United States Patent Application Publication US 2014/0004565 A1 - sequence listing, part 25

SEQ ID NO: 514225 - RNA, 19 nt, Artificial Sequence
  Description of Artificial Sequence: Synthetic oligonucleotide
gguuccagggucacacaac

SEQ ID NO: 514226 - RNA, 19 nt, Artificial Sequence
  Description of Artificial Sequence: Synthetic oligonucleotide
cuugggcauauagucucca

SEQ ID NO: 514227 - RNA, 19 nt, Artificial Sequence
  Description of Artificial Sequence: Synthetic oligonucleotide
ccuuugaccucacuaaacu

SEQ ID NO: 514228 - RNA, 19 nt, Artificial Sequence
  Description of Artificial Sequence: Synthetic oligonucleotide
ugacgucacucugccgaac

SEQ ID NO: 514229 - RNA, 19 nt, Artificial Sequence
  Description of Artificial Sequence: Synthetic oligonucleotide
ggugucgugacagcuccca

SEQ ID NO: 514230 - RNA, 19 nt, Artificial Sequence
  Description of Artificial Sequence: Synthetic oligonucleotide
gguacagucaguacugguu

SEQ ID NO: 514231 - RNA, 19 nt, Artificial Sequence
  Description of Artificial Sequence: Synthetic oligonucleotide
cucgccgugugcuuccucu

SEQ ID NO: 514232 - RNA, 19 nt, Artificial Sequence
  Description of Artificial Sequence: Synthetic oligonucleotide
ggaccugaguaucuuugua

SEQ ID NO: 514233 - RNA, 19 nt, Artificial Sequence
  Description of Artificial Sequence: Synthetic oligonucleotide
cugagcccauguagucuuc

SEQ ID NO: 514234 - RNA, 19 nt, Artificial Sequence
  Description of Artificial Sequence: Synthetic oligonucleotide
cugucagaucaaccuguaa

SEQ ID NO: 514235 - RNA, 19 nt, Artificial Sequence
  Description of Artificial Sequence: Synthetic oligonucleotide
auggcccguuccacucgcc

SEQ ID NO: 514236 - RNA, 19 nt, Artificial Sequence
  Description of Artificial Sequence: Synthetic oligonucleotide
cagagugccuuugccacaa

SEQ ID NO: 514237 - RNA, 19 nt, Artificial Sequence
  Description of Artificial Sequence: Synthetic oligonucleotide
uucccgccugaggauuucu

SEQ ID NO: 514238 - RNA, 19 nt, Artificial Sequence
  Description of Artificial Sequence: Synthetic oligonucleotide
acggagcguucaaagcacu

SEQ ID NO: 514239 - RNA, 19 nt, Artificial Sequence
  Description of Artificial Sequence: Synthetic oligonucleotide
ggucacgucuucccacauc

SEQ ID NO: 514240 - RNA, 19 nt, Artificial Sequence
  Description of Artificial Sequence: Synthetic oligonucleotide
gagccgaacugaagaaagu

SEQ ID NO: 514241 - RNA, 19 nt, Artificial Sequence
  Description of Artificial Sequence: Synthetic oligonucleotide
cgagcgcuccucaagcaac

SEQ ID NO: 514242 - RNA, 19 nt, Artificial Sequence
  Description of Artificial Sequence: Synthetic oligonucleotide
agucgaccugaaucaccuu

SEQ ID NO: 514243 - RNA, 19 nt, Artificial Sequence
  Description of Artificial Sequence: Synthetic oligonucleotide
gcaugggauuaaucuucac

SEQ ID NO: 514244 - RNA, 19 nt, Artificial Sequence
  Description of Artificial Sequence: Synthetic oligonucleotide
gcgcugaauagcccaguga

SEQ ID NO: 514245 - RNA, 19 nt, Artificial Sequence
  Description of Artificial Sequence: Synthetic oligonucleotide
gugcgaguccuauggcucu

SEQ ID NO: 514246 - RNA, 19 nt, Artificial Sequence
  Description of Artificial Sequence: Synthetic oligonucleotide
gggcacgugcacuccggug

SEQ ID NO: 514247 - RNA, 19 nt, Artificial Sequence
  Description of Artificial Sequence: Synthetic oligonucleotide
cgaucagucacaccauuaa

SEQ ID NO: 514248 - RNA, 19 nt, Artificial Sequence
  Description of Artificial Sequence: Synthetic oligonucleotide
caguauaaacuugggguuu

SEQ ID NO: 514249 - RNA, 19 nt, Artificial Sequence
  Description of Artificial Sequence: Synthetic oligonucleotide
cucuccugacaucuagaau

SEQ ID NO: 514250 - RNA, 19 nt, Artificial Sequence
  Description of Artificial Sequence: Synthetic oligonucleotide
cguaacagauggucacguc

SEQ ID NO: 514251 - RNA, 19 nt, Artificial Sequence
  Description of Artificial Sequence: Synthetic oligonucleotide
ugcgaguccuauggcucuu

SEQ ID NO: 514252 - RNA, 19 nt, Artificial Sequence
  Description of Artificial Sequence: Synthetic oligonucleotide
cguuggucacucuugacgu

SEQ ID NO: 514253 - RNA, 19 nt, Artificial Sequence
  Description of Artificial Sequence: Synthetic oligonucleotide
ccgaacaacuccugcagcu

SEQ ID NO: 514254 - RNA, 19 nt, Artificial Sequence
  Description of Artificial Sequence: Synthetic oligonucleotide
gcuaaaagucgaccugaau

SEQ ID NO: 514255 - RNA, 19 nt, Artificial Sequence
  Description of Artificial Sequence: Synthetic oligonucleotide
ggcgagcgcuccucaagca

SEQ ID NO: 514256 - RNA, 19 nt, Artificial Sequence
  Description of Artificial Sequence: Synthetic oligonucleotide
cguuccacucgccgugugc

SEQ ID NO: 514257 - RNA, 19 nt, Artificial Sequence
  Description of Artificial Sequence: Synthetic oligonucleotide
aguucccgccugaggauuu

SEQ ID NO: 514258 - RNA, 19 nt, Artificial Sequence
  Description of Artificial Sequence: Synthetic oligonucleotide
agagugccuuugccacaaa

SEQ ID NO: 514259 - RNA, 19 nt, Artificial Sequence
  Description of Artificial Sequence: Synthetic oligonucleotide
agcccaacucaaagagcaa

SEQ ID NO: 514260 - RNA, 19 nt, Artificial Sequence
  Description of Artificial Sequence: Synthetic oligonucleotide
gagcgcuccucaagcaacu

SEQ ID NO: 514261 - RNA, 19 nt, Artificial Sequence
  Description of Artificial Sequence: Synthetic oligonucleotide
caagcuuuguccggaggau

SEQ ID NO: 514262 - RNA, 19 nt, Artificial Sequence
  Description of Artificial Sequence: Synthetic oligonucleotide
cacaacgcugaaacgccuu

SEQ ID NO: 514263 - RNA, 19 nt, Artificial Sequence
  Description of Artificial Sequence: Synthetic oligonucleotide
cugccccgcccuuucguaa

SEQ ID NO: 514264 - RNA, 19 nt, Artificial Sequence
  Description of Artificial Sequence: Synthetic oligonucleotide
guucccgccugaggauuuc

SEQ ID NO: 514265 - RNA, 19 nt, Artificial Sequence
  Description of Artificial Sequence: Synthetic oligonucleotide
ggagcgcugggcacgugca

SEQ ID NO: 514266 - RNA, 19 nt, Artificial Sequence
  Description of Artificial Sequence: Synthetic oligonucleotide
caagcugcaugggauuaau

SEQ ID NO: 514267 - RNA, 19 nt, Artificial Sequence
  Description of Artificial Sequence: Synthetic oligonucleotide
ggaggcaaugucuccgcuu

SEQ ID NO: 514268 - RNA, 19 nt, Artificial Sequence
  Description of Artificial Sequence: Synthetic oligonucleotide
cuggaagggauguccucuu

SEQ ID NO: 514269 - RNA, 19 nt, Artificial Sequence
  Description of Artificial Sequence: Synthetic oligonucleotide
ccagagugccuuugccaca

SEQ ID NO: 514270 - RNA, 19 nt, Artificial Sequence
  Description of Artificial Sequence: Synthetic oligonucleotide
uuggagcgcugggcacgug

SEQ ID NO: 514271 - RNA, 19 nt, Artificial Sequence
  Description of Artificial Sequence: Synthetic oligonucleotide
ccugucagaucaaccugua

SEQ ID NO: 514272 - RNA, 19 nt, Artificial Sequence
  Description of Artificial Sequence: Synthetic oligonucleotide
ccugaguaucuuuguauuu

SEQ ID NO: 514273 - RNA, 19 nt, Artificial Sequence
  Description of Artificial Sequence: Synthetic oligonucleotide
cggagcguucaaagcacuc

SEQ ID NO: 514274 - RNA, 19 nt, Artificial Sequence
  Description of Artificial Sequence: Synthetic oligonucleotide
cgaguccuauggcucuuug

SEQ ID NO: 514275 - RNA, 19 nt, Artificial Sequence
  Description of Artificial Sequence: Synthetic oligonucleotide
ccgugugcuuccucuuuca

SEQ ID NO: 514276 - RNA, 19 nt, Artificial Sequence
  Description of Artificial Sequence: Synthetic oligonucleotide
ggagccggugguaagcuuu

SEQ ID NO: 514277 - RNA, 19 nt, Artificial Sequence
  Description of Artificial Sequence: Synthetic oligonucleotide
agccggugguaagcuuuaa

SEQ ID NO: 514278 - RNA, 19 nt, Artificial Sequence
  Description of Artificial Sequence: Synthetic oligonucleotide
ccgcuucgaucagucacac

SEQ ID NO: 514279 - RNA, 19 nt, Artificial Sequence
  Description of Artificial Sequence: Synthetic oligonucleotide
ccgaaacuccuuguuccga

SEQ ID NO: 514280 - RNA, 19 nt, Artificial Sequence
  Description of Artificial Sequence: Synthetic oligonucleotide
gcugccccgcccuuucgua

SEQ ID NO: 514281 - RNA, 19 nt, Artificial Sequence
  Description of Artificial Sequence: Synthetic oligonucleotide
cgcuucgaucagucacacc

SEQ ID NO: 514282 - RNA, 19 nt, Artificial Sequence
  Description of Artificial Sequence: Synthetic oligonucleotide
cccuguaaauugagccgaa

SEQ ID NO: 514283 - RNA, 19 nt, Artificial Sequence
  Description of Artificial Sequence: Synthetic oligonucleotide
cccaacaauuggacugugu

SEQ ID NO: 514284 - RNA, 19 nt, Artificial Sequence
  Description of Artificial Sequence: Synthetic oligonucleotide
gccggugguaagcuuuaau

SEQ ID NO: 514285 - RNA, 19 nt, Artificial Sequence
  Description of Artificial Sequence: Synthetic oligonucleotide
ccgcccuuucguaacagau

SEQ ID NO: 514286 - RNA, 19 nt, Artificial Sequence
  Description of Artificial Sequence: Synthetic oligonucleotide
ggccaaguaggcacacccu

SEQ ID NO: 514287 - RNA, 19 nt, Artificial Sequence
  Description of Artificial Sequence: Synthetic oligonucleotide
cccgcccuuucguaacaga

SEQ ID NO: 514288 - RNA, 19 nt, Artificial Sequence
  Description of Artificial Sequence: Synthetic oligonucleotide
gccugcaagcuggcgcuga

SEQ ID NO: 514289 - RNA, 19 nt, Artificial Sequence
  Description of Artificial Sequence: Synthetic oligonucleotide
ccaagcugcaugggauuaa

SEQ ID NO: 514290 - RNA, 19 nt, Artificial Sequence
  Description of Artificial Sequence: Synthetic oligonucleotide
gccccgcccuuucguaaca

SEQ ID NO: 514291 - RNA, 19 nt, Artificial Sequence
  Description of Artificial Sequence: Synthetic oligonucleotide
ccguuccacucgccgugug

SEQ ID NO: 514292 - RNA, 19 nt, Artificial Sequence
  Description of Artificial Sequence: Synthetic oligonucleotide
ccccgcccuuucguaacag

SEQ ID NO: 514293 - RNA, 19 nt, Artificial Sequence
  Description of Artificial Sequence: Synthetic oligonucleotide
gcacuccggugucgugaca

SEQ ID NO: 514294 - RNA, 19 nt, Artificial Sequence
  Description of Artificial Sequence: Synthetic oligonucleotide
cuccgcccauuuccaugua

SEQ ID NO: 514295 - RNA, 19 nt, Artificial Sequence
  Description of Artificial Sequence: Synthetic oligonucleotide
ccacaugugcgaguccuau

SEQ ID NO: 514296 - RNA, 19 nt, Artificial Sequence
  Description of Artificial Sequence: Synthetic oligonucleotide
ccggaggaucaaggcugac

SEQ ID NO: 514297 - RNA, 19 nt, Artificial Sequence
  Description of Artificial Sequence: Synthetic oligonucleotide
gcuuaugaacuggguuguu

SEQ ID NO: 514298 - RNA, 19 nt, Artificial Sequence
  Description of Artificial Sequence: Synthetic oligonucleotide
ccauguacuugggcauaua

SEQ ID NO: 514299 - RNA, 19 nt, Artificial Sequence
  Description of Artificial Sequence: Synthetic oligonucleotide
cgaagccgguugcuuaggu

SEQ ID NO: 514300 - RNA, 19 nt, Artificial Sequence
  Description of Artificial Sequence: Synthetic oligonucleotide
cgguugcuuaggucuugua

SEQ ID NO: 514301 - RNA, 19 nt, Artificial Sequence
  Description of Artificial Sequence: Synthetic oligonucleotide
gcgaguccuauggcucuuu

SEQ ID NO: 514302 - RNA, 19 nt, Artificial Sequence
  Description of Artificial Sequence: Synthetic oligonucleotide
cgccgugugcuuccucuuu

SEQ ID NO: 514303 - RNA, 19 nt, Artificial Sequence
  Description of Artificial Sequence: Synthetic oligonucleotide
aaacaggacauacacaugg

SEQ ID NO: 514304 - RNA, 19 nt, Artificial Sequence
  Description of Artificial Sequence: Synthetic oligonucleotide
aaaauuaggagguggcugg

SEQ ID NO: 514305 - RNA, 19 nt, Artificial Sequence
  Description of Artificial Sequence: Synthetic oligonucleotide
auauuggucacccagauug

SEQ ID NO: 514306 - RNA, 19 nt, Artificial Sequence
  Description of Artificial Sequence: Synthetic oligonucleotide
aaguauccugacuauaggc

SEQ ID NO: 514307 - RNA, 19 nt, Artificial Sequence
  Description of Artificial Sequence: Synthetic oligonucleotide
aucccgguaauacacaucc

SEQ ID NO: 514308 - RNA, 19 nt, Artificial Sequence
  Description of Artificial Sequence: Synthetic oligonucleotide
auuguagagguauucauag

SEQ ID NO: 514309 - RNA, 19 nt, Artificial Sequence
  Description of Artificial Sequence: Synthetic oligonucleotide
ugagaaaccucgaugaccc

SEQ ID NO: 514310 - RNA, 19 nt, Artificial Sequence
  Description of Artificial Sequence: Synthetic oligonucleotide
aauauuaccccaaugagaa

SEQ ID NO: 514311 - RNA, 19 nt, Artificial Sequence
  Description of Artificial Sequence: Synthetic oligonucleotide
aguguaggcaaccuaggcc

SEQ ID NO: 514312 - RNA, 19 nt, Artificial Sequence
  Description of Artificial Sequence: Synthetic oligonucleotide
auacacauggaagaaacgc

SEQ ID NO: 514313 - RNA, 19 nt, Artificial Sequence
  Description of Artificial Sequence: Synthetic oligonucleotide
aaaguauccugacuauagg

SEQ ID NO: 514314 - RNA, 19 nt, Artificial Sequence
  Description of Artificial Sequence: Synthetic oligonucleotide
aaguguaggcaaccuaggc

SEQ ID NO: 514315 - RNA, 19 nt, Artificial Sequence
  Description of Artificial Sequence: Synthetic oligonucleotide
agacaagagcuacagagcg

SEQ ID NO: 514316 - RNA, 19 nt, Artificial Sequence
  Description of Artificial Sequence: Synthetic oligonucleotide
guaggcaacaaucacuggg

SEQ ID NO: 514317 - RNA, 19 nt, Artificial Sequence
  Description of Artificial Sequence: Synthetic oligonucleotide
aucagaagggcauaaaaca

SEQ ID NO: 514318 - RNA, 19 nt, Artificial Sequence
  Description of Artificial Sequence: Synthetic oligonucleotide
uuaucugagucggauaugg

SEQ ID NO: 514319 - RNA, 19 nt, Artificial Sequence
  Description of Artificial Sequence: Synthetic oligonucleotide
aguccagacggacauagac

SEQ ID NO: 514320 - RNA, 19 nt, Artificial Sequence
  Description of Artificial Sequence: Synthetic oligonucleotide
ugugauacaggccacuuuc

SEQ ID NO: 514321 - RNA, 19 nt, Artificial Sequence
  Description of Artificial Sequence: Synthetic oligonucleotide
agcacauggguguagacag

SEQ ID NO: 514322 - RNA, 19 nt, Artificial Sequence
  Description of Artificial Sequence: Synthetic oligonucleotide
aaacauuaccaaucucauc

SEQ ID NO: 514323 - RNA, 19 nt, Artificial Sequence
  Description of Artificial Sequence: Synthetic oligonucleotide
uccauugccgacuucagca

SEQ ID NO: 514324 - RNA, 19 nt, Artificial Sequence
  Description of Artificial Sequence: Synthetic oligonucleotide
cacuauugagaguagagac

SEQ ID NO: 514325 - RNA, 19 nt, Artificial Sequence
  Description of Artificial Sequence: Synthetic oligonucleotide
uuuaccugcacgccgaggu

SEQ ID NO: 514326 - RNA, 19 nt, Artificial Sequence
  Description of Artificial Sequence: Synthetic oligonucleotide
gcaaguuucacucgcaugg

SEQ ID NO: 514327 - RNA, 19 nt, Artificial Sequence
  Description of Artificial Sequence: Synthetic oligonucleotide
cauagcgggagaaaggccc

SEQ ID NO: 514328 - RNA, 19 nt, Artificial Sequence
  Description of Artificial Sequence: Synthetic oligonucleotide
augugaucgaucuugguga

SEQ ID NO: 514329 - RNA, 19 nt, Artificial Sequence
  Description of Artificial Sequence: Synthetic oligonucleotide
uaauacacauccugggcag

SEQ ID NO: 514330 - RNA, 19 nt, Artificial Sequence
  Description of Artificial Sequence: Synthetic oligonucleotide
auuaggagguggcuggugg

SEQ ID NO: 514331 - RNA, 19 nt, Artificial Sequence
  Description of Artificial Sequence: Synthetic oligonucleotide
ucagaacaaacaaaucaac

SEQ ID NO: 514332 - RNA, 19 nt, Artificial Sequence
  Description of Artificial Sequence: Synthetic oligonucleotide
cagagaaucuaucacuugc

SEQ ID NO: 514333 - RNA, 19 nt, Artificial Sequence
  Description of Artificial Sequence: Synthetic oligonucleotide
aaagugacgguagaggccu

SEQ ID NO: 514334 - RNA, 19 nt, Artificial Sequence
  Description of Artificial Sequence: Synthetic oligonucleotide
agguccauaauccaagaca

SEQ ID NO: 514335 - RNA, 19 nt, Artificial Sequence
  Description of Artificial Sequence: Synthetic oligonucleotide
acauuaccaaucucauccc

SEQ ID NO: 514336 - RNA, 19 nt, Artificial Sequence
  Description of Artificial Sequence: Synthetic oligonucleotide
agaguagagacaucccggg

SEQ ID NO: 514337 - RNA, 19 nt, Artificial Sequence
  Description of Artificial Sequence: Synthetic oligonucleotide
aaaagaacggauggaggag

SEQ ID NO: 514338 - RNA, 19 nt, Artificial Sequence
  Description of Artificial Sequence: Synthetic oligonucleotide
gacauagacaaugacggug

SEQ ID NO: 514339 - RNA, 19 nt, Artificial Sequence
  Description of Artificial Sequence: Synthetic oligonucleotide
gaagaaacgccccagaccu

SEQ ID NO: 514340 - RNA, 19 nt, Artificial Sequence
  Description of Artificial Sequence: Synthetic oligonucleotide
uuguugaagguguagugca

SEQ ID NO: 514341 - RNA, 19 nt, Artificial Sequence
  Description of Artificial Sequence: Synthetic oligonucleotide
auaaugguugcccucaaau

SEQ ID NO: 514342 - RNA, 19 nt, Artificial Sequence
  Description of Artificial Sequence: Synthetic oligonucleotide
uucacguccucguugacca

SEQ ID NO: 514343 - RNA, 19 nt, Artificial Sequence
  Description of Artificial Sequence: Synthetic oligonucleotide
agucggauauggaugaagc

SEQ ID NO: 514344 - RNA, 19 nt, Artificial Sequence
  Description of Artificial Sequence: Synthetic oligonucleotide
ucucaucccgguaauacac

SEQ ID NO: 514345 - RNA, 19 nt, Artificial Sequence
  Description of Artificial Sequence: Synthetic oligonucleotide
acaaugacggugaagaaca

SEQ ID NO: 514346 - RNA, 19 nt, Artificial Sequence
  Description of Artificial Sequence: Synthetic oligonucleotide
ugcauacacucacaaaaga

SEQ ID NO: 514347 - RNA, 19 nt, Artificial Sequence
  Description of Artificial Sequence: Synthetic oligonucleotide
caacugagaucuuggaucc

SEQ ID NO: 514348 - RNA, 19 nt, Artificial Sequence
  Description of Artificial Sequence: Synthetic oligonucleotide
gguauucauagcuugggag

SEQ ID NO: 514349 - RNA, 19 nt, Artificial Sequence
  Description of Artificial Sequence: Synthetic oligonucleotide
cugucucugguaaucauag

SEQ ID NO: 514350 - RNA, 19 nt, Artificial Sequence
  Description of Artificial Sequence: Synthetic oligonucleotide
uccagacggacauagacaa

SEQ ID NO: 514351 - RNA, 19 nt, Artificial Sequence
  Description of Artificial Sequence: Synthetic oligonucleotide
cucugguaaucauagcggg

SEQ ID NO: 514352 - RNA, 19 nt, Artificial Sequence
  Description of Artificial Sequence: Synthetic oligonucleotide
ucucccuuuaccugcacgc

SEQ ID NO: 514353 - RNA, 19 nt, Artificial Sequence
  Description of Artificial Sequence: Synthetic oligonucleotide
uguaucugaaguguaggca

SEQ ID NO: 514354 - RNA, 19 nt, Artificial Sequence
  Description of Artificial Sequence: Synthetic oligonucleotide
uagugcaccacaauauccu

SEQ ID NO: 514355 - RNA, 19 nt, Artificial Sequence
  Description of Artificial Sequence: Synthetic oligonucleotide
guaauacacauccugggca

SEQ ID NO: 514356 - RNA, 19 nt, Artificial Sequence
  Description of Artificial Sequence: Synthetic oligonucleotide
uggucuuaaaagaacggau

SEQ ID NO: 514357 - RNA, 19 nt, Artificial Sequence
  Description of Artificial Sequence: Synthetic oligonucleotide
cugacuauaggcaggggug

SEQ ID NO: 514358 - RNA, 19 nt, Artificial Sequence
  Description of Artificial Sequence: Synthetic oligonucleotide
ugaucgaucuuggugacca

SEQ ID NO: 514359 - RNA, 19 nt, Artificial Sequence
  Description of Artificial Sequence: Synthetic oligonucleotide
ucggauauggaugaagcac

SEQ ID NO: 514360 - RNA, 19 nt, Artificial Sequence
  Description of Artificial Sequence: Synthetic oligonucleotide
gaugacccgggucauacug

SEQ ID NO: 514361 - RNA, 19 nt, Artificial Sequence
  Description of Artificial Sequence: Synthetic oligonucleotide
uguagugcaccacaauauc

SEQ ID NO: 514362 - RNA, 19 nt, Artificial Sequence
  Description of Artificial Sequence: Synthetic oligonucleotide
ggagaugccacuaucaggc

SEQ ID NO: 514363 - RNA, 19 nt, Artificial Sequence
  Description of Artificial Sequence: Synthetic oligonucleotide
uggucauacacacuuuaaa

SEQ ID NO: 514364 - RNA, 19 nt, Artificial Sequence
  Description of Artificial Sequence: Synthetic oligonucleotide
aucguagggacugucuacc

SEQ ID NO: 514365 - RNA, 19 nt, Artificial Sequence
  Description of Artificial Sequence: Synthetic oligonucleotide
aaagguccauaauccaaga

SEQ ID NO: 514366 - RNA, 19 nt, Artificial Sequence
  Description of Artificial Sequence: Synthetic oligonucleotide
cauacacauggaagaaacg

SEQ ID NO: 514367 - RNA, 19 nt, Artificial Sequence
  Description of Artificial Sequence: Synthetic oligonucleotide
gaggagaugccacuaucag

SEQ ID NO: 514368 - RNA, 19 nt, Artificial Sequence
  Description of Artificial Sequence: Synthetic oligonucleotide
gaaauaaugguugcccuca

SEQ ID NO: 514369 - RNA, 19 nt, Artificial Sequence
  Description of Artificial Sequence: Synthetic oligonucleotide
caaaauuaggagguggcug

SEQ ID NO: 514370 - RNA, 19 nt, Artificial Sequence
  Description of Artificial Sequence: Synthetic oligonucleotide
caaagugacgguagaggcc

SEQ ID NO: 514371 - RNA, 19 nt, Artificial Sequence
  Description of Artificial Sequence: Synthetic oligonucleotide
gugcauauuggucacccag

SEQ ID NO: 514372 - RNA, 19 nt, Artificial Sequence
  Description of Artificial Sequence: Synthetic oligonucleotide
acgguagaggccuaaccuc

SEQ ID NO: 514373 - RNA, 19 nt, Artificial Sequence
  Description of Artificial Sequence: Synthetic oligonucleotide
ucccuuuaccugcacgccg

SEQ ID NO: 514374 - RNA, 19 nt, Artificial Sequence
  Description of Artificial Sequence: Synthetic oligonucleotide
gacaaugacggugaagaac

SEQ ID NO: 514375 - RNA, 19 nt, Artificial Sequence
  Description of Artificial Sequence: Synthetic oligonucleotide
aaagaacggauggaggaga

SEQ ID NO: 514376 - RNA, 19 nt, Artificial Sequence
  Description of Artificial Sequence: Synthetic oligonucleotide
ucuaccuaugugcuguauc

SEQ ID NO: 514377 - RNA, 19 nt, Artificial Sequence
  Description of Artificial Sequence: Synthetic oligonucleotide
auuucgggaggcaaguuuc

SEQ ID NO: 514378 - RNA, 19 nt, Artificial Sequence
  Description of Artificial Sequence: Synthetic oligonucleotide
aagaugaucuucacuguca

SEQ ID NO: 514379 - RNA, 19 nt, Artificial Sequence
  Description of Artificial Sequence: Synthetic oligonucleotide
ggucucgucaaagugacgg

SEQ ID NO: 514380 - RNA, 19 nt, Artificial Sequence
  Description of Artificial Sequence: Synthetic oligonucleotide
guagguguagugcagcuca

SEQ ID NO: 514381 - RNA, 19 nt, Artificial Sequence
  Description of Artificial Sequence: Synthetic oligonucleotide
ucacugggcggccaaaugu

SEQ ID NO: 514382 - RNA, 19 nt, Artificial Sequence
  Description of Artificial Sequence: Synthetic oligonucleotide
gauacaggccacuuucauc

SEQ ID NO: 514383 - RNA, 19 nt, Artificial Sequence
  Description of Artificial Sequence: Synthetic oligonucleotide
gaaaccucgaugacccggg

SEQ ID NO: 514384 - RNA, 19 nt, Artificial Sequence
  Description of Artificial Sequence: Synthetic oligonucleotide
aggauggucuuaaaagaac

SEQ ID NO: 514385 - RNA, 19 nt, Artificial Sequence
  Description of Artificial Sequence: Synthetic oligonucleotide
aauaucguagggacugucu

SEQ ID NO: 514386 - RNA, 19 nt, Artificial Sequence
  Description of Artificial Sequence: Synthetic oligonucleotide
uuaccaaucucaucccggu

SEQ ID NO: 514387 - RNA, 19 nt, Artificial Sequence
  Description of Artificial Sequence: Synthetic oligonucleotide
agaaaccucgaugacccgg

SEQ ID NO: 514388 - RNA, 19 nt, Artificial Sequence
  Description of Artificial Sequence: Synthetic oligonucleotide
gguaauacacauccugggc

SEQ ID NO: 514389 - RNA, 19 nt, Artificial Sequence
  Description of Artificial Sequence: Synthetic oligonucleotide
ucagagaaucuaucacuug

SEQ ID NO: 514390 - RNA, 19 nt, Artificial Sequence
  Description of Artificial Sequence: Synthetic oligonucleotide
guaucugaaguguaggcaa

SEQ ID NO: 514391 - RNA, 19 nt, Artificial Sequence
  Description of Artificial Sequence: Synthetic oligonucleotide
gcuaauaucguagggacug

SEQ ID NO: 514392 - RNA, 19 nt, Artificial Sequence
  Description of Artificial Sequence: Synthetic oligonucleotide
ugacgguagaggccuaacc

SEQ ID NO: 514393 - RNA, 19 nt, Artificial Sequence
  Description of Artificial Sequence: Synthetic oligonucleotide
aucacaaccuccucccucu

SEQ ID NO: 514394 - RNA, 19 nt, Artificial Sequence
  Description of Artificial Sequence: Synthetic oligonucleotide
cucgucaaagugacgguag

SEQ ID NO: 514395 - RNA, 19 nt, Artificial Sequence
  Description of Artificial Sequence: Synthetic oligonucleotide
aggccuaaccucuuguuga

SEQ ID NO: 514396 - RNA, 19 nt, Artificial Sequence
  Description of Artificial Sequence: Synthetic oligonucleotide
aauaaugguugcccucaaa

SEQ ID NO: 514397 - RNA, 19 nt, Artificial Sequence
  Description of Artificial Sequence: Synthetic oligonucleotide
aaucuaucacuugcucauc

SEQ ID NO: 514398 - RNA, 19 nt, Artificial Sequence
  Description of Artificial Sequence: Synthetic oligonucleotide
cauggguguagacaguuuc

SEQ ID NO: 514399 - RNA, 19 nt, Artificial Sequence
  Description of Artificial Sequence: Synthetic oligonucleotide
uggcucgugauguggagcc

SEQ ID NO: 514400 - RNA, 19 nt, Artificial Sequence
  Description of Artificial Sequence: Synthetic oligonucleotide
guuaagaccugcucuguga

SEQ ID NO: 514401 - RNA, 19 nt, Artificial Sequence
  Description of Artificial Sequence: Synthetic oligonucleotide
agcaacuggaagcuugacu

SEQ ID NO: 514402 - RNA, 19 nt, Artificial Sequence
  Description of Artificial Sequence: Synthetic oligonucleotide
ugaguuaucugagucggau

SEQ ID NO: 514403 - RNA, 19 nt, Artificial Sequence
  Description of Artificial Sequence: Synthetic oligonucleotide
accuaugugcuguaucuga

SEQ ID NO: 514404 - RNA, 19 nt, Artificial Sequence
  Description of Artificial Sequence: Synthetic oligonucleotide
acucgcauggucugggucu

SEQ ID NO: 514405 - RNA, 19 nt, Artificial Sequence
  Description of Artificial Sequence: Synthetic oligonucleotide
guaccuauugauggucucg

SEQ ID NO: 514406 - RNA, 19 nt, Artificial Sequence
  Description of Artificial Sequence: Synthetic oligonucleotide
uaucguagggacugucuac

SEQ ID NO: 514407 - RNA, 19 nt, Artificial Sequence
  Description of Artificial Sequence: Synthetic oligonucleotide
acaauauccugaaugugcu

SEQ ID NO: 514408 - RNA, 19 nt, Artificial Sequence
  Description of Artificial Sequence: Synthetic oligonucleotide
guagugcaccacaauaucc

SEQ ID NO: 514409 - RNA, 19 nt, Artificial Sequence
  Description of Artificial Sequence: Synthetic oligonucleotide
aggccggauuuccauuucc

SEQ ID NO: 514410 - RNA, 19 nt, Artificial Sequence
  Description of Artificial Sequence: Synthetic oligonucleotide
aaccucuuguugacuaggg

SEQ ID NO: 514411 - RNA, 19 nt, Artificial Sequence
  Description of Artificial Sequence: Synthetic oligonucleotide
auggucuuaaaagaacgga

SEQ ID NO: 514412 - RNA, 19 nt, Artificial Sequence
  Description of Artificial Sequence: Synthetic oligonucleotide
agcacggcuaauaucguag

SEQ ID NO: 514413 - RNA, 19 nt, Artificial Sequence
  Description of Artificial Sequence: Synthetic oligonucleotide
ggaagaaacgccccagacc

SEQ ID NO: 514414 - RNA, 19 nt, Artificial Sequence
  Description of Artificial Sequence: Synthetic oligonucleotide
acauagacaaugacgguga

SEQ ID NO: 514415 - RNA, 19 nt, Artificial Sequence
  Description of Artificial Sequence: Synthetic oligonucleotide
uucagaaauaagggacaag

SEQ ID NO: 514416 - RNA, 19 nt, Artificial Sequence
  Description of Artificial Sequence: Synthetic oligonucleotide
ugauacaggccacuuucau

SEQ ID NO: 514417 - RNA, 19 nt, Artificial Sequence
  Description of Artificial Sequence: Synthetic oligonucleotide
cuagguagguguagugcag

SEQ ID NO: 514418 - RNA, 19 nt, Artificial Sequence
  Description of Artificial Sequence: Synthetic oligonucleotide
uguagccaacaauguagug

SEQ ID NO: 514419 - RNA, 19 nt, Artificial Sequence
  Description of Artificial Sequence: Synthetic oligonucleotide
auaguguaccuuaaaagua

SEQ ID NO: 514420 - RNA, 19 nt, Artificial Sequence
  Description of Artificial Sequence: Synthetic oligonucleotide
ggucuuaaaagaacggaug

SEQ ID NO: 514421 - RNA, 19 nt, Artificial Sequence
  Description of Artificial Sequence: Synthetic oligonucleotide
auaucguagggacugucua

SEQ ID NO: 514422 - RNA, 19 nt, Artificial Sequence
  Description of Artificial Sequence: Synthetic oligonucleotide
uauuggucacccagauugu

SEQ ID NO: 514423 - RNA, 19 nt, Artificial Sequence
  Description of Artificial Sequence: Synthetic oligonucleotide
cacgugguccacaaaccgc

SEQ ID NO: 514424 - RNA, 19 nt, Artificial Sequence
  Description of Artificial Sequence: Synthetic oligonucleotide
agguauucauagcuuggga

SEQ ID NO: 514425 - RNA, 19 nt, Artificial Sequence
  Description of Artificial Sequence: Synthetic oligonucleotide
aguguaccuuaaaaguauc

SEQ ID NO: 514426 - RNA, 19 nt, Artificial Sequence
  Description of Artificial Sequence: Synthetic oligonucleotide
agggacaagcuucucuuga

SEQ ID NO: 514427 - RNA, 19 nt, Artificial Sequence
  Description of Artificial Sequence: Synthetic oligonucleotide
aaauaaugguugcccucaa

SEQ ID NO: 514428 - RNA, 19 nt, Artificial Sequence
  Description of Artificial Sequence: Synthetic oligonucleotide
gcaacaaucacugggcggc

SEQ ID NO: 514429 - RNA, 19 nt, Artificial Sequence
  Description of Artificial Sequence: Synthetic oligonucleotide
gguggaaacauuaccaauc

SEQ ID NO: 514430 - RNA, 19 nt, Artificial Sequence
  Description of Artificial Sequence: Synthetic oligonucleotide
auagacaaugacggugaag

SEQ ID NO: 514431 - RNA, 19 nt, Artificial Sequence
  Description of Artificial Sequence: Synthetic oligonucleotide
ugguggaaacauuaccaau

SEQ ID NO: 514432 - RNA, 19 nt, Artificial Sequence
  Description of Artificial Sequence: Synthetic oligonucleotide
gauguggagccgccgcccg

SEQ ID NO: 514433 - RNA, 19 nt, Artificial Sequence
  Description of Artificial Sequence: Synthetic oligonucleotide
gggacugucuaccuggaug

SEQ ID NO: 514434 - RNA, 19 nt, Artificial Sequence
  Description of Artificial Sequence: Synthetic oligonucleotide
cacaacaacugagaucuug

SEQ ID NO: 514435 - RNA, 19 nt, Artificial Sequence
  Description of Artificial Sequence: Synthetic oligonucleotide
ucgucaaagugacgguaga

SEQ ID NO: 514436 - RNA, 19 nt, Artificial Sequence
  Description of Artificial Sequence: Synthetic oligonucleotide
acggcuaauaucguaggga

SEQ ID NO: 514437 - RNA, 19 nt, Artificial Sequence
  Description of Artificial Sequence: Synthetic oligonucleotide
ugugaucgaucuuggugac

SEQ ID NO: 514438 - RNA, 19 nt, Artificial Sequence
  Description of Artificial Sequence: Synthetic oligonucleotide
gacgguagaggccuaaccu

SEQ ID NO: 514439 - RNA, 19 nt, Artificial Sequence
  Description of Artificial Sequence: Synthetic oligonucleotide
cacggcuaauaucguaggg

SEQ ID NO: 514440 - RNA, 19 nt, Artificial Sequence
  Description of Artificial Sequence: Synthetic oligonucleotide
gacggacauagacaaugac

SEQ ID NO: 514441 - RNA, 19 nt, Artificial Sequence
  Description of Artificial Sequence: Synthetic oligonucleotide
ccaaugagaaaccucgaug

SEQ ID NO: 514442 - RNA, 19 nt, Artificial Sequence
  Description of Artificial Sequence: Synthetic oligonucleotide
agagaaucuaucacuugcu

SEQ ID NO: 514443 - RNA, 19 nt, Artificial Sequence
  Description of Artificial Sequence: Synthetic oligonucleotide
uguaccuauugauggucuc

SEQ ID NO: 514444 - RNA, 19 nt, Artificial Sequence
  Description of Artificial Sequence: Synthetic oligonucleotide
auagcgggagaaaggcccc

SEQ ID NO: 514445 - RNA, 19 nt, Artificial Sequence
  Description of Artificial Sequence: Synthetic oligonucleotide
ccucccucuaccuaugugc

SEQ ID NO: 514446 - RNA, 19 nt, Artificial Sequence
  Description of Artificial Sequence: Synthetic oligonucleotide
ggcaacaaucacugggcgg

SEQ ID NO: 514447 - RNA, 19 nt, Artificial Sequence
  Description of Artificial Sequence: Synthetic oligonucleotide
ucccuuuaauuuugguuuc

SEQ ID NO: 514448 - RNA, 19 nt, Artificial Sequence
  Description of Artificial Sequence: Synthetic oligonucleotide
uggaaacauuaccaaucuc

SEQ ID NO: 514449 - RNA, 19 nt, Artificial Sequence
  Description of Artificial Sequence: Synthetic oligonucleotide
gaucgugugggguucccca

SEQ ID NO: 514450 - RNA, 19 nt, Artificial Sequence
  Description of Artificial Sequence: Synthetic oligonucleotide
guuggauagggagaguaga

SEQ ID NO: 514451 - RNA, 19 nt, Artificial Sequence
  Description of Artificial Sequence: Synthetic oligonucleotide
ccggauuuccauuuccacg

SEQ ID NO: 514452 - RNA, 19 nt, Artificial Sequence
  Description of Artificial Sequence: Synthetic oligonucleotide
cagugcauauuggucaccc

SEQ ID NO: 514453 - RNA, 19 nt, Artificial Sequence
  Description of Artificial Sequence: Synthetic oligonucleotide
acggugaagaacagaaugu

SEQ ID NO: 514454 - RNA, 19 nt, Artificial Sequence
  Description of Artificial Sequence: Synthetic oligonucleotide
ggaaccauucagaaauaag

SEQ ID NO: 514455 - RNA, 19 nt, Artificial Sequence
  Description of Artificial Sequence: Synthetic oligonucleotide
gauagggagaguagaaaua

SEQ ID NO: 514456 - RNA, 19 nt, Artificial Sequence
  Description of Artificial Sequence: Synthetic oligonucleotide
aacgaaagagcuggcucgu

SEQ ID NO: 514457 - RNA, 19 nt, Artificial Sequence
  Description of Artificial Sequence: Synthetic oligonucleotide
ucgaugacccgggucauac

SEQ ID NO: 514458 - RNA, 19 nt, Artificial Sequence
  Description of Artificial Sequence: Synthetic oligonucleotide
cuucacguccucguugacc

SEQ ID NO: 514459 - RNA, 19 nt, Artificial Sequence
  Description of Artificial Sequence: Synthetic oligonucleotide
uaccuauugauggucucgu

SEQ ID NO: 514460 - RNA, 19 nt, Artificial Sequence
  Description of Artificial Sequence: Synthetic oligonucleotide
ugucuucagccuagacugc

SEQ ID NO: 514461 - RNA, 19 nt, Artificial Sequence
  Description of Artificial Sequence: Synthetic oligonucleotide
ugacuauaggcaggggugu

SEQ ID NO: 514462 - RNA, 19 nt, Artificial Sequence
  Description of Artificial Sequence: Synthetic oligonucleotide
agggcauaaaacaggacau

SEQ ID NO: 514463 - RNA, 19 nt, Artificial Sequence
  Description of Artificial Sequence: Synthetic oligonucleotide
acaugcauacacucacaaa

SEQ ID NO: 514464 - RNA, 19 nt, Artificial Sequence
  Description of Artificial Sequence: Synthetic oligonucleotide
cauuuggucauacacacuu

SEQ ID NO: 514465 - RNA, 19 nt, Artificial Sequence
  Description of Artificial Sequence: Synthetic oligonucleotide
accuauugauggucucguc

SEQ ID NO: 514466 - RNA, 19 nt, Artificial Sequence
  Description of Artificial Sequence: Synthetic oligonucleotide
uuaccugcacgccgaggug

SEQ ID NO: 514467 - RNA, 19 nt, Artificial Sequence
  Description of Artificial Sequence: Synthetic oligonucleotide
uagguagguguagugcagc

SEQ ID NO: 514468 - RNA, 19 nt, Artificial Sequence
  Description of Artificial Sequence: Synthetic oligonucleotide
aggaaaucgaggccggauu

SEQ ID NO: 514469 - RNA, 19 nt, Artificial Sequence
  Description of Artificial Sequence: Synthetic oligonucleotide
ugggcggccaaaugugucu

SEQ ID NO: 514470 - RNA, 19 nt, Artificial Sequence
  Description of Artificial Sequence: Synthetic oligonucleotide
caccgugcgcuucacgucc

SEQ ID NO: 514471 - RNA, 19 nt, Artificial Sequence
  Description of Artificial Sequence: Synthetic oligonucleotide
cauacuggugauggucagg

SEQ ID NO: 514472 - RNA, 19 nt, Artificial Sequence
  Description of Artificial Sequence: Synthetic oligonucleotide
cucgaguuccggcuccagg

SEQ ID NO: 514473 - RNA, 19 nt, Artificial Sequence
  Description of Artificial Sequence: Synthetic oligonucleotide
gagaaaccucgaugacccg

SEQ ID NO: 514474 - RNA, 19 nt, Artificial Sequence
  Description of Artificial Sequence: Synthetic oligonucleotide
uugagcuuuccagccacca

SEQ ID NO: 514475 - RNA, 19 nt, Artificial Sequence
  Description of Artificial Sequence: Synthetic oligonucleotide
aggaugugaucgaucuugg

SEQ ID NO: 514476 - RNA, 19 nt, Artificial Sequence
  Description of Artificial Sequence: Synthetic oligonucleotide
agaucgugugggguucccc

SEQ ID NO: 514477 - RNA, 19 nt, Artificial Sequence
  Description of Artificial Sequence: Synthetic oligonucleotide
ugugcuccgucuccaggcu

SEQ ID NO: 514478 - RNA, 19 nt, Artificial Sequence
  Description of Artificial Sequence: Synthetic oligonucleotide
ugggucuuuguuggauagg

SEQ ID NO: 514479 - RNA, 19 nt, Artificial Sequence
  Description of Artificial Sequence: Synthetic oligonucleotide
uccucccucuaccuaugug

SEQ ID NO: 514480 - RNA, 19 nt, Artificial Sequence
  Description of Artificial Sequence: Synthetic oligonucleotide
acccagauuguagagguau

SEQ ID NO: 514481 - RNA, 19 nt, Artificial Sequence
  Description of Artificial Sequence: Synthetic oligonucleotide
cuuuugcuaaucacaaccu

SEQ ID NO: 514482 - RNA, 19 nt, Artificial Sequence
  Description of Artificial Sequence: Synthetic oligonucleotide
ucguugaccagcggcggag

SEQ ID NO: 514483 - RNA, 19 nt, Artificial Sequence
  Description of Artificial Sequence: Synthetic oligonucleotide
acaaaucaacugaaaugcu

SEQ ID NO: 514484 - RNA, 19 nt, Artificial Sequence
  Description of Artificial Sequence: Synthetic oligonucleotide
agauccaccgugcgcuuca

SEQ ID NO: 514485 - RNA, 19 nt, Artificial Sequence
  Description of Artificial Sequence: Synthetic oligonucleotide
ugacccgggucauacuggu

SEQ ID NO: 514486 - RNA, 19 nt, Artificial Sequence
  Description of Artificial Sequence: Synthetic oligonucleotide
ugacggugaagaacagaau

SEQ ID NO: 514487 - RNA, 19 nt, Artificial Sequence
  Description of Artificial Sequence: Synthetic oligonucleotide
gucggauauggaugaagca

SEQ ID NO: 514488 - RNA, 19 nt, Artificial Sequence
  Description of Artificial Sequence: Synthetic oligonucleotide
uaauaucguagggacuguc

SEQ ID NO: 514489 - RNA, 19 nt, Artificial Sequence
  Description of Artificial Sequence: Synthetic oligonucleotide
gagcuacagagcguccagg

SEQ ID NO: 514490 - RNA, 19 nt, Artificial Sequence
  Description of Artificial Sequence: Synthetic oligonucleotide
agugcauauuggucaccca

SEQ ID NO: 514491 - RNA, 19 nt, Artificial Sequence
  Description of Artificial Sequence: Synthetic oligonucleotide
agcaaucucacuggucaca

SEQ ID NO: 514492 - RNA, 19 nt, Artificial Sequence
  Description of Artificial Sequence: Synthetic oligonucleotide
gacuaggguuaagaccugc

SEQ ID NO: 514493 - RNA, 19 nt, Artificial Sequence
  Description of Artificial Sequence: Synthetic oligonucleotide
aucgaggccggauuuccau

SEQ ID NO: 514494 - RNA, 19 nt, Artificial Sequence
  Description of Artificial Sequence: Synthetic oligonucleotide
caagagcuacagagcgucc

SEQ ID NO: 514495 - RNA, 19 nt, Artificial Sequence
  Description of Artificial Sequence: Synthetic oligonucleotide
ucgacucgaguuccggcuc

SEQ ID NO: 514496 - RNA, 19 nt, Artificial Sequence
  Description of Artificial Sequence: Synthetic oligonucleotide
acggagucauccaaaauua

SEQ ID NO: 514497 - RNA, 19 nt, Artificial Sequence
  Description of Artificial Sequence: Synthetic oligonucleotide
aaucacugggcggccaaau

SEQ ID NO: 514498 - RNA, 19 nt, Artificial Sequence
  Description of Artificial Sequence: Synthetic oligonucleotide
acuauaggcaggggugucu

SEQ ID NO: 514499 - RNA, 19 nt, Artificial Sequence
  Description of Artificial Sequence: Synthetic oligonucleotide
gaucgaucuuggugaccag

SEQ ID NO: 514500 - RNA, 19 nt, Artificial Sequence
  Description of Artificial Sequence: Synthetic oligonucleotide
cuagacugcagcacagcaa

SEQ ID NO: 514501 - RNA, 19 nt, Artificial Sequence
  Description of Artificial Sequence: Synthetic oligonucleotide
gaguagagacaucccggga

SEQ ID NO: 514502 - RNA, 19 nt, Artificial Sequence
  Description of Artificial Sequence: Synthetic oligonucleotide
acgugguccacaaaccgca

SEQ ID NO: 514503 - RNA, 19 nt, Artificial Sequence
  Description of Artificial Sequence: Synthetic oligonucleotide
ggcaaguuucacucgcaug

SEQ ID NO: 514504 - RNA, 19 nt, Artificial Sequence
  Description of Artificial Sequence: Synthetic oligonucleotide
aaaccucgaugacccgggu

SEQ ID NO: 514505 - RNA, 19 nt, Artificial Sequence
  Description of Artificial Sequence: Synthetic oligonucleotide
agagcguccaggaugugau

SEQ ID NO: 514506 - RNA, 19 nt, Artificial Sequence
  Description of Artificial Sequence: Synthetic oligonucleotide
guuaucugagucggauaug

SEQ ID NO: 514507 - RNA, 19 nt, Artificial Sequence
  Description of Artificial Sequence: Synthetic oligonucleotide
cucgugauguggagccgcc

SEQ ID NO: 514508 - RNA, 19 nt, Artificial Sequence
  Description of Artificial Sequence: Synthetic oligonucleotide
cccgguaauacacauccug

SEQ ID NO: 514509 - RNA, 19 nt, Artificial Sequence
  Description of Artificial Sequence: Synthetic oligonucleotide
augacccgggucauacugg

SEQ ID NO: 514510 - RNA, 19 nt, Artificial Sequence
  Description of Artificial Sequence: Synthetic oligonucleotide
aagaaacgccccagaccuc

SEQ ID NO: 514511 - RNA, 19 nt, Artificial Sequence
  Description of Artificial Sequence: Synthetic oligonucleotide
acaaucacugggcggccaa

SEQ ID NO: 514512 - RNA, 19 nt, Artificial Sequence
  Description of Artificial Sequence: Synthetic oligonucleotide
cgguaauacacauccuggg

SEQ ID NO: 514513 - RNA, 19 nt, Artificial Sequence
  Description of Artificial Sequence: Synthetic oligonucleotide
caccugugugcuucaaguc

SEQ ID NO: 514514 - RNA, 19 nt, Artificial Sequence
  Description of Artificial Sequence: Synthetic oligonucleotide
auauuaccccaaugagaaa

SEQ ID NO: 514515 - RNA, 19 nt, Artificial Sequence
  Description of Artificial Sequence: Synthetic oligonucleotide
ucguagggacugucuaccu

SEQ ID NO: 514516 - RNA, 19 nt, Artificial Sequence
  Description of Artificial Sequence: Synthetic oligonucleotide
gcacggcuaauaucguagg

SEQ ID NO: 514517 - RNA, 19 nt, Artificial Sequence
  Description of Artificial Sequence: Synthetic oligonucleotide
aggcaaguuucacucgcau

SEQ ID NO: 514518 - RNA, 19 nt, Artificial Sequence
  Description of Artificial Sequence: Synthetic oligonucleotide
cauccaaaauuaggaggug

SEQ ID NO: 514519 - RNA, 19 nt, Artificial Sequence
  Description of Artificial Sequence: Synthetic oligonucleotide
caucccgguaauacacauc

SEQ ID NO: 514520 - RNA, 19 nt, Artificial Sequence
  Description of Artificial Sequence: Synthetic oligonucleotide
agguuguagccaacaaugu

SEQ ID NO: 514521 - RNA, 19 nt, Artificial Sequence
  Description of Artificial Sequence: Synthetic oligonucleotide
ccuauugauggucucguca

SEQ ID NO: 514522 - RNA, 19 nt, Artificial Sequence
  Description of Artificial Sequence: Synthetic oligonucleotide
uagagacaucccgggacug

SEQ ID NO: 514523 - RNA, 19 nt, Artificial Sequence
  Description of Artificial Sequence: Synthetic oligonucleotide
ucccucuaccuaugugcug

SEQ ID NO: 514524 - RNA, 19 nt, Artificial Sequence
  Description of Artificial Sequence: Synthetic oligonucleotide
guaaucauagcgggagaaa

SEQ ID NO: 514525 - RNA, 19 nt, Artificial Sequence
  Description of Artificial Sequence: Synthetic oligonucleotide
ugcccucaaauaccacaaa

SEQ ID NO: 514526 - RNA, 19 nt, Artificial Sequence
  Description of Artificial Sequence: Synthetic oligonucleotide
uaccaaucucaucccggua

SEQ ID NO: 514527 - RNA, 19 nt, Artificial Sequence
  Description of Artificial Sequence: Synthetic oligonucleotide
agcagcaagccgaccggcg

SEQ ID NO: 514528 - RNA, 19 nt, Artificial Sequence
  Description of Artificial Sequence: Synthetic oligonucleotide
auggaaaaguccagacgga

SEQ ID NO: 514529 - RNA, 19 nt, Artificial Sequence
  Description of Artificial Sequence: Synthetic oligonucleotide
cacguccucguugaccagc

SEQ ID NO: 514530 - RNA, 19 nt, Artificial Sequence
  Description of Artificial Sequence: Synthetic oligonucleotide
agacggacauagacaauga

SEQ ID NO: 514531 - RNA, 19 nt, Artificial Sequence
  Description of Artificial Sequence: Synthetic oligonucleotide
gguuguagccaacaaugua

SEQ ID NO: 514532 - RNA, 19 nt, Artificial Sequence
  Description of Artificial Sequence: Synthetic oligonucleotide
cucaucccgguaauacaca

SEQ ID NO: 514533 - RNA, 19 nt, Artificial Sequence
  Description of Artificial Sequence: Synthetic oligonucleotide
ggacugucuaccuggaugu

SEQ ID NO: 514534 - RNA, 19 nt, Artificial Sequence
  Description of Artificial Sequence: Synthetic oligonucleotide
ucccgguaauacacauccu

SEQ ID NO: 514535 - RNA, 19 nt, Artificial Sequence
  Description of Artificial Sequence: Synthetic oligonucleotide
cugcagcacggcuaauauc

SEQ ID NO: 514536 - RNA, 19 nt, Artificial Sequence
  Description of Artificial Sequence: Synthetic oligonucleotide
acuggaagcuugacuguga

SEQ ID NO: 514537 - RNA, 19 nt, Artificial Sequence
  Description of Artificial Sequence: Synthetic oligonucleotide
cugggcggccaaauguguc

SEQ ID NO: 514538 - RNA, 19 nt, Artificial Sequence
  Description of Artificial Sequence: Synthetic oligonucleotide
gguaaucauagcgggagaa

SEQ ID NO: 514539 - RNA, 19 nt, Artificial Sequence
  Description of Artificial Sequence: Synthetic oligonucleotide
cggcuaauaucguagggac

SEQ ID NO: 514540 - RNA, 19 nt, Artificial Sequence
  Description of Artificial Sequence: Synthetic oligonucleotide
ccacauuucgggaggcaag

SEQ ID NO: 514541 - RNA, 19 nt, Artificial Sequence
  Description of Artificial Sequence: Synthetic oligonucleotide
agaacggauggaggagaug

SEQ ID NO: 514542 - RNA, 19 nt, Artificial Sequence
  Description of Artificial Sequence: Synthetic oligonucleotide
uccugacuauaggcagggg

SEQ ID NO: 514543 - RNA, 19 nt, Artificial Sequence
  Description of Artificial Sequence: Synthetic oligonucleotide
cagccuagacugcagcaca

SEQ ID NO: 514544 - RNA, 19 nt, Artificial Sequence
  Description of Artificial Sequence: Synthetic oligonucleotide
cuccgaagaggcgcugccg

SEQ ID NO: 514545 - RNA, 19 nt, Artificial Sequence
  Description of Artificial Sequence: Synthetic oligonucleotide
cucagccgucaccuuggcc

SEQ ID NO: 514546 - RNA, 19 nt, Artificial Sequence
  Description of Artificial Sequence: Synthetic oligonucleotide
cagccgucaccuuggccag

SEQ ID NO: 514547 - RNA, 19 nt, Artificial Sequence
  Description of Artificial Sequence: Synthetic oligonucleotide
cacucgcauggucuggguc

SEQ ID NO: 514548 - RNA, 19 nt, Artificial Sequence
  Description of Artificial Sequence: Synthetic oligonucleotide
ucacucgcauggucugggu

SEQ ID NO: 514549 - RNA, 19 nt, Artificial Sequence
  Description of Artificial Sequence: Synthetic oligonucleotide
agccuagacugcagcacag

SEQ ID NO: 514550 - RNA, 19 nt, Artificial Sequence
  Description of Artificial Sequence: Synthetic oligonucleotide
cgggucauacuggugaugg

SEQ ID NO: 514551 - RNA, 19 nt, Artificial Sequence
  Description of Artificial Sequence: Synthetic oligonucleotide
ggcggagccuccgaagagg

SEQ ID NO: 514552 - RNA, 19 nt, Artificial Sequence
  Description of Artificial Sequence: Synthetic oligonucleotide
ucacguccucguugaccag

SEQ ID NO: 514553 - RNA, 19 nt, Artificial Sequence
  Description of Artificial Sequence: Synthetic oligonucleotide
auuggucacccagauugua

SEQ ID NO: 514554 - RNA, 19 nt, Artificial Sequence
  Description of Artificial Sequence: Synthetic oligonucleotide
gaggcaaguuucacucgca

SEQ ID NO: 514555 - RNA, 19 nt, Artificial Sequence
  Description of Artificial Sequence: Synthetic oligonucleotide
ggugcgccagccucgacuc

SEQ ID NO: 514556 - RNA, 19 nt, Artificial Sequence
  Description of Artificial Sequence: Synthetic oligonucleotide
caacaaucacugggcggcc

SEQ ID NO: 514557 - RNA, 19 nt, Artificial Sequence
  Description of Artificial Sequence: Synthetic oligonucleotide
ucgaggccggauuuccauu

SEQ ID NO: 514558 - RNA, 19 nt, Artificial Sequence
  Description of Artificial Sequence: Synthetic oligonucleotide
gaggccggauuuccauuuc

SEQ ID NO: 514559 - RNA, 19 nt, Artificial Sequence
  Description of Artificial Sequence: Synthetic oligonucleotide
cucgacucgaguuccggcu

SEQ ID NO: 514560 - RNA, 19 nt, Artificial Sequence
  Description of Artificial Sequence: Synthetic oligonucleotide
cagccucgacucgaguucc

SEQ ID NO: 514561 - RNA, 19 nt, Artificial Sequence
  Description of Artificial Sequence: Synthetic oligonucleotide
gaccggcgccuccaugacc

SEQ ID NO: 514562 - RNA, 19 nt, Artificial Sequence
  Description of Artificial Sequence: Synthetic oligonucleotide
gccaacaauguaguguguc

SEQ ID NO: 514563 - RNA, 19 nt, Artificial Sequence
  Description of Artificial Sequence: Synthetic oligonucleotide
acgaccagcagagguuccu

SEQ ID NO: 514564 - RNA, 19 nt, Artificial Sequence
  Description of Artificial Sequence: Synthetic oligonucleotide
aagccgaccggcgccucca

SEQ ID NO: 514565 - RNA, 19 nt, Artificial Sequence
  Description of Artificial Sequence: Synthetic oligonucleotide
ggccuaaccucuuguugac

SEQ ID NO: 514566 - RNA, 19 nt, Artificial Sequence
  Description of Artificial Sequence: Synthetic oligonucleotide
gugaucgaucuuggugacc

SEQ ID NO: 514567 - RNA, 19 nt, Artificial Sequence
  Description of Artificial Sequence: Synthetic oligonucleotide
ucgcacaggucagagccuu

SEQ ID NO: 514568 - RNA, 19 nt, Artificial Sequence
  Description of Artificial Sequence: Synthetic oligonucleotide
gagguggcugguggaaaca

SEQ ID NO: 514569 - RNA, 19 nt, Artificial Sequence
  Description of Artificial Sequence: Synthetic oligonucleotide
caccgcaccugugugcuuc

SEQ ID NO: 514570 - RNA, 19 nt, Artificial Sequence
  Description of Artificial Sequence: Synthetic oligonucleotide
cugaguuaucugagucgga

SEQ ID NO: 514571 - RNA, 19 nt, Artificial Sequence
  Description of Artificial Sequence: Synthetic oligonucleotide
ccauugccgacuucagcac

SEQ ID NO: 514572 - RNA, 19 nt, Artificial Sequence
  Description of Artificial Sequence: Synthetic oligonucleotide
ccuagacugcagcacagca

SEQ ID NO: 514573 - RNA, 19 nt, Artificial Sequence
  Description of Artificial Sequence: Synthetic oligonucleotide
ccagccucgacucgaguuc

SEQ ID NO: 514574 - RNA, 19 nt, Artificial Sequence
  Description of Artificial Sequence: Synthetic oligonucleotide
acugggcggccaaaugugu

SEQ ID NO: 514575 - RNA, 19 nt, Artificial Sequence
  Description of Artificial Sequence: Synthetic oligonucleotide
gccccuucagcaccgcacc

SEQ ID NO: 514576 - RNA, 19 nt, Artificial Sequence
  Description of Artificial Sequence: Synthetic oligonucleotide
agaggaaaucgaggccgga

SEQ ID NO: 514577 - RNA, 19 nt, Artificial Sequence
  Description of Artificial Sequence: Synthetic oligonucleotide
uugaggccuuuugcuaauc

SEQ ID NO: 514578 - RNA, 19 nt, Artificial Sequence
  Description of Artificial Sequence: Synthetic oligonucleotide
guagagguauucauagcuu

SEQ ID NO: 514579 - RNA, 19 nt, Artificial Sequence
  Description of Artificial Sequence: Synthetic oligonucleotide
cauagacaaugacggugaa

SEQ ID NO: 514580 - RNA, 19 nt, Artificial Sequence
  Description of Artificial Sequence: Synthetic oligonucleotide
cauuucgggaggcaaguuu

SEQ ID NO: 514581 - RNA, 19 nt, Artificial Sequence
  Description of Artificial Sequence: Synthetic oligonucleotide
gaagucccuccuuuauuuu

SEQ ID NO: 514582 - RNA, 19 nt, Artificial Sequence
  Description of Artificial Sequence: Synthetic oligonucleotide
cccucaggcaagaugaucu

SEQ ID NO: 514583 - RNA, 19 nt, Artificial Sequence
  Description of Artificial Sequence: Synthetic oligonucleotide
acgaaagagcuggcucgug

SEQ ID NO: 514584 - RNA, 19 nt, Artificial Sequence
  Description of Artificial Sequence: Synthetic oligonucleotide
agggacugucuaccuggau

SEQ ID NO: 514585 - RNA, 19 nt, Artificial Sequence
  Description of Artificial Sequence: Synthetic oligonucleotide
gaggaaaucgaggccggau

SEQ ID NO: 514586 - RNA, 19 nt, Artificial Sequence
  Description of Artificial Sequence: Synthetic oligonucleotide
uuccugagcugagcuuuuc

SEQ ID NO: 514587 - RNA, 19 nt, Artificial Sequence
  Description of Artificial Sequence: Synthetic oligonucleotide
ccagaacgaaagagcuggc

SEQ ID NO: 514588 - RNA, 19 nt, Artificial Sequence
  Description of Artificial Sequence: Synthetic oligonucleotide
gcucgugauguggagccgc

SEQ ID NO: 514589 - RNA, 19 nt, Artificial Sequence
  Description of Artificial Sequence: Synthetic oligonucleotide
gagaugccacuaucaggcu

SEQ ID NO: 514590 - RNA, 19 nt, Artificial Sequence
  Description of Artificial Sequence: Synthetic oligonucleotide
gucucgucaaagugacggu

SEQ ID NO: 514591 - RNA, 19 nt, Artificial Sequence
  Description of Artificial Sequence: Synthetic oligonucleotide
ugucuaccuggauguucuu

SEQ ID NO: 514592 - RNA, 19 nt, Artificial Sequence
  Description of Artificial Sequence: Synthetic oligonucleotide
agcaagccgaccggcgccu

SEQ ID NO: 514593 - RNA, 19 nt, Artificial Sequence
  Description of Artificial Sequence: Synthetic oligonucleotide
gguagguguagugcagcuc

SEQ ID NO: 514594 - RNA, 19 nt, Artificial Sequence
  Description of Artificial Sequence: Synthetic oligonucleotide
cagaucgugugggguuccc

SEQ ID NO: 514595 - RNA, 19 nt, Artificial Sequence
  Description of Artificial Sequence: Synthetic oligonucleotide
augccacuaucaggcuguc

SEQ ID NO: 514596 - RNA, 19 nt, Artificial Sequence
  Description of Artificial Sequence: Synthetic oligonucleotide
accgcaccugugugcuuca

SEQ ID NO: 514597 - RNA, 19 nt, Artificial Sequence
  Description of Artificial Sequence: Synthetic oligonucleotide
ggccagaacgaaagagcug

SEQ ID NO: 514598 - RNA, 19 nt, Artificial Sequence
  Description of Artificial Sequence: Synthetic oligonucleotide
cucguugaccagcggcgga

SEQ ID NO: 514599 - RNA, 19 nt, Artificial Sequence
  Description of Artificial Sequence: Synthetic oligonucleotide
ggaaaucgaggccggauuu

SEQ ID NO: 514600 - RNA, 19 nt, Artificial Sequence
  Description of Artificial Sequence: Synthetic oligonucleotide
ccugacuauaggcaggggu

SEQ ID NO: 514601 - RNA, 19 nt, Artificial Sequence
  Description of Artificial Sequence: Synthetic oligonucleotide
ggcggccaaaugugucuag

SEQ ID NO: 514602 - RNA, 19 nt, Artificial Sequence
  Description of Artificial Sequence: Synthetic oligonucleotide
cacgccgaggugcgccagc

SEQ ID NO: 514603 - RNA, 19 nt, Artificial Sequence
  Description of Artificial Sequence: Synthetic oligonucleotide
gggaaccauucagaaauaa

SEQ ID NO: 514604 - RNA, 19 nt, Artificial Sequence
  Description of Artificial Sequence: Synthetic oligonucleotide
ugccacuaucaggcugucu

SEQ ID NO: 514605 - RNA, 19 nt, Artificial Sequence
  Description of Artificial Sequence: Synthetic oligonucleotide
gccgaggugcgccagccuc

SEQ ID NO: 514606 - RNA, 19 nt, Artificial Sequence
  Description of Artificial Sequence: Synthetic oligonucleotide
caacaauguagugugucuu

SEQ ID NO: 514607 - RNA, 19 nt, Artificial Sequence
  Description of Artificial Sequence: Synthetic oligonucleotide
gacccgggucauacuggug

SEQ ID NO: 514608 - RNA, 19 nt, Artificial Sequence
  Description of Artificial Sequence: Synthetic oligonucleotide
cauagcuugggagguugua

SEQ ID NO: 514609 - RNA, 19 nt, Artificial Sequence
  Description of Artificial Sequence: Synthetic oligonucleotide
agguugccgucuuccucau

SEQ ID NO: 514610 - RNA, 19 nt, Artificial Sequence
  Description of Artificial Sequence: Synthetic oligonucleotide
ggucuuuguuggauaggga

SEQ ID NO: 514611 - RNA, 19 nt, Artificial Sequence
  Description of Artificial Sequence: Synthetic oligonucleotide
acauggguguagacaguuu

SEQ ID NO: 514612 - RNA, 19 nt, Artificial Sequence
  Description of Artificial Sequence: Synthetic oligonucleotide
cagcacggcuaauaucgua

SEQ ID NO: 514613 - RNA, 19 nt, Artificial Sequence
  Description of Artificial Sequence: Synthetic oligonucleotide
augcuggccuuuguucaaa

SEQ ID NO: 514614 - RNA, 19 nt, Artificial Sequence
  Description of Artificial Sequence: Synthetic oligonucleotide
agccucgacucgaguuccg

SEQ ID NO: 514615 - RNA, 19 nt, Artificial Sequence
  Description of Artificial Sequence: Synthetic oligonucleotide
ggacauagacaaugacggu

SEQ ID NO: 514616 - RNA, 19 nt, Artificial Sequence
  Description of Artificial Sequence: Synthetic oligonucleotide
cuugaggccuuuugcuaau

SEQ ID NO: 514617 - RNA, 19 nt, Artificial Sequence
  Description of Artificial Sequence: Synthetic oligonucleotide
cagaacgaaagagcuggcu

SEQ ID NO: 514618 - RNA, 19 nt, Artificial Sequence
  Description of Artificial Sequence: Synthetic oligonucleotide
gacucgaguuccggcucca

SEQ ID NO: 514619 - RNA, 19 nt, Artificial Sequence
  Description of Artificial Sequence: Synthetic oligonucleotide
gccucgacucgaguuccgg

SEQ ID NO: 514620 - RNA, 19 nt, Artificial Sequence
  Description of Artificial Sequence: Synthetic oligonucleotide
agccaacaauguagugugu

SEQ ID NO: 514621 - RNA, 19 nt, Artificial Sequence
  Description of Artificial Sequence: Synthetic oligonucleotide
cuaauaucguagggacugu

SEQ ID NO: 514622 - RNA, 19 nt, Artificial Sequence
  Description of Artificial Sequence: Synthetic oligonucleotide
ggccggauuuccauuucca

SEQ ID NO: 514623 - RNA, 19 nt, Artificial Sequence
  Description of Artificial Sequence: Synthetic oligonucleotide
caaguuucacucgcauggu

SEQ ID NO: 514624 - RNA, 19 nt, Artificial Sequence
  Description of Artificial Sequence: Synthetic oligonucleotide
ggcucgugauguggagccg

SEQ ID NO: 514625 - RNA, 19 nt, Artificial Sequence
  Description of Artificial Sequence: Synthetic oligonucleotide
gccuagacugcagcacagc

SEQ ID NO: 514626 - RNA, 19 nt, Artificial Sequence
  Description of Artificial Sequence: Synthetic oligonucleotide
ccgaccggcgccuccauga

SEQ ID NO: 514627 - RNA, 19 nt, Artificial Sequence
  Description of Artificial Sequence: Synthetic oligonucleotide
cacauggguguagacaguu

SEQ ID NO: 514628 - RNA, 19 nt, Artificial Sequence
  Description of Artificial Sequence: Synthetic oligonucleotide
ggaugugaucgaucuuggu

SEQ ID NO: 514629 - RNA, 19 nt, Artificial Sequence
  Description of Artificial Sequence: Synthetic oligonucleotide
ccaccgugcgcuucacguc

SEQ ID NO: 514630 - RNA, 19 nt, Artificial Sequence
  Description of Artificial Sequence: Synthetic oligonucleotide
gaggugcgccagccucgac

SEQ ID NO: 514631 - RNA, 19 nt, Artificial Sequence
  Description of Artificial Sequence: Synthetic oligonucleotide
ggauauggaugaagcacau

SEQ ID NO: 514632 - RNA, 19 nt, Artificial Sequence
  Description of Artificial Sequence: Synthetic oligonucleotide
ggcuaauaucguagggacu

SEQ ID NO: 514633 - RNA, 19 nt, Artificial Sequence
  Description of Artificial Sequence: Synthetic oligonucleotide
cgacucgaguuccggcucc

SEQ ID NO: 514634 - RNA, 19 nt, Artificial Sequence
  Description of Artificial Sequence: Synthetic oligonucleotide
aagugacgguagaggccua

SEQ ID NO: 514635 - RNA, 19 nt, Artificial Sequence
  Description of Artificial Sequence: Synthetic oligonucleotide
caucccgggacugcuugua

SEQ ID NO: 514636 - RNA, 19 nt, Artificial Sequence
  Description of Artificial Sequence: Synthetic oligonucleotide
gagccuccgaagaggcgcu

SEQ ID NO: 514637 - RNA, 19 nt, Artificial Sequence
  Description of Artificial Sequence: Synthetic oligonucleotide
cggacuucuagguugccgu

SEQ ID NO: 514638 - RNA, 19 nt, Artificial Sequence
  Description of Artificial Sequence: Synthetic oligonucleotide
accgugcgcuucacguccu

SEQ ID NO: 514639 - RNA, 19 nt, Artificial Sequence
  Description of Artificial Sequence: Synthetic oligonucleotide
cccucuaccuaugugcugu

SEQ ID NO: 514640 - RNA, 19 nt, Artificial Sequence
  Description of Artificial Sequence: Synthetic oligonucleotide
agccuccgaagaggcgcug

SEQ ID NO: 514641 - RNA, 19 nt, Artificial Sequence
  Description of Artificial Sequence: Synthetic oligonucleotide
cgugcgcuucacguccucg

SEQ ID NO: 514642 - RNA, 19 nt, Artificial Sequence
  Description of Artificial Sequence: Synthetic oligonucleotide
cccaaugagaaaccucgau

SEQ ID NO: 514643 - RNA, 19 nt, Artificial Sequence
  Description of Artificial Sequence: Synthetic oligonucleotide
gccagccucgacucgaguu

SEQ ID NO: 514644 - RNA, 19 nt, Artificial Sequence
  Description of Artificial Sequence: Synthetic oligonucleotide
ccccaaugagaaaccucga

SEQ ID NO: 514645 - RNA, 19 nt, Artificial Sequence
  Description of Artificial Sequence: Synthetic oligonucleotide
gucgcacaggucagagccu

SEQ ID NO: 514646 - RNA, 19 nt, Artificial Sequence
  Description of Artificial Sequence: Synthetic oligonucleotide
cggagccuccgaagaggcg

SEQ ID NO: 514647 - RNA, 19 nt, Artificial Sequence
  Description of Artificial Sequence: Synthetic oligonucleotide
gggucauacuggugauggu

SEQ ID NO: 514648 - RNA, 19 nt, Artificial Sequence
  Description of Artificial Sequence: Synthetic oligonucleotide
ccucagaucgugugggguu

SEQ ID NO: 514649 - RNA, 19 nt, Artificial Sequence
  Description of Artificial Sequence: Synthetic oligonucleotide
cguugaccagcggcggagc

SEQ ID NO: 514650 - RNA, 19 nt, Artificial Sequence
  Description of Artificial Sequence: Synthetic oligonucleotide
cucgaugacccgggucaua

SEQ ID NO: 514651 - RNA, 19 nt, Artificial Sequence
  Description of Artificial Sequence: Synthetic oligonucleotide
gccgaccggcgccuccaug

SEQ ID NO: 514652 - RNA, 19 nt, Artificial Sequence
  Description of Artificial Sequence: Synthetic oligonucleotide
ucgcauggucugggucuuu

SEQ ID NO: 514653 - RNA, 19 nt, Artificial Sequence
  Description of Artificial Sequence: Synthetic oligonucleotide
cucccucaggcaagaugau

SEQ ID NO: 514654 - RNA, 19 nt, Artificial Sequence
  Description of Artificial Sequence: Synthetic oligonucleotide
cucuaccuaugugcuguau

SEQ ID NO: 514655 - RNA, 19 nt, Artificial Sequence
  Description of Artificial Sequence: Synthetic oligonucleotide
gggugcgccaggaccaccu

SEQ ID NO: 514656 - RNA, 19 nt, Artificial Sequence
  Description of Artificial Sequence: Synthetic oligonucleotide
cggcggagccuccgaagag

SEQ ID NO: 514657 - RNA, 19 nt, Artificial Sequence
  Description of Artificial Sequence: Synthetic oligonucleotide
ccggcuccagggccagaac

SEQ ID NO: 514658 - RNA, 19 nt, Artificial Sequence
  Description of Artificial Sequence: Synthetic oligonucleotide
cucgcauggucugggucuu

SEQ ID NO: 514659 - RNA, 19 nt, Artificial Sequence
  Description of Artificial Sequence: Synthetic oligonucleotide
cgaccggcgccuccaugac

SEQ ID NO: 514660 - RNA, 19 nt, Artificial Sequence
  Description of Artificial Sequence: Synthetic oligonucleotide
cggccaaaugugucuaggu

SEQ ID NO: 514661 - RNA, 19 nt, Artificial Sequence
  Description of Artificial Sequence: Synthetic oligonucleotide
ccggcgccuccaugaccgc

SEQ ID NO: 514662 - RNA, 19 nt, Artificial Sequence
  Description of Artificial Sequence: Synthetic oligonucleotide
cgaggccggauuuccauuu

SEQ ID NO: 514663 - RNA, 19 nt, Artificial Sequence
  Description of Artificial Sequence: Synthetic oligonucleotide
ccgugcgcuucacguccuc

SEQ ID NO: 514664 - RNA, 19 nt, Artificial Sequence
  Description of Artificial Sequence: Synthetic oligonucleotide
ccgggugcgccaggaccac

SEQ ID NO: 514665 - RNA, 19 nt, Artificial Sequence
  Description of Artificial Sequence: Synthetic oligonucleotide
gcaagccgaccggcgccuc

SEQ ID NO: 514666 - RNA, 19 nt, Artificial Sequence
  Description of Artificial Sequence: Synthetic oligonucleotide
ccgcaucuucagugcauau

SEQ ID NO: 514667 - RNA, 19 nt, Artificial Sequence
  Description of Artificial Sequence: Synthetic oligonucleotide
cgaggugcgccagccucga

SEQ ID NO: 514668 - RNA, 19 nt, Artificial Sequence
  Description of Artificial Sequence: Synthetic oligonucleotide
cgggugcgccaggaccacc

SEQ ID NO: 514669 - RNA, 19 nt, Artificial Sequence
  Description of Artificial Sequence: Synthetic oligonucleotide
ccccuucagcaccgcaccu

SEQ ID NO: 514670 - RNA, 19 nt, Artificial Sequence
  Description of Artificial Sequence: Synthetic oligonucleotide
cgaugacccgggucauacu

SEQ ID NO: 514671 - RNA, 19 nt, Artificial Sequence
  Description of Artificial Sequence: Synthetic oligonucleotide
cgugguccacaaaccgcau

SEQ ID NO: 514672 - RNA, 19 nt, Artificial Sequence
  Description of Artificial Sequence: Synthetic oligonucleotide
ccacaacaacugagaucuu

SEQ ID NO: 514673 - RNA, 19 nt, Artificial Sequence
  Description of Artificial Sequence: Synthetic oligonucleotide
ccgcaccugugugcuucaa

SEQ ID NO: 514674 - RNA, 19 nt, Artificial Sequence
  Description of Artificial Sequence: Synthetic oligonucleotide
cgccagccucgacucgagu

SEQ ID NO: 514675 - RNA, 19 nt, Artificial Sequence
  Description of Artificial Sequence: Synthetic oligonucleotide
agaugggugaaguagaggc

SEQ ID NO: 514676 - RNA, 19 nt, Artificial Sequence
  Description of Artificial Sequence: Synthetic oligonucleotide
auuguauggcauuugaaac

SEQ ID NO: 514677 - RNA, 19 nt, Artificial Sequence
  Description of Artificial Sequence: Synthetic oligonucleotide
aaaucugguauucacaccu

SEQ ID NO: 514678 - RNA, 19 nt, Artificial Sequence
  Description of Artificial Sequence: Synthetic oligonucleotide
uaauaugcagcaaagccag

SEQ ID NO: 514679 - RNA, 19 nt, Artificial Sequence
  Description of Artificial Sequence: Synthetic oligonucleotide
ugaccuaaagaucaccugg

SEQ ID NO: 514680 - RNA, 19 nt, Artificial Sequence
  Description of Artificial Sequence: Synthetic oligonucleotide
gaaaaugaugccaaaacag

SEQ ID NO: 514681 - RNA, 19 nt, Artificial Sequence
  Description of Artificial Sequence: Synthetic oligonucleotide
ucauuuauaucuacggcag

SEQ ID NO: 514682 - RNA, 19 nt, Artificial Sequence
  Description of Artificial Sequence: Synthetic oligonucleotide
uucauuuauaucuacggca

SEQ ID NO: 514683 - RNA, 19 nt, Artificial Sequence
  Description of Artificial Sequence: Synthetic oligonucleotide
auaguuaggggacaggauc

SEQ ID NO: 514684 - RNA, 19 nt, Artificial Sequence
  Description of Artificial Sequence: Synthetic oligonucleotide
aaucccaaacccuucuggg

SEQ ID NO: 514685 - RNA, 19 nt, Artificial Sequence
  Description of Artificial Sequence: Synthetic oligonucleotide
agcaaaaucugguauucac

SEQ ID NO: 514686 - RNA, 19 nt, Artificial Sequence
  Description of Artificial Sequence: Synthetic oligonucleotide
uuuauuguauggcauuuga

SEQ ID NO: 514687 - RNA, 19 nt, Artificial Sequence
  Description of Artificial Sequence: Synthetic oligonucleotide
auaauuggggcuugaaauc

SEQ ID NO: 514688 - RNA, 19 nt, Artificial Sequence
  Description of Artificial Sequence: Synthetic oligonucleotide
agaggcgaaucccaaaccc

SEQ ID NO: 514689 - RNA, 19 nt, Artificial Sequence
  Description of Artificial Sequence: Synthetic oligonucleotide
auuuauaucuacggcagcg

SEQ ID NO: 514690 - RNA, 19 nt, Artificial Sequence
  Description of Artificial Sequence: Synthetic oligonucleotide
agaaaaugaugccaaaaca

SEQ ID NO: 514691 - RNA, 19 nt, Artificial Sequence
  Description of Artificial Sequence: Synthetic oligonucleotide
uauggacugggauaauugg

SEQ ID NO: 514692 - RNA, 19 nt, Artificial Sequence
  Description of Artificial Sequence: Synthetic oligonucleotide
uacauucccacuacaauug

SEQ ID NO: 514693 - RNA, 19 nt, Artificial Sequence
  Description of Artificial Sequence: Synthetic oligonucleotide
gaugacagaggccaaacac

SEQ ID NO: 514694 - RNA, 19 nt, Artificial Sequence
  Description of Artificial Sequence: Synthetic oligonucleotide
uggcauuugaaacucuucc

SEQ ID NO: 514695 - RNA, 19 nt, Artificial Sequence
  Description of Artificial Sequence: Synthetic oligonucleotide
agauuaucugcaccgaguc

SEQ ID NO: 514696 - RNA, 19 nt, Artificial Sequence
  Description of Artificial Sequence: Synthetic oligonucleotide
acuacaauugacuccgcag

SEQ ID NO: 514697 - RNA, 19 nt, Artificial Sequence
  Description of Artificial Sequence: Synthetic oligonucleotide
aaaucuccccaaucagggc

SEQ ID NO: 514698 - RNA, 19 nt, Artificial Sequence
  Description of Artificial Sequence: Synthetic oligonucleotide
aaucugugcauucauuuau

SEQ ID NO: 514699 - RNA, 19 nt, Artificial Sequence
  Description of Artificial Sequence: Synthetic oligonucleotide
aagucugaccuaaagauca

SEQ ID NO: 514700 - RNA, 19 nt, Artificial Sequence
  Description of Artificial Sequence: Synthetic oligonucleotide
uugaaaucuccccaaucag

SEQ ID NO: 514701 - RNA, 19 nt, Artificial Sequence
  Description of Artificial Sequence: Synthetic oligonucleotide
agcaaagccaguaaaccgc

SEQ ID NO: 514702 - RNA, 19 nt, Artificial Sequence
  Description of Artificial Sequence: Synthetic oligonucleotide
auauucgcaguucucugac

SEQ ID NO: 514703 - RNA, 19 nt, Artificial Sequence
  Description of Artificial Sequence: Synthetic oligonucleotide
gaaucccaaacccuucugg

SEQ ID NO: 514704 - RNA, 19 nt, Artificial Sequence
  Description of Artificial Sequence: Synthetic oligonucleotide
uuggcauucuugcuggucc

SEQ ID NO: 514705 - RNA, 19 nt, Artificial Sequence
  Description of Artificial Sequence: Synthetic oligonucleotide
gauaauuggggcuugaaau

SEQ ID NO: 514706 - RNA, 19 nt, Artificial Sequence
  Description of Artificial Sequence: Synthetic oligonucleotide
ucugaccuaaagaucaccu

SEQ ID NO: 514707 - RNA, 19 nt, Artificial Sequence
  Description of Artificial Sequence: Synthetic oligonucleotide
gaaguaaccaccaaugaaa

SEQ ID NO: 514708 - RNA, 19 nt, Artificial Sequence
  Description of Artificial Sequence: Synthetic oligonucleotide
uuguauggcauuugaaacu

SEQ ID NO: 514709 - RNA, 19 nt, Artificial Sequence
  Description of Artificial Sequence: Synthetic oligonucleotide
auucgcaguucucugacag

SEQ ID NO: 514710 - RNA, 19 nt, Artificial Sequence
  Description of Artificial Sequence: Synthetic oligonucleotide
uggaguuuauuguauggca

SEQ ID NO: 514711 - RNA, 19 nt, Artificial Sequence
  Description of Artificial Sequence: Synthetic oligonucleotide
ugagauuaucugcaccgag

SEQ ID NO: 514712 - RNA, 19 nt, Artificial Sequence
  Description of Artificial Sequence: Synthetic oligonucleotide
gaguuggcauucuugcugg

SEQ ID NO: 514713 - RNA, 19 nt, Artificial Sequence
  Description of Artificial Sequence: Synthetic oligonucleotide
accaaugaaauuauugcag

SEQ ID NO: 514714 - RNA, 19 nt, Artificial Sequence
  Description of Artificial Sequence: Synthetic oligonucleotide
ugaaguagaggcgaauccc

SEQ ID NO: 514715 - RNA, 19 nt, Artificial Sequence
  Description of Artificial Sequence: Synthetic oligonucleotide
acuucuaugucccacguuu

SEQ ID NO: 514716 - RNA, 19 nt, Artificial Sequence
  Description of Artificial Sequence: Synthetic oligonucleotide
cuugaaaucuccccaauca

SEQ ID NO: 514717 - RNA, 19 nt, Artificial Sequence
  Description of Artificial Sequence: Synthetic oligonucleotide
aauuauugcagaaguggcu

SEQ ID NO: 514718 - RNA, 19 nt, Artificial Sequence
  Description of Artificial Sequence: Synthetic oligonucleotide
agugaauacauucccacua

SEQ ID NO: 514719 - RNA, 19 nt, Artificial Sequence
  Description of Artificial Sequence: Synthetic oligonucleotide
agaaguaaccaccaaugaa

SEQ ID NO: 514720 - RNA, 19 nt, Artificial Sequence
  Description of Artificial Sequence: Synthetic oligonucleotide
auacauucccacuacaauu

SEQ ID NO: 514721 - RNA, 19 nt, Artificial Sequence
  Description of Artificial Sequence: Synthetic oligonucleotide
ucuacggcagcguaauaug

SEQ ID NO: 514722 - RNA, 19 nt, Artificial Sequence
  Description of Artificial Sequence: Synthetic oligonucleotide
cagcaaagccaguaaaccg

SEQ ID NO: 514723 - RNA, 19 nt, Artificial Sequence
  Description of Artificial Sequence: Synthetic oligonucleotide
guaaccaccaaugaaauua

SEQ ID NO: 514724 - RNA, 19 nt, Artificial Sequence
  Description of Artificial Sequence: Synthetic oligonucleotide
cacaccuugaguucucggg

SEQ ID NO: 514725 - RNA, 19 nt, Artificial Sequence
  Description of Artificial Sequence: Synthetic oligonucleotide
aucaccuggaguuuauugu

SEQ ID NO: 514726 - RNA, 19 nt, Artificial Sequence
  Description of Artificial Sequence: Synthetic oligonucleotide
aaaucugugcauucauuua

SEQ ID NO: 514727 - RNA, 19 nt, Artificial Sequence
  Description of Artificial Sequence: Synthetic oligonucleotide
uaugucccacguuuucucg

SEQ ID NO: 514728 - RNA, 19 nt, Artificial Sequence
  Description of Artificial Sequence: Synthetic oligonucleotide
auugggguacgccugagga

SEQ ID NO: 514729 - RNA, 19 nt, Artificial Sequence
  Description of Artificial Sequence: Synthetic oligonucleotide
guaauaugcagcaaagcca

SEQ ID NO: 514730 - RNA, 19 nt, Artificial Sequence
  Description of Artificial Sequence: Synthetic oligonucleotide
caauugacuccgcaguucc

SEQ ID NO: 514731 - RNA, 19 nt, Artificial Sequence
  Description of Artificial Sequence: Synthetic oligonucleotide
uaguuaggggacaggaucu

SEQ ID NO: 514732 - RNA, 19 nt, Artificial Sequence
  Description of Artificial Sequence: Synthetic oligonucleotide
ucauauucgcaguucucug

SEQ ID NO: 514733 - RNA, 19 nt, Artificial Sequence
  Description of Artificial Sequence: Synthetic oligonucleotide
aguaaaccgcucuucguug

SEQ ID NO: 514734 - RNA, 19 nt, Artificial Sequence
  Description of Artificial Sequence: Synthetic oligonucleotide
uuauuguauggcauuugaa

SEQ ID NO: 514735 - RNA, 19 nt, Artificial Sequence
  Description of Artificial Sequence: Synthetic oligonucleotide
gagaagucugaccuaaaga

SEQ ID NO: 514736 - RNA, 19 nt, Artificial Sequence
  Description of Artificial Sequence: Synthetic oligonucleotide
uauaucuacggcagcguaa

SEQ ID NO: 514737 - RNA, 19 nt, Artificial Sequence
  Description of Artificial Sequence: Synthetic oligonucleotide
ugaauacauucccacuaca

SEQ ID NO: 514738 - RNA, 19 nt, Artificial Sequence
  Description of Artificial Sequence: Synthetic oligonucleotide
uccauguccagauggguga

SEQ ID NO: 514739 - RNA, 19 nt, Artificial Sequence
  Description of Artificial Sequence: Synthetic oligonucleotide
uccgcaguuccucauguca

SEQ ID NO: 514740 - RNA, 19 nt, Artificial Sequence
  Description of Artificial Sequence: Synthetic oligonucleotide
ucucuguucggccccaccc

SEQ ID NO: 514741 - RNA, 19 nt, Artificial Sequence
  Description of Artificial Sequence: Synthetic oligonucleotide
ugcaugguaggcucggcag

SEQ ID NO: 514742 - RNA, 19 nt, Artificial Sequence
  Description of Artificial Sequence: Synthetic oligonucleotide
gucuuggcaaucaaguucc

SEQ ID NO: 514743 - RNA, 19 nt, Artificial Sequence
  Description of Artificial Sequence: Synthetic oligonucleotide
auuaucugcaccgagucau

SEQ ID NO: 514744 - RNA, 19 nt, Artificial Sequence
  Description of Artificial Sequence: Synthetic oligonucleotide
cguaauaugcagcaaagcc

SEQ ID NO: 514745 - RNA, 19 nt, Artificial Sequence
  Description of Artificial Sequence: Synthetic oligonucleotide
ucccaaacccuucugggac

SEQ ID NO: 514746 - RNA, 19 nt, Artificial Sequence
  Description of Artificial Sequence: Synthetic oligonucleotide
aucucauugggguacgccu

SEQ ID NO: 514747 - RNA, 19 nt, Artificial Sequence
  Description of Artificial Sequence: Synthetic oligonucleotide
uguauggcauuugaaacuc

SEQ ID NO: 514748 - RNA, 19 nt, Artificial Sequence
  Description of Artificial Sequence: Synthetic oligonucleotide
ugguauucacaccuugagu

SEQ ID NO: 514749 - RNA, 19 nt, Artificial Sequence
  Description of Artificial Sequence: Synthetic oligonucleotide
accaccaaugaaauuauug

SEQ ID NO: 514750 - RNA, 19 nt, Artificial Sequence
  Description of Artificial Sequence: Synthetic oligonucleotide
uaugcagcaaagccaguaa

SEQ ID NO: 514751 - RNA, 19 nt, Artificial Sequence
  Description of Artificial Sequence: Synthetic oligonucleotide
gugaaguagaggcgaaucc

SEQ ID NO: 514752 - RNA, 19 nt, Artificial Sequence
  Description of Artificial Sequence: Synthetic oligonucleotide
aaucagggcagugaauaca

SEQ ID NO: 514753 - RNA, 19 nt, Artificial Sequence
  Description of Artificial Sequence: Synthetic oligonucleotide
cugguauucacaccuugag

SEQ ID NO: 514754 - RNA, 19 nt, Artificial Sequence
  Description of Artificial Sequence: Synthetic oligonucleotide
gaugggugaaguagaggcg

SEQ ID NO: 514755 - RNA, 19 nt, Artificial Sequence
  Description of Artificial Sequence: Synthetic oligonucleotide
gacaggagcagaaguaacc

SEQ ID NO: 514756 - RNA, 19 nt, Artificial Sequence
  Description of Artificial Sequence: Synthetic oligonucleotide
uaauuggggcuugaaaucu

SEQ ID NO: 514757 - RNA, 19 nt, Artificial Sequence
  Description of Artificial Sequence: Synthetic oligonucleotide
uccugagauuaucugcacc

SEQ ID NO: 514758 - RNA, 19 nt, Artificial Sequence
  Description of Artificial Sequence: Synthetic oligonucleotide
caccgagucauauucgcag

SEQ ID NO: 514759 - RNA, 19 nt, Artificial Sequence
  Description of Artificial Sequence: Synthetic oligonucleotide
guaaaccgcucuucguugg

SEQ ID NO: 514760 - RNA, 19 nt, Artificial Sequence
  Description of Artificial Sequence: Synthetic oligonucleotide
agcagaaguaaccaccaau

SEQ ID NO: 514761 - RNA, 19 nt, Artificial Sequence
  Description of Artificial Sequence: Synthetic oligonucleotide
ucguggaggaaguauucug

SEQ ID NO: 514762 - RNA, 19 nt, Artificial Sequence
  Description of Artificial Sequence: Synthetic oligonucleotide
ugaugccaaaacagaaaac

SEQ ID NO: 514763 - RNA, 19 nt, Artificial Sequence
  Description of Artificial Sequence: Synthetic oligonucleotide
ucggcagaaaaugaugcca

SEQ ID NO: 514764 - RNA, 19 nt, Artificial Sequence
  Description of Artificial Sequence: Synthetic oligonucleotide
uuauaucuacggcagcgua

SEQ ID NO: 514765 - RNA, 19 nt, Artificial Sequence
  Description of Artificial Sequence: Synthetic oligonucleotide
agucucccuuccucgacgc

SEQ ID NO: 514766 - RNA, 19 nt, Artificial Sequence
  Description of Artificial Sequence: Synthetic oligonucleotide
uacggcagcguaauaugca

SEQ ID NO: 514767 - RNA, 19 nt, Artificial Sequence
  Description of Artificial Sequence: Synthetic oligonucleotide
uuuauaucuacggcagcgu

SEQ ID NO: 514768 - RNA, 19 nt, Artificial Sequence
  Description of Artificial Sequence: Synthetic oligonucleotide
auugacuccgcaguuccuc

SEQ ID NO: 514769 - RNA, 19 nt, Artificial Sequence
  Description of Artificial Sequence: Synthetic oligonucleotide
uagaggcgaaucccaaacc

SEQ ID NO: 514770 - RNA, 19 nt, Artificial Sequence
  Description of Artificial Sequence: Synthetic oligonucleotide
uauucacaccuugaguucu

SEQ ID NO: 514771 - RNA, 19 nt, Artificial Sequence
  Description of Artificial Sequence: Synthetic oligonucleotide
ucaucguggaggaaguauu

SEQ ID NO: 514772 - RNA, 19 nt, Artificial Sequence
  Description of Artificial Sequence: Synthetic oligonucleotide
acaauugacuccgcaguuc

SEQ ID NO: 514773 - RNA, 19 nt, Artificial Sequence
  Description of Artificial Sequence: Synthetic oligonucleotide
acggcagcguaauaugcag

SEQ ID NO: 514774 - RNA, 19 nt, Artificial Sequence
  Description of Artificial Sequence: Synthetic oligonucleotide
guauggacugggauaauug

SEQ ID NO: 514775 - RNA, 19 nt, Artificial Sequence
  Description of Artificial Sequence: Synthetic oligonucleotide
uggggcuugaaaucucccc

SEQ ID NO: 514776 - RNA, 19 nt, Artificial Sequence
  Description of Artificial Sequence: Synthetic oligonucleotide
uucggccccacccugagau

SEQ ID NO: 514777 - RNA, 19 nt, Artificial Sequence
  Description of Artificial Sequence: Synthetic oligonucleotide
guaggcucggcagaaaaug

SEQ ID NO: 514778 - RNA, 19 nt, Artificial Sequence
  Description of Artificial Sequence: Synthetic oligonucleotide
gagucucccuuccucgacg

SEQ ID NO: 514779 - RNA, 19 nt, Artificial Sequence
  Description of Artificial Sequence: Synthetic oligonucleotide
accuaaagaucaccuggag

SEQ ID NO: 514780 - RNA, 19 nt, Artificial Sequence
  Description of Artificial Sequence: Synthetic oligonucleotide
cuacggcagcguaauaugc

SEQ ID NO: 514781 - RNA, 19 nt, Artificial Sequence
  Description of Artificial Sequence: Synthetic oligonucleotide
ucuaugucccacguuuucu

SEQ ID NO: 514782 - RNA, 19 nt, Artificial Sequence
  Description of Artificial Sequence: Synthetic oligonucleotide
cauuugaaacucuuccaca

SEQ ID NO: 514783 - RNA, 19 nt, Artificial Sequence
  Description of Artificial Sequence: Synthetic oligonucleotide
ucugugcauucauuuauau

SEQ ID NO: 514784 - RNA, 19 nt, Artificial Sequence
  Description of Artificial Sequence: Synthetic oligonucleotide
cauuuauaucuacggcagc

SEQ ID NO: 514785 - RNA, 19 nt, Artificial Sequence
  Description of Artificial Sequence: Synthetic oligonucleotide
aucagacccuccuuccauc

SEQ ID NO: 514786 - RNA, 19 nt, Artificial Sequence
  Description of Artificial Sequence: Synthetic oligonucleotide
gaguucucgggguauggac

SEQ ID NO: 514787 - RNA, 19 nt, Artificial Sequence
  Description of Artificial Sequence: Synthetic oligonucleotide
aaguaaccaccaaugaaau

SEQ ID NO: 514788 - RNA, 19 nt, Artificial Sequence
  Description of Artificial Sequence: Synthetic oligonucleotide
uaggcucggcagaaaauga

SEQ ID NO: 514789 - RNA, 19 nt, Artificial Sequence
  Description of Artificial Sequence: Synthetic oligonucleotide
ucagacccuccuuccaucc

SEQ ID NO: 514790 - RNA, 19 nt, Artificial Sequence
  Description of Artificial Sequence: Synthetic oligonucleotide
uacaauugacuccgcaguu

SEQ ID NO: 514791 - RNA, 19 nt, Artificial Sequence
  Description of Artificial Sequence: Synthetic oligonucleotide
cugaccuaaagaucaccug

SEQ ID NO: 514792 - RNA, 19 nt, Artificial Sequence
  Description of Artificial Sequence: Synthetic oligonucleotide
aucugguauucacaccuug

SEQ ID NO: 514793 - RNA, 19 nt, Artificial Sequence
  Description of Artificial Sequence: Synthetic oligonucleotide
agcguaauaugcagcaaag

SEQ ID NO: 514794 - RNA, 19 nt, Artificial Sequence
  Description of Artificial Sequence: Synthetic oligonucleotide
gaauacauucccacuacaa

SEQ ID NO: 514795 - RNA, 19 nt, Artificial Sequence
  Description of Artificial Sequence: Synthetic oligonucleotide
uucuaugucccacguuuuc

SEQ ID NO: 514796 - RNA, 19 nt, Artificial Sequence
  Description of Artificial Sequence: Synthetic oligonucleotide
ucacaccuugaguucucgg

SEQ ID NO: 514797 - RNA, 19 nt, Artificial Sequence
  Description of Artificial Sequence: Synthetic oligonucleotide
ucgcaguucucugacagcu

SEQ ID NO: 514798 - RNA, 19 nt, Artificial Sequence
  Description of Artificial Sequence: Synthetic oligonucleotide
cccacuacaauugacuccg

SEQ ID NO: 514799 - RNA, 19 nt, Artificial Sequence
  Description of Artificial Sequence: Synthetic oligonucleotide
ucguuggagaagucugacc

SEQ ID NO: 514800 - RNA, 19 nt, Artificial Sequence
  Description of Artificial Sequence: Synthetic oligonucleotide
cuguaaaaucugugcauuc

SEQ ID NO: 514801 - RNA, 19 nt, Artificial Sequence
  Description of Artificial Sequence: Synthetic oligonucleotide
ccucaugucaucguggagg

SEQ ID NO: 514802 - RNA, 19 nt, Artificial Sequence
  Description of Artificial Sequence: Synthetic oligonucleotide
uugaguucucgggguaugg

SEQ ID NO: 514803 - RNA, 19 nt, Artificial Sequence
  Description of Artificial Sequence: Synthetic oligonucleotide
gauuaucugcaccgaguca

SEQ ID NO: 514804 - RNA, 19 nt, Artificial Sequence
  Description of Artificial Sequence: Synthetic oligonucleotide
cugugcauucauuuauauc

SEQ ID NO: 514805 - RNA, 19 nt, Artificial Sequence
  Description of Artificial Sequence: Synthetic oligonucleotide
aaccgcucuucguuggaga

SEQ ID NO: 514806 - RNA, 19 nt, Artificial Sequence
  Description of Artificial Sequence: Synthetic oligonucleotide
ucuugcugguccucugccc

SEQ ID NO: 514807 - RNA, 19 nt, Artificial Sequence
  Description of Artificial Sequence: Synthetic oligonucleotide
cauucccacuacaauugac

SEQ ID NO: 514808 - RNA, 19 nt, Artificial Sequence
  Description of Artificial Sequence: Synthetic oligonucleotide
gaucucauugggguacgcc

SEQ ID NO: 514809 - RNA, 19 nt, Artificial Sequence
  Description of Artificial Sequence: Synthetic oligonucleotide
ugguaggcucggcagaaaa

SEQ ID NO: 514810 - RNA, 19 nt, Artificial Sequence
  Description of Artificial Sequence: Synthetic oligonucleotide
guucucgggguauggacug

SEQ ID NO: 514811 - RNA, 19 nt, Artificial Sequence
  Description of Artificial Sequence: Synthetic oligonucleotide
gaggauaguuaggggacag

SEQ ID NO: 514812 - RNA, 19 nt, Artificial Sequence
  Description of Artificial Sequence: Synthetic oligonucleotide
cauauucgcaguucucuga

SEQ ID NO: 514813 - RNA, 19 nt, Artificial Sequence
  Description of Artificial Sequence: Synthetic oligonucleotide
guuuauuguauggcauuug

SEQ ID NO: 514814 - RNA, 19 nt, Artificial Sequence
  Description of Artificial Sequence: Synthetic oligonucleotide
gccaguaaaccgcucuucg

SEQ ID NO: 514815 - RNA, 19 nt, Artificial Sequence
  Description of Artificial Sequence: Synthetic oligonucleotide
aaagaucaccuggaguuua

SEQ ID NO: 514816 - RNA, 19 nt, Artificial Sequence
  Description of Artificial Sequence: Synthetic oligonucleotide
uucacaccuugaguucucg

SEQ ID NO: 514817 - RNA, 19 nt, Artificial Sequence
  Description of Artificial Sequence: Synthetic oligonucleotide
aaaccgcucuucguuggag

SEQ ID NO: 514818 - RNA, 19 nt, Artificial Sequence
  Description of Artificial Sequence: Synthetic oligonucleotide
agaggccaaacacaguguu

SEQ ID NO: 514819 - RNA, 19 nt, Artificial Sequence
  Description of Artificial Sequence: Synthetic oligonucleotide
uuggggcuugaaaucuccc

SEQ ID NO: 514820 - RNA, 19 nt, Artificial Sequence
  Description of Artificial Sequence: Synthetic oligonucleotide
augggugaaguagaggcga

SEQ ID NO: 514821 - RNA, 19 nt, Artificial Sequence
  Description of Artificial Sequence: Synthetic oligonucleotide
gggacuucuaugucccacg

SEQ ID NO: 514822 - RNA, 19 nt, Artificial Sequence
  Description of Artificial Sequence: Synthetic oligonucleotide
aucccaaacccuucuggga

SEQ ID NO: 514823 - RNA, 19 nt, Artificial Sequence
  Description of Artificial Sequence: Synthetic oligonucleotide
auaucuacggcagcguaau

SEQ ID NO: 514824 - RNA, 19 nt, Artificial Sequence
  Description of Artificial Sequence: Synthetic oligonucleotide
caaucagggcagugaauac

SEQ ID NO: 514825 - RNA, 19 nt, Artificial Sequence
  Description of Artificial Sequence: Synthetic oligonucleotide
uguucggccccacccugag

SEQ ID NO: 514826 - RNA, 19 nt, Artificial Sequence
  Description of Artificial Sequence: Synthetic oligonucleotide
aucuacggcagcguaauau

SEQ ID NO: 514827 - RNA, 19 nt, Artificial Sequence
  Description of Artificial Sequence: Synthetic oligonucleotide
uugacuccgcaguuccuca

SEQ ID NO: 514828 - RNA, 19 nt, Artificial Sequence
  Description of Artificial Sequence: Synthetic oligonucleotide
uucgcaguucucugacagc

SEQ ID NO: 514829 - RNA, 19 nt, Artificial Sequence
  Description of Artificial Sequence: Synthetic oligonucleotide
uccucaugucaucguggag

SEQ ID NO: 514830 - RNA, 19 nt, Artificial Sequence
  Description of Artificial Sequence: Synthetic oligonucleotide
agucauauucgcaguucuc

SEQ ID NO: 514831 - RNA, 19 nt, Artificial Sequence
  Description of Artificial Sequence: Synthetic oligonucleotide
uauucgcaguucucugaca

SEQ ID NO: 514832 - RNA, 19 nt, Artificial Sequence
  Description of Artificial Sequence: Synthetic oligonucleotide
caucguggaggaaguauuc

SEQ ID NO: 514833 - RNA, 19 nt, Artificial Sequence
  Description of Artificial Sequence: Synthetic oligonucleotide
ucuccccaugcaugguagg

SEQ ID NO: 514834 - RNA, 19 nt, Artificial Sequence
  Description of Artificial Sequence: Synthetic oligonucleotide
aagccaguaaaccgcucuu

SEQ ID NO: 514835 - RNA, 19 nt, Artificial Sequence
  Description of Artificial Sequence: Synthetic oligonucleotide
uuccucgacgccuccugag

SEQ ID NO: 514836 - RNA, 19 nt, Artificial Sequence
  Description of Artificial Sequence: Synthetic oligonucleotide
aguagaggcgaaucccaaa

SEQ ID NO: 514837 - RNA, 19 nt, Artificial Sequence
  Description of Artificial Sequence: Synthetic oligonucleotide
uucguuggagaagucugac

SEQ ID NO: 514838 - RNA, 19 nt, Artificial Sequence
  Description of Artificial Sequence: Synthetic oligonucleotide
uggaugacagaggccaaac

SEQ ID NO: 514839 - RNA, 19 nt, Artificial Sequence
  Description of Artificial Sequence: Synthetic oligonucleotide
ugggguacgccugaggaua

SEQ ID NO: 514840 - RNA, 19 nt, Artificial Sequence
  Description of Artificial Sequence: Synthetic oligonucleotide
uccucgacgccuccugaga

SEQ ID NO: 514841 - RNA, 19 nt, Artificial Sequence
  Description of Artificial Sequence: Synthetic oligonucleotide
cagaaguaaccaccaauga

SEQ ID NO: 514842 - RNA, 19 nt, Artificial Sequence
  Description of Artificial Sequence: Synthetic oligonucleotide
accgagucauauucgcagu

SEQ ID NO: 514843 - RNA, 19 nt, Artificial Sequence
  Description of Artificial Sequence: Synthetic oligonucleotide
ucucccuuccucgacgccu

SEQ ID NO: 514844 - RNA, 19 nt, Artificial Sequence
  Description of Artificial Sequence: Synthetic oligonucleotide
cuacaauugacuccgcagu

SEQ ID NO: 514845 - RNA, 19 nt, Artificial Sequence
  Description of Artificial Sequence: Synthetic oligonucleotide
cucaugucaucguggagga

SEQ ID NO: 514846 - RNA, 19 nt, Artificial Sequence
  Description of Artificial Sequence: Synthetic oligonucleotide
ucgggguauggacugggau

SEQ ID NO: 514847 - RNA, 19 nt, Artificial Sequence
  Description of Artificial Sequence: Synthetic oligonucleotide
aguuaggggacaggaucuc

SEQ ID NO: 514848 - RNA, 19 nt, Artificial Sequence
  Description of Artificial Sequence: Synthetic oligonucleotide
aguucucgggguauggacu

SEQ ID NO: 514849 - RNA, 19 nt, Artificial Sequence
  Description of Artificial Sequence: Synthetic oligonucleotide
uucucuguucggccccacc

SEQ ID NO: 514850 - RNA, 19 nt, Artificial Sequence
  Description of Artificial Sequence: Synthetic oligonucleotide
aggauaguuaggggacagg

SEQ ID NO: 514851 - RNA, 19 nt, Artificial Sequence
  Description of Artificial Sequence: Synthetic oligonucleotide
acuccgcaguuccucaugu

SEQ ID NO: 514852 - RNA, 19 nt, Artificial Sequence
  Description of Artificial Sequence: Synthetic oligonucleotide
ucgaucucauugggguacg

SEQ ID NO: 514853 - RNA, 19 nt, Artificial Sequence
  Description of Artificial Sequence: Synthetic oligonucleotide
uccccaaucagggcaguga

SEQ ID NO: 514854 - RNA, 19 nt, Artificial Sequence
  Description of Artificial Sequence: Synthetic oligonucleotide
ccugaggauaguuagggga

SEQ ID NO: 514855 - RNA, 19 nt, Artificial Sequence
  Description of Artificial Sequence: Synthetic oligonucleotide
ccaaugaaauuauugcaga

SEQ ID NO: 514856 - RNA, 19 nt, Artificial Sequence
  Description of Artificial Sequence: Synthetic oligonucleotide
agucugaccuaaagaucac

SEQ ID NO: 514857 - RNA, 19 nt, Artificial Sequence
  Description of Artificial Sequence: Synthetic oligonucleotide
gacuccgcaguuccucaug

SEQ ID NO: 514858 - RNA, 19 nt, Artificial Sequence
  Description of Artificial Sequence: Synthetic oligonucleotide
ugggacuucuaugucccac

SEQ ID NO: 514859 - RNA, 19 nt, Artificial Sequence
  Description of Artificial Sequence: Synthetic oligonucleotide
gccuccugagauuaucugc

SEQ ID NO: 514860 - RNA, 19 nt, Artificial Sequence
  Description of Artificial Sequence: Synthetic oligonucleotide
cagaugggugaaguagagg

SEQ ID NO: 514861 - RNA, 19 nt, Artificial Sequence
  Description of Artificial Sequence: Synthetic oligonucleotide
ugaguucucgggguaugga

SEQ ID NO: 514862 - RNA, 19 nt, Artificial Sequence
  Description of Artificial Sequence: Synthetic oligonucleotide
uaaagaucaccuggaguuu

SEQ ID NO: 514863 - RNA, 19 nt, Artificial Sequence
  Description of Artificial Sequence: Synthetic oligonucleotide
auguccagaugggugaagu

SEQ ID NO: 514864 - RNA, 19 nt, Artificial Sequence
  Description of Artificial Sequence: Synthetic oligonucleotide
gggcagugaauacauuccc

SEQ ID NO: 514865 - RNA, 19 nt, Artificial Sequence
  Description of Artificial Sequence: Synthetic oligonucleotide
cuugcugguccucugccca

SEQ ID NO: 514866 - RNA, 19 nt, Artificial Sequence
  Description of Artificial Sequence: Synthetic oligonucleotide
ggauaguuaggggacagga

SEQ ID NO: 514867 - RNA, 19 nt, Artificial Sequence
  Description of Artificial Sequence: Synthetic oligonucleotide
uuaucugcaccgagucaua

SEQ ID NO: 514868 - RNA, 19 nt, Artificial Sequence
  Description of Artificial Sequence: Synthetic oligonucleotide
gucauauucgcaguucucu

SEQ ID NO: 514869 - RNA, 19 nt, Artificial Sequence
  Description of Artificial Sequence: Synthetic oligonucleotide
ggauaauuggggcuugaaa

SEQ ID NO: 514870 - RNA, 19 nt, Artificial Sequence
  Description of Artificial Sequence: Synthetic oligonucleotide
cuucguuggagaagucuga

SEQ ID NO: 514871 - RNA, 19 nt, Artificial Sequence
  Description of Artificial Sequence: Synthetic oligonucleotide
gagauuaucugcaccgagu

SEQ ID NO: 514872 - RNA, 19 nt, Artificial Sequence
  Description of Artificial Sequence: Synthetic oligonucleotide
gaguuuauuguauggcauu

SEQ ID NO: 514873 - RNA, 19 nt, Artificial Sequence
  Description of Artificial Sequence: Synthetic oligonucleotide
gauacucccggcguguucu

SEQ ID NO: 514874 - RNA, 19 nt, Artificial Sequence
  Description of Artificial Sequence: Synthetic oligonucleotide
ucucgaucucauuggggua

SEQ ID NO: 514875 - RNA, 19 nt, Artificial Sequence
  Description of Artificial Sequence: Synthetic oligonucleotide
gcucggcagaaaaugaugc

SEQ ID NO: 514876 - RNA, 19 nt, Artificial Sequence
  Description of Artificial Sequence: Synthetic oligonucleotide
gcaguuccucaugucaucg

SEQ ID NO: 514877 - RNA, 19 nt, Artificial Sequence
  Description of Artificial Sequence: Synthetic oligonucleotide
cagcguaauaugcagcaaa

SEQ ID NO: 514878 - RNA, 19 nt, Artificial Sequence
  Description of Artificial Sequence: Synthetic oligonucleotide
acucccggcguguucuuca

SEQ ID NO: 514879 - RNA, 19 nt, Artificial Sequence
  Description of Artificial Sequence: Synthetic oligonucleotide
gucugaccuaaagaucacc

SEQ ID NO: 514880 - RNA, 19 nt, Artificial Sequence
  Description of Artificial Sequence: Synthetic oligonucleotide
aucguggaggaaguauucu

SEQ ID NO: 514881 - RNA, 19 nt, Artificial Sequence
  Description of Artificial Sequence: Synthetic oligonucleotide
aggugucuuggcaaucaag

SEQ ID NO: 514882 - RNA, 19 nt, Artificial Sequence
  Description of Artificial Sequence: Synthetic oligonucleotide
aaguagaggcgaaucccaa

SEQ ID NO: 514883 - RNA, 19 nt, Artificial Sequence
  Description of Artificial Sequence: Synthetic oligonucleotide
cuugaguucucgggguaug

SEQ ID NO: 514884 - RNA, 19 nt, Artificial Sequence
  Description of Artificial Sequence: Synthetic oligonucleotide
ggugaaguagaggcgaauc

SEQ ID NO: 514885 - RNA, 19 nt, Artificial Sequence
  Description of Artificial Sequence: Synthetic oligonucleotide
aauugacuccgcaguuccu

SEQ ID NO: 514886 - RNA, 19 nt, Artificial Sequence
  Description of Artificial Sequence: Synthetic oligonucleotide
cuccccaugcaugguaggc

SEQ ID NO: 514887 - RNA, 19 nt, Artificial Sequence
  Description of Artificial Sequence: Synthetic oligonucleotide
aucuccccaugcaugguag

SEQ ID NO: 514888 - RNA, 19 nt, Artificial Sequence
  Description of Artificial Sequence: Synthetic oligonucleotide
uccccaugcaugguaggcu

SEQ ID NO: 514889 - RNA, 19 nt, Artificial Sequence
  Description of Artificial Sequence: Synthetic oligonucleotide
aauaugcagcaaagccagu

SEQ ID NO: 514890 - RNA, 19 nt, Artificial Sequence
  Description of Artificial Sequence: Synthetic oligonucleotide
ggggcuugaaaucucccca

SEQ ID NO: 514891 - RNA, 19 nt, Artificial Sequence
  Description of Artificial Sequence: Synthetic oligonucleotide
ucgacgccuccugagauua

SEQ ID NO: 514892 - RNA, 19 nt, Artificial Sequence
  Description of Artificial Sequence: Synthetic oligonucleotide
accgcucuucguuggagaa

SEQ ID NO: 514893 - RNA, 19 nt, Artificial Sequence
  Description of Artificial Sequence: Synthetic oligonucleotide
uucucgggguauggacugg

SEQ ID NO: 514894 - RNA, 19 nt, Artificial Sequence
  Description of Artificial Sequence: Synthetic oligonucleotide
uggagaagucugaccuaaa

SEQ ID NO: 514895 - RNA, 19 nt, Artificial Sequence
  Description of Artificial Sequence: Synthetic oligonucleotide
aagaucaccuggaguuuau

SEQ ID NO: 514896 - RNA, 19 nt, Artificial Sequence
  Description of Artificial Sequence: Synthetic oligonucleotide
ggugucuuggcaaucaagu

SEQ ID NO: 514897 - RNA, 19 nt, Artificial Sequence
  Description of Artificial Sequence: Synthetic oligonucleotide
gcuugaaaucuccccaauc

SEQ ID NO: 514898 - RNA, 19 nt, Artificial Sequence
  Description of Artificial Sequence: Synthetic oligonucleotide
cacuacaauugacuccgca

SEQ ID NO: 514899 - RNA, 19 nt, Artificial Sequence
  Description of Artificial Sequence: Synthetic oligonucleotide
ucauugggguacgccugag

SEQ ID NO: 514900 - RNA, 19 nt, Artificial Sequence
  Description of Artificial Sequence: Synthetic oligonucleotide
augucaucguggaggaagu

SEQ ID NO: 514901 - RNA, 19 nt, Artificial Sequence
  Description of Artificial Sequence: Synthetic oligonucleotide
aaucugguauucacaccuu

SEQ ID NO: 514902 - RNA, 19 nt, Artificial Sequence
  Description of Artificial Sequence: Synthetic oligonucleotide
cugcaagggacaucuguaa

SEQ ID NO: 514903 - RNA, 19 nt, Artificial Sequence
  Description of Artificial Sequence: Synthetic oligonucleotide
gaucagacccuccuuccau

SEQ ID NO: 514904 - RNA, 19 nt, Artificial Sequence
  Description of Artificial Sequence: Synthetic oligonucleotide
acccuucugggacuucuau

SEQ ID NO: 514905 - RNA, 19 nt, Artificial Sequence
  Description of Artificial Sequence: Synthetic oligonucleotide
caaagccaguaaaccgcuc

SEQ ID NO: 514906 - RNA, 19 nt, Artificial Sequence
  Description of Artificial Sequence: Synthetic oligonucleotide
gacgccuccugagauuauc

SEQ ID NO: 514907 - RNA, 19 nt, Artificial Sequence
  Description of Artificial Sequence: Synthetic oligonucleotide
guuggcauucuugcugguc

SEQ ID NO: 514908 - RNA, 19 nt, Artificial Sequence
  Description of Artificial Sequence: Synthetic oligonucleotide
gauaguuaggggacaggau

SEQ ID NO: 514909 - RNA, 19 nt, Artificial Sequence
  Description of Artificial Sequence: Synthetic oligonucleotide
ggcucggcagaaaaugaug

SEQ ID NO: 514910 - RNA, 19 nt, Artificial Sequence
  Description of Artificial Sequence: Synthetic oligonucleotide
gcguaauaugcagcaaagc

SEQ ID NO: 514911 - RNA, 19 nt, Artificial Sequence
  Description of Artificial Sequence: Synthetic oligonucleotide
agcgauacucccggcgugu

SEQ ID NO: 514912 - RNA, 19 nt, Artificial Sequence
  Description of Artificial Sequence: Synthetic oligonucleotide
uugcugguccucugcccac

SEQ ID NO: 514913 - RNA, 19 nt, Artificial Sequence
  Description of Artificial Sequence: Synthetic oligonucleotide
aguuggcauucuugcuggu

SEQ ID NO: 514914 - RNA, 19 nt, Artificial Sequence
  Description of Artificial Sequence: Synthetic oligonucleotide
caugcaugguaggcucggc

SEQ ID NO: 514915 - RNA, 19 nt, Artificial Sequence
  Description of Artificial Sequence: Synthetic oligonucleotide
ccccugacagcuaucaaca

SEQ ID NO: 514916 - RNA, 19 nt, Artificial Sequence
  Description of Artificial Sequence: Synthetic oligonucleotide
cagugaauacauucccacu

SEQ ID NO: 514917 - RNA, 19 nt, Artificial Sequence
  Description of Artificial Sequence: Synthetic oligonucleotide
uaucuacggcagcguaaua

SEQ ID NO: 514918 - RNA, 19 nt, Artificial Sequence
  Description of Artificial Sequence: Synthetic oligonucleotide
ugacuccgcaguuccucau

SEQ ID NO: 514919 - RNA, 19 nt, Artificial Sequence
  Description of Artificial Sequence: Synthetic oligonucleotide
cugagauuaucugcaccga

SEQ ID NO: 514920 - RNA, 19 nt, Artificial Sequence
  Description of Artificial Sequence: Synthetic oligonucleotide
gggguauggacugggauaa

SEQ ID NO: 514921 - RNA, 19 nt, Artificial Sequence
  Description of Artificial Sequence: Synthetic oligonucleotide
gagcagaaguaaccaccaa

SEQ ID NO: 514922 - RNA, 19 nt, Artificial Sequence
  Description of Artificial Sequence: Synthetic oligonucleotide
gaggcgaaucccaaacccu

SEQ ID NO: 514923 - RNA, 19 nt, Artificial Sequence
  Description of Artificial Sequence: Synthetic oligonucleotide
cagcgauacucccggcgug

SEQ ID NO: 514924 - RNA, 19 nt, Artificial Sequence
  Description of Artificial Sequence: Synthetic oligonucleotide
caguaaaccgcucuucguu

SEQ ID NO: 514925 - RNA, 19 nt, Artificial Sequence
  Description of Artificial Sequence: Synthetic oligonucleotide
caagggacaucuguaaaau

SEQ ID NO: 514926 - RNA, 19 nt, Artificial Sequence
  Description of Artificial Sequence: Synthetic oligonucleotide
aggcgaaucccaaacccuu

SEQ ID NO: 514927 - RNA, 19 nt, Artificial Sequence
  Description of Artificial Sequence: Synthetic oligonucleotide
ugcugguccucugcccaca

SEQ ID NO: 514928 - RNA, 19 nt, Artificial Sequence
  Description of Artificial Sequence: Synthetic oligonucleotide
ccaaucagggcagugaaua

SEQ ID NO: 514929 - RNA, 19 nt, Artificial Sequence
  Description of Artificial Sequence: Synthetic oligonucleotide
cacguuuucucgaucucau

SEQ ID NO: 514930 - RNA, 19 nt, Artificial Sequence
  Description of Artificial Sequence: Synthetic oligonucleotide
aggcucggcagaaaaugau

SEQ ID NO: 514931 - RNA, 19 nt, Artificial Sequence
  Description of Artificial Sequence: Synthetic oligonucleotide
ggaguuuauuguauggcau

SEQ ID NO: 514932 - RNA, 19 nt, Artificial Sequence
  Description of Artificial Sequence: Synthetic oligonucleotide
cuccgcaguuccucauguc

SEQ ID NO: 514933 - RNA, 19 nt, Artificial Sequence
  Description of Artificial Sequence: Synthetic oligonucleotide
gucaucguggaggaaguau

SEQ ID NO: 514934 - RNA, 19 nt, Artificial Sequence
  Description of Artificial Sequence: Synthetic oligonucleotide
cccaugcaugguaggcucg

SEQ ID NO: 514935 - RNA, 19 nt, Artificial Sequence
  Description of Artificial Sequence: Synthetic oligonucleotide
ugucaucguggaggaagua

SEQ ID NO: 514936 - RNA, 19 nt, Artificial Sequence
  Description of Artificial Sequence: Synthetic oligonucleotide
gucucccuuccucgacgcc

SEQ ID NO: 514937 - RNA, 19 nt, Artificial Sequence
  Description of Artificial Sequence: Synthetic oligonucleotide
gcaugguaggcucggcaga

SEQ ID NO: 514938 - RNA, 19 nt, Artificial Sequence
  Description of Artificial Sequence: Synthetic oligonucleotide
ccaugcaugguaggcucgg

SEQ ID NO: 514939 - RNA, 19 nt, Artificial Sequence
  Description of Artificial Sequence: Synthetic oligonucleotide
cuuccucgacgccuccuga

SEQ ID NO: 514940 - RNA, 19 nt, Artificial Sequence
  Description of Artificial Sequence: Synthetic oligonucleotide
ccuaaagaucaccuggagu

SEQ ID NO: 514941 - RNA, 19 nt, Artificial Sequence
  Description of Artificial Sequence: Synthetic oligonucleotide
ccccaugcaugguaggcuc

SEQ ID NO: 514942 - RNA, 19 nt, Artificial Sequence
  Description of Artificial Sequence: Synthetic oligonucleotide
gggcuugaaaucuccccaa

SEQ ID NO: 514943 - RNA, 19 nt, Artificial Sequence
  Description of Artificial Sequence: Synthetic oligonucleotide
agaucaccuggaguuuauu

SEQ ID NO: 514944 - RNA, 19 nt, Artificial Sequence
  Description of Artificial Sequence: Synthetic oligonucleotide
aacccuucugggacuucua

SEQ ID NO: 514945 - RNA, 19 nt, Artificial Sequence
  Description of Artificial Sequence: Synthetic oligonucleotide
caccuugaguucucggggu

SEQ ID NO: 514946 - RNA, 19 nt, Artificial Sequence
  Description of Artificial Sequence: Synthetic oligonucleotide
guacgccugaggauaguua

SEQ ID NO: 514947 - RNA, 19 nt, Artificial Sequence
  Description of Artificial Sequence: Synthetic oligonucleotide
cagaggccaaacacagugu

SEQ ID NO: 514948 - RNA, 19 nt, Artificial Sequence
  Description of Artificial Sequence: Synthetic oligonucleotide
cucgggguauggacuggga

SEQ ID NO: 514949 - RNA, 19 nt, Artificial Sequence
  Description of Artificial Sequence: Synthetic oligonucleotide
cuguucggccccacccuga

SEQ ID NO: 514950 - RNA, 19 nt, Artificial Sequence
  Description of Artificial Sequence: Synthetic oligonucleotide
gucccacguuuucucgauc

SEQ ID NO: 514951 - RNA, 19 nt, Artificial Sequence
  Description of Artificial Sequence: Synthetic oligonucleotide
cuucuaugucccacguuuu

SEQ ID NO: 514952 - RNA, 19 nt, Artificial Sequence
  Description of Artificial Sequence: Synthetic oligonucleotide
cccacgggcccguugggac

SEQ ID NO: 514953 - RNA, 19 nt, Artificial Sequence
  Description of Artificial Sequence: Synthetic oligonucleotide
uacucccggcguguucuuc

SEQ ID NO: 514954 - RNA, 19 nt, Artificial Sequence
  Description of Artificial Sequence: Synthetic oligonucleotide
cagacccuccuuccaucca

SEQ ID NO: 514955 - RNA, 19 nt, Artificial Sequence
  Description of Artificial Sequence: Synthetic oligonucleotide
cucuguucggccccacccu

SEQ ID NO: 514956 - RNA, 19 nt, Artificial Sequence
  Description of Artificial Sequence: Synthetic oligonucleotide
ucggccccacccugagauc

SEQ ID NO: 514957 - RNA, 19 nt, Artificial Sequence
  Description of Artificial Sequence: Synthetic oligonucleotide
caggugucuuggcaaucaa

SEQ ID NO: 514958 - RNA, 19 nt, Artificial Sequence
  Description of Artificial Sequence: Synthetic oligonucleotide
ggcgaaucccaaacccuuc

SEQ ID NO: 514959 - RNA, 19 nt, Artificial Sequence
  Description of Artificial Sequence: Synthetic oligonucleotide
gggguacgccugaggauag

SEQ ID NO: 514960 - RNA, 19 nt, Artificial Sequence
  Description of Artificial Sequence: Synthetic oligonucleotide
uccuuccauccaggugucu

SEQ ID NO: 514961 - RNA, 19 nt, Artificial Sequence
  Description of Artificial Sequence: Synthetic oligonucleotide
ggacuucuaugucccacgu

SEQ ID NO: 514962 - RNA, 19 nt, Artificial Sequence
  Description of Artificial Sequence: Synthetic oligonucleotide
cccugacagcuaucaacac

SEQ ID NO: 514963 - RNA, 19 nt, Artificial Sequence
  Description of Artificial Sequence: Synthetic oligonucleotide
auacucccggcguguucuu

SEQ ID NO: 514964 - RNA, 19 nt, Artificial Sequence
  Description of Artificial Sequence: Synthetic oligonucleotide
cacgggcccguugggacuc

SEQ ID NO: 514965 - RNA, 19 nt, Artificial Sequence
  Description of Artificial Sequence: Synthetic oligonucleotide
ccacguuuucucgaucuca

SEQ ID NO: 514966 - RNA, 19 nt, Artificial Sequence
  Description of Artificial Sequence: Synthetic oligonucleotide
cggcagcguaauaugcagc

SEQ ID NO: 514967 - RNA, 19 nt, Artificial Sequence
  Description of Artificial Sequence: Synthetic oligonucleotide
guauggcauuugaaacucu

SEQ ID NO: 514968 - RNA, 19 nt, Artificial Sequence
  Description of Artificial Sequence: Synthetic oligonucleotide
gguauggacugggauaauu

SEQ ID NO: 514969 - RNA, 19 nt, Artificial Sequence
  Description of Artificial Sequence: Synthetic oligonucleotide
gggauaauuggggcuugaa

SEQ ID NO: 514970 - RNA, 19 nt, Artificial Sequence
  Description of Artificial Sequence: Synthetic oligonucleotide
gcaccgagucauauucgca

SEQ ID NO: 514971 - RNA, 19 nt, Artificial Sequence
  Description of Artificial Sequence: Synthetic oligonucleotide
guucggccccacccugaga

SEQ ID NO: 514972 - RNA, 19 nt, Artificial Sequence
  Description of Artificial Sequence: Synthetic oligonucleotide
cccacguuuucucgaucuc

SEQ ID NO: 514973 - RNA, 19 nt, Artificial Sequence
  Description of Artificial Sequence: Synthetic oligonucleotide
cgcaguuccucaugucauc

SEQ ID NO: 514974 - RNA, 19 nt, Artificial Sequence
  Description of Artificial Sequence: Synthetic oligonucleotide
ccacuacaauugacuccgc

SEQ ID NO: 514975 - RNA, 19 nt, Artificial Sequence
  Description of Artificial Sequence: Synthetic oligonucleotide
cgccuccugagauuaucug

SEQ ID NO: 514976 - RNA, 19 nt, Artificial Sequence
  Description of Artificial Sequence: Synthetic oligonucleotide
cugguccucugcccacaga

SEQ ID NO: 514977 - RNA, 19 nt, Artificial Sequence
  Description of Artificial Sequence: Synthetic oligonucleotide
ccaguaaaccgcucuucgu

SEQ ID NO: 514978 - RNA, 19 nt, Artificial Sequence
  Description of Artificial Sequence: Synthetic oligonucleotide
ggcuugaaaucuccccaau

SEQ ID NO: 514979 - RNA, 19 nt, Artificial Sequence
  Description of Artificial Sequence: Synthetic oligonucleotide
ccgcucuucguuggagaag

SEQ ID NO: 514980 - RNA, 19 nt, Artificial Sequence
  Description of Artificial Sequence: Synthetic oligonucleotide
gcagcguaauaugcagcaa

SEQ ID NO: 514981 - RNA, 19 nt, Artificial Sequence
  Description of Artificial Sequence: Synthetic oligonucleotide
gguaggcucggcagaaaau

SEQ ID NO: 514982 - RNA, 19 nt, Artificial Sequence
  Description of Artificial Sequence: Synthetic oligonucleotide
cucgacgccuccugagauu

SEQ ID NO: 514983 - RNA, 19 nt, Artificial Sequence
  Description of Artificial Sequence: Synthetic oligonucleotide
gguacgccugaggauaguu

SEQ ID NO: 514984 - RNA, 19 nt, Artificial Sequence
  Description of Artificial Sequence: Synthetic oligonucleotide
gccccacgggcccguuggg

SEQ ID NO: 514985 - RNA, 19 nt, Artificial Sequence
  Description of Artificial Sequence: Synthetic oligonucleotide
cgauacucccggcguguuc

SEQ ID NO: 514986 - RNA, 19 nt, Artificial Sequence
  Description of Artificial Sequence: Synthetic oligonucleotide
cccaaacccuucugggacu

SEQ ID NO: 514987 - RNA, 19 nt, Artificial Sequence
  Description of Artificial Sequence: Synthetic oligonucleotide
ccgcaguuccucaugucau

SEQ ID NO: 514988 - RNA, 19 nt, Artificial Sequence
  Description of Artificial Sequence: Synthetic oligonucleotide
cgaucucauugggguacgc

SEQ ID NO: 514989 - RNA, 19 nt, Artificial Sequence
  Description of Artificial Sequence: Synthetic oligonucleotide
cucccggcguguucuucau

SEQ ID NO: 514990 - RNA, 19 nt, Artificial Sequence
  Description of Artificial Sequence: Synthetic oligonucleotide
gggugaaguagaggcgaau

SEQ ID NO: 514991 - RNA, 19 nt, Artificial Sequence
  Description of Artificial Sequence: Synthetic oligonucleotide
ccgagucauauucgcaguu

SEQ ID NO: 514992 - RNA, 19 nt, Artificial Sequence
  Description of Artificial Sequence: Synthetic oligonucleotide
ccucgacgccuccugagau

SEQ ID NO: 514993 - RNA, 19 nt, Artificial Sequence
  Description of Artificial Sequence: Synthetic oligonucleotide
acgggcccguugggacuca

SEQ ID NO: 514994 - RNA, 19 nt, Artificial Sequence
  Description of Artificial Sequence: Synthetic oligonucleotide
ccacagagucucccuuccu

SEQ ID NO: 514995 - RNA, 19 nt, Artificial Sequence
  Description of Artificial Sequence: Synthetic oligonucleotide
ccacgggcccguugggacu

SEQ ID NO: 514996 - RNA, 19 nt, Artificial Sequence
  Description of Artificial Sequence: Synthetic oligonucleotide
ggguacgccugaggauagu

SEQ ID NO: 514997 - RNA, 19 nt, Artificial Sequence
  Description of Artificial Sequence: Synthetic oligonucleotide
ggguauggacugggauaau

SEQ ID NO: 514998 - RNA, 19 nt, Artificial Sequence
  Description of Artificial Sequence: Synthetic oligonucleotide
gcgauacucccggcguguu

SEQ ID NO: 514999 - RNA, 19 nt, Artificial Sequence
  Description of Artificial Sequence: Synthetic oligonucleotide
cgacgccuccugagauuau

SEQ ID NO: 515000 - RNA, 19 nt, Artificial Sequence
  Description of Artificial Sequence: Synthetic oligonucleotide
aauacugggagauagugcc

SEQ ID NO: 515001 - RNA, 19 nt, Artificial Sequence
  Description of Artificial Sequence: Synthetic oligonucleotide
uuuaauuagacuuauaucu

SEQ ID NO: 515002 - RNA, 19 nt, Artificial Sequence
  Description of Artificial Sequence: Synthetic oligonucleotide
aauuagcagauguauagcc

SEQ ID NO: 515003 - RNA, 19 nt, Artificial Sequence
  Description of Artificial Sequence: Synthetic oligonucleotide
aaagucgugaaauacuggg

SEQ ID NO: 515004 - RNA, 19 nt, Artificial Sequence
  Description of Artificial Sequence: Synthetic oligonucleotide
uuuugcaucaaauaccggg

SEQ ID NO: 515005 - RNA, 19 nt, Artificial Sequence
  Description of Artificial Sequence: Synthetic oligonucleotide
guaucuuagaaacagcagg

SEQ ID NO: 515006 - RNA, 19 nt, Artificial Sequence
  Description of Artificial Sequence: Synthetic oligonucleotide
uuaaaguauugcaacaggc

SEQ ID NO: 515007 - RNA, 19 nt, Artificial Sequence
  Description of Artificial Sequence: Synthetic oligonucleotide
gauacagacaguuuaagga

SEQ ID NO: 515008 - RNA, 19 nt, Artificial Sequence
  Description of Artificial Sequence: Synthetic oligonucleotide
ugaucaaaguaacaaaucu

SEQ ID NO: 515009 - RNA, 19 nt, Artificial Sequence
  Description of Artificial Sequence: Synthetic oligonucleotide
cacaucuugauacagacag

SEQ ID NO: 515010 - RNA, 19 nt, Artificial Sequence
  Description of Artificial Sequence: Synthetic oligonucleotide
uaaaguauugcaacaggcc

SEQ ID NO: 515011 - RNA, 19 nt, Artificial Sequence
  Description of Artificial Sequence: Synthetic oligonucleotide
aacaaaucuacccuugagu

SEQ ID NO: 515012 - RNA, 19 nt, Artificial Sequence
  Description of Artificial Sequence: Synthetic oligonucleotide
ucauacguaagcauuuucc

SEQ ID NO: 515013 - RNA, 19 nt, Artificial Sequence
  Description of Artificial Sequence: Synthetic oligonucleotide
uuugaucaaaguaacaaau

SEQ ID NO: 515014 - RNA, 19 nt, Artificial Sequence
  Description of Artificial Sequence: Synthetic oligonucleotide
aauucaugauaccagcuga

SEQ ID NO: 515015 - RNA, 19 nt, Artificial Sequence
  Description of Artificial Sequence: Synthetic oligonucleotide
ugacagacaaugaacaucu

SEQ ID NO: 515016 - RNA, 19 nt, Artificial Sequence
  Description of Artificial Sequence: Synthetic oligonucleotide
aguagcuaaagcaagacag

SEQ ID NO: 515017 - RNA, 19 nt, Artificial Sequence
  Description of Artificial Sequence: Synthetic oligonucleotide
uuaauugcucguuccaacg

SEQ ID NO: 515018 - RNA, 19 nt, Artificial Sequence
  Description of Artificial Sequence: Synthetic oligonucleotide
uuuucaauauuccuuucca

SEQ ID NO: 515019 - RNA, 19 nt, Artificial Sequence
  Description of Artificial Sequence: Synthetic oligonucleotide
aaaaucuuguaugcuggcc

SEQ ID NO: 515020 - RNA, 19 nt, Artificial Sequence
  Description of Artificial Sequence: Synthetic oligonucleotide
cacccuuucguauugaagg

SEQ ID NO: 515021 - RNA, 19 nt, Artificial Sequence
  Description of Artificial Sequence: Synthetic oligonucleotide
guaacugccgaagauaugg

SEQ ID NO: 515022 - RNA, 19 nt, Artificial Sequence
  Description of Artificial Sequence: Synthetic oligonucleotide
caaguuucauacauugucg

SEQ ID NO: 515023 - RNA, 19 nt, Artificial Sequence
  Description of Artificial Sequence: Synthetic oligonucleotide
auaccaauaagagagaaga

SEQ ID NO: 515024 - RNA, 19 nt, Artificial Sequence
  Description of Artificial Sequence: Synthetic oligonucleotide
ucauacaucguaacccacg

SEQ ID NO: 515025 - RNA, 19 nt, Artificial Sequence
  Description of Artificial Sequence: Synthetic oligonucleotide
uccuuuugcaucaaauacc

SEQ ID NO: 515026 - RNA, 19 nt, Artificial Sequence
  Description of Artificial Sequence: Synthetic oligonucleotide
ugucuauacaaaacaagca

SEQ ID NO: 515027 - RNA, 19 nt, Artificial Sequence
  Description of Artificial Sequence: Synthetic oligonucleotide
auaaacaacucuagcaccc

SEQ ID NO: 515028 - RNA, 19 nt, Artificial Sequence
  Description of Artificial Sequence: Synthetic oligonucleotide
aauuuguacauuguaagaa

SEQ ID NO: 515029 - RNA, 19 nt, Artificial Sequence
  Description of Artificial Sequence: Synthetic oligonucleotide
caguuuaaggaauacacac

SEQ ID NO: 515030 - RNA, 19 nt, Artificial Sequence
  Description of Artificial Sequence: Synthetic oligonucleotide
uacguaagcauuuuccuug

SEQ ID NO: 515031 - RNA, 19 nt, Artificial Sequence
  Description of Artificial Sequence: Synthetic oligonucleotide
aggagauauaccaacaacg

SEQ ID NO: 515032 - RNA, 19 nt, Artificial Sequence
  Description of Artificial Sequence: Synthetic oligonucleotide
uuacauacugucaguauca

SEQ ID NO: 515033 - RNA, 19 nt, Artificial Sequence
  Description of Artificial Sequence: Synthetic oligonucleotide
uguacauacuguuuaauua

SEQ ID NO: 515034 - RNA, 19 nt, Artificial Sequence
  Description of Artificial Sequence: Synthetic oligonucleotide
ugguaauucaugauaccag

SEQ ID NO: 515035 - RNA, 19 nt, Artificial Sequence
  Description of Artificial Sequence: Synthetic oligonucleotide
ugagucaagcaaaaccuag

SEQ ID NO: 515036 - RNA, 19 nt, Artificial Sequence
  Description of Artificial Sequence: Synthetic oligonucleotide
cauuuacuaguuuaauugc

SEQ ID NO: 515037 - RNA, 19 nt, Artificial Sequence
  Description of Artificial Sequence: Synthetic oligonucleotide
agauauaccaacaacguga

SEQ ID NO: 515038 - RNA, 19 nt, Artificial Sequence
  Description of Artificial Sequence: Synthetic oligonucleotide
auauccuaaauacacauuu

SEQ ID NO: 515039 - RNA, 19 nt, Artificial Sequence
  Description of Artificial Sequence: Synthetic oligonucleotide
aucucuaagcaacacaucu

SEQ ID NO: 515040 - RNA, 19 nt, Artificial Sequence
  Description of Artificial Sequence: Synthetic oligonucleotide
uacauuguaagaagugagc

SEQ ID NO: 515041 - RNA, 19 nt, Artificial Sequence
  Description of Artificial Sequence: Synthetic oligonucleotide
uauaguagguggcauucag

SEQ ID NO: 515042 - RNA, 19 nt, Artificial Sequence
  Description of Artificial Sequence: Synthetic oligonucleotide
guuucauacaucguaaccc

SEQ ID NO: 515043 - RNA, 19 nt, Artificial Sequence
  Description of Artificial Sequence: Synthetic oligonucleotide
agucgugaaauacugggag

SEQ ID NO: 515044 - RNA, 19 nt, Artificial Sequence
  Description of Artificial Sequence: Synthetic oligonucleotide
gagaaugaggaauuuguac

SEQ ID NO: 515045 - RNA, 19 nt, Artificial Sequence
  Description of Artificial Sequence: Synthetic oligonucleotide
auauuuagaagcaauagaa

SEQ ID NO: 515046 - RNA, 19 nt, Artificial Sequence
  Description of Artificial Sequence: Synthetic oligonucleotide
ugcuuguaagccuucauug

SEQ ID NO: 515047 - RNA, 19 nt, Artificial Sequence
  Description of Artificial Sequence: Synthetic oligonucleotide
agauuaacuguacaguaca

SEQ ID NO: 515048 - RNA, 19 nt, Artificial Sequence
  Description of Artificial Sequence: Synthetic oligonucleotide
uuugcaucaaauaccgggu

SEQ ID NO: 515049 - RNA, 19 nt, Artificial Sequence
  Description of Artificial Sequence: Synthetic oligonucleotide
ucaccaugaaucuaagucu

SEQ ID NO: 515050 - RNA, 19 nt, Artificial Sequence
  Description of Artificial Sequence: Synthetic oligonucleotide
uuagacuuauaucucuugu

SEQ ID NO: 515051 - RNA, 19 nt, Artificial Sequence
  Description of Artificial Sequence: Synthetic oligonucleotide
ggaauuuguacauuguaag

SEQ ID NO: 515052 - RNA, 19 nt, Artificial Sequence
  Description of Artificial Sequence: Synthetic oligonucleotide
uaauuagacuuauaucucu

SEQ ID NO: 515053 - RNA, 19 nt, Artificial Sequence
  Description of Artificial Sequence: Synthetic oligonucleotide
ucugaugggcgucuuauca

SEQ ID NO: 515054 - RNA, 19 nt, Artificial Sequence
  Description of Artificial Sequence: Synthetic oligonucleotide
cagauaucaacauguauac

SEQ ID NO: 515055 - RNA, 19 nt, Artificial Sequence
  Description of Artificial Sequence: Synthetic oligonucleotide
gacugcuacaugcugaggc

SEQ ID NO: 515056 - RNA, 19 nt, Artificial Sequence
  Description of Artificial Sequence: Synthetic oligonucleotide
ucaccauaaacaacucuag

SEQ ID NO: 515057 - RNA, 19 nt, Artificial Sequence
  Description of Artificial Sequence: Synthetic oligonucleotide
acuugauggaaguugaaaa

SEQ ID NO: 515058 - RNA, 19 nt, Artificial Sequence
  Description of Artificial Sequence: Synthetic oligonucleotide
acucgugagaguuugaaaa

SEQ ID NO: 515059 - RNA, 19 nt, Artificial Sequence
  Description of Artificial Sequence: Synthetic oligonucleotide
uguaagccuucauugacug

SEQ ID NO: 515060 - RNA, 19 nt, Artificial Sequence
  Description of Artificial Sequence: Synthetic oligonucleotide
gauaucaacauguauacuu

SEQ ID NO: 515061 - RNA, 19 nt, Artificial Sequence
  Description of Artificial Sequence: Synthetic oligonucleotide
uuauaaagugaguggauau

SEQ ID NO: 515062 - RNA, 19 nt, Artificial Sequence
  Description of Artificial Sequence: Synthetic oligonucleotide
aauaccaauaagagagaag

SEQ ID NO: 515063 - RNA, 19 nt, Artificial Sequence
  Description of Artificial Sequence: Synthetic oligonucleotide
ucuagcaccccauuucuug

SEQ ID NO: 515064 - RNA, 19 nt, Artificial Sequence
  Description of Artificial Sequence: Synthetic oligonucleotide
cuagaggagauauaccaac

SEQ ID NO: 515065 - RNA, 19 nt, Artificial Sequence
  Description of Artificial Sequence: Synthetic oligonucleotide
uauccuaaauacacauuug

SEQ ID NO: 515066 - RNA, 19 nt, Artificial Sequence
  Description of Artificial Sequence: Synthetic oligonucleotide
uguaaguucaagagcugga

SEQ ID NO: 515067 - RNA, 19 nt, Artificial Sequence
  Description of Artificial Sequence: Synthetic oligonucleotide
aacauauggcacucguucu

SEQ ID NO: 515068 - RNA, 19 nt, Artificial Sequence
  Description of Artificial Sequence: Synthetic oligonucleotide
gagauagugccuuuccgcc

SEQ ID NO: 515069 - RNA, 19 nt, Artificial Sequence
  Description of Artificial Sequence: Synthetic oligonucleotide
aaaucuacccuugagucaa

SEQ ID NO: 515070 - RNA, 19 nt, Artificial Sequence
  Description of Artificial Sequence: Synthetic oligonucleotide
uucgacauuugcuacagau

SEQ ID NO: 515071 - RNA, 19 nt, Artificial Sequence
  Description of Artificial Sequence: Synthetic oligonucleotide
aguuauacaaauauccuaa

SEQ ID NO: 515072 - RNA, 19 nt, Artificial Sequence
  Description of Artificial Sequence: Synthetic oligonucleotide
aguuugaucaaaguaacaa

SEQ ID NO: 515073 - RNA, 19 nt, Artificial Sequence
  Description of Artificial Sequence: Synthetic oligonucleotide
uaguuuaauugcucguucc

SEQ ID NO: 515074 - RNA, 19 nt, Artificial Sequence
  Description of Artificial Sequence: Synthetic oligonucleotide
uaagcauucgugacagggc

SEQ ID NO: 515075 - RNA, 19 nt, Artificial Sequence
  Description of Artificial Sequence: Synthetic oligonucleotide
guuacauacugucaguauc

SEQ ID NO: 515076 - RNA, 19 nt, Artificial Sequence
  Description of Artificial Sequence: Synthetic oligonucleotide
gauaucucuaagcaacaca

SEQ ID NO: 515077 - RNA, 19 nt, Artificial Sequence
  Description of Artificial Sequence: Synthetic oligonucleotide
augacagacaaugaacauc

SEQ ID NO: 515078 - RNA, 19 nt, Artificial Sequence
  Description of Artificial Sequence: Synthetic oligonucleotide
ugcaucaaauaccgggucc

SEQ ID NO: 515079 - RNA, 19 nt, Artificial Sequence
  Description of Artificial Sequence: Synthetic oligonucleotide
ugaaacacaugggauaugu

SEQ ID NO: 515080 - RNA, 19 nt, Artificial Sequence
  Description of Artificial Sequence: Synthetic oligonucleotide
aacaagguuaaaaggugag

SEQ ID NO: 515081 - RNA, 19 nt, Artificial Sequence
  Description of Artificial Sequence: Synthetic oligonucleotide
auacagacaguuuaaggaa

SEQ ID NO: 515082 - RNA, 19 nt, Artificial Sequence
  Description of Artificial Sequence: Synthetic oligonucleotide
ugggcgucuuaucagcugg

SEQ ID NO: 515083 - RNA, 19 nt, Artificial Sequence
  Description of Artificial Sequence: Synthetic oligonucleotide
uaccggguccuucugaucc

SEQ ID NO: 515084 - RNA, 19 nt, Artificial Sequence
  Description of Artificial Sequence: Synthetic oligonucleotide
cucuaagcaacacaucuug

SEQ ID NO: 515085 - RNA, 19 nt, Artificial Sequence
  Description of Artificial Sequence: Synthetic oligonucleotide
cacaguuugaucaaaguaa

SEQ ID NO: 515086 - RNA, 19 nt, Artificial Sequence
  Description of Artificial Sequence: Synthetic oligonucleotide
aacgugaaaaucauuguau

SEQ ID NO: 515087 - RNA, 19 nt, Artificial Sequence
  Description of Artificial Sequence: Synthetic oligonucleotide
gauaaggggcaguccaggg

SEQ ID NO: 515088 - RNA, 19 nt, Artificial Sequence
  Description of Artificial Sequence: Synthetic oligonucleotide
ugcauuaagcauucgugac

SEQ ID NO: 515089 - RNA, 19 nt, Artificial Sequence
  Description of Artificial Sequence: Synthetic oligonucleotide
aucguaacccacguuauuc

SEQ ID NO: 515090 - RNA, 19 nt, Artificial Sequence
  Description of Artificial Sequence: Synthetic oligonucleotide
agauagugccuuuccgccc

SEQ ID NO: 515091 - RNA, 19 nt, Artificial Sequence
  Description of Artificial Sequence: Synthetic oligonucleotide
ugaacaaugcuaucgccaa

SEQ ID NO: 515092 - RNA, 19 nt, Artificial Sequence
  Description of Artificial Sequence: Synthetic oligonucleotide
ugggauaugucggucaaag

SEQ ID NO: 515093 - RNA, 19 nt, Artificial Sequence
  Description of Artificial Sequence: Synthetic oligonucleotide
auaaacuggagcaaauuca

SEQ ID NO: 515094 - RNA, 19 nt, Artificial Sequence
  Description of Artificial Sequence: Synthetic oligonucleotide
uuagaaacagcagggcaag

SEQ ID NO: 515095 - RNA, 19 nt, Artificial Sequence
  Description of Artificial Sequence: Synthetic oligonucleotide
auuuguguucaagggaugg

SEQ ID NO: 515096 - RNA, 19 nt, Artificial Sequence
  Description of Artificial Sequence: Synthetic oligonucleotide
auaaagugaguggauaucu

SEQ ID NO: 515097 - RNA, 19 nt, Artificial Sequence
  Description of Artificial Sequence: Synthetic oligonucleotide
agaagugagcuauucagau

SEQ ID NO: 515098 - RNA, 19 nt, Artificial Sequence
  Description of Artificial Sequence: Synthetic oligonucleotide
uaagcaacacaucuugaua

SEQ ID NO: 515099 - RNA, 19 nt, Artificial Sequence
  Description of Artificial Sequence: Synthetic oligonucleotide
ccaauaagagagaagauuc

SEQ ID NO: 515100 - RNA, 19 nt, Artificial Sequence
  Description of Artificial Sequence: Synthetic oligonucleotide
aauaagagagaagauucuu

SEQ ID NO: 515101 - RNA, 19 nt, Artificial Sequence
  Description of Artificial Sequence: Synthetic oligonucleotide
acauauggcacucguucuc

SEQ ID NO: 515102 - RNA, 19 nt, Artificial Sequence
  Description of Artificial Sequence: Synthetic oligonucleotide
guuucauacauugucgcug

SEQ ID NO: 515103 - RNA, 19 nt, Artificial Sequence
  Description of Artificial Sequence: Synthetic oligonucleotide
aggcccacagguuuguaac

SEQ ID NO: 515104 - RNA, 19 nt, Artificial Sequence
  Description of Artificial Sequence: Synthetic oligonucleotide
uagcugacgugcauuaagc

SEQ ID NO: 515105 - RNA, 19 nt, Artificial Sequence
  Description of Artificial Sequence: Synthetic oligonucleotide
ucaguuagcagaagucuuc

SEQ ID NO: 515106 - RNA, 19 nt, Artificial Sequence
  Description of Artificial Sequence: Synthetic oligonucleotide
agacuuauaucucuuguuu

SEQ ID NO: 515107 - RNA, 19 nt, Artificial Sequence
  Description of Artificial Sequence: Synthetic oligonucleotide
aaccuagaggagauauacc

SEQ ID NO: 515108 - RNA, 19 nt, Artificial Sequence
  Description of Artificial Sequence: Synthetic oligonucleotide
aacugccgaagauauggug

SEQ ID NO: 515109 - RNA, 19 nt, Artificial Sequence
  Description of Artificial Sequence: Synthetic oligonucleotide
aguuuaauugcucguucca

SEQ ID NO: 515110 - RNA, 19 nt, Artificial Sequence
  Description of Artificial Sequence: Synthetic oligonucleotide
aaacaagguuaaaagguga

SEQ ID NO: 515111 - RNA, 19 nt, Artificial Sequence
  Description of Artificial Sequence: Synthetic oligonucleotide
gaugguacauaaacuggag

SEQ ID NO: 515112 - RNA, 19 nt, Artificial Sequence
  Description of Artificial Sequence: Synthetic oligonucleotide
aauaccggguccuucugau

SEQ ID NO: 515113 - RNA, 19 nt, Artificial Sequence
  Description of Artificial Sequence: Synthetic oligonucleotide
augucggucaaaggaaccc

SEQ ID NO: 515114 - RNA, 19 nt, Artificial Sequence
  Description of Artificial Sequence: Synthetic oligonucleotide
uuaguccuagcugacgugc

SEQ ID NO: 515115 - RNA, 19 nt, Artificial Sequence
  Description of Artificial Sequence: Synthetic oligonucleotide
agaacacucaaguaucuua

SEQ ID NO: 515116 - RNA, 19 nt, Artificial Sequence
  Description of Artificial Sequence: Synthetic oligonucleotide
caaguaucuuagaaacagc

SEQ ID NO: 515117 - RNA, 19 nt, Artificial Sequence
  Description of Artificial Sequence: Synthetic oligonucleotide
uucucccagagaaauuagc

SEQ ID NO: 515118 - RNA, 19 nt, Artificial Sequence
  Description of Artificial Sequence: Synthetic oligonucleotide
aagauauggugccuuggau

SEQ ID NO: 515119 - RNA, 19 nt, Artificial Sequence
  Description of Artificial Sequence: Synthetic oligonucleotide
ggucccauaaauaauaaca

SEQ ID NO: 515120 - RNA, 19 nt, Artificial Sequence
  Description of Artificial Sequence: Synthetic oligonucleotide
ucucuguuuacucgugaga

SEQ ID NO: 515121 - RNA, 19 nt, Artificial Sequence
  Description of Artificial Sequence: Synthetic oligonucleotide
cacaaugccccguuaguag

SEQ ID NO: 515122 - RNA, 19 nt, Artificial Sequence
  Description of Artificial Sequence: Synthetic oligonucleotide
aauuauaaagugaguggau

SEQ ID NO: 515123 - RNA, 19 nt, Artificial Sequence
  Description of Artificial Sequence: Synthetic oligonucleotide
uaauugcucguuccaacgu

SEQ ID NO: 515124 - RNA, 19 nt, Artificial Sequence
  Description of Artificial Sequence: Synthetic oligonucleotide
uauaaagugaguggauauc

SEQ ID NO: 515125 - RNA, 19 nt, Artificial Sequence
  Description of Artificial Sequence: Synthetic oligonucleotide
cucgugagaguuugaaaag

SEQ ID NO: 515126 - RNA, 19 nt, Artificial Sequence
  Description of Artificial Sequence: Synthetic oligonucleotide
uacccuugagucaagcaaa

SEQ ID NO: 515127 - RNA, 19 nt, Artificial Sequence
  Description of Artificial Sequence: Synthetic oligonucleotide
agguuuucaauauuccuuu

SEQ ID NO: 515128 - RNA, 19 nt, Artificial Sequence
  Description of Artificial Sequence: Synthetic oligonucleotide
ucggauuucuugguugagg

SEQ ID NO: 515129 - RNA, 19 nt, Artificial Sequence
  Description of Artificial Sequence: Synthetic oligonucleotide
aaauaccggguccuucuga

SEQ ID NO: 515130 - RNA, 19 nt, Artificial Sequence
  Description of Artificial Sequence: Synthetic oligonucleotide
aguuucauacauugucgcu

SEQ ID NO: 515131 - RNA, 19 nt, Artificial Sequence
  Description of Artificial Sequence: Synthetic oligonucleotide
ucugacuguuucuauuccu

SEQ ID NO: 515132 - RNA, 19 nt, Artificial Sequence
  Description of Artificial Sequence: Synthetic oligonucleotide
aauugcucguuccaacguu

SEQ ID NO: 515133 - RNA, 19 nt, Artificial Sequence
  Description of Artificial Sequence: Synthetic oligonucleotide
ucgccaaccucaaugcaug

SEQ ID NO: 515134 - RNA, 19 nt, Artificial Sequence
  Description of Artificial Sequence: Synthetic oligonucleotide
uacuaguuuaauugcucgu

SEQ ID NO: 515135 - RNA, 19 nt, Artificial Sequence
  Description of Artificial Sequence: Synthetic oligonucleotide
agucuuuagaaaagaaugu

SEQ ID NO: 515136 - RNA, 19 nt, Artificial Sequence
  Description of Artificial Sequence: Synthetic oligonucleotide
aaacaacucuagcacccca

SEQ ID NO: 515137 - RNA, 19 nt, Artificial Sequence
  Description of Artificial Sequence: Synthetic oligonucleotide
uguaagaagugagcuauuc

SEQ ID NO: 515138 - RNA, 19 nt, Artificial Sequence
  Description of Artificial Sequence: Synthetic oligonucleotide
auuauaaagugaguggaua

SEQ ID NO: 515139 - RNA, 19 nt, Artificial Sequence
  Description of Artificial Sequence: Synthetic oligonucleotide
ugcuaucagcuuuaguccu

SEQ ID NO: 515140 - RNA, 19 nt, Artificial Sequence
  Description of Artificial Sequence: Synthetic oligonucleotide
uuuaguccuagcugacgug

SEQ ID NO: 515141 - RNA, 19 nt, Artificial Sequence
  Description of Artificial Sequence: Synthetic oligonucleotide
guuccaacguuucucuggc

SEQ ID NO: 515142 - RNA, 19 nt, Artificial Sequence
  Description of Artificial Sequence: Synthetic oligonucleotide
uugcagucaaaauuauaaa

SEQ ID NO: 515143 - RNA, 19 nt, Artificial Sequence
  Description of Artificial Sequence: Synthetic oligonucleotide
cuaguuuaauugcucguuc

SEQ ID NO: 515144 - RNA, 19 nt, Artificial Sequence
  Description of Artificial Sequence: Synthetic oligonucleotide
uacauaaacuggagcaaau

SEQ ID NO: 515145 - RNA, 19 nt, Artificial Sequence
  Description of Artificial Sequence: Synthetic oligonucleotide
ugauccaggguuucauaca

SEQ ID NO: 515146 - RNA, 19 nt, Artificial Sequence
  Description of Artificial Sequence: Synthetic oligonucleotide
uugaaaaguacugggcagu

SEQ ID NO: 515147 - RNA, 19 nt, Artificial Sequence
  Description of Artificial Sequence: Synthetic oligonucleotide
ugucggucaaaggaacccg

SEQ ID NO: 515148 - RNA, 19 nt, Artificial Sequence
  Description of Artificial Sequence: Synthetic oligonucleotide
uuauaucucuuguuucaaa

SEQ ID NO: 515149 - RNA, 19 nt, Artificial Sequence
  Description of Artificial Sequence: Synthetic oligonucleotide
uuguaugcuggccuuuccu

SEQ ID NO: 515150 - RNA, 19 nt, Artificial Sequence
  Description of Artificial Sequence: Synthetic oligonucleotide
acuauuugcacaguuugau

SEQ ID NO: 515151 - RNA, 19 nt, Artificial Sequence
  Description of Artificial Sequence: Synthetic oligonucleotide
cauacauugucgcuguaca

SEQ ID NO: 515152 - RNA, 19 nt, Artificial Sequence
  Description of Artificial Sequence: Synthetic oligonucleotide
accaauaagagagaagauu

SEQ ID NO: 515153 - RNA, 19 nt, Artificial Sequence
  Description of Artificial Sequence: Synthetic oligonucleotide
aguggauaucucuaagcaa

SEQ ID NO: 515154 - RNA, 19 nt, Artificial Sequence
  Description of Artificial Sequence: Synthetic oligonucleotide
uguguucaagggauggcaa

SEQ ID NO: 515155 - RNA, 19 nt, Artificial Sequence
  Description of Artificial Sequence: Synthetic oligonucleotide
ggaaguaaacaugaucugc

SEQ ID NO: 515156 - RNA, 19 nt, Artificial Sequence
  Description of Artificial Sequence: Synthetic oligonucleotide
uuaagagguuuucaauauu

SEQ ID NO: 515157 - RNA, 19 nt, Artificial Sequence
  Description of Artificial Sequence: Synthetic oligonucleotide
aaugcuacacaugguacua

SEQ ID NO: 515158 - RNA, 19 nt, Artificial Sequence
  Description of Artificial Sequence: Synthetic oligonucleotide
agcuuuagagaacacucaa

SEQ ID NO: 515159 - RNA, 19 nt, Artificial Sequence
  Description of Artificial Sequence: Synthetic oligonucleotide
agucggauccugcaggacu

SEQ ID NO: 515160 - RNA, 19 nt, Artificial Sequence
  Description of Artificial Sequence: Synthetic oligonucleotide
uagacuuauaucucuuguu

SEQ ID NO: 515161 - RNA, 19 nt, Artificial Sequence
  Description of Artificial Sequence: Synthetic oligonucleotide
ucauacauugucgcuguac

SEQ ID NO: 515162 - RNA, 19 nt, Artificial Sequence
  Description of Artificial Sequence: Synthetic oligonucleotide
guuuacucgugagaguuug

SEQ ID NO: 515163 - RNA, 19 nt, Artificial Sequence
  Description of Artificial Sequence: Synthetic oligonucleotide
gagugaaacacaugggaua

SEQ ID NO: 515164 - RNA, 19 nt, Artificial Sequence
  Description of Artificial Sequence: Synthetic oligonucleotide
uugguaucauuuacuaguu

SEQ ID NO: 515165 - RNA, 19 nt, Artificial Sequence
  Description of Artificial Sequence: Synthetic oligonucleotide
guaagaagugagcuauuca

SEQ ID NO: 515166 - RNA, 19 nt, Artificial Sequence
  Description of Artificial Sequence: Synthetic oligonucleotide
auaccagcugaagacauca

SEQ ID NO: 515167 - RNA, 19 nt, Artificial Sequence
  Description of Artificial Sequence: Synthetic oligonucleotide
ucgcuguacauacuguuua

SEQ ID NO: 515168 - RNA, 19 nt, Artificial Sequence
  Description of Artificial Sequence: Synthetic oligonucleotide
gaucaaaguaacaaaucua

SEQ ID NO: 515169 - RNA, 19 nt, Artificial Sequence
  Description of Artificial Sequence: Synthetic oligonucleotide
ucgacauuugcuacagaua

SEQ ID NO: 515170 - RNA, 19 nt, Artificial Sequence
  Description of Artificial Sequence: Synthetic oligonucleotide
aauuagacuuauaucucuu

SEQ ID NO: 515171 - RNA, 19 nt, Artificial Sequence
  Description of Artificial Sequence: Synthetic oligonucleotide
cuguuucuauuccuuuugc

SEQ ID NO: 515172 - RNA, 19 nt, Artificial Sequence
  Description of Artificial Sequence: Synthetic oligonucleotide
ucguaacccacguuauucu

SEQ ID NO: 515173 - RNA, 19 nt, Artificial Sequence
  Description of Artificial Sequence: Synthetic oligonucleotide
acgugcauuaagcauucgu

SEQ ID NO: 515174 - RNA, 19 nt, Artificial Sequence
  Description of Artificial Sequence: Synthetic oligonucleotide
gagagaaugaggaauuugu

SEQ ID NO: 515175 - RNA, 19 nt, Artificial Sequence
  Description of Artificial Sequence: Synthetic oligonucleotide
aaggguggaagaauuugcu

SEQ ID NO: 515176 - RNA, 19 nt, Artificial Sequence
  Description of Artificial Sequence: Synthetic oligonucleotide
ucuguuuacucgugagagu

SEQ ID NO: 515177 - RNA, 19 nt, Artificial Sequence
  Description of Artificial Sequence: Synthetic oligonucleotide
agugaguggauaucucuaa

SEQ ID NO: 515178 - RNA, 19 nt, Artificial Sequence
  Description of Artificial Sequence: Synthetic oligonucleotide
uucauacaucguaacccac

SEQ ID NO: 515179 - RNA, 19 nt, Artificial Sequence
  Description of Artificial Sequence: Synthetic oligonucleotide
ucucuaagcaacacaucuu

SEQ ID NO: 515180 - RNA, 19 nt, Artificial Sequence
  Description of Artificial Sequence: Synthetic oligonucleotide
uaaacaacucuagcacccc

SEQ ID NO: 515181 - RNA, 19 nt, Artificial Sequence
  Description of Artificial Sequence: Synthetic oligonucleotide
uugagucaagcaaaaccua

SEQ ID NO: 515182 - RNA, 19 nt, Artificial Sequence
  Description of Artificial Sequence: Synthetic oligonucleotide
ucgugaaauacugggagau

SEQ ID NO: 515183 - RNA, 19 nt, Artificial Sequence
  Description of Artificial Sequence: Synthetic oligonucleotide
auuagcagauguauagcca

SEQ ID NO: 515184 - RNA, 19 nt, Artificial Sequence
  Description of Artificial Sequence: Synthetic oligonucleotide
ucuugguagaacacccuuu

SEQ ID NO: 515185 - RNA, 19 nt, Artificial Sequence
  Description of Artificial Sequence: Synthetic oligonucleotide
aacucgaggcucagagcgc

SEQ ID NO: 515186 - RNA, 19 nt, Artificial Sequence
  Description of Artificial Sequence: Synthetic oligonucleotide
auacguaagcauuuuccuu

SEQ ID NO: 515187 - RNA, 19 nt, Artificial Sequence
  Description of Artificial Sequence: Synthetic oligonucleotide
acaguuuaaggaauacaca

SEQ ID NO: 515188 - RNA, 19 nt, Artificial Sequence
  Description of Artificial Sequence: Synthetic oligonucleotide
ucgugagaguuugaaaagu

SEQ ID NO: 515189 - RNA, 19 nt, Artificial Sequence
  Description of Artificial Sequence: Synthetic oligonucleotide
gauauaccaacaacgugaa

SEQ ID NO: 515190 - RNA, 19 nt, Artificial Sequence
  Description of Artificial Sequence: Synthetic oligonucleotide
ugacgugcauuaagcauuc

SEQ ID NO: 515191 - RNA, 19 nt, Artificial Sequence
  Description of Artificial Sequence: Synthetic oligonucleotide
aacacccuuucguauugaa

SEQ ID NO: 515192 - RNA, 19 nt, Artificial Sequence
  Description of Artificial Sequence: Synthetic oligonucleotide
uagaacacccuuucguauu

SEQ ID NO: 515193 - RNA, 19 nt, Artificial Sequence
  Description of Artificial Sequence: Synthetic oligonucleotide
acuguuuaauuagacuuau

SEQ ID NO: 515194 - RNA, 19 nt, Artificial Sequence
  Description of Artificial Sequence: Synthetic oligonucleotide
aagucgugaaauacuggga

SEQ ID NO: 515195 - RNA, 19 nt, Artificial Sequence
  Description of Artificial Sequence: Synthetic oligonucleotide
ugggcaguugagugaaaca

SEQ ID NO: 515196 - RNA, 19 nt, Artificial Sequence
  Description of Artificial Sequence: Synthetic oligonucleotide
agauaccauguugagucag

SEQ ID NO: 515197 - RNA, 19 nt, Artificial Sequence
  Description of Artificial Sequence: Synthetic oligonucleotide
uguaugcuggccuuuccuu

SEQ ID NO: 515198 - RNA, 19 nt, Artificial Sequence
  Description of Artificial Sequence: Synthetic oligonucleotide
uuuacucgugagaguuuga

SEQ ID NO: 515199 - RNA, 19 nt, Artificial Sequence
  Description of Artificial Sequence: Synthetic oligonucleotide
cagauguauagccaaaugu

SEQ ID NO: 515200 - RNA, 19 nt, Artificial Sequence
  Description of Artificial Sequence: Synthetic oligonucleotide
acuaguuuaauugcucguu

SEQ ID NO: 515201 - RNA, 19 nt, Artificial Sequence
  Description of Artificial Sequence: Synthetic oligonucleotide
caaaucuacccuugaguca

SEQ ID NO: 515202 - RNA, 19 nt, Artificial Sequence
  Description of Artificial Sequence: Synthetic oligonucleotide
guuugcgcuccaauucucg

SEQ ID NO: 515203 - RNA, 19 nt, Artificial Sequence
  Description of Artificial Sequence: Synthetic oligonucleotide
ugguacuauuugcacaguu

SEQ ID NO: 515204 - RNA, 19 nt, Artificial Sequence
  Description of Artificial Sequence: Synthetic oligonucleotide
uuacucgugagaguuugaa

SEQ ID NO: 515205 - RNA, 19 nt, Artificial Sequence
  Description of Artificial Sequence: Synthetic oligonucleotide
caugcugaggcuggcuucg

SEQ ID NO: 515206 - RNA, 19 nt, Artificial Sequence
  Description of Artificial Sequence: Synthetic oligonucleotide
agcuaaagcaagacagcag

SEQ ID NO: 515207 - RNA, 19 nt, Artificial Sequence
  Description of Artificial Sequence: Synthetic oligonucleotide
aaugaggaauuuguacauu

SEQ ID NO: 515208 - RNA, 19 nt, Artificial Sequence
  Description of Artificial Sequence: Synthetic oligonucleotide
cuacccuugagucaagcaa

SEQ ID NO: 515209 - RNA, 19 nt, Artificial Sequence
  Description of Artificial Sequence: Synthetic oligonucleotide
acaagguuaaaaggugaga

SEQ ID NO: 515210 - RNA, 19 nt, Artificial Sequence
  Description of Artificial Sequence: Synthetic oligonucleotide
uucgugacagggcucuguc

SEQ ID NO: 515211 - RNA, 19 nt, Artificial Sequence
  Description of Artificial Sequence: Synthetic oligonucleotide
uaacugccgaagauauggu

SEQ ID NO: 515212 - RNA, 19 nt, Artificial Sequence
  Description of Artificial Sequence: Synthetic oligonucleotide
auugacugcuucaccauga

SEQ ID NO: 515213 - RNA, 19 nt, Artificial Sequence
  Description of Artificial Sequence: Synthetic oligonucleotide
uacucgugagaguuugaaa

SEQ ID NO: 515214 - RNA, 19 nt, Artificial Sequence
  Description of Artificial Sequence: Synthetic oligonucleotide
cuuguaugcuggccuuucc

SEQ ID NO: 515215 - RNA, 19 nt, Artificial Sequence
  Description of Artificial Sequence: Synthetic oligonucleotide
agcugacgugcauuaagca

SEQ ID NO: 515216 - RNA, 19 nt, Artificial Sequence
  Description of Artificial Sequence: Synthetic oligonucleotide
aggaguugagugguaaaca

SEQ ID NO: 515217 - RNA, 19 nt, Artificial Sequence
  Description of Artificial Sequence: Synthetic oligonucleotide
guacaguuccugcauaucu

SEQ ID NO: 515218 - RNA, 19 nt, Artificial Sequence
  Description of Artificial Sequence: Synthetic oligonucleotide
gggagauagugccuuuccg

SEQ ID NO: 515219 - RNA, 19 nt, Artificial Sequence
  Description of Artificial Sequence: Synthetic oligonucleotide
uguuugcgcuccaauucuc

SEQ ID NO: 515220 - RNA, 19 nt, Artificial Sequence
  Description of Artificial Sequence: Synthetic oligonucleotide
gugagcuauucagauauca

SEQ ID NO: 515221 - RNA, 19 nt, Artificial Sequence
  Description of Artificial Sequence: Synthetic oligonucleotide
cccguuaguagcuaaagca

SEQ ID NO: 515222 - RNA, 19 nt, Artificial Sequence
  Description of Artificial Sequence: Synthetic oligonucleotide
uccuguuugcgcuccaauu

SEQ ID NO: 515223 - RNA, 19 nt, Artificial Sequence
  Description of Artificial Sequence: Synthetic oligonucleotide
gggaaguaaacaugaucug

SEQ ID NO: 515224 - RNA, 19 nt, Artificial Sequence
  Description of Artificial Sequence: Synthetic oligonucleotide
gcuaaagcaagacagcagu

SEQ ID NO: 515225 - RNA, 19 nt, Artificial Sequence
  Description of Artificial Sequence: Synthetic oligonucleotide
gaacaaugcuaucgccaac

SEQ ID NO: 515226 - RNA, 19 nt, Artificial Sequence
  Description of Artificial Sequence: Synthetic oligonucleotide
gaagugagcuauucagaua

SEQ ID NO: 515227 - RNA, 19 nt, Artificial Sequence
  Description of Artificial Sequence: Synthetic oligonucleotide
ccaaaugugacauuugcua

SEQ ID NO: 515228 - RNA, 19 nt, Artificial Sequence
  Description of Artificial Sequence: Synthetic oligonucleotide
ggucaucgcacacaggaca

SEQ ID NO: 515229 - RNA, 19 nt, Artificial Sequence
  Description of Artificial Sequence: Synthetic oligonucleotide
caggguuucauacaucgua

SEQ ID NO: 515230 - RNA, 19 nt, Artificial Sequence
  Description of Artificial Sequence: Synthetic oligonucleotide
ggucaaaggaacccguaca

SEQ ID NO: 515231 - RNA, 19 nt, Artificial Sequence
  Description of Artificial Sequence: Synthetic oligonucleotide
ugcucguuccaacguuucu

SEQ ID NO: 515232 - RNA, 19 nt, Artificial Sequence
  Description of Artificial Sequence: Synthetic oligonucleotide
gauagugccuuuccgcccu

SEQ ID NO: 515233 - RNA, 19 nt, Artificial Sequence
  Description of Artificial Sequence: Synthetic oligonucleotide
gucauacguaagcauuuuc

SEQ ID NO: 515234 - RNA, 19 nt, Artificial Sequence
  Description of Artificial Sequence: Synthetic oligonucleotide
ugcuacacaugguacuauu

SEQ ID NO: 515235 - RNA, 19 nt, Artificial Sequence
  Description of Artificial Sequence: Synthetic oligonucleotide
gucgugaaauacugggaga

SEQ ID NO: 515236 - RNA, 19 nt, Artificial Sequence
  Description of Artificial Sequence: Synthetic oligonucleotide
auaccggguccuucugauc

SEQ ID NO: 515237 - RNA, 19 nt, Artificial Sequence
  Description of Artificial Sequence: Synthetic oligonucleotide
uguuuacucgugagaguuu

SEQ ID NO: 515238 - RNA, 19 nt, Artificial Sequence
  Description of Artificial Sequence: Synthetic oligonucleotide
agauaucaacauguauacu

SEQ ID NO: 515239 - RNA, 19 nt, Artificial Sequence
  Description of Artificial Sequence: Synthetic oligonucleotide
uauggcacucguucuccaa

SEQ ID NO: 515240 - RNA, 19 nt, Artificial Sequence
  Description of Artificial Sequence: Synthetic oligonucleotide
uggcuucgacauuugcuac

SEQ ID NO: 515241 - RNA, 19 nt, Artificial Sequence
  Description of Artificial Sequence: Synthetic oligonucleotide
cuuuaguccuagcugacgu

SEQ ID NO: 515242 - RNA, 19 nt, Artificial Sequence
  Description of Artificial Sequence: Synthetic oligonucleotide
ggcaagaaucucuucugac

SEQ ID NO: 515243 - RNA, 19 nt, Artificial Sequence
  Description of Artificial Sequence: Synthetic oligonucleotide
guaagccuucauugacugc

SEQ ID NO: 515244 - RNA, 19 nt, Artificial Sequence
  Description of Artificial Sequence: Synthetic oligonucleotide
ugaaaaguacugggcaguu

SEQ ID NO: 515245 - RNA, 19 nt, Artificial Sequence
  Description of Artificial Sequence: Synthetic oligonucleotide
ggauccuugguaauucaug

SEQ ID NO: 515246 - RNA, 19 nt, Artificial Sequence
  Description of Artificial Sequence: Synthetic oligonucleotide
agaggaguugagugguaaa

SEQ ID NO: 515247 - RNA, 19 nt, Artificial Sequence
  Description of Artificial Sequence: Synthetic oligonucleotide
acacccuuucguauugaag

SEQ ID NO: 515248 - RNA, 19 nt, Artificial Sequence
  Description of Artificial Sequence: Synthetic oligonucleotide
caucgcacacaggacagug

SEQ ID NO: 515249 - RNA, 19 nt, Artificial Sequence
  Description of Artificial Sequence: Synthetic oligonucleotide
cuaagcaacacaucuugau

SEQ ID NO: 515250 - RNA, 19 nt, Artificial Sequence
  Description of Artificial Sequence: Synthetic oligonucleotide
auccuugguaauucaugau

SEQ ID NO: 515251 - RNA, 19 nt, Artificial Sequence
  Description of Artificial Sequence: Synthetic oligonucleotide
ucuuguaugcuggccuuuc

SEQ ID NO: 515252 - RNA, 19 nt, Artificial Sequence
  Description of Artificial Sequence: Synthetic oligonucleotide
augggcgucuuaucagcug

SEQ ID NO: 515253 - RNA, 19 nt, Artificial Sequence
  Description of Artificial Sequence: Synthetic oligonucleotide
gggcaguugagugaaacac

SEQ ID NO: 515254 - RNA, 19 nt, Artificial Sequence
  Description of Artificial Sequence: Synthetic oligonucleotide
cagcuuuagagaacacuca

SEQ ID NO: 515255 - RNA, 19 nt, Artificial Sequence
  Description of Artificial Sequence: Synthetic oligonucleotide
cucagagcgccggucauac

SEQ ID NO: 515256 - RNA, 19 nt, Artificial Sequence
  Description of Artificial Sequence: Synthetic oligonucleotide
caaauaccggguccuucug

SEQ ID NO: 515257 - RNA, 19 nt, Artificial Sequence
  Description of Artificial Sequence: Synthetic oligonucleotide
uugcucguuccaacguuuc

SEQ ID NO: 515258 - RNA, 19 nt, Artificial Sequence
  Description of Artificial Sequence: Synthetic oligonucleotide
gguccaguaacugccgaag

SEQ ID NO: 515259 - RNA, 19 nt, Artificial Sequence
  Description of Artificial Sequence: Synthetic oligonucleotide
accaugaaucuaagucuuc

SEQ ID NO: 515260 - RNA, 19 nt, Artificial Sequence
  Description of Artificial Sequence: Synthetic oligonucleotide
caaauagcaccuggaguuc

SEQ ID NO: 515261 - RNA, 19 nt, Artificial Sequence
  Description of Artificial Sequence: Synthetic oligonucleotide
acaacucuagcaccccauu

SEQ ID NO: 515262 - RNA, 19 nt, Artificial Sequence
  Description of Artificial Sequence: Synthetic oligonucleotide
caauaccaauaagagagaa

SEQ ID NO: 515263 - RNA, 19 nt, Artificial Sequence
  Description of Artificial Sequence: Synthetic oligonucleotide
uucugaugggcgucuuauc

SEQ ID NO: 515264 - RNA, 19 nt, Artificial Sequence
  Description of Artificial Sequence: Synthetic oligonucleotide
caguuugaucaaaguaaca

SEQ ID NO: 515265 - RNA, 19 nt, Artificial Sequence
  Description of Artificial Sequence: Synthetic oligonucleotide
ucggucaaaggaacccgua

SEQ ID NO: 515266 - RNA, 19 nt, Artificial Sequence
  Description of Artificial Sequence: Synthetic oligonucleotide
aggggucccauaaauaaua

SEQ ID NO: 515267 - RNA, 19 nt, Artificial Sequence
  Description of Artificial Sequence: Synthetic oligonucleotide
cuuauaucucuuguuucaa

SEQ ID NO: 515268 - RNA, 19 nt, Artificial Sequence
  Description of Artificial Sequence: Synthetic oligonucleotide
caccccauuucuugguauc

SEQ ID NO: 515269 - RNA, 19 nt, Artificial Sequence
  Description of Artificial Sequence: Synthetic oligonucleotide
cugacgugcauuaagcauu

SEQ ID NO: 515270 - RNA, 19 nt, Artificial Sequence
  Description of Artificial Sequence: Synthetic oligonucleotide
cauacaucguaacccacgu

SEQ ID NO: 515271 - RNA, 19 nt, Artificial Sequence
  Description of Artificial Sequence: Synthetic oligonucleotide
ggaauacacacaaaugacu

SEQ ID NO: 515272 - RNA, 19 nt, Artificial Sequence
  Description of Artificial Sequence: Synthetic oligonucleotide
aacguuucucuggcuuugu

SEQ ID NO: 515273 - RNA, 19 nt, Artificial Sequence
  Description of Artificial Sequence: Synthetic oligonucleotide
ucagagcgccggucauacg

SEQ ID NO: 515274 - RNA, 19 nt, Artificial Sequence
  Description of Artificial Sequence: Synthetic oligonucleotide
gcuucgacauuugcuacag

SEQ ID NO: 515275 - RNA, 19 nt, Artificial Sequence
  Description of Artificial Sequence: Synthetic oligonucleotide
ucgugacagggcucugucu

SEQ ID NO: 515276 - RNA, 19 nt, Artificial Sequence
  Description of Artificial Sequence: Synthetic oligonucleotide
auaacauauggcacucguu

SEQ ID NO: 515277 - RNA, 19 nt, Artificial Sequence
  Description of Artificial Sequence: Synthetic oligonucleotide
agugagcuauucagauauc

SEQ ID NO: 515278 - RNA, 19 nt, Artificial Sequence
  Description of Artificial Sequence: Synthetic oligonucleotide
caguguaaagucgugaaau

SEQ ID NO: 515279 - RNA, 19 nt, Artificial Sequence
  Description of Artificial Sequence: Synthetic oligonucleotide
ugccccguuaguagcuaaa

SEQ ID NO: 515280 - RNA, 19 nt, Artificial Sequence
  Description of Artificial Sequence: Synthetic oligonucleotide
aguccuagcugacgugcau

SEQ ID NO: 515281 - RNA, 19 nt, Artificial Sequence
  Description of Artificial Sequence: Synthetic oligonucleotide
guguucaagggauggcaaa

SEQ ID NO: 515282 - RNA, 19 nt, Artificial Sequence
  Description of Artificial Sequence: Synthetic oligonucleotide
agcauucgugacagggcuc

SEQ ID NO: 515283 - RNA, 19 nt, Artificial Sequence
  Description of Artificial Sequence: Synthetic oligonucleotide
gguuuucaauauuccuuuc

SEQ ID NO: 515284 - RNA, 19 nt, Artificial Sequence
  Description of Artificial Sequence: Synthetic oligonucleotide
ccucacaaugccccguuag

SEQ ID NO: 515285 - RNA, 19 nt, Artificial Sequence
  Description of Artificial Sequence: Synthetic oligonucleotide
auucgugacagggcucugu

SEQ ID NO: 515286 - RNA, 19 nt, Artificial Sequence
  Description of Artificial Sequence: Synthetic oligonucleotide
caugggauaugucggucaa

SEQ ID NO: 515287 - RNA, 19 nt, Artificial Sequence
  Description of Artificial Sequence: Synthetic oligonucleotide
auauaccaacaacgugaaa

SEQ ID NO: 515288 - RNA, 19 nt, Artificial Sequence
  Description of Artificial Sequence: Synthetic oligonucleotide
aggacaguguaaagucgug

SEQ ID NO: 515289 - RNA, 19 nt, Artificial Sequence
  Description of Artificial Sequence: Synthetic oligonucleotide
auagcaccuggaguucugu

SEQ ID NO: 515290 - RNA, 19 nt, Artificial Sequence
  Description of Artificial Sequence: Synthetic oligonucleotide
caucuugauacagacaguu

SEQ ID NO: 515291 - RNA, 19 nt, Artificial Sequence
  Description of Artificial Sequence: Synthetic oligonucleotide
acaucuugauacagacagu

SEQ ID NO: 515292 - RNA, 19 nt, Artificial Sequence
  Description of Artificial Sequence: Synthetic oligonucleotide
auucuugccaaggguggaa

SEQ ID NO: 515293 - RNA, 19 nt, Artificial Sequence
  Description of Artificial Sequence: Synthetic oligonucleotide
ggauaucucuaagcaacac

SEQ ID NO: 515294 - RNA, 19 nt, Artificial Sequence
  Description of Artificial Sequence: Synthetic oligonucleotide
caguuagcagaagucuuca

SEQ ID NO: 515295 - RNA, 19 nt, Artificial Sequence
  Description of Artificial Sequence: Synthetic oligonucleotide
auugcucguuccaacguuu

SEQ ID NO: 515296 - RNA, 19 nt, Artificial Sequence
  Description of Artificial Sequence: Synthetic oligonucleotide
acugaccacauaauuccuu

SEQ ID NO: 515297 - RNA, 19 nt, Artificial Sequence
  Description of Artificial Sequence: Synthetic oligonucleotide
uucauacauugucgcugua

SEQ ID NO: 515298 - RNA, 19 nt, Artificial Sequence
  Description of Artificial Sequence: Synthetic oligonucleotide
gcauucagucucagagucg

SEQ ID NO: 515299 - RNA, 19 nt, Artificial Sequence
  Description of Artificial Sequence: Synthetic oligonucleotide
aaugccccguuaguagcua

SEQ ID NO: 515300 - RNA, 19 nt, Artificial Sequence
  Description of Artificial Sequence: Synthetic oligonucleotide
cacaugggauaugucgguc

SEQ ID NO: 515301 - RNA, 19 nt, Artificial Sequence
  Description of Artificial Sequence: Synthetic oligonucleotide
gaauuugcuuggugauaua

SEQ ID NO: 515302 - RNA, 19 nt, Artificial Sequence
  Description of Artificial Sequence: Synthetic oligonucleotide
cuguuugcgcuccaauucu

SEQ ID NO: 515303 - RNA, 19 nt, Artificial Sequence
  Description of Artificial Sequence: Synthetic oligonucleotide
ccguuaguagcuaaagcaa

SEQ ID NO: 515304 - RNA, 19 nt, Artificial Sequence
  Description of Artificial Sequence: Synthetic oligonucleotide
gcgccggucauacguaagc

SEQ ID NO: 515305 - RNA, 19 nt, Artificial Sequence
  Description of Artificial Sequence: Synthetic oligonucleotide
uccucacaaugccccguua

SEQ ID NO: 515306 - RNA, 19 nt, Artificial Sequence
  Description of Artificial Sequence: Synthetic oligonucleotide
ccccguuaguagcuaaagc

SEQ ID NO: 515307 - RNA, 19 nt, Artificial Sequence
  Description of Artificial Sequence: Synthetic oligonucleotide
gggcaagaaucucuucuga

SEQ ID NO: 515308 - RNA, 19 nt, Artificial Sequence
  Description of Artificial Sequence: Synthetic oligonucleotide
caccaugaaucuaagucuu

SEQ ID NO: 515309 - RNA, 19 nt, Artificial Sequence
  Description of Artificial Sequence: Synthetic oligonucleotide
ggacaguguaaagucguga

SEQ ID NO: 515310 - RNA, 19 nt, Artificial Sequence
  Description of Artificial Sequence: Synthetic oligonucleotide
cuguuuaauuagacuuaua

SEQ ID NO: 515311 - RNA, 19 nt, Artificial Sequence
  Description of Artificial Sequence: Synthetic oligonucleotide
cugucaguaucaccauaaa

SEQ ID NO: 515312 - RNA, 19 nt, Artificial Sequence
  Description of Artificial Sequence: Synthetic oligonucleotide
ccuagaggagauauaccaa

SEQ ID NO: 515313 - RNA, 19 nt, Artificial Sequence
  Description of Artificial Sequence: Synthetic oligonucleotide
gcugacgugcauuaagcau

SEQ ID NO: 515314 - RNA, 19 nt, Artificial Sequence
  Description of Artificial Sequence: Synthetic oligonucleotide
augcuacacaugguacuau

SEQ ID NO: 515315 - RNA, 19 nt, Artificial Sequence
  Description of Artificial Sequence: Synthetic oligonucleotide
ccgaagauauggugccuug

SEQ ID NO: 515316 - RNA, 19 nt, Artificial Sequence
  Description of Artificial Sequence: Synthetic oligonucleotide
cagaggaguugagugguaa

SEQ ID NO: 515317 - RNA, 19 nt, Artificial Sequence
  Description of Artificial Sequence: Synthetic oligonucleotide
gagucggauccugcaggac

SEQ ID NO: 515318 - RNA, 19 nt, Artificial Sequence
  Description of Artificial Sequence: Synthetic oligonucleotide
cgaagauauggugccuugg

SEQ ID NO: 515319 - RNA, 19 nt, Artificial Sequence
  Description of Artificial Sequence: Synthetic oligonucleotide
gccccguuaguagcuaaag

SEQ ID NO: 515320 - RNA, 19 nt, Artificial Sequence
  Description of Artificial Sequence: Synthetic oligonucleotide
acccuugagucaagcaaaa

SEQ ID NO: 515321 - RNA, 19 nt, Artificial Sequence
  Description of Artificial Sequence: Synthetic oligonucleotide
gccaaccucaaugcauggc

SEQ ID NO: 515322 - RNA, 19 nt, Artificial Sequence
  Description of Artificial Sequence: Synthetic oligonucleotide
cuucugaugggcgucuuau

SEQ ID NO: 515323 - RNA, 19 nt, Artificial Sequence
  Description of Artificial Sequence: Synthetic oligonucleotide
gagcgccggucauacguaa

SEQ ID NO: 515324 - RNA, 19 nt, Artificial Sequence
  Description of Artificial Sequence: Synthetic oligonucleotide
agcgccggucauacguaag

SEQ ID NO: 515325 - RNA, 19 nt, Artificial Sequence
  Description of Artificial Sequence: Synthetic oligonucleotide
augccccguuaguagcuaa

SEQ ID NO: 515326 - RNA, 19 nt, Artificial Sequence
  Description of Artificial Sequence: Synthetic oligonucleotide
caaugccccguuaguagcu

SEQ ID NO: 515327 - RNA, 19 nt, Artificial Sequence
  Description of Artificial Sequence: Synthetic oligonucleotide
gguacuauuugcacaguuu

SEQ ID NO: 515328 - RNA, 19 nt, Artificial Sequence
  Description of Artificial Sequence: Synthetic oligonucleotide
auauggugccuuggauaau

SEQ ID NO: 515329 - RNA, 19 nt, Artificial Sequence
  Description of Artificial Sequence: Synthetic oligonucleotide
guaacccacguuauucuuu

SEQ ID NO: 515330 - RNA, 19 nt, Artificial Sequence
  Description of Artificial Sequence: Synthetic oligonucleotide
cacugaccacauaauuccu

SEQ ID NO: 515331 - RNA, 19 nt, Artificial Sequence
  Description of Artificial Sequence: Synthetic oligonucleotide
ccaacaacgugaaaaucau

SEQ ID NO: 515332 - RNA, 19 nt, Artificial Sequence
  Description of Artificial Sequence: Synthetic oligonucleotide
ggcacucguucuccaacuc

SEQ ID NO: 515333 - RNA, 19 nt, Artificial Sequence
  Description of Artificial Sequence: Synthetic oligonucleotide
cggucaaaggaacccguac

SEQ ID NO: 515334 - RNA, 19 nt, Artificial Sequence
  Description of Artificial Sequence: Synthetic oligonucleotide
ggcccacagguuuguaaca

SEQ ID NO: 515335 - RNA, 19 nt, Artificial Sequence
  Description of Artificial Sequence: Synthetic oligonucleotide
gcaucaaauaccggguccu

SEQ ID NO: 515336 - RNA, 19 nt, Artificial Sequence
  Description of Artificial Sequence: Synthetic oligonucleotide
cuucgacauuugcuacaga

SEQ ID NO: 515337 - RNA, 19 nt, Artificial Sequence
  Description of Artificial Sequence: Synthetic oligonucleotide
gcuacaugcugaggcuggc

SEQ ID NO: 515338 - RNA, 19 nt, Artificial Sequence
  Description of Artificial Sequence: Synthetic oligonucleotide
caggggucccauaaauaau

SEQ ID NO: 515339 - RNA, 19 nt, Artificial Sequence
  Description of Artificial Sequence: Synthetic oligonucleotide
cauucgugacagggcucug

SEQ ID NO: 515340 - RNA, 19 nt, Artificial Sequence
  Description of Artificial Sequence: Synthetic oligonucleotide
agagcgccggucauacgua

SEQ ID NO: 515341 - RNA, 19 nt, Artificial Sequence
  Description of Artificial Sequence: Synthetic oligonucleotide
gucggucaaaggaacccgu

SEQ ID NO: 515342 - RNA, 19 nt, Artificial Sequence
  Description of Artificial Sequence: Synthetic oligonucleotide
caacucuagcaccccauuu

SEQ ID NO: 515343 - RNA, 19 nt, Artificial Sequence
  Description of Artificial Sequence: Synthetic oligonucleotide
gucgcuguacauacuguuu

SEQ ID NO: 515344 - RNA, 19 nt, Artificial Sequence
  Description of Artificial Sequence: Synthetic oligonucleotide
gccuuuccgcccuucaagu

SEQ ID NO: 515345 - RNA, 19 nt, Artificial Sequence
  Description of Artificial Sequence: Synthetic oligonucleotide
cauugucgcuguacauacu

SEQ ID NO: 515346 - RNA, 19 nt, Artificial Sequence
  Description of Artificial Sequence: Synthetic oligonucleotide
gcauucgugacagggcucu

SEQ ID NO: 515347 - RNA, 19 nt, Artificial Sequence
  Description of Artificial Sequence: Synthetic oligonucleotide
auagugccuuuccgcccuu

SEQ ID NO: 515348 - RNA, 19 nt, Artificial Sequence
  Description of Artificial Sequence: Synthetic oligonucleotide
ggggucccauaaauaauaa

SEQ ID NO: 515349 - RNA, 19 nt, Artificial Sequence
  Description of Artificial Sequence: Synthetic oligonucleotide
caacaacgugaaaaucauu

SEQ ID NO: 515350 - RNA, 19 nt, Artificial Sequence
  Description of Artificial Sequence: Synthetic oligonucleotide
gcccacagguuuguaacaa

SEQ ID NO: 515351 - RNA, 19 nt, Artificial Sequence
  Description of Artificial Sequence: Synthetic oligonucleotide
gucggauccugcaggacuu

SEQ ID NO: 515352 - RNA, 19 nt, Artificial Sequence
  Description of Artificial Sequence: Synthetic oligonucleotide
gcuaucagcuuuaguccua

SEQ ID NO: 515353 - RNA, 19 nt, Artificial Sequence
  Description of Artificial Sequence: Synthetic oligonucleotide
cccuugagucaagcaaaac

SEQ ID NO: 515354 - RNA, 19 nt, Artificial Sequence
  Description of Artificial Sequence: Synthetic oligonucleotide
guauugcaacaggcccaca

SEQ ID NO: 515355 - RNA, 19 nt, Artificial Sequence
  Description of Artificial Sequence: Synthetic oligonucleotide
ccggucauacguaagcauu

SEQ ID NO: 515356 - RNA, 19 nt, Artificial Sequence
  Description of Artificial Sequence: Synthetic oligonucleotide
gccggucauacguaagcau

SEQ ID NO: 515357 - RNA, 19 nt, Artificial Sequence
  Description of Artificial Sequence: Synthetic oligonucleotide
guccuagcugacgugcauu

SEQ ID NO: 515358 - RNA, 19 nt, Artificial Sequence
  Description of Artificial Sequence: Synthetic oligonucleotide
ggucauacguaagcauuuu

SEQ ID NO: 515359 - RNA, 19 nt, Artificial Sequence
  Description of Artificial Sequence: Synthetic oligonucleotide
ccgcccuucaaguucacuu

SEQ ID NO: 515360 - RNA, 19 nt, Artificial Sequence
  Description of Artificial Sequence: Synthetic oligonucleotide
gcaccccauuucuugguau

SEQ ID NO: 515361 - RNA, 19 nt, Artificial Sequence
  Description of Artificial Sequence: Synthetic oligonucleotide
gccgaagauauggugccuu

SEQ ID NO: 515362 - RNA, 19 nt, Artificial Sequence
  Description of Artificial Sequence: Synthetic oligonucleotide
ccuagcugacgugcauuaa

SEQ ID NO: 515363 - RNA, 19 nt, Artificial Sequence
  Description of Artificial Sequence: Synthetic oligonucleotide
gcucagagcgccggucaua

SEQ ID NO: 515364 - RNA, 19 nt, Artificial Sequence
  Description of Artificial Sequence: Synthetic oligonucleotide
ccuggaguucugugauacu

SEQ ID NO: 515365 - RNA, 19 nt, Artificial Sequence
  Description of Artificial Sequence: Synthetic oligonucleotide
cgccggucauacguaagca

SEQ ID NO: 515366 - RNA, 19 nt, Artificial Sequence
  Description of Artificial Sequence: Synthetic oligonucleotide
cguaacccacguuauucuu

SEQ ID NO: 515367 - RNA, 19 nt, Artificial Sequence
  Description of Artificial Sequence: Synthetic oligonucleotide
ccuuuccgcccuucaaguu

SEQ ID NO: 515368 - RNA, 19 nt, Artificial Sequence
  Description of Artificial Sequence: Synthetic oligonucleotide
cguaagcauuuuccuugua

SEQ ID NO: 515369 - RNA, 19 nt, Artificial Sequence
  Description of Artificial Sequence: Synthetic oligonucleotide
gcgcuccaauucucggauu

SEQ ID NO: 515370 - RNA, 19 nt, Artificial Sequence
  Description of Artificial Sequence: Synthetic oligonucleotide
uagauagauagauagaugg

SEQ ID NO: 515371 - RNA, 19 nt, Artificial Sequence
  Description of Artificial Sequence: Synthetic oligonucleotide
uguucuaugaagauguggg

SEQ ID NO: 515372 - RNA, 19 nt, Artificial Sequence
  Description of Artificial Sequence: Synthetic oligonucleotide
uggauagauagcuagaugg

SEQ ID NO: 515373 - RNA, 19 nt, Artificial Sequence
  Description of Artificial Sequence: Synthetic oligonucleotide
uugauagauagauagauag

SEQ ID NO: 515374 - RNA, 19 nt, Artificial Sequence
  Description of Artificial Sequence: Synthetic oligonucleotide
auagauagaugauagauag

SEQ ID NO: 515375 - RNA, 19 nt, Artificial Sequence
  Description of Artificial Sequence: Synthetic oligonucleotide
augauugauagauagauag

SEQ ID NO: 515376 - RNA, 19 nt, Artificial Sequence
  Description of Artificial Sequence: Synthetic oligonucleotide
auagauagaugauagagag

SEQ ID NO: 515377 - RNA, 19 nt, Artificial Sequence
  Description of Artificial Sequence: Synthetic oligonucleotide
augauagauagauagauag

SEQ ID NO: 515378 - RNA, 19 nt, Artificial Sequence
  Description of Artificial Sequence: Synthetic oligonucleotide
aaacuuaacuaucuggguc

SEQ ID NO: 515379 - RNA, 19 nt, Artificial Sequence
  Description of Artificial Sequence: Synthetic oligonucleotide
auagauagaugauugauag

SEQ ID NO: 515380 - RNA, 19 nt, Artificial Sequence
  Description of Artificial Sequence: Synthetic oligonucleotide
uggauagauagauagauag

SEQ ID NO: 515381 - RNA, 19 nt, Artificial Sequence
  Description of Artificial Sequence: Synthetic oligonucleotide
uagauagauagauagauga

SEQ ID NO: 515382 - RNA, 19 nt, Artificial Sequence
  Description of Artificial Sequence: Synthetic oligonucleotide
auagaugauugauagauag

SEQ ID NO: 515383 - RNA, 19 nt, Artificial Sequence
  Description of Artificial Sequence: Synthetic oligonucleotide
auagaugauagagagaugg

SEQ ID NO: 515384 - RNA, 19 nt, Artificial Sequence
  Description of Artificial Sequence: Synthetic oligonucleotide
aacaacacugaucagcuug

SEQ ID NO: 515385 - RNA, 19 nt, Artificial Sequence
  Description of Artificial Sequence: Synthetic oligonucleotide
uaaucaaaguccaagcgcc

SEQ ID NO: 515386 - RNA, 19 nt, Artificial Sequence
  Description of Artificial Sequence: Synthetic oligonucleotide
gaagauaccgucuaucacc

SEQ ID NO: 515387 - RNA, 19 nt, Artificial Sequence
  Description of Artificial Sequence: Synthetic oligonucleotide
augauagauagauagauga

SEQ ID NO: 515388 - RNA, 19 nt, Artificial Sequence
  Description of Artificial Sequence: Synthetic oligonucleotide
aaccagaauuucuacauag

SEQ ID NO: 515389 - RNA, 19 nt, Artificial Sequence
  Description of Artificial Sequence: Synthetic oligonucleotide
aacgccaccucucuagugc

SEQ ID NO: 515390 - RNA, 19 nt, Artificial Sequence
  Description of Artificial Sequence: Synthetic oligonucleotide
cauaagauccuaauggggc

SEQ ID NO: 515391 - RNA, 19 nt, Artificial Sequence
  Description of Artificial Sequence: Synthetic oligonucleotide
uuauaaucaaaguccaagc

SEQ ID NO: 515392 - RNA, 19 nt, Artificial Sequence
  Description of Artificial Sequence: Synthetic oligonucleotide
uggguaaauaaacagagaa

SEQ ID NO: 515393 - RNA, 19 nt, Artificial Sequence
  Description of Artificial Sequence: Synthetic oligonucleotide
aauacuuuugcugauggca

SEQ ID NO: 515394 - RNA, 19 nt, Artificial Sequence
  Description of Artificial Sequence: Synthetic oligonucleotide
agauuuaccuuuucacucc

SEQ ID NO: 515395 - RNA, 19 nt, Artificial Sequence
  Description of Artificial Sequence: Synthetic oligonucleotide
auauacacaaaugauguuc

SEQ ID NO: 515396 - RNA, 19 nt, Artificial Sequence
  Description of Artificial Sequence: Synthetic oligonucleotide
uuuucacuccacaugaacc

SEQ ID NO: 515397 - RNA, 19 nt, Artificial Sequence
  Description of Artificial Sequence: Synthetic oligonucleotide
ugauuagugagugugauga

SEQ ID NO: 515398 - RNA, 19 nt, Artificial Sequence
  Description of Artificial Sequence: Synthetic oligonucleotide
aauaagugggaacgccacc

SEQ ID NO: 515399 - RNA, 19 nt, Artificial Sequence
  Description of Artificial Sequence: Synthetic oligonucleotide
ugaaauagccuguacagcu

SEQ ID NO: 515400 - RNA, 19 nt, Artificial Sequence
  Description of Artificial Sequence: Synthetic oligonucleotide
uagauagauagauggauag

SEQ ID NO: 515401 - RNA, 19 nt, Artificial Sequence
  Description of Artificial Sequence: Synthetic oligonucleotide
agauagauagaugauagag

SEQ ID NO: 515402 - RNA, 19 nt, Artificial Sequence
  Description of Artificial Sequence: Synthetic oligonucleotide
augggcuacguauauauac

SEQ ID NO: 515403 - RNA, 19 nt, Artificial Sequence
  Description of Artificial Sequence: Synthetic oligonucleotide
aacuuaacuaucuggguca

SEQ ID NO: 515404 - RNA, 19 nt, Artificial Sequence
  Description of Artificial Sequence: Synthetic oligonucleotide
uauacacaaaugauguuca

SEQ ID NO: 515405 - RNA, 19 nt, Artificial Sequence
  Description of Artificial Sequence: Synthetic oligonucleotide
cuuauaaucaaaguccaag

SEQ ID NO: 515406 - RNA, 19 nt, Artificial Sequence
  Description of Artificial Sequence: Synthetic oligonucleotide
uagauagcuagauggauag

SEQ ID NO: 515407 - RNA, 19 nt, Artificial Sequence
  Description of Artificial Sequence: Synthetic oligonucleotide
uucuacauaguugaugggg

SEQ ID NO: 515408 - RNA, 19 nt, Artificial Sequence
  Description of Artificial Sequence: Synthetic oligonucleotide
auauacacaaugcucacca

SEQ ID NO: 515409 - RNA, 19 nt, Artificial Sequence
  Description of Artificial Sequence: Synthetic oligonucleotide
aaaugggcuacguauauau

SEQ ID NO: 515410 - RNA, 19 nt, Artificial Sequence
  Description of Artificial Sequence: Synthetic oligonucleotide
uggacaauuaauacuuuug

SEQ ID NO: 515411 - RNA, 19 nt, Artificial Sequence
  Description of Artificial Sequence: Synthetic oligonucleotide
auaucacccucuuuaaaac

SEQ ID NO: 515412 - RNA, 19 nt, Artificial Sequence
  Description of Artificial Sequence: Synthetic oligonucleotide
gacucacacauuuaggaag

SEQ ID NO: 515413 - RNA, 19 nt, Artificial Sequence
  Description of Artificial Sequence: Synthetic oligonucleotide
gaugauaucacccucuuua

SEQ ID NO: 515414 - RNA, 19 nt, Artificial Sequence
  Description of Artificial Sequence: Synthetic oligonucleotide
uggaaucuugccuuugucg

SEQ ID NO: 515415 - RNA, 19 nt, Artificial Sequence
  Description of Artificial Sequence: Synthetic oligonucleotide
agugguuaaacuuaacuau

SEQ ID NO: 515416 - RNA, 19 nt, Artificial Sequence
  Description of Artificial Sequence: Synthetic oligonucleotide
auagauagauagaugauag

SEQ ID NO: 515417 - RNA, 19 nt, Artificial Sequence
  Description of Artificial Sequence: Synthetic oligonucleotide
gaaauggacugauuccugg

SEQ ID NO: 515418 - RNA, 19 nt, Artificial Sequence
  Description of Artificial Sequence: Synthetic oligonucleotide
ucaauuugauuagugagug

SEQ ID NO: 515419 - RNA, 19 nt, Artificial Sequence
  Description of Artificial Sequence: Synthetic oligonucleotide
uagauagauagauggauga

SEQ ID NO: 515420 - RNA, 19 nt, Artificial Sequence
  Description of Artificial Sequence: Synthetic oligonucleotide
uacguauauauacagcuuc

SEQ ID NO: 515421 - RNA, 19 nt, Artificial Sequence
  Description of Artificial Sequence: Synthetic oligonucleotide
ugugacucacacauuuagg

SEQ ID NO: 515422 - RNA, 19 nt, Artificial Sequence
  Description of Artificial Sequence: Synthetic oligonucleotide
ucauucgugguuuuggcug

SEQ ID NO: 515423 - RNA, 19 nt, Artificial Sequence
  Description of Artificial Sequence: Synthetic oligonucleotide
agauagaugauugauagau

SEQ ID NO: 515424 - RNA, 19 nt, Artificial Sequence
  Description of Artificial Sequence: Synthetic oligonucleotide
ugggugagagacaauaucu

SEQ ID NO: 515425 - RNA, 19 nt, Artificial Sequence
  Description of Artificial Sequence: Synthetic oligonucleotide
auagauagauagaugauug

SEQ ID NO: 515426 - RNA, 19 nt, Artificial Sequence
  Description of Artificial Sequence: Synthetic oligonucleotide
uuuucuaucuucagcaaua

SEQ ID NO: 515427 - RNA, 19 nt, Artificial Sequence
  Description of Artificial Sequence: Synthetic oligonucleotide
aaaaugaagaugcgauaga

SEQ ID NO: 515428 - RNA, 19 nt, Artificial Sequence
  Description of Artificial Sequence: Synthetic oligonucleotide
uuagugagugugaugauau

SEQ ID NO: 515429 - RNA, 19 nt, Artificial Sequence
  Description of Artificial Sequence: Synthetic oligonucleotide
uacacaaugcucaccaacu

SEQ ID NO: 515430 - RNA, 19 nt, Artificial Sequence
  Description of Artificial Sequence: Synthetic oligonucleotide
acagcaacgcuucccaugg

SEQ ID NO: 515431 - RNA, 19 nt, Artificial Sequence
  Description of Artificial Sequence: Synthetic oligonucleotide
aaacucuaggcucauucgu

SEQ ID NO: 515432 - RNA, 19 nt, Artificial Sequence
  Description of Artificial Sequence: Synthetic oligonucleotide
ucuuauucuuuccuccagc

SEQ ID NO: 515433 - RNA, 19 nt, Artificial Sequence
  Description of Artificial Sequence: Synthetic oligonucleotide
ugauagauagauagauaga

SEQ ID NO: 515434 - RNA, 19 nt, Artificial Sequence
  Description of Artificial Sequence: Synthetic oligonucleotide
agacaauauacacaaugcu

SEQ ID NO: 515435 - RNA, 19 nt, Artificial Sequence
  Description of Artificial Sequence: Synthetic oligonucleotide
ugcgauagaaggguuaaag

SEQ ID NO: 515436 - RNA, 19 nt, Artificial Sequence
  Description of Artificial Sequence: Synthetic oligonucleotide
ugguuaaacuuaacuaucu

SEQ ID NO: 515437 - RNA, 19 nt, Artificial Sequence
  Description of Artificial Sequence: Synthetic oligonucleotide
aacucacucagaaauaagu

SEQ ID NO: 515438 - RNA, 19 nt, Artificial Sequence
  Description of Artificial Sequence: Synthetic oligonucleotide
cugaacaacacugaucagc

SEQ ID NO: 515439 - RNA, 19 nt, Artificial Sequence
  Description of Artificial Sequence: Synthetic oligonucleotide
uuggcgaaguucuucaucu

SEQ ID NO: 515440 - RNA, 19 nt, Artificial Sequence
  Description of Artificial Sequence: Synthetic oligonucleotide
aacagcaacgcuucccaug

SEQ ID NO: 515441 - RNA, 19 nt, Artificial Sequence
  Description of Artificial Sequence: Synthetic oligonucleotide
ugaaccacuacugcaagug

SEQ ID NO: 515442 - RNA, 19 nt, Artificial Sequence
  Description of Artificial Sequence: Synthetic oligonucleotide
gaugaagcuugucuuauuc

SEQ ID NO: 515443 - RNA, 19 nt, Artificial Sequence
  Description of Artificial Sequence: Synthetic oligonucleotide
agccuguacagcuagauaa

SEQ ID NO: 515444 - RNA, 19 nt, Artificial Sequence
  Description of Artificial Sequence: Synthetic oligonucleotide
ugauugauagauagauaga

SEQ ID NO: 515445 - RNA, 19 nt, Artificial Sequence
  Description of Artificial Sequence: Synthetic oligonucleotide
gcugauauucccuucuugg

SEQ ID NO: 515446 - RNA, 19 nt, Artificial Sequence
  Description of Artificial Sequence: Synthetic oligonucleotide
accaacaauucugugacuc

SEQ ID NO: 515447 - RNA, 19 nt, Artificial Sequence
  Description of Artificial Sequence: Synthetic oligonucleotide
aguaggagauagaugauag

SEQ ID NO: 515448 - RNA, 19 nt, Artificial Sequence
  Description of Artificial Sequence: Synthetic oligonucleotide
uguauccuucagaaauggg

SEQ ID NO: 515449 - RNA, 19 nt, Artificial Sequence
  Description of Artificial Sequence: Synthetic oligonucleotide
aauggggcagagcaaccag

SEQ ID NO: 515450 - RNA, 19 nt, Artificial Sequence
  Description of Artificial Sequence: Synthetic oligonucleotide
aaaaccgcacccuccugag

SEQ ID NO: 515451 - RNA, 19 nt, Artificial Sequence
  Description of Artificial Sequence: Synthetic oligonucleotide
acaaaagugcuuuggacaa

SEQ ID NO: 515452 - RNA, 19 nt, Artificial Sequence
  Description of Artificial Sequence: Synthetic oligonucleotide
gauagauagaugauagaga

SEQ ID NO: 515453 - RNA, 19 nt, Artificial Sequence
  Description of Artificial Sequence: Synthetic oligonucleotide
ugguaugucucagaaguag

SEQ ID NO: 515454 - RNA, 19 nt, Artificial Sequence
  Description of Artificial Sequence: Synthetic oligonucleotide
agaaggguuaaaguaauga

SEQ ID NO: 515455 - RNA, 19 nt, Artificial Sequence
  Description of Artificial Sequence: Synthetic oligonucleotide
uggcauaucggaagcagca

SEQ ID NO: 515456 - RNA, 19 nt, Artificial Sequence
  Description of Artificial Sequence: Synthetic oligonucleotide
aauauacacaaaugauguu

SEQ ID NO: 515457 - RNA, 19 nt, Artificial Sequence
  Description of Artificial Sequence: Synthetic oligonucleotide
ucuagugcuuuaacagaag

SEQ ID NO: 515458 - RNA, 19 nt, Artificial Sequence
  Description of Artificial Sequence: Synthetic oligonucleotide
acucuaggcucauucgugg

SEQ ID NO: 515459 - RNA, 19 nt, Artificial Sequence
  Description of Artificial Sequence: Synthetic oligonucleotide
ugggcuacguauauauaca

SEQ ID NO: 515460 - RNA, 19 nt, Artificial Sequence
  Description of Artificial Sequence: Synthetic oligonucleotide
auaagauccuaauggggca

SEQ ID NO: 515461 - RNA, 19 nt, Artificial Sequence
  Description of Artificial Sequence: Synthetic oligonucleotide
uuuauacauuuaagcagga

SEQ ID NO: 515462 - RNA, 19 nt, Artificial Sequence
  Description of Artificial Sequence: Synthetic oligonucleotide
ucaacccaggacaugugug

SEQ ID NO: 515463 - RNA, 19 nt, Artificial Sequence
  Description of Artificial Sequence: Synthetic oligonucleotide
gugacucacacauuuagga

SEQ ID NO: 515464 - RNA, 19 nt, Artificial Sequence
  Description of Artificial Sequence: Synthetic oligonucleotide
ugauagauagauagaugau

SEQ ID NO: 515465 - RNA, 19 nt, Artificial Sequence
  Description of Artificial Sequence: Synthetic oligonucleotide
uacagcaaggaaucugagc

SEQ ID NO: 515466 - RNA, 19 nt, Artificial Sequence
  Description of Artificial Sequence: Synthetic oligonucleotide
cugaguacugucuccagug

SEQ ID NO: 515467 - RNA, 19 nt, Artificial Sequence
  Description of Artificial Sequence: Synthetic oligonucleotide
cugauauucccuucuuggc

SEQ ID NO: 515468 - RNA, 19 nt, Artificial Sequence
  Description of Artificial Sequence: Synthetic oligonucleotide
cagacaauuugcugguggg

SEQ ID NO: 515469 - RNA, 19 nt, Artificial Sequence
  Description of Artificial Sequence: Synthetic oligonucleotide
cucagaaauaagugggaac

SEQ ID NO: 515470 - RNA, 19 nt, Artificial Sequence
  Description of Artificial Sequence: Synthetic oligonucleotide
uacauggggaacuccagac

SEQ ID NO: 515471 - RNA, 19 nt, Artificial Sequence
  Description of Artificial Sequence: Synthetic oligonucleotide
auagauagauagauggaug

SEQ ID NO: 515472 - RNA, 19 nt, Artificial Sequence
  Description of Artificial Sequence: Synthetic oligonucleotide
cauugagggcagaauauac

SEQ ID NO: 515473 - RNA, 19 nt, Artificial Sequence
  Description of Artificial Sequence: Synthetic oligonucleotide
gaaccacuacugcaagugg

SEQ ID NO: 515474 - RNA, 19 nt, Artificial Sequence
  Description of Artificial Sequence: Synthetic oligonucleotide
cuuuucacuccacaugaac

SEQ ID NO: 515475 - RNA, 19 nt, Artificial Sequence
  Description of Artificial Sequence: Synthetic oligonucleotide
gauagauagauagaugaua

SEQ ID NO: 515476 - RNA, 19 nt, Artificial Sequence
  Description of Artificial Sequence: Synthetic oligonucleotide
gcaucaaaaguccaaguug

SEQ ID NO: 515477 - RNA, 19 nt, Artificial Sequence
  Description of Artificial Sequence: Synthetic oligonucleotide
agugagugugaugauauca

SEQ ID NO: 515478 - RNA, 19 nt, Artificial Sequence
  Description of Artificial Sequence: Synthetic oligonucleotide
ugucuuauucuuuccucca

SEQ ID NO: 515479 - RNA, 19 nt, Artificial Sequence
  Description of Artificial Sequence: Synthetic oligonucleotide
caacccaggacaugugugg

SEQ ID NO: 515480 - RNA, 19 nt, Artificial Sequence
  Description of Artificial Sequence: Synthetic oligonucleotide
auuaccaaagcagugguua

SEQ ID NO: 515481 - RNA, 19 nt, Artificial Sequence
  Description of Artificial Sequence: Synthetic oligonucleotide
cauuuaggaagggaaagug

SEQ ID NO: 515482 - RNA, 19 nt, Artificial Sequence
  Description of Artificial Sequence: Synthetic oligonucleotide
agauaaaagugggaaggag

SEQ ID NO: 515483 - RNA, 19 nt, Artificial Sequence
  Description of Artificial Sequence: Synthetic oligonucleotide
uucuaugaagaugugggaa

SEQ ID NO: 515484 - RNA, 19 nt, Artificial Sequence
  Description of Artificial Sequence: Synthetic oligonucleotide
aggagcaacggucacuaug

SEQ ID NO: 515485 - RNA, 19 nt, Artificial Sequence
  Description of Artificial Sequence: Synthetic oligonucleotide
ucucagauggaguuuuaaa

SEQ ID NO: 515486 - RNA, 19 nt, Artificial Sequence
  Description of Artificial Sequence: Synthetic oligonucleotide
gugaguuuauacauuuaag

SEQ ID NO: 515487 - RNA, 19 nt, Artificial Sequence
  Description of Artificial Sequence: Synthetic oligonucleotide
gaugacucauccacugcgg

SEQ ID NO: 515488 - RNA, 19 nt, Artificial Sequence
  Description of Artificial Sequence: Synthetic oligonucleotide
uaucggaagcagcacauua

SEQ ID NO: 515489 - RNA, 19 nt, Artificial Sequence
  Description of Artificial Sequence: Synthetic oligonucleotide
uuuaagcaggaagauuuac

SEQ ID NO: 515490 - RNA, 19 nt, Artificial Sequence
  Description of Artificial Sequence: Synthetic oligonucleotide
uuugauuagugagugugau

SEQ ID NO: 515491 - RNA, 19 nt, Artificial Sequence
  Description of Artificial Sequence: Synthetic oligonucleotide
guccaaguuguuuaggcca

SEQ ID NO: 515492 - RNA, 19 nt, Artificial Sequence
  Description of Artificial Sequence: Synthetic oligonucleotide
ucuuauaaucaaaguccaa

SEQ ID NO: 515493 - RNA, 19 nt, Artificial Sequence
  Description of Artificial Sequence: Synthetic oligonucleotide
ugucguuucuucuuauaau

SEQ ID NO: 515494 - RNA, 19 nt, Artificial Sequence
  Description of Artificial Sequence: Synthetic oligonucleotide
aagauaccgucuaucacca

SEQ ID NO: 515495 - RNA, 19 nt, Artificial Sequence
  Description of Artificial Sequence: Synthetic oligonucleotide
uagauagaugauagauaga

SEQ ID NO: 515496 - RNA, 19 nt, Artificial Sequence
  Description of Artificial Sequence: Synthetic oligonucleotide
cuuuggacaauuaauacuu

SEQ ID NO: 515497 - RNA, 19 nt, Artificial Sequence
  Description of Artificial Sequence: Synthetic oligonucleotide
ucggaagcagcacauuaaa

SEQ ID NO: 515498 - RNA, 19 nt, Artificial Sequence
  Description of Artificial Sequence: Synthetic oligonucleotide
gauggauagauagauagau

SEQ ID NO: 515499 - RNA, 19 nt, Artificial Sequence
  Description of Artificial Sequence: Synthetic oligonucleotide
acucacucagaaauaagug

SEQ ID NO: 515500 - RNA, 19 nt, Artificial Sequence
  Description of Artificial Sequence: Synthetic oligonucleotide
ugauaucacccucuuuaaa

SEQ ID NO: 515501 - RNA, 19 nt, Artificial Sequence
  Description of Artificial Sequence: Synthetic oligonucleotide
acaaaaugaagaugcgaua

SEQ ID NO: 515502 - RNA, 19 nt, Artificial Sequence
  Description of Artificial Sequence: Synthetic oligonucleotide
ugacucauccacugcggcc

SEQ ID NO: 515503 - RNA, 19 nt, Artificial Sequence
  Description of Artificial Sequence: Synthetic oligonucleotide
uagauagaugauugauaga

SEQ ID NO: 515504 - RNA, 19 nt, Artificial Sequence
  Description of Artificial Sequence: Synthetic oligonucleotide
cuguauccuucagaaaugg

SEQ ID NO: 515505 - RNA, 19 nt, Artificial Sequence
  Description of Artificial Sequence: Synthetic oligonucleotide
uuggacaauuaauacuuuu

SEQ ID NO: 515506 - RNA, 19 nt, Artificial Sequence
  Description of Artificial Sequence: Synthetic oligonucleotide
acugcaaguggcauaucgg

SEQ ID NO: 515507 - RNA, 19 nt, Artificial Sequence
  Description of Artificial Sequence: Synthetic oligonucleotide
ucccauggugaguuuauac

SEQ ID NO: 515508 - RNA, 19 nt, Artificial Sequence
  Description of Artificial Sequence: Synthetic oligonucleotide
caguucuguaaccacuggc

SEQ ID NO: 515509 - RNA, 19 nt, Artificial Sequence
  Description of Artificial Sequence: Synthetic oligonucleotide
uuuuguggcagagggacuc

SEQ ID NO: 515510 - RNA, 19 nt, Artificial Sequence
  Description of Artificial Sequence: Synthetic oligonucleotide
acuaaagugugaaaggguu

SEQ ID NO: 515511 - RNA, 19 nt, Artificial Sequence
  Description of Artificial Sequence: Synthetic oligonucleotide
accaggucaacuguaggag

SEQ ID NO: 515512 - RNA, 19 nt, Artificial Sequence
  Description of Artificial Sequence: Synthetic oligonucleotide
gcaaguggcauaucggaag

SEQ ID NO: 515513 - RNA, 19 nt, Artificial Sequence
  Description of Artificial Sequence: Synthetic oligonucleotide
accucucuagugcuuuaac

SEQ ID NO: 515514 - RNA, 19 nt, Artificial Sequence
  Description of Artificial Sequence: Synthetic oligonucleotide
gauagauagauagauggau

SEQ ID NO: 515515 - RNA, 19 nt, Artificial Sequence
  Description of Artificial Sequence: Synthetic oligonucleotide
agaugauagagagauggau

SEQ ID NO: 515516 - RNA, 19 nt, Artificial Sequence
  Description of Artificial Sequence: Synthetic oligonucleotide
agcaacggucacuaugucu

SEQ ID NO: 515517 - RNA, 19 nt, Artificial Sequence
  Description of Artificial Sequence: Synthetic oligonucleotide
aaguaggagauagaugaua

SEQ ID NO: 515518 - RNA, 19 nt, Artificial Sequence
  Description of Artificial Sequence: Synthetic oligonucleotide
cacuaugucuuguucuaug

SEQ ID NO: 515519 - RNA, 19 nt, Artificial Sequence
  Description of Artificial Sequence: Synthetic oligonucleotide
accgucuaucaccagguca

SEQ ID NO: 515520 - RNA, 19 nt, Artificial Sequence
  Description of Artificial Sequence: Synthetic oligonucleotide
gcagacaauuugcuggugg

SEQ ID NO: 515521 - RNA, 19 nt, Artificial Sequence
  Description of Artificial Sequence: Synthetic oligonucleotide
ugcaaguggcauaucggaa

SEQ ID NO: 515522 - RNA, 19 nt, Artificial Sequence
  Description of Artificial Sequence: Synthetic oligonucleotide
agacaauuugcuggugggg

SEQ ID NO: 515523 - RNA, 19 nt, Artificial Sequence
  Description of Artificial Sequence: Synthetic oligonucleotide
uuaaaacccaguuccccuu

SEQ ID NO: 515524 - RNA, 19 nt, Artificial Sequence
  Description of Artificial Sequence: Synthetic oligonucleotide
ggguaaauaaacagagaag

SEQ ID NO: 515525 - RNA, 19 nt, Artificial Sequence
  Description of Artificial Sequence: Synthetic oligonucleotide
cagugguuaaacuuaacua

SEQ ID NO: 515526 - RNA, 19 nt, Artificial Sequence
  Description of Artificial Sequence: Synthetic oligonucleotide
gaagaugcgauagaagggu

SEQ ID NO: 515527 - RNA, 19 nt, Artificial Sequence
  Description of Artificial Sequence: Synthetic oligonucleotide
gguuuuggcugauauuccc

SEQ ID NO: 515528 - RNA, 19 nt, Artificial Sequence
  Description of Artificial Sequence: Synthetic oligonucleotide
ucgugguuuuggcugauau

SEQ ID NO: 515529 - RNA, 19 nt, Artificial Sequence
  Description of Artificial Sequence: Synthetic oligonucleotide
ccaugacugaacaacacug

SEQ ID NO: 515530 - RNA, 19 nt, Artificial Sequence
  Description of Artificial Sequence: Synthetic oligonucleotide
ugcuuacuaguguuucucu

SEQ ID NO: 515531 - RNA, 19 nt, Artificial Sequence
  Description of Artificial Sequence: Synthetic oligonucleotide
gcuacguauauauacagcu

SEQ ID NO: 515532 - RNA, 19 nt, Artificial Sequence
  Description of Artificial Sequence: Synthetic oligonucleotide
caacucacucagaaauaag

SEQ ID NO: 515533 - RNA, 19 nt, Artificial Sequence
  Description of Artificial Sequence: Synthetic oligonucleotide
uucccuucuuggcugagau

SEQ ID NO: 515534 - RNA, 19 nt, Artificial Sequence
  Description of Artificial Sequence: Synthetic oligonucleotide
cuaauggggcagagcaacc

SEQ ID NO: 515535 - RNA, 19 nt, Artificial Sequence
  Description of Artificial Sequence: Synthetic oligonucleotide
cugggugagagacaauauc

SEQ ID NO: 515536 - RNA, 19 nt, Artificial Sequence
  Description of Artificial Sequence: Synthetic oligonucleotide
gauagcuagauggauagau

SEQ ID NO: 515537 - RNA, 19 nt, Artificial Sequence
  Description of Artificial Sequence: Synthetic oligonucleotide
ccuaacaggacuuccauga

SEQ ID NO: 515538 - RNA, 19 nt, Artificial Sequence
  Description of Artificial Sequence: Synthetic oligonucleotide
aguaaugacuaaaguguga

SEQ ID NO: 515539 - RNA, 19 nt, Artificial Sequence
  Description of Artificial Sequence: Synthetic oligonucleotide
uaaaacccaguuccccuuc

SEQ ID NO: 515540 - RNA, 19 nt, Artificial Sequence
  Description of Artificial Sequence: Synthetic oligonucleotide
gauagauagauagaugauu

SEQ ID NO: 515541 - RNA, 19 nt, Artificial Sequence
  Description of Artificial Sequence: Synthetic oligonucleotide
gcauaagauccuaaugggg

SEQ ID NO: 515542 - RNA, 19 nt, Artificial Sequence
  Description of Artificial Sequence: Synthetic oligonucleotide
auugagggcagaauauaca

SEQ ID NO: 515543 - RNA, 19 nt, Artificial Sequence
  Description of Artificial Sequence: Synthetic oligonucleotide
agauagauagauagaugga

SEQ ID NO: 515544 - RNA, 19 nt, Artificial Sequence
  Description of Artificial Sequence: Synthetic oligonucleotide
gguaugucucagaaguagg

SEQ ID NO: 515545 - RNA, 19 nt, Artificial Sequence
  Description of Artificial Sequence: Synthetic oligonucleotide
agauagauagauagauaga

SEQ ID NO: 515546 - RNA, 19 nt, Artificial Sequence
  Description of Artificial Sequence: Synthetic oligonucleotide
uuuggacaauuaauacuuu

SEQ ID NO: 515547 - RNA, 19 nt, Artificial Sequence
  Description of Artificial Sequence: Synthetic oligonucleotide
gugguuaaacuuaacuauc

SEQ ID NO: 515548 - RNA, 19 nt, Artificial Sequence
  Description of Artificial Sequence: Synthetic oligonucleotide
gaugauagauagauagaua

SEQ ID NO: 515549 - RNA, 19 nt, Artificial Sequence
  Description of Artificial Sequence: Synthetic oligonucleotide
aauagaacucugggugccu

SEQ ID NO: 515550 - RNA, 19 nt, Artificial Sequence
  Description of Artificial Sequence: Synthetic oligonucleotide
cagccugacagugacuugc

SEQ ID NO: 515551 - RNA, 19 nt, Artificial Sequence
  Description of Artificial Sequence: Synthetic oligonucleotide
auagauagcuagauggaua

SEQ ID NO: 515552 - RNA, 19 nt, Artificial Sequence
  Description of Artificial Sequence: Synthetic oligonucleotide
uccuucagaaaugggcuac

SEQ ID NO: 515553 - RNA, 19 nt, Artificial Sequence
  Description of Artificial Sequence: Synthetic oligonucleotide
uuuaggccagcagacaauu

SEQ ID NO: 515554 - RNA, 19 nt, Artificial Sequence
  Description of Artificial Sequence: Synthetic oligonucleotide
guucuaugaagauguggga

SEQ ID NO: 515555 - RNA, 19 nt, Artificial Sequence
  Description of Artificial Sequence: Synthetic oligonucleotide
cuguacauggggaacucca

SEQ ID NO: 515556 - RNA, 19 nt, Artificial Sequence
  Description of Artificial Sequence: Synthetic oligonucleotide
uggcaucaaaaguccaagu

SEQ ID NO: 515557 - RNA, 19 nt, Artificial Sequence
  Description of Artificial Sequence: Synthetic oligonucleotide
augugggaaaugcuuacua

SEQ ID NO: 515558 - RNA, 19 nt, Artificial Sequence
  Description of Artificial Sequence: Synthetic oligonucleotide
aggucaacccaggacaugu

SEQ ID NO: 515559 - RNA, 19 nt, Artificial Sequence
  Description of Artificial Sequence: Synthetic oligonucleotide
cagcauuaccaaagcagug

SEQ ID NO: 515560 - RNA, 19 nt, Artificial Sequence
  Description of Artificial Sequence: Synthetic oligonucleotide
acugaacaacacugaucag

SEQ ID NO: 515561 - RNA, 19 nt, Artificial Sequence
  Description of Artificial Sequence: Synthetic oligonucleotide
cugcaaguggcauaucgga

SEQ ID NO: 515562 - RNA, 19 nt, Artificial Sequence
  Description of Artificial Sequence: Synthetic oligonucleotide
gaugcgauagaaggguuaa

SEQ ID NO: 515563 - RNA, 19 nt, Artificial Sequence
  Description of Artificial Sequence: Synthetic oligonucleotide
ucuaggcucauucgugguu

SEQ ID NO: 515564 - RNA, 19 nt, Artificial Sequence
  Description of Artificial Sequence: Synthetic oligonucleotide
caacgcuucccauggugag

SEQ ID NO: 515565 - RNA, 19 nt, Artificial Sequence
  Description of Artificial Sequence: Synthetic oligonucleotide
gggaacgccaccucucuag

SEQ ID NO: 515566 - RNA, 19 nt, Artificial Sequence
  Description of Artificial Sequence: Synthetic oligonucleotide
ucaccaacucacucagaaa

SEQ ID NO: 515567 - RNA, 19 nt, Artificial Sequence
  Description of Artificial Sequence: Synthetic oligonucleotide
acuaucugggucagaagga

SEQ ID NO: 515568 - RNA, 19 nt, Artificial Sequence
  Description of Artificial Sequence: Synthetic oligonucleotide
guaugucucagaaguagga

SEQ ID NO: 515569 - RNA, 19 nt, Artificial Sequence
  Description of Artificial Sequence: Synthetic oligonucleotide
caggucaacuguaggagca

SEQ ID NO: 515570 - RNA, 19 nt, Artificial Sequence
  Description of Artificial Sequence: Synthetic oligonucleotide
gggcuacguauauauacag

SEQ ID NO: 515571 - RNA, 19 nt, Artificial Sequence
  Description of Artificial Sequence: Synthetic oligonucleotide
agauagauagauagaugau

SEQ ID NO: 515572 - RNA, 19 nt, Artificial Sequence
  Description of Artificial Sequence: Synthetic oligonucleotide
auacuuuugcugauggcau

SEQ ID NO: 515573 - RNA, 19 nt, Artificial Sequence
  Description of Artificial Sequence: Synthetic oligonucleotide
acucagaaauaagugggaa

SEQ ID NO: 515574 - RNA, 19 nt, Artificial Sequence
  Description of Artificial Sequence: Synthetic oligonucleotide
gguccauuugggcaccucc

SEQ ID NO: 515575 - RNA, 19 nt, Artificial Sequence
  Description of Artificial Sequence: Synthetic oligonucleotide
agcuucuauacagcaagga

SEQ ID NO: 515576 - RNA, 19 nt, Artificial Sequence
  Description of Artificial Sequence: Synthetic oligonucleotide
acuuaacuaucugggucag

SEQ ID NO: 515577 - RNA, 19 nt, Artificial Sequence
  Description of Artificial Sequence: Synthetic oligonucleotide
acguauauauacagcuucu

SEQ ID NO: 515578 - RNA, 19 nt, Artificial Sequence
  Description of Artificial Sequence: Synthetic oligonucleotide
auaccgucuaucaccaggu

SEQ ID NO: 515579 - RNA, 19 nt, Artificial Sequence
  Description of Artificial Sequence: Synthetic oligonucleotide
agauggauagauagauaga

SEQ ID NO: 515580 - RNA, 19 nt, Artificial Sequence
  Description of Artificial Sequence: Synthetic oligonucleotide
gguuaaaguaaugacuaaa

SEQ ID NO: 515581 - RNA, 19 nt, Artificial Sequence
  Description of Artificial Sequence: Synthetic oligonucleotide
augcuucaccaacaauucu

SEQ ID NO: 515582 - RNA, 19 nt, Artificial Sequence
  Description of Artificial Sequence: Synthetic oligonucleotide
acauuuaagcaggaagauu

SEQ ID NO: 515583 - RNA, 19 nt, Artificial Sequence
  Description of Artificial Sequence: Synthetic oligonucleotide
auggacugauuccugggua

SEQ ID NO: 515584 - RNA, 19 nt, Artificial Sequence
  Description of Artificial Sequence: Synthetic oligonucleotide
aacggucacuaugucuugu

SEQ ID NO: 515585 - RNA, 19 nt, Artificial Sequence
  Description of Artificial Sequence: Synthetic oligonucleotide
gauagaugauagauagaua

SEQ ID NO: 515586 - RNA, 19 nt, Artificial Sequence
  Description of Artificial Sequence: Synthetic oligonucleotide
uccuaauggggcagagcaa

SEQ ID NO: 515587 - RNA, 19 nt, Artificial Sequence
  Description of Artificial Sequence: Synthetic oligonucleotide
aggucaacuguaggagcac

SEQ ID NO: 515588 - RNA, 19 nt, Artificial Sequence
  Description of Artificial Sequence: Synthetic oligonucleotide
agaucagauucuucccaau

SEQ ID NO: 515589 - RNA, 19 nt, Artificial Sequence
  Description of Artificial Sequence: Synthetic oligonucleotide
aagauccuaauggggcaga

SEQ ID NO: 515590 - RNA, 19 nt, Artificial Sequence
  Description of Artificial Sequence: Synthetic oligonucleotide
guacauggggaacuccaga

SEQ ID NO: 515591 - RNA, 19 nt, Artificial Sequence
  Description of Artificial Sequence: Synthetic oligonucleotide
auagauagauggauagaua

SEQ ID NO: 515592 - RNA, 19 nt, Artificial Sequence
  Description of Artificial Sequence: Synthetic oligonucleotide
cuggguaaauaaacagaga

SEQ ID NO: 515593 - RNA, 19 nt, Artificial Sequence
  Description of Artificial Sequence: Synthetic oligonucleotide
ggcucauucgugguuuugg

SEQ ID NO: 515594 - RNA, 19 nt, Artificial Sequence
  Description of Artificial Sequence: Synthetic oligonucleotide
aacgcuucccauggugagu

SEQ ID NO: 515595 - RNA, 19 nt, Artificial Sequence
  Description of Artificial Sequence: Synthetic oligonucleotide
gauagauagcuagauggau

SEQ ID NO: 515596 - RNA, 19 nt, Artificial Sequence
  Description of Artificial Sequence: Synthetic oligonucleotide
aaccacuggcuagucucag

SEQ ID NO: 515597 - RNA, 19 nt, Artificial Sequence
  Description of Artificial Sequence: Synthetic oligonucleotide
uagucucagauggaguuuu

SEQ ID NO: 515598 - RNA, 19 nt, Artificial Sequence
  Description of Artificial Sequence: Synthetic oligonucleotide
caccaacucacucagaaau

SEQ ID NO: 515599 - RNA, 19 nt, Artificial Sequence
  Description of Artificial Sequence: Synthetic oligonucleotide
auggaguuuuaaagcaugu

SEQ ID NO: 515600 - RNA, 19 nt, Artificial Sequence
  Description of Artificial Sequence: Synthetic oligonucleotide
uagccuguacagcuagaua

SEQ ID NO: 515601 - RNA, 19 nt, Artificial Sequence
  Description of Artificial Sequence: Synthetic oligonucleotide
aaaccgcacccuccugaga

SEQ ID NO: 515602 - RNA, 19 nt, Artificial Sequence
  Description of Artificial Sequence: Synthetic oligonucleotide
gacuaaagugugaaagggu

SEQ ID NO: 515603 - RNA, 19 nt, Artificial Sequence
  Description of Artificial Sequence: Synthetic oligonucleotide
aggguuuuauaugcagcca

SEQ ID NO: 515604 - RNA, 19 nt, Artificial Sequence
  Description of Artificial Sequence: Synthetic oligonucleotide
cagcaauauuuauuggaaa

SEQ ID NO: 515605 - RNA, 19 nt, Artificial Sequence
  Description of Artificial Sequence: Synthetic oligonucleotide
aauagccuguacagcuaga

SEQ ID NO: 515606 - RNA, 19 nt, Artificial Sequence
  Description of Artificial Sequence: Synthetic oligonucleotide
gagauagaugauagauaga

SEQ ID NO: 515607 - RNA, 19 nt, Artificial Sequence
  Description of Artificial Sequence: Synthetic oligonucleotide
agauggaguuuuaaagcau

SEQ ID NO: 515608 - RNA, 19 nt, Artificial Sequence
  Description of Artificial Sequence: Synthetic oligonucleotide
agcgccggccuuuccuaac

SEQ ID NO: 515609 - RNA, 19 nt, Artificial Sequence
  Description of Artificial Sequence: Synthetic oligonucleotide
cauucgugguuuuggcuga

SEQ ID NO: 515610 - RNA, 19 nt, Artificial Sequence
  Description of Artificial Sequence: Synthetic oligonucleotide
ccuaauggggcagagcaac

SEQ ID NO: 515611 - RNA, 19 nt, Artificial Sequence
  Description of Artificial Sequence: Synthetic oligonucleotide
gcagugguuaaacuuaacu

SEQ ID NO: 515612 - RNA, 19 nt, Artificial Sequence
  Description of Artificial Sequence: Synthetic oligonucleotide
agauccuaauggggcagag

SEQ ID NO: 515613 - RNA, 19 nt, Artificial Sequence
  Description of Artificial Sequence: Synthetic oligonucleotide
auagagagauggauggaua

SEQ ID NO: 515614 - RNA, 19 nt, Artificial Sequence
  Description of Artificial Sequence: Synthetic oligonucleotide
aaguccaagcgccggccuu

SEQ ID NO: 515615 - RNA, 19 nt, Artificial Sequence
  Description of Artificial Sequence: Synthetic oligonucleotide
uagugagugugaugauauc

SEQ ID NO: 515616 - RNA, 19 nt, Artificial Sequence
  Description of Artificial Sequence: Synthetic oligonucleotide
uaccaaagcagugguuaaa

SEQ ID NO: 515617 - RNA, 19 nt, Artificial Sequence
  Description of Artificial Sequence: Synthetic oligonucleotide
cagaaaugggcuacguaua

SEQ ID NO: 515618 - RNA, 19 nt, Artificial Sequence
  Description of Artificial Sequence: Synthetic oligonucleotide
uuccuguauccuucagaaa

SEQ ID NO: 515619 - RNA, 19 nt, Artificial Sequence
  Description of Artificial Sequence: Synthetic oligonucleotide
agcagugguuaaacuuaac

SEQ ID NO: 515620 - RNA, 19 nt, Artificial Sequence
  Description of Artificial Sequence: Synthetic oligonucleotide
gucaacuguaggagcacac

SEQ ID NO: 515621 - RNA, 19 nt, Artificial Sequence
  Description of Artificial Sequence: Synthetic oligonucleotide
gcucauucgugguuuuggc

SEQ ID NO: 515622 - RNA, 19 nt, Artificial Sequence
  Description of Artificial Sequence: Synthetic oligonucleotide
ggcugauauucccuucuug

SEQ ID NO: 515623 - RNA, 19 nt, Artificial Sequence
  Description of Artificial Sequence: Synthetic oligonucleotide
ugggugccuaacaggacuu

SEQ ID NO: 515624 - RNA, 19 nt, Artificial Sequence
  Description of Artificial Sequence: Synthetic oligonucleotide
ggauagauagauagauaga

SEQ ID NO: 515625 - RNA, 19 nt, Artificial Sequence
  Description of Artificial Sequence: Synthetic oligonucleotide
ccuaguuugugguauucca

SEQ ID NO: 515626 - RNA, 19 nt, Artificial Sequence
  Description of Artificial Sequence: Synthetic oligonucleotide
ggauagauagcuagaugga

SEQ ID NO: 515627 - RNA, 19 nt, Artificial Sequence
  Description of Artificial Sequence: Synthetic oligonucleotide
gcauaucggaagcagcaca

SEQ ID NO: 515628 - RNA, 19 nt, Artificial Sequence
  Description of Artificial Sequence: Synthetic oligonucleotide
ggcuacguauauauacagc

SEQ ID NO: 515629 - RNA, 19 nt, Artificial Sequence
  Description of Artificial Sequence: Synthetic oligonucleotide
aaugggcuacguauauaua

SEQ ID NO: 515630 - RNA, 19 nt, Artificial Sequence
  Description of Artificial Sequence: Synthetic oligonucleotide
gcaaccagaauuucuacau

SEQ ID NO: 515631 - RNA, 19 nt, Artificial Sequence
  Description of Artificial Sequence: Synthetic oligonucleotide
ucccuucuuggcugagaug

SEQ ID NO: 515632 - RNA, 19 nt, Artificial Sequence
  Description of Artificial Sequence: Synthetic oligonucleotide
ccacaugaaccacuacugc

SEQ ID NO: 515633 - RNA, 19 nt, Artificial Sequence
  Description of Artificial Sequence: Synthetic oligonucleotide
agauaccgucuaucaccag

SEQ ID NO: 515634 - RNA, 19 nt, Artificial Sequence
  Description of Artificial Sequence: Synthetic oligonucleotide
auggauagauagauagaua

SEQ ID NO: 515635 - RNA, 19 nt, Artificial Sequence
  Description of Artificial Sequence: Synthetic oligonucleotide
ggccuuggaagauaccguc

SEQ ID NO: 515636 - RNA, 19 nt, Artificial Sequence
  Description of Artificial Sequence: Synthetic oligonucleotide
cauaucggaagcagcacau

SEQ ID NO: 515637 - RNA, 19 nt, Artificial Sequence
  Description of Artificial Sequence: Synthetic oligonucleotide
uauucccuucuuggcugag

SEQ ID NO: 515638 - RNA, 19 nt, Artificial Sequence
  Description of Artificial Sequence: Synthetic oligonucleotide
ggugccuaacaggacuucc

SEQ ID NO: 515639 - RNA, 19 nt, Artificial Sequence
  Description of Artificial Sequence: Synthetic oligonucleotide
acgccaccucucuagugcu

SEQ ID NO: 515640 - RNA, 19 nt, Artificial Sequence
  Description of Artificial Sequence: Synthetic oligonucleotide
uaccgucuaucaccagguc

SEQ ID NO: 515641 - RNA, 19 nt, Artificial Sequence
  Description of Artificial Sequence: Synthetic oligonucleotide
acggucacuaugucuuguu

SEQ ID NO: 515642 - RNA, 19 nt, Artificial Sequence
  Description of Artificial Sequence: Synthetic oligonucleotide
gaaaugggcuacguauaua

SEQ ID NO: 515643 - RNA, 19 nt, Artificial Sequence
  Description of Artificial Sequence: Synthetic oligonucleotide
gaugugggaaaugcuuacu

SEQ ID NO: 515644 - RNA, 19 nt, Artificial Sequence
  Description of Artificial Sequence: Synthetic oligonucleotide
agaugcgauagaaggguua

SEQ ID NO: 515645 - RNA, 19 nt, Artificial Sequence
  Description of Artificial Sequence: Synthetic oligonucleotide
agauagcuagauggauaga

SEQ ID NO: 515646 - RNA, 19 nt, Artificial Sequence
  Description of Artificial Sequence: Synthetic oligonucleotide
gacuuucuccucuguacau

SEQ ID NO: 515647 - RNA, 19 nt, Artificial Sequence
  Description of Artificial Sequence: Synthetic oligonucleotide
gccuaacaggacuuccaug

SEQ ID NO: 515648 - RNA, 19 nt, Artificial Sequence
  Description of Artificial Sequence: Synthetic oligonucleotide
gggucgaugaaguucugcu

SEQ ID NO: 515649 - RNA, 19 nt, Artificial Sequence
  Description of Artificial Sequence: Synthetic oligonucleotide
guuuuauaugcagccacau

SEQ ID NO: 515650 - RNA, 19 nt, Artificial Sequence
  Description of Artificial Sequence: Synthetic oligonucleotide
ggagcaacggucacuaugu

SEQ ID NO: 515651 - RNA, 19 nt, Artificial Sequence
  Description of Artificial Sequence: Synthetic oligonucleotide
cuaaagugugaaaggguuu

SEQ ID NO: 515652 - RNA, 19 nt, Artificial Sequence
  Description of Artificial Sequence: Synthetic oligonucleotide
caaggaaucugagcuugga

SEQ ID NO: 515653 - RNA, 19 nt, Artificial Sequence
  Description of Artificial Sequence: Synthetic oligonucleotide
ugcggccuucaugaugugu

SEQ ID NO: 515654 - RNA, 19 nt, Artificial Sequence
  Description of Artificial Sequence: Synthetic oligonucleotide
gggcugguccauuugggca

SEQ ID NO: 515655 - RNA, 19 nt, Artificial Sequence
  Description of Artificial Sequence: Synthetic oligonucleotide
gugccuaacaggacuucca

SEQ ID NO: 515656 - RNA, 19 nt, Artificial Sequence
  Description of Artificial Sequence: Synthetic oligonucleotide
cucauucgugguuuuggcu

SEQ ID NO: 515657 - RNA, 19 nt, Artificial Sequence
  Description of Artificial Sequence: Synthetic oligonucleotide
cuacguauauauacagcuu

SEQ ID NO: 515658 - RNA, 19 nt, Artificial Sequence
  Description of Artificial Sequence: Synthetic oligonucleotide
ggauggauagauagcuaga

SEQ ID NO: 515659 - RNA, 19 nt, Artificial Sequence
  Description of Artificial Sequence: Synthetic oligonucleotide
gcgauagaaggguuaaagu

SEQ ID NO: 515660 - RNA, 19 nt, Artificial Sequence
  Description of Artificial Sequence: Synthetic oligonucleotide
gagcaacggucacuauguc

SEQ ID NO: 515661 - RNA, 19 nt, Artificial Sequence
  Description of Artificial Sequence: Synthetic oligonucleotide
ugggugugccuguguggga

SEQ ID NO: 515662 - RNA, 19 nt, Artificial Sequence
  Description of Artificial Sequence: Synthetic oligonucleotide
acgcuucccauggugaguu

SEQ ID NO: 515663 - RNA, 19 nt, Artificial Sequence
  Description of Artificial Sequence: Synthetic oligonucleotide
cuggcuagucucagaugga

SEQ ID NO: 515664 - RNA, 19 nt, Artificial Sequence
  Description of Artificial Sequence: Synthetic oligonucleotide
cauggugaguuuauacauu

SEQ ID NO: 515665 - RNA, 19 nt, Artificial Sequence
  Description of Artificial Sequence: Synthetic oligonucleotide
gccuaguuugugguauucc

SEQ ID NO: 515666 - RNA, 19 nt, Artificial Sequence
  Description of Artificial Sequence: Synthetic oligonucleotide
caauuugauuagugagugu

SEQ ID NO: 515667 - RNA, 19 nt, Artificial Sequence
  Description of Artificial Sequence: Synthetic oligonucleotide
gcauuaccaaagcaguggu

SEQ ID NO: 515668 - RNA, 19 nt, Artificial Sequence
  Description of Artificial Sequence: Synthetic oligonucleotide
gucucagauggaguuuuaa

SEQ ID NO: 515669 - RNA, 19 nt, Artificial Sequence
  Description of Artificial Sequence: Synthetic oligonucleotide
auaucggaagcagcacauu

SEQ ID NO: 515670 - RNA, 19 nt, Artificial Sequence
  Description of Artificial Sequence: Synthetic oligonucleotide
ggcacggcagcagggcugg

SEQ ID NO: 515671 - RNA, 19 nt, Artificial Sequence
  Description of Artificial Sequence: Synthetic oligonucleotide
gaaguaggagauagaugau

SEQ ID NO: 515672 - RNA, 19 nt, Artificial Sequence
  Description of Artificial Sequence: Synthetic oligonucleotide
ggcauaucggaagcagcac

SEQ ID NO: 515673 - RNA, 19 nt, Artificial Sequence
  Description of Artificial Sequence: Synthetic oligonucleotide
cuaugaagaugugggaaau

SEQ ID NO: 515674 - RNA, 19 nt, Artificial Sequence
  Description of Artificial Sequence: Synthetic oligonucleotide
gcaacgcuucccaugguga

SEQ ID NO: 515675 - RNA, 19 nt, Artificial Sequence
  Description of Artificial Sequence: Synthetic oligonucleotide
aguccaagcgccggccuuu

SEQ ID NO: 515676 - RNA, 19 nt, Artificial Sequence
  Description of Artificial Sequence: Synthetic oligonucleotide
ccauggugaguuuauacau

SEQ ID NO: 515677 - RNA, 19 nt, Artificial Sequence
  Description of Artificial Sequence: Synthetic oligonucleotide
ggggaugcuucaccaacaa

SEQ ID NO: 515678 - RNA, 19 nt, Artificial Sequence
  Description of Artificial Sequence: Synthetic oligonucleotide
agccugacagugacuugcu

SEQ ID NO: 515679 - RNA, 19 nt, Artificial Sequence
  Description of Artificial Sequence: Synthetic oligonucleotide
ggucaacuguaggagcaca

SEQ ID NO: 515680 - RNA, 19 nt, Artificial Sequence
  Description of Artificial Sequence: Synthetic oligonucleotide
augcgauagaaggguuaaa

SEQ ID NO: 515681 - RNA, 19 nt, Artificial Sequence
  Description of Artificial Sequence: Synthetic oligonucleotide
gcuucaccaacaauucugu

SEQ ID NO: 515682 - RNA, 19 nt, Artificial Sequence
  Description of Artificial Sequence: Synthetic oligonucleotide
uucgugguuuuggcugaua

SEQ ID NO: 515683 - RNA, 19 nt, Artificial Sequence
  Description of Artificial Sequence: Synthetic oligonucleotide
cucuaggcucauucguggu

SEQ ID NO: 515684 - RNA, 19 nt, Artificial Sequence
  Description of Artificial Sequence: Synthetic oligonucleotide
gaaucucccucagauccuu

SEQ ID NO: 515685 - RNA, 19 nt, Artificial Sequence
  Description of Artificial Sequence: Synthetic oligonucleotide
gacugauuccuggguaaau

SEQ ID NO: 515686 - RNA, 19 nt, Artificial Sequence
  Description of Artificial Sequence: Synthetic oligonucleotide
cauuaccaaagcagugguu

SEQ ID NO: 515687 - RNA, 19 nt, Artificial Sequence
  Description of Artificial Sequence: Synthetic oligonucleotide
ugguccauuugggcaccuc

SEQ ID NO: 515688 - RNA, 19 nt, Artificial Sequence
  Description of Artificial Sequence: Synthetic oligonucleotide
ggucaacccaggacaugug

SEQ ID NO: 515689 - RNA, 19 nt, Artificial Sequence
  Description of Artificial Sequence: Synthetic oligonucleotide
cacggcagcagggcugguc

SEQ ID NO: 515690 - RNA, 19 nt, Artificial Sequence
  Description of Artificial Sequence: Synthetic oligonucleotide
cuucagaaaugggcuacgu

SEQ ID NO: 515691 - RNA, 19 nt, Artificial Sequence
  Description of Artificial Sequence: Synthetic oligonucleotide
guauuccagcuggcuuggc

SEQ ID NO: 515692 - RNA, 19 nt, Artificial Sequence
  Description of Artificial Sequence: Synthetic oligonucleotide
auucgugguuuuggcugau

SEQ ID NO: 515693 - RNA, 19 nt, Artificial Sequence
  Description of Artificial Sequence: Synthetic oligonucleotide
gccuguacagcuagauaaa

SEQ ID NO: 515694 - RNA, 19 nt, Artificial Sequence
  Description of Artificial Sequence: Synthetic oligonucleotide
cagacuggccaugaagcau

SEQ ID NO: 515695 - RNA, 19 nt, Artificial Sequence
  Description of Artificial Sequence: Synthetic oligonucleotide
cccguugggcugaguacug

SEQ ID NO: 515696 - RNA, 19 nt, Artificial Sequence
  Description of Artificial Sequence: Synthetic oligonucleotide
ggaacgccaccucucuagu

SEQ ID NO: 515697 - RNA, 19 nt, Artificial Sequence
  Description of Artificial Sequence: Synthetic oligonucleotide
cuagucucagauggaguuu

SEQ ID NO: 515698 - RNA, 19 nt, Artificial Sequence
  Description of Artificial Sequence: Synthetic oligonucleotide
cuacugcaaguggcauauc

SEQ ID NO: 515699 - RNA, 19 nt, Artificial Sequence
  Description of Artificial Sequence: Synthetic oligonucleotide
ggaucugcacugccuaguu

SEQ ID NO: 515700 - RNA, 19 nt, Artificial Sequence
  Description of Artificial Sequence: Synthetic oligonucleotide
gccccugggugagagacaa

SEQ ID NO: 515701 - RNA, 19 nt, Artificial Sequence
  Description of Artificial Sequence: Synthetic oligonucleotide
gggugagagacaauaucuu

SEQ ID NO: 515702 - RNA, 19 nt, Artificial Sequence
  Description of Artificial Sequence: Synthetic oligonucleotide
ggcuagucucagauggagu

SEQ ID NO: 515703 - RNA, 19 nt, Artificial Sequence
  Description of Artificial Sequence: Synthetic oligonucleotide
gggugccuaacaggacuuc

SEQ ID NO: 515704 - RNA, 19 nt, Artificial Sequence
  Description of Artificial Sequence: Synthetic oligonucleotide
gcggccuucaugauguguu

SEQ ID NO: 515705 - RNA, 19 nt, Artificial Sequence
  Description of Artificial Sequence: Synthetic oligonucleotide
ccugggugagagacaauau

SEQ ID NO: 515706 - RNA, 19 nt, Artificial Sequence
  Description of Artificial Sequence: Synthetic oligonucleotide
cugccuaguuugugguauu

SEQ ID NO: 515707 - RNA, 19 nt, Artificial Sequence
  Description of Artificial Sequence: Synthetic oligonucleotide
ccuguacagcuagauaaau

SEQ ID NO: 515708 - RNA, 19 nt, Artificial Sequence
  Description of Artificial Sequence: Synthetic oligonucleotide
cgucuaucaccaggucaac

SEQ ID NO: 515709 - RNA, 19 nt, Artificial Sequence
  Description of Artificial Sequence: Synthetic oligonucleotide
ccccguugggcugaguacu

SEQ ID NO: 515710 - RNA, 19 nt, Artificial Sequence
  Description of Artificial Sequence: Synthetic oligonucleotide
gccggccuuuccuaacuuu

SEQ ID NO: 515711 - RNA, 19 nt, Artificial Sequence
  Description of Artificial Sequence: Synthetic oligonucleotide
cagcaacgcuucccauggu

SEQ ID NO: 515712 - RNA, 19 nt, Artificial Sequence
  Description of Artificial Sequence: Synthetic oligonucleotide
cgugguuuuggcugauauu

SEQ ID NO: 515713 - RNA, 19 nt, Artificial Sequence
  Description of Artificial Sequence: Synthetic oligonucleotide
ccgcacccuccugagaacu

SEQ ID NO: 515714 - RNA, 19 nt, Artificial Sequence
  Description of Artificial Sequence: Synthetic oligonucleotide
ggcaaacucuaggcucauu

SEQ ID NO: 515715 - RNA, 19 nt, Artificial Sequence
  Description of Artificial Sequence: Synthetic oligonucleotide
ccguugggcugaguacugu

SEQ ID NO: 515716 - RNA, 19 nt, Artificial Sequence
  Description of Artificial Sequence: Synthetic oligonucleotide
ccacugcggccuucaugau

SEQ ID NO: 515717 - RNA, 19 nt, Artificial Sequence
  Description of Artificial Sequence: Synthetic oligonucleotide
ccccugggugagagacaau

SEQ ID NO: 515718 - RNA, 19 nt, Artificial Sequence
  Description of Artificial Sequence: Synthetic oligonucleotide
cgccggccuuuccuaacuu

SEQ ID NO: 515719 - RNA, 19 nt, Artificial Sequence
  Description of Artificial Sequence: Synthetic oligonucleotide
aauugcuucucuuaggauc

SEQ ID NO: 515720 - RNA, 19 nt, Artificial Sequence
  Description of Artificial Sequence: Synthetic oligonucleotide
aagacgagcacauggaacg

SEQ ID NO: 515721 - RNA, 19 nt, Artificial Sequence
  Description of Artificial Sequence: Synthetic oligonucleotide
uucaugauuaccaacacac

SEQ ID NO: 515722 - RNA, 19 nt, Artificial Sequence
  Description of Artificial Sequence: Synthetic oligonucleotide
gaaaguaccccacaaaagc

SEQ ID NO: 515723 - RNA, 19 nt, Artificial Sequence
  Description of Artificial Sequence: Synthetic oligonucleotide
aaagcuuuucaugauuacc

SEQ ID NO: 515724 - RNA, 19 nt, Artificial Sequence
  Description of Artificial Sequence: Synthetic oligonucleotide
aaguccauagaggagaagg

SEQ ID NO: 515725 - RNA, 19 nt, Artificial Sequence
  Description of Artificial Sequence: Synthetic oligonucleotide
aaguugauuauacauggcu

SEQ ID NO: 515726 - RNA, 19 nt, Artificial Sequence
  Description of Artificial Sequence: Synthetic oligonucleotide
uuuucacucaugcugguag

SEQ ID NO: 515727 - RNA, 19 nt, Artificial Sequence
  Description of Artificial Sequence: Synthetic oligonucleotide
aagaguugcaaccucauaa

SEQ ID NO: 515728 - RNA, 19 nt, Artificial Sequence
  Description of Artificial Sequence: Synthetic oligonucleotide
guugauuauacauggcugg

SEQ ID NO: 515729 - RNA, 19 nt, Artificial Sequence
  Description of Artificial Sequence: Synthetic oligonucleotide
gaugauauccaugaguccc

SEQ ID NO: 515730 - RNA, 19 nt, Artificial Sequence
  Description of Artificial Sequence: Synthetic oligonucleotide
agcacucucgauccgaucc

SEQ ID NO: 515731 - RNA, 19 nt, Artificial Sequence
  Description of Artificial Sequence: Synthetic oligonucleotide
uuaucgacacgcuggaugg

SEQ ID NO: 515732 - RNA, 19 nt, Artificial Sequence
  Description of Artificial Sequence: Synthetic oligonucleotide
ugugcuaaauguaugcaca

SEQ ID NO: 515733 - RNA, 19 nt, Artificial Sequence
  Description of Artificial Sequence: Synthetic oligonucleotide
ucaaccucuguccauuacg

SEQ ID NO: 515734 - RNA, 19 nt, Artificial Sequence
  Description of Artificial Sequence: Synthetic oligonucleotide
uacguuuuaccuguggucg

SEQ ID NO: 515735 - RNA, 19 nt, Artificial Sequence
  Description of Artificial Sequence: Synthetic oligonucleotide
acuucuuagaggucuaguc

SEQ ID NO: 515736 - RNA, 19 nt, Artificial Sequence
  Description of Artificial Sequence: Synthetic oligonucleotide
aagcucacaacauagcuaa

SEQ ID NO: 515737 - RNA, 19 nt, Artificial Sequence
  Description of Artificial Sequence: Synthetic oligonucleotide
uccaagguaaguccauugg

SEQ ID NO: 515738 - RNA, 19 nt, Artificial Sequence
  Description of Artificial Sequence: Synthetic oligonucleotide
uucucuuaggaucccagag

SEQ ID NO: 515739 - RNA, 19 nt, Artificial Sequence
  Description of Artificial Sequence: Synthetic oligonucleotide
uguuacgugagcucaagga

SEQ ID NO: 515740 - RNA, 19 nt, Artificial Sequence
  Description of Artificial Sequence: Synthetic oligonucleotide
ugucuagucauucuuugga

SEQ ID NO: 515741 - RNA, 19 nt, Artificial Sequence
  Description of Artificial Sequence: Synthetic oligonucleotide
uaggauacugugcuaaaug

SEQ ID NO: 515742 - RNA, 19 nt, Artificial Sequence
  Description of Artificial Sequence: Synthetic oligonucleotide
ucacaacauagcuaaaggc

SEQ ID NO: 515743 - RNA, 19 nt, Artificial Sequence
  Description of Artificial Sequence: Synthetic oligonucleotide
ugcaaucaccaccaaaacc

SEQ ID NO: 515744 - RNA, 19 nt, Artificial Sequence
  Description of Artificial Sequence: Synthetic oligonucleotide
aagaacgcaaggugguggg

SEQ ID NO: 515745 - RNA, 19 nt, Artificial Sequence
  Description of Artificial Sequence: Synthetic oligonucleotide
cuuaggaucccagagaaug

SEQ ID NO: 515746 - RNA, 19 nt, Artificial Sequence
  Description of Artificial Sequence: Synthetic oligonucleotide
cauaauacuucuccugagg

SEQ ID NO: 515747 - RNA, 19 nt, Artificial Sequence
  Description of Artificial Sequence: Synthetic oligonucleotide
cauaguccaagguaagucc

SEQ ID NO: 515748 - RNA, 19 nt, Artificial Sequence
  Description of Artificial Sequence: Synthetic oligonucleotide
aguuauccaagguagaaau

SEQ ID NO: 515749 - RNA, 19 nt, Artificial Sequence
  Description of Artificial Sequence: Synthetic oligonucleotide
uccauuacguuuuaccugu

SEQ ID NO: 515750 - RNA, 19 nt, Artificial Sequence
  Description of Artificial Sequence: Synthetic oligonucleotide
acagaauugcuucucuuag

SEQ ID NO: 515751 - RNA, 19 nt, Artificial Sequence
  Description of Artificial Sequence: Synthetic oligonucleotide
gauaucauaguccaaggua

SEQ ID NO: 515752 - RNA, 19 nt, Artificial Sequence
  Description of Artificial Sequence: Synthetic oligonucleotide
gauccugcggauaucauag

SEQ ID NO: 515753 - RNA, 19 nt, Artificial Sequence
  Description of Artificial Sequence: Synthetic oligonucleotide
ucaugauuaccaacacacg

SEQ ID NO: 515754 - RNA, 19 nt, Artificial Sequence
  Description of Artificial Sequence: Synthetic oligonucleotide
agaauugcuucucuuagga

SEQ ID NO: 515755 - RNA, 19 nt, Artificial Sequence
  Description of Artificial Sequence: Synthetic oligonucleotide
uccggcaggagcaugaaca

SEQ ID NO: 515756 - RNA, 19 nt, Artificial Sequence
  Description of Artificial Sequence: Synthetic oligonucleotide
uaucacagcugacaaagcu

SEQ ID NO: 515757 - RNA, 19 nt, Artificial Sequence
  Description of Artificial Sequence: Synthetic oligonucleotide
aggucuagucuccaaggcc

SEQ ID NO: 515758 - RNA, 19 nt, Artificial Sequence
  Description of Artificial Sequence: Synthetic oligonucleotide
uugugguuggguaacacgu

SEQ ID NO: 515759 - RNA, 19 nt, Artificial Sequence
  Description of Artificial Sequence: Synthetic oligonucleotide
agcacuuagagaaugaacu

SEQ ID NO: 515760 - RNA, 19 nt, Artificial Sequence
  Description of Artificial Sequence: Synthetic oligonucleotide
uaaaggcuugggaagagga

SEQ ID NO: 515761 - RNA, 19 nt, Artificial Sequence
  Description of Artificial Sequence: Synthetic oligonucleotide
uuuucucucaaccucuguc

SEQ ID NO: 515762 - RNA, 19 nt, Artificial Sequence
  Description of Artificial Sequence: Synthetic oligonucleotide
uuccuagccauuuaggaaa

SEQ ID NO: 515763 - RNA, 19 nt, Artificial Sequence
  Description of Artificial Sequence: Synthetic oligonucleotide
ucaugcauacaugaucccg

SEQ ID NO: 515764 - RNA, 19 nt, Artificial Sequence
  Description of Artificial Sequence: Synthetic oligonucleotide
cuuaucgacacgcuggaug

SEQ ID NO: 515765 - RNA, 19 nt, Artificial Sequence
  Description of Artificial Sequence: Synthetic oligonucleotide
guacuuaucgacacgcugg

SEQ ID NO: 515766 - RNA, 19 nt, Artificial Sequence
  Description of Artificial Sequence: Synthetic oligonucleotide
auuacguuuuaccuguggu

SEQ ID NO: 515767 - RNA, 19 nt, Artificial Sequence
  Description of Artificial Sequence: Synthetic oligonucleotide
aguacuuaucgacacgcug

SEQ ID NO: 515768 - RNA, 19 nt, Artificial Sequence
  Description of Artificial Sequence: Synthetic oligonucleotide
uguucacucaagcucacaa

SEQ ID NO: 515769 - RNA, 19 nt, Artificial Sequence
  Description of Artificial Sequence: Synthetic oligonucleotide
ucauaauacuucuccugag

SEQ ID NO: 515770 - RNA, 19 nt, Artificial Sequence
  Description of Artificial Sequence: Synthetic oligonucleotide
aacggggccgugcuguuac

SEQ ID NO: 515771 - RNA, 19 nt, Artificial Sequence
  Description of Artificial Sequence: Synthetic oligonucleotide
ucuacgcugaccaggaauc

SEQ ID NO: 515772 - RNA, 19 nt, Artificial Sequence
  Description of Artificial Sequence: Synthetic oligonucleotide
uuagugaguugccaugaca

SEQ ID NO: 515773 - RNA, 19 nt, Artificial Sequence
  Description of Artificial Sequence: Synthetic oligonucleotide
uggacgucagguaaguaac

SEQ ID NO: 515774 - RNA, 19 nt, Artificial Sequence
  Description of Artificial Sequence: Synthetic oligonucleotide
guggaagcgaguuugggug

SEQ ID NO: 515775 - RNA, 19 nt, Artificial Sequence
  Description of Artificial Sequence: Synthetic oligonucleotide
ucucuuaggaucccagaga

SEQ ID NO: 515776 - RNA, 19 nt, Artificial Sequence
  Description of Artificial Sequence: Synthetic oligonucleotide
aacauagcuaaaggcuugg

SEQ ID NO: 515777 - RNA, 19 nt, Artificial Sequence
  Description of Artificial Sequence: Synthetic oligonucleotide
gaagaacgcaagguggugg

SEQ ID NO: 515778 - RNA, 19 nt, Artificial Sequence
  Description of Artificial Sequence: Synthetic oligonucleotide
cugugugagggcaaagggg

SEQ ID NO: 515779 - RNA, 19 nt, Artificial Sequence
  Description of Artificial Sequence: Synthetic oligonucleotide
uagaagaacgcaagguggu

SEQ ID NO: 515780 - RNA, 19 nt, Artificial Sequence
  Description of Artificial Sequence: Synthetic oligonucleotide
caugauuaccaacacacga

SEQ ID NO: 515781 - RNA, 19 nt, Artificial Sequence
  Description of Artificial Sequence: Synthetic oligonucleotide
uuaccaacacacgaggcug

SEQ ID NO: 515782 - RNA, 19 nt, Artificial Sequence
  Description of Artificial Sequence: Synthetic oligonucleotide
ucuaguugcucuuccuagc

SEQ ID NO: 515783 - RNA, 19 nt, Artificial Sequence
  Description of Artificial Sequence: Synthetic oligonucleotide
guaaguaacagguucgucu

SEQ ID NO: 515784 - RNA, 19 nt, Artificial Sequence
  Description of Artificial Sequence: Synthetic oligonucleotide
aaaguaccccacaaaagcu

SEQ ID NO: 515785 - RNA, 19 nt, Artificial Sequence
  Description of Artificial Sequence: Synthetic oligonucleotide
cuuguuucggccugaguac

SEQ ID NO: 515786 - RNA, 19 nt, Artificial Sequence
  Description of Artificial Sequence: Synthetic oligonucleotide
auuagugaguugccaugac

SEQ ID NO: 515787 - RNA, 19 nt, Artificial Sequence
  Description of Artificial Sequence: Synthetic oligonucleotide
augauuaccaacacacgag

SEQ ID NO: 515788 - RNA, 19 nt, Artificial Sequence
  Description of Artificial Sequence: Synthetic oligonucleotide
auagaggagaaggaucggg

SEQ ID NO: 515789 - RNA, 19 nt, Artificial Sequence
  Description of Artificial Sequence: Synthetic oligonucleotide
ucuuauaggaaaguugauu

SEQ ID NO: 515790 - RNA, 19 nt, Artificial Sequence
  Description of Artificial Sequence: Synthetic oligonucleotide
aaaggcuugggaagaggac

SEQ ID NO: 515791 - RNA, 19 nt, Artificial Sequence
  Description of Artificial Sequence: Synthetic oligonucleotide
aauuguggucagguccacc

SEQ ID NO: 515792 - RNA, 19 nt, Artificial Sequence
  Description of Artificial Sequence: Synthetic oligonucleotide
acccguuguucacucaagc

SEQ ID NO: 515793 - RNA, 19 nt, Artificial Sequence
  Description of Artificial Sequence: Synthetic oligonucleotide
uauuagugaguugccauga

SEQ ID NO: 515794 - RNA, 19 nt, Artificial Sequence
  Description of Artificial Sequence: Synthetic oligonucleotide
cagagaggaggcaaauucc

SEQ ID NO: 515795 - RNA, 19 nt, Artificial Sequence
  Description of Artificial Sequence: Synthetic oligonucleotide
acgucagguaaguaacagg

SEQ ID NO: 515796 - RNA, 19 nt, Artificial Sequence
  Description of Artificial Sequence: Synthetic oligonucleotide
ucaaggaucagaaguccau

SEQ ID NO: 515797 - RNA, 19 nt, Artificial Sequence
  Description of Artificial Sequence: Synthetic oligonucleotide
auaucauaguccaagguaa

SEQ ID NO: 515798 - RNA, 19 nt, Artificial Sequence
  Description of Artificial Sequence: Synthetic oligonucleotide
aguaacagguucgucuggg

SEQ ID NO: 515799 - RNA, 19 nt, Artificial Sequence
  Description of Artificial Sequence: Synthetic oligonucleotide
ucauaguccaagguaaguc

SEQ ID NO: 515800 - RNA, 19 nt, Artificial Sequence
  Description of Artificial Sequence: Synthetic oligonucleotide
gggaguuccuauuagugag

SEQ ID NO: 515801 - RNA, 19 nt, Artificial Sequence
  Description of Artificial Sequence: Synthetic oligonucleotide
cuaguugcucuuccuagcc

SEQ ID NO: 515802 - RNA, 19 nt, Artificial Sequence
  Description of Artificial Sequence: Synthetic oligonucleotide
cugugcuaaauguaugcac

SEQ ID NO: 515803 - RNA, 19 nt, Artificial Sequence
  Description of Artificial Sequence: Synthetic oligonucleotide
auggacgucagguaaguaa

SEQ ID NO: 515804 - RNA, 19 nt, Artificial Sequence
  Description of Artificial Sequence: Synthetic oligonucleotide
cagaauugcuucucuuagg

SEQ ID NO: 515805 - RNA, 19 nt, Artificial Sequence
  Description of Artificial Sequence: Synthetic oligonucleotide
uuugcccguucaaucuugg

SEQ ID NO: 515806 - RNA, 19 nt, Artificial Sequence
  Description of Artificial Sequence: Synthetic oligonucleotide
uaggaaaguugauuauaca

SEQ ID NO: 515807 - RNA, 19 nt, Artificial Sequence
  Description of Artificial Sequence: Synthetic oligonucleotide
uacuuaucgacacgcugga

SEQ ID NO: 515808 - RNA, 19 nt, Artificial Sequence
  Description of Artificial Sequence: Synthetic oligonucleotide
acguuuuaccuguggucgc

SEQ ID NO: 515809 - RNA, 19 nt, Artificial Sequence
  Description of Artificial Sequence: Synthetic oligonucleotide
gagcaugaacagcuuaagc

SEQ ID NO: 515810 - RNA, 19 nt, Artificial Sequence
  Description of Artificial Sequence: Synthetic oligonucleotide
cauuacguuuuaccugugg

SEQ ID NO: 515811 - RNA, 19 nt, Artificial Sequence
  Description of Artificial Sequence: Synthetic oligonucleotide
cuagcaggccaguucacag

SEQ ID NO: 515812 - RNA, 19 nt, Artificial Sequence
  Description of Artificial Sequence: Synthetic oligonucleotide
gaggcacuaggccagguac

SEQ ID NO: 515813 - RNA, 19 nt, Artificial Sequence
  Description of Artificial Sequence: Synthetic oligonucleotide
acgggagcuucgcaguugc

SEQ ID NO: 515814 - RNA, 19 nt, Artificial Sequence
  Description of Artificial Sequence: Synthetic oligonucleotide
uggauauaucuugugacuc

SEQ ID NO: 515815 - RNA, 19 nt, Artificial Sequence
  Description of Artificial Sequence: Synthetic oligonucleotide
gugguagaagaacgcaagg

SEQ ID NO: 515816 - RNA, 19 nt, Artificial Sequence
  Description of Artificial Sequence: Synthetic oligonucleotide
agcucaaggaucagaaguc

SEQ ID NO: 515817 - RNA, 19 nt, Artificial Sequence
  Description of Artificial Sequence: Synthetic oligonucleotide
ugugguuggguaacacgug

SEQ ID NO: 515818 - RNA, 19 nt, Artificial Sequence
  Description of Artificial Sequence: Synthetic oligonucleotide
agaguugcaaccucauaau

SEQ ID NO: 515819 - RNA, 19 nt, Artificial Sequence
  Description of Artificial Sequence: Synthetic oligonucleotide
uggaagcgaguuugggugg

SEQ ID NO: 515820 - RNA, 19 nt, Artificial Sequence
  Description of Artificial Sequence: Synthetic oligonucleotide
cauagcugaugugaagucc

SEQ ID NO: 515821 - RNA, 19 nt, Artificial Sequence
  Description of Artificial Sequence: Synthetic oligonucleotide
cuagccauuuaggaaaaug

SEQ ID NO: 515822 - RNA, 19 nt, Artificial Sequence
  Description of Artificial Sequence: Synthetic oligonucleotide
cucuuccuagccauuuagg

SEQ ID NO: 515823 - RNA, 19 nt, Artificial Sequence
  Description of Artificial Sequence: Synthetic oligonucleotide
agggaguuccuauuaguga

SEQ ID NO: 515824 - RNA, 19 nt, Artificial Sequence
  Description of Artificial Sequence: Synthetic oligonucleotide
gagacggagcucuacgcug

SEQ ID NO: 515825 - RNA, 19 nt, Artificial Sequence
  Description of Artificial Sequence: Synthetic oligonucleotide
uuuuaccuguggucgcuag

SEQ ID NO: 515826 - RNA, 19 nt, Artificial Sequence
  Description of Artificial Sequence: Synthetic oligonucleotide
gagggaguuccuauuagug

SEQ ID NO: 515827 - RNA, 19 nt, Artificial Sequence
  Description of Artificial Sequence: Synthetic oligonucleotide
uuucacucaugcugguagc

SEQ ID NO: 515828 - RNA, 19 nt, Artificial Sequence
  Description of Artificial Sequence: Synthetic oligonucleotide
gauuaccaacacacgaggc

SEQ ID NO: 515829 - RNA, 19 nt, Artificial Sequence
  Description of Artificial Sequence: Synthetic oligonucleotide
gugcuaaauguaugcacag

SEQ ID NO: 515830 - RNA, 19 nt, Artificial Sequence
  Description of Artificial Sequence: Synthetic oligonucleotide
ugagcucaaggaucagaag

SEQ ID NO: 515831 - RNA, 19 nt, Artificial Sequence
  Description of Artificial Sequence: Synthetic oligonucleotide
gagagacggagcucuacgc

SEQ ID NO: 515832 - RNA, 19 nt, Artificial Sequence
  Description of Artificial Sequence: Synthetic oligonucleotide
caacauagcuaaaggcuug

SEQ ID NO: 515833 - RNA, 19 nt, Artificial Sequence
  Description of Artificial Sequence: Synthetic oligonucleotide
gacgucagguaaguaacag

SEQ ID NO: 515834 - RNA, 19 nt, Artificial Sequence
  Description of Artificial Sequence: Synthetic oligonucleotide
uggugguagaagaacgcaa

SEQ ID NO: 515835 - RNA, 19 nt, Artificial Sequence
  Description of Artificial Sequence: Synthetic oligonucleotide
cugaguacuuaucgacacg

SEQ ID NO: 515836 - RNA, 19 nt, Artificial Sequence
  Description of Artificial Sequence: Synthetic oligonucleotide
accagggcgaaaguacccc

SEQ ID NO: 515837 - RNA, 19 nt, Artificial Sequence
  Description of Artificial Sequence: Synthetic oligonucleotide
agcgaguuugggugggagg

SEQ ID NO: 515838 - RNA, 19 nt, Artificial Sequence
  Description of Artificial Sequence: Synthetic oligonucleotide
guaacagguucgucugggg

SEQ ID NO: 515839 - RNA, 19 nt, Artificial Sequence
  Description of Artificial Sequence: Synthetic oligonucleotide
ugcuaaauguaugcacagc

SEQ ID NO: 515840 - RNA, 19 nt, Artificial Sequence
  Description of Artificial Sequence: Synthetic oligonucleotide
ggcacuuuagaccuggcuc

SEQ ID NO: 515841 - RNA, 19 nt, Artificial Sequence
  Description of Artificial Sequence: Synthetic oligonucleotide
gauuauacauggcugguuu

SEQ ID NO: 515842 - RNA, 19 nt, Artificial Sequence
  Description of Artificial Sequence: Synthetic oligonucleotide
uugauuauacauggcuggu

SEQ ID NO: 515843 - RNA, 19 nt, Artificial Sequence
  Description of Artificial Sequence: Synthetic oligonucleotide
uucaugcauacaugauccc

SEQ ID NO: 515844 - RNA, 19 nt, Artificial Sequence
  Description of Artificial Sequence: Synthetic oligonucleotide
agagacggagcucuacgcu

SEQ ID NO: 515845 - RNA, 19 nt, Artificial Sequence
  Description of Artificial Sequence: Synthetic oligonucleotide
acccaguagauccugcgga

SEQ ID NO: 515846 - RNA, 19 nt, Artificial Sequence
  Description of Artificial Sequence: Synthetic oligonucleotide
aacuucuuagaggucuagu

SEQ ID NO: 515847 - RNA, 19 nt, Artificial Sequence
  Description of Artificial Sequence: Synthetic oligonucleotide
ucacucaagcucacaacau

SEQ ID NO: 515848 - RNA, 19 nt, Artificial Sequence
  Description of Artificial Sequence: Synthetic oligonucleotide
gauauccaugagucccucc

SEQ ID NO: 515849 - RNA, 19 nt, Artificial Sequence
  Description of Artificial Sequence: Synthetic oligonucleotide
cugaggagagcuuggguuc

SEQ ID NO: 515850 - RNA, 19 nt, Artificial Sequence
  Description of Artificial Sequence: Synthetic oligonucleotide
aggagggaguuccuauuag

SEQ ID NO: 515851 - RNA, 19 nt, Artificial Sequence
  Description of Artificial Sequence: Synthetic oligonucleotide
ggagagacggagcucuacg

SEQ ID NO: 515852 - RNA, 19 nt, Artificial Sequence
  Description of Artificial Sequence: Synthetic oligonucleotide
uucuuauaggaaaguugau

SEQ ID NO: 515853 - RNA, 19 nt, Artificial Sequence
  Description of Artificial Sequence: Synthetic oligonucleotide
cauagcuaaaggcuuggga

SEQ ID NO: 515854 - RNA, 19 nt, Artificial Sequence
  Description of Artificial Sequence: Synthetic oligonucleotide
uaacacgugggcuucuuuu

SEQ ID NO: 515855 - RNA, 19 nt, Artificial Sequence
  Description of Artificial Sequence: Synthetic oligonucleotide
uuuaccuguggucgcuagu

SEQ ID NO: 515856 - RNA, 19 nt, Artificial Sequence
  Description of Artificial Sequence: Synthetic oligonucleotide
aucaauugcaguggugcug

SEQ ID NO: 515857 - RNA, 19 nt, Artificial Sequence
  Description of Artificial Sequence: Synthetic oligonucleotide
augaucccguagaaggccc

SEQ ID NO: 515858 - RNA, 19 nt, Artificial Sequence
  Description of Artificial Sequence: Synthetic oligonucleotide
agccucauuagaauggaca

SEQ ID NO: 515859 - RNA, 19 nt, Artificial Sequence
  Description of Artificial Sequence: Synthetic oligonucleotide
auacaugaucccguagaag

SEQ ID NO: 515860 - RNA, 19 nt, Artificial Sequence
  Description of Artificial Sequence: Synthetic oligonucleotide
uccuauuagugaguugcca

SEQ ID NO: 515861 - RNA, 19 nt, Artificial Sequence
  Description of Artificial Sequence: Synthetic oligonucleotide
ugcggggcaggcacggagg

SEQ ID NO: 515862 - RNA, 19 nt, Artificial Sequence
  Description of Artificial Sequence: Synthetic oligonucleotide
accuguaucacagcugaca

SEQ ID NO: 515863 - RNA, 19 nt, Artificial Sequence
  Description of Artificial Sequence: Synthetic oligonucleotide
uuaccuguggucgcuaguc

SEQ ID NO: 515864 - RNA, 19 nt, Artificial Sequence
  Description of Artificial Sequence: Synthetic oligonucleotide
ggucuagucuccaaggccc

SEQ ID NO: 515865 - RNA, 19 nt, Artificial Sequence
  Description of Artificial Sequence: Synthetic oligonucleotide
ccaagguaaguccauuggg

SEQ ID NO: 515866 - RNA, 19 nt, Artificial Sequence
  Description of Artificial Sequence: Synthetic oligonucleotide
agacauuccggcaggagca

SEQ ID NO: 515867 - RNA, 19 nt, Artificial Sequence
  Description of Artificial Sequence: Synthetic oligonucleotide
guccaagguaaguccauug

SEQ ID NO: 515868 - RNA, 19 nt, Artificial Sequence
  Description of Artificial Sequence: Synthetic oligonucleotide
gaguugccaugacaggggc

SEQ ID NO: 515869 - RNA, 19 nt, Artificial Sequence
  Description of Artificial Sequence: Synthetic oligonucleotide
ggugguagaagaacgcaag

SEQ ID NO: 515870 - RNA, 19 nt, Artificial Sequence
  Description of Artificial Sequence: Synthetic oligonucleotide
ugaccaaaaccugccgcag

SEQ ID NO: 515871 - RNA, 19 nt, Artificial Sequence
  Description of Artificial Sequence: Synthetic oligonucleotide
cugcggauaucauagucca

SEQ ID NO: 515872 - RNA, 19 nt, Artificial Sequence
  Description of Artificial Sequence: Synthetic oligonucleotide
uaccuguggucgcuagucc

SEQ ID NO: 515873 - RNA, 19 nt, Artificial Sequence
  Description of Artificial Sequence: Synthetic oligonucleotide
acacgcuggauggauuugg

SEQ ID NO: 515874 - RNA, 19 nt, Artificial Sequence
  Description of Artificial Sequence: Synthetic oligonucleotide
uccagcccgugucuggcag

SEQ ID NO: 515875 - RNA, 19 nt, Artificial Sequence
  Description of Artificial Sequence: Synthetic oligonucleotide
guuauccaagguagaaaug

SEQ ID NO: 515876 - RNA, 19 nt, Artificial Sequence
  Description of Artificial Sequence: Synthetic oligonucleotide
cuguuacgugagcucaagg

SEQ ID NO: 515877 - RNA, 19 nt, Artificial Sequence
  Description of Artificial Sequence: Synthetic oligonucleotide
gcauacaugaucccguaga

SEQ ID NO: 515878 - RNA, 19 nt, Artificial Sequence
  Description of Artificial Sequence: Synthetic oligonucleotide
cacaacaaugaagcucagg

SEQ ID NO: 515879 - RNA, 19 nt, Artificial Sequence
  Description of Artificial Sequence: Synthetic oligonucleotide
gccucauuagaauggacac

SEQ ID NO: 515880 - RNA, 19 nt, Artificial Sequence
  Description of Artificial Sequence: Synthetic oligonucleotide
cacccaguagauccugcgg

SEQ ID NO: 515881 - RNA, 19 nt, Artificial Sequence
  Description of Artificial Sequence: Synthetic oligonucleotide
aacgcaagguggugggcau

SEQ ID NO: 515882 - RNA, 19 nt, Artificial Sequence
  Description of Artificial Sequence: Synthetic oligonucleotide
ccaagggaaggagagacgg

SEQ ID NO: 515883 - RNA, 19 nt, Artificial Sequence
  Description of Artificial Sequence: Synthetic oligonucleotide
uuagaggucuagucuccaa

SEQ ID NO: 515884 - RNA, 19 nt, Artificial Sequence
  Description of Artificial Sequence: Synthetic oligonucleotide
gcucacaacauagcuaaag

SEQ ID NO: 515885 - RNA, 19 nt, Artificial Sequence
  Description of Artificial Sequence: Synthetic oligonucleotide
cugcaaucaccaccaaaac

SEQ ID NO: 515886 - RNA, 19 nt, Artificial Sequence
  Description of Artificial Sequence: Synthetic oligonucleotide
aagcgaguuugggugggag

SEQ ID NO: 515887 - RNA, 19 nt, Artificial Sequence
  Description of Artificial Sequence: Synthetic oligonucleotide
uagcaggccaguucacaga

SEQ ID NO: 515888 - RNA, 19 nt, Artificial Sequence
  Description of Artificial Sequence: Synthetic oligonucleotide
agacugaggaguccaccga

SEQ ID NO: 515889 - RNA, 19 nt, Artificial Sequence
  Description of Artificial Sequence: Synthetic oligonucleotide
ccugaguacuuaucgacac

SEQ ID NO: 515890 - RNA, 19 nt, Artificial Sequence
  Description of Artificial Sequence: Synthetic oligonucleotide
gguuggguaacacgugggc

SEQ ID NO: 515891 - RNA, 19 nt, Artificial Sequence
  Description of Artificial Sequence: Synthetic oligonucleotide
uccuagccauuuaggaaaa

SEQ ID NO: 515892 - RNA, 19 nt, Artificial Sequence
  Description of Artificial Sequence: Synthetic oligonucleotide
aguagauccugcggauauc

SEQ ID NO: 515893 - RNA, 19 nt, Artificial Sequence
  Description of Artificial Sequence: Synthetic oligonucleotide
agcuaaaggcuugggaaga

SEQ ID NO: 515894 - RNA, 19 nt, Artificial Sequence
  Description of Artificial Sequence: Synthetic oligonucleotide
aguugccaugacaggggcc

SEQ ID NO: 515895 - RNA, 19 nt, Artificial Sequence
  Description of Artificial Sequence: Synthetic oligonucleotide
ugauuauacauggcugguu

SEQ ID NO: 515896 - RNA, 19 nt, Artificial Sequence
  Description of Artificial Sequence: Synthetic oligonucleotide
cauacaugaucccguagaa

SEQ ID NO: 515897 - RNA, 19 nt, Artificial Sequence
  Description of Artificial Sequence: Synthetic oligonucleotide
cauagaggagaaggaucgg

SEQ ID NO: 515898 - RNA, 19 nt, Artificial Sequence
  Description of Artificial Sequence: Synthetic oligonucleotide
agaagaacgcaagguggug

SEQ ID NO: 515899 - RNA, 19 nt, Artificial Sequence
  Description of Artificial Sequence: Synthetic oligonucleotide
agguaggauacugugcuaa

SEQ ID NO: 515900 - RNA, 19 nt, Artificial Sequence
  Description of Artificial Sequence: Synthetic oligonucleotide
cucaaggaucagaagucca

SEQ ID NO: 515901 - RNA, 19 nt, Artificial Sequence
  Description of Artificial Sequence: Synthetic oligonucleotide
guagauccaccuguccugc

SEQ ID NO: 515902 - RNA, 19 nt, Artificial Sequence
  Description of Artificial Sequence: Synthetic oligonucleotide
gcaauguggccccagucug

SEQ ID NO: 515903 - RNA, 19 nt, Artificial Sequence
  Description of Artificial Sequence: Synthetic oligonucleotide
ugaugaggaccuuccgcuc

SEQ ID NO: 515904 - RNA, 19 nt, Artificial Sequence
  Description of Artificial Sequence: Synthetic oligonucleotide
caugcauacaugaucccgu

SEQ ID NO: 515905 - RNA, 19 nt, Artificial Sequence
  Description of Artificial Sequence: Synthetic oligonucleotide
gaacgcaagguggugggca

SEQ ID NO: 515906 - RNA, 19 nt, Artificial Sequence
  Description of Artificial Sequence: Synthetic oligonucleotide
uuguuucggccugaguacu

SEQ ID NO: 515907 - RNA, 19 nt, Artificial Sequence
  Description of Artificial Sequence: Synthetic oligonucleotide
gcgaaaguaccccacaaaa

SEQ ID NO: 515908 - RNA, 19 nt, Artificial Sequence
  Description of Artificial Sequence: Synthetic oligonucleotide
aggcacacccgcugagggg

SEQ ID NO: 515909 - RNA, 19 nt, Artificial Sequence
  Description of Artificial Sequence: Synthetic oligonucleotide
acagcuuaagccacaccca

SEQ ID NO: 515910 - RNA, 19 nt, Artificial Sequence
  Description of Artificial Sequence: Synthetic oligonucleotide
agacgagcacauggaacgg

SEQ ID NO: 515911 - RNA, 19 nt, Artificial Sequence
  Description of Artificial Sequence: Synthetic oligonucleotide
ggaucccagagaaugggag

SEQ ID NO: 515912 - RNA, 19 nt, Artificial Sequence
  Description of Artificial Sequence: Synthetic oligonucleotide
cuggauauaucuugugacu

SEQ ID NO: 515913 - RNA, 19 nt, Artificial Sequence
  Description of Artificial Sequence: Synthetic oligonucleotide
ggacaccacgaugauaucc

SEQ ID NO: 515914 - RNA, 19 nt, Artificial Sequence
  Description of Artificial Sequence: Synthetic oligonucleotide
gaguugcaaccucauaaua

SEQ ID NO: 515915 - RNA, 19 nt, Artificial Sequence
  Description of Artificial Sequence: Synthetic oligonucleotide
uggucgcuagucccagccc

SEQ ID NO: 515916 - RNA, 19 nt, Artificial Sequence
  Description of Artificial Sequence: Synthetic oligonucleotide
agcgagggcugacugucug

SEQ ID NO: 515917 - RNA, 19 nt, Artificial Sequence
  Description of Artificial Sequence: Synthetic oligonucleotide
uucggccugaguacuuauc

SEQ ID NO: 515918 - RNA, 19 nt, Artificial Sequence
  Description of Artificial Sequence: Synthetic oligonucleotide
gugagcucaaggaucagaa

SEQ ID NO: 515919 - RNA, 19 nt, Artificial Sequence
  Description of Artificial Sequence: Synthetic oligonucleotide
agguaaguaacagguucgu

SEQ ID NO: 515920 - RNA, 19 nt, Artificial Sequence
  Description of Artificial Sequence: Synthetic oligonucleotide
augauauccaugagucccu

SEQ ID NO: 515921 - RNA, 19 nt, Artificial Sequence
  Description of Artificial Sequence: Synthetic oligonucleotide
ggucgcuagucccagcccc

SEQ ID NO: 515922 - RNA, 19 nt, Artificial Sequence
  Description of Artificial Sequence: Synthetic oligonucleotide
cgaaaguaccccacaaaag

SEQ ID NO: 515923 - RNA, 19 nt, Artificial Sequence
  Description of Artificial Sequence: Synthetic oligonucleotide
ccguuguucacucaagcuc

SEQ ID NO: 515924 - RNA, 19 nt, Artificial Sequence
  Description of Artificial Sequence: Synthetic oligonucleotide
agagccaucccagguuuug

SEQ ID NO: 515925 - RNA, 19 nt, Artificial Sequence
  Description of Artificial Sequence: Synthetic oligonucleotide
agggcgaaaguaccccaca

SEQ ID NO: 515926 - RNA, 19 nt, Artificial Sequence
  Description of Artificial Sequence: Synthetic oligonucleotide
cuucucuuaggaucccaga

SEQ ID NO: 515927 - RNA, 19 nt, Artificial Sequence
  Description of Artificial Sequence: Synthetic oligonucleotide
ugcuguuacgugagcucaa

SEQ ID NO: 515928 - RNA, 19 nt, Artificial Sequence
  Description of Artificial Sequence: Synthetic oligonucleotide
auauaucuugugacucucu

SEQ ID NO: 515929 - RNA, 19 nt, Artificial Sequence
  Description of Artificial Sequence: Synthetic oligonucleotide
aguccaccgauggcauagc

SEQ ID NO: 515930 - RNA, 19 nt, Artificial Sequence
  Description of Artificial Sequence: Synthetic oligonucleotide
agagccccgucuuuccgga

SEQ ID NO: 515931 - RNA, 19 nt, Artificial Sequence
  Description of Artificial Sequence: Synthetic oligonucleotide
ggauccgugaauuuggauu

SEQ ID NO: 515932 - RNA, 19 nt, Artificial Sequence
  Description of Artificial Sequence: Synthetic oligonucleotide
cuucgcaguugcuugaggu

SEQ ID NO: 515933 - RNA, 19 nt, Artificial Sequence
  Description of Artificial Sequence: Synthetic oligonucleotide
ugggaaugggaggcacuag

SEQ ID NO: 515934 - RNA, 19 nt, Artificial Sequence
  Description of Artificial Sequence: Synthetic oligonucleotide
guaucacagcugacaaagc

SEQ ID NO: 515935 - RNA, 19 nt, Artificial Sequence
  Description of Artificial Sequence: Synthetic oligonucleotide
cagggcgaaaguaccccac

SEQ ID NO: 515936 - RNA, 19 nt, Artificial Sequence
  Description of Artificial Sequence: Synthetic oligonucleotide
aggcuauuacagaauugcu

SEQ ID NO: 515937 - RNA, 19 nt, Artificial Sequence
  Description of Artificial Sequence: Synthetic oligonucleotide
uuucggccugaguacuuau

SEQ ID NO: 515938 - RNA, 19 nt, Artificial Sequence
  Description of Artificial Sequence: Synthetic oligonucleotide
cacccguuguucacucaag

SEQ ID NO: 515939 - RNA, 19 nt, Artificial Sequence
  Description of Artificial Sequence: Synthetic oligonucleotide
ggggcguugcuguagguca

SEQ ID NO: 515940 - RNA, 19 nt, Artificial Sequence
  Description of Artificial Sequence: Synthetic oligonucleotide
ugcggauaucauaguccaa

SEQ ID NO: 515941 - RNA, 19 nt, Artificial Sequence
  Description of Artificial Sequence: Synthetic oligonucleotide
uguuucggccugaguacuu

SEQ ID NO: 515942 - RNA, 19 nt, Artificial Sequence
  Description of Artificial Sequence: Synthetic oligonucleotide
uagauccugcggauaucau

SEQ ID NO: 515943 - RNA, 19 nt, Artificial Sequence
  Description of Artificial Sequence: Synthetic oligonucleotide
ugauauccaugagucccuc

SEQ ID NO: 515944 - RNA, 19 nt, Artificial Sequence
  Description of Artificial Sequence: Synthetic oligonucleotide
aggauccgugaauuuggau

SEQ ID NO: 515945 - RNA, 19 nt, Artificial Sequence
  Description of Artificial Sequence: Synthetic oligonucleotide
cauugaggucagcacucuc

SEQ ID NO: 515946 - RNA, 19 nt, Artificial Sequence
  Description of Artificial Sequence: Synthetic oligonucleotide
aguaccccacaaaagcuuu

SEQ ID NO: 515947 - RNA, 19 nt, Artificial Sequence
  Description of Artificial Sequence: Synthetic oligonucleotide
uguggucgcuagucccagc

SEQ ID NO: 515948 - RNA, 19 nt, Artificial Sequence
  Description of Artificial Sequence: Synthetic oligonucleotide
uuguucacucaagcucaca

SEQ ID NO: 515949 - RNA, 19 nt, Artificial Sequence
  Description of Artificial Sequence: Synthetic oligonucleotide
caauugcaguggugcugcg

SEQ ID NO: 515950 - RNA, 19 nt, Artificial Sequence
  Description of Artificial Sequence: Synthetic oligonucleotide
acggagcucuacgcugacc

SEQ ID NO: 515951 - RNA, 19 nt, Artificial Sequence
  Description of Artificial Sequence: Synthetic oligonucleotide
uggguaacacgugggcuuc

SEQ ID NO: 515952 - RNA, 19 nt, Artificial Sequence
  Description of Artificial Sequence: Synthetic oligonucleotide
ggauauaucuugugacucu

SEQ ID NO: 515953 - RNA, 19 nt, Artificial Sequence
  Description of Artificial Sequence: Synthetic oligonucleotide
gcucaaggaucagaagucc

SEQ ID NO: 515954 - RNA, 19 nt, Artificial Sequence
  Description of Artificial Sequence: Synthetic oligonucleotide
agccccgucuuuccggagu

SEQ ID NO: 515955 - RNA, 19 nt, Artificial Sequence
  Description of Artificial Sequence: Synthetic oligonucleotide
gaccuggcucucugaggag

SEQ ID NO: 515956 - RNA, 19 nt, Artificial Sequence
  Description of Artificial Sequence: Synthetic oligonucleotide
gaauugcuucucuuaggau

SEQ ID NO: 515957 - RNA, 19 nt, Artificial Sequence
  Description of Artificial Sequence: Synthetic oligonucleotide
gagcuucgcaguugcuuga

SEQ ID NO: 515958 - RNA, 19 nt, Artificial Sequence
  Description of Artificial Sequence: Synthetic oligonucleotide
ucgauccgauccagaugug

SEQ ID NO: 515959 - RNA, 19 nt, Artificial Sequence
  Description of Artificial Sequence: Synthetic oligonucleotide
ggugagaagaauguccacu

SEQ ID NO: 515960 - RNA, 19 nt, Artificial Sequence
  Description of Artificial Sequence: Synthetic oligonucleotide
aucgacacgcuggauggau

SEQ ID NO: 515961 - RNA, 19 nt, Artificial Sequence
  Description of Artificial Sequence: Synthetic oligonucleotide
uaaguccauugggccagcc

SEQ ID NO: 515962 - RNA, 19 nt, Artificial Sequence
  Description of Artificial Sequence: Synthetic oligonucleotide
ucgacacgcuggauggauu

SEQ ID NO: 515963 - RNA, 19 nt, Artificial Sequence
  Description of Artificial Sequence: Synthetic oligonucleotide
ucaucaggacaggcacacc

SEQ ID NO: 515964 - RNA, 19 nt, Artificial Sequence
  Description of Artificial Sequence: Synthetic oligonucleotide
ucuagucuccaaggcccac

SEQ ID NO: 515965 - RNA, 19 nt, Artificial Sequence
  Description of Artificial Sequence: Synthetic oligonucleotide
gacaagacaccagggcgaa

SEQ ID NO: 515966 - RNA, 19 nt, Artificial Sequence
  Description of Artificial Sequence: Synthetic oligonucleotide
caguuauccaagguagaaa

SEQ ID NO: 515967 - RNA, 19 nt, Artificial Sequence
  Description of Artificial Sequence: Synthetic oligonucleotide
ggccguggaagcgaguuug

SEQ ID NO: 515968 - RNA, 19 nt, Artificial Sequence
  Description of Artificial Sequence: Synthetic oligonucleotide
ggggacaccacgaugauau

SEQ ID NO: 515969 - RNA, 19 nt, Artificial Sequence
  Description of Artificial Sequence: Synthetic oligonucleotide
acuuuagaccuggcucucu

SEQ ID NO: 515970 - RNA, 19 nt, Artificial Sequence
  Description of Artificial Sequence: Synthetic oligonucleotide
uagauccaccuguccugcu

SEQ ID NO: 515971 - RNA, 19 nt, Artificial Sequence
  Description of Artificial Sequence: Synthetic oligonucleotide
gcuaaaggcuugggaagag

SEQ ID NO: 515972 - RNA, 19 nt, Artificial Sequence
  Description of Artificial Sequence: Synthetic oligonucleotide
cacucucgauccgauccag

SEQ ID NO: 515973 - RNA, 19 nt, Artificial Sequence
  Description of Artificial Sequence: Synthetic oligonucleotide
uaucgacacgcuggaugga

SEQ ID NO: 515974 - RNA, 19 nt, Artificial Sequence
  Description of Artificial Sequence: Synthetic oligonucleotide
guuguucacucaagcucac

SEQ ID NO: 515975 - RNA, 19 nt, Artificial Sequence
  Description of Artificial Sequence: Synthetic oligonucleotide
gcuucgcaguugcuugagg

SEQ ID NO: 515976 - RNA, 19 nt, Artificial Sequence
  Description of Artificial Sequence: Synthetic oligonucleotide
gugaugagaaagaguguua

SEQ ID NO: 515977 - RNA, 19 nt, Artificial Sequence
  Description of Artificial Sequence: Synthetic oligonucleotide
caucaauugcaguggugcu

SEQ ID NO: 515978 - RNA, 19 nt, Artificial Sequence
  Description of Artificial Sequence: Synthetic oligonucleotide
aucccuuucagagcaucuu

SEQ ID NO: 515979 - RNA, 19 nt, Artificial Sequence
  Description of Artificial Sequence: Synthetic oligonucleotide
auggaacggggccgugcug

SEQ ID NO: 515980 - RNA, 19 nt, Artificial Sequence
  Description of Artificial Sequence: Synthetic oligonucleotide
ggcaaauucccucuacaau

SEQ ID NO: 515981 - RNA, 19 nt, Artificial Sequence
  Description of Artificial Sequence: Synthetic oligonucleotide
gcuguuacgugagcucaag

SEQ ID NO: 515982 - RNA, 19 nt, Artificial Sequence
  Description of Artificial Sequence: Synthetic oligonucleotide
gguaaguaacagguucguc

SEQ ID NO: 515983 - RNA, 19 nt, Artificial Sequence
  Description of Artificial Sequence: Synthetic oligonucleotide
cuguggucgcuagucccag

SEQ ID NO: 515984 - RNA, 19 nt, Artificial Sequence
  Description of Artificial Sequence: Synthetic oligonucleotide
ggcgaaaguaccccacaaa

SEQ ID NO: 515985 - RNA, 19 nt, Artificial Sequence
  Description of Artificial Sequence: Synthetic oligonucleotide
agaaauggccccagacauu

SEQ ID NO: 515986 - RNA, 19 nt, Artificial Sequence
  Description of Artificial Sequence: Synthetic oligonucleotide
cacuuuagaccuggcucuc

SEQ ID NO: 515987 - RNA, 19 nt, Artificial Sequence
  Description of Artificial Sequence: Synthetic oligonucleotide
gcgagggcugacugucugg

SEQ ID NO: 515988 - RNA, 19 nt, Artificial Sequence
  Description of Artificial Sequence: Synthetic oligonucleotide
cacggagggugccaaggga

SEQ ID NO: 515989 - RNA, 19 nt, Artificial Sequence
  Description of Artificial Sequence: Synthetic oligonucleotide
ccggcaggagcaugaacag

SEQ ID NO: 515990 - RNA, 19 nt, Artificial Sequence
  Description of Artificial Sequence: Synthetic oligonucleotide
caccuguaucacagcugac

SEQ ID NO: 515991 - RNA, 19 nt, Artificial Sequence
  Description of Artificial Sequence: Synthetic oligonucleotide
caguagauccugcggauau

SEQ ID NO: 515992 - RNA, 19 nt, Artificial Sequence
  Description of Artificial Sequence: Synthetic oligonucleotide
ucccaggauccgugaauuu

SEQ ID NO: 515993 - RNA, 19 nt, Artificial Sequence
  Description of Artificial Sequence: Synthetic oligonucleotide
ggagggaguuccuauuagu

SEQ ID NO: 515994 - RNA, 19 nt, Artificial Sequence
  Description of Artificial Sequence: Synthetic oligonucleotide
acacgaggcuggagguuuc

SEQ ID NO: 515995 - RNA, 19 nt, Artificial Sequence
  Description of Artificial Sequence: Synthetic oligonucleotide
cagguuccccaucccagga

SEQ ID NO: 515996 - RNA, 19 nt, Artificial Sequence
  Description of Artificial Sequence: Synthetic oligonucleotide
guaggauacugugcuaaau

SEQ ID NO: 515997 - RNA, 19 nt, Artificial Sequence
  Description of Artificial Sequence: Synthetic oligonucleotide
cacgaggcuggagguuucc

SEQ ID NO: 515998 - RNA, 19 nt, Artificial Sequence
  Description of Artificial Sequence: Synthetic oligonucleotide
acggggccgugcuguuacg

SEQ ID NO: 515999 - RNA, 19 nt, Artificial Sequence
  Description of Artificial Sequence: Synthetic oligonucleotide
acccgcugaggggacacca

SEQ ID NO: 516000 - RNA, 19 nt, Artificial Sequence
  Description of Artificial Sequence: Synthetic oligonucleotide
cacgggagcuucgcaguug

SEQ ID NO: 516001 - RNA, 19 nt, Artificial Sequence
  Description of Artificial Sequence: Synthetic oligonucleotide
ggggccgugcuguuacgug

SEQ ID NO: 516002 - RNA, 19 nt, Artificial Sequence
  Description of Artificial Sequence: Synthetic oligonucleotide
gaguacuuaucgacacgcu

SEQ ID NO: 516003 - RNA, 19 nt, Artificial Sequence
  Description of Artificial Sequence: Synthetic oligonucleotide
ccgcucagagccaucccag

SEQ ID NO: 516004 - RNA, 19 nt, Artificial Sequence
  Description of Artificial Sequence: Synthetic oligonucleotide
ggcuauuacagaauugcuu

SEQ ID NO: 516005 - RNA, 19 nt, Artificial Sequence
  Description of Artificial Sequence: Synthetic oligonucleotide
ccuauuagugaguugccau

SEQ ID NO: 516006 - RNA, 19 nt, Artificial Sequence
  Description of Artificial Sequence: Synthetic oligonucleotide
gaagcgaguuuggguggga

SEQ ID NO: 516007 - RNA, 19 nt, Artificial Sequence
  Description of Artificial Sequence: Synthetic oligonucleotide
gccugaguacuuaucgaca

SEQ ID NO: 516008 - RNA, 19 nt, Artificial Sequence
  Description of Artificial Sequence: Synthetic oligonucleotide
guaaguccauugggccagc

SEQ ID NO: 516009 - RNA, 19 nt, Artificial Sequence
  Description of Artificial Sequence: Synthetic oligonucleotide
gggccgugcuguuacguga

SEQ ID NO: 516010 - RNA, 19 nt, Artificial Sequence
  Description of Artificial Sequence: Synthetic oligonucleotide
acuuaucgacacgcuggau

SEQ ID NO: 516011 - RNA, 19 nt, Artificial Sequence
  Description of Artificial Sequence: Synthetic oligonucleotide
gucuagucuccaaggccca

SEQ ID NO: 516012 - RNA, 19 nt, Artificial Sequence
  Description of Artificial Sequence: Synthetic oligonucleotide
cuacgcugaccaggaauca

SEQ ID NO: 516013 - RNA, 19 nt, Artificial Sequence
  Description of Artificial Sequence: Synthetic oligonucleotide
guuucggccugaguacuua

SEQ ID NO: 516014 - RNA, 19 nt, Artificial Sequence
  Description of Artificial Sequence: Synthetic oligonucleotide
gcggggcaggcacggaggg

SEQ ID NO: 516015 - RNA, 19 nt, Artificial Sequence
  Description of Artificial Sequence: Synthetic oligonucleotide
ggccgugcuguuacgugag

SEQ ID NO: 516016 - RNA, 19 nt, Artificial Sequence
  Description of Artificial Sequence: Synthetic oligonucleotide
gugucccugagcacuuaga

SEQ ID NO: 516017 - RNA, 19 nt, Artificial Sequence
  Description of Artificial Sequence: Synthetic oligonucleotide
guguggacacugcuacacu

SEQ ID NO: 516018 - RNA, 19 nt, Artificial Sequence
  Description of Artificial Sequence: Synthetic oligonucleotide
ccaguuauccaagguagaa

SEQ ID NO: 516019 - RNA, 19 nt, Artificial Sequence
  Description of Artificial Sequence: Synthetic oligonucleotide
gcacucucgauccgaucca

SEQ ID NO: 516020 - RNA, 19 nt, Artificial Sequence
  Description of Artificial Sequence: Synthetic oligonucleotide
caauguggccccagucugu

SEQ ID NO: 516021 - RNA, 19 nt, Artificial Sequence
  Description of Artificial Sequence: Synthetic oligonucleotide
gggcgaaaguaccccacaa

SEQ ID NO: 516022 - RNA, 19 nt, Artificial Sequence
  Description of Artificial Sequence: Synthetic oligonucleotide
ccagaugugcauccaccca

SEQ ID NO: 516023 - RNA, 19 nt, Artificial Sequence
  Description of Artificial Sequence: Synthetic oligonucleotide
ccgcagcuucccauugagg

SEQ ID NO: 516024 - RNA, 19 nt, Artificial Sequence
  Description of Artificial Sequence: Synthetic oligonucleotide
cgauccgauccagaugugc

SEQ ID NO: 516025 - RNA, 19 nt, Artificial Sequence
  Description of Artificial Sequence: Synthetic oligonucleotide
cauggcugguuugggaacu

SEQ ID NO: 516026 - RNA, 19 nt, Artificial Sequence
  Description of Artificial Sequence: Synthetic oligonucleotide
acgugagcucaaggaucag

SEQ ID NO: 516027 - RNA, 19 nt, Artificial Sequence
  Description of Artificial Sequence: Synthetic oligonucleotide
gccccuagcaggccaguuc

SEQ ID NO: 516028 - RNA, 19 nt, Artificial Sequence
  Description of Artificial Sequence: Synthetic oligonucleotide
cauccacccaguagauccu

SEQ ID NO: 516029 - RNA, 19 nt, Artificial Sequence
  Description of Artificial Sequence: Synthetic oligonucleotide
guuuuaccuguggucgcua

SEQ ID NO: 516030 - RNA, 19 nt, Artificial Sequence
  Description of Artificial Sequence: Synthetic oligonucleotide
gccguggaagcgaguuugg

SEQ ID NO: 516031 - RNA, 19 nt, Artificial Sequence
  Description of Artificial Sequence: Synthetic oligonucleotide
cccgugucuggcagagagc

SEQ ID NO: 516032 - RNA, 19 nt, Artificial Sequence
  Description of Artificial Sequence: Synthetic oligonucleotide
accuuccgcucagagccau

SEQ ID NO: 516033 - RNA, 19 nt, Artificial Sequence
  Description of Artificial Sequence: Synthetic oligonucleotide
ccggaguggcugcagugug

SEQ ID NO: 516034 - RNA, 19 nt, Artificial Sequence
  Description of Artificial Sequence: Synthetic oligonucleotide
cacgcuggauggauuuggu

SEQ ID NO: 516035 - RNA, 19 nt, Artificial Sequence
  Description of Artificial Sequence: Synthetic oligonucleotide
ggccccagacauuccggca

SEQ ID NO: 516036 - RNA, 19 nt, Artificial Sequence
  Description of Artificial Sequence: Synthetic oligonucleotide
ccauuacguuuuaccugug

SEQ ID NO: 516037 - RNA, 19 nt, Artificial Sequence
  Description of Artificial Sequence: Synthetic oligonucleotide
cggagggugccaagggaag

SEQ ID NO: 516038 - RNA, 19 nt, Artificial Sequence
  Description of Artificial Sequence: Synthetic oligonucleotide
gaccuuccgcucagagcca

SEQ ID NO: 516039 - RNA, 19 nt, Artificial Sequence
  Description of Artificial Sequence: Synthetic oligonucleotide
ucgcuagucccagccccua

SEQ ID NO: 516040 - RNA, 19 nt, Artificial Sequence
  Description of Artificial Sequence: Synthetic oligonucleotide
guccaccgauggcauagcu

SEQ ID NO: 516041 - RNA, 19 nt, Artificial Sequence
  Description of Artificial Sequence: Synthetic oligonucleotide
ccaacacacgaggcuggag

SEQ ID NO: 516042 - RNA, 19 nt, Artificial Sequence
  Description of Artificial Sequence: Synthetic oligonucleotide
acaagacaccagggcgaaa

SEQ ID NO: 516043 - RNA, 19 nt, Artificial Sequence
  Description of Artificial Sequence: Synthetic oligonucleotide
agcucacaacauagcuaaa

SEQ ID NO: 516044 - RNA, 19 nt, Artificial Sequence
  Description of Artificial Sequence: Synthetic oligonucleotide
ccuagcaggccaguucaca

SEQ ID NO: 516045 - RNA, 19 nt, Artificial Sequence
  Description of Artificial Sequence: Synthetic oligonucleotide
ccagggcgaaaguacccca

SEQ ID NO: 516046 - RNA, 19 nt, Artificial Sequence
  Description of Artificial Sequence: Synthetic oligonucleotide
cccguuguucacucaagcu

SEQ ID NO: 516047 - RNA, 19 nt, Artificial Sequence
  Description of Artificial Sequence: Synthetic oligonucleotide
gccgugcuguuacgugagc

SEQ ID NO: 516048 - RNA, 19 nt, Artificial Sequence
  Description of Artificial Sequence: Synthetic oligonucleotide
cauggacgucagguaagua

SEQ ID NO: 516049 - RNA, 19 nt, Artificial Sequence
  Description of Artificial Sequence: Synthetic oligonucleotide
cacccgcugaggggacacc

SEQ ID NO: 516050 - RNA, 19 nt, Artificial Sequence
  Description of Artificial Sequence: Synthetic oligonucleotide
cccgcugaggggacaccac

SEQ ID NO: 516051 - RNA, 19 nt, Artificial Sequence
  Description of Artificial Sequence: Synthetic oligonucleotide
cguggaagcgaguuugggu

SEQ ID NO: 516052 - RNA, 19 nt, Artificial Sequence
  Description of Artificial Sequence: Synthetic oligonucleotide
gcccacccguuguucacuc

SEQ ID NO: 516053 - RNA, 19 nt, Artificial Sequence
  Description of Artificial Sequence: Synthetic oligonucleotide
gaacggggccgugcuguua

SEQ ID NO: 516054 - RNA, 19 nt, Artificial Sequence
  Description of Artificial Sequence: Synthetic oligonucleotide
gucgcuagucccagccccu

SEQ ID NO: 516055 - RNA, 19 nt, Artificial Sequence
  Description of Artificial Sequence: Synthetic oligonucleotide
cgugagcucaaggaucaga

SEQ ID NO: 516056 - RNA, 19 nt, Artificial Sequence
  Description of Artificial Sequence: Synthetic oligonucleotide
acgcaagguggugggcauu

SEQ ID NO: 516057 - RNA, 19 nt, Artificial Sequence
  Description of Artificial Sequence: Synthetic oligonucleotide
cacccacacuucaccugua

SEQ ID NO: 516058 - RNA, 19 nt, Artificial Sequence
  Description of Artificial Sequence: Synthetic oligonucleotide
gagcgagggcugacugucu

SEQ ID NO: 516059 - RNA, 19 nt, Artificial Sequence
  Description of Artificial Sequence: Synthetic oligonucleotide
cacacccgcugaggggaca

SEQ ID NO: 516060 - RNA, 19 nt, Artificial Sequence
  Description of Artificial Sequence: Synthetic oligonucleotide
ccaucccaggauccgugaa

SEQ ID NO: 516061 - RNA, 19 nt, Artificial Sequence
  Description of Artificial Sequence: Synthetic oligonucleotide
ggggccguggaagcgaguu

SEQ ID NO: 516062 - RNA, 19 nt, Artificial Sequence
  Description of Artificial Sequence: Synthetic oligonucleotide
gcacauggaacggggccgu

SEQ ID NO: 516063 - RNA, 19 nt, Artificial Sequence
  Description of Artificial Sequence: Synthetic oligonucleotide
cagagccaucccagguuuu

SEQ ID NO: 516064 - RNA, 19 nt, Artificial Sequence
  Description of Artificial Sequence: Synthetic oligonucleotide
gguaacacgugggcuucuu

SEQ ID NO: 516065 - RNA, 19 nt, Artificial Sequence
  Description of Artificial Sequence: Synthetic oligonucleotide
ccauggacgucagguaagu

SEQ ID NO: 516066 - RNA, 19 nt, Artificial Sequence
  Description of Artificial Sequence: Synthetic oligonucleotide
ccagcccgugucuggcaga

SEQ ID NO: 516067 - RNA, 19 nt, Artificial Sequence
  Description of Artificial Sequence: Synthetic oligonucleotide
ccgugcuguuacgugagcu

SEQ ID NO: 516068 - RNA, 19 nt, Artificial Sequence
  Description of Artificial Sequence: Synthetic oligonucleotide
cguuuuaccuguggucgcu

SEQ ID NO: 516069 - RNA, 19 nt, Artificial Sequence
  Description of Artificial Sequence: Synthetic oligonucleotide
ggcccacccguuguucacu

SEQ ID NO: 516070 - RNA, 19 nt, Artificial Sequence
  Description of Artificial Sequence: Synthetic oligonucleotide
cccagacauuccggcagga

SEQ ID NO: 516071 - RNA, 19 nt, Artificial Sequence
  Description of Artificial Sequence: Synthetic oligonucleotide
ggaacggggccgugcuguu

SEQ ID NO: 516072 - RNA, 19 nt, Artificial Sequence
  Description of Artificial Sequence: Synthetic oligonucleotide
ggguaacacgugggcuucu

SEQ ID NO: 516073 - RNA, 19 nt, Artificial Sequence
  Description of Artificial Sequence: Synthetic oligonucleotide
gggccguggaagcgaguuu

SEQ ID NO: 516074 - RNA, 19 nt, Artificial Sequence
  Description of Artificial Sequence: Synthetic oligonucleotide
ccuagccauuuaggaaaau

SEQ ID NO: 516075 - RNA, 19 nt, Artificial Sequence
  Description of Artificial Sequence: Synthetic oligonucleotide
cggggccgugcuguuacgu

SEQ ID NO: 516076 - RNA, 19 nt, Artificial Sequence
  Description of Artificial Sequence: Synthetic oligonucleotide
acaaacgucucucagagcc

SEQ ID NO: 516077 - RNA, 19 nt, Artificial Sequence
  Description of Artificial Sequence: Synthetic oligonucleotide
aaagcaaccgaacaugaac

SEQ ID NO: 516078 - RNA, 19 nt, Artificial Sequence
  Description of Artificial Sequence: Synthetic oligonucleotide
ucgguuauaaccaacuugg

SEQ ID NO: 516079 - RNA, 19 nt, Artificial Sequence
  Description of Artificial Sequence: Synthetic oligonucleotide
aauaaauugauuucauacu

SEQ ID NO: 516080 - RNA, 19 nt, Artificial Sequence
  Description of Artificial Sequence: Synthetic oligonucleotide
aaaguuacuccagagagac

SEQ ID NO: 516081 - RNA, 19 nt, Artificial Sequence
  Description of Artificial Sequence: Synthetic oligonucleotide
acauacaacacacagguuc

SEQ ID NO: 516082 - RNA, 19 nt, Artificial Sequence
  Description of Artificial Sequence: Synthetic oligonucleotide
agugggaacauuuccaagc

SEQ ID NO: 516083 - RNA, 19 nt, Artificial Sequence
  Description of Artificial Sequence: Synthetic oligonucleotide
uguguuauaaaacucccug

SEQ ID NO: 516084 - RNA, 19 nt, Artificial Sequence
  Description of Artificial Sequence: Synthetic oligonucleotide
acuaauugcuaauaaauug

SEQ ID NO: 516085 - RNA, 19 nt, Artificial Sequence
  Description of Artificial Sequence: Synthetic oligonucleotide
aacuccucaauuaaaauuc

SEQ ID NO: 516086 - RNA, 19 nt, Artificial Sequence
  Description of Artificial Sequence: Synthetic oligonucleotide
ucuuuaaccaucaaguaau

SEQ ID NO: 516087 - RNA, 19 nt, Artificial Sequence
  Description of Artificial Sequence: Synthetic oligonucleotide
uguaacuuagcacuaugag

SEQ ID NO: 516088 - RNA, 19 nt, Artificial Sequence
  Description of Artificial Sequence: Synthetic oligonucleotide
aauacuaauugcuaauaaa

SEQ ID NO: 516089 - RNA, 19 nt, Artificial Sequence
  Description of Artificial Sequence: Synthetic oligonucleotide
ugaaacauuacccuuuuaa

SEQ ID NO: 516090 - RNA, 19 nt, Artificial Sequence
  Description of Artificial Sequence: Synthetic oligonucleotide
uaaccaucaaguaauaauc

SEQ ID NO: 516091 - RNA, 19 nt, Artificial Sequence
  Description of Artificial Sequence: Synthetic oligonucleotide
augguuaugguccacugac

SEQ ID NO: 516092 - RNA, 19 nt, Artificial Sequence
  Description of Artificial Sequence: Synthetic oligonucleotide
uuaaguguuaaggagaggu

SEQ ID NO: 516093 - RNA, 19 nt, Artificial Sequence
  Description of Artificial Sequence: Synthetic oligonucleotide
uaaaacaacagccuugcuc

SEQ ID NO: 516094 - RNA, 19 nt, Artificial Sequence
  Description of Artificial Sequence: Synthetic oligonucleotide
ucauuguauauucuggucu

SEQ ID NO: 516095 - RNA, 19 nt, Artificial Sequence
  Description of Artificial Sequence: Synthetic oligonucleotide
uuaaccaucaaguaauaau

SEQ ID NO: 516096 - RNA, 19 nt, Artificial Sequence
  Description of Artificial Sequence: Synthetic oligonucleotide
augguuguauacuugggac

SEQ ID NO: 516097 - RNA, 19 nt, Artificial Sequence
  Description of Artificial Sequence: Synthetic oligonucleotide
ucuaacauuuugaaagaug

SEQ ID NO: 516098 - RNA, 19 nt, Artificial Sequence
  Description of Artificial Sequence: Synthetic oligonucleotide
augaauauggaaaagcaag

SEQ ID NO: 516099 - RNA, 19 nt, Artificial Sequence
  Description of Artificial Sequence: Synthetic oligonucleotide
gguaauuuaaccuuggcuc

SEQ ID NO: 516100 - RNA, 19 nt, Artificial Sequence
  Description of Artificial Sequence: Synthetic oligonucleotide
gaaguuuucucccugcccc

SEQ ID NO: 516101 - RNA, 19 nt, Artificial Sequence
  Description of Artificial Sequence: Synthetic oligonucleotide
auaugaaucugacucuggg

SEQ ID NO: 516102 - RNA, 19 nt, Artificial Sequence
  Description of Artificial Sequence: Synthetic oligonucleotide
aggucaguaucgcaaaagc

SEQ ID NO: 516103 - RNA, 19 nt, Artificial Sequence
  Description of Artificial Sequence: Synthetic oligonucleotide
guaacuuagcacuaugagc

SEQ ID NO: 516104 - RNA, 19 nt, Artificial Sequence
  Description of Artificial Sequence: Synthetic oligonucleotide
aaauugauuucauacucaa

SEQ ID NO: 516105 - RNA, 19 nt, Artificial Sequence
  Description of Artificial Sequence: Synthetic oligonucleotide
cacacaaucggccaagucc

SEQ ID NO: 516106 - RNA, 19 nt, Artificial Sequence
  Description of Artificial Sequence: Synthetic oligonucleotide
aaagaauaaacuccucaau

SEQ ID NO: 516107 - RNA, 19 nt, Artificial Sequence
  Description of Artificial Sequence: Synthetic oligonucleotide
ugcucaagcuuauuaagag

SEQ ID NO: 516108 - RNA, 19 nt, Artificial Sequence
  Description of Artificial Sequence: Synthetic oligonucleotide
agcacuaugagccagucau

SEQ ID NO: 516109 - RNA, 19 nt, Artificial Sequence
  Description of Artificial Sequence: Synthetic oligonucleotide
uuaaggagaggucaguauc

SEQ ID NO: 516110 - RNA, 19 nt, Artificial Sequence
  Description of Artificial Sequence: Synthetic oligonucleotide
guacaaacgucucucagag

SEQ ID NO: 516111 - RNA, 19 nt, Artificial Sequence
  Description of Artificial Sequence: Synthetic oligonucleotide
guaauuuaaccuuggcucc

SEQ ID NO: 516112 - RNA, 19 nt, Artificial Sequence
  Description of Artificial Sequence: Synthetic oligonucleotide
guaagcugggcuuuggucc

SEQ ID NO: 516113 - RNA, 19 nt, Artificial Sequence
  Description of Artificial Sequence: Synthetic oligonucleotide
cugaacaacguaucaaagc

SEQ ID NO: 516114 - RNA, 19 nt, Artificial Sequence
  Description of Artificial Sequence: Synthetic oligonucleotide
aguaucuguguuauaaaac

SEQ ID NO: 516115 - RNA, 19 nt, Artificial Sequence
  Description of Artificial Sequence: Synthetic oligonucleotide
ucugggagugaauuaagug

SEQ ID NO: 516116 - RNA, 19 nt, Artificial Sequence
  Description of Artificial Sequence: Synthetic oligonucleotide
guauauucuggucuccagg

SEQ ID NO: 516117 - RNA, 19 nt, Artificial Sequence
  Description of Artificial Sequence: Synthetic oligonucleotide
uccaaugggagccuggaac

SEQ ID NO: 516118 - RNA, 19 nt, Artificial Sequence
  Description of Artificial Sequence: Synthetic oligonucleotide
uggagagaaguacaaacgu

SEQ ID NO: 516119 - RNA, 19 nt, Artificial Sequence
  Description of Artificial Sequence: Synthetic oligonucleotide
aacaacguaucaaagcucu

SEQ ID NO: 516120 - RNA, 19 nt, Artificial Sequence
  Description of Artificial Sequence: Synthetic oligonucleotide
aucgguuauaaccaacuug

SEQ ID NO: 516121 - RNA, 19 nt, Artificial Sequence
  Description of Artificial Sequence: Synthetic oligonucleotide
ucaguaucgcaaaagcaac

SEQ ID NO: 516122 - RNA, 19 nt, Artificial Sequence
  Description of Artificial Sequence: Synthetic oligonucleotide
caaccgaacaugaacacug

SEQ ID NO: 516123 - RNA, 19 nt, Artificial Sequence
  Description of Artificial Sequence: Synthetic oligonucleotide
uuagccuuccuauuucuug

SEQ ID NO: 516124 - RNA, 19 nt, Artificial Sequence
  Description of Artificial Sequence: Synthetic oligonucleotide
uaguagucuaacauuuuga

SEQ ID NO: 516125 - RNA, 19 nt, Artificial Sequence
  Description of Artificial Sequence: Synthetic oligonucleotide
guagccugaccacaaaagg

SEQ ID NO: 516126 - RNA, 19 nt, Artificial Sequence
  Description of Artificial Sequence: Synthetic oligonucleotide
aguaagcugggcuuugguc

SEQ ID NO: 516127 - RNA, 19 nt, Artificial Sequence
  Description of Artificial Sequence: Synthetic oligonucleotide
uucgccauuaaguucuuca

SEQ ID NO: 516128 - RNA, 19 nt, Artificial Sequence
  Description of Artificial Sequence: Synthetic oligonucleotide
agaauagcccaccccaggg

SEQ ID NO: 516129 - RNA, 19 nt, Artificial Sequence
  Description of Artificial Sequence: Synthetic oligonucleotide
uuaaucucagugucccagg

SEQ ID NO: 516130 - RNA, 19 nt, Artificial Sequence
  Description of Artificial Sequence: Synthetic oligonucleotide
ucaguuaaucucagugucc

SEQ ID NO: 516131 - RNA, 19 nt, Artificial Sequence
  Description of Artificial Sequence: Synthetic oligonucleotide
ucuagaucuuccagcaggc

SEQ ID NO: 516132 - RNA, 19 nt, Artificial Sequence
  Description of Artificial Sequence: Synthetic oligonucleotide
aguaucgcaaaagcaaccg

SEQ ID NO: 516133 - RNA, 19 nt, Artificial Sequence
  Description of Artificial Sequence: Synthetic oligonucleotide
uaucgcaaaagcaaccgaa

SEQ ID NO: 516134 - RNA, 19 nt, Artificial Sequence
  Description of Artificial Sequence: Synthetic oligonucleotide
uuugguccuauaugcaaag

SEQ ID NO: 516135 - RNA, 19 nt, Artificial Sequence
  Description of Artificial Sequence: Synthetic oligonucleotide
cucuuaacaugaaaagcag

SEQ ID NO: 516136 - RNA, 19 nt, Artificial Sequence
  Description of Artificial Sequence: Synthetic oligonucleotide
ucccucuuaacaugaaaag

SEQ ID NO: 516137 - RNA, 19 nt, Artificial Sequence
  Description of Artificial Sequence: Synthetic oligonucleotide
ugggguuaguguaacuuag

SEQ ID NO: 516138 - RNA, 19 nt, Artificial Sequence
  Description of Artificial Sequence: Synthetic oligonucleotide
uacuaauugcuaauaaauu

SEQ ID NO: 516139 - RNA, 19 nt, Artificial Sequence
  Description of Artificial Sequence: Synthetic oligonucleotide
uacucauguggaaugauau

SEQ ID NO: 516140 - RNA, 19 nt, Artificial Sequence
  Description of Artificial Sequence: Synthetic oligonucleotide
aguagucuaacauuuugaa

SEQ ID NO: 516141 - RNA, 19 nt, Artificial Sequence
  Description of Artificial Sequence: Synthetic oligonucleotide
aauuaggaauaugaaucug

SEQ ID NO: 516142 - RNA, 19 nt, Artificial Sequence
  Description of Artificial Sequence: Synthetic oligonucleotide
auacuaauugcuaauaaau

SEQ ID NO: 516143 - RNA, 19 nt, Artificial Sequence
  Description of Artificial Sequence: Synthetic oligonucleotide
aguacaaacgucucucaga

SEQ ID NO: 516144 - RNA, 19 nt, Artificial Sequence
  Description of Artificial Sequence: Synthetic oligonucleotide
cuauaugcaaagugggaac

SEQ ID NO: 516145 - RNA, 19 nt, Artificial Sequence
  Description of Artificial Sequence: Synthetic oligonucleotide
agaugguugucauaguagu

SEQ ID NO: 516146 - RNA, 19 nt, Artificial Sequence
  Description of Artificial Sequence: Synthetic oligonucleotide
aaucggccaagucccuugc

SEQ ID NO: 516147 - RNA, 19 nt, Artificial Sequence
  Description of Artificial Sequence: Synthetic oligonucleotide
gaugggaaggucauccccg

SEQ ID NO: 516148 - RNA, 19 nt, Artificial Sequence
  Description of Artificial Sequence: Synthetic oligonucleotide
aauaugaaucugacucugg

SEQ ID NO: 516149 - RNA, 19 nt, Artificial Sequence
  Description of Artificial Sequence: Synthetic oligonucleotide
aacgcaccugccuacgcuc

SEQ ID NO: 516150 - RNA, 19 nt, Artificial Sequence
  Description of Artificial Sequence: Synthetic oligonucleotide
aaacucccugagugcaugc

SEQ ID NO: 516151 - RNA, 19 nt, Artificial Sequence
  Description of Artificial Sequence: Synthetic oligonucleotide
uguccugaccugcaggaag

SEQ ID NO: 516152 - RNA, 19 nt, Artificial Sequence
  Description of Artificial Sequence: Synthetic oligonucleotide
aagcacauggcaguaagcu

SEQ ID NO: 516153 - RNA, 19 nt, Artificial Sequence
  Description of Artificial Sequence: Synthetic oligonucleotide
aaagcucuccuaggaaugg

SEQ ID NO: 516154 - RNA, 19 nt, Artificial Sequence
  Description of Artificial Sequence: Synthetic oligonucleotide
guaucaaagcucuccuagg

SEQ ID NO: 516155 - RNA, 19 nt, Artificial Sequence
  Description of Artificial Sequence: Synthetic oligonucleotide
auuacccuuuuaaacuugc

SEQ ID NO: 516156 - RNA, 19 nt, Artificial Sequence
  Description of Artificial Sequence: Synthetic oligonucleotide
ugguuguauacuugggacc

SEQ ID NO: 516157 - RNA, 19 nt, Artificial Sequence
  Description of Artificial Sequence: Synthetic oligonucleotide
ugacauuaaacagcaggag

SEQ ID NO: 516158 - RNA, 19 nt, Artificial Sequence
  Description of Artificial Sequence: Synthetic oligonucleotide
uccaaguaauaaaguuggg

SEQ ID NO: 516159 - RNA, 19 nt, Artificial Sequence
  Description of Artificial Sequence: Synthetic oligonucleotide
uguaacaguaucuguguua

SEQ ID NO: 516160 - RNA, 19 nt, Artificial Sequence
  Description of Artificial Sequence: Synthetic oligonucleotide
aguuaucauaaagagguga

SEQ ID NO: 516161 - RNA, 19 nt, Artificial Sequence
  Description of Artificial Sequence: Synthetic oligonucleotide
uuaacaugaaaagcagaga

SEQ ID NO: 516162 - RNA, 19 nt, Artificial Sequence
  Description of Artificial Sequence: Synthetic oligonucleotide
aggugcuuaggcugcaugg

SEQ ID NO: 516163 - RNA, 19 nt, Artificial Sequence
  Description of Artificial Sequence: Synthetic oligonucleotide
agcaaccgaacaugaacac

SEQ ID NO: 516164 - RNA, 19 nt, Artificial Sequence
  Description of Artificial Sequence: Synthetic oligonucleotide
uacgcucuagaucuuccag

SEQ ID NO: 516165 - RNA, 19 nt, Artificial Sequence
  Description of Artificial Sequence: Synthetic oligonucleotide
uguucucccucuuaacaug

SEQ ID NO: 516166 - RNA, 19 nt, Artificial Sequence
  Description of Artificial Sequence: Synthetic oligonucleotide
ucauaaagaggugauuuuc

SEQ ID NO: 516167 - RNA, 19 nt, Artificial Sequence
  Description of Artificial Sequence: Synthetic oligonucleotide
uucauuguauauucugguc

SEQ ID NO: 516168 - RNA, 19 nt, Artificial Sequence
  Description of Artificial Sequence: Synthetic oligonucleotide
uagacccuaauaaaugaau

SEQ ID NO: 516169 - RNA, 19 nt, Artificial Sequence
  Description of Artificial Sequence: Synthetic oligonucleotide
uauaugcaaagugggaaca

SEQ ID NO: 516170 - RNA, 19 nt, Artificial Sequence
  Description of Artificial Sequence: Synthetic oligonucleotide
auuucauacucaaaguagu

SEQ ID NO: 516171 - RNA, 19 nt, Artificial Sequence
  Description of Artificial Sequence: Synthetic oligonucleotide
ucaugagguugaauuagga

SEQ ID NO: 516172 - RNA, 19 nt, Artificial Sequence
  Description of Artificial Sequence: Synthetic oligonucleotide
gguccuauaugcaaagugg

SEQ ID NO: 516173 - RNA, 19 nt, Artificial Sequence
  Description of Artificial Sequence: Synthetic oligonucleotide
uccuauaugcaaaguggga

SEQ ID NO: 516174 - RNA, 19 nt, Artificial Sequence
  Description of Artificial Sequence: Synthetic oligonucleotide
ucgcaaaagcaaccgaaca

SEQ ID NO: 516175 - RNA, 19 nt, Artificial Sequence
  Description of Artificial Sequence: Synthetic oligonucleotide
cauuguauauucuggucuc

SEQ ID NO: 516176 - RNA, 19 nt, Artificial Sequence
  Description of Artificial Sequence: Synthetic oligonucleotide
gaauagcccaccccagggg

SEQ ID NO: 516177 - RNA, 19 nt, Artificial Sequence
  Description of Artificial Sequence: Synthetic oligonucleotide
agcaguuaucauaaagagg

SEQ ID NO: 516178 - RNA, 19 nt, Artificial Sequence
  Description of Artificial Sequence: Synthetic oligonucleotide
aaugucagaucgguuauaa

SEQ ID NO: 516179 - RNA, 19 nt, Artificial Sequence
  Description of Artificial Sequence: Synthetic oligonucleotide
agugcuucgccauuaaguu

SEQ ID NO: 516180 - RNA, 19 nt, Artificial Sequence
  Description of Artificial Sequence: Synthetic oligonucleotide
gagaaagcaguuaucauaa

SEQ ID NO: 516181 - RNA, 19 nt, Artificial Sequence
  Description of Artificial Sequence: Synthetic oligonucleotide
acccuaauaaaugaauaug

SEQ ID NO: 516182 - RNA, 19 nt, Artificial Sequence
  Description of Artificial Sequence: Synthetic oligonucleotide
aguaccauuccaucaggcu

SEQ ID NO: 516183 - RNA, 19 nt, Artificial Sequence
  Description of Artificial Sequence: Synthetic oligonucleotide
uuucccuaauaguuuagaa

SEQ ID NO: 516184 - RNA, 19 nt, Artificial Sequence
  Description of Artificial Sequence: Synthetic oligonucleotide
caaacuguagccugaccac

SEQ ID NO: 516185 - RNA, 19 nt, Artificial Sequence
  Description of Artificial Sequence: Synthetic oligonucleotide
aaccaucaaguaauaaucu

SEQ ID NO: 516186 - RNA, 19 nt, Artificial Sequence
  Description of Artificial Sequence: Synthetic oligonucleotide
guaagcccuccucugaucc

SEQ ID NO: 516187 - RNA, 19 nt, Artificial Sequence
  Description of Artificial Sequence: Synthetic oligonucleotide
gguugaauuaggaauauga

SEQ ID NO: 516188 - RNA, 19 nt, Artificial Sequence
  Description of Artificial Sequence: Synthetic oligonucleotide
ucugcguugagcagggcuc

SEQ ID NO: 516189 - RNA, 19 nt, Artificial Sequence
  Description of Artificial Sequence: Synthetic oligonucleotide
uuuuaugcuuccugggguc

SEQ ID NO: 516190 - RNA, 19 nt, Artificial Sequence
  Description of Artificial Sequence: Synthetic oligonucleotide
ugggauagacccuaauaaa

SEQ ID NO: 516191 - RNA, 19 nt, Artificial Sequence
  Description of Artificial Sequence: Synthetic oligonucleotide
cucugauccaaugggagcc

SEQ ID NO: 516192 - RNA, 19 nt, Artificial Sequence
  Description of Artificial Sequence: Synthetic oligonucleotide
caguuaaucucaguguccc

SEQ ID NO: 516193 - RNA, 19 nt, Artificial Sequence
  Description of Artificial Sequence: Synthetic oligonucleotide
aacacugacggaggaagug

SEQ ID NO: 516194 - RNA, 19 nt, Artificial Sequence
  Description of Artificial Sequence: Synthetic oligonucleotide
uaguaccauuccaucaggc

SEQ ID NO: 516195 - RNA, 19 nt, Artificial Sequence
  Description of Artificial Sequence: Synthetic oligonucleotide
aaucucagugucccaggcu

SEQ ID NO: 516196 - RNA, 19 nt, Artificial Sequence
  Description of Artificial Sequence: Synthetic oligonucleotide
agguucaaacuguagccug

SEQ ID NO: 516197 - RNA, 19 nt, Artificial Sequence
  Description of Artificial Sequence: Synthetic oligonucleotide
acuccucaauuaaaauucc

SEQ ID NO: 516198 - RNA, 19 nt, Artificial Sequence
  Description of Artificial Sequence: Synthetic oligonucleotide
gagguaauuuaaccuuggc

SEQ ID NO: 516199 - RNA, 19 nt, Artificial Sequence
  Description of Artificial Sequence: Synthetic oligonucleotide
cuaguaccauuccaucagg

SEQ ID NO: 516200 - RNA, 19 nt, Artificial Sequence
  Description of Artificial Sequence: Synthetic oligonucleotide
aaguaccugggguuagugu

SEQ ID NO: 516201 - RNA, 19 nt, Artificial Sequence
  Description of Artificial Sequence: Synthetic oligonucleotide
cauuaaguucuucacacaa

SEQ ID NO: 516202 - RNA, 19 nt, Artificial Sequence
  Description of Artificial Sequence: Synthetic oligonucleotide
aucgcaaaagcaaccgaac

SEQ ID NO: 516203 - RNA, 19 nt, Artificial Sequence
  Description of Artificial Sequence: Synthetic oligonucleotide
uucggaaugggaugucuac

SEQ ID NO: 516204 - RNA, 19 nt, Artificial Sequence
  Description of Artificial Sequence: Synthetic oligonucleotide
ugcaaugcaucaguuaauc

SEQ ID NO: 516205 - RNA, 19 nt, Artificial Sequence
  Description of Artificial Sequence: Synthetic oligonucleotide
accgaacaugaacacugac

SEQ ID NO: 516206 - RNA, 19 nt, Artificial Sequence
  Description of Artificial Sequence: Synthetic oligonucleotide
accacugagcuuuccuccg

SEQ ID NO: 516207 - RNA, 19 nt, Artificial Sequence
  Description of Artificial Sequence: Synthetic oligonucleotide
cuuggguacaauuccaaaa

SEQ ID NO: 516208 - RNA, 19 nt, Artificial Sequence
  Description of Artificial Sequence: Synthetic oligonucleotide
gucaguaucgcaaaagcaa

SEQ ID NO: 516209 - RNA, 19 nt, Artificial Sequence
  Description of Artificial Sequence: Synthetic oligonucleotide
ccgaacaugaacacugacg

SEQ ID NO: 516210 - RNA, 19 nt, Artificial Sequence
  Description of Artificial Sequence: Synthetic oligonucleotide
acauuacccuuuuaaacuu

SEQ ID NO: 516211 - RNA, 19 nt, Artificial Sequence
  Description of Artificial Sequence: Synthetic oligonucleotide
agaacgcaccugccuacgc

SEQ ID NO: 516212 - RNA, 19 nt, Artificial Sequence
  Description of Artificial Sequence: Synthetic oligonucleotide
ggaggugacguccucaccc

SEQ ID NO: 516213 - RNA, 19 nt, Artificial Sequence
  Description of Artificial Sequence: Synthetic oligonucleotide
cugacggaggaagugacag

SEQ ID NO: 516214 - RNA, 19 nt, Artificial Sequence
  Description of Artificial Sequence: Synthetic oligonucleotide
gucagaucgguuauaacca

SEQ ID NO: 516215 - RNA, 19 nt, Artificial Sequence
  Description of Artificial Sequence: Synthetic oligonucleotide
ugcuuaggcugcauggagu

SEQ ID NO: 516216 - RNA, 19 nt, Artificial Sequence
  Description of Artificial Sequence: Synthetic oligonucleotide
augucagaucgguuauaac

SEQ ID NO: 516217 - RNA, 19 nt, Artificial Sequence
  Description of Artificial Sequence: Synthetic oligonucleotide
caugggcuccccuuaaaac

SEQ ID NO: 516218 - RNA, 19 nt, Artificial Sequence
  Description of Artificial Sequence: Synthetic oligonucleotide
gucgcugaggcugugacug

SEQ ID NO: 516219 - RNA, 19 nt, Artificial Sequence
  Description of Artificial Sequence: Synthetic oligonucleotide
uaggaaugguuguauacuu

SEQ ID NO: 516220 - RNA, 19 nt, Artificial Sequence
  Description of Artificial Sequence: Synthetic oligonucleotide
ucgccauuaaguucuucac

SEQ ID NO: 516221 - RNA, 19 nt, Artificial Sequence
  Description of Artificial Sequence: Synthetic oligonucleotide
ugguuaugguccacugacc

SEQ ID NO: 516222 - RNA, 19 nt, Artificial Sequence
  Description of Artificial Sequence: Synthetic oligonucleotide
gguuguauacuugggaccc

SEQ ID NO: 516223 - RNA, 19 nt, Artificial Sequence
  Description of Artificial Sequence: Synthetic oligonucleotide
agauuaaaaucaugagguu

SEQ ID NO: 516224 - RNA, 19 nt, Artificial Sequence
  Description of Artificial Sequence: Synthetic oligonucleotide
ccaacuuggguacaauucc

SEQ ID NO: 516225 - RNA, 19 nt, Artificial Sequence
  Description of Artificial Sequence: Synthetic oligonucleotide
gacguccucacccuggcca

SEQ ID NO: 516226 - RNA, 19 nt, Artificial Sequence
  Description of Artificial Sequence: Synthetic oligonucleotide
uccagaacgcaccugccua

SEQ ID NO: 516227 - RNA, 19 nt, Artificial Sequence
  Description of Artificial Sequence: Synthetic oligonucleotide
cagaauagcccaccccagg

SEQ ID NO: 516228 - RNA, 19 nt, Artificial Sequence
  Description of Artificial Sequence: Synthetic oligonucleotide
cauuacccuuuuaaacuug

SEQ ID NO: 516229 - RNA, 19 nt, Artificial Sequence
  Description of Artificial Sequence: Synthetic oligonucleotide
guaauaaucuccuggggau

SEQ ID NO: 516230 - RNA, 19 nt, Artificial Sequence
  Description of Artificial Sequence: Synthetic oligonucleotide
agaucgguuauaaccaacu

SEQ ID NO: 516231 - RNA, 19 nt, Artificial Sequence
  Description of Artificial Sequence: Synthetic oligonucleotide
augagccagucaucugggc

SEQ ID NO: 516232 - RNA, 19 nt, Artificial Sequence
  Description of Artificial Sequence: Synthetic oligonucleotide
ccuuaaaacaacagccuug

SEQ ID NO: 516233 - RNA, 19 nt, Artificial Sequence
  Description of Artificial Sequence: Synthetic oligonucleotide
cuucuuuccgaugggcagg

SEQ ID NO: 516234 - RNA, 19 nt, Artificial Sequence
  Description of Artificial Sequence: Synthetic oligonucleotide
uggguacaauuccaaaaua

SEQ ID NO: 516235 - RNA, 19 nt, Artificial Sequence
  Description of Artificial Sequence: Synthetic oligonucleotide
guagucuaacauuuugaaa

SEQ ID NO: 516236 - RNA, 19 nt, Artificial Sequence
  Description of Artificial Sequence: Synthetic oligonucleotide
gacuuccccugugacaagg

SEQ ID NO: 516237 - RNA, 19 nt, Artificial Sequence
  Description of Artificial Sequence: Synthetic oligonucleotide
cugggagugaauuaagugu

SEQ ID NO: 516238 - RNA, 19 nt, Artificial Sequence
  Description of Artificial Sequence: Synthetic oligonucleotide
ccuaguaccauuccaucag

SEQ ID NO: 516239 - RNA, 19 nt, Artificial Sequence
  Description of Artificial Sequence: Synthetic oligonucleotide
uuuccuccggucacaggug

SEQ ID NO: 516240 - RNA, 19 nt, Artificial Sequence
  Description of Artificial Sequence: Synthetic oligonucleotide
uuuggauucuggccauaaa

SEQ ID NO: 516241 - RNA, 19 nt, Artificial Sequence
  Description of Artificial Sequence: Synthetic oligonucleotide
uguuaaggagaggucagua

SEQ ID NO: 516242 - RNA, 19 nt, Artificial Sequence
  Description of Artificial Sequence: Synthetic oligonucleotide
uccaagcauguaaaauaaa

SEQ ID NO: 516243 - RNA, 19 nt, Artificial Sequence
  Description of Artificial Sequence: Synthetic oligonucleotide
cugccuacgcucuagaucu

SEQ ID NO: 516244 - RNA, 19 nt, Artificial Sequence
  Description of Artificial Sequence: Synthetic oligonucleotide
auauucuggucuccaggcu

SEQ ID NO: 516245 - RNA, 19 nt, Artificial Sequence
  Description of Artificial Sequence: Synthetic oligonucleotide
ucggaaugggaugucuacc

SEQ ID NO: 516246 - RNA, 19 nt, Artificial Sequence
  Description of Artificial Sequence: Synthetic oligonucleotide
guugggauagacccuaaua

SEQ ID NO: 516247 - RNA, 19 nt, Artificial Sequence
  Description of Artificial Sequence: Synthetic oligonucleotide
cugucuugccacauacaac

SEQ ID NO: 516248 - RNA, 19 nt, Artificial Sequence
  Description of Artificial Sequence: Synthetic oligonucleotide
ucagaucgguuauaaccaa

SEQ ID NO: 516249 - RNA, 19 nt, Artificial Sequence
  Description of Artificial Sequence: Synthetic oligonucleotide
gguuaugguccacugacca

SEQ ID NO: 516250 - RNA, 19 nt, Artificial Sequence
  Description of Artificial Sequence: Synthetic oligonucleotide
gacccuaauaaaugaauau

SEQ ID NO: 516251 - RNA, 19 nt, Artificial Sequence
  Description of Artificial Sequence: Synthetic oligonucleotide
aaaccaugggcuccccuua

SEQ ID NO: 516252 - RNA, 19 nt, Artificial Sequence
  Description of Artificial Sequence: Synthetic oligonucleotide
caucaaguaauaaucuccu

SEQ ID NO: 516253 - RNA, 19 nt, Artificial Sequence
  Description of Artificial Sequence: Synthetic oligonucleotide
ucaagcuuauuaagagcuu

SEQ ID NO: 516254 - RNA, 19 nt, Artificial Sequence
  Description of Artificial Sequence: Synthetic oligonucleotide
ggcagaauagcccacccca

SEQ ID NO: 516255 - RNA, 19 nt, Artificial Sequence
  Description of Artificial Sequence: Synthetic oligonucleotide
uuaucauaaagaggugauu

SEQ ID NO: 516256 - RNA, 19 nt, Artificial Sequence
  Description of Artificial Sequence: Synthetic oligonucleotide
aggagguaauuuaaccuug

SEQ ID NO: 516257 - RNA, 19 nt, Artificial Sequence
  Description of Artificial Sequence: Synthetic oligonucleotide
uuuuccggauguagguauc

SEQ ID NO: 516258 - RNA, 19 nt, Artificial Sequence
  Description of Artificial Sequence: Synthetic oligonucleotide
gaacaacguaucaaagcuc

SEQ ID NO: 516259 - RNA, 19 nt, Artificial Sequence
  Description of Artificial Sequence: Synthetic oligonucleotide
acuuggguacaauuccaaa

SEQ ID NO: 516260 - RNA, 19 nt, Artificial Sequence
  Description of Artificial Sequence: Synthetic oligonucleotide
caaucggccaagucccuug

SEQ ID NO: 516261 - RNA, 19 nt, Artificial Sequence
  Description of Artificial Sequence: Synthetic oligonucleotide
agaugaaacauuacccuuu

SEQ ID NO: 516262 - RNA, 19 nt, Artificial Sequence
  Description of Artificial Sequence: Synthetic oligonucleotide
cguaucaaagcucuccuag

SEQ ID NO: 516263 - RNA, 19 nt, Artificial Sequence
  Description of Artificial Sequence: Synthetic oligonucleotide
uccccguacuuccggagca

SEQ ID NO: 516264 - RNA, 19 nt, Artificial Sequence
  Description of Artificial Sequence: Synthetic oligonucleotide
cagaucgguuauaaccaac

SEQ ID NO: 516265 - RNA, 19 nt, Artificial Sequence
  Description of Artificial Sequence: Synthetic oligonucleotide
uuccggagcagcuucugau

SEQ ID NO: 516266 - RNA, 19 nt, Artificial Sequence
  Description of Artificial Sequence: Synthetic oligonucleotide
uuuaugcuuccuggggucu

SEQ ID NO: 516267 - RNA, 19 nt, Artificial Sequence
  Description of Artificial Sequence: Synthetic oligonucleotide
cuuuacucaccagcucucc

SEQ ID NO: 516268 - RNA, 19 nt, Artificial Sequence
  Description of Artificial Sequence: Synthetic oligonucleotide
gacgccagcggcucuccag

SEQ ID NO: 516269 - RNA, 19 nt, Artificial Sequence
  Description of Artificial Sequence: Synthetic oligonucleotide
uuguauacuugggacccac

SEQ ID NO: 516270 - RNA, 19 nt, Artificial Sequence
  Description of Artificial Sequence: Synthetic oligonucleotide
gaacaugaacacugacgga

SEQ ID NO: 516271 - RNA, 19 nt, Artificial Sequence
  Description of Artificial Sequence: Synthetic oligonucleotide
cauacaacacacagguucu

SEQ ID NO: 516272 - RNA, 19 nt, Artificial Sequence
  Description of Artificial Sequence: Synthetic oligonucleotide
uaucaaugucagaucgguu

SEQ ID NO: 516273 - RNA, 19 nt, Artificial Sequence
  Description of Artificial Sequence: Synthetic oligonucleotide
uacaaacgucucucagagc

SEQ ID NO: 516274 - RNA, 19 nt, Artificial Sequence
  Description of Artificial Sequence: Synthetic oligonucleotide
ugcaucaguuaaucucagu

SEQ ID NO: 516275 - RNA, 19 nt, Artificial Sequence
  Description of Artificial Sequence: Synthetic oligonucleotide
gaugucuaccauagcucug

SEQ ID NO: 516276 - RNA, 19 nt, Artificial Sequence
  Description of Artificial Sequence: Synthetic oligonucleotide
caucaguuaaucucagugu

SEQ ID NO: 516277 - RNA, 19 nt, Artificial Sequence
  Description of Artificial Sequence: Synthetic oligonucleotide
aguuaaucucaguguccca

SEQ ID NO: 516278 - RNA, 19 nt, Artificial Sequence
  Description of Artificial Sequence: Synthetic oligonucleotide
ggagguaauuuaaccuugg

SEQ ID NO: 516279 - RNA, 19 nt, Artificial Sequence
  Description of Artificial Sequence: Synthetic oligonucleotide
aguugacuuggucgcugag

SEQ ID NO: 516280 - RNA, 19 nt, Artificial Sequence
  Description of Artificial Sequence: Synthetic oligonucleotide
uaugcaaagugggaacauu

SEQ ID NO: 516281 - RNA, 19 nt, Artificial Sequence
  Description of Artificial Sequence: Synthetic oligonucleotide
ggguuaguguaacuuagca

SEQ ID NO: 516282 - RNA, 19 nt, Artificial Sequence
  Description of Artificial Sequence: Synthetic oligonucleotide
cacugacggaggaagugac

SEQ ID NO: 516283 - RNA, 19 nt, Artificial Sequence
  Description of Artificial Sequence: Synthetic oligonucleotide
uagcacuaugagccaguca

SEQ ID NO: 516284 - RNA, 19 nt, Artificial Sequence
  Description of Artificial Sequence: Synthetic oligonucleotide
ccgccaguugacuuggucg

SEQ ID NO: 516285 - RNA, 19 nt, Artificial Sequence
  Description of Artificial Sequence: Synthetic oligonucleotide
caacuuggguacaauucca

SEQ ID NO: 516286 - RNA, 19 nt, Artificial Sequence
  Description of Artificial Sequence: Synthetic oligonucleotide
uuuccggauguagguaucu

SEQ ID NO: 516287 - RNA, 19 nt, Artificial Sequence
  Description of Artificial Sequence: Synthetic oligonucleotide
caagacuuuccgccaguug

SEQ ID NO: 516288 - RNA, 19 nt, Artificial Sequence
  Description of Artificial Sequence: Synthetic oligonucleotide
uugcuccaucagaaguacc

SEQ ID NO: 516289 - RNA, 19 nt, Artificial Sequence
  Description of Artificial Sequence: Synthetic oligonucleotide
agacccuaauaaaugaaua

SEQ ID NO: 516290 - RNA, 19 nt, Artificial Sequence
  Description of Artificial Sequence: Synthetic oligonucleotide
gguuauaaccaacuugggu

SEQ ID NO: 516291 - RNA, 19 nt, Artificial Sequence
  Description of Artificial Sequence: Synthetic oligonucleotide
cuuuuaugcuuccuggggu

SEQ ID NO: 516292 - RNA, 19 nt, Artificial Sequence
  Description of Artificial Sequence: Synthetic oligonucleotide
guaucgcaaaagcaaccga

SEQ ID NO: 516293 - RNA, 19 nt, Artificial Sequence
  Description of Artificial Sequence: Synthetic oligonucleotide
cugaccacugcuggggaag

SEQ ID NO: 516294 - RNA, 19 nt, Artificial Sequence
  Description of Artificial Sequence: Synthetic oligonucleotide
ucggccaagucccuugcuu

SEQ ID NO: 516295 - RNA, 19 nt, Artificial Sequence
  Description of Artificial Sequence: Synthetic oligonucleotide
guuaucauaaagaggugau

SEQ ID NO: 516296 - RNA, 19 nt, Artificial Sequence
  Description of Artificial Sequence: Synthetic oligonucleotide
ugaccacugcuggggaagg

SEQ ID NO: 516297 - RNA, 19 nt, Artificial Sequence
  Description of Artificial Sequence: Synthetic oligonucleotide
acacugacggaggaaguga

SEQ ID NO: 516298 - RNA, 19 nt, Artificial Sequence
  Description of Artificial Sequence: Synthetic oligonucleotide
caaucacgacaacuugaug

SEQ ID NO: 516299 - RNA, 19 nt, Artificial Sequence
  Description of Artificial Sequence: Synthetic oligonucleotide
aacuguagccugaccacaa

SEQ ID NO: 516300 - RNA, 19 nt, Artificial Sequence
  Description of Artificial Sequence: Synthetic oligonucleotide
uccuauuucuuggcuucug

SEQ ID NO: 516301 - RNA, 19 nt, Artificial Sequence
  Description of Artificial Sequence: Synthetic oligonucleotide
aaauucugcucaagcuuau

SEQ ID NO: 516302 - RNA, 19 nt, Artificial Sequence
  Description of Artificial Sequence: Synthetic oligonucleotide
uccuaggaaugguuguaua

SEQ ID NO: 516303 - RNA, 19 nt, Artificial Sequence
  Description of Artificial Sequence: Synthetic oligonucleotide
ucccuugcuucggaauggg

SEQ ID NO: 516304 - RNA, 19 nt, Artificial Sequence
  Description of Artificial Sequence: Synthetic oligonucleotide
auaaccaacuuggguacaa

SEQ ID NO: 516305 - RNA, 19 nt, Artificial Sequence
  Description of Artificial Sequence: Synthetic oligonucleotide
cagugcuucgccauuaagu

SEQ ID NO: 516306 - RNA, 19 nt, Artificial Sequence
  Description of Artificial Sequence: Synthetic oligonucleotide
uuagcacuaugagccaguc

SEQ ID NO: 516307 - RNA, 19 nt, Artificial Sequence
  Description of Artificial Sequence: Synthetic oligonucleotide
aggcuuagccuuccuauuu

SEQ ID NO: 516308 - RNA, 19 nt, Artificial Sequence
  Description of Artificial Sequence: Synthetic oligonucleotide
gauccaaugggagccugga

SEQ ID NO: 516309 - RNA, 19 nt, Artificial Sequence
  Description of Artificial Sequence: Synthetic oligonucleotide
aaauggcucugggagugaa

SEQ ID NO: 516310 - RNA, 19 nt, Artificial Sequence
  Description of Artificial Sequence: Synthetic oligonucleotide
guuaaggagaggucaguau

SEQ ID NO: 516311 - RNA, 19 nt, Artificial Sequence
  Description of Artificial Sequence: Synthetic oligonucleotide
aguugggauagacccuaau

SEQ ID NO: 516312 - RNA, 19 nt, Artificial Sequence
  Description of Artificial Sequence: Synthetic oligonucleotide
acuuuccgccaguugacuu

SEQ ID NO: 516313 - RNA, 19 nt, Artificial Sequence
  Description of Artificial Sequence: Synthetic oligonucleotide
auaugcaaagugggaacau

SEQ ID NO: 516314 - RNA, 19 nt, Artificial Sequence
  Description of Artificial Sequence: Synthetic oligonucleotide
cuaggaaugguuguauacu

SEQ ID NO: 516315 - RNA, 19 nt, Artificial Sequence
  Description of Artificial Sequence: Synthetic oligonucleotide
augcaaagugggaacauuu

SEQ ID NO: 516316 - RNA, 19 nt, Artificial Sequence
  Description of Artificial Sequence: Synthetic oligonucleotide
aguuuucucccugccccag

SEQ ID NO: 516317 - RNA, 19 nt, Artificial Sequence
  Description of Artificial Sequence: Synthetic oligonucleotide
ucacgacaacuugauggga

SEQ ID NO: 516318 - RNA, 19 nt, Artificial Sequence
  Description of Artificial Sequence: Synthetic oligonucleotide
ucugauccaaugggagccu

SEQ ID NO: 516319 - RNA, 19 nt, Artificial Sequence
  Description of Artificial Sequence: Synthetic oligonucleotide
aggagacaggcaacgagca

SEQ ID NO: 516320 - RNA, 19 nt, Artificial Sequence
  Description of Artificial Sequence: Synthetic oligonucleotide
agguugaauuaggaauaug

SEQ ID NO: 516321 - RNA, 19 nt, Artificial Sequence
  Description of Artificial Sequence: Synthetic oligonucleotide
acaacguaucaaagcucuc

SEQ ID NO: 516322 - RNA, 19 nt, Artificial Sequence
  Description of Artificial Sequence: Synthetic oligonucleotide
ggaggagaaagaauaaacu

SEQ ID NO: 516323 - RNA, 19 nt, Artificial Sequence
  Description of Artificial Sequence: Synthetic oligonucleotide
auggcucugggagugaauu

SEQ ID NO: 516324 - RNA, 19 nt, Artificial Sequence
  Description of Artificial Sequence: Synthetic oligonucleotide
ccucugauccaaugggagc

SEQ ID NO: 516325 - RNA, 19 nt, Artificial Sequence
  Description of Artificial Sequence: Synthetic oligonucleotide
uuccgaugggcaggcaggc

SEQ ID NO: 516326 - RNA, 19 nt, Artificial Sequence
  Description of Artificial Sequence: Synthetic oligonucleotide
uuccggauguagguaucug

SEQ ID NO: 516327 - RNA, 19 nt, Artificial Sequence
  Description of Artificial Sequence: Synthetic oligonucleotide
gcaggagguaauuuaaccu

SEQ ID NO: 516328 - RNA, 19 nt, Artificial Sequence
  Description of Artificial Sequence: Synthetic oligonucleotide
ccaaguaauaaaguuggga

SEQ ID NO: 516329 - RNA, 19 nt, Artificial Sequence
  Description of Artificial Sequence: Synthetic oligonucleotide
cuuuaaccaucaaguaaua

SEQ ID NO: 516330 - RNA, 19 nt, Artificial Sequence
  Description of Artificial Sequence: Synthetic oligonucleotide
cagccuugcuccaucagaa

SEQ ID NO: 516331 - RNA, 19 nt, Artificial Sequence
  Description of Artificial Sequence: Synthetic oligonucleotide
ggugacguccucacccugg

SEQ ID NO: 516332 - RNA, 19 nt, Artificial Sequence
  Description of Artificial Sequence: Synthetic oligonucleotide
cauggcaguaagcugggcu

SEQ ID NO: 516333 - RNA, 19 nt, Artificial Sequence
  Description of Artificial Sequence: Synthetic oligonucleotide
gugcuucgccauuaaguuc

SEQ ID NO: 516334 - RNA, 19 nt, Artificial Sequence
  Description of Artificial Sequence: Synthetic oligonucleotide
agacuccagugcuucgcca

SEQ ID NO: 516335 - RNA, 19 nt, Artificial Sequence
  Description of Artificial Sequence: Synthetic oligonucleotide
ugugacgcuguaccaccuu

SEQ ID NO: 516336 - RNA, 19 nt, Artificial Sequence
  Description of Artificial Sequence: Synthetic oligonucleotide
aggcugaacaacguaucaa

SEQ ID NO: 516337 - RNA, 19 nt, Artificial Sequence
  Description of Artificial Sequence: Synthetic oligonucleotide
ggucaguaucgcaaaagca

SEQ ID NO: 516338 - RNA, 19 nt, Artificial Sequence
  Description of Artificial Sequence: Synthetic oligonucleotide
ugacguccucacccuggcc

SEQ ID NO: 516339 - RNA, 19 nt, Artificial Sequence
  Description of Artificial Sequence: Synthetic oligonucleotide
gagcgcagcccacccuccg

SEQ ID NO: 516340 - RNA, 19 nt, Artificial Sequence
  Description of Artificial Sequence: Synthetic oligonucleotide
uuccuauuucuuggcuucu

SEQ ID NO: 516341 - RNA, 19 nt, Artificial Sequence
  Description of Artificial Sequence: Synthetic oligonucleotide
acguaucaaagcucuccua

SEQ ID NO: 516342 - RNA, 19 nt, Artificial Sequence
  Description of Artificial Sequence: Synthetic oligonucleotide
ggaauauagcuuucauugu

SEQ ID NO: 516343 - RNA, 19 nt, Artificial Sequence
  Description of Artificial Sequence: Synthetic oligonucleotide
aguaguagucuaacauuuu

SEQ ID NO: 516344 - RNA, 19 nt, Artificial Sequence
  Description of Artificial Sequence: Synthetic oligonucleotide
caggagguaauuuaaccuu

SEQ ID NO: 516345 - RNA, 19 nt, Artificial Sequence
  Description of Artificial Sequence: Synthetic oligonucleotide
acgccagcggcucuccagu

SEQ ID NO: 516346 - RNA, 19 nt, Artificial Sequence
  Description of Artificial Sequence: Synthetic oligonucleotide
cuacgcucuagaucuucca

SEQ ID NO: 516347 - RNA, 19 nt, Artificial Sequence
  Description of Artificial Sequence: Synthetic oligonucleotide
ccuacgcucuagaucuucc

SEQ ID NO: 516348 - RNA, 19 nt, Artificial Sequence
  Description of Artificial Sequence: Synthetic oligonucleotide
cugacucugggucacuucu

SEQ ID NO: 516349 - RNA, 19 nt, Artificial Sequence
  Description of Artificial Sequence: Synthetic oligonucleotide
ggucacuucuucaacucca

SEQ ID NO: 516350 - RNA, 19 nt, Artificial Sequence
  Description of Artificial Sequence: Synthetic oligonucleotide
agguaccacugagcuuucc

SEQ ID NO: 516351 - RNA, 19 nt, Artificial Sequence
  Description of Artificial Sequence: Synthetic oligonucleotide
ccuauaugcaaagugggaa

SEQ ID NO: 516352 - RNA, 19 nt, Artificial Sequence
  Description of Artificial Sequence: Synthetic oligonucleotide
ccugccuacgcucuagauc

SEQ ID NO: 516353 - RNA, 19 nt, Artificial Sequence
  Description of Artificial Sequence: Synthetic oligonucleotide
augaacacugacggaggaa

SEQ ID NO: 516354 - RNA, 19 nt, Artificial Sequence
  Description of Artificial Sequence: Synthetic oligonucleotide
cauuaaacagcaggaggua

SEQ ID NO: 516355 - RNA, 19 nt, Artificial Sequence
  Description of Artificial Sequence: Synthetic oligonucleotide
guacucauguggaaugaua

SEQ ID NO: 516356 - RNA, 19 nt, Artificial Sequence
  Description of Artificial Sequence: Synthetic oligonucleotide
gaacgcaccugccuacgcu

SEQ ID NO: 516357 - RNA, 19 nt, Artificial Sequence
  Description of Artificial Sequence: Synthetic oligonucleotide
gaucgguuauaaccaacuu

SEQ ID NO: 516358 - RNA, 19 nt, Artificial Sequence
  Description of Artificial Sequence: Synthetic oligonucleotide
cuuagcacuaugagccagu

SEQ ID NO: 516359 - RNA, 19 nt, Artificial Sequence
  Description of Artificial Sequence: Synthetic oligonucleotide
ggcuuagccuuccuauuuc

SEQ ID NO: 516360 - RNA, 19 nt, Artificial Sequence
  Description of Artificial Sequence: Synthetic oligonucleotide
ggacccacccagcugaaaa

SEQ ID NO: 516361 - RNA, 19 nt, Artificial Sequence
  Description of Artificial Sequence: Synthetic oligonucleotide
uggcucugggagugaauua

SEQ ID NO: 516362 - RNA, 19 nt, Artificial Sequence
  Description of Artificial Sequence: Synthetic oligonucleotide
gcuucccuugcacacagaa

SEQ ID NO: 516363 - RNA, 19 nt, Artificial Sequence
  Description of Artificial Sequence: Synthetic oligonucleotide
cgugugacgcuguaccacc

SEQ ID NO: 516364 - RNA, 19 nt, Artificial Sequence
  Description of Artificial Sequence: Synthetic oligonucleotide
uaccugggguuaguguaac

SEQ ID NO: 516365 - RNA, 19 nt, Artificial Sequence
  Description of Artificial Sequence: Synthetic oligonucleotide
gguucaaacuguagccuga

SEQ ID NO: 516366 - RNA, 19 nt, Artificial Sequence
  Description of Artificial Sequence: Synthetic oligonucleotide
cugggucacuucuucaacu

SEQ ID NO: 516367 - RNA, 19 nt, Artificial Sequence
  Description of Artificial Sequence: Synthetic oligonucleotide
ggauucuggccauaaaauu

SEQ ID NO: 516368 - RNA, 19 nt, Artificial Sequence
  Description of Artificial Sequence: Synthetic oligonucleotide
acugacggaggaagugaca

SEQ ID NO: 516369 - RNA, 19 nt, Artificial Sequence
  Description of Artificial Sequence: Synthetic oligonucleotide
gaggugacguccucacccu

SEQ ID NO: 516370 - RNA, 19 nt, Artificial Sequence
  Description of Artificial Sequence: Synthetic oligonucleotide
gggguuaguguaacuuagc

SEQ ID NO: 516371 - RNA, 19 nt, Artificial Sequence
  Description of Artificial Sequence: Synthetic oligonucleotide
accugccuacgcucuagau

SEQ ID NO: 516372 - RNA, 19 nt, Artificial Sequence
  Description of Artificial Sequence: Synthetic oligonucleotide
caguugacuuggucgcuga

SEQ ID NO: 516373 - RNA, 19 nt, Artificial Sequence
  Description of Artificial Sequence: Synthetic oligonucleotide
caccuguccugaccugcag

SEQ ID NO: 516374 - RNA, 19 nt, Artificial Sequence
  Description of Artificial Sequence: Synthetic oligonucleotide
uuggucgcugaggcuguga

SEQ ID NO: 516375 - RNA, 19 nt, Artificial Sequence
  Description of Artificial Sequence: Synthetic oligonucleotide
ugggaaggucauccccgua

SEQ ID NO: 516376 - RNA, 19 nt, Artificial Sequence
  Description of Artificial Sequence: Synthetic oligonucleotide
agcgcagcccacccuccgu

SEQ ID NO: 516377 - RNA, 19 nt, Artificial Sequence
  Description of Artificial Sequence: Synthetic oligonucleotide
gaugguugucauaguaguu

SEQ ID NO: 516378 - RNA, 19 nt, Artificial Sequence
  Description of Artificial Sequence: Synthetic oligonucleotide
cgguuauaaccaacuuggg

SEQ ID NO: 516379 - RNA, 19 nt, Artificial Sequence
  Description of Artificial Sequence: Synthetic oligonucleotide
ccagaacgcaccugccuac

SEQ ID NO: 516380 - RNA, 19 nt, Artificial Sequence
  Description of Artificial Sequence: Synthetic oligonucleotide
ggcucugggagugaauuaa

SEQ ID NO: 516381 - RNA, 19 nt, Artificial Sequence
  Description of Artificial Sequence: Synthetic oligonucleotide
ccauuaaguucuucacaca

SEQ ID NO: 516382 - RNA, 19 nt, Artificial Sequence
  Description of Artificial Sequence: Synthetic oligonucleotide
uccaaaccaugggcucccc

SEQ ID NO: 516383 - RNA, 19 nt, Artificial Sequence
  Description of Artificial Sequence: Synthetic oligonucleotide
ggcguaagcccuccucuga

SEQ ID NO: 516384 - RNA, 19 nt, Artificial Sequence
  Description of Artificial Sequence: Synthetic oligonucleotide
ggucauccccguacuuccg

SEQ ID NO: 516385 - RNA, 19 nt, Artificial Sequence
  Description of Artificial Sequence: Synthetic oligonucleotide
acuuggucgcugaggcugu

SEQ ID NO: 516386 - RNA, 19 nt, Artificial Sequence
  Description of Artificial Sequence: Synthetic oligonucleotide
gucuaacauuuugaaagau

SEQ ID NO: 516387 - RNA, 19 nt, Artificial Sequence
  Description of Artificial Sequence: Synthetic oligonucleotide
cagguucaaacuguagccu

SEQ ID NO: 516388 - RNA, 19 nt, Artificial Sequence
  Description of Artificial Sequence: Synthetic oligonucleotide
ugcguugagcagggcucug

SEQ ID NO: 516389 - RNA, 19 nt, Artificial Sequence
  Description of Artificial Sequence: Synthetic oligonucleotide
uagcccaccccagggguuu

SEQ ID NO: 516390 - RNA, 19 nt, Artificial Sequence
  Description of Artificial Sequence: Synthetic oligonucleotide
ucuuuccgaugggcaggca

SEQ ID NO: 516391 - RNA, 19 nt, Artificial Sequence
  Description of Artificial Sequence: Synthetic oligonucleotide
cuucgccauuaaguucuuc

SEQ ID NO: 516392 - RNA, 19 nt, Artificial Sequence
  Description of Artificial Sequence: Synthetic oligonucleotide
cuccagaacgcaccugccu

SEQ ID NO: 516393 - RNA, 19 nt, Artificial Sequence
  Description of Artificial Sequence: Synthetic oligonucleotide
gcaaucacgacaacuugau

SEQ ID NO: 516394 - RNA, 19 nt, Artificial Sequence
  Description of Artificial Sequence: Synthetic oligonucleotide
guguuaaggagaggucagu

SEQ ID NO: 516395 - RNA, 19 nt, Artificial Sequence
  Description of Artificial Sequence: Synthetic oligonucleotide
gccugaccacaaaagguuc

SEQ ID NO: 516396 - RNA, 19 nt, Artificial Sequence
  Description of Artificial Sequence: Synthetic oligonucleotide
cagguaccacugagcuuuc

SEQ ID NO: 516397 - RNA, 19 nt, Artificial Sequence
  Description of Artificial Sequence: Synthetic oligonucleotide
ggacuuccccugugacaag

SEQ ID NO: 516398 - RNA, 19 nt, Artificial Sequence
  Description of Artificial Sequence: Synthetic oligonucleotide
cuguaacaguaucuguguu

SEQ ID NO: 516399 - RNA, 19 nt, Artificial Sequence
  Description of Artificial Sequence: Synthetic oligonucleotide
gccaaauggcucugggagu

SEQ ID NO: 516400 - RNA, 19 nt, Artificial Sequence
  Description of Artificial Sequence: Synthetic oligonucleotide
acgcaccugccuacgcucu

SEQ ID NO: 516401 - RNA, 19 nt, Artificial Sequence
  Description of Artificial Sequence: Synthetic oligonucleotide
caaauggcucugggaguga

SEQ ID NO: 516402 - RNA, 19 nt, Artificial Sequence
  Description of Artificial Sequence: Synthetic oligonucleotide
ugccuacgcucuagaucuu

SEQ ID NO: 516403 - RNA, 19 nt, Artificial Sequence
  Description of Artificial Sequence: Synthetic oligonucleotide
cuuggucgcugaggcugug

SEQ ID NO: 516404 - RNA, 19 nt, Artificial Sequence
  Description of Artificial Sequence: Synthetic oligonucleotide
gcaaccgaacaugaacacu

SEQ ID NO: 516405 - RNA, 19 nt, Artificial Sequence
  Description of Artificial Sequence: Synthetic oligonucleotide
gacaggcaacgagcagaga

SEQ ID NO: 516406 - RNA, 19 nt, Artificial Sequence
  Description of Artificial Sequence: Synthetic oligonucleotide
cggccaagucccuugcuuc

SEQ ID NO: 516407 - RNA, 19 nt, Artificial Sequence
  Description of Artificial Sequence: Synthetic oligonucleotide
ccuauuucuuggcuucugu

SEQ ID NO: 516408 - RNA, 19 nt, Artificial Sequence
  Description of Artificial Sequence: Synthetic oligonucleotide
ccaugggcuccccuuaaaa

SEQ ID NO: 516409 - RNA, 19 nt, Artificial Sequence
  Description of Artificial Sequence: Synthetic oligonucleotide
cuccuaggaaugguuguau

SEQ ID NO: 516410 - RNA, 19 nt, Artificial Sequence
  Description of Artificial Sequence: Synthetic oligonucleotide
ggagcgcagcccacccucc

SEQ ID NO: 516411 - RNA, 19 nt, Artificial Sequence
  Description of Artificial Sequence: Synthetic oligonucleotide
gccuacgcucuagaucuuc

SEQ ID NO: 516412 - RNA, 19 nt, Artificial Sequence
  Description of Artificial Sequence: Synthetic oligonucleotide
cacaaucggccaagucccu

SEQ ID NO: 516413 - RNA, 19 nt, Artificial Sequence
  Description of Artificial Sequence: Synthetic oligonucleotide
gguaucugucuugccacau

SEQ ID NO: 516414 - RNA, 19 nt, Artificial Sequence
  Description of Artificial Sequence: Synthetic oligonucleotide
gggcuccccuuaaaacaac

SEQ ID NO: 516415 - RNA, 19 nt, Artificial Sequence
  Description of Artificial Sequence: Synthetic oligonucleotide
ccuugguugcugccuagua

SEQ ID NO: 516416 - RNA, 19 nt, Artificial Sequence
  Description of Artificial Sequence: Synthetic oligonucleotide
ggcaacgagcagagauauc

SEQ ID NO: 516417 - RNA, 19 nt, Artificial Sequence
  Description of Artificial Sequence: Synthetic oligonucleotide
gugugacgcuguaccaccu

SEQ ID NO: 516418 - RNA, 19 nt, Artificial Sequence
  Description of Artificial Sequence: Synthetic oligonucleotide
cugcguugagcagggcucu

SEQ ID NO: 516419 - RNA, 19 nt, Artificial Sequence
  Description of Artificial Sequence: Synthetic oligonucleotide
caucaggggcuuggagaaa

SEQ ID NO: 516420 - RNA, 19 nt, Artificial Sequence
  Description of Artificial Sequence: Synthetic oligonucleotide
gcguaagcccuccucugau

SEQ ID NO: 516421 - RNA, 19 nt, Artificial Sequence
  Description of Artificial Sequence: Synthetic oligonucleotide
cccuugcuucggaauggga

SEQ ID NO: 516422 - RNA, 19 nt, Artificial Sequence
  Description of Artificial Sequence: Synthetic oligonucleotide
ccccguacuuccggagcag

SEQ ID NO: 516423 - RNA, 19 nt, Artificial Sequence
  Description of Artificial Sequence: Synthetic oligonucleotide
gguugcugccuaguaccau

SEQ ID NO: 516424 - RNA, 19 nt, Artificial Sequence
  Description of Artificial Sequence: Synthetic oligonucleotide
ccggucacaggugcauaga

SEQ ID NO: 516425 - RNA, 19 nt, Artificial Sequence
  Description of Artificial Sequence: Synthetic oligonucleotide
ccaaaccaugggcuccccu

SEQ ID NO: 516426 - RNA, 19 nt, Artificial Sequence
  Description of Artificial Sequence: Synthetic oligonucleotide
gggacccacccagcugaaa

SEQ ID NO: 516427 - RNA, 19 nt, Artificial Sequence
  Description of Artificial Sequence: Synthetic oligonucleotide
cccagggguuuucuuuuau

SEQ ID NO: 516428 - RNA, 19 nt, Artificial Sequence
  Description of Artificial Sequence: Synthetic oligonucleotide
gcuucgccauuaaguucuu

SEQ ID NO: 516429 - RNA, 19 nt, Artificial Sequence
  Description of Artificial Sequence: Synthetic oligonucleotide
aauguuaugacacauucgg

SEQ ID NO: 516430 - RNA, 19 nt, Artificial Sequence
  Description of Artificial Sequence: Synthetic oligonucleotide
uuaaucggcagcaagaaag

SEQ ID NO: 516431 - RNA, 19 nt, Artificial Sequence
  Description of Artificial Sequence: Synthetic oligonucleotide
aacaguugaaucuacacca

SEQ ID NO: 516432 - RNA, 19 nt, Artificial Sequence
  Description of Artificial Sequence: Synthetic oligonucleotide
uguaauggagucaaaauca

SEQ ID NO: 516433 - RNA, 19 nt, Artificial Sequence
  Description of Artificial Sequence: Synthetic oligonucleotide
uguuaugacacauucgggg

SEQ ID NO: 516434 - RNA, 19 nt, Artificial Sequence
  Description of Artificial Sequence: Synthetic oligonucleotide
ucuguuaauguuaugacac

SEQ ID NO: 516435 - RNA, 19 nt, Artificial Sequence
  Description of Artificial Sequence: Synthetic oligonucleotide
augaaaaucuuucagaggu

SEQ ID NO: 516436 - RNA, 19 nt, Artificial Sequence
  Description of Artificial Sequence: Synthetic oligonucleotide
aauuagguccuccagauau

SEQ ID NO: 516437 - RNA, 19 nt, Artificial Sequence
  Description of Artificial Sequence: Synthetic oligonucleotide
auaaccacagaucucuggc

SEQ ID NO: 516438 - RNA, 19 nt, Artificial Sequence
  Description of Artificial Sequence: Synthetic oligonucleotide
cucguuuucucauaaaucc

SEQ ID NO: 516439 - RNA, 19 nt, Artificial Sequence
  Description of Artificial Sequence: Synthetic oligonucleotide
uucauuggcaaucuuaaca

SEQ ID NO: 516440 - RNA, 19 nt, Artificial Sequence
  Description of Artificial Sequence: Synthetic oligonucleotide
aacuguaggaacgacaguc

SEQ ID NO: 516441 - RNA, 19 nt, Artificial Sequence
  Description of Artificial Sequence: Synthetic oligonucleotide
aaugaagguucgaauaacc

SEQ ID NO: 516442 - RNA, 19 nt, Artificial Sequence
  Description of Artificial Sequence: Synthetic oligonucleotide
ucauacauaacucuagaaa

SEQ ID NO: 516443 - RNA, 19 nt, Artificial Sequence
  Description of Artificial Sequence: Synthetic oligonucleotide
uauaaguuuggcaaggaaa

SEQ ID NO: 516444 - RNA, 19 nt, Artificial Sequence
  Description of Artificial Sequence: Synthetic oligonucleotide
agcuauaccagucaugaag

SEQ ID NO: 516445 - RNA, 19 nt, Artificial Sequence
  Description of Artificial Sequence: Synthetic oligonucleotide
aauagcccgaaauccuugc

SEQ ID NO: 516446 - RNA, 19 nt, Artificial Sequence
  Description of Artificial Sequence: Synthetic oligonucleotide
uggaucucgaucaaaaugu

SEQ ID NO: 516447 - RNA, 19 nt, Artificial Sequence
  Description of Artificial Sequence: Synthetic oligonucleotide
aauguaauggagucaaaau

SEQ ID NO: 516448 - RNA, 19 nt, Artificial Sequence
  Description of Artificial Sequence: Synthetic oligonucleotide
agcauuuaucacuuugacc

SEQ ID NO: 516449 - RNA, 19 nt, Artificial Sequence
  Description of Artificial Sequence: Synthetic oligonucleotide
uccauuaucaauguguaca

SEQ ID NO: 516450 - RNA, 19 nt, Artificial Sequence
  Description of Artificial Sequence: Synthetic oligonucleotide
aaaauaagagauucccagu

SEQ ID NO: 516451 - RNA, 19 nt, Artificial Sequence
  Description of Artificial Sequence: Synthetic oligonucleotide
agauucauuggcuauaccu

SEQ ID NO: 516452 - RNA, 19 nt, Artificial Sequence
  Description of Artificial Sequence: Synthetic oligonucleotide
uccuuuauggcgaaggcug

SEQ ID NO: 516453 - RNA, 19 nt, Artificial Sequence
  Description of Artificial Sequence: Synthetic oligonucleotide
aaauuccgcauacauaacu

SEQ ID NO: 516454 - RNA, 19 nt, Artificial Sequence
  Description of Artificial Sequence: Synthetic oligonucleotide
uuaugggccacaaaaucag

SEQ ID NO: 516455 - RNA, 19 nt, Artificial Sequence
  Description of Artificial Sequence: Synthetic oligonucleotide
uucuguaaggccaacuuca

SEQ ID NO: 516456 - RNA, 19 nt, Artificial Sequence
  Description of Artificial Sequence: Synthetic oligonucleotide
uauugcuggaucaaaccag

SEQ ID NO: 516457 - RNA, 19 nt, Artificial Sequence
  Description of Artificial Sequence: Synthetic oligonucleotide
ugauaauagcccgaaaucc

SEQ ID NO: 516458 - RNA, 19 nt, Artificial Sequence
  Description of Artificial Sequence: Synthetic oligonucleotide
gcacauauuacucugauug

SEQ ID NO: 516459 - RNA, 19 nt, Artificial Sequence
  Description of Artificial Sequence: Synthetic oligonucleotide
acauauuacucugauugcc

SEQ ID NO: 516460 - RNA, 19 nt, Artificial Sequence
  Description of Artificial Sequence: Synthetic oligonucleotide
aagucacuaguaaugaagg

SEQ ID NO: 516461 - RNA, 19 nt, Artificial Sequence
  Description of Artificial Sequence: Synthetic oligonucleotide
uuagcuuucugauaaguuc

SEQ ID NO: 516462 - RNA, 19 nt, Artificial Sequence
  Description of Artificial Sequence: Synthetic oligonucleotide
augacuuugccauauugag

SEQ ID NO: 516463 - RNA, 19 nt, Artificial Sequence
  Description of Artificial Sequence: Synthetic oligonucleotide
ucacuaguaaugaagguuc

SEQ ID NO: 516464 - RNA, 19 nt, Artificial Sequence
  Description of Artificial Sequence: Synthetic oligonucleotide
uucaguauuacuuucccau

SEQ ID NO: 516465 - RNA, 19 nt, Artificial Sequence
  Description of Artificial Sequence: Synthetic oligonucleotide
uuugaccugaauuccaagc

SEQ ID NO: 516466 - RNA, 19 nt, Artificial Sequence
  Description of Artificial Sequence: Synthetic oligonucleotide
auuaugguggguuuugaug

SEQ ID NO: 516467 - RNA, 19 nt, Artificial Sequence
  Description of Artificial Sequence: Synthetic oligonucleotide
uucucuaacacuuuucuua

SEQ ID NO: 516468 - RNA, 19 nt, Artificial Sequence
  Description of Artificial Sequence: Synthetic oligonucleotide
aauuagaucaggccguaaa

SEQ ID NO: 516469 - RNA, 19 nt, Artificial Sequence
  Description of Artificial Sequence: Synthetic oligonucleotide
ucgaaugcauucaaguucu

SEQ ID NO: 516470 - RNA, 19 nt, Artificial Sequence
  Description of Artificial Sequence: Synthetic oligonucleotide
uucaaaauauuguugguuu

SEQ ID NO: 516471 - RNA, 19 nt, Artificial Sequence
  Description of Artificial Sequence: Synthetic oligonucleotide
cagauaugauaauagcccg

SEQ ID NO: 516472 - RNA, 19 nt, Artificial Sequence
  Description of Artificial Sequence: Synthetic oligonucleotide
uuucugauaaguuccgugu

SEQ ID NO: 516473 - RNA, 19 nt, Artificial Sequence
  Description of Artificial Sequence: Synthetic oligonucleotide
auuagaucaggccguaaag

SEQ ID NO: 516474 - RNA, 19 nt, Artificial Sequence
  Description of Artificial Sequence: Synthetic oligonucleotide
ucgaucaaaauguaaugga

SEQ ID NO: 516475 - RNA, 19 nt, Artificial Sequence
  Description of Artificial Sequence: Synthetic oligonucleotide
uauuguugguuucaggaaa

SEQ ID NO: 516476 - RNA, 19 nt, Artificial Sequence
  Description of Artificial Sequence: Synthetic oligonucleotide
ugaagguucgaauaaccac

SEQ ID NO: 516477 - RNA, 19 nt, Artificial Sequence
  Description of Artificial Sequence: Synthetic oligonucleotide
aguaaugaagguucgaaua

SEQ ID NO: 516478 - RNA, 19 nt, Artificial Sequence
  Description of Artificial Sequence: Synthetic oligonucleotide
aguuuuaaucggcagcaag

SEQ ID NO: 516479 - RNA, 19 nt, Artificial Sequence
  Description of Artificial Sequence: Synthetic oligonucleotide
auacauaacuguaggaacg

SEQ ID NO: 516480 - RNA, 19 nt, Artificial Sequence
  Description of Artificial Sequence: Synthetic oligonucleotide
acacauuuauuacucccac

SEQ ID NO: 516481 - RNA, 19 nt, Artificial Sequence
  Description of Artificial Sequence: Synthetic oligonucleotide
ugaaucuacaccaccacua

SEQ ID NO: 516482 - RNA, 19 nt, Artificial Sequence
  Description of Artificial Sequence: Synthetic oligonucleotide
guugucaagaaagugggag

SEQ ID NO: 516483 - RNA, 19 nt, Artificial Sequence
  Description of Artificial Sequence: Synthetic oligonucleotide
auacucgugacagccaucc

SEQ ID NO: 516484 - RNA, 19 nt, Artificial Sequence
  Description of Artificial Sequence: Synthetic oligonucleotide
uccgcauacauaacuguag

SEQ ID NO: 516485 - RNA, 19 nt, Artificial Sequence
  Description of Artificial Sequence: Synthetic oligonucleotide
ccagauaugauaauagccc

SEQ ID NO: 516486 - RNA, 19 nt, Artificial Sequence
  Description of Artificial Sequence: Synthetic oligonucleotide
gauucauuggcuauaccug

SEQ ID NO: 516487 - RNA, 19 nt, Artificial Sequence
  Description of Artificial Sequence: Synthetic oligonucleotide
acaaccuugaauccaucag

SEQ ID NO: 516488 - RNA, 19 nt, Artificial Sequence
  Description of Artificial Sequence: Synthetic oligonucleotide
ucucgaucaaaauguaaug

SEQ ID NO: 516489 - RNA, 19 nt, Artificial Sequence
  Description of Artificial Sequence: Synthetic oligonucleotide
ucugauaaguuccguguca

SEQ ID NO: 516490 - RNA, 19 nt, Artificial Sequence
  Description of Artificial Sequence: Synthetic oligonucleotide
cucgaucaaaauguaaugg

SEQ ID NO: 516491 - RNA, 19 nt, Artificial Sequence
  Description of Artificial Sequence: Synthetic oligonucleotide
uuaacaaaaguaucaccaa

SEQ ID NO: 516492 - RNA, 19 nt, Artificial Sequence
  Description of Artificial Sequence: Synthetic oligonucleotide
auauugcuggaucaaacca

SEQ ID NO: 516493 - RNA, 19 nt, Artificial Sequence
  Description of Artificial Sequence: Synthetic oligonucleotide
uccaagaacaggcuugcca

SEQ ID NO: 516494 - RNA, 19 nt, Artificial Sequence
  Description of Artificial Sequence: Synthetic oligonucleotide
guaggaacgacagucaccc

SEQ ID NO: 516495 - RNA, 19 nt, Artificial Sequence
  Description of Artificial Sequence: Synthetic oligonucleotide
ucuacagguaucucauugc

SEQ ID NO: 516496 - RNA, 19 nt, Artificial Sequence
  Description of Artificial Sequence: Synthetic oligonucleotide
gaaucuccguugcacaggg

SEQ ID NO: 516497 - RNA, 19 nt, Artificial Sequence
  Description of Artificial Sequence: Synthetic oligonucleotide
uagacaacucuguuaaugu

SEQ ID NO: 516498 - RNA, 19 nt, Artificial Sequence
  Description of Artificial Sequence: Synthetic oligonucleotide
uccuucauacucgugacag

SEQ ID NO: 516499 - RNA, 19 nt, Artificial Sequence
  Description of Artificial Sequence: Synthetic oligonucleotide
uuaguaccaccucuacagg

SEQ ID NO: 516500 - RNA, 19 nt, Artificial Sequence
  Description of Artificial Sequence: Synthetic oligonucleotide
aauuccgcauacauaacug

SEQ ID NO: 516501 - RNA, 19 nt, Artificial Sequence
  Description of Artificial Sequence: Synthetic oligonucleotide
ugggaguaacgucuguagg

SEQ ID NO: 516502 - RNA, 19 nt, Artificial Sequence
  Description of Artificial Sequence: Synthetic oligonucleotide
acgacagucacccugcaca

SEQ ID NO: 516503 - RNA, 19 nt, Artificial Sequence
  Description of Artificial Sequence: Synthetic oligonucleotide
agguucuauuacuuuuccc

SEQ ID NO: 516504 - RNA, 19 nt, Artificial Sequence
  Description of Artificial Sequence: Synthetic oligonucleotide
uuugucuacacugucucca

SEQ ID NO: 516505 - RNA, 19 nt, Artificial Sequence
  Description of Artificial Sequence: Synthetic oligonucleotide
ucucguuuucucauaaauc

SEQ ID NO: 516506 - RNA, 19 nt, Artificial Sequence
  Description of Artificial Sequence: Synthetic oligonucleotide
uaaucggcagcaagaaagc

SEQ ID NO: 516507 - RNA, 19 nt, Artificial Sequence
  Description of Artificial Sequence: Synthetic oligonucleotide
aguaccuugggcaagaaaa

SEQ ID NO: 516508 - RNA, 19 nt, Artificial Sequence
  Description of Artificial Sequence: Synthetic oligonucleotide
ugguaaauauugcuggauc

SEQ ID NO: 516509 - RNA, 19 nt, Artificial Sequence
  Description of Artificial Sequence: Synthetic oligonucleotide
acacauucgggguauaagu

SEQ ID NO: 516510 - RNA, 19 nt, Artificial Sequence
  Description of Artificial Sequence: Synthetic oligonucleotide
gaagguucgaauaaccaca

SEQ ID NO: 516511 - RNA, 19 nt, Artificial Sequence
  Description of Artificial Sequence: Synthetic oligonucleotide
cucgaaugcauucaaguuc

SEQ ID NO: 516512 - RNA, 19 nt, Artificial Sequence
  Description of Artificial Sequence: Synthetic oligonucleotide
agaauuagguccuccagau

SEQ ID NO: 516513 - RNA, 19 nt, Artificial Sequence
  Description of Artificial Sequence: Synthetic oligonucleotide
agugaauggagacuuguaa

SEQ ID NO: 516514 - RNA, 19 nt, Artificial Sequence
  Description of Artificial Sequence: Synthetic oligonucleotide
ugcacaaagagcucccgca

SEQ ID NO: 516515 - RNA, 19 nt, Artificial Sequence
  Description of Artificial Sequence: Synthetic oligonucleotide
aacacauuuauuacuccca

SEQ ID NO: 516516 - RNA, 19 nt, Artificial Sequence
  Description of Artificial Sequence: Synthetic oligonucleotide
aaaccuuauucaucaucug

SEQ ID NO: 516517 - RNA, 19 nt, Artificial Sequence
  Description of Artificial Sequence: Synthetic oligonucleotide
acauaacucuagaaauucc

SEQ ID NO: 516518 - RNA, 19 nt, Artificial Sequence
  Description of Artificial Sequence: Synthetic oligonucleotide
ugauugccaggccaggacc

SEQ ID NO: 516519 - RNA, 19 nt, Artificial Sequence
  Description of Artificial Sequence: Synthetic oligonucleotide
ucccugagaauguuauggg

SEQ ID NO: 516520 - RNA, 19 nt, Artificial Sequence
  Description of Artificial Sequence: Synthetic oligonucleotide
agucaaaaucacuggcauc

SEQ ID NO: 516521 - RNA, 19 nt, Artificial Sequence
  Description of Artificial Sequence: Synthetic oligonucleotide
cugaaguggaucucgauca

SEQ ID NO: 516522 - RNA, 19 nt, Artificial Sequence
  Description of Artificial Sequence: Synthetic oligonucleotide
agcacgauucagcaaagcu

SEQ ID NO: 516523 - RNA, 19 nt, Artificial Sequence
  Description of Artificial Sequence: Synthetic oligonucleotide
uccaaggggaagauuucag

SEQ ID NO: 516524 - RNA, 19 nt, Artificial Sequence
  Description of Artificial Sequence: Synthetic oligonucleotide
cacaauauucccagagcgc

SEQ ID NO: 516525 - RNA, 19 nt, Artificial Sequence
  Description of Artificial Sequence: Synthetic oligonucleotide
ucaaaauguaauggaguca

SEQ ID NO: 516526 - RNA, 19 nt, Artificial Sequence
  Description of Artificial Sequence: Synthetic oligonucleotide
cuuuguaacaggguaugag

SEQ ID NO: 516527 - RNA, 19 nt, Artificial Sequence
  Description of Artificial Sequence: Synthetic oligonucleotide
cuacagguaucucauugcc

SEQ ID NO: 516528 - RNA, 19 nt, Artificial Sequence
  Description of Artificial Sequence: Synthetic oligonucleotide
aacgacagucacccugcac

SEQ ID NO: 516529 - RNA, 19 nt, Artificial Sequence
  Description of Artificial Sequence: Synthetic oligonucleotide
gagauugguagagugguug

SEQ ID NO: 516530 - RNA, 19 nt, Artificial Sequence
  Description of Artificial Sequence: Synthetic oligonucleotide
uaaguuccgugucauuaug

SEQ ID NO: 516531 - RNA, 19 nt, Artificial Sequence
  Description of Artificial Sequence: Synthetic oligonucleotide
ugauguuaggucauacaua

SEQ ID NO: 516532 - RNA, 19 nt, Artificial Sequence
  Description of Artificial Sequence: Synthetic oligonucleotide
uuuuaaucggcagcaagaa

SEQ ID NO: 516533 - RNA, 19 nt, Artificial Sequence
  Description of Artificial Sequence: Synthetic oligonucleotide
uuagaucaggccguaaagu

SEQ ID NO: 516534 - RNA, 19 nt, Artificial Sequence
  Description of Artificial Sequence: Synthetic oligonucleotide
cauucgggguauaaguuug

SEQ ID NO: 516535 - RNA, 19 nt, Artificial Sequence
  Description of Artificial Sequence: Synthetic oligonucleotide
uugucaagaaagugggagu

SEQ ID NO: 516536 - RNA, 19 nt, Artificial Sequence
  Description of Artificial Sequence: Synthetic oligonucleotide
caaagcacgauucagcaaa

SEQ ID NO: 516537 - RNA, 19 nt, Artificial Sequence
  Description of Artificial Sequence: Synthetic oligonucleotide
guaggagguucuuuaacug

SEQ ID NO: 516538 - RNA, 19 nt, Artificial Sequence
  Description of Artificial Sequence: Synthetic oligonucleotide
aauauucccagagcgcgcu

SEQ ID NO: 516539 - RNA, 19 nt, Artificial Sequence
  Description of Artificial Sequence: Synthetic oligonucleotide
ugagcagcauuuaucacuu

SEQ ID NO: 516540 - RNA, 19 nt, Artificial Sequence
  Description of Artificial Sequence: Synthetic oligonucleotide
agagugagcagcauuuauc

SEQ ID NO: 516541 - RNA, 19 nt, Artificial Sequence
  Description of Artificial Sequence: Synthetic oligonucleotide
ugucccuacucucucuuug

SEQ ID NO: 516542 - RNA, 19 nt, Artificial Sequence
  Description of Artificial Sequence: Synthetic oligonucleotide
ucuuuaguaccaccucuac

SEQ ID NO: 516543 - RNA, 19 nt, Artificial Sequence
  Description of Artificial Sequence: Synthetic oligonucleotide
aaucggcagcaagaaagcg

SEQ ID NO: 516544 - RNA, 19 nt, Artificial Sequence
  Description of Artificial Sequence: Synthetic oligonucleotide
auccauuaucaauguguac

SEQ ID NO: 516545 - RNA, 19 nt, Artificial Sequence
  Description of Artificial Sequence: Synthetic oligonucleotide
guaugaggcuucuuaacac

SEQ ID NO: 516546 - RNA, 19 nt, Artificial Sequence
  Description of Artificial Sequence: Synthetic oligonucleotide
guaaugaagguucgaauaa

SEQ ID NO: 516547 - RNA, 19 nt, Artificial Sequence
  Description of Artificial Sequence: Synthetic oligonucleotide
augcacuuucaauuagauc

SEQ ID NO: 516548 - RNA, 19 nt, Artificial Sequence
  Description of Artificial Sequence: Synthetic oligonucleotide
auauuguugguuucaggaa

SEQ ID NO: 516549 - RNA, 19 nt, Artificial Sequence
  Description of Artificial Sequence: Synthetic oligonucleotide
aagagugagcagcauuuau

SEQ ID NO: 516550 - RNA, 19 nt, Artificial Sequence
  Description of Artificial Sequence: Synthetic oligonucleotide
agaucaggccguaaaguac

SEQ ID NO: 516551 - RNA, 19 nt, Artificial Sequence
  Description of Artificial Sequence: Synthetic oligonucleotide
ugaucucucgaaugcauuc

SEQ ID NO: 516552 - RNA, 19 nt, Artificial Sequence
  Description of Artificial Sequence: Synthetic oligonucleotide
ugaugaguucagcuuugcc

SEQ ID NO: 516553 - RNA, 19 nt, Artificial Sequence
  Description of Artificial Sequence: Synthetic oligonucleotide
uuagauucauuggcuauac

SEQ ID NO: 516554 - RNA, 19 nt, Artificial Sequence
  Description of Artificial Sequence: Synthetic oligonucleotide
uagaucaggccguaaagua

SEQ ID NO: 516555 - RNA, 19 nt, Artificial Sequence
  Description of Artificial Sequence: Synthetic oligonucleotide
gauaaguuccgugucauua

SEQ ID NO: 516556 - RNA, 19 nt, Artificial Sequence
  Description of Artificial Sequence: Synthetic oligonucleotide
gagcauguauuguccauug

SEQ ID NO: 516557 - RNA, 19 nt, Artificial Sequence
  Description of Artificial Sequence: Synthetic oligonucleotide
aauccauuaucaaugugua

SEQ ID NO: 516558 - RNA, 19 nt, Artificial Sequence
  Description of Artificial Sequence: Synthetic oligonucleotide
uuuaaucggcagcaagaaa

SEQ ID NO: 516559 - RNA, 19 nt, Artificial Sequence
  Description of Artificial Sequence: Synthetic oligonucleotide
uguguacagcaauaaccug

SEQ ID NO: 516560 - RNA, 19 nt, Artificial Sequence
  Description of Artificial Sequence: Synthetic oligonucleotide
uaguaaugaagguucgaau

SEQ ID NO: 516561 - RNA, 19 nt, Artificial Sequence
  Description of Artificial Sequence: Synthetic oligonucleotide
ucuacaccaccacuaagua

SEQ ID NO: 516562 - RNA, 19 nt, Artificial Sequence
  Description of Artificial Sequence: Synthetic oligonucleotide
uacagguaucucauugcca

SEQ ID NO: 516563 - RNA, 19 nt, Artificial Sequence
  Description of Artificial Sequence: Synthetic oligonucleotide
uacuggaaauuccgcauac

SEQ ID NO: 516564 - RNA, 19 nt, Artificial Sequence
  Description of Artificial Sequence: Synthetic oligonucleotide
cauaacuguaggaacgaca

SEQ ID NO: 516565 - RNA, 19 nt, Artificial Sequence
  Description of Artificial Sequence: Synthetic oligonucleotide
ucucucgaaugcauucaag

SEQ ID NO: 516566 - RNA, 19 nt, Artificial Sequence
  Description of Artificial Sequence: Synthetic oligonucleotide
uggaaauuccgcauacaua

SEQ ID NO: 516567 - RNA, 19 nt, Artificial Sequence
  Description of Artificial Sequence: Synthetic oligonucleotide
gaguaacgucuguaggagg

SEQ ID NO: 516568 - RNA, 19 nt, Artificial Sequence
  Description of Artificial Sequence: Synthetic oligonucleotide
aagguucgaauaaccacag

SEQ ID NO: 516569 - RNA, 19 nt, Artificial Sequence
  Description of Artificial Sequence: Synthetic oligonucleotide
cauauuacucugauugcca

SEQ ID NO: 516570 - RNA, 19 nt, Artificial Sequence
  Description of Artificial Sequence: Synthetic oligonucleotide
aguuccgugucauuauggu

SEQ ID NO: 516571 - RNA, 19 nt, Artificial Sequence
  Description of Artificial Sequence: Synthetic oligonucleotide
uucugauaaguuccguguc

SEQ ID NO: 516572 - RNA, 19 nt, Artificial Sequence
  Description of Artificial Sequence: Synthetic oligonucleotide
guuaugggccacaaaauca

SEQ ID NO: 516573 - RNA, 19 nt, Artificial Sequence
  Description of Artificial Sequence: Synthetic oligonucleotide
ucauuggcuauaccugcca

SEQ ID NO: 516574 - RNA, 19 nt, Artificial Sequence
  Description of Artificial Sequence: Synthetic oligonucleotide
ggauuugacucuuuguaac

SEQ ID NO: 516575 - RNA, 19 nt, Artificial Sequence
  Description of Artificial Sequence: Synthetic oligonucleotide
aguugaaucuacaccacca

SEQ ID NO: 516576 - RNA, 19 nt, Artificial Sequence
  Description of Artificial Sequence: Synthetic oligonucleotide
cccguugucaagaaagugg

SEQ ID NO: 516577 - RNA, 19 nt, Artificial Sequence
  Description of Artificial Sequence: Synthetic oligonucleotide
cacuaguaaugaagguucg

SEQ ID NO: 516578 - RNA, 19 nt, Artificial Sequence
  Description of Artificial Sequence: Synthetic oligonucleotide
uaaugaagguucgaauaac

SEQ ID NO: 516579 - RNA, 19 nt, Artificial Sequence
  Description of Artificial Sequence: Synthetic oligonucleotide
gugggaguaacgucuguag

SEQ ID NO: 516580 - RNA, 19 nt, Artificial Sequence
  Description of Artificial Sequence: Synthetic oligonucleotide
ucucgaaugcauucaaguu

SEQ ID NO: 516581 - RNA, 19 nt, Artificial Sequence
  Description of Artificial Sequence: Synthetic oligonucleotide
aucucgaucaaaauguaau

SEQ ID NO: 516582 - RNA, 19 nt, Artificial Sequence
  Description of Artificial Sequence: Synthetic oligonucleotide
uacauaacuguaggaacga

SEQ ID NO: 516583 - RNA, 19 nt, Artificial Sequence
  Description of Artificial Sequence: Synthetic oligonucleotide
aagcacgauucagcaaagc

SEQ ID NO: 516584 - RNA, 19 nt, Artificial Sequence
  Description of Artificial Sequence: Synthetic oligonucleotide
guugaaucuacaccaccac

SEQ ID NO: 516585 - RNA, 19 nt, Artificial Sequence
  Description of Artificial Sequence: Synthetic oligonucleotide
uuugccauauugagcccca

SEQ ID NO: 516586 - RNA, 19 nt, Artificial Sequence
  Description of Artificial Sequence: Synthetic oligonucleotide
caggccguaaaguaccuug

SEQ ID NO: 516587 - RNA, 19 nt, Artificial Sequence
  Description of Artificial Sequence: Synthetic oligonucleotide
auuccgcauacauaacugu

SEQ ID NO: 516588 - RNA, 19 nt, Artificial Sequence
  Description of Artificial Sequence: Synthetic oligonucleotide
agaaagagugagcagcauu

SEQ ID NO: 516589 - RNA, 19 nt, Artificial Sequence
  Description of Artificial Sequence: Synthetic oligonucleotide
ucuuaugcacagugccucc

SEQ ID NO: 516590 - RNA, 19 nt, Artificial Sequence
  Description of Artificial Sequence: Synthetic oligonucleotide
uuaugacacauucggggua

SEQ ID NO: 516591 - RNA, 19 nt, Artificial Sequence
  Description of Artificial Sequence: Synthetic oligonucleotide
cuucuuuaucucagugacc

SEQ ID NO: 516592 - RNA, 19 nt, Artificial Sequence
  Description of Artificial Sequence: Synthetic oligonucleotide
cucuguuaauguuaugaca

SEQ ID NO: 516593 - RNA, 19 nt, Artificial Sequence
  Description of Artificial Sequence: Synthetic oligonucleotide
ucgaauaaccacagaucuc

SEQ ID NO: 516594 - RNA, 19 nt, Artificial Sequence
  Description of Artificial Sequence: Synthetic oligonucleotide
aguaacgucuguaggaggu

SEQ ID NO: 516595 - RNA, 19 nt, Artificial Sequence
  Description of Artificial Sequence: Synthetic oligonucleotide
augcauucaaguucucggu

SEQ ID NO: 516596 - RNA, 19 nt, Artificial Sequence
  Description of Artificial Sequence: Synthetic oligonucleotide
uaugggccacaaaaucagc

SEQ ID NO: 516597 - RNA, 19 nt, Artificial Sequence
  Description of Artificial Sequence: Synthetic oligonucleotide
ucgguucugcacaguaaag

SEQ ID NO: 516598 - RNA, 19 nt, Artificial Sequence
  Description of Artificial Sequence: Synthetic oligonucleotide
ucagugaauggagacuugu

SEQ ID NO: 516599 - RNA, 19 nt, Artificial Sequence
  Description of Artificial Sequence: Synthetic oligonucleotide
ucgggguauaaguuuggca

SEQ ID NO: 516600 - RNA, 19 nt, Artificial Sequence
  Description of Artificial Sequence: Synthetic oligonucleotide
cuuugucuacacugucucc

SEQ ID NO: 516601 - RNA, 19 nt, Artificial Sequence
  Description of Artificial Sequence: Synthetic oligonucleotide
agauugguagagugguugu

SEQ ID NO: 516602 - RNA, 19 nt, Artificial Sequence
  Description of Artificial Sequence: Synthetic oligonucleotide
uuuauggcgaaggcuggug

SEQ ID NO: 516603 - RNA, 19 nt, Artificial Sequence
  Description of Artificial Sequence: Synthetic oligonucleotide
gguaugaggcuucuuaaca

SEQ ID NO: 516604 - RNA, 19 nt, Artificial Sequence
  Description of Artificial Sequence: Synthetic oligonucleotide
cuuugccauauugagcccc

SEQ ID NO: 516605 - RNA, 19 nt, Artificial Sequence
  Description of Artificial Sequence: Synthetic oligonucleotide
cuuugaccugaauuccaag

SEQ ID NO: 516606 - RNA, 19 nt, Artificial Sequence
  Description of Artificial Sequence: Synthetic oligonucleotide
uuccgcauacauaacugua

SEQ ID NO: 516607 - RNA, 19 nt, Artificial Sequence
  Description of Artificial Sequence: Synthetic oligonucleotide
uuggcuauaccugccacaa

SEQ ID NO: 516608 - RNA, 19 nt, Artificial Sequence
  Description of Artificial Sequence: Synthetic oligonucleotide
gauaauagcccgaaauccu

SEQ ID NO: 516609 - RNA, 19 nt, Artificial Sequence
  Description of Artificial Sequence: Synthetic oligonucleotide
caauauucccagagcgcgc

SEQ ID NO: 516610 - RNA, 19 nt, Artificial Sequence
  Description of Artificial Sequence: Synthetic oligonucleotide
cagcauuuaucacuuugac

SEQ ID NO: 516611 - RNA, 19 nt, Artificial Sequence
  Description of Artificial Sequence: Synthetic oligonucleotide
auuuaucacuuugaccuga

SEQ ID NO: 516612 - RNA, 19 nt, Artificial Sequence
  Description of Artificial Sequence: Synthetic oligonucleotide
caaagauauagacaacucu

SEQ ID NO: 516613 - RNA, 19 nt, Artificial Sequence
  Description of Artificial Sequence: Synthetic oligonucleotide
auguuaugacacauucggg

SEQ ID NO: 516614 - RNA, 19 nt, Artificial Sequence
  Description of Artificial Sequence: Synthetic oligonucleotide
aguucucgguucugcacag

SEQ ID NO: 516615 - RNA, 19 nt, Artificial Sequence
  Description of Artificial Sequence: Synthetic oligonucleotide
cacucagugguucccgggg

SEQ ID NO: 516616 - RNA, 19 nt, Artificial Sequence
  Description of Artificial Sequence: Synthetic oligonucleotide
acauucgggguauaaguuu

SEQ ID NO: 516617 - RNA, 19 nt, Artificial Sequence
  Description of Artificial Sequence: Synthetic oligonucleotide
acauaacuguaggaacgac

SEQ ID NO: 516618 - RNA, 19 nt, Artificial Sequence
  Description of Artificial Sequence: Synthetic oligonucleotide
uagauucauuggcuauacc

SEQ ID NO: 516619 - RNA, 19 nt, Artificial Sequence
  Description of Artificial Sequence: Synthetic oligonucleotide
cgcgcuacaaccuugaauc

SEQ ID NO: 516620 - RNA, 19 nt, Artificial Sequence
  Description of Artificial Sequence: Synthetic oligonucleotide
guugcagcuauaccaguca

SEQ ID NO: 516621 - RNA, 19 nt, Artificial Sequence
  Description of Artificial Sequence: Synthetic oligonucleotide
uugaugucccuacucucuc

SEQ ID NO: 516622 - RNA, 19 nt, Artificial Sequence
  Description of Artificial Sequence: Synthetic oligonucleotide
aggucauacauaacucuag

SEQ ID NO: 516623 - RNA, 19 nt, Artificial Sequence
  Description of Artificial Sequence: Synthetic oligonucleotide
ugcauucaaguucucgguu

SEQ ID NO: 516624 - RNA, 19 nt, Artificial Sequence
  Description of Artificial Sequence: Synthetic oligonucleotide
uucagugaauggagacuug

SEQ ID NO: 516625 - RNA, 19 nt, Artificial Sequence
  Description of Artificial Sequence: Synthetic oligonucleotide
agucacccugcacacccac

SEQ ID NO: 516626 - RNA, 19 nt, Artificial Sequence
  Description of Artificial Sequence: Synthetic oligonucleotide
gugguuguuccauuguaga

SEQ ID NO: 516627 - RNA, 19 nt, Artificial Sequence
  Description of Artificial Sequence: Synthetic oligonucleotide
agucagguucaucuuuacu

SEQ ID NO: 516628 - RNA, 19 nt, Artificial Sequence
  Description of Artificial Sequence: Synthetic oligonucleotide
uagcccgaaauccuugcuc

SEQ ID NO: 516629 - RNA, 19 nt, Artificial Sequence
  Description of Artificial Sequence: Synthetic oligonucleotide
guuaugacacauucggggu

SEQ ID NO: 516630 - RNA, 19 nt, Artificial Sequence
  Description of Artificial Sequence: Synthetic oligonucleotide
ugucuacacugucuccaug

SEQ ID NO: 516631 - RNA, 19 nt, Artificial Sequence
  Description of Artificial Sequence: Synthetic oligonucleotide
uuuaggucuccuccagcau

SEQ ID NO: 516632 - RNA, 19 nt, Artificial Sequence
  Description of Artificial Sequence: Synthetic oligonucleotide
cacgauucagcaaagcugu

SEQ ID NO: 516633 - RNA, 19 nt, Artificial Sequence
  Description of Artificial Sequence: Synthetic oligonucleotide
guaaaguaccuugggcaag

SEQ ID NO: 516634 - RNA, 19 nt, Artificial Sequence
  Description of Artificial Sequence: Synthetic oligonucleotide
agaaagcguucagugaaug

SEQ ID NO: 516635 - RNA, 19 nt, Artificial Sequence
  Description of Artificial Sequence: Synthetic oligonucleotide
gguguugcagcuauaccag

SEQ ID NO: 516636 - RNA, 19 nt, Artificial Sequence
  Description of Artificial Sequence: Synthetic oligonucleotide
uugaucucucgaaugcauu

SEQ ID NO: 516637 - RNA, 19 nt, Artificial Sequence
  Description of Artificial Sequence: Synthetic oligonucleotide
aaguaccuugggcaagaaa

SEQ ID NO: 516638 - RNA, 19 nt, Artificial Sequence
  Description of Artificial Sequence: Synthetic oligonucleotide
aggguaugaggcuucuuaa

SEQ ID NO: 516639 - RNA, 19 nt, Artificial Sequence
  Description of Artificial Sequence: Synthetic oligonucleotide
cauuaucaauguguacagc

SEQ ID NO: 516640 - RNA, 19 nt, Artificial Sequence
  Description of Artificial Sequence: Synthetic oligonucleotide
cuaguaaugaagguucgaa

SEQ ID NO: 516641 - RNA, 19 nt, Artificial Sequence
  Description of Artificial Sequence: Synthetic oligonucleotide
ggaguaacgucuguaggag

SEQ ID NO: 516642 - RNA, 19 nt, Artificial Sequence
  Description of Artificial Sequence: Synthetic oligonucleotide
agggaugcacuuucaauua

SEQ ID NO: 516643 - RNA, 19 nt, Artificial Sequence
  Description of Artificial Sequence: Synthetic oligonucleotide
ugaaguggaucucgaucaa

SEQ ID NO: 516644 - RNA, 19 nt, Artificial Sequence
  Description of Artificial Sequence: Synthetic oligonucleotide
uuacucugauugccaggcc

SEQ ID NO: 516645 - RNA, 19 nt, Artificial Sequence
  Description of Artificial Sequence: Synthetic oligonucleotide
guaaauauugcuggaucaa

SEQ ID NO: 516646 - RNA, 19 nt, Artificial Sequence
  Description of Artificial Sequence: Synthetic oligonucleotide
auugagccccagcauccag

SEQ ID NO: 516647 - RNA, 19 nt, Artificial Sequence
  Description of Artificial Sequence: Synthetic oligonucleotide
guauuguccauuguaauau

SEQ ID NO: 516648 - RNA, 19 nt, Artificial Sequence
  Description of Artificial Sequence: Synthetic oligonucleotide
guagaaagagugagcagca

SEQ ID NO: 516649 - RNA, 19 nt, Artificial Sequence
  Description of Artificial Sequence: Synthetic oligonucleotide
cuguacaccauauagcuuu

SEQ ID NO: 516650 - RNA, 19 nt, Artificial Sequence
  Description of Artificial Sequence: Synthetic oligonucleotide
agauaugauaauagcccga

SEQ ID NO: 516651 - RNA, 19 nt, Artificial Sequence
  Description of Artificial Sequence: Synthetic oligonucleotide
gguucgaauaaccacagau

SEQ ID NO: 516652 - RNA, 19 nt, Artificial Sequence
  Description of Artificial Sequence: Synthetic oligonucleotide
ggguauaaguuuggcaagg

SEQ ID NO: 516653 - RNA, 19 nt, Artificial Sequence
  Description of Artificial Sequence: Synthetic oligonucleotide
gggaguaacgucuguagga

SEQ ID NO: 516654 - RNA, 19 nt, Artificial Sequence
  Description of Artificial Sequence: Synthetic oligonucleotide
ucugauugccaggccagga

SEQ ID NO: 516655 - RNA, 19 nt, Artificial Sequence
  Description of Artificial Sequence: Synthetic oligonucleotide
gggguauaaguuuggcaag

SEQ ID NO: 516656 - RNA, 19 nt, Artificial Sequence
  Description of Artificial Sequence: Synthetic oligonucleotide
cauuggcuauaccugccac

SEQ ID NO: 516657 - RNA, 19 nt, Artificial Sequence
  Description of Artificial Sequence: Synthetic oligonucleotide
gaaagagugagcagcauuu

SEQ ID NO: 516658 - RNA, 19 nt, Artificial Sequence
  Description of Artificial Sequence: Synthetic oligonucleotide
agacaacucuguuaauguu

SEQ ID NO: 516659 - RNA, 19 nt, Artificial Sequence
  Description of Artificial Sequence: Synthetic oligonucleotide
gaucucucgaaugcauuca

SEQ ID NO: 516660 - RNA, 19 nt, Artificial Sequence
  Description of Artificial Sequence: Synthetic oligonucleotide
acaaacaguugaaucuaca

SEQ ID NO: 516661 - RNA, 19 nt, Artificial Sequence
  Description of Artificial Sequence: Synthetic oligonucleotide
cagguaucucauugccagg

SEQ ID NO: 516662 - RNA, 19 nt, Artificial Sequence
  Description of Artificial Sequence: Synthetic oligonucleotide
gcacgauucagcaaagcug

SEQ ID NO: 516663 - RNA, 19 nt, Artificial Sequence
  Description of Artificial Sequence: Synthetic oligonucleotide
auaagguucuucagcacau

SEQ ID NO: 516664 - RNA, 19 nt, Artificial Sequence
  Description of Artificial Sequence: Synthetic oligonucleotide
uuucucguuuucucauaaa

SEQ ID NO: 516665 - RNA, 19 nt, Artificial Sequence
  Description of Artificial Sequence: Synthetic oligonucleotide
acuaguaaugaagguucga

SEQ ID NO: 516666 - RNA, 19 nt, Artificial Sequence
  Description of Artificial Sequence: Synthetic oligonucleotide
ugagcauguauuguccauu

SEQ ID NO: 516667 - RNA, 19 nt, Artificial Sequence
  Description of Artificial Sequence: Synthetic oligonucleotide
uucgggguauaaguuuggc

SEQ ID NO: 516668 - RNA, 19 nt, Artificial Sequence
  Description of Artificial Sequence: Synthetic oligonucleotide
cuguuaauguuaugacaca

SEQ ID NO: 516669 - RNA, 19 nt, Artificial Sequence
  Description of Artificial Sequence: Synthetic oligonucleotide
uugcagcuauaccagucau

SEQ ID NO: 516670 - RNA, 19 nt, Artificial Sequence
  Description of Artificial Sequence: Synthetic oligonucleotide
gaaauuccgcauacauaac

SEQ ID NO: 516671 - RNA, 19 nt, Artificial Sequence
  Description of Artificial Sequence: Synthetic oligonucleotide
aaucagcuuggcgcaaagu

SEQ ID NO: 516672 - RNA, 19 nt, Artificial Sequence
  Description of Artificial Sequence: Synthetic oligonucleotide
ggucauacauaacucuaga

SEQ ID NO: 516673 - RNA, 19 nt, Artificial Sequence
  Description of Artificial Sequence: Synthetic oligonucleotide
auagcccgaaauccuugcu

SEQ ID NO: 516674 - RNA, 19 nt, Artificial Sequence
  Description of Artificial Sequence: Synthetic oligonucleotide
gcauacauaacuguaggaa

SEQ ID NO: 516675 - RNA, 19 nt, Artificial Sequence
  Description of Artificial Sequence: Synthetic oligonucleotide
aucggcagcaagaaagcgu

SEQ ID NO: 516676 - RNA, 19 nt, Artificial Sequence
  Description of Artificial Sequence: Synthetic oligonucleotide
uaccugccacaauauuccc

SEQ ID NO: 516677 - RNA, 19 nt, Artificial Sequence
  Description of Artificial Sequence: Synthetic oligonucleotide
gugaauggagacuuguaau

SEQ ID NO: 516678 - RNA, 19 nt, Artificial Sequence
  Description of Artificial Sequence: Synthetic oligonucleotide
ggcaaggaaaauaagagau

SEQ ID NO: 516679 - RNA, 19 nt, Artificial Sequence
  Description of Artificial Sequence: Synthetic oligonucleotide
aucucucgaaugcauucaa

SEQ ID NO: 516680 - RNA, 19 nt, Artificial Sequence
  Description of Artificial Sequence: Synthetic oligonucleotide
uauucccagagcgcgcuac

SEQ ID NO: 516681 - RNA, 19 nt, Artificial Sequence
  Description of Artificial Sequence: Synthetic oligonucleotide
aucaauguguacagcaaua

SEQ ID NO: 516682 - RNA, 19 nt, Artificial Sequence
  Description of Artificial Sequence: Synthetic oligonucleotide
uguacaccauauagcuuuu

SEQ ID NO: 516683 - RNA, 19 nt, Artificial Sequence
  Description of Artificial Sequence: Synthetic oligonucleotide
guagucauauuuaauguuu

SEQ ID NO: 516684 - RNA, 19 nt, Artificial Sequence
  Description of Artificial Sequence: Synthetic oligonucleotide
ccguaaaguaccuugggca

SEQ ID NO: 516685 - RNA, 19 nt, Artificial Sequence
  Description of Artificial Sequence: Synthetic oligonucleotide
aagaaagcguucagugaau

SEQ ID NO: 516686 - RNA, 19 nt, Artificial Sequence
  Description of Artificial Sequence: Synthetic oligonucleotide
guacaaacaguugaaucua

SEQ ID NO: 516687 - RNA, 19 nt, Artificial Sequence
  Description of Artificial Sequence: Synthetic oligonucleotide
auaauagcccgaaauccuu

SEQ ID NO: 516688 - RNA, 19 nt, Artificial Sequence
  Description of Artificial Sequence: Synthetic oligonucleotide
ccgcauacauaacuguagg

SEQ ID NO: 516689 - RNA, 19 nt, Artificial Sequence
  Description of Artificial Sequence: Synthetic oligonucleotide
aggccguaaaguaccuugg

SEQ ID NO: 516690 - RNA, 19 nt, Artificial Sequence
  Description of Artificial Sequence: Synthetic oligonucleotide
ugagauugguagagugguu

SEQ ID NO: 516691 - RNA, 19 nt, Artificial Sequence
  Description of Artificial Sequence: Synthetic oligonucleotide
cucauugccagguguugca

SEQ ID NO: 516692 - RNA, 19 nt, Artificial Sequence
  Description of Artificial Sequence: Synthetic oligonucleotide
gcauucaaguucucgguuc

SEQ ID NO: 516693 - RNA, 19 nt, Artificial Sequence
  Description of Artificial Sequence: Synthetic oligonucleotide
aaggaugccuggaaaccaa

SEQ ID NO: 516694 - RNA, 19 nt, Artificial Sequence
  Description of Artificial Sequence: Synthetic oligonucleotide
gaucucgaucaaaauguaa

SEQ ID NO: 516695 - RNA, 19 nt, Artificial Sequence
  Description of Artificial Sequence: Synthetic oligonucleotide
ucaauuagaucaggccgua

SEQ ID NO: 516696 - RNA, 19 nt, Artificial Sequence
  Description of Artificial Sequence: Synthetic oligonucleotide
auucgggguauaaguuugg

SEQ ID NO: 516697 - RNA, 19 nt, Artificial Sequence
  Description of Artificial Sequence: Synthetic oligonucleotide
gcaaucuuaacaaaaguau

SEQ ID NO: 516698 - RNA, 19 nt, Artificial Sequence
  Description of Artificial Sequence: Synthetic oligonucleotide
ccuacucucucuuugaucu

SEQ ID NO: 516699 - RNA, 19 nt, Artificial Sequence
  Description of Artificial Sequence: Synthetic oligonucleotide
ggaaucuccguugcacagg

SEQ ID NO: 516700 - RNA, 19 nt, Artificial Sequence
  Description of Artificial Sequence: Synthetic oligonucleotide
ggccguaaaguaccuuggg

SEQ ID NO: 516701 - RNA, 19 nt, Artificial Sequence
  Description of Artificial Sequence: Synthetic oligonucleotide
gcaagaaagcguucaguga

SEQ ID NO: 516702 - RNA, 19 nt, Artificial Sequence
  Description of Artificial Sequence: Synthetic oligonucleotide
gguuguuccauuguagaaa

SEQ ID NO: 516703 - RNA, 19 nt, Artificial Sequence
  Description of Artificial Sequence: Synthetic oligonucleotide
agucagcuacuauuuucaa

SEQ ID NO: 516704 - RNA, 19 nt, Artificial Sequence
  Description of Artificial Sequence: Synthetic oligonucleotide
gcgcaaaguacugagcacc

SEQ ID NO: 516705 - RNA, 19 nt, Artificial Sequence
  Description of Artificial Sequence: Synthetic oligonucleotide
cuauuacuuuucccucuuc

SEQ ID NO: 516706 - RNA, 19 nt, Artificial Sequence
  Description of Artificial Sequence: Synthetic oligonucleotide
uauugagccccagcaucca

SEQ ID NO: 516707 - RNA, 19 nt, Artificial Sequence
  Description of Artificial Sequence: Synthetic oligonucleotide
caggguaugaggcuucuua

SEQ ID NO: 516708 - RNA, 19 nt, Artificial Sequence
  Description of Artificial Sequence: Synthetic oligonucleotide
agaauguuaugggccacaa

SEQ ID NO: 516709 - RNA, 19 nt, Artificial Sequence
  Description of Artificial Sequence: Synthetic oligonucleotide
ugaccaucuuuaguaccac

SEQ ID NO: 516710 - RNA, 19 nt, Artificial Sequence
  Description of Artificial Sequence: Synthetic oligonucleotide
cccugagaauguuaugggc

SEQ ID NO: 516711 - RNA, 19 nt, Artificial Sequence
  Description of Artificial Sequence: Synthetic oligonucleotide
ucccuacucucucuuugau

SEQ ID NO: 516712 - RNA, 19 nt, Artificial Sequence
  Description of Artificial Sequence: Synthetic oligonucleotide
ucuuuaucucagugaccau

SEQ ID NO: 516713 - RNA, 19 nt, Artificial Sequence
  Description of Artificial Sequence: Synthetic oligonucleotide
caucagcuacuuugucuac

SEQ ID NO: 516714 - RNA, 19 nt, Artificial Sequence
  Description of Artificial Sequence: Synthetic oligonucleotide
ggguaugaggcuucuuaac

SEQ ID NO: 516715 - RNA, 19 nt, Artificial Sequence
  Description of Artificial Sequence: Synthetic oligonucleotide
ccuuuauggcgaaggcugg

SEQ ID NO: 516716 - RNA, 19 nt, Artificial Sequence
  Description of Artificial Sequence: Synthetic oligonucleotide
cuggaaauuccgcauacau

SEQ ID NO: 516717 - RNA, 19 nt, Artificial Sequence
  Description of Artificial Sequence: Synthetic oligonucleotide
uaccagucaugaagucacu

SEQ ID NO: 516718 - RNA, 19 nt, Artificial Sequence
  Description of Artificial Sequence: Synthetic oligonucleotide
gucacuaguaaugaagguu

SEQ ID NO: 516719 - RNA, 19 nt, Artificial Sequence
  Description of Artificial Sequence: Synthetic oligonucleotide
auucccagagcgcgcuaca

SEQ ID NO: 516720 - RNA, 19 nt, Artificial Sequence
  Description of Artificial Sequence: Synthetic oligonucleotide
gccaacuucaggguggaac

SEQ ID NO: 516721 - RNA, 19 nt, Artificial Sequence
  Description of Artificial Sequence: Synthetic oligonucleotide
gguaucucauugccaggug

SEQ ID NO: 516722 - RNA, 19 nt, Artificial Sequence
  Description of Artificial Sequence: Synthetic oligonucleotide
uggcauugacaagugguuu

SEQ ID NO: 516723 - RNA, 19 nt, Artificial Sequence
  Description of Artificial Sequence: Synthetic oligonucleotide
cugagauugguagaguggu

SEQ ID NO: 516724 - RNA, 19 nt, Artificial Sequence
  Description of Artificial Sequence: Synthetic oligonucleotide
cauacucgugacagccauc

SEQ ID NO: 516725 - RNA, 19 nt, Artificial Sequence
  Description of Artificial Sequence: Synthetic oligonucleotide
gaauuagguccuccagaua

SEQ ID NO: 516726 - RNA, 19 nt, Artificial Sequence
  Description of Artificial Sequence: Synthetic oligonucleotide
gcguucagugaauggagac

SEQ ID NO: 516727 - RNA, 19 nt, Artificial Sequence
  Description of Artificial Sequence: Synthetic oligonucleotide
ggcuuggaaucuccguugc

SEQ ID NO: 516728 - RNA, 19 nt, Artificial Sequence
  Description of Artificial Sequence: Synthetic oligonucleotide
gucccuacucucucuuuga

SEQ ID NO: 516729 - RNA, 19 nt, Artificial Sequence
  Description of Artificial Sequence: Synthetic oligonucleotide
uagaaagagugagcagcau

SEQ ID NO: 516730 - RNA, 19 nt, Artificial Sequence
  Description of Artificial Sequence: Synthetic oligonucleotide
gaaguggaucucgaucaaa

SEQ ID NO: 516731 - RNA, 19 nt, Artificial Sequence
  Description of Artificial Sequence: Synthetic oligonucleotide
aaaguaccuugggcaagaa

SEQ ID NO: 516732 - RNA, 19 nt, Artificial Sequence
  Description of Artificial Sequence: Synthetic oligonucleotide
agguucgaauaaccacaga

SEQ ID NO: 516733 - RNA, 19 nt, Artificial Sequence
  Description of Artificial Sequence: Synthetic oligonucleotide
cuacucucucuuugaucuc

SEQ ID NO: 516734 - RNA, 19 nt, Artificial Sequence
  Description of Artificial Sequence: Synthetic oligonucleotide
cgggguauaaguuuggcaa

SEQ ID NO: 516735 - RNA, 19 nt, Artificial Sequence
  Description of Artificial Sequence: Synthetic oligonucleotide
ucaaaccagggagcauccu

SEQ ID NO: 516736 - RNA, 19 nt, Artificial Sequence
  Description of Artificial Sequence: Synthetic oligonucleotide
gcuauaccagucaugaagu

SEQ ID NO: 516737 - RNA, 19 nt, Artificial Sequence
  Description of Artificial Sequence: Synthetic oligonucleotide
uucgugggguccugucuuc

SEQ ID NO: 516738 - RNA, 19 nt, Artificial Sequence
  Description of Artificial Sequence: Synthetic oligonucleotide
caagggaugcacuuucaau

SEQ ID NO: 516739 - RNA, 19 nt, Artificial Sequence
  Description of Artificial Sequence: Synthetic oligonucleotide
ggaugcacuuucaauuaga

SEQ ID NO: 516740 - RNA, 19 nt, Artificial Sequence
  Description of Artificial Sequence: Synthetic oligonucleotide
agagcgcgcuacaaccuug

SEQ ID NO: 516741 - RNA, 19 nt, Artificial Sequence
  Description of Artificial Sequence: Synthetic oligonucleotide
gacucccugagaauguuau

SEQ ID NO: 516742 - RNA, 19 nt, Artificial Sequence
  Description of Artificial Sequence: Synthetic oligonucleotide
accugccacaauauuccca

SEQ ID NO: 516743 - RNA, 19 nt, Artificial Sequence
  Description of Artificial Sequence: Synthetic oligonucleotide
ugcuucugaaguggaucuc

SEQ ID NO: 516744 - RNA, 19 nt, Artificial Sequence
  Description of Artificial Sequence: Synthetic oligonucleotide
cucagugaccaucuuuagu

SEQ ID NO: 516745 - RNA, 19 nt, Artificial Sequence
  Description of Artificial Sequence: Synthetic oligonucleotide
gauugccaggccaggaccu

SEQ ID NO: 516746 - RNA, 19 nt, Artificial Sequence
  Description of Artificial Sequence: Synthetic oligonucleotide
ccagguguugcagcuauac

SEQ ID NO: 516747 - RNA, 19 nt, Artificial Sequence
  Description of Artificial Sequence: Synthetic oligonucleotide
ggaagauuucagacugcac

SEQ ID NO: 516748 - RNA, 19 nt, Artificial Sequence
  Description of Artificial Sequence: Synthetic oligonucleotide
guaacaggguaugaggcuu

SEQ ID NO: 516749 - RNA, 19 nt, Artificial Sequence
  Description of Artificial Sequence: Synthetic oligonucleotide
gucaagaaagugggaguaa

SEQ ID NO: 516750 - RNA, 19 nt, Artificial Sequence
  Description of Artificial Sequence: Synthetic oligonucleotide
cugguguuuccaaggggaa

SEQ ID NO: 516751 - RNA, 19 nt, Artificial Sequence
  Description of Artificial Sequence: Synthetic oligonucleotide
ucccgcacucuucgaucga

SEQ ID NO: 516752 - RNA, 19 nt, Artificial Sequence
  Description of Artificial Sequence: Synthetic oligonucleotide
acucuucgaucgaugacuu

SEQ ID NO: 516753 - RNA, 19 nt, Artificial Sequence
  Description of Artificial Sequence: Synthetic oligonucleotide
cauuaugguggguuuugau

SEQ ID NO: 516754 - RNA, 19 nt, Artificial Sequence
  Description of Artificial Sequence: Synthetic oligonucleotide
ccaaggggaagauuucaga

SEQ ID NO: 516755 - RNA, 19 nt, Artificial Sequence
  Description of Artificial Sequence: Synthetic oligonucleotide
aggcuucuuaacacuugca

SEQ ID NO: 516756 - RNA, 19 nt, Artificial Sequence
  Description of Artificial Sequence: Synthetic oligonucleotide
uggcgaaggcugguguuuc

SEQ ID NO: 516757 - RNA, 19 nt, Artificial Sequence
  Description of Artificial Sequence: Synthetic oligonucleotide
uggcuauaccugccacaau

SEQ ID NO: 516758 - RNA, 19 nt, Artificial Sequence
  Description of Artificial Sequence: Synthetic oligonucleotide
uaggaacgacagucacccu

SEQ ID NO: 516759 - RNA, 19 nt, Artificial Sequence
  Description of Artificial Sequence: Synthetic oligonucleotide
cucgugacagccauccuuu

SEQ ID NO: 516760 - RNA, 19 nt, Artificial Sequence
  Description of Artificial Sequence: Synthetic oligonucleotide
cacauucgggguauaaguu

SEQ ID NO: 516761 - RNA, 19 nt, Artificial Sequence
  Description of Artificial Sequence: Synthetic oligonucleotide
gcacucuucgaucgaugac

SEQ ID NO: 516762 - RNA, 19 nt, Artificial Sequence
  Description of Artificial Sequence: Synthetic oligonucleotide
caauacuuuugaugucccu

SEQ ID NO: 516763 - RNA, 19 nt, Artificial Sequence
  Description of Artificial Sequence: Synthetic oligonucleotide
auggcgaaggcugguguuu

SEQ ID NO: 516764 - RNA, 19 nt, Artificial Sequence
  Description of Artificial Sequence: Synthetic oligonucleotide
gcgcuacaaccuugaaucc

SEQ ID NO: 516765 - RNA, 19 nt, Artificial Sequence
  Description of Artificial Sequence: Synthetic oligonucleotide
uuacucccacucagugguu

SEQ ID NO: 516766 - RNA, 19 nt, Artificial Sequence
  Description of Artificial Sequence: Synthetic oligonucleotide
augucccuacucucucuuu

SEQ ID NO: 516767 - RNA, 19 nt, Artificial Sequence
  Description of Artificial Sequence: Synthetic oligonucleotide
cgaauaaccacagaucucu

SEQ ID NO: 516768 - RNA, 19 nt, Artificial Sequence
  Description of Artificial Sequence: Synthetic oligonucleotide
ccaacuucaggguggaacu

SEQ ID NO: 516769 - RNA, 19 nt, Artificial Sequence
  Description of Artificial Sequence: Synthetic oligonucleotide
gugagcauguauuguccau

SEQ ID NO: 516770 - RNA, 19 nt, Artificial Sequence
  Description of Artificial Sequence: Synthetic oligonucleotide
cguaaaguaccuugggcaa

SEQ ID NO: 516771 - RNA, 19 nt, Artificial Sequence
  Description of Artificial Sequence: Synthetic oligonucleotide
ucgugacagccauccuuua

SEQ ID NO: 516772 - RNA, 19 nt, Artificial Sequence
  Description of Artificial Sequence: Synthetic oligonucleotide
cuggcuuggaaucuccguu

SEQ ID NO: 516773 - RNA, 19 nt, Artificial Sequence
  Description of Artificial Sequence: Synthetic oligonucleotide
aucaggccguaaaguaccu

SEQ ID NO: 516774 - RNA, 19 nt, Artificial Sequence
  Description of Artificial Sequence: Synthetic oligonucleotide
cacaaagagcucccgcacu

SEQ ID NO: 516775 - RNA, 19 nt, Artificial Sequence
  Description of Artificial Sequence: Synthetic oligonucleotide
cccuacucucucuuugauc

SEQ ID NO: 516776 - RNA, 19 nt, Artificial Sequence
  Description of Artificial Sequence: Synthetic oligonucleotide
gagcgcgcuacaaccuuga

SEQ ID NO: 516777 - RNA, 19 nt, Artificial Sequence
  Description of Artificial Sequence: Synthetic oligonucleotide
auauucccagagcgcgcua

SEQ ID NO: 516778 - RNA, 19 nt, Artificial Sequence
  Description of Artificial Sequence: Synthetic oligonucleotide
cgauucagcaaagcuguac

SEQ ID NO: 516779 - RNA, 19 nt, Artificial Sequence
  Description of Artificial Sequence: Synthetic oligonucleotide
cccacucagugguucccgg

SEQ ID NO: 516780 - RNA, 19 nt, Artificial Sequence
  Description of Artificial Sequence: Synthetic oligonucleotide
cugauaaguuccgugucau

SEQ ID NO: 516781 - RNA, 19 nt, Artificial Sequence
  Description of Artificial Sequence: Synthetic oligonucleotide
caauaaccugaucuugguu

SEQ ID NO: 516782 - RNA, 19 nt, Artificial Sequence
  Description of Artificial Sequence: Synthetic oligonucleotide
ucaggccguaaaguaccuu

SEQ ID NO: 516783 - RNA, 19 nt, Artificial Sequence
  Description of Artificial Sequence: Synthetic oligonucleotide
guagagugguuguuccauu

SEQ ID NO: 516784 - RNA, 19 nt, Artificial Sequence
  Description of Artificial Sequence: Synthetic oligonucleotide
agcgcgcuacaaccuugaa

SEQ ID NO: 516785 - RNA, 19 nt, Artificial Sequence
  Description of Artificial Sequence: Synthetic oligonucleotide
cugcacacccacaguuuua

SEQ ID NO: 516786 - RNA, 19 nt, Artificial Sequence
  Description of Artificial Sequence: Synthetic oligonucleotide
cagcuauaccagucaugaa

SEQ ID NO: 516787 - RNA, 19 nt, Artificial Sequence
  Description of Artificial Sequence: Synthetic oligonucleotide
cuuuauggcgaaggcuggu

SEQ ID NO: 516788 - RNA, 19 nt, Artificial Sequence
  Description of Artificial Sequence: Synthetic oligonucleotide
caauuagaucaggccguaa

SEQ ID NO: 516789 - RNA, 19 nt, Artificial Sequence
  Description of Artificial Sequence: Synthetic oligonucleotide
ggaucucgaucaaaaugua

SEQ ID NO: 516790 - RNA, 19 nt, Artificial Sequence
  Description of Artificial Sequence: Synthetic oligonucleotide
gcaaagcuguacaaacagu

SEQ ID NO: 516791 - RNA, 19 nt, Artificial Sequence
  Description of Artificial Sequence: Synthetic oligonucleotide
ccccguugucaagaaagug

SEQ ID NO: 516792 - RNA, 19 nt, Artificial Sequence
  Description of Artificial Sequence: Synthetic oligonucleotide
cgcacucuucgaucgauga

SEQ ID NO: 516793 - RNA, 19 nt, Artificial Sequence
  Description of Artificial Sequence: Synthetic oligonucleotide
uccguugcacagggccauc

SEQ ID NO: 516794 - RNA, 19 nt, Artificial Sequence
  Description of Artificial Sequence: Synthetic oligonucleotide
cagucacccugcacaccca

SEQ ID NO: 516795 - RNA, 19 nt, Artificial Sequence
  Description of Artificial Sequence: Synthetic oligonucleotide
gcuuggcgcaaaguacuga

SEQ ID NO: 516796 - RNA, 19 nt, Artificial Sequence
  Description of Artificial Sequence: Synthetic oligonucleotide
ccgcacucuucgaucgaug

SEQ ID NO: 516797 - RNA, 19 nt, Artificial Sequence
  Description of Artificial Sequence: Synthetic oligonucleotide
acaggguaugaggcuucuu

SEQ ID NO: 516798 - RNA, 19 nt, Artificial Sequence
  Description of Artificial Sequence: Synthetic oligonucleotide
guaacgucuguaggagguu

SEQ ID NO: 516799 - RNA, 19 nt, Artificial Sequence
  Description of Artificial Sequence: Synthetic oligonucleotide
acgauucagcaaagcugua

SEQ ID NO: 516800 - RNA, 19 nt, Artificial Sequence
  Description of Artificial Sequence: Synthetic oligonucleotide
ccuuagcuuucugauaagu

SEQ ID NO: 516801 - RNA, 19 nt, Artificial Sequence
  Description of Artificial Sequence: Synthetic oligonucleotide
cagggagcauccucugcau

SEQ ID NO: 516802 - RNA, 19 nt, Artificial Sequence
  Description of Artificial Sequence: Synthetic oligonucleotide
gcgcgcuacaaccuugaau

SEQ ID NO: 516803 - RNA, 19 nt, Artificial Sequence
  Description of Artificial Sequence: Synthetic oligonucleotide
cguugucaagaaaguggga

SEQ ID NO: 516804 - RNA, 19 nt, Artificial Sequence
  Description of Artificial Sequence: Synthetic oligonucleotide
ggcuuugauguuaggucau

SEQ ID NO: 516805 - RNA, 19 nt, Artificial Sequence
  Description of Artificial Sequence: Synthetic oligonucleotide
cagagcgcgcuacaaccuu

SEQ ID NO: 516806 - RNA, 19 nt, Artificial Sequence
  Description of Artificial Sequence: Synthetic oligonucleotide
ccagagcgcgcuacaaccu

SEQ ID NO: 516807 - RNA, 19 nt, Artificial Sequence
  Description of Artificial Sequence: Synthetic oligonucleotide
cuccguugcacagggccau

SEQ ID NO: 516808 - RNA, 19 nt, Artificial Sequence
  Description of Artificial Sequence: Synthetic oligonucleotide
cucuucgaucgaugacuuu

SEQ ID NO: 516809 - RNA, 19 nt, Artificial Sequence
  Description of Artificial Sequence: Synthetic oligonucleotide
guucucgguucugcacagu

SEQ ID NO: 516810 - RNA, 19 nt, Artificial Sequence
  Description of Artificial Sequence: Synthetic oligonucleotide
gcccgaaauccuugcuccu

SEQ ID NO: 516811 - RNA, 19 nt, Artificial Sequence
  Description of Artificial Sequence: Synthetic oligonucleotide
ccgaaauccuugcuccuuu

SEQ ID NO: 516812 - RNA, 19 nt, Artificial Sequence
  Description of Artificial Sequence: Synthetic oligonucleotide
cccgaaauccuugcuccuu

SEQ ID NO: 516813 - RNA, 19 nt, Artificial Sequence
  Description of Artificial Sequence: Synthetic oligonucleotide
cccgcacucuucgaucgau

SEQ ID NO: 516814 - RNA, 19 nt, Artificial Sequence
  Description of Artificial Sequence: Synthetic oligonucleotide
ccgugucauuauggugggu

SEQ ID NO: 516815 - RNA, 19 nt, Artificial Sequence
  Description of Artificial Sequence: Synthetic oligonucleotide
agacucuugaaauagaccc

SEQ ID NO: 516816 - RNA, 19 nt, Artificial Sequence
  Description of Artificial Sequence: Synthetic oligonucleotide
ugaaccuugagaaacaucc

SEQ ID NO: 516817 - RNA, 19 nt, Artificial Sequence
  Description of Artificial Sequence: Synthetic oligonucleotide
auugacaccacucugaaag

SEQ ID NO: 516818 - RNA, 19 nt, Artificial Sequence
  Description of Artificial Sequence: Synthetic oligonucleotide
auaauuaucaaaugcgaac

SEQ ID NO: 516819 - RNA, 19 nt, Artificial Sequence
  Description of Artificial Sequence: Synthetic oligonucleotide
aaauggcgcaucuuaaacc

SEQ ID NO: 516820 - RNA, 19 nt, Artificial Sequence
  Description of Artificial Sequence: Synthetic oligonucleotide
aaaauggcgcaucuuaaac

SEQ ID NO: 516821 - RNA, 19 nt, Artificial Sequence
  Description of Artificial Sequence: Synthetic oligonucleotide
aaucacaaccuuucuauac

SEQ ID NO: 516822 - RNA, 19 nt, Artificial Sequence
  Description of Artificial Sequence: Synthetic oligonucleotide
acaagauagacuccaaccc

SEQ ID NO: 516823 - RNA, 19 nt, Artificial Sequence
  Description of Artificial Sequence: Synthetic oligonucleotide
uucuguaauguuaucaggg

SEQ ID NO: 516824 - RNA, 19 nt, Artificial Sequence
  Description of Artificial Sequence: Synthetic oligonucleotide
uuuacaaguaauucagggg

SEQ ID NO: 516825 - RNA, 19 nt, Artificial Sequence
  Description of Artificial Sequence: Synthetic oligonucleotide
acagcuaaaagagagagac

SEQ ID NO: 516826 - RNA, 19 nt, Artificial Sequence
  Description of Artificial Sequence: Synthetic oligonucleotide
gauaguuaggucuccaagg

SEQ ID NO: 516827 - RNA, 19 nt, Artificial Sequence
  Description of Artificial Sequence: Synthetic oligonucleotide
auuaucuaauuuuauuaac

SEQ ID NO: 516828 - RNA, 19 nt, Artificial Sequence
  Description of Artificial Sequence: Synthetic oligonucleotide
agguauucaaaccacugcc

SEQ ID NO: 516829 - RNA, 19 nt, Artificial Sequence
  Description of Artificial Sequence: Synthetic oligonucleotide
uguaaaguugcacagggga

SEQ ID NO: 516830 - RNA, 19 nt, Artificial Sequence
  Description of Artificial Sequence: Synthetic oligonucleotide
aauuaucaaaugcgaacac

SEQ ID NO: 516831 - RNA, 19 nt, Artificial Sequence
  Description of Artificial Sequence: Synthetic oligonucleotide
agucuuagggcuucggucc

SEQ ID NO: 516832 - RNA, 19 nt, Artificial Sequence
  Description of Artificial Sequence: Synthetic oligonucleotide
auugauaguauccaucuca

SEQ ID NO: 516833 - RNA, 19 nt, Artificial Sequence
  Description of Artificial Sequence: Synthetic oligonucleotide
uuugauauugacaccacuc

SEQ ID NO: 516834 - RNA, 19 nt, Artificial Sequence
  Description of Artificial Sequence: Synthetic oligonucleotide
cuuagcugaaucaaguaag

SEQ ID NO: 516835 - RNA, 19 nt, Artificial Sequence
  Description of Artificial Sequence: Synthetic oligonucleotide
ucuaauuuuggcauauacu

SEQ ID NO: 516836 - RNA, 19 nt, Artificial Sequence
  Description of Artificial Sequence: Synthetic oligonucleotide
aauggcgcaucuuaaaccu

SEQ ID NO: 516837 - RNA, 19 nt, Artificial Sequence
  Description of Artificial Sequence: Synthetic oligonucleotide
auaagauaagaacaugucu

SEQ ID NO: 516838 - RNA, 19 nt, Artificial Sequence
  Description of Artificial Sequence: Synthetic oligonucleotide
aaguaagaaauaauuauca

SEQ ID NO: 516839 - RNA, 19 nt, Artificial Sequence
  Description of Artificial Sequence: Synthetic oligonucleotide
uagucuaccacucugccca

SEQ ID NO: 516840 - RNA, 19 nt, Artificial Sequence
  Description of Artificial Sequence: Synthetic oligonucleotide
agaauaaguauucaucaca

SEQ ID NO: 516841 - RNA, 19 nt, Artificial Sequence
  Description of Artificial Sequence: Synthetic oligonucleotide
uuauuaacuucugaucugg

SEQ ID NO: 516842 - RNA, 19 nt, Artificial Sequence
  Description of Artificial Sequence: Synthetic oligonucleotide
auaguuaggucuccaaggg

SEQ ID NO: 516843 - RNA, 19 nt, Artificial Sequence
  Description of Artificial Sequence: Synthetic oligonucleotide
ucugggacaaacauaguga

SEQ ID NO: 516844 - RNA, 19 nt, Artificial Sequence
  Description of Artificial Sequence: Synthetic oligonucleotide
ugaaaguuguaccagucac

SEQ ID NO: 516845 - RNA, 19 nt, Artificial Sequence
  Description of Artificial Sequence: Synthetic oligonucleotide
uaauuaucaaaugcgaaca

SEQ ID NO: 516846 - RNA, 19 nt, Artificial Sequence
  Description of Artificial Sequence: Synthetic oligonucleotide
gacaaccacagucuuaggg

SEQ ID NO: 516847 - RNA, 19 nt, Artificial Sequence
  Description of Artificial Sequence: Synthetic oligonucleotide
uuuuaugauaguuggcagc

SEQ ID NO: 516848 - RNA, 19 nt, Artificial Sequence
  Description of Artificial Sequence: Synthetic oligonucleotide
uaaacgucuguucacauau

SEQ ID NO: 516849 - RNA, 19 nt, Artificial Sequence
  Description of Artificial Sequence: Synthetic oligonucleotide
ucuguuuacucaaagcagu

SEQ ID NO: 516850 - RNA, 19 nt, Artificial Sequence
  Description of Artificial Sequence: Synthetic oligonucleotide
uguugagucaccaaauaaa

SEQ ID NO: 516851 - RNA, 19 nt, Artificial Sequence
  Description of Artificial Sequence: Synthetic oligonucleotide
cuaccagucaauuggaaag

SEQ ID NO: 516852 - RNA, 19 nt, Artificial Sequence
  Description of Artificial Sequence: Synthetic oligonucleotide
uugaucggcauuuugauau

SEQ ID NO: 516853 - RNA, 19 nt, Artificial Sequence
  Description of Artificial Sequence: Synthetic oligonucleotide
agaacucuaaucccuucgc

SEQ ID NO: 516854 - RNA, 19 nt, Artificial Sequence
  Description of Artificial Sequence: Synthetic oligonucleotide
ugaggagagacccuugugc

SEQ ID NO: 516855 - RNA, 19 nt, Artificial Sequence
  Description of Artificial Sequence: Synthetic oligonucleotide
ucuaauugguucuucacaa

SEQ ID NO: 516856 - RNA, 19 nt, Artificial Sequence
  Description of Artificial Sequence: Synthetic oligonucleotide
aacaugucuaauugguucu

SEQ ID NO: 516857 - RNA, 19 nt, Artificial Sequence
  Description of Artificial Sequence: Synthetic oligonucleotide
uccagaauaaguauucauc

SEQ ID NO: 516858 - RNA, 19 nt, Artificial Sequence
  Description of Artificial Sequence: Synthetic oligonucleotide
aguuaggucuccaaggggc

SEQ ID NO: 516859 - RNA, 19 nt, Artificial Sequence
  Description of Artificial Sequence: Synthetic oligonucleotide
aacucuaaucccuucgcug

SEQ ID NO: 516860 - RNA, 19 nt, Artificial Sequence
  Description of Artificial Sequence: Synthetic oligonucleotide
ucauuacugaagacgcucg

SEQ ID NO: 516861 - RNA, 19 nt, Artificial Sequence
  Description of Artificial Sequence: Synthetic oligonucleotide
acucuaaucccuucgcugg

SEQ ID NO: 516862 - RNA, 19 nt, Artificial Sequence
  Description of Artificial Sequence: Synthetic oligonucleotide
ucuacacugccuaaguucu

SEQ ID NO: 516863 - RNA, 19 nt, Artificial Sequence
  Description of Artificial Sequence: Synthetic oligonucleotide
aaccuuucuauacuaccag

SEQ ID NO: 516864 - RNA, 19 nt, Artificial Sequence
  Description of Artificial Sequence: Synthetic oligonucleotide
uugauauugacaccacucu

SEQ ID NO: 516865 - RNA, 19 nt, Artificial Sequence
  Description of Artificial Sequence: Synthetic oligonucleotide
agggucauuaaaauggcgc

SEQ ID NO: 516866 - RNA, 19 nt, Artificial Sequence
  Description of Artificial Sequence: Synthetic oligonucleotide
ugagccugcgaauauauac

SEQ ID NO: 516867 - RNA, 19 nt, Artificial Sequence
  Description of Artificial Sequence: Synthetic oligonucleotide
agacccuucguguagccgc

SEQ ID NO: 516868 - RNA, 19 nt, Artificial Sequence
  Description of Artificial Sequence: Synthetic oligonucleotide
uccaguugaaaguuguacc

SEQ ID NO: 516869 - RNA, 19 nt, Artificial Sequence
  Description of Artificial Sequence: Synthetic oligonucleotide
uuuaugauaguuggcagca

SEQ ID NO: 516870 - RNA, 19 nt, Artificial Sequence
  Description of Artificial Sequence: Synthetic oligonucleotide
agugagaagacccuucgug

SEQ ID NO: 516871 - RNA, 19 nt, Artificial Sequence
  Description of Artificial Sequence: Synthetic oligonucleotide
guaaguggcaaacauagga

SEQ ID NO: 516872 - RNA, 19 nt, Artificial Sequence
  Description of Artificial Sequence: Synthetic oligonucleotide
cuucaugacagcuaaaaga

SEQ ID NO: 516873 - RNA, 19 nt, Artificial Sequence
  Description of Artificial Sequence: Synthetic oligonucleotide
aaaacuuagcugaaucaag

SEQ ID NO: 516874 - RNA, 19 nt, Artificial Sequence
  Description of Artificial Sequence: Synthetic oligonucleotide
uaaguggcaaacauaggac

SEQ ID NO: 516875 - RNA, 19 nt, Artificial Sequence
  Description of Artificial Sequence: Synthetic oligonucleotide
ucaaacauauugauaguau

SEQ ID NO: 516876 - RNA, 19 nt, Artificial Sequence
  Description of Artificial Sequence: Synthetic oligonucleotide
ucgugaaucggaugggugg

SEQ ID NO: 516877 - RNA, 19 nt, Artificial Sequence
  Description of Artificial Sequence: Synthetic oligonucleotide
uuacugaagacgcucguga

SEQ ID NO: 516878 - RNA, 19 nt, Artificial Sequence
  Description of Artificial Sequence: Synthetic oligonucleotide
ugagguauucaaaccacug

SEQ ID NO: 516879 - RNA, 19 nt, Artificial Sequence
  Description of Artificial Sequence: Synthetic oligonucleotide
cauaagauaagaacauguc

SEQ ID NO: 516880 - RNA, 19 nt, Artificial Sequence
  Description of Artificial Sequence: Synthetic oligonucleotide
aucugggacaaacauagug

SEQ ID NO: 516881 - RNA, 19 nt, Artificial Sequence
  Description of Artificial Sequence: Synthetic oligonucleotide
ugauauugacaccacucug

SEQ ID NO: 516882 - RNA, 19 nt, Artificial Sequence
  Description of Artificial Sequence: Synthetic oligonucleotide
aauaauuaucaaaugcgaa

SEQ ID NO: 516883 - RNA, 19 nt, Artificial Sequence
  Description of Artificial Sequence: Synthetic oligonucleotide
agauaguuaggucuccaag

SEQ ID NO: 516884 - RNA, 19 nt, Artificial Sequence
  Description of Artificial Sequence: Synthetic oligonucleotide
aagaacaugucuaauuggu

SEQ ID NO: 516885 - RNA, 19 nt, Artificial Sequence
  Description of Artificial Sequence: Synthetic oligonucleotide
cauauugauaguauccauc

SEQ ID NO: 516886 - RNA, 19 nt, Artificial Sequence
  Description of Artificial Sequence: Synthetic oligonucleotide
cuugugggguagaugaugg

SEQ ID NO: 516887 - RNA, 19 nt, Artificial Sequence
  Description of Artificial Sequence: Synthetic oligonucleotide
uccuuuaguguacuugaag

SEQ ID NO: 516888 - RNA, 19 nt, Artificial Sequence
  Description of Artificial Sequence: Synthetic oligonucleotide
guuugaagcagaaccaggg

SEQ ID NO: 516889 - RNA, 19 nt, Artificial Sequence
  Description of Artificial Sequence: Synthetic oligonucleotide
ugguuauuccagaauaagu

SEQ ID NO: 516890 - RNA, 19 nt, Artificial Sequence
  Description of Artificial Sequence: Synthetic oligonucleotide
aaugcgaacaccaauccaa

SEQ ID NO: 516891 - RNA, 19 nt, Artificial Sequence
  Description of Artificial Sequence: Synthetic oligonucleotide
uuagcugaaucaaguaaga

SEQ ID NO: 516892 - RNA, 19 nt, Artificial Sequence
  Description of Artificial Sequence: Synthetic oligonucleotide
uaaaguugcacaggggaag

SEQ ID NO: 516893 - RNA, 19 nt, Artificial Sequence
  Description of Artificial Sequence: Synthetic oligonucleotide
auauauacuuccaagggga

SEQ ID NO: 516894 - RNA, 19 nt, Artificial Sequence
  Description of Artificial Sequence: Synthetic oligonucleotide
uaaaacuuagcugaaucaa

SEQ ID NO: 516895 - RNA, 19 nt, Artificial Sequence
  Description of Artificial Sequence: Synthetic oligonucleotide
agucaauagaaacuccuga

SEQ ID NO: 516896 - RNA, 19 nt, Artificial Sequence
  Description of Artificial Sequence: Synthetic oligonucleotide
auuaugcaaguacagcucu

SEQ ID NO: 516897 - RNA, 19 nt, Artificial Sequence
  Description of Artificial Sequence: Synthetic oligonucleotide
gagguauucaaaccacugc

SEQ ID NO: 516898 - RNA, 19 nt, Artificial Sequence
  Description of Artificial Sequence: Synthetic oligonucleotide
uugauaguauccaucucac

SEQ ID NO: 516899 - RNA, 19 nt, Artificial Sequence
  Description of Artificial Sequence: Synthetic oligonucleotide
caaacauauugauaguauc

SEQ ID NO: 516900 - RNA, 19 nt, Artificial Sequence
  Description of Artificial Sequence: Synthetic oligonucleotide
aaccaaaucuauccauucu

SEQ ID NO: 516901 - RNA, 19 nt, Artificial Sequence
  Description of Artificial Sequence: Synthetic oligonucleotide
caagauagacuccaacccc

SEQ ID NO: 516902 - RNA, 19 nt, Artificial Sequence
  Description of Artificial Sequence: Synthetic oligonucleotide
uugaagauaguuaggucuc

SEQ ID NO: 516903 - RNA, 19 nt, Artificial Sequence
  Description of Artificial Sequence: Synthetic oligonucleotide
ugcgaggaaaggaccaacg

SEQ ID NO: 516904 - RNA, 19 nt, Artificial Sequence
  Description of Artificial Sequence: Synthetic oligonucleotide
aacacucucuauuccugag

SEQ ID NO: 516905 - RNA, 19 nt, Artificial Sequence
  Description of Artificial Sequence: Synthetic oligonucleotide
auauggacacucuaacucu

SEQ ID NO: 516906 - RNA, 19 nt, Artificial Sequence
  Description of Artificial Sequence: Synthetic oligonucleotide
uugcacuucauuguuuccg

SEQ ID NO: 516907 - RNA, 19 nt, Artificial Sequence
  Description of Artificial Sequence: Synthetic oligonucleotide
guuuuggcgagugaauucg

SEQ ID NO: 516908 - RNA, 19 nt, Artificial Sequence
  Description of Artificial Sequence: Synthetic oligonucleotide
aaacuuagcugaaucaagu

SEQ ID NO: 516909 - RNA, 19 nt, Artificial Sequence
  Description of Artificial Sequence: Synthetic oligonucleotide
uuuggcgagugaauucggg

SEQ ID NO: 516910 - RNA, 19 nt, Artificial Sequence
  Description of Artificial Sequence: Synthetic oligonucleotide
aagucauuaugcaaguaca

SEQ ID NO: 516911 - RNA, 19 nt, Artificial Sequence
  Description of Artificial Sequence: Synthetic oligonucleotide
aggucuguaaaguugcaca

SEQ ID NO: 516912 - RNA, 19 nt, Artificial Sequence
  Description of Artificial Sequence: Synthetic oligonucleotide
aaaugcgaacaccaaucca

SEQ ID NO: 516913 - RNA, 19 nt, Artificial Sequence
  Description of Artificial Sequence: Synthetic oligonucleotide
acauaagauaagaacaugu

SEQ ID NO: 516914 - RNA, 19 nt, Artificial Sequence
  Description of Artificial Sequence: Synthetic oligonucleotide
acgcucgugaaucggaugg

SEQ ID NO: 516915 - RNA, 19 nt, Artificial Sequence
  Description of Artificial Sequence: Synthetic oligonucleotide
uuuacuagguaaguggcaa

SEQ ID NO: 516916 - RNA, 19 nt, Artificial Sequence
  Description of Artificial Sequence: Synthetic oligonucleotide
uuaucagggucauuaaaau

SEQ ID NO: 516917 - RNA, 19 nt, Artificial Sequence
  Description of Artificial Sequence: Synthetic oligonucleotide
gaaucggauggguggaccg

SEQ ID NO: 516918 - RNA, 19 nt, Artificial Sequence
  Description of Artificial Sequence: Synthetic oligonucleotide
uaguuaggucuccaagggg

SEQ ID NO: 516919 - RNA, 19 nt, Artificial Sequence
  Description of Artificial Sequence: Synthetic oligonucleotide
uuguugagucaccaaauaa

SEQ ID NO: 516920 - RNA, 19 nt, Artificial Sequence
  Description of Artificial Sequence: Synthetic oligonucleotide
ugaugggagaaacucuaca

SEQ ID NO: 516921 - RNA, 19 nt, Artificial Sequence
  Description of Artificial Sequence: Synthetic oligonucleotide
gauauugacaccacucuga

SEQ ID NO: 516922 - RNA, 19 nt, Artificial Sequence
  Description of Artificial Sequence: Synthetic oligonucleotide
aucacaaccuuucuauacu

SEQ ID NO: 516923 - RNA, 19 nt, Artificial Sequence
  Description of Artificial Sequence: Synthetic oligonucleotide
acuuagcugaaucaaguaa

SEQ ID NO: 516924 - RNA, 19 nt, Artificial Sequence
  Description of Artificial Sequence: Synthetic oligonucleotide
uauucaaaccacugccuga

SEQ ID NO: 516925 - RNA, 19 nt, Artificial Sequence
  Description of Artificial Sequence: Synthetic oligonucleotide
aaaacccacaagcuccaga

SEQ ID NO: 516926 - RNA, 19 nt, Artificial Sequence
  Description of Artificial Sequence: Synthetic oligonucleotide
uccgccauacuucuugggc

SEQ ID NO: 516927 - RNA, 19 nt, Artificial Sequence
  Description of Artificial Sequence: Synthetic oligonucleotide
aauagacccugucugguuu

SEQ ID NO: 516928 - RNA, 19 nt, Artificial Sequence
  Description of Artificial Sequence: Synthetic oligonucleotide
guauucaaaccacugccug

SEQ ID NO: 516929 - RNA, 19 nt, Artificial Sequence
  Description of Artificial Sequence: Synthetic oligonucleotide
uuuccgaaauccuuccgga

SEQ ID NO: 516930 - RNA, 19 nt, Artificial Sequence
  Description of Artificial Sequence: Synthetic oligonucleotide
ugcgaauauauacuuccaa

SEQ ID NO: 516931 - RNA, 19 nt, Artificial Sequence
  Description of Artificial Sequence: Synthetic oligonucleotide
agauauggacacucuaacu

SEQ ID NO: 516932 - RNA, 19 nt, Artificial Sequence
  Description of Artificial Sequence: Synthetic oligonucleotide
uucuauacuaccagucaau

SEQ ID NO: 516933 - RNA, 19 nt, Artificial Sequence
  Description of Artificial Sequence: Synthetic oligonucleotide
ucuauuccugaggagagac

SEQ ID NO: 516934 - RNA, 19 nt, Artificial Sequence
  Description of Artificial Sequence: Synthetic oligonucleotide
aacgucuguucacauauuu

SEQ ID NO: 516935 - RNA, 19 nt, Artificial Sequence
  Description of Artificial Sequence: Synthetic oligonucleotide
aauaaguauucaucacaua

SEQ ID NO: 516936 - RNA, 19 nt, Artificial Sequence
  Description of Artificial Sequence: Synthetic oligonucleotide
gauggguggaccguggcag

SEQ ID NO: 516937 - RNA, 19 nt, Artificial Sequence
  Description of Artificial Sequence: Synthetic oligonucleotide
gguccacuggaguugaucg

SEQ ID NO: 516938 - RNA, 19 nt, Artificial Sequence
  Description of Artificial Sequence: Synthetic oligonucleotide
cgaauauauacuuccaagg

SEQ ID NO: 516939 - RNA, 19 nt, Artificial Sequence
  Description of Artificial Sequence: Synthetic oligonucleotide
ugagaccauacagcuaugg

SEQ ID NO: 516940 - RNA, 19 nt, Artificial Sequence
  Description of Artificial Sequence: Synthetic oligonucleotide
uuccuagauaaaagcagga

SEQ ID NO: 516941 - RNA, 19 nt, Artificial Sequence
  Description of Artificial Sequence: Synthetic oligonucleotide
cagucacccagucaggucc

SEQ ID NO: 516942 - RNA, 19 nt, Artificial Sequence
  Description of Artificial Sequence: Synthetic oligonucleotide
uuuuggcgagugaauucgg

SEQ ID NO: 516943 - RNA, 19 nt, Artificial Sequence
  Description of Artificial Sequence: Synthetic oligonucleotide
cuauacuaccagucaauug

SEQ ID NO: 516944 - RNA, 19 nt, Artificial Sequence
  Description of Artificial Sequence: Synthetic oligonucleotide
uggcgagugaauucgggcc

SEQ ID NO: 516945 - RNA, 19 nt, Artificial Sequence
  Description of Artificial Sequence: Synthetic oligonucleotide
uggcgcaucuuaaaccucc

SEQ ID NO: 516946 - RNA, 19 nt, Artificial Sequence
  Description of Artificial Sequence: Synthetic oligonucleotide
cuuuacaagucauuaugca

SEQ ID NO: 516947 - RNA, 19 nt, Artificial Sequence
  Description of Artificial Sequence: Synthetic oligonucleotide
guggcagcgauauuugagc

SEQ ID NO: 516948 - RNA, 19 nt, Artificial Sequence
  Description of Artificial Sequence: Synthetic oligonucleotide
gcgaauauauacuuccaag

SEQ ID NO: 516949 - RNA, 19 nt, Artificial Sequence
  Description of Artificial Sequence: Synthetic oligonucleotide
cauccuccgaagaacagug

SEQ ID NO: 516950 - RNA, 19 nt, Artificial Sequence
  Description of Artificial Sequence: Synthetic oligonucleotide
aagucaauagaaacuccug

SEQ ID NO: 516951 - RNA, 19 nt, Artificial Sequence
  Description of Artificial Sequence: Synthetic oligonucleotide
gacuccccaaguuaaacuc

SEQ ID NO: 516952 - RNA, 19 nt, Artificial Sequence
  Description of Artificial Sequence: Synthetic oligonucleotide
ccugcgaauauauacuucc

SEQ ID NO: 516953 - RNA, 19 nt, Artificial Sequence
  Description of Artificial Sequence: Synthetic oligonucleotide
aggaccaacguucuuggga

SEQ ID NO: 516954 - RNA, 19 nt, Artificial Sequence
  Description of Artificial Sequence: Synthetic oligonucleotide
cuuggaaucgugcacguga

SEQ ID NO: 516955 - RNA, 19 nt, Artificial Sequence
  Description of Artificial Sequence: Synthetic oligonucleotide
gucuacacugccuaaguuc

SEQ ID NO: 516956 - RNA, 19 nt, Artificial Sequence
  Description of Artificial Sequence: Synthetic oligonucleotide
accaauccaaagcacagau

SEQ ID NO: 516957 - RNA, 19 nt, Artificial Sequence
  Description of Artificial Sequence: Synthetic oligonucleotide
aggugcuaaagugagacca

SEQ ID NO: 516958 - RNA, 19 nt, Artificial Sequence
  Description of Artificial Sequence: Synthetic oligonucleotide
aacuuagcugaaucaagua

SEQ ID NO: 516959 - RNA, 19 nt, Artificial Sequence
  Description of Artificial Sequence: Synthetic oligonucleotide
uacaagucauuaugcaagu

SEQ ID NO: 516960 - RNA, 19 nt, Artificial Sequence
  Description of Artificial Sequence: Synthetic oligonucleotide
uuguuuccgaaauccuucc

SEQ ID NO: 516961 - RNA, 19 nt, Artificial Sequence
  Description of Artificial Sequence: Synthetic oligonucleotide
ugguccacugcgaggaaag

SEQ ID NO: 516962 - RNA, 19 nt, Artificial Sequence
  Description of Artificial Sequence: Synthetic oligonucleotide
ugguaguauccuuauuaca

SEQ ID NO: 516963 - RNA, 19 nt, Artificial Sequence
  Description of Artificial Sequence: Synthetic oligonucleotide
acuaccagucaauuggaaa

SEQ ID NO: 516964 - RNA, 19 nt, Artificial Sequence
  Description of Artificial Sequence: Synthetic oligonucleotide
augugauuccuuuagugua

SEQ ID NO: 516965 - RNA, 19 nt, Artificial Sequence
  Description of Artificial Sequence: Synthetic oligonucleotide
aguugaucggcauuuugau

SEQ ID NO: 516966 - RNA, 19 nt, Artificial Sequence
  Description of Artificial Sequence: Synthetic oligonucleotide
uuggcgagugaauucgggc

SEQ ID NO: 516967 - RNA, 19 nt, Artificial Sequence
  Description of Artificial Sequence: Synthetic oligonucleotide
ugccuaaguucuuuacaag

SEQ ID NO: 516968 - RNA, 19 nt, Artificial Sequence
  Description of Artificial Sequence: Synthetic oligonucleotide
augauaguuggcagcauuc

SEQ ID NO: 516969 - RNA, 19 nt, Artificial Sequence
  Description of Artificial Sequence: Synthetic oligonucleotide
uugggcauugccuguccgg

SEQ ID NO: 516970 - RNA, 19 nt, Artificial Sequence
  Description of Artificial Sequence: Synthetic oligonucleotide
gaaucgugcacgugaacca

SEQ ID NO: 516971 - RNA, 19 nt, Artificial Sequence
  Description of Artificial Sequence: Synthetic oligonucleotide
uauauacuuccaaggggaa

SEQ ID NO: 516972 - RNA, 19 nt, Artificial Sequence
  Description of Artificial Sequence: Synthetic oligonucleotide
guuaucagggucauuaaaa

SEQ ID NO: 516973 - RNA, 19 nt, Artificial Sequence
  Description of Artificial Sequence: Synthetic oligonucleotide
ucggcauuuugauauugac

SEQ ID NO: 516974 - RNA, 19 nt, Artificial Sequence
  Description of Artificial Sequence: Synthetic oligonucleotide
uaucaaaugcgaacaccaa

SEQ ID NO: 516975 - RNA, 19 nt, Artificial Sequence
  Description of Artificial Sequence: Synthetic oligonucleotide
ugaucugguguaaugucua

SEQ ID NO: 516976 - RNA, 19 nt, Artificial Sequence
  Description of Artificial Sequence: Synthetic oligonucleotide
aguggcaaacauaggacag

SEQ ID NO: 516977 - RNA, 19 nt, Artificial Sequence
  Description of Artificial Sequence: Synthetic oligonucleotide
gugaaccagagauauggac

SEQ ID NO: 516978 - RNA, 19 nt, Artificial Sequence
  Description of Artificial Sequence: Synthetic oligonucleotide
aggggcauacauaagauaa

SEQ ID NO: 516979 - RNA, 19 nt, Artificial Sequence
  Description of Artificial Sequence: Synthetic oligonucleotide
ugaugggccaaggucaucu

SEQ ID NO: 516980 - RNA, 19 nt, Artificial Sequence
  Description of Artificial Sequence: Synthetic oligonucleotide
uugagucaccaaauaaaua

SEQ ID NO: 516981 - RNA, 19 nt, Artificial Sequence
  Description of Artificial Sequence: Synthetic oligonucleotide
cuguaauguuaucaggguc

SEQ ID NO: 516982 - RNA, 19 nt, Artificial Sequence
  Description of Artificial Sequence: Synthetic oligonucleotide
acacguugcacuucauugu

SEQ ID NO: 516983 - RNA, 19 nt, Artificial Sequence
  Description of Artificial Sequence: Synthetic oligonucleotide
aaauagacccugucugguu

SEQ ID NO: 516984 - RNA, 19 nt, Artificial Sequence
  Description of Artificial Sequence: Synthetic oligonucleotide
ugcaguuuuggcgagugaa

SEQ ID NO: 516985 - RNA, 19 nt, Artificial Sequence
  Description of Artificial Sequence: Synthetic oligonucleotide
agucauuaugcaaguacag

SEQ ID NO: 516986 - RNA, 19 nt, Artificial Sequence
  Description of Artificial Sequence: Synthetic oligonucleotide
auauugacaccacucugaa

SEQ ID NO: 516987 - RNA, 19 nt, Artificial Sequence
  Description of Artificial Sequence: Synthetic oligonucleotide
auauccagaaggaaaaguu

SEQ ID NO: 516988 - RNA, 19 nt, Artificial Sequence
  Description of Artificial Sequence: Synthetic oligonucleotide
uguuuacucaaagcagucu

SEQ ID NO: 516989 - RNA, 19 nt, Artificial Sequence
  Description of Artificial Sequence: Synthetic oligonucleotide
uagguaaguggcaaacaua

SEQ ID NO: 516990 - RNA, 19 nt, Artificial Sequence
  Description of Artificial Sequence: Synthetic oligonucleotide
aauuggaaagucacugaau

SEQ ID NO: 516991 - RNA, 19 nt, Artificial Sequence
  Description of Artificial Sequence: Synthetic oligonucleotide
cuuccggagcggaagagac

SEQ ID NO: 516992 - RNA, 19 nt, Artificial Sequence
  Description of Artificial Sequence: Synthetic oligonucleotide
aguacagcucuuuucugaa

SEQ ID NO: 516993 - RNA, 19 nt, Artificial Sequence
  Description of Artificial Sequence: Synthetic oligonucleotide
auuguugagucaccaaaua

SEQ ID NO: 516994 - RNA, 19 nt, Artificial Sequence
  Description of Artificial Sequence: Synthetic oligonucleotide
caaccuuucuauacuacca

SEQ ID NO: 516995 - RNA, 19 nt, Artificial Sequence
  Description of Artificial Sequence: Synthetic oligonucleotide
gguaguauccuuauuacaa

SEQ ID NO: 516996 - RNA, 19 nt, Artificial Sequence
  Description of Artificial Sequence: Synthetic oligonucleotide
uacuagguaaguggcaaac

SEQ ID NO: 516997 - RNA, 19 nt, Artificial Sequence
  Description of Artificial Sequence: Synthetic oligonucleotide
uuccgaaauccuuccggag

SEQ ID NO: 516998 - RNA, 19 nt, Artificial Sequence
  Description of Artificial Sequence: Synthetic oligonucleotide
acccuugugcuauucauaa

SEQ ID NO: 516999 - RNA, 19 nt, Artificial Sequence
  Description of Artificial Sequence: Synthetic oligonucleotide
ucuccgccauacuucuugg

SEQ ID NO: 517000 - RNA, 19 nt, Artificial Sequence
  Description of Artificial Sequence: Synthetic oligonucleotide
uuacucuccuggaaaucac

SEQ ID NO: 517001 - RNA, 19 nt, Artificial Sequence
  Description of Artificial Sequence: Synthetic oligonucleotide
ucggauguuccugagccug

SEQ ID NO: 517002 - RNA, 19 nt, Artificial Sequence
  Description of Artificial Sequence: Synthetic oligonucleotide
gaagacgcucgugaaucgg

SEQ ID NO: 517003 - RNA, 19 nt, Artificial Sequence
  Description of Artificial Sequence: Synthetic oligonucleotide
uucgcuggggugaaccaga

SEQ ID NO: 517004 - RNA, 19 nt, Artificial Sequence
  Description of Artificial Sequence: Synthetic oligonucleotide
cagucuuagggcuucgguc

SEQ ID NO: 517005 - RNA, 19 nt, Artificial Sequence
  Description of Artificial Sequence: Synthetic oligonucleotide
guguaaugucuaauuuugg

SEQ ID NO: 517006 - RNA, 19 nt, Artificial Sequence
  Description of Artificial Sequence: Synthetic oligonucleotide
aaggggcauacauaagaua

SEQ ID NO: 517007 - RNA, 19 nt, Artificial Sequence
  Description of Artificial Sequence: Synthetic oligonucleotide
cagggucauuaaaauggcg

SEQ ID NO: 517008 - RNA, 19 nt, Artificial Sequence
  Description of Artificial Sequence: Synthetic oligonucleotide
gaauaaguauucaucacau

SEQ ID NO: 517009 - RNA, 19 nt, Artificial Sequence
  Description of Artificial Sequence: Synthetic oligonucleotide
gaagaacaguguccaguug

SEQ ID NO: 517010 - RNA, 19 nt, Artificial Sequence
  Description of Artificial Sequence: Synthetic oligonucleotide
uccuagauaaaagcaggaa

SEQ ID NO: 517011 - RNA, 19 nt, Artificial Sequence
  Description of Artificial Sequence: Synthetic oligonucleotide
gucggcagcagugagaaga

SEQ ID NO: 517012 - RNA, 19 nt, Artificial Sequence
  Description of Artificial Sequence: Synthetic oligonucleotide
accuuucuauacuaccagu

SEQ ID NO: 517013 - RNA, 19 nt, Artificial Sequence
  Description of Artificial Sequence: Synthetic oligonucleotide
aagacccuucguguagccg

SEQ ID NO: 517014 - RNA, 19 nt, Artificial Sequence
  Description of Artificial Sequence: Synthetic oligonucleotide
ucuccaaggggcauacaua

SEQ ID NO: 517015 - RNA, 19 nt, Artificial Sequence
  Description of Artificial Sequence: Synthetic oligonucleotide
cuguuuacucaaagcaguc

SEQ ID NO: 517016 - RNA, 19 nt, Artificial Sequence
  Description of Artificial Sequence: Synthetic oligonucleotide
gguuguuaguuucuuuuac

SEQ ID NO: 517017 - RNA, 19 nt, Artificial Sequence
  Description of Artificial Sequence: Synthetic oligonucleotide
acagccaaccaaaucuauc

SEQ ID NO: 517018 - RNA, 19 nt, Artificial Sequence
  Description of Artificial Sequence: Synthetic oligonucleotide
ucuauacuaccagucaauu

SEQ ID NO: 517019 - RNA, 19 nt, Artificial Sequence
  Description of Artificial Sequence: Synthetic oligonucleotide
acaaucacuucaucuggau

SEQ ID NO: 517020 - RNA, 19 nt, Artificial Sequence
  Description of Artificial Sequence: Synthetic oligonucleotide
acagucuuagggcuucggu

SEQ ID NO: 517021 - RNA, 19 nt, Artificial Sequence
  Description of Artificial Sequence: Synthetic oligonucleotide
gguuauuccagaauaagua

SEQ ID NO: 517022 - RNA, 19 nt, Artificial Sequence
  Description of Artificial Sequence: Synthetic oligonucleotide
uuggaaucgugcacgugaa

SEQ ID NO: 517023 - RNA, 19 nt, Artificial Sequence
  Description of Artificial Sequence: Synthetic oligonucleotide
accugacauaauuuuaauu

SEQ ID NO: 517024 - RNA, 19 nt, Artificial Sequence
  Description of Artificial Sequence: Synthetic oligonucleotide
ucacaaccuuucuauacua

SEQ ID NO: 517025 - RNA, 19 nt, Artificial Sequence
  Description of Artificial Sequence: Synthetic oligonucleotide
cuauuccugaggagagacc

SEQ ID NO: 517026 - RNA, 19 nt, Artificial Sequence
  Description of Artificial Sequence: Synthetic oligonucleotide
cacaaccuuucuauacuac

SEQ ID NO: 517027 - RNA, 19 nt, Artificial Sequence
  Description of Artificial Sequence: Synthetic oligonucleotide
guaguauccuuauuacaaa

SEQ ID NO: 517028 - RNA, 19 nt, Artificial Sequence
  Description of Artificial Sequence: Synthetic oligonucleotide
uggcagcgauauuugagca

SEQ ID NO: 517029 - RNA, 19 nt, Artificial Sequence
  Description of Artificial Sequence: Synthetic oligonucleotide
ugaaucggauggguggacc

SEQ ID NO: 517030 - RNA, 19 nt, Artificial Sequence
  Description of Artificial Sequence: Synthetic oligonucleotide
aacguucuugggacucccc

SEQ ID NO: 517031 - RNA, 19 nt, Artificial Sequence
  Description of Artificial Sequence: Synthetic oligonucleotide
ggaccaacguucuugggac

SEQ ID NO: 517032 - RNA, 19 nt, Artificial Sequence
  Description of Artificial Sequence: Synthetic oligonucleotide
uccggagcggaagagacuc

SEQ ID NO: 517033 - RNA, 19 nt, Artificial Sequence
  Description of Artificial Sequence: Synthetic oligonucleotide
agacaugucccauuuccuu

SEQ ID NO: 517034 - RNA, 19 nt, Artificial Sequence
  Description of Artificial Sequence: Synthetic oligonucleotide
aguauccuuauuacaaaau

SEQ ID NO: 517035 - RNA, 19 nt, Artificial Sequence
  Description of Artificial Sequence: Synthetic oligonucleotide
cugccuaaguucuuuacaa

SEQ ID NO: 517036 - RNA, 19 nt, Artificial Sequence
  Description of Artificial Sequence: Synthetic oligonucleotide
cucuaaucccuucgcuggg

SEQ ID NO: 517037 - RNA, 19 nt, Artificial Sequence
  Description of Artificial Sequence: Synthetic oligonucleotide
auagacccugucugguuug

SEQ ID NO: 517038 - RNA, 19 nt, Artificial Sequence
  Description of Artificial Sequence: Synthetic oligonucleotide
accaacguucuugggacuc

SEQ ID NO: 517039 - RNA, 19 nt, Artificial Sequence
  Description of Artificial Sequence: Synthetic oligonucleotide
cuccaaggggcauacauaa

SEQ ID NO: 517040 - RNA, 19 nt, Artificial Sequence
  Description of Artificial Sequence: Synthetic oligonucleotide
agacccuugugcuauucau

SEQ ID NO: 517041 - RNA, 19 nt, Artificial Sequence
  Description of Artificial Sequence: Synthetic oligonucleotide
gacuccaaccccugagaac

SEQ ID NO: 517042 - RNA, 19 nt, Artificial Sequence
  Description of Artificial Sequence: Synthetic oligonucleotide
uuacuagguaaguggcaaa

SEQ ID NO: 517043 - RNA, 19 nt, Artificial Sequence
  Description of Artificial Sequence: Synthetic oligonucleotide
gcagcgauauuugagcaag

SEQ ID NO: 517044 - RNA, 19 nt, Artificial Sequence
  Description of Artificial Sequence: Synthetic oligonucleotide
ggccuuuacaaguaauuca

SEQ ID NO: 517045 - RNA, 19 nt, Artificial Sequence
  Description of Artificial Sequence: Synthetic oligonucleotide
agugguugauucugcugcu

SEQ ID NO: 517046 - RNA, 19 nt, Artificial Sequence
  Description of Artificial Sequence: Synthetic oligonucleotide
uaugcaaguacagcucuuu

SEQ ID NO: 517047 - RNA, 19 nt, Artificial Sequence
  Description of Artificial Sequence: Synthetic oligonucleotide
gguagucuaccacucugcc

SEQ ID NO: 517048 - RNA, 19 nt, Artificial Sequence
  Description of Artificial Sequence: Synthetic oligonucleotide
gcugaaucaaguaagaaau

SEQ ID NO: 517049 - RNA, 19 nt, Artificial Sequence
  Description of Artificial Sequence: Synthetic oligonucleotide
gcgauauuugagcaagaug

SEQ ID NO: 517050 - RNA, 19 nt, Artificial Sequence
  Description of Artificial Sequence: Synthetic oligonucleotide
uggaccguggcagcgauau

SEQ ID NO: 517051 - RNA, 19 nt, Artificial Sequence
  Description of Artificial Sequence: Synthetic oligonucleotide
acguucuugggacucccca

SEQ ID NO: 517052 - RNA, 19 nt, Artificial Sequence
  Description of Artificial Sequence: Synthetic oligonucleotide
auacuucuugggcuugccu

SEQ ID NO: 517053 - RNA, 19 nt, Artificial Sequence
  Description of Artificial Sequence: Synthetic oligonucleotide
cuugggcauugccuguccg

SEQ ID NO: 517054 - RNA, 19 nt, Artificial Sequence
  Description of Artificial Sequence: Synthetic oligonucleotide
acucuacaauuuuaugaua

SEQ ID NO: 517055 - RNA, 19 nt, Artificial Sequence
  Description of Artificial Sequence: Synthetic oligonucleotide
ucgucggauguuccugagc

SEQ ID NO: 517056 - RNA, 19 nt, Artificial Sequence
  Description of Artificial Sequence: Synthetic oligonucleotide
guaccagucacuguugaaa

SEQ ID NO: 517057 - RNA, 19 nt, Artificial Sequence
  Description of Artificial Sequence: Synthetic oligonucleotide
uuaugcaaguacagcucuu

SEQ ID NO: 517058 - RNA, 19 nt, Artificial Sequence
  Description of Artificial Sequence: Synthetic oligonucleotide
uauugacaccacucugaaa

SEQ ID NO: 517059 - RNA, 19 nt, Artificial Sequence
  Description of Artificial Sequence: Synthetic oligonucleotide
agcguggccaagaaaccuc

SEQ ID NO: 517060 - RNA, 19 nt, Artificial Sequence
  Description of Artificial Sequence: Synthetic oligonucleotide
aagacgcucgugaaucgga

SEQ ID NO: 517061 - RNA, 19 nt, Artificial Sequence
  Description of Artificial Sequence: Synthetic oligonucleotide
gacgcucgugaaucggaug

SEQ ID NO: 517062 - RNA, 19 nt, Artificial Sequence
  Description of Artificial Sequence: Synthetic oligonucleotide
aaucggauggguggaccgu

SEQ ID NO: 517063 - RNA, 19 nt, Artificial Sequence
  Description of Artificial Sequence: Synthetic oligonucleotide
agugguuauuccagaauaa

SEQ ID NO: 517064 - RNA, 19 nt, Artificial Sequence
  Description of Artificial Sequence: Synthetic oligonucleotide
aauucugaccacacacauu

SEQ ID NO: 517065 - RNA, 19 nt, Artificial Sequence
  Description of Artificial Sequence: Synthetic oligonucleotide
ugggcauugccuguccgga

SEQ ID NO: 517066 - RNA, 19 nt, Artificial Sequence
  Description of Artificial Sequence: Synthetic oligonucleotide
ccuccgaagaacagugucc

SEQ ID NO: 517067 - RNA, 19 nt, Artificial Sequence
  Description of Artificial Sequence: Synthetic oligonucleotide
agucaauuggaaagucacu

SEQ ID NO: 517068 - RNA, 19 nt, Artificial Sequence
  Description of Artificial Sequence: Synthetic oligonucleotide
agcgauauuugagcaagau

SEQ ID NO: 517069 - RNA, 19 nt, Artificial Sequence
  Description of Artificial Sequence: Synthetic oligonucleotide
cuuugguuugaagcagaac

SEQ ID NO: 517070 - RNA, 19 nt, Artificial Sequence
  Description of Artificial Sequence: Synthetic oligonucleotide
ccaaccccugagaacaucc

SEQ ID NO: 517071 - RNA, 19 nt, Artificial Sequence
  Description of Artificial Sequence: Synthetic oligonucleotide
cacaagcuccagaacauaa

SEQ ID NO: 517072 - RNA, 19 nt, Artificial Sequence
  Description of Artificial Sequence: Synthetic oligonucleotide
ugcagguagucuccgccau

SEQ ID NO: 517073 - RNA, 19 nt, Artificial Sequence
  Description of Artificial Sequence: Synthetic oligonucleotide
agccugcgaauauauacuu

SEQ ID NO: 517074 - RNA, 19 nt, Artificial Sequence
  Description of Artificial Sequence: Synthetic oligonucleotide
ugcucgucggauguuccug

SEQ ID NO: 517075 - RNA, 19 nt, Artificial Sequence
  Description of Artificial Sequence: Synthetic oligonucleotide
cagguagucuccgccauac

SEQ ID NO: 517076 - RNA, 19 nt, Artificial Sequence
  Description of Artificial Sequence: Synthetic oligonucleotide
guugagucaccaaauaaau

SEQ ID NO: 517077 - RNA, 19 nt, Artificial Sequence
  Description of Artificial Sequence: Synthetic oligonucleotide
gaaauagacccugucuggu

SEQ ID NO: 517078 - RNA, 19 nt, Artificial Sequence
  Description of Artificial Sequence: Synthetic oligonucleotide
uagacccugucugguuugg

SEQ ID NO: 517079 - RNA, 19 nt, Artificial Sequence
  Description of Artificial Sequence: Synthetic oligonucleotide
uucguguagccgcccuuga

SEQ ID NO: 517080 - RNA, 19 nt, Artificial Sequence
  Description of Artificial Sequence: Synthetic oligonucleotide
ccaguugaaaguuguacca

SEQ ID NO: 517081 - RNA, 19 nt, Artificial Sequence
  Description of Artificial Sequence: Synthetic oligonucleotide
gauuguugagucaccaaau

SEQ ID NO: 517082 - RNA, 19 nt, Artificial Sequence
  Description of Artificial Sequence: Synthetic oligonucleotide
cuagguaaguggcaaacau

SEQ ID NO: 517083 - RNA, 19 nt, Artificial Sequence
  Description of Artificial Sequence: Synthetic oligonucleotide
gagacccuugugcuauuca

SEQ ID NO: 517084 - RNA, 19 nt, Artificial Sequence
  Description of Artificial Sequence: Synthetic oligonucleotide
ucgcuggggugaaccagag

SEQ ID NO: 517085 - RNA, 19 nt, Artificial Sequence
  Description of Artificial Sequence: Synthetic oligonucleotide
gguaaguggcaaacauagg

SEQ ID NO: 517086 - RNA, 19 nt, Artificial Sequence
  Description of Artificial Sequence: Synthetic oligonucleotide
cuuagggcuucgguccagg

SEQ ID NO: 517087 - RNA, 19 nt, Artificial Sequence
  Description of Artificial Sequence: Synthetic oligonucleotide
acacacguugcacuucauu

SEQ ID NO: 517088 - RNA, 19 nt, Artificial Sequence
  Description of Artificial Sequence: Synthetic oligonucleotide
agagacccuugugcuauuc

SEQ ID NO: 517089 - RNA, 19 nt, Artificial Sequence
  Description of Artificial Sequence: Synthetic oligonucleotide
cuccccaaguuaaacucca

SEQ ID NO: 517090 - RNA, 19 nt, Artificial Sequence
  Description of Artificial Sequence: Synthetic oligonucleotide
guugaucggcauuuugaua

SEQ ID NO: 517091 - RNA, 19 nt, Artificial Sequence
  Description of Artificial Sequence: Synthetic oligonucleotide
cuucguguagccgcccuug

SEQ ID NO: 517092 - RNA, 19 nt, Artificial Sequence
  Description of Artificial Sequence: Synthetic oligonucleotide
cugcgaauauauacuucca

SEQ ID NO: 517093 - RNA, 19 nt, Artificial Sequence
  Description of Artificial Sequence: Synthetic oligonucleotide
cuggaccacugcucgucgg

SEQ ID NO: 517094 - RNA, 19 nt, Artificial Sequence
  Description of Artificial Sequence: Synthetic oligonucleotide
uuccggagcggaagagacu

SEQ ID NO: 517095 - RNA, 19 nt, Artificial Sequence
  Description of Artificial Sequence: Synthetic oligonucleotide
ggcauugccuguccggaug

SEQ ID NO: 517096 - RNA, 19 nt, Artificial Sequence
  Description of Artificial Sequence: Synthetic oligonucleotide
agaacaugucuaauugguu

SEQ ID NO: 517097 - RNA, 19 nt, Artificial Sequence
  Description of Artificial Sequence: Synthetic oligonucleotide
cacugcgaggaaaggacca

SEQ ID NO: 517098 - RNA, 19 nt, Artificial Sequence
  Description of Artificial Sequence: Synthetic oligonucleotide
uuccugagccugcgaauau

SEQ ID NO: 517099 - RNA, 19 nt, Artificial Sequence
  Description of Artificial Sequence: Synthetic oligonucleotide
aggggaagacuucccggga

SEQ ID NO: 517100 - RNA, 19 nt, Artificial Sequence
  Description of Artificial Sequence: Synthetic oligonucleotide
uccccaaguuaaacuccac

SEQ ID NO: 517101 - RNA, 19 nt, Artificial Sequence
  Description of Artificial Sequence: Synthetic oligonucleotide
auugccuguccggaugaca

SEQ ID NO: 517102 - RNA, 19 nt, Artificial Sequence
  Description of Artificial Sequence: Synthetic oligonucleotide
agaacaguguccaguugaa

SEQ ID NO: 517103 - RNA, 19 nt, Artificial Sequence
  Description of Artificial Sequence: Synthetic oligonucleotide
gagccugcgaauauauacu

SEQ ID NO: 517104 - RNA, 19 nt, Artificial Sequence
  Description of Artificial Sequence: Synthetic oligonucleotide
cucgucggauguuccugag

SEQ ID NO: 517105 - RNA, 19 nt, Artificial Sequence
  Description of Artificial Sequence: Synthetic oligonucleotide
uuaugauaguuggcagcau

SEQ ID NO: 517106 - RNA, 19 nt, Artificial Sequence
  Description of Artificial Sequence: Synthetic oligonucleotide
ucuuagggcuucgguccag

SEQ ID NO: 517107 - RNA, 19 nt, Artificial Sequence
  Description of Artificial Sequence: Synthetic oligonucleotide
ggacacucuaacucugcca

SEQ ID NO: 517108 - RNA, 19 nt, Artificial Sequence
  Description of Artificial Sequence: Synthetic oligonucleotide
aucggauggguggaccgug

SEQ ID NO: 517109 - RNA, 19 nt, Artificial Sequence
  Description of Artificial Sequence: Synthetic oligonucleotide
ggaauugcugaugggagaa

SEQ ID NO: 517110 - RNA, 19 nt, Artificial Sequence
  Description of Artificial Sequence: Synthetic oligonucleotide
cacugucggcagcagugag

SEQ ID NO: 517111 - RNA, 19 nt, Artificial Sequence
  Description of Artificial Sequence: Synthetic oligonucleotide
cauaaagacaugucccauu

SEQ ID NO: 517112 - RNA, 19 nt, Artificial Sequence
  Description of Artificial Sequence: Synthetic oligonucleotide
gcuugugggguagaugaug

SEQ ID NO: 517113 - RNA, 19 nt, Artificial Sequence
  Description of Artificial Sequence: Synthetic oligonucleotide
gacccuucguguagccgcc

SEQ ID NO: 517114 - RNA, 19 nt, Artificial Sequence
  Description of Artificial Sequence: Synthetic oligonucleotide
accguggcagcgauauuug

SEQ ID NO: 517115 - RNA, 19 nt, Artificial Sequence
  Description of Artificial Sequence: Synthetic oligonucleotide
acugucggcagcagugaga

SEQ ID NO: 517116 - RNA, 19 nt, Artificial Sequence
  Description of Artificial Sequence: Synthetic oligonucleotide
auggcgcaucuuaaaccuc

SEQ ID NO: 517117 - RNA, 19 nt, Artificial Sequence
  Description of Artificial Sequence: Synthetic oligonucleotide
ccccugagaacauccuccg

SEQ ID NO: 517118 - RNA, 19 nt, Artificial Sequence
  Description of Artificial Sequence: Synthetic oligonucleotide
ggcaucaacaagauagacu

SEQ ID NO: 517119 - RNA, 19 nt, Artificial Sequence
  Description of Artificial Sequence: Synthetic oligonucleotide
ccacugcgaggaaaggacc

SEQ ID NO: 517120 - RNA, 19 nt, Artificial Sequence
  Description of Artificial Sequence: Synthetic oligonucleotide
gccuguccggaugacaacc

SEQ ID NO: 517121 - RNA, 19 nt, Artificial Sequence
  Description of Artificial Sequence: Synthetic oligonucleotide
acgucuguucacauauuua

SEQ ID NO: 517122 - RNA, 19 nt, Artificial Sequence
  Description of Artificial Sequence: Synthetic oligonucleotide
guacagcucuuuucugaaa

SEQ ID NO: 517123 - RNA, 19 nt, Artificial Sequence
  Description of Artificial Sequence: Synthetic oligonucleotide
aaacgucuguucacauauu

SEQ ID NO: 517124 - RNA, 19 nt, Artificial Sequence
  Description of Artificial Sequence: Synthetic oligonucleotide
ugucggcagcagugagaag

SEQ ID NO: 517125 - RNA, 19 nt, Artificial Sequence
  Description of Artificial Sequence: Synthetic oligonucleotide
cacugcucgucggauguuc

SEQ ID NO: 517126 - RNA, 19 nt, Artificial Sequence
  Description of Artificial Sequence: Synthetic oligonucleotide
augaugggccaaggucauc

SEQ ID NO: 517127 - RNA, 19 nt, Artificial Sequence
  Description of Artificial Sequence: Synthetic oligonucleotide
agguagucuccgccauacu

SEQ ID NO: 517128 - RNA, 19 nt, Artificial Sequence
  Description of Artificial Sequence: Synthetic oligonucleotide
gggaagacuucccgggaga

SEQ ID NO: 517129 - RNA, 19 nt, Artificial Sequence
  Description of Artificial Sequence: Synthetic oligonucleotide
gguauucaaaccacugccu

SEQ ID NO: 517130 - RNA, 19 nt, Artificial Sequence
  Description of Artificial Sequence: Synthetic oligonucleotide
ggaaauugguaguauccuu

SEQ ID NO: 517131 - RNA, 19 nt, Artificial Sequence
  Description of Artificial Sequence: Synthetic oligonucleotide
gaauugcugaugggagaaa

SEQ ID NO: 517132 - RNA, 19 nt, Artificial Sequence
  Description of Artificial Sequence: Synthetic oligonucleotide
gcuugccuuggaaucgugc

SEQ ID NO: 517133 - RNA, 19 nt, Artificial Sequence
  Description of Artificial Sequence: Synthetic oligonucleotide
acccuucguguagccgccc

SEQ ID NO: 517134 - RNA, 19 nt, Artificial Sequence
  Description of Artificial Sequence: Synthetic oligonucleotide
gugagguauucaaaccacu

SEQ ID NO: 517135 - RNA, 19 nt, Artificial Sequence
  Description of Artificial Sequence: Synthetic oligonucleotide
ggauggguggaccguggca

SEQ ID NO: 517136 - RNA, 19 nt, Artificial Sequence
  Description of Artificial Sequence: Synthetic oligonucleotide
cuccacaccugacauaauu

SEQ ID NO: 517137 - RNA, 19 nt, Artificial Sequence
  Description of Artificial Sequence: Synthetic oligonucleotide
gugaaucggauggguggac

SEQ ID NO: 517138 - RNA, 19 nt, Artificial Sequence
  Description of Artificial Sequence: Synthetic oligonucleotide
gaugaugggccaaggucau

SEQ ID NO: 517139 - RNA, 19 nt, Artificial Sequence
  Description of Artificial Sequence: Synthetic oligonucleotide
ggcagcgauauuugagcaa

SEQ ID NO: 517140 - RNA, 19 nt, Artificial Sequence
  Description of Artificial Sequence: Synthetic oligonucleotide
agacgcucgugaaucggau

SEQ ID NO: 517141 - RNA, 19 nt, Artificial Sequence
  Description of Artificial Sequence: Synthetic oligonucleotide
cagcgauauuugagcaaga

SEQ ID NO: 517142 - RNA, 19 nt, Artificial Sequence
  Description of Artificial Sequence: Synthetic oligonucleotide
gcauugccuguccggauga

SEQ ID NO: 517143 - RNA, 19 nt, Artificial Sequence
  Description of Artificial Sequence: Synthetic oligonucleotide
cccgggagacacacguugc

SEQ ID NO: 517144 - RNA, 19 nt, Artificial Sequence
  Description of Artificial Sequence: Synthetic oligonucleotide
cuucagcguggccaagaaa

SEQ ID NO: 517145 - RNA, 19 nt, Artificial Sequence
  Description of Artificial Sequence: Synthetic oligonucleotide
gugcuaaagugagaccaua

SEQ ID NO: 517146 - RNA, 19 nt, Artificial Sequence
  Description of Artificial Sequence: Synthetic oligonucleotide
ccugauuguugagucacca

SEQ ID NO: 517147 - RNA, 19 nt, Artificial Sequence
  Description of Artificial Sequence: Synthetic oligonucleotide
cagcuaaaagagagagacu

SEQ ID NO: 517148 - RNA, 19 nt, Artificial Sequence
  Description of Artificial Sequence: Synthetic oligonucleotide
gaccacacacauuggccuu

SEQ ID NO: 517149 - RNA, 19 nt, Artificial Sequence
  Description of Artificial Sequence: Synthetic oligonucleotide
ccgccugcaguuuuggcga

SEQ ID NO: 517150 - RNA, 19 nt, Artificial Sequence
  Description of Artificial Sequence: Synthetic oligonucleotide
ggcgagugaauucgggccu

SEQ ID NO: 517151 - RNA, 19 nt, Artificial Sequence
  Description of Artificial Sequence: Synthetic oligonucleotide
cuggaguugaucggcauuu

SEQ ID NO: 517152 - RNA, 19 nt, Artificial Sequence
  Description of Artificial Sequence: Synthetic oligonucleotide
gcgcaucuuaaaccuccug

SEQ ID NO: 517153 - RNA, 19 nt, Artificial Sequence
  Description of Artificial Sequence: Synthetic oligonucleotide
gggagaaacucuacaauuu

SEQ ID NO: 517154 - RNA, 19 nt, Artificial Sequence
  Description of Artificial Sequence: Synthetic oligonucleotide
cauugccuguccggaugac

SEQ ID NO: 517155 - RNA, 19 nt, Artificial Sequence
  Description of Artificial Sequence: Synthetic oligonucleotide
gaauucgggccugcaggua

SEQ ID NO: 517156 - RNA, 19 nt, Artificial Sequence
  Description of Artificial Sequence: Synthetic oligonucleotide
auccuccgaagaacagugu

SEQ ID NO: 517157 - RNA, 19 nt, Artificial Sequence
  Description of Artificial Sequence: Synthetic oligonucleotide
gaccaacguucuugggacu

SEQ ID NO: 517158 - RNA, 19 nt, Artificial Sequence
  Description of Artificial Sequence: Synthetic oligonucleotide
ggagagacccuugugcuau

SEQ ID NO: 517159 - RNA, 19 nt, Artificial Sequence
  Description of Artificial Sequence: Synthetic oligonucleotide
cacguugcacuucauuguu

SEQ ID NO: 517160 - RNA, 19 nt, Artificial Sequence
  Description of Artificial Sequence: Synthetic oligonucleotide
cugagccugcgaauauaua

SEQ ID NO: 517161 - RNA, 19 nt, Artificial Sequence
  Description of Artificial Sequence: Synthetic oligonucleotide
ccauacagcuauggccacc

SEQ ID NO: 517162 - RNA, 19 nt, Artificial Sequence
  Description of Artificial Sequence: Synthetic oligonucleotide
ggcuccccgguguagaggu

SEQ ID NO: 517163 - RNA, 19 nt, Artificial Sequence
  Description of Artificial Sequence: Synthetic oligonucleotide
acguugcacuucauuguuu

SEQ ID NO: 517164 - RNA, 19 nt, Artificial Sequence
  Description of Artificial Sequence: Synthetic oligonucleotide
gcaagauguugugcuucug

SEQ ID NO: 517165 - RNA, 19 nt, Artificial Sequence
  Description of Artificial Sequence: Synthetic oligonucleotide
agcuugugggguagaugau

SEQ ID NO: 517166 - RNA, 19 nt, Artificial Sequence
  Description of Artificial Sequence: Synthetic oligonucleotide
gcucaccucaggccccagc

SEQ ID NO: 517167 - RNA, 19 nt, Artificial Sequence
  Description of Artificial Sequence: Synthetic oligonucleotide
cauuaaaauggcgcaucuu

SEQ ID NO: 517168 - RNA, 19 nt, Artificial Sequence
  Description of Artificial Sequence: Synthetic oligonucleotide
gccugcgaauauauacuuc

SEQ ID NO: 517169 - RNA, 19 nt, Artificial Sequence
  Description of Artificial Sequence: Synthetic oligonucleotide
gccugauuguugagucacc

SEQ ID NO: 517170 - RNA, 19 nt, Artificial Sequence
  Description of Artificial Sequence: Synthetic oligonucleotide
cugguccacugcgaggaaa

SEQ ID NO: 517171 - RNA, 19 nt, Artificial Sequence
  Description of Artificial Sequence: Synthetic oligonucleotide
gcgagugaauucgggccug

SEQ ID NO: 517172 - RNA, 19 nt, Artificial Sequence
  Description of Artificial Sequence: Synthetic oligonucleotide
gccauacuucuugggcuug

SEQ ID NO: 517173 - RNA, 19 nt, Artificial Sequence
  Description of Artificial Sequence: Synthetic oligonucleotide
ccgcccuugaagugguuga

SEQ ID NO: 517174 - RNA, 19 nt, Artificial Sequence
  Description of Artificial Sequence: Synthetic oligonucleotide
cagcguggccaagaaaccu

SEQ ID NO: 517175 - RNA, 19 nt, Artificial Sequence
  Description of Artificial Sequence: Synthetic oligonucleotide
cugcucgucggauguuccu

SEQ ID NO: 517176 - RNA, 19 nt, Artificial Sequence
  Description of Artificial Sequence: Synthetic oligonucleotide
cacuggaguugaucggcau

SEQ ID NO: 517177 - RNA, 19 nt, Artificial Sequence
  Description of Artificial Sequence: Synthetic oligonucleotide
ccgccauacuucuugggcu

SEQ ID NO: 517178 - RNA, 19 nt, Artificial Sequence
  Description of Artificial Sequence: Synthetic oligonucleotide
ccacaccugacauaauuuu

SEQ ID NO: 517179 - RNA, 19 nt, Artificial Sequence
  Description of Artificial Sequence: Synthetic oligonucleotide
ccgguguagaggucuguaa

SEQ ID NO: 517180 - RNA, 19 nt, Artificial Sequence
  Description of Artificial Sequence: Synthetic oligonucleotide
gcaguuuuggcgagugaau

SEQ ID NO: 517181 - RNA, 19 nt, Artificial Sequence
  Description of Artificial Sequence: Synthetic oligonucleotide
cgggagacacacguugcac

SEQ ID NO: 517182 - RNA, 19 nt, Artificial Sequence
  Description of Artificial Sequence: Synthetic oligonucleotide
cgugaaucggaugggugga

SEQ ID NO: 517183 - RNA, 19 nt, Artificial Sequence
  Description of Artificial Sequence: Synthetic oligonucleotide
cgaagaacaguguccaguu

SEQ ID NO: 517184 - RNA, 19 nt, Artificial Sequence
  Description of Artificial Sequence: Synthetic oligonucleotide
cgcucgugaaucggauggg

SEQ ID NO: 517185 - RNA, 19 nt, Artificial Sequence
  Description of Artificial Sequence: Synthetic oligonucleotide
ccuuccggagcggaagaga

SEQ ID NO: 517186 - RNA, 19 nt, Artificial Sequence
  Description of Artificial Sequence: Synthetic oligonucleotide
ggaaaggaccaacguucuu

SEQ ID NO: 517187 - RNA, 19 nt, Artificial Sequence
  Description of Artificial Sequence: Synthetic oligonucleotide
gcagguagucuccgccaua

SEQ ID NO: 517188 - RNA, 19 nt, Artificial Sequence
  Description of Artificial Sequence: Synthetic oligonucleotide
gagagacccuugugcuauu

SEQ ID NO: 517189 - RNA, 19 nt, Artificial Sequence
  Description of Artificial Sequence: Synthetic oligonucleotide
gcucgugaaucggaugggu

SEQ ID NO: 517190 - RNA, 19 nt, Artificial Sequence
  Description of Artificial Sequence: Synthetic oligonucleotide
ccacuggucuuuguagaaa

SEQ ID NO: 517191 - RNA, 19 nt, Artificial Sequence
  Description of Artificial Sequence: Synthetic oligonucleotide
ccccgccugcaguuuuggc

SEQ ID NO: 517192 - RNA, 19 nt, Artificial Sequence
  Description of Artificial Sequence: Synthetic oligonucleotide
gguggaccguggcagcgau

SEQ ID NO: 517193 - RNA, 19 nt, Artificial Sequence
  Description of Artificial Sequence: Synthetic oligonucleotide
cccuugugcuauucauaaa

SEQ ID NO: 517194 - RNA, 19 nt, Artificial Sequence
  Description of Artificial Sequence: Synthetic oligonucleotide
ccguggcagcgauauuuga

SEQ ID NO: 517195 - RNA, 19 nt, Artificial Sequence
  Description of Artificial Sequence: Synthetic oligonucleotide
ggcgcaucuuaaaccuccu

SEQ ID NO: 517196 - RNA, 19 nt, Artificial Sequence
  Description of Artificial Sequence: Synthetic oligonucleotide
gggcauugccuguccggau

SEQ ID NO: 517197 - RNA, 19 nt, Artificial Sequence
  Description of Artificial Sequence: Synthetic oligonucleotide
gggcuugccuuggaaucgu

SEQ ID NO: 517198 - RNA, 19 nt, Artificial Sequence
  Description of Artificial Sequence: Synthetic oligonucleotide
ggucuccaaggggcauaca

SEQ ID NO: 517199 - RNA, 19 nt, Artificial Sequence
  Description of Artificial Sequence: Synthetic oligonucleotide
cccgguguagaggucugua

SEQ ID NO: 517200 - RNA, 19 nt, Artificial Sequence
  Description of Artificial Sequence: Synthetic oligonucleotide
cccuucguguagccgcccu

SEQ ID NO: 517201 - RNA, 19 nt, Artificial Sequence
  Description of Artificial Sequence: Synthetic oligonucleotide
ccuucguguagccgcccuu

SEQ ID NO: 517202 - RNA, 19 nt, Artificial Sequence
  Description of Artificial Sequence: Synthetic oligonucleotide
ccggagcggaagagacucu

SEQ ID NO: 517203 - RNA, 19 nt, Artificial Sequence
  Description of Artificial Sequence: Synthetic oligonucleotide
ggaccguggcagcgauauu

SEQ ID NO: 517204 - RNA, 19 nt, Artificial Sequence
  Description of Artificial Sequence: Synthetic oligonucleotide
ccuccacaccugacauaau

SEQ ID NO: 517205 - RNA, 19 nt, Artificial Sequence
  Description of Artificial Sequence: Synthetic oligonucleotide
ccccgguguagaggucugu

SEQ ID NO: 517206 - RNA, 19 nt, Artificial Sequence
  Description of Artificial Sequence: Synthetic oligonucleotide
ccacugcucgucggauguu

SEQ ID NO: 517207 - RNA, 19 nt, Artificial Sequence
  Description of Artificial Sequence: Synthetic oligonucleotide
aagcacauaccgcagaagc

SEQ ID NO: 517208 - RNA, 19 nt, Artificial Sequence
  Description of Artificial Sequence: Synthetic oligonucleotide
gaugauuuuggccacgugg

SEQ ID NO: 517209 - RNA, 19 nt, Artificial Sequence
  Description of Artificial Sequence: Synthetic oligonucleotide
uuugggacgaacuagagaa

SEQ ID NO: 517210 - RNA, 19 nt, Artificial Sequence
  Description of Artificial Sequence: Synthetic oligonucleotide
aaagcaagacgugagaguc

SEQ ID NO: 517211 - RNA, 19 nt, Artificial Sequence
  Description of Artificial Sequence: Synthetic oligonucleotide
aaugcuaggggccaaugag

SEQ ID NO: 517212 - RNA, 19 nt, Artificial Sequence
  Description of Artificial Sequence: Synthetic oligonucleotide
gaugcaaacaacuccucgg

SEQ ID NO: 517213 - RNA, 19 nt, Artificial Sequence
  Description of Artificial Sequence: Synthetic oligonucleotide
gaucauaccugccauauac

SEQ ID NO: 517214 - RNA, 19 nt, Artificial Sequence
  Description of Artificial Sequence: Synthetic oligonucleotide
uuucgcaauagucacucgg

SEQ ID NO: 517215 - RNA, 19 nt, Artificial Sequence
  Description of Artificial Sequence: Synthetic oligonucleotide
aacuagagaacauuuagua

SEQ ID NO: 517216 - RNA, 19 nt, Artificial Sequence
  Description of Artificial Sequence: Synthetic oligonucleotide
agaauauugaugucuccac

SEQ ID NO: 517217 - RNA, 19 nt, Artificial Sequence
  Description of Artificial Sequence: Synthetic oligonucleotide
uuuauccaccagaucaucg

SEQ ID NO: 517218 - RNA, 19 nt, Artificial Sequence
  Description of Artificial Sequence: Synthetic oligonucleotide
cuucgaacaacuuugggac

SEQ ID NO: 517219 - RNA, 19 nt, Artificial Sequence
  Description of Artificial Sequence: Synthetic oligonucleotide
aacacuucgaacaacuuug

SEQ ID NO: 517220 - RNA, 19 nt, Artificial Sequence
  Description of Artificial Sequence: Synthetic oligonucleotide
ucauaccugccauauaccg

SEQ ID NO: 517221 - RNA, 19 nt, Artificial Sequence
  Description of Artificial Sequence: Synthetic oligonucleotide
gaauauugaugucuccacg

SEQ ID NO: 517222 - RNA, 19 nt, Artificial Sequence
  Description of Artificial Sequence: Synthetic oligonucleotide
ucaucgucuagaaugacgu

SEQ ID NO: 517223 - RNA, 19 nt, Artificial Sequence
  Description of Artificial Sequence: Synthetic oligonucleotide
ugagaaagcaagacgugag

SEQ ID NO: 517224 - RNA, 19 nt, Artificial Sequence
  Description of Artificial Sequence: Synthetic oligonucleotide
ucacauuacaggcaaucag

SEQ ID NO: 517225 - RNA, 19 nt, Artificial Sequence
  Description of Artificial Sequence: Synthetic oligonucleotide
aucgucuagaaugacgucc

SEQ ID NO: 517226 - RNA, 19 nt, Artificial Sequence
  Description of Artificial Sequence: Synthetic oligonucleotide
agucuuauacugaucauac

SEQ ID NO: 517227 - RNA, 19 nt, Artificial Sequence
  Description of Artificial Sequence: Synthetic oligonucleotide
auagguagcaucaauggag

SEQ ID NO: 517228 - RNA, 19 nt, Artificial Sequence
  Description of Artificial Sequence: Synthetic oligonucleotide
ugacucugguaucaggacg

SEQ ID NO: 517229 - RNA, 19 nt, Artificial Sequence
  Description of Artificial Sequence: Synthetic oligonucleotide
ucugguaucaggacgggcu

SEQ ID NO: 517230 - RNA, 19 nt, Artificial Sequence
  Description of Artificial Sequence: Synthetic oligonucleotide
ugcuaggggccaaugagcg

SEQ ID NO: 517231 - RNA, 19 nt, Artificial Sequence
  Description of Artificial Sequence: Synthetic oligonucleotide
ggauaaacagaacuugacg

SEQ ID NO: 517232 - RNA, 19 nt, Artificial Sequence
  Description of Artificial Sequence: Synthetic oligonucleotide
ucgugggauaaacagaacu

SEQ ID NO: 517233 - RNA, 19 nt, Artificial Sequence
  Description of Artificial Sequence: Synthetic oligonucleotide
uagagaacauuuaguaaca

SEQ ID NO: 517234 - RNA, 19 nt, Artificial Sequence
  Description of Artificial Sequence: Synthetic oligonucleotide
guagucaugcccaugaaug

SEQ ID NO: 517235 - RNA, 19 nt, Artificial Sequence
  Description of Artificial Sequence: Synthetic oligonucleotide
auaaauccggguauccugc

SEQ ID NO: 517236 - RNA, 19 nt, Artificial Sequence
  Description of Artificial Sequence: Synthetic oligonucleotide
ugagaucagaguagcgccg

SEQ ID NO: 517237 - RNA, 19 nt, Artificial Sequence
  Description of Artificial Sequence: Synthetic oligonucleotide
guuauaagggucaaaggac

SEQ ID NO: 517238 - RNA, 19 nt, Artificial Sequence
  Description of Artificial Sequence: Synthetic oligonucleotide
uccaguccuauguagaacu

SEQ ID NO: 517239 - RNA, 19 nt, Artificial Sequence
  Description of Artificial Sequence: Synthetic oligonucleotide
agaaacgugcuuugagccg

SEQ ID NO: 517240 - RNA, 19 nt, Artificial Sequence
  Description of Artificial Sequence: Synthetic oligonucleotide
ugacgggaaagccaccagg

SEQ ID NO: 517241 - RNA, 19 nt, Artificial Sequence
  Description of Artificial Sequence: Synthetic oligonucleotide
caucgaugcaaacaacucc

SEQ ID NO: 517242 - RNA, 19 nt, Artificial Sequence
  Description of Artificial Sequence: Synthetic oligonucleotide
auaccugccauauaccgga

SEQ ID NO: 517243 - RNA, 19 nt, Artificial Sequence
  Description of Artificial Sequence: Synthetic oligonucleotide
ucuucacguagucaugccc

SEQ ID NO: 517244 - RNA, 19 nt, Artificial Sequence
  Description of Artificial Sequence: Synthetic oligonucleotide
acauuuaguaacaaugccu

SEQ ID NO: 517245 - RNA, 19 nt, Artificial Sequence
  Description of Artificial Sequence: Synthetic oligonucleotide
cacugaacuacccaacggc

SEQ ID NO: 517246 - RNA, 19 nt, Artificial Sequence
  Description of Artificial Sequence: Synthetic oligonucleotide
gugagaucagaguagcgcc

SEQ ID NO: 517247 - RNA, 19 nt, Artificial Sequence
  Description of Artificial Sequence: Synthetic oligonucleotide
cuuggaacguguuuugcug

SEQ ID NO: 517248 - RNA, 19 nt, Artificial Sequence
  Description of Artificial Sequence: Synthetic oligonucleotide
aagacgugagaguccgggg

SEQ ID NO: 517249 - RNA, 19 nt, Artificial Sequence
  Description of Artificial Sequence: Synthetic oligonucleotide
agcccaauguucuccauag

SEQ ID NO: 517250 - RNA, 19 nt, Artificial Sequence
  Description of Artificial Sequence: Synthetic oligonucleotide
gacucugguaucaggacgg

SEQ ID NO: 517251 - RNA, 19 nt, Artificial Sequence
  Description of Artificial Sequence: Synthetic oligonucleotide
cauaccugccauauaccgg

SEQ ID NO: 517252 - RNA, 19 nt, Artificial Sequence
  Description of Artificial Sequence: Synthetic oligonucleotide
ucggagugugcacuugugg

SEQ ID NO: 517253 - RNA, 19 nt, Artificial Sequence
  Description of Artificial Sequence: Synthetic oligonucleotide
uucagucgagcauggaugc

SEQ ID NO: 517254 - RNA, 19 nt, Artificial Sequence
  Description of Artificial Sequence: Synthetic oligonucleotide
uuauccaccagaucaucgu

SEQ ID NO: 517255 - RNA, 19 nt, Artificial Sequence
  Description of Artificial Sequence: Synthetic oligonucleotide
auacugaucauaccugcca

SEQ ID NO: 517256 - RNA, 19 nt, Artificial Sequence
  Description of Artificial Sequence: Synthetic oligonucleotide
ucaucgaugcaaacaacuc

SEQ ID NO: 517257 - RNA, 19 nt, Artificial Sequence
  Description of Artificial Sequence: Synthetic oligonucleotide
gcauagguagcaucaaugg

SEQ ID NO: 517258 - RNA, 19 nt, Artificial Sequence
  Description of Artificial Sequence: Synthetic oligonucleotide
cuuggaacacguccaagag

SEQ ID NO: 517259 - RNA, 19 nt, Artificial Sequence
  Description of Artificial Sequence: Synthetic oligonucleotide
caaugagcgggccaacugg

SEQ ID NO: 517260 - RNA, 19 nt, Artificial Sequence
  Description of Artificial Sequence: Synthetic oligonucleotide
auaccggauuggcagcugc

SEQ ID NO: 517261 - RNA, 19 nt, Artificial Sequence
  Description of Artificial Sequence: Synthetic oligonucleotide
aacaacuuugggacgaacu

SEQ ID NO: 517262 - RNA, 19 nt, Artificial Sequence
  Description of Artificial Sequence: Synthetic oligonucleotide
uuggcuaugucgucagcag

SEQ ID NO: 517263 - RNA, 19 nt, Artificial Sequence
  Description of Artificial Sequence: Synthetic oligonucleotide
gagaauauugaugucucca

SEQ ID NO: 517264 - RNA, 19 nt, Artificial Sequence
  Description of Artificial Sequence: Synthetic oligonucleotide
ucgucuagaaugacgucca

SEQ ID NO: 517265 - RNA, 19 nt, Artificial Sequence
  Description of Artificial Sequence: Synthetic oligonucleotide
uucgaacaacuuugggacg

SEQ ID NO: 517266 - RNA, 19 nt, Artificial Sequence
  Description of Artificial Sequence: Synthetic oligonucleotide
auaccgcagaagcugggac

SEQ ID NO: 517267 - RNA, 19 nt, Artificial Sequence
  Description of Artificial Sequence: Synthetic oligonucleotide
ccauauaccggauuggcag

SEQ ID NO: 517268 - RNA, 19 nt, Artificial Sequence
  Description of Artificial Sequence: Synthetic oligonucleotide
agcaagacgugagaguccg

SEQ ID NO: 517269 - RNA, 19 nt, Artificial Sequence
  Description of Artificial Sequence: Synthetic oligonucleotide
auguccgugcuguaacugg

SEQ ID NO: 517270 - RNA, 19 nt, Artificial Sequence
  Description of Artificial Sequence: Synthetic oligonucleotide
uagucaugcccaugaaugc

SEQ ID NO: 517271 - RNA, 19 nt, Artificial Sequence
  Description of Artificial Sequence: Synthetic oligonucleotide
augucgucagcagagaaug

SEQ ID NO: 517272 - RNA, 19 nt, Artificial Sequence
  Description of Artificial Sequence: Synthetic oligonucleotide
auucagucgagcauggaug

SEQ ID NO: 517273 - RNA, 19 nt, Artificial Sequence
  Description of Artificial Sequence: Synthetic oligonucleotide
aauagucacucggcccugc

SEQ ID NO: 517274 - RNA, 19 nt, Artificial Sequence
  Description of Artificial Sequence: Synthetic oligonucleotide
uaugucgucagcagagaau

SEQ ID NO: 517275 - RNA, 19 nt, Artificial Sequence
  Description of Artificial Sequence: Synthetic oligonucleotide
caggguagugagaucagag

SEQ ID NO: 517276 - RNA, 19 nt, Artificial Sequence
  Description of Artificial Sequence: Synthetic oligonucleotide
cauauaccggauuggcagc

SEQ ID NO: 517277 - RNA, 19 nt, Artificial Sequence
  Description of Artificial Sequence: Synthetic oligonucleotide
aucgugacagcagcgaguc

SEQ ID NO: 517278 - RNA, 19 nt, Artificial Sequence
  Description of Artificial Sequence: Synthetic oligonucleotide
ggagaaacgugcuuugagc

SEQ ID NO: 517279 - RNA, 19 nt, Artificial Sequence
  Description of Artificial Sequence: Synthetic oligonucleotide
aucauaccugccauauacc

SEQ ID NO: 517280 - RNA, 19 nt, Artificial Sequence
  Description of Artificial Sequence: Synthetic oligonucleotide
ugagcgggccaacugguca

SEQ ID NO: 517281 - RNA, 19 nt, Artificial Sequence
  Description of Artificial Sequence: Synthetic oligonucleotide
acaacuuugggacgaacua

SEQ ID NO: 517282 - RNA, 19 nt, Artificial Sequence
  Description of Artificial Sequence: Synthetic oligonucleotide
cuucgugggauaaacagaa

SEQ ID NO: 517283 - RNA, 19 nt, Artificial Sequence
  Description of Artificial Sequence: Synthetic oligonucleotide
caagacgugagaguccggg

SEQ ID NO: 517284 - RNA, 19 nt, Artificial Sequence
  Description of Artificial Sequence: Synthetic oligonucleotide
aagagcaggucaaaucgug

SEQ ID NO: 517285 - RNA, 19 nt, Artificial Sequence
  Description of Artificial Sequence: Synthetic oligonucleotide
aucgaugcaaacaacuccu

SEQ ID NO: 517286 - RNA, 19 nt, Artificial Sequence
  Description of Artificial Sequence: Synthetic oligonucleotide
cacauaccgcagaagcugg

SEQ ID NO: 517287 - RNA, 19 nt, Artificial Sequence
  Description of Artificial Sequence: Synthetic oligonucleotide
aacagaacuugacgggaaa

SEQ ID NO: 517288 - RNA, 19 nt, Artificial Sequence
  Description of Artificial Sequence: Synthetic oligonucleotide
ucgaaucagaguuuccaau

SEQ ID NO: 517289 - RNA, 19 nt, Artificial Sequence
  Description of Artificial Sequence: Synthetic oligonucleotide
augcaaacaacuccucggu

SEQ ID NO: 517290 - RNA, 19 nt, Artificial Sequence
  Description of Artificial Sequence: Synthetic oligonucleotide
cauacgggccuucgcaugg

SEQ ID NO: 517291 - RNA, 19 nt, Artificial Sequence
  Description of Artificial Sequence: Synthetic oligonucleotide
gagcaggucaaaucgugac

SEQ ID NO: 517292 - RNA, 19 nt, Artificial Sequence
  Description of Artificial Sequence: Synthetic oligonucleotide
aguagcgccgcucuauggu

SEQ ID NO: 517293 - RNA, 19 nt, Artificial Sequence
  Description of Artificial Sequence: Synthetic oligonucleotide
ugggacgaacuagagaaca

SEQ ID NO: 517294 - RNA, 19 nt, Artificial Sequence
  Description of Artificial Sequence: Synthetic oligonucleotide
agucgaaucagaguuucca

SEQ ID NO: 517295 - RNA, 19 nt, Artificial Sequence
  Description of Artificial Sequence: Synthetic oligonucleotide
ucgaacaacuuugggacga

SEQ ID NO: 517296 - RNA, 19 nt, Artificial Sequence
  Description of Artificial Sequence: Synthetic oligonucleotide
uacgguccaugucagacau

SEQ ID NO: 517297 - RNA, 19 nt, Artificial Sequence
  Description of Artificial Sequence: Synthetic oligonucleotide
ugagaaucaucucgucggu

SEQ ID NO: 517298 - RNA, 19 nt, Artificial Sequence
  Description of Artificial Sequence: Synthetic oligonucleotide
gugggauaaacagaacuug

SEQ ID NO: 517299 - RNA, 19 nt, Artificial Sequence
  Description of Artificial Sequence: Synthetic oligonucleotide
gaggccauacucugucucc

SEQ ID NO: 517300 - RNA, 19 nt, Artificial Sequence
  Description of Artificial Sequence: Synthetic oligonucleotide
cuuuaucccgguuaaugga

SEQ ID NO: 517301 - RNA, 19 nt, Artificial Sequence
  Description of Artificial Sequence: Synthetic oligonucleotide
gacgugagaguccggggag

SEQ ID NO: 517302 - RNA, 19 nt, Artificial Sequence
  Description of Artificial Sequence: Synthetic oligonucleotide
uacugaucauaccugccau

SEQ ID NO: 517303 - RNA, 19 nt, Artificial Sequence
  Description of Artificial Sequence: Synthetic oligonucleotide
agagggccgccuugaaagc

SEQ ID NO: 517304 - RNA, 19 nt, Artificial Sequence
  Description of Artificial Sequence: Synthetic oligonucleotide
aggguagugagaucagagu

SEQ ID NO: 517305 - RNA, 19 nt, Artificial Sequence
  Description of Artificial Sequence: Synthetic oligonucleotide
aggacuccccauccguggc

SEQ ID NO: 517306 - RNA, 19 nt, Artificial Sequence
  Description of Artificial Sequence: Synthetic oligonucleotide
augauuuuggccacgugga

SEQ ID NO: 517307 - RNA, 19 nt, Artificial Sequence
  Description of Artificial Sequence: Synthetic oligonucleotide
cagcuuucgcaauagucac

SEQ ID NO: 517308 - RNA, 19 nt, Artificial Sequence
  Description of Artificial Sequence: Synthetic oligonucleotide
caggcgugaguauucuucc

SEQ ID NO: 517309 - RNA, 19 nt, Artificial Sequence
  Description of Artificial Sequence: Synthetic oligonucleotide
ugccauauaccggauuggc

SEQ ID NO: 517310 - RNA, 19 nt, Artificial Sequence
  Description of Artificial Sequence: Synthetic oligonucleotide
uugcauccugcucagggaa

SEQ ID NO: 517311 - RNA, 19 nt, Artificial Sequence
  Description of Artificial Sequence: Synthetic oligonucleotide
uguccgugcuguaacugga

SEQ ID NO: 517312 - RNA, 19 nt, Artificial Sequence
  Description of Artificial Sequence: Synthetic oligonucleotide
agacgugagaguccgggga

SEQ ID NO: 517313 - RNA, 19 nt, Artificial Sequence
  Description of Artificial Sequence: Synthetic oligonucleotide
uagacagagaggccauacu

SEQ ID NO: 517314 - RNA, 19 nt, Artificial Sequence
  Description of Artificial Sequence: Synthetic oligonucleotide
auccuaaggacguggucug

SEQ ID NO: 517315 - RNA, 19 nt, Artificial Sequence
  Description of Artificial Sequence: Synthetic oligonucleotide
gguagugagaucagaguag

SEQ ID NO: 517316 - RNA, 19 nt, Artificial Sequence
  Description of Artificial Sequence: Synthetic oligonucleotide
uccuguaguuccacagucu

SEQ ID NO: 517317 - RNA, 19 nt, Artificial Sequence
  Description of Artificial Sequence: Synthetic oligonucleotide
cucauaaauccggguaucc

SEQ ID NO: 517318 - RNA, 19 nt, Artificial Sequence
  Description of Artificial Sequence: Synthetic oligonucleotide
ucauacgggccuucgcaug

SEQ ID NO: 517319 - RNA, 19 nt, Artificial Sequence
  Description of Artificial Sequence: Synthetic oligonucleotide
gaaacgugcuuugagccga

SEQ ID NO: 517320 - RNA, 19 nt, Artificial Sequence
  Description of Artificial Sequence: Synthetic oligonucleotide
aggucaaaucgugacagca

SEQ ID NO: 517321 - RNA, 19 nt, Artificial Sequence
  Description of Artificial Sequence: Synthetic oligonucleotide
acuacccaacggcaaagca

SEQ ID NO: 517322 - RNA, 19 nt, Artificial Sequence
  Description of Artificial Sequence: Synthetic oligonucleotide
agcaggucaaaucgugaca

SEQ ID NO: 517323 - RNA, 19 nt, Artificial Sequence
  Description of Artificial Sequence: Synthetic oligonucleotide
aaucgugacagcagcgagu

SEQ ID NO: 517324 - RNA, 19 nt, Artificial Sequence
  Description of Artificial Sequence: Synthetic oligonucleotide
cucccuauccuguucagga

SEQ ID NO: 517325 - RNA, 19 nt, Artificial Sequence
  Description of Artificial Sequence: Synthetic oligonucleotide
cuucucauaaauccgggua

SEQ ID NO: 517326 - RNA, 19 nt, Artificial Sequence
  Description of Artificial Sequence: Synthetic oligonucleotide
cgaacuagagaacauuuag

SEQ ID NO: 517327 - RNA, 19 nt, Artificial Sequence
  Description of Artificial Sequence: Synthetic oligonucleotide
gaguagcgccgcucuaugg

SEQ ID NO: 517328 - RNA, 19 nt, Artificial Sequence
  Description of Artificial Sequence: Synthetic oligonucleotide
aucaucucgucggucuucg

SEQ ID NO: 517329 - RNA, 19 nt, Artificial Sequence
  Description of Artificial Sequence: Synthetic oligonucleotide
cacuucgaacaacuuuggg

SEQ ID NO: 517330 - RNA, 19 nt, Artificial Sequence
  Description of Artificial Sequence: Synthetic oligonucleotide
gagauguccuggcaguguc

SEQ ID NO: 517331 - RNA, 19 nt, Artificial Sequence
  Description of Artificial Sequence: Synthetic oligonucleotide
uucggagugugcacuugug

SEQ ID NO: 517332 - RNA, 19 nt, Artificial Sequence
  Description of Artificial Sequence: Synthetic oligonucleotide
uucuccauaggagucuuau

SEQ ID NO: 517333 - RNA, 19 nt, Artificial Sequence
  Description of Artificial Sequence: Synthetic oligonucleotide
ugcaaacaacuccucgguc

SEQ ID NO: 517334 - RNA, 19 nt, Artificial Sequence
  Description of Artificial Sequence: Synthetic oligonucleotide
uccgugcuguaacuggaga

SEQ ID NO: 517335 - RNA, 19 nt, Artificial Sequence
  Description of Artificial Sequence: Synthetic oligonucleotide
aaugagcgggccaacuggu

SEQ ID NO: 517336 - RNA, 19 nt, Artificial Sequence
  Description of Artificial Sequence: Synthetic oligonucleotide
gacguggucugagaucucc

SEQ ID NO: 517337 - RNA, 19 nt, Artificial Sequence
  Description of Artificial Sequence: Synthetic oligonucleotide
ucggucuucggagugugca

SEQ ID NO: 517338 - RNA, 19 nt, Artificial Sequence
  Description of Artificial Sequence: Synthetic oligonucleotide
uuucguagcggggcaguag

SEQ ID NO: 517339 - RNA, 19 nt, Artificial Sequence
  Description of Artificial Sequence: Synthetic oligonucleotide
uaucccgguuaauggauuc

SEQ ID NO: 517340 - RNA, 19 nt, Artificial Sequence
  Description of Artificial Sequence: Synthetic oligonucleotide
ugggaauggcccugggcgc

SEQ ID NO: 517341 - RNA, 19 nt, Artificial Sequence
  Description of Artificial Sequence: Synthetic oligonucleotide
uaguaacaaugccuuccac

SEQ ID NO: 517342 - RNA, 19 nt, Artificial Sequence
  Description of Artificial Sequence: Synthetic oligonucleotide
gcaggucaaaucgugacag

SEQ ID NO: 517343 - RNA, 19 nt, Artificial Sequence
  Description of Artificial Sequence: Synthetic oligonucleotide
gagucuuauacugaucaua

SEQ ID NO: 517344 - RNA, 19 nt, Artificial Sequence
  Description of Artificial Sequence: Synthetic oligonucleotide
agaguagcgccgcucuaug

SEQ ID NO: 517345 - RNA, 19 nt, Artificial Sequence
  Description of Artificial Sequence: Synthetic oligonucleotide
cauccuucgugggauaaac

SEQ ID NO: 517346 - RNA, 19 nt, Artificial Sequence
  Description of Artificial Sequence: Synthetic oligonucleotide
ggcauagguagcaucaaug

SEQ ID NO: 517347 - RNA, 19 nt, Artificial Sequence
  Description of Artificial Sequence: Synthetic oligonucleotide
acugaacuacccaacggca

SEQ ID NO: 517348 - RNA, 19 nt, Artificial Sequence
  Description of Artificial Sequence: Synthetic oligonucleotide
ugaacacuucgaacaacuu

SEQ ID NO: 517349 - RNA, 19 nt, Artificial Sequence
  Description of Artificial Sequence: Synthetic oligonucleotide
cucaucgaugcaaacaacu

SEQ ID NO: 517350 - RNA, 19 nt, Artificial Sequence
  Description of Artificial Sequence: Synthetic oligonucleotide
cuuucgcaauagucacucg

SEQ ID NO: 517351 - RNA, 19 nt, Artificial Sequence
  Description of Artificial Sequence: Synthetic oligonucleotide
cauacuguuuggcauaggu

SEQ ID NO: 517352 - RNA, 19 nt, Artificial Sequence
  Description of Artificial Sequence: Synthetic oligonucleotide
cauggaugccagcuuucgc

SEQ ID NO: 517353 - RNA, 19 nt, Artificial Sequence
  Description of Artificial Sequence: Synthetic oligonucleotide
guuuggcauagguagcauc

SEQ ID NO: 517354 - RNA, 19 nt, Artificial Sequence
  Description of Artificial Sequence: Synthetic oligonucleotide
caguccuauguagaacucc

SEQ ID NO: 517355 - RNA, 19 nt, Artificial Sequence
  Description of Artificial Sequence: Synthetic oligonucleotide
uugggacgaacuagagaac

SEQ ID NO: 517356 - RNA, 19 nt, Artificial Sequence
  Description of Artificial Sequence: Synthetic oligonucleotide
uaccggauuggcagcugcc

SEQ ID NO: 517357 - RNA, 19 nt, Artificial Sequence
  Description of Artificial Sequence: Synthetic oligonucleotide
gaacacuucgaacaacuuu

SEQ ID NO: 517358 - RNA, 19 nt, Artificial Sequence
  Description of Artificial Sequence: Synthetic oligonucleotide
ccugccauauaccggauug

SEQ ID NO: 517359 - RNA, 19 nt, Artificial Sequence
  Description of Artificial Sequence: Synthetic oligonucleotide
cucacagacugugcguggg

SEQ ID NO: 517360 - RNA, 19 nt, Artificial Sequence
  Description of Artificial Sequence: Synthetic oligonucleotide
uaggagucuuauacugauc

SEQ ID NO: 517361 - RNA, 19 nt, Artificial Sequence
  Description of Artificial Sequence: Synthetic oligonucleotide
gagaguccggggagaaacg

SEQ ID NO: 517362 - RNA, 19 nt, Artificial Sequence
  Description of Artificial Sequence: Synthetic oligonucleotide
ucccgguuaauggauucug

SEQ ID NO: 517363 - RNA, 19 nt, Artificial Sequence
  Description of Artificial Sequence: Synthetic oligonucleotide
aggagcaaacagaggauug

SEQ ID NO: 517364 - RNA, 19 nt, Artificial Sequence
  Description of Artificial Sequence: Synthetic oligonucleotide
gggccaacuggucaaagac

SEQ ID NO: 517365 - RNA, 19 nt, Artificial Sequence
  Description of Artificial Sequence: Synthetic oligonucleotide
ggagaauauugaugucucc

SEQ ID NO: 517366 - RNA, 19 nt, Artificial Sequence
  Description of Artificial Sequence: Synthetic oligonucleotide
caggauauccacugaacua

SEQ ID NO: 517367 - RNA, 19 nt, Artificial Sequence
  Description of Artificial Sequence: Synthetic oligonucleotide
ccuaugaggagaauauuga

SEQ ID NO: 517368 - RNA, 19 nt, Artificial Sequence
  Description of Artificial Sequence: Synthetic oligonucleotide
uucgugggauaaacagaac

SEQ ID NO: 517369 - RNA, 19 nt, Artificial Sequence
  Description of Artificial Sequence: Synthetic oligonucleotide
ucgaugcaaacaacuccuc

SEQ ID NO: 517370 - RNA, 19 nt, Artificial Sequence
  Description of Artificial Sequence: Synthetic oligonucleotide
cucaugcuguccugacugc

SEQ ID NO: 517371 - RNA, 19 nt, Artificial Sequence
  Description of Artificial Sequence: Synthetic oligonucleotide
ugcgcaggcgugaguauuc

SEQ ID NO: 517372 - RNA, 19 nt, Artificial Sequence
  Description of Artificial Sequence: Synthetic oligonucleotide
ggucaaaucgugacagcag

SEQ ID NO: 517373 - RNA, 19 nt, Artificial Sequence
  Description of Artificial Sequence: Synthetic oligonucleotide
ggagcaaacagaggauugc

SEQ ID NO: 517374 - RNA, 19 nt, Artificial Sequence
  Description of Artificial Sequence: Synthetic oligonucleotide
uguagccgcccuucuuccc

SEQ ID NO: 517375 - RNA, 19 nt, Artificial Sequence
  Description of Artificial Sequence: Synthetic oligonucleotide
auauaccggauuggcagcu

SEQ ID NO: 517376 - RNA, 19 nt, Artificial Sequence
  Description of Artificial Sequence: Synthetic oligonucleotide
ugaucauaccugccauaua

SEQ ID NO: 517377 - RNA, 19 nt, Artificial Sequence
  Description of Artificial Sequence: Synthetic oligonucleotide
gucgaaucagaguuuccaa

SEQ ID NO: 517378 - RNA, 19 nt, Artificial Sequence
  Description of Artificial Sequence: Synthetic oligonucleotide
gggauaaacagaacuugac

SEQ ID NO: 517379 - RNA, 19 nt, Artificial Sequence
  Description of Artificial Sequence: Synthetic oligonucleotide
cugccauauaccggauugg

SEQ ID NO: 517380 - RNA, 19 nt, Artificial Sequence
  Description of Artificial Sequence: Synthetic oligonucleotide
ggguagugagaucagagua

SEQ ID NO: 517381 - RNA, 19 nt, Artificial Sequence
  Description of Artificial Sequence: Synthetic oligonucleotide
ucauacuguuuggcauagg

SEQ ID NO: 517382 - RNA, 19 nt, Artificial Sequence
  Description of Artificial Sequence: Synthetic oligonucleotide
caaaucgugacagcagcga

SEQ ID NO: 517383 - RNA, 19 nt, Artificial Sequence
  Description of Artificial Sequence: Synthetic oligonucleotide
ucuccauaggagucuuaua

SEQ ID NO: 517384 - RNA, 19 nt, Artificial Sequence
  Description of Artificial Sequence: Synthetic oligonucleotide
agcacauaccgcagaagcu

SEQ ID NO: 517385 - RNA, 19 nt, Artificial Sequence
  Description of Artificial Sequence: Synthetic oligonucleotide
augaugcccucagacacca

SEQ ID NO: 517386 - RNA, 19 nt, Artificial Sequence
  Description of Artificial Sequence: Synthetic oligonucleotide
agcgaggaagcuggccagc

SEQ ID NO: 517387 - RNA, 19 nt, Artificial Sequence
  Description of Artificial Sequence: Synthetic oligonucleotide
acguggucugagaucuccc

SEQ ID NO: 517388 - RNA, 19 nt, Artificial Sequence
  Description of Artificial Sequence: Synthetic oligonucleotide
cauccuaaggacguggucu

SEQ ID NO: 517389 - RNA, 19 nt, Artificial Sequence
  Description of Artificial Sequence: Synthetic oligonucleotide
gacuuggcgacagaggggu

SEQ ID NO: 517390 - RNA, 19 nt, Artificial Sequence
  Description of Artificial Sequence: Synthetic oligonucleotide
cagucgaaucagaguuucc

SEQ ID NO: 517391 - RNA, 19 nt, Artificial Sequence
  Description of Artificial Sequence: Synthetic oligonucleotide
cggcaaagcaucaccaucc

SEQ ID NO: 517392 - RNA, 19 nt, Artificial Sequence
  Description of Artificial Sequence: Synthetic oligonucleotide
uagcgccgcucuauggucu

SEQ ID NO: 517393 - RNA, 19 nt, Artificial Sequence
  Description of Artificial Sequence: Synthetic oligonucleotide
cuguauuggugcauccuaa

SEQ ID NO: 517394 - RNA, 19 nt, Artificial Sequence
  Description of Artificial Sequence: Synthetic oligonucleotide
accucguggauggcuguac

SEQ ID NO: 517395 - RNA, 19 nt, Artificial Sequence
  Description of Artificial Sequence: Synthetic oligonucleotide
gacagaggggucaccuaug

SEQ ID NO: 517396 - RNA, 19 nt, Artificial Sequence
  Description of Artificial Sequence: Synthetic oligonucleotide
gugaacacuucgaacaacu

SEQ ID NO: 517397 - RNA, 19 nt, Artificial Sequence
  Description of Artificial Sequence: Synthetic oligonucleotide
ucguagcggggcaguagug

SEQ ID NO: 517398 - RNA, 19 nt, Artificial Sequence
  Description of Artificial Sequence: Synthetic oligonucleotide
uccgcaauguaggcugcug

SEQ ID NO: 517399 - RNA, 19 nt, Artificial Sequence
  Description of Artificial Sequence: Synthetic oligonucleotide
guacgguccaugucagaca

SEQ ID NO: 517400 - RNA, 19 nt, Artificial Sequence
  Description of Artificial Sequence: Synthetic oligonucleotide
gucaccuaugaggagaaua

SEQ ID NO: 517401 - RNA, 19 nt, Artificial Sequence
  Description of Artificial Sequence: Synthetic oligonucleotide
aggcaaucaggacgguccu

SEQ ID NO: 517402 - RNA, 19 nt, Artificial Sequence
  Description of Artificial Sequence: Synthetic oligonucleotide
cugaacuacccaacggcaa

SEQ ID NO: 517403 - RNA, 19 nt, Artificial Sequence
  Description of Artificial Sequence: Synthetic oligonucleotide
auagucacucggcccugcu

SEQ ID NO: 517404 - RNA, 19 nt, Artificial Sequence
  Description of Artificial Sequence: Synthetic oligonucleotide
gcuuucgcaauagucacuc

SEQ ID NO: 517405 - RNA, 19 nt, Artificial Sequence
  Description of Artificial Sequence: Synthetic oligonucleotide
uauaccggauuggcagcug

SEQ ID NO: 517406 - RNA, 19 nt, Artificial Sequence
  Description of Artificial Sequence: Synthetic oligonucleotide
ugguaucaggacgggcuug

SEQ ID NO: 517407 - RNA, 19 nt, Artificial Sequence
  Description of Artificial Sequence: Synthetic oligonucleotide
guagcgccgcucuaugguc

SEQ ID NO: 517408 - RNA, 19 nt, Artificial Sequence
  Description of Artificial Sequence: Synthetic oligonucleotide
gcagcgggcauucagucga

SEQ ID NO: 517409 - RNA, 19 nt, Artificial Sequence
  Description of Artificial Sequence: Synthetic oligonucleotide
gcucauacgggccuucgca

SEQ ID NO: 517410 - RNA, 19 nt, Artificial Sequence
  Description of Artificial Sequence: Synthetic oligonucleotide
cucguuccaccccucccag

SEQ ID NO: 517411 - RNA, 19 nt, Artificial Sequence
  Description of Artificial Sequence: Synthetic oligonucleotide
ccgguuaauggauucugug

SEQ ID NO: 517412 - RNA, 19 nt, Artificial Sequence
  Description of Artificial Sequence: Synthetic oligonucleotide
caucgucuagaaugacguc

SEQ ID NO: 517413 - RNA, 19 nt, Artificial Sequence
  Description of Artificial Sequence: Synthetic oligonucleotide
ucccuauccuguucaggau

SEQ ID NO: 517414 - RNA, 19 nt, Artificial Sequence
  Description of Artificial Sequence: Synthetic oligonucleotide
cugggcaaagucgggauca

SEQ ID NO: 517415 - RNA, 19 nt, Artificial Sequence
  Description of Artificial Sequence: Synthetic oligonucleotide
ugcucggggucuuccuggc

SEQ ID NO: 517416 - RNA, 19 nt, Artificial Sequence
  Description of Artificial Sequence: Synthetic oligonucleotide
gaacaacuuugggacgaac

SEQ ID NO: 517417 - RNA, 19 nt, Artificial Sequence
  Description of Artificial Sequence: Synthetic oligonucleotide
uacgggccuucgcaugggc

SEQ ID NO: 517418 - RNA, 19 nt, Artificial Sequence
  Description of Artificial Sequence: Synthetic oligonucleotide
ucagucgagcauggaugcc

SEQ ID NO: 517419 - RNA, 19 nt, Artificial Sequence
  Description of Artificial Sequence: Synthetic oligonucleotide
uucugcucggggucuuccu

SEQ ID NO: 517420 - RNA, 19 nt, Artificial Sequence
  Description of Artificial Sequence: Synthetic oligonucleotide
gagggccgccuugaaagcc

SEQ ID NO: 517421 - RNA, 19 nt, Artificial Sequence
  Description of Artificial Sequence: Synthetic oligonucleotide
cuaugucgucagcagagaa

SEQ ID NO: 517422 - RNA, 19 nt, Artificial Sequence
  Description of Artificial Sequence: Synthetic oligonucleotide
cccguggugggaauggccc

SEQ ID NO: 517423 - RNA, 19 nt, Artificial Sequence
  Description of Artificial Sequence: Synthetic oligonucleotide
gcaauagucacucggcccu

SEQ ID NO: 517424 - RNA, 19 nt, Artificial Sequence
  Description of Artificial Sequence: Synthetic oligonucleotide
cauucagucgagcauggau

SEQ ID NO: 517425 - RNA, 19 nt, Artificial Sequence
  Description of Artificial Sequence: Synthetic oligonucleotide
cuuguggcguuuccuucuc

SEQ ID NO: 517426 - RNA, 19 nt, Artificial Sequence
  Description of Artificial Sequence: Synthetic oligonucleotide
gacgaacuagagaacauuu

SEQ ID NO: 517427 - RNA, 19 nt, Artificial Sequence
  Description of Artificial Sequence: Synthetic oligonucleotide
cuccaguccuauguagaac

SEQ ID NO: 517428 - RNA, 19 nt, Artificial Sequence
  Description of Artificial Sequence: Synthetic oligonucleotide
guagcggggcaguagugaa

SEQ ID NO: 517429 - RNA, 19 nt, Artificial Sequence
  Description of Artificial Sequence: Synthetic oligonucleotide
cuacccaacggcaaagcau

SEQ ID NO: 517430 - RNA, 19 nt, Artificial Sequence
  Description of Artificial Sequence: Synthetic oligonucleotide
cugggcgcggugcaaagca

SEQ ID NO: 517431 - RNA, 19 nt, Artificial Sequence
  Description of Artificial Sequence: Synthetic oligonucleotide
cgcaauagucacucggccc

SEQ ID NO: 517432 - RNA, 19 nt, Artificial Sequence
  Description of Artificial Sequence: Synthetic oligonucleotide
gacugcgcaggcgugagua

SEQ ID NO: 517433 - RNA, 19 nt, Artificial Sequence
  Description of Artificial Sequence: Synthetic oligonucleotide
acgaacuagagaacauuua

SEQ ID NO: 517434 - RNA, 19 nt, Artificial Sequence
  Description of Artificial Sequence: Synthetic oligonucleotide
aacgugcuuugagccgaag

SEQ ID NO: 517435 - RNA, 19 nt, Artificial Sequence
  Description of Artificial Sequence: Synthetic oligonucleotide
cuguccugacugcgcaggc

SEQ ID NO: 517436 - RNA, 19 nt, Artificial Sequence
  Description of Artificial Sequence: Synthetic oligonucleotide
ucgcaugggcuguggccag

SEQ ID NO: 517437 - RNA, 19 nt, Artificial Sequence
  Description of Artificial Sequence: Synthetic oligonucleotide
gcagccgugagacccacuc

SEQ ID NO: 517438 - RNA, 19 nt, Artificial Sequence
  Description of Artificial Sequence: Synthetic oligonucleotide
gugaguauucuuccgcaau

SEQ ID NO: 517439 - RNA, 19 nt, Artificial Sequence
  Description of Artificial Sequence: Synthetic oligonucleotide
agcgggcauucagucgagc

SEQ ID NO: 517440 - RNA, 19 nt, Artificial Sequence
  Description of Artificial Sequence: Synthetic oligonucleotide
gcugagaaagcaagacgug

SEQ ID NO: 517441 - RNA, 19 nt, Artificial Sequence
  Description of Artificial Sequence: Synthetic oligonucleotide
ugggcgcggugcaaagcac

SEQ ID NO: 517442 - RNA, 19 nt, Artificial Sequence
  Description of Artificial Sequence: Synthetic oligonucleotide
gcaggcgugaguauucuuc

SEQ ID NO: 517443 - RNA, 19 nt, Artificial Sequence
  Description of Artificial Sequence: Synthetic oligonucleotide
gucaccggguuucacuuua

SEQ ID NO: 517444 - RNA, 19 nt, Artificial Sequence
  Description of Artificial Sequence: Synthetic oligonucleotide
accggauuggcagcugcca

SEQ ID NO: 517445 - RNA, 19 nt, Artificial Sequence
  Description of Artificial Sequence: Synthetic oligonucleotide
uccggggagaaacgugcuu

SEQ ID NO: 517446 - RNA, 19 nt, Artificial Sequence
  Description of Artificial Sequence: Synthetic oligonucleotide
aggacgggcuugaugauuu

SEQ ID NO: 517447 - RNA, 19 nt, Artificial Sequence
  Description of Artificial Sequence: Synthetic oligonucleotide
uuuucguagcggggcagua

SEQ ID NO: 517448 - RNA, 19 nt, Artificial Sequence
  Description of Artificial Sequence: Synthetic oligonucleotide
ggccagucgaaucagaguu

SEQ ID NO: 517449 - RNA, 19 nt, Artificial Sequence
  Description of Artificial Sequence: Synthetic oligonucleotide
aucccgguuaauggauucu

SEQ ID NO: 517450 - RNA, 19 nt, Artificial Sequence
  Description of Artificial Sequence: Synthetic oligonucleotide
gcucuguauuggugcaucc

SEQ ID NO: 517451 - RNA, 19 nt, Artificial Sequence
  Description of Artificial Sequence: Synthetic oligonucleotide
gcccucagacaccaugacc

SEQ ID NO: 517452 - RNA, 19 nt, Artificial Sequence
  Description of Artificial Sequence: Synthetic oligonucleotide
auacgggccuucgcauggg

SEQ ID NO: 517453 - RNA, 19 nt, Artificial Sequence
  Description of Artificial Sequence: Synthetic oligonucleotide
cugacugcgcaggcgugag

SEQ ID NO: 517454 - RNA, 19 nt, Artificial Sequence
  Description of Artificial Sequence: Synthetic oligonucleotide
cugcacucaccaucuucuc

SEQ ID NO: 517455 - RNA, 19 nt, Artificial Sequence
  Description of Artificial Sequence: Synthetic oligonucleotide
ucaccggguuucacuuuau

SEQ ID NO: 517456 - RNA, 19 nt, Artificial Sequence
  Description of Artificial Sequence: Synthetic oligonucleotide
augagcgggccaacugguc

SEQ ID NO: 517457 - RNA, 19 nt, Artificial Sequence
  Description of Artificial Sequence: Synthetic oligonucleotide
cauaccgcagaagcuggga

SEQ ID NO: 517458 - RNA, 19 nt, Artificial Sequence
  Description of Artificial Sequence: Synthetic oligonucleotide
agcuuucgcaauagucacu

SEQ ID NO: 517459 - RNA, 19 nt, Artificial Sequence
  Description of Artificial Sequence: Synthetic oligonucleotide
gggaauggcccugggcgcg

SEQ ID NO: 517460 - RNA, 19 nt, Artificial Sequence
  Description of Artificial Sequence: Synthetic oligonucleotide
caauagucacucggcccug

SEQ ID NO: 517461 - RNA, 19 nt, Artificial Sequence
  Description of Artificial Sequence: Synthetic oligonucleotide
gcgugaguauucuuccgca

SEQ ID NO: 517462 - RNA, 19 nt, Artificial Sequence
  Description of Artificial Sequence: Synthetic oligonucleotide
ugucaccggguuucacuuu

SEQ ID NO: 517463 - RNA, 19 nt, Artificial Sequence
  Description of Artificial Sequence: Synthetic oligonucleotide
ucgucggucuucggagugu

SEQ ID NO: 517464 - RNA, 19 nt, Artificial Sequence
  Description of Artificial Sequence: Synthetic oligonucleotide
acugcgcaggcgugaguau

SEQ ID NO: 517465 - RNA, 19 nt, Artificial Sequence
  Description of Artificial Sequence: Synthetic oligonucleotide
ugacugcgcaggcgugagu

SEQ ID NO: 517466 - RNA, 19 nt, Artificial Sequence
  Description of Artificial Sequence: Synthetic oligonucleotide
caccggguuucacuuuauc

SEQ ID NO: 517467 - RNA, 19 nt, Artificial Sequence
  Description of Artificial Sequence: Synthetic oligonucleotide
ccuaaggacguggucugag

SEQ ID NO: 517468 - RNA, 19 nt, Artificial Sequence
  Description of Artificial Sequence: Synthetic oligonucleotide
gccacguggauguauuucu

SEQ ID NO: 517469 - RNA, 19 nt, Artificial Sequence
  Description of Artificial Sequence: Synthetic oligonucleotide
agauguccuggcagugucu

SEQ ID NO: 517470 - RNA, 19 nt, Artificial Sequence
  Description of Artificial Sequence: Synthetic oligonucleotide
acguccaagagggccgccu

SEQ ID NO: 517471 - RNA, 19 nt, Artificial Sequence
  Description of Artificial Sequence: Synthetic oligonucleotide
ccagucgaaucagaguuuc

SEQ ID NO: 517472 - RNA, 19 nt, Artificial Sequence
  Description of Artificial Sequence: Synthetic oligonucleotide
cugaaguuauaagggucaa

SEQ ID NO: 517473 - RNA, 19 nt, Artificial Sequence
  Description of Artificial Sequence: Synthetic oligonucleotide
guagccgcccuucuucccu

SEQ ID NO: 517474 - RNA, 19 nt, Artificial Sequence
  Description of Artificial Sequence: Synthetic oligonucleotide
uuccgcaauguaggcugcu

SEQ ID NO: 517475 - RNA, 19 nt, Artificial Sequence
  Description of Artificial Sequence: Synthetic oligonucleotide
accugccauauaccggauu

SEQ ID NO: 517476 - RNA, 19 nt, Artificial Sequence
  Description of Artificial Sequence: Synthetic oligonucleotide
gccguuuucaagcucucgu

SEQ ID NO: 517477 - RNA, 19 nt, Artificial Sequence
  Description of Artificial Sequence: Synthetic oligonucleotide
gcccaauguucuccauagg

SEQ ID NO: 517478 - RNA, 19 nt, Artificial Sequence
  Description of Artificial Sequence: Synthetic oligonucleotide
gucgagcauggaugccagc

SEQ ID NO: 517479 - RNA, 19 nt, Artificial Sequence
  Description of Artificial Sequence: Synthetic oligonucleotide
ggcuguggccagucgaauc

SEQ ID NO: 517480 - RNA, 19 nt, Artificial Sequence
  Description of Artificial Sequence: Synthetic oligonucleotide
gcgggcauucagucgagca

SEQ ID NO: 517481 - RNA, 19 nt, Artificial Sequence
  Description of Artificial Sequence: Synthetic oligonucleotide
ccggguauccugcugguca

SEQ ID NO: 517482 - RNA, 19 nt, Artificial Sequence
  Description of Artificial Sequence: Synthetic oligonucleotide
ggucugagaucucccuauc

SEQ ID NO: 517483 - RNA, 19 nt, Artificial Sequence
  Description of Artificial Sequence: Synthetic oligonucleotide
gcgaggaagcuggccagcg

SEQ ID NO: 517484 - RNA, 19 nt, Artificial Sequence
  Description of Artificial Sequence: Synthetic oligonucleotide
caauguccgugcuguaacu

SEQ ID NO: 517485 - RNA, 19 nt, Artificial Sequence
  Description of Artificial Sequence: Synthetic oligonucleotide
aaacgugcuuugagccgaa

SEQ ID NO: 517486 - RNA, 19 nt, Artificial Sequence
  Description of Artificial Sequence: Synthetic oligonucleotide
gcgguagguccccaccacc

SEQ ID NO: 517487 - RNA, 19 nt, Artificial Sequence
  Description of Artificial Sequence: Synthetic oligonucleotide
ccaggauauccacugaacu

SEQ ID NO: 517488 - RNA, 19 nt, Artificial Sequence
  Description of Artificial Sequence: Synthetic oligonucleotide
gcauccuaaggacgugguc

SEQ ID NO: 517489 - RNA, 19 nt, Artificial Sequence
  Description of Artificial Sequence: Synthetic oligonucleotide
gccauauaccggauuggca

SEQ ID NO: 517490 - RNA, 19 nt, Artificial Sequence
  Description of Artificial Sequence: Synthetic oligonucleotide
cagcgggcauucagucgag

SEQ ID NO: 517491 - RNA, 19 nt, Artificial Sequence
  Description of Artificial Sequence: Synthetic oligonucleotide
cucauacgggccuucgcau

SEQ ID NO: 517492 - RNA, 19 nt, Artificial Sequence
  Description of Artificial Sequence: Synthetic oligonucleotide
gcucucguuccaccccucc

SEQ ID NO: 517493 - RNA, 19 nt, Artificial Sequence
  Description of Artificial Sequence: Synthetic oligonucleotide
gaggugucucaugcucaca

SEQ ID NO: 517494 - RNA, 19 nt, Artificial Sequence
  Description of Artificial Sequence: Synthetic oligonucleotide
ggauucugugaggugucuc

SEQ ID NO: 517495 - RNA, 19 nt, Artificial Sequence
  Description of Artificial Sequence: Synthetic oligonucleotide
cguccacagagcgaggaag

SEQ ID NO: 517496 - RNA, 19 nt, Artificial Sequence
  Description of Artificial Sequence: Synthetic oligonucleotide
gcugccguuuucaagcucu

SEQ ID NO: 517497 - RNA, 19 nt, Artificial Sequence
  Description of Artificial Sequence: Synthetic oligonucleotide
ggcagugucugagcucaug

SEQ ID NO: 517498 - RNA, 19 nt, Artificial Sequence
  Description of Artificial Sequence: Synthetic oligonucleotide
cugucaccggguuucacuu

SEQ ID NO: 517499 - RNA, 19 nt, Artificial Sequence
  Description of Artificial Sequence: Synthetic oligonucleotide
ggccacguggauguauuuc

SEQ ID NO: 517500 - RNA, 19 nt, Artificial Sequence
  Description of Artificial Sequence: Synthetic oligonucleotide
uccggguauccugcugguc

SEQ ID NO: 517501 - RNA, 19 nt, Artificial Sequence
  Description of Artificial Sequence: Synthetic oligonucleotide
ggcaucagucuuccuccuc

SEQ ID NO: 517502 - RNA, 19 nt, Artificial Sequence
  Description of Artificial Sequence: Synthetic oligonucleotide
ccuucgcaugggcuguggc

SEQ ID NO: 517503 - RNA, 19 nt, Artificial Sequence
  Description of Artificial Sequence: Synthetic oligonucleotide
gcgacgcuccccuguuucc

SEQ ID NO: 517504 - RNA, 19 nt, Artificial Sequence
  Description of Artificial Sequence: Synthetic oligonucleotide
agcgccgcucuauggucuu

SEQ ID NO: 517505 - RNA, 19 nt, Artificial Sequence
  Description of Artificial Sequence: Synthetic oligonucleotide
gcuaugucgucagcagaga

SEQ ID NO: 517506 - RNA, 19 nt, Artificial Sequence
  Description of Artificial Sequence: Synthetic oligonucleotide
gucggucuucggagugugc

SEQ ID NO: 517507 - RNA, 19 nt, Artificial Sequence
  Description of Artificial Sequence: Synthetic oligonucleotide
gccgccuugaaagccuuca

SEQ ID NO: 517508 - RNA, 19 nt, Artificial Sequence
  Description of Artificial Sequence: Synthetic oligonucleotide
ggcaaucaggacgguccug

SEQ ID NO: 517509 - RNA, 19 nt, Artificial Sequence
  Description of Artificial Sequence: Synthetic oligonucleotide
uggcgacagaggggucacc

SEQ ID NO: 517510 - RNA, 19 nt, Artificial Sequence
  Description of Artificial Sequence: Synthetic oligonucleotide
ccgcaauguaggcugcuga

SEQ ID NO: 517511 - RNA, 19 nt, Artificial Sequence
  Description of Artificial Sequence: Synthetic oligonucleotide
gccgugagacccacuccag

SEQ ID NO: 517512 - RNA, 19 nt, Artificial Sequence
  Description of Artificial Sequence: Synthetic oligonucleotide
gcggugcaaagcacauacc

SEQ ID NO: 517513 - RNA, 19 nt, Artificial Sequence
  Description of Artificial Sequence: Synthetic oligonucleotide
cugguaucaggacgggcuu

SEQ ID NO: 517514 - RNA, 19 nt, Artificial Sequence
  Description of Artificial Sequence: Synthetic oligonucleotide
cgugggauaaacagaacuu

SEQ ID NO: 517515 - RNA, 19 nt, Artificial Sequence
  Description of Artificial Sequence: Synthetic oligonucleotide
gcaagacgugagaguccgg

SEQ ID NO: 517516 - RNA, 19 nt, Artificial Sequence
  Description of Artificial Sequence: Synthetic oligonucleotide
ggacgaacuagagaacauu

SEQ ID NO: 517517 - RNA, 19 nt, Artificial Sequence
  Description of Artificial Sequence: Synthetic oligonucleotide
ggcugccguuuucaagcuc

SEQ ID NO: 517518 - RNA, 19 nt, Artificial Sequence
  Description of Artificial Sequence: Synthetic oligonucleotide
cacguccaagagggccgcc

SEQ ID NO: 517519 - RNA, 19 nt, Artificial Sequence
  Description of Artificial Sequence: Synthetic oligonucleotide
ggcgacagaggggucaccu

SEQ ID NO: 517520 - RNA, 19 nt, Artificial Sequence
  Description of Artificial Sequence: Synthetic oligonucleotide
agacagcgguaggucccca

SEQ ID NO: 517521 - RNA, 19 nt, Artificial Sequence
  Description of Artificial Sequence: Synthetic oligonucleotide
gccuucgcaugggcugugg

SEQ ID NO: 517522 - RNA, 19 nt, Artificial Sequence
  Description of Artificial Sequence: Synthetic oligonucleotide
gggcgcggugcaaagcaca

SEQ ID NO: 517523 - RNA, 19 nt, Artificial Sequence
  Description of Artificial Sequence: Synthetic oligonucleotide
aggcgacgcuccccuguuu

SEQ ID NO: 517524 - RNA, 19 nt, Artificial Sequence
  Description of Artificial Sequence: Synthetic oligonucleotide
cgugaguauucuuccgcaa

SEQ ID NO: 517525 - RNA, 19 nt, Artificial Sequence
  Description of Artificial Sequence: Synthetic oligonucleotide
ggauugccuucuucacgua

SEQ ID NO: 517526 - RNA, 19 nt, Artificial Sequence
  Description of Artificial Sequence: Synthetic oligonucleotide
ccugggcgcggugcaaagc

SEQ ID NO: 517527 - RNA, 19 nt, Artificial Sequence
  Description of Artificial Sequence: Synthetic oligonucleotide
ccaggguagugagaucaga

SEQ ID NO: 517528 - RNA, 19 nt, Artificial Sequence
  Description of Artificial Sequence: Synthetic oligonucleotide
gggcaguagugaacacuuc

SEQ ID NO: 517529 - RNA, 19 nt, Artificial Sequence
  Description of Artificial Sequence: Synthetic oligonucleotide
ccgugagacccacuccaga

SEQ ID NO: 517530 - RNA, 19 nt, Artificial Sequence
  Description of Artificial Sequence: Synthetic oligonucleotide
gggacgaacuagagaacau

SEQ ID NO: 517531 - RNA, 19 nt, Artificial Sequence
  Description of Artificial Sequence: Synthetic oligonucleotide
caccuaugaggagaauauu

SEQ ID NO: 517532 - RNA, 19 nt, Artificial Sequence
  Description of Artificial Sequence: Synthetic oligonucleotide
ccgugcuguaacuggagau

SEQ ID NO: 517533 - RNA, 19 nt, Artificial Sequence
  Description of Artificial Sequence: Synthetic oligonucleotide
ccggauuggcagcugccaa

SEQ ID NO: 517534 - RNA, 19 nt, Artificial Sequence
  Description of Artificial Sequence: Synthetic oligonucleotide
ccugacugcgcaggcguga

SEQ ID NO: 517535 - RNA, 19 nt, Artificial Sequence
  Description of Artificial Sequence: Synthetic oligonucleotide
agcagccgugagacccacu

SEQ ID NO: 517536 - RNA, 19 nt, Artificial Sequence
  Description of Artificial Sequence: Synthetic oligonucleotide
cguggauguauuucuucau

SEQ ID NO: 517537 - RNA, 19 nt, Artificial Sequence
  Description of Artificial Sequence: Synthetic oligonucleotide
cggcccguggugggaaugg

SEQ ID NO: 517538 - RNA, 19 nt, Artificial Sequence
  Description of Artificial Sequence: Synthetic oligonucleotide
caggacgggcuugaugauu

SEQ ID NO: 517539 - RNA, 19 nt, Artificial Sequence
  Description of Artificial Sequence: Synthetic oligonucleotide
cguggucugagaucucccu

SEQ ID NO: 517540 - RNA, 19 nt, Artificial Sequence
  Description of Artificial Sequence: Synthetic oligonucleotide
ccagaucaucgucuagaau

SEQ ID NO: 517541 - RNA, 19 nt, Artificial Sequence
  Description of Artificial Sequence: Synthetic oligonucleotide
ccacggauguggcugccgu

SEQ ID NO: 517542 - RNA, 19 nt, Artificial Sequence
  Description of Artificial Sequence: Synthetic oligonucleotide
caggcgacgcuccccuguu

SEQ ID NO: 517543 - RNA, 19 nt, Artificial Sequence
  Description of Artificial Sequence: Synthetic oligonucleotide
ggcgcggugcaaagcacau

SEQ ID NO: 517544 - RNA, 19 nt, Artificial Sequence
  Description of Artificial Sequence: Synthetic oligonucleotide
gccagucgaaucagaguuu

SEQ ID NO: 517545 - RNA, 19 nt, Artificial Sequence
  Description of Artificial Sequence: Synthetic oligonucleotide
ccacguggauguauuucuu

SEQ ID NO: 517546 - RNA, 19 nt, Artificial Sequence
  Description of Artificial Sequence: Synthetic oligonucleotide
ccggcccguggugggaaug

SEQ ID NO: 517547 - RNA, 19 nt, Artificial Sequence
  Description of Artificial Sequence: Synthetic oligonucleotide
ggccgccuugaaagccuuc

SEQ ID NO: 517548 - RNA, 19 nt, Artificial Sequence
  Description of Artificial Sequence: Synthetic oligonucleotide
ccguggugggaauggcccu

SEQ ID NO: 517549 - RNA, 19 nt, Artificial Sequence
  Description of Artificial Sequence: Synthetic oligonucleotide
gcgcggugcaaagcacaua

SEQ ID NO: 517550 - RNA, 19 nt, Artificial Sequence
  Description of Artificial Sequence: Synthetic oligonucleotide
cggguauccugcuggucau

SEQ ID NO: 517551 - RNA, 19 nt, Artificial Sequence
  Description of Artificial Sequence: Synthetic oligonucleotide
ccccauccguggcaucagu

SEQ ID NO: 517552 - RNA, 19 nt, Artificial Sequence
  Description of Artificial Sequence: Synthetic oligonucleotide
cgacgcuccccuguuuccu

SEQ ID NO: 517553 - RNA, 19 nt, Artificial Sequence
  Description of Artificial Sequence: Synthetic oligonucleotide
cggauguggcugccguuuu

SEQ ID NO: 517554 - RNA, 19 nt, Artificial Sequence
  Description of Artificial Sequence: Synthetic oligonucleotide
ccguggcaucagucuuccu

SEQ ID NO: 517555 - RNA, 19 nt, Artificial Sequence
  Description of Artificial Sequence: Synthetic oligonucleotide
cgccgcucuauggucuuuu

SEQ ID NO: 517556 - RNA, 19 nt, Artificial Sequence
  Description of Artificial Sequence: Synthetic oligonucleotide
cccggcccguggugggaau

SEQ ID NO: 517557 - RNA, 19 nt, Artificial Sequence
  Description of Artificial Sequence: Synthetic oligonucleotide
gcgccgcucuauggucuuu

SEQ ID NO: 517558 - RNA, 19 nt, Artificial Sequence
  Description of Artificial Sequence: Synthetic oligonucleotide
aauuauaccauucuugggc

SEQ ID NO: 517559 - RNA, 19 nt, Artificial Sequence
  Description of Artificial Sequence: Synthetic oligonucleotide
aguuuaauccagcagaucc

SEQ ID NO: 517560 - RNA, 19 nt, Artificial Sequence
  Description of Artificial Sequence: Synthetic oligonucleotide
uagacauaaaguaauaacg

SEQ ID NO: 517561 - RNA, 19 nt, Artificial Sequence
  Description of Artificial Sequence: Synthetic oligonucleotide
aaaucuuuucucuagcuac

SEQ ID NO: 517562 - RNA, 19 nt, Artificial Sequence
  Description of Artificial Sequence: Synthetic oligonucleotide
auaaagaguaucuucauac

SEQ ID NO: 517563 - RNA, 19 nt, Artificial Sequence
  Description of Artificial Sequence: Synthetic oligonucleotide
uuugacuuaaacauaauuc

SEQ ID NO: 517564 - RNA, 19 nt, Artificial Sequence
  Description of Artificial Sequence: Synthetic oligonucleotide
aucaagugaaaccaguugc

SEQ ID NO: 517565 - RNA, 19 nt, Artificial Sequence
  Description of Artificial Sequence: Synthetic oligonucleotide
acuacugaacuacagaaac

SEQ ID NO: 517566 - RNA, 19 nt, Artificial Sequence
  Description of Artificial Sequence: Synthetic oligonucleotide
uugacuuaaacauaauucc

SEQ ID NO: 517567 - RNA, 19 nt, Artificial Sequence
  Description of Artificial Sequence: Synthetic oligonucleotide
uuuaaaucuuccaagccag

SEQ ID NO: 517568 - RNA, 19 nt, Artificial Sequence
  Description of Artificial Sequence: Synthetic oligonucleotide
aacauaagcauccacaaau

SEQ ID NO: 517569 - RNA, 19 nt, Artificial Sequence
  Description of Artificial Sequence: Synthetic oligonucleotide
uuaaacauaauuccccugc

SEQ ID NO: 517570 - RNA, 19 nt, Artificial Sequence
  Description of Artificial Sequence: Synthetic oligonucleotide
acuaauucauugucuaucc

SEQ ID NO: 517571 - RNA, 19 nt, Artificial Sequence
  Description of Artificial Sequence: Synthetic oligonucleotide
aauuuuagcaauuggagua

SEQ ID NO: 517572 - RNA, 19 nt, Artificial Sequence
  Description of Artificial Sequence: Synthetic oligonucleotide
uaaaguaauaacgggaccg

SEQ ID NO: 517573 - RNA, 19 nt, Artificial Sequence
  Description of Artificial Sequence: Synthetic oligonucleotide
cuagaaaaccacaagagac

SEQ ID NO: 517574 - RNA, 19 nt, Artificial Sequence
  Description of Artificial Sequence: Synthetic oligonucleotide
ugcaucacaaucuauaugu

SEQ ID NO: 517575 - RNA, 19 nt, Artificial Sequence
  Description of Artificial Sequence: Synthetic oligonucleotide
uguauaccacucaugaacg

SEQ ID NO: 517576 - RNA, 19 nt, Artificial Sequence
  Description of Artificial Sequence: Synthetic oligonucleotide
ugaauaaucgccccuguag

SEQ ID NO: 517577 - RNA, 19 nt, Artificial Sequence
  Description of Artificial Sequence: Synthetic oligonucleotide
uaucuagaaaaccacaaga

SEQ ID NO: 517578 - RNA, 19 nt, Artificial Sequence
  Description of Artificial Sequence: Synthetic oligonucleotide
gacauaaaguaauaacggg

SEQ ID NO: 517579 - RNA, 19 nt, Artificial Sequence
  Description of Artificial Sequence: Synthetic oligonucleotide
cauacuuuaacaguuagag

SEQ ID NO: 517580 - RNA, 19 nt, Artificial Sequence
  Description of Artificial Sequence: Synthetic oligonucleotide
ucuaucauaaagaguaucu

SEQ ID NO: 517581 - RNA, 19 nt, Artificial Sequence
  Description of Artificial Sequence: Synthetic oligonucleotide
aggcuuuacauucaguagc

SEQ ID NO: 517582 - RNA, 19 nt, Artificial Sequence
  Description of Artificial Sequence: Synthetic oligonucleotide
uguuguaugugucuuucgg

SEQ ID NO: 517583 - RNA, 19 nt, Artificial Sequence
  Description of Artificial Sequence: Synthetic oligonucleotide
caaacuaaaaccuucauaa

SEQ ID NO: 517584 - RNA, 19 nt, Artificial Sequence
  Description of Artificial Sequence: Synthetic oligonucleotide
uguuuaaucaccccauagc

SEQ ID NO: 517585 - RNA, 19 nt, Artificial Sequence
  Description of Artificial Sequence: Synthetic oligonucleotide
aagcuuacaaucuacugca

SEQ ID NO: 517586 - RNA, 19 nt, Artificial Sequence
  Description of Artificial Sequence: Synthetic oligonucleotide
uaaauguuguauuuauaag

SEQ ID NO: 517587 - RNA, 19 nt, Artificial Sequence
  Description of Artificial Sequence: Synthetic oligonucleotide
gauauuuuguauccgcugc

SEQ ID NO: 517588 - RNA, 19 nt, Artificial Sequence
  Description of Artificial Sequence: Synthetic oligonucleotide
auaaaguaauaacgggacc

SEQ ID NO: 517589 - RNA, 19 nt, Artificial Sequence
  Description of Artificial Sequence: Synthetic oligonucleotide
acagcaugcauccacuagc

SEQ ID NO: 517590 - RNA, 19 nt, Artificial Sequence
  Description of Artificial Sequence: Synthetic oligonucleotide
cauaaaguaauaacgggac

SEQ ID NO: 517591 - RNA, 19 nt, Artificial Sequence
  Description of Artificial Sequence: Synthetic oligonucleotide
ugcaacuugcuucaaaagc

SEQ ID NO: 517592 - RNA, 19 nt, Artificial Sequence
  Description of Artificial Sequence: Synthetic oligonucleotide
gguguuauuaauuauacca

SEQ ID NO: 517593 - RNA, 19 nt, Artificial Sequence
  Description of Artificial Sequence: Synthetic oligonucleotide
cuggccauuccauagaugg

SEQ ID NO: 517594 - RNA, 19 nt, Artificial Sequence
  Description of Artificial Sequence: Synthetic oligonucleotide
ucaagugaaaccaguugcg

SEQ ID NO: 517595 - RNA, 19 nt, Artificial Sequence
  Description of Artificial Sequence: Synthetic oligonucleotide
ggagaauuaauucaaguag

SEQ ID NO: 517596 - RNA, 19 nt, Artificial Sequence
  Description of Artificial Sequence: Synthetic oligonucleotide
uacaugaguucuuugauca

SEQ ID NO: 517597 - RNA, 19 nt, Artificial Sequence
  Description of Artificial Sequence: Synthetic oligonucleotide
ucgaaugcuaagcaguuag

SEQ ID NO: 517598 - RNA, 19 nt, Artificial Sequence
  Description of Artificial Sequence: Synthetic oligonucleotide
uucauaauugucgagggcc

SEQ ID NO: 517599 - RNA, 19 nt, Artificial Sequence
  Description of Artificial Sequence: Synthetic oligonucleotide
cuuguagagagccaguggg

SEQ ID NO: 517600 - RNA, 19 nt, Artificial Sequence
  Description of Artificial Sequence: Synthetic oligonucleotide
aauguuguauuuauaagga

SEQ ID NO: 517601 - RNA, 19 nt, Artificial Sequence
  Description of Artificial Sequence: Synthetic oligonucleotide
uccaucaagacucaaggcu

SEQ ID NO: 517602 - RNA, 19 nt, Artificial Sequence
  Description of Artificial Sequence: Synthetic oligonucleotide
uuaucgaaugcuaagcagu

SEQ ID NO: 517603 - RNA, 19 nt, Artificial Sequence
  Description of Artificial Sequence: Synthetic oligonucleotide
uuaggauucaaaagucucc

SEQ ID NO: 517604 - RNA, 19 nt, Artificial Sequence
  Description of Artificial Sequence: Synthetic oligonucleotide
aaugcaacuugcuucaaaa

SEQ ID NO: 517605 - RNA, 19 nt, Artificial Sequence
  Description of Artificial Sequence: Synthetic oligonucleotide
aauugaggcagaaagucuc

SEQ ID NO: 517606 - RNA, 19 nt, Artificial Sequence
  Description of Artificial Sequence: Synthetic oligonucleotide
aaaaccacaagagacugug

SEQ ID NO: 517607 - RNA, 19 nt, Artificial Sequence
  Description of Artificial Sequence: Synthetic oligonucleotide
auuaauucaaguagcaaag

SEQ ID NO: 517608 - RNA, 19 nt, Artificial Sequence
  Description of Artificial Sequence: Synthetic oligonucleotide
agcaaaauccaauccacuc

SEQ ID NO: 517609 - RNA, 19 nt, Artificial Sequence
  Description of Artificial Sequence: Synthetic oligonucleotide
guggagaucaaccacagug

SEQ ID NO: 517610 - RNA, 19 nt, Artificial Sequence
  Description of Artificial Sequence: Synthetic oligonucleotide
aaaugggucuacuaauuca

SEQ ID NO: 517611 - RNA, 19 nt, Artificial Sequence
  Description of Artificial Sequence: Synthetic oligonucleotide
agacauaaaguaauaacgg

SEQ ID NO: 517612 - RNA, 19 nt, Artificial Sequence
  Description of Artificial Sequence: Synthetic oligonucleotide
ugcugcuauauuuagggag

SEQ ID NO: 517613 - RNA, 19 nt, Artificial Sequence
  Description of Artificial Sequence: Synthetic oligonucleotide
aaucuacugcaguuuaauc

SEQ ID NO: 517614 - RNA, 19 nt, Artificial Sequence
  Description of Artificial Sequence: Synthetic oligonucleotide
cuguauaccacucaugaac

SEQ ID NO: 517615 - RNA, 19 nt, Artificial Sequence
  Description of Artificial Sequence: Synthetic oligonucleotide
uuuaggauucaaaagucuc

SEQ ID NO: 517616 - RNA, 19 nt, Artificial Sequence
  Description of Artificial Sequence: Synthetic oligonucleotide
ucuuugaucauguaggauu

SEQ ID NO: 517617 - RNA, 19 nt, Artificial Sequence
  Description of Artificial Sequence: Synthetic oligonucleotide
ugugagucuugauaguagg

SEQ ID NO: 517618 - RNA, 19 nt, Artificial Sequence
  Description of Artificial Sequence: Synthetic oligonucleotide
guagacauaaaguaauaac

SEQ ID NO: 517619 - RNA, 19 nt, Artificial Sequence
  Description of Artificial Sequence: Synthetic oligonucleotide
agugaaaccaguugcgcuc

SEQ ID NO: 517620 - RNA, 19 nt, Artificial Sequence
  Description of Artificial Sequence: Synthetic oligonucleotide
agacugugagucuugauag

SEQ ID NO: 517621 - RNA, 19 nt, Artificial Sequence
  Description of Artificial Sequence: Synthetic oligonucleotide
cuugguguaaaacaaaaca

SEQ ID NO: 517622 - RNA, 19 nt, Artificial Sequence
  Description of Artificial Sequence: Synthetic oligonucleotide
uuacuacugaacuacagaa

SEQ ID NO: 517623 - RNA, 19 nt, Artificial Sequence
  Description of Artificial Sequence: Synthetic oligonucleotide
aaaaucagcauuacaugag

SEQ ID NO: 517624 - RNA, 19 nt, Artificial Sequence
  Description of Artificial Sequence: Synthetic oligonucleotide
caugauauuuuguauccgc

SEQ ID NO: 517625 - RNA, 19 nt, Artificial Sequence
  Description of Artificial Sequence: Synthetic oligonucleotide
agcagaucccaacacauuc

SEQ ID NO: 517626 - RNA, 19 nt, Artificial Sequence
  Description of Artificial Sequence: Synthetic oligonucleotide
aucuauauguacuucauuu

SEQ ID NO: 517627 - RNA, 19 nt, Artificial Sequence
  Description of Artificial Sequence: Synthetic oligonucleotide
aucagcauuacaugaguuc

SEQ ID NO: 517628 - RNA, 19 nt, Artificial Sequence
  Description of Artificial Sequence: Synthetic oligonucleotide
uccuuuaaaucuuccaagc

SEQ ID NO: 517629 - RNA, 19 nt, Artificial Sequence
  Description of Artificial Sequence: Synthetic oligonucleotide
aguagcaaagacaaggaag

SEQ ID NO: 517630 - RNA, 19 nt, Artificial Sequence
  Description of Artificial Sequence: Synthetic oligonucleotide
ucuuaucgaaugcuaagca

SEQ ID NO: 517631 - RNA, 19 nt, Artificial Sequence
  Description of Artificial Sequence: Synthetic oligonucleotide
auuaacauaagcauccaca

SEQ ID NO: 517632 - RNA, 19 nt, Artificial Sequence
  Description of Artificial Sequence: Synthetic oligonucleotide
aacuaccaaauuuauugga

SEQ ID NO: 517633 - RNA, 19 nt, Artificial Sequence
  Description of Artificial Sequence: Synthetic oligonucleotide
aaaucuacauuccuuccau

SEQ ID NO: 517634 - RNA, 19 nt, Artificial Sequence
  Description of Artificial Sequence: Synthetic oligonucleotide
uuaaucaccccauagcuuu

SEQ ID NO: 517635 - RNA, 19 nt, Artificial Sequence
  Description of Artificial Sequence: Synthetic oligonucleotide
ugaacggagacuuggaaaa

SEQ ID NO: 517636 - RNA, 19 nt, Artificial Sequence
  Description of Artificial Sequence: Synthetic oligonucleotide
cauacuaaagccaaguuua

SEQ ID NO: 517637 - RNA, 19 nt, Artificial Sequence
  Description of Artificial Sequence: Synthetic oligonucleotide
gcuaacaacacacaugcag

SEQ ID NO: 517638 - RNA, 19 nt, Artificial Sequence
  Description of Artificial Sequence: Synthetic oligonucleotide
uggagaauuaauucaagua

SEQ ID NO: 517639 - RNA, 19 nt, Artificial Sequence
  Description of Artificial Sequence: Synthetic oligonucleotide
acuaaagccaaguuuacua

SEQ ID NO: 517640 - RNA, 19 nt, Artificial Sequence
  Description of Artificial Sequence: Synthetic oligonucleotide
cucaggccaaacuaaaacc

SEQ ID NO: 517641 - RNA, 19 nt, Artificial Sequence
  Description of Artificial Sequence: Synthetic oligonucleotide
cuuaucgaaugcuaagcag

SEQ ID NO: 517642 - RNA, 19 nt, Artificial Sequence
  Description of Artificial Sequence: Synthetic oligonucleotide
guuguaugugucuuucggg

SEQ ID NO: 517643 - RNA, 19 nt, Artificial Sequence
  Description of Artificial Sequence: Synthetic oligonucleotide
uguauccgcugcaaugugg

SEQ ID NO: 517644 - RNA, 19 nt, Artificial Sequence
  Description of Artificial Sequence: Synthetic oligonucleotide
uaaucgccccuguagacgg

SEQ ID NO: 517645 - RNA, 19 nt, Artificial Sequence
  Description of Artificial Sequence: Synthetic oligonucleotide
uagauagcuaguccacagg

SEQ ID NO: 517646 - RNA, 19 nt, Artificial Sequence
  Description of Artificial Sequence: Synthetic oligonucleotide
uauuuagggaggucaagca

SEQ ID NO: 517647 - RNA, 19 nt, Artificial Sequence
  Description of Artificial Sequence: Synthetic oligonucleotide
auuauaccauucuugggca

SEQ ID NO: 517648 - RNA, 19 nt, Artificial Sequence
  Description of Artificial Sequence: Synthetic oligonucleotide
aagugaaaccaguugcgcu

SEQ ID NO: 517649 - RNA, 19 nt, Artificial Sequence
  Description of Artificial Sequence: Synthetic oligonucleotide
accuucauaauugucgagg

SEQ ID NO: 517650 - RNA, 19 nt, Artificial Sequence
  Description of Artificial Sequence: Synthetic oligonucleotide
ucuagaaguucuugaagac

SEQ ID NO: 517651 - RNA, 19 nt, Artificial Sequence
  Description of Artificial Sequence: Synthetic oligonucleotide
aucuagaaaaccacaagag

SEQ ID NO: 517652 - RNA, 19 nt, Artificial Sequence
  Description of Artificial Sequence: Synthetic oligonucleotide
uucuuaucgaaugcuaagc

SEQ ID NO: 517653 - RNA, 19 nt, Artificial Sequence
  Description of Artificial Sequence: Synthetic oligonucleotide
ugggucuacuaauucauug

SEQ ID NO: 517654 - RNA, 19 nt, Artificial Sequence
  Description of Artificial Sequence: Synthetic oligonucleotide
ucauacuuuaacaguuaga

SEQ ID NO: 517655 - RNA, 19 nt, Artificial Sequence
  Description of Artificial Sequence: Synthetic oligonucleotide
aauaacgggaccgcggugu

SEQ ID NO: 517656 - RNA, 19 nt, Artificial Sequence
  Description of Artificial Sequence: Synthetic oligonucleotide
ucaaucagucaucucggca

SEQ ID NO: 517657 - RNA, 19 nt, Artificial Sequence
  Description of Artificial Sequence: Synthetic oligonucleotide
uguuauuaauuauaccauu

SEQ ID NO: 517658 - RNA, 19 nt, Artificial Sequence
  Description of Artificial Sequence: Synthetic oligonucleotide
ugggaauccggucacugcc

SEQ ID NO: 517659 - RNA, 19 nt, Artificial Sequence
  Description of Artificial Sequence: Synthetic oligonucleotide
ugaucauguaggauuuucu

SEQ ID NO: 517660 - RNA, 19 nt, Artificial Sequence
  Description of Artificial Sequence: Synthetic oligonucleotide
guagauagcuaguccacag

SEQ ID NO: 517661 - RNA, 19 nt, Artificial Sequence
  Description of Artificial Sequence: Synthetic oligonucleotide
agauagcuaguccacaggu

SEQ ID NO: 517662 - RNA, 19 nt, Artificial Sequence
  Description of Artificial Sequence: Synthetic oligonucleotide
ugccaaucaagugaaacca

SEQ ID NO: 517663 - RNA, 19 nt, Artificial Sequence
  Description of Artificial Sequence: Synthetic oligonucleotide
uaaaugggucuacuaauuc

SEQ ID NO: 517664 - RNA, 19 nt, Artificial Sequence
  Description of Artificial Sequence: Synthetic oligonucleotide
uuauuggauaauagugaac

SEQ ID NO: 517665 - RNA, 19 nt, Artificial Sequence
  Description of Artificial Sequence: Synthetic oligonucleotide
aaacuaaaaccuucauaau

SEQ ID NO: 517666 - RNA, 19 nt, Artificial Sequence
  Description of Artificial Sequence: Synthetic oligonucleotide
ugacagcuccuuuaaaucu

SEQ ID NO: 517667 - RNA, 19 nt, Artificial Sequence
  Description of Artificial Sequence: Synthetic oligonucleotide
gguaucauggcuaacaaca

SEQ ID NO: 517668 - RNA, 19 nt, Artificial Sequence
  Description of Artificial Sequence: Synthetic oligonucleotide
ccaauuuuagcaauuggag

SEQ ID NO: 517669 - RNA, 19 nt, Artificial Sequence
  Description of Artificial Sequence: Synthetic oligonucleotide
agagggaacucauggaaug

SEQ ID NO: 517670 - RNA, 19 nt, Artificial Sequence
  Description of Artificial Sequence: Synthetic oligonucleotide
ugcaagacuggccauucca

SEQ ID NO: 517671 - RNA, 19 nt, Artificial Sequence
  Description of Artificial Sequence: Synthetic oligonucleotide
ugcgcucuacaaaacaugu

SEQ ID NO: 517672 - RNA, 19 nt, Artificial Sequence
  Description of Artificial Sequence: Synthetic oligonucleotide
gaauaaucgccccuguaga

SEQ ID NO: 517673 - RNA, 19 nt, Artificial Sequence
  Description of Artificial Sequence: Synthetic oligonucleotide
uaaaucuuccaagccaggc

SEQ ID NO: 517674 - RNA, 19 nt, Artificial Sequence
  Description of Artificial Sequence: Synthetic oligonucleotide
auaagcauccacaaauucu

SEQ ID NO: 517675 - RNA, 19 nt, Artificial Sequence
  Description of Artificial Sequence: Synthetic oligonucleotide
aagcaagguaaaugggucu

SEQ ID NO: 517676 - RNA, 19 nt, Artificial Sequence
  Description of Artificial Sequence: Synthetic oligonucleotide
gguuaugccaaucaaguga

SEQ ID NO: 517677 - RNA, 19 nt, Artificial Sequence
  Description of Artificial Sequence: Synthetic oligonucleotide
ucuauauguacuucauuuu

SEQ ID NO: 517678 - RNA, 19 nt, Artificial Sequence
  Description of Artificial Sequence: Synthetic oligonucleotide
uacuaauucauugucuauc

SEQ ID NO: 517679 - RNA, 19 nt, Artificial Sequence
  Description of Artificial Sequence: Synthetic oligonucleotide
uuuaauccagcagauccca

SEQ ID NO: 517680 - RNA, 19 nt, Artificial Sequence
  Description of Artificial Sequence: Synthetic oligonucleotide
aaguaauaacgggaccgcg

SEQ ID NO: 517681 - RNA, 19 nt, Artificial Sequence
  Description of Artificial Sequence: Synthetic oligonucleotide
aguaauaacgggaccgcgg

SEQ ID NO: 517682 - RNA, 19 nt, Artificial Sequence
  Description of Artificial Sequence: Synthetic oligonucleotide
ucauaauugucgagggccu

SEQ ID NO: 517683 - RNA, 19 nt, Artificial Sequence
  Description of Artificial Sequence: Synthetic oligonucleotide
auagcuaguccacagguua

SEQ ID NO: 517684 - RNA, 19 nt, Artificial Sequence
  Description of Artificial Sequence: Synthetic oligonucleotide
ucuagagggaacucaugga

SEQ ID NO: 517685 - RNA, 19 nt, Artificial Sequence
  Description of Artificial Sequence: Synthetic oligonucleotide
gacaagggacaacagguac

SEQ ID NO: 517686 - RNA, 19 nt, Artificial Sequence
  Description of Artificial Sequence: Synthetic oligonucleotide
uuacaugaguucuuugauc

SEQ ID NO: 517687 - RNA, 19 nt, Artificial Sequence
  Description of Artificial Sequence: Synthetic oligonucleotide
gucuauccagguaucaugg

SEQ ID NO: 517688 - RNA, 19 nt, Artificial Sequence
  Description of Artificial Sequence: Synthetic oligonucleotide
gaaugcuaagcaguuagac

SEQ ID NO: 517689 - RNA, 19 nt, Artificial Sequence
  Description of Artificial Sequence: Synthetic oligonucleotide
cucaugaacggagacuugg

SEQ ID NO: 517690 - RNA, 19 nt, Artificial Sequence
  Description of Artificial Sequence: Synthetic oligonucleotide
agguaucauggcuaacaac

SEQ ID NO: 517691 - RNA, 19 nt, Artificial Sequence
  Description of Artificial Sequence: Synthetic oligonucleotide
guagacggcagucucuucc

SEQ ID NO: 517692 - RNA, 19 nt, Artificial Sequence
  Description of Artificial Sequence: Synthetic oligonucleotide
aaugggucuacuaauucau

SEQ ID NO: 517693 - RNA, 19 nt, Artificial Sequence
  Description of Artificial Sequence: Synthetic oligonucleotide
uuguagauagcuaguccac

SEQ ID NO: 517694 - RNA, 19 nt, Artificial Sequence
  Description of Artificial Sequence: Synthetic oligonucleotide
acacauguauuuauuugac

SEQ ID NO: 517695 - RNA, 19 nt, Artificial Sequence
  Description of Artificial Sequence: Synthetic oligonucleotide
aaucuauauguacuucauu

SEQ ID NO: 517696 - RNA, 19 nt, Artificial Sequence
  Description of Artificial Sequence: Synthetic oligonucleotide
ugggcuacaacaagccaug

SEQ ID NO: 517697 - RNA, 19 nt, Artificial Sequence
  Description of Artificial Sequence: Synthetic oligonucleotide
uuagcaauuggaguaacuu

SEQ ID NO: 517698 - RNA, 19 nt, Artificial Sequence
  Description of Artificial Sequence: Synthetic oligonucleotide
uuuaaucaccccauagcuu

SEQ ID NO: 517699 - RNA, 19 nt, Artificial Sequence
  Description of Artificial Sequence: Synthetic oligonucleotide
uaggauucaaaagucucca

SEQ ID NO: 517700 - RNA, 19 nt, Artificial Sequence
  Description of Artificial Sequence: Synthetic oligonucleotide
auaaucgccccuguagacg

SEQ ID NO: 517701 - RNA, 19 nt, Artificial Sequence
  Description of Artificial Sequence: Synthetic oligonucleotide
uauaccacucaugaacgga

SEQ ID NO: 517702 - RNA, 19 nt, Artificial Sequence
  Description of Artificial Sequence: Synthetic oligonucleotide
aaccuucauaauugucgag

SEQ ID NO: 517703 - RNA, 19 nt, Artificial Sequence
  Description of Artificial Sequence: Synthetic oligonucleotide
aauccacucccauacuaaa

SEQ ID NO: 517704 - RNA, 19 nt, Artificial Sequence
  Description of Artificial Sequence: Synthetic oligonucleotide
uugcgcucuacaaaacaug

SEQ ID NO: 517705 - RNA, 19 nt, Artificial Sequence
  Description of Artificial Sequence: Synthetic oligonucleotide
gagacugugagucuugaua

SEQ ID NO: 517706 - RNA, 19 nt, Artificial Sequence
  Description of Artificial Sequence: Synthetic oligonucleotide
uacaaucuacugcaguuua

SEQ ID NO: 517707 - RNA, 19 nt, Artificial Sequence
  Description of Artificial Sequence: Synthetic oligonucleotide
ucaucucggcagcagagac

SEQ ID NO: 517708 - RNA, 19 nt, Artificial Sequence
  Description of Artificial Sequence: Synthetic oligonucleotide
aacacacugacugggauuu

SEQ ID NO: 517709 - RNA, 19 nt, Artificial Sequence
  Description of Artificial Sequence: Synthetic oligonucleotide
aauguccuacccaaaauua

SEQ ID NO: 517710 - RNA, 19 nt, Artificial Sequence
  Description of Artificial Sequence: Synthetic oligonucleotide
auaauugucgagggccugg

SEQ ID NO: 517711 - RNA, 19 nt, Artificial Sequence
  Description of Artificial Sequence: Synthetic oligonucleotide
guaguugcuacuccccacc

SEQ ID NO: 517712 - RNA, 19 nt, Artificial Sequence
  Description of Artificial Sequence: Synthetic oligonucleotide
aaguggagaauuaauucaa

SEQ ID NO: 517713 - RNA, 19 nt, Artificial Sequence
  Description of Artificial Sequence: Synthetic oligonucleotide
auauguacuucauuuuaua

SEQ ID NO: 517714 - RNA, 19 nt, Artificial Sequence
  Description of Artificial Sequence: Synthetic oligonucleotide
augaacggagacuuggaaa

SEQ ID NO: 517715 - RNA, 19 nt, Artificial Sequence
  Description of Artificial Sequence: Synthetic oligonucleotide
aguugcgcucuacaaaaca

SEQ ID NO: 517716 - RNA, 19 nt, Artificial Sequence
  Description of Artificial Sequence: Synthetic oligonucleotide
guauaccacucaugaacgg

SEQ ID NO: 517717 - RNA, 19 nt, Artificial Sequence
  Description of Artificial Sequence: Synthetic oligonucleotide
guuuaauccagcagauccc

SEQ ID NO: 517718 - RNA, 19 nt, Artificial Sequence
  Description of Artificial Sequence: Synthetic oligonucleotide
augcaacuugcuucaaaag

SEQ ID NO: 517719 - RNA, 19 nt, Artificial Sequence
  Description of Artificial Sequence: Synthetic oligonucleotide
ucaugaacggagacuugga

SEQ ID NO: 517720 - RNA, 19 nt, Artificial Sequence
  Description of Artificial Sequence: Synthetic oligonucleotide
cuucauaauugucgagggc

SEQ ID NO: 517721 - RNA, 19 nt, Artificial Sequence
  Description of Artificial Sequence: Synthetic oligonucleotide
caucaagacucaaggcugc

SEQ ID NO: 517722 - RNA, 19 nt, Artificial Sequence
  Description of Artificial Sequence: Synthetic oligonucleotide
cuaguccacagguuaugcc

SEQ ID NO: 517723 - RNA, 19 nt, Artificial Sequence
  Description of Artificial Sequence: Synthetic oligonucleotide
uaucgaaugcuaagcaguu

SEQ ID NO: 517724 - RNA, 19 nt, Artificial Sequence
  Description of Artificial Sequence: Synthetic oligonucleotide
ucaacaucuucacccgggu

SEQ ID NO: 517725 - RNA, 19 nt, Artificial Sequence
  Description of Artificial Sequence: Synthetic oligonucleotide
ugagucuugauaguaggua

SEQ ID NO: 517726 - RNA, 19 nt, Artificial Sequence
  Description of Artificial Sequence: Synthetic oligonucleotide
ugugugccugaauaaucgc

SEQ ID NO: 517727 - RNA, 19 nt, Artificial Sequence
  Description of Artificial Sequence: Synthetic oligonucleotide
auuuaggauucaaaagucu

SEQ ID NO: 517728 - RNA, 19 nt, Artificial Sequence
  Description of Artificial Sequence: Synthetic oligonucleotide
caugcauccacuagcagaa

SEQ ID NO: 517729 - RNA, 19 nt, Artificial Sequence
  Description of Artificial Sequence: Synthetic oligonucleotide
uuccauagaugggaauccg

SEQ ID NO: 517730 - RNA, 19 nt, Artificial Sequence
  Description of Artificial Sequence: Synthetic oligonucleotide
aguagacauaaaguaauaa

SEQ ID NO: 517731 - RNA, 19 nt, Artificial Sequence
  Description of Artificial Sequence: Synthetic oligonucleotide
guaggauuuucuuaucgaa

SEQ ID NO: 517732 - RNA, 19 nt, Artificial Sequence
  Description of Artificial Sequence: Synthetic oligonucleotide
gauaugucaaucagucauc

SEQ ID NO: 517733 - RNA, 19 nt, Artificial Sequence
  Description of Artificial Sequence: Synthetic oligonucleotide
uguagauagcuaguccaca

SEQ ID NO: 517734 - RNA, 19 nt, Artificial Sequence
  Description of Artificial Sequence: Synthetic oligonucleotide
uggccauuccauagauggg

SEQ ID NO: 517735 - RNA, 19 nt, Artificial Sequence
  Description of Artificial Sequence: Synthetic oligonucleotide
agguuaugccaaucaagug

SEQ ID NO: 517736 - RNA, 19 nt, Artificial Sequence
  Description of Artificial Sequence: Synthetic oligonucleotide
cauggaauguccuacccaa

SEQ ID NO: 517737 - RNA, 19 nt, Artificial Sequence
  Description of Artificial Sequence: Synthetic oligonucleotide
ggauuuucuuaucgaaugc

SEQ ID NO: 517738 - RNA, 19 nt, Artificial Sequence
  Description of Artificial Sequence: Synthetic oligonucleotide
guugcuacuccccaccauc

SEQ ID NO: 517739 - RNA, 19 nt, Artificial Sequence
  Description of Artificial Sequence: Synthetic oligonucleotide
aauuaguuucacaguggga

SEQ ID NO: 517740 - RNA, 19 nt, Artificial Sequence
  Description of Artificial Sequence: Synthetic oligonucleotide
cuauauguacuucauuuua

SEQ ID NO: 517741 - RNA, 19 nt, Artificial Sequence
  Description of Artificial Sequence: Synthetic oligonucleotide
uagagggaacucauggaau

SEQ ID NO: 517742 - RNA, 19 nt, Artificial Sequence
  Description of Artificial Sequence: Synthetic oligonucleotide
ucuauccagguaucauggc

SEQ ID NO: 517743 - RNA, 19 nt, Artificial Sequence
  Description of Artificial Sequence: Synthetic oligonucleotide
uagcaauuggaguaacuuu

SEQ ID NO: 517744 - RNA, 19 nt, Artificial Sequence
  Description of Artificial Sequence: Synthetic oligonucleotide
uaauugucgagggccuggg

SEQ ID NO: 517745 - RNA, 19 nt, Artificial Sequence
  Description of Artificial Sequence: Synthetic oligonucleotide
uguagagagccagugggaa

SEQ ID NO: 517746 - RNA, 19 nt, Artificial Sequence
  Description of Artificial Sequence: Synthetic oligonucleotide
cuucacccggguaaucuag

SEQ ID NO: 517747 - RNA, 19 nt, Artificial Sequence
  Description of Artificial Sequence: Synthetic oligonucleotide
caagugaaaccaguugcgc

SEQ ID NO: 517748 - RNA, 19 nt, Artificial Sequence
  Description of Artificial Sequence: Synthetic oligonucleotide
uuucucggcacaccgugaa

SEQ ID NO: 517749 - RNA, 19 nt, Artificial Sequence
  Description of Artificial Sequence: Synthetic oligonucleotide
cagguaaguacuccucccc

SEQ ID NO: 517750 - RNA, 19 nt, Artificial Sequence
  Description of Artificial Sequence: Synthetic oligonucleotide
accccauagcuuucucggc

SEQ ID NO: 517751 - RNA, 19 nt, Artificial Sequence
  Description of Artificial Sequence: Synthetic oligonucleotide
agcaauuggaguaacuuuu

SEQ ID NO: 517752 - RNA, 19 nt, Artificial Sequence
  Description of Artificial Sequence: Synthetic oligonucleotide
ucccauacuaaagccaagu

SEQ ID NO: 517753 - RNA, 19 nt, Artificial Sequence
  Description of Artificial Sequence: Synthetic oligonucleotide
gcuauauuuagggagguca

SEQ ID NO: 517754 - RNA, 19 nt, Artificial Sequence
  Description of Artificial Sequence: Synthetic oligonucleotide
ggcuguauaccacucauga

SEQ ID NO: 517755 - RNA, 19 nt, Artificial Sequence
  Description of Artificial Sequence: Synthetic oligonucleotide
ugacugggauuuaggauuc

SEQ ID NO: 517756 - RNA, 19 nt, Artificial Sequence
  Description of Artificial Sequence: Synthetic oligonucleotide
guauuuauaaggacugaaa

SEQ ID NO: 517757 - RNA, 19 nt, Artificial Sequence
  Description of Artificial Sequence: Synthetic oligonucleotide
cagccuagccuucauaauc

SEQ ID NO: 517758 - RNA, 19 nt, Artificial Sequence
  Description of Artificial Sequence: Synthetic oligonucleotide
uugcuacuccccaccauca

SEQ ID NO: 517759 - RNA, 19 nt, Artificial Sequence
  Description of Artificial Sequence: Synthetic oligonucleotide
gaugggaauccggucacug

SEQ ID NO: 517760 - RNA, 19 nt, Artificial Sequence
  Description of Artificial Sequence: Synthetic oligonucleotide
gagaucaaccacaguggag

SEQ ID NO: 517761 - RNA, 19 nt, Artificial Sequence
  Description of Artificial Sequence: Synthetic oligonucleotide
gagacagaagcuaggaaaa

SEQ ID NO: 517762 - RNA, 19 nt, Artificial Sequence
  Description of Artificial Sequence: Synthetic oligonucleotide
guuggggaacauaggaaag

SEQ ID NO: 517763 - RNA, 19 nt, Artificial Sequence
  Description of Artificial Sequence: Synthetic oligonucleotide
agaaaucauccccaugaua

SEQ ID NO: 517764 - RNA, 19 nt, Artificial Sequence
  Description of Artificial Sequence: Synthetic oligonucleotide
caauuuuagcaauuggagu

SEQ ID NO: 517765 - RNA, 19 nt, Artificial Sequence
  Description of Artificial Sequence: Synthetic oligonucleotide
acauaauuccccugcugaa

SEQ ID NO: 517766 - RNA, 19 nt, Artificial Sequence
  Description of Artificial Sequence: Synthetic oligonucleotide
guuaugccaaucaagugaa

SEQ ID NO: 517767 - RNA, 19 nt, Artificial Sequence
  Description of Artificial Sequence: Synthetic oligonucleotide
uuguauccgcugcaaugug

SEQ ID NO: 517768 - RNA, 19 nt, Artificial Sequence
  Description of Artificial Sequence: Synthetic oligonucleotide
cauauaauuguguaucuuu

SEQ ID NO: 517769 - RNA, 19 nt, Artificial Sequence
  Description of Artificial Sequence: Synthetic oligonucleotide
uaauaacgggaccgcggug

SEQ ID NO: 517770 - RNA, 19 nt, Artificial Sequence
  Description of Artificial Sequence: Synthetic oligonucleotide
auuuuguauccgcugcaau

SEQ ID NO: 517771 - RNA, 19 nt, Artificial Sequence
  Description of Artificial Sequence: Synthetic oligonucleotide
uccccauggauuguggacu

SEQ ID NO: 517772 - RNA, 19 nt, Artificial Sequence
  Description of Artificial Sequence: Synthetic oligonucleotide
cagaucccaacacauucac

SEQ ID NO: 517773 - RNA, 19 nt, Artificial Sequence
  Description of Artificial Sequence: Synthetic oligonucleotide
cugcaucacaaucuauaug

SEQ ID NO: 517774 - RNA, 19 nt, Artificial Sequence
  Description of Artificial Sequence: Synthetic oligonucleotide
gaguuguagauagcuaguc

SEQ ID NO: 517775 - RNA, 19 nt, Artificial Sequence
  Description of Artificial Sequence: Synthetic oligonucleotide
cucuaucauaaagaguauc

SEQ ID NO: 517776 - RNA, 19 nt, Artificial Sequence
  Description of Artificial Sequence: Synthetic oligonucleotide
accaguugcgcucuacaaa

SEQ ID NO: 517777 - RNA, 19 nt, Artificial Sequence
  Description of Artificial Sequence: Synthetic oligonucleotide
cagguuaugccaaucaagu

SEQ ID NO: 517778 - RNA, 19 nt, Artificial Sequence
  Description of Artificial Sequence: Synthetic oligonucleotide
acaccgugaaauugaggca

SEQ ID NO: 517779 - RNA, 19 nt, Artificial Sequence
  Description of Artificial Sequence: Synthetic oligonucleotide
cuugcgcacggccacucgg

SEQ ID NO: 517780 - RNA, 19 nt, Artificial Sequence
  Description of Artificial Sequence: Synthetic oligonucleotide
uuacaaucuacugcaguuu

SEQ ID NO: 517781 - RNA, 19 nt, Artificial Sequence
  Description of Artificial Sequence: Synthetic oligonucleotide
accgcgguguuauuaauua

SEQ ID NO: 517782 - RNA, 19 nt, Artificial Sequence
  Description of Artificial Sequence: Synthetic oligonucleotide
uuuuagcaauuggaguaac

SEQ ID NO: 517783 - RNA, 19 nt, Artificial Sequence
  Description of Artificial Sequence: Synthetic oligonucleotide
gguaaucuagaaguucuug

SEQ ID NO: 517784 - RNA, 19 nt, Artificial Sequence
  Description of Artificial Sequence: Synthetic oligonucleotide
cuauauuuagggaggucaa

SEQ ID NO: 517785 - RNA, 19 nt, Artificial Sequence
  Description of Artificial Sequence: Synthetic oligonucleotide
ucggcagcagagacagaag

SEQ ID NO: 517786 - RNA, 19 nt, Artificial Sequence
  Description of Artificial Sequence: Synthetic oligonucleotide
cuacugcaguuuaauccag

SEQ ID NO: 517787 - RNA, 19 nt, Artificial Sequence
  Description of Artificial Sequence: Synthetic oligonucleotide
aaacaccggggcucagaug

SEQ ID NO: 517788 - RNA, 19 nt, Artificial Sequence
  Description of Artificial Sequence: Synthetic oligonucleotide
aaucagcauuacaugaguu

SEQ ID NO: 517789 - RNA, 19 nt, Artificial Sequence
  Description of Artificial Sequence: Synthetic oligonucleotide
gguuggggaacauaggaaa

SEQ ID NO: 517790 - RNA, 19 nt, Artificial Sequence
  Description of Artificial Sequence: Synthetic oligonucleotide
uucacccggguaaucuaga

SEQ ID NO: 517791 - RNA, 19 nt, Artificial Sequence
  Description of Artificial Sequence: Synthetic oligonucleotide
aauugucgagggccugggu

SEQ ID NO: 517792 - RNA, 19 nt, Artificial Sequence
  Description of Artificial Sequence: Synthetic oligonucleotide
agccaaguuuacuacugaa

SEQ ID NO: 517793 - RNA, 19 nt, Artificial Sequence
  Description of Artificial Sequence: Synthetic oligonucleotide
uaguugcuacuccccacca

SEQ ID NO: 517794 - RNA, 19 nt, Artificial Sequence
  Description of Artificial Sequence: Synthetic oligonucleotide
uuauaccauucuugggcaa

SEQ ID NO: 517795 - RNA, 19 nt, Artificial Sequence
  Description of Artificial Sequence: Synthetic oligonucleotide
cauguaggauuuucuuauc

SEQ ID NO: 517796 - RNA, 19 nt, Artificial Sequence
  Description of Artificial Sequence: Synthetic oligonucleotide
gcugaaaucccacuguaaa

SEQ ID NO: 517797 - RNA, 19 nt, Artificial Sequence
  Description of Artificial Sequence: Synthetic oligonucleotide
auuuucuuaucgaaugcua

SEQ ID NO: 517798 - RNA, 19 nt, Artificial Sequence
  Description of Artificial Sequence: Synthetic oligonucleotide
uuaauccagcagaucccaa

SEQ ID NO: 517799 - RNA, 19 nt, Artificial Sequence
  Description of Artificial Sequence: Synthetic oligonucleotide
gcaugcauccacuagcaga

SEQ ID NO: 517800 - RNA, 19 nt, Artificial Sequence
  Description of Artificial Sequence: Synthetic oligonucleotide
aacgggaccgcgguguuau

SEQ ID NO: 517801 - RNA, 19 nt, Artificial Sequence
  Description of Artificial Sequence: Synthetic oligonucleotide
auugucuauccagguauca

SEQ ID NO: 517802 - RNA, 19 nt, Artificial Sequence
  Description of Artificial Sequence: Synthetic oligonucleotide
ucucggcacaccgugaaau

SEQ ID NO: 517803 - RNA, 19 nt, Artificial Sequence
  Description of Artificial Sequence: Synthetic oligonucleotide
gcaauauguagacaagaaa

SEQ ID NO: 517804 - RNA, 19 nt, Artificial Sequence
  Description of Artificial Sequence: Synthetic oligonucleotide
guaauaacgggaccgcggu

SEQ ID NO: 517805 - RNA, 19 nt, Artificial Sequence
  Description of Artificial Sequence: Synthetic oligonucleotide
aaucaccccauagcuuucu

SEQ ID NO: 517806 - RNA, 19 nt, Artificial Sequence
  Description of Artificial Sequence: Synthetic oligonucleotide
guaucauggcuaacaacac

SEQ ID NO: 517807 - RNA, 19 nt, Artificial Sequence
  Description of Artificial Sequence: Synthetic oligonucleotide
uagcuacuacauauuuaaa

SEQ ID NO: 517808 - RNA, 19 nt, Artificial Sequence
  Description of Artificial Sequence: Synthetic oligonucleotide
cacacugacugggauuuag

SEQ ID NO: 517809 - RNA, 19 nt, Artificial Sequence
  Description of Artificial Sequence: Synthetic oligonucleotide
agcaguuagacacgucauu

SEQ ID NO: 517810 - RNA, 19 nt, Artificial Sequence
  Description of Artificial Sequence: Synthetic oligonucleotide
ugucuuucgggaggccuag

SEQ ID NO: 517811 - RNA, 19 nt, Artificial Sequence
  Description of Artificial Sequence: Synthetic oligonucleotide
uugucuauccagguaucau

SEQ ID NO: 517812 - RNA, 19 nt, Artificial Sequence
  Description of Artificial Sequence: Synthetic oligonucleotide
gaaaagagcagggaagcau

SEQ ID NO: 517813 - RNA, 19 nt, Artificial Sequence
  Description of Artificial Sequence: Synthetic oligonucleotide
acugugagucuugauagua

SEQ ID NO: 517814 - RNA, 19 nt, Artificial Sequence
  Description of Artificial Sequence: Synthetic oligonucleotide
uucuuugaucauguaggau

SEQ ID NO: 517815 - RNA, 19 nt, Artificial Sequence
  Description of Artificial Sequence: Synthetic oligonucleotide
ccucaggccaaacuaaaac

SEQ ID NO: 517816 - RNA, 19 nt, Artificial Sequence
  Description of Artificial Sequence: Synthetic oligonucleotide
aagcaguuagacacgucau

SEQ ID NO: 517817 - RNA, 19 nt, Artificial Sequence
  Description of Artificial Sequence: Synthetic oligonucleotide
agccuagccuucauaaucu

SEQ ID NO: 517818 - RNA, 19 nt, Artificial Sequence
  Description of Artificial Sequence: Synthetic oligonucleotide
uaaucaccccauagcuuuc

SEQ ID NO: 517819 - RNA, 19 nt, Artificial Sequence
  Description of Artificial Sequence: Synthetic oligonucleotide
agccaggcuuuacauucag

SEQ ID NO: 517820 - RNA, 19 nt, Artificial Sequence
  Description of Artificial Sequence: Synthetic oligonucleotide
gcuacaacaagccaugcau

SEQ ID NO: 517821 - RNA, 19 nt, Artificial Sequence
  Description of Artificial Sequence: Synthetic oligonucleotide
cauagcuuucucggcacac

SEQ ID NO: 517822 - RNA, 19 nt, Artificial Sequence
  Description of Artificial Sequence: Synthetic oligonucleotide
cacccggguaaucuagaag

SEQ ID NO: 517823 - RNA, 19 nt, Artificial Sequence
  Description of Artificial Sequence: Synthetic oligonucleotide
gaggccuaggcagugggca

SEQ ID NO: 517824 - RNA, 19 nt, Artificial Sequence
  Description of Artificial Sequence: Synthetic oligonucleotide
agcauuacaugaguucuuu

SEQ ID NO: 517825 - RNA, 19 nt, Artificial Sequence
  Description of Artificial Sequence: Synthetic oligonucleotide
gugggcagucauuccacug

SEQ ID NO: 517826 - RNA, 19 nt, Artificial Sequence
  Description of Artificial Sequence: Synthetic oligonucleotide
caacuugcuucaaaagcaa

SEQ ID NO: 517827 - RNA, 19 nt, Artificial Sequence
  Description of Artificial Sequence: Synthetic oligonucleotide
cagugggcagucauuccac

SEQ ID NO: 517828 - RNA, 19 nt, Artificial Sequence
  Description of Artificial Sequence: Synthetic oligonucleotide
gguaaaugggucuacuaau

SEQ ID NO: 517829 - RNA, 19 nt, Artificial Sequence
  Description of Artificial Sequence: Synthetic oligonucleotide
guguuauuaauuauaccau

SEQ ID NO: 517830 - RNA, 19 nt, Artificial Sequence
  Description of Artificial Sequence: Synthetic oligonucleotide
ucacccggguaaucuagaa

SEQ ID NO: 517831 - RNA, 19 nt, Artificial Sequence
  Description of Artificial Sequence: Synthetic oligonucleotide
acaugcagcccaccugcca

SEQ ID NO: 517832 - RNA, 19 nt, Artificial Sequence
  Description of Artificial Sequence: Synthetic oligonucleotide
aaguucuugaagacuccuu

SEQ ID NO: 517833 - RNA, 19 nt, Artificial Sequence
  Description of Artificial Sequence: Synthetic oligonucleotide
aaaccacaagagacuguga

SEQ ID NO: 517834 - RNA, 19 nt, Artificial Sequence
  Description of Artificial Sequence: Synthetic oligonucleotide
cauaauugucgagggccug

SEQ ID NO: 517835 - RNA, 19 nt, Artificial Sequence
  Description of Artificial Sequence: Synthetic oligonucleotide
ccccaugauauuuuguauc

SEQ ID NO: 517836 - RNA, 19 nt, Artificial Sequence
  Description of Artificial Sequence: Synthetic oligonucleotide
aaucgccccuguagacggc

SEQ ID NO: 517837 - RNA, 19 nt, Artificial Sequence
  Description of Artificial Sequence: Synthetic oligonucleotide
uguagcaggugugggccac

SEQ ID NO: 517838 - RNA, 19 nt, Artificial Sequence
  Description of Artificial Sequence: Synthetic oligonucleotide
aguggagaucaaccacagu

SEQ ID NO: 517839 - RNA, 19 nt, Artificial Sequence
  Description of Artificial Sequence: Synthetic oligonucleotide
cagcaugcauccacuagca

SEQ ID NO: 517840 - RNA, 19 nt, Artificial Sequence
  Description of Artificial Sequence: Synthetic oligonucleotide
caugaacggagacuuggaa

SEQ ID NO: 517841 - RNA, 19 nt, Artificial Sequence
  Description of Artificial Sequence: Synthetic oligonucleotide
gcgguguuauuaauuauac

SEQ ID NO: 517842 - RNA, 19 nt, Artificial Sequence
  Description of Artificial Sequence: Synthetic oligonucleotide
agcaagguaaaugggucua

SEQ ID NO: 517843 - RNA, 19 nt, Artificial Sequence
  Description of Artificial Sequence: Synthetic oligonucleotide
agcuaguccacagguuaug

SEQ ID NO: 517844 - RNA, 19 nt, Artificial Sequence
  Description of Artificial Sequence: Synthetic oligonucleotide
aguugcuacuccccaccau

SEQ ID NO: 517845 - RNA, 19 nt, Artificial Sequence
  Description of Artificial Sequence: Synthetic oligonucleotide
gcuacuccccaccaucaug

SEQ ID NO: 517846 - RNA, 19 nt, Artificial Sequence
  Description of Artificial Sequence: Synthetic oligonucleotide
agugaacuauaugcacaca

SEQ ID NO: 517847 - RNA, 19 nt, Artificial Sequence
  Description of Artificial Sequence: Synthetic oligonucleotide
ggcaauauguagacaagaa

SEQ ID NO: 517848 - RNA, 19 nt, Artificial Sequence
  Description of Artificial Sequence: Synthetic oligonucleotide
cacauguauuuauuugacu

SEQ ID NO: 517849 - RNA, 19 nt, Artificial Sequence
  Description of Artificial Sequence: Synthetic oligonucleotide
caguugcgcucuacaaaac

SEQ ID NO: 517850 - RNA, 19 nt, Artificial Sequence
  Description of Artificial Sequence: Synthetic oligonucleotide
acugggauuuaggauucaa

SEQ ID NO: 517851 - RNA, 19 nt, Artificial Sequence
  Description of Artificial Sequence: Synthetic oligonucleotide
ugcuacuccccaccaucau

SEQ ID NO: 517852 - RNA, 19 nt, Artificial Sequence
  Description of Artificial Sequence: Synthetic oligonucleotide
uucucggcacaccgugaaa

SEQ ID NO: 517853 - RNA, 19 nt, Artificial Sequence
  Description of Artificial Sequence: Synthetic oligonucleotide
gcagugggcagucauucca

SEQ ID NO: 517854 - RNA, 19 nt, Artificial Sequence
  Description of Artificial Sequence: Synthetic oligonucleotide
agaaggaaguggagaauua

SEQ ID NO: 517855 - RNA, 19 nt, Artificial Sequence
  Description of Artificial Sequence: Synthetic oligonucleotide
augugucuuucgggaggcc

SEQ ID NO: 517856 - RNA, 19 nt, Artificial Sequence
  Description of Artificial Sequence: Synthetic oligonucleotide
ccaguugcgcucuacaaaa

SEQ ID NO: 517857 - RNA, 19 nt, Artificial Sequence
  Description of Artificial Sequence: Synthetic oligonucleotide
agcuuacaaucuacugcag

SEQ ID NO: 517858 - RNA, 19 nt, Artificial Sequence
  Description of Artificial Sequence: Synthetic oligonucleotide
uguagacggcagucucuuc

SEQ ID NO: 517859 - RNA, 19 nt, Artificial Sequence
  Description of Artificial Sequence: Synthetic oligonucleotide
caaucaagugaaaccaguu

SEQ ID NO: 517860 - RNA, 19 nt, Artificial Sequence
  Description of Artificial Sequence: Synthetic oligonucleotide
gcuaguccacagguuaugc

SEQ ID NO: 517861 - RNA, 19 nt, Artificial Sequence
  Description of Artificial Sequence: Synthetic oligonucleotide
ggcuacaacaagccaugca

SEQ ID NO: 517862 - RNA, 19 nt, Artificial Sequence
  Description of Artificial Sequence: Synthetic oligonucleotide
gccaaucaagugaaaccag

SEQ ID NO: 517863 - RNA, 19 nt, Artificial Sequence
  Description of Artificial Sequence: Synthetic oligonucleotide
uauccgcugcaaugugguc

SEQ ID NO: 517864 - RNA, 19 nt, Artificial Sequence
  Description of Artificial Sequence: Synthetic oligonucleotide
cuuucucggcacaccguga

SEQ ID NO: 517865 - RNA, 19 nt, Artificial Sequence
  Description of Artificial Sequence: Synthetic oligonucleotide
ucgccccuguagacggcag

SEQ ID NO: 517866 - RNA, 19 nt, Artificial Sequence
  Description of Artificial Sequence: Synthetic oligonucleotide
aggcuguauaccacucaug

SEQ ID NO: 517867 - RNA, 19 nt, Artificial Sequence
  Description of Artificial Sequence: Synthetic oligonucleotide
auaccauucuugggcaaua

SEQ ID NO: 517868 - RNA, 19 nt, Artificial Sequence
  Description of Artificial Sequence: Synthetic oligonucleotide
cgguguuauuaauuauacc

SEQ ID NO: 517869 - RNA, 19 nt, Artificial Sequence
  Description of Artificial Sequence: Synthetic oligonucleotide
guugcgcucuacaaaacau

SEQ ID NO: 517870 - RNA, 19 nt, Artificial Sequence
  Description of Artificial Sequence: Synthetic oligonucleotide
caagggacaacagguaccu

SEQ ID NO: 517871 - RNA, 19 nt, Artificial Sequence
  Description of Artificial Sequence: Synthetic oligonucleotide
guauccgcugcaauguggu

SEQ ID NO: 517872 - RNA, 19 nt, Artificial Sequence
  Description of Artificial Sequence: Synthetic oligonucleotide
gccugaauaaucgccccug

SEQ ID NO: 517873 - RNA, 19 nt, Artificial Sequence
  Description of Artificial Sequence: Synthetic oligonucleotide
auaacgggaccgcgguguu

SEQ ID NO: 517874 - RNA, 19 nt, Artificial Sequence
  Description of Artificial Sequence: Synthetic oligonucleotide
cuaucauaaagaguaucuu

SEQ ID NO: 517875 - RNA, 19 nt, Artificial Sequence
  Description of Artificial Sequence: Synthetic oligonucleotide
gcuuacaaucuacugcagu

SEQ ID NO: 517876 - RNA, 19 nt, Artificial Sequence
  Description of Artificial Sequence: Synthetic oligonucleotide
gucaucucggcagcagaga

SEQ ID NO: 517877 - RNA, 19 nt, Artificial Sequence
  Description of Artificial Sequence: Synthetic oligonucleotide
ggcccguaguucugcaggc

SEQ ID NO: 517878 - RNA, 19 nt, Artificial Sequence
  Description of Artificial Sequence: Synthetic oligonucleotide
cccauagcuuucucggcac

SEQ ID NO: 517879 - RNA, 19 nt, Artificial Sequence
  Description of Artificial Sequence: Synthetic oligonucleotide
aucgaaugcuaagcaguua

SEQ ID NO: 517880 - RNA, 19 nt, Artificial Sequence
  Description of Artificial Sequence: Synthetic oligonucleotide
gcuguauaccacucaugaa

SEQ ID NO: 517881 - RNA, 19 nt, Artificial Sequence
  Description of Artificial Sequence: Synthetic oligonucleotide
cuccaucuacuuagaaaua

SEQ ID NO: 517882 - RNA, 19 nt, Artificial Sequence
  Description of Artificial Sequence: Synthetic oligonucleotide
gauagcuaguccacagguu

SEQ ID NO: 517883 - RNA, 19 nt, Artificial Sequence
  Description of Artificial Sequence: Synthetic oligonucleotide
ggaugacaaucugcaagac

SEQ ID NO: 517884 - RNA, 19 nt, Artificial Sequence
  Description of Artificial Sequence: Synthetic oligonucleotide
accgugaaauugaggcaga

SEQ ID NO: 517885 - RNA, 19 nt, Artificial Sequence
  Description of Artificial Sequence: Synthetic oligonucleotide
gugagucuugauaguaggu

SEQ ID NO: 517886 - RNA, 19 nt, Artificial Sequence
  Description of Artificial Sequence: Synthetic oligonucleotide
ccggucacugccugucagg

SEQ ID NO: 517887 - RNA, 19 nt, Artificial Sequence
  Description of Artificial Sequence: Synthetic oligonucleotide
agaugggaauccggucacu

SEQ ID NO: 517888 - RNA, 19 nt, Artificial Sequence
  Description of Artificial Sequence: Synthetic oligonucleotide
ccaaucaagugaaaccagu

SEQ ID NO: 517889 - RNA, 19 nt, Artificial Sequence
  Description of Artificial Sequence: Synthetic oligonucleotide
ggcuuuacauucaguagcu

SEQ ID NO: 517890 - RNA, 19 nt, Artificial Sequence
  Description of Artificial Sequence: Synthetic oligonucleotide
ggccacagguaaguacucc

SEQ ID NO: 517891 - RNA, 19 nt, Artificial Sequence
  Description of Artificial Sequence: Synthetic oligonucleotide
gucuuucgggaggccuagg

SEQ ID NO: 517892 - RNA, 19 nt, Artificial Sequence
  Description of Artificial Sequence: Synthetic oligonucleotide
gcacaccgugaaauugagg

SEQ ID NO: 517893 - RNA, 19 nt, Artificial Sequence
  Description of Artificial Sequence: Synthetic oligonucleotide
gggaccgcgguguuauuaa

SEQ ID NO: 517894 - RNA, 19 nt, Artificial Sequence
  Description of Artificial Sequence: Synthetic oligonucleotide
augggucuacuaauucauu

SEQ ID NO: 517895 - RNA, 19 nt, Artificial Sequence
  Description of Artificial Sequence: Synthetic oligonucleotide
caguuagacacgucauuuu

SEQ ID NO: 517896 - RNA, 19 nt, Artificial Sequence
  Description of Artificial Sequence: Synthetic oligonucleotide
gcaauuggaguaacuuuua

SEQ ID NO: 517897 - RNA, 19 nt, Artificial Sequence
  Description of Artificial Sequence: Synthetic oligonucleotide
aagggacaacagguaccuu

SEQ ID NO: 517898 - RNA, 19 nt, Artificial Sequence
  Description of Artificial Sequence: Synthetic oligonucleotide
gacugggauuuaggauuca

SEQ ID NO: 517899 - RNA, 19 nt, Artificial Sequence
  Description of Artificial Sequence: Synthetic oligonucleotide
gcaguuagacacgucauuu

SEQ ID NO: 517900 - RNA, 19 nt, Artificial Sequence
  Description of Artificial Sequence: Synthetic oligonucleotide
cgcgguguuauuaauuaua

SEQ ID NO: 517901 - RNA, 19 nt, Artificial Sequence
  Description of Artificial Sequence: Synthetic oligonucleotide
uaacgggaccgcgguguua

SEQ ID NO: 517902 - RNA, 19 nt, Artificial Sequence
  Description of Artificial Sequence: Synthetic oligonucleotide
ccaccaucauggcccguag

SEQ ID NO: 517903 - RNA, 19 nt, Artificial Sequence
  Description of Artificial Sequence: Synthetic oligonucleotide
gccuagccuucauaaucuc

SEQ ID NO: 517904 - RNA, 19 nt, Artificial Sequence
  Description of Artificial Sequence: Synthetic oligonucleotide
gaccgcgguguuauuaauu

SEQ ID NO: 517905 - RNA, 19 nt, Artificial Sequence
  Description of Artificial Sequence: Synthetic oligonucleotide
cugcuauauuuagggaggu

SEQ ID NO: 517906 - RNA, 19 nt, Artificial Sequence
  Description of Artificial Sequence: Synthetic oligonucleotide
gggcuacaacaagccaugc

SEQ ID NO: 517907 - RNA, 19 nt, Artificial Sequence
  Description of Artificial Sequence: Synthetic oligonucleotide
cagcauuacaugaguucuu

SEQ ID NO: 517908 - RNA, 19 nt, Artificial Sequence
  Description of Artificial Sequence: Synthetic oligonucleotide
ccuagccuucauaaucucu

SEQ ID NO: 517909 - RNA, 19 nt, Artificial Sequence
  Description of Artificial Sequence: Synthetic oligonucleotide
cccauggauuguggacugg

SEQ ID NO: 517910 - RNA, 19 nt, Artificial Sequence
  Description of Artificial Sequence: Synthetic oligonucleotide
gcaagacuggccauuccau

SEQ ID NO: 517911 - RNA, 19 nt, Artificial Sequence
  Description of Artificial Sequence: Synthetic oligonucleotide
gccaucugaggcuguugua

SEQ ID NO: 517912 - RNA, 19 nt, Artificial Sequence
  Description of Artificial Sequence: Synthetic oligonucleotide
cccaguuguaguugcuacu

SEQ ID NO: 517913 - RNA, 19 nt, Artificial Sequence
  Description of Artificial Sequence: Synthetic oligonucleotide
acacacugacugggauuua

SEQ ID NO: 517914 - RNA, 19 nt, Artificial Sequence
  Description of Artificial Sequence: Synthetic oligonucleotide
gugggaugugugccugaau

SEQ ID NO: 517915 - RNA, 19 nt, Artificial Sequence
  Description of Artificial Sequence: Synthetic oligonucleotide
gggccacagguaaguacuc

SEQ ID NO: 517916 - RNA, 19 nt, Artificial Sequence
  Description of Artificial Sequence: Synthetic oligonucleotide
gggaauccggucacugccu

SEQ ID NO: 517917 - RNA, 19 nt, Artificial Sequence
  Description of Artificial Sequence: Synthetic oligonucleotide
gcgcucuacaaaacaugua

SEQ ID NO: 517918 - RNA, 19 nt, Artificial Sequence
  Description of Artificial Sequence: Synthetic oligonucleotide
caaccacaguggaguugua

SEQ ID NO: 517919 - RNA, 19 nt, Artificial Sequence
  Description of Artificial Sequence: Synthetic oligonucleotide
acgggaccgcgguguuauu

SEQ ID NO: 517920 - RNA, 19 nt, Artificial Sequence
  Description of Artificial Sequence: Synthetic oligonucleotide
ggaccgcgguguuauuaau

SEQ ID NO: 517921 - RNA, 19 nt, Artificial Sequence
  Description of Artificial Sequence: Synthetic oligonucleotide
ccgugaaauugaggcagaa

SEQ ID NO: 517922 - RNA, 19 nt, Artificial Sequence
  Description of Artificial Sequence: Synthetic oligonucleotide
guccuugcgcacggccacu

SEQ ID NO: 517923 - RNA, 19 nt, Artificial Sequence
  Description of Artificial Sequence: Synthetic oligonucleotide
cccggguaaucuagaaguu

SEQ ID NO: 517924 - RNA, 19 nt, Artificial Sequence
  Description of Artificial Sequence: Synthetic oligonucleotide
caccggggcucagaugcau

SEQ ID NO: 517925 - RNA, 19 nt, Artificial Sequence
  Description of Artificial Sequence: Synthetic oligonucleotide
ccgcgguguuauuaauuau

SEQ ID NO: 517926 - RNA, 19 nt, Artificial Sequence
  Description of Artificial Sequence: Synthetic oligonucleotide
cgggaccgcgguguuauua

SEQ ID NO: 517927 - RNA, 19 nt, Artificial Sequence
  Description of Artificial Sequence: Synthetic oligonucleotide
ccgcugcaauguggucacu

SEQ ID NO: 517928 - RNA, 19 nt, Artificial Sequence
  Description of Artificial Sequence: Synthetic oligonucleotide
gagaaugucagcuauauac

SEQ ID NO: 517929 - RNA, 19 nt, Artificial Sequence
  Description of Artificial Sequence: Synthetic oligonucleotide
ugauucaaaacguauacug

SEQ ID NO: 517930 - RNA, 19 nt, Artificial Sequence
  Description of Artificial Sequence: Synthetic oligonucleotide
acauuauacauggauaucc

SEQ ID NO: 517931 - RNA, 19 nt, Artificial Sequence
  Description of Artificial Sequence: Synthetic oligonucleotide
ucagcuauauacauuauac

SEQ ID NO: 517932 - RNA, 19 nt, Artificial Sequence
  Description of Artificial Sequence: Synthetic oligonucleotide
cuuguauuugccaagagug

SEQ ID NO: 517933 - RNA, 19 nt, Artificial Sequence
  Description of Artificial Sequence: Synthetic oligonucleotide
ugacuauauauauauaugu

SEQ ID NO: 517934 - RNA, 19 nt, Artificial Sequence
  Description of Artificial Sequence: Synthetic oligonucleotide
aaugggaaguugcauauug

SEQ ID NO: 517935 - RNA, 19 nt, Artificial Sequence
  Description of Artificial Sequence: Synthetic oligonucleotide
uuauaguuagagagggugg

SEQ ID NO: 517936 - RNA, 19 nt, Artificial Sequence
  Description of Artificial Sequence: Synthetic oligonucleotide
ugugacuauauauauauau

SEQ ID NO: 517937 - RNA, 19 nt, Artificial Sequence
  Description of Artificial Sequence: Synthetic oligonucleotide
uuagacacagggcaugggg

SEQ ID NO: 517938 - RNA, 19 nt, Artificial Sequence
  Description of Artificial Sequence: Synthetic oligonucleotide
uuaacaaauaacugauuca

SEQ ID NO: 517939 - RNA, 19 nt, Artificial Sequence
  Description of Artificial Sequence: Synthetic oligonucleotide
ugaauuaucuacagugcag

SEQ ID NO: 517940 - RNA, 19 nt, Artificial Sequence
  Description of Artificial Sequence: Synthetic oligonucleotide
uauacauggauauccucgg

SEQ ID NO: 517941 - RNA, 19 nt, Artificial Sequence
  Description of Artificial Sequence: Synthetic oligonucleotide
aacuuugcugacucuacgg

SEQ ID NO: 517942 - RNA, 19 nt, Artificial Sequence
  Description of Artificial Sequence: Synthetic oligonucleotide
uguguguaaugccacaugc

SEQ ID NO: 517943 - RNA, 19 nt, Artificial Sequence
  Description of Artificial Sequence: Synthetic oligonucleotide
acguauacuguuuauauga

SEQ ID NO: 517944 - RNA, 19 nt, Artificial Sequence
  Description of Artificial Sequence: Synthetic oligonucleotide
uacucuggaaguacuaagg

SEQ ID NO: 517945 - RNA, 19 nt, Artificial Sequence
  Description of Artificial Sequence: Synthetic oligonucleotide
ugucacuugaagaagucug

SEQ ID NO: 517946 - RNA, 19 nt, Artificial Sequence
  Description of Artificial Sequence: Synthetic oligonucleotide
agcuauauacauuauacau

SEQ ID NO: 517947 - RNA, 19 nt, Artificial Sequence
  Description of Artificial Sequence: Synthetic oligonucleotide
auauacauuauacauggau

SEQ ID NO: 517948 - RNA, 19 nt, Artificial Sequence
  Description of Artificial Sequence: Synthetic oligonucleotide
uuaacaacuuugcugacuc

SEQ ID NO: 517949 - RNA, 19 nt, Artificial Sequence
  Description of Artificial Sequence: Synthetic oligonucleotide
acuauauauauauauguua

SEQ ID NO: 517950 - RNA, 19 nt, Artificial Sequence
  Description of Artificial Sequence: Synthetic oligonucleotide
gaugcguuuucccugcugg

SEQ ID NO: 517951 - RNA, 19 nt, Artificial Sequence
  Description of Artificial Sequence: Synthetic oligonucleotide
augcuacacagcuucaacc

SEQ ID NO: 517952 - RNA, 19 nt, Artificial Sequence
  Description of Artificial Sequence: Synthetic oligonucleotide
ugucacauaguauuccugc

SEQ ID NO: 517953 - RNA, 19 nt, Artificial Sequence
  Description of Artificial Sequence: Synthetic oligonucleotide
gugaaauuaugacaggcag

SEQ ID NO: 517954 - RNA, 19 nt, Artificial Sequence
  Description of Artificial Sequence: Synthetic oligonucleotide
agggauuagacacagggca

SEQ ID NO: 517955 - RNA, 19 nt, Artificial Sequence
  Description of Artificial Sequence: Synthetic oligonucleotide
uguuguucgucugagaaug

SEQ ID NO: 517956 - RNA, 19 nt, Artificial Sequence
  Description of Artificial Sequence: Synthetic oligonucleotide
cacuagagggauuagacac

SEQ ID NO: 517957 - RNA, 19 nt, Artificial Sequence
  Description of Artificial Sequence: Synthetic oligonucleotide
uauaguuagagaggguggg

SEQ ID NO: 517958 - RNA, 19 nt, Artificial Sequence
  Description of Artificial Sequence: Synthetic oligonucleotide
cauuuaacauuuugugugg

SEQ ID NO: 517959 - RNA, 19 nt, Artificial Sequence
  Description of Artificial Sequence: Synthetic oligonucleotide
uuggucacaaauuagcuua

SEQ ID NO: 517960 - RNA, 19 nt, Artificial Sequence
  Description of Artificial Sequence: Synthetic oligonucleotide
aaguguuccuuucauagaa

SEQ ID NO: 517961 - RNA, 19 nt, Artificial Sequence
  Description of Artificial Sequence: Synthetic oligonucleotide
cuuauaguuagagagggug

SEQ ID NO: 517962 - RNA, 19 nt, Artificial Sequence
  Description of Artificial Sequence: Synthetic oligonucleotide
aacguauacuguuuauaug

SEQ ID NO: 517963 - RNA, 19 nt, Artificial Sequence
  Description of Artificial Sequence: Synthetic oligonucleotide
cuauauauauauauguuaa

SEQ ID NO: 517964 - RNA, 19 nt, Artificial Sequence
  Description of Artificial Sequence: Synthetic oligonucleotide
uaacaaauaacugauucaa

SEQ ID NO: 517965 - RNA, 19 nt, Artificial Sequence
  Description of Artificial Sequence: Synthetic oligonucleotide
auauauauauauguuaaaa

SEQ ID NO: 517966 - RNA, 19 nt, Artificial Sequence
  Description of Artificial Sequence: Synthetic oligonucleotide
gaauaguggauacagcauc

SEQ ID NO: 517967 - RNA, 19 nt, Artificial Sequence
  Description of Artificial Sequence: Synthetic oligonucleotide
agcuuauaguuagagaggg

SEQ ID NO: 517968 - RNA, 19 nt, Artificial Sequence
  Description of Artificial Sequence: Synthetic oligonucleotide
gguauuagagaagagauac

SEQ ID NO: 517969 - RNA, 19 nt, Artificial Sequence
  Description of Artificial Sequence: Synthetic oligonucleotide
gaugggagaaccacgcucg

SEQ ID NO: 517970 - RNA, 19 nt, Artificial Sequence
  Description of Artificial Sequence: Synthetic oligonucleotide
uaugccgggcaacacagag

SEQ ID NO: 517971 - RNA, 19 nt, Artificial Sequence
  Description of Artificial Sequence: Synthetic oligonucleotide
caaaaugcuggguucagac

SEQ ID NO: 517972 - RNA, 19 nt, Artificial Sequence
  Description of Artificial Sequence: Synthetic oligonucleotide
gagucuuacagagagaguc

SEQ ID NO: 517973 - RNA, 19 nt, Artificial Sequence
  Description of Artificial Sequence: Synthetic oligonucleotide
uauauauauauauguuaaa

SEQ ID NO: 517974 - RNA, 19 nt, Artificial Sequence
  Description of Artificial Sequence: Synthetic oligonucleotide
cucagaauaguggauacag

SEQ ID NO: 517975 - RNA, 19 nt, Artificial Sequence
  Description of Artificial Sequence: Synthetic oligonucleotide
aaugaaggaugcuaucuuu

SEQ ID NO: 517976 - RNA, 19 nt, Artificial Sequence
  Description of Artificial Sequence: Synthetic oligonucleotide
ucuucaauaccacacgcuu

SEQ ID NO: 517977 - RNA, 19 nt, Artificial Sequence
  Description of Artificial Sequence: Synthetic oligonucleotide
acuaaggacaugucaaggu

SEQ ID NO: 517978 - RNA, 19 nt, Artificial Sequence
  Description of Artificial Sequence: Synthetic oligonucleotide
uguucgucugagaauguca

SEQ ID NO: 517979 - RNA, 19 nt, Artificial Sequence
  Description of Artificial Sequence: Synthetic oligonucleotide
ugcuacacagcuucaacca

SEQ ID NO: 517980 - RNA, 19 nt, Artificial Sequence
  Description of Artificial Sequence: Synthetic oligonucleotide
aguaauuaggccacuuggg

SEQ ID NO: 517981 - RNA, 19 nt, Artificial Sequence
  Description of Artificial Sequence: Synthetic oligonucleotide
aaccacgcucgcuagucac

SEQ ID NO: 517982 - RNA, 19 nt, Artificial Sequence
  Description of Artificial Sequence: Synthetic oligonucleotide
cagaauaguggauacagca

SEQ ID NO: 517983 - RNA, 19 nt, Artificial Sequence
  Description of Artificial Sequence: Synthetic oligonucleotide
auucaaaacguauacuguu

SEQ ID NO: 517984 - RNA, 19 nt, Artificial Sequence
  Description of Artificial Sequence: Synthetic oligonucleotide
uggucuugcauuuucccug

SEQ ID NO: 517985 - RNA, 19 nt, Artificial Sequence
  Description of Artificial Sequence: Synthetic oligonucleotide
uguauuugccaagagugga

SEQ ID NO: 517986 - RNA, 19 nt, Artificial Sequence
  Description of Artificial Sequence: Synthetic oligonucleotide
uccucauugggccucuugc

SEQ ID NO: 517987 - RNA, 19 nt, Artificial Sequence
  Description of Artificial Sequence: Synthetic oligonucleotide
uacuaaggacaugucaagg

SEQ ID NO: 517988 - RNA, 19 nt, Artificial Sequence
  Description of Artificial Sequence: Synthetic oligonucleotide
guacuggacaaaaugcugg

SEQ ID NO: 517989 - RNA, 19 nt, Artificial Sequence
  Description of Artificial Sequence: Synthetic oligonucleotide
uauccucggaaacauuccc

SEQ ID NO: 517990 - RNA, 19 nt, Artificial Sequence
  Description of Artificial Sequence: Synthetic oligonucleotide
aaaugccuuguauuugcca

SEQ ID NO: 517991 - RNA, 19 nt, Artificial Sequence
  Description of Artificial Sequence: Synthetic oligonucleotide
ggugcauaaaucuuguuuc

SEQ ID NO: 517992 - RNA, 19 nt, Artificial Sequence
  Description of Artificial Sequence: Synthetic oligonucleotide
caugucaaggucugaagug

SEQ ID NO: 517993 - RNA, 19 nt, Artificial Sequence
  Description of Artificial Sequence: Synthetic oligonucleotide
ucuuacagagagagucagg

SEQ ID NO: 517994 - RNA, 19 nt, Artificial Sequence
  Description of Artificial Sequence: Synthetic oligonucleotide
cuugggucacuccugacag

SEQ ID NO: 517995 - RNA, 19 nt, Artificial Sequence
  Description of Artificial Sequence: Synthetic oligonucleotide
ugccgggcaacacagagcu

SEQ ID NO: 517996 - RNA, 19 nt, Artificial Sequence
  Description of Artificial Sequence: Synthetic oligonucleotide
ggaauaacuguccccaucc

SEQ ID NO: 517997 - RNA, 19 nt, Artificial Sequence
  Description of Artificial Sequence: Synthetic oligonucleotide
ucaaaacguauacuguuua

SEQ ID NO: 517998 - RNA, 19 nt, Artificial Sequence
  Description of Artificial Sequence: Synthetic oligonucleotide
gugacuauauauauauaug

SEQ ID NO: 517999 - RNA, 19 nt, Artificial Sequence
  Description of Artificial Sequence: Synthetic oligonucleotide
gacaugucaaggucugaag

SEQ ID NO: 518000 - RNA, 19 nt, Artificial Sequence
  Description of Artificial Sequence: Synthetic oligonucleotide
aucgacauauuccucuucu

SEQ ID NO: 518001 - RNA, 19 nt, Artificial Sequence
  Description of Artificial Sequence: Synthetic oligonucleotide
agguagacuaccaaguuug

SEQ ID NO: 518002 - RNA, 19 nt, Artificial Sequence
  Description of Artificial Sequence: Synthetic oligonucleotide
aguacuaaggacaugucaa

SEQ ID NO: 518003 - RNA, 19 nt, Artificial Sequence
  Description of Artificial Sequence: Synthetic oligonucleotide
agaaugaaggaugcuaucu

SEQ ID NO: 518004 - RNA, 19 nt, Artificial Sequence
  Description of Artificial Sequence: Synthetic oligonucleotide
aaaacguauacuguuuaua

SEQ ID NO: 518005 - RNA, 19 nt, Artificial Sequence
  Description of Artificial Sequence: Synthetic oligonucleotide
uaaugauuuccggugaccu

SEQ ID NO: 518006 - RNA, 19 nt, Artificial Sequence
  Description of Artificial Sequence: Synthetic oligonucleotide
uacauggauauccucggaa

SEQ ID NO: 518007 - RNA, 19 nt, Artificial Sequence
  Description of Artificial Sequence: Synthetic oligonucleotide
ggaauaaccaacagaaaug

SEQ ID NO: 518008 - RNA, 19 nt, Artificial Sequence
  Description of Artificial Sequence: Synthetic oligonucleotide
uucaaaacguauacuguuu

SEQ ID NO: 518009 - RNA, 19 nt, Artificial Sequence
  Description of Artificial Sequence: Synthetic oligonucleotide
aaauuaugacaggcagugg

SEQ ID NO: 518010 - RNA, 19 nt, Artificial Sequence
  Description of Artificial Sequence: Synthetic oligonucleotide
uguguguguguguaaugcc

SEQ ID NO: 518011 - RNA, 19 nt, Artificial Sequence
  Description of Artificial Sequence: Synthetic oligonucleotide
ucacguaccgccuaaugau

SEQ ID NO: 518012 - RNA, 19 nt, Artificial Sequence
  Description of Artificial Sequence: Synthetic oligonucleotide
ucaaggucugaaguguucc

SEQ ID NO: 518013 - RNA, 19 nt, Artificial Sequence
  Description of Artificial Sequence: Synthetic oligonucleotide
auguggaauaaccaacaga

SEQ ID NO: 518014 - RNA, 19 nt, Artificial Sequence
  Description of Artificial Sequence: Synthetic oligonucleotide
cauaucaucucccuuuuga

SEQ ID NO: 518015 - RNA, 19 nt, Artificial Sequence
  Description of Artificial Sequence: Synthetic oligonucleotide
ucaguuuuggggauacaau

SEQ ID NO: 518016 - RNA, 19 nt, Artificial Sequence
  Description of Artificial Sequence: Synthetic oligonucleotide
uuuacuucuguuguucguc

SEQ ID NO: 518017 - RNA, 19 nt, Artificial Sequence
  Description of Artificial Sequence: Synthetic oligonucleotide
cuaaggacaugucaagguc

SEQ ID NO: 518018 - RNA, 19 nt, Artificial Sequence
  Description of Artificial Sequence: Synthetic oligonucleotide
auauccucggaaacauucc

SEQ ID NO: 518019 - RNA, 19 nt, Artificial Sequence
  Description of Artificial Sequence: Synthetic oligonucleotide
aggucaguggcuaagcuag

SEQ ID NO: 518020 - RNA, 19 nt, Artificial Sequence
  Description of Artificial Sequence: Synthetic oligonucleotide
guacuaaggacaugucaag

SEQ ID NO: 518021 - RNA, 19 nt, Artificial Sequence
  Description of Artificial Sequence: Synthetic oligonucleotide
uuuggucacaaauuagcuu

SEQ ID NO: 518022 - RNA, 19 nt, Artificial Sequence
  Description of Artificial Sequence: Synthetic oligonucleotide
aggaugcuaucuuugguca

SEQ ID NO: 518023 - RNA, 19 nt, Artificial Sequence
  Description of Artificial Sequence: Synthetic oligonucleotide
gacuccacuaucaccaggc

SEQ ID NO: 518024 - RNA, 19 nt, Artificial Sequence
  Description of Artificial Sequence: Synthetic oligonucleotide
aaugccgaaggaguuggug

SEQ ID NO: 518025 - RNA, 19 nt, Artificial Sequence
  Description of Artificial Sequence: Synthetic oligonucleotide
cuuacagagagagucagga

SEQ ID NO: 518026 - RNA, 19 nt, Artificial Sequence
  Description of Artificial Sequence: Synthetic oligonucleotide
uuuuaggagcaauggcuac

SEQ ID NO: 518027 - RNA, 19 nt, Artificial Sequence
  Description of Artificial Sequence: Synthetic oligonucleotide
uuccgcauagcuguggccc

SEQ ID NO: 518028 - RNA, 19 nt, Artificial Sequence
  Description of Artificial Sequence: Synthetic oligonucleotide
aggagcaauggcuacucug

SEQ ID NO: 518029 - RNA, 19 nt, Artificial Sequence
  Description of Artificial Sequence: Synthetic oligonucleotide
agaacaauggaggcgccag

SEQ ID NO: 518030 - RNA, 19 nt, Artificial Sequence
  Description of Artificial Sequence: Synthetic oligonucleotide
ucaguggcuaagcuagagu

SEQ ID NO: 518031 - RNA, 19 nt, Artificial Sequence
  Description of Artificial Sequence: Synthetic oligonucleotide
ugacucuacggccuucuac

SEQ ID NO: 518032 - RNA, 19 nt, Artificial Sequence
  Description of Artificial Sequence: Synthetic oligonucleotide
uaccacuguuguuuuaaca

SEQ ID NO: 518033 - RNA, 19 nt, Artificial Sequence
  Description of Artificial Sequence: Synthetic oligonucleotide
gaagaaaguaccaccagua

SEQ ID NO: 518034 - RNA, 19 nt, Artificial Sequence
  Description of Artificial Sequence: Synthetic oligonucleotide
gguucuugcacgaugggag

SEQ ID NO: 518035 - RNA, 19 nt, Artificial Sequence
  Description of Artificial Sequence: Synthetic oligonucleotide
ugcagggguacugaugucc

SEQ ID NO: 518036 - RNA, 19 nt, Artificial Sequence
  Description of Artificial Sequence: Synthetic oligonucleotide
cauuguaaucuccuccuuc

SEQ ID NO: 518037 - RNA, 19 nt, Artificial Sequence
  Description of Artificial Sequence: Synthetic oligonucleotide
uguggcguucccugcauug

SEQ ID NO: 518038 - RNA, 19 nt, Artificial Sequence
  Description of Artificial Sequence: Synthetic oligonucleotide
uccaguacaauggucugcu

SEQ ID NO: 518039 - RNA, 19 nt, Artificial Sequence
  Description of Artificial Sequence: Synthetic oligonucleotide
gagauacaccuggaggugg

SEQ ID NO: 518040 - RNA, 19 nt, Artificial Sequence
  Description of Artificial Sequence: Synthetic oligonucleotide
uccucggaaacauuccccu

SEQ ID NO: 518041 - RNA, 19 nt, Artificial Sequence
  Description of Artificial Sequence: Synthetic oligonucleotide
agaaugucagcuauauaca

SEQ ID NO: 518042 - RNA, 19 nt, Artificial Sequence
  Description of Artificial Sequence: Synthetic oligonucleotide
acuaccaaguuugaugcgu

SEQ ID NO: 518043 - RNA, 19 nt, Artificial Sequence
  Description of Artificial Sequence: Synthetic oligonucleotide
acaacuuugcugacucuac

SEQ ID NO: 518044 - RNA, 19 nt, Artificial Sequence
  Description of Artificial Sequence: Synthetic oligonucleotide
auggcuacucuggaaguac

SEQ ID NO: 518045 - RNA, 19 nt, Artificial Sequence
  Description of Artificial Sequence: Synthetic oligonucleotide
caacuuugcugacucuacg

SEQ ID NO: 518046 - RNA, 19 nt, Artificial Sequence
  Description of Artificial Sequence: Synthetic oligonucleotide
uggaauaacuguccccauc

SEQ ID NO: 518047 - RNA, 19 nt, Artificial Sequence
  Description of Artificial Sequence: Synthetic oligonucleotide
uuuaggagcaauggcuacu

SEQ ID NO: 518048 - RNA, 19 nt, Artificial Sequence
  Description of Artificial Sequence: Synthetic oligonucleotide
gaccaugggugggugaucg

SEQ ID NO: 518049 - RNA, 19 nt, Artificial Sequence
  Description of Artificial Sequence: Synthetic oligonucleotide
agaaccacgcucgcuaguc

SEQ ID NO: 518050 - RNA, 19 nt, Artificial Sequence
  Description of Artificial Sequence: Synthetic oligonucleotide
gaauauauuugugacuaua

SEQ ID NO: 518051 - RNA, 19 nt, Artificial Sequence
  Description of Artificial Sequence: Synthetic oligonucleotide
ggagcaauggcuacucugg

SEQ ID NO: 518052 - RNA, 19 nt, Artificial Sequence
  Description of Artificial Sequence: Synthetic oligonucleotide
guucgucugagaaugucag

SEQ ID NO: 518053 - RNA, 19 nt, Artificial Sequence
  Description of Artificial Sequence: Synthetic oligonucleotide
uguguguguguguguaaug

SEQ ID NO: 518054 - RNA, 19 nt, Artificial Sequence
  Description of Artificial Sequence: Synthetic oligonucleotide
ucucacguaccgccuaaug

SEQ ID NO: 518055 - RNA, 19 nt, Artificial Sequence
  Description of Artificial Sequence: Synthetic oligonucleotide
ugcagguauuagagaagag

SEQ ID NO: 518056 - RNA, 19 nt, Artificial Sequence
  Description of Artificial Sequence: Synthetic oligonucleotide
cuagagggauuagacacag

SEQ ID NO: 518057 - RNA, 19 nt, Artificial Sequence
  Description of Artificial Sequence: Synthetic oligonucleotide
auaguuagagagggugggg

SEQ ID NO: 518058 - RNA, 19 nt, Artificial Sequence
  Description of Artificial Sequence: Synthetic oligonucleotide
ugcugacuccacuaucacc

SEQ ID NO: 518059 - RNA, 19 nt, Artificial Sequence
  Description of Artificial Sequence: Synthetic oligonucleotide
aucccaguaauuaggccac

SEQ ID NO: 518060 - RNA, 19 nt, Artificial Sequence
  Description of Artificial Sequence: Synthetic oligonucleotide
guguguguguguguaaugc

SEQ ID NO: 518061 - RNA, 19 nt, Artificial Sequence
  Description of Artificial Sequence: Synthetic oligonucleotide
cugagaaauccuguugagc

SEQ ID NO: 518062 - RNA, 19 nt, Artificial Sequence
  Description of Artificial Sequence: Synthetic oligonucleotide
acaggcagugguuuaaauu

SEQ ID NO: 518063 - RNA, 19 nt, Artificial Sequence
  Description of Artificial Sequence: Synthetic oligonucleotide
ggggauacaaucuugaaau

SEQ ID NO: 518064 - RNA, 19 nt, Artificial Sequence
  Description of Artificial Sequence: Synthetic oligonucleotide
aguugguggagaucucucu

SEQ ID NO: 518065 - RNA, 19 nt, Artificial Sequence
  Description of Artificial Sequence: Synthetic oligonucleotide
auccucggaaacauucccc

SEQ ID NO: 518066 - RNA, 19 nt, Artificial Sequence
  Description of Artificial Sequence: Synthetic oligonucleotide
ucgacauauuccucuucug

SEQ ID NO: 518067 - RNA, 19 nt, Artificial Sequence
  Description of Artificial Sequence: Synthetic oligonucleotide
guggcuaagcuagaguccc

SEQ ID NO: 518068 - RNA, 19 nt, Artificial Sequence
  Description of Artificial Sequence: Synthetic oligonucleotide
acgcucgcuagucacuggg

SEQ ID NO: 518069 - RNA, 19 nt, Artificial Sequence
  Description of Artificial Sequence: Synthetic oligonucleotide
gagggauuagacacagggc

SEQ ID NO: 518070 - RNA, 19 nt, Artificial Sequence
  Description of Artificial Sequence: Synthetic oligonucleotide
gaauuaucuacagugcagu

SEQ ID NO: 518071 - RNA, 19 nt, Artificial Sequence
  Description of Artificial Sequence: Synthetic oligonucleotide
auggauauccucggaaaca

SEQ ID NO: 518072 - RNA, 19 nt, Artificial Sequence
  Description of Artificial Sequence: Synthetic oligonucleotide
ugggucacuccugacagga

SEQ ID NO: 518073 - RNA, 19 nt, Artificial Sequence
  Description of Artificial Sequence: Synthetic oligonucleotide
aagaccugaggcuggucau

SEQ ID NO: 518074 - RNA, 19 nt, Artificial Sequence
  Description of Artificial Sequence: Synthetic oligonucleotide
aaaugcuacacagcuucaa

SEQ ID NO: 518075 - RNA, 19 nt, Artificial Sequence
  Description of Artificial Sequence: Synthetic oligonucleotide
aguguuccuuucauagaac

SEQ ID NO: 518076 - RNA, 19 nt, Artificial Sequence
  Description of Artificial Sequence: Synthetic oligonucleotide
gaagcaaagaaaaugccuu

SEQ ID NO: 518077 - RNA, 19 nt, Artificial Sequence
  Description of Artificial Sequence: Synthetic oligonucleotide
aagacagcgugguuugcua

SEQ ID NO: 518078 - RNA, 19 nt, Artificial Sequence
  Description of Artificial Sequence: Synthetic oligonucleotide
uggguaugugguuucuggu

SEQ ID NO: 518079 - RNA, 19 nt, Artificial Sequence
  Description of Artificial Sequence: Synthetic oligonucleotide
guaauuaggccacuugggu

SEQ ID NO: 518080 - RNA, 19 nt, Artificial Sequence
  Description of Artificial Sequence: Synthetic oligonucleotide
ugguggagaucucucugga

SEQ ID NO: 518081 - RNA, 19 nt, Artificial Sequence
  Description of Artificial Sequence: Synthetic oligonucleotide
gaugcuaucuuuggucaca

SEQ ID NO: 518082 - RNA, 19 nt, Artificial Sequence
  Description of Artificial Sequence: Synthetic oligonucleotide
acacgcuuuaucacuuugg

SEQ ID NO: 518083 - RNA, 19 nt, Artificial Sequence
  Description of Artificial Sequence: Synthetic oligonucleotide
cucuacggccuucuacugg

SEQ ID NO: 518084 - RNA, 19 nt, Artificial Sequence
  Description of Artificial Sequence: Synthetic oligonucleotide
ucugagaaugucagcuaua

SEQ ID NO: 518085 - RNA, 19 nt, Artificial Sequence
  Description of Artificial Sequence: Synthetic oligonucleotide
ugaugcguuuucccugcug

SEQ ID NO: 518086 - RNA, 19 nt, Artificial Sequence
  Description of Artificial Sequence: Synthetic oligonucleotide
cuugcacgaugggagaacc

SEQ ID NO: 518087 - RNA, 19 nt, Artificial Sequence
  Description of Artificial Sequence: Synthetic oligonucleotide
uuacagagagagucaggaa

SEQ ID NO: 518088 - RNA, 19 nt, Artificial Sequence
  Description of Artificial Sequence: Synthetic oligonucleotide
cagcuauauacauuauaca

SEQ ID NO: 518089 - RNA, 19 nt, Artificial Sequence
  Description of Artificial Sequence: Synthetic oligonucleotide
gacaaaaugcuggguucag

SEQ ID NO: 518090 - RNA, 19 nt, Artificial Sequence
  Description of Artificial Sequence: Synthetic oligonucleotide
cucagugugugugugugug

SEQ ID NO: 518091 - RNA, 19 nt, Artificial Sequence
  Description of Artificial Sequence: Synthetic oligonucleotide
augggagaaccacgcucgc

SEQ ID NO: 518092 - RNA, 19 nt, Artificial Sequence
  Description of Artificial Sequence: Synthetic oligonucleotide
ugguguugucacauaguau

SEQ ID NO: 518093 - RNA, 19 nt, Artificial Sequence
  Description of Artificial Sequence: Synthetic oligonucleotide
cucacguaccgccuaauga

SEQ ID NO: 518094 - RNA, 19 nt, Artificial Sequence
  Description of Artificial Sequence: Synthetic oligonucleotide
gguguugucacauaguauu

SEQ ID NO: 518095 - RNA, 19 nt, Artificial Sequence
  Description of Artificial Sequence: Synthetic oligonucleotide
gucgucuuggucuagugcu

SEQ ID NO: 518096 - RNA, 19 nt, Artificial Sequence
  Description of Artificial Sequence: Synthetic oligonucleotide
aagaacaauggaggcgcca

SEQ ID NO: 518097 - RNA, 19 nt, Artificial Sequence
  Description of Artificial Sequence: Synthetic oligonucleotide
agaauaguggauacagcau

SEQ ID NO: 518098 - RNA, 19 nt, Artificial Sequence
  Description of Artificial Sequence: Synthetic oligonucleotide
aaaaugcuacacagcuuca

SEQ ID NO: 518099 - RNA, 19 nt, Artificial Sequence
  Description of Artificial Sequence: Synthetic oligonucleotide
ucgcuagucacuggggucu

SEQ ID NO: 518100 - RNA, 19 nt, Artificial Sequence
  Description of Artificial Sequence: Synthetic oligonucleotide
uaucuacagugcaguggcc

SEQ ID NO: 518101 - RNA, 19 nt, Artificial Sequence
  Description of Artificial Sequence: Synthetic oligonucleotide
uugugacuauauauauaua

SEQ ID NO: 518102 - RNA, 19 nt, Artificial Sequence
  Description of Artificial Sequence: Synthetic oligonucleotide
ugauuuccggugaccuucu

SEQ ID NO: 518103 - RNA, 19 nt, Artificial Sequence
  Description of Artificial Sequence: Synthetic oligonucleotide
aauggcuacucuggaagua

SEQ ID NO: 518104 - RNA, 19 nt, Artificial Sequence
  Description of Artificial Sequence: Synthetic oligonucleotide
cuuuggaagcugcuugcuc

SEQ ID NO: 518105 - RNA, 19 nt, Artificial Sequence
  Description of Artificial Sequence: Synthetic oligonucleotide
gguacuggacaaaaugcug

SEQ ID NO: 518106 - RNA, 19 nt, Artificial Sequence
  Description of Artificial Sequence: Synthetic oligonucleotide
ugagaaugucagcuauaua

SEQ ID NO: 518107 - RNA, 19 nt, Artificial Sequence
  Description of Artificial Sequence: Synthetic oligonucleotide
agauacaccuggagguggg

SEQ ID NO: 518108 - RNA, 19 nt, Artificial Sequence
  Description of Artificial Sequence: Synthetic oligonucleotide
ugaguggguaugugguuuc

SEQ ID NO: 518109 - RNA, 19 nt, Artificial Sequence
  Description of Artificial Sequence: Synthetic oligonucleotide
auacauggauauccucgga

SEQ ID NO: 518110 - RNA, 19 nt, Artificial Sequence
  Description of Artificial Sequence: Synthetic oligonucleotide
ugccacaugcagguauuag

SEQ ID NO: 518111 - RNA, 19 nt, Artificial Sequence
  Description of Artificial Sequence: Synthetic oligonucleotide
ugucaaggucugaaguguu

SEQ ID NO: 518112 - RNA, 19 nt, Artificial Sequence
  Description of Artificial Sequence: Synthetic oligonucleotide
ugugugugugugugugugu

SEQ ID NO: 518113 - RNA, 19 nt, Artificial Sequence
  Description of Artificial Sequence: Synthetic oligonucleotide
cacgcuuuaucacuuugga

SEQ ID NO: 518114 - RNA, 19 nt, Artificial Sequence
  Description of Artificial Sequence: Synthetic oligonucleotide
uucccugcauuguaaucuc

SEQ ID NO: 518115 - RNA, 19 nt, Artificial Sequence
  Description of Artificial Sequence: Synthetic oligonucleotide
gacuauauauauauauguu

SEQ ID NO: 518116 - RNA, 19 nt, Artificial Sequence
  Description of Artificial Sequence: Synthetic oligonucleotide
cacgguguguccauucuca

SEQ ID NO: 518117 - RNA, 19 nt, Artificial Sequence
  Description of Artificial Sequence: Synthetic oligonucleotide
cauuauacauggauauccu

SEQ ID NO: 518118 - RNA, 19 nt, Artificial Sequence
  Description of Artificial Sequence: Synthetic oligonucleotide
uggucacaaauuagcuuau

SEQ ID NO: 518119 - RNA, 19 nt, Artificial Sequence
  Description of Artificial Sequence: Synthetic oligonucleotide
auugaguggguaugugguu

SEQ ID NO: 518120 - RNA, 19 nt, Artificial Sequence
  Description of Artificial Sequence: Synthetic oligonucleotide
gcagguauuagagaagaga

SEQ ID NO: 518121 - RNA, 19 nt, Artificial Sequence
  Description of Artificial Sequence: Synthetic oligonucleotide
cugguguugucacauagua

SEQ ID NO: 518122 - RNA, 19 nt, Artificial Sequence
  Description of Artificial Sequence: Synthetic oligonucleotide
acucuacggccuucuacug

SEQ ID NO: 518123 - RNA, 19 nt, Artificial Sequence
  Description of Artificial Sequence: Synthetic oligonucleotide
cugguucagccugaaacug

SEQ ID NO: 518124 - RNA, 19 nt, Artificial Sequence
  Description of Artificial Sequence: Synthetic oligonucleotide
ucagugugugugugugugu

SEQ ID NO: 518125 - RNA, 19 nt, Artificial Sequence
  Description of Artificial Sequence: Synthetic oligonucleotide
acuagagggauuagacaca

SEQ ID NO: 518126 - RNA, 19 nt, Artificial Sequence
  Description of Artificial Sequence: Synthetic oligonucleotide
gugugugugugugugugug

SEQ ID NO: 518127 - RNA, 19 nt, Artificial Sequence
  Description of Artificial Sequence: Synthetic oligonucleotide
ugguuugcuaaagcagcga

SEQ ID NO: 518128 - RNA, 19 nt, Artificial Sequence
  Description of Artificial Sequence: Synthetic oligonucleotide
ucuugcacgaugggagaac

SEQ ID NO: 518129 - RNA, 19 nt, Artificial Sequence
  Description of Artificial Sequence: Synthetic oligonucleotide
gauuuucauggagccugag

SEQ ID NO: 518130 - RNA, 19 nt, Artificial Sequence
  Description of Artificial Sequence: Synthetic oligonucleotide
gaugaacacuggaaaacua

SEQ ID NO: 518131 - RNA, 19 nt, Artificial Sequence
  Description of Artificial Sequence: Synthetic oligonucleotide
acgcuuuaucacuuuggaa

SEQ ID NO: 518132 - RNA, 19 nt, Artificial Sequence
  Description of Artificial Sequence: Synthetic oligonucleotide
agugugugugugugugugu

SEQ ID NO: 518133 - RNA, 19 nt, Artificial Sequence
  Description of Artificial Sequence: Synthetic oligonucleotide
aguguugcggcugggcugu

SEQ ID NO: 518134 - RNA, 19 nt, Artificial Sequence
  Description of Artificial Sequence: Synthetic oligonucleotide
cucgcuagucacugggguc

SEQ ID NO: 518135 - RNA, 19 nt, Artificial Sequence
  Description of Artificial Sequence: Synthetic oligonucleotide
gucaguggcuaagcuagag

SEQ ID NO: 518136 - RNA, 19 nt, Artificial Sequence
  Description of Artificial Sequence: Synthetic oligonucleotide
guguguguguguaaugcca

SEQ ID NO: 518137 - RNA, 19 nt, Artificial Sequence
  Description of Artificial Sequence: Synthetic oligonucleotide
cacucagugugugugugug

SEQ ID NO: 518138 - RNA, 19 nt, Artificial Sequence
  Description of Artificial Sequence: Synthetic oligonucleotide
uguguguguguguguguaa

SEQ ID NO: 518139 - RNA, 19 nt, Artificial Sequence
  Description of Artificial Sequence: Synthetic oligonucleotide
accaugggugggugaucgc

SEQ ID NO: 518140 - RNA, 19 nt, Artificial Sequence
  Description of Artificial Sequence: Synthetic oligonucleotide
uccuucucacguaccgccu

SEQ ID NO: 518141 - RNA, 19 nt, Artificial Sequence
  Description of Artificial Sequence: Synthetic oligonucleotide
guaccgccuaaugauuucc

SEQ ID NO: 518142 - RNA, 19 nt, Artificial Sequence
  Description of Artificial Sequence: Synthetic oligonucleotide
gaaguacuaaggacauguc

SEQ ID NO: 518143 - RNA, 19 nt, Artificial Sequence
  Description of Artificial Sequence: Synthetic oligonucleotide
ucugcaggugaaguucuuc

SEQ ID NO: 518144 - RNA, 19 nt, Artificial Sequence
  Description of Artificial Sequence: Synthetic oligonucleotide
ugucagcuauauacauuau

SEQ ID NO: 518145 - RNA, 19 nt, Artificial Sequence
  Description of Artificial Sequence: Synthetic oligonucleotide
ucacucagugugugugugu

SEQ ID NO: 518146 - RNA, 19 nt, Artificial Sequence
  Description of Artificial Sequence: Synthetic oligonucleotide
ucgucuuggucuagugcuc

SEQ ID NO: 518147 - RNA, 19 nt, Artificial Sequence
  Description of Artificial Sequence: Synthetic oligonucleotide
ugaucgcuggacucgcuuu

SEQ ID NO: 518148 - RNA, 19 nt, Artificial Sequence
  Description of Artificial Sequence: Synthetic oligonucleotide
cagugugugugugugugug

SEQ ID NO: 518149 - RNA, 19 nt, Artificial Sequence
  Description of Artificial Sequence: Synthetic oligonucleotide
aaauccuguugagcuggcu

SEQ ID NO: 518150 - RNA, 19 nt, Artificial Sequence
  Description of Artificial Sequence: Synthetic oligonucleotide
acaaaaugcuggguucaga

SEQ ID NO: 518151 - RNA, 19 nt, Artificial Sequence
  Description of Artificial Sequence: Synthetic oligonucleotide
gggauacaaucuugaaaug

SEQ ID NO: 518152 - RNA, 19 nt, Artificial Sequence
  Description of Artificial Sequence: Synthetic oligonucleotide
aguucccagguuagcacag

SEQ ID NO: 518153 - RNA, 19 nt, Artificial Sequence
  Description of Artificial Sequence: Synthetic oligonucleotide
uuaugccgggcaacacaga

SEQ ID NO: 518154 - RNA, 19 nt, Artificial Sequence
  Description of Artificial Sequence: Synthetic oligonucleotide
ggucgucuuggucuagugc

SEQ ID NO: 518155 - RNA, 19 nt, Artificial Sequence
  Description of Artificial Sequence: Synthetic oligonucleotide
cugucucccucaguuuugg

SEQ ID NO: 518156 - RNA, 19 nt, Artificial Sequence
  Description of Artificial Sequence: Synthetic oligonucleotide
uuacuucauuguuguuccu

SEQ ID NO: 518157 - RNA, 19 nt, Artificial Sequence
  Description of Artificial Sequence: Synthetic oligonucleotide
cugaaaauccuucacuguu

SEQ ID NO: 518158 - RNA, 19 nt, Artificial Sequence
  Description of Artificial Sequence: Synthetic oligonucleotide
gacagcgugguuugcuaaa

SEQ ID NO: 518159 - RNA, 19 nt, Artificial Sequence
  Description of Artificial Sequence: Synthetic oligonucleotide
guaccacuguuguuuuaac

SEQ ID NO: 518160 - RNA, 19 nt, Artificial Sequence
  Description of Artificial Sequence: Synthetic oligonucleotide
ggauuagacacagggcaug

SEQ ID NO: 518161 - RNA, 19 nt, Artificial Sequence
  Description of Artificial Sequence: Synthetic oligonucleotide
ggaucccaguaauuaggcc

SEQ ID NO: 518162 - RNA, 19 nt, Artificial Sequence
  Description of Artificial Sequence: Synthetic oligonucleotide
uuggagacuucuccucauu

SEQ ID NO: 518163 - RNA, 19 nt, Artificial Sequence
  Description of Artificial Sequence: Synthetic oligonucleotide
uggcuaagcuagagucccc

SEQ ID NO: 518164 - RNA, 19 nt, Artificial Sequence
  Description of Artificial Sequence: Synthetic oligonucleotide
uccucggguucuugcacga

SEQ ID NO: 518165 - RNA, 19 nt, Artificial Sequence
  Description of Artificial Sequence: Synthetic oligonucleotide
gguuagcacagaugcucag

SEQ ID NO: 518166 - RNA, 19 nt, Artificial Sequence
  Description of Artificial Sequence: Synthetic oligonucleotide
gccacaugcagguauuaga

SEQ ID NO: 518167 - RNA, 19 nt, Artificial Sequence
  Description of Artificial Sequence: Synthetic oligonucleotide
cagcgugguuugcuaaagc

SEQ ID NO: 518168 - RNA, 19 nt, Artificial Sequence
  Description of Artificial Sequence: Synthetic oligonucleotide
gcgaugaacacuggaaaac

SEQ ID NO: 518169 - RNA, 19 nt, Artificial Sequence
  Description of Artificial Sequence: Synthetic oligonucleotide
agacagcgugguuugcuaa

SEQ ID NO: 518170 - RNA, 19 nt, Artificial Sequence
  Description of Artificial Sequence: Synthetic oligonucleotide
uucuugcacgaugggagaa

SEQ ID NO: 518171 - RNA, 19 nt, Artificial Sequence
  Description of Artificial Sequence: Synthetic oligonucleotide
ggauacaaucuugaaaugu

SEQ ID NO: 518172 - RNA, 19 nt, Artificial Sequence
  Description of Artificial Sequence: Synthetic oligonucleotide
gggcauggggaucacucag

SEQ ID NO: 518173 - RNA, 19 nt, Artificial Sequence
  Description of Artificial Sequence: Synthetic oligonucleotide
gcuucaaccacuagaggga

SEQ ID NO: 518174 - RNA, 19 nt, Artificial Sequence
  Description of Artificial Sequence: Synthetic oligonucleotide
uguguucuccuugcagaaa

SEQ ID NO: 518175 - RNA, 19 nt, Artificial Sequence
  Description of Artificial Sequence: Synthetic oligonucleotide
ggagaaccacgcucgcuag

SEQ ID NO: 518176 - RNA, 19 nt, Artificial Sequence
  Description of Artificial Sequence: Synthetic oligonucleotide
acucagugugugugugugu

SEQ ID NO: 518177 - RNA, 19 nt, Artificial Sequence
  Description of Artificial Sequence: Synthetic oligonucleotide
guauuugccaagaguggaa

SEQ ID NO: 518178 - RNA, 19 nt, Artificial Sequence
  Description of Artificial Sequence: Synthetic oligonucleotide
augggaaguugcauauuga

SEQ ID NO: 518179 - RNA, 19 nt, Artificial Sequence
  Description of Artificial Sequence: Synthetic oligonucleotide
gaguugguggagaucucuc

SEQ ID NO: 518180 - RNA, 19 nt, Artificial Sequence
  Description of Artificial Sequence: Synthetic oligonucleotide
uucuguguacuggcuuuac

SEQ ID NO: 518181 - RNA, 19 nt, Artificial Sequence
  Description of Artificial Sequence: Synthetic oligonucleotide
gcuuaugccgggcaacaca

SEQ ID NO: 518182 - RNA, 19 nt, Artificial Sequence
  Description of Artificial Sequence: Synthetic oligonucleotide
gaaccacgcucgcuaguca

SEQ ID NO: 518183 - RNA, 19 nt, Artificial Sequence
  Description of Artificial Sequence: Synthetic oligonucleotide
agguauuagagaagagaua

SEQ ID NO: 518184 - RNA, 19 nt, Artificial Sequence
  Description of Artificial Sequence: Synthetic oligonucleotide
acgaugggagaaccacgcu

SEQ ID NO: 518185 - RNA, 19 nt, Artificial Sequence
  Description of Artificial Sequence: Synthetic oligonucleotide
ggaaaacuacaguaguuau

SEQ ID NO: 518186 - RNA, 19 nt, Artificial Sequence
  Description of Artificial Sequence: Synthetic oligonucleotide
cucuucaauaccacacgcu

SEQ ID NO: 518187 - RNA, 19 nt, Artificial Sequence
  Description of Artificial Sequence: Synthetic oligonucleotide
uaccaaguuugaugcguuu

SEQ ID NO: 518188 - RNA, 19 nt, Artificial Sequence
  Description of Artificial Sequence: Synthetic oligonucleotide
ccuaaugauuuccggugac

SEQ ID NO: 518189 - RNA, 19 nt, Artificial Sequence
  Description of Artificial Sequence: Synthetic oligonucleotide
uuccggugaccuucuucac

SEQ ID NO: 518190 - RNA, 19 nt, Artificial Sequence
  Description of Artificial Sequence: Synthetic oligonucleotide
cgccuaaugauuuccggug

SEQ ID NO: 518191 - RNA, 19 nt, Artificial Sequence
  Description of Artificial Sequence: Synthetic oligonucleotide
cacgcucgcuagucacugg

SEQ ID NO: 518192 - RNA, 19 nt, Artificial Sequence
  Description of Artificial Sequence: Synthetic oligonucleotide
gguucagacaaggucaccu

SEQ ID NO: 518193 - RNA, 19 nt, Artificial Sequence
  Description of Artificial Sequence: Synthetic oligonucleotide
cccugguguugucacauag

SEQ ID NO: 518194 - RNA, 19 nt, Artificial Sequence
  Description of Artificial Sequence: Synthetic oligonucleotide
aaaugccgaaggaguuggu

SEQ ID NO: 518195 - RNA, 19 nt, Artificial Sequence
  Description of Artificial Sequence: Synthetic oligonucleotide
caccacgguguguccauuc

SEQ ID NO: 518196 - RNA, 19 nt, Artificial Sequence
  Description of Artificial Sequence: Synthetic oligonucleotide
gccuaaugauuuccgguga

SEQ ID NO: 518197 - RNA, 19 nt, Artificial Sequence
  Description of Artificial Sequence: Synthetic oligonucleotide
cuucaauaccacacgcuuu

SEQ ID NO: 518198 - RNA, 19 nt, Artificial Sequence
  Description of Artificial Sequence: Synthetic oligonucleotide
uugcugacucuacggccuu

SEQ ID NO: 518199 - RNA, 19 nt, Artificial Sequence
  Description of Artificial Sequence: Synthetic oligonucleotide
cacuugggucacuccugac

SEQ ID NO: 518200 - RNA, 19 nt, Artificial Sequence
  Description of Artificial Sequence: Synthetic oligonucleotide
caauggcuacucuggaagu

SEQ ID NO: 518201 - RNA, 19 nt, Artificial Sequence
  Description of Artificial Sequence: Synthetic oligonucleotide
gugugugugugugugugua

SEQ ID NO: 518202 - RNA, 19 nt, Artificial Sequence
  Description of Artificial Sequence: Synthetic oligonucleotide
aucgcuggacucgcuuucu

SEQ ID NO: 518203 - RNA, 19 nt, Artificial Sequence
  Description of Artificial Sequence: Synthetic oligonucleotide
auggaggcgccaguuccca

SEQ ID NO: 518204 - RNA, 19 nt, Artificial Sequence
  Description of Artificial Sequence: Synthetic oligonucleotide
gcauaucaucucccuuuug

SEQ ID NO: 518205 - RNA, 19 nt, Artificial Sequence
  Description of Artificial Sequence: Synthetic oligonucleotide
caguaagacagcgugguuu

SEQ ID NO: 518206 - RNA, 19 nt, Artificial Sequence
  Description of Artificial Sequence: Synthetic oligonucleotide
acguaccgccuaaugauuu

SEQ ID NO: 518207 - RNA, 19 nt, Artificial Sequence
  Description of Artificial Sequence: Synthetic oligonucleotide
cuucucacguaccgccuaa

SEQ ID NO: 518208 - RNA, 19 nt, Artificial Sequence
  Description of Artificial Sequence: Synthetic oligonucleotide
gcuacucuggaaguacuaa

SEQ ID NO: 518209 - RNA, 19 nt, Artificial Sequence
  Description of Artificial Sequence: Synthetic oligonucleotide
ggggaucacucagugugug

SEQ ID NO: 518210 - RNA, 19 nt, Artificial Sequence
  Description of Artificial Sequence: Synthetic oligonucleotide
caaggucugaaguguuccu

SEQ ID NO: 518211 - RNA, 19 nt, Artificial Sequence
  Description of Artificial Sequence: Synthetic oligonucleotide
uguugcggcugggcugucu

SEQ ID NO: 518212 - RNA, 19 nt, Artificial Sequence
  Description of Artificial Sequence: Synthetic oligonucleotide
uucucacguaccgccuaau

SEQ ID NO: 518213 - RNA, 19 nt, Artificial Sequence
  Description of Artificial Sequence: Synthetic oligonucleotide
ucgcuggacucgcuuucuu

SEQ ID NO: 518214 - RNA, 19 nt, Artificial Sequence
  Description of Artificial Sequence: Synthetic oligonucleotide
gagaaccacgcucgcuagu

SEQ ID NO: 518215 - RNA, 19 nt, Artificial Sequence
  Description of Artificial Sequence: Synthetic oligonucleotide
guagacuaccaaguuugau

SEQ ID NO: 518216 - RNA, 19 nt, Artificial Sequence
  Description of Artificial Sequence: Synthetic oligonucleotide
ggacucgcuuucuuuggaa

SEQ ID NO: 518217 - RNA, 19 nt, Artificial Sequence
  Description of Artificial Sequence: Synthetic oligonucleotide
accacgcucgcuagucacu

SEQ ID NO: 518218 - RNA, 19 nt, Artificial Sequence
  Description of Artificial Sequence: Synthetic oligonucleotide
gguagacuaccaaguuuga

SEQ ID NO: 518219 - RNA, 19 nt, Artificial Sequence
  Description of Artificial Sequence: Synthetic oligonucleotide
cauguaccacuguuguuuu

SEQ ID NO: 518220 - RNA, 19 nt, Artificial Sequence
  Description of Artificial Sequence: Synthetic oligonucleotide
cauggggaucacucagugu

SEQ ID NO: 518221 - RNA, 19 nt, Artificial Sequence
  Description of Artificial Sequence: Synthetic oligonucleotide
cuggcuccgggugcauuug

SEQ ID NO: 518222 - RNA, 19 nt, Artificial Sequence
  Description of Artificial Sequence: Synthetic oligonucleotide
guguguguguguguguaau

SEQ ID NO: 518223 - RNA, 19 nt, Artificial Sequence
  Description of Artificial Sequence: Synthetic oligonucleotide
gcucagaauaguggauaca

SEQ ID NO: 518224 - RNA, 19 nt, Artificial Sequence
  Description of Artificial Sequence: Synthetic oligonucleotide
ggugggugaucgcuggacu

SEQ ID NO: 518225 - RNA, 19 nt, Artificial Sequence
  Description of Artificial Sequence: Synthetic oligonucleotide
gggugaucgcuggacucgc

SEQ ID NO: 518226 - RNA, 19 nt, Artificial Sequence
  Description of Artificial Sequence: Synthetic oligonucleotide
ccccucugucacuugaaga

SEQ ID NO: 518227 - RNA, 19 nt, Artificial Sequence
  Description of Artificial Sequence: Synthetic oligonucleotide
guccauucucaucgacaua

SEQ ID NO: 518228 - RNA, 19 nt, Artificial Sequence
  Description of Artificial Sequence: Synthetic oligonucleotide
ccucggaaacauuccccuc

SEQ ID NO: 518229 - RNA, 19 nt, Artificial Sequence
  Description of Artificial Sequence: Synthetic oligonucleotide
cguaccgccuaaugauuuc

SEQ ID NO: 518230 - RNA, 19 nt, Artificial Sequence
  Description of Artificial Sequence: Synthetic oligonucleotide
gcuagucacuggggucugg

SEQ ID NO: 518231 - RNA, 19 nt, Artificial Sequence
  Description of Artificial Sequence: Synthetic oligonucleotide
gugaucgcuggacucgcuu

SEQ ID NO: 518232 - RNA, 19 nt, Artificial Sequence
  Description of Artificial Sequence: Synthetic oligonucleotide
cguucccugcauuguaauc

SEQ ID NO: 518233 - RNA, 19 nt, Artificial Sequence
  Description of Artificial Sequence: Synthetic oligonucleotide
augccacaugcagguauua

SEQ ID NO: 518234 - RNA, 19 nt, Artificial Sequence
  Description of Artificial Sequence: Synthetic oligonucleotide
cacguaccgccuaaugauu

SEQ ID NO: 518235 - RNA, 19 nt, Artificial Sequence
  Description of Artificial Sequence: Synthetic oligonucleotide
guaaugccacaugcaggua

SEQ ID NO: 518236 - RNA, 19 nt, Artificial Sequence
  Description of Artificial Sequence: Synthetic oligonucleotide
gcgccaguucccagguuag

SEQ ID NO: 518237 - RNA, 19 nt, Artificial Sequence
  Description of Artificial Sequence: Synthetic oligonucleotide
guuguucgucugagaaugu

SEQ ID NO: 518238 - RNA, 19 nt, Artificial Sequence
  Description of Artificial Sequence: Synthetic oligonucleotide
ccacgcucgcuagucacug

SEQ ID NO: 518239 - RNA, 19 nt, Artificial Sequence
  Description of Artificial Sequence: Synthetic oligonucleotide
guguuacccuuuagugaaa

SEQ ID NO: 518240 - RNA, 19 nt, Artificial Sequence
  Description of Artificial Sequence: Synthetic oligonucleotide
gggauuagacacagggcau

SEQ ID NO: 518241 - RNA, 19 nt, Artificial Sequence
  Description of Artificial Sequence: Synthetic oligonucleotide
ggccuucuacugguucagc

SEQ ID NO: 518242 - RNA, 19 nt, Artificial Sequence
  Description of Artificial Sequence: Synthetic oligonucleotide
ggcuacucuggaaguacua

SEQ ID NO: 518243 - RNA, 19 nt, Artificial Sequence
  Description of Artificial Sequence: Synthetic oligonucleotide
ccgccuaaugauuuccggu

SEQ ID NO: 518244 - RNA, 19 nt, Artificial Sequence
  Description of Artificial Sequence: Synthetic oligonucleotide
cggguucuugcacgauggg

SEQ ID NO: 518245 - RNA, 19 nt, Artificial Sequence
  Description of Artificial Sequence: Synthetic oligonucleotide
cugacucuacggccuucua

SEQ ID NO: 518246 - RNA, 19 nt, Artificial Sequence
  Description of Artificial Sequence: Synthetic oligonucleotide
gcuuauaguuagagagggu

SEQ ID NO: 518247 - RNA, 19 nt, Artificial Sequence
  Description of Artificial Sequence: Synthetic oligonucleotide
guacaauggucugcuccau

SEQ ID NO: 518248 - RNA, 19 nt, Artificial Sequence
  Description of Artificial Sequence: Synthetic oligonucleotide
gauuuccggugaccuucuu

SEQ ID NO: 518249 - RNA, 19 nt, Artificial Sequence
  Description of Artificial Sequence: Synthetic oligonucleotide
ggcauggggaucacucagu

SEQ ID NO: 518250 - RNA, 19 nt, Artificial Sequence
  Description of Artificial Sequence: Synthetic oligonucleotide
ggucaguggcuaagcuaga

SEQ ID NO: 518251 - RNA, 19 nt, Artificial Sequence
  Description of Artificial Sequence: Synthetic oligonucleotide
ccagguuagcacagaugcu

SEQ ID NO: 518252 - RNA, 19 nt, Artificial Sequence
  Description of Artificial Sequence: Synthetic oligonucleotide
ccuucucacguaccgccua

SEQ ID NO: 518253 - RNA, 19 nt, Artificial Sequence
  Description of Artificial Sequence: Synthetic oligonucleotide
ccaugggugggugaucgcu

SEQ ID NO: 518254 - RNA, 19 nt, Artificial Sequence
  Description of Artificial Sequence: Synthetic oligonucleotide
cuacggccuucuacugguu

SEQ ID NO: 518255 - RNA, 19 nt, Artificial Sequence
  Description of Artificial Sequence: Synthetic oligonucleotide
ggugaucgcuggacucgcu

SEQ ID NO: 518256 - RNA, 19 nt, Artificial Sequence
  Description of Artificial Sequence: Synthetic oligonucleotide
cuguggcguucccugcauu

SEQ ID NO: 518257 - RNA, 19 nt, Artificial Sequence
  Description of Artificial Sequence: Synthetic oligonucleotide
cgcuagucacuggggucug

SEQ ID NO: 518258 - RNA, 19 nt, Artificial Sequence
  Description of Artificial Sequence: Synthetic oligonucleotide
ccaguaagacagcgugguu

SEQ ID NO: 518259 - RNA, 19 nt, Artificial Sequence
  Description of Artificial Sequence: Synthetic oligonucleotide
gcggcugggcugucucccu

SEQ ID NO: 518260 - RNA, 19 nt, Artificial Sequence
  Description of Artificial Sequence: Synthetic oligonucleotide
ccuguggcguucccugcau

SEQ ID NO: 518261 - RNA, 19 nt, Artificial Sequence
  Description of Artificial Sequence: Synthetic oligonucleotide
ccacacgcuuuaucacuuu

SEQ ID NO: 518262 - RNA, 19 nt, Artificial Sequence
  Description of Artificial Sequence: Synthetic oligonucleotide
cccaagaccugaggcuggu

SEQ ID NO: 518263 - RNA, 19 nt, Artificial Sequence
  Description of Artificial Sequence: Synthetic oligonucleotide
ccucggguucuugcacgau

SEQ ID NO: 518264 - RNA, 19 nt, Artificial Sequence
  Description of Artificial Sequence: Synthetic oligonucleotide
cgggugcauuuggggagaa

SEQ ID NO: 518265 - RNA, 19 nt, Artificial Sequence
  Description of Artificial Sequence: Synthetic oligonucleotide
agcaguaggauauuauugc

SEQ ID NO: 518266 - RNA, 19 nt, Artificial Sequence
  Description of Artificial Sequence: Synthetic oligonucleotide
aaagcguccauccaccuuc

SEQ ID NO: 518267 - RNA, 19 nt, Artificial Sequence
  Description of Artificial Sequence: Synthetic oligonucleotide
uucuuuauaaacuuccucu

SEQ ID NO: 518268 - RNA, 19 nt, Artificial Sequence
  Description of Artificial Sequence: Synthetic oligonucleotide
agaggaaugcaccagaaca

SEQ ID NO: 518269 - RNA, 19 nt, Artificial Sequence
  Description of Artificial Sequence: Synthetic oligonucleotide
auuguuauagucauuagcu

SEQ ID NO: 518270 - RNA, 19 nt, Artificial Sequence
  Description of Artificial Sequence: Synthetic oligonucleotide
aacugacaaguauaccggc

SEQ ID NO: 518271 - RNA, 19 nt, Artificial Sequence
  Description of Artificial Sequence: Synthetic oligonucleotide
gggaacaccauccagauag

SEQ ID NO: 518272 - RNA, 19 nt, Artificial Sequence
  Description of Artificial Sequence: Synthetic oligonucleotide
uugcaacucacuuuuauug

SEQ ID NO: 518273 - RNA, 19 nt, Artificial Sequence
  Description of Artificial Sequence: Synthetic oligonucleotide
acaauagaaaggcacuuag

SEQ ID NO: 518274 - RNA, 19 nt, Artificial Sequence
  Description of Artificial Sequence: Synthetic oligonucleotide
agcagaaccacccaggaga

SEQ ID NO: 518275 - RNA, 19 nt, Artificial Sequence
  Description of Artificial Sequence: Synthetic oligonucleotide
aauccacagcauuaggcag

SEQ ID NO: 518276 - RNA, 19 nt, Artificial Sequence
  Description of Artificial Sequence: Synthetic oligonucleotide
agcucaaagagcugguuac

SEQ ID NO: 518277 - RNA, 19 nt, Artificial Sequence
  Description of Artificial Sequence: Synthetic oligonucleotide
agcauuaggcaguggaggc

SEQ ID NO: 518278 - RNA, 19 nt, Artificial Sequence
  Description of Artificial Sequence: Synthetic oligonucleotide
aauggcagcaguaccgagc

SEQ ID NO: 518279 - RNA, 19 nt, Artificial Sequence
  Description of Artificial Sequence: Synthetic oligonucleotide
caaacuaugggcuagggaa

SEQ ID NO: 518280 - RNA, 19 nt, Artificial Sequence
  Description of Artificial Sequence: Synthetic oligonucleotide
aagaccuucuagcaccauc

SEQ ID NO: 518281 - RNA, 19 nt, Artificial Sequence
  Description of Artificial Sequence: Synthetic oligonucleotide
uguuauagucauuagcuua

SEQ ID NO: 518282 - RNA, 19 nt, Artificial Sequence
  Description of Artificial Sequence: Synthetic oligonucleotide
uuagcacccaagagcaugg

SEQ ID NO: 518283 - RNA, 19 nt, Artificial Sequence
  Description of Artificial Sequence: Synthetic oligonucleotide
agcuacaauagaaaggcac

SEQ ID NO: 518284 - RNA, 19 nt, Artificial Sequence
  Description of Artificial Sequence: Synthetic oligonucleotide
aguaggauauuauugcuau

SEQ ID NO: 518285 - RNA, 19 nt, Artificial Sequence
  Description of Artificial Sequence: Synthetic oligonucleotide
uggguagacccgaagacag

SEQ ID NO: 518286 - RNA, 19 nt, Artificial Sequence
  Description of Artificial Sequence: Synthetic oligonucleotide
gaaugcaccagaacaagag

SEQ ID NO: 518287 - RNA, 19 nt, Artificial Sequence
  Description of Artificial Sequence: Synthetic oligonucleotide
aaggggucuaaggaauucc

SEQ ID NO: 518288 - RNA, 19 nt, Artificial Sequence
  Description of Artificial Sequence: Synthetic oligonucleotide
uggucuaucacugaaucac

SEQ ID NO: 518289 - RNA, 19 nt, Artificial Sequence
  Description of Artificial Sequence: Synthetic oligonucleotide
caggagguugauuggaucg

SEQ ID NO: 518290 - RNA, 19 nt, Artificial Sequence
  Description of Artificial Sequence: Synthetic oligonucleotide
cuuuaggucaagcggcucg

SEQ ID NO: 518291 - RNA, 19 nt, Artificial Sequence
  Description of Artificial Sequence: Synthetic oligonucleotide
gaucaggucagggugaccc

SEQ ID NO: 518292 - RNA, 19 nt, Artificial Sequence
  Description of Artificial Sequence: Synthetic oligonucleotide
guaccgagcauccuguucc

SEQ ID NO: 518293 - RNA, 19 nt, Artificial Sequence
  Description of Artificial Sequence: Synthetic oligonucleotide
agcuccuuaacuugcucac

SEQ ID NO: 518294 - RNA, 19 nt, Artificial Sequence
  Description of Artificial Sequence: Synthetic oligonucleotide
cucccuaugcaaaguaugg

SEQ ID NO: 518295 - RNA, 19 nt, Artificial Sequence
  Description of Artificial Sequence: Synthetic oligonucleotide
agaaccacccaggagagag

SEQ ID NO: 518296 - RNA, 19 nt, Artificial Sequence
  Description of Artificial Sequence: Synthetic oligonucleotide
aauggcaaccugcccugac

SEQ ID NO: 518297 - RNA, 19 nt, Artificial Sequence
  Description of Artificial Sequence: Synthetic oligonucleotide
gaagccacggccguggcgg

SEQ ID NO: 518298 - RNA, 19 nt, Artificial Sequence
  Description of Artificial Sequence: Synthetic oligonucleotide
aaguauaccggcccuucca

SEQ ID NO: 518299 - RNA, 19 nt, Artificial Sequence
  Description of Artificial Sequence: Synthetic oligonucleotide
cuugcuaccagcagaacca

SEQ ID NO: 518300 - RNA, 19 nt, Artificial Sequence
  Description of Artificial Sequence: Synthetic oligonucleotide
ugacccuucugaaacagaa

SEQ ID NO: 518301 - RNA, 19 nt, Artificial Sequence
  Description of Artificial Sequence: Synthetic oligonucleotide
cugacaaguauaccggccc

SEQ ID NO: 518302 - RNA, 19 nt, Artificial Sequence
  Description of Artificial Sequence: Synthetic oligonucleotide
aagcugguaggugcaaagc

SEQ ID NO: 518303 - RNA, 19 nt, Artificial Sequence
  Description of Artificial Sequence: Synthetic oligonucleotide
cagcuuuaggucaagcggc

SEQ ID NO: 518304 - RNA, 19 nt, Artificial Sequence
  Description of Artificial Sequence: Synthetic oligonucleotide
agguugauuggaucguggg

SEQ ID NO: 518305 - RNA, 19 nt, Artificial Sequence
  Description of Artificial Sequence: Synthetic oligonucleotide
acuuagaaccuguuaaaau

SEQ ID NO: 518306 - RNA, 19 nt, Artificial Sequence
  Description of Artificial Sequence: Synthetic oligonucleotide
uccuguuccggcuugacau

SEQ ID NO: 518307 - RNA, 19 nt, Artificial Sequence
  Description of Artificial Sequence: Synthetic oligonucleotide
ugcccuauuccucugcucu

SEQ ID NO: 518308 - RNA, 19 nt, Artificial Sequence
  Description of Artificial Sequence: Synthetic oligonucleotide
ggacuuagggccuagggcc

SEQ ID NO: 518309 - RNA, 19 nt, Artificial Sequence
  Description of Artificial Sequence: Synthetic oligonucleotide
auaccggcccuuccaagcc

SEQ ID NO: 518310 - RNA, 19 nt, Artificial Sequence
  Description of Artificial Sequence: Synthetic oligonucleotide
acugacaaguauaccggcc

SEQ ID NO: 518311 - RNA, 19 nt, Artificial Sequence
  Description of Artificial Sequence: Synthetic oligonucleotide
ugacuacccagccaggagu

SEQ ID NO: 518312 - RNA, 19 nt, Artificial Sequence
  Description of Artificial Sequence: Synthetic oligonucleotide
gagcaguaggauauuauug

SEQ ID NO: 518313 - RNA, 19 nt, Artificial Sequence
  Description of Artificial Sequence: Synthetic oligonucleotide
cagauagcgaaguggcugg

SEQ ID NO: 518314 - RNA, 19 nt, Artificial Sequence
  Description of Artificial Sequence: Synthetic oligonucleotide
uugauuggaucguggguag

SEQ ID NO: 518315 - RNA, 19 nt, Artificial Sequence
  Description of Artificial Sequence: Synthetic oligonucleotide
aaacuaugggcuagggaag

SEQ ID NO: 518316 - RNA, 19 nt, Artificial Sequence
  Description of Artificial Sequence: Synthetic oligonucleotide
ggauauuauugcuauuuug

SEQ ID NO: 518317 - RNA, 19 nt, Artificial Sequence
  Description of Artificial Sequence: Synthetic oligonucleotide
uuccggcuugacauggugg

SEQ ID NO: 518318 - RNA, 19 nt, Artificial Sequence
  Description of Artificial Sequence: Synthetic oligonucleotide
ucccaguugauaaguaggu

SEQ ID NO: 518319 - RNA, 19 nt, Artificial Sequence
  Description of Artificial Sequence: Synthetic oligonucleotide
agcaguaccgagcauccug

SEQ ID NO: 518320 - RNA, 19 nt, Artificial Sequence
  Description of Artificial Sequence: Synthetic oligonucleotide
aguaccgagcauccuguuc

SEQ ID NO: 518321 - RNA, 19 nt, Artificial Sequence
  Description of Artificial Sequence: Synthetic oligonucleotide
aggaaggccucacccaaac

SEQ ID NO: 518322 - RNA, 19 nt, Artificial Sequence
  Description of Artificial Sequence: Synthetic oligonucleotide
acuuggcccaucgacacac

SEQ ID NO: 518323 - RNA, 19 nt, Artificial Sequence
  Description of Artificial Sequence: Synthetic oligonucleotide
cugauguccuggaaugugc

SEQ ID NO: 518324 - RNA, 19 nt, Artificial Sequence
  Description of Artificial Sequence: Synthetic oligonucleotide
gacagguccaauacagugc

SEQ ID NO: 518325 - RNA, 19 nt, Artificial Sequence
  Description of Artificial Sequence: Synthetic oligonucleotide
auuggaucguggguagacc

SEQ ID NO: 518326 - RNA, 19 nt, Artificial Sequence
  Description of Artificial Sequence: Synthetic oligonucleotide
agggacuuagggccuaggg

SEQ ID NO: 518327 - RNA, 19 nt, Artificial Sequence
  Description of Artificial Sequence: Synthetic oligonucleotide
gaauaggcagagcugcuca

SEQ ID NO: 518328 - RNA, 19 nt, Artificial Sequence
  Description of Artificial Sequence: Synthetic oligonucleotide
ugauguccuggaaugugca

SEQ ID NO: 518329 - RNA, 19 nt, Artificial Sequence
  Description of Artificial Sequence: Synthetic oligonucleotide
ucguggguagacccgaaga

SEQ ID NO: 518330 - RNA, 19 nt, Artificial Sequence
  Description of Artificial Sequence: Synthetic oligonucleotide
gagccucaaacccaauccc

SEQ ID NO: 518331 - RNA, 19 nt, Artificial Sequence
  Description of Artificial Sequence: Synthetic oligonucleotide
uuggccaagggcagcuccg

SEQ ID NO: 518332 - RNA, 19 nt, Artificial Sequence
  Description of Artificial Sequence: Synthetic oligonucleotide
ccuggaaugugcaacaaac

SEQ ID NO: 518333 - RNA, 19 nt, Artificial Sequence
  Description of Artificial Sequence: Synthetic oligonucleotide
cuuagcacccaagagcaug

SEQ ID NO: 518334 - RNA, 19 nt, Artificial Sequence
  Description of Artificial Sequence: Synthetic oligonucleotide
gugagugaggccuuagcac

SEQ ID NO: 518335 - RNA, 19 nt, Artificial Sequence
  Description of Artificial Sequence: Synthetic oligonucleotide
gaagaauuggaaggagcug

SEQ ID NO: 518336 - RNA, 19 nt, Artificial Sequence
  Description of Artificial Sequence: Synthetic oligonucleotide
uccggugagaggcacuugu

SEQ ID NO: 518337 - RNA, 19 nt, Artificial Sequence
  Description of Artificial Sequence: Synthetic oligonucleotide
cuuccucucacauggagga

SEQ ID NO: 518338 - RNA, 19 nt, Artificial Sequence
  Description of Artificial Sequence: Synthetic oligonucleotide
agcaucuuguaccuggcau

SEQ ID NO: 518339 - RNA, 19 nt, Artificial Sequence
  Description of Artificial Sequence: Synthetic oligonucleotide
gaacaccauccagauagcg

SEQ ID NO: 518340 - RNA, 19 nt, Artificial Sequence
  Description of Artificial Sequence: Synthetic oligonucleotide
uucugaucacugaggauuc

SEQ ID NO: 518341 - RNA, 19 nt, Artificial Sequence
  Description of Artificial Sequence: Synthetic oligonucleotide
agggccuagggcccuaacg

SEQ ID NO: 518342 - RNA, 19 nt, Artificial Sequence
  Description of Artificial Sequence: Synthetic oligonucleotide
cagccgagcccuaucaggg

SEQ ID NO: 518343 - RNA, 19 nt, Artificial Sequence
  Description of Artificial Sequence: Synthetic oligonucleotide
uuuaaacuucuaugcuaac

SEQ ID NO: 518344 - RNA, 19 nt, Artificial Sequence
  Description of Artificial Sequence: Synthetic oligonucleotide
ccagccaggaguuagcgcc

SEQ ID NO: 518345 - RNA, 19 nt, Artificial Sequence
  Description of Artificial Sequence: Synthetic oligonucleotide
uccuaaagcccagcagucg

SEQ ID NO: 518346 - RNA, 19 nt, Artificial Sequence
  Description of Artificial Sequence: Synthetic oligonucleotide
aggggucuaaggaauuccc

SEQ ID NO: 518347 - RNA, 19 nt, Artificial Sequence
  Description of Artificial Sequence: Synthetic oligonucleotide
ggcccaucgacacacaagc

SEQ ID NO: 518348 - RNA, 19 nt, Artificial Sequence
  Description of Artificial Sequence: Synthetic oligonucleotide
aggauucccaguugauaag

SEQ ID NO: 518349 - RNA, 19 nt, Artificial Sequence
  Description of Artificial Sequence: Synthetic oligonucleotide
ucccaauggcagcaguacc

SEQ ID NO: 518350 - RNA, 19 nt, Artificial Sequence
  Description of Artificial Sequence: Synthetic oligonucleotide
guuaaaauacugauguccu

SEQ ID NO: 518351 - RNA, 19 nt, Artificial Sequence
  Description of Artificial Sequence: Synthetic oligonucleotide
uccaauacagugccuggua

SEQ ID NO: 518352 - RNA, 19 nt, Artificial Sequence
  Description of Artificial Sequence: Synthetic oligonucleotide
ugacaaguauaccggcccu

SEQ ID NO: 518353 - RNA, 19 nt, Artificial Sequence
  Description of Artificial Sequence: Synthetic oligonucleotide
cugaguugccuguggacag

SEQ ID NO: 518354 - RNA, 19 nt, Artificial Sequence
  Description of Artificial Sequence: Synthetic oligonucleotide
auugaggggcagaacagag

SEQ ID NO: 518355 - RNA, 19 nt, Artificial Sequence
  Description of Artificial Sequence: Synthetic oligonucleotide
acaaguauaccggcccuuc

SEQ ID NO: 518356 - RNA, 19 nt, Artificial Sequence
  Description of Artificial Sequence: Synthetic oligonucleotide
acccaauguccucucccgc

SEQ ID NO: 518357 - RNA, 19 nt, Artificial Sequence
  Description of Artificial Sequence: Synthetic oligonucleotide
cuaugggcuagggaagugg

SEQ ID NO: 518358 - RNA, 19 nt, Artificial Sequence
  Description of Artificial Sequence: Synthetic oligonucleotide
gagguugauuggaucgugg

SEQ ID NO: 518359 - RNA, 19 nt, Artificial Sequence
  Description of Artificial Sequence: Synthetic oligonucleotide
cauuaggcaguggaggcag

SEQ ID NO: 518360 - RNA, 19 nt, Artificial Sequence
  Description of Artificial Sequence: Synthetic oligonucleotide
uguucgucaggggaugagc

SEQ ID NO: 518361 - RNA, 19 nt, Artificial Sequence
  Description of Artificial Sequence: Synthetic oligonucleotide
auagcgaaguggcuggaaa

SEQ ID NO: 518362 - RNA, 19 nt, Artificial Sequence
  Description of Artificial Sequence: Synthetic oligonucleotide
auguggaugagcaucuugu

SEQ ID NO: 518363 - RNA, 19 nt, Artificial Sequence
  Description of Artificial Sequence: Synthetic oligonucleotide
gauuggaucguggguagac

SEQ ID NO: 518364 - RNA, 19 nt, Artificial Sequence
  Description of Artificial Sequence: Synthetic oligonucleotide
aggaaugcaccagaacaag

SEQ ID NO: 518365 - RNA, 19 nt, Artificial Sequence
  Description of Artificial Sequence: Synthetic oligonucleotide
agcuaaugucaccuuccag

SEQ ID NO: 518366 - RNA, 19 nt, Artificial Sequence
  Description of Artificial Sequence: Synthetic oligonucleotide
aaaagcguccauccaccuu

SEQ ID NO: 518367 - RNA, 19 nt, Artificial Sequence
  Description of Artificial Sequence: Synthetic oligonucleotide
aacuaugggcuagggaagu

SEQ ID NO: 518368 - RNA, 19 nt, Artificial Sequence
  Description of Artificial Sequence: Synthetic oligonucleotide
uauggugccgggccacacc

SEQ ID NO: 518369 - RNA, 19 nt, Artificial Sequence
  Description of Artificial Sequence: Synthetic oligonucleotide
gaggccuuagcacccaaga

SEQ ID NO: 518370 - RNA, 19 nt, Artificial Sequence
  Description of Artificial Sequence: Synthetic oligonucleotide
cuucaagggguagagccag

SEQ ID NO: 518371 - RNA, 19 nt, Artificial Sequence
  Description of Artificial Sequence: Synthetic oligonucleotide
guugauuggaucgugggua

SEQ ID NO: 518372 - RNA, 19 nt, Artificial Sequence
  Description of Artificial Sequence: Synthetic oligonucleotide
gggccuagggcccuaacgg

SEQ ID NO: 518373 - RNA, 19 nt, Artificial Sequence
  Description of Artificial Sequence: Synthetic oligonucleotide
agcugguuugagcagcaca

SEQ ID NO: 518374 - RNA, 19 nt, Artificial Sequence
  Description of Artificial Sequence: Synthetic oligonucleotide
uucgucaggggaugagccc

SEQ ID NO: 518375 - RNA, 19 nt, Artificial Sequence
  Description of Artificial Sequence: Synthetic oligonucleotide
ugaaucacaugcugagcua

SEQ ID NO: 518376 - RNA, 19 nt, Artificial Sequence
  Description of Artificial Sequence: Synthetic oligonucleotide
aggauauuauugcuauuuu

SEQ ID NO: 518377 - RNA, 19 nt, Artificial Sequence
  Description of Artificial Sequence: Synthetic oligonucleotide
uagcaaggggaguccauca

SEQ ID NO: 518378 - RNA, 19 nt, Artificial Sequence
  Description of Artificial Sequence: Synthetic oligonucleotide
aguauaccggcccuuccaa

SEQ ID NO: 518379 - RNA, 19 nt, Artificial Sequence
  Description of Artificial Sequence: Synthetic oligonucleotide
ggcauugaagccacggccg

SEQ ID NO: 518380 - RNA, 19 nt, Artificial Sequence
  Description of Artificial Sequence: Synthetic oligonucleotide
gggacuuagggccuagggc

SEQ ID NO: 518381 - RNA, 19 nt, Artificial Sequence
  Description of Artificial Sequence: Synthetic oligonucleotide
aggaguuagcgccucugga

SEQ ID NO: 518382 - RNA, 19 nt, Artificial Sequence
  Description of Artificial Sequence: Synthetic oligonucleotide
uccauugcccuggcgcucg

SEQ ID NO: 518383 - RNA, 19 nt, Artificial Sequence
  Description of Artificial Sequence: Synthetic oligonucleotide
caggaguuagcgccucugg

SEQ ID NO: 518384 - RNA, 19 nt, Artificial Sequence
  Description of Artificial Sequence: Synthetic oligonucleotide
gaaguggcuggaaauccac

SEQ ID NO: 518385 - RNA, 19 nt, Artificial Sequence
  Description of Artificial Sequence: Synthetic oligonucleotide
cauggagaggaaugcacca

SEQ ID NO: 518386 - RNA, 19 nt, Artificial Sequence
  Description of Artificial Sequence: Synthetic oligonucleotide
cugaaucacaugcugagcu

SEQ ID NO: 518387 - RNA, 19 nt, Artificial Sequence
  Description of Artificial Sequence: Synthetic oligonucleotide
ucaagggguagagccagca

SEQ ID NO: 518388 - RNA, 19 nt, Artificial Sequence
  Description of Artificial Sequence: Synthetic oligonucleotide
guucgucaggggaugagcc

SEQ ID NO: 518389 - RNA, 19 nt, Artificial Sequence
  Description of Artificial Sequence: Synthetic oligonucleotide
ggaguuagcgccucuggac

SEQ ID NO: 518390 - RNA, 19 nt, Artificial Sequence
  Description of Artificial Sequence: Synthetic oligonucleotide
auggucaaccaggucuugg

SEQ ID NO: 518391 - RNA, 19 nt, Artificial Sequence
  Description of Artificial Sequence: Synthetic oligonucleotide
agcccuaucagggcugggg

SEQ ID NO: 518392 - RNA, 19 nt, Artificial Sequence
  Description of Artificial Sequence: Synthetic oligonucleotide
gcccacaguagguagcugg

SEQ ID NO: 518393 - RNA, 19 nt, Artificial Sequence
  Description of Artificial Sequence: Synthetic oligonucleotide
caaguauaccggcccuucc

SEQ ID NO: 518394 - RNA, 19 nt, Artificial Sequence
  Description of Artificial Sequence: Synthetic oligonucleotide
ggugaugcucagcuuuagg

SEQ ID NO: 518395 - RNA, 19 nt, Artificial Sequence
  Description of Artificial Sequence: Synthetic oligonucleotide
uaccgagcauccuguuccg

SEQ ID NO: 518396 - RNA, 19 nt, Artificial Sequence
  Description of Artificial Sequence: Synthetic oligonucleotide
agccgagcccuaucagggc

SEQ ID NO: 518397 - RNA, 19 nt, Artificial Sequence
  Description of Artificial Sequence: Synthetic oligonucleotide
ucgucaggggaugagccca

SEQ ID NO: 518398 - RNA, 19 nt, Artificial Sequence
  Description of Artificial Sequence: Synthetic oligonucleotide
ucauugguguguguccgga

SEQ ID NO: 518399 - RNA, 19 nt, Artificial Sequence
  Description of Artificial Sequence: Synthetic oligonucleotide
gauugaggggcagaacaga

SEQ ID NO: 518400 - RNA, 19 nt, Artificial Sequence
  Description of Artificial Sequence: Synthetic oligonucleotide
ggaaaagcguccauccacc

SEQ ID NO: 518401 - RNA, 19 nt, Artificial Sequence
  Description of Artificial Sequence: Synthetic oligonucleotide
uagcgaaguggcuggaaau

SEQ ID NO: 518402 - RNA, 19 nt, Artificial Sequence
  Description of Artificial Sequence: Synthetic oligonucleotide
aaggccucacccaaacuau

SEQ ID NO: 518403 - RNA, 19 nt, Artificial Sequence
  Description of Artificial Sequence: Synthetic oligonucleotide
uggcgggaugacuacccag

SEQ ID NO: 518404 - RNA, 19 nt, Artificial Sequence
  Description of Artificial Sequence: Synthetic oligonucleotide
aucacaugcugagcuaaug

SEQ ID NO: 518405 - RNA, 19 nt, Artificial Sequence
  Description of Artificial Sequence: Synthetic oligonucleotide
guauaccggcccuuccaag

SEQ ID NO: 518406 - RNA, 19 nt, Artificial Sequence
  Description of Artificial Sequence: Synthetic oligonucleotide
gaguccaucagggcuuggc

SEQ ID NO: 518407 - RNA, 19 nt, Artificial Sequence
  Description of Artificial Sequence: Synthetic oligonucleotide
uucuguucgucaggggaug

SEQ ID NO: 518408 - RNA, 19 nt, Artificial Sequence
  Description of Artificial Sequence: Synthetic oligonucleotide
gagcuaaugucaccuucca

SEQ ID NO: 518409 - RNA, 19 nt, Artificial Sequence
  Description of Artificial Sequence: Synthetic oligonucleotide
aucguggguagacccgaag

SEQ ID NO: 518410 - RNA, 19 nt, Artificial Sequence
  Description of Artificial Sequence: Synthetic oligonucleotide
cuacccagccaggaguuag

SEQ ID NO: 518411 - RNA, 19 nt, Artificial Sequence
  Description of Artificial Sequence: Synthetic oligonucleotide
acuucuaugcuaacagcaa

SEQ ID NO: 518412 - RNA, 19 nt, Artificial Sequence
  Description of Artificial Sequence: Synthetic oligonucleotide
cuagggcccuaacggagcc

SEQ ID NO: 518413 - RNA, 19 nt, Artificial Sequence
  Description of Artificial Sequence: Synthetic oligonucleotide
cuguuccggcuugacaugg

SEQ ID NO: 518414 - RNA, 19 nt, Artificial Sequence
  Description of Artificial Sequence: Synthetic oligonucleotide
aagccuggucuaucacuga

SEQ ID NO: 518415 - RNA, 19 nt, Artificial Sequence
  Description of Artificial Sequence: Synthetic oligonucleotide
uagcucccuaugcaaagua

SEQ ID NO: 518416 - RNA, 19 nt, Artificial Sequence
  Description of Artificial Sequence: Synthetic oligonucleotide
gacuuagggccuagggccc

SEQ ID NO: 518417 - RNA, 19 nt, Artificial Sequence
  Description of Artificial Sequence: Synthetic oligonucleotide
guuccggcuugacauggug

SEQ ID NO: 518418 - RNA, 19 nt, Artificial Sequence
  Description of Artificial Sequence: Synthetic oligonucleotide
uguccggauguggaugagc

SEQ ID NO: 518419 - RNA, 19 nt, Artificial Sequence
  Description of Artificial Sequence: Synthetic oligonucleotide
aaugugcaacaaacugaca

SEQ ID NO: 518420 - RNA, 19 nt, Artificial Sequence
  Description of Artificial Sequence: Synthetic oligonucleotide
ucucucucgccgcccggag

SEQ ID NO: 518421 - RNA, 19 nt, Artificial Sequence
  Description of Artificial Sequence: Synthetic oligonucleotide
uucaagggguagagccagc

SEQ ID NO: 518422 - RNA, 19 nt, Artificial Sequence
  Description of Artificial Sequence: Synthetic oligonucleotide
ccaauacagugccugguag

SEQ ID NO: 518423 - RNA, 19 nt, Artificial Sequence
  Description of Artificial Sequence: Synthetic oligonucleotide
agguaaggcagggaggaau

SEQ ID NO: 518424 - RNA, 19 nt, Artificial Sequence
  Description of Artificial Sequence: Synthetic oligonucleotide
caauggcagcaguaccgag

SEQ ID NO: 518425 - RNA, 19 nt, Artificial Sequence
  Description of Artificial Sequence: Synthetic oligonucleotide
cuaugcuaacagcaaugga

SEQ ID NO: 518426 - RNA, 19 nt, Artificial Sequence
  Description of Artificial Sequence: Synthetic oligonucleotide
uggggcuaucauccaccag

SEQ ID NO: 518427 - RNA, 19 nt, Artificial Sequence
  Description of Artificial Sequence: Synthetic oligonucleotide
cccaucgacacacaagcug

SEQ ID NO: 518428 - RNA, 19 nt, Artificial Sequence
  Description of Artificial Sequence: Synthetic oligonucleotide
cuggucuaucacugaauca

SEQ ID NO: 518429 - RNA, 19 nt, Artificial Sequence
  Description of Artificial Sequence: Synthetic oligonucleotide
uacugauguccuggaaugu

SEQ ID NO: 518430 - RNA, 19 nt, Artificial Sequence
  Description of Artificial Sequence: Synthetic oligonucleotide
guagcccagguucaguuua

SEQ ID NO: 518431 - RNA, 19 nt, Artificial Sequence
  Description of Artificial Sequence: Synthetic oligonucleotide
ccagauagcgaaguggcug

SEQ ID NO: 518432 - RNA, 19 nt, Artificial Sequence
  Description of Artificial Sequence: Synthetic oligonucleotide
agggcccuaacggagccag

SEQ ID NO: 518433 - RNA, 19 nt, Artificial Sequence
  Description of Artificial Sequence: Synthetic oligonucleotide
agccuggucuaucacugaa

SEQ ID NO: 518434 - RNA, 19 nt, Artificial Sequence
  Description of Artificial Sequence: Synthetic oligonucleotide
cccuaacggagccaggagg

SEQ ID NO: 518435 - RNA, 19 nt, Artificial Sequence
  Description of Artificial Sequence: Synthetic oligonucleotide
guagcaaggggaguccauc

SEQ ID NO: 518436 - RNA, 19 nt, Artificial Sequence
  Description of Artificial Sequence: Synthetic oligonucleotide
ucuuugcaacucacuuuua

SEQ ID NO: 518437 - RNA, 19 nt, Artificial Sequence
  Description of Artificial Sequence: Synthetic oligonucleotide
agaucaggucagggugacc

SEQ ID NO: 518438 - RNA, 19 nt, Artificial Sequence
  Description of Artificial Sequence: Synthetic oligonucleotide
ccuagcucccuaugcaaag

SEQ ID NO: 518439 - RNA, 19 nt, Artificial Sequence
  Description of Artificial Sequence: Synthetic oligonucleotide
uguuccggcuugacauggu

SEQ ID NO: 518440 - RNA, 19 nt, Artificial Sequence
  Description of Artificial Sequence: Synthetic oligonucleotide
caccauccagauagcgaag

SEQ ID NO: 518441 - RNA, 19 nt, Artificial Sequence
  Description of Artificial Sequence: Synthetic oligonucleotide
cacccaaacuaugggcuag

SEQ ID NO: 518442 - RNA, 19 nt, Artificial Sequence
  Description of Artificial Sequence: Synthetic oligonucleotide
aggagguugauuggaucgu

SEQ ID NO: 518443 - RNA, 19 nt, Artificial Sequence
  Description of Artificial Sequence: Synthetic oligonucleotide
cuaaggaauucccaagcau

SEQ ID NO: 518444 - RNA, 19 nt, Artificial Sequence
  Description of Artificial Sequence: Synthetic oligonucleotide
ggccucacccaaacuaugg

SEQ ID NO: 518445 - RNA, 19 nt, Artificial Sequence
  Description of Artificial Sequence: Synthetic oligonucleotide
gguagacccgaagacagga

SEQ ID NO: 518446 - RNA, 19 nt, Artificial Sequence
  Description of Artificial Sequence: Synthetic oligonucleotide
ccuaucagggcuggggucc

SEQ ID NO: 518447 - RNA, 19 nt, Artificial Sequence
  Description of Artificial Sequence: Synthetic oligonucleotide
uuauagucauuagcuuauu

SEQ ID NO: 518448 - RNA, 19 nt, Artificial Sequence
  Description of Artificial Sequence: Synthetic oligonucleotide
ucuguucgucaggggauga

SEQ ID NO: 518449 - RNA, 19 nt, Artificial Sequence
  Description of Artificial Sequence: Synthetic oligonucleotide
gcucccuaugcaaaguaug

SEQ ID NO: 518450 - RNA, 19 nt, Artificial Sequence
  Description of Artificial Sequence: Synthetic oligonucleotide
guuagcgccucuggacugc

SEQ ID NO: 518451 - RNA, 19 nt, Artificial Sequence
  Description of Artificial Sequence: Synthetic oligonucleotide
gaaaagcguccauccaccu

SEQ ID NO: 518452 - RNA, 19 nt, Artificial Sequence
  Description of Artificial Sequence: Synthetic oligonucleotide
ugauuggaucguggguaga

SEQ ID NO: 518453 - RNA, 19 nt, Artificial Sequence
  Description of Artificial Sequence: Synthetic oligonucleotide
ugguagcaaggggagucca

SEQ ID NO: 518454 - RNA, 19 nt, Artificial Sequence
  Description of Artificial Sequence: Synthetic oligonucleotide
ggagcuuggugaugcucag

SEQ ID NO: 518455 - RNA, 19 nt, Artificial Sequence
  Description of Artificial Sequence: Synthetic oligonucleotide
ggcgggaugacuacccagc

SEQ ID NO: 518456 - RNA, 19 nt, Artificial Sequence
  Description of Artificial Sequence: Synthetic oligonucleotide
agcuuuaggucaagcggcu

SEQ ID NO: 518457 - RNA, 19 nt, Artificial Sequence
  Description of Artificial Sequence: Synthetic oligonucleotide
uaccggcccuuccaagccu

SEQ ID NO: 518458 - RNA, 19 nt, Artificial Sequence
  Description of Artificial Sequence: Synthetic oligonucleotide
cacaguagguagcuggacu

SEQ ID NO: 518459 - RNA, 19 nt, Artificial Sequence
  Description of Artificial Sequence: Synthetic oligonucleotide
auuaggcaguggaggcagg

SEQ ID NO: 518460 - RNA, 19 nt, Artificial Sequence
  Description of Artificial Sequence: Synthetic oligonucleotide
ccuggcgggaugacuaccc

SEQ ID NO: 518461 - RNA, 19 nt, Artificial Sequence
  Description of Artificial Sequence: Synthetic oligonucleotide
acauggucaaccaggucuu

SEQ ID NO: 518462 - RNA, 19 nt, Artificial Sequence
  Description of Artificial Sequence: Synthetic oligonucleotide
cuucuaugcuaacagcaau

SEQ ID NO: 518463 - RNA, 19 nt, Artificial Sequence
  Description of Artificial Sequence: Synthetic oligonucleotide
gcuacaauagaaaggcacu

SEQ ID NO: 518464 - RNA, 19 nt, Artificial Sequence
  Description of Artificial Sequence: Synthetic oligonucleotide
gcagcaguaccgagcaucc

SEQ ID NO: 518465 - RNA, 19 nt, Artificial Sequence
  Description of Artificial Sequence: Synthetic oligonucleotide
ccuagggcccuaacggagc

SEQ ID NO: 518466 - RNA, 19 nt, Artificial Sequence
  Description of Artificial Sequence: Synthetic oligonucleotide
ugggaacaccauccagaua

SEQ ID NO: 518467 - RNA, 19 nt, Artificial Sequence
  Description of Artificial Sequence: Synthetic oligonucleotide
aguggguucuuggccagau

SEQ ID NO: 518468 - RNA, 19 nt, Artificial Sequence
  Description of Artificial Sequence: Synthetic oligonucleotide
ccagacgguggugacaagc

SEQ ID NO: 518469 - RNA, 19 nt, Artificial Sequence
  Description of Artificial Sequence: Synthetic oligonucleotide
cauugaagccacggccgug

SEQ ID NO: 518470 - RNA, 19 nt, Artificial Sequence
  Description of Artificial Sequence: Synthetic oligonucleotide
gauagcgaaguggcuggaa

SEQ ID NO: 518471 - RNA, 19 nt, Artificial Sequence
  Description of Artificial Sequence: Synthetic oligonucleotide
caguccagacgguggugac

SEQ ID NO: 518472 - RNA, 19 nt, Artificial Sequence
  Description of Artificial Sequence: Synthetic oligonucleotide
uccggauguggaugagcau

SEQ ID NO: 518473 - RNA, 19 nt, Artificial Sequence
  Description of Artificial Sequence: Synthetic oligonucleotide
ggaaugcaccagaacaaga

SEQ ID NO: 518474 - RNA, 19 nt, Artificial Sequence
  Description of Artificial Sequence: Synthetic oligonucleotide
guggggcuaucauccacca

SEQ ID NO: 518475 - RNA, 19 nt, Artificial Sequence
  Description of Artificial Sequence: Synthetic oligonucleotide
gagcggcugugcuccgucc

SEQ ID NO: 518476 - RNA, 19 nt, Artificial Sequence
  Description of Artificial Sequence: Synthetic oligonucleotide
gggcuaucauccaccagcc

SEQ ID NO: 518477 - RNA, 19 nt, Artificial Sequence
  Description of Artificial Sequence: Synthetic oligonucleotide
ggagcaguaggauauuauu

SEQ ID NO: 518478 - RNA, 19 nt, Artificial Sequence
  Description of Artificial Sequence: Synthetic oligonucleotide
gugacaagcugaggucuac

SEQ ID NO: 518479 - RNA, 19 nt, Artificial Sequence
  Description of Artificial Sequence: Synthetic oligonucleotide
cagucgggcaggucagauc

SEQ ID NO: 518480 - RNA, 19 nt, Artificial Sequence
  Description of Artificial Sequence: Synthetic oligonucleotide
ggagguugauuggaucgug

SEQ ID NO: 518481 - RNA, 19 nt, Artificial Sequence
  Description of Artificial Sequence: Synthetic oligonucleotide
gcaaaguauggugccgggc

SEQ ID NO: 518482 - RNA, 19 nt, Artificial Sequence
  Description of Artificial Sequence: Synthetic oligonucleotide
ccggauguggaugagcauc

SEQ ID NO: 518483 - RNA, 19 nt, Artificial Sequence
  Description of Artificial Sequence: Synthetic oligonucleotide
gguugauuggaucgugggu

SEQ ID NO: 518484 - RNA, 19 nt, Artificial Sequence
  Description of Artificial Sequence: Synthetic oligonucleotide
agcucccuaugcaaaguau

SEQ ID NO: 518485 - RNA, 19 nt, Artificial Sequence
  Description of Artificial Sequence: Synthetic oligonucleotide
cagacgguggugacaagcu

SEQ ID NO: 518486 - RNA, 19 nt, Artificial Sequence
  Description of Artificial Sequence: Synthetic oligonucleotide
ccucaaacccaauccccug

SEQ ID NO: 518487 - RNA, 19 nt, Artificial Sequence
  Description of Artificial Sequence: Synthetic oligonucleotide
ugggguccuaaagcccagc

SEQ ID NO: 518488 - RNA, 19 nt, Artificial Sequence
  Description of Artificial Sequence: Synthetic oligonucleotide
uccagacgguggugacaag

SEQ ID NO: 518489 - RNA, 19 nt, Artificial Sequence
  Description of Artificial Sequence: Synthetic oligonucleotide
ggucuaucacugaaucaca

SEQ ID NO: 518490 - RNA, 19 nt, Artificial Sequence
  Description of Artificial Sequence: Synthetic oligonucleotide
gagcgguuguggaucuuca

SEQ ID NO: 518491 - RNA, 19 nt, Artificial Sequence
  Description of Artificial Sequence: Synthetic oligonucleotide
agauagcgaaguggcugga

SEQ ID NO: 518492 - RNA, 19 nt, Artificial Sequence
  Description of Artificial Sequence: Synthetic oligonucleotide
aggccucacccaaacuaug

SEQ ID NO: 518493 - RNA, 19 nt, Artificial Sequence
  Description of Artificial Sequence: Synthetic oligonucleotide
gccuagggcccuaacggag

SEQ ID NO: 518494 - RNA, 19 nt, Artificial Sequence
  Description of Artificial Sequence: Synthetic oligonucleotide
uagggccuagggcccuaac

SEQ ID NO: 518495 - RNA, 19 nt, Artificial Sequence
  Description of Artificial Sequence: Synthetic oligonucleotide
acggccguggcgggcacag

SEQ ID NO: 518496 - RNA, 19 nt, Artificial Sequence
  Description of Artificial Sequence: Synthetic oligonucleotide
cauggucaaccaggucuug

SEQ ID NO: 518497 - RNA, 19 nt, Artificial Sequence
  Description of Artificial Sequence: Synthetic oligonucleotide
ggguagacccgaagacagg

SEQ ID NO: 518498 - RNA, 19 nt, Artificial Sequence
  Description of Artificial Sequence: Synthetic oligonucleotide
acuuagggccuagggcccu

SEQ ID NO: 518499 - RNA, 19 nt, Artificial Sequence
  Description of Artificial Sequence: Synthetic oligonucleotide
gcccuaacggagccaggag

SEQ ID NO: 518500 - RNA, 19 nt, Artificial Sequence
  Description of Artificial Sequence: Synthetic oligonucleotide
ccuucaagggguagagcca

SEQ ID NO: 518501 - RNA, 19 nt, Artificial Sequence
  Description of Artificial Sequence: Synthetic oligonucleotide
ccaaacuaugggcuaggga

SEQ ID NO: 518502 - RNA, 19 nt, Artificial Sequence
  Description of Artificial Sequence: Synthetic oligonucleotide
uuccucucacauggaggaa

SEQ ID NO: 518503 - RNA, 19 nt, Artificial Sequence
  Description of Artificial Sequence: Synthetic oligonucleotide
cuacaauagaaaggcacuu

SEQ ID NO: 518504 - RNA, 19 nt, Artificial Sequence
  Description of Artificial Sequence: Synthetic oligonucleotide
ggcuaucauccaccagccc

SEQ ID NO: 518505 - RNA, 19 nt, Artificial Sequence
  Description of Artificial Sequence: Synthetic oligonucleotide
gucuaucacugaaucacau

SEQ ID NO: 518506 - RNA, 19 nt, Artificial Sequence
  Description of Artificial Sequence: Synthetic oligonucleotide
ggauucccaguugauaagu

SEQ ID NO: 518507 - RNA, 19 nt, Artificial Sequence
  Description of Artificial Sequence: Synthetic oligonucleotide
gaauggcaaccugcccuga

SEQ ID NO: 518508 - RNA, 19 nt, Artificial Sequence
  Description of Artificial Sequence: Synthetic oligonucleotide
guauggugccgggccacac

SEQ ID NO: 518509 - RNA, 19 nt, Artificial Sequence
  Description of Artificial Sequence: Synthetic oligonucleotide
ccaagggcagcuccgguga

SEQ ID NO: 518510 - RNA, 19 nt, Artificial Sequence
  Description of Artificial Sequence: Synthetic oligonucleotide
cauugcccuggcgcucggg

SEQ ID NO: 518511 - RNA, 19 nt, Artificial Sequence
  Description of Artificial Sequence: Synthetic oligonucleotide
ccuaacggagccaggaggu

SEQ ID NO: 518512 - RNA, 19 nt, Artificial Sequence
  Description of Artificial Sequence: Synthetic oligonucleotide
ggccuagggcccuaacgga

SEQ ID NO: 518513 - RNA, 19 nt, Artificial Sequence
  Description of Artificial Sequence: Synthetic oligonucleotide
cccaaacuaugggcuaggg

SEQ ID NO: 518514 - RNA, 19 nt, Artificial Sequence
  Description of Artificial Sequence: Synthetic oligonucleotide
gccgcccggagcuugguga

SEQ ID NO: 518515 - RNA, 19 nt, Artificial Sequence
  Description of Artificial Sequence: Synthetic oligonucleotide
ggcccuaacggagccagga

SEQ ID NO: 518516 - RNA, 19 nt, Artificial Sequence
  Description of Artificial Sequence: Synthetic oligonucleotide
cuggcgggaugacuaccca

SEQ ID NO: 518517 - RNA, 19 nt, Artificial Sequence
  Description of Artificial Sequence: Synthetic oligonucleotide
gcuugagccucaaacccaa

SEQ ID NO: 518518 - RNA, 19 nt, Artificial Sequence
  Description of Artificial Sequence: Synthetic oligonucleotide
gagcccuaucagggcuggg

SEQ ID NO: 518519 - RNA, 19 nt, Artificial Sequence
  Description of Artificial Sequence: Synthetic oligonucleotide
cggagcuuggugaugcuca

SEQ ID NO: 518520 - RNA, 19 nt, Artificial Sequence
  Description of Artificial Sequence: Synthetic oligonucleotide
gacaaguauaccggcccuu

SEQ ID NO: 518521 - RNA, 19 nt, Artificial Sequence
  Description of Artificial Sequence: Synthetic oligonucleotide
ggagcggcugugcuccguc

SEQ ID NO: 518522 - RNA, 19 nt, Artificial Sequence
  Description of Artificial Sequence: Synthetic oligonucleotide
guguccggauguggaugag

SEQ ID NO: 518523 - RNA, 19 nt, Artificial Sequence
  Description of Artificial Sequence: Synthetic oligonucleotide
cccacaguagguagcugga

SEQ ID NO: 518524 - RNA, 19 nt, Artificial Sequence
  Description of Artificial Sequence: Synthetic oligonucleotide
gacuacccagccaggaguu

SEQ ID NO: 518525 - RNA, 19 nt, Artificial Sequence
  Description of Artificial Sequence: Synthetic oligonucleotide
cuagcucccuaugcaaagu

SEQ ID NO: 518526 - RNA, 19 nt, Artificial Sequence
  Description of Artificial Sequence: Synthetic oligonucleotide
ccguggaaaagcguccauc

SEQ ID NO: 518527 - RNA, 19 nt, Artificial Sequence
  Description of Artificial Sequence: Synthetic oligonucleotide
gaucguggguagacccgaa

SEQ ID NO: 518528 - RNA, 19 nt, Artificial Sequence
  Description of Artificial Sequence: Synthetic oligonucleotide
ccaggaguuagcgccucug

SEQ ID NO: 518529 - RNA, 19 nt, Artificial Sequence
  Description of Artificial Sequence: Synthetic oligonucleotide
acuacccagccaggaguua

SEQ ID NO: 518530 - RNA, 19 nt, Artificial Sequence
  Description of Artificial Sequence: Synthetic oligonucleotide
agcagucgggcaggucaga

SEQ ID NO: 518531 - RNA, 19 nt, Artificial Sequence
  Description of Artificial Sequence: Synthetic oligonucleotide
ccgagcccuaucagggcug

SEQ ID NO: 518532 - RNA, 19 nt, Artificial Sequence
  Description of Artificial Sequence: Synthetic oligonucleotide
gccuaguccaccagcccca

SEQ ID NO: 518533 - RNA, 19 nt, Artificial Sequence
  Description of Artificial Sequence: Synthetic oligonucleotide
ccgggccacacccaauguc

SEQ ID NO: 518534 - RNA, 19 nt, Artificial Sequence
  Description of Artificial Sequence: Synthetic oligonucleotide
gcauugaagccacggccgu

SEQ ID NO: 518535 - RNA, 19 nt, Artificial Sequence
  Description of Artificial Sequence: Synthetic oligonucleotide
gcuuuaggucaagcggcuc

SEQ ID NO: 518536 - RNA, 19 nt, Artificial Sequence
  Description of Artificial Sequence: Synthetic oligonucleotide
ugguuacacuuggcccauc

SEQ ID NO: 518537 - RNA, 19 nt, Artificial Sequence
  Description of Artificial Sequence: Synthetic oligonucleotide
cauugguguguguccggau

SEQ ID NO: 518538 - RNA, 19 nt, Artificial Sequence
  Description of Artificial Sequence: Synthetic oligonucleotide
cuccggugagaggcacuug

SEQ ID NO: 518539 - RNA, 19 nt, Artificial Sequence
  Description of Artificial Sequence: Synthetic oligonucleotide
gccgagcccuaucagggcu

SEQ ID NO: 518540 - RNA, 19 nt, Artificial Sequence
  Description of Artificial Sequence: Synthetic oligonucleotide
gccguggcgggcacagccc

SEQ ID NO: 518541 - RNA, 19 nt, Artificial Sequence
  Description of Artificial Sequence: Synthetic oligonucleotide
cagaaccacccaggagaga

SEQ ID NO: 518542 - RNA, 19 nt, Artificial Sequence
  Description of Artificial Sequence: Synthetic oligonucleotide
ggccagauugaggggcaga

SEQ ID NO: 518543 - RNA, 19 nt, Artificial Sequence
  Description of Artificial Sequence: Synthetic oligonucleotide
cagguccaauacagugccu

SEQ ID NO: 518544 - RNA, 19 nt, Artificial Sequence
  Description of Artificial Sequence: Synthetic oligonucleotide
cccuggcgggaugacuacc

SEQ ID NO: 518545 - RNA, 19 nt, Artificial Sequence
  Description of Artificial Sequence: Synthetic oligonucleotide
cugguuacacuuggcccau

SEQ ID NO: 518546 - RNA, 19 nt, Artificial Sequence
  Description of Artificial Sequence: Synthetic oligonucleotide
gcugagcuaaugucaccuu

SEQ ID NO: 518547 - RNA, 19 nt, Artificial Sequence
  Description of Artificial Sequence: Synthetic oligonucleotide
ggcuugacaugguggucau

SEQ ID NO: 518548 - RNA, 19 nt, Artificial Sequence
  Description of Artificial Sequence: Synthetic oligonucleotide
gggcccuaacggagccagg

SEQ ID NO: 518549 - RNA, 19 nt, Artificial Sequence
  Description of Artificial Sequence: Synthetic oligonucleotide
caguggguucuuggccaga

SEQ ID NO: 518550 - RNA, 19 nt, Artificial Sequence
  Description of Artificial Sequence: Synthetic oligonucleotide
cccaguugauaaguaggua

SEQ ID NO: 518551 - RNA, 19 nt, Artificial Sequence
  Description of Artificial Sequence: Synthetic oligonucleotide
ucgccgcccggagcuuggu

SEQ ID NO: 518552 - RNA, 19 nt, Artificial Sequence
  Description of Artificial Sequence: Synthetic oligonucleotide
cuuagggccuagggcccua

SEQ ID NO: 518553 - RNA, 19 nt, Artificial Sequence
  Description of Artificial Sequence: Synthetic oligonucleotide
cgggaugacuacccagcca

SEQ ID NO: 518554 - RNA, 19 nt, Artificial Sequence
  Description of Artificial Sequence: Synthetic oligonucleotide
gccuugcuaccagcagaac

SEQ ID NO: 518555 - RNA, 19 nt, Artificial Sequence
  Description of Artificial Sequence: Synthetic oligonucleotide
ccggcuugacauggugguc

SEQ ID NO: 518556 - RNA, 19 nt, Artificial Sequence
  Description of Artificial Sequence: Synthetic oligonucleotide
ccacccugugugggagcgg

SEQ ID NO: 518557 - RNA, 19 nt, Artificial Sequence
  Description of Artificial Sequence: Synthetic oligonucleotide
gcacugacccacgaccuuu

SEQ ID NO: 518558 - RNA, 19 nt, Artificial Sequence
  Description of Artificial Sequence: Synthetic oligonucleotide
caguaccgagcauccuguu

SEQ ID NO: 518559 - RNA, 19 nt, Artificial Sequence
  Description of Artificial Sequence: Synthetic oligonucleotide
gccuggucuaucacugaau

SEQ ID NO: 518560 - RNA, 19 nt, Artificial Sequence
  Description of Artificial Sequence: Synthetic oligonucleotide
ggccaagggcagcuccggu

SEQ ID NO: 518561 - RNA, 19 nt, Artificial Sequence
  Description of Artificial Sequence: Synthetic oligonucleotide
gcccuauuccucugcucuu

SEQ ID NO: 518562 - RNA, 19 nt, Artificial Sequence
  Description of Artificial Sequence: Synthetic oligonucleotide
cccuuccaagccuggucua

SEQ ID NO: 518563 - RNA, 19 nt, Artificial Sequence
  Description of Artificial Sequence: Synthetic oligonucleotide
gccguggaaaagcguccau

SEQ ID NO: 518564 - RNA, 19 nt, Artificial Sequence
  Description of Artificial Sequence: Synthetic oligonucleotide
cagcaguaccgagcauccu

SEQ ID NO: 518565 - RNA, 19 nt, Artificial Sequence
  Description of Artificial Sequence: Synthetic oligonucleotide
gcccaucgacacacaagcu

SEQ ID NO: 518566 - RNA, 19 nt, Artificial Sequence
  Description of Artificial Sequence: Synthetic oligonucleotide
cacggccguggcgggcaca

SEQ ID NO: 518567 - RNA, 19 nt, Artificial Sequence
  Description of Artificial Sequence: Synthetic oligonucleotide
ccuuccaagccuggucuau

SEQ ID NO: 518568 - RNA, 19 nt, Artificial Sequence
  Description of Artificial Sequence: Synthetic oligonucleotide
gugccgggccacacccaau

SEQ ID NO: 518569 - RNA, 19 nt, Artificial Sequence
  Description of Artificial Sequence: Synthetic oligonucleotide
ccaggcgggagaagcucuu

SEQ ID NO: 518570 - RNA, 19 nt, Artificial Sequence
  Description of Artificial Sequence: Synthetic oligonucleotide
ccgcccggagcuuggugau

SEQ ID NO: 518571 - RNA, 19 nt, Artificial Sequence
  Description of Artificial Sequence: Synthetic oligonucleotide
cucucgccgcccggagcuu

SEQ ID NO: 518572 - RNA, 19 nt, Artificial Sequence
  Description of Artificial Sequence: Synthetic oligonucleotide
aaauagacaggauuugucc

SEQ ID NO: 518573 - RNA, 19 nt, Artificial Sequence
  Description of Artificial Sequence: Synthetic oligonucleotide
uguaauuugaccuccaggg

SEQ ID NO: 518574 - RNA, 19 nt, Artificial Sequence
  Description of Artificial Sequence: Synthetic oligonucleotide
aaauagugaagcuagcacg

SEQ ID NO: 518575 - RNA, 19 nt, Artificial Sequence
  Description of Artificial Sequence: Synthetic oligonucleotide
aagacguuaggacacaguc

SEQ ID NO: 518576 - RNA, 19 nt, Artificial Sequence
  Description of Artificial Sequence: Synthetic oligonucleotide
uguggaauaaaguacacac

SEQ ID NO: 518577 - RNA, 19 nt, Artificial Sequence
  Description of Artificial Sequence: Synthetic oligonucleotide
uaucccaagauuuugaugu

SEQ ID NO: 518578 - RNA, 19 nt, Artificial Sequence
  Description of Artificial Sequence: Synthetic oligonucleotide
cauucauucaccuugggag

SEQ ID NO: 518579 - RNA, 19 nt, Artificial Sequence
  Description of Artificial Sequence: Synthetic oligonucleotide
aaaauacccuaacuaggcc

SEQ ID NO: 518580 - RNA, 19 nt, Artificial Sequence
  Description of Artificial Sequence: Synthetic oligonucleotide
auagauaugcagcagaugu

SEQ ID NO: 518581 - RNA, 19 nt, Artificial Sequence
  Description of Artificial Sequence: Synthetic oligonucleotide
auaaauuugccucccuugc

SEQ ID NO: 518582 - RNA, 19 nt, Artificial Sequence
  Description of Artificial Sequence: Synthetic oligonucleotide
uaaaauacccuaacuaggc

SEQ ID NO: 518583 - RNA, 19 nt, Artificial Sequence
  Description of Artificial Sequence: Synthetic oligonucleotide
gguucuaccauucagaacc

SEQ ID NO: 518584 - RNA, 19 nt, Artificial Sequence
  Description of Artificial Sequence: Synthetic oligonucleotide
acaccaauuauuuuccuac

SEQ ID NO: 518585 - RNA, 19 nt, Artificial Sequence
  Description of Artificial Sequence: Synthetic oligonucleotide
aauacucccuuccccaagc

SEQ ID NO: 518586 - RNA, 19 nt, Artificial Sequence
  Description of Artificial Sequence: Synthetic oligonucleotide
ugcaguucgagucacuggg

SEQ ID NO: 518587 - RNA, 19 nt, Artificial Sequence
  Description of Artificial Sequence: Synthetic oligonucleotide
uuuguuuagccccuucccg

SEQ ID NO: 518588 - RNA, 19 nt, Artificial Sequence
  Description of Artificial Sequence: Synthetic oligonucleotide
acuguggaaauagugaagc

SEQ ID NO: 518589 - RNA, 19 nt, Artificial Sequence
  Description of Artificial Sequence: Synthetic oligonucleotide
aauaucucagauucgcacu

SEQ ID NO: 518590 - RNA, 19 nt, Artificial Sequence
  Description of Artificial Sequence: Synthetic oligonucleotide
aacguucuuuguuuagccc

SEQ ID NO: 518591 - RNA, 19 nt, Artificial Sequence
  Description of Artificial Sequence: Synthetic oligonucleotide
caugaaucaugauaaauac

SEQ ID NO: 518592 - RNA, 19 nt, Artificial Sequence
  Description of Artificial Sequence: Synthetic oligonucleotide
acguucuuuguuuagcccc

SEQ ID NO: 518593 - RNA, 19 nt, Artificial Sequence
  Description of Artificial Sequence: Synthetic oligonucleotide
cauucauauagauaugcag

SEQ ID NO: 518594 - RNA, 19 nt, Artificial Sequence
  Description of Artificial Sequence: Synthetic oligonucleotide
acccucauaaugcucaggc

SEQ ID NO: 518595 - RNA, 19 nt, Artificial Sequence
  Description of Artificial Sequence: Synthetic oligonucleotide
uucauauagauaugcagca

SEQ ID NO: 518596 - RNA, 19 nt, Artificial Sequence
  Description of Artificial Sequence: Synthetic oligonucleotide
cuaguucaaaccaagauca

SEQ ID NO: 518597 - RNA, 19 nt, Artificial Sequence
  Description of Artificial Sequence: Synthetic oligonucleotide
auucaauacucccuucccc

SEQ ID NO: 518598 - RNA, 19 nt, Artificial Sequence
  Description of Artificial Sequence: Synthetic oligonucleotide
ugacagaugacuaucuaga

SEQ ID NO: 518599 - RNA, 19 nt, Artificial Sequence
  Description of Artificial Sequence: Synthetic oligonucleotide
acuaacuaacccuccauuc

SEQ ID NO: 518600 - RNA, 19 nt, Artificial Sequence
  Description of Artificial Sequence: Synthetic oligonucleotide
ucuccuauuucacucacug

SEQ ID NO: 518601 - RNA, 19 nt, Artificial Sequence
  Description of Artificial Sequence: Synthetic oligonucleotide
cuuauuuccaggcuccucc

SEQ ID NO: 518602 - RNA, 19 nt, Artificial Sequence
  Description of Artificial Sequence: Synthetic oligonucleotide
uauguacuugcuagcaagg

SEQ ID NO: 518603 - RNA, 19 nt, Artificial Sequence
  Description of Artificial Sequence: Synthetic oligonucleotide
ucugugagcgggaucacgg

SEQ ID NO: 518604 - RNA, 19 nt, Artificial Sequence
  Description of Artificial Sequence: Synthetic oligonucleotide
accagugucauuccaacuc

SEQ ID NO: 518605 - RNA, 19 nt, Artificial Sequence
  Description of Artificial Sequence: Synthetic oligonucleotide
ugaacauagcaaaauguaa

SEQ ID NO: 518606 - RNA, 19 nt, Artificial Sequence
  Description of Artificial Sequence: Synthetic oligonucleotide
gacuguagaaguccaaaag

SEQ ID NO: 518607 - RNA, 19 nt, Artificial Sequence
  Description of Artificial Sequence: Synthetic oligonucleotide
cagaugacuaucuagaaga

SEQ ID NO: 518608 - RNA, 19 nt, Artificial Sequence
  Description of Artificial Sequence: Synthetic oligonucleotide
agauucgcacuauacuccc

SEQ ID NO: 518609 - RNA, 19 nt, Artificial Sequence
  Description of Artificial Sequence: Synthetic oligonucleotide
auacuuguucaauuugggg

SEQ ID NO: 518610 - RNA, 19 nt, Artificial Sequence
  Description of Artificial Sequence: Synthetic oligonucleotide
aggcacaaggcauucauuc

SEQ ID NO: 518611 - RNA, 19 nt, Artificial Sequence
  Description of Artificial Sequence: Synthetic oligonucleotide
gagaauuuacccaagccug

SEQ ID NO: 518612 - RNA, 19 nt, Artificial Sequence
  Description of Artificial Sequence: Synthetic oligonucleotide
ugucuuguggaauaaagua

SEQ ID NO: 518613 - RNA, 19 nt, Artificial Sequence
  Description of Artificial Sequence: Synthetic oligonucleotide
uaaauagacaggauuuguc

SEQ ID NO: 518614 - RNA, 19 nt, Artificial Sequence
  Description of Artificial Sequence: Synthetic oligonucleotide
augacagaugacuaucuag

SEQ ID NO: 518615 - RNA, 19 nt, Artificial Sequence
  Description of Artificial Sequence: Synthetic oligonucleotide
augacuaucuagaagaaca

SEQ ID NO: 518616 - RNA, 19 nt, Artificial Sequence
  Description of Artificial Sequence: Synthetic oligonucleotide
aauugcucaauaucucaga

SEQ ID NO: 518617 - RNA, 19 nt, Artificial Sequence
  Description of Artificial Sequence: Synthetic oligonucleotide
gaugucuuguggaauaaag

SEQ ID NO: 518618 - RNA, 19 nt, Artificial Sequence
  Description of Artificial Sequence: Synthetic oligonucleotide
uuguuuagccccuucccgg

SEQ ID NO: 518619 - RNA, 19 nt, Artificial Sequence
  Description of Artificial Sequence: Synthetic oligonucleotide
aacacuaggauggaugaca

SEQ ID NO: 518620 - RNA, 19 nt, Artificial Sequence
  Description of Artificial Sequence: Synthetic oligonucleotide
ucuuuguuuagccccuucc

SEQ ID NO: 518621 - RNA, 19 nt, Artificial Sequence
  Description of Artificial Sequence: Synthetic oligonucleotide
acagaugacuaucuagaag

SEQ ID NO: 518622 - RNA, 19 nt, Artificial Sequence
  Description of Artificial Sequence: Synthetic oligonucleotide
uucaauacucccuucccca

SEQ ID NO: 518623 - RNA, 19 nt, Artificial Sequence
  Description of Artificial Sequence: Synthetic oligonucleotide
uguccgauuccccagacuc

SEQ ID NO: 518624 - RNA, 19 nt, Artificial Sequence
  Description of Artificial Sequence: Synthetic oligonucleotide
caauaucucagauucgcac

SEQ ID NO: 518625 - RNA, 19 nt, Artificial Sequence
  Description of Artificial Sequence: Synthetic oligonucleotide
aauagugaagcuagcacga

SEQ ID NO: 518626 - RNA, 19 nt, Artificial Sequence
  Description of Artificial Sequence: Synthetic oligonucleotide
aagucuaaaggugaugaga

SEQ ID NO: 518627 - RNA, 19 nt, Artificial Sequence
  Description of Artificial Sequence: Synthetic oligonucleotide
gacagaguuacacuggcca

SEQ ID NO: 518628 - RNA, 19 nt, Artificial Sequence
  Description of Artificial Sequence: Synthetic oligonucleotide
aaauuugccucccuugcau

SEQ ID NO: 518629 - RNA, 19 nt, Artificial Sequence
  Description of Artificial Sequence: Synthetic oligonucleotide
accauuccuguuuuauccc

SEQ ID NO: 518630 - RNA, 19 nt, Artificial Sequence
  Description of Artificial Sequence: Synthetic oligonucleotide
aaacauuccugcacuugcc

SEQ ID NO: 518631 - RNA, 19 nt, Artificial Sequence
  Description of Artificial Sequence: Synthetic oligonucleotide
uaacguucuuuguuuagcc

SEQ ID NO: 518632 - RNA, 19 nt, Artificial Sequence
  Description of Artificial Sequence: Synthetic oligonucleotide
gaagcuagcacgagcagag

SEQ ID NO: 518633 - RNA, 19 nt, Artificial Sequence
  Description of Artificial Sequence: Synthetic oligonucleotide
ucucuagucugccagcucu

SEQ ID NO: 518634 - RNA, 19 nt, Artificial Sequence
  Description of Artificial Sequence: Synthetic oligonucleotide
ucgaacauugucacuguca

SEQ ID NO: 518635 - RNA, 19 nt, Artificial Sequence
  Description of Artificial Sequence: Synthetic oligonucleotide
aauacccuaacuaggccag

SEQ ID NO: 518636 - RNA, 19 nt, Artificial Sequence
  Description of Artificial Sequence: Synthetic oligonucleotide
ugcgucagaugacagcggg

SEQ ID NO: 518637 - RNA, 19 nt, Artificial Sequence
  Description of Artificial Sequence: Synthetic oligonucleotide
uuaacguucuuuguuuagc

SEQ ID NO: 518638 - RNA, 19 nt, Artificial Sequence
  Description of Artificial Sequence: Synthetic oligonucleotide
aguuacacuggccagucga

SEQ ID NO: 518639 - RNA, 19 nt, Artificial Sequence
  Description of Artificial Sequence: Synthetic oligonucleotide
agaacugcugccaacugac

SEQ ID NO: 518640 - RNA, 19 nt, Artificial Sequence
  Description of Artificial Sequence: Synthetic oligonucleotide
ugacugagaaccuuauuuc

SEQ ID NO: 518641 - RNA, 19 nt, Artificial Sequence
  Description of Artificial Sequence: Synthetic oligonucleotide
cagauucgcacuauacucc

SEQ ID NO: 518642 - RNA, 19 nt, Artificial Sequence
  Description of Artificial Sequence: Synthetic oligonucleotide
gaaucugugagcgggauca

SEQ ID NO: 518643 - RNA, 19 nt, Artificial Sequence
  Description of Artificial Sequence: Synthetic oligonucleotide
ucuaccuaguucaaaccaa

SEQ ID NO: 518644 - RNA, 19 nt, Artificial Sequence
  Description of Artificial Sequence: Synthetic oligonucleotide
ucacugggguuuaaaauac

SEQ ID NO: 518645 - RNA, 19 nt, Artificial Sequence
  Description of Artificial Sequence: Synthetic oligonucleotide
agaggugagguuaacguuc

SEQ ID NO: 518646 - RNA, 19 nt, Artificial Sequence
  Description of Artificial Sequence: Synthetic oligonucleotide
aucuaccuaguucaaacca

SEQ ID NO: 518647 - RNA, 19 nt, Artificial Sequence
  Description of Artificial Sequence: Synthetic oligonucleotide
aaacuuacuaggacaaaga

SEQ ID NO: 518648 - RNA, 19 nt, Artificial Sequence
  Description of Artificial Sequence: Synthetic oligonucleotide
accuuaauaccauuccugu

SEQ ID NO: 518649 - RNA, 19 nt, Artificial Sequence
  Description of Artificial Sequence: Synthetic oligonucleotide
uaaauuugccucccuugca

SEQ ID NO: 518650 - RNA, 19 nt, Artificial Sequence
  Description of Artificial Sequence: Synthetic oligonucleotide
agcacacauccuuccagcc

SEQ ID NO: 518651 - RNA, 19 nt, Artificial Sequence
  Description of Artificial Sequence: Synthetic oligonucleotide
gaacauagcaaaauguaaa

SEQ ID NO: 518652 - RNA, 19 nt, Artificial Sequence
  Description of Artificial Sequence: Synthetic oligonucleotide
acuaucuugaugcaauauu

SEQ ID NO: 518653 - RNA, 19 nt, Artificial Sequence
  Description of Artificial Sequence: Synthetic oligonucleotide
auauuggugccgguggccc

SEQ ID NO: 518654 - RNA, 19 nt, Artificial Sequence
  Description of Artificial Sequence: Synthetic oligonucleotide
gaaccuuauuuccaggcuc

SEQ ID NO: 518655 - RNA, 19 nt, Artificial Sequence
  Description of Artificial Sequence: Synthetic oligonucleotide
agcuagcacgagcagaguc

SEQ ID NO: 518656 - RNA, 19 nt, Artificial Sequence
  Description of Artificial Sequence: Synthetic oligonucleotide
cuaccuaguucaaaccaag

SEQ ID NO: 518657 - RNA, 19 nt, Artificial Sequence
  Description of Artificial Sequence: Synthetic oligonucleotide
uuuaucccaagauuuugau

SEQ ID NO: 518658 - RNA, 19 nt, Artificial Sequence
  Description of Artificial Sequence: Synthetic oligonucleotide
cauauagauaugcagcaga

SEQ ID NO: 518659 - RNA, 19 nt, Artificial Sequence
  Description of Artificial Sequence: Synthetic oligonucleotide
gagccugugcgucagauga

SEQ ID NO: 518660 - RNA, 19 nt, Artificial Sequence
  Description of Artificial Sequence: Synthetic oligonucleotide
guuaacguucuuuguuuag

SEQ ID NO: 518661 - RNA, 19 nt, Artificial Sequence
  Description of Artificial Sequence: Synthetic oligonucleotide
uguuuuaucccaagauuuu

SEQ ID NO: 518662 - RNA, 19 nt, Artificial Sequence
  Description of Artificial Sequence: Synthetic oligonucleotide
ucauauagauaugcagcag

SEQ ID NO: 518663 - RNA, 19 nt, Artificial Sequence
  Description of Artificial Sequence: Synthetic oligonucleotide
uaacuaacccuccauucau

SEQ ID NO: 518664 - RNA, 19 nt, Artificial Sequence
  Description of Artificial Sequence: Synthetic oligonucleotide
uuaauaccauuccuguuuu

SEQ ID NO: 518665 - RNA, 19 nt, Artificial Sequence
  Description of Artificial Sequence: Synthetic oligonucleotide
uauacuugcucccuccauu

SEQ ID NO: 518666 - RNA, 19 nt, Artificial Sequence
  Description of Artificial Sequence: Synthetic oligonucleotide
aaggcugccgaaccccauc

SEQ ID NO: 518667 - RNA, 19 nt, Artificial Sequence
  Description of Artificial Sequence: Synthetic oligonucleotide
ugucguguagucuccaguc

SEQ ID NO: 518668 - RNA, 19 nt, Artificial Sequence
  Description of Artificial Sequence: Synthetic oligonucleotide
uuuuagggcaacaggcaau

SEQ ID NO: 518669 - RNA, 19 nt, Artificial Sequence
  Description of Artificial Sequence: Synthetic oligonucleotide
auacuugcucccuccauug

SEQ ID NO: 518670 - RNA, 19 nt, Artificial Sequence
  Description of Artificial Sequence: Synthetic oligonucleotide
uuaugcucugaaucuguga

SEQ ID NO: 518671 - RNA, 19 nt, Artificial Sequence
  Description of Artificial Sequence: Synthetic oligonucleotide
agaaccuuauuuccaggcu

SEQ ID NO: 518672 - RNA, 19 nt, Artificial Sequence
  Description of Artificial Sequence: Synthetic oligonucleotide
acuaacccuccauucauga

SEQ ID NO: 518673 - RNA, 19 nt, Artificial Sequence
  Description of Artificial Sequence: Synthetic oligonucleotide
auaaugcucaggcuuugca

SEQ ID NO: 518674 - RNA, 19 nt, Artificial Sequence
  Description of Artificial Sequence: Synthetic oligonucleotide
uauagauaugcagcagaug

SEQ ID NO: 518675 - RNA, 19 nt, Artificial Sequence
  Description of Artificial Sequence: Synthetic oligonucleotide
ugugcuagcccuguccugc

SEQ ID NO: 518676 - RNA, 19 nt, Artificial Sequence
  Description of Artificial Sequence: Synthetic oligonucleotide
cagucgaacauugucacug

SEQ ID NO: 518677 - RNA, 19 nt, Artificial Sequence
  Description of Artificial Sequence: Synthetic oligonucleotide
aaugaacuuuggucuauuu

SEQ ID NO: 518678 - RNA, 19 nt, Artificial Sequence
  Description of Artificial Sequence: Synthetic oligonucleotide
uguagucuccagucaaacu

SEQ ID NO: 518679 - RNA, 19 nt, Artificial Sequence
  Description of Artificial Sequence: Synthetic oligonucleotide
uaaaggugaugagaacaag

SEQ ID NO: 518680 - RNA, 19 nt, Artificial Sequence
  Description of Artificial Sequence: Synthetic oligonucleotide
ucgcacuauacucccaaac

SEQ ID NO: 518681 - RNA, 19 nt, Artificial Sequence
  Description of Artificial Sequence: Synthetic oligonucleotide
acaagcgcagagaaguggg

SEQ ID NO: 518682 - RNA, 19 nt, Artificial Sequence
  Description of Artificial Sequence: Synthetic oligonucleotide
guucgagucacugggcugg

SEQ ID NO: 518683 - RNA, 19 nt, Artificial Sequence
  Description of Artificial Sequence: Synthetic oligonucleotide
ugacuguagaaguccaaaa

SEQ ID NO: 518684 - RNA, 19 nt, Artificial Sequence
  Description of Artificial Sequence: Synthetic oligonucleotide
cuccauugccaacagacuc

SEQ ID NO: 518685 - RNA, 19 nt, Artificial Sequence
  Description of Artificial Sequence: Synthetic oligonucleotide
uuauuuccaggcuccuccc

SEQ ID NO: 518686 - RNA, 19 nt, Artificial Sequence
  Description of Artificial Sequence: Synthetic oligonucleotide
uggaaauagugaagcuagc

SEQ ID NO: 518687 - RNA, 19 nt, Artificial Sequence
  Description of Artificial Sequence: Synthetic oligonucleotide
uguuuagccccuucccggc

SEQ ID NO: 518688 - RNA, 19 nt, Artificial Sequence
  Description of Artificial Sequence: Synthetic oligonucleotide
cuaacuaacccuccauuca

SEQ ID NO: 518689 - RNA, 19 nt, Artificial Sequence
  Description of Artificial Sequence: Synthetic oligonucleotide
gauuuguccucauacuugu

SEQ ID NO: 518690 - RNA, 19 nt, Artificial Sequence
  Description of Artificial Sequence: Synthetic oligonucleotide
acaagccugacuguagaag

SEQ ID NO: 518691 - RNA, 19 nt, Artificial Sequence
  Description of Artificial Sequence: Synthetic oligonucleotide
agaacaaggcacaaggcau

SEQ ID NO: 518692 - RNA, 19 nt, Artificial Sequence
  Description of Artificial Sequence: Synthetic oligonucleotide
gcagcuuaugcucugaauc

SEQ ID NO: 518693 - RNA, 19 nt, Artificial Sequence
  Description of Artificial Sequence: Synthetic oligonucleotide
uuuagggcaacaggcaauc

SEQ ID NO: 518694 - RNA, 19 nt, Artificial Sequence
  Description of Artificial Sequence: Synthetic oligonucleotide
ccuaguucaaaccaagauc

SEQ ID NO: 518695 - RNA, 19 nt, Artificial Sequence
  Description of Artificial Sequence: Synthetic oligonucleotide
gaugacuaucuagaagaac

SEQ ID NO: 518696 - RNA, 19 nt, Artificial Sequence
  Description of Artificial Sequence: Synthetic oligonucleotide
ucguguagucuccagucaa

SEQ ID NO: 518697 - RNA, 19 nt, Artificial Sequence
  Description of Artificial Sequence: Synthetic oligonucleotide
agguuaacguucuuuguuu

SEQ ID NO: 518698 - RNA, 19 nt, Artificial Sequence
  Description of Artificial Sequence: Synthetic oligonucleotide
aggcccacuaacuaacccu

SEQ ID NO: 518699 - RNA, 19 nt, Artificial Sequence
  Description of Artificial Sequence: Synthetic oligonucleotide
cuaggauggaugacagaug

SEQ ID NO: 518700 - RNA, 19 nt, Artificial Sequence
  Description of Artificial Sequence: Synthetic oligonucleotide
auacucccaaacuccacca

SEQ ID NO: 518701 - RNA, 19 nt, Artificial Sequence
  Description of Artificial Sequence: Synthetic oligonucleotide
caggcaaucuccucuaaca

SEQ ID NO: 518702 - RNA, 19 nt, Artificial Sequence
  Description of Artificial Sequence: Synthetic oligonucleotide
cuccuauuucacucacugg

SEQ ID NO: 518703 - RNA, 19 nt, Artificial Sequence
  Description of Artificial Sequence: Synthetic oligonucleotide
uccgauuccccagacucag

SEQ ID NO: 518704 - RNA, 19 nt, Artificial Sequence
  Description of Artificial Sequence: Synthetic oligonucleotide
guggaauaaaguacacacc

SEQ ID NO: 518705 - RNA, 19 nt, Artificial Sequence
  Description of Artificial Sequence: Synthetic oligonucleotide
gagguucuaccauucagaa

SEQ ID NO: 518706 - RNA, 19 nt, Artificial Sequence
  Description of Artificial Sequence: Synthetic oligonucleotide
auaucucagauucgcacua

SEQ ID NO: 518707 - RNA, 19 nt, Artificial Sequence
  Description of Artificial Sequence: Synthetic oligonucleotide
aucacggcuuguuccuugg

SEQ ID NO: 518708 - RNA, 19 nt, Artificial Sequence
  Description of Artificial Sequence: Synthetic oligonucleotide
gauauuggugccgguggcc

SEQ ID NO: 518709 - RNA, 19 nt, Artificial Sequence
  Description of Artificial Sequence: Synthetic oligonucleotide
cuuaauaccauuccuguuu

SEQ ID NO: 518710 - RNA, 19 nt, Artificial Sequence
  Description of Artificial Sequence: Synthetic oligonucleotide
agauuuugauguuguuggu

SEQ ID NO: 518711 - RNA, 19 nt, Artificial Sequence
  Description of Artificial Sequence: Synthetic oligonucleotide
guaauuugaccuccaggga

SEQ ID NO: 518712 - RNA, 19 nt, Artificial Sequence
  Description of Artificial Sequence: Synthetic oligonucleotide
auucgcacuauacucccaa

SEQ ID NO: 518713 - RNA, 19 nt, Artificial Sequence
  Description of Artificial Sequence: Synthetic oligonucleotide
acuuacuaggacaaagaau

SEQ ID NO: 518714 - RNA, 19 nt, Artificial Sequence
  Description of Artificial Sequence: Synthetic oligonucleotide
gacguuaggacacagucuu

SEQ ID NO: 518715 - RNA, 19 nt, Artificial Sequence
  Description of Artificial Sequence: Synthetic oligonucleotide
ugaccccuccggaagggag

SEQ ID NO: 518716 - RNA, 19 nt, Artificial Sequence
  Description of Artificial Sequence: Synthetic oligonucleotide
gcugcaacuguggaaauag

SEQ ID NO: 518717 - RNA, 19 nt, Artificial Sequence
  Description of Artificial Sequence: Synthetic oligonucleotide
caacuccagaaacugggac

SEQ ID NO: 518718 - RNA, 19 nt, Artificial Sequence
  Description of Artificial Sequence: Synthetic oligonucleotide
gacgagggcuucuccgacg

SEQ ID NO: 518719 - RNA, 19 nt, Artificial Sequence
  Description of Artificial Sequence: Synthetic oligonucleotide
ugcggguuucaccaguguc

SEQ ID NO: 518720 - RNA, 19 nt, Artificial Sequence
  Description of Artificial Sequence: Synthetic oligonucleotide
aaggagugcuuaaaacaca

SEQ ID NO: 518721 - RNA, 19 nt, Artificial Sequence
  Description of Artificial Sequence: Synthetic oligonucleotide
auauagauaugcagcagau

SEQ ID NO: 518722 - RNA, 19 nt, Artificial Sequence
  Description of Artificial Sequence: Synthetic oligonucleotide
agacgagggcuucuccgac

SEQ ID NO: 518723 - RNA, 19 nt, Artificial Sequence
  Description of Artificial Sequence: Synthetic oligonucleotide
cacaagcgcagagaagugg

SEQ ID NO: 518724 - RNA, 19 nt, Artificial Sequence
  Description of Artificial Sequence: Synthetic oligonucleotide
gacagaugacuaucuagaa

SEQ ID NO: 518725 - RNA, 19 nt, Artificial Sequence
  Description of Artificial Sequence: Synthetic oligonucleotide
ucccuguaacagcaagagc

SEQ ID NO: 518726 - RNA, 19 nt, Artificial Sequence
  Description of Artificial Sequence: Synthetic oligonucleotide
gaauuuacccaagccugac

SEQ ID NO: 518727 - RNA, 19 nt, Artificial Sequence
  Description of Artificial Sequence: Synthetic oligonucleotide
ggaagggagaauuuaccca

SEQ ID NO: 518728 - RNA, 19 nt, Artificial Sequence
  Description of Artificial Sequence: Synthetic oligonucleotide
uuuggggcucacuucuuuc

SEQ ID NO: 518729 - RNA, 19 nt, Artificial Sequence
  Description of Artificial Sequence: Synthetic oligonucleotide
acauucauauagauaugca

SEQ ID NO: 518730 - RNA, 19 nt, Artificial Sequence
  Description of Artificial Sequence: Synthetic oligonucleotide
cagucuggaacaaacaggu

SEQ ID NO: 518731 - RNA, 19 nt, Artificial Sequence
  Description of Artificial Sequence: Synthetic oligonucleotide
augucuuguggaauaaagu

SEQ ID NO: 518732 - RNA, 19 nt, Artificial Sequence
  Description of Artificial Sequence: Synthetic oligonucleotide
gggguugugacauucaaua

SEQ ID NO: 518733 - RNA, 19 nt, Artificial Sequence
  Description of Artificial Sequence: Synthetic oligonucleotide
acuugccccaucacuacgg

SEQ ID NO: 518734 - RNA, 19 nt, Artificial Sequence
  Description of Artificial Sequence: Synthetic oligonucleotide
ucaauacucccuuccccaa

SEQ ID NO: 518735 - RNA, 19 nt, Artificial Sequence
  Description of Artificial Sequence: Synthetic oligonucleotide
acuauacucccaaacucca

SEQ ID NO: 518736 - RNA, 19 nt, Artificial Sequence
  Description of Artificial Sequence: Synthetic oligonucleotide
ugaaucugugagcgggauc

SEQ ID NO: 518737 - RNA, 19 nt, Artificial Sequence
  Description of Artificial Sequence: Synthetic oligonucleotide
uguccugcucucucuaguc

SEQ ID NO: 518738 - RNA, 19 nt, Artificial Sequence
  Description of Artificial Sequence: Synthetic oligonucleotide
cugugcgucagaugacagc

SEQ ID NO: 518739 - RNA, 19 nt, Artificial Sequence
  Description of Artificial Sequence: Synthetic oligonucleotide
gugcuuaaaacacaugaau

SEQ ID NO: 518740 - RNA, 19 nt, Artificial Sequence
  Description of Artificial Sequence: Synthetic oligonucleotide
cuucugucguguagucucc

SEQ ID NO: 518741 - RNA, 19 nt, Artificial Sequence
  Description of Artificial Sequence: Synthetic oligonucleotide
gaaguccaaaaggcugccg

SEQ ID NO: 518742 - RNA, 19 nt, Artificial Sequence
  Description of Artificial Sequence: Synthetic oligonucleotide
aaucugugagcgggaucac

SEQ ID NO: 518743 - RNA, 19 nt, Artificial Sequence
  Description of Artificial Sequence: Synthetic oligonucleotide
ggguuuaaaauacccuaac

SEQ ID NO: 518744 - RNA, 19 nt, Artificial Sequence
  Description of Artificial Sequence: Synthetic oligonucleotide
cuaucuugaugcaauauuu

SEQ ID NO: 518745 - RNA, 19 nt, Artificial Sequence
  Description of Artificial Sequence: Synthetic oligonucleotide
gaugacagaugacuaucua

SEQ ID NO: 518746 - RNA, 19 nt, Artificial Sequence
  Description of Artificial Sequence: Synthetic oligonucleotide
cacaccucgaugucuugug

SEQ ID NO: 518747 - RNA, 19 nt, Artificial Sequence
  Description of Artificial Sequence: Synthetic oligonucleotide
ugagcgggaucacggcuug

SEQ ID NO: 518748 - RNA, 19 nt, Artificial Sequence
  Description of Artificial Sequence: Synthetic oligonucleotide
uacuaucuugaugcaauau

SEQ ID NO: 518749 - RNA, 19 nt, Artificial Sequence
  Description of Artificial Sequence: Synthetic oligonucleotide
caauacucccuuccccaag

SEQ ID NO: 518750 - RNA, 19 nt, Artificial Sequence
  Description of Artificial Sequence: Synthetic oligonucleotide
cuagcacgagcagagucag

SEQ ID NO: 518751 - RNA, 19 nt, Artificial Sequence
  Description of Artificial Sequence: Synthetic oligonucleotide
cuugccccaucacuacggg

SEQ ID NO: 518752 - RNA, 19 nt, Artificial Sequence
  Description of Artificial Sequence: Synthetic oligonucleotide
agaauuuacccaagccuga

SEQ ID NO: 518753 - RNA, 19 nt, Artificial Sequence
  Description of Artificial Sequence: Synthetic oligonucleotide
uaguucaaaccaagaucaa

SEQ ID NO: 518754 - RNA, 19 nt, Artificial Sequence
  Description of Artificial Sequence: Synthetic oligonucleotide
cugacugagaaccuuauuu

SEQ ID NO: 518755 - RNA, 19 nt, Artificial Sequence
  Description of Artificial Sequence: Synthetic oligonucleotide
augacagcgggauccacuu

SEQ ID NO: 518756 - RNA, 19 nt, Artificial Sequence
  Description of Artificial Sequence: Synthetic oligonucleotide
uacccuaacuaggccaggc

SEQ ID NO: 518757 - RNA, 19 nt, Artificial Sequence
  Description of Artificial Sequence: Synthetic oligonucleotide
ucgcuuugacuucuccuuc

SEQ ID NO: 518758 - RNA, 19 nt, Artificial Sequence
  Description of Artificial Sequence: Synthetic oligonucleotide
agcuuaugcucugaaucug

SEQ ID NO: 518759 - RNA, 19 nt, Artificial Sequence
  Description of Artificial Sequence: Synthetic oligonucleotide
gcagauguaauuugaccuc

SEQ ID NO: 518760 - RNA, 19 nt, Artificial Sequence
  Description of Artificial Sequence: Synthetic oligonucleotide
cacugggguuuaaaauacc

SEQ ID NO: 518761 - RNA, 19 nt, Artificial Sequence
  Description of Artificial Sequence: Synthetic oligonucleotide
ggaaauagugaagcuagca

SEQ ID NO: 518762 - RNA, 19 nt, Artificial Sequence
  Description of Artificial Sequence: Synthetic oligonucleotide
gugaugagaacaaggcaca

SEQ ID NO: 518763 - RNA, 19 nt, Artificial Sequence
  Description of Artificial Sequence: Synthetic oligonucleotide
aacucugugcuagcccugu

SEQ ID NO: 518764 - RNA, 19 nt, Artificial Sequence
  Description of Artificial Sequence: Synthetic oligonucleotide
aucugugagcgggaucacg

SEQ ID NO: 518765 - RNA, 19 nt, Artificial Sequence
  Description of Artificial Sequence: Synthetic oligonucleotide
ugacuccuuguccgauucc

SEQ ID NO: 518766 - RNA, 19 nt, Artificial Sequence
  Description of Artificial Sequence: Synthetic oligonucleotide
cugacuccuuguccgauuc

SEQ ID NO: 518767 - RNA, 19 nt, Artificial Sequence
  Description of Artificial Sequence: Synthetic oligonucleotide
cacuugccccaucacuacg

SEQ ID NO: 518768 - RNA, 19 nt, Artificial Sequence
  Description of Artificial Sequence: Synthetic oligonucleotide
uugcccucauugccuguag

SEQ ID NO: 518769 - RNA, 19 nt, Artificial Sequence
  Description of Artificial Sequence: Synthetic oligonucleotide
aggagugcuuaaaacacau

SEQ ID NO: 518770 - RNA, 19 nt, Artificial Sequence
  Description of Artificial Sequence: Synthetic oligonucleotide
gggacagaguuacacuggc

SEQ ID NO: 518771 - RNA, 19 nt, Artificial Sequence
  Description of Artificial Sequence: Synthetic oligonucleotide
gaaccccaucaccacacca

SEQ ID NO: 518772 - RNA, 19 nt, Artificial Sequence
  Description of Artificial Sequence: Synthetic oligonucleotide
cugccgaaccccaucacca

SEQ ID NO: 518773 - RNA, 19 nt, Artificial Sequence
  Description of Artificial Sequence: Synthetic oligonucleotide
agcagcuuaugcucugaau

SEQ ID NO: 518774 - RNA, 19 nt, Artificial Sequence
  Description of Artificial Sequence: Synthetic oligonucleotide
uuccccaagcacacauccu

SEQ ID NO: 518775 - RNA, 19 nt, Artificial Sequence
  Description of Artificial Sequence: Synthetic oligonucleotide
aggcauucauucaccuugg

SEQ ID NO: 518776 - RNA, 19 nt, Artificial Sequence
  Description of Artificial Sequence: Synthetic oligonucleotide
agacguuaggacacagucu

SEQ ID NO: 518777 - RNA, 19 nt, Artificial Sequence
  Description of Artificial Sequence: Synthetic oligonucleotide
uucccgccuccucaguucu

SEQ ID NO: 518778 - RNA, 19 nt, Artificial Sequence
  Description of Artificial Sequence: Synthetic oligonucleotide
cauagaagcugcaguucga

SEQ ID NO: 518779 - RNA, 19 nt, Artificial Sequence
  Description of Artificial Sequence: Synthetic oligonucleotide
cugugagcgggaucacggc

SEQ ID NO: 518780 - RNA, 19 nt, Artificial Sequence
  Description of Artificial Sequence: Synthetic oligonucleotide
uaacacuaggauggaugac

SEQ ID NO: 518781 - RNA, 19 nt, Artificial Sequence
  Description of Artificial Sequence: Synthetic oligonucleotide
auuuggggcucacuucuuu

SEQ ID NO: 518782 - RNA, 19 nt, Artificial Sequence
  Description of Artificial Sequence: Synthetic oligonucleotide
acucagacgagggcuucuc

SEQ ID NO: 518783 - RNA, 19 nt, Artificial Sequence
  Description of Artificial Sequence: Synthetic oligonucleotide
gucaaugaacuuuggucua

SEQ ID NO: 518784 - RNA, 19 nt, Artificial Sequence
  Description of Artificial Sequence: Synthetic oligonucleotide
uauuggugccgguggccca

SEQ ID NO: 518785 - RNA, 19 nt, Artificial Sequence
  Description of Artificial Sequence: Synthetic oligonucleotide
acccuaacuaggccaggca

SEQ ID NO: 518786 - RNA, 19 nt, Artificial Sequence
  Description of Artificial Sequence: Synthetic oligonucleotide
cuguugcccucauugccug

SEQ ID NO: 518787 - RNA, 19 nt, Artificial Sequence
  Description of Artificial Sequence: Synthetic oligonucleotide
uuugucucgggguguccau

SEQ ID NO: 518788 - RNA, 19 nt, Artificial Sequence
  Description of Artificial Sequence: Synthetic oligonucleotide
gggacaagucuaaagguga

SEQ ID NO: 518789 - RNA, 19 nt, Artificial Sequence
  Description of Artificial Sequence: Synthetic oligonucleotide
gccgcaagacguuaggaca

SEQ ID NO: 518790 - RNA, 19 nt, Artificial Sequence
  Description of Artificial Sequence: Synthetic oligonucleotide
ugcccucauugccuguaga

SEQ ID NO: 518791 - RNA, 19 nt, Artificial Sequence
  Description of Artificial Sequence: Synthetic oligonucleotide
ucccggcugagguucuacc

SEQ ID NO: 518792 - RNA, 19 nt, Artificial Sequence
  Description of Artificial Sequence: Synthetic oligonucleotide
cuuguccgauuccccagac

SEQ ID NO: 518793 - RNA, 19 nt, Artificial Sequence
  Description of Artificial Sequence: Synthetic oligonucleotide
uucgcacuauacucccaaa

SEQ ID NO: 518794 - RNA, 19 nt, Artificial Sequence
  Description of Artificial Sequence: Synthetic oligonucleotide
ggauggaugacagaugacu

SEQ ID NO: 518795 - RNA, 19 nt, Artificial Sequence
  Description of Artificial Sequence: Synthetic oligonucleotide
gucguguagucuccaguca

SEQ ID NO: 518796 - RNA, 19 nt, Artificial Sequence
  Description of Artificial Sequence: Synthetic oligonucleotide
cagcuuaugcucugaaucu

SEQ ID NO: 518797 - RNA, 19 nt, Artificial Sequence
  Description of Artificial Sequence: Synthetic oligonucleotide
ugccgaaccccaucaccac

SEQ ID NO: 518798 - RNA, 19 nt, Artificial Sequence
  Description of Artificial Sequence: Synthetic oligonucleotide
cugggacaagucuaaaggu

SEQ ID NO: 518799 - RNA, 19 nt, Artificial Sequence
  Description of Artificial Sequence: Synthetic oligonucleotide
ggccgcaagacguuaggac

SEQ ID NO: 518800 - RNA, 19 nt, Artificial Sequence
  Description of Artificial Sequence: Synthetic oligonucleotide
gggguguccauagaagcug

SEQ ID NO: 518801 - RNA, 19 nt, Artificial Sequence
  Description of Artificial Sequence: Synthetic oligonucleotide
agaugacuaucuagaagaa

SEQ ID NO: 518802 - RNA, 19 nt, Artificial Sequence
  Description of Artificial Sequence: Synthetic oligonucleotide
auacccuaacuaggccagg

SEQ ID NO: 518803 - RNA, 19 nt, Artificial Sequence
  Description of Artificial Sequence: Synthetic oligonucleotide
gcaaucuccucuaacacua

SEQ ID NO: 518804 - RNA, 19 nt, Artificial Sequence
  Description of Artificial Sequence: Synthetic oligonucleotide
gacaggauuuguccucaua

SEQ ID NO: 518805 - RNA, 19 nt, Artificial Sequence
  Description of Artificial Sequence: Synthetic oligonucleotide
caccucgaugucuugugga

SEQ ID NO: 518806 - RNA, 19 nt, Artificial Sequence
  Description of Artificial Sequence: Synthetic oligonucleotide
acugacuccuuguccgauu

SEQ ID NO: 518807 - RNA, 19 nt, Artificial Sequence
  Description of Artificial Sequence: Synthetic oligonucleotide
cguuaggacacagucuucc

SEQ ID NO: 518808 - RNA, 19 nt, Artificial Sequence
  Description of Artificial Sequence: Synthetic oligonucleotide
gccagaggugagguuaacg

SEQ ID NO: 518809 - RNA, 19 nt, Artificial Sequence
  Description of Artificial Sequence: Synthetic oligonucleotide
uuagggcaacaggcaaucu

SEQ ID NO: 518810 - RNA, 19 nt, Artificial Sequence
  Description of Artificial Sequence: Synthetic oligonucleotide
gacgccggcccauccccag

SEQ ID NO: 518811 - RNA, 19 nt, Artificial Sequence
  Description of Artificial Sequence: Synthetic oligonucleotide
gcucaauaucucagauucg

SEQ ID NO: 518812 - RNA, 19 nt, Artificial Sequence
  Description of Artificial Sequence: Synthetic oligonucleotide
ucacucacugggguuuaaa

SEQ ID NO: 518813 - RNA, 19 nt, Artificial Sequence
  Description of Artificial Sequence: Synthetic oligonucleotide
gggaccgggccgcaagacg

SEQ ID NO: 518814 - RNA, 19 nt, Artificial Sequence
  Description of Artificial Sequence: Synthetic oligonucleotide
gcuucuccgacgccggccc

SEQ ID NO: 518815 - RNA, 19 nt, Artificial Sequence
  Description of Artificial Sequence: Synthetic oligonucleotide
uucugucguguagucucca

SEQ ID NO: 518816 - RNA, 19 nt, Artificial Sequence
  Description of Artificial Sequence: Synthetic oligonucleotide
caggauuuguccucauacu

SEQ ID NO: 518817 - RNA, 19 nt, Artificial Sequence
  Description of Artificial Sequence: Synthetic oligonucleotide
cagcaauccuuaggugggg

SEQ ID NO: 518818 - RNA, 19 nt, Artificial Sequence
  Description of Artificial Sequence: Synthetic oligonucleotide
gguuaacguucuuuguuua

SEQ ID NO: 518819 - RNA, 19 nt, Artificial Sequence
  Description of Artificial Sequence: Synthetic oligonucleotide
agauuccacccaccuccca

SEQ ID NO: 518820 - RNA, 19 nt, Artificial Sequence
  Description of Artificial Sequence: Synthetic oligonucleotide
cugugcuagcccuguccug

SEQ ID NO: 518821 - RNA, 19 nt, Artificial Sequence
  Description of Artificial Sequence: Synthetic oligonucleotide
ccgcaagacguuaggacac

SEQ ID NO: 518822 - RNA, 19 nt, Artificial Sequence
  Description of Artificial Sequence: Synthetic oligonucleotide
ccuaacuaggccaggcaca

SEQ ID NO: 518823 - RNA, 19 nt, Artificial Sequence
  Description of Artificial Sequence: Synthetic oligonucleotide
aauuuggggcucacuucuu

SEQ ID NO: 518824 - RNA, 19 nt, Artificial Sequence
  Description of Artificial Sequence: Synthetic oligonucleotide
uguugcccucauugccugu

SEQ ID NO: 518825 - RNA, 19 nt, Artificial Sequence
  Description of Artificial Sequence: Synthetic oligonucleotide
agggcuucuccgacgccgg

SEQ ID NO: 518826 - RNA, 19 nt, Artificial Sequence
  Description of Artificial Sequence: Synthetic oligonucleotide
uccugauauuggugccggu

SEQ ID NO: 518827 - RNA, 19 nt, Artificial Sequence
  Description of Artificial Sequence: Synthetic oligonucleotide
cgggaucacggcuuguucc

SEQ ID NO: 518828 - RNA, 19 nt, Artificial Sequence
  Description of Artificial Sequence: Synthetic oligonucleotide
gauucgcacuauacuccca

SEQ ID NO: 518829 - RNA, 19 nt, Artificial Sequence
  Description of Artificial Sequence: Synthetic oligonucleotide
guuacacuggccagucgaa

SEQ ID NO: 518830 - RNA, 19 nt, Artificial Sequence
  Description of Artificial Sequence: Synthetic oligonucleotide
gcucugaaucugugagcgg

SEQ ID NO: 518831 - RNA, 19 nt, Artificial Sequence
  Description of Artificial Sequence: Synthetic oligonucleotide
guuguuggucacucugggu

SEQ ID NO: 518832 - RNA, 19 nt, Artificial Sequence
  Description of Artificial Sequence: Synthetic oligonucleotide
gugcgucagaugacagcgg

SEQ ID NO: 518833 - RNA, 19 nt, Artificial Sequence
  Description of Artificial Sequence: Synthetic oligonucleotide
uuucacucacugggguuua

SEQ ID NO: 518834 - RNA, 19 nt, Artificial Sequence
  Description of Artificial Sequence: Synthetic oligonucleotide
ugucucgcuuugacuucuc

SEQ ID NO: 518835 - RNA, 19 nt, Artificial Sequence
  Description of Artificial Sequence: Synthetic oligonucleotide
ccgaaccccaucaccacac

SEQ ID NO: 518836 - RNA, 19 nt, Artificial Sequence
  Description of Artificial Sequence: Synthetic oligonucleotide
caacugacuccuuguccga

SEQ ID NO: 518837 - RNA, 19 nt, Artificial Sequence
  Description of Artificial Sequence: Synthetic oligonucleotide
cccucaagauuccacccac

SEQ ID NO: 518838 - RNA, 19 nt, Artificial Sequence
  Description of Artificial Sequence: Synthetic oligonucleotide
cacaagccugacuguagaa

SEQ ID NO: 518839 - RNA, 19 nt, Artificial Sequence
  Description of Artificial Sequence: Synthetic oligonucleotide
cacacaccucgaugucuug

SEQ ID NO: 518840 - RNA, 19 nt, Artificial Sequence
  Description of Artificial Sequence: Synthetic oligonucleotide
ggagccugugcgucagaug

SEQ ID NO: 518841 - RNA, 19 nt, Artificial Sequence
  Description of Artificial Sequence: Synthetic oligonucleotide
ggagugcuuaaaacacaug

SEQ ID NO: 518842 - RNA, 19 nt, Artificial Sequence
  Description of Artificial Sequence: Synthetic oligonucleotide
gaggugagguuaacguucu

SEQ ID NO: 518843 - RNA, 19 nt, Artificial Sequence
  Description of Artificial Sequence: Synthetic oligonucleotide
ccagaggugagguuaacgu

SEQ ID NO: 518844 - RNA, 19 nt, Artificial Sequence
  Description of Artificial Sequence: Synthetic oligonucleotide
cuguggaaauagugaagcu

SEQ ID NO: 518845 - RNA, 19 nt, Artificial Sequence
  Description of Artificial Sequence: Synthetic oligonucleotide
caagacguuaggacacagu

SEQ ID NO: 518846 - RNA, 19 nt, Artificial Sequence
  Description of Artificial Sequence: Synthetic oligonucleotide
cccaagccugacaucuacc

SEQ ID NO: 518847 - RNA, 19 nt, Artificial Sequence
  Description of Artificial Sequence: Synthetic oligonucleotide
ggacagaguuacacuggcc

SEQ ID NO: 518848 - RNA, 19 nt, Artificial Sequence
  Description of Artificial Sequence: Synthetic oligonucleotide
uagcacgagcagagucagu

SEQ ID NO: 518849 - RNA, 19 nt, Artificial Sequence
  Description of Artificial Sequence: Synthetic oligonucleotide
gccugaccccuccggaagg

SEQ ID NO: 518850 - RNA, 19 nt, Artificial Sequence
  Description of Artificial Sequence: Synthetic oligonucleotide
caguucgagucacugggcu

SEQ ID NO: 518851 - RNA, 19 nt, Artificial Sequence
  Description of Artificial Sequence: Synthetic oligonucleotide
cacuaacuaacccuccauu

SEQ ID NO: 518852 - RNA, 19 nt, Artificial Sequence
  Description of Artificial Sequence: Synthetic oligonucleotide
guuguuugucucggggugu

SEQ ID NO: 518853 - RNA, 19 nt, Artificial Sequence
  Description of Artificial Sequence: Synthetic oligonucleotide
agcgggaucacggcuuguu

SEQ ID NO: 518854 - RNA, 19 nt, Artificial Sequence
  Description of Artificial Sequence: Synthetic oligonucleotide
ggugcggguuucaccagug

SEQ ID NO: 518855 - RNA, 19 nt, Artificial Sequence
  Description of Artificial Sequence: Synthetic oligonucleotide
cugucguguagucuccagu

SEQ ID NO: 518856 - RNA, 19 nt, Artificial Sequence
  Description of Artificial Sequence: Synthetic oligonucleotide
uucacucacugggguuuaa

SEQ ID NO: 518857 - RNA, 19 nt, Artificial Sequence
  Description of Artificial Sequence: Synthetic oligonucleotide
cagaggugagguuaacguu

SEQ ID NO: 518858 - RNA, 19 nt, Artificial Sequence
  Description of Artificial Sequence: Synthetic oligonucleotide
gcaguucgagucacugggc

SEQ ID NO: 518859 - RNA, 19 nt, Artificial Sequence
  Description of Artificial Sequence: Synthetic oligonucleotide
ccuugcauugcgacccuca

SEQ ID NO: 518860 - RNA, 19 nt, Artificial Sequence
  Description of Artificial Sequence: Synthetic oligonucleotide
uucuccgacgccggcccau

SEQ ID NO: 518861 - RNA, 19 nt, Artificial Sequence
  Description of Artificial Sequence: Synthetic oligonucleotide
cuccgacgccggcccaucc

SEQ ID NO: 518862 - RNA, 19 nt, Artificial Sequence
  Description of Artificial Sequence: Synthetic oligonucleotide
cuugcauugcgacccucau

SEQ ID NO: 518863 - RNA, 19 nt, Artificial Sequence
  Description of Artificial Sequence: Synthetic oligonucleotide
cccacuaacuaacccucca

SEQ ID NO: 518864 - RNA, 19 nt, Artificial Sequence
  Description of Artificial Sequence: Synthetic oligonucleotide
ggugagguuaacguucuuu

SEQ ID NO: 518865 - RNA, 19 nt, Artificial Sequence
  Description of Artificial Sequence: Synthetic oligonucleotide
cuggcuauacuugcucccu

SEQ ID NO: 518866 - RNA, 19 nt, Artificial Sequence
  Description of Artificial Sequence: Synthetic oligonucleotide
gccgaaccccaucaccaca

SEQ ID NO: 518867 - RNA, 19 nt, Artificial Sequence
  Description of Artificial Sequence: Synthetic oligonucleotide
ucuccgacgccggcccauc

SEQ ID NO: 518868 - RNA, 19 nt, Artificial Sequence
  Description of Artificial Sequence: Synthetic oligonucleotide
accccuccggaagggagaa

SEQ ID NO: 518869 - RNA, 19 nt, Artificial Sequence
  Description of Artificial Sequence: Synthetic oligonucleotide
gcgggaucacggcuuguuc

SEQ ID NO: 518870 - RNA, 19 nt, Artificial Sequence
  Description of Artificial Sequence: Synthetic oligonucleotide
ccgauuccccagacucagg

SEQ ID NO: 518871 - RNA, 19 nt, Artificial Sequence
  Description of Artificial Sequence: Synthetic oligonucleotide
ccuuauuuccaggcuccuc

SEQ ID NO: 518872 - RNA, 19 nt, Artificial Sequence
  Description of Artificial Sequence: Synthetic oligonucleotide
cugcaacuguggaaauagu

SEQ ID NO: 518873 - RNA, 19 nt, Artificial Sequence
  Description of Artificial Sequence: Synthetic oligonucleotide
ggggcucaucuggugcggg

SEQ ID NO: 518874 - RNA, 19 nt, Artificial Sequence
  Description of Artificial Sequence: Synthetic oligonucleotide
gacucagacgagggcuucu

SEQ ID NO: 518875 - RNA, 19 nt, Artificial Sequence
  Description of Artificial Sequence: Synthetic oligonucleotide
cccguucccgccuccucag

SEQ ID NO: 518876 - RNA, 19 nt, Artificial Sequence
  Description of Artificial Sequence: Synthetic oligonucleotide
cagcgggauccacuucaca

SEQ ID NO: 518877 - RNA, 19 nt, Artificial Sequence
  Description of Artificial Sequence: Synthetic oligonucleotide
gcccacuaacuaacccucc

SEQ ID NO: 518878 - RNA, 19 nt, Artificial Sequence
  Description of Artificial Sequence: Synthetic oligonucleotide
ccuuguccgauuccccaga

SEQ ID NO: 518879 - RNA, 19 nt, Artificial Sequence
  Description of Artificial Sequence: Synthetic oligonucleotide
ggaccgggccgcaagacgu

SEQ ID NO: 518880 - RNA, 19 nt, Artificial Sequence
  Description of Artificial Sequence: Synthetic oligonucleotide
ccgggccgcaagacguuag

SEQ ID NO: 518881 - RNA, 19 nt, Artificial Sequence
  Description of Artificial Sequence: Synthetic oligonucleotide
cgggccgcaagacguuagg

SEQ ID NO: 518882 - RNA, 19 nt, Artificial Sequence
  Description of Artificial Sequence: Synthetic oligonucleotide
ggacaagucuaaaggugau

SEQ ID NO: 518883 - RNA, 19 nt, Artificial Sequence
  Description of Artificial Sequence: Synthetic oligonucleotide
gugcggguuucaccagugu

SEQ ID NO: 518884 - RNA, 19 nt, Artificial Sequence
  Description of Artificial Sequence: Synthetic oligonucleotide
gggccgcaagacguuagga

SEQ ID NO: 518885 - RNA, 19 nt, Artificial Sequence
  Description of Artificial Sequence: Synthetic oligonucleotide
cuucuccgacgccggccca

SEQ ID NO: 518886 - RNA, 19 nt, Artificial Sequence
  Description of Artificial Sequence: Synthetic oligonucleotide
gguggcccaucuucagggu

SEQ ID NO: 518887 - RNA, 19 nt, Artificial Sequence
  Description of Artificial Sequence: Synthetic oligonucleotide
gcgucagaugacagcggga

SEQ ID NO: 518888 - RNA, 19 nt, Artificial Sequence
  Description of Artificial Sequence: Synthetic oligonucleotide
cuccucccucaagauucca

SEQ ID NO: 518889 - RNA, 19 nt, Artificial Sequence
  Description of Artificial Sequence: Synthetic oligonucleotide
ccacuaacuaacccuccau

SEQ ID NO: 518890 - RNA, 19 nt, Artificial Sequence
  Description of Artificial Sequence: Synthetic oligonucleotide
ccacacaccucgaugucuu

SEQ ID NO: 518891 - RNA, 19 nt, Artificial Sequence
  Description of Artificial Sequence: Synthetic oligonucleotide
ccagucgaacauugucacu

SEQ ID NO: 518892 - RNA, 19 nt, Artificial Sequence
  Description of Artificial Sequence: Synthetic oligonucleotide
gagcgggaucacggcuugu

SEQ ID NO: 518893 - RNA, 19 nt, Artificial Sequence
  Description of Artificial Sequence: Synthetic oligonucleotide
cuucccggcugagguucua

SEQ ID NO: 518894 - RNA, 19 nt, Artificial Sequence
  Description of Artificial Sequence: Synthetic oligonucleotide
gaccgggccgcaagacguu

SEQ ID NO: 518895 - RNA, 19 nt, Artificial Sequence
  Description of Artificial Sequence: Synthetic oligonucleotide
cgcaagacguuaggacaca

SEQ ID NO: 518896 - RNA, 19 nt, Artificial Sequence
  Description of Artificial Sequence: Synthetic oligonucleotide
gcauugcgacccucauaau

SEQ ID NO: 518897 - RNA, 19 nt, Artificial Sequence
  Description of Artificial Sequence: Synthetic oligonucleotide
cccuugcauugcgacccuc

SEQ ID NO: 518898 - RNA, 19 nt, Artificial Sequence
  Description of Artificial Sequence: Synthetic oligonucleotide
ggaucacggcuuguuccuu

SEQ ID NO: 518899 - RNA, 19 nt, Artificial Sequence
  Description of Artificial Sequence: Synthetic oligonucleotide
cggguuucaccagugucau

SEQ ID NO: 518900 - RNA, 19 nt, Artificial Sequence
  Description of Artificial Sequence: Synthetic oligonucleotide
cguucccgccuccucaguu

SEQ ID NO: 518901 - RNA, 19 nt, Artificial Sequence
  Description of Artificial Sequence: Synthetic oligonucleotide
cgccggcccauccccagcu

SEQ ID NO: 518902 - RNA, 19 nt, Artificial Sequence
  Description of Artificial Sequence: Synthetic oligonucleotide
uuuacaaucagaguuaagg

SEQ ID NO: 518903 - RNA, 19 nt, Artificial Sequence
  Description of Artificial Sequence: Synthetic oligonucleotide
uugauaaugaauacaagag

SEQ ID NO: 518904 - RNA, 19 nt, Artificial Sequence
  Description of Artificial Sequence: Synthetic oligonucleotide
aaagguagcucucucaaac

SEQ ID NO: 518905 - RNA, 19 nt, Artificial Sequence
  Description of Artificial Sequence: Synthetic oligonucleotide
ugauaaugaauacaagagg

SEQ ID NO: 518906 - RNA, 19 nt, Artificial Sequence
  Description of Artificial Sequence: Synthetic oligonucleotide
uuagacaagaccuugauau

SEQ ID NO: 518907 - RNA, 19 nt, Artificial Sequence
  Description of Artificial Sequence: Synthetic oligonucleotide
aaaucugugggcaucacgc

SEQ ID NO: 518908 - RNA, 19 nt, Artificial Sequence
  Description of Artificial Sequence: Synthetic oligonucleotide
uaggaguacaacaauaaag

SEQ ID NO: 518909 - RNA, 19 nt, Artificial Sequence
  Description of Artificial Sequence: Synthetic oligonucleotide
ugauauauaucccuggcug

SEQ ID NO: 518910 - RNA, 19 nt, Artificial Sequence
  Description of Artificial Sequence: Synthetic oligonucleotide
uuuacacugauaaugagaa

SEQ ID NO: 518911 - RNA, 19 nt, Artificial Sequence
  Description of Artificial Sequence: Synthetic oligonucleotide
ucuauuagaaucauguuau

SEQ ID NO: 518912 - RNA, 19 nt, Artificial Sequence
  Description of Artificial Sequence: Synthetic oligonucleotide
cuuauacagaguuucaucc

SEQ ID NO: 518913 - RNA, 19 nt, Artificial Sequence
  Description of Artificial Sequence: Synthetic oligonucleotide
uaauggacgagauaaacgc

SEQ ID NO: 518914 - RNA, 19 nt, Artificial Sequence
  Description of Artificial Sequence: Synthetic oligonucleotide
ugauaaugagaaaugacca

SEQ ID NO: 518915 - RNA, 19 nt, Artificial Sequence
  Description of Artificial Sequence: Synthetic oligonucleotide
uuuuagagucuacacauag

SEQ ID NO: 518916 - RNA, 19 nt, Artificial Sequence
  Description of Artificial Sequence: Synthetic oligonucleotide
uugugugaaacaauauucg

SEQ ID NO: 518917 - RNA, 19 nt, Artificial Sequence
  Description of Artificial Sequence: Synthetic oligonucleotide
acacuuacauauuaucacc

SEQ ID NO: 518918 - RNA, 19 nt, Artificial Sequence
  Description of Artificial Sequence: Synthetic oligonucleotide
aacuuaagucuccaggcac

SEQ ID NO: 518919 - RNA, 19 nt, Artificial Sequence
  Description of Artificial Sequence: Synthetic oligonucleotide
gauaauagaccucaugcug

SEQ ID NO: 518920 - RNA, 19 nt, Artificial Sequence
  Description of Artificial Sequence: Synthetic oligonucleotide
aaguuaaacgguaagacug

SEQ ID NO: 518921 - RNA, 19 nt, Artificial Sequence
  Description of Artificial Sequence: Synthetic oligonucleotide
agaguuaaggaauacauau

SEQ ID NO: 518922 - RNA, 19 nt, Artificial Sequence
  Description of Artificial Sequence: Synthetic oligonucleotide
uucagcaaaauuccguagg

SEQ ID NO: 518923 - RNA, 19 nt, Artificial Sequence
  Description of Artificial Sequence: Synthetic oligonucleotide
aaaguuaaacgguaagacu

SEQ ID NO: 518924 - RNA, 19 nt, Artificial Sequence
  Description of Artificial Sequence: Synthetic oligonucleotide
uaaacgguaagacugggga

SEQ ID NO: 518925 - RNA, 19 nt, Artificial Sequence
  Description of Artificial Sequence: Synthetic oligonucleotide
guaagaauccgccugaggc

SEQ ID NO: 518926 - RNA, 19 nt, Artificial Sequence
  Description of Artificial Sequence: Synthetic oligonucleotide
acuguuuugguccauccac

SEQ ID NO: 518927 - RNA, 19 nt, Artificial Sequence
  Description of Artificial Sequence: Synthetic oligonucleotide
gugaauaugucaaugaaag

SEQ ID NO: 518928 - RNA, 19 nt, Artificial Sequence
  Description of Artificial Sequence: Synthetic oligonucleotide
aaucauguuaucagaacac

SEQ ID NO: 518929 - RNA, 19 nt, Artificial Sequence
  Description of Artificial Sequence: Synthetic oligonucleotide
uuuucucggagucagauuc

SEQ ID NO: 518930 - RNA, 19 nt, Artificial Sequence
  Description of Artificial Sequence: Synthetic oligonucleotide
ugcuuaauaauguugcuga

SEQ ID NO: 518931 - RNA, 19 nt, Artificial Sequence
  Description of Artificial Sequence: Synthetic oligonucleotide
uguauuguuguaccaaggc

SEQ ID NO: 518932 - RNA, 19 nt, Artificial Sequence
  Description of Artificial Sequence: Synthetic oligonucleotide
agguuaucagaacacaaac

SEQ ID NO: 518933 - RNA, 19 nt, Artificial Sequence
  Description of Artificial Sequence: Synthetic oligonucleotide
gagauaaacgccuuaaguc

SEQ ID NO: 518934 - RNA, 19 nt, Artificial Sequence
  Description of Artificial Sequence: Synthetic oligonucleotide
ugugugaaacaauauucgg

SEQ ID NO: 518935 - RNA, 19 nt, Artificial Sequence
  Description of Artificial Sequence: Synthetic oligonucleotide
cuaauggacgagauaaacg

SEQ ID NO: 518936 - RNA, 19 nt, Artificial Sequence
  Description of Artificial Sequence: Synthetic oligonucleotide
uggaccaagccuuauacag

SEQ ID NO: 518937 - RNA, 19 nt, Artificial Sequence
  Description of Artificial Sequence: Synthetic oligonucleotide
accaacuucauggacaccc

SEQ ID NO: 518938 - RNA, 19 nt, Artificial Sequence
  Description of Artificial Sequence: Synthetic oligonucleotide
aaagguaacuugguccucc

SEQ ID NO: 518939 - RNA, 19 nt, Artificial Sequence
  Description of Artificial Sequence: Synthetic oligonucleotide
agagucuacacauaggagu

SEQ ID NO: 518940 - RNA, 19 nt, Artificial Sequence
  Description of Artificial Sequence: Synthetic oligonucleotide
agauaaacgccuuaagucu

SEQ ID NO: 518941 - RNA, 19 nt, Artificial Sequence
  Description of Artificial Sequence: Synthetic oligonucleotide
aguuaaggaauacauauau

SEQ ID NO: 518942 - RNA, 19 nt, Artificial Sequence
  Description of Artificial Sequence: Synthetic oligonucleotide
uuuagagucuacacauagg

SEQ ID NO: 518943 - RNA, 19 nt, Artificial Sequence
  Description of Artificial Sequence: Synthetic oligonucleotide
ucagaguuaaggaauacau

SEQ ID NO: 518944 - RNA, 19 nt, Artificial Sequence
  Description of Artificial Sequence: Synthetic oligonucleotide
aagacuggggaguagagaa

SEQ ID NO: 518945 - RNA, 19 nt, Artificial Sequence
  Description of Artificial Sequence: Synthetic oligonucleotide
ugggguaacggaaugagcu

SEQ ID NO: 518946 - RNA, 19 nt, Artificial Sequence
  Description of Artificial Sequence: Synthetic oligonucleotide
uauacagaguuucauccca

SEQ ID NO: 518947 - RNA, 19 nt, Artificial Sequence
  Description of Artificial Sequence: Synthetic oligonucleotide
gaaaucgaacaugagaaug

SEQ ID NO: 518948 - RNA, 19 nt, Artificial Sequence
  Description of Artificial Sequence: Synthetic oligonucleotide
ugugaauaugucaaugaaa

SEQ ID NO: 518949 - RNA, 19 nt, Artificial Sequence
  Description of Artificial Sequence: Synthetic oligonucleotide
auucuaauggacgagauaa

SEQ ID NO: 518950 - RNA, 19 nt, Artificial Sequence
  Description of Artificial Sequence: Synthetic oligonucleotide
uauacguuacaccaacuuc

SEQ ID NO: 518951 - RNA, 19 nt, Artificial Sequence
  Description of Artificial Sequence: Synthetic oligonucleotide
aauggacgagauaaacgcc

SEQ ID NO: 518952 - RNA, 19 nt, Artificial Sequence
  Description of Artificial Sequence: Synthetic oligonucleotide
auuggaagcagguuaucag

SEQ ID NO: 518953 - RNA, 19 nt, Artificial Sequence
  Description of Artificial Sequence: Synthetic oligonucleotide
aucuauuagaaucauguua

SEQ ID NO: 518954 - RNA, 19 nt, Artificial Sequence
  Description of Artificial Sequence: Synthetic oligonucleotide
auaauagaccucaugcugg

SEQ ID NO: 518955 - RNA, 19 nt, Artificial Sequence
  Description of Artificial Sequence: Synthetic oligonucleotide
acgaccaugacguaagugu

SEQ ID NO: 518956 - RNA, 19 nt, Artificial Sequence
  Description of Artificial Sequence: Synthetic oligonucleotide
uacauauuaucaccuacgu

SEQ ID NO: 518957 - RNA, 19 nt, Artificial Sequence
  Description of Artificial Sequence: Synthetic oligonucleotide
aacaauaaagaaacagugu

SEQ ID NO: 518958 - RNA, 19 nt, Artificial Sequence
  Description of Artificial Sequence: Synthetic oligonucleotide
cuugauauauaucccuggc

SEQ ID NO: 518959 - RNA, 19 nt, Artificial Sequence
  Description of Artificial Sequence: Synthetic oligonucleotide
uggcauacacaacuauugg

SEQ ID NO: 518960 - RNA, 19 nt, Artificial Sequence
  Description of Artificial Sequence: Synthetic oligonucleotide
acguauacguuacaccaac

SEQ ID NO: 518961 - RNA, 19 nt, Artificial Sequence
  Description of Artificial Sequence: Synthetic oligonucleotide
uuaucaccuacguauacgu

SEQ ID NO: 518962 - RNA, 19 nt, Artificial Sequence
  Description of Artificial Sequence: Synthetic oligonucleotide
uuauacagaguuucauccc

SEQ ID NO: 518963 - RNA, 19 nt, Artificial Sequence
  Description of Artificial Sequence: Synthetic oligonucleotide
uuaucagaacacaaacacu

SEQ ID NO: 518964 - RNA, 19 nt, Artificial Sequence
  Description of Artificial Sequence: Synthetic oligonucleotide
agauaauagaccucaugcu

SEQ ID NO: 518965 - RNA, 19 nt, Artificial Sequence
  Description of Artificial Sequence: Synthetic oligonucleotide
uaaacaaugcuggaccaag

SEQ ID NO: 518966 - RNA, 19 nt, Artificial Sequence
  Description of Artificial Sequence: Synthetic oligonucleotide
aaacuuacagcaauccucu

SEQ ID NO: 518967 - RNA, 19 nt, Artificial Sequence
  Description of Artificial Sequence: Synthetic oligonucleotide
aagaauccgccugaggccg

SEQ ID NO: 518968 - RNA, 19 nt, Artificial Sequence
  Description of Artificial Sequence: Synthetic oligonucleotide
uguuuagcgcaugagaaga

SEQ ID NO: 518969 - RNA, 19 nt, Artificial Sequence
  Description of Artificial Sequence: Synthetic oligonucleotide
auuaucaccuacguauacg

SEQ ID NO: 518970 - RNA, 19 nt, Artificial Sequence
  Description of Artificial Sequence: Synthetic oligonucleotide
aaaucgaacaugagaaugu

SEQ ID NO: 518971 - RNA, 19 nt, Artificial Sequence
  Description of Artificial Sequence: Synthetic oligonucleotide
uucggcaauguuuagcgca

SEQ ID NO: 518972 - RNA, 19 nt, Artificial Sequence
  Description of Artificial Sequence: Synthetic oligonucleotide
aggaguacaacaauaaaga

SEQ ID NO: 518973 - RNA, 19 nt, Artificial Sequence
  Description of Artificial Sequence: Synthetic oligonucleotide
cuuguaacuccucacuggc

SEQ ID NO: 518974 - RNA, 19 nt, Artificial Sequence
  Description of Artificial Sequence: Synthetic oligonucleotide
uuuacuuccgcgcccgccc

SEQ ID NO: 518975 - RNA, 19 nt, Artificial Sequence
  Description of Artificial Sequence: Synthetic oligonucleotide
uggaucagacaucacgacc

SEQ ID NO: 518976 - RNA, 19 nt, Artificial Sequence
  Description of Artificial Sequence: Synthetic oligonucleotide
uacagaagugguaagcauc

SEQ ID NO: 518977 - RNA, 19 nt, Artificial Sequence
  Description of Artificial Sequence: Synthetic oligonucleotide
cguuacaccaacuucaugg

SEQ ID NO: 518978 - RNA, 19 nt, Artificial Sequence
  Description of Artificial Sequence: Synthetic oligonucleotide
cuacguauacguuacacca

SEQ ID NO: 518979 - RNA, 19 nt, Artificial Sequence
  Description of Artificial Sequence: Synthetic oligonucleotide
aauauucggcaauguuuag

SEQ ID NO: 518980 - RNA, 19 nt, Artificial Sequence
  Description of Artificial Sequence: Synthetic oligonucleotide
aacaauauucggcaauguu

SEQ ID NO: 518981 - RNA, 19 nt, Artificial Sequence
  Description of Artificial Sequence: Synthetic oligonucleotide
aacuaccaugccuagcuga

SEQ ID NO: 518982 - RNA, 19 nt, Artificial Sequence
  Description of Artificial Sequence: Synthetic oligonucleotide
ugacguaaguguuggaugu

SEQ ID NO: 518983 - RNA, 19 nt, Artificial Sequence
  Description of Artificial Sequence: Synthetic oligonucleotide
ucuaaauccgcaguacucu

SEQ ID NO: 518984 - RNA, 19 nt, Artificial Sequence
  Description of Artificial Sequence: Synthetic oligonucleotide
uaaguguuggaugugaaua

SEQ ID NO: 518985 - RNA, 19 nt, Artificial Sequence
  Description of Artificial Sequence: Synthetic oligonucleotide
ucagcaaaauuccguaggu

SEQ ID NO: 518986 - RNA, 19 nt, Artificial Sequence
  Description of Artificial Sequence: Synthetic oligonucleotide
ucccuaugcagacaggcug

SEQ ID NO: 518987 - RNA, 19 nt, Artificial Sequence
  Description of Artificial Sequence: Synthetic oligonucleotide
aaacaaugcuggaccaagc

SEQ ID NO: 518988 - RNA, 19 nt, Artificial Sequence
  Description of Artificial Sequence: Synthetic oligonucleotide
uguuaucagaacacuuaca

SEQ ID NO: 518989 - RNA, 19 nt, Artificial Sequence
  Description of Artificial Sequence: Synthetic oligonucleotide
cucgccgccaguaagaauc

SEQ ID NO: 518990 - RNA, 19 nt, Artificial Sequence
  Description of Artificial Sequence: Synthetic oligonucleotide
accuuuaccgacccgaacu

SEQ ID NO: 518991 - RNA, 19 nt, Artificial Sequence
  Description of Artificial Sequence: Synthetic oligonucleotide
cuuuacacugauaaugaga

SEQ ID NO: 518992 - RNA, 19 nt, Artificial Sequence
  Description of Artificial Sequence: Synthetic oligonucleotide
aaugagcugacccgagcug

SEQ ID NO: 518993 - RNA, 19 nt, Artificial Sequence
  Description of Artificial Sequence: Synthetic oligonucleotide
uguaacuccucacuggcua

SEQ ID NO: 518994 - RNA, 19 nt, Artificial Sequence
  Description of Artificial Sequence: Synthetic oligonucleotide
uagugaaauaauuuuccau

SEQ ID NO: 518995 - RNA, 19 nt, Artificial Sequence
  Description of Artificial Sequence: Synthetic oligonucleotide
aaguguuggaugugaauau

SEQ ID NO: 518996 - RNA, 19 nt, Artificial Sequence
  Description of Artificial Sequence: Synthetic oligonucleotide
uguuguaccaaggcgacgu

SEQ ID NO: 518997 - RNA, 19 nt, Artificial Sequence
  Description of Artificial Sequence: Synthetic oligonucleotide
aacauucuaauggacgaga

SEQ ID NO: 518998 - RNA, 19 nt, Artificial Sequence
  Description of Artificial Sequence: Synthetic oligonucleotide
uuagcgcaugagaagacac

SEQ ID NO: 518999 - RNA, 19 nt, Artificial Sequence
  Description of Artificial Sequence: Synthetic oligonucleotide
accgacccgaacuuaaguc

SEQ ID NO: 519000 - RNA, 19 nt, Artificial Sequence
  Description of Artificial Sequence: Synthetic oligonucleotide
uaccagauccacuuuuacc

SEQ ID NO: 519001 - RNA, 19 nt, Artificial Sequence
  Description of Artificial Sequence: Synthetic oligonucleotide
aguaagaauccgccugagg

SEQ ID NO: 519002 - RNA, 19 nt, Artificial Sequence
  Description of Artificial Sequence: Synthetic oligonucleotide
agacaugacugauaguagu

SEQ ID NO: 519003 - RNA, 19 nt, Artificial Sequence
  Description of Artificial Sequence: Synthetic oligonucleotide
ucaccuacguauacguuac

SEQ ID NO: 519004 - RNA, 19 nt, Artificial Sequence
  Description of Artificial Sequence: Synthetic oligonucleotide
gauggaucagacaucacga

SEQ ID NO: 519005 - RNA, 19 nt, Artificial Sequence
  Description of Artificial Sequence: Synthetic oligonucleotide
auacguuacaccaacuuca

SEQ ID NO: 519006 - RNA, 19 nt, Artificial Sequence
  Description of Artificial Sequence: Synthetic oligonucleotide
uguucggaaacaagaacau

SEQ ID NO: 519007 - RNA, 19 nt, Artificial Sequence
  Description of Artificial Sequence: Synthetic oligonucleotide
uccaucgcgcaacaagucc

SEQ ID NO: 519008 - RNA, 19 nt, Artificial Sequence
  Description of Artificial Sequence: Synthetic oligonucleotide
auggaucagacaucacgac

SEQ ID NO: 519009 - RNA, 19 nt, Artificial Sequence
  Description of Artificial Sequence: Synthetic oligonucleotide
uuuaccgacccgaacuuaa

SEQ ID NO: 519010 - RNA, 19 nt, Artificial Sequence
  Description of Artificial Sequence: Synthetic oligonucleotide
gugugaaacaauauucggc

SEQ ID NO: 519011 - RNA, 19 nt, Artificial Sequence
  Description of Artificial Sequence: Synthetic oligonucleotide
aguuagaguuccucacuuc

SEQ ID NO: 519012 - RNA, 19 nt, Artificial Sequence
  Description of Artificial Sequence: Synthetic oligonucleotide
auguucggaaacaagaaca

SEQ ID NO: 519013 - RNA, 19 nt, Artificial Sequence
  Description of Artificial Sequence: Synthetic oligonucleotide
aguuaaacgguaagacugg

SEQ ID NO: 519014 - RNA, 19 nt, Artificial Sequence
  Description of Artificial Sequence: Synthetic oligonucleotide
uauuggaagcagguuauca

SEQ ID NO: 519015 - RNA, 19 nt, Artificial Sequence
  Description of Artificial Sequence: Synthetic oligonucleotide
aaguuagaguuccucacuu

SEQ ID NO: 519016 - RNA, 19 nt, Artificial Sequence
  Description of Artificial Sequence: Synthetic oligonucleotide
uuggucccgaguuugggcc

SEQ ID NO: 519017 - RNA, 19 nt, Artificial Sequence
  Description of Artificial Sequence: Synthetic oligonucleotide
uggccucaagacaugacug

SEQ ID NO: 519018 - RNA, 19 nt, Artificial Sequence
  Description of Artificial Sequence: Synthetic oligonucleotide
gauuccgugcgugcaaugg

SEQ ID NO: 519019 - RNA, 19 nt, Artificial Sequence
  Description of Artificial Sequence: Synthetic oligonucleotide
aagacaugacugauaguag

SEQ ID NO: 519020 - RNA, 19 nt, Artificial Sequence
  Description of Artificial Sequence: Synthetic oligonucleotide
uuuagacaagaccuugaua

SEQ ID NO: 519021 - RNA, 19 nt, Artificial Sequence
  Description of Artificial Sequence: Synthetic oligonucleotide
aaauuccguagguucauuu

SEQ ID NO: 519022 - RNA, 19 nt, Artificial Sequence
  Description of Artificial Sequence: Synthetic oligonucleotide
auucggcaauguuuagcgc

SEQ ID NO: 519023 - RNA, 19 nt, Artificial Sequence
  Description of Artificial Sequence: Synthetic oligonucleotide
auggccucaagacaugacu

SEQ ID NO: 519024 - RNA, 19 nt, Artificial Sequence
  Description of Artificial Sequence: Synthetic oligonucleotide
aaauccgcaguacucuuuu

SEQ ID NO: 519025 - RNA, 19 nt, Artificial Sequence
  Description of Artificial Sequence: Synthetic oligonucleotide
aucaccuacguauacguua

SEQ ID NO: 519026 - RNA, 19 nt, Artificial Sequence
  Description of Artificial Sequence: Synthetic oligonucleotide
acaauauucggcaauguuu

SEQ ID NO: 519027 - RNA, 19 nt, Artificial Sequence
  Description of Artificial Sequence: Synthetic oligonucleotide
accuacguauacguuacac

SEQ ID NO: 519028 - RNA, 19 nt, Artificial Sequence
  Description of Artificial Sequence: Synthetic oligonucleotide
cccacgguuaccuuuaccg

SEQ ID NO: 519029 - RNA, 19 nt, Artificial Sequence
  Description of Artificial Sequence: Synthetic oligonucleotide
caauauucggcaauguuua

SEQ ID NO: 519030 - RNA, 19 nt, Artificial Sequence
  Description of Artificial Sequence: Synthetic oligonucleotide
acccaagcgauccuuccgg

SEQ ID NO: 519031 - RNA, 19 nt, Artificial Sequence
  Description of Artificial Sequence: Synthetic oligonucleotide
acaacuauuggaagcaggu

SEQ ID NO: 519032 - RNA, 19 nt, Artificial Sequence
  Description of Artificial Sequence: Synthetic oligonucleotide
ucuuaccagauccacuuuu

SEQ ID NO: 519033 - RNA, 19 nt, Artificial Sequence
  Description of Artificial Sequence: Synthetic oligonucleotide
auuugauaaugaauacaag

SEQ ID NO: 519034 - RNA, 19 nt, Artificial Sequence
  Description of Artificial Sequence: Synthetic oligonucleotide
cagauagauguucggaaac

SEQ ID NO: 519035 - RNA, 19 nt, Artificial Sequence
  Description of Artificial Sequence: Synthetic oligonucleotide
uguaccaaggcgacgugua

SEQ ID NO: 519036 - RNA, 19 nt, Artificial Sequence
  Description of Artificial Sequence: Synthetic oligonucleotide
ggcauuguccacccaagcg

SEQ ID NO: 519037 - RNA, 19 nt, Artificial Sequence
  Description of Artificial Sequence: Synthetic oligonucleotide
aauccgcaguacucuuuuc

SEQ ID NO: 519038 - RNA, 19 nt, Artificial Sequence
  Description of Artificial Sequence: Synthetic oligonucleotide
acgagauaaacgccuuaag

SEQ ID NO: 519039 - RNA, 19 nt, Artificial Sequence
  Description of Artificial Sequence: Synthetic oligonucleotide
aaggugucuuguccaccac

SEQ ID NO: 519040 - RNA, 19 nt, Artificial Sequence
  Description of Artificial Sequence: Synthetic oligonucleotide
uuguccacccaagcgaucc

SEQ ID NO: 519041 - RNA, 19 nt, Artificial Sequence
  Description of Artificial Sequence: Synthetic oligonucleotide
ucaaguucgcggcucucca

SEQ ID NO: 519042 - RNA, 19 nt, Artificial Sequence
  Description of Artificial Sequence: Synthetic oligonucleotide
cgugcaauggaagagaugc

SEQ ID NO: 519043 - RNA, 19 nt, Artificial Sequence
  Description of Artificial Sequence: Synthetic oligonucleotide
uuuagcgcaugagaagaca

SEQ ID NO: 519044 - RNA, 19 nt, Artificial Sequence
  Description of Artificial Sequence: Synthetic oligonucleotide
caaagacauaaaucagaac

SEQ ID NO: 519045 - RNA, 19 nt, Artificial Sequence
  Description of Artificial Sequence: Synthetic oligonucleotide
ugguccauccacucucucc

SEQ ID NO: 519046 - RNA, 19 nt, Artificial Sequence
  Description of Artificial Sequence: Synthetic oligonucleotide
aaacaauauucggcaaugu

SEQ ID NO: 519047 - RNA, 19 nt, Artificial Sequence
  Description of Artificial Sequence: Synthetic oligonucleotide
acgguuaccuuuaccgacc

SEQ ID NO: 519048 - RNA, 19 nt, Artificial Sequence
  Description of Artificial Sequence: Synthetic oligonucleotide
cacccgaucuuguaacucc

SEQ ID NO: 519049 - RNA, 19 nt, Artificial Sequence
  Description of Artificial Sequence: Synthetic oligonucleotide
guuaccuuuaccgacccga

SEQ ID NO: 519050 - RNA, 19 nt, Artificial Sequence
  Description of Artificial Sequence: Synthetic oligonucleotide
cacgguuaccuuuaccgac

SEQ ID NO: 519051 - RNA, 19 nt, Artificial Sequence
  Description of Artificial Sequence: Synthetic oligonucleotide
ucuacacauaggaguacaa

SEQ ID NO: 519052 - RNA, 19 nt, Artificial Sequence
  Description of Artificial Sequence: Synthetic oligonucleotide
auagauguucggaaacaag

SEQ ID NO: 519053 - RNA, 19 nt, Artificial Sequence
  Description of Artificial Sequence: Synthetic oligonucleotide
uuaccgacccgaacuuaag

SEQ ID NO: 519054 - RNA, 19 nt, Artificial Sequence
  Description of Artificial Sequence: Synthetic oligonucleotide
agaaaucgaacaugagaau

SEQ ID NO: 519055 - RNA, 19 nt, Artificial Sequence
  Description of Artificial Sequence: Synthetic oligonucleotide
agaacacaaacacuaucua

SEQ ID NO: 519056 - RNA, 19 nt, Artificial Sequence
  Description of Artificial Sequence: Synthetic oligonucleotide
acgccuuaagucuucuucu

SEQ ID NO: 519057 - RNA, 19 nt, Artificial Sequence
  Description of Artificial Sequence: Synthetic oligonucleotide
ugguaagcaucacaguauu

SEQ ID NO: 519058 - RNA, 19 nt, Artificial Sequence
  Description of Artificial Sequence: Synthetic oligonucleotide
uacguauacguuacaccaa

SEQ ID NO: 519059 - RNA, 19 nt, Artificial Sequence
  Description of Artificial Sequence: Synthetic oligonucleotide
guuaaacgguaagacuggg

SEQ ID NO: 519060 - RNA, 19 nt, Artificial Sequence
  Description of Artificial Sequence: Synthetic oligonucleotide
aaagcggucaccgccuggu

SEQ ID NO: 519061 - RNA, 19 nt, Artificial Sequence
  Description of Artificial Sequence: Synthetic oligonucleotide
auccgcaguacucuuuucu

SEQ ID NO: 519062 - RNA, 19 nt, Artificial Sequence
  Description of Artificial Sequence: Synthetic oligonucleotide
acacuaucuauuagaauca

SEQ ID NO: 519063 - RNA, 19 nt, Artificial Sequence
  Description of Artificial Sequence: Synthetic oligonucleotide
cuuaagucuccaggcacgg

SEQ ID NO: 519064 - RNA, 19 nt, Artificial Sequence
  Description of Artificial Sequence: Synthetic oligonucleotide
aucacgaccaugacguaag

SEQ ID NO: 519065 - RNA, 19 nt, Artificial Sequence
  Description of Artificial Sequence: Synthetic oligonucleotide
agauagauguucggaaaca

SEQ ID NO: 519066 - RNA, 19 nt, Artificial Sequence
  Description of Artificial Sequence: Synthetic oligonucleotide
aucagaguuaaggaauaca

SEQ ID NO: 519067 - RNA, 19 nt, Artificial Sequence
  Description of Artificial Sequence: Synthetic oligonucleotide
auauaucccuggcuggccu

SEQ ID NO: 519068 - RNA, 19 nt, Artificial Sequence
  Description of Artificial Sequence: Synthetic oligonucleotide
uucuaauggacgagauaaa

SEQ ID NO: 519069 - RNA, 19 nt, Artificial Sequence
  Description of Artificial Sequence: Synthetic oligonucleotide
uaccaugccuagcugaguu

SEQ ID NO: 519070 - RNA, 19 nt, Artificial Sequence
  Description of Artificial Sequence: Synthetic oligonucleotide
uggucuuaccagauccacu

SEQ ID NO: 519071 - RNA, 19 nt, Artificial Sequence
  Description of Artificial Sequence: Synthetic oligonucleotide
ccgaacuuaagucuccagg

SEQ ID NO: 519072 - RNA, 19 nt, Artificial Sequence
  Description of Artificial Sequence: Synthetic oligonucleotide
aagguaacuugguccuccu

SEQ ID NO: 519073 - RNA, 19 nt, Artificial Sequence
  Description of Artificial Sequence: Synthetic oligonucleotide
uacguuacaccaacuucau

SEQ ID NO: 519074 - RNA, 19 nt, Artificial Sequence
  Description of Artificial Sequence: Synthetic oligonucleotide
uggcucaccuccucaacug

SEQ ID NO: 519075 - RNA, 19 nt, Artificial Sequence
  Description of Artificial Sequence: Synthetic oligonucleotide
ccuacguauacguuacacc

SEQ ID NO: 519076 - RNA, 19 nt, Artificial Sequence
  Description of Artificial Sequence: Synthetic oligonucleotide
acuuacauauuaucaccua

SEQ ID NO: 519077 - RNA, 19 nt, Artificial Sequence
  Description of Artificial Sequence: Synthetic oligonucleotide
uuuuacccaucaacagcac

SEQ ID NO: 519078 - RNA, 19 nt, Artificial Sequence
  Description of Artificial Sequence: Synthetic oligonucleotide
cuauuagaaucauguuauc

SEQ ID NO: 519079 - RNA, 19 nt, Artificial Sequence
  Description of Artificial Sequence: Synthetic oligonucleotide
caaggcgacguguagucuc

SEQ ID NO: 519080 - RNA, 19 nt, Artificial Sequence
  Description of Artificial Sequence: Synthetic oligonucleotide
acacauaggaguacaacaa

SEQ ID NO: 519081 - RNA, 19 nt, Artificial Sequence
  Description of Artificial Sequence: Synthetic oligonucleotide
auggacgagauaaacgccu

SEQ ID NO: 519082 - RNA, 19 nt, Artificial Sequence
  Description of Artificial Sequence: Synthetic oligonucleotide
gauagauguucggaaacaa

SEQ ID NO: 519083 - RNA, 19 nt, Artificial Sequence
  Description of Artificial Sequence: Synthetic oligonucleotide
uccgugcgugcaauggaag

SEQ ID NO: 519084 - RNA, 19 nt, Artificial Sequence
  Description of Artificial Sequence: Synthetic oligonucleotide
cucaacugccuaugcacac

SEQ ID NO: 519085 - RNA, 19 nt, Artificial Sequence
  Description of Artificial Sequence: Synthetic oligonucleotide
ggcacaagcgauuccgugc

SEQ ID NO: 519086 - RNA, 19 nt, Artificial Sequence
  Description of Artificial Sequence: Synthetic oligonucleotide
ucggagucagauucuucca

SEQ ID NO: 519087 - RNA, 19 nt, Artificial Sequence
  Description of Artificial Sequence: Synthetic oligonucleotide
gcacaagcgauuccgugcg

SEQ ID NO: 519088 - RNA, 19 nt, Artificial Sequence
  Description of Artificial Sequence: Synthetic oligonucleotide
gaccuugauauauaucccu

SEQ ID NO: 519089 - RNA, 19 nt, Artificial Sequence
  Description of Artificial Sequence: Synthetic oligonucleotide
auaaacgccuuaagucuuc

SEQ ID NO: 519090 - RNA, 19 nt, Artificial Sequence
  Description of Artificial Sequence: Synthetic oligonucleotide
uagcgcaugagaagacacu

SEQ ID NO: 519091 - RNA, 19 nt, Artificial Sequence
  Description of Artificial Sequence: Synthetic oligonucleotide
uucccgaucucgccgccag

SEQ ID NO: 519092 - RNA, 19 nt, Artificial Sequence
  Description of Artificial Sequence: Synthetic oligonucleotide
acuaucuauuagaaucaug

SEQ ID NO: 519093 - RNA, 19 nt, Artificial Sequence
  Description of Artificial Sequence: Synthetic oligonucleotide
uaccgacccgaacuuaagu

SEQ ID NO: 519094 - RNA, 19 nt, Artificial Sequence
  Description of Artificial Sequence: Synthetic oligonucleotide
gccaguaagaauccgccug

SEQ ID NO: 519095 - RNA, 19 nt, Artificial Sequence
  Description of Artificial Sequence: Synthetic oligonucleotide
uuucucggagucagauucu

SEQ ID NO: 519096 - RNA, 19 nt, Artificial Sequence
  Description of Artificial Sequence: Synthetic oligonucleotide
agucuacacauaggaguac

SEQ ID NO: 519097 - RNA, 19 nt, Artificial Sequence
  Description of Artificial Sequence: Synthetic oligonucleotide
gacguguagucucuggcaa

SEQ ID NO: 519098 - RNA, 19 nt, Artificial Sequence
  Description of Artificial Sequence: Synthetic oligonucleotide
uuccgugcgugcaauggaa

SEQ ID NO: 519099 - RNA, 19 nt, Artificial Sequence
  Description of Artificial Sequence: Synthetic oligonucleotide
uaaauccgcaguacucuuu

SEQ ID NO: 519100 - RNA, 19 nt, Artificial Sequence
  Description of Artificial Sequence: Synthetic oligonucleotide
accuugauauauaucccug

SEQ ID NO: 519101 - RNA, 19 nt, Artificial Sequence
  Description of Artificial Sequence: Synthetic oligonucleotide
ucggcaauguuuagcgcau

SEQ ID NO: 519102 - RNA, 19 nt, Artificial Sequence
  Description of Artificial Sequence: Synthetic oligonucleotide
aggccgucuuuacuuccgc

SEQ ID NO: 519103 - RNA, 19 nt, Artificial Sequence
  Description of Artificial Sequence: Synthetic oligonucleotide
cugggguaacggaaugagc

SEQ ID NO: 519104 - RNA, 19 nt, Artificial Sequence
  Description of Artificial Sequence: Synthetic oligonucleotide
auuccgugcgugcaaugga

SEQ ID NO: 519105 - RNA, 19 nt, Artificial Sequence
  Description of Artificial Sequence: Synthetic oligonucleotide
ccuuauacagaguuucauc

SEQ ID NO: 519106 - RNA, 19 nt, Artificial Sequence
  Description of Artificial Sequence: Synthetic oligonucleotide
ugcgugcaauggaagagau

SEQ ID NO: 519107 - RNA, 19 nt, Artificial Sequence
  Description of Artificial Sequence: Synthetic oligonucleotide
ggcauacacaacuauugga

SEQ ID NO: 519108 - RNA, 19 nt, Artificial Sequence
  Description of Artificial Sequence: Synthetic oligonucleotide
agauguucggaaacaagaa

SEQ ID NO: 519109 - RNA, 19 nt, Artificial Sequence
  Description of Artificial Sequence: Synthetic oligonucleotide
auggaugcauuuggcauug

SEQ ID NO: 519110 - RNA, 19 nt, Artificial Sequence
  Description of Artificial Sequence: Synthetic oligonucleotide
gacgagauaaacgccuuaa

SEQ ID NO: 519111 - RNA, 19 nt, Artificial Sequence
  Description of Artificial Sequence: Synthetic oligonucleotide
ucucaaaucugugggcauc

SEQ ID NO: 519112 - RNA, 19 nt, Artificial Sequence
  Description of Artificial Sequence: Synthetic oligonucleotide
aguuggucccgaguuuggg

SEQ ID NO: 519113 - RNA, 19 nt, Artificial Sequence
  Description of Artificial Sequence: Synthetic oligonucleotide
gagucuacacauaggagua

SEQ ID NO: 519114 - RNA, 19 nt, Artificial Sequence
  Description of Artificial Sequence: Synthetic oligonucleotide
auguucuacaucaauugua

SEQ ID NO: 519115 - RNA, 19 nt, Artificial Sequence
  Description of Artificial Sequence: Synthetic oligonucleotide
ucgcgcaacaaguccuuca

SEQ ID NO: 519116 - RNA, 19 nt, Artificial Sequence
  Description of Artificial Sequence: Synthetic oligonucleotide
uuguuguaccaaggcgacg

SEQ ID NO: 519117 - RNA, 19 nt, Artificial Sequence
  Description of Artificial Sequence: Synthetic oligonucleotide
gcauuguccacccaagcga

SEQ ID NO: 519118 - RNA, 19 nt, Artificial Sequence
  Description of Artificial Sequence: Synthetic oligonucleotide
uuccaucgcgcaacaaguc

SEQ ID NO: 519119 - RNA, 19 nt, Artificial Sequence
  Description of Artificial Sequence: Synthetic oligonucleotide
cuaugcacaccgcccgcgg

SEQ ID NO: 519120 - RNA, 19 nt, Artificial Sequence
  Description of Artificial Sequence: Synthetic oligonucleotide
aggcacaagcgauuccgug

SEQ ID NO: 519121 - RNA, 19 nt, Artificial Sequence
  Description of Artificial Sequence: Synthetic oligonucleotide
auacagaguuucaucccag

SEQ ID NO: 519122 - RNA, 19 nt, Artificial Sequence
  Description of Artificial Sequence: Synthetic oligonucleotide
acacccgaucuuguaacuc

SEQ ID NO: 519123 - RNA, 19 nt, Artificial Sequence
  Description of Artificial Sequence: Synthetic oligonucleotide
guaccaaggcgacguguag

SEQ ID NO: 519124 - RNA, 19 nt, Artificial Sequence
  Description of Artificial Sequence: Synthetic oligonucleotide
agauucuuccaucgcgcaa

SEQ ID NO: 519125 - RNA, 19 nt, Artificial Sequence
  Description of Artificial Sequence: Synthetic oligonucleotide
uccgcaguacucuuuucuu

SEQ ID NO: 519126 - RNA, 19 nt, Artificial Sequence
  Description of Artificial Sequence: Synthetic oligonucleotide
cucguugauccuccuguac

SEQ ID NO: 519127 - RNA, 19 nt, Artificial Sequence
  Description of Artificial Sequence: Synthetic oligonucleotide
gcauacacaacuauuggaa

SEQ ID NO: 519128 - RNA, 19 nt, Artificial Sequence
  Description of Artificial Sequence: Synthetic oligonucleotide
cuuuacuuccgcgcccgcc

SEQ ID NO: 519129 - RNA, 19 nt, Artificial Sequence
  Description of Artificial Sequence: Synthetic oligonucleotide
acaagcgauuccgugcgug

SEQ ID NO: 519130 - RNA, 19 nt, Artificial Sequence
  Description of Artificial Sequence: Synthetic oligonucleotide
uaucaccuacguauacguu

SEQ ID NO: 519131 - RNA, 19 nt, Artificial Sequence
  Description of Artificial Sequence: Synthetic oligonucleotide
acguaaguguuggauguga

SEQ ID NO: 519132 - RNA, 19 nt, Artificial Sequence
  Description of Artificial Sequence: Synthetic oligonucleotide
ggaguagagaagaaauaca

SEQ ID NO: 519133 - RNA, 19 nt, Artificial Sequence
  Description of Artificial Sequence: Synthetic oligonucleotide
ccacuuuuacccaucaaca

SEQ ID NO: 519134 - RNA, 19 nt, Artificial Sequence
  Description of Artificial Sequence: Synthetic oligonucleotide
uaccaaggcgacguguagu

SEQ ID NO: 519135 - RNA, 19 nt, Artificial Sequence
  Description of Artificial Sequence: Synthetic oligonucleotide
uuguaccaaggcgacgugu

SEQ ID NO: 519136 - RNA, 19 nt, Artificial Sequence
  Description of Artificial Sequence: Synthetic oligonucleotide
gaguuaaggaauacauaua

SEQ ID NO: 519137 - RNA, 19 nt, Artificial Sequence
  Description of Artificial Sequence: Synthetic oligonucleotide
cagaguuucaucccagaua

SEQ ID NO: 519138 - RNA, 19 nt, Artificial Sequence
  Description of Artificial Sequence: Synthetic oligonucleotide
ucccacgguuaccuuuacc

SEQ ID NO: 519139 - RNA, 19 nt, Artificial Sequence
  Description of Artificial Sequence: Synthetic oligonucleotide
uggacgagauaaacgccuu

SEQ ID NO: 519140 - RNA, 19 nt, Artificial Sequence
  Description of Artificial Sequence: Synthetic oligonucleotide
auacaagaggaugcuggga

SEQ ID NO: 519141 - RNA, 19 nt, Artificial Sequence
  Description of Artificial Sequence: Synthetic oligonucleotide
cagaguuaaggaauacaua

SEQ ID NO: 519142 - RNA, 19 nt, Artificial Sequence
  Description of Artificial Sequence: Synthetic oligonucleotide
cuggucuuaccagauccac

SEQ ID NO: 519143 - RNA, 19 nt, Artificial Sequence
  Description of Artificial Sequence: Synthetic oligonucleotide
ucgccgccaguaagaaucc

SEQ ID NO: 519144 - RNA, 19 nt, Artificial Sequence
  Description of Artificial Sequence: Synthetic oligonucleotide
gucuacacauaggaguaca

SEQ ID NO: 519145 - RNA, 19 nt, Artificial Sequence
  Description of Artificial Sequence: Synthetic oligonucleotide
gaucucgccgccaguaaga

SEQ ID NO: 519146 - RNA, 19 nt, Artificial Sequence
  Description of Artificial Sequence: Synthetic oligonucleotide
guauacguuacaccaacuu

SEQ ID NO: 519147 - RNA, 19 nt, Artificial Sequence
  Description of Artificial Sequence: Synthetic oligonucleotide
gacguaaguguuggaugug

SEQ ID NO: 519148 - RNA, 19 nt, Artificial Sequence
  Description of Artificial Sequence: Synthetic oligonucleotide
acggaaugagcugacccga

SEQ ID NO: 519149 - RNA, 19 nt, Artificial Sequence
  Description of Artificial Sequence: Synthetic oligonucleotide
uuaagucuccaggcacggc

SEQ ID NO: 519150 - RNA, 19 nt, Artificial Sequence
  Description of Artificial Sequence: Synthetic oligonucleotide
guagggccugcucuauccc

SEQ ID NO: 519151 - RNA, 19 nt, Artificial Sequence
  Description of Artificial Sequence: Synthetic oligonucleotide
acguuacaccaacuucaug

SEQ ID NO: 519152 - RNA, 19 nt, Artificial Sequence
  Description of Artificial Sequence: Synthetic oligonucleotide
gccgucuuuacuuccgcgc

SEQ ID NO: 519153 - RNA, 19 nt, Artificial Sequence
  Description of Artificial Sequence: Synthetic oligonucleotide
cccuaugcagacaggcugg

SEQ ID NO: 519154 - RNA, 19 nt, Artificial Sequence
  Description of Artificial Sequence: Synthetic oligonucleotide
guaacggaaugagcugacc

SEQ ID NO: 519155 - RNA, 19 nt, Artificial Sequence
  Description of Artificial Sequence: Synthetic oligonucleotide
cuagcugaguuacggaaua

SEQ ID NO: 519156 - RNA, 19 nt, Artificial Sequence
  Description of Artificial Sequence: Synthetic oligonucleotide
ggaaugagcugacccgagc

SEQ ID NO: 519157 - RNA, 19 nt, Artificial Sequence
  Description of Artificial Sequence: Synthetic oligonucleotide
ggagucagauucuuccauc

SEQ ID NO: 519158 - RNA, 19 nt, Artificial Sequence
  Description of Artificial Sequence: Synthetic oligonucleotide
aaggcgacguguagucucu

SEQ ID NO: 519159 - RNA, 19 nt, Artificial Sequence
  Description of Artificial Sequence: Synthetic oligonucleotide
ucacgcuggcuagugaaau

SEQ ID NO: 519160 - RNA, 19 nt, Artificial Sequence
  Description of Artificial Sequence: Synthetic oligonucleotide
cuucuaaauccgcaguacu

SEQ ID NO: 519161 - RNA, 19 nt, Artificial Sequence
  Description of Artificial Sequence: Synthetic oligonucleotide
gacccgaacuuaagucucc

SEQ ID NO: 519162 - RNA, 19 nt, Artificial Sequence
  Description of Artificial Sequence: Synthetic oligonucleotide
acauucuaauggacgagau

SEQ ID NO: 519163 - RNA, 19 nt, Artificial Sequence
  Description of Artificial Sequence: Synthetic oligonucleotide
guuguaccaaggcgacgug

SEQ ID NO: 519164 - RNA, 19 nt, Artificial Sequence
  Description of Artificial Sequence: Synthetic oligonucleotide
uuacuuccgcgcccgcccu

SEQ ID NO: 519165 - RNA, 19 nt, Artificial Sequence
  Description of Artificial Sequence: Synthetic oligonucleotide
guuuagcgcaugagaagac

SEQ ID NO: 519166 - RNA, 19 nt, Artificial Sequence
  Description of Artificial Sequence: Synthetic oligonucleotide
aacuuacagcaauccucuu

SEQ ID NO: 519167 - RNA, 19 nt, Artificial Sequence
  Description of Artificial Sequence: Synthetic oligonucleotide
gggguaacggaaugagcug

SEQ ID NO: 519168 - RNA, 19 nt, Artificial Sequence
  Description of Artificial Sequence: Synthetic oligonucleotide
gaguuugggccccgcuccc

SEQ ID NO: 519169 - RNA, 19 nt, Artificial Sequence
  Description of Artificial Sequence: Synthetic oligonucleotide
guugaacauugggaaucag

SEQ ID NO: 519170 - RNA, 19 nt, Artificial Sequence
  Description of Artificial Sequence: Synthetic oligonucleotide
uggucccgaguuugggccc

SEQ ID NO: 519171 - RNA, 19 nt, Artificial Sequence
  Description of Artificial Sequence: Synthetic oligonucleotide
gcugggguaacggaaugag

SEQ ID NO: 519172 - RNA, 19 nt, Artificial Sequence
  Description of Artificial Sequence: Synthetic oligonucleotide
caaagcggucaccgccugg

SEQ ID NO: 519173 - RNA, 19 nt, Artificial Sequence
  Description of Artificial Sequence: Synthetic oligonucleotide
aaggcacaagcgauuccgu

SEQ ID NO: 519174 - RNA, 19 nt, Artificial Sequence
  Description of Artificial Sequence: Synthetic oligonucleotide
ucacgaccaugacguaagu

SEQ ID NO: 519175 - RNA, 19 nt, Artificial Sequence
  Description of Artificial Sequence: Synthetic oligonucleotide
uguccacccaagcgauccu

SEQ ID NO: 519176 - RNA, 19 nt, Artificial Sequence
  Description of Artificial Sequence: Synthetic oligonucleotide
ugcggauguugaucagagu

SEQ ID NO: 519177 - RNA, 19 nt, Artificial Sequence
  Description of Artificial Sequence: Synthetic oligonucleotide
agcaaagcggucaccgccu

SEQ ID NO: 519178 - RNA, 19 nt, Artificial Sequence
  Description of Artificial Sequence: Synthetic oligonucleotide
cuggaccaagccuuauaca

SEQ ID NO: 519179 - RNA, 19 nt, Artificial Sequence
  Description of Artificial Sequence: Synthetic oligonucleotide
ccgccaguaagaauccgcc

SEQ ID NO: 519180 - RNA, 19 nt, Artificial Sequence
  Description of Artificial Sequence: Synthetic oligonucleotide
cauucuaauggacgagaua

SEQ ID NO: 519181 - RNA, 19 nt, Artificial Sequence
  Description of Artificial Sequence: Synthetic oligonucleotide
auccuuccgguuccccgag

SEQ ID NO: 519182 - RNA, 19 nt, Artificial Sequence
  Description of Artificial Sequence: Synthetic oligonucleotide
gauaaacgccuuaagucuu

SEQ ID NO: 519183 - RNA, 19 nt, Artificial Sequence
  Description of Artificial Sequence: Synthetic oligonucleotide
gucucaagacccaaaggua

SEQ ID NO: 519184 - RNA, 19 nt, Artificial Sequence
  Description of Artificial Sequence: Synthetic oligonucleotide
cagauucuuccaucgcgca

SEQ ID NO: 519185 - RNA, 19 nt, Artificial Sequence
  Description of Artificial Sequence: Synthetic oligonucleotide
cacgaccaugacguaagug

SEQ ID NO: 519186 - RNA, 19 nt, Artificial Sequence
  Description of Artificial Sequence: Synthetic oligonucleotide
gcgacguguagucucuggc

SEQ ID NO: 519187 - RNA, 19 nt, Artificial Sequence
  Description of Artificial Sequence: Synthetic oligonucleotide
ggcgacguguagucucugg

SEQ ID NO: 519188 - RNA, 19 nt, Artificial Sequence
  Description of Artificial Sequence: Synthetic oligonucleotide
acguguagucucuggcaau

SEQ ID NO: 519189 - RNA, 19 nt, Artificial Sequence
  Description of Artificial Sequence: Synthetic oligonucleotide
auuguccacccaagcgauc

SEQ ID NO: 519190 - RNA, 19 nt, Artificial Sequence
  Description of Artificial Sequence: Synthetic oligonucleotide
gaugaggaguuggucccga

SEQ ID NO: 519191 - RNA, 19 nt, Artificial Sequence
  Description of Artificial Sequence: Synthetic oligonucleotide
ccucccuaugcagacaggc

SEQ ID NO: 519192 - RNA, 19 nt, Artificial Sequence
  Description of Artificial Sequence: Synthetic oligonucleotide
gcaugaacuaccaugccua

SEQ ID NO: 519193 - RNA, 19 nt, Artificial Sequence
  Description of Artificial Sequence: Synthetic oligonucleotide
ccgucuuuacuuccgcgcc

SEQ ID NO: 519194 - RNA, 19 nt, Artificial Sequence
  Description of Artificial Sequence: Synthetic oligonucleotide
caugacguaaguguuggau

SEQ ID NO: 519195 - RNA, 19 nt, Artificial Sequence
  Description of Artificial Sequence: Synthetic oligonucleotide
gguuaccuuuaccgacccg

SEQ ID NO: 519196 - RNA, 19 nt, Artificial Sequence
  Description of Artificial Sequence: Synthetic oligonucleotide
cuuaauaauguugcugauu

SEQ ID NO: 519197 - RNA, 19 nt, Artificial Sequence
  Description of Artificial Sequence: Synthetic oligonucleotide
ccuucuaaauccgcaguac

SEQ ID NO: 519198 - RNA, 19 nt, Artificial Sequence
  Description of Artificial Sequence: Synthetic oligonucleotide
ggccgucuuuacuuccgcg

SEQ ID NO: 519199 - RNA, 19 nt, Artificial Sequence
  Description of Artificial Sequence: Synthetic oligonucleotide
agccuuauacagaguuuca

SEQ ID NO: 519200 - RNA, 19 nt, Artificial Sequence
  Description of Artificial Sequence: Synthetic oligonucleotide
aucgcgcaacaaguccuuc

SEQ ID NO: 519201 - RNA, 19 nt, Artificial Sequence
  Description of Artificial Sequence: Synthetic oligonucleotide
cuguuuugguccauccacu

SEQ ID NO: 519202 - RNA, 19 nt, Artificial Sequence
  Description of Artificial Sequence: Synthetic oligonucleotide
gugcgugcaauggaagaga

SEQ ID NO: 519203 - RNA, 19 nt, Artificial Sequence
  Description of Artificial Sequence: Synthetic oligonucleotide
ggccucaagacaugacuga

SEQ ID NO: 519204 - RNA, 19 nt, Artificial Sequence
  Description of Artificial Sequence: Synthetic oligonucleotide
gccuagcugaguuacggaa

SEQ ID NO: 519205 - RNA, 19 nt, Artificial Sequence
  Description of Artificial Sequence: Synthetic oligonucleotide
ggguaacggaaugagcuga

SEQ ID NO: 519206 - RNA, 19 nt, Artificial Sequence
  Description of Artificial Sequence: Synthetic oligonucleotide
caucacgaccaugacguaa

SEQ ID NO: 519207 - RNA, 19 nt, Artificial Sequence
  Description of Artificial Sequence: Synthetic oligonucleotide
cauuguccacccaagcgau

SEQ ID NO: 519208 - RNA, 19 nt, Artificial Sequence
  Description of Artificial Sequence: Synthetic oligonucleotide
ggaugaggaguuggucccg

SEQ ID NO: 519209 - RNA, 19 nt, Artificial Sequence
  Description of Artificial Sequence: Synthetic oligonucleotide
guuugggccccgcucccca

SEQ ID NO: 519210 - RNA, 19 nt, Artificial Sequence
  Description of Artificial Sequence: Synthetic oligonucleotide
cacauaggaguacaacaau

SEQ ID NO: 519211 - RNA, 19 nt, Artificial Sequence
  Description of Artificial Sequence: Synthetic oligonucleotide
acccgaucuuguaacuccu

SEQ ID NO: 519212 - RNA, 19 nt, Artificial Sequence
  Description of Artificial Sequence: Synthetic oligonucleotide
ucucgccgccaguaagaau

SEQ ID NO: 519213 - RNA, 19 nt, Artificial Sequence
  Description of Artificial Sequence: Synthetic oligonucleotide
acccgaacuuaagucucca

SEQ ID NO: 519214 - RNA, 19 nt, Artificial Sequence
  Description of Artificial Sequence: Synthetic oligonucleotide
gccgccaguaagaauccgc

SEQ ID NO: 519215 - RNA, 19 nt, Artificial Sequence
  Description of Artificial Sequence: Synthetic oligonucleotide
uuugggccccgcuccccaa

SEQ ID NO: 519216 - RNA, 19 nt, Artificial Sequence
  Description of Artificial Sequence: Synthetic oligonucleotide
uccgccugaggccgucuuu

SEQ ID NO: 519217 - RNA, 19 nt, Artificial Sequence
  Description of Artificial Sequence: Synthetic oligonucleotide
gccuucuaaauccgcagua

SEQ ID NO: 519218 - RNA, 19 nt, Artificial Sequence
  Description of Artificial Sequence: Synthetic oligonucleotide
ucucaaguucgcggcucuc

SEQ ID NO: 519219 - RNA, 19 nt, Artificial Sequence
  Description of Artificial Sequence: Synthetic oligonucleotide
aucucgccgccaguaagaa

SEQ ID NO: 519220 - RNA, 19 nt, Artificial Sequence
  Description of Artificial Sequence: Synthetic oligonucleotide
ccuaugcacaccgcccgcg

SEQ ID NO: 519221 - RNA, 19 nt, Artificial Sequence
  Description of Artificial Sequence: Synthetic oligonucleotide
cuggcucaccuccucaacu

SEQ ID NO: 519222 - RNA, 19 nt, Artificial Sequence
  Description of Artificial Sequence: Synthetic oligonucleotide
ccgaucuuguaacuccuca

SEQ ID NO: 519223 - RNA, 19 nt, Artificial Sequence
  Description of Artificial Sequence: Synthetic oligonucleotide
cgagauaaacgccuuaagu

SEQ ID NO: 519224 - RNA, 19 nt, Artificial Sequence
  Description of Artificial Sequence: Synthetic oligonucleotide
gcgcccgcccuucaggagc

SEQ ID NO: 519225 - RNA, 19 nt, Artificial Sequence
  Description of Artificial Sequence: Synthetic oligonucleotide
cccgaacuuaagucuccag

SEQ ID NO: 519226 - RNA, 19 nt, Artificial Sequence
  Description of Artificial Sequence: Synthetic oligonucleotide
guaccaagcaaaagauuuu

SEQ ID NO: 519227 - RNA, 19 nt, Artificial Sequence
  Description of Artificial Sequence: Synthetic oligonucleotide
acaucacgaccaugacgua

SEQ ID NO: 519228 - RNA, 19 nt, Artificial Sequence
  Description of Artificial Sequence: Synthetic oligonucleotide
ucccgaucucgccgccagu

SEQ ID NO: 519229 - RNA, 19 nt, Artificial Sequence
  Description of Artificial Sequence: Synthetic oligonucleotide
cgcgcaacaaguccuucac

SEQ ID NO: 519230 - RNA, 19 nt, Artificial Sequence
  Description of Artificial Sequence: Synthetic oligonucleotide
cgacccgaacuuaagucuc

SEQ ID NO: 519231 - RNA, 19 nt, Artificial Sequence
  Description of Artificial Sequence: Synthetic oligonucleotide
cacgcuggcuagugaaaua

SEQ ID NO: 519232 - RNA, 19 nt, Artificial Sequence
  Description of Artificial Sequence: Synthetic oligonucleotide
cgucuuuacuuccgcgccc

SEQ ID NO: 519233 - RNA, 19 nt, Artificial Sequence
  Description of Artificial Sequence: Synthetic oligonucleotide
ccacgguuaccuuuaccga

SEQ ID NO: 519234 - RNA, 19 nt, Artificial Sequence
  Description of Artificial Sequence: Synthetic oligonucleotide
cgaucucgccgccaguaag

SEQ ID NO: 519235 - RNA, 19 nt, Artificial Sequence
  Description of Artificial Sequence: Synthetic oligonucleotide
cuuuaccgacccgaacuua

SEQ ID NO: 519236 - RNA, 19 nt, Artificial Sequence
  Description of Artificial Sequence: Synthetic oligonucleotide
gccuaugcacaccgcccgc

SEQ ID NO: 519237 - RNA, 19 nt, Artificial Sequence
  Description of Artificial Sequence: Synthetic oligonucleotide
gcuuaauaauguugcugau

SEQ ID NO: 519238 - RNA, 19 nt, Artificial Sequence
  Description of Artificial Sequence: Synthetic oligonucleotide
uggaugcauuuggcauugu

SEQ ID NO: 519239 - RNA, 19 nt, Artificial Sequence
  Description of Artificial Sequence: Synthetic oligonucleotide
ggacgagauaaacgccuua

SEQ ID NO: 519240 - RNA, 19 nt, Artificial Sequence
  Description of Artificial Sequence: Synthetic oligonucleotide
guucggaaacaagaacauu

SEQ ID NO: 519241 - RNA, 19 nt, Artificial Sequence
  Description of Artificial Sequence: Synthetic oligonucleotide
uacuuccgcgcccgcccuu

SEQ ID NO: 519242 - RNA, 19 nt, Artificial Sequence
  Description of Artificial Sequence: Synthetic oligonucleotide
auccgccugaggccgucuu

SEQ ID NO: 519243 - RNA, 19 nt, Artificial Sequence
  Description of Artificial Sequence: Synthetic oligonucleotide
ccgacccgaacuuaagucu

SEQ ID NO: 519244 - RNA, 19 nt, Artificial Sequence
  Description of Artificial Sequence: Synthetic oligonucleotide
cacuggcuauuugaauaaa

SEQ ID NO: 519245 - RNA, 19 nt, Artificial Sequence
  Description of Artificial Sequence: Synthetic oligonucleotide
cgccuuaagucuucuucuc

SEQ ID NO: 519246 - RNA, 19 nt, Artificial Sequence
  Description of Artificial Sequence: Synthetic oligonucleotide
ccaucgcgcaacaaguccu

SEQ ID NO: 519247 - RNA, 19 nt, Artificial Sequence
  Description of Artificial Sequence: Synthetic oligonucleotide
cacuaucuauuagaaucau

SEQ ID NO: 519248 - RNA, 19 nt, Artificial Sequence
  Description of Artificial Sequence: Synthetic oligonucleotide
cgacguguagucucuggca

SEQ ID NO: 519249 - RNA, 19 nt, Artificial Sequence
  Description of Artificial Sequence: Synthetic oligonucleotide
ccgugcgugcaauggaaga

SEQ ID NO: 519250 - RNA, 19 nt, Artificial Sequence
  Description of Artificial Sequence: Synthetic oligonucleotide
ggcugggguaacggaauga

SEQ ID NO: 519251 - RNA, 19 nt, Artificial Sequence
  Description of Artificial Sequence: Synthetic oligonucleotide
caccuacguauacguuaca

SEQ ID NO: 519252 - RNA, 19 nt, Artificial Sequence
  Description of Artificial Sequence: Synthetic oligonucleotide
gcuugcuacagcucagcuu

SEQ ID NO: 519253 - RNA, 19 nt, Artificial Sequence
  Description of Artificial Sequence: Synthetic oligonucleotide
cggaaugagcugacccgag

SEQ ID NO: 519254 - RNA, 19 nt, Artificial Sequence
  Description of Artificial Sequence: Synthetic oligonucleotide
gcgugcaauggaagagaug

SEQ ID NO: 519255 - RNA, 19 nt, Artificial Sequence
  Description of Artificial Sequence: Synthetic oligonucleotide
cccgaucuuguaacuccuc

SEQ ID NO: 519256 - RNA, 19 nt, Artificial Sequence
  Description of Artificial Sequence: Synthetic oligonucleotide
cauugggaaucagcugaua

SEQ ID NO: 519257 - RNA, 19 nt, Artificial Sequence
  Description of Artificial Sequence: Synthetic oligonucleotide
ucccgaguuugggccccgc

SEQ ID NO: 519258 - RNA, 19 nt, Artificial Sequence
  Description of Artificial Sequence: Synthetic oligonucleotide
gccgcuuuucccacgguua

SEQ ID NO: 519259 - RNA, 19 nt, Artificial Sequence
  Description of Artificial Sequence: Synthetic oligonucleotide
gucuuaccagauccacuuu

SEQ ID NO: 519260 - RNA, 19 nt, Artificial Sequence
  Description of Artificial Sequence: Synthetic oligonucleotide
aggcgacguguagucucug

SEQ ID NO: 519261 - RNA, 19 nt, Artificial Sequence
  Description of Artificial Sequence: Synthetic oligonucleotide
ccuagcugaguuacggaau

SEQ ID NO: 519262 - RNA, 19 nt, Artificial Sequence
  Description of Artificial Sequence: Synthetic oligonucleotide
gucccgaguuugggccccg

SEQ ID NO: 519263 - RNA, 19 nt, Artificial Sequence
  Description of Artificial Sequence: Synthetic oligonucleotide
gccuuauacagaguuucau

SEQ ID NO: 519264 - RNA, 19 nt, Artificial Sequence
  Description of Artificial Sequence: Synthetic oligonucleotide
caucgcgcaacaaguccuu

SEQ ID NO: 519265 - RNA, 19 nt, Artificial Sequence
  Description of Artificial Sequence: Synthetic oligonucleotide
cgcccgcccuucaggagcg

SEQ ID NO: 519266 - RNA, 19 nt, Artificial Sequence
  Description of Artificial Sequence: Synthetic oligonucleotide
cgauuccgugcgugcaaug

SEQ ID NO: 519267 - RNA, 19 nt, Artificial Sequence
  Description of Artificial Sequence: Synthetic oligonucleotide
gcgauccuuccgguucccc

SEQ ID NO: 519268 - RNA, 19 nt, Artificial Sequence
  Description of Artificial Sequence: Synthetic oligonucleotide
ccguagguucauuuccagu

SEQ ID NO: 519269 - RNA, 19 nt, Artificial Sequence
  Description of Artificial Sequence: Synthetic oligonucleotide
cgcgaaggcugggguaacg

SEQ ID NO: 519270 - RNA, 19 nt, Artificial Sequence
  Description of Artificial Sequence: Synthetic oligonucleotide
ggccgcuuuucccacgguu

SEQ ID NO: 519271 - RNA, 19 nt, Artificial Sequence
  Description of Artificial Sequence: Synthetic oligonucleotide
cguauacguuacaccaacu

SEQ ID NO: 519272 - RNA, 19 nt, Artificial Sequence
  Description of Artificial Sequence: Synthetic oligonucleotide
caccgcccgcggcccguag

SEQ ID NO: 519273 - RNA, 19 nt, Artificial Sequence
  Description of Artificial Sequence: Synthetic oligonucleotide
ccuuuaccgacccgaacuu

SEQ ID NO: 519274 - RNA, 19 nt, Artificial Sequence
  Description of Artificial Sequence: Synthetic oligonucleotide
gcccguagggccugcucua

SEQ ID NO: 519275 - RNA, 19 nt, Artificial Sequence
  Description of Artificial Sequence: Synthetic oligonucleotide
gcgcaugagaagacacugu

SEQ ID NO: 519276 - RNA, 19 nt, Artificial Sequence
  Description of Artificial Sequence: Synthetic oligonucleotide
ccuucucaaguucgcggcu

SEQ ID NO: 519277 - RNA, 19 nt, Artificial Sequence
  Description of Artificial Sequence: Synthetic oligonucleotide
ggucaccgccugguggcuc

SEQ ID NO: 519278 - RNA, 19 nt, Artificial Sequence
  Description of Artificial Sequence: Synthetic oligonucleotide
cgccugaggccgucuuuac

SEQ ID NO: 519279 - RNA, 19 nt, Artificial Sequence
  Description of Artificial Sequence: Synthetic oligonucleotide
cccuaacagcaaacauuua

SEQ ID NO: 519280 - RNA, 19 nt, Artificial Sequence
  Description of Artificial Sequence: Synthetic oligonucleotide
ccgaucucgccgccaguaa

SEQ ID NO: 519281 - RNA, 19 nt, Artificial Sequence
  Description of Artificial Sequence: Synthetic oligonucleotide
cccgaucucgccgccagua

SEQ ID NO: 519282 - RNA, 19 nt, Artificial Sequence
  Description of Artificial Sequence: Synthetic oligonucleotide
cccaagcgauccuuccggu

SEQ ID NO: 519283 - RNA, 19 nt, Artificial Sequence
  Description of Artificial Sequence: Synthetic oligonucleotide
cgccgccaguaagaauccg

SEQ ID NO: 519284 - RNA, 19 nt, Artificial Sequence
  Description of Artificial Sequence: Synthetic oligonucleotide
gcgauuccgugcgugcaau

SEQ ID NO: 519285 - RNA, 19 nt, Artificial Sequence
  Description of Artificial Sequence: Synthetic oligonucleotide
ccaagcgauccuuccgguu

SEQ ID NO: 519286 - RNA, 19 nt, Artificial Sequence
  Description of Artificial Sequence: Synthetic oligonucleotide
ccgccugaggccgucuuua

SEQ ID NO: 519287 - RNA, 19 nt, Artificial Sequence
  Description of Artificial Sequence: Synthetic oligonucleotide
cgccaguaagaauccgccu

SEQ ID NO: 519288 - RNA, 19 nt, Artificial Sequence
  Description of Artificial Sequence: Synthetic oligonucleotide
ccaaggcgacguguagucu

SEQ ID NO: 519289 - RNA, 19 nt, Artificial Sequence
  Description of Artificial Sequence: Synthetic oligonucleotide
cccgaguuugggccccgcu

SEQ ID NO: 519290 - RNA, 19 nt, Artificial Sequence
  Description of Artificial Sequence: Synthetic oligonucleotide
cggcccguagggccugcuc

SEQ ID NO: 519291 - RNA, 19 nt, Artificial Sequence
  Description of Artificial Sequence: Synthetic oligonucleotide
gcggcccguagggccugcu

SEQ ID NO: 519292 - RNA, 19 nt, Artificial Sequence
  Description of Artificial Sequence: Synthetic oligonucleotide
aaugcgguccugcuuaucc

SEQ ID NO: 519293 - RNA, 19 nt, Artificial Sequence
  Description of Artificial Sequence: Synthetic oligonucleotide
uaagcuuugguuuuggucu

SEQ ID NO: 519294 - RNA, 19 nt, Artificial Sequence
  Description of Artificial Sequence: Synthetic oligonucleotide
auauuuagggugucaaugg

SEQ ID NO: 519295 - RNA, 19 nt, Artificial Sequence
  Description of Artificial Sequence: Synthetic oligonucleotide
uuuuccguagugcaguuag

SEQ ID NO: 519296 - RNA, 19 nt, Artificial Sequence
  Description of Artificial Sequence: Synthetic oligonucleotide
uuuggcuggagacugacug

SEQ ID NO: 519297 - RNA, 19 nt, Artificial Sequence
  Description of Artificial Sequence: Synthetic oligonucleotide
aguacugcgccuugguucc

SEQ ID NO: 519298 - RNA, 19 nt, Artificial Sequence
  Description of Artificial Sequence: Synthetic oligonucleotide
uguggaaucuccaggacug

SEQ ID NO: 519299 - RNA, 19 nt, Artificial Sequence
  Description of Artificial Sequence: Synthetic oligonucleotide
uccagauaguagaagauga

SEQ ID NO: 519300 - RNA, 19 nt, Artificial Sequence
  Description of Artificial Sequence: Synthetic oligonucleotide
guauguucaccucugacag

SEQ ID NO: 519301 - RNA, 19 nt, Artificial Sequence
  Description of Artificial Sequence: Synthetic oligonucleotide
ugcgcucggagucagaggg

SEQ ID NO: 519302 - RNA, 19 nt, Artificial Sequence
  Description of Artificial Sequence: Synthetic oligonucleotide
ucagguguaacguuggcac

SEQ ID NO: 519303 - RNA, 19 nt, Artificial Sequence
  Description of Artificial Sequence: Synthetic oligonucleotide
acaaccgaacuguagcugg

SEQ ID NO: 519304 - RNA, 19 nt, Artificial Sequence
  Description of Artificial Sequence: Synthetic oligonucleotide
aggaccauugagcaggguc

SEQ ID NO: 519305 - RNA, 19 nt, Artificial Sequence
  Description of Artificial Sequence: Synthetic oligonucleotide
uuugaaccguuccauuugc

SEQ ID NO: 519306 - RNA, 19 nt, Artificial Sequence
  Description of Artificial Sequence: Synthetic oligonucleotide
auguacuugguguggaauc

SEQ ID NO: 519307 - RNA, 19 nt, Artificial Sequence
  Description of Artificial Sequence: Synthetic oligonucleotide
guaacguuggcacaggguc

SEQ ID NO: 519308 - RNA, 19 nt, Artificial Sequence
  Description of Artificial Sequence: Synthetic oligonucleotide
cugaguuguucccugagcc

SEQ ID NO: 519309 - RNA, 19 nt, Artificial Sequence
  Description of Artificial Sequence: Synthetic oligonucleotide
acaacuuugaaccguucca

SEQ ID NO: 519310 - RNA, 19 nt, Artificial Sequence
  Description of Artificial Sequence: Synthetic oligonucleotide
agauaguagaagaugaaga

SEQ ID NO: 519311 - RNA, 19 nt, Artificial Sequence
  Description of Artificial Sequence: Synthetic oligonucleotide
guuucaaugagcuugcggu

SEQ ID NO: 519312 - RNA, 19 nt, Artificial Sequence
  Description of Artificial Sequence: Synthetic oligonucleotide
cuuggagccguuuuggcug

SEQ ID NO: 519313 - RNA, 19 nt, Artificial Sequence
  Description of Artificial Sequence: Synthetic oligonucleotide
aacugguccaccugcauau

SEQ ID NO: 519314 - RNA, 19 nt, Artificial Sequence
  Description of Artificial Sequence: Synthetic oligonucleotide
uguucguaagccacuggcc

SEQ ID NO: 519315 - RNA, 19 nt, Artificial Sequence
  Description of Artificial Sequence: Synthetic oligonucleotide
ucguucuccucgaagucgg

SEQ ID NO: 519316 - RNA, 19 nt, Artificial Sequence
  Description of Artificial Sequence: Synthetic oligonucleotide
agccguuuuggcuggagac

SEQ ID NO: 519317 - RNA, 19 nt, Artificial Sequence
  Description of Artificial Sequence: Synthetic oligonucleotide
ucucguuccacaacuuuga

SEQ ID NO: 519318 - RNA, 19 nt, Artificial Sequence
  Description of Artificial Sequence: Synthetic oligonucleotide
aaugcgcucggagucagag

SEQ ID NO: 519319 - RNA, 19 nt, Artificial Sequence
  Description of Artificial Sequence: Synthetic oligonucleotide
aaugguauguucaccucug

SEQ ID NO: 519320 - RNA, 19 nt, Artificial Sequence
  Description of Artificial Sequence: Synthetic oligonucleotide
uccugcuuauccuugucgc

SEQ ID NO: 519321 - RNA, 19 nt, Artificial Sequence
  Description of Artificial Sequence: Synthetic oligonucleotide
gauggucucgagcaugcgc

SEQ ID NO: 519322 - RNA, 19 nt, Artificial Sequence
  Description of Artificial Sequence: Synthetic oligonucleotide
cacaacuuugaaccguucc

SEQ ID NO: 519323 - RNA, 19 nt, Artificial Sequence
  Description of Artificial Sequence: Synthetic oligonucleotide
acaaugguauguucaccuc

SEQ ID NO: 519324 - RNA, 19 nt, Artificial Sequence
  Description of Artificial Sequence: Synthetic oligonucleotide
uguaacguuggcacagggu

SEQ ID NO: 519325 - RNA, 19 nt, Artificial Sequence
  Description of Artificial Sequence: Synthetic oligonucleotide
ugcgugucugcaccgacag

SEQ ID NO: 519326 - RNA, 19 nt, Artificial Sequence
  Description of Artificial Sequence: Synthetic oligonucleotide
ucgaugugccgcuucaggc

SEQ ID NO: 519327 - RNA, 19 nt, Artificial Sequence
  Description of Artificial Sequence: Synthetic oligonucleotide
uagcgguacucaaagguga

SEQ ID NO: 519328 - RNA, 19 nt, Artificial Sequence
  Description of Artificial Sequence: Synthetic oligonucleotide
ugaaccguuccauuugcgu

SEQ ID NO: 519329 - RNA, 19 nt, Artificial Sequence
  Description of Artificial Sequence: Synthetic oligonucleotide
guguucguaagccacuggc

SEQ ID NO: 519330 - RNA, 19 nt, Artificial Sequence
  Description of Artificial Sequence: Synthetic oligonucleotide
ugcucaaacucaucuguga

SEQ ID NO: 519331 - RNA, 19 nt, Artificial Sequence
  Description of Artificial Sequence: Synthetic oligonucleotide
gucgacguaguacuccacg

SEQ ID NO: 519332 - RNA, 19 nt, Artificial Sequence
  Description of Artificial Sequence: Synthetic oligonucleotide
auuugcguuucaaugagcu

SEQ ID NO: 519333 - RNA, 19 nt, Artificial Sequence
  Description of Artificial Sequence: Synthetic oligonucleotide
gacaaugguauguucaccu

SEQ ID NO: 519334 - RNA, 19 nt, Artificial Sequence
  Description of Artificial Sequence: Synthetic oligonucleotide
uugaaccguuccauuugcg

SEQ ID NO: 519335 - RNA, 19 nt, Artificial Sequence
  Description of Artificial Sequence: Synthetic oligonucleotide
uggacacacgcccagugac

SEQ ID NO: 519336 - RNA, 19 nt, Artificial Sequence
  Description of Artificial Sequence: Synthetic oligonucleotide
agaagagugucucgguuga

SEQ ID NO: 519337 - RNA, 19 nt, Artificial Sequence
  Description of Artificial Sequence: Synthetic oligonucleotide
aagucgggguccugggagg

SEQ ID NO: 519338 - RNA, 19 nt, Artificial Sequence
  Description of Artificial Sequence: Synthetic oligonucleotide
agcucaaggcagaaguggc

SEQ ID NO: 519339 - RNA, 19 nt, Artificial Sequence
  Description of Artificial Sequence: Synthetic oligonucleotide
accgaacuguagcuggugg

SEQ ID NO: 519340 - RNA, 19 nt, Artificial Sequence
  Description of Artificial Sequence: Synthetic oligonucleotide
uaucggugcuucucgaugu

SEQ ID NO: 519341 - RNA, 19 nt, Artificial Sequence
  Description of Artificial Sequence: Synthetic oligonucleotide
cagguagcgguacucaaag

SEQ ID NO: 519342 - RNA, 19 nt, Artificial Sequence
  Description of Artificial Sequence: Synthetic oligonucleotide
gucaaugguguucguaagc

SEQ ID NO: 519343 - RNA, 19 nt, Artificial Sequence
  Description of Artificial Sequence: Synthetic oligonucleotide
aggaguacccgaguugugg

SEQ ID NO: 519344 - RNA, 19 nt, Artificial Sequence
  Description of Artificial Sequence: Synthetic oligonucleotide
gguauguucaccucugaca

SEQ ID NO: 519345 - RNA, 19 nt, Artificial Sequence
  Description of Artificial Sequence: Synthetic oligonucleotide
aaguagauguaggugcccu

SEQ ID NO: 519346 - RNA, 19 nt, Artificial Sequence
  Description of Artificial Sequence: Synthetic oligonucleotide
aaccguuccauuugcguuu

SEQ ID NO: 519347 - RNA, 19 nt, Artificial Sequence
  Description of Artificial Sequence: Synthetic oligonucleotide
gaacucguucuccucgaag

SEQ ID NO: 519348 - RNA, 19 nt, Artificial Sequence
  Description of Artificial Sequence: Synthetic oligonucleotide
agcuggacuggccuugggg

SEQ ID NO: 519349 - RNA, 19 nt, Artificial Sequence
  Description of Artificial Sequence: Synthetic oligonucleotide
cuugcuauaagcuuugguu

SEQ ID NO: 519350 - RNA, 19 nt, Artificial Sequence
  Description of Artificial Sequence: Synthetic oligonucleotide
acuuugaaccguuccauuu

SEQ ID NO: 519351 - RNA, 19 nt, Artificial Sequence
  Description of Artificial Sequence: Synthetic oligonucleotide
uucccugagccugaagccg

SEQ ID NO: 519352 - RNA, 19 nt, Artificial Sequence
  Description of Artificial Sequence: Synthetic oligonucleotide
agccugaagccgcacuccc

SEQ ID NO: 519353 - RNA, 19 nt, Artificial Sequence
  Description of Artificial Sequence: Synthetic oligonucleotide
uucuccucgaagucggggu

SEQ ID NO: 519354 - RNA, 19 nt, Artificial Sequence
  Description of Artificial Sequence: Synthetic oligonucleotide
uccgcgacaaccgaacugu

SEQ ID NO: 519355 - RNA, 19 nt, Artificial Sequence
  Description of Artificial Sequence: Synthetic oligonucleotide
ccguagugcaguuagcugg

SEQ ID NO: 519356 - RNA, 19 nt, Artificial Sequence
  Description of Artificial Sequence: Synthetic oligonucleotide
ugucucgguugacaggcgc

SEQ ID NO: 519357 - RNA, 19 nt, Artificial Sequence
  Description of Artificial Sequence: Synthetic oligonucleotide
guaucggugcuucucgaug

SEQ ID NO: 519358 - RNA, 19 nt, Artificial Sequence
  Description of Artificial Sequence: Synthetic oligonucleotide
ugcuauaagcuuugguuuu

SEQ ID NO: 519359 - RNA, 19 nt, Artificial Sequence
  Description of Artificial Sequence: Synthetic oligonucleotide
ucguuccacaacuuugaac

SEQ ID NO: 519360 - RNA, 19 nt, Artificial Sequence
  Description of Artificial Sequence: Synthetic oligonucleotide
gguacucaaaggugaagcc

SEQ ID NO: 519361 - RNA, 19 nt, Artificial Sequence
  Description of Artificial Sequence: Synthetic oligonucleotide
uauaagcuuugguuuuggu

SEQ ID NO: 519362 - RNA, 19 nt, Artificial Sequence
  Description of Artificial Sequence: Synthetic oligonucleotide
ugaguuguucccugagccu

SEQ ID NO: 519363 - RNA, 19 nt, Artificial Sequence
  Description of Artificial Sequence: Synthetic oligonucleotide
cugucagguguaacguugg

SEQ ID NO: 519364 - RNA, 19 nt, Artificial Sequence
  Description of Artificial Sequence: Synthetic oligonucleotide
ucgacguaguacuccacgu

SEQ ID NO: 519365 - RNA, 19 nt, Artificial Sequence
  Description of Artificial Sequence: Synthetic oligonucleotide
uuccguagugcaguuagcu

SEQ ID NO: 519366 - RNA, 19 nt, Artificial Sequence
  Description of Artificial Sequence: Synthetic oligonucleotide
gaggagucgacguaguacu

SEQ ID NO: 519367 - RNA, 19 nt, Artificial Sequence
  Description of Artificial Sequence: Synthetic oligonucleotide
aguuguggcugggagcugg

SEQ ID NO: 519368 - RNA, 19 nt, Artificial Sequence
  Description of Artificial Sequence: Synthetic oligonucleotide
ugacaaugguauguucacc

SEQ ID NO: 519369 - RNA, 19 nt, Artificial Sequence
  Description of Artificial Sequence: Synthetic oligonucleotide
caggcggccucuuccaugg

SEQ ID NO: 519370 - RNA, 19 nt, Artificial Sequence
  Description of Artificial Sequence: Synthetic oligonucleotide
agagcucagcgguucgggg

SEQ ID NO: 519371 - RNA, 19 nt, Artificial Sequence
  Description of Artificial Sequence: Synthetic oligonucleotide
caccugcauauuuagggug

SEQ ID NO: 519372 - RNA, 19 nt, Artificial Sequence
  Description of Artificial Sequence: Synthetic oligonucleotide
ucgaagucgggguccuggg

SEQ ID NO: 519373 - RNA, 19 nt, Artificial Sequence
  Description of Artificial Sequence: Synthetic oligonucleotide
gguugugagggcccgaagc

SEQ ID NO: 519374 - RNA, 19 nt, Artificial Sequence
  Description of Artificial Sequence: Synthetic oligonucleotide
guagcgguacucaaaggug

SEQ ID NO: 519375 - RNA, 19 nt, Artificial Sequence
  Description of Artificial Sequence: Synthetic oligonucleotide
cauuugcguuucaaugagc

SEQ ID NO: 519376 - RNA, 19 nt, Artificial Sequence
  Description of Artificial Sequence: Synthetic oligonucleotide
gaacuguggaggaccauug

SEQ ID NO: 519377 - RNA, 19 nt, Artificial Sequence
  Description of Artificial Sequence: Synthetic oligonucleotide
cucggagucagaggggugg

SEQ ID NO: 519378 - RNA, 19 nt, Artificial Sequence
  Description of Artificial Sequence: Synthetic oligonucleotide
guaggugcccugcucaaac

SEQ ID NO: 519379 - RNA, 19 nt, Artificial Sequence
  Description of Artificial Sequence: Synthetic oligonucleotide
gcgacaaccgaacuguagc

SEQ ID NO: 519380 - RNA, 19 nt, Artificial Sequence
  Description of Artificial Sequence: Synthetic oligonucleotide
ggagucguuguccagcaug

SEQ ID NO: 519381 - RNA, 19 nt, Artificial Sequence
  Description of Artificial Sequence: Synthetic oligonucleotide
uuuccguagugcaguuagc

SEQ ID NO: 519382 - RNA, 19 nt, Artificial Sequence
  Description of Artificial Sequence: Synthetic oligonucleotide
accgacagugacuccaccu

SEQ ID NO: 519383 - RNA, 19 nt, Artificial Sequence
  Description of Artificial Sequence: Synthetic oligonucleotide
agagcugauagcugcccgu

SEQ ID NO: 519384 - RNA, 19 nt, Artificial Sequence
  Description of Artificial Sequence: Synthetic oligonucleotide
ugucagguguaacguuggc

SEQ ID NO: 519385 - RNA, 19 nt, Artificial Sequence
  Description of Artificial Sequence: Synthetic oligonucleotide
gacaaccgaacuguagcug

SEQ ID NO: 519386 - RNA, 19 nt, Artificial Sequence
  Description of Artificial Sequence: Synthetic oligonucleotide
augccucugaaaccacauc

SEQ ID NO: 519387 - RNA, 19 nt, Artificial Sequence
  Description of Artificial Sequence: Synthetic oligonucleotide
ugaacuguggaggaccauu

SEQ ID NO: 519388 - RNA, 19 nt, Artificial Sequence
  Description of Artificial Sequence: Synthetic oligonucleotide
guguaacguuggcacaggg

SEQ ID NO: 519389 - RNA, 19 nt, Artificial Sequence
  Description of Artificial Sequence: Synthetic oligonucleotide
gagucgacguaguacucca

SEQ ID NO: 519390 - RNA, 19 nt, Artificial Sequence
  Description of Artificial Sequence: Synthetic oligonucleotide
cagagcugauagcugcccg

SEQ ID NO: 519391 - RNA, 19 nt, Artificial Sequence
  Description of Artificial Sequence: Synthetic oligonucleotide
gcgguuuucgaugagcugc

SEQ ID NO: 519392 - RNA, 19 nt, Artificial Sequence
  Description of Artificial Sequence: Synthetic oligonucleotide
ugccgaaugcgcucggagu

SEQ ID NO: 519393 - RNA, 19 nt, Artificial Sequence
  Description of Artificial Sequence: Synthetic oligonucleotide
uguggagcggccccucuuc

SEQ ID NO: 519394 - RNA, 19 nt, Artificial Sequence
  Description of Artificial Sequence: Synthetic oligonucleotide
ugucugcaccgacagugac

SEQ ID NO: 519395 - RNA, 19 nt, Artificial Sequence
  Description of Artificial Sequence: Synthetic oligonucleotide
cauugagcagggucccagc

SEQ ID NO: 519396 - RNA, 19 nt, Artificial Sequence
  Description of Artificial Sequence: Synthetic oligonucleotide
ugcgguuuucgaugagcug

SEQ ID NO: 519397 - RNA, 19 nt, Artificial Sequence
  Description of Artificial Sequence: Synthetic oligonucleotide
uugcgugucugcaccgaca

SEQ ID NO: 519398 - RNA, 19 nt, Artificial Sequence
  Description of Artificial Sequence: Synthetic oligonucleotide
cucaaugcgguccugcuua

SEQ ID NO: 519399 - RNA, 19 nt, Artificial Sequence
  Description of Artificial Sequence: Synthetic oligonucleotide
gcuggacuggccuuggggc

SEQ ID NO: 519400 - RNA, 19 nt, Artificial Sequence
  Description of Artificial Sequence: Synthetic oligonucleotide
cucgagcaugcgcacgugg

SEQ ID NO: 519401 - RNA, 19 nt, Artificial Sequence
  Description of Artificial Sequence: Synthetic oligonucleotide
cacgguguccgaguguggg

SEQ ID NO: 519402 - RNA, 19 nt, Artificial Sequence
  Description of Artificial Sequence: Synthetic oligonucleotide
gaacuguagcugguggcgc

SEQ ID NO: 519403 - RNA, 19 nt, Artificial Sequence
  Description of Artificial Sequence: Synthetic oligonucleotide
aggcuuggagccguuuugg

SEQ ID NO: 519404 - RNA, 19 nt, Artificial Sequence
  Description of Artificial Sequence: Synthetic oligonucleotide
gugcaguuagcugggcugg

SEQ ID NO: 519405 - RNA, 19 nt, Artificial Sequence
  Description of Artificial Sequence: Synthetic oligonucleotide
aaccgaacuguagcuggug

SEQ ID NO: 519406 - RNA, 19 nt, Artificial Sequence
  Description of Artificial Sequence: Synthetic oligonucleotide
acgguguccgagugugggg

SEQ ID NO: 519407 - RNA, 19 nt, Artificial Sequence
  Description of Artificial Sequence: Synthetic oligonucleotide
ugcgcacgugguaucggug

SEQ ID NO: 519408 - RNA, 19 nt, Artificial Sequence
  Description of Artificial Sequence: Synthetic oligonucleotide
ccauuugcguuucaaugag

SEQ ID NO: 519409 - RNA, 19 nt, Artificial Sequence
  Description of Artificial Sequence: Synthetic oligonucleotide
ugguguucguaagccacug

SEQ ID NO: 519410 - RNA, 19 nt, Artificial Sequence
  Description of Artificial Sequence: Synthetic oligonucleotide
agcuugcgguuuucgauga

SEQ ID NO: 519411 - RNA, 19 nt, Artificial Sequence
  Description of Artificial Sequence: Synthetic oligonucleotide
cuccacgucguccuugauc

SEQ ID NO: 519412 - RNA, 19 nt, Artificial Sequence
  Description of Artificial Sequence: Synthetic oligonucleotide
caguuagcugggcugggug

SEQ ID NO: 519413 - RNA, 19 nt, Artificial Sequence
  Description of Artificial Sequence: Synthetic oligonucleotide
ucgguugacaggcgcuggu

SEQ ID NO: 519414 - RNA, 19 nt, Artificial Sequence
  Description of Artificial Sequence: Synthetic oligonucleotide
gaggccccauuguugccag

SEQ ID NO: 519415 - RNA, 19 nt, Artificial Sequence
  Description of Artificial Sequence: Synthetic oligonucleotide
ugguaucggugcuucucga

SEQ ID NO: 519416 - RNA, 19 nt, Artificial Sequence
  Description of Artificial Sequence: Synthetic oligonucleotide
ugggcggcacagcugggga

SEQ ID NO: 519417 - RNA, 19 nt, Artificial Sequence
  Description of Artificial Sequence: Synthetic oligonucleotide
uguccgcgacaaccgaacu

SEQ ID NO: 519418 - RNA, 19 nt, Artificial Sequence
  Description of Artificial Sequence: Synthetic oligonucleotide
accugcauauuuagggugu

SEQ ID NO: 519419 - RNA, 19 nt, Artificial Sequence
  Description of Artificial Sequence: Synthetic oligonucleotide
guccgcgacaaccgaacug

SEQ ID NO: 519420 - RNA, 19 nt, Artificial Sequence
  Description of Artificial Sequence: Synthetic oligonucleotide
augguauguucaccucuga

SEQ ID NO: 519421 - RNA, 19 nt, Artificial Sequence
  Description of Artificial Sequence: Synthetic oligonucleotide
gacugacugacuucacugu

SEQ ID NO: 519422 - RNA, 19 nt, Artificial Sequence
  Description of Artificial Sequence: Synthetic oligonucleotide
ucggagucagagggguggg

SEQ ID NO: 519423 - RNA, 19 nt, Artificial Sequence
  Description of Artificial Sequence: Synthetic oligonucleotide
cugccgaaugcgcucggag

SEQ ID NO: 519424 - RNA, 19 nt, Artificial Sequence
  Description of Artificial Sequence: Synthetic oligonucleotide
ugcaguuagcugggcuggg

SEQ ID NO: 519425 - RNA, 19 nt, Artificial Sequence
  Description of Artificial Sequence: Synthetic oligonucleotide
gaaccguuccauuugcguu

SEQ ID NO: 519426 - RNA, 19 nt, Artificial Sequence
  Description of Artificial Sequence: Synthetic oligonucleotide
ggaggagucgacguaguac

SEQ ID NO: 519427 - RNA, 19 nt, Artificial Sequence
  Description of Artificial Sequence: Synthetic oligonucleotide
uccuugcuauaagcuuugg

SEQ ID NO: 519428 - RNA, 19 nt, Artificial Sequence
  Description of Artificial Sequence: Synthetic oligonucleotide
uucagagagcucagcgguu

SEQ ID NO: 519429 - RNA, 19 nt, Artificial Sequence
  Description of Artificial Sequence: Synthetic oligonucleotide
cuugcgugucugcaccgac

SEQ ID NO: 519430 - RNA, 19 nt, Artificial Sequence
  Description of Artificial Sequence: Synthetic oligonucleotide
cugauagcugcccguucug

SEQ ID NO: 519431 - RNA, 19 nt, Artificial Sequence
  Description of Artificial Sequence: Synthetic oligonucleotide
gguguucguaagccacugg

SEQ ID NO: 519432 - RNA, 19 nt, Artificial Sequence
  Description of Artificial Sequence: Synthetic oligonucleotide
cgcucugucagguguaacg

SEQ ID NO: 519433 - RNA, 19 nt, Artificial Sequence
  Description of Artificial Sequence: Synthetic oligonucleotide
acaggcuuggagccguuuu

SEQ ID NO: 519434 - RNA, 19 nt, Artificial Sequence
  Description of Artificial Sequence: Synthetic oligonucleotide
uaggugcccugcucaaacu

SEQ ID NO: 519435 - RNA, 19 nt, Artificial Sequence
  Description of Artificial Sequence: Synthetic oligonucleotide
uacugccgaaugcgcucgg

SEQ ID NO: 519436 - RNA, 19 nt, Artificial Sequence
  Description of Artificial Sequence: Synthetic oligonucleotide
aggugaugggagcuggguu

SEQ ID NO: 519437 - RNA, 19 nt, Artificial Sequence
  Description of Artificial Sequence: Synthetic oligonucleotide
augcgcacgugguaucggu

SEQ ID NO: 519438 - RNA, 19 nt, Artificial Sequence
  Description of Artificial Sequence: Synthetic oligonucleotide
ucucgaugugccgcuucag

SEQ ID NO: 519439 - RNA, 19 nt, Artificial Sequence
  Description of Artificial Sequence: Synthetic oligonucleotide
caaugguauguucaccucu

SEQ ID NO: 519440 - RNA, 19 nt, Artificial Sequence
  Description of Artificial Sequence: Synthetic oligonucleotide
ugacuccaccucacucuca

SEQ ID NO: 519441 - RNA, 19 nt, Artificial Sequence
  Description of Artificial Sequence: Synthetic oligonucleotide
ggcaggaguacccgaguug

SEQ ID NO: 519442 - RNA, 19 nt, Artificial Sequence
  Description of Artificial Sequence: Synthetic oligonucleotide
aguuuuccguagugcaguu

SEQ ID NO: 519443 - RNA, 19 nt, Artificial Sequence
  Description of Artificial Sequence: Synthetic oligonucleotide
gucacuggaggucccgguc

SEQ ID NO: 519444 - RNA, 19 nt, Artificial Sequence
  Description of Artificial Sequence: Synthetic oligonucleotide
ggagucgacguaguacucc

SEQ ID NO: 519445 - RNA, 19 nt, Artificial Sequence
  Description of Artificial Sequence: Synthetic oligonucleotide
augucucgcucugucaggu

SEQ ID NO: 519446 - RNA, 19 nt, Artificial Sequence
  Description of Artificial Sequence: Synthetic oligonucleotide
cguuucaaugagcuugcgg

SEQ ID NO: 519447 - RNA, 19 nt, Artificial Sequence
  Description of Artificial Sequence: Synthetic oligonucleotide
agcaugcgcaggauggucu

SEQ ID NO: 519448 - RNA, 19 nt, Artificial Sequence
  Description of Artificial Sequence: Synthetic oligonucleotide
ucuugcgugucugcaccga

SEQ ID NO: 519449 - RNA, 19 nt, Artificial Sequence
  Description of Artificial Sequence: Synthetic oligonucleotide
gagccguuuuggcuggaga

SEQ ID NO: 519450 - RNA, 19 nt, Artificial Sequence
  Description of Artificial Sequence: Synthetic oligonucleotide
uggcgaccagcgccugugg

SEQ ID NO: 519451 - RNA, 19 nt, Artificial Sequence
  Description of Artificial Sequence: Synthetic oligonucleotide
aggcccuccuugcuauaag

SEQ ID NO: 519452 - RNA, 19 nt, Artificial Sequence
  Description of Artificial Sequence: Synthetic oligonucleotide
cccauuguugccaggggug

SEQ ID NO: 519453 - RNA, 19 nt, Artificial Sequence
  Description of Artificial Sequence: Synthetic oligonucleotide
agaucucguccuccaugug

SEQ ID NO: 519454 - RNA, 19 nt, Artificial Sequence
  Description of Artificial Sequence: Synthetic oligonucleotide
gacacacgcccagugacaa

SEQ ID NO: 519455 - RNA, 19 nt, Artificial Sequence
  Description of Artificial Sequence: Synthetic oligonucleotide
cuggccccacuucucguag

SEQ ID NO: 519456 - RNA, 19 nt, Artificial Sequence
  Description of Artificial Sequence: Synthetic oligonucleotide
cccugcaccacuguuacug

SEQ ID NO: 519457 - RNA, 19 nt, Artificial Sequence
  Description of Artificial Sequence: Synthetic oligonucleotide
gcuauaagcuuugguuuug

SEQ ID NO: 519458 - RNA, 19 nt, Artificial Sequence
  Description of Artificial Sequence: Synthetic oligonucleotide
ccugaguuguucccugagc

SEQ ID NO: 519459 - RNA, 19 nt, Artificial Sequence
  Description of Artificial Sequence: Synthetic oligonucleotide
ggcccuccuugcuauaagc

SEQ ID NO: 519460 - RNA, 19 nt, Artificial Sequence
  Description of Artificial Sequence: Synthetic oligonucleotide
ucacugaagcuggguguug

SEQ ID NO: 519461 - RNA, 19 nt, Artificial Sequence
  Description of Artificial Sequence: Synthetic oligonucleotide
gguguaacguuggcacagg

SEQ ID NO: 519462 - RNA, 19 nt, Artificial Sequence
  Description of Artificial Sequence: Synthetic oligonucleotide
gcgcugguagaacuccacg

SEQ ID NO: 519463 - RNA, 19 nt, Artificial Sequence
  Description of Artificial Sequence: Synthetic oligonucleotide
caugcgcacgugguaucgg

SEQ ID NO: 519464 - RNA, 19 nt, Artificial Sequence
  Description of Artificial Sequence: Synthetic oligonucleotide
caccaagaggcuggguccc

SEQ ID NO: 519465 - RNA, 19 nt, Artificial Sequence
  Description of Artificial Sequence: Synthetic oligonucleotide
cucgguugacaggcgcugg

SEQ ID NO: 519466 - RNA, 19 nt, Artificial Sequence
  Description of Artificial Sequence: Synthetic oligonucleotide
gguguggaaucuccaggac

SEQ ID NO: 519467 - RNA, 19 nt, Artificial Sequence
  Description of Artificial Sequence: Synthetic oligonucleotide
ggggagguacugccgaaug

SEQ ID NO: 519468 - RNA, 19 nt, Artificial Sequence
  Description of Artificial Sequence: Synthetic oligonucleotide
cgguacucaaaggugaagc

SEQ ID NO: 519469 - RNA, 19 nt, Artificial Sequence
  Description of Artificial Sequence: Synthetic oligonucleotide
gccgaaugcgcucggaguc

SEQ ID NO: 519470 - RNA, 19 nt, Artificial Sequence
  Description of Artificial Sequence: Synthetic oligonucleotide
cguacuggauuccuuugag

SEQ ID NO: 519471 - RNA, 19 nt, Artificial Sequence
  Description of Artificial Sequence: Synthetic oligonucleotide
aggagucgacguaguacuc

SEQ ID NO: 519472 - RNA, 19 nt, Artificial Sequence
  Description of Artificial Sequence: Synthetic oligonucleotide
ugagggcccgaagcgggcc

SEQ ID NO: 519473 - RNA, 19 nt, Artificial Sequence
  Description of Artificial Sequence: Synthetic oligonucleotide
uccgcuggccccacuucuc

SEQ ID NO: 519474 - RNA, 19 nt, Artificial Sequence
  Description of Artificial Sequence: Synthetic oligonucleotide
cacgugguaucggugcuuc

SEQ ID NO: 519475 - RNA, 19 nt, Artificial Sequence
  Description of Artificial Sequence: Synthetic oligonucleotide
cgaugugccgcuucaggcc

SEQ ID NO: 519476 - RNA, 19 nt, Artificial Sequence
  Description of Artificial Sequence: Synthetic oligonucleotide
ccacuucucguagucaaag

SEQ ID NO: 519477 - RNA, 19 nt, Artificial Sequence
  Description of Artificial Sequence: Synthetic oligonucleotide
ggucucucguuccacaacu

SEQ ID NO: 519478 - RNA, 19 nt, Artificial Sequence
  Description of Artificial Sequence: Synthetic oligonucleotide
gcgcacgugguaucggugc

SEQ ID NO: 519479 - RNA, 19 nt, Artificial Sequence
  Description of Artificial Sequence: Synthetic oligonucleotide
gaccagcgccuguggaaug

SEQ ID NO: 519480 - RNA, 19 nt, Artificial Sequence
  Description of Artificial Sequence: Synthetic oligonucleotide
accuaggcccuccuugcua

SEQ ID NO: 519481 - RNA, 19 nt, Artificial Sequence
  Description of Artificial Sequence: Synthetic oligonucleotide
uaggcccuccuugcuauaa

SEQ ID NO: 519482 - RNA, 19 nt, Artificial Sequence
  Description of Artificial Sequence: Synthetic oligonucleotide
cagguguaacguuggcaca

SEQ ID NO: 519483 - RNA, 19 nt, Artificial Sequence
  Description of Artificial Sequence: Synthetic oligonucleotide
caggaguacccgaguugug

SEQ ID NO: 519484 - RNA, 19 nt, Artificial Sequence
  Description of Artificial Sequence: Synthetic oligonucleotide
guggagcucaaggcagaag

SEQ ID NO: 519485 - RNA, 19 nt, Artificial Sequence
  Description of Artificial Sequence: Synthetic oligonucleotide
ggcugccaaguacugcgcc

SEQ ID NO: 519486 - RNA, 19 nt, Artificial Sequence
  Description of Artificial Sequence: Synthetic oligonucleotide
ccgaguuguggcugggagc

SEQ ID NO: 519487 - RNA, 19 nt, Artificial Sequence
  Description of Artificial Sequence: Synthetic oligonucleotide
cuuccgcuggccccacuuc

SEQ ID NO: 519488 - RNA, 19 nt, Artificial Sequence
  Description of Artificial Sequence: Synthetic oligonucleotide
gccguacuggauuccuuug

SEQ ID NO: 519489 - RNA, 19 nt, Artificial Sequence
  Description of Artificial Sequence: Synthetic oligonucleotide
gcaugcgcacgugguaucg

SEQ ID NO: 519490 - RNA, 19 nt, Artificial Sequence
  Description of Artificial Sequence: Synthetic oligonucleotide
accagcgccuguggaaugu

SEQ ID NO: 519491 - RNA, 19 nt, Artificial Sequence
  Description of Artificial Sequence: Synthetic oligonucleotide
ggauucacaggcaguggca

SEQ ID NO: 519492 - RNA, 19 nt, Artificial Sequence
  Description of Artificial Sequence: Synthetic oligonucleotide
ccgacagugacuccaccuc

SEQ ID NO: 519493 - RNA, 19 nt, Artificial Sequence
  Description of Artificial Sequence: Synthetic oligonucleotide
uggagucguuguccagcau

SEQ ID NO: 519494 - RNA, 19 nt, Artificial Sequence
  Description of Artificial Sequence: Synthetic oligonucleotide
gggcuguccgcgacaaccg

SEQ ID NO: 519495 - RNA, 19 nt, Artificial Sequence
  Description of Artificial Sequence: Synthetic oligonucleotide
guagugcaguuagcugggc

SEQ ID NO: 519496 - RNA, 19 nt, Artificial Sequence
  Description of Artificial Sequence: Synthetic oligonucleotide
uacugcgccuugguucccu

SEQ ID NO: 519497 - RNA, 19 nt, Artificial Sequence
  Description of Artificial Sequence: Synthetic oligonucleotide
ccguuuuggcuggagacug

SEQ ID NO: 519498 - RNA, 19 nt, Artificial Sequence
  Description of Artificial Sequence: Synthetic oligonucleotide
uguagcugguggcgccguu

SEQ ID NO: 519499 - RNA, 19 nt, Artificial Sequence
  Description of Artificial Sequence: Synthetic oligonucleotide
gccggcauuggguggggcc

SEQ ID NO: 519500 - RNA, 19 nt, Artificial Sequence
  Description of Artificial Sequence: Synthetic oligonucleotide
aagcgggccccagggcuug

SEQ ID NO: 519501 - RNA, 19 nt, Artificial Sequence
  Description of Artificial Sequence: Synthetic oligonucleotide
cugcauauuuaggguguca

SEQ ID NO: 519502 - RNA, 19 nt, Artificial Sequence
  Description of Artificial Sequence: Synthetic oligonucleotide
uggccccacuucucguagu

SEQ ID NO: 519503 - RNA, 19 nt, Artificial Sequence
  Description of Artificial Sequence: Synthetic oligonucleotide
cagcaugcgcaggaugguc

SEQ ID NO: 519504 - RNA, 19 nt, Artificial Sequence
  Description of Artificial Sequence: Synthetic oligonucleotide
ugaugggagcuggguugug

SEQ ID NO: 519505 - RNA, 19 nt, Artificial Sequence
  Description of Artificial Sequence: Synthetic oligonucleotide
cucguuccacaacuuugaa

SEQ ID NO: 519506 - RNA, 19 nt, Artificial Sequence
  Description of Artificial Sequence: Synthetic oligonucleotide
ugcuugccggccccuccuc

SEQ ID NO: 519507 - RNA, 19 nt, Artificial Sequence
  Description of Artificial Sequence: Synthetic oligonucleotide
gagcaugcgcacgugguau

SEQ ID NO: 519508 - RNA, 19 nt, Artificial Sequence
  Description of Artificial Sequence: Synthetic oligonucleotide
cacuucucguagucaaagu

SEQ ID NO: 519509 - RNA, 19 nt, Artificial Sequence
  Description of Artificial Sequence: Synthetic oligonucleotide
caaugagcuugcgguuuuc

SEQ ID NO: 519510 - RNA, 19 nt, Artificial Sequence
  Description of Artificial Sequence: Synthetic oligonucleotide
gcuuggagccguuuuggcu

SEQ ID NO: 519511 - RNA, 19 nt, Artificial Sequence
  Description of Artificial Sequence: Synthetic oligonucleotide
acugccgaaugcgcucgga

SEQ ID NO: 519512 - RNA, 19 nt, Artificial Sequence
  Description of Artificial Sequence: Synthetic oligonucleotide
ggugucaaugguguucgua

SEQ ID NO: 519513 - RNA, 19 nt, Artificial Sequence
  Description of Artificial Sequence: Synthetic oligonucleotide
acgcccagugacaauggua

SEQ ID NO: 519514 - RNA, 19 nt, Artificial Sequence
  Description of Artificial Sequence: Synthetic oligonucleotide
uggagcggccccucuucuu

SEQ ID NO: 519515 - RNA, 19 nt, Artificial Sequence
  Description of Artificial Sequence: Synthetic oligonucleotide
cgcgacaaccgaacuguag

SEQ ID NO: 519516 - RNA, 19 nt, Artificial Sequence
  Description of Artificial Sequence: Synthetic oligonucleotide
cccugaguuguucccugag

SEQ ID NO: 519517 - RNA, 19 nt, Artificial Sequence
  Description of Artificial Sequence: Synthetic oligonucleotide
ggguugugagggcccgaag

SEQ ID NO: 519518 - RNA, 19 nt, Artificial Sequence
  Description of Artificial Sequence: Synthetic oligonucleotide
gcaggaguacccgaguugu

SEQ ID NO: 519519 - RNA, 19 nt, Artificial Sequence
  Description of Artificial Sequence: Synthetic oligonucleotide
gagguggcgaccagcgccu

SEQ ID NO: 519520 - RNA, 19 nt, Artificial Sequence
  Description of Artificial Sequence: Synthetic oligonucleotide
ggccccacuucucguaguc

SEQ ID NO: 519521 - RNA, 19 nt, Artificial Sequence
  Description of Artificial Sequence: Synthetic oligonucleotide
ggagcggccccucuucuua

SEQ ID NO: 519522 - RNA, 19 nt, Artificial Sequence
  Description of Artificial Sequence: Synthetic oligonucleotide
uuucuuccgcuggccccac

SEQ ID NO: 519523 - RNA, 19 nt, Artificial Sequence
  Description of Artificial Sequence: Synthetic oligonucleotide
gcugcccguucugccaugg

SEQ ID NO: 519524 - RNA, 19 nt, Artificial Sequence
  Description of Artificial Sequence: Synthetic oligonucleotide
caaccgaacuguagcuggu

SEQ ID NO: 519525 - RNA, 19 nt, Artificial Sequence
  Description of Artificial Sequence: Synthetic oligonucleotide
gaccuaggcccuccuugcu

SEQ ID NO: 519526 - RNA, 19 nt, Artificial Sequence
  Description of Artificial Sequence: Synthetic oligonucleotide
guuuuccguagugcaguua

SEQ ID NO: 519527 - RNA, 19 nt, Artificial Sequence
  Description of Artificial Sequence: Synthetic oligonucleotide
ccaggcggccucuuccaug

SEQ ID NO: 519528 - RNA, 19 nt, Artificial Sequence
  Description of Artificial Sequence: Synthetic oligonucleotide
ggugccccauggccuuggg

SEQ ID NO: 519529 - RNA, 19 nt, Artificial Sequence
  Description of Artificial Sequence: Synthetic oligonucleotide
gccuguggaauguccucga

SEQ ID NO: 519530 - RNA, 19 nt, Artificial Sequence
  Description of Artificial Sequence: Synthetic oligonucleotide
ccagguagcgguacucaaa

SEQ ID NO: 519531 - RNA, 19 nt, Artificial Sequence
  Description of Artificial Sequence: Synthetic oligonucleotide
ccgcuggccccacuucucg

SEQ ID NO: 519532 - RNA, 19 nt, Artificial Sequence
  Description of Artificial Sequence: Synthetic oligonucleotide
cgacguaguacuccacguc

SEQ ID NO: 519533 - RNA, 19 nt, Artificial Sequence
  Description of Artificial Sequence: Synthetic oligonucleotide
gcccagggcacuuggaggu

SEQ ID NO: 519534 - RNA, 19 nt, Artificial Sequence
  Description of Artificial Sequence: Synthetic oligonucleotide
caaugcgguccugcuuauc

SEQ ID NO: 519535 - RNA, 19 nt, Artificial Sequence
  Description of Artificial Sequence: Synthetic oligonucleotide
cguaguacuccacgucguc

SEQ ID NO: 519536 - RNA, 19 nt, Artificial Sequence
  Description of Artificial Sequence: Synthetic oligonucleotide
ccguacuggauuccuuuga

SEQ ID NO: 519537 - RNA, 19 nt, Artificial Sequence
  Description of Artificial Sequence: Synthetic oligonucleotide
gucgggguccugggaggag

SEQ ID NO: 519538 - RNA, 19 nt, Artificial Sequence
  Description of Artificial Sequence: Synthetic oligonucleotide
gguaucggugcuucucgau

SEQ ID NO: 519539 - RNA, 19 nt, Artificial Sequence
  Description of Artificial Sequence: Synthetic oligonucleotide
gaaugcgcucggagucaga

SEQ ID NO: 519540 - RNA, 19 nt, Artificial Sequence
  Description of Artificial Sequence: Synthetic oligonucleotide
gcggccccucuucuuauca

SEQ ID NO: 519541 - RNA, 19 nt, Artificial Sequence
  Description of Artificial Sequence: Synthetic oligonucleotide
ccccacuucucguagucaa

SEQ ID NO: 519542 - RNA, 19 nt, Artificial Sequence
  Description of Artificial Sequence: Synthetic oligonucleotide
gggcugccguacuggauuc

SEQ ID NO: 519543 - RNA, 19 nt, Artificial Sequence
  Description of Artificial Sequence: Synthetic oligonucleotide
ccuccuugcuauaagcuuu

SEQ ID NO: 519544 - RNA, 19 nt, Artificial Sequence
  Description of Artificial Sequence: Synthetic oligonucleotide
acccgaguuguggcuggga

SEQ ID NO: 519545 - RNA, 19 nt, Artificial Sequence
  Description of Artificial Sequence: Synthetic oligonucleotide
cucugucagguguaacguu

SEQ ID NO: 519546 - RNA, 19 nt, Artificial Sequence
  Description of Artificial Sequence: Synthetic oligonucleotide
gcgguccugcuuauccuug

SEQ ID NO: 519547 - RNA, 19 nt, Artificial Sequence
  Description of Artificial Sequence: Synthetic oligonucleotide
gcgccuguggaauguccuc

SEQ ID NO: 519548 - RNA, 19 nt, Artificial Sequence
  Description of Artificial Sequence: Synthetic oligonucleotide
ggcgaccagcgccugugga

SEQ ID NO: 519549 - RNA, 19 nt, Artificial Sequence
  Description of Artificial Sequence: Synthetic oligonucleotide
ggcuguccgcgacaaccga

SEQ ID NO: 519550 - RNA, 19 nt, Artificial Sequence
  Description of Artificial Sequence: Synthetic oligonucleotide
cccgccggcauuggguggg

SEQ ID NO: 519551 - RNA, 19 nt, Artificial Sequence
  Description of Artificial Sequence: Synthetic oligonucleotide
guacugcgccuugguuccc

SEQ ID NO: 519552 - RNA, 19 nt, Artificial Sequence
  Description of Artificial Sequence: Synthetic oligonucleotide
gagaaaccucccugcccuu

SEQ ID NO: 519553 - RNA, 19 nt, Artificial Sequence
  Description of Artificial Sequence: Synthetic oligonucleotide
gggaggagucgacguagua

SEQ ID NO: 519554 - RNA, 19 nt, Artificial Sequence
  Description of Artificial Sequence: Synthetic oligonucleotide
ggucgucguagaggaacuc

SEQ ID NO: 519555 - RNA, 19 nt, Artificial Sequence
  Description of Artificial Sequence: Synthetic oligonucleotide
gcuggccccacuucucgua

SEQ ID NO: 519556 - RNA, 19 nt, Artificial Sequence
  Description of Artificial Sequence: Synthetic oligonucleotide
gggugccccauggccuugg

SEQ ID NO: 519557 - RNA, 19 nt, Artificial Sequence
  Description of Artificial Sequence: Synthetic oligonucleotide
uggagccguuuuggcugga

SEQ ID NO: 519558 - RNA, 19 nt, Artificial Sequence
  Description of Artificial Sequence: Synthetic oligonucleotide
gccguucugcuugccggcc

SEQ ID NO: 519559 - RNA, 19 nt, Artificial Sequence
  Description of Artificial Sequence: Synthetic oligonucleotide
cacuggaggucccgguccu

SEQ ID NO: 519560 - RNA, 19 nt, Artificial Sequence
  Description of Artificial Sequence: Synthetic oligonucleotide
cuggccccgccggcauugg

SEQ ID NO: 519561 - RNA, 19 nt, Artificial Sequence
  Description of Artificial Sequence: Synthetic oligonucleotide
ggcgucgggcaaggguucc

SEQ ID NO: 519562 - RNA, 19 nt, Artificial Sequence
  Description of Artificial Sequence: Synthetic oligonucleotide
gcgcucggagucagagggg

SEQ ID NO: 519563 - RNA, 19 nt, Artificial Sequence
  Description of Artificial Sequence: Synthetic oligonucleotide
cccguuggggcugccguac

SEQ ID NO: 519564 - RNA, 19 nt, Artificial Sequence
  Description of Artificial Sequence: Synthetic oligonucleotide
gcgucgggcaaggguuccg

SEQ ID NO: 519565 - RNA, 19 nt, Artificial Sequence
  Description of Artificial Sequence: Synthetic oligonucleotide
cgccguucugcuugccggc

SEQ ID NO: 519566 - RNA, 19 nt, Artificial Sequence
  Description of Artificial Sequence: Synthetic oligonucleotide
gccguuuuggcuggagacu

SEQ ID NO: 519567 - RNA, 19 nt, Artificial Sequence
  Description of Artificial Sequence: Synthetic oligonucleotide
ccgaagcgggccccagggc

SEQ ID NO: 519568 - RNA, 19 nt, Artificial Sequence
  Description of Artificial Sequence: Synthetic oligonucleotide
gcuguccgcgacaaccgaa

SEQ ID NO: 519569 - RNA, 19 nt, Artificial Sequence
  Description of Artificial Sequence: Synthetic oligonucleotide
ggcugccguacuggauucc

SEQ ID NO: 519570 - RNA, 19 nt, Artificial Sequence
  Description of Artificial Sequence: Synthetic oligonucleotide
cgaaugcgcucggagucag

SEQ ID NO: 519571 - RNA, 19 nt, Artificial Sequence
  Description of Artificial Sequence: Synthetic oligonucleotide
ccaaguacugcgccuuggu

SEQ ID NO: 519572 - RNA, 19 nt, Artificial Sequence
  Description of Artificial Sequence: Synthetic oligonucleotide
cgucgggcaaggguuccgg

SEQ ID NO: 519573 - RNA, 19 nt, Artificial Sequence
  Description of Artificial Sequence: Synthetic oligonucleotide
gcucggagucagaggggug

SEQ ID NO: 519574 - RNA, 19 nt, Artificial Sequence
  Description of Artificial Sequence: Synthetic oligonucleotide
agguggcgaccagcgccug

SEQ ID NO: 519575 - RNA, 19 nt, Artificial Sequence
  Description of Artificial Sequence: Synthetic oligonucleotide
cugcccguucugccaugga

SEQ ID NO: 519576 - RNA, 19 nt, Artificial Sequence
  Description of Artificial Sequence: Synthetic oligonucleotide
cccacuucucguagucaaa

SEQ ID NO: 519577 - RNA, 19 nt, Artificial Sequence
  Description of Artificial Sequence: Synthetic oligonucleotide
cgacaaccgaacuguagcu

SEQ ID NO: 519578 - RNA, 19 nt, Artificial Sequence
  Description of Artificial Sequence: Synthetic oligonucleotide
gcugccguacuggauuccu

SEQ ID NO: 519579 - RNA, 19 nt, Artificial Sequence
  Description of Artificial Sequence: Synthetic oligonucleotide
ggcggcacagcuggggacu

SEQ ID NO: 519580 - RNA, 19 nt, Artificial Sequence
  Description of Artificial Sequence: Synthetic oligonucleotide
ccggcauuggguggggcca

SEQ ID NO: 519581 - RNA, 19 nt, Artificial Sequence
  Description of Artificial Sequence: Synthetic oligonucleotide
cuggguugugagggcccga

SEQ ID NO: 519582 - RNA, 19 nt, Artificial Sequence
  Description of Artificial Sequence: Synthetic oligonucleotide
cguuccauuugcguuucaa

SEQ ID NO: 519583 - RNA, 19 nt, Artificial Sequence
  Description of Artificial Sequence: Synthetic oligonucleotide
ggugggcgugcugcuggac

SEQ ID NO: 519584 - RNA, 19 nt, Artificial Sequence
  Description of Artificial Sequence: Synthetic oligonucleotide
ccgaaugcgcucggaguca

SEQ ID NO: 519585 - RNA, 19 nt, Artificial Sequence
  Description of Artificial Sequence: Synthetic oligonucleotide
cguuuuggcuggagacuga

SEQ ID NO: 519586 - RNA, 19 nt, Artificial Sequence
  Description of Artificial Sequence: Synthetic oligonucleotide
gacaggcuuggagccguuu

SEQ ID NO: 519587 - RNA, 19 nt, Artificial Sequence
  Description of Artificial Sequence: Synthetic oligonucleotide
gaggaccauugagcagggu

SEQ ID NO: 519588 - RNA, 19 nt, Artificial Sequence
  Description of Artificial Sequence: Synthetic oligonucleotide
gcaguuagcugggcugggu

SEQ ID NO: 519589 - RNA, 19 nt, Artificial Sequence
  Description of Artificial Sequence: Synthetic oligonucleotide
gggcgucgggcaaggguuc

SEQ ID NO: 519590 - RNA, 19 nt, Artificial Sequence
  Description of Artificial Sequence: Synthetic oligonucleotide
gguggcgaccagcgccugu

SEQ ID NO: 519591 - RNA, 19 nt, Artificial Sequence
  Description of Artificial Sequence: Synthetic oligonucleotide
cugaacuguggaggaccau

SEQ ID NO: 519592 - RNA, 19 nt, Artificial Sequence
  Description of Artificial Sequence: Synthetic oligonucleotide
ggccccgccggcauugggu

SEQ ID NO: 519593 - RNA, 19 nt, Artificial Sequence
  Description of Artificial Sequence: Synthetic oligonucleotide
cuuggggcccagggcacuu

SEQ ID NO: 519594 - RNA, 19 nt, Artificial Sequence
  Description of Artificial Sequence: Synthetic oligonucleotide
gcgugucugcaccgacagu

SEQ ID NO: 519595 - RNA, 19 nt, Artificial Sequence
  Description of Artificial Sequence: Synthetic oligonucleotide
ccgcucggcugggcgcugg

SEQ ID NO: 519596 - RNA, 19 nt, Artificial Sequence
  Description of Artificial Sequence: Synthetic oligonucleotide
ggcgugcugcuggacuggu

SEQ ID NO: 519597 - RNA, 19 nt, Artificial Sequence
  Description of Artificial Sequence: Synthetic oligonucleotide
ccgccggcauugggugggg

SEQ ID NO: 519598 - RNA, 19 nt, Artificial Sequence
  Description of Artificial Sequence: Synthetic oligonucleotide
ccgcgacaaccgaacugua

SEQ ID NO: 519599 - RNA, 19 nt, Artificial Sequence
  Description of Artificial Sequence: Synthetic oligonucleotide
ccccguuggggcugccgua

SEQ ID NO: 519600 - RNA, 19 nt, Artificial Sequence
  Description of Artificial Sequence: Synthetic oligonucleotide
gcacgugguaucggugcuu

SEQ ID NO: 519601 - RNA, 19 nt, Artificial Sequence
  Description of Artificial Sequence: Synthetic oligonucleotide
ccguuccauuugcguuuca

SEQ ID NO: 519602 - RNA, 19 nt, Artificial Sequence
  Description of Artificial Sequence: Synthetic oligonucleotide
cgaccagcgccuguggaau

SEQ ID NO: 519603 - RNA, 19 nt, Artificial Sequence
  Description of Artificial Sequence: Synthetic oligonucleotide
ccagaccuaggcccuccuu

SEQ ID NO: 519604 - RNA, 19 nt, Artificial Sequence
  Description of Artificial Sequence: Synthetic oligonucleotide
cgccggcauuggguggggc

SEQ ID NO: 519605 - RNA, 19 nt, Artificial Sequence
  Description of Artificial Sequence: Synthetic oligonucleotide
ccguuggggcugccguacu

SEQ ID NO: 519606 - RNA, 19 nt, Artificial Sequence
  Description of Artificial Sequence: Synthetic oligonucleotide
auugcuauggaugaugucc

SEQ ID NO: 519607 - RNA, 19 nt, Artificial Sequence
  Description of Artificial Sequence: Synthetic oligonucleotide
uucauuacaguguauuugg

SEQ ID NO: 519608 - RNA, 19 nt, Artificial Sequence
  Description of Artificial Sequence: Synthetic oligonucleotide
cucacuaagaagcaaaucc

SEQ ID NO: 519609 - RNA, 19 nt, Artificial Sequence
  Description of Artificial Sequence: Synthetic oligonucleotide
gagugauugacuuaacuag

SEQ ID NO: 519610 - RNA, 19 nt, Artificial Sequence
  Description of Artificial Sequence: Synthetic oligonucleotide
aguuccuauacauugagug

SEQ ID NO: 519611 - RNA, 19 nt, Artificial Sequence
  Description of Artificial Sequence: Synthetic oligonucleotide
auuacaguguauuuggucu

SEQ ID NO: 519612 - RNA, 19 nt, Artificial Sequence
  Description of Artificial Sequence: Synthetic oligonucleotide
auuuagguuguaugggucc

SEQ ID NO: 519613 - RNA, 19 nt, Artificial Sequence
  Description of Artificial Sequence: Synthetic oligonucleotide
aacguuggcacucuuaaca

SEQ ID NO: 519614 - RNA, 19 nt, Artificial Sequence
  Description of Artificial Sequence: Synthetic oligonucleotide
auagaaagcccacuaaguc

SEQ ID NO: 519615 - RNA, 19 nt, Artificial Sequence
  Description of Artificial Sequence: Synthetic oligonucleotide
aauaccaguggcuuacaag

SEQ ID NO: 519616 - RNA, 19 nt, Artificial Sequence
  Description of Artificial Sequence: Synthetic oligonucleotide
agcuauaaauaacacacag

SEQ ID NO: 519617 - RNA, 19 nt, Artificial Sequence
  Description of Artificial Sequence: Synthetic oligonucleotide
guauucgacagcuugaagc

SEQ ID NO: 519618 - RNA, 19 nt, Artificial Sequence
  Description of Artificial Sequence: Synthetic oligonucleotide
aaagcugcaucucugcuug

SEQ ID NO: 519619 - RNA, 19 nt, Artificial Sequence
  Description of Artificial Sequence: Synthetic oligonucleotide
uggacuucgauccuugucc

SEQ ID NO: 519620 - RNA, 19 nt, Artificial Sequence
  Description of Artificial Sequence: Synthetic oligonucleotide
aauggacaaguguccaccc

SEQ ID NO: 519621 - RNA, 19 nt, Artificial Sequence
  Description of Artificial Sequence: Synthetic oligonucleotide
gauugacuuaacuagcagc

SEQ ID NO: 519622 - RNA, 19 nt, Artificial Sequence
  Description of Artificial Sequence: Synthetic oligonucleotide
ucucaauuuuccaugaagu

SEQ ID NO: 519623 - RNA, 19 nt, Artificial Sequence
  Description of Artificial Sequence: Synthetic oligonucleotide
gaugcuagcacgcuggggc

SEQ ID NO: 519624 - RNA, 19 nt, Artificial Sequence
  Description of Artificial Sequence: Synthetic oligonucleotide
uauacauugagugauugac

SEQ ID NO: 519625 - RNA, 19 nt, Artificial Sequence
  Description of Artificial Sequence: Synthetic oligonucleotide
agcuaauacaauuccacag

SEQ ID NO: 519626 - RNA, 19 nt, Artificial Sequence
  Description of Artificial Sequence: Synthetic oligonucleotide
aguucucaggcaaauaugc

SEQ ID NO: 519627 - RNA, 19 nt, Artificial Sequence
  Description of Artificial Sequence: Synthetic oligonucleotide
agaugauaacucuggaaac

SEQ ID NO: 519628 - RNA, 19 nt, Artificial Sequence
  Description of Artificial Sequence: Synthetic oligonucleotide
auaaauaccaguggcuuac

SEQ ID NO: 519629 - RNA, 19 nt, Artificial Sequence
  Description of Artificial Sequence: Synthetic oligonucleotide
acucuuaacauugcuaugg

SEQ ID NO: 519630 - RNA, 19 nt, Artificial Sequence
  Description of Artificial Sequence: Synthetic oligonucleotide
guuguauggguccugacag

SEQ ID NO: 519631 - RNA, 19 nt, Artificial Sequence
  Description of Artificial Sequence: Synthetic oligonucleotide
aaaacguuggcacucuuaa

SEQ ID NO: 519632 - RNA, 19 nt, Artificial Sequence
  Description of Artificial Sequence: Synthetic oligonucleotide
ugagauuugcagaaagcug

SEQ ID NO: 519633 - RNA, 19 nt, Artificial Sequence
  Description of Artificial Sequence: Synthetic oligonucleotide
uaugacagacagaugauaa

SEQ ID NO: 519634 - RNA, 19 nt, Artificial Sequence
  Description of Artificial Sequence: Synthetic oligonucleotide
ccagcuauaaauaacacac

SEQ ID NO: 519635 - RNA, 19 nt, Artificial Sequence
  Description of Artificial Sequence: Synthetic oligonucleotide
caggggauaccuuacaagg

SEQ ID NO: 519636 - RNA, 19 nt, Artificial Sequence
  Description of Artificial Sequence: Synthetic oligonucleotide
uauucgacagcuugaagca

SEQ ID NO: 519637 - RNA, 19 nt, Artificial Sequence
  Description of Artificial Sequence: Synthetic oligonucleotide
augacaucggucucacucc

SEQ ID NO: 519638 - RNA, 19 nt, Artificial Sequence
  Description of Artificial Sequence: Synthetic oligonucleotide
uacaaggauacugaguucc

SEQ ID NO: 519639 - RNA, 19 nt, Artificial Sequence
  Description of Artificial Sequence: Synthetic oligonucleotide
ucuguguaaguugaggucc

SEQ ID NO: 519640 - RNA, 19 nt, Artificial Sequence
  Description of Artificial Sequence: Synthetic oligonucleotide
aucucaauuuuccaugaag

SEQ ID NO: 519641 - RNA, 19 nt, Artificial Sequence
  Description of Artificial Sequence: Synthetic oligonucleotide
ucacuaagaagcaaauccu

SEQ ID NO: 519642 - RNA, 19 nt, Artificial Sequence
  Description of Artificial Sequence: Synthetic oligonucleotide
uauggguccugacagaccu

SEQ ID NO: 519643 - RNA, 19 nt, Artificial Sequence
  Description of Artificial Sequence: Synthetic oligonucleotide
ugugcccucagaaacccgg

SEQ ID NO: 519644 - RNA, 19 nt, Artificial Sequence
  Description of Artificial Sequence: Synthetic oligonucleotide
guaaucuugaacuugagau

SEQ ID NO: 519645 - RNA, 19 nt, Artificial Sequence
  Description of Artificial Sequence: Synthetic oligonucleotide
caacccuuguacaugacgc

SEQ ID NO: 519646 - RNA, 19 nt, Artificial Sequence
  Description of Artificial Sequence: Synthetic oligonucleotide
gcaaauaugcagcugaggc

SEQ ID NO: 519647 - RNA, 19 nt, Artificial Sequence
  Description of Artificial Sequence: Synthetic oligonucleotide
gggguuaagaugcugaucc

SEQ ID NO: 519648 - RNA, 19 nt, Artificial Sequence
  Description of Artificial Sequence: Synthetic oligonucleotide
ugauugacuuaacuagcag

SEQ ID NO: 519649 - RNA, 19 nt, Artificial Sequence
  Description of Artificial Sequence: Synthetic oligonucleotide
ugagcuaaccaucucccug

SEQ ID NO: 519650 - RNA, 19 nt, Artificial Sequence
  Description of Artificial Sequence: Synthetic oligonucleotide
ugacuuaacuagcagcaga

SEQ ID NO: 519651 - RNA, 19 nt, Artificial Sequence
  Description of Artificial Sequence: Synthetic oligonucleotide
uuagccuggagucuguccu

SEQ ID NO: 519652 - RNA, 19 nt, Artificial Sequence
  Description of Artificial Sequence: Synthetic oligonucleotide
uuacaagauuauuaacuga

SEQ ID NO: 519653 - RNA, 19 nt, Artificial Sequence
  Description of Artificial Sequence: Synthetic oligonucleotide
cuugagauuugcagaaagc

SEQ ID NO: 519654 - RNA, 19 nt, Artificial Sequence
  Description of Artificial Sequence: Synthetic oligonucleotide
auaaaggugcaaagcaagc

SEQ ID NO: 519655 - RNA, 19 nt, Artificial Sequence
  Description of Artificial Sequence: Synthetic oligonucleotide
uuaagaugcugauccagca

SEQ ID NO: 519656 - RNA, 19 nt, Artificial Sequence
  Description of Artificial Sequence: Synthetic oligonucleotide
agauuauuaacugaagaaa

SEQ ID NO: 519657 - RNA, 19 nt, Artificial Sequence
  Description of Artificial Sequence: Synthetic oligonucleotide
aguagauaucagcaaaggu

SEQ ID NO: 519658 - RNA, 19 nt, Artificial Sequence
  Description of Artificial Sequence: Synthetic oligonucleotide
aaacguuggcacucuuaac

SEQ ID NO: 519659 - RNA, 19 nt, Artificial Sequence
  Description of Artificial Sequence: Synthetic oligonucleotide
uacaauuccacagcugaag

SEQ ID NO: 519660 - RNA, 19 nt, Artificial Sequence
  Description of Artificial Sequence: Synthetic oligonucleotide
aauugucaacgucaucugu

SEQ ID NO: 519661 - RNA, 19 nt, Artificial Sequence
  Description of Artificial Sequence: Synthetic oligonucleotide
ucagguaaacuggacuucg

SEQ ID NO: 519662 - RNA, 19 nt, Artificial Sequence
  Description of Artificial Sequence: Synthetic oligonucleotide
auaccuuacaaggauacug

SEQ ID NO: 519663 - RNA, 19 nt, Artificial Sequence
  Description of Artificial Sequence: Synthetic oligonucleotide
auugacuuaacuagcagca

SEQ ID NO: 519664 - RNA, 19 nt, Artificial Sequence
  Description of Artificial Sequence: Synthetic oligonucleotide
aaggauacugaguuccuau

SEQ ID NO: 519665 - RNA, 19 nt, Artificial Sequence
  Description of Artificial Sequence: Synthetic oligonucleotide
accuauugggaugauaauc

SEQ ID NO: 519666 - RNA, 19 nt, Artificial Sequence
  Description of Artificial Sequence: Synthetic oligonucleotide
cuaugcagguauucgacag

SEQ ID NO: 519667 - RNA, 19 nt, Artificial Sequence
  Description of Artificial Sequence: Synthetic oligonucleotide
gaaucaaacaugagacuag

SEQ ID NO: 519668 - RNA, 19 nt, Artificial Sequence
  Description of Artificial Sequence: Synthetic oligonucleotide
uugagugauugacuuaacu

SEQ ID NO: 519669 - RNA, 19 nt, Artificial Sequence
  Description of Artificial Sequence: Synthetic oligonucleotide
ugugcagaugcuagcacgc

SEQ ID NO: 519670 - RNA, 19 nt, Artificial Sequence
  Description of Artificial Sequence: Synthetic oligonucleotide
agaaauagaaagcccacua

SEQ ID NO: 519671 - RNA, 19 nt, Artificial Sequence
  Description of Artificial Sequence: Synthetic oligonucleotide
ucggaaucucacuaagaag

SEQ ID NO: 519672 - RNA, 19 nt, Artificial Sequence
  Description of Artificial Sequence: Synthetic oligonucleotide
caagauuauuaacugaaga

SEQ ID NO: 519673 - RNA, 19 nt, Artificial Sequence
  Description of Artificial Sequence: Synthetic oligonucleotide
agaaacccggcuccaaggg

SEQ ID NO: 519674 - RNA, 19 nt, Artificial Sequence
  Description of Artificial Sequence: Synthetic oligonucleotide
agacuaguucucgugauuc

SEQ ID NO: 519675 - RNA, 19 nt, Artificial Sequence
  Description of Artificial Sequence: Synthetic oligonucleotide
gaauggacaaguguccacc

SEQ ID NO: 519676 - RNA, 19 nt, Artificial Sequence
  Description of Artificial Sequence: Synthetic oligonucleotide
ugauaacucuggaaacacc

SEQ ID NO: 519677 - RNA, 19 nt, Artificial Sequence
  Description of Artificial Sequence: Synthetic oligonucleotide
gucaacgucaucuguuucc

SEQ ID NO: 519678 - RNA, 19 nt, Artificial Sequence
  Description of Artificial Sequence: Synthetic oligonucleotide
uguggaacugucuuccagu

SEQ ID NO: 519679 - RNA, 19 nt, Artificial Sequence
  Description of Artificial Sequence: Synthetic oligonucleotide
gcuaauacaauuccacagc

SEQ ID NO: 519680 - RNA, 19 nt, Artificial Sequence
  Description of Artificial Sequence: Synthetic oligonucleotide
gaauugucaacgucaucug

SEQ ID NO: 519681 - RNA, 19 nt, Artificial Sequence
  Description of Artificial Sequence: Synthetic oligonucleotide
caguugaggaaaagggucc

SEQ ID NO: 519682 - RNA, 19 nt, Artificial Sequence
  Description of Artificial Sequence: Synthetic oligonucleotide
gggaugauaaucaacauga

SEQ ID NO: 519683 - RNA, 19 nt, Artificial Sequence
  Description of Artificial Sequence: Synthetic oligonucleotide
cggaaucucacuaagaagc

SEQ ID NO: 519684 - RNA, 19 nt, Artificial Sequence
  Description of Artificial Sequence: Synthetic oligonucleotide
gaugauaacucuggaaaca

SEQ ID NO: 519685 - RNA, 19 nt, Artificial Sequence
  Description of Artificial Sequence: Synthetic oligonucleotide
uugcuauggaugaugucca

SEQ ID NO: 519686 - RNA, 19 nt, Artificial Sequence
  Description of Artificial Sequence: Synthetic oligonucleotide
ucggucucacuccagaaaa

SEQ ID NO: 519687 - RNA, 19 nt, Artificial Sequence
  Description of Artificial Sequence: Synthetic oligonucleotide
cuuuggucaaaguccuccg

SEQ ID NO: 519688 - RNA, 19 nt, Artificial Sequence
  Description of Artificial Sequence: Synthetic oligonucleotide
auacugaguuccuauacau

SEQ ID NO: 519689 - RNA, 19 nt, Artificial Sequence
  Description of Artificial Sequence: Synthetic oligonucleotide
uucgacagcuugaagcaac

SEQ ID NO: 519690 - RNA, 19 nt, Artificial Sequence
  Description of Artificial Sequence: Synthetic oligonucleotide
caugagacuaguucucgug

SEQ ID NO: 519691 - RNA, 19 nt, Artificial Sequence
  Description of Artificial Sequence: Synthetic oligonucleotide
uccuccguugcuuggauga

SEQ ID NO: 519692 - RNA, 19 nt, Artificial Sequence
  Description of Artificial Sequence: Synthetic oligonucleotide
gaggagucaaccuccacuc

SEQ ID NO: 519693 - RNA, 19 nt, Artificial Sequence
  Description of Artificial Sequence: Synthetic oligonucleotide
ugcucggaaucucacuaag

SEQ ID NO: 519694 - RNA, 19 nt, Artificial Sequence
  Description of Artificial Sequence: Synthetic oligonucleotide
gauaucagcaaaggucccc

SEQ ID NO: 519695 - RNA, 19 nt, Artificial Sequence
  Description of Artificial Sequence: Synthetic oligonucleotide
agucaaccuccacucuucc

SEQ ID NO: 519696 - RNA, 19 nt, Artificial Sequence
  Description of Artificial Sequence: Synthetic oligonucleotide
cuuacaaggauacugaguu

SEQ ID NO: 519697 - RNA, 19 nt, Artificial Sequence
  Description of Artificial Sequence: Synthetic oligonucleotide
ugaagcaacccugugcaga

SEQ ID NO: 519698 - RNA, 19 nt, Artificial Sequence
  Description of Artificial Sequence: Synthetic oligonucleotide
uuccuauacauugagugau

SEQ ID NO: 519699 - RNA, 19 nt, Artificial Sequence
  Description of Artificial Sequence: Synthetic oligonucleotide
gauuauuaacugaagaaau

SEQ ID NO: 519700 - RNA, 19 nt, Artificial Sequence
  Description of Artificial Sequence: Synthetic oligonucleotide
ucaacaugaucucccugga

SEQ ID NO: 519701 - RNA, 19 nt, Artificial Sequence
  Description of Artificial Sequence: Synthetic oligonucleotide
aaguucucaggcaaauaug

SEQ ID NO: 519702 - RNA, 19 nt, Artificial Sequence
  Description of Artificial Sequence: Synthetic oligonucleotide
aaacccggcuccaagggag

SEQ ID NO: 519703 - RNA, 19 nt, Artificial Sequence
  Description of Artificial Sequence: Synthetic oligonucleotide
agaaagcccacuaaguccu

SEQ ID NO: 519704 - RNA, 19 nt, Artificial Sequence
  Description of Artificial Sequence: Synthetic oligonucleotide
uccaucgcagggaugccag

SEQ ID NO: 519705 - RNA, 19 nt, Artificial Sequence
  Description of Artificial Sequence: Synthetic oligonucleotide
augagacuaguucucguga

SEQ ID NO: 519706 - RNA, 19 nt, Artificial Sequence
  Description of Artificial Sequence: Synthetic oligonucleotide
cugugcuuuggucaucagg

SEQ ID NO: 519707 - RNA, 19 nt, Artificial Sequence
  Description of Artificial Sequence: Synthetic oligonucleotide
ggagcaacagcaccuauug

SEQ ID NO: 519708 - RNA, 19 nt, Artificial Sequence
  Description of Artificial Sequence: Synthetic oligonucleotide
uguauggguccugacagac

SEQ ID NO: 519709 - RNA, 19 nt, Artificial Sequence
  Description of Artificial Sequence: Synthetic oligonucleotide
cagaaacccggcuccaagg

SEQ ID NO: 519710 - RNA, 19 nt, Artificial Sequence
  Description of Artificial Sequence: Synthetic oligonucleotide
gcaagcaguucauaaauac

SEQ ID NO: 519711 - RNA, 19 nt, Artificial Sequence
  Description of Artificial Sequence: Synthetic oligonucleotide
guuccuauacauugaguga

SEQ ID NO: 519712 - RNA, 19 nt, Artificial Sequence
  Description of Artificial Sequence: Synthetic oligonucleotide
ugcagaugcuagcacgcug

SEQ ID NO: 519713 - RNA, 19 nt, Artificial Sequence
  Description of Artificial Sequence: Synthetic oligonucleotide
gacgccaccaucacagaag

SEQ ID NO: 519714 - RNA, 19 nt, Artificial Sequence
  Description of Artificial Sequence: Synthetic oligonucleotide
ugaauggacaaguguccac

SEQ ID NO: 519715 - RNA, 19 nt, Artificial Sequence
  Description of Artificial Sequence: Synthetic oligonucleotide
guagggguagaugaggcug

SEQ ID NO: 519716 - RNA, 19 nt, Artificial Sequence
  Description of Artificial Sequence: Synthetic oligonucleotide
augcuagcacgcuggggcc

SEQ ID NO: 519717 - RNA, 19 nt, Artificial Sequence
  Description of Artificial Sequence: Synthetic oligonucleotide
ucgacagcuugaagcaacc

SEQ ID NO: 519718 - RNA, 19 nt, Artificial Sequence
  Description of Artificial Sequence: Synthetic oligonucleotide
ucuuaacauugcuauggau

SEQ ID NO: 519719 - RNA, 19 nt, Artificial Sequence
  Description of Artificial Sequence: Synthetic oligonucleotide
guugcuuggaugacaucgg

SEQ ID NO: 519720 - RNA, 19 nt, Artificial Sequence
  Description of Artificial Sequence: Synthetic oligonucleotide
gcugucagcaaauaugaca

SEQ ID NO: 519721 - RNA, 19 nt, Artificial Sequence
  Description of Artificial Sequence: Synthetic oligonucleotide
cuuagccuggagucugucc

SEQ ID NO: 519722 - RNA, 19 nt, Artificial Sequence
  Description of Artificial Sequence: Synthetic oligonucleotide
uauuggaagacaggccugu

SEQ ID NO: 519723 - RNA, 19 nt, Artificial Sequence
  Description of Artificial Sequence: Synthetic oligonucleotide
gcaaauaugacagacagau

SEQ ID NO: 519724 - RNA, 19 nt, Artificial Sequence
  Description of Artificial Sequence: Synthetic oligonucleotide
gcugccaaagaccuuuucc

SEQ ID NO: 519725 - RNA, 19 nt, Artificial Sequence
  Description of Artificial Sequence: Synthetic oligonucleotide
ucaacgucaucuguuuccu

SEQ ID NO: 519726 - RNA, 19 nt, Artificial Sequence
  Description of Artificial Sequence: Synthetic oligonucleotide
ugagacuaguucucgugau

SEQ ID NO: 519727 - RNA, 19 nt, Artificial Sequence
  Description of Artificial Sequence: Synthetic oligonucleotide
uccguugcuuggaugacau

SEQ ID NO: 519728 - RNA, 19 nt, Artificial Sequence
  Description of Artificial Sequence: Synthetic oligonucleotide
ccuauugggaugauaauca

SEQ ID NO: 519729 - RNA, 19 nt, Artificial Sequence
  Description of Artificial Sequence: Synthetic oligonucleotide
uacaugacgccaccaucac

SEQ ID NO: 519730 - RNA, 19 nt, Artificial Sequence
  Description of Artificial Sequence: Synthetic oligonucleotide
gguauuggaagacaggccu

SEQ ID NO: 519731 - RNA, 19 nt, Artificial Sequence
  Description of Artificial Sequence: Synthetic oligonucleotide
uugccaagugucuugcuuu

SEQ ID NO: 519732 - RNA, 19 nt, Artificial Sequence
  Description of Artificial Sequence: Synthetic oligonucleotide
cauugagugauugacuuaa

SEQ ID NO: 519733 - RNA, 19 nt, Artificial Sequence
  Description of Artificial Sequence: Synthetic oligonucleotide
acccugugcagaugcuagc

SEQ ID NO: 519734 - RNA, 19 nt, Artificial Sequence
  Description of Artificial Sequence: Synthetic oligonucleotide
gggguauuggaagacaggc

SEQ ID NO: 519735 - RNA, 19 nt, Artificial Sequence
  Description of Artificial Sequence: Synthetic oligonucleotide
gucacauaccagguguucc

SEQ ID NO: 519736 - RNA, 19 nt, Artificial Sequence
  Description of Artificial Sequence: Synthetic oligonucleotide
gcaacccuuguacaugacg

SEQ ID NO: 519737 - RNA, 19 nt, Artificial Sequence
  Description of Artificial Sequence: Synthetic oligonucleotide
gacuuaacuagcagcagaa

SEQ ID NO: 519738 - RNA, 19 nt, Artificial Sequence
  Description of Artificial Sequence: Synthetic oligonucleotide
agauaaaggugcaaagcaa

SEQ ID NO: 519739 - RNA, 19 nt, Artificial Sequence
  Description of Artificial Sequence: Synthetic oligonucleotide
ggaaucuguccauggaccc

SEQ ID NO: 519740 - RNA, 19 nt, Artificial Sequence
  Description of Artificial Sequence: Synthetic oligonucleotide
acuaaguccuuugccaagu

SEQ ID NO: 519741 - RNA, 19 nt, Artificial Sequence
  Description of Artificial Sequence: Synthetic oligonucleotide
uucuucacccagcuauaaa

SEQ ID NO: 519742 - RNA, 19 nt, Artificial Sequence
  Description of Artificial Sequence: Synthetic oligonucleotide
ucgcagggaugccagugag

SEQ ID NO: 519743 - RNA, 19 nt, Artificial Sequence
  Description of Artificial Sequence: Synthetic oligonucleotide
uugucaacgucaucuguuu

SEQ ID NO: 519744 - RNA, 19 nt, Artificial Sequence
  Description of Artificial Sequence: Synthetic oligonucleotide
cacuaaguccuuugccaag

SEQ ID NO: 519745 - RNA, 19 nt, Artificial Sequence
  Description of Artificial Sequence: Synthetic oligonucleotide
agguaaacuggacuucgau

SEQ ID NO: 519746 - RNA, 19 nt, Artificial Sequence
  Description of Artificial Sequence: Synthetic oligonucleotide
uuacaaggauacugaguuc

SEQ ID NO: 519747 - RNA, 19 nt, Artificial Sequence
  Description of Artificial Sequence: Synthetic oligonucleotide
cuauacauugagugauuga

SEQ ID NO: 519748 - RNA, 19 nt, Artificial Sequence
  Description of Artificial Sequence: Synthetic oligonucleotide
cagagagccauuugccaug

SEQ ID NO: 519749 - RNA, 19 nt, Artificial Sequence
  Description of Artificial Sequence: Synthetic oligonucleotide
uuacaguguauuuggucuu

SEQ ID NO: 519750 - RNA, 19 nt, Artificial Sequence
  Description of Artificial Sequence: Synthetic oligonucleotide
auacauugagugauugacu

SEQ ID NO: 519751 - RNA, 19 nt, Artificial Sequence
  Description of Artificial Sequence: Synthetic oligonucleotide
gguuaagaugcugauccag

SEQ ID NO: 519752 - RNA, 19 nt, Artificial Sequence
  Description of Artificial Sequence: Synthetic oligonucleotide
gguauggaaggccagaagu

SEQ ID NO: 519753 - RNA, 19 nt, Artificial Sequence
  Description of Artificial Sequence: Synthetic oligonucleotide
aggcaaaggccacaccaug

SEQ ID NO: 519754 - RNA, 19 nt, Artificial Sequence
  Description of Artificial Sequence: Synthetic oligonucleotide
augaucucccuggaaccac

SEQ ID NO: 519755 - RNA, 19 nt, Artificial Sequence
  Description of Artificial Sequence: Synthetic oligonucleotide
uacugaguuccuauacauu

SEQ ID NO: 519756 - RNA, 19 nt, Artificial Sequence
  Description of Artificial Sequence: Synthetic oligonucleotide
ucucacuaagaagcaaauc

SEQ ID NO: 519757 - RNA, 19 nt, Artificial Sequence
  Description of Artificial Sequence: Synthetic oligonucleotide
ugucaacgucaucuguuuc

SEQ ID NO: 519758 - RNA, 19 nt, Artificial Sequence
  Description of Artificial Sequence: Synthetic oligonucleotide
uugagcuaaccaucucccu

SEQ ID NO: 519759 - RNA, 19 nt, Artificial Sequence
  Description of Artificial Sequence: Synthetic oligonucleotide
ugacgccaccaucacagaa

SEQ ID NO: 519760 - RNA, 19 nt, Artificial Sequence
  Description of Artificial Sequence: Synthetic oligonucleotide
auugcgccuccgcaggcag

SEQ ID NO: 519761 - RNA, 19 nt, Artificial Sequence
  Description of Artificial Sequence: Synthetic oligonucleotide
uccuugggucacauaccag

SEQ ID NO: 519762 - RNA, 19 nt, Artificial Sequence
  Description of Artificial Sequence: Synthetic oligonucleotide
uggguccugacagaccuug

SEQ ID NO: 519763 - RNA, 19 nt, Artificial Sequence
  Description of Artificial Sequence: Synthetic oligonucleotide
ucucgugauucuucaccca

SEQ ID NO: 519764 - RNA, 19 nt, Artificial Sequence
  Description of Artificial Sequence: Synthetic oligonucleotide
guauggaaggccagaaguc

SEQ ID NO: 519765 - RNA, 19 nt, Artificial Sequence
  Description of Artificial Sequence: Synthetic oligonucleotide
ucaggcaaauaugcagcug

SEQ ID NO: 519766 - RNA, 19 nt, Artificial Sequence
  Description of Artificial Sequence: Synthetic oligonucleotide
cagcuaauacaauuccaca

SEQ ID NO: 519767 - RNA, 19 nt, Artificial Sequence
  Description of Artificial Sequence: Synthetic oligonucleotide
uuguauggguccugacaga

SEQ ID NO: 519768 - RNA, 19 nt, Artificial Sequence
  Description of Artificial Sequence: Synthetic oligonucleotide
agcggagaggaggcaaccc

SEQ ID NO: 519769 - RNA, 19 nt, Artificial Sequence
  Description of Artificial Sequence: Synthetic oligonucleotide
gucuccguagcguccuggg

SEQ ID NO: 519770 - RNA, 19 nt, Artificial Sequence
  Description of Artificial Sequence: Synthetic oligonucleotide
acguuggcacucuuaacau

SEQ ID NO: 519771 - RNA, 19 nt, Artificial Sequence
  Description of Artificial Sequence: Synthetic oligonucleotide
ggcaguacugcucggaauc

SEQ ID NO: 519772 - RNA, 19 nt, Artificial Sequence
  Description of Artificial Sequence: Synthetic oligonucleotide
gugauugacuuaacuagca

SEQ ID NO: 519773 - RNA, 19 nt, Artificial Sequence
  Description of Artificial Sequence: Synthetic oligonucleotide
auugagugauugacuuaac

SEQ ID NO: 519774 - RNA, 19 nt, Artificial Sequence
  Description of Artificial Sequence: Synthetic oligonucleotide
agcugaagauguccacuug

SEQ ID NO: 519775 - RNA, 19 nt, Artificial Sequence
  Description of Artificial Sequence: Synthetic oligonucleotide
gcaggggauaccuuacaag

SEQ ID NO: 519776 - RNA, 19 nt, Artificial Sequence
  Description of Artificial Sequence: Synthetic oligonucleotide
aucggucucacuccagaaa

SEQ ID NO: 519777 - RNA, 19 nt, Artificial Sequence
  Description of Artificial Sequence: Synthetic oligonucleotide
ggauaccuuacaaggauac

SEQ ID NO: 519778 - RNA, 19 nt, Artificial Sequence
  Description of Artificial Sequence: Synthetic oligonucleotide
gggacauuggugugcuagg

SEQ ID NO: 519779 - RNA, 19 nt, Artificial Sequence
  Description of Artificial Sequence: Synthetic oligonucleotide
gacauuggugugcuaggaa

SEQ ID NO: 519780 - RNA, 19 nt, Artificial Sequence
  Description of Artificial Sequence: Synthetic oligonucleotide
uccuauacauugagugauu

SEQ ID NO: 519781 - RNA, 19 nt, Artificial Sequence
  Description of Artificial Sequence: Synthetic oligonucleotide
gaaacccggcuccaaggga

SEQ ID NO: 519782 - RNA, 19 nt, Artificial Sequence
  Description of Artificial Sequence: Synthetic oligonucleotide
cacagcugaagauguccac

SEQ ID NO: 519783 - RNA, 19 nt, Artificial Sequence
  Description of Artificial Sequence: Synthetic oligonucleotide
guauuggaagacaggccug

SEQ ID NO: 519784 - RNA, 19 nt, Artificial Sequence
  Description of Artificial Sequence: Synthetic oligonucleotide
aggauacugaguuccuaua

SEQ ID NO: 519785 - RNA, 19 nt, Artificial Sequence
  Description of Artificial Sequence: Synthetic oligonucleotide
gcuuggaugacaucggucu

SEQ ID NO: 519786 - RNA, 19 nt, Artificial Sequence
  Description of Artificial Sequence: Synthetic oligonucleotide
uggccugguauggaaggcc

SEQ ID NO: 519787 - RNA, 19 nt, Artificial Sequence
  Description of Artificial Sequence: Synthetic oligonucleotide
agugggacauuggugugcu

SEQ ID NO: 519788 - RNA, 19 nt, Artificial Sequence
  Description of Artificial Sequence: Synthetic oligonucleotide
cagguauucgacagcuuga

SEQ ID NO: 519789 - RNA, 19 nt, Artificial Sequence
  Description of Artificial Sequence: Synthetic oligonucleotide
gguauucgacagcuugaag

SEQ ID NO: 519790 - RNA, 19 nt, Artificial Sequence
  Description of Artificial Sequence: Synthetic oligonucleotide
gagucaaccuccacucuuc

SEQ ID NO: 519791 - RNA, 19 nt, Artificial Sequence
  Description of Artificial Sequence: Synthetic oligonucleotide
cuugggcugccaaagaccu

SEQ ID NO: 519792 - RNA, 19 nt, Artificial Sequence
  Description of Artificial Sequence: Synthetic oligonucleotide
auuggugugcuaggaagau

SEQ ID NO: 519793 - RNA, 19 nt, Artificial Sequence
  Description of Artificial Sequence: Synthetic oligonucleotide
gcuauggaugauguccagg

SEQ ID NO: 519794 - RNA, 19 nt, Artificial Sequence
  Description of Artificial Sequence: Synthetic oligonucleotide
cugacagaccuugggcugc

SEQ ID NO: 519795 - RNA, 19 nt, Artificial Sequence
  Description of Artificial Sequence: Synthetic oligonucleotide
cagaugcuagcacgcuggg

SEQ ID NO: 519796 - RNA, 19 nt, Artificial Sequence
  Description of Artificial Sequence: Synthetic oligonucleotide
guugucuguguaaguugag

SEQ ID NO: 519797 - RNA, 19 nt, Artificial Sequence
  Description of Artificial Sequence: Synthetic oligonucleotide
cuauugggaugauaaucaa

SEQ ID NO: 519798 - RNA, 19 nt, Artificial Sequence
  Description of Artificial Sequence: Synthetic oligonucleotide
agcaaauaugacagacaga

SEQ ID NO: 519799 - RNA, 19 nt, Artificial Sequence
  Description of Artificial Sequence: Synthetic oligonucleotide
gcaccuauugggaugauaa

SEQ ID NO: 519800 - RNA, 19 nt, Artificial Sequence
  Description of Artificial Sequence: Synthetic oligonucleotide
cagcagagguaggacauug

SEQ ID NO: 519801 - RNA, 19 nt, Artificial Sequence
  Description of Artificial Sequence: Synthetic oligonucleotide
agguauucgacagcuugaa

SEQ ID NO: 519802 - RNA, 19 nt, Artificial Sequence
  Description of Artificial Sequence: Synthetic oligonucleotide
acuggcggauggcuguacu

SEQ ID NO: 519803 - RNA, 19 nt, Artificial Sequence
  Description of Artificial Sequence: Synthetic oligonucleotide
cagcaaaacguuggcacuc

SEQ ID NO: 519804 - RNA, 19 nt, Artificial Sequence
  Description of Artificial Sequence: Synthetic oligonucleotide
gcuguacuauuccauuuuc

SEQ ID NO: 519805 - RNA, 19 nt, Artificial Sequence
  Description of Artificial Sequence: Synthetic oligonucleotide
auaacucuggaaacaccau

SEQ ID NO: 519806 - RNA, 19 nt, Artificial Sequence
  Description of Artificial Sequence: Synthetic oligonucleotide
caucgcagggaugccagug

SEQ ID NO: 519807 - RNA, 19 nt, Artificial Sequence
  Description of Artificial Sequence: Synthetic oligonucleotide
ucucuuucgccaccaccuu

SEQ ID NO: 519808 - RNA, 19 nt, Artificial Sequence
  Description of Artificial Sequence: Synthetic oligonucleotide
aggggauaccuuacaagga

SEQ ID NO: 519809 - RNA, 19 nt, Artificial Sequence
  Description of Artificial Sequence: Synthetic oligonucleotide
aggagucaaccuccacucu

SEQ ID NO: 519810 - RNA, 19 nt, Artificial Sequence
  Description of Artificial Sequence: Synthetic oligonucleotide
agucuccguagcguccugg

SEQ ID NO: 519811 - RNA, 19 nt, Artificial Sequence
  Description of Artificial Sequence: Synthetic oligonucleotide
aacccggcuccaagggagg

SEQ ID NO: 519812 - RNA, 19 nt, Artificial Sequence
  Description of Artificial Sequence: Synthetic oligonucleotide
uggcggauggcuguacuau

SEQ ID NO: 519813 - RNA, 19 nt, Artificial Sequence
  Description of Artificial Sequence: Synthetic oligonucleotide
ggcuccaagggagggacgg

SEQ ID NO: 519814 - RNA, 19 nt, Artificial Sequence
  Description of Artificial Sequence: Synthetic oligonucleotide
cccacuaaguccuuugcca

SEQ ID NO: 519815 - RNA, 19 nt, Artificial Sequence
  Description of Artificial Sequence: Synthetic oligonucleotide
ccuauacauugagugauug

SEQ ID NO: 519816 - RNA, 19 nt, Artificial Sequence
  Description of Artificial Sequence: Synthetic oligonucleotide
uacaguguauuuggucuuu

SEQ ID NO: 519817 - RNA, 19 nt, Artificial Sequence
  Description of Artificial Sequence: Synthetic oligonucleotide
ggaggagucaaccuccacu

SEQ ID NO: 519818 - RNA, 19 nt, Artificial Sequence
  Description of Artificial Sequence: Synthetic oligonucleotide
aagucuccguagcguccug

SEQ ID NO: 519819 - RNA, 19 nt, Artificial Sequence
  Description of Artificial Sequence: Synthetic oligonucleotide
ggacggcugaccucggagc

SEQ ID NO: 519820 - RNA, 19 nt, Artificial Sequence
  Description of Artificial Sequence: Synthetic oligonucleotide
gucacccuuagccuggagu

SEQ ID NO: 519821 - RNA, 19 nt, Artificial Sequence
  Description of Artificial Sequence: Synthetic oligonucleotide
gcuaugcagguauucgaca

SEQ ID NO: 519822 - RNA, 19 nt, Artificial Sequence
  Description of Artificial Sequence: Synthetic oligonucleotide
gacuaguucucgugauucu

SEQ ID NO: 519823 - RNA, 19 nt, Artificial Sequence
  Description of Artificial Sequence: Synthetic oligonucleotide
cgauccuuguccaucgcag

SEQ ID NO: 519824 - RNA, 19 nt, Artificial Sequence
  Description of Artificial Sequence: Synthetic oligonucleotide
agagagccauuugccaugu

SEQ ID NO: 519825 - RNA, 19 nt, Artificial Sequence
  Description of Artificial Sequence: Synthetic oligonucleotide
ggcuaugcagguauucgac

SEQ ID NO: 519826 - RNA, 19 nt, Artificial Sequence
  Description of Artificial Sequence: Synthetic oligonucleotide
auucuucacccagcuauaa

SEQ ID NO: 519827 - RNA, 19 nt, Artificial Sequence
  Description of Artificial Sequence: Synthetic oligonucleotide
ggaaucucacuaagaagca

SEQ ID NO: 519828 - RNA, 19 nt, Artificial Sequence
  Description of Artificial Sequence: Synthetic oligonucleotide
cccagcuauaaauaacaca

SEQ ID NO: 519829 - RNA, 19 nt, Artificial Sequence
  Description of Artificial Sequence: Synthetic oligonucleotide
ggguuguucuugucaguug

SEQ ID NO: 519830 - RNA, 19 nt, Artificial Sequence
  Description of Artificial Sequence: Synthetic oligonucleotide
ccauuugccauguaggggu

SEQ ID NO: 519831 - RNA, 19 nt, Artificial Sequence
  Description of Artificial Sequence: Synthetic oligonucleotide
gcccacuaaguccuuugcc

SEQ ID NO: 519832 - RNA, 19 nt, Artificial Sequence
  Description of Artificial Sequence: Synthetic oligonucleotide
gauaccuuacaaggauacu

SEQ ID NO: 519833 - RNA, 19 nt, Artificial Sequence
  Description of Artificial Sequence: Synthetic oligonucleotide
cauggacccuggacuugag

SEQ ID NO: 519834 - RNA, 19 nt, Artificial Sequence
  Description of Artificial Sequence: Synthetic oligonucleotide
gcuauaaauaacacacagu

SEQ ID NO: 519835 - RNA, 19 nt, Artificial Sequence
  Description of Artificial Sequence: Synthetic oligonucleotide
uggagacucgugccuccuc

SEQ ID NO: 519836 - RNA, 19 nt, Artificial Sequence
  Description of Artificial Sequence: Synthetic oligonucleotide
guacugcucggaaucucac

SEQ ID NO: 519837 - RNA, 19 nt, Artificial Sequence
  Description of Artificial Sequence: Synthetic oligonucleotide
ugcuagcacgcuggggcca

SEQ ID NO: 519838 - RNA, 19 nt, Artificial Sequence
  Description of Artificial Sequence: Synthetic oligonucleotide
cagguaaacuggacuucga

SEQ ID NO: 519839 - RNA, 19 nt, Artificial Sequence
  Description of Artificial Sequence: Synthetic oligonucleotide
ggacuucgauccuugucca

SEQ ID NO: 519840 - RNA, 19 nt, Artificial Sequence
  Description of Artificial Sequence: Synthetic oligonucleotide
gcaguucauaaauaccagu

SEQ ID NO: 519841 - RNA, 19 nt, Artificial Sequence
  Description of Artificial Sequence: Synthetic oligonucleotide
aaagguccccucacugauu

SEQ ID NO: 519842 - RNA, 19 nt, Artificial Sequence
  Description of Artificial Sequence: Synthetic oligonucleotide
auucgacagcuugaagcaa

SEQ ID NO: 519843 - RNA, 19 nt, Artificial Sequence
  Description of Artificial Sequence: Synthetic oligonucleotide
gccugugcgggccucugag

SEQ ID NO: 519844 - RNA, 19 nt, Artificial Sequence
  Description of Artificial Sequence: Synthetic oligonucleotide
ggagaggaggcaacccuug

SEQ ID NO: 519845 - RNA, 19 nt, Artificial Sequence
  Description of Artificial Sequence: Synthetic oligonucleotide
gaaucuguccauggacccu

SEQ ID NO: 519846 - RNA, 19 nt, Artificial Sequence
  Description of Artificial Sequence: Synthetic oligonucleotide
uugccauguagggguagau

SEQ ID NO: 519847 - RNA, 19 nt, Artificial Sequence
  Description of Artificial Sequence: Synthetic oligonucleotide
ggggauaccuuacaaggau

SEQ ID NO: 519848 - RNA, 19 nt, Artificial Sequence
  Description of Artificial Sequence: Synthetic oligonucleotide
caucggucucacuccagaa

SEQ ID NO: 519849 - RNA, 19 nt, Artificial Sequence
  Description of Artificial Sequence: Synthetic oligonucleotide
uccaggcuaugcagguauu

SEQ ID NO: 519850 - RNA, 19 nt, Artificial Sequence
  Description of Artificial Sequence: Synthetic oligonucleotide
cccaguagauaucagcaaa

SEQ ID NO: 519851 - RNA, 19 nt, Artificial Sequence
  Description of Artificial Sequence: Synthetic oligonucleotide
gagacuaguucucgugauu

SEQ ID NO: 519852 - RNA, 19 nt, Artificial Sequence
  Description of Artificial Sequence: Synthetic oligonucleotide
agcguccugggguggcugu

SEQ ID NO: 519853 - RNA, 19 nt, Artificial Sequence
  Description of Artificial Sequence: Synthetic oligonucleotide
guguuccauuccuggccug

SEQ ID NO: 519854 - RNA, 19 nt, Artificial Sequence
  Description of Artificial Sequence: Synthetic oligonucleotide
gguguuccauuccuggccu

SEQ ID NO: 519855 - RNA, 19 nt, Artificial Sequence
  Description of Artificial Sequence: Synthetic oligonucleotide
gacaaguguccacccaguu

SEQ ID NO: 519856 - RNA, 19 nt, Artificial Sequence
  Description of Artificial Sequence: Synthetic oligonucleotide
gcuaaccaucucccugagc

SEQ ID NO: 519857 - RNA, 19 nt, Artificial Sequence
  Description of Artificial Sequence: Synthetic oligonucleotide
ggguuaagaugcugaucca

SEQ ID NO: 519858 - RNA, 19 nt, Artificial Sequence
  Description of Artificial Sequence: Synthetic oligonucleotide
uugcgccuccgcaggcaga

SEQ ID NO: 519859 - RNA, 19 nt, Artificial Sequence
  Description of Artificial Sequence: Synthetic oligonucleotide
cacccugaugaaguucuca

SEQ ID NO: 519860 - RNA, 19 nt, Artificial Sequence
  Description of Artificial Sequence: Synthetic oligonucleotide
agcaccuauugggaugaua

SEQ ID NO: 519861 - RNA, 19 nt, Artificial Sequence
  Description of Artificial Sequence: Synthetic oligonucleotide
ggacauuggugugcuagga

SEQ ID NO: 519862 - RNA, 19 nt, Artificial Sequence
  Description of Artificial Sequence: Synthetic oligonucleotide
gcagagagccauuugccau

SEQ ID NO: 519863 - RNA, 19 nt, Artificial Sequence
  Description of Artificial Sequence: Synthetic oligonucleotide
gcaaauccuucagguaaac

SEQ ID NO: 519864 - RNA, 19 nt, Artificial Sequence
  Description of Artificial Sequence: Synthetic oligonucleotide
ggaggcaacccuuguacau

SEQ ID NO: 519865 - RNA, 19 nt, Artificial Sequence
  Description of Artificial Sequence: Synthetic oligonucleotide
guccaucgcagggaugcca

SEQ ID NO: 519866 - RNA, 19 nt, Artificial Sequence
  Description of Artificial Sequence: Synthetic oligonucleotide
cauuugccauguaggggua

SEQ ID NO: 519867 - RNA, 19 nt, Artificial Sequence
  Description of Artificial Sequence: Synthetic oligonucleotide
ccacuaaguccuuugccaa

SEQ ID NO: 519868 - RNA, 19 nt, Artificial Sequence
  Description of Artificial Sequence: Synthetic oligonucleotide
acggcugaccucggagcug

SEQ ID NO: 519869 - RNA, 19 nt, Artificial Sequence
  Description of Artificial Sequence: Synthetic oligonucleotide
cuggcggauggcuguacua

SEQ ID NO: 519870 - RNA, 19 nt, Artificial Sequence
  Description of Artificial Sequence: Synthetic oligonucleotide
guguaaguugagguccccu

SEQ ID NO: 519871 - RNA, 19 nt, Artificial Sequence
  Description of Artificial Sequence: Synthetic oligonucleotide
gaccucggagcugcuccac

SEQ ID NO: 519872 - RNA, 19 nt, Artificial Sequence
  Description of Artificial Sequence: Synthetic oligonucleotide
ggcuguacuauuccauuuu

SEQ ID NO: 519873 - RNA, 19 nt, Artificial Sequence
  Description of Artificial Sequence: Synthetic oligonucleotide
ggacuugagcuaaccaucu

SEQ ID NO: 519874 - RNA, 19 nt, Artificial Sequence
  Description of Artificial Sequence: Synthetic oligonucleotide
cauugcgccuccgcaggca

SEQ ID NO: 519875 - RNA, 19 nt, Artificial Sequence
  Description of Artificial Sequence: Synthetic oligonucleotide
gggauaccuuacaaggaua

SEQ ID NO: 519876 - RNA, 19 nt, Artificial Sequence
  Description of Artificial Sequence: Synthetic oligonucleotide
gcucggaaucucacuaaga

SEQ ID NO: 519877 - RNA, 19 nt, Artificial Sequence
  Description of Artificial Sequence: Synthetic oligonucleotide
agugagggccucagcuaau

SEQ ID NO: 519878 - RNA, 19 nt, Artificial Sequence
  Description of Artificial Sequence: Synthetic oligonucleotide
gacuucgauccuuguccau

SEQ ID NO: 519879 - RNA, 19 nt, Artificial Sequence
  Description of Artificial Sequence: Synthetic oligonucleotide
caacccugugcagaugcua

SEQ ID NO: 519880 - RNA, 19 nt, Artificial Sequence
  Description of Artificial Sequence: Synthetic oligonucleotide
guagcccggcucuccucuc

SEQ ID NO: 519881 - RNA, 19 nt, Artificial Sequence
  Description of Artificial Sequence: Synthetic oligonucleotide
caccuauugggaugauaau

SEQ ID NO: 519882 - RNA, 19 nt, Artificial Sequence
  Description of Artificial Sequence: Synthetic oligonucleotide
cuagcacgcuggggccagg

SEQ ID NO: 519883 - RNA, 19 nt, Artificial Sequence
  Description of Artificial Sequence: Synthetic oligonucleotide
cacucuuccacuggcggau

SEQ ID NO: 519884 - RNA, 19 nt, Artificial Sequence
  Description of Artificial Sequence: Synthetic oligonucleotide
gcggagaggaggcaacccu

SEQ ID NO: 519885 - RNA, 19 nt, Artificial Sequence
  Description of Artificial Sequence: Synthetic oligonucleotide
cuuuguagaguaggauguu

SEQ ID NO: 519886 - RNA, 19 nt, Artificial Sequence
  Description of Artificial Sequence: Synthetic oligonucleotide
ccugguauggaaggccaga

SEQ ID NO: 519887 - RNA, 19 nt, Artificial Sequence
  Description of Artificial Sequence: Synthetic oligonucleotide
ggaugauaaucaacaugau

SEQ ID NO: 519888 - RNA, 19 nt, Artificial Sequence
  Description of Artificial Sequence: Synthetic oligonucleotide
ccacccaguugaggaaaag

SEQ ID NO: 519889 - RNA, 19 nt, Artificial Sequence
  Description of Artificial Sequence: Synthetic oligonucleotide
cgccuccgcaggcagagac

SEQ ID NO: 519890 - RNA, 19 nt, Artificial Sequence
  Description of Artificial Sequence: Synthetic oligonucleotide
gagagccauuugccaugua

SEQ ID NO: 519891 - RNA, 19 nt, Artificial Sequence
  Description of Artificial Sequence: Synthetic oligonucleotide
ccuccguugcuuggaugac

SEQ ID NO: 519892 - RNA, 19 nt, Artificial Sequence
  Description of Artificial Sequence: Synthetic oligonucleotide
cguagcguccugggguggc

SEQ ID NO: 519893 - RNA, 19 nt, Artificial Sequence
  Description of Artificial Sequence: Synthetic oligonucleotide
guagcguccugggguggcu

SEQ ID NO: 519894 - RNA, 19 nt, Artificial Sequence
  Description of Artificial Sequence: Synthetic oligonucleotide
ccguugcuuggaugacauc

SEQ ID NO: 519895 - RNA, 19 nt, Artificial Sequence
  Description of Artificial Sequence: Synthetic oligonucleotide
ccaagcuggcauugcgccu

SEQ ID NO: 519896 - RNA, 19 nt, Artificial Sequence
  Description of Artificial Sequence: Synthetic oligonucleotide
gggccucagcuaauacaau

SEQ ID NO: 519897 - RNA, 19 nt, Artificial Sequence
  Description of Artificial Sequence: Synthetic oligonucleotide
ccaucgcagggaugccagu

SEQ ID NO: 519898 - RNA, 19 nt, Artificial Sequence
  Description of Artificial Sequence: Synthetic oligonucleotide
gccccacccugaugaaguu

SEQ ID NO: 519899 - RNA, 19 nt, Artificial Sequence
  Description of Artificial Sequence: Synthetic oligonucleotide
gcccggcucuccucuccau

SEQ ID NO: 519900 - RNA, 19 nt, Artificial Sequence
  Description of Artificial Sequence: Synthetic oligonucleotide
cagcaccuauugggaugau

SEQ ID NO: 519901 - RNA, 19 nt, Artificial Sequence
  Description of Artificial Sequence: Synthetic oligonucleotide
aauauuggggagcagguug

SEQ ID NO: 519902 - RNA, 19 nt, Artificial Sequence
  Description of Artificial Sequence: Synthetic oligonucleotide
aagaugcacagguuggugc

SEQ ID NO: 519903 - RNA, 19 nt, Artificial Sequence
  Description of Artificial Sequence: Synthetic oligonucleotide
agggaguagaguuugaagg

SEQ ID NO: 519904 - RNA, 19 nt, Artificial Sequence
  Description of Artificial Sequence: Synthetic oligonucleotide
aagcguuugcagcagacgg

SEQ ID NO: 519905 - RNA, 19 nt, Artificial Sequence
  Description of Artificial Sequence: Synthetic oligonucleotide
aaacgugucauuugggucu

SEQ ID NO: 519906 - RNA, 19 nt, Artificial Sequence
  Description of Artificial Sequence: Synthetic oligonucleotide
auauaggagaggcggaagc

SEQ ID NO: 519907 - RNA, 19 nt, Artificial Sequence
  Description of Artificial Sequence: Synthetic oligonucleotide
ugagcugaccguaggaugg

SEQ ID NO: 519908 - RNA, 19 nt, Artificial Sequence
  Description of Artificial Sequence: Synthetic oligonucleotide
ugcagugaagguccgaagg

SEQ ID NO: 519909 - RNA, 19 nt, Artificial Sequence
  Description of Artificial Sequence: Synthetic oligonucleotide
cuagccuccaauauugggg

SEQ ID NO: 519910 - RNA, 19 nt, Artificial Sequence
  Description of Artificial Sequence: Synthetic oligonucleotide
agagcuauaggcuugcaga

SEQ ID NO: 519911 - RNA, 19 nt, Artificial Sequence
  Description of Artificial Sequence: Synthetic oligonucleotide
uccacacucauccaccgcg

SEQ ID NO: 519912 - RNA, 19 nt, Artificial Sequence
  Description of Artificial Sequence: Synthetic oligonucleotide
uguugcaacgauccgcagg

SEQ ID NO: 519913 - RNA, 19 nt, Artificial Sequence
  Description of Artificial Sequence: Synthetic oligonucleotide
agaaagaacgcagaggcag

SEQ ID NO: 519914 - RNA, 19 nt, Artificial Sequence
  Description of Artificial Sequence: Synthetic oligonucleotide
uccaauauuggggagcagg

SEQ ID NO: 519915 - RNA, 19 nt, Artificial Sequence
  Description of Artificial Sequence: Synthetic oligonucleotide
aauggcuccggugaguggg

SEQ ID NO: 519916 - RNA, 19 nt, Artificial Sequence
  Description of Artificial Sequence: Synthetic oligonucleotide
aacaguuacccucauccga

SEQ ID NO: 519917 - RNA, 19 nt, Artificial Sequence
  Description of Artificial Sequence: Synthetic oligonucleotide
uguuuguaagaaagaacgc

SEQ ID NO: 519918 - RNA, 19 nt, Artificial Sequence
  Description of Artificial Sequence: Synthetic oligonucleotide
ucuaaacgugucauuuggg

SEQ ID NO: 519919 - RNA, 19 nt, Artificial Sequence
  Description of Artificial Sequence: Synthetic oligonucleotide
uggguugcgcuguagacgg

SEQ ID NO: 519920 - RNA, 19 nt, Artificial Sequence
  Description of Artificial Sequence: Synthetic oligonucleotide
aucggggcaacuuuucugg

SEQ ID NO: 519921 - RNA, 19 nt, Artificial Sequence
  Description of Artificial Sequence: Synthetic oligonucleotide
uuuccucggauauaggaga

SEQ ID NO: 519922 - RNA, 19 nt, Artificial Sequence
  Description of Artificial Sequence: Synthetic oligonucleotide
aacggaacucaucugucug

SEQ ID NO: 519923 - RNA, 19 nt, Artificial Sequence
  Description of Artificial Sequence: Synthetic oligonucleotide
cuuuccucggauauaggag

SEQ ID NO: 519924 - RNA, 19 nt, Artificial Sequence
  Description of Artificial Sequence: Synthetic oligonucleotide
caacuuuucugguuguugc

SEQ ID NO: 519925 - RNA, 19 nt, Artificial Sequence
  Description of Artificial Sequence: Synthetic oligonucleotide
gcugcaguaacacacggcg

SEQ ID NO: 519926 - RNA, 19 nt, Artificial Sequence
  Description of Artificial Sequence: Synthetic oligonucleotide
agcacggucugugaggucc

SEQ ID NO: 519927 - RNA, 19 nt, Artificial Sequence
  Description of Artificial Sequence: Synthetic oligonucleotide
ucaacgggagggaugagac

SEQ ID NO: 519928 - RNA, 19 nt, Artificial Sequence
  Description of Artificial Sequence: Synthetic oligonucleotide
ucuugggccaagcagggcu

SEQ ID NO: 519929 - RNA, 19 nt, Artificial Sequence
  Description of Artificial Sequence: Synthetic oligonucleotide
aguuacccucauccgagcc

SEQ ID NO: 519930 - RNA, 19 nt, Artificial Sequence
  Description of Artificial Sequence: Synthetic oligonucleotide
acgggaaaauccucaacgg

SEQ ID NO: 519931 - RNA, 19 nt, Artificial Sequence
  Description of Artificial Sequence: Synthetic oligonucleotide
cuugccguugucacaacgg

SEQ ID NO: 519932 - RNA, 19 nt, Artificial Sequence
  Description of Artificial Sequence: Synthetic oligonucleotide
auagucaucguaacccagc

SEQ ID NO: 519933 - RNA, 19 nt, Artificial Sequence
  Description of Artificial Sequence: Synthetic oligonucleotide
uguggagcgagcuccacug

SEQ ID NO: 519934 - RNA, 19 nt, Artificial Sequence
  Description of Artificial Sequence: Synthetic oligonucleotide
guagguggcauugaagccg

SEQ ID NO: 519935 - RNA, 19 nt, Artificial Sequence
  Description of Artificial Sequence: Synthetic oligonucleotide
gaacaguuacccucauccg

SEQ ID NO: 519936 - RNA, 19 nt, Artificial Sequence
  Description of Artificial Sequence: Synthetic oligonucleotide
uagcccuucaccugguagg

SEQ ID NO: 519937 - RNA, 19 nt, Artificial Sequence
  Description of Artificial Sequence: Synthetic oligonucleotide
ugguaagccacggugaggc

SEQ ID NO: 519938 - RNA, 19 nt, Artificial Sequence
  Description of Artificial Sequence: Synthetic oligonucleotide
aaagaacgcagaggcaggg

SEQ ID NO: 519939 - RNA, 19 nt, Artificial Sequence
  Description of Artificial Sequence: Synthetic oligonucleotide
agcgcuguggcucugagaa

SEQ ID NO: 519940 - RNA, 19 nt, Artificial Sequence
  Description of Artificial Sequence: Synthetic oligonucleotide
cagaguagcccacuggccg

SEQ ID NO: 519941 - RNA, 19 nt, Artificial Sequence
  Description of Artificial Sequence: Synthetic oligonucleotide
gagcuauaggcuugcagag

SEQ ID NO: 519942 - RNA, 19 nt, Artificial Sequence
  Description of Artificial Sequence: Synthetic oligonucleotide
agcguguggagcgagcucc

SEQ ID NO: 519943 - RNA, 19 nt, Artificial Sequence
  Description of Artificial Sequence: Synthetic oligonucleotide
ucauccaccgcguugcacu

SEQ ID NO: 519944 - RNA, 19 nt, Artificial Sequence
  Description of Artificial Sequence: Synthetic oligonucleotide
aucguaacccagccguagc

SEQ ID NO: 519945 - RNA, 19 nt, Artificial Sequence
  Description of Artificial Sequence: Synthetic oligonucleotide
ugcaacgauccgcaggugc

SEQ ID NO: 519946 - RNA, 19 nt, Artificial Sequence
  Description of Artificial Sequence: Synthetic oligonucleotide
aacuuuucugguuguugca

SEQ ID NO: 519947 - RNA, 19 nt, Artificial Sequence
  Description of Artificial Sequence: Synthetic oligonucleotide
agcgugguaagccacggug

SEQ ID NO: 519948 - RNA, 19 nt, Artificial Sequence
  Description of Artificial Sequence: Synthetic oligonucleotide
guuacccucauccgagccg

SEQ ID NO: 519949 - RNA, 19 nt, Artificial Sequence
  Description of Artificial Sequence: Synthetic oligonucleotide
uugcagaguagcccacugg

SEQ ID NO: 519950 - RNA, 19 nt, Artificial Sequence
  Description of Artificial Sequence: Synthetic oligonucleotide
aacucugccucuaaacgug

SEQ ID NO: 519951 - RNA, 19 nt, Artificial Sequence
  Description of Artificial Sequence: Synthetic oligonucleotide
aucgcggccacuugcacag

SEQ ID NO: 519952 - RNA, 19 nt, Artificial Sequence
  Description of Artificial Sequence: Synthetic oligonucleotide
uauaggcuugcagaguagc

SEQ ID NO: 519953 - RNA, 19 nt, Artificial Sequence
  Description of Artificial Sequence: Synthetic oligonucleotide
gaaagaacgcagaggcagg

SEQ ID NO: 519954 - RNA, 19 nt, Artificial Sequence
  Description of Artificial Sequence: Synthetic oligonucleotide
uaagccacggugaggcggc

SEQ ID NO: 519955 - RNA, 19 nt, Artificial Sequence
  Description of Artificial Sequence: Synthetic oligonucleotide
augagcugaccguaggaug

SEQ ID NO: 519956 - RNA, 19 nt, Artificial Sequence
  Description of Artificial Sequence: Synthetic oligonucleotide
gucacaacggaacucaucu

SEQ ID NO: 519957 - RNA, 19 nt, Artificial Sequence
  Description of Artificial Sequence: Synthetic oligonucleotide
gauauaggagaggcggaag

SEQ ID NO: 519958 - RNA, 19 nt, Artificial Sequence
  Description of Artificial Sequence: Synthetic oligonucleotide
auaggcuugcagaguagcc

SEQ ID NO: 519959 - RNA, 19 nt, Artificial Sequence
  Description of Artificial Sequence: Synthetic oligonucleotide
cacuugcacauagucaucg

SEQ ID NO: 519960 - RNA, 19 nt, Artificial Sequence
  Description of Artificial Sequence: Synthetic oligonucleotide
uccgcaggugcauagcaca

SEQ ID NO: 519961 - RNA, 19 nt, Artificial Sequence
  Description of Artificial Sequence: Synthetic oligonucleotide
cauagucaucguaacccag

SEQ ID NO: 519962 - RNA, 19 nt, Artificial Sequence
  Description of Artificial Sequence: Synthetic oligonucleotide
ccuaucaucucccucgccg

SEQ ID NO: 519963 - RNA, 19 nt, Artificial Sequence
  Description of Artificial Sequence: Synthetic oligonucleotide
guuugcagcagacgguccc

SEQ ID NO: 519964 - RNA, 19 nt, Artificial Sequence
  Description of Artificial Sequence: Synthetic oligonucleotide
cagggaguagaguuugaag

SEQ ID NO: 519965 - RNA, 19 nt, Artificial Sequence
  Description of Artificial Sequence: Synthetic oligonucleotide
agcgcccaggcuuuccacc

SEQ ID NO: 519966 - RNA, 19 nt, Artificial Sequence
  Description of Artificial Sequence: Synthetic oligonucleotide
uguagacgggaaaauccuc

SEQ ID NO: 519967 - RNA, 19 nt, Artificial Sequence
  Description of Artificial Sequence: Synthetic oligonucleotide
auauuggggagcagguugg

SEQ ID NO: 519968 - RNA, 19 nt, Artificial Sequence
  Description of Artificial Sequence: Synthetic oligonucleotide
accggcagcguguggagcg

SEQ ID NO: 519969 - RNA, 19 nt, Artificial Sequence
  Description of Artificial Sequence: Synthetic oligonucleotide
uggcauugaagccgugacc

SEQ ID NO: 519970 - RNA, 19 nt, Artificial Sequence
  Description of Artificial Sequence: Synthetic oligonucleotide
ucaaccggcagcgugugga

SEQ ID NO: 519971 - RNA, 19 nt, Artificial Sequence
  Description of Artificial Sequence: Synthetic oligonucleotide
cagacgguccccacgcucg

SEQ ID NO: 519972 - RNA, 19 nt, Artificial Sequence
  Description of Artificial Sequence: Synthetic oligonucleotide
cuugcagguucaagggcgg

SEQ ID NO: 519973 - RNA, 19 nt, Artificial Sequence
  Description of Artificial Sequence: Synthetic oligonucleotide
ugcgguaggaaagcguuug

SEQ ID NO: 519974 - RNA, 19 nt, Artificial Sequence
  Description of Artificial Sequence: Synthetic oligonucleotide
guaagccacggugaggcgg

SEQ ID NO: 519975 - RNA, 19 nt, Artificial Sequence
  Description of Artificial Sequence: Synthetic oligonucleotide
uugccguugucacaacgga

SEQ ID NO: 519976 - RNA, 19 nt, Artificial Sequence
  Description of Artificial Sequence: Synthetic oligonucleotide
uucaucgcggccacuugca

SEQ ID NO: 519977 - RNA, 19 nt, Artificial Sequence
  Description of Artificial Sequence: Synthetic oligonucleotide
cucggauauaggagaggcg

SEQ ID NO: 519978 - RNA, 19 nt, Artificial Sequence
  Description of Artificial Sequence: Synthetic oligonucleotide
guagcccuucaccugguag

SEQ ID NO: 519979 - RNA, 19 nt, Artificial Sequence
  Description of Artificial Sequence: Synthetic oligonucleotide
gucaucguaacccagccgu

SEQ ID NO: 519980 - RNA, 19 nt, Artificial Sequence
  Description of Artificial Sequence: Synthetic oligonucleotide
gcgacaagcugccuggugg

SEQ ID NO: 519981 - RNA, 19 nt, Artificial Sequence
  Description of Artificial Sequence: Synthetic oligonucleotide
aggcgaccgagccugcggc

SEQ ID NO: 519982 - RNA, 19 nt, Artificial Sequence
  Description of Artificial Sequence: Synthetic oligonucleotide
cauugaagccgugaccagc

SEQ ID NO: 519983 - RNA, 19 nt, Artificial Sequence
  Description of Artificial Sequence: Synthetic oligonucleotide
aaauccucaacgggaggga

SEQ ID NO: 519984 - RNA, 19 nt, Artificial Sequence
  Description of Artificial Sequence: Synthetic oligonucleotide
ucaucggcgccaucggggc

SEQ ID NO: 519985 - RNA, 19 nt, Artificial Sequence
  Description of Artificial Sequence: Synthetic oligonucleotide
aacgugucauuugggucuc

SEQ ID NO: 519986 - RNA, 19 nt, Artificial Sequence
  Description of Artificial Sequence: Synthetic oligonucleotide
aaagcgggcuguggcaguc

SEQ ID NO: 519987 - RNA, 19 nt, Artificial Sequence
  Description of Artificial Sequence: Synthetic oligonucleotide
guugcaacgauccgcaggu

SEQ ID NO: 519988 - RNA, 19 nt, Artificial Sequence
  Description of Artificial Sequence: Synthetic oligonucleotide
cacagcgccucucaaccgg

SEQ ID NO: 519989 - RNA, 19 nt, Artificial Sequence
  Description of Artificial Sequence: Synthetic oligonucleotide
uguguauucccugguuaca

SEQ ID NO: 519990 - RNA, 19 nt, Artificial Sequence
  Description of Artificial Sequence: Synthetic oligonucleotide
aucgucacuagccuccaau

SEQ ID NO: 519991 - RNA, 19 nt, Artificial Sequence
  Description of Artificial Sequence: Synthetic oligonucleotide
gagcgagcuccacugcacg

SEQ ID NO: 519992 - RNA, 19 nt, Artificial Sequence
  Description of Artificial Sequence: Synthetic oligonucleotide
cagagcuauaggcuugcag

SEQ ID NO: 519993 - RNA, 19 nt, Artificial Sequence
  Description of Artificial Sequence: Synthetic oligonucleotide
uggucacgggccgagauga

SEQ ID NO: 519994 - RNA, 19 nt, Artificial Sequence
  Description of Artificial Sequence: Synthetic oligonucleotide
guucaucgcggccacuugc

SEQ ID NO: 519995 - RNA, 19 nt, Artificial Sequence
  Description of Artificial Sequence: Synthetic oligonucleotide
acaacggaacucaucuguc

SEQ ID NO: 519996 - RNA, 19 nt, Artificial Sequence
  Description of Artificial Sequence: Synthetic oligonucleotide
uggagcgagcuccacugca

SEQ ID NO: 519997 - RNA, 19 nt, Artificial Sequence
  Description of Artificial Sequence: Synthetic oligonucleotide
agcccuguucaucgcggcc

SEQ ID NO: 519998 - RNA, 19 nt, Artificial Sequence
  Description of Artificial Sequence: Synthetic oligonucleotide
gaaggcaguagcccuucac

SEQ ID NO: 519999 - RNA, 19 nt, Artificial Sequence
  Description of Artificial Sequence: Synthetic oligonucleotide
ugcgcgaugagcugaccgu

SEQ ID NO: 520000 - RNA, 19 nt, Artificial Sequence
  Description of Artificial Sequence: Synthetic oligonucleotide
uguucaucgcggccacuug

SEQ ID NO: 520001 - RNA, 19 nt, Artificial Sequence
  Description of Artificial Sequence: Synthetic oligonucleotide
gauacuggucuggagggca

SEQ ID NO: 520002 - RNA, 19 nt, Artificial Sequence
  Description of Artificial Sequence: Synthetic oligonucleotide
uguacuccugcgugcgcag

SEQ ID NO: 520003 - RNA, 19 nt, Artificial Sequence
  Description of Artificial Sequence: Synthetic oligonucleotide
ucacagcgccucucaaccg

SEQ ID NO: 520004 - RNA, 19 nt, Artificial Sequence
  Description of Artificial Sequence: Synthetic oligonucleotide
gaacgcagaggcaggguag

SEQ ID NO: 520005 - RNA, 19 nt, Artificial Sequence
  Description of Artificial Sequence: Synthetic oligonucleotide
gguuguugcaacgauccgc

SEQ ID NO: 520006 - RNA, 19 nt, Artificial Sequence
  Description of Artificial Sequence: Synthetic oligonucleotide
ucacaacggaacucaucug

SEQ ID NO: 520007 - RNA, 19 nt, Artificial Sequence
  Description of Artificial Sequence: Synthetic oligonucleotide
acaggccggugguugcugc

SEQ ID NO: 520008 - RNA, 19 nt, Artificial Sequence
  Description of Artificial Sequence: Synthetic oligonucleotide
uucugguuguugcaacgau

SEQ ID NO: 520009 - RNA, 19 nt, Artificial Sequence
  Description of Artificial Sequence: Synthetic oligonucleotide
ggggcaacuuuucugguug

SEQ ID NO: 520010 - RNA, 19 nt, Artificial Sequence
  Description of Artificial Sequence: Synthetic oligonucleotide
cugcgcgaugagcugaccg

SEQ ID NO: 520011 - RNA, 19 nt, Artificial Sequence
  Description of Artificial Sequence: Synthetic oligonucleotide
guagacgggaaaauccuca

SEQ ID NO: 520012 - RNA, 19 nt, Artificial Sequence
  Description of Artificial Sequence: Synthetic oligonucleotide
acggaacucaucugucuga

SEQ ID NO: 520013 - RNA, 19 nt, Artificial Sequence
  Description of Artificial Sequence: Synthetic oligonucleotide
aagguccgaaggcccgcgg

SEQ ID NO: 520014 - RNA, 19 nt, Artificial Sequence
  Description of Artificial Sequence: Synthetic oligonucleotide
cguugcacugccaaggacc

SEQ ID NO: 520015 - RNA, 19 nt, Artificial Sequence
  Description of Artificial Sequence: Synthetic oligonucleotide
ggcauugaagccgugacca

SEQ ID NO: 520016 - RNA, 19 nt, Artificial Sequence
  Description of Artificial Sequence: Synthetic oligonucleotide
acuggccgagcgcccaggc

SEQ ID NO: 520017 - RNA, 19 nt, Artificial Sequence
  Description of Artificial Sequence: Synthetic oligonucleotide
aaccggcagcguguggagc

SEQ ID NO: 520018 - RNA, 19 nt, Artificial Sequence
  Description of Artificial Sequence: Synthetic oligonucleotide
acgauccgcaggugcauag

SEQ ID NO: 520019 - RNA, 19 nt, Artificial Sequence
  Description of Artificial Sequence: Synthetic oligonucleotide
ugcugcgguaggaaagcgu

SEQ ID NO: 520020 - RNA, 19 nt, Artificial Sequence
  Description of Artificial Sequence: Synthetic oligonucleotide
agguccgaaggcccgcggg

SEQ ID NO: 520021 - RNA, 19 nt, Artificial Sequence
  Description of Artificial Sequence: Synthetic oligonucleotide
ucgucacuagccuccaaua

SEQ ID NO: 520022 - RNA, 19 nt, Artificial Sequence
  Description of Artificial Sequence: Synthetic oligonucleotide
ggaaccauagaagcugccc

SEQ ID NO: 520023 - RNA, 19 nt, Artificial Sequence
  Description of Artificial Sequence: Synthetic oligonucleotide
agaggcgaaaagccuccug

SEQ ID NO: 520024 - RNA, 19 nt, Artificial Sequence
  Description of Artificial Sequence: Synthetic oligonucleotide
cugagugaaagaagaucca

SEQ ID NO: 520025 - RNA, 19 nt, Artificial Sequence
  Description of Artificial Sequence: Synthetic oligonucleotide
aagccgugaccagcacugc

SEQ ID NO: 520026 - RNA, 19 nt, Artificial Sequence
  Description of Artificial Sequence: Synthetic oligonucleotide
caugugcagugaagguccg

SEQ ID NO: 520027 - RNA, 19 nt, Artificial Sequence
  Description of Artificial Sequence: Synthetic oligonucleotide
ggaggcgucugagugaaag

SEQ ID NO: 520028 - RNA, 19 nt, Artificial Sequence
  Description of Artificial Sequence: Synthetic oligonucleotide
ccugggucccgucacagcg

SEQ ID NO: 520029 - RNA, 19 nt, Artificial Sequence
  Description of Artificial Sequence: Synthetic oligonucleotide
ugucuguguggggugccgg

SEQ ID NO: 520030 - RNA, 19 nt, Artificial Sequence
  Description of Artificial Sequence: Synthetic oligonucleotide
uccggcacguggccaaggc

SEQ ID NO: 520031 - RNA, 19 nt, Artificial Sequence
  Description of Artificial Sequence: Synthetic oligonucleotide
ugccguugucacaacggaa

SEQ ID NO: 520032 - RNA, 19 nt, Artificial Sequence
  Description of Artificial Sequence: Synthetic oligonucleotide
auggucacgggccgagaug

SEQ ID NO: 520033 - RNA, 19 nt, Artificial Sequence
  Description of Artificial Sequence: Synthetic oligonucleotide
agacccugcgcgaugagcu

SEQ ID NO: 520034 - RNA, 19 nt, Artificial Sequence
  Description of Artificial Sequence: Synthetic oligonucleotide
caucguaacccagccguag

SEQ ID NO: 520035 - RNA, 19 nt, Artificial Sequence
  Description of Artificial Sequence: Synthetic oligonucleotide
acuugcacauagucaucgu

SEQ ID NO: 520036 - RNA, 19 nt, Artificial Sequence
  Description of Artificial Sequence: Synthetic oligonucleotide
aacgcagaggcaggguaga

SEQ ID NO: 520037 - RNA, 19 nt, Artificial Sequence
  Description of Artificial Sequence: Synthetic oligonucleotide
accgggaggaggcccaucu

SEQ ID NO: 520038 - RNA, 19 nt, Artificial Sequence
  Description of Artificial Sequence: Synthetic oligonucleotide
gucuguguggggugccggg

SEQ ID NO: 520039 - RNA, 19 nt, Artificial Sequence
  Description of Artificial Sequence: Synthetic oligonucleotide
agacgguccccacgcucgc

SEQ ID NO: 520040 - RNA, 19 nt, Artificial Sequence
  Description of Artificial Sequence: Synthetic oligonucleotide
ggaucuggccucgaggugc

SEQ ID NO: 520041 - RNA, 19 nt, Artificial Sequence
  Description of Artificial Sequence: Synthetic oligonucleotide
agcgggcuguggcagucac

SEQ ID NO: 520042 - RNA, 19 nt, Artificial Sequence
  Description of Artificial Sequence: Synthetic oligonucleotide
guagaaaggacuguguauu

SEQ ID NO: 520043 - RNA, 19 nt, Artificial Sequence
  Description of Artificial Sequence: Synthetic oligonucleotide
aauccucaacgggagggau

SEQ ID NO: 520044 - RNA, 19 nt, Artificial Sequence
  Description of Artificial Sequence: Synthetic oligonucleotide
gaagguccgaaggcccgcg

SEQ ID NO: 520045 - RNA, 19 nt, Artificial Sequence
  Description of Artificial Sequence: Synthetic oligonucleotide
gcuaggucggggcagccag

SEQ ID NO: 520046 - RNA, 19 nt, Artificial Sequence
  Description of Artificial Sequence: Synthetic oligonucleotide
gcacauagucaucguaacc

SEQ ID NO: 520047 - RNA, 19 nt, Artificial Sequence
  Description of Artificial Sequence: Synthetic oligonucleotide
gaggcgaaggaaccauaga

SEQ ID NO: 520048 - RNA, 19 nt, Artificial Sequence
  Description of Artificial Sequence: Synthetic oligonucleotide
uccuaucaucucccucgcc

SEQ ID NO: 520049 - RNA, 19 nt, Artificial Sequence
  Description of Artificial Sequence: Synthetic oligonucleotide
ugaccagcacugcgggcgc

SEQ ID NO: 520050 - RNA, 19 nt, Artificial Sequence
  Description of Artificial Sequence: Synthetic oligonucleotide
ggcgagguggagcugccgg

SEQ ID NO: 520051 - RNA, 19 nt, Artificial Sequence
  Description of Artificial Sequence: Synthetic oligonucleotide
gaaaagccuccuggcgagg

SEQ ID NO: 520052 - RNA, 19 nt, Artificial Sequence
  Description of Artificial Sequence: Synthetic oligonucleotide
auggcgacgcaucugccuu

SEQ ID NO: 520053 - RNA, 19 nt, Artificial Sequence
  Description of Artificial Sequence: Synthetic oligonucleotide
uacuggucuggagggcacg

SEQ ID NO: 520054 - RNA, 19 nt, Artificial Sequence
  Description of Artificial Sequence: Synthetic oligonucleotide
augcacagguuggugccac

SEQ ID NO: 520055 - RNA, 19 nt, Artificial Sequence
  Description of Artificial Sequence: Synthetic oligonucleotide
gggcugaacaguuacccuc

SEQ ID NO: 520056 - RNA, 19 nt, Artificial Sequence
  Description of Artificial Sequence: Synthetic oligonucleotide
caacgggagggaugagacc

SEQ ID NO: 520057 - RNA, 19 nt, Artificial Sequence
  Description of Artificial Sequence: Synthetic oligonucleotide
ccucggauauaggagaggc

SEQ ID NO: 520058 - RNA, 19 nt, Artificial Sequence
  Description of Artificial Sequence: Synthetic oligonucleotide
aggcgucugagugaaagaa

SEQ ID NO: 520059 - RNA, 19 nt, Artificial Sequence
  Description of Artificial Sequence: Synthetic oligonucleotide
accgcguugcacugccaag

SEQ ID NO: 520060 - RNA, 19 nt, Artificial Sequence
  Description of Artificial Sequence: Synthetic oligonucleotide
auacuggucuggagggcac

SEQ ID NO: 520061 - RNA, 19 nt, Artificial Sequence
  Description of Artificial Sequence: Synthetic oligonucleotide
gaggcgucugagugaaaga

SEQ ID NO: 520062 - RNA, 19 nt, Artificial Sequence
  Description of Artificial Sequence: Synthetic oligonucleotide
agcgccucucaaccggcag

SEQ ID NO: 520063 - RNA, 19 nt, Artificial Sequence
  Description of Artificial Sequence: Synthetic oligonucleotide
ucaucgcggccacuugcac

SEQ ID NO: 520064 - RNA, 19 nt, Artificial Sequence
  Description of Artificial Sequence: Synthetic oligonucleotide
cucgcccagccccucauac

SEQ ID NO: 520065 - RNA, 19 nt, Artificial Sequence
  Description of Artificial Sequence: Synthetic oligonucleotide
auccgcaggugcauagcac

SEQ ID NO: 520066 - RNA, 19 nt, Artificial Sequence
  Description of Artificial Sequence: Synthetic oligonucleotide
ucaagggcggagguggcau

SEQ ID NO: 520067 - RNA, 19 nt, Artificial Sequence
  Description of Artificial Sequence: Synthetic oligonucleotide
aucgcagcgccaugucuca

SEQ ID NO: 520068 - RNA, 19 nt, Artificial Sequence
  Description of Artificial Sequence: Synthetic oligonucleotide
acagcgccucucaaccggc

SEQ ID NO: 520069 - RNA, 19 nt, Artificial Sequence
  Description of Artificial Sequence: Synthetic oligonucleotide
gccgagaugaaggcgggcg

SEQ ID NO: 520070 - RNA, 19 nt, Artificial Sequence
  Description of Artificial Sequence: Synthetic oligonucleotide
caguuacccucauccgagc

SEQ ID NO: 520071 - RNA, 19 nt, Artificial Sequence
  Description of Artificial Sequence: Synthetic oligonucleotide
caugcuaggucggggcagc

SEQ ID NO: 520072 - RNA, 19 nt, Artificial Sequence
  Description of Artificial Sequence: Synthetic oligonucleotide
ggcgggauggaccccugcg

SEQ ID NO: 520073 - RNA, 19 nt, Artificial Sequence
  Description of Artificial Sequence: Synthetic oligonucleotide
gugguaagccacggugagg

SEQ ID NO: 520074 - RNA, 19 nt, Artificial Sequence
  Description of Artificial Sequence: Synthetic oligonucleotide
agcgggaucuggccucgag

SEQ ID NO: 520075 - RNA, 19 nt, Artificial Sequence
  Description of Artificial Sequence: Synthetic oligonucleotide
uugcgcuguagacgggaaa

SEQ ID NO: 520076 - RNA, 19 nt, Artificial Sequence
  Description of Artificial Sequence: Synthetic oligonucleotide
agcuauaggcuugcagagu

SEQ ID NO: 520077 - RNA, 19 nt, Artificial Sequence
  Description of Artificial Sequence: Synthetic oligonucleotide
gccguugucacaacggaac

SEQ ID NO: 520078 - RNA, 19 nt, Artificial Sequence
  Description of Artificial Sequence: Synthetic oligonucleotide
ugguuacaaagcgggcugu

SEQ ID NO: 520079 - RNA, 19 nt, Artificial Sequence
  Description of Artificial Sequence: Synthetic oligonucleotide
ucucaaccggcagcgugug

SEQ ID NO: 520080 - RNA, 19 nt, Artificial Sequence
  Description of Artificial Sequence: Synthetic oligonucleotide
caaccggcagcguguggag

SEQ ID NO: 520081 - RNA, 19 nt, Artificial Sequence
  Description of Artificial Sequence: Synthetic oligonucleotide
ccacaugcuaggucggggc

SEQ ID NO: 520082 - RNA, 19 nt, Artificial Sequence
  Description of Artificial Sequence: Synthetic oligonucleotide
agggcggcggugaugaccu

SEQ ID NO: 520083 - RNA, 19 nt, Artificial Sequence
  Description of Artificial Sequence: Synthetic oligonucleotide
gaucuggccucgaggugcc

SEQ ID NO: 520084 - RNA, 19 nt, Artificial Sequence
  Description of Artificial Sequence: Synthetic oligonucleotide
gcgaugagcugaccguagg

SEQ ID NO: 520085 - RNA, 19 nt, Artificial Sequence
  Description of Artificial Sequence: Synthetic oligonucleotide
acgcaucugccuucucaug

SEQ ID NO: 520086 - RNA, 19 nt, Artificial Sequence
  Description of Artificial Sequence: Synthetic oligonucleotide
ccucuaaacgugucauuug

SEQ ID NO: 520087 - RNA, 19 nt, Artificial Sequence
  Description of Artificial Sequence: Synthetic oligonucleotide
gcgucugagugaaagaaga

SEQ ID NO: 520088 - RNA, 19 nt, Artificial Sequence
  Description of Artificial Sequence: Synthetic oligonucleotide
gacccugcgcgaugagcug

SEQ ID NO: 520089 - RNA, 19 nt, Artificial Sequence
  Description of Artificial Sequence: Synthetic oligonucleotide
caccagcguguccaauggg

SEQ ID NO: 520090 - RNA, 19 nt, Artificial Sequence
  Description of Artificial Sequence: Synthetic oligonucleotide
ugcgggaggcauggcgacg

SEQ ID NO: 520091 - RNA, 19 nt, Artificial Sequence
  Description of Artificial Sequence: Synthetic oligonucleotide
cuaggucggggcagccagc

SEQ ID NO: 520092 - RNA, 19 nt, Artificial Sequence
  Description of Artificial Sequence: Synthetic oligonucleotide
ggcgggauggcugagccac

SEQ ID NO: 520093 - RNA, 19 nt, Artificial Sequence
  Description of Artificial Sequence: Synthetic oligonucleotide
gucacuagccuccaauauu

SEQ ID NO: 520094 - RNA, 19 nt, Artificial Sequence
  Description of Artificial Sequence: Synthetic oligonucleotide
agcugaccguaggaugggg

SEQ ID NO: 520095 - RNA, 19 nt, Artificial Sequence
  Description of Artificial Sequence: Synthetic oligonucleotide
ucggggcaacuuuucuggu

SEQ ID NO: 520096 - RNA, 19 nt, Artificial Sequence
  Description of Artificial Sequence: Synthetic oligonucleotide
agcguuugcagcagacggu

SEQ ID NO: 520097 - RNA, 19 nt, Artificial Sequence
  Description of Artificial Sequence: Synthetic oligonucleotide
ggcgucugagugaaagaag

SEQ ID NO: 520098 - RNA, 19 nt, Artificial Sequence
  Description of Artificial Sequence: Synthetic oligonucleotide
cucaacgggagggaugaga

SEQ ID NO: 520099 - RNA, 19 nt, Artificial Sequence
  Description of Artificial Sequence: Synthetic oligonucleotide
gaguagcccacuggccgag

SEQ ID NO: 520100 - RNA, 19 nt, Artificial Sequence
  Description of Artificial Sequence: Synthetic oligonucleotide
gccgugaccagcacugcgg

SEQ ID NO: 520101 - RNA, 19 nt, Artificial Sequence
  Description of Artificial Sequence: Synthetic oligonucleotide
cagccgugcucaucacugc

SEQ ID NO: 520102 - RNA, 19 nt, Artificial Sequence
  Description of Artificial Sequence: Synthetic oligonucleotide
caucgcggccacuugcaca

SEQ ID NO: 520103 - RNA, 19 nt, Artificial Sequence
  Description of Artificial Sequence: Synthetic oligonucleotide
cgaaaagccuccuggcgag

SEQ ID NO: 520104 - RNA, 19 nt, Artificial Sequence
  Description of Artificial Sequence: Synthetic oligonucleotide
cgggccgagaugaaggcgg

SEQ ID NO: 520105 - RNA, 19 nt, Artificial Sequence
  Description of Artificial Sequence: Synthetic oligonucleotide
ugcgugcgcagggaguaga

SEQ ID NO: 520106 - RNA, 19 nt, Artificial Sequence
  Description of Artificial Sequence: Synthetic oligonucleotide
caggccggugguugcugcg

SEQ ID NO: 520107 - RNA, 19 nt, Artificial Sequence
  Description of Artificial Sequence: Synthetic oligonucleotide
ggugcauagcacaggccgc

SEQ ID NO: 520108 - RNA, 19 nt, Artificial Sequence
  Description of Artificial Sequence: Synthetic oligonucleotide
ugccucuaaacgugucauu

SEQ ID NO: 520109 - RNA, 19 nt, Artificial Sequence
  Description of Artificial Sequence: Synthetic oligonucleotide
ugcagcagacgguccccac

SEQ ID NO: 520110 - RNA, 19 nt, Artificial Sequence
  Description of Artificial Sequence: Synthetic oligonucleotide
cugcaguaacacacggcga

SEQ ID NO: 520111 - RNA, 19 nt, Artificial Sequence
  Description of Artificial Sequence: Synthetic oligonucleotide
cacccucgcagggauacug

SEQ ID NO: 520112 - RNA, 19 nt, Artificial Sequence
  Description of Artificial Sequence: Synthetic oligonucleotide
gcgccgaacaggucugggg

SEQ ID NO: 520113 - RNA, 19 nt, Artificial Sequence
  Description of Artificial Sequence: Synthetic oligonucleotide
gagaugaaggcgggcggga

SEQ ID NO: 520114 - RNA, 19 nt, Artificial Sequence
  Description of Artificial Sequence: Synthetic oligonucleotide
acccucgcagggauacugg

SEQ ID NO: 520115 - RNA, 19 nt, Artificial Sequence
  Description of Artificial Sequence: Synthetic oligonucleotide
gcauugaagccgugaccag

SEQ ID NO: 520116 - RNA, 19 nt, Artificial Sequence
  Description of Artificial Sequence: Synthetic oligonucleotide
agcgccgaacaggucuggg

SEQ ID NO: 520117 - RNA, 19 nt, Artificial Sequence
  Description of Artificial Sequence: Synthetic oligonucleotide
cacaugcuaggucggggca

SEQ ID NO: 520118 - RNA, 19 nt, Artificial Sequence
  Description of Artificial Sequence: Synthetic oligonucleotide
ugcuaggucggggcagcca

SEQ ID NO: 520119 - RNA, 19 nt, Artificial Sequence
  Description of Artificial Sequence: Synthetic oligonucleotide
aacgauccgcaggugcaua

SEQ ID NO: 520120 - RNA, 19 nt, Artificial Sequence
  Description of Artificial Sequence: Synthetic oligonucleotide
aggccggugguugcugcgg

SEQ ID NO: 520121 - RNA, 19 nt, Artificial Sequence
  Description of Artificial Sequence: Synthetic oligonucleotide
guggagcgagcuccacugc

SEQ ID NO: 520122 - RNA, 19 nt, Artificial Sequence
  Description of Artificial Sequence: Synthetic oligonucleotide
cuccugcgugcgcagggag

SEQ ID NO: 520123 - RNA, 19 nt, Artificial Sequence
  Description of Artificial Sequence: Synthetic oligonucleotide
uuccggcacguggccaagg

SEQ ID NO: 520124 - RNA, 19 nt, Artificial Sequence
  Description of Artificial Sequence: Synthetic oligonucleotide
gccgaacaggucuggggag

SEQ ID NO: 520125 - RNA, 19 nt, Artificial Sequence
  Description of Artificial Sequence: Synthetic oligonucleotide
cucaaccggcagcgugugg

SEQ ID NO: 520126 - RNA, 19 nt, Artificial Sequence
  Description of Artificial Sequence: Synthetic oligonucleotide
ccuccggccacaugcuagg

SEQ ID NO: 520127 - RNA, 19 nt, Artificial Sequence
  Description of Artificial Sequence: Synthetic oligonucleotide
uccccacgcucgcccagcc

SEQ ID NO: 520128 - RNA, 19 nt, Artificial Sequence
  Description of Artificial Sequence: Synthetic oligonucleotide
uccgagccgucuccacacu

SEQ ID NO: 520129 - RNA, 19 nt, Artificial Sequence
  Description of Artificial Sequence: Synthetic oligonucleotide
caacggaacucaucugucu

SEQ ID NO: 520130 - RNA, 19 nt, Artificial Sequence
  Description of Artificial Sequence: Synthetic oligonucleotide
ccgagaugaaggcgggcgg

SEQ ID NO: 520131 - RNA, 19 nt, Artificial Sequence
  Description of Artificial Sequence: Synthetic oligonucleotide
cuguacuccugcgugcgca

SEQ ID NO: 520132 - RNA, 19 nt, Artificial Sequence
  Description of Artificial Sequence: Synthetic oligonucleotide
guacuccugcgugcgcagg

SEQ ID NO: 520133 - RNA, 19 nt, Artificial Sequence
  Description of Artificial Sequence: Synthetic oligonucleotide
ugcggcgggauggaccccu

SEQ ID NO: 520134 - RNA, 19 nt, Artificial Sequence
  Description of Artificial Sequence: Synthetic oligonucleotide
ccuagggcgaugaccagca

SEQ ID NO: 520135 - RNA, 19 nt, Artificial Sequence
  Description of Artificial Sequence: Synthetic oligonucleotide
ggugaggcggcccugugcu

SEQ ID NO: 520136 - RNA, 19 nt, Artificial Sequence
  Description of Artificial Sequence: Synthetic oligonucleotide
ccaaugggucagcagacca

SEQ ID NO: 520137 - RNA, 19 nt, Artificial Sequence
  Description of Artificial Sequence: Synthetic oligonucleotide
gugagguccucgcagccgu

SEQ ID NO: 520138 - RNA, 19 nt, Artificial Sequence
  Description of Artificial Sequence: Synthetic oligonucleotide
ccucucaaccggcagcgug

SEQ ID NO: 520139 - RNA, 19 nt, Artificial Sequence
  Description of Artificial Sequence: Synthetic oligonucleotide
uggccaucgcagcgccaug

SEQ ID NO: 520140 - RNA, 19 nt, Artificial Sequence
  Description of Artificial Sequence: Synthetic oligonucleotide
auggcuccggugagugggg

SEQ ID NO: 520141 - RNA, 19 nt, Artificial Sequence
  Description of Artificial Sequence: Synthetic oligonucleotide
cgugguaagccacggugag

SEQ ID NO: 520142 - RNA, 19 nt, Artificial Sequence
  Description of Artificial Sequence: Synthetic oligonucleotide
uggcgagguggagcugccg

SEQ ID NO: 520143 - RNA, 19 nt, Artificial Sequence
  Description of Artificial Sequence: Synthetic oligonucleotide
gcaacgauccgcaggugca

SEQ ID NO: 520144 - RNA, 19 nt, Artificial Sequence
  Description of Artificial Sequence: Synthetic oligonucleotide
cuagggcgaugaccagcag

SEQ ID NO: 520145 - RNA, 19 nt, Artificial Sequence
  Description of Artificial Sequence: Synthetic oligonucleotide
ggaaagcguuugcagcaga

SEQ ID NO: 520146 - RNA, 19 nt, Artificial Sequence
  Description of Artificial Sequence: Synthetic oligonucleotide
ccgcguugcacugccaagg

SEQ ID NO: 520147 - RNA, 19 nt, Artificial Sequence
  Description of Artificial Sequence: Synthetic oligonucleotide
ccgugaccagcacugcggg

SEQ ID NO: 520148 - RNA, 19 nt, Artificial Sequence
  Description of Artificial Sequence: Synthetic oligonucleotide
uggcgacgcaucugccuuc

SEQ ID NO: 520149 - RNA, 19 nt, Artificial Sequence
  Description of Artificial Sequence: Synthetic oligonucleotide
cgggcgacaagcugccugg

SEQ ID NO: 520150 - RNA, 19 nt, Artificial Sequence
  Description of Artificial Sequence: Synthetic oligonucleotide
gcucacaggccggugguug

SEQ ID NO: 520151 - RNA, 19 nt, Artificial Sequence
  Description of Artificial Sequence: Synthetic oligonucleotide
gcguuugcagcagacgguc

SEQ ID NO: 520152 - RNA, 19 nt, Artificial Sequence
  Description of Artificial Sequence: Synthetic oligonucleotide
cacggcugcucccacggaa

SEQ ID NO: 520153 - RNA, 19 nt, Artificial Sequence
  Description of Artificial Sequence: Synthetic oligonucleotide
gccccucauacacuugcac

SEQ ID NO: 520154 - RNA, 19 nt, Artificial Sequence
  Description of Artificial Sequence: Synthetic oligonucleotide
ggcgaccgagccugcggcg

SEQ ID NO: 520155 - RNA, 19 nt, Artificial Sequence
  Description of Artificial Sequence: Synthetic oligonucleotide
acccugcgcgaugagcuga

SEQ ID NO: 520156 - RNA, 19 nt, Artificial Sequence
  Description of Artificial Sequence: Synthetic oligonucleotide
ccgcgcuccuaucaucucc

SEQ ID NO: 520157 - RNA, 19 nt, Artificial Sequence
  Description of Artificial Sequence: Synthetic oligonucleotide
ggagcgagcuccacugcac

SEQ ID NO: 520158 - RNA, 19 nt, Artificial Sequence
  Description of Artificial Sequence: Synthetic oligonucleotide
gguugcgcuguagacggga

SEQ ID NO: 520159 - RNA, 19 nt, Artificial Sequence
  Description of Artificial Sequence: Synthetic oligonucleotide
ugccgucuuggcaguccuc

SEQ ID NO: 520160 - RNA, 19 nt, Artificial Sequence
  Description of Artificial Sequence: Synthetic oligonucleotide
gcgagcgugguaagccacg

SEQ ID NO: 520161 - RNA, 19 nt, Artificial Sequence
  Description of Artificial Sequence: Synthetic oligonucleotide
cccugguuacaaagcgggc

SEQ ID NO: 520162 - RNA, 19 nt, Artificial Sequence
  Description of Artificial Sequence: Synthetic oligonucleotide
cgcgcuccuaucaucuccc

SEQ ID NO: 520163 - RNA, 19 nt, Artificial Sequence
  Description of Artificial Sequence: Synthetic oligonucleotide
gcgccucucaaccggcagc

SEQ ID NO: 520164 - RNA, 19 nt, Artificial Sequence
  Description of Artificial Sequence: Synthetic oligonucleotide
cacugcgggcgcgagcgug

SEQ ID NO: 520165 - RNA, 19 nt, Artificial Sequence
  Description of Artificial Sequence: Synthetic oligonucleotide
cuccaauauuggggagcag

SEQ ID NO: 520166 - RNA, 19 nt, Artificial Sequence
  Description of Artificial Sequence: Synthetic oligonucleotide
gccuccggccacaugcuag

SEQ ID NO: 520167 - RNA, 19 nt, Artificial Sequence
  Description of Artificial Sequence: Synthetic oligonucleotide
cacagccuagggcgaugac

SEQ ID NO: 520168 - RNA, 19 nt, Artificial Sequence
  Description of Artificial Sequence: Synthetic oligonucleotide
ggcguguccacaggagcug

SEQ ID NO: 520169 - RNA, 19 nt, Artificial Sequence
  Description of Artificial Sequence: Synthetic oligonucleotide
ccgcaggugcauagcacag

SEQ ID NO: 520170 - RNA, 19 nt, Artificial Sequence
  Description of Artificial Sequence: Synthetic oligonucleotide
ggucccgucacagcgccuc

SEQ ID NO: 520171 - RNA, 19 nt, Artificial Sequence
  Description of Artificial Sequence: Synthetic oligonucleotide
gaccccugcgggaggcaug

SEQ ID NO: 520172 - RNA, 19 nt, Artificial Sequence
  Description of Artificial Sequence: Synthetic oligonucleotide
ugaaggcgggcgggauggc

SEQ ID NO: 520173 - RNA, 19 nt, Artificial Sequence
  Description of Artificial Sequence: Synthetic oligonucleotide
cgagaugaaggcgggcggg

SEQ ID NO: 520174 - RNA, 19 nt, Artificial Sequence
  Description of Artificial Sequence: Synthetic oligonucleotide
gcgcagggaguagaguuug

SEQ ID NO: 520175 - RNA, 19 nt, Artificial Sequence
  Description of Artificial Sequence: Synthetic oligonucleotide
ggcgcugccuggagaagcc

SEQ ID NO: 520176 - RNA, 19 nt, Artificial Sequence
  Description of Artificial Sequence: Synthetic oligonucleotide
gugaggcggcccugugcug

SEQ ID NO: 520177 - RNA, 19 nt, Artificial Sequence
  Description of Artificial Sequence: Synthetic oligonucleotide
cuuccggcacguggccaag

SEQ ID NO: 520178 - RNA, 19 nt, Artificial Sequence
  Description of Artificial Sequence: Synthetic oligonucleotide
gcgggaggcauggcgacgc

SEQ ID NO: 520179 - RNA, 19 nt, Artificial Sequence
  Description of Artificial Sequence: Synthetic oligonucleotide
gcgaccgagccugcggcgg

SEQ ID NO: 520180 - RNA, 19 nt, Artificial Sequence
  Description of Artificial Sequence: Synthetic oligonucleotide
ccgggcgacaagcugccug

SEQ ID NO: 520181 - RNA, 19 nt, Artificial Sequence
  Description of Artificial Sequence: Synthetic oligonucleotide
cacaggccggugguugcug

SEQ ID NO: 520182 - RNA, 19 nt, Artificial Sequence
  Description of Artificial Sequence: Synthetic oligonucleotide
gugcauagcacaggccgcu

SEQ ID NO: 520183 - RNA, 19 nt, Artificial Sequence
  Description of Artificial Sequence: Synthetic oligonucleotide
cauggucacgggccgagau

SEQ ID NO: 520184 - RNA, 19 nt, Artificial Sequence
  Description of Artificial Sequence: Synthetic oligonucleotide
acauggucacgggccgaga

SEQ ID NO: 520185 - RNA, 19 nt, Artificial Sequence
  Description of Artificial Sequence: Synthetic oligonucleotide
gcguugcacugccaaggac

SEQ ID NO: 520186 - RNA, 19 nt, Artificial Sequence
  Description of Artificial Sequence: Synthetic oligonucleotide
uggcuccggugagugggga

SEQ ID NO: 520187 - RNA, 19 nt, Artificial Sequence
  Description of Artificial Sequence: Synthetic oligonucleotide
gcggcggugaugaccuugc

SEQ ID NO: 520188 - RNA, 19 nt, Artificial Sequence
  Description of Artificial Sequence: Synthetic oligonucleotide
cuggcgcugccuggagaag

SEQ ID NO: 520189 - RNA, 19 nt, Artificial Sequence
  Description of Artificial Sequence: Synthetic oligonucleotide
gcccuguucaucgcggcca

SEQ ID NO: 520190 - RNA, 19 nt, Artificial Sequence
  Description of Artificial Sequence: Synthetic oligonucleotide
gcagcgggaucuggccucg

SEQ ID NO: 520191 - RNA, 19 nt, Artificial Sequence
  Description of Artificial Sequence: Synthetic oligonucleotide
gcuccggugaguggggauc

SEQ ID NO: 520192 - RNA, 19 nt, Artificial Sequence
  Description of Artificial Sequence: Synthetic oligonucleotide
agccugcggcgggauggac

SEQ ID NO: 520193 - RNA, 19 nt, Artificial Sequence
  Description of Artificial Sequence: Synthetic oligonucleotide
acgggagggaugagacccu

SEQ ID NO: 520194 - RNA, 19 nt, Artificial Sequence
  Description of Artificial Sequence: Synthetic oligonucleotide
ccacuuccggcacguggcc

SEQ ID NO: 520195 - RNA, 19 nt, Artificial Sequence
  Description of Artificial Sequence: Synthetic oligonucleotide
guccccacgcucgcccagc

SEQ ID NO: 520196 - RNA, 19 nt, Artificial Sequence
  Description of Artificial Sequence: Synthetic oligonucleotide
gcgaguguccugggugucc

SEQ ID NO: 520197 - RNA, 19 nt, Artificial Sequence
  Description of Artificial Sequence: Synthetic oligonucleotide
cgccucucaaccggcagcg

SEQ ID NO: 520198 - RNA, 19 nt, Artificial Sequence
  Description of Artificial Sequence: Synthetic oligonucleotide
gagcgugguaagccacggu

SEQ ID NO: 520199 - RNA, 19 nt, Artificial Sequence
  Description of Artificial Sequence: Synthetic oligonucleotide
cugcgugcgcagggaguag

SEQ ID NO: 520200 - RNA, 19 nt, Artificial Sequence
  Description of Artificial Sequence: Synthetic oligonucleotide
ccuguacuccugcgugcgc

SEQ ID NO: 520201 - RNA, 19 nt, Artificial Sequence
  Description of Artificial Sequence: Synthetic oligonucleotide
cccgccgcacaaacucugc

SEQ ID NO: 520202 - RNA, 19 nt, Artificial Sequence
  Description of Artificial Sequence: Synthetic oligonucleotide
gccugcggcgggauggacc

SEQ ID NO: 520203 - RNA, 19 nt, Artificial Sequence
  Description of Artificial Sequence: Synthetic oligonucleotide
gaaggcgggcgggauggcu

SEQ ID NO: 520204 - RNA, 19 nt, Artificial Sequence
  Description of Artificial Sequence: Synthetic oligonucleotide
cagcgcuguggcucugaga

SEQ ID NO: 520205 - RNA, 19 nt, Artificial Sequence
  Description of Artificial Sequence: Synthetic oligonucleotide
cguugucacaacggaacuc

SEQ ID NO: 520206 - RNA, 19 nt, Artificial Sequence
  Description of Artificial Sequence: Synthetic oligonucleotide
gcaauccgcacaccaggcu

SEQ ID NO: 520207 - RNA, 19 nt, Artificial Sequence
  Description of Artificial Sequence: Synthetic oligonucleotide
gcgcuguggcucugagaag

SEQ ID NO: 520208 - RNA, 19 nt, Artificial Sequence
  Description of Artificial Sequence: Synthetic oligonucleotide
cgggcgggauggcugagcc

SEQ ID NO: 520209 - RNA, 19 nt, Artificial Sequence
  Description of Artificial Sequence: Synthetic oligonucleotide
cgagcgugguaagccacgg

SEQ ID NO: 520210 - RNA, 19 nt, Artificial Sequence
  Description of Artificial Sequence: Synthetic oligonucleotide
caauauuggggagcagguu

SEQ ID NO: 520211 - RNA, 19 nt, Artificial Sequence
  Description of Artificial Sequence: Synthetic oligonucleotide
cgccgaacaggucugggga

SEQ ID NO: 520212 - RNA, 19 nt, Artificial Sequence
  Description of Artificial Sequence: Synthetic oligonucleotide
cagccgucacagcgcugug

SEQ ID NO: 520213 - RNA, 19 nt, Artificial Sequence
  Description of Artificial Sequence: Synthetic oligonucleotide
cgacgcaucugccuucuca

SEQ ID NO: 520214 - RNA, 19 nt, Artificial Sequence
  Description of Artificial Sequence: Synthetic oligonucleotide
ggcacguggccaaggccac

SEQ ID NO: 520215 - RNA, 19 nt, Artificial Sequence
  Description of Artificial Sequence: Synthetic oligonucleotide
gcgguggaagagccuguuc

SEQ ID NO: 520216 - RNA, 19 nt, Artificial Sequence
  Description of Artificial Sequence: Synthetic oligonucleotide
cuguucaucgcggccacuu

SEQ ID NO: 520217 - RNA, 19 nt, Artificial Sequence
  Description of Artificial Sequence: Synthetic oligonucleotide
gagccugcggcgggaugga

SEQ ID NO: 520218 - RNA, 19 nt, Artificial Sequence
  Description of Artificial Sequence: Synthetic oligonucleotide
acgcagaggcaggguagaa

SEQ ID NO: 520219 - RNA, 19 nt, Artificial Sequence
  Description of Artificial Sequence: Synthetic oligonucleotide
ccccgggcgacaagcugcc

SEQ ID NO: 520220 - RNA, 19 nt, Artificial Sequence
  Description of Artificial Sequence: Synthetic oligonucleotide
caucgccacaguccugggu

SEQ ID NO: 520221 - RNA, 19 nt, Artificial Sequence
  Description of Artificial Sequence: Synthetic oligonucleotide
ggcugugcgaagguucugu

SEQ ID NO: 520222 - RNA, 19 nt, Artificial Sequence
  Description of Artificial Sequence: Synthetic oligonucleotide
ggcagcguguggagcgagc

SEQ ID NO: 520223 - RNA, 19 nt, Artificial Sequence
  Description of Artificial Sequence: Synthetic oligonucleotide
gccaucggggcaacuuuuc

SEQ ID NO: 520224 - RNA, 19 nt, Artificial Sequence
  Description of Artificial Sequence: Synthetic oligonucleotide
cagcgccucucaaccggca

SEQ ID NO: 520225 - RNA, 19 nt, Artificial Sequence
  Description of Artificial Sequence: Synthetic oligonucleotide
ggcacagccuagggcgaug

SEQ ID NO: 520226 - RNA, 19 nt, Artificial Sequence
  Description of Artificial Sequence: Synthetic oligonucleotide
gcgcgagcgugguaagcca

SEQ ID NO: 520227 - RNA, 19 nt, Artificial Sequence
  Description of Artificial Sequence: Synthetic oligonucleotide
cuggccaucgcagcgccau

SEQ ID NO: 520228 - RNA, 19 nt, Artificial Sequence
  Description of Artificial Sequence: Synthetic oligonucleotide
caccagccgucacagcgcu

SEQ ID NO: 520229 - RNA, 19 nt, Artificial Sequence
  Description of Artificial Sequence: Synthetic oligonucleotide
cgcgagcgugguaagccac

SEQ ID NO: 520230 - RNA, 19 nt, Artificial Sequence
  Description of Artificial Sequence: Synthetic oligonucleotide
cugccgucuuggcaguccu

SEQ ID NO: 520231 - RNA, 19 nt, Artificial Sequence
  Description of Artificial Sequence: Synthetic oligonucleotide
ccggugaguggggaucuug

SEQ ID NO: 520232 - RNA, 19 nt, Artificial Sequence
  Description of Artificial Sequence: Synthetic oligonucleotide
cccugcgcgaugagcugac

SEQ ID NO: 520233 - RNA, 19 nt, Artificial Sequence
  Description of Artificial Sequence: Synthetic oligonucleotide
ccgcacaccaggcugccaa

SEQ ID NO: 520234 - RNA, 19 nt, Artificial Sequence
  Description of Artificial Sequence: Synthetic oligonucleotide
cacggucugugagguccuc

SEQ ID NO: 520235 - RNA, 19 nt, Artificial Sequence
  Description of Artificial Sequence: Synthetic oligonucleotide
acgugucauuugggucuca

SEQ ID NO: 520236 - RNA, 19 nt, Artificial Sequence
  Description of Artificial Sequence: Synthetic oligonucleotide
cgauccgcaggugcauagc

SEQ ID NO: 520237 - RNA, 19 nt, Artificial Sequence
  Description of Artificial Sequence: Synthetic oligonucleotide
caggugggccucuguuugu

SEQ ID NO: 520238 - RNA, 19 nt, Artificial Sequence
  Description of Artificial Sequence: Synthetic oligonucleotide
ggccgagaugaaggcgggc

SEQ ID NO: 520239 - RNA, 19 nt, Artificial Sequence
  Description of Artificial Sequence: Synthetic oligonucleotide
uccggugaguggggaucuu

SEQ ID NO: 520240 - RNA, 19 nt, Artificial Sequence
  Description of Artificial Sequence: Synthetic oligonucleotide
ggguugcgcuguagacggg

SEQ ID NO: 520241 - RNA, 19 nt, Artificial Sequence
  Description of Artificial Sequence: Synthetic oligonucleotide
cccgucacagcgccucuca

SEQ ID NO: 520242 - RNA, 19 nt, Artificial Sequence
  Description of Artificial Sequence: Synthetic oligonucleotide
gcaguaacacacggcgagu

SEQ ID NO: 520243 - RNA, 19 nt, Artificial Sequence
  Description of Artificial Sequence: Synthetic oligonucleotide
cuccggugaguggggaucu

SEQ ID NO: 520244 - RNA, 19 nt, Artificial Sequence
  Description of Artificial Sequence: Synthetic oligonucleotide
cugcgguaggaaagcguuu

SEQ ID NO: 520245 - RNA, 19 nt, Artificial Sequence
  Description of Artificial Sequence: Synthetic oligonucleotide
cugccacccucgcagggau

SEQ ID NO: 520246 - RNA, 19 nt, Artificial Sequence
  Description of Artificial Sequence: Synthetic oligonucleotide
gggcgcgagcgugguaagc

SEQ ID NO: 520247 - RNA, 19 nt, Artificial Sequence
  Description of Artificial Sequence: Synthetic oligonucleotide
cugggucuugcagguucaa

SEQ ID NO: 520248 - RNA, 19 nt, Artificial Sequence
  Description of Artificial Sequence: Synthetic oligonucleotide
cgaccgagccugcggcggg

SEQ ID NO: 520249 - RNA, 19 nt, Artificial Sequence
  Description of Artificial Sequence: Synthetic oligonucleotide
ccguugucacaacggaacu

SEQ ID NO: 520250 - RNA, 19 nt, Artificial Sequence
  Description of Artificial Sequence: Synthetic oligonucleotide
caacgauccgcaggugcau

SEQ ID NO: 520251 - RNA, 19 nt, Artificial Sequence
  Description of Artificial Sequence: Synthetic oligonucleotide
gggcgggauggcugagcca

SEQ ID NO: 520252 - RNA, 19 nt, Artificial Sequence
  Description of Artificial Sequence: Synthetic oligonucleotide
ggcggccaggcagccgugc

SEQ ID NO: 520253 - RNA, 19 nt, Artificial Sequence
  Description of Artificial Sequence: Synthetic oligonucleotide
gccaccgggaggaggccca

SEQ ID NO: 520254 - RNA, 19 nt, Artificial Sequence
  Description of Artificial Sequence: Synthetic oligonucleotide
ucgcggccacuugcacagu

SEQ ID NO: 520255 - RNA, 19 nt, Artificial Sequence
  Description of Artificial Sequence: Synthetic oligonucleotide
ggccaucgcagcgccaugu

SEQ ID NO: 520256 - RNA, 19 nt, Artificial Sequence
  Description of Artificial Sequence: Synthetic oligonucleotide
gcgcugccuggagaagccc

SEQ ID NO: 520257 - RNA, 19 nt, Artificial Sequence
  Description of Artificial Sequence: Synthetic oligonucleotide
gucccgucacagcgccucu

SEQ ID NO: 520258 - RNA, 19 nt, Artificial Sequence
  Description of Artificial Sequence: Synthetic oligonucleotide
gcgggcuguggcagucacc

SEQ ID NO: 520259 - RNA, 19 nt, Artificial Sequence
  Description of Artificial Sequence: Synthetic oligonucleotide
gcgcgaugagcugaccgua

SEQ ID NO: 520260 - RNA, 19 nt, Artificial Sequence
  Description of Artificial Sequence: Synthetic oligonucleotide
cccgcgcuccuaucaucuc

SEQ ID NO: 520261 - RNA, 19 nt, Artificial Sequence
  Description of Artificial Sequence: Synthetic oligonucleotide
cgcguugcacugccaagga

SEQ ID NO: 520262 - RNA, 19 nt, Artificial Sequence
  Description of Artificial Sequence: Synthetic oligonucleotide
ccccgcgcuccuaucaucu

SEQ ID NO: 520263 - RNA, 19 nt, Artificial Sequence
  Description of Artificial Sequence: Synthetic oligonucleotide
ccgggaggaggcccaucuc

SEQ ID NO: 520264 - RNA, 19 nt, Artificial Sequence
  Description of Artificial Sequence: Synthetic oligonucleotide
ccgagcgcccaggcuuucc

SEQ ID NO: 520265 - RNA, 19 nt, Artificial Sequence
  Description of Artificial Sequence: Synthetic oligonucleotide
caagggcggagguggcauu

SEQ ID NO: 520266 - RNA, 19 nt, Artificial Sequence
  Description of Artificial Sequence: Synthetic oligonucleotide
ccgugcucaucacugccgu

SEQ ID NO: 520267 - RNA, 19 nt, Artificial Sequence
  Description of Artificial Sequence: Synthetic oligonucleotide
ggcgacgcaucugccuucu

SEQ ID NO: 520268 - RNA, 19 nt, Artificial Sequence
  Description of Artificial Sequence: Synthetic oligonucleotide
gcguguggagcgagcucca

SEQ ID NO: 520269 - RNA, 19 nt, Artificial Sequence
  Description of Artificial Sequence: Synthetic oligonucleotide
ggcgccaucggggcaacuu

SEQ ID NO: 520270 - RNA, 19 nt, Artificial Sequence
  Description of Artificial Sequence: Synthetic oligonucleotide
gcgccaucggggcaacuuu

SEQ ID NO: 520271 - RNA, 19 nt, Artificial Sequence
  Description of Artificial Sequence: Synthetic oligonucleotide
cguguccaaugggucagca

SEQ ID NO: 520272 - RNA, 19 nt, Artificial Sequence
  Description of Artificial Sequence: Synthetic oligonucleotide
cccucgcagggauacuggu

SEQ ID NO: 520273 - RNA, 19 nt, Artificial Sequence
  Description of Artificial Sequence: Synthetic oligonucleotide
cguguggagcgagcuccac

SEQ ID NO: 520274 - RNA, 19 nt, Artificial Sequence
  Description of Artificial Sequence: Synthetic oligonucleotide
ggucacgggccgagaugaa

SEQ ID NO: 520275 - RNA, 19 nt, Artificial Sequence
  Description of Artificial Sequence: Synthetic oligonucleotide
gcgacgcaucugccuucuc

SEQ ID NO: 520276 - RNA, 19 nt, Artificial Sequence
  Description of Artificial Sequence: Synthetic oligonucleotide
cuccggccacaugcuaggu

SEQ ID NO: 520277 - RNA, 19 nt, Artificial Sequence
  Description of Artificial Sequence: Synthetic oligonucleotide
ccgucacagcgccucucaa

SEQ ID NO: 520278 - RNA, 19 nt, Artificial Sequence
  Description of Artificial Sequence: Synthetic oligonucleotide
gcgcuccuaucaucucccu

SEQ ID NO: 520279 - RNA, 19 nt, Artificial Sequence
  Description of Artificial Sequence: Synthetic oligonucleotide
gcgggauggcugagccaca

SEQ ID NO: 520280 - RNA, 19 nt, Artificial Sequence
  Description of Artificial Sequence: Synthetic oligonucleotide
ggcgguggaagagccuguu

SEQ ID NO: 520281 - RNA, 19 nt, Artificial Sequence
  Description of Artificial Sequence: Synthetic oligonucleotide
cggcagcguguggagcgag

SEQ ID NO: 520282 - RNA, 19 nt, Artificial Sequence
  Description of Artificial Sequence: Synthetic oligonucleotide
gggcgguggaagagccugu

SEQ ID NO: 520283 - RNA, 19 nt, Artificial Sequence
  Description of Artificial Sequence: Synthetic oligonucleotide
gcacgcugggcagcccugu

SEQ ID NO: 520284 - RNA, 19 nt, Artificial Sequence
  Description of Artificial Sequence: Synthetic oligonucleotide
cagcgggaucuggccucga

SEQ ID NO: 520285 - RNA, 19 nt, Artificial Sequence
  Description of Artificial Sequence: Synthetic oligonucleotide
ccggcagcguguggagcga

SEQ ID NO: 520286 - RNA, 19 nt, Artificial Sequence
  Description of Artificial Sequence: Synthetic oligonucleotide
gccgagcgcccaggcuuuc

SEQ ID NO: 520287 - RNA, 19 nt, Artificial Sequence
  Description of Artificial Sequence: Synthetic oligonucleotide
ggcucacaggccggugguu

SEQ ID NO: 520288 - RNA, 19 nt, Artificial Sequence
  Description of Artificial Sequence: Synthetic oligonucleotide
ccccugcgggaggcauggc

SEQ ID NO: 520289 - RNA, 19 nt, Artificial Sequence
  Description of Artificial Sequence: Synthetic oligonucleotide
cggcggccaggcagccgug

SEQ ID NO: 520290 - RNA, 19 nt, Artificial Sequence
  Description of Artificial Sequence: Synthetic oligonucleotide
ccacccucgcagggauacu

SEQ ID NO: 520291 - RNA, 19 nt, Artificial Sequence
  Description of Artificial Sequence: Synthetic oligonucleotide
gggcggcggugaugaccuu

SEQ ID NO: 520292 - RNA, 19 nt, Artificial Sequence
  Description of Artificial Sequence: Synthetic oligonucleotide
cccgggcgacaagcugccu

SEQ ID NO: 520293 - RNA, 19 nt, Artificial Sequence
  Description of Artificial Sequence: Synthetic oligonucleotide
aauauagaugcccagcccc

SEQ ID NO: 520294 - RNA, 19 nt, Artificial Sequence
  Description of Artificial Sequence: Synthetic oligonucleotide
uguauugugaccauguucc

SEQ ID NO: 520295 - RNA, 19 nt, Artificial Sequence
  Description of Artificial Sequence: Synthetic oligonucleotide
uuaacuauaaauucaagcu

SEQ ID NO: 520296 - RNA, 19 nt, Artificial Sequence
  Description of Artificial Sequence: Synthetic oligonucleotide
aauaggacaaucuguuugc

SEQ ID NO: 520297 - RNA, 19 nt, Artificial Sequence
  Description of Artificial Sequence: Synthetic oligonucleotide
gaaguuauucuuuagagug

SEQ ID NO: 520298 - RNA, 19 nt, Artificial Sequence
  Description of Artificial Sequence: Synthetic oligonucleotide
uaaucugcaauccugaugc

SEQ ID NO: 520299 - RNA, 19 nt, Artificial Sequence
  Description of Artificial Sequence: Synthetic oligonucleotide
acuuacaaacaucugagcc

SEQ ID NO: 520300 - RNA, 19 nt, Artificial Sequence
  Description of Artificial Sequence: Synthetic oligonucleotide
uacaauaggucucaaaugc

SEQ ID NO: 520301 - RNA, 19 nt, Artificial Sequence
  Description of Artificial Sequence: Synthetic oligonucleotide
aagguuaguaaauugucuc

SEQ ID NO: 520302 - RNA, 19 nt, Artificial Sequence
  Description of Artificial Sequence: Synthetic oligonucleotide
uuuauaacccuuuauguga

SEQ ID NO: 520303 - RNA, 19 nt, Artificial Sequence
  Description of Artificial Sequence: Synthetic oligonucleotide
aaaucauagaagugucccc

SEQ ID NO: 520304 - RNA, 19 nt, Artificial Sequence
  Description of Artificial Sequence: Synthetic oligonucleotide
aaaacauagaauccuucag

SEQ ID NO: 520305 - RNA, 19 nt, Artificial Sequence
  Description of Artificial Sequence: Synthetic oligonucleotide
guuaacuauaaauucaagc

SEQ ID NO: 520306 - RNA, 19 nt, Artificial Sequence
  Description of Artificial Sequence: Synthetic oligonucleotide
aaugccagaaagaaaauag

SEQ ID NO: 520307 - RNA, 19 nt, Artificial Sequence
  Description of Artificial Sequence: Synthetic oligonucleotide
aaauaaagauucucuauca

SEQ ID NO: 520308 - RNA, 19 nt, Artificial Sequence
  Description of Artificial Sequence: Synthetic oligonucleotide
caagauuauaaucugcugg

SEQ ID NO: 520309 - RNA, 19 nt, Artificial Sequence
  Description of Artificial Sequence: Synthetic oligonucleotide
ucuacuugagauaaucugc

SEQ ID NO: 520310 - RNA, 19 nt, Artificial Sequence
  Description of Artificial Sequence: Synthetic oligonucleotide
uuuuauaacccuuuaugug

SEQ ID NO: 520311 - RNA, 19 nt, Artificial Sequence
  Description of Artificial Sequence: Synthetic oligonucleotide
ucuagcauaaaugaugcag

SEQ ID NO: 520312 - RNA, 19 nt, Artificial Sequence
  Description of Artificial Sequence: Synthetic oligonucleotide
cauuuagacauuaaaugcc

SEQ ID NO: 520313 - RNA, 19 nt, Artificial Sequence
  Description of Artificial Sequence: Synthetic oligonucleotide
agccuugccaauuugauuc

SEQ ID NO: 520314 - RNA, 19 nt, Artificial Sequence
  Description of Artificial Sequence: Synthetic oligonucleotide
ugacuuacaaacaucugag

SEQ ID NO: 520315 - RNA, 19 nt, Artificial Sequence
  Description of Artificial Sequence: Synthetic oligonucleotide
uaaagugucucacaggcca

SEQ ID NO: 520316 - RNA, 19 nt, Artificial Sequence
  Description of Artificial Sequence: Synthetic oligonucleotide
auggcuagaauacagcuuc

SEQ ID NO: 520317 - RNA, 19 nt, Artificial Sequence
  Description of Artificial Sequence: Synthetic oligonucleotide
aaacaaauaggccaucaga

SEQ ID NO: 520318 - RNA, 19 nt, Artificial Sequence
  Description of Artificial Sequence: Synthetic oligonucleotide
uuaguaaauugucucagca

SEQ ID NO: 520319 - RNA, 19 nt, Artificial Sequence
  Description of Artificial Sequence: Synthetic oligonucleotide
uuaaugagcgauuugcucu

SEQ ID NO: 520320 - RNA, 19 nt, Artificial Sequence
  Description of Artificial Sequence: Synthetic oligonucleotide
uagaauacagcuucuagca

SEQ ID NO: 520321 - RNA, 19 nt, Artificial Sequence
  Description of Artificial Sequence: Synthetic oligonucleotide
aagagauguagucgcaugg

SEQ ID NO: 520322 - RNA, 19 nt, Artificial Sequence
  Description of Artificial Sequence: Synthetic oligonucleotide
aacuacaacacaccacuuc

SEQ ID NO: 520323 - RNA, 19 nt, Artificial Sequence
  Description of Artificial Sequence: Synthetic oligonucleotide
ucuugacuuacaaacaucu

SEQ ID NO: 520324 - RNA, 19 nt, Artificial Sequence
  Description of Artificial Sequence: Synthetic oligonucleotide
aguaaauugucucagcaga

SEQ ID NO: 520325 - RNA, 19 nt, Artificial Sequence
  Description of Artificial Sequence: Synthetic oligonucleotide
uuuagaaagagauguaguc

SEQ ID NO: 520326 - RNA, 19 nt, Artificial Sequence
  Description of Artificial Sequence: Synthetic oligonucleotide
cuagcauaaaugaugcagg

SEQ ID NO: 520327 - RNA, 19 nt, Artificial Sequence
  Description of Artificial Sequence: Synthetic oligonucleotide
acaacuaugugagaaaguc

SEQ ID NO: 520328 - RNA, 19 nt, Artificial Sequence
  Description of Artificial Sequence: Synthetic oligonucleotide
cuagaauacagcuucuagc

SEQ ID NO: 520329 - RNA, 19 nt, Artificial Sequence
  Description of Artificial Sequence: Synthetic oligonucleotide
acaagaagccucuauuaac

SEQ ID NO: 520330 - RNA, 19 nt, Artificial Sequence
  Description of Artificial Sequence: Synthetic oligonucleotide
ugauauuacugauauuuca

SEQ ID NO: 520331 - RNA, 19 nt, Artificial Sequence
  Description of Artificial Sequence: Synthetic oligonucleotide
ucguuuuccaauauagaug

SEQ ID NO: 520332 - RNA, 19 nt, Artificial Sequence
  Description of Artificial Sequence: Synthetic oligonucleotide
agaauuuucugacagcacu

SEQ ID NO: 520333 - RNA, 19 nt, Artificial Sequence
  Description of Artificial Sequence: Synthetic oligonucleotide
caagcuuagguuaagcuug

SEQ ID NO: 520334 - RNA, 19 nt, Artificial Sequence
  Description of Artificial Sequence: Synthetic oligonucleotide
aucaacaccgcacaagcuc

SEQ ID NO: 520335 - RNA, 19 nt, Artificial Sequence
  Description of Artificial Sequence: Synthetic oligonucleotide
acacaccaauuuuauaacc

SEQ ID NO: 520336 - RNA, 19 nt, Artificial Sequence
  Description of Artificial Sequence: Synthetic oligonucleotide
agaagccucuauuaacacc

SEQ ID NO: 520337 - RNA, 19 nt, Artificial Sequence
  Description of Artificial Sequence: Synthetic oligonucleotide
gaaucaugcuuacaauagg

SEQ ID NO: 520338 - RNA, 19 nt, Artificial Sequence
  Description of Artificial Sequence: Synthetic oligonucleotide
acuaugaggagaccauggc

SEQ ID NO: 520339 - RNA, 19 nt, Artificial Sequence
  Description of Artificial Sequence: Synthetic oligonucleotide
uacaugcuagcaaaccugg

SEQ ID NO: 520340 - RNA, 19 nt, Artificial Sequence
  Description of Artificial Sequence: Synthetic oligonucleotide
ugugcuguaguuuagccuc

SEQ ID NO: 520341 - RNA, 19 nt, Artificial Sequence
  Description of Artificial Sequence: Synthetic oligonucleotide
gauguagucgcauggcuag

SEQ ID NO: 520342 - RNA, 19 nt, Artificial Sequence
  Description of Artificial Sequence: Synthetic oligonucleotide
uccuaaaacaagaagccuc

SEQ ID NO: 520343 - RNA, 19 nt, Artificial Sequence
  Description of Artificial Sequence: Synthetic oligonucleotide
uuauaacccuuuaugugag

SEQ ID NO: 520344 - RNA, 19 nt, Artificial Sequence
  Description of Artificial Sequence: Synthetic oligonucleotide
ucaugcuuacaauaggucu

SEQ ID NO: 520345 - RNA, 19 nt, Artificial Sequence
  Description of Artificial Sequence: Synthetic oligonucleotide
uuccuaaagaaauucaaau

SEQ ID NO: 520346 - RNA, 19 nt, Artificial Sequence
  Description of Artificial Sequence: Synthetic oligonucleotide
ugcaaauuucuaaacgaca

SEQ ID NO: 520347 - RNA, 19 nt, Artificial Sequence
  Description of Artificial Sequence: Synthetic oligonucleotide
ugugguacuaugaggagac

SEQ ID NO: 520348 - RNA, 19 nt, Artificial Sequence
  Description of Artificial Sequence: Synthetic oligonucleotide
uuacaauaggucucaaaug

SEQ ID NO: 520349 - RNA, 19 nt, Artificial Sequence
  Description of Artificial Sequence: Synthetic oligonucleotide
aaagauagcauuuguuguu

SEQ ID NO: 520350 - RNA, 19 nt, Artificial Sequence
  Description of Artificial Sequence: Synthetic oligonucleotide
caugaaucagacucguucc

SEQ ID NO: 520351 - RNA, 19 nt, Artificial Sequence
  Description of Artificial Sequence: Synthetic oligonucleotide
ucuacaugcuagcaaaccu

SEQ ID NO: 520352 - RNA, 19 nt, Artificial Sequence
  Description of Artificial Sequence: Synthetic oligonucleotide
aaaacaacuaugugagaaa

SEQ ID NO: 520353 - RNA, 19 nt, Artificial Sequence
  Description of Artificial Sequence: Synthetic oligonucleotide
uucauguaugucuaggccu

SEQ ID NO: 520354 - RNA, 19 nt, Artificial Sequence
  Description of Artificial Sequence: Synthetic oligonucleotide
uaaaagaaggugacgucug

SEQ ID NO: 520355 - RNA, 19 nt, Artificial Sequence
  Description of Artificial Sequence: Synthetic oligonucleotide
uaguuaacuauaaauucaa

SEQ ID NO: 520356 - RNA, 19 nt, Artificial Sequence
  Description of Artificial Sequence: Synthetic oligonucleotide
cacaccaauuuuauaaccc

SEQ ID NO: 520357 - RNA, 19 nt, Artificial Sequence
  Description of Artificial Sequence: Synthetic oligonucleotide
uaguaaauugucucagcag

SEQ ID NO: 520358 - RNA, 19 nt, Artificial Sequence
  Description of Artificial Sequence: Synthetic oligonucleotide
aagucaaccuggugcaccg

SEQ ID NO: 520359 - RNA, 19 nt, Artificial Sequence
  Description of Artificial Sequence: Synthetic oligonucleotide
cuuggaauaacucugaagu

SEQ ID NO: 520360 - RNA, 19 nt, Artificial Sequence
  Description of Artificial Sequence: Synthetic oligonucleotide
caauaggacaaucuguuug

SEQ ID NO: 520361 - RNA, 19 nt, Artificial Sequence
  Description of Artificial Sequence: Synthetic oligonucleotide
aagauagcauuuguuguuc

SEQ ID NO: 520362 - RNA, 19 nt, Artificial Sequence
  Description of Artificial Sequence: Synthetic oligonucleotide
aagaaagucugucauucaa

SEQ ID NO: 520363 - RNA, 19 nt, Artificial Sequence
  Description of Artificial Sequence: Synthetic oligonucleotide
agauaaacagcuauguucu

SEQ ID NO: 520364 - RNA, 19 nt, Artificial Sequence
  Description of Artificial Sequence: Synthetic oligonucleotide
ucauguaugucuaggccug

SEQ ID NO: 520365 - RNA, 19 nt, Artificial Sequence
  Description of Artificial Sequence: Synthetic oligonucleotide
aggacaaucuguuugcacu

SEQ ID NO: 520366 - RNA, 19 nt, Artificial Sequence
  Description of Artificial Sequence: Synthetic oligonucleotide
ugacaagauuauaaucugc

SEQ ID NO: 520367 - RNA, 19 nt, Artificial Sequence
  Description of Artificial Sequence: Synthetic oligonucleotide
uguaugucuaggccugagg

SEQ ID NO: 520368 - RNA, 19 nt, Artificial Sequence
  Description of Artificial Sequence: Synthetic oligonucleotide
ugucuaacaauuugguccu

SEQ ID NO: 520369 - RNA, 19 nt, Artificial Sequence
  Description of Artificial Sequence: Synthetic oligonucleotide
uugcaaauuucuaaacgac

SEQ ID NO: 520370 - RNA, 19 nt, Artificial Sequence
  Description of Artificial Sequence: Synthetic oligonucleotide
cacuuaaugagcgauuugc

SEQ ID NO: 520371 - RNA, 19 nt, Artificial Sequence
  Description of Artificial Sequence: Synthetic oligonucleotide
uagacaguuguauugugac

SEQ ID NO: 520372 - RNA, 19 nt, Artificial Sequence
  Description of Artificial Sequence: Synthetic oligonucleotide
aauccugaugcugucuaac

SEQ ID NO: 520373 - RNA, 19 nt, Artificial Sequence
  Description of Artificial Sequence: Synthetic oligonucleotide
guaugucuaggccugaggc

SEQ ID NO: 520374 - RNA, 19 nt, Artificial Sequence
  Description of Artificial Sequence: Synthetic oligonucleotide
auaaucugcaauccugaug

SEQ ID NO: 520375 - RNA, 19 nt, Artificial Sequence
  Description of Artificial Sequence: Synthetic oligonucleotide
agauccuagggacacacug

SEQ ID NO: 520376 - RNA, 19 nt, Artificial Sequence
  Description of Artificial Sequence: Synthetic oligonucleotide
cuaucauagaaaagauagc

SEQ ID NO: 520377 - RNA, 19 nt, Artificial Sequence
  Description of Artificial Sequence: Synthetic oligonucleotide
gucuacuugagauaaucug

SEQ ID NO: 520378 - RNA, 19 nt, Artificial Sequence
  Description of Artificial Sequence: Synthetic oligonucleotide
ugcaauaggacaaucuguu

SEQ ID NO: 520379 - RNA, 19 nt, Artificial Sequence
  Description of Artificial Sequence: Synthetic oligonucleotide
cugaguacaacacugcauc

SEQ ID NO: 520380 - RNA, 19 nt, Artificial Sequence
  Description of Artificial Sequence: Synthetic oligonucleotide
aaaugauagaaaugucuuu

SEQ ID NO: 520381 - RNA, 19 nt, Artificial Sequence
  Description of Artificial Sequence: Synthetic oligonucleotide
uccuaaagaaauucaaaua

SEQ ID NO: 520382 - RNA, 19 nt, Artificial Sequence
  Description of Artificial Sequence: Synthetic oligonucleotide
auaaaagaaggugacgucu

SEQ ID NO: 520383 - RNA, 19 nt, Artificial Sequence
  Description of Artificial Sequence: Synthetic oligonucleotide
gaagccucuauuaacacca

SEQ ID NO: 520384 - RNA, 19 nt, Artificial Sequence
  Description of Artificial Sequence: Synthetic oligonucleotide
uuguauugugaccauguuc

SEQ ID NO: 520385 - RNA, 19 nt, Artificial Sequence
  Description of Artificial Sequence: Synthetic oligonucleotide
augcuauguucugaaaucc

SEQ ID NO: 520386 - RNA, 19 nt, Artificial Sequence
  Description of Artificial Sequence: Synthetic oligonucleotide
gagauaaucugcaauccug

SEQ ID NO: 520387 - RNA, 19 nt, Artificial Sequence
  Description of Artificial Sequence: Synthetic oligonucleotide
ugagauaaucugcaauccu

SEQ ID NO: 520388 - RNA, 19 nt, Artificial Sequence
  Description of Artificial Sequence: Synthetic oligonucleotide
cuacuuuggauauauuauc

SEQ ID NO: 520389 - RNA, 19 nt, Artificial Sequence
  Description of Artificial Sequence: Synthetic oligonucleotide
ucagacucguuccaagucu

SEQ ID NO: 520390 - RNA, 19 nt, Artificial Sequence
  Description of Artificial Sequence: Synthetic oligonucleotide
caugcuauguucugaaauc

SEQ ID NO: 520391 - RNA, 19 nt, Artificial Sequence
  Description of Artificial Sequence: Synthetic oligonucleotide
ugcaucugagaguuacugg

SEQ ID NO: 520392 - RNA, 19 nt, Artificial Sequence
  Description of Artificial Sequence: Synthetic oligonucleotide
agaggaguuaguuucuaca

SEQ ID NO: 520393 - RNA, 19 nt, Artificial Sequence
  Description of Artificial Sequence: Synthetic oligonucleotide
aacacugcaucugagaguu

SEQ ID NO: 520394 - RNA, 19 nt, Artificial Sequence
  Description of Artificial Sequence: Synthetic oligonucleotide
ugcagguaacacaugaaaa

SEQ ID NO: 520395 - RNA, 19 nt, Artificial Sequence
  Description of Artificial Sequence: Synthetic oligonucleotide
uucaagcuuagguuaagcu

SEQ ID NO: 520396 - RNA, 19 nt, Artificial Sequence
  Description of Artificial Sequence: Synthetic oligonucleotide
aaaucaagcgucaccaggu

SEQ ID NO: 520397 - RNA, 19 nt, Artificial Sequence
  Description of Artificial Sequence: Synthetic oligonucleotide
augcuagcaaaccugguug

SEQ ID NO: 520398 - RNA, 19 nt, Artificial Sequence
  Description of Artificial Sequence: Synthetic oligonucleotide
aggcaaaucaagcgucacc

SEQ ID NO: 520399 - RNA, 19 nt, Artificial Sequence
  Description of Artificial Sequence: Synthetic oligonucleotide
ucaacaccgcacaagcuca

SEQ ID NO: 520400 - RNA, 19 nt, Artificial Sequence
  Description of Artificial Sequence: Synthetic oligonucleotide
uauaaaagaaggugacguc

SEQ ID NO: 520401 - RNA, 19 nt, Artificial Sequence
  Description of Artificial Sequence: Synthetic oligonucleotide
ugaccuuauuuagaaagag

SEQ ID NO: 520402 - RNA, 19 nt, Artificial Sequence
  Description of Artificial Sequence: Synthetic oligonucleotide
ugcaacuacagcacagucu

SEQ ID NO: 520403 - RNA, 19 nt, Artificial Sequence
  Description of Artificial Sequence: Synthetic oligonucleotide
uuuaugucagggcugcaaa

SEQ ID NO: 520404 - RNA, 19 nt, Artificial Sequence
  Description of Artificial Sequence: Synthetic oligonucleotide
uuuagaguguaaaggcuuc

SEQ ID NO: 520405 - RNA, 19 nt, Artificial Sequence
  Description of Artificial Sequence: Synthetic oligonucleotide
acaagguuaguaaauuguc

SEQ ID NO: 520406 - RNA, 19 nt, Artificial Sequence
  Description of Artificial Sequence: Synthetic oligonucleotide
ugagaguuacuggaauugg

SEQ ID NO: 520407 - RNA, 19 nt, Artificial Sequence
  Description of Artificial Sequence: Synthetic oligonucleotide
caugcuuacaauaggucuc

SEQ ID NO: 520408 - RNA, 19 nt, Artificial Sequence
  Description of Artificial Sequence: Synthetic oligonucleotide
aaagaaagucugucauuca

SEQ ID NO: 520409 - RNA, 19 nt, Artificial Sequence
  Description of Artificial Sequence: Synthetic oligonucleotide
ugaccauguuccaugauau

SEQ ID NO: 520410 - RNA, 19 nt, Artificial Sequence
  Description of Artificial Sequence: Synthetic oligonucleotide
agucacuagggccugggag

SEQ ID NO: 520411 - RNA, 19 nt, Artificial Sequence
  Description of Artificial Sequence: Synthetic oligonucleotide
acuggaauuggguauguaa

SEQ ID NO: 520412 - RNA, 19 nt, Artificial Sequence
  Description of Artificial Sequence: Synthetic oligonucleotide
agagauguagucgcauggc

SEQ ID NO: 520413 - RNA, 19 nt, Artificial Sequence
  Description of Artificial Sequence: Synthetic oligonucleotide
cuacaugcuagcaaaccug

SEQ ID NO: 520414 - RNA, 19 nt, Artificial Sequence
  Description of Artificial Sequence: Synthetic oligonucleotide
cacucaacaagaaucucug

SEQ ID NO: 520415 - RNA, 19 nt, Artificial Sequence
  Description of Artificial Sequence: Synthetic oligonucleotide
ccugaccuuauuuagaaag

SEQ ID NO: 520416 - RNA, 19 nt, Artificial Sequence
  Description of Artificial Sequence: Synthetic oligonucleotide
aguaagggacuagagaaug

SEQ ID NO: 520417 - RNA, 19 nt, Artificial Sequence
  Description of Artificial Sequence: Synthetic oligonucleotide
guugcuagcuuugaaauuc

SEQ ID NO: 520418 - RNA, 19 nt, Artificial Sequence
  Description of Artificial Sequence: Synthetic oligonucleotide
uaaugagcgauuugcucug

SEQ ID NO: 520419 - RNA, 19 nt, Artificial Sequence
  Description of Artificial Sequence: Synthetic oligonucleotide
agucgcauggcuagaauac

SEQ ID NO: 520420 - RNA, 19 nt, Artificial Sequence
  Description of Artificial Sequence: Synthetic oligonucleotide
acaccaauuuuauaacccu

SEQ ID NO: 520421 - RNA, 19 nt, Artificial Sequence
  Description of Artificial Sequence: Synthetic oligonucleotide
caagaagccucuauuaaca

SEQ ID NO: 520422 - RNA, 19 nt, Artificial Sequence
  Description of Artificial Sequence: Synthetic oligonucleotide
gacgcccacaaucauuuag

SEQ ID NO: 520423 - RNA, 19 nt, Artificial Sequence
  Description of Artificial Sequence: Synthetic oligonucleotide
gaauuuucugacagcacug

SEQ ID NO: 520424 - RNA, 19 nt, Artificial Sequence
  Description of Artificial Sequence: Synthetic oligonucleotide
ucaagcgucaccagguuua

SEQ ID NO: 520425 - RNA, 19 nt, Artificial Sequence
  Description of Artificial Sequence: Synthetic oligonucleotide
cuauguucugaaauccaac

SEQ ID NO: 520426 - RNA, 19 nt, Artificial Sequence
  Description of Artificial Sequence: Synthetic oligonucleotide
ucugaguacaacacugcau

SEQ ID NO: 520427 - RNA, 19 nt, Artificial Sequence
  Description of Artificial Sequence: Synthetic oligonucleotide
agggacuagagaaugaaug

SEQ ID NO: 520428 - RNA, 19 nt, Artificial Sequence
  Description of Artificial Sequence: Synthetic oligonucleotide
uuuaugugagagaggaguu

SEQ ID NO: 520429 - RNA, 19 nt, Artificial Sequence
  Description of Artificial Sequence: Synthetic oligonucleotide
uauucaagucaaccuggug

SEQ ID NO: 520430 - RNA, 19 nt, Artificial Sequence
  Description of Artificial Sequence: Synthetic oligonucleotide
ucgcauggcuagaauacag

SEQ ID NO: 520431 - RNA, 19 nt, Artificial Sequence
  Description of Artificial Sequence: Synthetic oligonucleotide
cuaaagcuucacauuuuag

SEQ ID NO: 520432 - RNA, 19 nt, Artificial Sequence
  Description of Artificial Sequence: Synthetic oligonucleotide
auuuagacauuaaaugcca

SEQ ID NO: 520433 - RNA, 19 nt, Artificial Sequence
  Description of Artificial Sequence: Synthetic oligonucleotide
uuauucaagucaaccuggu

SEQ ID NO: 520434 - RNA, 19 nt, Artificial Sequence
  Description of Artificial Sequence: Synthetic oligonucleotide
agguuaguaaauugucuca

SEQ ID NO: 520435 - RNA, 19 nt, Artificial Sequence
  Description of Artificial Sequence: Synthetic oligonucleotide
gauccuagggacacacugg

SEQ ID NO: 520436 - RNA, 19 nt, Artificial Sequence
  Description of Artificial Sequence: Synthetic oligonucleotide
caaacaaauaggccaucag

SEQ ID NO: 520437 - RNA, 19 nt, Artificial Sequence
  Description of Artificial Sequence: Synthetic oligonucleotide
aauucacaaugguucugca

SEQ ID NO: 520438 - RNA, 19 nt, Artificial Sequence
  Description of Artificial Sequence: Synthetic oligonucleotide
caaaagacgcccacaauca

SEQ ID NO: 520439 - RNA, 19 nt, Artificial Sequence
  Description of Artificial Sequence: Synthetic oligonucleotide
cuuacaauaggucucaaau

SEQ ID NO: 520440 - RNA, 19 nt, Artificial Sequence
  Description of Artificial Sequence: Synthetic oligonucleotide
aagaaucucuguaggagca

SEQ ID NO: 520441 - RNA, 19 nt, Artificial Sequence
  Description of Artificial Sequence: Synthetic oligonucleotide
uauuaacaccaugaaucag

SEQ ID NO: 520442 - RNA, 19 nt, Artificial Sequence
  Description of Artificial Sequence: Synthetic oligonucleotide
cucuaaagugucucacagg

SEQ ID NO: 520443 - RNA, 19 nt, Artificial Sequence
  Description of Artificial Sequence: Synthetic oligonucleotide
gaguguaaaggcuucaggu

SEQ ID NO: 520444 - RNA, 19 nt, Artificial Sequence
  Description of Artificial Sequence: Synthetic oligonucleotide
augauauuacugauauuuc

SEQ ID NO: 520445 - RNA, 19 nt, Artificial Sequence
  Description of Artificial Sequence: Synthetic oligonucleotide
gucaugagaaauucccaug

SEQ ID NO: 520446 - RNA, 19 nt, Artificial Sequence
  Description of Artificial Sequence: Synthetic oligonucleotide
uuuccauauaacacaccaa

SEQ ID NO: 520447 - RNA, 19 nt, Artificial Sequence
  Description of Artificial Sequence: Synthetic oligonucleotide
caauauagaugcccagccc

SEQ ID NO: 520448 - RNA, 19 nt, Artificial Sequence
  Description of Artificial Sequence: Synthetic oligonucleotide
aauucaagcuuagguuaag

SEQ ID NO: 520449 - RNA, 19 nt, Artificial Sequence
  Description of Artificial Sequence: Synthetic oligonucleotide
aaggcaaaucaagcgucac

SEQ ID NO: 520450 - RNA, 19 nt, Artificial Sequence
  Description of Artificial Sequence: Synthetic oligonucleotide
gcuacugaauuuauaaaag

SEQ ID NO: 520451 - RNA, 19 nt, Artificial Sequence
  Description of Artificial Sequence: Synthetic oligonucleotide
uucagagucaugcuauguu

SEQ ID NO: 520452 - RNA, 19 nt, Artificial Sequence
  Description of Artificial Sequence: Synthetic oligonucleotide
agucuguaucauaaacagc

SEQ ID NO: 520453 - RNA, 19 nt, Artificial Sequence
  Description of Artificial Sequence: Synthetic oligonucleotide
aggugugacucugugguac

SEQ ID NO: 520454 - RNA, 19 nt, Artificial Sequence
  Description of Artificial Sequence: Synthetic oligonucleotide
agguugcuagcuuugaaau

SEQ ID NO: 520455 - RNA, 19 nt, Artificial Sequence
  Description of Artificial Sequence: Synthetic oligonucleotide
ccuugcaaauuucuaaacg

SEQ ID NO: 520456 - RNA, 19 nt, Artificial Sequence
  Description of Artificial Sequence: Synthetic oligonucleotide
uucaacucuugguugaauu

SEQ ID NO: 520457 - RNA, 19 nt, Artificial Sequence
  Description of Artificial Sequence: Synthetic oligonucleotide
uuccaauauagaugcccag

SEQ ID NO: 520458 - RNA, 19 nt, Artificial Sequence
  Description of Artificial Sequence: Synthetic oligonucleotide
gcuucuagcauaaaugaug

SEQ ID NO: 520459 - RNA, 19 nt, Artificial Sequence
  Description of Artificial Sequence: Synthetic oligonucleotide
cuaaagugucucacaggcc

SEQ ID NO: 520460 - RNA, 19 nt, Artificial Sequence
  Description of Artificial Sequence: Synthetic oligonucleotide
ugacucugugguacuauga

SEQ ID NO: 520461 - RNA, 19 nt, Artificial Sequence
  Description of Artificial Sequence: Synthetic oligonucleotide
gugagaaggcaaaucaagc

SEQ ID NO: 520462 - RNA, 19 nt, Artificial Sequence
  Description of Artificial Sequence: Synthetic oligonucleotide
auaguuguuguuguuugca

SEQ ID NO: 520463 - RNA, 19 nt, Artificial Sequence
  Description of Artificial Sequence: Synthetic oligonucleotide
ucacuuaaugagcgauuug

SEQ ID NO: 520464 - RNA, 19 nt, Artificial Sequence
  Description of Artificial Sequence: Synthetic oligonucleotide
aaauaggugagaaggcaaa

SEQ ID NO: 520465 - RNA, 19 nt, Artificial Sequence
  Description of Artificial Sequence: Synthetic oligonucleotide
aaaagacgcccacaaucau

SEQ ID NO: 520466 - RNA, 19 nt, Artificial Sequence
  Description of Artificial Sequence: Synthetic oligonucleotide
aaguuauucuuuagagugu

SEQ ID NO: 520467 - RNA, 19 nt, Artificial Sequence
  Description of Artificial Sequence: Synthetic oligonucleotide
ucaaccuggugcaccgugc

SEQ ID NO: 520468 - RNA, 19 nt, Artificial Sequence
  Description of Artificial Sequence: Synthetic oligonucleotide
ugcuagcaaaccugguugc

SEQ ID NO: 520469 - RNA, 19 nt, Artificial Sequence
  Description of Artificial Sequence: Synthetic oligonucleotide
uuauaaucugcugguggca

SEQ ID NO: 520470 - RNA, 19 nt, Artificial Sequence
  Description of Artificial Sequence: Synthetic oligonucleotide
uuugcaaaccugaccuuau

SEQ ID NO: 520471 - RNA, 19 nt, Artificial Sequence
  Description of Artificial Sequence: Synthetic oligonucleotide
aaauucaagcuuagguuaa

SEQ ID NO: 520472 - RNA, 19 nt, Artificial Sequence
  Description of Artificial Sequence: Synthetic oligonucleotide
aauaggucucaaaugcaaa

SEQ ID NO: 520473 - RNA, 19 nt, Artificial Sequence
  Description of Artificial Sequence: Synthetic oligonucleotide
ugugguugggaaucaugcu

SEQ ID NO: 520474 - RNA, 19 nt, Artificial Sequence
  Description of Artificial Sequence: Synthetic oligonucleotide
uggggacacacucagccaa

SEQ ID NO: 520475 - RNA, 19 nt, Artificial Sequence
  Description of Artificial Sequence: Synthetic oligonucleotide
acaaauaggccaucagauu

SEQ ID NO: 520476 - RNA, 19 nt, Artificial Sequence
  Description of Artificial Sequence: Synthetic oligonucleotide
gguuaguaaauugucucag

SEQ ID NO: 520477 - RNA, 19 nt, Artificial Sequence
  Description of Artificial Sequence: Synthetic oligonucleotide
cuuagguuaagcuuguuuu

SEQ ID NO: 520478 - RNA, 19 nt, Artificial Sequence
  Description of Artificial Sequence: Synthetic oligonucleotide
agguguaaguaaagcuucc

SEQ ID NO: 520479 - RNA, 19 nt, Artificial Sequence
  Description of Artificial Sequence: Synthetic oligonucleotide
cuuuaugugagagaggagu

SEQ ID NO: 520480 - RNA, 19 nt, Artificial Sequence
  Description of Artificial Sequence: Synthetic oligonucleotide
agauaaucugcaauccuga

SEQ ID NO: 520481 - RNA, 19 nt, Artificial Sequence
  Description of Artificial Sequence: Synthetic oligonucleotide
uuuuauaguuguuguuguu

SEQ ID NO: 520482 - RNA, 19 nt, Artificial Sequence
  Description of Artificial Sequence: Synthetic oligonucleotide
cugguuugcaauaggacaa

SEQ ID NO: 520483 - RNA, 19 nt, Artificial Sequence
  Description of Artificial Sequence: Synthetic oligonucleotide
aagacgcccacaaucauuu

SEQ ID NO: 520484 - RNA, 19 nt, Artificial Sequence
  Description of Artificial Sequence: Synthetic oligonucleotide
ugugagagaggaguuaguu

SEQ ID NO: 520485 - RNA, 19 nt, Artificial Sequence
  Description of Artificial Sequence: Synthetic oligonucleotide
gacaagguuaguaaauugu

SEQ ID NO: 520486 - RNA, 19 nt, Artificial Sequence
  Description of Artificial Sequence: Synthetic oligonucleotide
gucguuuuccaauauagau

SEQ ID NO: 520487 - RNA, 19 nt, Artificial Sequence
  Description of Artificial Sequence: Synthetic oligonucleotide
auaaaugaugcagguguga

SEQ ID NO: 520488 - RNA, 19 nt, Artificial Sequence
  Description of Artificial Sequence: Synthetic oligonucleotide
caaagucuacuugagauaa

SEQ ID NO: 520489 - RNA, 19 nt, Artificial Sequence
  Description of Artificial Sequence: Synthetic oligonucleotide
cuaaacgacaggaaacucu

SEQ ID NO: 520490 - RNA, 19 nt, Artificial Sequence
  Description of Artificial Sequence: Synthetic oligonucleotide
agcagagucugaguacaac

SEQ ID NO: 520491 - RNA, 19 nt, Artificial Sequence
  Description of Artificial Sequence: Synthetic oligonucleotide
auucacaaugguucugcaa

SEQ ID NO: 520492 - RNA, 19 nt, Artificial Sequence
  Description of Artificial Sequence: Synthetic oligonucleotide
gugacgucugccugugagg

SEQ ID NO: 520493 - RNA, 19 nt, Artificial Sequence
  Description of Artificial Sequence: Synthetic oligonucleotide
caauaggucucaaaugcaa

SEQ ID NO: 520494 - RNA, 19 nt, Artificial Sequence
  Description of Artificial Sequence: Synthetic oligonucleotide
ccaugaaucagacucguuc

SEQ ID NO: 520495 - RNA, 19 nt, Artificial Sequence
  Description of Artificial Sequence: Synthetic oligonucleotide
aauagggcugugguuggga

SEQ ID NO: 520496 - RNA, 19 nt, Artificial Sequence
  Description of Artificial Sequence: Synthetic oligonucleotide
acuagagaaugaaugguau

SEQ ID NO: 520497 - RNA, 19 nt, Artificial Sequence
  Description of Artificial Sequence: Synthetic oligonucleotide
uguuugcacucaacaagaa

SEQ ID NO: 520498 - RNA, 19 nt, Artificial Sequence
  Description of Artificial Sequence: Synthetic oligonucleotide
auagacaguuguauuguga

SEQ ID NO: 520499 - RNA, 19 nt, Artificial Sequence
  Description of Artificial Sequence: Synthetic oligonucleotide
acaccaugaaucagacucg

SEQ ID NO: 520500 - RNA, 19 nt, Artificial Sequence
  Description of Artificial Sequence: Synthetic oligonucleotide
ugugcucagucguuuucca

SEQ ID NO: 520501 - RNA, 19 nt, Artificial Sequence
  Description of Artificial Sequence: Synthetic oligonucleotide
uuaugucagggcugcaaau

SEQ ID NO: 520502 - RNA, 19 nt, Artificial Sequence
  Description of Artificial Sequence: Synthetic oligonucleotide
uuagaguguaaaggcuuca

SEQ ID NO: 520503 - RNA, 19 nt, Artificial Sequence
  Description of Artificial Sequence: Synthetic oligonucleotide
aaucaagcgucaccagguu

SEQ ID NO: 520504 - RNA, 19 nt, Artificial Sequence
  Description of Artificial Sequence: Synthetic oligonucleotide
cugaccuuauuuagaaaga

SEQ ID NO: 520505 - RNA, 19 nt, Artificial Sequence
  Description of Artificial Sequence: Synthetic oligonucleotide
ggacaagguuaguaaauug

SEQ ID NO: 520506 - RNA, 19 nt, Artificial Sequence
  Description of Artificial Sequence: Synthetic oligonucleotide
gcauuccuuagaaauaaag

SEQ ID NO: 520507 - RNA, 19 nt, Artificial Sequence
  Description of Artificial Sequence: Synthetic oligonucleotide
aguuauucuuuagagugua

SEQ ID NO: 520508 - RNA, 19 nt, Artificial Sequence
  Description of Artificial Sequence: Synthetic oligonucleotide
uuagccucagcagccuugc

SEQ ID NO: 520509 - RNA, 19 nt, Artificial Sequence
  Description of Artificial Sequence: Synthetic oligonucleotide
ugacgucugccugugaggu

SEQ ID NO: 520510 - RNA, 19 nt, Artificial Sequence
  Description of Artificial Sequence: Synthetic oligonucleotide
uugcucugcuugaucacac

SEQ ID NO: 520511 - RNA, 19 nt, Artificial Sequence
  Description of Artificial Sequence: Synthetic oligonucleotide
aggagcauaaacauccuuu

SEQ ID NO: 520512 - RNA, 19 nt, Artificial Sequence
  Description of Artificial Sequence: Synthetic oligonucleotide
acuuaaugagcgauuugcu

SEQ ID NO: 520513 - RNA, 19 nt, Artificial Sequence
  Description of Artificial Sequence: Synthetic oligonucleotide
ucuaaacgacaggaaacuc

SEQ ID NO: 520514 - RNA, 19 nt, Artificial Sequence
  Description of Artificial Sequence: Synthetic oligonucleotide
uauaacccuuuaugugaga

SEQ ID NO: 520515 - RNA, 19 nt, Artificial Sequence
  Description of Artificial Sequence: Synthetic oligonucleotide
ccauguuccaugauauuac

SEQ ID NO: 520516 - RNA, 19 nt, Artificial Sequence
  Description of Artificial Sequence: Synthetic oligonucleotide
auagaauccuucagaguca

SEQ ID NO: 520517 - RNA, 19 nt, Artificial Sequence
  Description of Artificial Sequence: Synthetic oligonucleotide
gacuagagaaugaauggua

SEQ ID NO: 520518 - RNA, 19 nt, Artificial Sequence
  Description of Artificial Sequence: Synthetic oligonucleotide
aaucaacaccgcacaagcu

SEQ ID NO: 520519 - RNA, 19 nt, Artificial Sequence
  Description of Artificial Sequence: Synthetic oligonucleotide
ggcaaaacuaaauuuaguu

SEQ ID NO: 520520 - RNA, 19 nt, Artificial Sequence
  Description of Artificial Sequence: Synthetic oligonucleotide
uucuagcauaaaugaugca

SEQ ID NO: 520521 - RNA, 19 nt, Artificial Sequence
  Description of Artificial Sequence: Synthetic oligonucleotide
uagcaaaccugguugccau

SEQ ID NO: 520522 - RNA, 19 nt, Artificial Sequence
  Description of Artificial Sequence: Synthetic oligonucleotide
acgacaggaaacucuguua

SEQ ID NO: 520523 - RNA, 19 nt, Artificial Sequence
  Description of Artificial Sequence: Synthetic oligonucleotide
gugaccauguuccaugaua

SEQ ID NO: 520524 - RNA, 19 nt, Artificial Sequence
  Description of Artificial Sequence: Synthetic oligonucleotide
uacuugagauaaucugcaa

SEQ ID NO: 520525 - RNA, 19 nt, Artificial Sequence
  Description of Artificial Sequence: Synthetic oligonucleotide
ugugaacugugcuguaguu

SEQ ID NO: 520526 - RNA, 19 nt, Artificial Sequence
  Description of Artificial Sequence: Synthetic oligonucleotide
gugacucugugguacuaug

SEQ ID NO: 520527 - RNA, 19 nt, Artificial Sequence
  Description of Artificial Sequence: Synthetic oligonucleotide
uuaugugagagaggaguua

SEQ ID NO: 520528 - RNA, 19 nt, Artificial Sequence
  Description of Artificial Sequence: Synthetic oligonucleotide
uccuaaagcuucacauuuu

SEQ ID NO: 520529 - RNA, 19 nt, Artificial Sequence
  Description of Artificial Sequence: Synthetic oligonucleotide
cgcacaagcucacugauag

SEQ ID NO: 520530 - RNA, 19 nt, Artificial Sequence
  Description of Artificial Sequence: Synthetic oligonucleotide
caagguuaguaaauugucu

SEQ ID NO: 520531 - RNA, 19 nt, Artificial Sequence
  Description of Artificial Sequence: Synthetic oligonucleotide
agaaagucugucauucaaa

SEQ ID NO: 520532 - RNA, 19 nt, Artificial Sequence
  Description of Artificial Sequence: Synthetic oligonucleotide
acgucugccugugagguca

SEQ ID NO: 520533 - RNA, 19 nt, Artificial Sequence
  Description of Artificial Sequence: Synthetic oligonucleotide
cuugucgcaguugcacagg

SEQ ID NO: 520534 - RNA, 19 nt, Artificial Sequence
  Description of Artificial Sequence: Synthetic oligonucleotide
agcucacugauagacaguu

SEQ ID NO: 520535 - RNA, 19 nt, Artificial Sequence
  Description of Artificial Sequence: Synthetic oligonucleotide
ugagcgauuugcucugcuu

SEQ ID NO: 520536 - RNA, 19 nt, Artificial Sequence
  Description of Artificial Sequence: Synthetic oligonucleotide
augcuuacaauaggucuca

SEQ ID NO: 520537 - RNA, 19 nt, Artificial Sequence
  Description of Artificial Sequence: Synthetic oligonucleotide
agccucuauuaacaccaug

SEQ ID NO: 520538 - RNA, 19 nt, Artificial Sequence
  Description of Artificial Sequence: Synthetic oligonucleotide
gucaaccuggugcaccgug

SEQ ID NO: 520539 - RNA, 19 nt, Artificial Sequence
  Description of Artificial Sequence: Synthetic oligonucleotide
cuuuagaguguaaaggcuu

SEQ ID NO: 520540 - RNA, 19 nt, Artificial Sequence
  Description of Artificial Sequence: Synthetic oligonucleotide
cuaacaauuugguccuaaa

SEQ ID NO: 520541 - RNA, 19 nt, Artificial Sequence
  Description of Artificial Sequence: Synthetic oligonucleotide
cagacucguuccaagucuc

SEQ ID NO: 520542 - RNA, 19 nt, Artificial Sequence
  Description of Artificial Sequence: Synthetic oligonucleotide
auauagaugcccagcccca

SEQ ID NO: 520543 - RNA, 19 nt, Artificial Sequence
  Description of Artificial Sequence: Synthetic oligonucleotide
aagggacuagagaaugaau

SEQ ID NO: 520544 - RNA, 19 nt, Artificial Sequence
  Description of Artificial Sequence: Synthetic oligonucleotide
uagaauccuucagagucau

SEQ ID NO: 520545 - RNA, 19 nt, Artificial Sequence
  Description of Artificial Sequence: Synthetic oligonucleotide
gggaaucaugcuuacaaua

SEQ ID NO: 520546 - RNA, 19 nt, Artificial Sequence
  Description of Artificial Sequence: Synthetic oligonucleotide
gcuugucgcaguugcacag

SEQ ID NO: 520547 - RNA, 19 nt, Artificial Sequence
  Description of Artificial Sequence: Synthetic oligonucleotide
gaacugugcuguaguuuag

SEQ ID NO: 520548 - RNA, 19 nt, Artificial Sequence
  Description of Artificial Sequence: Synthetic oligonucleotide
gcaccgugcagguugcuag

SEQ ID NO: 520549 - RNA, 19 nt, Artificial Sequence
  Description of Artificial Sequence: Synthetic oligonucleotide
uggcuagaauacagcuucu

SEQ ID NO: 520550 - RNA, 19 nt, Artificial Sequence
  Description of Artificial Sequence: Synthetic oligonucleotide
acaguuguauugugaccau

SEQ ID NO: 520551 - RNA, 19 nt, Artificial Sequence
  Description of Artificial Sequence: Synthetic oligonucleotide
uuugguccuaaagcuucac

SEQ ID NO: 520552 - RNA, 19 nt, Artificial Sequence
  Description of Artificial Sequence: Synthetic oligonucleotide
ugguugaauucugguuugc

SEQ ID NO: 520553 - RNA, 19 nt, Artificial Sequence
  Description of Artificial Sequence: Synthetic oligonucleotide
aagcuuagguuaagcuugu

SEQ ID NO: 520554 - RNA, 19 nt, Artificial Sequence
  Description of Artificial Sequence: Synthetic oligonucleotide
gagucaugcuauguucuga

SEQ ID NO: 520555 - RNA, 19 nt, Artificial Sequence
  Description of Artificial Sequence: Synthetic oligonucleotide
aucaagcgucaccagguuu

SEQ ID NO: 520556 - RNA, 19 nt, Artificial Sequence
  Description of Artificial Sequence: Synthetic oligonucleotide
ggacaaucuguuugcacuc

SEQ ID NO: 520557 - RNA, 19 nt, Artificial Sequence
  Description of Artificial Sequence: Synthetic oligonucleotide
guccuaaagcuucacauuu

SEQ ID NO: 520558 - RNA, 19 nt, Artificial Sequence
  Description of Artificial Sequence: Synthetic oligonucleotide
cacgcgcauuuccaggggc

SEQ ID NO: 520559 - RNA, 19 nt, Artificial Sequence
  Description of Artificial Sequence: Synthetic oligonucleotide
auaggacaaucuguuugca

SEQ ID NO: 520560 - RNA, 19 nt, Artificial Sequence
  Description of Artificial Sequence: Synthetic oligonucleotide
gaaacucuguuaggaaucu

SEQ ID NO: 520561 - RNA, 19 nt, Artificial Sequence
  Description of Artificial Sequence: Synthetic oligonucleotide
gcugcaaaucaacaccgca

SEQ ID NO: 520562 - RNA, 19 nt, Artificial Sequence
  Description of Artificial Sequence: Synthetic oligonucleotide
acgcccacaaucauuuaga

SEQ ID NO: 520563 - RNA, 19 nt, Artificial Sequence
  Description of Artificial Sequence: Synthetic oligonucleotide
cuagcaaaccugguugcca

SEQ ID NO: 520564 - RNA, 19 nt, Artificial Sequence
  Description of Artificial Sequence: Synthetic oligonucleotide
uauagaugcccagccccaa

SEQ ID NO: 520565 - RNA, 19 nt, Artificial Sequence
  Description of Artificial Sequence: Synthetic oligonucleotide
guauugugaccauguucca

SEQ ID NO: 520566 - RNA, 19 nt, Artificial Sequence
  Description of Artificial Sequence: Synthetic oligonucleotide
ugcacucaacaagaaucuc

SEQ ID NO: 520567 - RNA, 19 nt, Artificial Sequence
  Description of Artificial Sequence: Synthetic oligonucleotide
aagcucacugauagacagu

SEQ ID NO: 520568 - RNA, 19 nt, Artificial Sequence
  Description of Artificial Sequence: Synthetic oligonucleotide
cccuuuaugugagagagga

SEQ ID NO: 520569 - RNA, 19 nt, Artificial Sequence
  Description of Artificial Sequence: Synthetic oligonucleotide
agcuucuagcauaaaugau

SEQ ID NO: 520570 - RNA, 19 nt, Artificial Sequence
  Description of Artificial Sequence: Synthetic oligonucleotide
caccgugcagguugcuagc

SEQ ID NO: 520571 - RNA, 19 nt, Artificial Sequence
  Description of Artificial Sequence: Synthetic oligonucleotide
uacuuuccauuuccauaua

SEQ ID NO: 520572 - RNA, 19 nt, Artificial Sequence
  Description of Artificial Sequence: Synthetic oligonucleotide
ggagauccuagggacacac

SEQ ID NO: 520573 - RNA, 19 nt, Artificial Sequence
  Description of Artificial Sequence: Synthetic oligonucleotide
cugugguacuaugaggaga

SEQ ID NO: 520574 - RNA, 19 nt, Artificial Sequence
  Description of Artificial Sequence: Synthetic oligonucleotide
gaaucucuguaggagcaua

SEQ ID NO: 520575 - RNA, 19 nt, Artificial Sequence
  Description of Artificial Sequence: Synthetic oligonucleotide
cagagucaugcuauguucu

SEQ ID NO: 520576 - RNA, 19 nt, Artificial Sequence
  Description of Artificial Sequence: Synthetic oligonucleotide
ugguuugcaauaggacaau

SEQ ID NO: 520577 - RNA, 19 nt, Artificial Sequence
  Description of Artificial Sequence: Synthetic oligonucleotide
aguguccccacaguuugau

SEQ ID NO: 520578 - RNA, 19 nt, Artificial Sequence
  Description of Artificial Sequence: Synthetic oligonucleotide
aggagaccauggcauuggu

SEQ ID NO: 520579 - RNA, 19 nt, Artificial Sequence
  Description of Artificial Sequence: Synthetic oligonucleotide
acccuuuaugugagagagg

SEQ ID NO: 520580 - RNA, 19 nt, Artificial Sequence
  Description of Artificial Sequence: Synthetic oligonucleotide
cacaaucauuuagacauua

SEQ ID NO: 520581 - RNA, 19 nt, Artificial Sequence
  Description of Artificial Sequence: Synthetic oligonucleotide
caacaccgcacaagcucac

SEQ ID NO: 520582 - RNA, 19 nt, Artificial Sequence
  Description of Artificial Sequence: Synthetic oligonucleotide
ccuaaaacaagaagccucu

SEQ ID NO: 520583 - RNA, 19 nt, Artificial Sequence
  Description of Artificial Sequence: Synthetic oligonucleotide
caggccacgcgcauuucca

SEQ ID NO: 520584 - RNA, 19 nt, Artificial Sequence
  Description of Artificial Sequence: Synthetic oligonucleotide
cugcaauccugaugcuguc

SEQ ID NO: 520585 - RNA, 19 nt, Artificial Sequence
  Description of Artificial Sequence: Synthetic oligonucleotide
cucggugcugcuuuccucu

SEQ ID NO: 520586 - RNA, 19 nt, Artificial Sequence
  Description of Artificial Sequence: Synthetic oligonucleotide
gguugggaaucaugcuuac

SEQ ID NO: 520587 - RNA, 19 nt, Artificial Sequence
  Description of Artificial Sequence: Synthetic oligonucleotide
gggcaaaagacgcccacaa

SEQ ID NO: 520588 - RNA, 19 nt, Artificial Sequence
  Description of Artificial Sequence: Synthetic oligonucleotide
ucuaggccugaggcauucc

SEQ ID NO: 520589 - RNA, 19 nt, Artificial Sequence
  Description of Artificial Sequence: Synthetic oligonucleotide
cacaggugcuuggaauaac

SEQ ID NO: 520590 - RNA, 19 nt, Artificial Sequence
  Description of Artificial Sequence: Synthetic oligonucleotide
gcuuacaauaggucucaaa

SEQ ID NO: 520591 - RNA, 19 nt, Artificial Sequence
  Description of Artificial Sequence: Synthetic oligonucleotide
gucaugcuauguucugaaa

SEQ ID NO: 520592 - RNA, 19 nt, Artificial Sequence
  Description of Artificial Sequence: Synthetic oligonucleotide
gucgcauggcuagaauaca

SEQ ID NO: 520593 - RNA, 19 nt, Artificial Sequence
  Description of Artificial Sequence: Synthetic oligonucleotide
cgcauggcuagaauacagc

SEQ ID NO: 520594 - RNA, 19 nt, Artificial Sequence
  Description of Artificial Sequence: Synthetic oligonucleotide
guugggaaucaugcuuaca

SEQ ID NO: 520595 - RNA, 19 nt, Artificial Sequence
  Description of Artificial Sequence: Synthetic oligonucleotide
caaccuggugcaccgugca

SEQ ID NO: 520596 - RNA, 19 nt, Artificial Sequence
  Description of Artificial Sequence: Synthetic oligonucleotide
gacgucugccugugagguc

SEQ ID NO: 520597 - RNA, 19 nt, Artificial Sequence
  Description of Artificial Sequence: Synthetic oligonucleotide
gcuagcaaaccugguugcc

SEQ ID NO: 520598 - RNA, 19 nt, Artificial Sequence
  Description of Artificial Sequence: Synthetic oligonucleotide
augugagagaggaguuagu

SEQ ID NO: 520599 - RNA, 19 nt, Artificial Sequence
  Description of Artificial Sequence: Synthetic oligonucleotide
acaugcuagcaaaccuggu

SEQ ID NO: 520600 - RNA, 19 nt, Artificial Sequence
  Description of Artificial Sequence: Synthetic oligonucleotide
guaaaggcuucagguguaa

SEQ ID NO: 520601 - RNA, 19 nt, Artificial Sequence
  Description of Artificial Sequence: Synthetic oligonucleotide
accgugcagguugcuagcu

SEQ ID NO: 520602 - RNA, 19 nt, Artificial Sequence
  Description of Artificial Sequence: Synthetic oligonucleotide
caccaauuuuauaacccuu

SEQ ID NO: 520603 - RNA, 19 nt, Artificial Sequence
  Description of Artificial Sequence: Synthetic oligonucleotide
ugcuuacaauaggucucaa

SEQ ID NO: 520604 - RNA, 19 nt, Artificial Sequence
  Description of Artificial Sequence: Synthetic oligonucleotide
agacucguuccaagucucu

SEQ ID NO: 520605 - RNA, 19 nt, Artificial Sequence
  Description of Artificial Sequence: Synthetic oligonucleotide
auguagucgcauggcuaga

SEQ ID NO: 520606 - RNA, 19 nt, Artificial Sequence
  Description of Artificial Sequence: Synthetic oligonucleotide
cuaggccugaggcauuccu

SEQ ID NO: 520607 - RNA, 19 nt, Artificial Sequence
  Description of Artificial Sequence: Synthetic oligonucleotide
gcuuagguuaagcuuguuu

SEQ ID NO: 520608 - RNA, 19 nt, Artificial Sequence
  Description of Artificial Sequence: Synthetic oligonucleotide
cacaaugguucugcaacua

SEQ ID NO: 520609 - RNA, 19 nt, Artificial Sequence
  Description of Artificial Sequence: Synthetic oligonucleotide
gcucagucguuuuccaaua

SEQ ID NO: 520610 - RNA, 19 nt, Artificial Sequence
  Description of Artificial Sequence: Synthetic oligonucleotide
cauuggugacaagauuaua

SEQ ID NO: 520611 - RNA, 19 nt, Artificial Sequence
  Description of Artificial Sequence: Synthetic oligonucleotide
aagcgucaccagguuuaaa

SEQ ID NO: 520612 - RNA, 19 nt, Artificial Sequence
  Description of Artificial Sequence: Synthetic oligonucleotide
guagucgcauggcuagaau

SEQ ID NO: 520613 - RNA, 19 nt, Artificial Sequence
  Description of Artificial Sequence: Synthetic oligonucleotide
gaccauguuccaugauauu

SEQ ID NO: 520614 - RNA, 19 nt, Artificial Sequence
  Description of Artificial Sequence: Synthetic oligonucleotide
agucaaccuggugcaccgu

SEQ ID NO: 520615 - RNA, 19 nt, Artificial Sequence
  Description of Artificial Sequence: Synthetic oligonucleotide
gguugcuagcuuugaaauu

SEQ ID NO: 520616 - RNA, 19 nt, Artificial Sequence
  Description of Artificial Sequence: Synthetic oligonucleotide
agacgcccacaaucauuua

SEQ ID NO: 520617 - RNA, 19 nt, Artificial Sequence
  Description of Artificial Sequence: Synthetic oligonucleotide
ggacacacucagccaagua

SEQ ID NO: 520618 - RNA, 19 nt, Artificial Sequence
  Description of Artificial Sequence: Synthetic oligonucleotide
gacucguuccaagucucuu

SEQ ID NO: 520619 - RNA, 19 nt, Artificial Sequence
  Description of Artificial Sequence: Synthetic oligonucleotide
accaugaaucagacucguu

SEQ ID NO: 520620 - RNA, 19 nt, Artificial Sequence
  Description of Artificial Sequence: Synthetic oligonucleotide
caccaugaaucagacucgu

SEQ ID NO: 520621 - RNA, 19 nt, Artificial Sequence
  Description of Artificial Sequence: Synthetic oligonucleotide
gggacaagguuaguaaauu

SEQ ID NO: 520622 - RNA, 19 nt, Artificial Sequence
  Description of Artificial Sequence: Synthetic oligonucleotide
ggcuagaauacagcuucua

SEQ ID NO: 520623 - RNA, 19 nt, Artificial Sequence
  Description of Artificial Sequence: Synthetic oligonucleotide
caagcgucaccagguuuaa

SEQ ID NO: 520624 - RNA, 19 nt, Artificial Sequence
  Description of Artificial Sequence: Synthetic oligonucleotide
gcaauaggacaaucuguuu

SEQ ID NO: 520625 - RNA, 19 nt, Artificial Sequence
  Description of Artificial Sequence: Synthetic oligonucleotide
gagauccuagggacacacu

SEQ ID NO: 520626 - RNA, 19 nt, Artificial Sequence
  Description of Artificial Sequence: Synthetic oligonucleotide
cagccuugccaauuugauu

SEQ ID NO: 520627 - RNA, 19 nt, Artificial Sequence
  Description of Artificial Sequence: Synthetic oligonucleotide
agcuuagguuaagcuuguu

SEQ ID NO: 520628 - RNA, 19 nt, Artificial Sequence
  Description of Artificial Sequence: Synthetic oligonucleotide
ggcaaaagacgcccacaau

SEQ ID NO: 520629 - RNA, 19 nt, Artificial Sequence
  Description of Artificial Sequence: Synthetic oligonucleotide
gcacaggugcuuggaauaa

SEQ ID NO: 520630 - RNA, 19 nt, Artificial Sequence
  Description of Artificial Sequence: Synthetic oligonucleotide
cuucacaggccacgcgcau

SEQ ID NO: 520631 - RNA, 19 nt, Artificial Sequence
  Description of Artificial Sequence: Synthetic oligonucleotide
ccgggucugcuugucgcag

SEQ ID NO: 520632 - RNA, 19 nt, Artificial Sequence
  Description of Artificial Sequence: Synthetic oligonucleotide
gggagauccuagggacaca

SEQ ID NO: 520633 - RNA, 19 nt, Artificial Sequence
  Description of Artificial Sequence: Synthetic oligonucleotide
caaccccgggucugcuugu

SEQ ID NO: 520634 - RNA, 19 nt, Artificial Sequence
  Description of Artificial Sequence: Synthetic oligonucleotide
caccagcauugugaacugu

SEQ ID NO: 520635 - RNA, 19 nt, Artificial Sequence
  Description of Artificial Sequence: Synthetic oligonucleotide
ccgcacaagcucacugaua

SEQ ID NO: 520636 - RNA, 19 nt, Artificial Sequence
  Description of Artificial Sequence: Synthetic oligonucleotide
gcgauuugcucugcuugau

SEQ ID NO: 520637 - RNA, 19 nt, Artificial Sequence
  Description of Artificial Sequence: Synthetic oligonucleotide
ccuuuaugucagggcugca

SEQ ID NO: 520638 - RNA, 19 nt, Artificial Sequence
  Description of Artificial Sequence: Synthetic oligonucleotide
gcgcauuuccaggggcuuu

SEQ ID NO: 520639 - RNA, 19 nt, Artificial Sequence
  Description of Artificial Sequence: Synthetic oligonucleotide
ccgugcagguugcuagcuu

SEQ ID NO: 520640 - RNA, 19 nt, Artificial Sequence
  Description of Artificial Sequence: Synthetic oligonucleotide
aaguuaugccaccacaucc

SEQ ID NO: 520641 - RNA, 19 nt, Artificial Sequence
  Description of Artificial Sequence: Synthetic oligonucleotide
uauugagaguauuugaugg

SEQ ID NO: 520642 - RNA, 19 nt, Artificial Sequence
  Description of Artificial Sequence: Synthetic oligonucleotide
gaauagaagaacaaacugg

SEQ ID NO: 520643 - RNA, 19 nt, Artificial Sequence
  Description of Artificial Sequence: Synthetic oligonucleotide
ucuugcuauaaucacacag

SEQ ID NO: 520644 - RNA, 19 nt, Artificial Sequence
  Description of Artificial Sequence: Synthetic oligonucleotide
auuagcguauuccaguccc

SEQ ID NO: 520645 - RNA, 19 nt, Artificial Sequence
  Description of Artificial Sequence: Synthetic oligonucleotide
ucauuguacaacuuagagg

SEQ ID NO: 520646 - RNA, 19 nt, Artificial Sequence
  Description of Artificial Sequence: Synthetic oligonucleotide
aacuuagaggaagaaaugg

SEQ ID NO: 520647 - RNA, 19 nt, Artificial Sequence
  Description of Artificial Sequence: Synthetic oligonucleotide
acaaccgucaccuggcucc

SEQ ID NO: 520648 - RNA, 19 nt, Artificial Sequence
  Description of Artificial Sequence: Synthetic oligonucleotide
gcuauaaucacacagaguc

SEQ ID NO: 520649 - RNA, 19 nt, Artificial Sequence
  Description of Artificial Sequence: Synthetic oligonucleotide
uggacggauacucagagug

SEQ ID NO: 520650 - RNA, 19 nt, Artificial Sequence
  Description of Artificial Sequence: Synthetic oligonucleotide
aguacagucucaaaguagc

SEQ ID NO: 520651 - RNA, 19 nt, Artificial Sequence
  Description of Artificial Sequence: Synthetic oligonucleotide
agaaacaaccgucaccugg

SEQ ID NO: 520652 - RNA, 19 nt, Artificial Sequence
  Description of Artificial Sequence: Synthetic oligonucleotide
aguucauaagcauugggug

SEQ ID NO: 520653 - RNA, 19 nt, Artificial Sequence
  Description of Artificial Sequence: Synthetic oligonucleotide
ucuuagaauugcugcaucg

SEQ ID NO: 520654 - RNA, 19 nt, Artificial Sequence
  Description of Artificial Sequence: Synthetic oligonucleotide
agacgcauucaccagaggg

SEQ ID NO: 520655 - RNA, 19 nt, Artificial Sequence
  Description of Artificial Sequence: Synthetic oligonucleotide
caaugacgugauuagaugg

SEQ ID NO: 520656 - RNA, 19 nt, Artificial Sequence
  Description of Artificial Sequence: Synthetic oligonucleotide
ugaagaaacaaccgucacc

SEQ ID NO: 520657 - RNA, 19 nt, Artificial Sequence
  Description of Artificial Sequence: Synthetic oligonucleotide
gacgaauccacggagaaag

SEQ ID NO: 520658 - RNA, 19 nt, Artificial Sequence
  Description of Artificial Sequence: Synthetic oligonucleotide
cagaaacgcacacagaugc

SEQ ID NO: 520659 - RNA, 19 nt, Artificial Sequence
  Description of Artificial Sequence: Synthetic oligonucleotide
aauacuucguaugucugag

SEQ ID NO: 520660 - RNA, 19 nt, Artificial Sequence
  Description of Artificial Sequence: Synthetic oligonucleotide
auuagaugggaggucagcc

SEQ ID NO: 520661 - RNA, 19 nt, Artificial Sequence
  Description of Artificial Sequence: Synthetic oligonucleotide
cucguugucagcaaaggag

SEQ ID NO: 520662 - RNA, 19 nt, Artificial Sequence
  Description of Artificial Sequence: Synthetic oligonucleotide
gacgugauuagaugggagg

SEQ ID NO: 520663 - RNA, 19 nt, Artificial Sequence
  Description of Artificial Sequence: Synthetic oligonucleotide
aagagaauggggaaccacg

SEQ ID NO: 520664 - RNA, 19 nt, Artificial Sequence
  Description of Artificial Sequence: Synthetic oligonucleotide
ugauauugagaguauuuga

SEQ ID NO: 520665 - RNA, 19 nt, Artificial Sequence
  Description of Artificial Sequence: Synthetic oligonucleotide
caaaguagccugcaaagcc

SEQ ID NO: 520666 - RNA, 19 nt, Artificial Sequence
  Description of Artificial Sequence: Synthetic oligonucleotide
cuuaaggggaaagagaaug

SEQ ID NO: 520667 - RNA, 19 nt, Artificial Sequence
  Description of Artificial Sequence: Synthetic oligonucleotide
gauacucagagugaugucc

SEQ ID NO: 520668 - RNA, 19 nt, Artificial Sequence
  Description of Artificial Sequence: Synthetic oligonucleotide
aaugacgugauuagauggg

SEQ ID NO: 520669 - RNA, 19 nt, Artificial Sequence
  Description of Artificial Sequence: Synthetic oligonucleotide
cucauuguacaacuuagag

SEQ ID NO: 520670 - RNA, 19 nt, Artificial Sequence
  Description of Artificial Sequence: Synthetic oligonucleotide
auauugagaguauuugaug

SEQ ID NO: 520671 - RNA, 19 nt, Artificial Sequence
  Description of Artificial Sequence: Synthetic oligonucleotide
uguacaacuuagaggaaga

SEQ ID NO: 520672 - RNA, 19 nt, Artificial Sequence
  Description of Artificial Sequence: Synthetic oligonucleotide
agaguauuugauggggucc

SEQ ID NO: 520673 - RNA, 19 nt, Artificial Sequence
  Description of Artificial Sequence: Synthetic oligonucleotide
cuucguaugucugagauuc

SEQ ID NO: 520674 - RNA, 19 nt, Artificial Sequence
  Description of Artificial Sequence: Synthetic oligonucleotide
aacauagccgcuucagagu

SEQ ID NO: 520675 - RNA, 19 nt, Artificial Sequence
  Description of Artificial Sequence: Synthetic oligonucleotide
ucgccagaaacgcacacag

SEQ ID NO: 520676 - RNA, 19 nt, Artificial Sequence
  Description of Artificial Sequence: Synthetic oligonucleotide
agaguucauaagcauuggg

SEQ ID NO: 520677 - RNA, 19 nt, Artificial Sequence
  Description of Artificial Sequence: Synthetic oligonucleotide
ggagguauauucuccaggg

SEQ ID NO: 520678 - RNA, 19 nt, Artificial Sequence
  Description of Artificial Sequence: Synthetic oligonucleotide
uuauccgccggucagccug

SEQ ID NO: 520679 - RNA, 19 nt, Artificial Sequence
  Description of Artificial Sequence: Synthetic oligonucleotide
ugccccgaaauucagcucc

SEQ ID NO: 520680 - RNA, 19 nt, Artificial Sequence
  Description of Artificial Sequence: Synthetic oligonucleotide
accguguucaccuccacag

SEQ ID NO: 520681 - RNA, 19 nt, Artificial Sequence
  Description of Artificial Sequence: Synthetic oligonucleotide
uaugccccgaaauucagcu

SEQ ID NO: 520682 - RNA, 19 nt, Artificial Sequence
  Description of Artificial Sequence: Synthetic oligonucleotide
ugauaaacugcacuuccaa

SEQ ID NO: 520683 - RNA, 19 nt, Artificial Sequence
  Description of Artificial Sequence: Synthetic oligonucleotide
ugaugucccgauaaaguac

SEQ ID NO: 520684 - RNA, 19 nt, Artificial Sequence
  Description of Artificial Sequence: Synthetic oligonucleotide
uguaacauagccgcuucag

SEQ ID NO: 520685 - RNA, 19 nt, Artificial Sequence
  Description of Artificial Sequence: Synthetic oligonucleotide
cuauaaucacacagagucc

SEQ ID NO: 520686 - RNA, 19 nt, Artificial Sequence
  Description of Artificial Sequence: Synthetic oligonucleotide
ucaaucauaggaucucggu

SEQ ID NO: 520687 - RNA, 19 nt, Artificial Sequence
  Description of Artificial Sequence: Synthetic oligonucleotide
uacuucguaugucugagau

SEQ ID NO: 520688 - RNA, 19 nt, Artificial Sequence
  Description of Artificial Sequence: Synthetic oligonucleotide
acgcaauucaggucccucc

SEQ ID NO: 520689 - RNA, 19 nt, Artificial Sequence
  Description of Artificial Sequence: Synthetic oligonucleotide
acauuuguagauagccugc

SEQ ID NO: 520690 - RNA, 19 nt, Artificial Sequence
  Description of Artificial Sequence: Synthetic oligonucleotide
aaucccuucuuguugguua

SEQ ID NO: 520691 - RNA, 19 nt, Artificial Sequence
  Description of Artificial Sequence: Synthetic oligonucleotide
gaaaaugcugguggggagg

SEQ ID NO: 520692 - RNA, 19 nt, Artificial Sequence
  Description of Artificial Sequence: Synthetic oligonucleotide
ugcaucgccagaaacgcac

SEQ ID NO: 520693 - RNA, 19 nt, Artificial Sequence
  Description of Artificial Sequence: Synthetic oligonucleotide
ucgauucuuagcagguucc

SEQ ID NO: 520694 - RNA, 19 nt, Artificial Sequence
  Description of Artificial Sequence: Synthetic oligonucleotide
aaacuggugcugucaccgc

SEQ ID NO: 520695 - RNA, 19 nt, Artificial Sequence
  Description of Artificial Sequence: Synthetic oligonucleotide
auagccgcuucagaguucc

SEQ ID NO: 520696 - RNA, 19 nt, Artificial Sequence
  Description of Artificial Sequence: Synthetic oligonucleotide
aaguacagucucaaaguag

SEQ ID NO: 520697 - RNA, 19 nt, Artificial Sequence
  Description of Artificial Sequence: Synthetic oligonucleotide
cacaauuagcguauuccag

SEQ ID NO: 520698 - RNA, 19 nt, Artificial Sequence
  Description of Artificial Sequence: Synthetic oligonucleotide
uucggggacgcaauucagg

SEQ ID NO: 520699 - RNA, 19 nt, Artificial Sequence
  Description of Artificial Sequence: Synthetic oligonucleotide
gaaacaaccgucaccuggc

SEQ ID NO: 520700 - RNA, 19 nt, Artificial Sequence
  Description of Artificial Sequence: Synthetic oligonucleotide
gucccgauaaaguacaguc

SEQ ID NO: 520701 - RNA, 19 nt, Artificial Sequence
  Description of Artificial Sequence: Synthetic oligonucleotide
acacucaggcgacagcucg

SEQ ID NO: 520702 - RNA, 19 nt, Artificial Sequence
  Description of Artificial Sequence: Synthetic oligonucleotide
uuuggagucuggacgaauc

SEQ ID NO: 520703 - RNA, 19 nt, Artificial Sequence
  Description of Artificial Sequence: Synthetic oligonucleotide
cugauauugagaguauuug

SEQ ID NO: 520704 - RNA, 19 nt, Artificial Sequence
  Description of Artificial Sequence: Synthetic oligonucleotide
agcacuagaggccaauggu

SEQ ID NO: 520705 - RNA, 19 nt, Artificial Sequence
  Description of Artificial Sequence: Synthetic oligonucleotide
ugacgugauuagaugggag

SEQ ID NO: 520706 - RNA, 19 nt, Artificial Sequence
  Description of Artificial Sequence: Synthetic oligonucleotide
aacaaccgucaccuggcuc

SEQ ID NO: 520707 - RNA, 19 nt, Artificial Sequence
  Description of Artificial Sequence: Synthetic oligonucleotide
gaguccugaaguuaugcca

SEQ ID NO: 520708 - RNA, 19 nt, Artificial Sequence
  Description of Artificial Sequence: Synthetic oligonucleotide
ugagaguauuugauggggu

SEQ ID NO: 520709 - RNA, 19 nt, Artificial Sequence
  Description of Artificial Sequence: Synthetic oligonucleotide
cagguuuguguuaucuucc

SEQ ID NO: 520710 - RNA, 19 nt, Artificial Sequence
  Description of Artificial Sequence: Synthetic oligonucleotide
ucuagcgucaccacagcau

SEQ ID NO: 520711 - RNA, 19 nt, Artificial Sequence
  Description of Artificial Sequence: Synthetic oligonucleotide
auuucggggacgcaauuca

SEQ ID NO: 520712 - RNA, 19 nt, Artificial Sequence
  Description of Artificial Sequence: Synthetic oligonucleotide
gugauggguugcuuaaggg

SEQ ID NO: 520713 - RNA, 19 nt, Artificial Sequence
  Description of Artificial Sequence: Synthetic oligonucleotide
gaugugguuggucaaaacu

SEQ ID NO: 520714 - RNA, 19 nt, Artificial Sequence
  Description of Artificial Sequence: Synthetic oligonucleotide
ugaaccguuccucucugac

SEQ ID NO: 520715 - RNA, 19 nt, Artificial Sequence
  Description of Artificial Sequence: Synthetic oligonucleotide
uuggagucuggacgaaucc

SEQ ID NO: 520716 - RNA, 19 nt, Artificial Sequence
  Description of Artificial Sequence: Synthetic oligonucleotide
guuggucaaaacucuggcc

SEQ ID NO: 520717 - RNA, 19 nt, Artificial Sequence
  Description of Artificial Sequence: Synthetic oligonucleotide
uguuaucuuccugauucag

SEQ ID NO: 520718 - RNA, 19 nt, Artificial Sequence
  Description of Artificial Sequence: Synthetic oligonucleotide
ucaagagcuacugcaauuc

SEQ ID NO: 520719 - RNA, 19 nt, Artificial Sequence
  Description of Artificial Sequence: Synthetic oligonucleotide
caacuuagaggaagaaaug

SEQ ID NO: 520720 - RNA, 19 nt, Artificial Sequence
  Description of Artificial Sequence: Synthetic oligonucleotide
uccaagguacaguagcggu

SEQ ID NO: 520721 - RNA, 19 nt, Artificial Sequence
  Description of Artificial Sequence: Synthetic oligonucleotide
gauggguugcuuaagggga

SEQ ID NO: 520722 - RNA, 19 nt, Artificial Sequence
  Description of Artificial Sequence: Synthetic oligonucleotide
cuggaagacccagauaugc

SEQ ID NO: 520723 - RNA, 19 nt, Artificial Sequence
  Description of Artificial Sequence: Synthetic oligonucleotide
ucagcuauuucggggacgc

SEQ ID NO: 520724 - RNA, 19 nt, Artificial Sequence
  Description of Artificial Sequence: Synthetic oligonucleotide
agagugguggccaguaugg

SEQ ID NO: 520725 - RNA, 19 nt, Artificial Sequence
  Description of Artificial Sequence: Synthetic oligonucleotide
ugaggagucggaagaucag

SEQ ID NO: 520726 - RNA, 19 nt, Artificial Sequence
  Description of Artificial Sequence: Synthetic oligonucleotide
gagaguauuugaugggguc

SEQ ID NO: 520727 - RNA, 19 nt, Artificial Sequence
  Description of Artificial Sequence: Synthetic oligonucleotide
gacgcauucaccagagggc

SEQ ID NO: 520728 - RNA, 19 nt, Artificial Sequence
  Description of Artificial Sequence: Synthetic oligonucleotide
ugauuagaugggaggucag

SEQ ID NO: 520729 - RNA, 19 nt, Artificial Sequence
  Description of Artificial Sequence: Synthetic oligonucleotide
uuuguguuaucuuccugau

SEQ ID NO: 520730 - RNA, 19 nt, Artificial Sequence
  Description of Artificial Sequence: Synthetic oligonucleotide
caauuagcguauuccaguc

SEQ ID NO: 520731 - RNA, 19 nt, Artificial Sequence
  Description of Artificial Sequence: Synthetic oligonucleotide
accuccgacugccaucgcc

SEQ ID NO: 520732 - RNA, 19 nt, Artificial Sequence
  Description of Artificial Sequence: Synthetic oligonucleotide
uggaaugccuaccccuugc

SEQ ID NO: 520733 - RNA, 19 nt, Artificial Sequence
  Description of Artificial Sequence: Synthetic oligonucleotide
agugaugucccgauaaagu

SEQ ID NO: 520734 - RNA, 19 nt, Artificial Sequence
  Description of Artificial Sequence: Synthetic oligonucleotide
agagugggucucuggacgg

SEQ ID NO: 520735 - RNA, 19 nt, Artificial Sequence
  Description of Artificial Sequence: Synthetic oligonucleotide
guuagguagaccagccuag

SEQ ID NO: 520736 - RNA, 19 nt, Artificial Sequence
  Description of Artificial Sequence: Synthetic oligonucleotide
ucaaagcgcuuccaaggcu

SEQ ID NO: 520737 - RNA, 19 nt, Artificial Sequence
  Description of Artificial Sequence: Synthetic oligonucleotide
uucagaguuccuucggauc

SEQ ID NO: 520738 - RNA, 19 nt, Artificial Sequence
  Description of Artificial Sequence: Synthetic oligonucleotide
aauucaggucccucccgcu

SEQ ID NO: 520739 - RNA, 19 nt, Artificial Sequence
  Description of Artificial Sequence: Synthetic oligonucleotide
ucuuccugauucaggggca

SEQ ID NO: 520740 - RNA, 19 nt, Artificial Sequence
  Description of Artificial Sequence: Synthetic oligonucleotide
gaugucccgauaaaguaca

SEQ ID NO: 520741 - RNA, 19 nt, Artificial Sequence
  Description of Artificial Sequence: Synthetic oligonucleotide
gagugaugucccgauaaag

SEQ ID NO: 520742 - RNA, 19 nt, Artificial Sequence
  Description of Artificial Sequence: Synthetic oligonucleotide
gauauugagaguauuugau

SEQ ID NO: 520743 - RNA, 19 nt, Artificial Sequence
  Description of Artificial Sequence: Synthetic oligonucleotide
uucuuagaauugcugcauc

SEQ ID NO: 520744 - RNA, 19 nt, Artificial Sequence
  Description of Artificial Sequence: Synthetic oligonucleotide
aaacgcggguggaagacag

SEQ ID NO: 520745 - RNA, 19 nt, Artificial Sequence
  Description of Artificial Sequence: Synthetic oligonucleotide
ugaugauaaacugcacuuc

SEQ ID NO: 520746 - RNA, 19 nt, Artificial Sequence
  Description of Artificial Sequence: Synthetic oligonucleotide
gauuagaugggaggucagc

SEQ ID NO: 520747 - RNA, 19 nt, Artificial Sequence
  Description of Artificial Sequence: Synthetic oligonucleotide
ugcccgugaugauaaacug

SEQ ID NO: 520748 - RNA, 19 nt, Artificial Sequence
  Description of Artificial Sequence: Synthetic oligonucleotide
uggacgaauccacggagaa

SEQ ID NO: 520749 - RNA, 19 nt, Artificial Sequence
  Description of Artificial Sequence: Synthetic oligonucleotide
aacuuguuagguagaccag

SEQ ID NO: 520750 - RNA, 19 nt, Artificial Sequence
  Description of Artificial Sequence: Synthetic oligonucleotide
ucggggacgcaauucaggu

SEQ ID NO: 520751 - RNA, 19 nt, Artificial Sequence
  Description of Artificial Sequence: Synthetic oligonucleotide
uuguagauagccugcugau

SEQ ID NO: 520752 - RNA, 19 nt, Artificial Sequence
  Description of Artificial Sequence: Synthetic oligonucleotide
auggggaaccacgagaaca

SEQ ID NO: 520753 - RNA, 19 nt, Artificial Sequence
  Description of Artificial Sequence: Synthetic oligonucleotide
gaaugccuaccccuugccc

SEQ ID NO: 520754 - RNA, 19 nt, Artificial Sequence
  Description of Artificial Sequence: Synthetic oligonucleotide
caauucaggucccucccgc

SEQ ID NO: 520755 - RNA, 19 nt, Artificial Sequence
  Description of Artificial Sequence: Synthetic oligonucleotide
uacucagagugaugucccg

SEQ ID NO: 520756 - RNA, 19 nt, Artificial Sequence
  Description of Artificial Sequence: Synthetic oligonucleotide
agcguauuccagucccuuc

SEQ ID NO: 520757 - RNA, 19 nt, Artificial Sequence
  Description of Artificial Sequence: Synthetic oligonucleotide
auagccuuuggcaaagagu

SEQ ID NO: 520758 - RNA, 19 nt, Artificial Sequence
  Description of Artificial Sequence: Synthetic oligonucleotide
cagauaugccccgaaauuc

SEQ ID NO: 520759 - RNA, 19 nt, Artificial Sequence
  Description of Artificial Sequence: Synthetic oligonucleotide
cagcacuagaggccaaugg

SEQ ID NO: 520760 - RNA, 19 nt, Artificial Sequence
  Description of Artificial Sequence: Synthetic oligonucleotide
ucggccugcgcccaacacc

SEQ ID NO: 520761 - RNA, 19 nt, Artificial Sequence
  Description of Artificial Sequence: Synthetic oligonucleotide
gauaugccccgaaauucag

SEQ ID NO: 520762 - RNA, 19 nt, Artificial Sequence
  Description of Artificial Sequence: Synthetic oligonucleotide
aggagagugggucucugga

SEQ ID NO: 520763 - RNA, 19 nt, Artificial Sequence
  Description of Artificial Sequence: Synthetic oligonucleotide
agacugaaccguuccucuc

SEQ ID NO: 520764 - RNA, 19 nt, Artificial Sequence
  Description of Artificial Sequence: Synthetic oligonucleotide
ugcagguagucuucauagc

SEQ ID NO: 520765 - RNA, 19 nt, Artificial Sequence
  Description of Artificial Sequence: Synthetic oligonucleotide
ucucugacgggugaggguc

SEQ ID NO: 520766 - RNA, 19 nt, Artificial Sequence
  Description of Artificial Sequence: Synthetic oligonucleotide
gucaaucauaggaucucgg

SEQ ID NO: 520767 - RNA, 19 nt, Artificial Sequence
  Description of Artificial Sequence: Synthetic oligonucleotide
ugcuuggcaguccuggaau

SEQ ID NO: 520768 - RNA, 19 nt, Artificial Sequence
  Description of Artificial Sequence: Synthetic oligonucleotide
uugaaacgcggguggaaga

SEQ ID NO: 520769 - RNA, 19 nt, Artificial Sequence
  Description of Artificial Sequence: Synthetic oligonucleotide
ucguaugucugagauucca

SEQ ID NO: 520770 - RNA, 19 nt, Artificial Sequence
  Description of Artificial Sequence: Synthetic oligonucleotide
uuguuagguagaccagccu

SEQ ID NO: 520771 - RNA, 19 nt, Artificial Sequence
  Description of Artificial Sequence: Synthetic oligonucleotide
gucugaagaaacaaccguc

SEQ ID NO: 520772 - RNA, 19 nt, Artificial Sequence
  Description of Artificial Sequence: Synthetic oligonucleotide
auaugccccgaaauucagc

SEQ ID NO: 520773 - RNA, 19 nt, Artificial Sequence
  Description of Artificial Sequence: Synthetic oligonucleotide
uuccaacuugaggagucgg

SEQ ID NO: 520774 - RNA, 19 nt, Artificial Sequence
  Description of Artificial Sequence: Synthetic oligonucleotide
uugucaaucauaggaucuc

SEQ ID NO: 520775 - RNA, 19 nt, Artificial Sequence
  Description of Artificial Sequence: Synthetic oligonucleotide
cuuucccacaauuagcgua

SEQ ID NO: 520776 - RNA, 19 nt, Artificial Sequence
  Description of Artificial Sequence: Synthetic oligonucleotide
acauagccgcuucagaguu

SEQ ID NO: 520777 - RNA, 19 nt, Artificial Sequence
  Description of Artificial Sequence: Synthetic oligonucleotide
aaacaaccgucaccuggcu

SEQ ID NO: 520778 - RNA, 19 nt, Artificial Sequence
  Description of Artificial Sequence: Synthetic oligonucleotide
gagucuggacgaauccacg

SEQ ID NO: 520779 - RNA, 19 nt, Artificial Sequence
  Description of Artificial Sequence: Synthetic oligonucleotide
acgauccuuuucccgacag

SEQ ID NO: 520780 - RNA, 19 nt, Artificial Sequence
  Description of Artificial Sequence: Synthetic oligonucleotide
agauaugccccgaaauuca

SEQ ID NO: 520781 - RNA, 19 nt, Artificial Sequence
  Description of Artificial Sequence: Synthetic oligonucleotide
gugaauagaagaacaaacu

SEQ ID NO: 520782 - RNA, 19 nt, Artificial Sequence
  Description of Artificial Sequence: Synthetic oligonucleotide
ugaaacgcggguggaagac

SEQ ID NO: 520783 - RNA, 19 nt, Artificial Sequence
  Description of Artificial Sequence: Synthetic oligonucleotide
accggcaccuccgacugcc

SEQ ID NO: 520784 - RNA, 19 nt, Artificial Sequence
  Description of Artificial Sequence: Synthetic oligonucleotide
agccuuauccgccggucag

SEQ ID NO: 520785 - RNA, 19 nt, Artificial Sequence
  Description of Artificial Sequence: Synthetic oligonucleotide
guaacauagccgcuucaga

SEQ ID NO: 520786 - RNA, 19 nt, Artificial Sequence
  Description of Artificial Sequence: Synthetic oligonucleotide
agcucguugucagcaaagg

SEQ ID NO: 520787 - RNA, 19 nt, Artificial Sequence
  Description of Artificial Sequence: Synthetic oligonucleotide
agcgcuuccaaggcucagc

SEQ ID NO: 520788 - RNA, 19 nt, Artificial Sequence
  Description of Artificial Sequence: Synthetic oligonucleotide
uuagcguauuccagucccu

SEQ ID NO: 520789 - RNA, 19 nt, Artificial Sequence
  Description of Artificial Sequence: Synthetic oligonucleotide
gguugugaauagaagaaca

SEQ ID NO: 520790 - RNA, 19 nt, Artificial Sequence
  Description of Artificial Sequence: Synthetic oligonucleotide
agccccaauuucaagagcu

SEQ ID NO: 520791 - RNA, 19 nt, Artificial Sequence
  Description of Artificial Sequence: Synthetic oligonucleotide
uccugauucaggggcaaca

SEQ ID NO: 520792 - RNA, 19 nt, Artificial Sequence
  Description of Artificial Sequence: Synthetic oligonucleotide
cagaguccugaaguuaugc

SEQ ID NO: 520793 - RNA, 19 nt, Artificial Sequence
  Description of Artificial Sequence: Synthetic oligonucleotide
ucaccgcccacucguacca

SEQ ID NO: 520794 - RNA, 19 nt, Artificial Sequence
  Description of Artificial Sequence: Synthetic oligonucleotide
gaacagaacucaaagcgcu

SEQ ID NO: 520795 - RNA, 19 nt, Artificial Sequence
  Description of Artificial Sequence: Synthetic oligonucleotide
gugaugucccgauaaagua

SEQ ID NO: 520796 - RNA, 19 nt, Artificial Sequence
  Description of Artificial Sequence: Synthetic oligonucleotide
uauuucggggacgcaauuc

SEQ ID NO: 520797 - RNA, 19 nt, Artificial Sequence
  Description of Artificial Sequence: Synthetic oligonucleotide
ucacgcaccgugauggguu

SEQ ID NO: 520798 - RNA, 19 nt, Artificial Sequence
  Description of Artificial Sequence: Synthetic oligonucleotide
acgugauuagaugggaggu

SEQ ID NO: 520799 - RNA, 19 nt, Artificial Sequence
  Description of Artificial Sequence: Synthetic oligonucleotide
agaacauggaagaguggug

SEQ ID NO: 520800 - RNA, 19 nt, Artificial Sequence
  Description of Artificial Sequence: Synthetic oligonucleotide
ucuguguguguaguuggga

SEQ ID NO: 520801 - RNA, 19 nt, Artificial Sequence
  Description of Artificial Sequence: Synthetic oligonucleotide
agagacgcauucaccagag

SEQ ID NO: 520802 - RNA, 19 nt, Artificial Sequence
  Description of Artificial Sequence: Synthetic oligonucleotide
uuggcaguccuggaaugcc

SEQ ID NO: 520803 - RNA, 19 nt, Artificial Sequence
  Description of Artificial Sequence: Synthetic oligonucleotide
acacgcggcugccaccggc

SEQ ID NO: 520804 - RNA, 19 nt, Artificial Sequence
  Description of Artificial Sequence: Synthetic oligonucleotide
ucccucuugaaacgcgggu

SEQ ID NO: 520805 - RNA, 19 nt, Artificial Sequence
  Description of Artificial Sequence: Synthetic oligonucleotide
acugaaccguuccucucug

SEQ ID NO: 520806 - RNA, 19 nt, Artificial Sequence
  Description of Artificial Sequence: Synthetic oligonucleotide
ccuucacgcaccgugaugg

SEQ ID NO: 520807 - RNA, 19 nt, Artificial Sequence
  Description of Artificial Sequence: Synthetic oligonucleotide
guugugaauagaagaacaa

SEQ ID NO: 520808 - RNA, 19 nt, Artificial Sequence
  Description of Artificial Sequence: Synthetic oligonucleotide
uggagucuggacgaaucca

SEQ ID NO: 520809 - RNA, 19 nt, Artificial Sequence
  Description of Artificial Sequence: Synthetic oligonucleotide
uucguaugucugagauucc

SEQ ID NO: 520810 - RNA, 19 nt, Artificial Sequence
  Description of Artificial Sequence: Synthetic oligonucleotide
cccacaauuagcguauucc

SEQ ID NO: 520811 - RNA, 19 nt, Artificial Sequence
  Description of Artificial Sequence: Synthetic oligonucleotide
gugaugauaaacugcacuu

SEQ ID NO: 520812 - RNA, 19 nt, Artificial Sequence
  Description of Artificial Sequence: Synthetic oligonucleotide
gaacaaacuggugcuguca

SEQ ID NO: 520813 - RNA, 19 nt, Artificial Sequence
  Description of Artificial Sequence: Synthetic oligonucleotide
gaacucaaagcgcuuccaa

SEQ ID NO: 520814 - RNA, 19 nt, Artificial Sequence
  Description of Artificial Sequence: Synthetic oligonucleotide
gacagcaguaggucugauc

SEQ ID NO: 520815 - RNA, 19 nt, Artificial Sequence
  Description of Artificial Sequence: Synthetic oligonucleotide
agauuguccaucaguggcu

SEQ ID NO: 520816 - RNA, 19 nt, Artificial Sequence
  Description of Artificial Sequence: Synthetic oligonucleotide
ugucugcuuucucgggagc

SEQ ID NO: 520817 - RNA, 19 nt, Artificial Sequence
  Description of Artificial Sequence: Synthetic oligonucleotide
gcaccuuuugugcuguaag

SEQ ID NO: 520818 - RNA, 19 nt, Artificial Sequence
  Description of Artificial Sequence: Synthetic oligonucleotide
ccagguuuguguuaucuuc

SEQ ID NO: 520819 - RNA, 19 nt, Artificial Sequence
  Description of Artificial Sequence: Synthetic oligonucleotide
caucgccgccaucuuaucc

SEQ ID NO: 520820 - RNA, 19 nt, Artificial Sequence
  Description of Artificial Sequence: Synthetic oligonucleotide
ucacgauccuuuucccgac

SEQ ID NO: 520821 - RNA, 19 nt, Artificial Sequence
  Description of Artificial Sequence: Synthetic oligonucleotide
uggcacaagguaggaaagc

SEQ ID NO: 520822 - RNA, 19 nt, Artificial Sequence
  Description of Artificial Sequence: Synthetic oligonucleotide
guaggagcggccagugggg

SEQ ID NO: 520823 - RNA, 19 nt, Artificial Sequence
  Description of Artificial Sequence: Synthetic oligonucleotide
gucaccgcccacucguacc

SEQ ID NO: 520824 - RNA, 19 nt, Artificial Sequence
  Description of Artificial Sequence: Synthetic oligonucleotide
gagacgcauucaccagagg

SEQ ID NO: 520825 - RNA, 19 nt, Artificial Sequence
  Description of Artificial Sequence: Synthetic oligonucleotide
ggagagacgcauucaccag

SEQ ID NO: 520826 - RNA, 19 nt, Artificial Sequence
  Description of Artificial Sequence: Synthetic oligonucleotide
uagcgucaccacagcauug

SEQ ID NO: 520827 - RNA, 19 nt, Artificial Sequence
  Description of Artificial Sequence: Synthetic oligonucleotide
acagccuuauccgccgguc

SEQ ID NO: 520828 - RNA, 19 nt, Artificial Sequence
  Description of Artificial Sequence: Synthetic oligonucleotide
cauucccgcaugucugaag

SEQ ID NO: 520829 - RNA, 19 nt, Artificial Sequence
  Description of Artificial Sequence: Synthetic oligonucleotide
accgugauggguugcuuaa

SEQ ID NO: 520830 - RNA, 19 nt, Artificial Sequence
  Description of Artificial Sequence: Synthetic oligonucleotide
ucggucgagcaaacauuug

SEQ ID NO: 520831 - RNA, 19 nt, Artificial Sequence
  Description of Artificial Sequence: Synthetic oligonucleotide
gaaccacgagaacauccca

SEQ ID NO: 520832 - RNA, 19 nt, Artificial Sequence
  Description of Artificial Sequence: Synthetic oligonucleotide
uguagauagccugcugaua

SEQ ID NO: 520833 - RNA, 19 nt, Artificial Sequence
  Description of Artificial Sequence: Synthetic oligonucleotide
ucggaagaucagccuuugc

SEQ ID NO: 520834 - RNA, 19 nt, Artificial Sequence
  Description of Artificial Sequence: Synthetic oligonucleotide
agcuauuucggggacgcaa

SEQ ID NO: 520835 - RNA, 19 nt, Artificial Sequence
  Description of Artificial Sequence: Synthetic oligonucleotide
ucggaccucauuguacaac

SEQ ID NO: 520836 - RNA, 19 nt, Artificial Sequence
  Description of Artificial Sequence: Synthetic oligonucleotide
accagccuagccucgaauu

SEQ ID NO: 520837 - RNA, 19 nt, Artificial Sequence
  Description of Artificial Sequence: Synthetic oligonucleotide
augacgugauuagauggga

SEQ ID NO: 520838 - RNA, 19 nt, Artificial Sequence
  Description of Artificial Sequence: Synthetic oligonucleotide
gcugcaucgccagaaacgc

SEQ ID NO: 520839 - RNA, 19 nt, Artificial Sequence
  Description of Artificial Sequence: Synthetic oligonucleotide
guauuccagucccuuccug

SEQ ID NO: 520840 - RNA, 19 nt, Artificial Sequence
  Description of Artificial Sequence: Synthetic oligonucleotide
auacuucguaugucugaga

SEQ ID NO: 520841 - RNA, 19 nt, Artificial Sequence
  Description of Artificial Sequence: Synthetic oligonucleotide
augccccgaaauucagcuc

SEQ ID NO: 520842 - RNA, 19 nt, Artificial Sequence
  Description of Artificial Sequence: Synthetic oligonucleotide
ucuugaaacgcggguggaa

SEQ ID NO: 520843 - RNA, 19 nt, Artificial Sequence
  Description of Artificial Sequence: Synthetic oligonucleotide
aggacaauuuuggcuuaag

SEQ ID NO: 520844 - RNA, 19 nt, Artificial Sequence
  Description of Artificial Sequence: Synthetic oligonucleotide
ggcgacagcucguugucag

SEQ ID NO: 520845 - RNA, 19 nt, Artificial Sequence
  Description of Artificial Sequence: Synthetic oligonucleotide
cuucacgcaccgugauggg

SEQ ID NO: 520846 - RNA, 19 nt, Artificial Sequence
  Description of Artificial Sequence: Synthetic oligonucleotide
caguaggucugaucguguc

SEQ ID NO: 520847 - RNA, 19 nt, Artificial Sequence
  Description of Artificial Sequence: Synthetic oligonucleotide
ucccgcaugucugaagaaa

SEQ ID NO: 520848 - RNA, 19 nt, Artificial Sequence
  Description of Artificial Sequence: Synthetic oligonucleotide
cgguuguugucaaucauag

SEQ ID NO: 520849 - RNA, 19 nt, Artificial Sequence
  Description of Artificial Sequence: Synthetic oligonucleotide
ucaaaacucuggccagguu

SEQ ID NO: 520850 - RNA, 19 nt, Artificial Sequence
  Description of Artificial Sequence: Synthetic oligonucleotide
gcaauucaggucccucccg

SEQ ID NO: 520851 - RNA, 19 nt, Artificial Sequence
  Description of Artificial Sequence: Synthetic oligonucleotide
acuucguaugucugagauu

SEQ ID NO: 520852 - RNA, 19 nt, Artificial Sequence
  Description of Artificial Sequence: Synthetic oligonucleotide
ucccgacaggcucggaccu

SEQ ID NO: 520853 - RNA, 19 nt, Artificial Sequence
  Description of Artificial Sequence: Synthetic oligonucleotide
ccuccgacugccaucgccg

SEQ ID NO: 520854 - RNA, 19 nt, Artificial Sequence
  Description of Artificial Sequence: Synthetic oligonucleotide
cagaacauggaagaguggu

SEQ ID NO: 520855 - RNA, 19 nt, Artificial Sequence
  Description of Artificial Sequence: Synthetic oligonucleotide
cccgugaugauaaacugca

SEQ ID NO: 520856 - RNA, 19 nt, Artificial Sequence
  Description of Artificial Sequence: Synthetic oligonucleotide
acuagaggccaauggugua

SEQ ID NO: 520857 - RNA, 19 nt, Artificial Sequence
  Description of Artificial Sequence: Synthetic oligonucleotide
aucucgguugggauggcug

SEQ ID NO: 520858 - RNA, 19 nt, Artificial Sequence
  Description of Artificial Sequence: Synthetic oligonucleotide
cuaccccuugcccaccaug

SEQ ID NO: 520859 - RNA, 19 nt, Artificial Sequence
  Description of Artificial Sequence: Synthetic oligonucleotide
guguguaguugggacauuc

SEQ ID NO: 520860 - RNA, 19 nt, Artificial Sequence
  Description of Artificial Sequence: Synthetic oligonucleotide
uccgacugccaucgccgcc

SEQ ID NO: 520861 - RNA, 19 nt, Artificial Sequence
  Description of Artificial Sequence: Synthetic oligonucleotide
ggugaaacagggcuggggu

SEQ ID NO: 520862 - RNA, 19 nt, Artificial Sequence
  Description of Artificial Sequence: Synthetic oligonucleotide
gcagccgaaccacguaagg

SEQ ID NO: 520863 - RNA, 19 nt, Artificial Sequence
  Description of Artificial Sequence: Synthetic oligonucleotide
ugcgcccaacaccaucagu

SEQ ID NO: 520864 - RNA, 19 nt, Artificial Sequence
  Description of Artificial Sequence: Synthetic oligonucleotide
cgugauggguugcuuaagg

SEQ ID NO: 520865 - RNA, 19 nt, Artificial Sequence
  Description of Artificial Sequence: Synthetic oligonucleotide
caucgccagaaacgcacac

SEQ ID NO: 520866 - RNA, 19 nt, Artificial Sequence
  Description of Artificial Sequence: Synthetic oligonucleotide
guguaggagcggccagugg

SEQ ID NO: 520867 - RNA, 19 nt, Artificial Sequence
  Description of Artificial Sequence: Synthetic oligonucleotide
uagauagccugcugauauu

SEQ ID NO: 520868 - RNA, 19 nt, Artificial Sequence
  Description of Artificial Sequence: Synthetic oligonucleotide
acaccuucuuagaauugcu

SEQ ID NO: 520869 - RNA, 19 nt, Artificial Sequence
  Description of Artificial Sequence: Synthetic oligonucleotide
cacuagaggccaauggugu

SEQ ID NO: 520870 - RNA, 19 nt, Artificial Sequence
  Description of Artificial Sequence: Synthetic oligonucleotide
uucacgcaccgugaugggu

SEQ ID NO: 520871 - RNA, 19 nt, Artificial Sequence
  Description of Artificial Sequence: Synthetic oligonucleotide
aucgccagaaacgcacaca

SEQ ID NO: 520872 - RNA, 19 nt, Artificial Sequence
  Description of Artificial Sequence: Synthetic oligonucleotide
ugagggucucacagauaaa

SEQ ID NO: 520873 - RNA, 19 nt, Artificial Sequence
  Description of Artificial Sequence: Synthetic oligonucleotide
cuggaaugccuaccccuug

SEQ ID NO: 520874 - RNA, 19 nt, Artificial Sequence
  Description of Artificial Sequence: Synthetic oligonucleotide
ccagaaacgcacacagaug

SEQ ID NO: 520875 - RNA, 19 nt, Artificial Sequence
  Description of Artificial Sequence: Synthetic oligonucleotide
ugcaccuuuugugcuguaa

SEQ ID NO: 520876 - RNA, 19 nt, Artificial Sequence
  Description of Artificial Sequence: Synthetic oligonucleotide
ggaaugccuaccccuugcc

SEQ ID NO: 520877 - RNA, 19 nt, Artificial Sequence
  Description of Artificial Sequence: Synthetic oligonucleotide
ggagucuggacgaauccac

SEQ ID NO: 520878 - RNA, 19 nt, Artificial Sequence
  Description of Artificial Sequence: Synthetic oligonucleotide
gcaccuccgacugccaucg

SEQ ID NO: 520879 - RNA, 19 nt, Artificial Sequence
  Description of Artificial Sequence: Synthetic oligonucleotide
aacgcggguggaagacagg

SEQ ID NO: 520880 - RNA, 19 nt, Artificial Sequence
  Description of Artificial Sequence: Synthetic oligonucleotide
cuggacgaauccacggaga

SEQ ID NO: 520881 - RNA, 19 nt, Artificial Sequence
  Description of Artificial Sequence: Synthetic oligonucleotide
cacagcauacagccuuauc

SEQ ID NO: 520882 - RNA, 19 nt, Artificial Sequence
  Description of Artificial Sequence: Synthetic oligonucleotide
ggcacaagguaggaaagca

SEQ ID NO: 520883 - RNA, 19 nt, Artificial Sequence
  Description of Artificial Sequence: Synthetic oligonucleotide
ggguugugaauagaagaac

SEQ ID NO: 520884 - RNA, 19 nt, Artificial Sequence
  Description of Artificial Sequence: Synthetic oligonucleotide
uuccaaggcucagcauugc

SEQ ID NO: 520885 - RNA, 19 nt, Artificial Sequence
  Description of Artificial Sequence: Synthetic oligonucleotide
cccgcaugucugaagaaac

SEQ ID NO: 520886 - RNA, 19 nt, Artificial Sequence
  Description of Artificial Sequence: Synthetic oligonucleotide
gaaacgcggguggaagaca

SEQ ID NO: 520887 - RNA, 19 nt, Artificial Sequence
  Description of Artificial Sequence: Synthetic oligonucleotide
gggguugugaauagaagaa

SEQ ID NO: 520888 - RNA, 19 nt, Artificial Sequence
  Description of Artificial Sequence: Synthetic oligonucleotide
guacaguagcgguuguugu

SEQ ID NO: 520889 - RNA, 19 nt, Artificial Sequence
  Description of Artificial Sequence: Synthetic oligonucleotide
gaauccacggagaaagcuu

SEQ ID NO: 520890 - RNA, 19 nt, Artificial Sequence
  Description of Artificial Sequence: Synthetic oligonucleotide
aggucccucccgcuggaca

SEQ ID NO: 520891 - RNA, 19 nt, Artificial Sequence
  Description of Artificial Sequence: Synthetic oligonucleotide
cacagaguccugaaguuau

SEQ ID NO: 520892 - RNA, 19 nt, Artificial Sequence
  Description of Artificial Sequence: Synthetic oligonucleotide
cagguagucuucauagccu

SEQ ID NO: 520893 - RNA, 19 nt, Artificial Sequence
  Description of Artificial Sequence: Synthetic oligonucleotide
acccagauaugccccgaaa

SEQ ID NO: 520894 - RNA, 19 nt, Artificial Sequence
  Description of Artificial Sequence: Synthetic oligonucleotide
accacguaaggcaucucaa

SEQ ID NO: 520895 - RNA, 19 nt, Artificial Sequence
  Description of Artificial Sequence: Synthetic oligonucleotide
caggcgacagcucguuguc

SEQ ID NO: 520896 - RNA, 19 nt, Artificial Sequence
  Description of Artificial Sequence: Synthetic oligonucleotide
cauagccgcuucagaguuc

SEQ ID NO: 520897 - RNA, 19 nt, Artificial Sequence
  Description of Artificial Sequence: Synthetic oligonucleotide
acucggucgagcaaacauu

SEQ ID NO: 520898 - RNA, 19 nt, Artificial Sequence
  Description of Artificial Sequence: Synthetic oligonucleotide
cuccgacugccaucgccgc

SEQ ID NO: 520899 - RNA, 19 nt, Artificial Sequence
  Description of Artificial Sequence: Synthetic oligonucleotide
cacgcaccgugauggguug

SEQ ID NO: 520900 - RNA, 19 nt, Artificial Sequence
  Description of Artificial Sequence: Synthetic oligonucleotide
gugcagccgaaccacguaa

SEQ ID NO: 520901 - RNA, 19 nt, Artificial Sequence
  Description of Artificial Sequence: Synthetic oligonucleotide
acagaguccugaaguuaug

SEQ ID NO: 520902 - RNA, 19 nt, Artificial Sequence
  Description of Artificial Sequence: Synthetic oligonucleotide
ccagaacauggaagagugg

SEQ ID NO: 520903 - RNA, 19 nt, Artificial Sequence
  Description of Artificial Sequence: Synthetic oligonucleotide
ccacggagaaagcuuuccc

SEQ ID NO: 520904 - RNA, 19 nt, Artificial Sequence
  Description of Artificial Sequence: Synthetic oligonucleotide
cucuagcgucaccacagca

SEQ ID NO: 520905 - RNA, 19 nt, Artificial Sequence
  Description of Artificial Sequence: Synthetic oligonucleotide
gacggauacucagagugau

SEQ ID NO: 520906 - RNA, 19 nt, Artificial Sequence
  Description of Artificial Sequence: Synthetic oligonucleotide
cagacugaaccguuccucu

SEQ ID NO: 520907 - RNA, 19 nt, Artificial Sequence
  Description of Artificial Sequence: Synthetic oligonucleotide
uagcguauuccagucccuu

SEQ ID NO: 520908 - RNA, 19 nt, Artificial Sequence
  Description of Artificial Sequence: Synthetic oligonucleotide
guacaacuuagaggaagaa

SEQ ID NO: 520909 - RNA, 19 nt, Artificial Sequence
  Description of Artificial Sequence: Synthetic oligonucleotide
ggauacucagagugauguc

SEQ ID NO: 520910 - RNA, 19 nt, Artificial Sequence
  Description of Artificial Sequence: Synthetic oligonucleotide
accgcccacucguaccaca

SEQ ID NO: 520911 - RNA, 19 nt, Artificial Sequence
  Description of Artificial Sequence: Synthetic oligonucleotide
ggagcggccagugggguug

SEQ ID NO: 520912 - RNA, 19 nt, Artificial Sequence
  Description of Artificial Sequence: Synthetic oligonucleotide
cuucagaguuccuucggau

SEQ ID NO: 520913 - RNA, 19 nt, Artificial Sequence
  Description of Artificial Sequence: Synthetic oligonucleotide
gcucguugucagcaaagga

SEQ ID NO: 520914 - RNA, 19 nt, Artificial Sequence
  Description of Artificial Sequence: Synthetic oligonucleotide
ccggagagacgcauucacc

SEQ ID NO: 520915 - RNA, 19 nt, Artificial Sequence
  Description of Artificial Sequence: Synthetic oligonucleotide
gcccgugaugauaaacugc

SEQ ID NO: 520916 - RNA, 19 nt, Artificial Sequence
  Description of Artificial Sequence: Synthetic oligonucleotide
ggugcccgugaugauaaac

SEQ ID NO: 520917 - RNA, 19 nt, Artificial Sequence
  Description of Artificial Sequence: Synthetic oligonucleotide
agguaggagcagaacuccu

SEQ ID NO: 520918 - RNA, 19 nt, Artificial Sequence
  Description of Artificial Sequence: Synthetic oligonucleotide
gguguaggagcggccagug

SEQ ID NO: 520919 - RNA, 19 nt, Artificial Sequence
  Description of Artificial Sequence: Synthetic oligonucleotide
cugcaauucucuugcuaua

SEQ ID NO: 520920 - RNA, 19 nt, Artificial Sequence
  Description of Artificial Sequence: Synthetic oligonucleotide
cucuugcuauaaucacaca

SEQ ID NO: 520921 - RNA, 19 nt, Artificial Sequence
  Description of Artificial Sequence: Synthetic oligonucleotide
gaaagcagacugaaccguu

SEQ ID NO: 520922 - RNA, 19 nt, Artificial Sequence
  Description of Artificial Sequence: Synthetic oligonucleotide
cacucggucgagcaaacau

SEQ ID NO: 520923 - RNA, 19 nt, Artificial Sequence
  Description of Artificial Sequence: Synthetic oligonucleotide
cgcaauucaggucccuccc

SEQ ID NO: 520924 - RNA, 19 nt, Artificial Sequence
  Description of Artificial Sequence: Synthetic oligonucleotide
cucaggcgacagcucguug

SEQ ID NO: 520925 - RNA, 19 nt, Artificial Sequence
  Description of Artificial Sequence: Synthetic oligonucleotide
uaggagcggccaguggggu

SEQ ID NO: 520926 - RNA, 19 nt, Artificial Sequence
  Description of Artificial Sequence: Synthetic oligonucleotide
cucggucgagcaaacauuu

SEQ ID NO: 520927 - RNA, 19 nt, Artificial Sequence
  Description of Artificial Sequence: Synthetic oligonucleotide
augucccgauaaaguacag

SEQ ID NO: 520928 - RNA, 19 nt, Artificial Sequence
  Description of Artificial Sequence: Synthetic oligonucleotide
cggagagacgcauucacca

SEQ ID NO: 520929 - RNA, 19 nt, Artificial Sequence
  Description of Artificial Sequence: Synthetic oligonucleotide
cccggagagacgcauucac

SEQ ID NO: 520930 - RNA, 19 nt, Artificial Sequence
  Description of Artificial Sequence: Synthetic oligonucleotide
gacacgcggcugccaccgg

SEQ ID NO: 520931 - RNA, 19 nt, Artificial Sequence
  Description of Artificial Sequence: Synthetic oligonucleotide
aaaugcugguggggaggau

SEQ ID NO: 520932 - RNA, 19 nt, Artificial Sequence
  Description of Artificial Sequence: Synthetic oligonucleotide
gacccagauaugccccgaa

SEQ ID NO: 520933 - RNA, 19 nt, Artificial Sequence
  Description of Artificial Sequence: Synthetic oligonucleotide
ggguugcuuaaggggaaag

SEQ ID NO: 520934 - RNA, 19 nt, Artificial Sequence
  Description of Artificial Sequence: Synthetic oligonucleotide
cauuuguagauagccugcu

SEQ ID NO: 520935 - RNA, 19 nt, Artificial Sequence
  Description of Artificial Sequence: Synthetic oligonucleotide
cuagcgucaccacagcauu

SEQ ID NO: 520936 - RNA, 19 nt, Artificial Sequence
  Description of Artificial Sequence: Synthetic oligonucleotide
ccccaauuucaagagcuac

SEQ ID NO: 520937 - RNA, 19 nt, Artificial Sequence
  Description of Artificial Sequence: Synthetic oligonucleotide
ccuuauccgccggucagcc

SEQ ID NO: 520938 - RNA, 19 nt, Artificial Sequence
  Description of Artificial Sequence: Synthetic oligonucleotide
gcagacaacugguggaagu

SEQ ID NO: 520939 - RNA, 19 nt, Artificial Sequence
  Description of Artificial Sequence: Synthetic oligonucleotide
caaccgucaccuggcuccc

SEQ ID NO: 520940 - RNA, 19 nt, Artificial Sequence
  Description of Artificial Sequence: Synthetic oligonucleotide
cucggccugcgcccaacac

SEQ ID NO: 520941 - RNA, 19 nt, Artificial Sequence
  Description of Artificial Sequence: Synthetic oligonucleotide
ccgauaaaguacagucuca

SEQ ID NO: 520942 - RNA, 19 nt, Artificial Sequence
  Description of Artificial Sequence: Synthetic oligonucleotide
ccgaaauucagcuccugua

SEQ ID NO: 520943 - RNA, 19 nt, Artificial Sequence
  Description of Artificial Sequence: Synthetic oligonucleotide
ggucgagcaaacauuugua

SEQ ID NO: 520944 - RNA, 19 nt, Artificial Sequence
  Description of Artificial Sequence: Synthetic oligonucleotide
agccacccauucccgcaug

SEQ ID NO: 520945 - RNA, 19 nt, Artificial Sequence
  Description of Artificial Sequence: Synthetic oligonucleotide
cugcgcccaacaccaucag

SEQ ID NO: 520946 - RNA, 19 nt, Artificial Sequence
  Description of Artificial Sequence: Synthetic oligonucleotide
ccacucguaccacaccuuc

SEQ ID NO: 520947 - RNA, 19 nt, Artificial Sequence
  Description of Artificial Sequence: Synthetic oligonucleotide
agccgcuucagaguuccuu

SEQ ID NO: 520948 - RNA, 19 nt, Artificial Sequence
  Description of Artificial Sequence: Synthetic oligonucleotide
gccaaugguguaggagcgg

SEQ ID NO: 520949 - RNA, 19 nt, Artificial Sequence
  Description of Artificial Sequence: Synthetic oligonucleotide
ucccucccgcuggacacgc

SEQ ID NO: 520950 - RNA, 19 nt, Artificial Sequence
  Description of Artificial Sequence: Synthetic oligonucleotide
ccguguucaccuccacagg

SEQ ID NO: 520951 - RNA, 19 nt, Artificial Sequence
  Description of Artificial Sequence: Synthetic oligonucleotide
caccgugauggguugcuua

SEQ ID NO: 520952 - RNA, 19 nt, Artificial Sequence
  Description of Artificial Sequence: Synthetic oligonucleotide
agacccagauaugccccga

SEQ ID NO: 520953 - RNA, 19 nt, Artificial Sequence
  Description of Artificial Sequence: Synthetic oligonucleotide
cagccuuauccgccgguca

SEQ ID NO: 520954 - RNA, 19 nt, Artificial Sequence
  Description of Artificial Sequence: Synthetic oligonucleotide
acuuuggagucuggacgaa

SEQ ID NO: 520955 - RNA, 19 nt, Artificial Sequence
  Description of Artificial Sequence: Synthetic oligonucleotide
gaagagugguggccaguau

SEQ ID NO: 520956 - RNA, 19 nt, Artificial Sequence
  Description of Artificial Sequence: Synthetic oligonucleotide
gcgcccaacaccaucagua

SEQ ID NO: 520957 - RNA, 19 nt, Artificial Sequence
  Description of Artificial Sequence: Synthetic oligonucleotide
ggcaccuccgacugccauc

SEQ ID NO: 520958 - RNA, 19 nt, Artificial Sequence
  Description of Artificial Sequence: Synthetic oligonucleotide
cugcaucgccagaaacgca

SEQ ID NO: 520959 - RNA, 19 nt, Artificial Sequence
  Description of Artificial Sequence: Synthetic oligonucleotide
cgugaugauaaacugcacu

SEQ ID NO: 520960 - RNA, 19 nt, Artificial Sequence
  Description of Artificial Sequence: Synthetic oligonucleotide
gcugauauugagaguauuu

SEQ ID NO: 520961 - RNA, 19 nt, Artificial Sequence
  Description of Artificial Sequence: Synthetic oligonucleotide
cugaaccguuccucucuga

SEQ ID NO: 520962 - RNA, 19 nt, Artificial Sequence
  Description of Artificial Sequence: Synthetic oligonucleotide
gcgcuuccaaggcucagca

SEQ ID NO: 520963 - RNA, 19 nt, Artificial Sequence
  Description of Artificial Sequence: Synthetic oligonucleotide
cacgauccuuuucccgaca

SEQ ID NO: 520964 - RNA, 19 nt, Artificial Sequence
  Description of Artificial Sequence: Synthetic oligonucleotide
gccuucacgcaccgugaug

SEQ ID NO: 520965 - RNA, 19 nt, Artificial Sequence
  Description of Artificial Sequence: Synthetic oligonucleotide
ggacggauacucagaguga

SEQ ID NO: 520966 - RNA, 19 nt, Artificial Sequence
  Description of Artificial Sequence: Synthetic oligonucleotide
cacccucauccagaacaug

SEQ ID NO: 520967 - RNA, 19 nt, Artificial Sequence
  Description of Artificial Sequence: Synthetic oligonucleotide
cgauccuuuucccgacagg

SEQ ID NO: 520968 - RNA, 19 nt, Artificial Sequence
  Description of Artificial Sequence: Synthetic oligonucleotide
uuuucccgacaggcucgga

SEQ ID NO: 520969 - RNA, 19 nt, Artificial Sequence
  Description of Artificial Sequence: Synthetic oligonucleotide
ccaccggcaccuccgacug

SEQ ID NO: 520970 - RNA, 19 nt, Artificial Sequence
  Description of Artificial Sequence: Synthetic oligonucleotide
cucggaccucauuguacaa

SEQ ID NO: 520971 - RNA, 19 nt, Artificial Sequence
  Description of Artificial Sequence: Synthetic oligonucleotide
ccgugaugauaaacugcac

SEQ ID NO: 520972 - RNA, 19 nt, Artificial Sequence
  Description of Artificial Sequence: Synthetic oligonucleotide
cacucguaccacaccuucu

SEQ ID NO: 520973 - RNA, 19 nt, Artificial Sequence
  Description of Artificial Sequence: Synthetic oligonucleotide
aggagcggccagugggguu

SEQ ID NO: 520974 - RNA, 19 nt, Artificial Sequence
  Description of Artificial Sequence: Synthetic oligonucleotide
aggcgacagcucguuguca

SEQ ID NO: 520975 - RNA, 19 nt, Artificial Sequence
  Description of Artificial Sequence: Synthetic oligonucleotide
gcgguuguugucaaucaua

SEQ ID NO: 520976 - RNA, 19 nt, Artificial Sequence
  Description of Artificial Sequence: Synthetic oligonucleotide
gugcuccauccagacacuc

SEQ ID NO: 520977 - RNA, 19 nt, Artificial Sequence
  Description of Artificial Sequence: Synthetic oligonucleotide
ccacguaaggcaucucaaa

SEQ ID NO: 520978 - RNA, 19 nt, Artificial Sequence
  Description of Artificial Sequence: Synthetic oligonucleotide
ccgcaugucugaagaaaca

SEQ ID NO: 520979 - RNA, 19 nt, Artificial Sequence
  Description of Artificial Sequence: Synthetic oligonucleotide
agcggucaaugacgugauu

SEQ ID NO: 520980 - RNA, 19 nt, Artificial Sequence
  Description of Artificial Sequence: Synthetic oligonucleotide
gcugugcuccauccagaca

SEQ ID NO: 520981 - RNA, 19 nt, Artificial Sequence
  Description of Artificial Sequence: Synthetic oligonucleotide
uagccgcuucagaguuccu

SEQ ID NO: 520982 - RNA, 19 nt, Artificial Sequence
  Description of Artificial Sequence: Synthetic oligonucleotide
gccuuauccgccggucagc

SEQ ID NO: 520983 - RNA, 19 nt, Artificial Sequence
  Description of Artificial Sequence: Synthetic oligonucleotide
gaucucgguugggauggcu

SEQ ID NO: 520984 - RNA, 19 nt, Artificial Sequence
  Description of Artificial Sequence: Synthetic oligonucleotide
uucccacaauuagcguauu

SEQ ID NO: 520985 - RNA, 19 nt, Artificial Sequence
  Description of Artificial Sequence: Synthetic oligonucleotide
uggugcccgugaugauaaa

SEQ ID NO: 520986 - RNA, 19 nt, Artificial Sequence
  Description of Artificial Sequence: Synthetic oligonucleotide
gagccacccauucccgcau

SEQ ID NO: 520987 - RNA, 19 nt, Artificial Sequence
  Description of Artificial Sequence: Synthetic oligonucleotide
gggacgcaauucagguccc

SEQ ID NO: 520988 - RNA, 19 nt, Artificial Sequence
  Description of Artificial Sequence: Synthetic oligonucleotide
ccacgagaacaucccagga

SEQ ID NO: 520989 - RNA, 19 nt, Artificial Sequence
  Description of Artificial Sequence: Synthetic oligonucleotide
ggacgaauccacggagaaa

SEQ ID NO: 520990 - RNA, 19 nt, Artificial Sequence
  Description of Artificial Sequence: Synthetic oligonucleotide
ccgaaccacguaaggcauc

SEQ ID NO: 520991 - RNA, 19 nt, Artificial Sequence
  Description of Artificial Sequence: Synthetic oligonucleotide
ccgcccacucguaccacac

SEQ ID NO: 520992 - RNA, 19 nt, Artificial Sequence
  Description of Artificial Sequence: Synthetic oligonucleotide
ggccagguuuguguuaucu

SEQ ID NO: 520993 - RNA, 19 nt, Artificial Sequence
  Description of Artificial Sequence: Synthetic oligonucleotide
cggauacucagagugaugu

SEQ ID NO: 520994 - RNA, 19 nt, Artificial Sequence
  Description of Artificial Sequence: Synthetic oligonucleotide
cuccuguaacauagccgcu

SEQ ID NO: 520995 - RNA, 19 nt, Artificial Sequence
  Description of Artificial Sequence: Synthetic oligonucleotide
caccggcaccuccgacugc

SEQ ID NO: 520996 - RNA, 19 nt, Artificial Sequence
  Description of Artificial Sequence: Synthetic oligonucleotide
gcuauuucggggacgcaau

SEQ ID NO: 520997 - RNA, 19 nt, Artificial Sequence
  Description of Artificial Sequence: Synthetic oligonucleotide
cccagauaugccccgaaau

SEQ ID NO: 520998 - RNA, 19 nt, Artificial Sequence
  Description of Artificial Sequence: Synthetic oligonucleotide
cuuauccgccggucagccu

SEQ ID NO: 520999 - RNA, 19 nt, Artificial Sequence
  Description of Artificial Sequence: Synthetic oligonucleotide
uccgccggucagccugcuu

SEQ ID NO: 521000 - RNA, 19 nt, Artificial Sequence
  Description of Artificial Sequence: Synthetic oligonucleotide
ccaagccagcggucaauga

SEQ ID NO: 521001 - RNA, 19 nt, Artificial Sequence
  Description of Artificial Sequence: Synthetic oligonucleotide
aggagcuguucugcaccuu

SEQ ID NO: 521002 - RNA, 19 nt, Artificial Sequence
  Description of Artificial Sequence: Synthetic oligonucleotide
cggucgagcaaacauuugu

SEQ ID NO: 521003 - RNA, 19 nt, Artificial Sequence
  Description of Artificial Sequence: Synthetic oligonucleotide
gggaugcucacaccaucau

SEQ ID NO: 521004 - RNA, 19 nt, Artificial Sequence
  Description of Artificial Sequence: Synthetic oligonucleotide
ggcaguccuggaaugccua

SEQ ID NO: 521005 - RNA, 19 nt, Artificial Sequence
  Description of Artificial Sequence: Synthetic oligonucleotide
cccgaaauucagcuccugu

SEQ ID NO: 521006 - RNA, 19 nt, Artificial Sequence
  Description of Artificial Sequence: Synthetic oligonucleotide
ggugugcaccaccaugcuu

SEQ ID NO: 521007 - RNA, 19 nt, Artificial Sequence
  Description of Artificial Sequence: Synthetic oligonucleotide
caccuccgacugccaucgc

SEQ ID NO: 521008 - RNA, 19 nt, Artificial Sequence
  Description of Artificial Sequence: Synthetic oligonucleotide
cugacgggugagggucuca

SEQ ID NO: 521009 - RNA, 19 nt, Artificial Sequence
  Description of Artificial Sequence: Synthetic oligonucleotide
caccgcccacucguaccac

SEQ ID NO: 521010 - RNA, 19 nt, Artificial Sequence
  Description of Artificial Sequence: Synthetic oligonucleotide
caggucccucccgcuggac

SEQ ID NO: 521011 - RNA, 19 nt, Artificial Sequence
  Description of Artificial Sequence: Synthetic oligonucleotide
ccacccauucccgcauguc

SEQ ID NO: 521012 - RNA, 19 nt, Artificial Sequence
  Description of Artificial Sequence: Synthetic oligonucleotide
cagcuauuucggggacgca

SEQ ID NO: 521013 - RNA, 19 nt, Artificial Sequence
  Description of Artificial Sequence: Synthetic oligonucleotide
caguauggaugugguuggu

SEQ ID NO: 521014 - RNA, 19 nt, Artificial Sequence
  Description of Artificial Sequence: Synthetic oligonucleotide
cgcccacucguaccacacc

SEQ ID NO: 521015 - RNA, 19 nt, Artificial Sequence
  Description of Artificial Sequence: Synthetic oligonucleotide
gccgaaccacguaaggcau

SEQ ID NO: 521016 - RNA, 19 nt, Artificial Sequence
  Description of Artificial Sequence: Synthetic oligonucleotide
cuccaagccagcggucaau

SEQ ID NO: 521017 - RNA, 19 nt, Artificial Sequence
  Description of Artificial Sequence: Synthetic oligonucleotide
gccacccauucccgcaugu

SEQ ID NO: 521018 - RNA, 19 nt, Artificial Sequence
  Description of Artificial Sequence: Synthetic oligonucleotide
ccccgaaauucagcuccug

SEQ ID NO: 521019 - RNA, 19 nt, Artificial Sequence
  Description of Artificial Sequence: Synthetic oligonucleotide
gcccggagagacgcauuca

SEQ ID NO: 521020 - RNA, 19 nt, Artificial Sequence
  Description of Artificial Sequence: Synthetic oligonucleotide
ggccuucacgcaccgugau

SEQ ID NO: 521021 - RNA, 19 nt, Artificial Sequence
  Description of Artificial Sequence: Synthetic oligonucleotide
auccgccggucagccugcu

SEQ ID NO: 521022 - RNA, 19 nt, Artificial Sequence
  Description of Artificial Sequence: Synthetic oligonucleotide
ggacgcaauucaggucccu

SEQ ID NO: 521023 - RNA, 19 nt, Artificial Sequence
  Description of Artificial Sequence: Synthetic oligonucleotide
gccccgaaauucagcuccu

SEQ ID NO: 521024 - RNA, 19 nt, Artificial Sequence
  Description of Artificial Sequence: Synthetic oligonucleotide
aaggcaacagcauuagggc

SEQ ID NO: 521025 - RNA, 19 nt, Artificial Sequence
  Description of Artificial Sequence: Synthetic oligonucleotide
agauuuggcgcauagaggg

SEQ ID NO: 521026 - RNA, 19 nt, Artificial Sequence
  Description of Artificial Sequence: Synthetic oligonucleotide
agcaagaauacaaacaucc

SEQ ID NO: 521027 - RNA, 19 nt, Artificial Sequence
  Description of Artificial Sequence: Synthetic oligonucleotide
aacuacauugguuuggcag

SEQ ID NO: 521028 - RNA, 19 nt, Artificial Sequence
  Description of Artificial Sequence: Synthetic oligonucleotide
ugaaauagggacuugugcc

SEQ ID NO: 521029 - RNA, 19 nt, Artificial Sequence
  Description of Artificial Sequence: Synthetic oligonucleotide
ucagauggcacauuugugg

SEQ ID NO: 521030 - RNA, 19 nt, Artificial Sequence
  Description of Artificial Sequence: Synthetic oligonucleotide
gauuggucuuuucagaugg

SEQ ID NO: 521031 - RNA, 19 nt, Artificial Sequence
  Description of Artificial Sequence: Synthetic oligonucleotide
acuacauugguuuggcagc

SEQ ID NO: 521032 - RNA, 19 nt, Artificial Sequence
  Description of Artificial Sequence: Synthetic oligonucleotide
acaagaauguagcugagag

SEQ ID NO: 521033 - RNA, 19 nt, Artificial Sequence
  Description of Artificial Sequence: Synthetic oligonucleotide
aguggaugcaccuguagcc

SEQ ID NO: 521034 - RNA, 19 nt, Artificial Sequence
  Description of Artificial Sequence: Synthetic oligonucleotide
auagauacugcuccagagc

SEQ ID NO: 521035 - RNA, 19 nt, Artificial Sequence
  Description of Artificial Sequence: Synthetic oligonucleotide
uuugguagaggaaacaguc

SEQ ID NO: 521036 - RNA, 19 nt, Artificial Sequence
  Description of Artificial Sequence: Synthetic oligonucleotide
aguagggagacuugugugc

SEQ ID NO: 521037 - RNA, 19 nt, Artificial Sequence
  Description of Artificial Sequence: Synthetic oligonucleotide
aaaagguaagcaagggacc

SEQ ID NO: 521038 - RNA, 19 nt, Artificial Sequence
  Description of Artificial Sequence: Synthetic oligonucleotide
aagaccuccacaauuagag

SEQ ID NO: 521039 - RNA, 19 nt, Artificial Sequence
  Description of Artificial Sequence: Synthetic oligonucleotide
uggacuaugaacagguggc

SEQ ID NO: 521040 - RNA, 19 nt, Artificial Sequence
  Description of Artificial Sequence: Synthetic oligonucleotide
aagaauguagcugagagua

SEQ ID NO: 521041 - RNA, 19 nt, Artificial Sequence
  Description of Artificial Sequence: Synthetic oligonucleotide
gaugcggcaacacuguggg

SEQ ID NO: 521042 - RNA, 19 nt, Artificial Sequence
  Description of Artificial Sequence: Synthetic oligonucleotide
ucaauuuccucccuccucc

SEQ ID NO: 521043 - RNA, 19 nt, Artificial Sequence
  Description of Artificial Sequence: Synthetic oligonucleotide
uuuucgagcauagugcagg

SEQ ID NO: 521044 - RNA, 19 nt, Artificial Sequence
  Description of Artificial Sequence: Synthetic oligonucleotide
uggcuuuucagcaaggcca

SEQ ID NO: 521045 - RNA, 19 nt, Artificial Sequence
  Description of Artificial Sequence: Synthetic oligonucleotide
ucugccauucugcugauug

SEQ ID NO: 521046 - RNA, 19 nt, Artificial Sequence
  Description of Artificial Sequence: Synthetic oligonucleotide
auacaaacaucccaauguc

SEQ ID NO: 521047 - RNA, 19 nt, Artificial Sequence
  Description of Artificial Sequence: Synthetic oligonucleotide
agagaucggcuucacaagc

SEQ ID NO: 521048 - RNA, 19 nt, Artificial Sequence
  Description of Artificial Sequence: Synthetic oligonucleotide
aauguggacgcuccgccgg

SEQ ID NO: 521049 - RNA, 19 nt, Artificial Sequence
  Description of Artificial Sequence: Synthetic oligonucleotide
ugguagaggaaacagucgc

SEQ ID NO: 521050 - RNA, 19 nt, Artificial Sequence
  Description of Artificial Sequence: Synthetic oligonucleotide
ugacugauggcuacaaagc

SEQ ID NO: 521051 - RNA, 19 nt, Artificial Sequence
  Description of Artificial Sequence: Synthetic oligonucleotide
caaauucagagcuguaagg

SEQ ID NO: 521052 - RNA, 19 nt, Artificial Sequence
  Description of Artificial Sequence: Synthetic oligonucleotide
ugcacacugaaauagggac

SEQ ID NO: 521053 - RNA, 19 nt, Artificial Sequence
  Description of Artificial Sequence: Synthetic oligonucleotide
cacuuuucgagcauagugc

SEQ ID NO: 521054 - RNA, 19 nt, Artificial Sequence
  Description of Artificial Sequence: Synthetic oligonucleotide
auuuugcacacugaaauag

SEQ ID NO: 521055 - RNA, 19 nt, Artificial Sequence
  Description of Artificial Sequence: Synthetic oligonucleotide
uugggcaauagacuggcag

SEQ ID NO: 521056 - RNA, 19 nt, Artificial Sequence
  Description of Artificial Sequence: Synthetic oligonucleotide
cacagagacaugaucagcc

SEQ ID NO: 521057 - RNA, 19 nt, Artificial Sequence
  Description of Artificial Sequence: Synthetic oligonucleotide
uuccauuaccggaugagcc

SEQ ID NO: 521058 - RNA, 19 nt, Artificial Sequence
  Description of Artificial Sequence: Synthetic oligonucleotide
uguggagcuguccaccugg

SEQ ID NO: 521059 - RNA, 19 nt, Artificial Sequence
  Description of Artificial Sequence: Synthetic oligonucleotide
cucaugauguuucuggggc

SEQ ID NO: 521060 - RNA, 19 nt, Artificial Sequence
  Description of Artificial Sequence: Synthetic oligonucleotide
augucuguguaacccacgc

SEQ ID NO: 521061 - RNA, 19 nt, Artificial Sequence
  Description of Artificial Sequence: Synthetic oligonucleotide
gaaacagucgcaccauugc

SEQ ID NO: 521062 - RNA, 19 nt, Artificial Sequence
  Description of Artificial Sequence: Synthetic oligonucleotide
ugggcaauagacuggcagg

SEQ ID NO: 521063 - RNA, 19 nt, Artificial Sequence
  Description of Artificial Sequence: Synthetic oligonucleotide
cauauagucucgcaucugc

SEQ ID NO: 521064 - RNA, 19 nt, Artificial Sequence
  Description of Artificial Sequence: Synthetic oligonucleotide
uaccuaaguagccuggggc

SEQ ID NO: 521065 - RNA, 19 nt, Artificial Sequence
  Description of Artificial Sequence: Synthetic oligonucleotide
guggacuaugaacaggugg

SEQ ID NO: 521066 - RNA, 19 nt, Artificial Sequence
  Description of Artificial Sequence: Synthetic oligonucleotide
cuagugaucuccuuggcuc

SEQ ID NO: 521067 - RNA, 19 nt, Artificial Sequence
  Description of Artificial Sequence: Synthetic oligonucleotide
cugaaauagggacuugugc

SEQ ID NO: 521068 - RNA, 19 nt, Artificial Sequence
  Description of Artificial Sequence: Synthetic oligonucleotide
gacuugugccuuuugguag

SEQ ID NO: 521069 - RNA, 19 nt, Artificial Sequence
  Description of Artificial Sequence: Synthetic oligonucleotide
auugcuagugcccggagca

SEQ ID NO: 521070 - RNA, 19 nt, Artificial Sequence
  Description of Artificial Sequence: Synthetic oligonucleotide
augacuaggcccuugcucu

SEQ ID NO: 521071 - RNA, 19 nt, Artificial Sequence
  Description of Artificial Sequence: Synthetic oligonucleotide
uccacaauuagaggggcgg

SEQ ID NO: 521072 - RNA, 19 nt, Artificial Sequence
  Description of Artificial Sequence: Synthetic oligonucleotide
ccaagaagcagcauaaagc

SEQ ID NO: 521073 - RNA, 19 nt, Artificial Sequence
  Description of Artificial Sequence: Synthetic oligonucleotide
cuucacaagcagcugagag

SEQ ID NO: 521074 - RNA, 19 nt, Artificial Sequence
  Description of Artificial Sequence: Synthetic oligonucleotide
agcgucuuggagcacagag

SEQ ID NO: 521075 - RNA, 19 nt, Artificial Sequence
  Description of Artificial Sequence: Synthetic oligonucleotide
agacuugugugcaugaauc

SEQ ID NO: 521076 - RNA, 19 nt, Artificial Sequence
  Description of Artificial Sequence: Synthetic oligonucleotide
aaagguaagcaagggaccu

SEQ ID NO: 521077 - RNA, 19 nt, Artificial Sequence
  Description of Artificial Sequence: Synthetic oligonucleotide
uggaggaccuuguugaaga

SEQ ID NO: 521078 - RNA, 19 nt, Artificial Sequence
  Description of Artificial Sequence: Synthetic oligonucleotide
aaacagucgcaccauugcu

SEQ ID NO: 521079 - RNA, 19 nt, Artificial Sequence
  Description of Artificial Sequence: Synthetic oligonucleotide
cucugguccgcagagaucg

SEQ ID NO: 521080 - RNA, 19 nt, Artificial Sequence
  Description of Artificial Sequence: Synthetic oligonucleotide
aauaauagucugagcaaca

SEQ ID NO: 521081 - RNA, 19 nt, Artificial Sequence
  Description of Artificial Sequence: Synthetic oligonucleotide
ucgagcauagugcaggcaa

SEQ ID NO: 521082 - RNA, 19 nt, Artificial Sequence
  Description of Artificial Sequence: Synthetic oligonucleotide
ucauuugcgugaccugagg

SEQ ID NO: 521083 - RNA, 19 nt, Artificial Sequence
  Description of Artificial Sequence: Synthetic oligonucleotide
uugaagaccuccacaauua

SEQ ID NO: 521084 - RNA, 19 nt, Artificial Sequence
  Description of Artificial Sequence: Synthetic oligonucleotide
aggguuagagcuguggagg

SEQ ID NO: 521085 - RNA, 19 nt, Artificial Sequence
  Description of Artificial Sequence: Synthetic oligonucleotide
acuuuucgagcauagugca

SEQ ID NO: 521086 - RNA, 19 nt, Artificial Sequence
  Description of Artificial Sequence: Synthetic oligonucleotide
agaauuugcagcucaggau

SEQ ID NO: 521087 - RNA, 19 nt, Artificial Sequence
  Description of Artificial Sequence: Synthetic oligonucleotide
uaccggaugagccucacuc

SEQ ID NO: 521088 - RNA, 19 nt, Artificial Sequence
  Description of Artificial Sequence: Synthetic oligonucleotide
acauuugguuccauuaccg

SEQ ID NO: 521089 - RNA, 19 nt, Artificial Sequence
  Description of Artificial Sequence: Synthetic oligonucleotide
cauagugcaggcaauucuc

SEQ ID NO: 521090 - RNA, 19 nt, Artificial Sequence
  Description of Artificial Sequence: Synthetic oligonucleotide
acagucgcaccauugcuag

SEQ ID NO: 521091 - RNA, 19 nt, Artificial Sequence
  Description of Artificial Sequence: Synthetic oligonucleotide
uucagauggcacauuugug

SEQ ID NO: 521092 - RNA, 19 nt, Artificial Sequence
  Description of Artificial Sequence: Synthetic oligonucleotide
aucccaaugucuguguaac

SEQ ID NO: 521093 - RNA, 19 nt, Artificial Sequence
  Description of Artificial Sequence: Synthetic oligonucleotide
ucugcauagcagguggagg

SEQ ID NO: 521094 - RNA, 19 nt, Artificial Sequence
  Description of Artificial Sequence: Synthetic oligonucleotide
gagauuuggcgcauagagg

SEQ ID NO: 521095 - RNA, 19 nt, Artificial Sequence
  Description of Artificial Sequence: Synthetic oligonucleotide
cagauguguagcacaagcc

SEQ ID NO: 521096 - RNA, 19 nt, Artificial Sequence
  Description of Artificial Sequence: Synthetic oligonucleotide
ucucgcaucugcuugugac

SEQ ID NO: 521097 - RNA, 19 nt, Artificial Sequence
  Description of Artificial Sequence: Synthetic oligonucleotide
ucuguguaacccacgcccc

SEQ ID NO: 521098 - RNA, 19 nt, Artificial Sequence
  Description of Artificial Sequence: Synthetic oligonucleotide
cacacagucugcauagcag

SEQ ID NO: 521099 - RNA, 19 nt, Artificial Sequence
  Description of Artificial Sequence: Synthetic oligonucleotide
aauuugcagcucaggauag

SEQ ID NO: 521100 - RNA, 19 nt, Artificial Sequence
  Description of Artificial Sequence: Synthetic oligonucleotide
agagcagcgucuuggagca

SEQ ID NO: 521101 - RNA, 19 nt, Artificial Sequence
  Description of Artificial Sequence: Synthetic oligonucleotide
aaccuggcaguguucgcuc

SEQ ID NO: 521102 - RNA, 19 nt, Artificial Sequence
  Description of Artificial Sequence: Synthetic oligonucleotide
accauauagucucgcaucu

SEQ ID NO: 521103 - RNA, 19 nt, Artificial Sequence
  Description of Artificial Sequence: Synthetic oligonucleotide
ugagccucacucugguccg

SEQ ID NO: 521104 - RNA, 19 nt, Artificial Sequence
  Description of Artificial Sequence: Synthetic oligonucleotide
uuugcgugaccugaggcug

SEQ ID NO: 521105 - RNA, 19 nt, Artificial Sequence
  Description of Artificial Sequence: Synthetic oligonucleotide
gauguguagcacaagccac

SEQ ID NO: 521106 - RNA, 19 nt, Artificial Sequence
  Description of Artificial Sequence: Synthetic oligonucleotide
ugucauuugcgugaccuga

SEQ ID NO: 521107 - RNA, 19 nt, Artificial Sequence
  Description of Artificial Sequence: Synthetic oligonucleotide
uccauuaccggaugagccu

SEQ ID NO: 521108 - RNA, 19 nt, Artificial Sequence
  Description of Artificial Sequence: Synthetic oligonucleotide
uggccauacuucaugauuu

SEQ ID NO: 521109 - RNA, 19 nt, Artificial Sequence
  Description of Artificial Sequence: Synthetic oligonucleotide
uuggccauacuucaugauu

SEQ ID NO: 521110 - RNA, 19 nt, Artificial Sequence
  Description of Artificial Sequence: Synthetic oligonucleotide
caugugucuggaaguaggc

SEQ ID NO: 521111 - RNA, 19 nt, Artificial Sequence
  Description of Artificial Sequence: Synthetic oligonucleotide
ugagaguaggagagggcug

SEQ ID NO: 521112 - RNA, 19 nt, Artificial Sequence
  Description of Artificial Sequence: Synthetic oligonucleotide
cuggucucucacuuugugg

SEQ ID NO: 521113 - RNA, 19 nt, Artificial Sequence
  Description of Artificial Sequence: Synthetic oligonucleotide
cauuugcgugaccugaggc

SEQ ID NO: 521114 - RNA, 19 nt, Artificial Sequence
  Description of Artificial Sequence: Synthetic oligonucleotide
caggcuagggcagaguucc

SEQ ID NO: 521115 - RNA, 19 nt, Artificial Sequence
  Description of Artificial Sequence: Synthetic oligonucleotide
uaacccacgccccaccugu

SEQ ID NO: 521116 - RNA, 19 nt, Artificial Sequence
  Description of Artificial Sequence: Synthetic oligonucleotide
ugcaugacuaggcccuugc

SEQ ID NO: 521117 - RNA, 19 nt, Artificial Sequence
  Description of Artificial Sequence: Synthetic oligonucleotide
accuaaguagccuggggcu

SEQ ID NO: 521118 - RNA, 19 nt, Artificial Sequence
  Description of Artificial Sequence: Synthetic oligonucleotide
aggacauuugguuccauua

SEQ ID NO: 521119 - RNA, 19 nt, Artificial Sequence
  Description of Artificial Sequence: Synthetic oligonucleotide
agcaggaccuucccacagc

SEQ ID NO: 521120 - RNA, 19 nt, Artificial Sequence
  Description of Artificial Sequence: Synthetic oligonucleotide
caagggaccucaccaagcc

SEQ ID NO: 521121 - RNA, 19 nt, Artificial Sequence
  Description of Artificial Sequence: Synthetic oligonucleotide
ucagguggaugacaccaca

SEQ ID NO: 521122 - RNA, 19 nt, Artificial Sequence
  Description of Artificial Sequence: Synthetic oligonucleotide
cauaccuggcaagucagcc

SEQ ID NO: 521123 - RNA, 19 nt, Artificial Sequence
  Description of Artificial Sequence: Synthetic oligonucleotide
caggagcaagaauacaaac

SEQ ID NO: 521124 - RNA, 19 nt, Artificial Sequence
  Description of Artificial Sequence: Synthetic oligonucleotide
uagaggaaacagucgcacc

SEQ ID NO: 521125 - RNA, 19 nt, Artificial Sequence
  Description of Artificial Sequence: Synthetic oligonucleotide
caugacuaggcccuugcuc

SEQ ID NO: 521126 - RNA, 19 nt, Artificial Sequence
  Description of Artificial Sequence: Synthetic oligonucleotide
uccagggacaggccuagug

SEQ ID NO: 521127 - RNA, 19 nt, Artificial Sequence
  Description of Artificial Sequence: Synthetic oligonucleotide
cuguagcccacuuuucgag

SEQ ID NO: 521128 - RNA, 19 nt, Artificial Sequence
  Description of Artificial Sequence: Synthetic oligonucleotide
ucuaguuuccauggccacc

SEQ ID NO: 521129 - RNA, 19 nt, Artificial Sequence
  Description of Artificial Sequence: Synthetic oligonucleotide
aauagacuggcaggggcca

SEQ ID NO: 521130 - RNA, 19 nt, Artificial Sequence
  Description of Artificial Sequence: Synthetic oligonucleotide
caguggaugcaccuguagc

SEQ ID NO: 521131 - RNA, 19 nt, Artificial Sequence
  Description of Artificial Sequence: Synthetic oligonucleotide
cuguggaggaccuuguuga

SEQ ID NO: 521132 - RNA, 19 nt, Artificial Sequence
  Description of Artificial Sequence: Synthetic oligonucleotide
gaaauagggacuugugccu

SEQ ID NO: 521133 - RNA, 19 nt, Artificial Sequence
  Description of Artificial Sequence: Synthetic oligonucleotide
agaauacaaacaucccaau

SEQ ID NO: 521134 - RNA, 19 nt, Artificial Sequence
  Description of Artificial Sequence: Synthetic oligonucleotide
aacgcgucuccacacucca

SEQ ID NO: 521135 - RNA, 19 nt, Artificial Sequence
  Description of Artificial Sequence: Synthetic oligonucleotide
cagagcaugccucuggguc

SEQ ID NO: 521136 - RNA, 19 nt, Artificial Sequence
  Description of Artificial Sequence: Synthetic oligonucleotide
uguguagcacaagccacag

SEQ ID NO: 521137 - RNA, 19 nt, Artificial Sequence
  Description of Artificial Sequence: Synthetic oligonucleotide
gacacgugaaguccucaug

SEQ ID NO: 521138 - RNA, 19 nt, Artificial Sequence
  Description of Artificial Sequence: Synthetic oligonucleotide
uuucgagcauagugcaggc

SEQ ID NO: 521139 - RNA, 19 nt, Artificial Sequence
  Description of Artificial Sequence: Synthetic oligonucleotide
cagaauuugcagcucagga

SEQ ID NO: 521140 - RNA, 19 nt, Artificial Sequence
  Description of Artificial Sequence: Synthetic oligonucleotide
aaacuacauugguuuggca

SEQ ID NO: 521141 - RNA, 19 nt, Artificial Sequence
  Description of Artificial Sequence: Synthetic oligonucleotide
ugauguuucuggggcaaag

SEQ ID NO: 521142 - RNA, 19 nt, Artificial Sequence
  Description of Artificial Sequence: Synthetic oligonucleotide
uccguuggugugcacagaa

SEQ ID NO: 521143 - RNA, 19 nt, Artificial Sequence
  Description of Artificial Sequence: Synthetic oligonucleotide
caggguuagagcuguggag

SEQ ID NO: 521144 - RNA, 19 nt, Artificial Sequence
  Description of Artificial Sequence: Synthetic oligonucleotide
acgugaaguccucaugaug

SEQ ID NO: 521145 - RNA, 19 nt, Artificial Sequence
  Description of Artificial Sequence: Synthetic oligonucleotide
cuaccuaaguagccugggg

SEQ ID NO: 521146 - RNA, 19 nt, Artificial Sequence
  Description of Artificial Sequence: Synthetic oligonucleotide
cagagaucggcuucacaag

SEQ ID NO: 521147 - RNA, 19 nt, Artificial Sequence
  Description of Artificial Sequence: Synthetic oligonucleotide
cauagcagguggagggugc

SEQ ID NO: 521148 - RNA, 19 nt, Artificial Sequence
  Description of Artificial Sequence: Synthetic oligonucleotide
uauagucucgcaucugcuu

SEQ ID NO: 521149 - RNA, 19 nt, Artificial Sequence
  Description of Artificial Sequence: Synthetic oligonucleotide
cacuaccuaaguagccugg

SEQ ID NO: 521150 - RNA, 19 nt, Artificial Sequence
  Description of Artificial Sequence: Synthetic oligonucleotide
agucgcaccauugcuagug

SEQ ID NO: 521151 - RNA, 19 nt, Artificial Sequence
  Description of Artificial Sequence: Synthetic oligonucleotide
ucuaauggcacaggagcaa

SEQ ID NO: 521152 - RNA, 19 nt, Artificial Sequence
  Description of Artificial Sequence: Synthetic oligonucleotide
acuaccuaaguagccuggg

SEQ ID NO: 521153 - RNA, 19 nt, Artificial Sequence
  Description of Artificial Sequence: Synthetic oligonucleotide
gucacaccugaggagauag

SEQ ID NO: 521154 - RNA, 19 nt, Artificial Sequence
  Description of Artificial Sequence: Synthetic oligonucleotide
ucucucuaguuuccauggc

SEQ ID NO: 521155 - RNA, 19 nt, Artificial Sequence
  Description of Artificial Sequence: Synthetic oligonucleotide
acagagacaugaucagcca

SEQ ID NO: 521156 - RNA, 19 nt, Artificial Sequence
  Description of Artificial Sequence: Synthetic oligonucleotide
caguagggagacuugugug

SEQ ID NO: 521157 - RNA, 19 nt, Artificial Sequence
  Description of Artificial Sequence: Synthetic oligonucleotide
uccguucucucuaguuucc

SEQ ID NO: 521158 - RNA, 19 nt, Artificial Sequence
  Description of Artificial Sequence: Synthetic oligonucleotide
accuccacaauuagagggg

SEQ ID NO: 521159 - RNA, 19 nt, Artificial Sequence
  Description of Artificial Sequence: Synthetic oligonucleotide
guagaggaaacagucgcac

SEQ ID NO: 521160 - RNA, 19 nt, Artificial Sequence
  Description of Artificial Sequence: Synthetic oligonucleotide
uccuuuacaugugucugga

SEQ ID NO: 521161 - RNA, 19 nt, Artificial Sequence
  Description of Artificial Sequence: Synthetic oligonucleotide
ggauucugcugucugcagg

SEQ ID NO: 521162 - RNA, 19 nt, Artificial Sequence
  Description of Artificial Sequence: Synthetic oligonucleotide
agcgacagaggacaccaca

SEQ ID NO: 521163 - RNA, 19 nt, Artificial Sequence
  Description of Artificial Sequence: Synthetic oligonucleotide
aacucgggcucugagucug

SEQ ID NO: 521164 - RNA, 19 nt, Artificial Sequence
  Description of Artificial Sequence: Synthetic oligonucleotide
gauagugcauggcuguucu

SEQ ID NO: 521165 - RNA, 19 nt, Artificial Sequence
  Description of Artificial Sequence: Synthetic oligonucleotide
agaugcggcaacacugugg

SEQ ID NO: 521166 - RNA, 19 nt, Artificial Sequence
  Description of Artificial Sequence: Synthetic oligonucleotide
ucucuaaggcaaacgcguc

SEQ ID NO: 521167 - RNA, 19 nt, Artificial Sequence
  Description of Artificial Sequence: Synthetic oligonucleotide
uuagggcugcacuaccuaa

SEQ ID NO: 521168 - RNA, 19 nt, Artificial Sequence
  Description of Artificial Sequence: Synthetic oligonucleotide
acugaaauagggacuugug

SEQ ID NO: 521169 - RNA, 19 nt, Artificial Sequence
  Description of Artificial Sequence: Synthetic oligonucleotide
aagcaagggaccucaccaa

SEQ ID NO: 521170 - RNA, 19 nt, Artificial Sequence
  Description of Artificial Sequence: Synthetic oligonucleotide
caauucuccuuuacaugug

SEQ ID NO: 521171 - RNA, 19 nt, Artificial Sequence
  Description of Artificial Sequence: Synthetic oligonucleotide
cuuguggucacgggcgugg

SEQ ID NO: 521172 - RNA, 19 nt, Artificial Sequence
  Description of Artificial Sequence: Synthetic oligonucleotide
cuaauggcacaggagcaag

SEQ ID NO: 521173 - RNA, 19 nt, Artificial Sequence
  Description of Artificial Sequence: Synthetic oligonucleotide
agguggaugacaccacagu

SEQ ID NO: 521174 - RNA, 19 nt, Artificial Sequence
  Description of Artificial Sequence: Synthetic oligonucleotide
uguaacccacgccccaccu

SEQ ID NO: 521175 - RNA, 19 nt, Artificial Sequence
  Description of Artificial Sequence: Synthetic oligonucleotide
gcaauagacuggcaggggc

SEQ ID NO: 521176 - RNA, 19 nt, Artificial Sequence
  Description of Artificial Sequence: Synthetic oligonucleotide
guuccauuaccggaugagc

SEQ ID NO: 521177 - RNA, 19 nt, Artificial Sequence
  Description of Artificial Sequence: Synthetic oligonucleotide
cauugcuagugcccggagc

SEQ ID NO: 521178 - RNA, 19 nt, Artificial Sequence
  Description of Artificial Sequence: Synthetic oligonucleotide
cuaaguagccuggggcugg

SEQ ID NO: 521179 - RNA, 19 nt, Artificial Sequence
  Description of Artificial Sequence: Synthetic oligonucleotide
gccaggaccauauagucuc

SEQ ID NO: 521180 - RNA, 19 nt, Artificial Sequence
  Description of Artificial Sequence: Synthetic oligonucleotide
uggaacucgggcucugagu

SEQ ID NO: 521181 - RNA, 19 nt, Artificial Sequence
  Description of Artificial Sequence: Synthetic oligonucleotide
gauggcuacaaagccucug

SEQ ID NO: 521182 - RNA, 19 nt, Artificial Sequence
  Description of Artificial Sequence: Synthetic oligonucleotide
cugcacuaccuaaguagcc

SEQ ID NO: 521183 - RNA, 19 nt, Artificial Sequence
  Description of Artificial Sequence: Synthetic oligonucleotide
ugugugcaugaauccguug

SEQ ID NO: 521184 - RNA, 19 nt, Artificial Sequence
  Description of Artificial Sequence: Synthetic oligonucleotide
gguaccaagaagcagcaua

SEQ ID NO: 521185 - RNA, 19 nt, Artificial Sequence
  Description of Artificial Sequence: Synthetic oligonucleotide
uugcgugaccugaggcugg

SEQ ID NO: 521186 - RNA, 19 nt, Artificial Sequence
  Description of Artificial Sequence: Synthetic oligonucleotide
uggcucuagaucagccacc

SEQ ID NO: 521187 - RNA, 19 nt, Artificial Sequence
  Description of Artificial Sequence: Synthetic oligonucleotide
guacugacauuucucccac

SEQ ID NO: 521188 - RNA, 19 nt, Artificial Sequence
  Description of Artificial Sequence: Synthetic oligonucleotide
gaauccguuggugugcaca

SEQ ID NO: 521189 - RNA, 19 nt, Artificial Sequence
  Description of Artificial Sequence: Synthetic oligonucleotide
ugaggagauagugcauggc

SEQ ID NO: 521190 - RNA, 19 nt, Artificial Sequence
  Description of Artificial Sequence: Synthetic oligonucleotide
uuacaugugucuggaagua

SEQ ID NO: 521191 - RNA, 19 nt, Artificial Sequence
  Description of Artificial Sequence: Synthetic oligonucleotide
uaaggcaaacgcgucucca

SEQ ID NO: 521192 - RNA, 19 nt, Artificial Sequence
  Description of Artificial Sequence: Synthetic oligonucleotide
cuccacaauuagaggggcg

SEQ ID NO: 521193 - RNA, 19 nt, Artificial Sequence
  Description of Artificial Sequence: Synthetic oligonucleotide
aucggcuucacaagcagcu

SEQ ID NO: 521194 - RNA, 19 nt, Artificial Sequence
  Description of Artificial Sequence: Synthetic oligonucleotide
guacucuguugcuucuugc

SEQ ID NO: 521195 - RNA, 19 nt, Artificial Sequence
  Description of Artificial Sequence: Synthetic oligonucleotide
cacaauuagaggggcggcc

SEQ ID NO: 521196 - RNA, 19 nt, Artificial Sequence
  Description of Artificial Sequence: Synthetic oligonucleotide
cucuaauggcacaggagca

SEQ ID NO: 521197 - RNA, 19 nt, Artificial Sequence
  Description of Artificial Sequence: Synthetic oligonucleotide
aauagggacuugugccuuu

SEQ ID NO: 521198 - RNA, 19 nt, Artificial Sequence
  Description of Artificial Sequence: Synthetic oligonucleotide
caacaagaauguagcugag

SEQ ID NO: 521199 - RNA, 19 nt, Artificial Sequence
  Description of Artificial Sequence: Synthetic oligonucleotide
auguggacgcuccgccggc

SEQ ID NO: 521200 - RNA, 19 nt, Artificial Sequence
  Description of Artificial Sequence: Synthetic oligonucleotide
acaauuagaggggcggccu

SEQ ID NO: 521201 - RNA, 19 nt, Artificial Sequence
  Description of Artificial Sequence: Synthetic oligonucleotide
cagguggaugacaccacag

SEQ ID NO: 521202 - RNA, 19 nt, Artificial Sequence
  Description of Artificial Sequence: Synthetic oligonucleotide
gacaggccuagugaucucc

SEQ ID NO: 521203 - RNA, 19 nt, Artificial Sequence
  Description of Artificial Sequence: Synthetic oligonucleotide
agcugagagcacugcauga

SEQ ID NO: 521204 - RNA, 19 nt, Artificial Sequence
  Description of Artificial Sequence: Synthetic oligonucleotide
ugugacacgugaaguccuc

SEQ ID NO: 521205 - RNA, 19 nt, Artificial Sequence
  Description of Artificial Sequence: Synthetic oligonucleotide
ggacauuugguuccauuac

SEQ ID NO: 521206 - RNA, 19 nt, Artificial Sequence
  Description of Artificial Sequence: Synthetic oligonucleotide
aaauagggacuugugccuu

SEQ ID NO: 521207 - RNA, 19 nt, Artificial Sequence
  Description of Artificial Sequence: Synthetic oligonucleotide
uccaguccguucucucuag

SEQ ID NO: 521208 - RNA, 19 nt, Artificial Sequence
  Description of Artificial Sequence: Synthetic oligonucleotide
uugcucuuguggucacggg

SEQ ID NO: 521209 - RNA, 19 nt, Artificial Sequence
  Description of Artificial Sequence: Synthetic oligonucleotide
uucagagcuguaagggauu

SEQ ID NO: 521210 - RNA, 19 nt, Artificial Sequence
  Description of Artificial Sequence: Synthetic oligonucleotide
aacagucgcaccauugcua

SEQ ID NO: 521211 - RNA, 19 nt, Artificial Sequence
  Description of Artificial Sequence: Synthetic oligonucleotide
cucuaguuuccauggccac

SEQ ID NO: 521212 - RNA, 19 nt, Artificial Sequence
  Description of Artificial Sequence: Synthetic oligonucleotide
gcaauucuccuuuacaugu

SEQ ID NO: 521213 - RNA, 19 nt, Artificial Sequence
  Description of Artificial Sequence: Synthetic oligonucleotide
guagcccacuuuucgagca

SEQ ID NO: 521214 - RNA, 19 nt, Artificial Sequence
  Description of Artificial Sequence: Synthetic oligonucleotide
gauguuucuggggcaaaga

SEQ ID NO: 521215 - RNA, 19 nt, Artificial Sequence
  Description of Artificial Sequence: Synthetic oligonucleotide
auuagggcugcacuaccua

SEQ ID NO: 521216 - RNA, 19 nt, Artificial Sequence
  Description of Artificial Sequence: Synthetic oligonucleotide
cucuggucacaccugagga

SEQ ID NO: 521217 - RNA, 19 nt, Artificial Sequence
  Description of Artificial Sequence: Synthetic oligonucleotide
cagauggcacauuugugga

SEQ ID NO: 521218 - RNA, 19 nt, Artificial Sequence
  Description of Artificial Sequence: Synthetic oligonucleotide
uagucucgcaucugcuugu

SEQ ID NO: 521219 - RNA, 19 nt, Artificial Sequence
  Description of Artificial Sequence: Synthetic oligonucleotide
aggcaaacgcgucuccaca

SEQ ID NO: 521220 - RNA, 19 nt, Artificial Sequence
  Description of Artificial Sequence: Synthetic oligonucleotide
ugacacgugaaguccucau

SEQ ID NO: 521221 - RNA, 19 nt, Artificial Sequence
  Description of Artificial Sequence: Synthetic oligonucleotide
ucccaaugucuguguaacc

SEQ ID NO: 521222 - RNA, 19 nt, Artificial Sequence
  Description of Artificial Sequence: Synthetic oligonucleotide
agccaccaaaggcucacug

SEQ ID NO: 521223 - RNA, 19 nt, Artificial Sequence
  Description of Artificial Sequence: Synthetic oligonucleotide
cuuggcucuagaucagcca

SEQ ID NO: 521224 - RNA, 19 nt, Artificial Sequence
  Description of Artificial Sequence: Synthetic oligonucleotide
agggcugcacuaccuaagu

SEQ ID NO: 521225 - RNA, 19 nt, Artificial Sequence
  Description of Artificial Sequence: Synthetic oligonucleotide
gaguuccaguggaacagcc

SEQ ID NO: 521226 - RNA, 19 nt, Artificial Sequence
  Description of Artificial Sequence: Synthetic oligonucleotide
gcucuuguggucacgggcg

SEQ ID NO: 521227 - RNA, 19 nt, Artificial Sequence
  Description of Artificial Sequence: Synthetic oligonucleotide
aaguaggcagagcgacaga

SEQ ID NO: 521228 - RNA, 19 nt, Artificial Sequence
  Description of Artificial Sequence: Synthetic oligonucleotide
uugugugcaugaauccguu

SEQ ID NO: 521229 - RNA, 19 nt, Artificial Sequence
  Description of Artificial Sequence: Synthetic oligonucleotide
ucgcaccauugcuagugcc

SEQ ID NO: 521230 - RNA, 19 nt, Artificial Sequence
  Description of Artificial Sequence: Synthetic oligonucleotide
uggaacagccagcauccuu

SEQ ID NO: 521231 - RNA, 19 nt, Artificial Sequence
  Description of Artificial Sequence: Synthetic oligonucleotide
gcugagauuuggcgcauag

SEQ ID NO: 521232 - RNA, 19 nt, Artificial Sequence
  Description of Artificial Sequence: Synthetic oligonucleotide
augaacagguggcgguuga

SEQ ID NO: 521233 - RNA, 19 nt, Artificial Sequence
  Description of Artificial Sequence: Synthetic oligonucleotide
auuaccggaugagccucac

SEQ ID NO: 521234 - RNA, 19 nt, Artificial Sequence
  Description of Artificial Sequence: Synthetic oligonucleotide
ggagaugcccagaauuugc

SEQ ID NO: 521235 - RNA, 19 nt, Artificial Sequence
  Description of Artificial Sequence: Synthetic oligonucleotide
gcaagaauacaaacauccc

SEQ ID NO: 521236 - RNA, 19 nt, Artificial Sequence
  Description of Artificial Sequence: Synthetic oligonucleotide
ugaucuccuuggcucuaga

SEQ ID NO: 521237 - RNA, 19 nt, Artificial Sequence
  Description of Artificial Sequence: Synthetic oligonucleotide
gucauuugcgugaccugag

SEQ ID NO: 521238 - RNA, 19 nt, Artificial Sequence
  Description of Artificial Sequence: Synthetic oligonucleotide
gcugauuggucuuuucaga

SEQ ID NO: 521239 - RNA, 19 nt, Artificial Sequence
  Description of Artificial Sequence: Synthetic oligonucleotide
caaacgcgucuccacacuc

SEQ ID NO: 521240 - RNA, 19 nt, Artificial Sequence
  Description of Artificial Sequence: Synthetic oligonucleotide
caggcaauucuccuuuaca

SEQ ID NO: 521241 - RNA, 19 nt, Artificial Sequence
  Description of Artificial Sequence: Synthetic oligonucleotide
cugucauuugcgugaccug

SEQ ID NO: 521242 - RNA, 19 nt, Artificial Sequence
  Description of Artificial Sequence: Synthetic oligonucleotide
guggucacgggcguggcgc

SEQ ID NO: 521243 - RNA, 19 nt, Artificial Sequence
  Description of Artificial Sequence: Synthetic oligonucleotide
uugcagcucaggauagaua

SEQ ID NO: 521244 - RNA, 19 nt, Artificial Sequence
  Description of Artificial Sequence: Synthetic oligonucleotide
ggaaacagucgcaccauug

SEQ ID NO: 521245 - RNA, 19 nt, Artificial Sequence
  Description of Artificial Sequence: Synthetic oligonucleotide
ugccugaagugcuguacuc

SEQ ID NO: 521246 - RNA, 19 nt, Artificial Sequence
  Description of Artificial Sequence: Synthetic oligonucleotide
aggaguguacugacauuuc

SEQ ID NO: 521247 - RNA, 19 nt, Artificial Sequence
  Description of Artificial Sequence: Synthetic oligonucleotide
cuugugugcaugaauccgu

SEQ ID NO: 521248 - RNA, 19 nt, Artificial Sequence
  Description of Artificial Sequence: Synthetic oligonucleotide
uguggcaaagcugcauuuu

SEQ ID NO: 521249 - RNA, 19 nt, Artificial Sequence
  Description of Artificial Sequence: Synthetic oligonucleotide
ggacuaugaacagguggcg

SEQ ID NO: 521250 - RNA, 19 nt, Artificial Sequence
  Description of Artificial Sequence: Synthetic oligonucleotide
cgucuuggagcacagagug

SEQ ID NO: 521251 - RNA, 19 nt, Artificial Sequence
  Description of Artificial Sequence: Synthetic oligonucleotide
agggagacuugugugcaug

SEQ ID NO: 521252 - RNA, 19 nt, Artificial Sequence
  Description of Artificial Sequence: Synthetic oligonucleotide
gccagcauccuucaauuuc

SEQ ID NO: 521253 - RNA, 19 nt, Artificial Sequence
  Description of Artificial Sequence: Synthetic oligonucleotide
uccgcagagaucggcuuca

SEQ ID NO: 521254 - RNA, 19 nt, Artificial Sequence
  Description of Artificial Sequence: Synthetic oligonucleotide
ucgcaucugcuugugacau

SEQ ID NO: 521255 - RNA, 19 nt, Artificial Sequence
  Description of Artificial Sequence: Synthetic oligonucleotide
gagaucggcuucacaagca

SEQ ID NO: 521256 - RNA, 19 nt, Artificial Sequence
  Description of Artificial Sequence: Synthetic oligonucleotide
ugcaccuguagcccacuuu

SEQ ID NO: 521257 - RNA, 19 nt, Artificial Sequence
  Description of Artificial Sequence: Synthetic oligonucleotide
guagggagacuugugugca

SEQ ID NO: 521258 - RNA, 19 nt, Artificial Sequence
  Description of Artificial Sequence: Synthetic oligonucleotide
uagggacuugugccuuuug

SEQ ID NO: 521259 - RNA, 19 nt, Artificial Sequence
  Description of Artificial Sequence: Synthetic oligonucleotide
gcacuuguugaagaagagc

SEQ ID NO: 521260 - RNA, 19 nt, Artificial Sequence
  Description of Artificial Sequence: Synthetic oligonucleotide
gagacuugugugcaugaau

SEQ ID NO: 521261 - RNA, 19 nt, Artificial Sequence
  Description of Artificial Sequence: Synthetic oligonucleotide
uuggccaagugcacagcuu

SEQ ID NO: 521262 - RNA, 19 nt, Artificial Sequence
  Description of Artificial Sequence: Synthetic oligonucleotide
ggcuacaaagccucugguc

SEQ ID NO: 521263 - RNA, 19 nt, Artificial Sequence
  Description of Artificial Sequence: Synthetic oligonucleotide
uuaccggaugagccucacu

SEQ ID NO: 521264 - RNA, 19 nt, Artificial Sequence
  Description of Artificial Sequence: Synthetic oligonucleotide
guaacccacgccccaccug

SEQ ID NO: 521265 - RNA, 19 nt, Artificial Sequence
  Description of Artificial Sequence: Synthetic oligonucleotide
gagggaacuggcagaugug

SEQ ID NO: 521266 - RNA, 19 nt, Artificial Sequence
  Description of Artificial Sequence: Synthetic oligonucleotide
gucgcaccauugcuagugc

SEQ ID NO: 521267 - RNA, 19 nt, Artificial Sequence
  Description of Artificial Sequence: Synthetic oligonucleotide
gagguauguggcucuggaa

SEQ ID NO: 521268 - RNA, 19 nt, Artificial Sequence
  Description of Artificial Sequence: Synthetic oligonucleotide
agcagcgucuuggagcaca

SEQ ID NO: 521269 - RNA, 19 nt, Artificial Sequence
  Description of Artificial Sequence: Synthetic oligonucleotide
cuccuuggcucuagaucag

SEQ ID NO: 521270 - RNA, 19 nt, Artificial Sequence
  Description of Artificial Sequence: Synthetic oligonucleotide
gcacuaccuaaguagccug

SEQ ID NO: 521271 - RNA, 19 nt, Artificial Sequence
  Description of Artificial Sequence: Synthetic oligonucleotide
ucccaagaggggucuggcu

SEQ ID NO: 521272 - RNA, 19 nt, Artificial Sequence
  Description of Artificial Sequence: Synthetic oligonucleotide
augaauccguuggugugca

SEQ ID NO: 521273 - RNA, 19 nt, Artificial Sequence
  Description of Artificial Sequence: Synthetic oligonucleotide
agcaguagggagacuugug

SEQ ID NO: 521274 - RNA, 19 nt, Artificial Sequence
  Description of Artificial Sequence: Synthetic oligonucleotide
caccauugcuagugcccgg

SEQ ID NO: 521275 - RNA, 19 nt, Artificial Sequence
  Description of Artificial Sequence: Synthetic oligonucleotide
aggccuguggugaauucug

SEQ ID NO: 521276 - RNA, 19 nt, Artificial Sequence
  Description of Artificial Sequence: Synthetic oligonucleotide
cugauuggucuuuucagau

SEQ ID NO: 521277 - RNA, 19 nt, Artificial Sequence
  Description of Artificial Sequence: Synthetic oligonucleotide
cagccugacugauggcuac

SEQ ID NO: 521278 - RNA, 19 nt, Artificial Sequence
  Description of Artificial Sequence: Synthetic oligonucleotide
aggcagagcgacagaggac

SEQ ID NO: 521279 - RNA, 19 nt, Artificial Sequence
  Description of Artificial Sequence: Synthetic oligonucleotide
ggcauaccuggcaagucag

SEQ ID NO: 521280 - RNA, 19 nt, Artificial Sequence
  Description of Artificial Sequence: Synthetic oligonucleotide
caucccaaugucuguguaa

SEQ ID NO: 521281 - RNA, 19 nt, Artificial Sequence
  Description of Artificial Sequence: Synthetic oligonucleotide
uucgagcauagugcaggca

SEQ ID NO: 521282 - RNA, 19 nt, Artificial Sequence
  Description of Artificial Sequence: Synthetic oligonucleotide
ucggcuucacaagcagcug

SEQ ID NO: 521283 - RNA, 19 nt, Artificial Sequence
  Description of Artificial Sequence: Synthetic oligonucleotide
agggacaggccuagugauc

SEQ ID NO: 521284 - RNA, 19 nt, Artificial Sequence
  Description of Artificial Sequence: Synthetic oligonucleotide
cacgccccaccugucaggg

SEQ ID NO: 521285 - RNA, 19 nt, Artificial Sequence
  Description of Artificial Sequence: Synthetic oligonucleotide
ggcaauagacuggcagggg

SEQ ID NO: 521286 - RNA, 19 nt, Artificial Sequence
  Description of Artificial Sequence: Synthetic oligonucleotide
cuaguuuccauggccaccu

SEQ ID NO: 521287 - RNA, 19 nt, Artificial Sequence
  Description of Artificial Sequence: Synthetic oligonucleotide
ggagauagugcauggcugu

SEQ ID NO: 521288 - RNA, 19 nt, Artificial Sequence
  Description of Artificial Sequence: Synthetic oligonucleotide
caucuggcauaccuggcaa

SEQ ID NO: 521289 - RNA, 19 nt, Artificial Sequence
  Description of Artificial Sequence: Synthetic oligonucleotide
ugcuagugcccggagcauc

SEQ ID NO: 521290 - RNA, 19 nt, Artificial Sequence
  Description of Artificial Sequence: Synthetic oligonucleotide
auuugcagcucaggauaga

SEQ ID NO: 521291 - RNA, 19 nt, Artificial Sequence
  Description of Artificial Sequence: Synthetic oligonucleotide
cagagcgacagaggacacc

SEQ ID NO: 521292 - RNA, 19 nt, Artificial Sequence
  Description of Artificial Sequence: Synthetic oligonucleotide
caugauguuucuggggcaa

SEQ ID NO: 521293 - RNA, 19 nt, Artificial Sequence
  Description of Artificial Sequence: Synthetic oligonucleotide
agguucaaguuggccaagu

SEQ ID NO: 521294 - RNA, 19 nt, Artificial Sequence
  Description of Artificial Sequence: Synthetic oligonucleotide
acucugguccgcagagauc

SEQ ID NO: 521295 - RNA, 19 nt, Artificial Sequence
  Description of Artificial Sequence: Synthetic oligonucleotide
cagucacagaugcggcaac

SEQ ID NO: 521296 - RNA, 19 nt, Artificial Sequence
  Description of Artificial Sequence: Synthetic oligonucleotide
guacccacuggccggcaca

SEQ ID NO: 521297 - RNA, 19 nt, Artificial Sequence
  Description of Artificial Sequence: Synthetic oligonucleotide
ucacgggcguggcgcagca

SEQ ID NO: 521298 - RNA, 19 nt, Artificial Sequence
  Description of Artificial Sequence: Synthetic oligonucleotide
gguagaggaaacagucgca

SEQ ID NO: 521299 - RNA, 19 nt, Artificial Sequence
  Description of Artificial Sequence: Synthetic oligonucleotide
cgugaaguccucaugaugu

SEQ ID NO: 521300 - RNA, 19 nt, Artificial Sequence
  Description of Artificial Sequence: Synthetic oligonucleotide
ggaguguacugacauuucu

SEQ ID NO: 521301 - RNA, 19 nt, Artificial Sequence
  Description of Artificial Sequence: Synthetic oligonucleotide
augcggcaacacugugggg

SEQ ID NO: 521302 - RNA, 19 nt, Artificial Sequence
  Description of Artificial Sequence: Synthetic oligonucleotide
caccuguagcccacuuuuc

SEQ ID NO: 521303 - RNA, 19 nt, Artificial Sequence
  Description of Artificial Sequence: Synthetic oligonucleotide
gaccucaccaagccaggcu

SEQ ID NO: 521304 - RNA, 19 nt, Artificial Sequence
  Description of Artificial Sequence: Synthetic oligonucleotide
gggcacugucauuugcgug

SEQ ID NO: 521305 - RNA, 19 nt, Artificial Sequence
  Description of Artificial Sequence: Synthetic oligonucleotide
gaucuccuuggcucuagau

SEQ ID NO: 521306 - RNA, 19 nt, Artificial Sequence
  Description of Artificial Sequence: Synthetic oligonucleotide
gcaagggaccucaccaagc

SEQ ID NO: 521307 - RNA, 19 nt, Artificial Sequence
  Description of Artificial Sequence: Synthetic oligonucleotide
cauuaccggaugagccuca

SEQ ID NO: 521308 - RNA, 19 nt, Artificial Sequence
  Description of Artificial Sequence: Synthetic oligonucleotide
gcauagugcaggcaauucu

SEQ ID NO: 521309 - RNA, 19 nt, Artificial Sequence
  Description of Artificial Sequence: Synthetic oligonucleotide
cucuaaggcaaacgcgucu

SEQ ID NO: 521310 - RNA, 19 nt, Artificial Sequence
  Description of Artificial Sequence: Synthetic oligonucleotide
cuguggagcuguccaccug

SEQ ID NO: 521311 - RNA, 19 nt, Artificial Sequence
  Description of Artificial Sequence: Synthetic oligonucleotide
cuguguaacccacgcccca

SEQ ID NO: 521312 - RNA, 19 nt, Artificial Sequence
  Description of Artificial Sequence: Synthetic oligonucleotide
ugacuaggcccuugcucuu

SEQ ID NO: 521313 - RNA, 19 nt, Artificial Sequence
  Description of Artificial Sequence: Synthetic oligonucleotide
ggguuagagcuguggagga

SEQ ID NO: 521314 - RNA, 19 nt, Artificial Sequence
  Description of Artificial Sequence: Synthetic oligonucleotide
caccucaauguggacgcuc

SEQ ID NO: 521315 - RNA, 19 nt, Artificial Sequence
  Description of Artificial Sequence: Synthetic oligonucleotide
ggccauacuucaugauuuc

SEQ ID NO: 521316 - RNA, 19 nt, Artificial Sequence
  Description of Artificial Sequence: Synthetic oligonucleotide
ggcgguugagggaacuggc

SEQ ID NO: 521317 - RNA, 19 nt, Artificial Sequence
  Description of Artificial Sequence: Synthetic oligonucleotide
ggaggaccuuguugaagac

SEQ ID NO: 521318 - RNA, 19 nt, Artificial Sequence
  Description of Artificial Sequence: Synthetic oligonucleotide
ccggaugagccucacucug

SEQ ID NO: 521319 - RNA, 19 nt, Artificial Sequence
  Description of Artificial Sequence: Synthetic oligonucleotide
ccuggucucucacuuugug

SEQ ID NO: 521320 - RNA, 19 nt, Artificial Sequence
  Description of Artificial Sequence: Synthetic oligonucleotide
auuagaggggcggccuuuu

SEQ ID NO: 521321 - RNA, 19 nt, Artificial Sequence
  Description of Artificial Sequence: Synthetic oligonucleotide
caggaguguacugacauuu

SEQ ID NO: 521322 - RNA, 19 nt, Artificial Sequence
  Description of Artificial Sequence: Synthetic oligonucleotide
ccaggaccauauagucucg

SEQ ID NO: 521323 - RNA, 19 nt, Artificial Sequence
  Description of Artificial Sequence: Synthetic oligonucleotide
gaagcagcauaaagccaua

SEQ ID NO: 521324 - RNA, 19 nt, Artificial Sequence
  Description of Artificial Sequence: Synthetic oligonucleotide
uuggcgcauagaggggcac

SEQ ID NO: 521325 - RNA, 19 nt, Artificial Sequence
  Description of Artificial Sequence: Synthetic oligonucleotide
ggcguggcgcagcaggcug

SEQ ID NO: 521326 - RNA, 19 nt, Artificial Sequence
  Description of Artificial Sequence: Synthetic oligonucleotide
ccgccggcuguaaugcugg

SEQ ID NO: 521327 - RNA, 19 nt, Artificial Sequence
  Description of Artificial Sequence: Synthetic oligonucleotide
ggugcugagguauguggcu

SEQ ID NO: 521328 - RNA, 19 nt, Artificial Sequence
  Description of Artificial Sequence: Synthetic oligonucleotide
aaaggcucacuggcacauu

SEQ ID NO: 521329 - RNA, 19 nt, Artificial Sequence
  Description of Artificial Sequence: Synthetic oligonucleotide
cacugucauuugcgugacc

SEQ ID NO: 521330 - RNA, 19 nt, Artificial Sequence
  Description of Artificial Sequence: Synthetic oligonucleotide
gcgucuccacacuccaggc

SEQ ID NO: 521331 - RNA, 19 nt, Artificial Sequence
  Description of Artificial Sequence: Synthetic oligonucleotide
cacagccugacugauggcu

SEQ ID NO: 521332 - RNA, 19 nt, Artificial Sequence
  Description of Artificial Sequence: Synthetic oligonucleotide
guguagcacaagccacaga

SEQ ID NO: 521333 - RNA, 19 nt, Artificial Sequence
  Description of Artificial Sequence: Synthetic oligonucleotide
guggcgguugagggaacug

SEQ ID NO: 521334 - RNA, 19 nt, Artificial Sequence
  Description of Artificial Sequence: Synthetic oligonucleotide
ccuccacaauuagaggggc

SEQ ID NO: 521335 - RNA, 19 nt, Artificial Sequence
  Description of Artificial Sequence: Synthetic oligonucleotide
auagggacuugugccuuuu

SEQ ID NO: 521336 - RNA, 19 nt, Artificial Sequence
  Description of Artificial Sequence: Synthetic oligonucleotide
gguuagagcuguggaggac

SEQ ID NO: 521337 - RNA, 19 nt, Artificial Sequence
  Description of Artificial Sequence: Synthetic oligonucleotide
cugaagugcuguacucugu

SEQ ID NO: 521338 - RNA, 19 nt, Artificial Sequence
  Description of Artificial Sequence: Synthetic oligonucleotide
uacccacuggccggcacau

SEQ ID NO: 521339 - RNA, 19 nt, Artificial Sequence
  Description of Artificial Sequence: Synthetic oligonucleotide
augauguuucuggggcaaa

SEQ ID NO: 521340 - RNA, 19 nt, Artificial Sequence
  Description of Artificial Sequence: Synthetic oligonucleotide
ggcuccgucucugugcuga

SEQ ID NO: 521341 - RNA, 19 nt, Artificial Sequence
  Description of Artificial Sequence: Synthetic oligonucleotide
accuggugcugagguaugu

SEQ ID NO: 521342 - RNA, 19 nt, Artificial Sequence
  Description of Artificial Sequence: Synthetic oligonucleotide
ucgcuccuggauguggcuu

SEQ ID NO: 521343 - RNA, 19 nt, Artificial Sequence
  Description of Artificial Sequence: Synthetic oligonucleotide
uugcuagugcccggagcau

SEQ ID NO: 521344 - RNA, 19 nt, Artificial Sequence
  Description of Artificial Sequence: Synthetic oligonucleotide
ccacaauuagaggggcggc

SEQ ID NO: 521345 - RNA, 19 nt, Artificial Sequence
  Description of Artificial Sequence: Synthetic oligonucleotide
ggccaaagucagguggaug

SEQ ID NO: 521346 - RNA, 19 nt, Artificial Sequence
  Description of Artificial Sequence: Synthetic oligonucleotide
ccauuaccggaugagccuc

SEQ ID NO: 521347 - RNA, 19 nt, Artificial Sequence
  Description of Artificial Sequence: Synthetic oligonucleotide
agugaucuccuuggcucua

SEQ ID NO: 521348 - RNA, 19 nt, Artificial Sequence
  Description of Artificial Sequence: Synthetic oligonucleotide
caagucagccccucaguuu

SEQ ID NO: 521349 - RNA, 19 nt, Artificial Sequence
  Description of Artificial Sequence: Synthetic oligonucleotide
agccugacugauggcuaca

SEQ ID NO: 521350 - RNA, 19 nt, Artificial Sequence
  Description of Artificial Sequence: Synthetic oligonucleotide
gucucgcaucugcuuguga

SEQ ID NO: 521351 - RNA, 19 nt, Artificial Sequence
  Description of Artificial Sequence: Synthetic oligonucleotide
cggcacauggauucugcug

SEQ ID NO: 521352 - RNA, 19 nt, Artificial Sequence
  Description of Artificial Sequence: Synthetic oligonucleotide
cuagugcccggagcaucug

SEQ ID NO: 521353 - RNA, 19 nt, Artificial Sequence
  Description of Artificial Sequence: Synthetic oligonucleotide
cacaguggaugcaccugua

SEQ ID NO: 521354 - RNA, 19 nt, Artificial Sequence
  Description of Artificial Sequence: Synthetic oligonucleotide
augcaccuguagcccacuu

SEQ ID NO: 521355 - RNA, 19 nt, Artificial Sequence
  Description of Artificial Sequence: Synthetic oligonucleotide
ggaccucaccaagccaggc

SEQ ID NO: 521356 - RNA, 19 nt, Artificial Sequence
  Description of Artificial Sequence: Synthetic oligonucleotide
cucgggcucugagucugug

SEQ ID NO: 521357 - RNA, 19 nt, Artificial Sequence
  Description of Artificial Sequence: Synthetic oligonucleotide
ggaugcaccuguagcccac

SEQ ID NO: 521358 - RNA, 19 nt, Artificial Sequence
  Description of Artificial Sequence: Synthetic oligonucleotide
caagaggggucuggcucuc

SEQ ID NO: 521359 - RNA, 19 nt, Artificial Sequence
  Description of Artificial Sequence: Synthetic oligonucleotide
ccauauagucucgcaucug

SEQ ID NO: 521360 - RNA, 19 nt, Artificial Sequence
  Description of Artificial Sequence: Synthetic oligonucleotide
gugaaguccucaugauguu

SEQ ID NO: 521361 - RNA, 19 nt, Artificial Sequence
  Description of Artificial Sequence: Synthetic oligonucleotide
auccguuggugugcacaga

SEQ ID NO: 521362 - RNA, 19 nt, Artificial Sequence
  Description of Artificial Sequence: Synthetic oligonucleotide
cacgugaaguccucaugau

SEQ ID NO: 521363 - RNA, 19 nt, Artificial Sequence
  Description of Artificial Sequence: Synthetic oligonucleotide
ggccaagugcacagcuuug

SEQ ID NO: 521364 - RNA, 19 nt, Artificial Sequence
  Description of Artificial Sequence: Synthetic oligonucleotide
gagcauagugcaggcaauu

SEQ ID NO: 521365 - RNA, 19 nt, Artificial Sequence
  Description of Artificial Sequence: Synthetic oligonucleotide
agccagugugacacgugaa

SEQ ID NO: 521366 - RNA, 19 nt, Artificial Sequence
  Description of Artificial Sequence: Synthetic oligonucleotide
gcaggaccuucccacagcu

SEQ ID NO: 521367 - RNA, 19 nt, Artificial Sequence
  Description of Artificial Sequence: Synthetic oligonucleotide
ccauugcuagugcccggag

SEQ ID NO: 521368 - RNA, 19 nt, Artificial Sequence
  Description of Artificial Sequence: Synthetic oligonucleotide
ccacgccccaccugucagg

SEQ ID NO: 521369 - RNA, 19 nt, Artificial Sequence
  Description of Artificial Sequence: Synthetic oligonucleotide
accuucccacagcucccaa

SEQ ID NO: 521370 - RNA, 19 nt, Artificial Sequence
  Description of Artificial Sequence: Synthetic oligonucleotide
guguucgcuccuggaugug

SEQ ID NO: 521371 - RNA, 19 nt, Artificial Sequence
  Description of Artificial Sequence: Synthetic oligonucleotide
acuggccggcacauggauu

SEQ ID NO: 521372 - RNA, 19 nt, Artificial Sequence
  Description of Artificial Sequence: Synthetic oligonucleotide
gcacacugaaauagggacu

SEQ ID NO: 521373 - RNA, 19 nt, Artificial Sequence
  Description of Artificial Sequence: Synthetic oligonucleotide
uggccggcacauggauucu

SEQ ID NO: 521374 - RNA, 19 nt, Artificial Sequence
  Description of Artificial Sequence: Synthetic oligonucleotide
caggacauuugguuccauu

SEQ ID NO: 521375 - RNA, 19 nt, Artificial Sequence
  Description of Artificial Sequence: Synthetic oligonucleotide
cuguggcaaagcugcauuu

SEQ ID NO: 521376 - RNA, 19 nt, Artificial Sequence
  Description of Artificial Sequence: Synthetic oligonucleotide
gcgcauagaggggcacagg

SEQ ID NO: 521377 - RNA, 19 nt, Artificial Sequence
  Description of Artificial Sequence: Synthetic oligonucleotide
gagauagugcauggcuguu

SEQ ID NO: 521378 - RNA, 19 nt, Artificial Sequence
  Description of Artificial Sequence: Synthetic oligonucleotide
ggggcacugucauuugcgu

SEQ ID NO: 521379 - RNA, 19 nt, Artificial Sequence
  Description of Artificial Sequence: Synthetic oligonucleotide
agcucccaagaggggucug

SEQ ID NO: 521380 - RNA, 19 nt, Artificial Sequence
  Description of Artificial Sequence: Synthetic oligonucleotide
ggaccaggggcacugucau

SEQ ID NO: 521381 - RNA, 19 nt, Artificial Sequence
  Description of Artificial Sequence: Synthetic oligonucleotide
gcaaacgcgucuccacacu

SEQ ID NO: 521382 - RNA, 19 nt, Artificial Sequence
  Description of Artificial Sequence: Synthetic oligonucleotide
cuaugaacagguggcgguu

SEQ ID NO: 521383 - RNA, 19 nt, Artificial Sequence
  Description of Artificial Sequence: Synthetic oligonucleotide
cucuuguggucacgggcgu

SEQ ID NO: 521384 - RNA, 19 nt, Artificial Sequence
  Description of Artificial Sequence: Synthetic oligonucleotide
ccaagaggggucuggcucu

SEQ ID NO: 521385 - RNA, 19 nt, Artificial Sequence
  Description of Artificial Sequence: Synthetic oligonucleotide
caauuagaggggcggccuu

SEQ ID NO: 521386 - RNA, 19 nt, Artificial Sequence
  Description of Artificial Sequence: Synthetic oligonucleotide
gcuagugcccggagcaucu

SEQ ID NO: 521387 - RNA, 19 nt, Artificial Sequence
  Description of Artificial Sequence: Synthetic oligonucleotide
gggcugcacuaccuaagua

SEQ ID NO: 521388 - RNA, 19 nt, Artificial Sequence
  Description of Artificial Sequence: Synthetic oligonucleotide
gcagagcgacagaggacac

SEQ ID NO: 521389 - RNA, 19 nt, Artificial Sequence
  Description of Artificial Sequence: Synthetic oligonucleotide
gacgcuccgccggcuguaa

SEQ ID NO: 521390 - RNA, 19 nt, Artificial Sequence
  Description of Artificial Sequence: Synthetic oligonucleotide
acgcuccgccggcuguaau

SEQ ID NO: 521391 - RNA, 19 nt, Artificial Sequence
  Description of Artificial Sequence: Synthetic oligonucleotide
gcaugacuaggcccuugcu

SEQ ID NO: 521392 - RNA, 19 nt, Artificial Sequence
  Description of Artificial Sequence: Synthetic oligonucleotide
cacuggccggcacauggau

SEQ ID NO: 521393 - RNA, 19 nt, Artificial Sequence
  Description of Artificial Sequence: Synthetic oligonucleotide
gcgucuuggagcacagagu

SEQ ID NO: 521394 - RNA, 19 nt, Artificial Sequence
  Description of Artificial Sequence: Synthetic oligonucleotide
ccugacugauggcuacaaa

SEQ ID NO: 521395 - RNA, 19 nt, Artificial Sequence
  Description of Artificial Sequence: Synthetic oligonucleotide
gccugacugauggcuacaa

SEQ ID NO: 521396 - RNA, 19 nt, Artificial Sequence
  Description of Artificial Sequence: Synthetic oligonucleotide
aggcuagggcagaguucca

SEQ ID NO: 521397 - RNA, 19 nt, Artificial Sequence
  Description of Artificial Sequence: Synthetic oligonucleotide
cagagcuguaagggauucu

SEQ ID NO: 521398 - RNA, 19 nt, Artificial Sequence
  Description of Artificial Sequence: Synthetic oligonucleotide
gguccgcagagaucggcuu

SEQ ID NO: 521399 - RNA, 19 nt, Artificial Sequence
  Description of Artificial Sequence: Synthetic oligonucleotide
cacgggcguggcgcagcag

SEQ ID NO: 521400 - RNA, 19 nt, Artificial Sequence
  Description of Artificial Sequence: Synthetic oligonucleotide
gugcagccaggaccauaua

SEQ ID NO: 521401 - RNA, 19 nt, Artificial Sequence
  Description of Artificial Sequence: Synthetic oligonucleotide
ccguuggugugcacagaaa

SEQ ID NO: 521402 - RNA, 19 nt, Artificial Sequence
  Description of Artificial Sequence: Synthetic oligonucleotide
guggaacagccagcauccu

SEQ ID NO: 521403 - RNA, 19 nt, Artificial Sequence
  Description of Artificial Sequence: Synthetic oligonucleotide
ccguucucucuaguuucca

SEQ ID NO: 521404 - RNA, 19 nt, Artificial Sequence
  Description of Artificial Sequence: Synthetic oligonucleotide
cuccgccggcuguaaugcu

SEQ ID NO: 521405 - RNA, 19 nt, Artificial Sequence
  Description of Artificial Sequence: Synthetic oligonucleotide
caacagcauuagggcugca

SEQ ID NO: 521406 - RNA, 19 nt, Artificial Sequence
  Description of Artificial Sequence: Synthetic oligonucleotide
cguucucucuaguuuccau

SEQ ID NO: 521407 - RNA, 19 nt, Artificial Sequence
  Description of Artificial Sequence: Synthetic oligonucleotide
ggcugagauuuggcgcaua

SEQ ID NO: 521408 - RNA, 19 nt, Artificial Sequence
  Description of Artificial Sequence: Synthetic oligonucleotide
ggacgcuccgccggcugua

SEQ ID NO: 521409 - RNA, 19 nt, Artificial Sequence
  Description of Artificial Sequence: Synthetic oligonucleotide
ccgcagagaucggcuucac

SEQ ID NO: 521410 - RNA, 19 nt, Artificial Sequence
  Description of Artificial Sequence: Synthetic oligonucleotide
gguggaccaggggcacugu

SEQ ID NO: 521411 - RNA, 19 nt, Artificial Sequence
  Description of Artificial Sequence: Synthetic oligonucleotide
ccaguccguucucucuagu

SEQ ID NO: 521412 - RNA, 19 nt, Artificial Sequence
  Description of Artificial Sequence: Synthetic oligonucleotide
gcaccucaauguggacgcu

SEQ ID NO: 521413 - RNA, 19 nt, Artificial Sequence
  Description of Artificial Sequence: Synthetic oligonucleotide
gcgugaccugaggcuggcu

SEQ ID NO: 521414 - RNA, 19 nt, Artificial Sequence
  Description of Artificial Sequence: Synthetic oligonucleotide
aguaauaauggcuacacgg

SEQ ID NO: 521415 - RNA, 19 nt, Artificial Sequence
  Description of Artificial Sequence: Synthetic oligonucleotide
ucauaaaacuuucaggucc

SEQ ID NO: 521416 - RNA, 19 nt, Artificial Sequence
  Description of Artificial Sequence: Synthetic oligonucleotide
agucagaugagucagcacc

SEQ ID NO: 521417 - RNA, 19 nt, Artificial Sequence
  Description of Artificial Sequence: Synthetic oligonucleotide
aacuauacaagacggaaag

SEQ ID NO: 521418 - RNA, 19 nt, Artificial Sequence
  Description of Artificial Sequence: Synthetic oligonucleotide
acuacaagaagcucaauac

SEQ ID NO: 521419 - RNA, 19 nt, Artificial Sequence
  Description of Artificial Sequence: Synthetic oligonucleotide
aauucaauaaauggcuacc

SEQ ID NO: 521420 - RNA, 19 nt, Artificial Sequence
  Description of Artificial Sequence: Synthetic oligonucleotide
uucauuagcaaccacgcag

SEQ ID NO: 521421 - RNA, 19 nt, Artificial Sequence
  Description of Artificial Sequence: Synthetic oligonucleotide
agaaggacggcucauagac

SEQ ID NO: 521422 - RNA, 19 nt, Artificial Sequence
  Description of Artificial Sequence: Synthetic oligonucleotide
aguucuuaggguuagauga

SEQ ID NO: 521423 - RNA, 19 nt, Artificial Sequence
  Description of Artificial Sequence: Synthetic oligonucleotide
aauagcuuaagcaccagac

SEQ ID NO: 521424 - RNA, 19 nt, Artificial Sequence
  Description of Artificial Sequence: Synthetic oligonucleotide
uuaagcaccagacaaugag

SEQ ID NO: 521425 - RNA, 19 nt, Artificial Sequence
  Description of Artificial Sequence: Synthetic oligonucleotide
uaaauggcuacccacaaug

SEQ ID NO: 521426 - RNA, 19 nt, Artificial Sequence
  Description of Artificial Sequence: Synthetic oligonucleotide
aaugggaacacguccgcgc

SEQ ID NO: 521427 - RNA, 19 nt, Artificial Sequence
  Description of Artificial Sequence: Synthetic oligonucleotide
ucuaugguugucuuuaaag

SEQ ID NO: 521428 - RNA, 19 nt, Artificial Sequence
  Description of Artificial Sequence: Synthetic oligonucleotide
ugcaagaagauaaagucca

SEQ ID NO: 521429 - RNA, 19 nt, Artificial Sequence
  Description of Artificial Sequence: Synthetic oligonucleotide
agaaagugaaaacugaacu

SEQ ID NO: 521430 - RNA, 19 nt, Artificial Sequence
  Description of Artificial Sequence: Synthetic oligonucleotide
auuucaguaaaucucuaag

SEQ ID NO: 521431 - RNA, 19 nt, Artificial Sequence
  Description of Artificial Sequence: Synthetic oligonucleotide
uuaaggcaaagcaaaaggc

SEQ ID NO: 521432 - RNA, 19 nt, Artificial Sequence
  Description of Artificial Sequence: Synthetic oligonucleotide
uaaggacuuacaaagggag

SEQ ID NO: 521433 - RNA, 19 nt, Artificial Sequence
  Description of Artificial Sequence: Synthetic oligonucleotide
ucuuccacuaacuuuuagg

SEQ ID NO: 521434 - RNA, 19 nt, Artificial Sequence
  Description of Artificial Sequence: Synthetic oligonucleotide
uuagcaaccacgcagaguu

SEQ ID NO: 521435 - RNA, 19 nt, Artificial Sequence
  Description of Artificial Sequence: Synthetic oligonucleotide
uguguuuaccccaugaccu

SEQ ID NO: 521436 - RNA, 19 nt, Artificial Sequence
  Description of Artificial Sequence: Synthetic oligonucleotide
cagacuaugguaaaguggc

SEQ ID NO: 521437 - RNA, 19 nt, Artificial Sequence
  Description of Artificial Sequence: Synthetic oligonucleotide
aaggacggcucauagacuc

SEQ ID NO: 521438 - RNA, 19 nt, Artificial Sequence
  Description of Artificial Sequence: Synthetic oligonucleotide
auguguuuaccccaugacc

SEQ ID NO: 521439 - RNA, 19 nt, Artificial Sequence
  Description of Artificial Sequence: Synthetic oligonucleotide
aguuguuugauccauuucu

SEQ ID NO: 521440 - RNA, 19 nt, Artificial Sequence
  Description of Artificial Sequence: Synthetic oligonucleotide
gauagcaucuagcauacug

SEQ ID NO: 521441 - RNA, 19 nt, Artificial Sequence
  Description of Artificial Sequence: Synthetic oligonucleotide
aaaccuuuuacccugguua

SEQ ID NO: 521442 - RNA, 19 nt, Artificial Sequence
  Description of Artificial Sequence: Synthetic oligonucleotide
guugaauucaauaaauggc

SEQ ID NO: 521443 - RNA, 19 nt, Artificial Sequence
  Description of Artificial Sequence: Synthetic oligonucleotide
cuugagauaagcuuccuug

SEQ ID NO: 521444 - RNA, 19 nt, Artificial Sequence
  Description of Artificial Sequence: Synthetic oligonucleotide
ugcaguggcaauuaggagc

SEQ ID NO: 521445 - RNA, 19 nt, Artificial Sequence
  Description of Artificial Sequence: Synthetic oligonucleotide
uuagagaauugcuugaccu

SEQ ID NO: 521446 - RNA, 19 nt, Artificial Sequence
  Description of Artificial Sequence: Synthetic oligonucleotide
cuuccacuaacuuuuaggc

SEQ ID NO: 521447 - RNA, 19 nt, Artificial Sequence
  Description of Artificial Sequence: Synthetic oligonucleotide
auacuauacaggcaggcuc

SEQ ID NO: 521448 - RNA, 19 nt, Artificial Sequence
  Description of Artificial Sequence: Synthetic oligonucleotide
aacucuagaagcuaucaau

SEQ ID NO: 521449 - RNA, 19 nt, Artificial Sequence
  Description of Artificial Sequence: Synthetic oligonucleotide
uacaguuaccacuacaaga

SEQ ID NO: 521450 - RNA, 19 nt, Artificial Sequence
  Description of Artificial Sequence: Synthetic oligonucleotide
cuaguauauucccaggucc

SEQ ID NO: 521451 - RNA, 19 nt, Artificial Sequence
  Description of Artificial Sequence: Synthetic oligonucleotide
aaaacuauacaagacggaa

SEQ ID NO: 521452 - RNA, 19 nt, Artificial Sequence
  Description of Artificial Sequence: Synthetic oligonucleotide
uugaccuccacacauuagc

SEQ ID NO: 521453 - RNA, 19 nt, Artificial Sequence
  Description of Artificial Sequence: Synthetic oligonucleotide
caccauaauacauccagcg

SEQ ID NO: 521454 - RNA, 19 nt, Artificial Sequence
  Description of Artificial Sequence: Synthetic oligonucleotide
auuaaagcaucuuaagaau

SEQ ID NO: 521455 - RNA, 19 nt, Artificial Sequence
  Description of Artificial Sequence: Synthetic oligonucleotide
acagauagcaucuagcaua

SEQ ID NO: 521456 - RNA, 19 nt, Artificial Sequence
  Description of Artificial Sequence: Synthetic oligonucleotide
uugacaaacaugugcaaga

SEQ ID NO: 521457 - RNA, 19 nt, Artificial Sequence
  Description of Artificial Sequence: Synthetic oligonucleotide
gaauucaauaaauggcuac

SEQ ID NO: 521458 - RNA, 19 nt, Artificial Sequence
  Description of Artificial Sequence: Synthetic oligonucleotide
uuuagagaauugcuugacc

SEQ ID NO: 521459 - RNA, 19 nt, Artificial Sequence
  Description of Artificial Sequence: Synthetic oligonucleotide
auugcguacaguuaccacu

SEQ ID NO: 521460 - RNA, 19 nt, Artificial Sequence
  Description of Artificial Sequence: Synthetic oligonucleotide
cuagaagcuaucaaugcug

SEQ ID NO: 521461 - RNA, 19 nt, Artificial Sequence
  Description of Artificial Sequence: Synthetic oligonucleotide
uuaagaaugaauggcuuca

SEQ ID NO: 521462 - RNA, 19 nt, Artificial Sequence
  Description of Artificial Sequence: Synthetic oligonucleotide
agcuauuucaguaaaucuc

SEQ ID NO: 521463 - RNA, 19 nt, Artificial Sequence
  Description of Artificial Sequence: Synthetic oligonucleotide
aauuuacagaccaaaggcu

SEQ ID NO: 521464 - RNA, 19 nt, Artificial Sequence
  Description of Artificial Sequence: Synthetic oligonucleotide
ucaagaacccauucauuag

SEQ ID NO: 521465 - RNA, 19 nt, Artificial Sequence
  Description of Artificial Sequence: Synthetic oligonucleotide
uaggcuuacuguacaauag

SEQ ID NO: 521466 - RNA, 19 nt, Artificial Sequence
  Description of Artificial Sequence: Synthetic oligonucleotide
gauacaaguacaaccuucc

SEQ ID NO: 521467 - RNA, 19 nt, Artificial Sequence
  Description of Artificial Sequence: Synthetic oligonucleotide
cagacaaugagcuauuuca

SEQ ID NO: 521468 - RNA, 19 nt, Artificial Sequence
  Description of Artificial Sequence: Synthetic oligonucleotide
uuugacaaacaugugcaag

SEQ ID NO: 521469 - RNA, 19 nt, Artificial Sequence
  Description of Artificial Sequence: Synthetic oligonucleotide
aagccugcuagaaaacugc

SEQ ID NO: 521470 - RNA, 19 nt, Artificial Sequence
  Description of Artificial Sequence: Synthetic oligonucleotide
uuucuuaugggacacucau

SEQ ID NO: 521471 - RNA, 19 nt, Artificial Sequence
  Description of Artificial Sequence: Synthetic oligonucleotide
aggcuuacuguacaauagc

SEQ ID NO: 521472 - RNA, 19 nt, Artificial Sequence
  Description of Artificial Sequence: Synthetic oligonucleotide
uagcuuaagcaccagacaa

SEQ ID NO: 521473 - RNA, 19 nt, Artificial Sequence
  Description of Artificial Sequence: Synthetic oligonucleotide
cuacccacaaugaaagacc

SEQ ID NO: 521474 - RNA, 19 nt, Artificial Sequence
  Description of Artificial Sequence: Synthetic oligonucleotide
uacaauagcuuaagcacca

SEQ ID NO: 521475 - RNA, 19 nt, Artificial Sequence
  Description of Artificial Sequence: Synthetic oligonucleotide
agcuguacgcuucauuugg

SEQ ID NO: 521476 - RNA, 19 nt, Artificial Sequence
  Description of Artificial Sequence: Synthetic oligonucleotide
uggcuacccacaaugaaag

SEQ ID NO: 521477 - RNA, 19 nt, Artificial Sequence
  Description of Artificial Sequence: Synthetic oligonucleotide
ugauacaaguacaaccuuc

SEQ ID NO: 521478 - RNA, 19 nt, Artificial Sequence
  Description of Artificial Sequence: Synthetic oligonucleotide
cauaaaacuuucagguccc

SEQ ID NO: 521479 - RNA, 19 nt, Artificial Sequence
  Description of Artificial Sequence: Synthetic oligonucleotide
uaauaauggcuacacggac

SEQ ID NO: 521480 - RNA, 19 nt, Artificial Sequence
  Description of Artificial Sequence: Synthetic oligonucleotide
aaugagcuauuucaguaaa

SEQ ID NO: 521481 - RNA, 19 nt, Artificial Sequence
  Description of Artificial Sequence: Synthetic oligonucleotide
agcauacugagccaauguc

SEQ ID NO: 521482 - RNA, 19 nt, Artificial Sequence
  Description of Artificial Sequence: Synthetic oligonucleotide
agauauuacacccguuuca

SEQ ID NO: 521483 - RNA, 19 nt, Artificial Sequence
  Description of Artificial Sequence: Synthetic oligonucleotide
aggagcaugaaacaucacu

SEQ ID NO: 521484 - RNA, 19 nt, Artificial Sequence
  Description of Artificial Sequence: Synthetic oligonucleotide
ugacucagcugucagguug

SEQ ID NO: 521485 - RNA, 19 nt, Artificial Sequence
  Description of Artificial Sequence: Synthetic oligonucleotide
uagcaucuagcauacuggg

SEQ ID NO: 521486 - RNA, 19 nt, Artificial Sequence
  Description of Artificial Sequence: Synthetic oligonucleotide
auagcaucuagcauacugg

SEQ ID NO: 521487 - RNA, 19 nt, Artificial Sequence
  Description of Artificial Sequence: Synthetic oligonucleotide
aggauucaugaaaagacac

SEQ ID NO: 521488 - RNA, 19 nt, Artificial Sequence
  Description of Artificial Sequence: Synthetic oligonucleotide
uuaugcuagaaaagaaaau

SEQ ID NO: 521489 - RNA, 19 nt, Artificial Sequence
  Description of Artificial Sequence: Synthetic oligonucleotide
gguaaagauuuccugcugg

SEQ ID NO: 521490 - RNA, 19 nt, Artificial Sequence
  Description of Artificial Sequence: Synthetic oligonucleotide
caagaacccauucauuagc

SEQ ID NO: 521491 - RNA, 19 nt, Artificial Sequence
  Description of Artificial Sequence: Synthetic oligonucleotide
cuuaagaaugaauggcuuc

SEQ ID NO: 521492 - RNA, 19 nt, Artificial Sequence
  Description of Artificial Sequence: Synthetic oligonucleotide
cucuagaagcuaucaaugc

SEQ ID NO: 521493 - RNA, 19 nt, Artificial Sequence
  Description of Artificial Sequence: Synthetic oligonucleotide
cuguacaauagcuuaagca

SEQ ID NO: 521494 - RNA, 19 nt, Artificial Sequence
  Description of Artificial Sequence: Synthetic oligonucleotide
ugagcuauuucaguaaauc

SEQ ID NO: 521495 - RNA, 19 nt, Artificial Sequence
  Description of Artificial Sequence: Synthetic oligonucleotide
cagaaagugaaaacugaac

SEQ ID NO: 521496 - RNA, 19 nt, Artificial Sequence
  Description of Artificial Sequence: Synthetic oligonucleotide
acuaugguaaaguggcgug

SEQ ID NO: 521497 - RNA, 19 nt, Artificial Sequence
  Description of Artificial Sequence: Synthetic oligonucleotide
ucagcuaauucacuguuuu

SEQ ID NO: 521498 - RNA, 19 nt, Artificial Sequence
  Description of Artificial Sequence: Synthetic oligonucleotide
ugucagauaaggacuuaca

SEQ ID NO: 521499 - RNA, 19 nt, Artificial Sequence
  Description of Artificial Sequence: Synthetic oligonucleotide
auacaagacggaaagaccu

SEQ ID NO: 521500 - RNA, 19 nt, Artificial Sequence
  Description of Artificial Sequence: Synthetic oligonucleotide
guuuaauuccuuugcaaga

SEQ ID NO: 521501 - RNA, 19 nt, Artificial Sequence
  Description of Artificial Sequence: Synthetic oligonucleotide
ugcuaguauauucccaggu

SEQ ID NO: 521502 - RNA, 19 nt, Artificial Sequence
  Description of Artificial Sequence: Synthetic oligonucleotide
uacccacaaugaaagaccc

SEQ ID NO: 521503 - RNA, 19 nt, Artificial Sequence
  Description of Artificial Sequence: Synthetic oligonucleotide
uuaggcuuacuguacaaua

SEQ ID NO: 521504 - RNA, 19 nt, Artificial Sequence
  Description of Artificial Sequence: Synthetic oligonucleotide
accuucuauacccuggugu

SEQ ID NO: 521505 - RNA, 19 nt, Artificial Sequence
  Description of Artificial Sequence: Synthetic oligonucleotide
auuacacauccugccaugc

SEQ ID NO: 521506 - RNA, 19 nt, Artificial Sequence
  Description of Artificial Sequence: Synthetic oligonucleotide
aaccacgcagaguucagcu

SEQ ID NO: 521507 - RNA, 19 nt, Artificial Sequence
  Description of Artificial Sequence: Synthetic oligonucleotide
ccauucauuagcaaccacg

SEQ ID NO: 521508 - RNA, 19 nt, Artificial Sequence
  Description of Artificial Sequence: Synthetic oligonucleotide
ugcuuuuagagaauugcuu

SEQ ID NO: 521509 - RNA, 19 nt, Artificial Sequence
  Description of Artificial Sequence: Synthetic oligonucleotide
auagcuuaagcaccagaca

SEQ ID NO: 521510 - RNA, 19 nt, Artificial Sequence
  Description of Artificial Sequence: Synthetic oligonucleotide
aaccuuaaggcaaagcaaa

SEQ ID NO: 521511 - RNA, 19 nt, Artificial Sequence
  Description of Artificial Sequence: Synthetic oligonucleotide
uucgagacaaggcugcguc

SEQ ID NO: 521512 - RNA, 19 nt, Artificial Sequence
  Description of Artificial Sequence: Synthetic oligonucleotide
uccagacuaugguaaagug

SEQ ID NO: 521513 - RNA, 19 nt, Artificial Sequence
  Description of Artificial Sequence: Synthetic oligonucleotide
caagaagcucaauacauga

SEQ ID NO: 521514 - RNA, 19 nt, Artificial Sequence
  Description of Artificial Sequence: Synthetic oligonucleotide
uuuagcugaccccgcaugu

SEQ ID NO: 521515 - RNA, 19 nt, Artificial Sequence
  Description of Artificial Sequence: Synthetic oligonucleotide
acauuucuuggauaagccu

SEQ ID NO: 521516 - RNA, 19 nt, Artificial Sequence
  Description of Artificial Sequence: Synthetic oligonucleotide
acuuuuaggcuuacuguac

SEQ ID NO: 521517 - RNA, 19 nt, Artificial Sequence
  Description of Artificial Sequence: Synthetic oligonucleotide
auuucagggagagguuucc

SEQ ID NO: 521518 - RNA, 19 nt, Artificial Sequence
  Description of Artificial Sequence: Synthetic oligonucleotide
aggucccuauacuauacag

SEQ ID NO: 521519 - RNA, 19 nt, Artificial Sequence
  Description of Artificial Sequence: Synthetic oligonucleotide
aguuccauagaaggacggc

SEQ ID NO: 521520 - RNA, 19 nt, Artificial Sequence
  Description of Artificial Sequence: Synthetic oligonucleotide
gaaagacccaccccaaauc

SEQ ID NO: 521521 - RNA, 19 nt, Artificial Sequence
  Description of Artificial Sequence: Synthetic oligonucleotide
aaccuuuuacccugguuau

SEQ ID NO: 521522 - RNA, 19 nt, Artificial Sequence
  Description of Artificial Sequence: Synthetic oligonucleotide
acacccguuucauaaaacu

SEQ ID NO: 521523 - RNA, 19 nt, Artificial Sequence
  Description of Artificial Sequence: Synthetic oligonucleotide
uggugugugucaagaaccc

SEQ ID NO: 521524 - RNA, 19 nt, Artificial Sequence
  Description of Artificial Sequence: Synthetic oligonucleotide
cauccagcgucuaugguug

SEQ ID NO: 521525 - RNA, 19 nt, Artificial Sequence
  Description of Artificial Sequence: Synthetic oligonucleotide
acggcucauagacucaauc

SEQ ID NO: 521526 - RNA, 19 nt, Artificial Sequence
  Description of Artificial Sequence: Synthetic oligonucleotide
aucuuacacagacugcucu

SEQ ID NO: 521527 - RNA, 19 nt, Artificial Sequence
  Description of Artificial Sequence: Synthetic oligonucleotide
gagauauuacacccguuuc

SEQ ID NO: 521528 - RNA, 19 nt, Artificial Sequence
  Description of Artificial Sequence: Synthetic oligonucleotide
uucgggcaaguucacacug

SEQ ID NO: 521529 - RNA, 19 nt, Artificial Sequence
  Description of Artificial Sequence: Synthetic oligonucleotide
uaggguuagaugauggcuu

SEQ ID NO: 521530 - RNA, 19 nt, Artificial Sequence
  Description of Artificial Sequence: Synthetic oligonucleotide
agauaagcuuccuuggcaa

SEQ ID NO: 521531 - RNA, 19 nt, Artificial Sequence
  Description of Artificial Sequence: Synthetic oligonucleotide
ugcuggguuuagcugaccc

SEQ ID NO: 521532 - RNA, 19 nt, Artificial Sequence
  Description of Artificial Sequence: Synthetic oligonucleotide
aaaaccuuuuacccugguu

SEQ ID NO: 521533 - RNA, 19 nt, Artificial Sequence
  Description of Artificial Sequence: Synthetic oligonucleotide
ugaccuccacacauuagca

SEQ ID NO: 521534 - RNA, 19 nt, Artificial Sequence
  Description of Artificial Sequence: Synthetic oligonucleotide
acucuagaagcuaucaaug

SEQ ID NO: 521535 - RNA, 19 nt, Artificial Sequence
  Description of Artificial Sequence: Synthetic oligonucleotide
cuggguuuagcugaccccg

SEQ ID NO: 521536 - RNA, 19 nt, Artificial Sequence
  Description of Artificial Sequence: Synthetic oligonucleotide
uugccaagccuucauuaca

SEQ ID NO: 521537 - RNA, 19 nt, Artificial Sequence
  Description of Artificial Sequence: Synthetic oligonucleotide
guacaguuaccacuacaag

SEQ ID NO: 521538 - RNA, 19 nt, Artificial Sequence
  Description of Artificial Sequence: Synthetic oligonucleotide
caagcuggagcagaacugg

SEQ ID NO: 521539 - RNA, 19 nt, Artificial Sequence
  Description of Artificial Sequence: Synthetic oligonucleotide
aaacuauacaagacggaaa

SEQ ID NO: 521540 - RNA, 19 nt, Artificial Sequence
  Description of Artificial Sequence: Synthetic oligonucleotide
uucuauacccuggugugug

SEQ ID NO: 521541 - RNA, 19 nt, Artificial Sequence
  Description of Artificial Sequence: Synthetic oligonucleotide
uugaguaauaauggcuaca

SEQ ID NO: 521542 - RNA, 19 nt, Artificial Sequence
  Description of Artificial Sequence: Synthetic oligonucleotide
cccuauacuauacaggcag

SEQ ID NO: 521543 - RNA, 19 nt, Artificial Sequence
  Description of Artificial Sequence: Synthetic oligonucleotide
ucuagcauacuggguacag

SEQ ID NO: 521544 - RNA, 19 nt, Artificial Sequence
  Description of Artificial Sequence: Synthetic oligonucleotide
uuacacccguuucauaaaa

SEQ ID NO: 521545 - RNA, 19 nt, Artificial Sequence
  Description of Artificial Sequence: Synthetic oligonucleotide
ggcuacacggaccugacgc

SEQ ID NO: 521546 - RNA, 19 nt, Artificial Sequence
  Description of Artificial Sequence: Synthetic oligonucleotide
ucaauacaugacucagcug

SEQ ID NO: 521547 - RNA, 19 nt, Artificial Sequence
  Description of Artificial Sequence: Synthetic oligonucleotide
ucaggucccuauacuauac

SEQ ID NO: 521548 - RNA, 19 nt, Artificial Sequence
  Description of Artificial Sequence: Synthetic oligonucleotide
uagagaauugcuugaccuc

SEQ ID NO: 521549 - RNA, 19 nt, Artificial Sequence
  Description of Artificial Sequence: Synthetic oligonucleotide
cauccugccaugcugaaga

SEQ ID NO: 521550 - RNA, 19 nt, Artificial Sequence
  Description of Artificial Sequence: Synthetic oligonucleotide
ccagacuaugguaaagugg

SEQ ID NO: 521551 - RNA, 19 nt, Artificial Sequence
  Description of Artificial Sequence: Synthetic oligonucleotide
acauccagcgucuaugguu

SEQ ID NO: 521552 - RNA, 19 nt, Artificial Sequence
  Description of Artificial Sequence: Synthetic oligonucleotide
auaaggacuuacaaaggga

SEQ ID NO: 521553 - RNA, 19 nt, Artificial Sequence
  Description of Artificial Sequence: Synthetic oligonucleotide
ucacccgcuaucuuacaca

SEQ ID NO: 521554 - RNA, 19 nt, Artificial Sequence
  Description of Artificial Sequence: Synthetic oligonucleotide
caguugcuaguauauuccc

SEQ ID NO: 521555 - RNA, 19 nt, Artificial Sequence
  Description of Artificial Sequence: Synthetic oligonucleotide
ccauaauacauccagcguc

SEQ ID NO: 521556 - RNA, 19 nt, Artificial Sequence
  Description of Artificial Sequence: Synthetic oligonucleotide
uuacacagacugcucuaca

SEQ ID NO: 521557 - RNA, 19 nt, Artificial Sequence
  Description of Artificial Sequence: Synthetic oligonucleotide
gagcacaaguuccauagaa

SEQ ID NO: 521558 - RNA, 19 nt, Artificial Sequence
  Description of Artificial Sequence: Synthetic oligonucleotide
ucuagaguuccaucucuuc

SEQ ID NO: 521559 - RNA, 19 nt, Artificial Sequence
  Description of Artificial Sequence: Synthetic oligonucleotide
gucagauaaggacuuacaa

SEQ ID NO: 521560 - RNA, 19 nt, Artificial Sequence
  Description of Artificial Sequence: Synthetic oligonucleotide
agacaaugagcuauuucag

SEQ ID NO: 521561 - RNA, 19 nt, Artificial Sequence
  Description of Artificial Sequence: Synthetic oligonucleotide
ccaguugcuaguauauucc

SEQ ID NO: 521562 - RNA, 19 nt, Artificial Sequence
  Description of Artificial Sequence: Synthetic oligonucleotide
cuacaagaagcucaauaca

SEQ ID NO: 521563 - RNA, 19 nt, Artificial Sequence
  Description of Artificial Sequence: Synthetic oligonucleotide
aggacuuacaaagggagaa

SEQ ID NO: 521564 - RNA, 19 nt, Artificial Sequence
  Description of Artificial Sequence: Synthetic oligonucleotide
aggcuuaugcuagaaaaga

SEQ ID NO: 521565 - RNA, 19 nt, Artificial Sequence
  Description of Artificial Sequence: Synthetic oligonucleotide
gacuuacaaagggagaaga

SEQ ID NO: 521566 - RNA, 19 nt, Artificial Sequence
  Description of Artificial Sequence: Synthetic oligonucleotide
uccgcgcugccucucagag

SEQ ID NO: 521567 - RNA, 19 nt, Artificial Sequence
  Description of Artificial Sequence: Synthetic oligonucleotide
cuugcugauacaaguacaa

SEQ ID NO: 521568 - RNA, 19 nt, Artificial Sequence
  Description of Artificial Sequence: Synthetic oligonucleotide
gaagcuaucaaugcugggu

SEQ ID NO: 521569 - RNA, 19 nt, Artificial Sequence
  Description of Artificial Sequence: Synthetic oligonucleotide
uaucuuacacagacugcuc

SEQ ID NO: 521570 - RNA, 19 nt, Artificial Sequence
  Description of Artificial Sequence: Synthetic oligonucleotide
cauuacacauccugccaug

SEQ ID NO: 521571 - RNA, 19 nt, Artificial Sequence
  Description of Artificial Sequence: Synthetic oligonucleotide
acggaccugacgccaacac

SEQ ID NO: 521572 - RNA, 19 nt, Artificial Sequence
  Description of Artificial Sequence: Synthetic oligonucleotide
cuuacaaagggagaagaaa

SEQ ID NO: 521573 - RNA, 19 nt, Artificial Sequence
  Description of Artificial Sequence: Synthetic oligonucleotide
ugguaaaguggcgugucug

SEQ ID NO: 521574 - RNA, 19 nt, Artificial Sequence
  Description of Artificial Sequence: Synthetic oligonucleotide
uagaaggacggcucauaga

SEQ ID NO: 521575 - RNA, 19 nt, Artificial Sequence
  Description of Artificial Sequence: Synthetic oligonucleotide
uacacccguuucauaaaac

SEQ ID NO: 521576 - RNA, 19 nt, Artificial Sequence
  Description of Artificial Sequence: Synthetic oligonucleotide
cucaauacaugacucagcu

SEQ ID NO: 521577 - RNA, 19 nt, Artificial Sequence
  Description of Artificial Sequence: Synthetic oligonucleotide
cacccgcuaucuuacacag

SEQ ID NO: 521578 - RNA, 19 nt, Artificial Sequence
  Description of Artificial Sequence: Synthetic oligonucleotide
aaauggcuacccacaauga

SEQ ID NO: 521579 - RNA, 19 nt, Artificial Sequence
  Description of Artificial Sequence: Synthetic oligonucleotide
gauaagccugcuagaaaac

SEQ ID NO: 521580 - RNA, 19 nt, Artificial Sequence
  Description of Artificial Sequence: Synthetic oligonucleotide
uucuuaggguuagaugaug

SEQ ID NO: 521581 - RNA, 19 nt, Artificial Sequence
  Description of Artificial Sequence: Synthetic oligonucleotide
gacgccaacacagguuucc

SEQ ID NO: 521582 - RNA, 19 nt, Artificial Sequence
  Description of Artificial Sequence: Synthetic oligonucleotide
gguacagaaaggccacuag

SEQ ID NO: 521583 - RNA, 19 nt, Artificial Sequence
  Description of Artificial Sequence: Synthetic oligonucleotide
auauucccaggucccguag

SEQ ID NO: 521584 - RNA, 19 nt, Artificial Sequence
  Description of Artificial Sequence: Synthetic oligonucleotide
ugucaagaacccauucauu

SEQ ID NO: 521585 - RNA, 19 nt, Artificial Sequence
  Description of Artificial Sequence: Synthetic oligonucleotide
ugugugccgagguuccagc

SEQ ID NO: 521586 - RNA, 19 nt, Artificial Sequence
  Description of Artificial Sequence: Synthetic oligonucleotide
uuuaggcuuacuguacaau

SEQ ID NO: 521587 - RNA, 19 nt, Artificial Sequence
  Description of Artificial Sequence: Synthetic oligonucleotide
uucaggucccuauacuaua

SEQ ID NO: 521588 - RNA, 19 nt, Artificial Sequence
  Description of Artificial Sequence: Synthetic oligonucleotide
cauaauacauccagcgucu

SEQ ID NO: 521589 - RNA, 19 nt, Artificial Sequence
  Description of Artificial Sequence: Synthetic oligonucleotide
agagucagaugagucagca

SEQ ID NO: 521590 - RNA, 19 nt, Artificial Sequence
  Description of Artificial Sequence: Synthetic oligonucleotide
auuacacccguuucauaaa

SEQ ID NO: 521591 - RNA, 19 nt, Artificial Sequence
  Description of Artificial Sequence: Synthetic oligonucleotide
cuccccuuuccccauugcg

SEQ ID NO: 521592 - RNA, 19 nt, Artificial Sequence
  Description of Artificial Sequence: Synthetic oligonucleotide
cuugaccuccacacauuag

SEQ ID NO: 521593 - RNA, 19 nt, Artificial Sequence
  Description of Artificial Sequence: Synthetic oligonucleotide
ggucccuauacuauacagg

SEQ ID NO: 521594 - RNA, 19 nt, Artificial Sequence
  Description of Artificial Sequence: Synthetic oligonucleotide
aucugcccguuuuauucuc

SEQ ID NO: 521595 - RNA, 19 nt, Artificial Sequence
  Description of Artificial Sequence: Synthetic oligonucleotide
uaaaaccuuuuacccuggu

SEQ ID NO: 521596 - RNA, 19 nt, Artificial Sequence
  Description of Artificial Sequence: Synthetic oligonucleotide
gacaaugagcuauuucagu

SEQ ID NO: 521597 - RNA, 19 nt, Artificial Sequence
  Description of Artificial Sequence: Synthetic oligonucleotide
cauugcguacaguuaccac

SEQ ID NO: 521598 - RNA, 19 nt, Artificial Sequence
  Description of Artificial Sequence: Synthetic oligonucleotide
cuucuagaacuugccaagc

SEQ ID NO: 521599 - RNA, 19 nt, Artificial Sequence
  Description of Artificial Sequence: Synthetic oligonucleotide
uauauucccaggucccgua

SEQ ID NO: 521600 - RNA, 19 nt, Artificial Sequence
  Description of Artificial Sequence: Synthetic oligonucleotide
cuuggcgcaacgcgggagc

SEQ ID NO: 521601 - RNA, 19 nt, Artificial Sequence
  Description of Artificial Sequence: Synthetic oligonucleotide
cacuacaagaagcucaaua

SEQ ID NO: 521602 - RNA, 19 nt, Artificial Sequence
  Description of Artificial Sequence: Synthetic oligonucleotide
ucuaagauaucugcccguu

SEQ ID NO: 521603 - RNA, 19 nt, Artificial Sequence
  Description of Artificial Sequence: Synthetic oligonucleotide
cauuuggcucucucccagg

SEQ ID NO: 521604 - RNA, 19 nt, Artificial Sequence
  Description of Artificial Sequence: Synthetic oligonucleotide
cacucacccgcuaucuuac

SEQ ID NO: 521605 - RNA, 19 nt, Artificial Sequence
  Description of Artificial Sequence: Synthetic oligonucleotide
caaugagcuauuucaguaa

SEQ ID NO: 521606 - RNA, 19 nt, Artificial Sequence
  Description of Artificial Sequence: Synthetic oligonucleotide
gacugcucuacagugcuga

SEQ ID NO: 521607 - RNA, 19 nt, Artificial Sequence
  Description of Artificial Sequence: Synthetic oligonucleotide
cuaucuuacacagacugcu

SEQ ID NO: 521608 - RNA, 19 nt, Artificial Sequence
  Description of Artificial Sequence: Synthetic oligonucleotide
caucauccuccgccaaucg

SEQ ID NO: 521609 - RNA, 19 nt, Artificial Sequence
  Description of Artificial Sequence: Synthetic oligonucleotide
acucaacuugcugauacaa

SEQ ID NO: 521610 - RNA, 19 nt, Artificial Sequence
  Description of Artificial Sequence: Synthetic oligonucleotide
uggcaauuaggagcauucc

SEQ ID NO: 521611 - RNA, 19 nt, Artificial Sequence
  Description of Artificial Sequence: Synthetic oligonucleotide
cagugaaugggaacacguc

SEQ ID NO: 521612 - RNA, 19 nt, Artificial Sequence
  Description of Artificial Sequence: Synthetic oligonucleotide
acaagacggaaagaccugu

SEQ ID NO: 521613 - RNA, 19 nt, Artificial Sequence
  Description of Artificial Sequence: Synthetic oligonucleotide
aaggcccggcccgcgaagc

SEQ ID NO: 521614 - RNA, 19 nt, Artificial Sequence
  Description of Artificial Sequence: Synthetic oligonucleotide
gguggagauauuacacccg

SEQ ID NO: 521615 - RNA, 19 nt, Artificial Sequence
  Description of Artificial Sequence: Synthetic oligonucleotide
acacucacccgcuaucuua

SEQ ID NO: 521616 - RNA, 19 nt, Artificial Sequence
  Description of Artificial Sequence: Synthetic oligonucleotide
cuuucuuaugggacacuca

SEQ ID NO: 521617 - RNA, 19 nt, Artificial Sequence
  Description of Artificial Sequence: Synthetic oligonucleotide
acuauacaagacggaaaga

SEQ ID NO: 521618 - RNA, 19 nt, Artificial Sequence
  Description of Artificial Sequence: Synthetic oligonucleotide
gauaagcuuccuuggcaaa

SEQ ID NO: 521619 - RNA, 19 nt, Artificial Sequence
  Description of Artificial Sequence: Synthetic oligonucleotide
auggcuacccacaaugaaa

SEQ ID NO: 521620 - RNA, 19 nt, Artificial Sequence
  Description of Artificial Sequence: Synthetic oligonucleotide
auuagcaaccacgcagagu

SEQ ID NO: 521621 - RNA, 19 nt, Artificial Sequence
  Description of Artificial Sequence: Synthetic oligonucleotide
gcuaguauauucccagguc

SEQ ID NO: 521622 - RNA, 19 nt, Artificial Sequence
  Description of Artificial Sequence: Synthetic oligonucleotide
auaagcuuccuuggcaaaa

SEQ ID NO: 521623 - RNA, 19 nt, Artificial Sequence
  Description of Artificial Sequence: Synthetic oligonucleotide
uggcuacacggaccugacg

SEQ ID NO: 521624 - RNA, 19 nt, Artificial Sequence
  Description of Artificial Sequence: Synthetic oligonucleotide
uggguuuagcugaccccgc

SEQ ID NO: 521625 - RNA, 19 nt, Artificial Sequence
  Description of Artificial Sequence: Synthetic oligonucleotide
uugcugauacaaguacaac

SEQ ID NO: 521626 - RNA, 19 nt, Artificial Sequence
  Description of Artificial Sequence: Synthetic oligonucleotide
cucacccgcuaucuuacac

SEQ ID NO: 521627 - RNA, 19 nt, Artificial Sequence
  Description of Artificial Sequence: Synthetic oligonucleotide
ucuauacccuggugugugu

SEQ ID NO: 521628 - RNA, 19 nt, Artificial Sequence
  Description of Artificial Sequence: Synthetic oligonucleotide
cuuaagcaccagacaauga

SEQ ID NO: 521629 - RNA, 19 nt, Artificial Sequence
  Description of Artificial Sequence: Synthetic oligonucleotide
cgcuaucuuacacagacug

SEQ ID NO: 521630 - RNA, 19 nt, Artificial Sequence
  Description of Artificial Sequence: Synthetic oligonucleotide
gagucagaugagucagcac

SEQ ID NO: 521631 - RNA, 19 nt, Artificial Sequence
  Description of Artificial Sequence: Synthetic oligonucleotide
agguaguucuuaggguuag

SEQ ID NO: 521632 - RNA, 19 nt, Artificial Sequence
  Description of Artificial Sequence: Synthetic oligonucleotide
ucgggcaaguucacacugu

SEQ ID NO: 521633 - RNA, 19 nt, Artificial Sequence
  Description of Artificial Sequence: Synthetic oligonucleotide
uaaaacuuucaggucccua

SEQ ID NO: 521634 - RNA, 19 nt, Artificial Sequence
  Description of Artificial Sequence: Synthetic oligonucleotide
ugaagccuccuucgggcaa

SEQ ID NO: 521635 - RNA, 19 nt, Artificial Sequence
  Description of Artificial Sequence: Synthetic oligonucleotide
acccguuucauaaaacuuu

SEQ ID NO: 521636 - RNA, 19 nt, Artificial Sequence
  Description of Artificial Sequence: Synthetic oligonucleotide
ccuauacuauacaggcagg

SEQ ID NO: 521637 - RNA, 19 nt, Artificial Sequence
  Description of Artificial Sequence: Synthetic oligonucleotide
guaggaggccaucuuccac

SEQ ID NO: 521638 - RNA, 19 nt, Artificial Sequence
  Description of Artificial Sequence: Synthetic oligonucleotide
agagcacaaguuccauaga

SEQ ID NO: 521639 - RNA, 19 nt, Artificial Sequence
  Description of Artificial Sequence: Synthetic oligonucleotide
cagcuguacgcuucauuug

SEQ ID NO: 521640 - RNA, 19 nt, Artificial Sequence
  Description of Artificial Sequence: Synthetic oligonucleotide
caacgcgggagcccggccg

SEQ ID NO: 521641 - RNA, 19 nt, Artificial Sequence
  Description of Artificial Sequence: Synthetic oligonucleotide
gacauguguuuaccccaug

SEQ ID NO: 521642 - RNA, 19 nt, Artificial Sequence
  Description of Artificial Sequence: Synthetic oligonucleotide
gacuaugguaaaguggcgu

SEQ ID NO: 521643 - RNA, 19 nt, Artificial Sequence
  Description of Artificial Sequence: Synthetic oligonucleotide
ccuucgggcaaguucacac

SEQ ID NO: 521644 - RNA, 19 nt, Artificial Sequence
  Description of Artificial Sequence: Synthetic oligonucleotide
cuuucgagacaaggcugcg

SEQ ID NO: 521645 - RNA, 19 nt, Artificial Sequence
  Description of Artificial Sequence: Synthetic oligonucleotide
uuucgagacaaggcugcgu

SEQ ID NO: 521646 - RNA, 19 nt, Artificial Sequence
  Description of Artificial Sequence: Synthetic oligonucleotide
gaccuucuauacccuggug

SEQ ID NO: 521647 - RNA, 19 nt, Artificial Sequence
  Description of Artificial Sequence: Synthetic oligonucleotide
acggaaagaccuguuaauu

SEQ ID NO: 521648 - RNA, 19 nt, Artificial Sequence
  Description of Artificial Sequence: Synthetic oligonucleotide
augaaagacccaccccaaa

SEQ ID NO: 521649 - RNA, 19 nt, Artificial Sequence
  Description of Artificial Sequence: Synthetic oligonucleotide
acacggaccugacgccaac

SEQ ID NO: 521650 - RNA, 19 nt, Artificial Sequence
  Description of Artificial Sequence: Synthetic oligonucleotide
acaauagcuuaagcaccag

SEQ ID NO: 521651 - RNA, 19 nt, Artificial Sequence
  Description of Artificial Sequence: Synthetic oligonucleotide
accugacgccaacacaggu

SEQ ID NO: 521652 - RNA, 19 nt, Artificial Sequence
  Description of Artificial Sequence: Synthetic oligonucleotide
uuucagggagagguuucca

SEQ ID NO: 521653 - RNA, 19 nt, Artificial Sequence
  Description of Artificial Sequence: Synthetic oligonucleotide
gacggaaagaccuguuaau

SEQ ID NO: 521654 - RNA, 19 nt, Artificial Sequence
  Description of Artificial Sequence: Synthetic oligonucleotide
aggguuagaugauggcuuu

SEQ ID NO: 521655 - RNA, 19 nt, Artificial Sequence
  Description of Artificial Sequence: Synthetic oligonucleotide
ccuuaaggcaaagcaaaag

SEQ ID NO: 521656 - RNA, 19 nt, Artificial Sequence
  Description of Artificial Sequence: Synthetic oligonucleotide
uccccauugcguacaguua

SEQ ID NO: 521657 - RNA, 19 nt, Artificial Sequence
  Description of Artificial Sequence: Synthetic oligonucleotide
cuuugacaaacaugugcaa

SEQ ID NO: 521658 - RNA, 19 nt, Artificial Sequence
  Description of Artificial Sequence: Synthetic oligonucleotide
ugggaacacguccgcgcgc

SEQ ID NO: 521659 - RNA, 19 nt, Artificial Sequence
  Description of Artificial Sequence: Synthetic oligonucleotide
ucccgcucgggcugcuugg

SEQ ID NO: 521660 - RNA, 19 nt, Artificial Sequence
  Description of Artificial Sequence: Synthetic oligonucleotide
uacacggaccugacgccaa

SEQ ID NO: 521661 - RNA, 19 nt, Artificial Sequence
  Description of Artificial Sequence: Synthetic oligonucleotide
ggacuuacaaagggagaag

SEQ ID NO: 521662 - RNA, 19 nt, Artificial Sequence
  Description of Artificial Sequence: Synthetic oligonucleotide
gaaggaguugccaagccuu

SEQ ID NO: 521663 - RNA, 19 nt, Artificial Sequence
  Description of Artificial Sequence: Synthetic oligonucleotide
gcuuucgagacaaggcugc

SEQ ID NO: 521664 - RNA, 19 nt, Artificial Sequence
  Description of Artificial Sequence: Synthetic oligonucleotide
ccuguuaauucuuuaggaa

SEQ ID NO: 521665 - RNA, 19 nt, Artificial Sequence
  Description of Artificial Sequence: Synthetic oligonucleotide
ggagauauuacacccguuu

SEQ ID NO: 521666 - RNA, 19 nt, Artificial Sequence
  Description of Artificial Sequence: Synthetic oligonucleotide
uggcgugucugugugccga

SEQ ID NO: 521667 - RNA, 19 nt, Artificial Sequence
  Description of Artificial Sequence: Synthetic oligonucleotide
cccguuucauaaaacuuuc

SEQ ID NO: 521668 - RNA, 19 nt, Artificial Sequence
  Description of Artificial Sequence: Synthetic oligonucleotide
gaccccgcauguccucagg

SEQ ID NO: 521669 - RNA, 19 nt, Artificial Sequence
  Description of Artificial Sequence: Synthetic oligonucleotide
ccuccuucgggcaaguuca

SEQ ID NO: 521670 - RNA, 19 nt, Artificial Sequence
  Description of Artificial Sequence: Synthetic oligonucleotide
gcuaucuuacacagacugc

SEQ ID NO: 521671 - RNA, 19 nt, Artificial Sequence
  Description of Artificial Sequence: Synthetic oligonucleotide
agcuaucaaugcuggguuu

SEQ ID NO: 521672 - RNA, 19 nt, Artificial Sequence
  Description of Artificial Sequence: Synthetic oligonucleotide
gaaggcccggcccgcgaag

SEQ ID NO: 521673 - RNA, 19 nt, Artificial Sequence
  Description of Artificial Sequence: Synthetic oligonucleotide
guggaaaggcagugccggc

SEQ ID NO: 521674 - RNA, 19 nt, Artificial Sequence
  Description of Artificial Sequence: Synthetic oligonucleotide
ccccauugcguacaguuac

SEQ ID NO: 521675 - RNA, 19 nt, Artificial Sequence
  Description of Artificial Sequence: Synthetic oligonucleotide
gcuacacggaccugacgcc

SEQ ID NO: 521676 - RNA, 19 nt, Artificial Sequence
  Description of Artificial Sequence: Synthetic oligonucleotide
caaccacgcagaguucagc

SEQ ID NO: 521677 - RNA, 19 nt, Artificial Sequence
  Description of Artificial Sequence: Synthetic oligonucleotide
agcgccgccauggcuuucg

SEQ ID NO: 521678 - RNA, 19 nt, Artificial Sequence
  Description of Artificial Sequence: Synthetic oligonucleotide
cuauacccugguguguguc

SEQ ID NO: 521679 - RNA, 19 nt, Artificial Sequence
  Description of Artificial Sequence: Synthetic oligonucleotide
ggcuuucgagacaaggcug

SEQ ID NO: 521680 - RNA, 19 nt, Artificial Sequence
  Description of Artificial Sequence: Synthetic oligonucleotide
cguacaguuaccacuacaa

SEQ ID NO: 521681 - RNA, 19 nt, Artificial Sequence
  Description of Artificial Sequence: Synthetic oligonucleotide
cugugugccgagguuccag

SEQ ID NO: 521682 - RNA, 19 nt, Artificial Sequence
  Description of Artificial Sequence: Synthetic oligonucleotide
ugcuuggcgcaacgcggga

SEQ ID NO: 521683 - RNA, 19 nt, Artificial Sequence
  Description of Artificial Sequence: Synthetic oligonucleotide
aggcaaagcaaaaggcuua

SEQ ID NO: 521684 - RNA, 19 nt, Artificial Sequence
  Description of Artificial Sequence: Synthetic oligonucleotide
accugcuuuuagagaauug

SEQ ID NO: 521685 - RNA, 19 nt, Artificial Sequence
  Description of Artificial Sequence: Synthetic oligonucleotide
ccagacaaugagcuauuuc

SEQ ID NO: 521686 - RNA, 19 nt, Artificial Sequence
  Description of Artificial Sequence: Synthetic oligonucleotide
ggauggaaagaggggauga

SEQ ID NO: 521687 - RNA, 19 nt, Artificial Sequence
  Description of Artificial Sequence: Synthetic oligonucleotide
augagcuauuucaguaaau

SEQ ID NO: 521688 - RNA, 19 nt, Artificial Sequence
  Description of Artificial Sequence: Synthetic oligonucleotide
agcgucuaugguugucuuu

SEQ ID NO: 521689 - RNA, 19 nt, Artificial Sequence
  Description of Artificial Sequence: Synthetic oligonucleotide
ggcgcaacgcgggagcccg

SEQ ID NO: 521690 - RNA, 19 nt, Artificial Sequence
  Description of Artificial Sequence: Synthetic oligonucleotide
ugacgccaacacagguuuc

SEQ ID NO: 521691 - RNA, 19 nt, Artificial Sequence
  Description of Artificial Sequence: Synthetic oligonucleotide
uuggcgcaacgcgggagcc

SEQ ID NO: 521692 - RNA, 19 nt, Artificial Sequence
  Description of Artificial Sequence: Synthetic oligonucleotide
aggagccuucuagaacuug

SEQ ID NO: 521693 - RNA, 19 nt, Artificial Sequence
  Description of Artificial Sequence: Synthetic oligonucleotide
agucaccauaauacaucca

SEQ ID NO: 521694 - RNA, 19 nt, Artificial Sequence
  Description of Artificial Sequence: Synthetic oligonucleotide
guggcgugucugugugccg

SEQ ID NO: 521695 - RNA, 19 nt, Artificial Sequence
  Description of Artificial Sequence: Synthetic oligonucleotide
cuagcauacuggguacaga

SEQ ID NO: 521696 - RNA, 19 nt, Artificial Sequence
  Description of Artificial Sequence: Synthetic oligonucleotide
auacccuggugugugucaa

SEQ ID NO: 521697 - RNA, 19 nt, Artificial Sequence
  Description of Artificial Sequence: Synthetic oligonucleotide
cccauugcguacaguuacc

SEQ ID NO: 521698 - RNA, 19 nt, Artificial Sequence
  Description of Artificial Sequence: Synthetic oligonucleotide
uagcaaccacgcagaguuc

SEQ ID NO: 521699 - RNA, 19 nt, Artificial Sequence
  Description of Artificial Sequence: Synthetic oligonucleotide
ggcuuaugcuagaaaagaa

SEQ ID NO: 521700 - RNA, 19 nt, Artificial Sequence
  Description of Artificial Sequence: Synthetic oligonucleotide
agccugcuagaaaacugca

SEQ ID NO: 521701 - RNA, 19 nt, Artificial Sequence
  Description of Artificial Sequence: Synthetic oligonucleotide
ggauucaugaaaagacacu

SEQ ID NO: 521702 - RNA, 19 nt, Artificial Sequence
  Description of Artificial Sequence: Synthetic oligonucleotide
cacgcagaguucagcuuca

SEQ ID NO: 521703 - RNA, 19 nt, Artificial Sequence
  Description of Artificial Sequence: Synthetic oligonucleotide
acucacccgcuaucuuaca

SEQ ID NO: 521704 - RNA, 19 nt, Artificial Sequence
  Description of Artificial Sequence: Synthetic oligonucleotide
cugacgccaacacagguuu

SEQ ID NO: 521705 - RNA, 19 nt, Artificial Sequence
  Description of Artificial Sequence: Synthetic oligonucleotide
caggucccuauacuauaca

SEQ ID NO: 521706 - RNA, 19 nt, Artificial Sequence
  Description of Artificial Sequence: Synthetic oligonucleotide
cuguacgcuucauuuggcu

SEQ ID NO: 521707 - RNA, 19 nt, Artificial Sequence
  Description of Artificial Sequence: Synthetic oligonucleotide
cuacacggaccugacgcca

SEQ ID NO: 521708 - RNA, 19 nt, Artificial Sequence
  Description of Artificial Sequence: Synthetic oligonucleotide
auaauacauccagcgucua

SEQ ID NO: 521709 - RNA, 19 nt, Artificial Sequence
  Description of Artificial Sequence: Synthetic oligonucleotide
uccagcgucuaugguuguc

SEQ ID NO: 521710 - RNA, 19 nt, Artificial Sequence
  Description of Artificial Sequence: Synthetic oligonucleotide
cacagauagcaucuagcau

SEQ ID NO: 521711 - RNA, 19 nt, Artificial Sequence
  Description of Artificial Sequence: Synthetic oligonucleotide
aggcuacugcuugaguaau

SEQ ID NO: 521712 - RNA, 19 nt, Artificial Sequence
  Description of Artificial Sequence: Synthetic oligonucleotide
gcguacaguuaccacuaca

SEQ ID NO: 521713 - RNA, 19 nt, Artificial Sequence
  Description of Artificial Sequence: Synthetic oligonucleotide
guauauucccaggucccgu

SEQ ID NO: 521714 - RNA, 19 nt, Artificial Sequence
  Description of Artificial Sequence: Synthetic oligonucleotide
cuucgggcaaguucacacu

SEQ ID NO: 521715 - RNA, 19 nt, Artificial Sequence
  Description of Artificial Sequence: Synthetic oligonucleotide
ggcuuacuguacaauagcu

SEQ ID NO: 521716 - RNA, 19 nt, Artificial Sequence
  Description of Artificial Sequence: Synthetic oligonucleotide
cuaugguaaaguggcgugu

SEQ ID NO: 521717 - RNA, 19 nt, Artificial Sequence
  Description of Artificial Sequence: Synthetic oligonucleotide
acgccaacacagguuuccu

SEQ ID NO: 521718 - RNA, 19 nt, Artificial Sequence
  Description of Artificial Sequence: Synthetic oligonucleotide
aggauuucagggagagguu

SEQ ID NO: 521719 - RNA, 19 nt, Artificial Sequence
  Description of Artificial Sequence: Synthetic oligonucleotide
ccgccauggcuuucgagac

SEQ ID NO: 521720 - RNA, 19 nt, Artificial Sequence
  Description of Artificial Sequence: Synthetic oligonucleotide
gcgucuaugguugucuuua

SEQ ID NO: 521721 - RNA, 19 nt, Artificial Sequence
  Description of Artificial Sequence: Synthetic oligonucleotide
gcuugaccuccacacauua

SEQ ID NO: 521722 - RNA, 19 nt, Artificial Sequence
  Description of Artificial Sequence: Synthetic oligonucleotide
cacuaacuuuuaggcuuac

SEQ ID NO: 521723 - RNA, 19 nt, Artificial Sequence
  Description of Artificial Sequence: Synthetic oligonucleotide
gaaggacggcucauagacu

SEQ ID NO: 521724 - RNA, 19 nt, Artificial Sequence
  Description of Artificial Sequence: Synthetic oligonucleotide
gcaagagacucaaacuacu

SEQ ID NO: 521725 - RNA, 19 nt, Artificial Sequence
  Description of Artificial Sequence: Synthetic oligonucleotide
acccacaaugaaagaccca

SEQ ID NO: 521726 - RNA, 19 nt, Artificial Sequence
  Description of Artificial Sequence: Synthetic oligonucleotide
guucuuaggguuagaugau

SEQ ID NO: 521727 - RNA, 19 nt, Artificial Sequence
  Description of Artificial Sequence: Synthetic oligonucleotide
gccacuaggacauguguuu

SEQ ID NO: 521728 - RNA, 19 nt, Artificial Sequence
  Description of Artificial Sequence: Synthetic oligonucleotide
ggguuuagcugaccccgca

SEQ ID NO: 521729 - RNA, 19 nt, Artificial Sequence
  Description of Artificial Sequence: Synthetic oligonucleotide
gaguugccaagccuucauu

SEQ ID NO: 521730 - RNA, 19 nt, Artificial Sequence
  Description of Artificial Sequence: Synthetic oligonucleotide
cagcaacacuucaguucuc

SEQ ID NO: 521731 - RNA, 19 nt, Artificial Sequence
  Description of Artificial Sequence: Synthetic oligonucleotide
agauagcaucuagcauacu

SEQ ID NO: 521732 - RNA, 19 nt, Artificial Sequence
  Description of Artificial Sequence: Synthetic oligonucleotide
gcgcaguucucccgcucgg

SEQ ID NO: 521733 - RNA, 19 nt, Artificial Sequence
  Description of Artificial Sequence: Synthetic oligonucleotide
aggacggcucauagacuca

SEQ ID NO: 521734 - RNA, 19 nt, Artificial Sequence
  Description of Artificial Sequence: Synthetic oligonucleotide
aggccgcugaagggccggc

SEQ ID NO: 521735 - RNA, 19 nt, Artificial Sequence
  Description of Artificial Sequence: Synthetic oligonucleotide
ccucucagagggaggccgc

SEQ ID NO: 521736 - RNA, 19 nt, Artificial Sequence
  Description of Artificial Sequence: Synthetic oligonucleotide
caaaggcuacugcuugagu

SEQ ID NO: 521737 - RNA, 19 nt, Artificial Sequence
  Description of Artificial Sequence: Synthetic oligonucleotide
gcuguggaagagccaccac

SEQ ID NO: 521738 - RNA, 19 nt, Artificial Sequence
  Description of Artificial Sequence: Synthetic oligonucleotide
cucuagaguuccaucucuu

SEQ ID NO: 521739 - RNA, 19 nt, Artificial Sequence
  Description of Artificial Sequence: Synthetic oligonucleotide
gcucuacagugcugaagga

SEQ ID NO: 521740 - RNA, 19 nt, Artificial Sequence
  Description of Artificial Sequence: Synthetic oligonucleotide
ggcuacccacaaugaaaga

SEQ ID NO: 521741 - RNA, 19 nt, Artificial Sequence
  Description of Artificial Sequence: Synthetic oligonucleotide
gcuuggcgcaacgcgggag

SEQ ID NO: 521742 - RNA, 19 nt, Artificial Sequence
  Description of Artificial Sequence: Synthetic oligonucleotide
cgcgcaguucucccgcucg

SEQ ID NO: 521743 - RNA, 19 nt, Artificial Sequence
  Description of Artificial Sequence: Synthetic oligonucleotide
cagggccgguggcuccugg

SEQ ID NO: 521744 - RNA, 19 nt, Artificial Sequence
  Description of Artificial Sequence: Synthetic oligonucleotide
ccguuucauaaaacuuuca

SEQ ID NO: 521745 - RNA, 19 nt, Artificial Sequence
  Description of Artificial Sequence: Synthetic oligonucleotide
gcguccgccgccccaguug

SEQ ID NO: 521746 - RNA, 19 nt, Artificial Sequence
  Description of Artificial Sequence: Synthetic oligonucleotide
gaacacguccgcgcgcagu

SEQ ID NO: 521747 - RNA, 19 nt, Artificial Sequence
  Description of Artificial Sequence: Synthetic oligonucleotide
aagggccggccgagcgccg

SEQ ID NO: 521748 - RNA, 19 nt, Artificial Sequence
  Description of Artificial Sequence: Synthetic oligonucleotide
cgggcaaguucacacugug

SEQ ID NO: 521749 - RNA, 19 nt, Artificial Sequence
  Description of Artificial Sequence: Synthetic oligonucleotide
ggaguugccaagccuucau

SEQ ID NO: 521750 - RNA, 19 nt, Artificial Sequence
  Description of Artificial Sequence: Synthetic oligonucleotide
guccgcgcugccucucaga

SEQ ID NO: 521751 - RNA, 19 nt, Artificial Sequence
  Description of Artificial Sequence: Synthetic oligonucleotide
ggauuucagggagagguuu

SEQ ID NO: 521752 - RNA, 19 nt, Artificial Sequence
  Description of Artificial Sequence: Synthetic oligonucleotide
caagacggaaagaccuguu

SEQ ID NO: 521753 - RNA, 19 nt, Artificial Sequence
  Description of Artificial Sequence: Synthetic oligonucleotide
ccauugcguacaguuacca

SEQ ID NO: 521754 - RNA, 19 nt, Artificial Sequence
  Description of Artificial Sequence: Synthetic oligonucleotide
cccguuuuauucucagcua

SEQ ID NO: 521755 - RNA, 19 nt, Artificial Sequence
  Description of Artificial Sequence: Synthetic oligonucleotide
ccacuaacuuuuaggcuua

SEQ ID NO: 521756 - RNA, 19 nt, Artificial Sequence
  Description of Artificial Sequence: Synthetic oligonucleotide
gguuuagcugaccccgcau

SEQ ID NO: 521757 - RNA, 19 nt, Artificial Sequence
  Description of Artificial Sequence: Synthetic oligonucleotide
ccaagccuucauuacacau

SEQ ID NO: 521758 - RNA, 19 nt, Artificial Sequence
  Description of Artificial Sequence: Synthetic oligonucleotide
ggacggcucauagacucaa

SEQ ID NO: 521759 - RNA, 19 nt, Artificial Sequence
  Description of Artificial Sequence: Synthetic oligonucleotide
cacggaccugacgccaaca

SEQ ID NO: 521760 - RNA, 19 nt, Artificial Sequence
  Description of Artificial Sequence: Synthetic oligonucleotide
cacguccgcgcgcaguucu

SEQ ID NO: 521761 - RNA, 19 nt, Artificial Sequence
  Description of Artificial Sequence: Synthetic oligonucleotide
gcaacgcgggagcccggcc

SEQ ID NO: 521762 - RNA, 19 nt, Artificial Sequence
  Description of Artificial Sequence: Synthetic oligonucleotide
ggucccguaguggcggcca

SEQ ID NO: 521763 - RNA, 19 nt, Artificial Sequence
  Description of Artificial Sequence: Synthetic oligonucleotide
caccagacaaugagcuauu

SEQ ID NO: 521764 - RNA, 19 nt, Artificial Sequence
  Description of Artificial Sequence: Synthetic oligonucleotide
ccgcgcgcaguucucccgc

SEQ ID NO: 521765 - RNA, 19 nt, Artificial Sequence
  Description of Artificial Sequence: Synthetic oligonucleotide
ccgcgcugccucucagagg

SEQ ID NO: 521766 - RNA, 19 nt, Artificial Sequence
  Description of Artificial Sequence: Synthetic oligonucleotide
ggacauguguuuaccccau

SEQ ID NO: 521767 - RNA, 19 nt, Artificial Sequence
  Description of Artificial Sequence: Synthetic oligonucleotide
cggccgagcgccgccaugg

SEQ ID NO: 521768 - RNA, 19 nt, Artificial Sequence
  Description of Artificial Sequence: Synthetic oligonucleotide
ccugacgccaacacagguu

SEQ ID NO: 521769 - RNA, 19 nt, Artificial Sequence
  Description of Artificial Sequence: Synthetic oligonucleotide
gacggcucauagacucaau

SEQ ID NO: 521770 - RNA, 19 nt, Artificial Sequence
  Description of Artificial Sequence: Synthetic oligonucleotide
cacacucacccgcuaucuu

SEQ ID NO: 521771 - RNA, 19 nt, Artificial Sequence
  Description of Artificial Sequence: Synthetic oligonucleotide
ccagcgucuaugguugucu

SEQ ID NO: 521772 - RNA, 19 nt, Artificial Sequence
  Description of Artificial Sequence: Synthetic oligonucleotide
gcccggcgauggcugcagg

SEQ ID NO: 521773 - RNA, 19 nt, Artificial Sequence
  Description of Artificial Sequence: Synthetic oligonucleotide
gccccaguugcuaguauau

SEQ ID NO: 521774 - RNA, 19 nt, Artificial Sequence
  Description of Artificial Sequence: Synthetic oligonucleotide
cggaccugacgccaacaca

SEQ ID NO: 521775 - RNA, 19 nt, Artificial Sequence
  Description of Artificial Sequence: Synthetic oligonucleotide
ccgagguuccagcaacacu

SEQ ID NO: 521776 - RNA, 19 nt, Artificial Sequence
  Description of Artificial Sequence: Synthetic oligonucleotide
ccgccaaucgcuuguguuu

SEQ ID NO: 521777 - RNA, 19 nt, Artificial Sequence
  Description of Artificial Sequence: Synthetic oligonucleotide
gccugcuagaaaacugcau

SEQ ID NO: 521778 - RNA, 19 nt, Artificial Sequence
  Description of Artificial Sequence: Synthetic oligonucleotide
cuauacaggcaggcucauu

SEQ ID NO: 521779 - RNA, 19 nt, Artificial Sequence
  Description of Artificial Sequence: Synthetic oligonucleotide
cguccgcgcgcaguucucc

SEQ ID NO: 521780 - RNA, 19 nt, Artificial Sequence
  Description of Artificial Sequence: Synthetic oligonucleotide
gcgaagcccggcgauggcu

SEQ ID NO: 521781 - RNA, 19 nt, Artificial Sequence
  Description of Artificial Sequence: Synthetic oligonucleotide
ccacacucacccgcuaucu

SEQ ID NO: 521782 - RNA, 19 nt, Artificial Sequence
  Description of Artificial Sequence: Synthetic oligonucleotide
cccgcauguccucaggauu

SEQ ID NO: 521783 - RNA, 19 nt, Artificial Sequence
  Description of Artificial Sequence: Synthetic oligonucleotide
gagcgccgccauggcuuuc

SEQ ID NO: 521784 - RNA, 19 nt, Artificial Sequence
  Description of Artificial Sequence: Synthetic oligonucleotide
cgccccaguugcuaguaua

SEQ ID NO: 521785 - RNA, 19 nt, Artificial Sequence
  Description of Artificial Sequence: Synthetic oligonucleotide
ccgcuaucuuacacagacu

SEQ ID NO: 521786 - RNA, 19 nt, Artificial Sequence
  Description of Artificial Sequence: Synthetic oligonucleotide
gcgcaacgcgggagcccgg

SEQ ID NO: 521787 - RNA, 19 nt, Artificial Sequence
  Description of Artificial Sequence: Synthetic oligonucleotide
ccggccgagcgccgccaug

SEQ ID NO: 521788 - RNA, 19 nt, Artificial Sequence
  Description of Artificial Sequence: Synthetic oligonucleotide
ccccgcauguccucaggau

SEQ ID NO: 521789 - RNA, 19 nt, Artificial Sequence
  Description of Artificial Sequence: Synthetic oligonucleotide
ccggccgcggggccagguc

SEQ ID NO: 521790 - RNA, 19 nt, Artificial Sequence
  Description of Artificial Sequence: Synthetic oligonucleotide
gcgccgccauggcuuucga

SEQ ID NO: 521791 - RNA, 19 nt, Artificial Sequence
  Description of Artificial Sequence: Synthetic oligonucleotide
cggccgcggggccagguca

SEQ ID NO: 521792 - RNA, 19 nt, Artificial Sequence
  Description of Artificial Sequence: Synthetic oligonucleotide
cgccaaucgcuuguguuuu

SEQ ID NO: 521793 - RNA, 19 nt, Artificial Sequence
  Description of Artificial Sequence: Synthetic oligonucleotide
cgccaacacagguuuccuu

SEQ ID NO: 521794 - RNA, 19 nt, Artificial Sequence
  Description of Artificial Sequence: Synthetic oligonucleotide
ccccaguugcuaguauauu

SEQ ID NO: 521795 - RNA, 19 nt, Artificial Sequence
  Description of Artificial Sequence: Synthetic oligonucleotide
gccggccgagcgccgccau

SEQ ID NO: 521796 - RNA, 19 nt, Artificial Sequence
  Description of Artificial Sequence: Synthetic oligonucleotide
ccgccccaguugcuaguau

SEQ ID NO: 521797 - RNA, 19 nt, Artificial Sequence
  Description of Artificial Sequence: Synthetic oligonucleotide
aauaaauaguccuacaaag

SEQ ID NO: 521798 - RNA, 19 nt, Artificial Sequence
  Description of Artificial Sequence: Synthetic oligonucleotide
aaugaauauaucaagaaag

SEQ ID NO: 521799 - RNA, 19 nt, Artificial Sequence
  Description of Artificial Sequence: Synthetic oligonucleotide
uuuauaaccagauagaguu

SEQ ID NO: 521800 - RNA, 19 nt, Artificial Sequence
  Description of Artificial Sequence: Synthetic oligonucleotide
uuaaagaauuauauuaucc

SEQ ID NO: 521801 - RNA, 19 nt, Artificial Sequence
  Description of Artificial Sequence: Synthetic oligonucleotide
ucaucuuucagaaacgcgg

SEQ ID NO: 521802 - RNA, 19 nt, Artificial Sequence
  Description of Artificial Sequence: Synthetic oligonucleotide
aauuccacauaucuggcac

SEQ ID NO: 521803 - RNA, 19 nt, Artificial Sequence
  Description of Artificial Sequence: Synthetic oligonucleotide
acugaagcgaucuuuaaac

SEQ ID NO: 521804 - RNA, 19 nt, Artificial Sequence
  Description of Artificial Sequence: Synthetic oligonucleotide
uucuuaaacucauuaaggg

SEQ ID NO: 521805 - RNA, 19 nt, Artificial Sequence
  Description of Artificial Sequence: Synthetic oligonucleotide
aagugagaagcacaggggc

SEQ ID NO: 521806 - RNA, 19 nt, Artificial Sequence
  Description of Artificial Sequence: Synthetic oligonucleotide
agauguucaggccagaaac

SEQ ID NO: 521807 - RNA, 19 nt, Artificial Sequence
  Description of Artificial Sequence: Synthetic oligonucleotide
uuugucacgauucuuaaac

SEQ ID NO: 521808 - RNA, 19 nt, Artificial Sequence
  Description of Artificial Sequence: Synthetic oligonucleotide
aguuuuaaaugauuguuuc

SEQ ID NO: 521809 - RNA, 19 nt, Artificial Sequence
  Description of Artificial Sequence: Synthetic oligonucleotide
uucaauuagacauuacacc

SEQ ID NO: 521810 - RNA, 19 nt, Artificial Sequence
  Description of Artificial Sequence: Synthetic oligonucleotide
aaaugugcuucuuaaguag

SEQ ID NO: 521811 - RNA, 19 nt, Artificial Sequence
  Description of Artificial Sequence: Synthetic oligonucleotide
ucaauuagacauuacaccu

SEQ ID NO: 521812 - RNA, 19 nt, Artificial Sequence
  Description of Artificial Sequence: Synthetic oligonucleotide
uaaagaauuauauuauccu

SEQ ID NO: 521813 - RNA, 19 nt, Artificial Sequence
  Description of Artificial Sequence: Synthetic oligonucleotide
uguguaaaauccaaacucc

SEQ ID NO: 521814 - RNA, 19 nt, Artificial Sequence
  Description of Artificial Sequence: Synthetic oligonucleotide
caugaguuguguaaaaucc

SEQ ID NO: 521815 - RNA, 19 nt, Artificial Sequence
  Description of Artificial Sequence: Synthetic oligonucleotide
uuguguaaaauccaaacuc

SEQ ID NO: 521816 - RNA, 19 nt, Artificial Sequence
  Description of Artificial Sequence: Synthetic oligonucleotide
aauacagccagugauuguc

SEQ ID NO: 521817 - RNA, 19 nt, Artificial Sequence
  Description of Artificial Sequence: Synthetic oligonucleotide
uguauagccaauaauuagu

SEQ ID NO: 521818 - RNA, 19 nt, Artificial Sequence
  Description of Artificial Sequence: Synthetic oligonucleotide
caaauggagagucugauag

SEQ ID NO: 521819 - RNA, 19 nt, Artificial Sequence
  Description of Artificial Sequence: Synthetic oligonucleotide
ugaucaugaccaaugaaag

SEQ ID NO: 521820 - RNA, 19 nt, Artificial Sequence
  Description of Artificial Sequence: Synthetic oligonucleotide
uugaucaugaccaaugaaa

SEQ ID NO: 521821 - RNA, 19 nt, Artificial Sequence
  Description of Artificial Sequence: Synthetic oligonucleotide
uguuaaagaauuauauuau

SEQ ID NO: 521822 - RNA, 19 nt, Artificial Sequence
  Description of Artificial Sequence: Synthetic oligonucleotide
cuagaauuucuguauagcc

SEQ ID NO: 521823 - RNA, 19 nt, Artificial Sequence
  Description of Artificial Sequence: Synthetic oligonucleotide
aaagaauuauauuauccuu

SEQ ID NO: 521824 - RNA, 19 nt, Artificial Sequence
  Description of Artificial Sequence: Synthetic oligonucleotide
aaauaguccuacaaagaac

SEQ ID NO: 521825 - RNA, 19 nt, Artificial Sequence
  Description of Artificial Sequence: Synthetic oligonucleotide
uguaagauugugcauuucu

SEQ ID NO: 521826 - RNA, 19 nt, Artificial Sequence
  Description of Artificial Sequence: Synthetic oligonucleotide
agacauaacuaaaaugugc

SEQ ID NO: 521827 - RNA, 19 nt, Artificial Sequence
  Description of Artificial Sequence: Synthetic oligonucleotide
ucuuaaguaguacaacugu

SEQ ID NO: 521828 - RNA, 19 nt, Artificial Sequence
  Description of Artificial Sequence: Synthetic oligonucleotide
uuuaugagaugagagguag

SEQ ID NO: 521829 - RNA, 19 nt, Artificial Sequence
  Description of Artificial Sequence: Synthetic oligonucleotide
uccgauaguuuucaaauga

SEQ ID NO: 521830 - RNA, 19 nt, Artificial Sequence
  Description of Artificial Sequence: Synthetic oligonucleotide
uggagagucugauaguagg

SEQ ID NO: 521831 - RNA, 19 nt, Artificial Sequence
  Description of Artificial Sequence: Synthetic oligonucleotide
ucucugugaguuuugaggc

SEQ ID NO: 521832 - RNA, 19 nt, Artificial Sequence
  Description of Artificial Sequence: Synthetic oligonucleotide
uucuuaaguaguacaacug

SEQ ID NO: 521833 - RNA, 19 nt, Artificial Sequence
  Description of Artificial Sequence: Synthetic oligonucleotide
uauaaccagauagaguuag

SEQ ID NO: 521834 - RNA, 19 nt, Artificial Sequence
  Description of Artificial Sequence: Synthetic oligonucleotide
auagccaauaauuagucau

SEQ ID NO: 521835 - RNA, 19 nt, Artificial Sequence
  Description of Artificial Sequence: Synthetic oligonucleotide
ugaaaugcaaacuuugcua

SEQ ID NO: 521836 - RNA, 19 nt, Artificial Sequence
  Description of Artificial Sequence: Synthetic oligonucleotide
uuuccgauaguuuucaaau

SEQ ID NO: 521837 - RNA, 19 nt, Artificial Sequence
  Description of Artificial Sequence: Synthetic oligonucleotide
uacuaauacagccagugau

SEQ ID NO: 521838 - RNA, 19 nt, Artificial Sequence
  Description of Artificial Sequence: Synthetic oligonucleotide
ugacugacaucaaucaacc

SEQ ID NO: 521839 - RNA, 19 nt, Artificial Sequence
  Description of Artificial Sequence: Synthetic oligonucleotide
uuaaacucauuaaggguug

SEQ ID NO: 521840 - RNA, 19 nt, Artificial Sequence
  Description of Artificial Sequence: Synthetic oligonucleotide
uguacuuuccgauaguuuu

SEQ ID NO: 521841 - RNA, 19 nt, Artificial Sequence
  Description of Artificial Sequence: Synthetic oligonucleotide
ugaaacauuccuacaguca

SEQ ID NO: 521842 - RNA, 19 nt, Artificial Sequence
  Description of Artificial Sequence: Synthetic oligonucleotide
aaauaucucaggugggaca

SEQ ID NO: 521843 - RNA, 19 nt, Artificial Sequence
  Description of Artificial Sequence: Synthetic oligonucleotide
aaaggauguacuuuccgau

SEQ ID NO: 521844 - RNA, 19 nt, Artificial Sequence
  Description of Artificial Sequence: Synthetic oligonucleotide
aacauguuauacucgcuga

SEQ ID NO: 521845 - RNA, 19 nt, Artificial Sequence
  Description of Artificial Sequence: Synthetic oligonucleotide
uuaguuuaggggcuggaac

SEQ ID NO: 521846 - RNA, 19 nt, Artificial Sequence
  Description of Artificial Sequence: Synthetic oligonucleotide
uauacauaagcaagcgugu

SEQ ID NO: 521847 - RNA, 19 nt, Artificial Sequence
  Description of Artificial Sequence: Synthetic oligonucleotide
cacaacauguuauacucgc

SEQ ID NO: 521848 - RNA, 19 nt, Artificial Sequence
  Description of Artificial Sequence: Synthetic oligonucleotide
guuuaguggauccagucug

SEQ ID NO: 521849 - RNA, 19 nt, Artificial Sequence
  Description of Artificial Sequence: Synthetic oligonucleotide
agcaguauaacagaaacaa

SEQ ID NO: 521850 - RNA, 19 nt, Artificial Sequence
  Description of Artificial Sequence: Synthetic oligonucleotide
ugcggaugaucuuacgugg

SEQ ID NO: 521851 - RNA, 19 nt, Artificial Sequence
  Description of Artificial Sequence: Synthetic oligonucleotide
cugacugacaucaaucaac

SEQ ID NO: 521852 - RNA, 19 nt, Artificial Sequence
  Description of Artificial Sequence: Synthetic oligonucleotide
accuugauggcacauucgg

SEQ ID NO: 521853 - RNA, 19 nt, Artificial Sequence
  Description of Artificial Sequence: Synthetic oligonucleotide
aacgcggaugcuuuccuuc

SEQ ID NO: 521854 - RNA, 19 nt, Artificial Sequence
  Description of Artificial Sequence: Synthetic oligonucleotide
uuuuggaguagguacuggc

SEQ ID NO: 521855 - RNA, 19 nt, Artificial Sequence
  Description of Artificial Sequence: Synthetic oligonucleotide
cuguauagccaauaauuag

SEQ ID NO: 521856 - RNA, 19 nt, Artificial Sequence
  Description of Artificial Sequence: Synthetic oligonucleotide
agaguuaggcuguuuagug

SEQ ID NO: 521857 - RNA, 19 nt, Artificial Sequence
  Description of Artificial Sequence: Synthetic oligonucleotide
uuaaguaguacaacuguuu

SEQ ID NO: 521858 - RNA, 19 nt, Artificial Sequence
  Description of Artificial Sequence: Synthetic oligonucleotide
ugugaaacauuccuacagu

SEQ ID NO: 521859 - RNA, 19 nt, Artificial Sequence
  Description of Artificial Sequence: Synthetic oligonucleotide
uucuaucucagcuaagaaa

SEQ ID NO: 521860 - RNA, 19 nt, Artificial Sequence
  Description of Artificial Sequence: Synthetic oligonucleotide
ucuagaauuucuguauagc

SEQ ID NO: 521861 - RNA, 19 nt, Artificial Sequence
  Description of Artificial Sequence: Synthetic oligonucleotide
uguuuaguggauccagucu

SEQ ID NO: 521862 - RNA, 19 nt, Artificial Sequence
  Description of Artificial Sequence: Synthetic oligonucleotide
gagacgggcacuucgacgc

SEQ ID NO: 521863 - RNA, 19 nt, Artificial Sequence
  Description of Artificial Sequence: Synthetic oligonucleotide
aaucuuuguuugcagagua

SEQ ID NO: 521864 - RNA, 19 nt, Artificial Sequence
  Description of Artificial Sequence: Synthetic oligonucleotide
uggauuuaguuuacugaag

SEQ ID NO: 521865 - RNA, 19 nt, Artificial Sequence
  Description of Artificial Sequence: Synthetic oligonucleotide
ucauuauauaauugcugca

SEQ ID NO: 521866 - RNA, 19 nt, Artificial Sequence
  Description of Artificial Sequence: Synthetic oligonucleotide
uugcuaucaccauugaacu

SEQ ID NO: 521867 - RNA, 19 nt, Artificial Sequence
  Description of Artificial Sequence: Synthetic oligonucleotide
auagaguuaggcuguuuag

SEQ ID NO: 521868 - RNA, 19 nt, Artificial Sequence
  Description of Artificial Sequence: Synthetic oligonucleotide
aaauuccacauaucuggca

SEQ ID NO: 521869 - RNA, 19 nt, Artificial Sequence
  Description of Artificial Sequence: Synthetic oligonucleotide
ugcaacuaaaagcaguaua

SEQ ID NO: 521870 - RNA, 19 nt, Artificial Sequence
  Description of Artificial Sequence: Synthetic oligonucleotide
gauccagucugacuccugg

SEQ ID NO: 521871 - RNA, 19 nt, Artificial Sequence
  Description of Artificial Sequence: Synthetic oligonucleotide
uauuucacgucacccacac

SEQ ID NO: 521872 - RNA, 19 nt, Artificial Sequence
  Description of Artificial Sequence: Synthetic oligonucleotide
ugaucuuacguggauuuag

SEQ ID NO: 521873 - RNA, 19 nt, Artificial Sequence
  Description of Artificial Sequence: Synthetic oligonucleotide
cagaguagcaaauaucuca

SEQ ID NO: 521874 - RNA, 19 nt, Artificial Sequence
  Description of Artificial Sequence: Synthetic oligonucleotide
uccuguacuaauacagcca

SEQ ID NO: 521875 - RNA, 19 nt, Artificial Sequence
  Description of Artificial Sequence: Synthetic oligonucleotide
gugucuuaggaucaacugc

SEQ ID NO: 521876 - RNA, 19 nt, Artificial Sequence
  Description of Artificial Sequence: Synthetic oligonucleotide
uaaccagauagaguuaggc

SEQ ID NO: 521877 - RNA, 19 nt, Artificial Sequence
  Description of Artificial Sequence: Synthetic oligonucleotide
ucuuacguggauuuaguuu

SEQ ID NO: 521878 - RNA, 19 nt, Artificial Sequence
  Description of Artificial Sequence: Synthetic oligonucleotide
cuuacguggauuuaguuua

SEQ ID NO: 521879 - RNA, 19 nt, Artificial Sequence
  Description of Artificial Sequence: Synthetic oligonucleotide
uguuuggacaaggaauucc

SEQ ID NO: 521880 - RNA, 19 nt, Artificial Sequence
  Description of Artificial Sequence: Synthetic oligonucleotide
aucaaccagaccuuuccag

SEQ ID NO: 521881 - RNA, 19 nt, Artificial Sequence
  Description of Artificial Sequence: Synthetic oligonucleotide
cauuacaccuguuaaagaa

SEQ ID NO: 521882 - RNA, 19 nt, Artificial Sequence
  Description of Artificial Sequence: Synthetic oligonucleotide
guagguacuggcuuugcug

SEQ ID NO: 521883 - RNA, 19 nt, Artificial Sequence
  Description of Artificial Sequence: Synthetic oligonucleotide
uuacacucauuauauaauu

SEQ ID NO: 521884 - RNA, 19 nt, Artificial Sequence
  Description of Artificial Sequence: Synthetic oligonucleotide
agcauugaacagcucccgc

SEQ ID NO: 521885 - RNA, 19 nt, Artificial Sequence
  Description of Artificial Sequence: Synthetic oligonucleotide
ucuuguaagauugugcauu

SEQ ID NO: 521886 - RNA, 19 nt, Artificial Sequence
  Description of Artificial Sequence: Synthetic oligonucleotide
aagcaagcgugucuuagga

SEQ ID NO: 521887 - RNA, 19 nt, Artificial Sequence
  Description of Artificial Sequence: Synthetic oligonucleotide
auuaaggguuguuuuaaau

SEQ ID NO: 521888 - RNA, 19 nt, Artificial Sequence
  Description of Artificial Sequence: Synthetic oligonucleotide
ugauaguaggcaucuuuca

SEQ ID NO: 521889 - RNA, 19 nt, Artificial Sequence
  Description of Artificial Sequence: Synthetic oligonucleotide
aauaucucaggugggacaa

SEQ ID NO: 521890 - RNA, 19 nt, Artificial Sequence
  Description of Artificial Sequence: Synthetic oligonucleotide
ugauggcacauucggcugg

SEQ ID NO: 521891 - RNA, 19 nt, Artificial Sequence
  Description of Artificial Sequence: Synthetic oligonucleotide
uaggcuguuuaguggaucc

SEQ ID NO: 521892 - RNA, 19 nt, Artificial Sequence
  Description of Artificial Sequence: Synthetic oligonucleotide
uggagcacggugcagccag

SEQ ID NO: 521893 - RNA, 19 nt, Artificial Sequence
  Description of Artificial Sequence: Synthetic oligonucleotide
ucaagugaguucucuagaa

SEQ ID NO: 521894 - RNA, 19 nt, Artificial Sequence
  Description of Artificial Sequence: Synthetic oligonucleotide
ugguauuucacgucaccca

SEQ ID NO: 521895 - RNA, 19 nt, Artificial Sequence
  Description of Artificial Sequence: Synthetic oligonucleotide
ugucacgauucuuaaacuc

SEQ ID NO: 521896 - RNA, 19 nt, Artificial Sequence
  Description of Artificial Sequence: Synthetic oligonucleotide
aaauggagagucugauagu

SEQ ID NO: 521897 - RNA, 19 nt, Artificial Sequence
  Description of Artificial Sequence: Synthetic oligonucleotide
gauagaguuaggcuguuua

SEQ ID NO: 521898 - RNA, 19 nt, Artificial Sequence
  Description of Artificial Sequence: Synthetic oligonucleotide
caauuagacauuacaccug

SEQ ID NO: 521899 - RNA, 19 nt, Artificial Sequence
  Description of Artificial Sequence: Synthetic oligonucleotide
cuaggcucccuccauacgc

SEQ ID NO: 521900 - RNA, 19 nt, Artificial Sequence
  Description of Artificial Sequence: Synthetic oligonucleotide
uuuuaugagaugagaggua

SEQ ID NO: 521901 - RNA, 19 nt, Artificial Sequence
  Description of Artificial Sequence: Synthetic oligonucleotide
uaagauugugcauuucuuu

SEQ ID NO: 521902 - RNA, 19 nt, Artificial Sequence
  Description of Artificial Sequence: Synthetic oligonucleotide
augcggaugaucuuacgug

SEQ ID NO: 521903 - RNA, 19 nt, Artificial Sequence
  Description of Artificial Sequence: Synthetic oligonucleotide
uacagucacggaauaagaa

SEQ ID NO: 521904 - RNA, 19 nt, Artificial Sequence
  Description of Artificial Sequence: Synthetic oligonucleotide
uugguauuucacgucaccc

SEQ ID NO: 521905 - RNA, 19 nt, Artificial Sequence
  Description of Artificial Sequence: Synthetic oligonucleotide
guuauacucgcugagguca

SEQ ID NO: 521906 - RNA, 19 nt, Artificial Sequence
  Description of Artificial Sequence: Synthetic oligonucleotide
ugcaaacuuugcuaucacc

SEQ ID NO: 521907 - RNA, 19 nt, Artificial Sequence
  Description of Artificial Sequence: Synthetic oligonucleotide
uuacaccuguuaaagaauu

SEQ ID NO: 521908 - RNA, 19 nt, Artificial Sequence
  Description of Artificial Sequence: Synthetic oligonucleotide
agaaacgcggaugcuuucc

SEQ ID NO: 521909 - RNA, 19 nt, Artificial Sequence
  Description of Artificial Sequence: Synthetic oligonucleotide
uuccgaguaggcauguugu

SEQ ID NO: 521910 - RNA, 19 nt, Artificial Sequence
  Description of Artificial Sequence: Synthetic oligonucleotide
ucaaccucgucuucagagc

SEQ ID NO: 521911 - RNA, 19 nt, Artificial Sequence
  Description of Artificial Sequence: Synthetic oligonucleotide
cugaagcgaucuuuaaacc

SEQ ID NO: 521912 - RNA, 19 nt, Artificial Sequence
  Description of Artificial Sequence: Synthetic oligonucleotide
acuucgacgcucuuccgag

SEQ ID NO: 521913 - RNA, 19 nt, Artificial Sequence
  Description of Artificial Sequence: Synthetic oligonucleotide
guaggcauguuguuuuaag

SEQ ID NO: 521914 - RNA, 19 nt, Artificial Sequence
  Description of Artificial Sequence: Synthetic oligonucleotide
cauguuauacucgcugagg

SEQ ID NO: 521915 - RNA, 19 nt, Artificial Sequence
  Description of Artificial Sequence: Synthetic oligonucleotide
auauaauugcugcaucaaa

SEQ ID NO: 521916 - RNA, 19 nt, Artificial Sequence
  Description of Artificial Sequence: Synthetic oligonucleotide
uccucagaaaugcaacuaa

SEQ ID NO: 521917 - RNA, 19 nt, Artificial Sequence
  Description of Artificial Sequence: Synthetic oligonucleotide
cacggaauaagaacuccag

SEQ ID NO: 521918 - RNA, 19 nt, Artificial Sequence
  Description of Artificial Sequence: Synthetic oligonucleotide
aguauaacagaaacaaaau

SEQ ID NO: 521919 - RNA, 19 nt, Artificial Sequence
  Description of Artificial Sequence: Synthetic oligonucleotide
ucguugucugcugagaugu

SEQ ID NO: 521920 - RNA, 19 nt, Artificial Sequence
  Description of Artificial Sequence: Synthetic oligonucleotide
guggauuuaguuuacugaa

SEQ ID NO: 521921 - RNA, 19 nt, Artificial Sequence
  Description of Artificial Sequence: Synthetic oligonucleotide
auauuucagaucaugaguu

SEQ ID NO: 521922 - RNA, 19 nt, Artificial Sequence
  Description of Artificial Sequence: Synthetic oligonucleotide
aacaugauuggauguuuua

SEQ ID NO: 521923 - RNA, 19 nt, Artificial Sequence
  Description of Artificial Sequence: Synthetic oligonucleotide
uguucaggccagaaacagc

SEQ ID NO: 521924 - RNA, 19 nt, Artificial Sequence
  Description of Artificial Sequence: Synthetic oligonucleotide
gacauaacuaaaaugugcu

SEQ ID NO: 521925 - RNA, 19 nt, Artificial Sequence
  Description of Artificial Sequence: Synthetic oligonucleotide
uagccaauaauuagucauc

SEQ ID NO: 521926 - RNA, 19 nt, Artificial Sequence
  Description of Artificial Sequence: Synthetic oligonucleotide
aguugaccauuuuauacau

SEQ ID NO: 521927 - RNA, 19 nt, Artificial Sequence
  Description of Artificial Sequence: Synthetic oligonucleotide
gaguagcaaauaucucagg

SEQ ID NO: 521928 - RNA, 19 nt, Artificial Sequence
  Description of Artificial Sequence: Synthetic oligonucleotide
uuauacucgcugaggucag

SEQ ID NO: 521929 - RNA, 19 nt, Artificial Sequence
  Description of Artificial Sequence: Synthetic oligonucleotide
uccguucuucugcacgugg

SEQ ID NO: 521930 - RNA, 19 nt, Artificial Sequence
  Description of Artificial Sequence: Synthetic oligonucleotide
uuaguggugaugucuuuuc

SEQ ID NO: 521931 - RNA, 19 nt, Artificial Sequence
  Description of Artificial Sequence: Synthetic oligonucleotide
acguggauuuaguuuacug

SEQ ID NO: 521932 - RNA, 19 nt, Artificial Sequence
  Description of Artificial Sequence: Synthetic oligonucleotide
aaaacaugauuggauguuu

SEQ ID NO: 521933 - RNA, 19 nt, Artificial Sequence
  Description of Artificial Sequence: Synthetic oligonucleotide
ucagaaacgcggaugcuuu

SEQ ID NO: 521934 - RNA, 19 nt, Artificial Sequence
  Description of Artificial Sequence: Synthetic oligonucleotide
aaggauguacuuuccgaua

SEQ ID NO: 521935 - RNA, 19 nt, Artificial Sequence
  Description of Artificial Sequence: Synthetic oligonucleotide
augcaaacuuugcuaucac

SEQ ID NO: 521936 - RNA, 19 nt, Artificial Sequence
  Description of Artificial Sequence: Synthetic oligonucleotide
agacauuacaccuguuaaa

SEQ ID NO: 521937 - RNA, 19 nt, Artificial Sequence
  Description of Artificial Sequence: Synthetic oligonucleotide
ucucuagaauuucuguaua

SEQ ID NO: 521938 - RNA, 19 nt, Artificial Sequence
  Description of Artificial Sequence: Synthetic oligonucleotide
accuguuaaagaauuauau

SEQ ID NO: 521939 - RNA, 19 nt, Artificial Sequence
  Description of Artificial Sequence: Synthetic oligonucleotide
auacauaagcaagcguguc

SEQ ID NO: 521940 - RNA, 19 nt, Artificial Sequence
  Description of Artificial Sequence: Synthetic oligonucleotide
cugcacguggucuucauuc

SEQ ID NO: 521941 - RNA, 19 nt, Artificial Sequence
  Description of Artificial Sequence: Synthetic oligonucleotide
gucaucacgaguguccugc

SEQ ID NO: 521942 - RNA, 19 nt, Artificial Sequence
  Description of Artificial Sequence: Synthetic oligonucleotide
aucaucuuucagaaacgcg

SEQ ID NO: 521943 - RNA, 19 nt, Artificial Sequence
  Description of Artificial Sequence: Synthetic oligonucleotide
gugaaacauuccuacaguc

SEQ ID NO: 521944 - RNA, 19 nt, Artificial Sequence
  Description of Artificial Sequence: Synthetic oligonucleotide
aaauccauuccaauuccau

SEQ ID NO: 521945 - RNA, 19 nt, Artificial Sequence
  Description of Artificial Sequence: Synthetic oligonucleotide
uagaguuaggcuguuuagu

SEQ ID NO: 521946 - RNA, 19 nt, Artificial Sequence
  Description of Artificial Sequence: Synthetic oligonucleotide
uguuauacucgcugagguc

SEQ ID NO: 521947 - RNA, 19 nt, Artificial Sequence
  Description of Artificial Sequence: Synthetic oligonucleotide
uacuaccuauguuuaaaau

SEQ ID NO: 521948 - RNA, 19 nt, Artificial Sequence
  Description of Artificial Sequence: Synthetic oligonucleotide
acgcggaugcuuuccuucc

SEQ ID NO: 521949 - RNA, 19 nt, Artificial Sequence
  Description of Artificial Sequence: Synthetic oligonucleotide
uugucacgauucuuaaacu

SEQ ID NO: 521950 - RNA, 19 nt, Artificial Sequence
  Description of Artificial Sequence: Synthetic oligonucleotide
uucguugucugcugagaug

SEQ ID NO: 521951 - RNA, 19 nt, Artificial Sequence
  Description of Artificial Sequence: Synthetic oligonucleotide
uuaaaccugaaaucaucuu

SEQ ID NO: 521952 - RNA, 19 nt, Artificial Sequence
  Description of Artificial Sequence: Synthetic oligonucleotide
aaaucaucuuuaauguauu

SEQ ID NO: 521953 - RNA, 19 nt, Artificial Sequence
  Description of Artificial Sequence: Synthetic oligonucleotide
ucaaucaaccagaccuuuc

SEQ ID NO: 521954 - RNA, 19 nt, Artificial Sequence
  Description of Artificial Sequence: Synthetic oligonucleotide
cauacagcacagguggacc

SEQ ID NO: 521955 - RNA, 19 nt, Artificial Sequence
  Description of Artificial Sequence: Synthetic oligonucleotide
uguuugcagaguagcaaau

SEQ ID NO: 521956 - RNA, 19 nt, Artificial Sequence
  Description of Artificial Sequence: Synthetic oligonucleotide
guauagccaauaauuaguc

SEQ ID NO: 521957 - RNA, 19 nt, Artificial Sequence
  Description of Artificial Sequence: Synthetic oligonucleotide
uuauaaccagauagaguua

SEQ ID NO: 521958 - RNA, 19 nt, Artificial Sequence
  Description of Artificial Sequence: Synthetic oligonucleotide
ugaguugguucuacagacu

SEQ ID NO: 521959 - RNA, 19 nt, Artificial Sequence
  Description of Artificial Sequence: Synthetic oligonucleotide
uuaugagaugagagguagu

SEQ ID NO: 521960 - RNA, 19 nt, Artificial Sequence
  Description of Artificial Sequence: Synthetic oligonucleotide
acauugacacccugucuug

SEQ ID NO: 521961 - RNA, 19 nt, Artificial Sequence
  Description of Artificial Sequence: Synthetic oligonucleotide
aggugcaaaauuuuccauu

SEQ ID NO: 521962 - RNA, 19 nt, Artificial Sequence
  Description of Artificial Sequence: Synthetic oligonucleotide
cauuccuacagucacggaa

SEQ ID NO: 521963 - RNA, 19 nt, Artificial Sequence
  Description of Artificial Sequence: Synthetic oligonucleotide
uuuaguuuaggggcuggaa

SEQ ID NO: 521964 - RNA, 19 nt, Artificial Sequence
  Description of Artificial Sequence: Synthetic oligonucleotide
gguauuucacgucacccac

SEQ ID NO: 521965 - RNA, 19 nt, Artificial Sequence
  Description of Artificial Sequence: Synthetic oligonucleotide
ggcacuucgacgcucuucc

SEQ ID NO: 521966 - RNA, 19 nt, Artificial Sequence
  Description of Artificial Sequence: Synthetic oligonucleotide
uacuuuccgauaguuuuca

SEQ ID NO: 521967 - RNA, 19 nt, Artificial Sequence
  Description of Artificial Sequence: Synthetic oligonucleotide
ucuuuuaguuuaggggcug

SEQ ID NO: 521968 - RNA, 19 nt, Artificial Sequence
  Description of Artificial Sequence: Synthetic oligonucleotide
acugguuggcuaccggcag

SEQ ID NO: 521969 - RNA, 19 nt, Artificial Sequence
  Description of Artificial Sequence: Synthetic oligonucleotide
uuggcuaccggcagcugcu

SEQ ID NO: 521970 - RNA, 19 nt, Artificial Sequence
  Description of Artificial Sequence: Synthetic oligonucleotide
ugcaucaaauggagagucu

SEQ ID NO: 521971 - RNA, 19 nt, Artificial Sequence
  Description of Artificial Sequence: Synthetic oligonucleotide
cagaucaugaguuguguaa

SEQ ID NO: 521972 - RNA, 19 nt, Artificial Sequence
  Description of Artificial Sequence: Synthetic oligonucleotide
uacuaagcuguacuucuuu

SEQ ID NO: 521973 - RNA, 19 nt, Artificial Sequence
  Description of Artificial Sequence: Synthetic oligonucleotide
caucuccuaccugaaagcc

SEQ ID NO: 521974 - RNA, 19 nt, Artificial Sequence
  Description of Artificial Sequence: Synthetic oligonucleotide
ccuguacuaauacagccag

SEQ ID NO: 521975 - RNA, 19 nt, Artificial Sequence
  Description of Artificial Sequence: Synthetic oligonucleotide
aguagguacuggcuuugcu

SEQ ID NO: 521976 - RNA, 19 nt, Artificial Sequence
  Description of Artificial Sequence: Synthetic oligonucleotide
uaauacagccagugauugu

SEQ ID NO: 521977 - RNA, 19 nt, Artificial Sequence
  Description of Artificial Sequence: Synthetic oligonucleotide
auacucgcugaggucagcg

SEQ ID NO: 521978 - RNA, 19 nt, Artificial Sequence
  Description of Artificial Sequence: Synthetic oligonucleotide
acaagccaccuaaagucac

SEQ ID NO: 521979 - RNA, 19 nt, Artificial Sequence
  Description of Artificial Sequence: Synthetic oligonucleotide
caaauaucucaggugggac

SEQ ID NO: 521980 - RNA, 19 nt, Artificial Sequence
  Description of Artificial Sequence: Synthetic oligonucleotide
gucacgauucuuaaacuca

SEQ ID NO: 521981 - RNA, 19 nt, Artificial Sequence
  Description of Artificial Sequence: Synthetic oligonucleotide
cuuugguauuucacgucac

SEQ ID NO: 521982 - RNA, 19 nt, Artificial Sequence
  Description of Artificial Sequence: Synthetic oligonucleotide
acugacugacaucaaucaa

SEQ ID NO: 521983 - RNA, 19 nt, Artificial Sequence
  Description of Artificial Sequence: Synthetic oligonucleotide
ccacauaucuggcacgugg

SEQ ID NO: 521984 - RNA, 19 nt, Artificial Sequence
  Description of Artificial Sequence: Synthetic oligonucleotide
uuacguggauuuaguuuac

SEQ ID NO: 521985 - RNA, 19 nt, Artificial Sequence
  Description of Artificial Sequence: Synthetic oligonucleotide
augagagguagugacauuu

SEQ ID NO: 521986 - RNA, 19 nt, Artificial Sequence
  Description of Artificial Sequence: Synthetic oligonucleotide
ggcauguuguuuuaagguc

SEQ ID NO: 521987 - RNA, 19 nt, Artificial Sequence
  Description of Artificial Sequence: Synthetic oligonucleotide
uucuuguaagauugugcau

SEQ ID NO: 521988 - RNA, 19 nt, Artificial Sequence
  Description of Artificial Sequence: Synthetic oligonucleotide
uucagaaacgcggaugcuu

SEQ ID NO: 521989 - RNA, 19 nt, Artificial Sequence
  Description of Artificial Sequence: Synthetic oligonucleotide
gaccacuucaucaugcuua

SEQ ID NO: 521990 - RNA, 19 nt, Artificial Sequence
  Description of Artificial Sequence: Synthetic oligonucleotide
ggcaguugguggcauaugc

SEQ ID NO: 521991 - RNA, 19 nt, Artificial Sequence
  Description of Artificial Sequence: Synthetic oligonucleotide
cacguggguuacaagugag

SEQ ID NO: 521992 - RNA, 19 nt, Artificial Sequence
  Description of Artificial Sequence: Synthetic oligonucleotide
gcaagcgugucuuaggauc

SEQ ID NO: 521993 - RNA, 19 nt, Artificial Sequence
  Description of Artificial Sequence: Synthetic oligonucleotide
gggguaauggagcacggug

SEQ ID NO: 521994 - RNA, 19 nt, Artificial Sequence
  Description of Artificial Sequence: Synthetic oligonucleotide
uugacacccugucuugaaa

SEQ ID NO: 521995 - RNA, 19 nt, Artificial Sequence
  Description of Artificial Sequence: Synthetic oligonucleotide
gauugucuccagcacucca

SEQ ID NO: 521996 - RNA, 19 nt, Artificial Sequence
  Description of Artificial Sequence: Synthetic oligonucleotide
acauaucuggcacgugggu

SEQ ID NO: 521997 - RNA, 19 nt, Artificial Sequence
  Description of Artificial Sequence: Synthetic oligonucleotide
ggccaugaggaugaguugg

SEQ ID NO: 521998 - RNA, 19 nt, Artificial Sequence
  Description of Artificial Sequence: Synthetic oligonucleotide
acaugcggaugaucuuacg

SEQ ID NO: 521999 - RNA, 19 nt, Artificial Sequence
  Description of Artificial Sequence: Synthetic oligonucleotide
aaccagaccuuuccagcau

SEQ ID NO: 522000 - RNA, 19 nt, Artificial Sequence
  Description of Artificial Sequence: Synthetic oligonucleotide
auaaccagauagaguuagg

SEQ ID NO: 522001 - RNA, 19 nt, Artificial Sequence
  Description of Artificial Sequence: Synthetic oligonucleotide
auuacaccuguuaaagaau

SEQ ID NO: 522002 - RNA, 19 nt, Artificial Sequence
  Description of Artificial Sequence: Synthetic oligonucleotide
auucggcugguauagcuuu

SEQ ID NO: 522003 - RNA, 19 nt, Artificial Sequence
  Description of Artificial Sequence: Synthetic oligonucleotide
auuccuacagucacggaau

SEQ ID NO: 522004 - RNA, 19 nt, Artificial Sequence
  Description of Artificial Sequence: Synthetic oligonucleotide
ggagacgggcacuucgacg

SEQ ID NO: 522005 - RNA, 19 nt, Artificial Sequence
  Description of Artificial Sequence: Synthetic oligonucleotide
aaauaccuugauggcacau

SEQ ID NO: 522006 - RNA, 19 nt, Artificial Sequence
  Description of Artificial Sequence: Synthetic oligonucleotide
gucacggaauaagaacucc

SEQ ID NO: 522007 - RNA, 19 nt, Artificial Sequence
  Description of Artificial Sequence: Synthetic oligonucleotide
aaacaugauuggauguuuu

SEQ ID NO: 522008 - RNA, 19 nt, Artificial Sequence
  Description of Artificial Sequence: Synthetic oligonucleotide
uucgacgcucuuccgagua

SEQ ID NO: 522009 - RNA, 19 nt, Artificial Sequence
  Description of Artificial Sequence: Synthetic oligonucleotide
guaguacaacuguuuggac

SEQ ID NO: 522010 - RNA, 19 nt, Artificial Sequence
  Description of Artificial Sequence: Synthetic oligonucleotide
guacuaauacagccaguga

SEQ ID NO: 522011 - RNA, 19 nt, Artificial Sequence
  Description of Artificial Sequence: Synthetic oligonucleotide
agagguagugacauuuuau

SEQ ID NO: 522012 - RNA, 19 nt, Artificial Sequence
  Description of Artificial Sequence: Synthetic oligonucleotide
aagcgaucuuuaaaccuga

SEQ ID NO: 522013 - RNA, 19 nt, Artificial Sequence
  Description of Artificial Sequence: Synthetic oligonucleotide
aucaugaguuguguaaaau

SEQ ID NO: 522014 - RNA, 19 nt, Artificial Sequence
  Description of Artificial Sequence: Synthetic oligonucleotide
caagcgugucuuaggauca

SEQ ID NO: 522015 - RNA, 19 nt, Artificial Sequence
  Description of Artificial Sequence: Synthetic oligonucleotide
ucacgucacccacacuggu

SEQ ID NO: 522016 - RNA, 19 nt, Artificial Sequence
  Description of Artificial Sequence: Synthetic oligonucleotide
acaacuguuuggacaagga

SEQ ID NO: 522017 - RNA, 19 nt, Artificial Sequence
  Description of Artificial Sequence: Synthetic oligonucleotide
cuauguuuaaaauccucau

SEQ ID NO: 522018 - RNA, 19 nt, Artificial Sequence
  Description of Artificial Sequence: Synthetic oligonucleotide
aggaugaguugguucuaca

SEQ ID NO: 522019 - RNA, 19 nt, Artificial Sequence
  Description of Artificial Sequence: Synthetic oligonucleotide
cacaugcggaugaucuuac

SEQ ID NO: 522020 - RNA, 19 nt, Artificial Sequence
  Description of Artificial Sequence: Synthetic oligonucleotide
cacuacuaagcuguacuuc

SEQ ID NO: 522021 - RNA, 19 nt, Artificial Sequence
  Description of Artificial Sequence: Synthetic oligonucleotide
gagucugauaguaggcauc

SEQ ID NO: 522022 - RNA, 19 nt, Artificial Sequence
  Description of Artificial Sequence: Synthetic oligonucleotide
cauuauauaauugcugcau

SEQ ID NO: 522023 - RNA, 19 nt, Artificial Sequence
  Description of Artificial Sequence: Synthetic oligonucleotide
aucuuacguggauuuaguu

SEQ ID NO: 522024 - RNA, 19 nt, Artificial Sequence
  Description of Artificial Sequence: Synthetic oligonucleotide
uuaggcuguuuaguggauc

SEQ ID NO: 522025 - RNA, 19 nt, Artificial Sequence
  Description of Artificial Sequence: Synthetic oligonucleotide
caaccagaccuuuccagca

SEQ ID NO: 522026 - RNA, 19 nt, Artificial Sequence
  Description of Artificial Sequence: Synthetic oligonucleotide
cugggguaauggagcacgg

SEQ ID NO: 522027 - RNA, 19 nt, Artificial Sequence
  Description of Artificial Sequence: Synthetic oligonucleotide
uccuaccugaaagccaggu

SEQ ID NO: 522028 - RNA, 19 nt, Artificial Sequence
  Description of Artificial Sequence: Synthetic oligonucleotide
ucaucacgaguguccugcc

SEQ ID NO: 522029 - RNA, 19 nt, Artificial Sequence
  Description of Artificial Sequence: Synthetic oligonucleotide
gguaauggagcacggugca

SEQ ID NO: 522030 - RNA, 19 nt, Artificial Sequence
  Description of Artificial Sequence: Synthetic oligonucleotide
uggagacgggcacuucgac

SEQ ID NO: 522031 - RNA, 19 nt, Artificial Sequence
  Description of Artificial Sequence: Synthetic oligonucleotide
gaaugcuccuucuucucgu

SEQ ID NO: 522032 - RNA, 19 nt, Artificial Sequence
  Description of Artificial Sequence: Synthetic oligonucleotide
caugccacaacauguuaua

SEQ ID NO: 522033 - RNA, 19 nt, Artificial Sequence
  Description of Artificial Sequence: Synthetic oligonucleotide
aaacgcggaugcuuuccuu

SEQ ID NO: 522034 - RNA, 19 nt, Artificial Sequence
  Description of Artificial Sequence: Synthetic oligonucleotide
acgaguguccugccaguca

SEQ ID NO: 522035 - RNA, 19 nt, Artificial Sequence
  Description of Artificial Sequence: Synthetic oligonucleotide
cacacugguuggcuaccgg

SEQ ID NO: 522036 - RNA, 19 nt, Artificial Sequence
  Description of Artificial Sequence: Synthetic oligonucleotide
gguuacaagugagaagcac

SEQ ID NO: 522037 - RNA, 19 nt, Artificial Sequence
  Description of Artificial Sequence: Synthetic oligonucleotide
ggagagucugauaguaggc

SEQ ID NO: 522038 - RNA, 19 nt, Artificial Sequence
  Description of Artificial Sequence: Synthetic oligonucleotide
gcaaccuccccuguaaaug

SEQ ID NO: 522039 - RNA, 19 nt, Artificial Sequence
  Description of Artificial Sequence: Synthetic oligonucleotide
ugcuaucaccauugaacuu

SEQ ID NO: 522040 - RNA, 19 nt, Artificial Sequence
  Description of Artificial Sequence: Synthetic oligonucleotide
augauuguuucaagugagu

SEQ ID NO: 522041 - RNA, 19 nt, Artificial Sequence
  Description of Artificial Sequence: Synthetic oligonucleotide
ucacgaguguccugccagu

SEQ ID NO: 522042 - RNA, 19 nt, Artificial Sequence
  Description of Artificial Sequence: Synthetic oligonucleotide
agcgugucuuaggaucaac

SEQ ID NO: 522043 - RNA, 19 nt, Artificial Sequence
  Description of Artificial Sequence: Synthetic oligonucleotide
gcacauucggcugguauag

SEQ ID NO: 522044 - RNA, 19 nt, Artificial Sequence
  Description of Artificial Sequence: Synthetic oligonucleotide
uuccuacagucacggaaua

SEQ ID NO: 522045 - RNA, 19 nt, Artificial Sequence
  Description of Artificial Sequence: Synthetic oligonucleotide
cugguuggcuaccggcagc

SEQ ID NO: 522046 - RNA, 19 nt, Artificial Sequence
  Description of Artificial Sequence: Synthetic oligonucleotide
agcaagcgugucuuaggau

SEQ ID NO: 522047 - RNA, 19 nt, Artificial Sequence
  Description of Artificial Sequence: Synthetic oligonucleotide
caugaccaaugaaagacau

SEQ ID NO: 522048 - RNA, 19 nt, Artificial Sequence
  Description of Artificial Sequence: Synthetic oligonucleotide
aguuuacugaagcgaucuu

SEQ ID NO: 522049 - RNA, 19 nt, Artificial Sequence
  Description of Artificial Sequence: Synthetic oligonucleotide
guuuaggggcuggaacuug

SEQ ID NO: 522050 - RNA, 19 nt, Artificial Sequence
  Description of Artificial Sequence: Synthetic oligonucleotide
caugcggaugaucuuacgu

SEQ ID NO: 522051 - RNA, 19 nt, Artificial Sequence
  Description of Artificial Sequence: Synthetic oligonucleotide
aaauccucaucaagauauu

SEQ ID NO: 522052 - RNA, 19 nt, Artificial Sequence
  Description of Artificial Sequence: Synthetic oligonucleotide
aucuccuaccugaaagcca

SEQ ID NO: 522053 - RNA, 19 nt, Artificial Sequence
  Description of Artificial Sequence: Synthetic oligonucleotide
cacugguuggcuaccggca

SEQ ID NO: 522054 - RNA, 19 nt, Artificial Sequence
  Description of Artificial Sequence: Synthetic oligonucleotide
agucaaccucgucuucaga

SEQ ID NO: 522055 - RNA, 19 nt, Artificial Sequence
  Description of Artificial Sequence: Synthetic oligonucleotide
aaccucgucuucagagcug

SEQ ID NO: 522056 - RNA, 19 nt, Artificial Sequence
  Description of Artificial Sequence: Synthetic oligonucleotide
cgugucuuaggaucaacug

SEQ ID NO: 522057 - RNA, 19 nt, Artificial Sequence
  Description of Artificial Sequence: Synthetic oligonucleotide
accucgucuucagagcugu

SEQ ID NO: 522058 - RNA, 19 nt, Artificial Sequence
  Description of Artificial Sequence: Synthetic oligonucleotide
cgugcacaaguuuacacuc

SEQ ID NO: 522059 - RNA, 19 nt, Artificial Sequence
  Description of Artificial Sequence: Synthetic oligonucleotide
aucaugcuuaguggugaug

SEQ ID NO: 522060 - RNA, 19 nt, Artificial Sequence
  Description of Artificial Sequence: Synthetic oligonucleotide
uauacucgcugaggucagc

SEQ ID NO: 522061 - RNA, 19 nt, Artificial Sequence
  Description of Artificial Sequence: Synthetic oligonucleotide
ucggcugguauagcuuuac

SEQ ID NO: 522062 - RNA, 19 nt, Artificial Sequence
  Description of Artificial Sequence: Synthetic oligonucleotide
gaucuuacguggauuuagu

SEQ ID NO: 522063 - RNA, 19 nt, Artificial Sequence
  Description of Artificial Sequence: Synthetic oligonucleotide
uccgaguaggcauguuguu

SEQ ID NO: 522064 - RNA, 19 nt, Artificial Sequence
  Description of Artificial Sequence: Synthetic oligonucleotide
gucagcgugcacaaguuua

SEQ ID NO: 522065 - RNA, 19 nt, Artificial Sequence
  Description of Artificial Sequence: Synthetic oligonucleotide
gacgcucuuccgaguaggc

SEQ ID NO: 522066 - RNA, 19 nt, Artificial Sequence
  Description of Artificial Sequence: Synthetic oligonucleotide
ggucauugaaaacaugauu

SEQ ID NO: 522067 - RNA, 19 nt, Artificial Sequence
  Description of Artificial Sequence: Synthetic oligonucleotide
gaaacgcggaugcuuuccu

SEQ ID NO: 522068 - RNA, 19 nt, Artificial Sequence
  Description of Artificial Sequence: Synthetic oligonucleotide
gaguagguacuggcuuugc

SEQ ID NO: 522069 - RNA, 19 nt, Artificial Sequence
  Description of Artificial Sequence: Synthetic oligonucleotide
cuguuuggacaaggaauuc

SEQ ID NO: 522070 - RNA, 19 nt, Artificial Sequence
  Description of Artificial Sequence: Synthetic oligonucleotide
ggcacguggguuacaagug

SEQ ID NO: 522071 - RNA, 19 nt, Artificial Sequence
  Description of Artificial Sequence: Synthetic oligonucleotide
acauuccuacagucacgga

SEQ ID NO: 522072 - RNA, 19 nt, Artificial Sequence
  Description of Artificial Sequence: Synthetic oligonucleotide
cagucugacuccuggaccu

SEQ ID NO: 522073 - RNA, 19 nt, Artificial Sequence
  Description of Artificial Sequence: Synthetic oligonucleotide
ugggguaauggagcacggu

SEQ ID NO: 522074 - RNA, 19 nt, Artificial Sequence
  Description of Artificial Sequence: Synthetic oligonucleotide
cagaaacgcggaugcuuuc

SEQ ID NO: 522075 - RNA, 19 nt, Artificial Sequence
  Description of Artificial Sequence: Synthetic oligonucleotide
uccacauaucuggcacgug

SEQ ID NO: 522076 - RNA, 19 nt, Artificial Sequence
  Description of Artificial Sequence: Synthetic oligonucleotide
gcaguugguggcauaugcc

SEQ ID NO: 522077 - RNA, 19 nt, Artificial Sequence
  Description of Artificial Sequence: Synthetic oligonucleotide
cccuccauacgcaugaaaa

SEQ ID NO: 522078 - RNA, 19 nt, Artificial Sequence
  Description of Artificial Sequence: Synthetic oligonucleotide
uucugcacguggucuucau

SEQ ID NO: 522079 - RNA, 19 nt, Artificial Sequence
  Description of Artificial Sequence: Synthetic oligonucleotide
cuuccguucuucugcacgu

SEQ ID NO: 522080 - RNA, 19 nt, Artificial Sequence
  Description of Artificial Sequence: Synthetic oligonucleotide
cuggaccugggguaaugga

SEQ ID NO: 522081 - RNA, 19 nt, Artificial Sequence
  Description of Artificial Sequence: Synthetic oligonucleotide
auaguccuacaaagaacau

SEQ ID NO: 522082 - RNA, 19 nt, Artificial Sequence
  Description of Artificial Sequence: Synthetic oligonucleotide
ccuaccugaaagccaggug

SEQ ID NO: 522083 - RNA, 19 nt, Artificial Sequence
  Description of Artificial Sequence: Synthetic oligonucleotide
gcucccgcucguuaagggc

SEQ ID NO: 522084 - RNA, 19 nt, Artificial Sequence
  Description of Artificial Sequence: Synthetic oligonucleotide
gcauacagcacagguggac

SEQ ID NO: 522085 - RNA, 19 nt, Artificial Sequence
  Description of Artificial Sequence: Synthetic oligonucleotide
cauguuguuuuaaggucau

SEQ ID NO: 522086 - RNA, 19 nt, Artificial Sequence
  Description of Artificial Sequence: Synthetic oligonucleotide
acguggguuacaagugaga

SEQ ID NO: 522087 - RNA, 19 nt, Artificial Sequence
  Description of Artificial Sequence: Synthetic oligonucleotide
ccagaguugaccauuuuau

SEQ ID NO: 522088 - RNA, 19 nt, Artificial Sequence
  Description of Artificial Sequence: Synthetic oligonucleotide
cauugacacccugucuuga

SEQ ID NO: 522089 - RNA, 19 nt, Artificial Sequence
  Description of Artificial Sequence: Synthetic oligonucleotide
augaucuuacguggauuua

SEQ ID NO: 522090 - RNA, 19 nt, Artificial Sequence
  Description of Artificial Sequence: Synthetic oligonucleotide
caagugaguucucuagaau

SEQ ID NO: 522091 - RNA, 19 nt, Artificial Sequence
  Description of Artificial Sequence: Synthetic oligonucleotide
agcacggugcagccagcaa

SEQ ID NO: 522092 - RNA, 19 nt, Artificial Sequence
  Description of Artificial Sequence: Synthetic oligonucleotide
acgcucuuccgaguaggca

SEQ ID NO: 522093 - RNA, 19 nt, Artificial Sequence
  Description of Artificial Sequence: Synthetic oligonucleotide
gcacguggguuacaaguga

SEQ ID NO: 522094 - RNA, 19 nt, Artificial Sequence
  Description of Artificial Sequence: Synthetic oligonucleotide
cuucguugucugcugagau

SEQ ID NO: 522095 - RNA, 19 nt, Artificial Sequence
  Description of Artificial Sequence: Synthetic oligonucleotide
gcgugcacaaguuuacacu

SEQ ID NO: 522096 - RNA, 19 nt, Artificial Sequence
  Description of Artificial Sequence: Synthetic oligonucleotide
agacgggcacuucgacgcu

SEQ ID NO: 522097 - RNA, 19 nt, Artificial Sequence
  Description of Artificial Sequence: Synthetic oligonucleotide
acuccagaguugaccauuu

SEQ ID NO: 522098 - RNA, 19 nt, Artificial Sequence
  Description of Artificial Sequence: Synthetic oligonucleotide
gaauuccagccuucugcau

SEQ ID NO: 522099 - RNA, 19 nt, Artificial Sequence
  Description of Artificial Sequence: Synthetic oligonucleotide
cacgaguguccugccaguc

SEQ ID NO: 522100 - RNA, 19 nt, Artificial Sequence
  Description of Artificial Sequence: Synthetic oligonucleotide
ccagauagaguuaggcugu

SEQ ID NO: 522101 - RNA, 19 nt, Artificial Sequence
  Description of Artificial Sequence: Synthetic oligonucleotide
agauagaguuaggcuguuu

SEQ ID NO: 522102 - RNA, 19 nt, Artificial Sequence
  Description of Artificial Sequence: Synthetic oligonucleotide
ucccgcucguuaagggcuu

SEQ ID NO: 522103 - RNA, 19 nt, Artificial Sequence
  Description of Artificial Sequence: Synthetic oligonucleotide
ccuggaccugggguaaugg

SEQ ID NO: 522104 - RNA, 19 nt, Artificial Sequence
  Description of Artificial Sequence: Synthetic oligonucleotide
gcacuucgacgcucuuccg

SEQ ID NO: 522105 - RNA, 19 nt, Artificial Sequence
  Description of Artificial Sequence: Synthetic oligonucleotide
aggucagcgugcacaaguu

SEQ ID NO: 522106 - RNA, 19 nt, Artificial Sequence
  Description of Artificial Sequence: Synthetic oligonucleotide
gacgggcacuucgacgcuc

SEQ ID NO: 522107 - RNA, 19 nt, Artificial Sequence
  Description of Artificial Sequence: Synthetic oligonucleotide
gcucuuccgaguaggcaug

SEQ ID NO: 522108 - RNA, 19 nt, Artificial Sequence
  Description of Artificial Sequence: Synthetic oligonucleotide
acgggcacuucgacgcucu

SEQ ID NO: 522109 - RNA, 19 nt, Artificial Sequence
  Description of Artificial Sequence: Synthetic oligonucleotide
ucuuccgaguaggcauguu

SEQ ID NO: 522110 - RNA, 19 nt, Artificial Sequence
  Description of Artificial Sequence: Synthetic oligonucleotide
agcgaucuuuaaaccugaa

SEQ ID NO: 522111 - RNA, 19 nt, Artificial Sequence
  Description of Artificial Sequence: Synthetic oligonucleotide
gcaguagaaugcuccuucu

SEQ ID NO: 522112 - RNA, 19 nt, Artificial Sequence
  Description of Artificial Sequence: Synthetic oligonucleotide
cuacuaagcuguacuucuu

SEQ ID NO: 522113 - RNA, 19 nt, Artificial Sequence
  Description of Artificial Sequence: Synthetic oligonucleotide
ggguuacaagugagaagca

SEQ ID NO: 522114 - RNA, 19 nt, Artificial Sequence
  Description of Artificial Sequence: Synthetic oligonucleotide
cguuaagggcuuccuucac

SEQ ID NO: 522115 - RNA, 19 nt, Artificial Sequence
  Description of Artificial Sequence: Synthetic oligonucleotide
cacccacacugguuggcua

SEQ ID NO: 522116 - RNA, 19 nt, Artificial Sequence
  Description of Artificial Sequence: Synthetic oligonucleotide
guuaggcuguuuaguggau

SEQ ID NO: 522117 - RNA, 19 nt, Artificial Sequence
  Description of Artificial Sequence: Synthetic oligonucleotide
ggaugaucuuacguggauu

SEQ ID NO: 522118 - RNA, 19 nt, Artificial Sequence
  Description of Artificial Sequence: Synthetic oligonucleotide
gcgugucuuaggaucaacu

SEQ ID NO: 522119 - RNA, 19 nt, Artificial Sequence
  Description of Artificial Sequence: Synthetic oligonucleotide
cuucgacgcucuuccgagu

SEQ ID NO: 522120 - RNA, 19 nt, Artificial Sequence
  Description of Artificial Sequence: Synthetic oligonucleotide
cacgucacccacacugguu

SEQ ID NO: 522121 - RNA, 19 nt, Artificial Sequence
  Description of Artificial Sequence: Synthetic oligonucleotide
cacuccagaguugaccauu

SEQ ID NO: 522122 - RNA, 19 nt, Artificial Sequence
  Description of Artificial Sequence: Synthetic oligonucleotide
ccacaugcggaugaucuua

SEQ ID NO: 522123 - RNA, 19 nt, Artificial Sequence
  Description of Artificial Sequence: Synthetic oligonucleotide
cggcugguauagcuuuacc

SEQ ID NO: 522124 - RNA, 19 nt, Artificial Sequence
  Description of Artificial Sequence: Synthetic oligonucleotide
uggcuaccggcagcugcua

SEQ ID NO: 522125 - RNA, 19 nt, Artificial Sequence
  Description of Artificial Sequence: Synthetic oligonucleotide
gucuuaggaucaacugcuu

SEQ ID NO: 522126 - RNA, 19 nt, Artificial Sequence
  Description of Artificial Sequence: Synthetic oligonucleotide
gcuaccggcagcugcuauu

SEQ ID NO: 522127 - RNA, 19 nt, Artificial Sequence
  Description of Artificial Sequence: Synthetic oligonucleotide
ggagcacggugcagccagc

SEQ ID NO: 522128 - RNA, 19 nt, Artificial Sequence
  Description of Artificial Sequence: Synthetic oligonucleotide
ggucagcgugcacaaguuu

SEQ ID NO: 522129 - RNA, 19 nt, Artificial Sequence
  Description of Artificial Sequence: Synthetic oligonucleotide
ccgcucguuaagggcuucc

SEQ ID NO: 522130 - RNA, 19 nt, Artificial Sequence
  Description of Artificial Sequence: Synthetic oligonucleotide
ccguucuucugcacguggu

SEQ ID NO: 522131 - RNA, 19 nt, Artificial Sequence
  Description of Artificial Sequence: Synthetic oligonucleotide
cacuccugcuuugguauuu

SEQ ID NO: 522132 - RNA, 19 nt, Artificial Sequence
  Description of Artificial Sequence: Synthetic oligonucleotide
cuccagaguugaccauuuu

SEQ ID NO: 522133 - RNA, 19 nt, Artificial Sequence
  Description of Artificial Sequence: Synthetic oligonucleotide
cagauagaguuaggcuguu

SEQ ID NO: 522134 - RNA, 19 nt, Artificial Sequence
  Description of Artificial Sequence: Synthetic oligonucleotide
ccgaguaggcauguuguuu

SEQ ID NO: 522135 - RNA, 19 nt, Artificial Sequence
  Description of Artificial Sequence: Synthetic oligonucleotide
gcacaaguuuacacucauu

SEQ ID NO: 522136 - RNA, 19 nt, Artificial Sequence
  Description of Artificial Sequence: Synthetic oligonucleotide
ggcuaccggcagcugcuau

SEQ ID NO: 522137 - RNA, 19 nt, Artificial Sequence
  Description of Artificial Sequence: Synthetic oligonucleotide
cggaugaucuuacguggau

SEQ ID NO: 522138 - RNA, 19 nt, Artificial Sequence
  Description of Artificial Sequence: Synthetic oligonucleotide
cccacaugcggaugaucuu

SEQ ID NO: 522139 - RNA, 19 nt, Artificial Sequence
  Description of Artificial Sequence: Synthetic oligonucleotide
cccgcucguuaagggcuuc

SEQ ID NO: 522140 - RNA, 19 nt, Artificial Sequence
  Description of Artificial Sequence: Synthetic oligonucleotide
cgcucguuaagggcuuccu

SEQ ID NO: 522141 - RNA, 19 nt, Artificial Sequence
  Description of Artificial Sequence: Synthetic oligonucleotide
acagacgucacacuggugc

SEQ ID NO: 522142 - RNA, 19 nt, Artificial Sequence
  Description of Artificial Sequence: Synthetic oligonucleotide
gacgaauuuccauacaugg

SEQ ID NO: 522143 - RNA, 19 nt, Artificial Sequence
  Description of Artificial Sequence: Synthetic oligonucleotide
aagacaaacgcccaucgag

SEQ ID NO: 522144 - RNA, 19 nt, Artificial Sequence
  Description of Artificial Sequence: Synthetic oligonucleotide
agcaccuauggauuuaucc

SEQ ID NO: 522145 - RNA, 19 nt, Artificial Sequence
  Description of Artificial Sequence: Synthetic oligonucleotide
aaagucucacgccaguggg

SEQ ID NO: 522146 - RNA, 19 nt, Artificial Sequence
  Description of Artificial Sequence: Synthetic oligonucleotide
uucgccaagaccuaagaag

SEQ ID NO: 522147 - RNA, 19 nt, Artificial Sequence
  Description of Artificial Sequence: Synthetic oligonucleotide
ugauuuaacagcuugccaa

SEQ ID NO: 522148 - RNA, 19 nt, Artificial Sequence
  Description of Artificial Sequence: Synthetic oligonucleotide
uuugcgacuagaaggagcc

SEQ ID NO: 522149 - RNA, 19 nt, Artificial Sequence
  Description of Artificial Sequence: Synthetic oligonucleotide
gucagauugagacagucgg

SEQ ID NO: 522150 - RNA, 19 nt, Artificial Sequence
  Description of Artificial Sequence: Synthetic oligonucleotide
agauuuaccuccccaaaac

SEQ ID NO: 522151 - RNA, 19 nt, Artificial Sequence
  Description of Artificial Sequence: Synthetic oligonucleotide
uacaguacauguuuauggg

SEQ ID NO: 522152 - RNA, 19 nt, Artificial Sequence
  Description of Artificial Sequence: Synthetic oligonucleotide
agugauuuaacagcuugcc

SEQ ID NO: 522153 - RNA, 19 nt, Artificial Sequence
  Description of Artificial Sequence: Synthetic oligonucleotide
ugauugacugcucugucag

SEQ ID NO: 522154 - RNA, 19 nt, Artificial Sequence
  Description of Artificial Sequence: Synthetic oligonucleotide
auaguacuuucucaggagg

SEQ ID NO: 522155 - RNA, 19 nt, Artificial Sequence
  Description of Artificial Sequence: Synthetic oligonucleotide
  modified_base (16)..(16): a, c, u, g, unknown or other
aguugcucgauucaunuaa

SEQ ID NO: 522156 - RNA, 19 nt, Artificial Sequence
  Description of Artificial Sequence: Synthetic oligonucleotide
caguacaagacaaacgccc

SEQ ID NO: 522157 - RNA, 19 nt, Artificial Sequence
  Description of Artificial Sequence: Synthetic oligonucleotide
aaagcaucccuucucgaug

SEQ ID NO: 522158 - RNA, 19 nt, Artificial Sequence
  Description of Artificial Sequence: Synthetic oligonucleotide
gauuuaacagcuugccaag

SEQ ID NO: 522159 - RNA, 19 nt, Artificial Sequence
  Description of Artificial Sequence: Synthetic oligonucleotide
ucgccaagaccuaagaagc

SEQ ID NO: 522160 - RNA, 19 nt, Artificial Sequence
  Description of Artificial Sequence: Synthetic oligonucleotide
uuaguaggugggcugauca

SEQ ID NO: 522161 - RNA, 19 nt, Artificial Sequence
  Description of Artificial Sequence: Synthetic oligonucleotide
ggugagagaacagugaugg

SEQ ID NO: 522162 - RNA, 19 nt, Artificial Sequence
  Description of Artificial Sequence: Synthetic oligonucleotide
aagaagaacaguggaagug

SEQ ID NO: 522163 - RNA, 19 nt, Artificial Sequence
  Description of Artificial Sequence: Synthetic oligonucleotide
uguuuauggggacuccuag

SEQ ID NO: 522164 - RNA, 19 nt, Artificial Sequence
  Description of Artificial Sequence: Synthetic oligonucleotide
gaaaccugggacuugggac

SEQ ID NO: 522165 - RNA, 19 nt, Artificial Sequence
  Description of Artificial Sequence: Synthetic oligonucleotide
ugggcuaaugucacuagag

SEQ ID NO: 522166 - RNA, 19 nt, Artificial Sequence
  Description of Artificial Sequence: Synthetic oligonucleotide
gguuaugugguauuuacug

SEQ ID NO: 522167 - RNA, 19 nt, Artificial Sequence
  Description of Artificial Sequence: Synthetic oligonucleotide
uuagcuaccagagacugga

SEQ ID NO: 522168 - RNA, 19 nt, Artificial Sequence
  Description of Artificial Sequence: Synthetic oligonucleotide
agagaacagugauggaccc

SEQ ID NO: 522169 - RNA, 19 nt, Artificial Sequence
  Description of Artificial Sequence: Synthetic oligonucleotide
agauaguacuuucucagga

SEQ ID NO: 522170 - RNA, 19 nt, Artificial Sequence
  Description of Artificial Sequence: Synthetic oligonucleotide
aaaagcaucccuucucgau

SEQ ID NO: 522171 - RNA, 19 nt, Artificial Sequence
  Description of Artificial Sequence: Synthetic oligonucleotide
aacuagacucaguucucuc

SEQ ID NO: 522172 - RNA, 19 nt, Artificial Sequence
  Description of Artificial Sequence: Synthetic oligonucleotide
cucaccuacacacguaagg

SEQ ID NO: 522173 - RNA, 19 nt, Artificial Sequence
  Description of Artificial Sequence: Synthetic oligonucleotide
ucaugcucaguacaagaca

SEQ ID NO: 522174 - RNA, 19 nt, Artificial Sequence
  Description of Artificial Sequence: Synthetic oligonucleotide
acuagagaggcucugugcu

SEQ ID NO: 522175 - RNA, 19 nt, Artificial Sequence
  Description of Artificial Sequence: Synthetic oligonucleotide
uuuaguagguggccugucc

SEQ ID NO: 522176 - RNA, 19 nt, Artificial Sequence
  Description of Artificial Sequence: Synthetic oligonucleotide
ucugacccuaucugaaagg

SEQ ID NO: 522177 - RNA, 19 nt, Artificial Sequence
  Description of Artificial Sequence: Synthetic oligonucleotide
agugauggacccuuggcug

SEQ ID NO: 522178 - RNA, 19 nt, Artificial Sequence
  Description of Artificial Sequence: Synthetic oligonucleotide
uuaugugguauuuacugua

SEQ ID NO: 522179 - RNA, 19 nt, Artificial Sequence
  Description of Artificial Sequence: Synthetic oligonucleotide
cuuccaagggaccagcaag

SEQ ID NO: 522180 - RNA, 19 nt, Artificial Sequence
  Description of Artificial Sequence: Synthetic oligonucleotide
uuuagcuaccagagacugg

SEQ ID NO: 522181 - RNA, 19 nt, Artificial Sequence
  Description of Artificial Sequence: Synthetic oligonucleotide
  modified_base (7)..(7): a, c, u, g, unknown or other
ucugucnccuugacugggg

SEQ ID NO: 522182 - RNA, 19 nt, Artificial Sequence
  Description of Artificial Sequence: Synthetic oligonucleotide
gccacuaugggccaaagcc

SEQ ID NO: 522183 - RNA, 19 nt, Artificial Sequence
  Description of Artificial Sequence: Synthetic oligonucleotide
cugguuaugugguauuuac

SEQ ID NO: 522184 - RNA, 19 nt, Artificial Sequence
  Description of Artificial Sequence: Synthetic oligonucleotide
acuggugccaaggacacuc

SEQ ID NO: 522185 - RNA, 19 nt, Artificial Sequence
  Description of Artificial Sequence: Synthetic oligonucleotide
gauugagacagucggcgug

SEQ ID NO: 522186 - RNA, 19 nt, Artificial Sequence
  Description of Artificial Sequence: Synthetic oligonucleotide
ugucggauggcugaggucu

SEQ ID NO: 522187 - RNA, 19 nt, Artificial Sequence
  Description of Artificial Sequence: Synthetic oligonucleotide
cagauugagacagucggcg

SEQ ID NO: 522188 - RNA, 19 nt, Artificial Sequence
  Description of Artificial Sequence: Synthetic oligonucleotide
agacaaacgcccaucgagc

SEQ ID NO: 522189 - RNA, 19 nt, Artificial Sequence
  Description of Artificial Sequence: Synthetic oligonucleotide
gaucagacgucuugggccc

SEQ ID NO: 522190 - RNA, 19 nt, Artificial Sequence
  Description of Artificial Sequence: Synthetic oligonucleotide
ucaccuacacacguaaggc

SEQ ID NO: 522191 - RNA, 19 nt, Artificial Sequence
  Description of Artificial Sequence: Synthetic oligonucleotide
aaguuugugccaaugucug

SEQ ID NO: 522192 - RNA, 19 nt, Artificial Sequence
  Description of Artificial Sequence: Synthetic oligonucleotide
ucagauugagacagucggc

SEQ ID NO: 522193 - RNA, 19 nt, Artificial Sequence
  Description of Artificial Sequence: Synthetic oligonucleotide
ugggccaaagcccugcccc

SEQ ID NO: 522194 - RNA, 19 nt, Artificial Sequence
  Description of Artificial Sequence: Synthetic oligonucleotide
  modified_base (18)..(18): a, c, u, g, unknown or other
ugaguugcucgauucaunu

SEQ ID NO: 522195 - RNA, 19 nt, Artificial Sequence
  Description of Artificial Sequence: Synthetic oligonucleotide
gagguccaucacuagagag

SEQ ID NO: 522196 - RNA, 19 nt, Artificial Sequence
  Description of Artificial Sequence: Synthetic oligonucleotide
uuugucggauggcugaggu

SEQ ID NO: 522197 - RNA, 19 nt, Artificial Sequence
  Description of Artificial Sequence: Synthetic oligonucleotide
uuaguagguggccuguccu

SEQ ID NO: 522198 - RNA, 19 nt, Artificial Sequence
  Description of Artificial Sequence: Synthetic oligonucleotide
cugacagucuguugggagg

SEQ ID NO: 522199 - RNA, 19 nt, Artificial Sequence
  Description of Artificial Sequence: Synthetic oligonucleotide
gggauuuggucccugaucc

SEQ ID NO: 522200 - RNA, 19 nt, Artificial Sequence
  Description of Artificial Sequence: Synthetic oligonucleotide
ugacccuaucugaaagggg

SEQ ID NO: 522201 - RNA, 19 nt, Artificial Sequence
  Description of Artificial Sequence: Synthetic oligonucleotide
ucugacacacugcuuuucu

SEQ ID NO: 522202 - RNA, 19 nt, Artificial Sequence
  Description of Artificial Sequence: Synthetic oligonucleotide
uuauggggacuccuagugc

SEQ ID NO: 522203 - RNA, 19 nt, Artificial Sequence
  Description of Artificial Sequence: Synthetic oligonucleotide
agaccagcaagccugggcu

SEQ ID NO: 522204 - RNA, 19 nt, Artificial Sequence
  Description of Artificial Sequence: Synthetic oligonucleotide
agcagauaguacuuucuca

SEQ ID NO: 522205 - RNA, 19 nt, Artificial Sequence
  Description of Artificial Sequence: Synthetic oligonucleotide
auaugccccagaccuuugc

SEQ ID NO: 522206 - RNA, 19 nt, Artificial Sequence
  Description of Artificial Sequence: Synthetic oligonucleotide
aguaaguccucuagauagc

SEQ ID NO: 522207 - RNA, 19 nt, Artificial Sequence
  Description of Artificial Sequence: Synthetic oligonucleotide
ucccaagagaccugaagga

SEQ ID NO: 522208 - RNA, 19 nt, Artificial Sequence
  Description of Artificial Sequence: Synthetic oligonucleotide
  modified_base (9)..(9): a, c, u, g, unknown or other
ugucugucnccuugacugg

SEQ ID NO: 522209 - RNA, 19 nt, Artificial Sequence
  Description of Artificial Sequence: Synthetic oligonucleotide
accuacacacguaaggcgg

SEQ ID NO: 522210 - RNA, 19 nt, Artificial Sequence
  Description of Artificial Sequence: Synthetic oligonucleotide
gacucugcgcauuugcgac

SEQ ID NO: 522211 - RNA, 19 nt, Artificial Sequence
  Description of Artificial Sequence: Synthetic oligonucleotide
aggacugcccacucucggc

SEQ ID NO: 522212 - RNA, 19 nt, Artificial Sequence
  Description of Artificial Sequence: Synthetic oligonucleotide
guagucagcuuucuucgcc

SEQ ID NO: 522213 - RNA, 19 nt, Artificial Sequence
  Description of Artificial Sequence: Synthetic oligonucleotide
uggugaggcuuucccaagg

SEQ ID NO: 522214 - RNA, 19 nt, Artificial Sequence
  Description of Artificial Sequence: Synthetic oligonucleotide
uuccacgagcuccuagggg

SEQ ID NO: 522215 - RNA, 19 nt, Artificial Sequence
  Description of Artificial Sequence: Synthetic oligonucleotide
caccuacacacguaaggcg

SEQ ID NO: 522216 - RNA, 19 nt, Artificial Sequence
  Description of Artificial Sequence: Synthetic oligonucleotide
ucuucgccaagaccuaaga

SEQ ID NO: 522217 - RNA, 19 nt, Artificial Sequence
  Description of Artificial Sequence: Synthetic oligonucleotide
ugcucaguacaagacaaac

SEQ ID NO: 522218 - RNA, 19 nt, Artificial Sequence
  Description of Artificial Sequence: Synthetic oligonucleotide
auacucacggaucuccccu

SEQ ID NO: 522219 - RNA, 19 nt, Artificial Sequence
  Description of Artificial Sequence: Synthetic oligonucleotide
ugguuaugugguauuuacu

SEQ ID NO: 522220 - RNA, 19 nt, Artificial Sequence
  Description of Artificial Sequence: Synthetic oligonucleotide
acacacguaaggcggcaac

SEQ ID NO: 522221 - RNA, 19 nt, Artificial Sequence
  Description of Artificial Sequence: Synthetic oligonucleotide
uucuucgccaagaccuaag

SEQ ID NO: 522222 - RNA, 19 nt, Artificial Sequence
  Description of Artificial Sequence: Synthetic oligonucleotide
auuuaacagcuugccaagg

SEQ ID NO: 522223 - RNA, 19 nt, Artificial Sequence
  Description of Artificial Sequence: Synthetic oligonucleotide
cuaagaagcugcuuuucca

SEQ ID NO: 522224 - RNA, 19 nt, Artificial Sequence
  Description of Artificial Sequence: Synthetic oligonucleotide
uggaccacagcagauagua

SEQ ID NO: 522225 - RNA, 19 nt, Artificial Sequence
  Description of Artificial Sequence: Synthetic oligonucleotide
agaaaccugggacuuggga

SEQ ID NO: 522226 - RNA, 19 nt, Artificial Sequence
  Description of Artificial Sequence: Synthetic oligonucleotide
cuugggucaaucauuccca

SEQ ID NO: 522227 - RNA, 19 nt, Artificial Sequence
  Description of Artificial Sequence: Synthetic oligonucleotide
cacuagagaggcucugugc

SEQ ID NO: 522228 - RNA, 19 nt, Artificial Sequence
  Description of Artificial Sequence: Synthetic oligonucleotide
agaggauuugucggauggc

SEQ ID NO: 522229 - RNA, 19 nt, Artificial Sequence
  Description of Artificial Sequence: Synthetic oligonucleotide
cauacucacggaucucccc

SEQ ID NO: 522230 - RNA, 19 nt, Artificial Sequence
  Description of Artificial Sequence: Synthetic oligonucleotide
ugcgcauuugcgacuagaa

SEQ ID NO: 522231 - RNA, 19 nt, Artificial Sequence
  Description of Artificial Sequence: Synthetic oligonucleotide
  modified_base (4)..(4): a, c, u, g, unknown or other
gucnccuugacuggggccc

SEQ ID NO: 522232 - RNA, 19 nt, Artificial Sequence
  Description of Artificial Sequence: Synthetic oligonucleotide
uagucagcuuucuucgcca

SEQ ID NO: 522233 - RNA, 19 nt, Artificial Sequence
  Description of Artificial Sequence: Synthetic oligonucleotide
ggauuuauccagccuuggg

SEQ ID NO: 522234 - RNA, 19 nt, Artificial Sequence
  Description of Artificial Sequence: Synthetic oligonucleotide
aagaacaguggaaguguug

SEQ ID NO: 522235 - RNA, 19 nt, Artificial Sequence
  Description of Artificial Sequence: Synthetic oligonucleotide
accuccccaaaacgguacc

SEQ ID NO: 522236 - RNA, 19 nt, Artificial Sequence
  Description of Artificial Sequence: Synthetic oligonucleotide
auuuggucccugauccagc

SEQ ID NO: 522237 - RNA, 19 nt, Artificial Sequence
  Description of Artificial Sequence: Synthetic oligonucleotide
acauguuuauggggacucc

SEQ ID NO: 522238 - RNA, 19 nt, Artificial Sequence
  Description of Artificial Sequence: Synthetic oligonucleotide
uccaguacgggcgucuucu

SEQ ID NO: 522239 - RNA, 19 nt, Artificial Sequence
  Description of Artificial Sequence: Synthetic oligonucleotide
cagcccguggcauaugccc

SEQ ID NO: 522240 - RNA, 19 nt, Artificial Sequence
  Description of Artificial Sequence: Synthetic oligonucleotide
  modified_base (5)..(5): a, c, u, g, unknown or other
ugucnccuugacuggggcc

SEQ ID NO: 522241 - RNA, 19 nt, Artificial Sequence
  Description of Artificial Sequence: Synthetic oligonucleotide
uucccugcgggucgcuugg

SEQ ID NO: 522242 - RNA, 19 nt, Artificial Sequence
  Description of Artificial Sequence: Synthetic oligonucleotide
guggugaaagucucacgcc

SEQ ID NO: 522243 - RNA, 19 nt, Artificial Sequence
  Description of Artificial Sequence: Synthetic oligonucleotide
uaguguuuguccagccacu

SEQ ID NO: 522244 - RNA, 19 nt, Artificial Sequence
  Description of Artificial Sequence: Synthetic oligonucleotide
aagagaccugaaggacugc

SEQ ID NO: 522245 - RNA, 19 nt, Artificial Sequence
  Description of Artificial Sequence: Synthetic oligonucleotide
ugcuuugacugaguguucu

SEQ ID NO: 522246 - RNA, 19 nt, Artificial Sequence
  Description of Artificial Sequence: Synthetic oligonucleotide
aguacgggcgucuucucau

SEQ ID NO: 522247 - RNA, 19 nt, Artificial Sequence
  Description of Artificial Sequence: Synthetic oligonucleotide
ucacggaucuccccuggcu

SEQ ID NO: 522248 - RNA, 19 nt, Artificial Sequence
  Description of Artificial Sequence: Synthetic oligonucleotide
uggggcccgacgaauuucc

SEQ ID NO: 522249 - RNA, 19 nt, Artificial Sequence
  Description of Artificial Sequence: Synthetic oligonucleotide
gacgucuugggccccugag

SEQ ID NO: 522250 - RNA, 19 nt, Artificial Sequence
  Description of Artificial Sequence: Synthetic oligonucleotide
uaguagguggccuguccug

SEQ ID NO: 522251 - RNA, 19 nt, Artificial Sequence
  Description of Artificial Sequence: Synthetic oligonucleotide
aagucucacgccagugggg

SEQ ID NO: 522252 - RNA, 19 nt, Artificial Sequence
  Description of Artificial Sequence: Synthetic oligonucleotide
agauugagacagucggcgu

SEQ ID NO: 522253 - RNA, 19 nt, Artificial Sequence
  Description of Artificial Sequence: Synthetic oligonucleotide
gaaggacugcccacucucg

SEQ ID NO: 522254 - RNA, 19 nt, Artificial Sequence
  Description of Artificial Sequence: Synthetic oligonucleotide
caugggcuaaugucacuag

SEQ ID NO: 522255 - RNA, 19 nt, Artificial Sequence
  Description of Artificial Sequence: Synthetic oligonucleotide
gaaaagcaucccuucucga

SEQ ID NO: 522256 - RNA, 19 nt, Artificial Sequence
  Description of Artificial Sequence: Synthetic oligonucleotide
gauuugucggauggcugag

SEQ ID NO: 522257 - RNA, 19 nt, Artificial Sequence
  Description of Artificial Sequence: Synthetic oligonucleotide
accuguuuaaucaggccug

SEQ ID NO: 522258 - RNA, 19 nt, Artificial Sequence
  Description of Artificial Sequence: Synthetic oligonucleotide
uccccaaaacgguacccug

SEQ ID NO: 522259 - RNA, 19 nt, Artificial Sequence
  Description of Artificial Sequence: Synthetic oligonucleotide
cugggugagugauuuaaca

SEQ ID NO: 522260 - RNA, 19 nt, Artificial Sequence
  Description of Artificial Sequence: Synthetic oligonucleotide
gguagcauuggccucugac

SEQ ID NO: 522261 - RNA, 19 nt, Artificial Sequence
  Description of Artificial Sequence: Synthetic oligonucleotide
cagacgucacacuggugcc

SEQ ID NO: 522262 - RNA, 19 nt, Artificial Sequence
  Description of Artificial Sequence: Synthetic oligonucleotide
gcaccuauggauuuaucca

SEQ ID NO: 522263 - RNA, 19 nt, Artificial Sequence
  Description of Artificial Sequence: Synthetic oligonucleotide
guuaugugguauuuacugu

SEQ ID NO: 522264 - RNA, 19 nt, Artificial Sequence
  Description of Artificial Sequence: Synthetic oligonucleotide
gggguauaaggaaagaaga

SEQ ID NO: 522265 - RNA, 19 nt, Artificial Sequence
  Description of Artificial Sequence: Synthetic oligonucleotide
ugaguggcauuaguaggug

SEQ ID NO: 522266 - RNA, 19 nt, Artificial Sequence
  Description of Artificial Sequence: Synthetic oligonucleotide
ucucaucagccuguggugu

SEQ ID NO: 522267 - RNA, 19 nt, Artificial Sequence
  Description of Artificial Sequence: Synthetic oligonucleotide
ggucaaucauucccagagg

SEQ ID NO: 522268 - RNA, 19 nt, Artificial Sequence
  Description of Artificial Sequence: Synthetic oligonucleotide
uaaucaggccuggugcuga

SEQ ID NO: 522269 - RNA, 19 nt, Artificial Sequence
  Description of Artificial Sequence: Synthetic oligonucleotide
acucucggcaguaaguccu

SEQ ID NO: 522270 - RNA, 19 nt, Artificial Sequence
  Description of Artificial Sequence: Synthetic oligonucleotide
auugacugcucugucaguu

SEQ ID NO: 522271 - RNA, 19 nt, Artificial Sequence
  Description of Artificial Sequence: Synthetic oligonucleotide
cugaguugggagguccugg

SEQ ID NO: 522272 - RNA, 19 nt, Artificial Sequence
  Description of Artificial Sequence: Synthetic oligonucleotide
cuuggagacuggcagccuc

SEQ ID NO: 522273 - RNA, 19 nt, Artificial Sequence
  Description of Artificial Sequence: Synthetic oligonucleotide
acguaaggcggcaacacca

SEQ ID NO: 522274 - RNA, 19 nt, Artificial Sequence
  Description of Artificial Sequence: Synthetic oligonucleotide
cuaggagguucacuuccag

SEQ ID NO: 522275 - RNA, 19 nt, Artificial Sequence
  Description of Artificial Sequence: Synthetic oligonucleotide
ggcauuaguaggugggcug

SEQ ID NO: 522276 - RNA, 19 nt, Artificial Sequence
  Description of Artificial Sequence: Synthetic oligonucleotide
cacucucggcaguaagucc

SEQ ID NO: 522277 - RNA, 19 nt, Artificial Sequence
  Description of Artificial Sequence: Synthetic oligonucleotide
aaacgguacccugggguca

SEQ ID NO: 522278 - RNA, 19 nt, Artificial Sequence
  Description of Artificial Sequence: Synthetic oligonucleotide
gcaaguuugugccaauguc

SEQ ID NO: 522279 - RNA, 19 nt, Artificial Sequence
  Description of Artificial Sequence: Synthetic oligonucleotide
uugccaaggguguucugaa

SEQ ID NO: 522280 - RNA, 19 nt, Artificial Sequence
  Description of Artificial Sequence: Synthetic oligonucleotide
gggucgcuuggucagauug

SEQ ID NO: 522281 - RNA, 19 nt, Artificial Sequence
  Description of Artificial Sequence: Synthetic oligonucleotide
aacgguacccuggggucag

SEQ ID NO: 522282 - RNA, 19 nt, Artificial Sequence
  Description of Artificial Sequence: Synthetic oligonucleotide
gugaggcuuucccaaggcc

SEQ ID NO: 522283 - RNA, 19 nt, Artificial Sequence
  Description of Artificial Sequence: Synthetic oligonucleotide
ggauuugucggauggcuga

SEQ ID NO: 522284 - RNA, 19 nt, Artificial Sequence
  Description of Artificial Sequence: Synthetic oligonucleotide
uacgggcgucuucucauca

SEQ ID NO: 522285 - RNA, 19 nt, Artificial Sequence
  Description of Artificial Sequence: Synthetic oligonucleotide
cugggucaaagaggcaugg

SEQ ID NO: 522286 - RNA, 19 nt, Artificial Sequence
  Description of Artificial Sequence: Synthetic oligonucleotide
cuucuggcgagguccauca

SEQ ID NO: 522287 - RNA, 19 nt, Artificial Sequence
  Description of Artificial Sequence: Synthetic oligonucleotide
ccuauggauuuauccagcc

SEQ ID NO: 522288 - RNA, 19 nt, Artificial Sequence
  Description of Artificial Sequence: Synthetic oligonucleotide
acgaauuuccauacauggu

SEQ ID NO: 522289 - RNA, 19 nt, Artificial Sequence
  Description of Artificial Sequence: Synthetic oligonucleotide
ugccaaggguguucugaag

SEQ ID NO: 522290 - RNA, 19 nt, Artificial Sequence
  Description of Artificial Sequence: Synthetic oligonucleotide
gucgcuuggucagauugag

SEQ ID NO: 522291 - RNA, 19 nt, Artificial Sequence
  Description of Artificial Sequence: Synthetic oligonucleotide
auuugucggauggcugagg

SEQ ID NO: 522292 - RNA, 19 nt, Artificial Sequence
  Description of Artificial Sequence: Synthetic oligonucleotide
uacucacggaucuccccug

SEQ ID NO: 522293 - RNA, 19 nt, Artificial Sequence
  Description of Artificial Sequence: Synthetic oligonucleotide
auagagcuuuguagucagc

SEQ ID NO: 522294 - RNA, 19 nt, Artificial Sequence
  Description of Artificial Sequence: Synthetic oligonucleotide
ucgaugcugcuugcaaaag

SEQ ID NO: 522295 - RNA, 19 nt, Artificial Sequence
  Description of Artificial Sequence: Synthetic oligonucleotide
cuaugggccaaagcccugc

SEQ ID NO: 522296 - RNA, 19 nt, Artificial Sequence
  Description of Artificial Sequence: Synthetic oligonucleotide
  modified_base (6)..(6): a, c, u, g, unknown or other
cugucnccuugacuggggc

SEQ ID NO: 522297 - RNA, 19 nt, Artificial Sequence
  Description of Artificial Sequence: Synthetic oligonucleotide
ggucaugcucaguacaaga

SEQ ID NO: 522298 - RNA, 19 nt, Artificial Sequence
  Description of Artificial Sequence: Synthetic oligonucleotide
uggacccuuggcugaacac

SEQ ID NO: 522299 - RNA, 19 nt, Artificial Sequence
  Description of Artificial Sequence: Synthetic oligonucleotide
  modified_base (8)..(8): a, c, u, g, unknown or other
gucugucnccuugacuggg

SEQ ID NO: 522300 - RNA, 19 nt, Artificial Sequence
  Description of Artificial Sequence: Synthetic oligonucleotide
caccuguuuaaucaggccu

SEQ ID NO: 522301 - RNA, 19 nt, Artificial Sequence
  Description of Artificial Sequence: Synthetic oligonucleotide
auggacccuuggcugaaca

SEQ ID NO: 522302 - RNA, 19 nt, Artificial Sequence
  Description of Artificial Sequence: Synthetic oligonucleotide
cugaguggcauuaguaggu

SEQ ID NO: 522303 - RNA, 19 nt, Artificial Sequence
  Description of Artificial Sequence: Synthetic oligonucleotide
aguagguggccuguccugu

SEQ ID NO: 522304 - RNA, 19 nt, Artificial Sequence
  Description of Artificial Sequence: Synthetic oligonucleotide
acgucuugggccccugagu

SEQ ID NO: 522305 - RNA, 19 nt, Artificial Sequence
  Description of Artificial Sequence: Synthetic oligonucleotide
  modified_base (3)..(3): a, c, u, g, unknown or other
ucnccuugacuggggcccg

SEQ ID NO: 522306 - RNA, 19 nt, Artificial Sequence
  Description of Artificial Sequence: Synthetic oligonucleotide
acagucggcgugguaaacu

SEQ ID NO: 522307 - RNA, 19 nt, Artificial Sequence
  Description of Artificial Sequence: Synthetic oligonucleotide
cuaaugucacuagaguucu

SEQ ID NO: 522308 - RNA, 19 nt, Artificial Sequence
  Description of Artificial Sequence: Synthetic oligonucleotide
ggaaagaagaacaguggaa

SEQ ID NO: 522309 - RNA, 19 nt, Artificial Sequence
  Description of Artificial Sequence: Synthetic oligonucleotide
cacggaucuccccuggcuc

SEQ ID NO: 522310 - RNA, 19 nt, Artificial Sequence
  Description of Artificial Sequence: Synthetic oligonucleotide
uuauccagccuugggucaa

SEQ ID NO: 522311 - RNA, 19 nt, Artificial Sequence
  Description of Artificial Sequence: Synthetic oligonucleotide
  modified_base (8)..(8): a, c, u, g, unknown or other
ugcagggnuccccucuuuu

SEQ ID NO: 522312 - RNA, 19 nt, Artificial Sequence
  Description of Artificial Sequence: Synthetic oligonucleotide
acgggcgucuucucaucag

SEQ ID NO: 522313 - RNA, 19 nt, Artificial Sequence
  Description of Artificial Sequence: Synthetic oligonucleotide
uuggucagauugagacagu

SEQ ID NO: 522314 - RNA, 19 nt, Artificial Sequence
  Description of Artificial Sequence: Synthetic oligonucleotide
gaggauuugucggauggcu

SEQ ID NO: 522315 - RNA, 19 nt, Artificial Sequence
  Description of Artificial Sequence: Synthetic oligonucleotide
gcgagguccaucacuagag

SEQ ID NO: 522316 - RNA, 19 nt, Artificial Sequence
  Description of Artificial Sequence: Synthetic oligonucleotide
aaucauucccagaggucuu

SEQ ID NO: 522317 - RNA, 19 nt, Artificial Sequence
  Description of Artificial Sequence: Synthetic oligonucleotide
ccugguuaagagcuugaac

SEQ ID NO: 522318 - RNA, 19 nt, Artificial Sequence
  Description of Artificial Sequence: Synthetic oligonucleotide
cauuugcgacuagaaggag

SEQ ID NO: 522319 - RNA, 19 nt, Artificial Sequence
  Description of Artificial Sequence: Synthetic oligonucleotide
guuuauggggacuccuagu

SEQ ID NO: 522320 - RNA, 19 nt, Artificial Sequence
  Description of Artificial Sequence: Synthetic oligonucleotide
uuucuucgccaagaccuaa

SEQ ID NO: 522321 - RNA, 19 nt, Artificial Sequence
  Description of Artificial Sequence: Synthetic oligonucleotide
gcgcauuugcgacuagaag

SEQ ID NO: 522322 - RNA, 19 nt, Artificial Sequence
  Description of Artificial Sequence: Synthetic oligonucleotide
acucuguucugugguuguc

SEQ ID NO: 522323 - RNA, 19 nt, Artificial Sequence
  Description of Artificial Sequence: Synthetic oligonucleotide
agagaggcucugugcuuug

SEQ ID NO: 522324 - RNA, 19 nt, Artificial Sequence
  Description of Artificial Sequence: Synthetic oligonucleotide
ugaggagacgcagcccgcu

SEQ ID NO: 522325 - RNA, 19 nt, Artificial Sequence
  Description of Artificial Sequence: Synthetic oligonucleotide
gaccuuugcuggauggcca

SEQ ID NO: 522326 - RNA, 19 nt, Artificial Sequence
  Description of Artificial Sequence: Synthetic oligonucleotide
cacucaccuacacacguaa

SEQ ID NO: 522327 - RNA, 19 nt, Artificial Sequence
  Description of Artificial Sequence: Synthetic oligonucleotide
uugucggauggcugagguc

SEQ ID NO: 522328 - RNA, 19 nt, Artificial Sequence
  Description of Artificial Sequence: Synthetic oligonucleotide
uguugggaauaugucuguu

SEQ ID NO: 522329 - RNA, 19 nt, Artificial Sequence
  Description of Artificial Sequence: Synthetic oligonucleotide
acaaacgcccaucgagcuu

SEQ ID NO: 522330 - RNA, 19 nt, Artificial Sequence
  Description of Artificial Sequence: Synthetic oligonucleotide
caagacaaacgcccaucga

SEQ ID NO: 522331 - RNA, 19 nt, Artificial Sequence
  Description of Artificial Sequence: Synthetic oligonucleotide
ggugagugauuuaacagcu

SEQ ID NO: 522332 - RNA, 19 nt, Artificial Sequence
  Description of Artificial Sequence: Synthetic oligonucleotide
gcgacuagaaggagccugg

SEQ ID NO: 522333 - RNA, 19 nt, Artificial Sequence
  Description of Artificial Sequence: Synthetic oligonucleotide
cuggcgagguccaucacua

SEQ ID NO: 522334 - RNA, 19 nt, Artificial Sequence
  Description of Artificial Sequence: Synthetic oligonucleotide
gcggcaacaccacaaccug

SEQ ID NO: 522335 - RNA, 19 nt, Artificial Sequence
  Description of Artificial Sequence: Synthetic oligonucleotide
agucagcuuucuucgccaa

SEQ ID NO: 522336 - RNA, 19 nt, Artificial Sequence
  Description of Artificial Sequence: Synthetic oligonucleotide
  modified_base (17)..(17): a, c, u, g, unknown or other
gacuccuagugcagggnuc

SEQ ID NO: 522337 - RNA, 19 nt, Artificial Sequence
  Description of Artificial Sequence: Synthetic oligonucleotide
aucagacgucuugggcccc

SEQ ID NO: 522338 - RNA, 19 nt, Artificial Sequence
  Description of Artificial Sequence: Synthetic oligonucleotide
ggagaggauuugucggaug

SEQ ID NO: 522339 - RNA, 19 nt, Artificial Sequence
  Description of Artificial Sequence: Synthetic oligonucleotide
ccuacacacguaaggcggc

SEQ ID NO: 522340 - RNA, 19 nt, Artificial Sequence
  Description of Artificial Sequence: Synthetic oligonucleotide
gaacuagacucaguucucu

SEQ ID NO: 522341 - RNA, 19 nt, Artificial Sequence
  Description of Artificial Sequence: Synthetic oligonucleotide
uggcgagguccaucacuag

SEQ ID NO: 522342 - RNA, 19 nt, Artificial Sequence
  Description of Artificial Sequence: Synthetic oligonucleotide
cuucgccaagaccuaagaa

SEQ ID NO: 522343 - RNA, 19 nt, Artificial Sequence
  Description of Artificial Sequence: Synthetic oligonucleotide
uuccaguacgggcgucuuc

SEQ ID NO: 522344 - RNA, 19 nt, Artificial Sequence
  Description of Artificial Sequence: Synthetic oligonucleotide
cuuuaguagguggccuguc

SEQ ID NO: 522345 - RNA, 19 nt, Artificial Sequence
  Description of Artificial Sequence: Synthetic oligonucleotide
guaaguccucuagauagcu

SEQ ID NO: 522346 - RNA, 19 nt, Artificial Sequence
  Description of Artificial Sequence: Synthetic oligonucleotide
ggcuaguguuuguccagcc

SEQ ID NO: 522347 - RNA, 19 nt, Artificial Sequence
  Description of Artificial Sequence: Synthetic oligonucleotide
aguguuuguccagccacua

SEQ ID NO: 522348 - RNA, 19 nt, Artificial Sequence
  Description of Artificial Sequence: Synthetic oligonucleotide
aagaggcaugggauuuggu

SEQ ID NO: 522349 - RNA, 19 nt, Artificial Sequence
  Description of Artificial Sequence: Synthetic oligonucleotide
aucgagcuuggaaaugaaa

SEQ ID NO: 522350 - RNA, 19 nt, Artificial Sequence
  Description of Artificial Sequence: Synthetic oligonucleotide
cuauggauuuauccagccu

SEQ ID NO: 522351 - RNA, 19 nt, Artificial Sequence
  Description of Artificial Sequence: Synthetic oligonucleotide
cuuucuucgccaagaccua

SEQ ID NO: 522352 - RNA, 19 nt, Artificial Sequence
  Description of Artificial Sequence: Synthetic oligonucleotide
cacacucaccuacacacgu

SEQ ID NO: 522353 - RNA, 19 nt, Artificial Sequence
  Description of Artificial Sequence: Synthetic oligonucleotide
gcuaguguuuguccagcca

SEQ ID NO: 522354 - RNA, 19 nt, Artificial Sequence
  Description of Artificial Sequence: Synthetic oligonucleotide
cccugaguagccaucccug

SEQ ID NO: 522355 - RNA, 19 nt, Artificial Sequence
  Description of Artificial Sequence: Synthetic oligonucleotide
ggcgagguccaucacuaga

SEQ ID NO: 522356 - RNA, 19 nt, Artificial Sequence
  Description of Artificial Sequence: Synthetic oligonucleotide
gcuccuaggggcugcacuc

SEQ ID NO: 522357 - RNA, 19 nt, Artificial Sequence
  Description of Artificial Sequence: Synthetic oligonucleotide
gaggagacgcagcccgcuc

SEQ ID NO: 522358 - RNA, 19 nt, Artificial Sequence
  Description of Artificial Sequence: Synthetic oligonucleotide
ggggaacuagacucaguuc

SEQ ID NO: 522359 - RNA, 19 nt, Artificial Sequence
  Description of Artificial Sequence: Synthetic oligonucleotide
gucagcuugccugguuaug

SEQ ID NO: 522360 - RNA, 19 nt, Artificial Sequence
  Description of Artificial Sequence: Synthetic oligonucleotide
cucucggcaguaaguccuc

SEQ ID NO: 522361 - RNA, 19 nt, Artificial Sequence
  Description of Artificial Sequence: Synthetic oligonucleotide
uacacacguaaggcggcaa

SEQ ID NO: 522362 - RNA, 19 nt, Artificial Sequence
  Description of Artificial Sequence: Synthetic oligonucleotide
agacgucacacuggugcca

SEQ ID NO: 522363 - RNA, 19 nt, Artificial Sequence
  Description of Artificial Sequence: Synthetic oligonucleotide
cgacgaauuuccauacaug

SEQ ID NO: 522364 - RNA, 19 nt, Artificial Sequence
  Description of Artificial Sequence: Synthetic oligonucleotide
gggcuugauuccaguacgg

SEQ ID NO: 522365 - RNA, 19 nt, Artificial Sequence
  Description of Artificial Sequence: Synthetic oligonucleotide
gauugacugcucugucagu

SEQ ID NO: 522366 - RNA, 19 nt, Artificial Sequence
  Description of Artificial Sequence: Synthetic oligonucleotide
  modified_base (15)..(15): a, c, u, g, unknown or other
guugcucgauucaunuaaa

SEQ ID NO: 522367 - RNA, 19 nt, Artificial Sequence
  Description of Artificial Sequence: Synthetic oligonucleotide
cacacguaaggcggcaaca

SEQ ID NO: 522368 - RNA, 19 nt, Artificial Sequence
  Description of Artificial Sequence: Synthetic oligonucleotide
uucuggcgagguccaucac

SEQ ID NO: 522369 - RNA, 19 nt, Artificial Sequence
  Description of Artificial Sequence: Synthetic oligonucleotide
cacaaguccccaugggcua

SEQ ID NO: 522370 - RNA, 19 nt, Artificial Sequence
  Description of Artificial Sequence: Synthetic oligonucleotide
aguugggugcuggggcuug

SEQ ID NO: 522371 - RNA, 19 nt, Artificial Sequence
  Description of Artificial Sequence: Synthetic oligonucleotide
ugggcugaucagacgucuu

SEQ ID NO: 522372 - RNA, 19 nt, Artificial Sequence
  Description of Artificial Sequence: Synthetic oligonucleotide
gacagucggcgugguaaac

SEQ ID NO: 522373 - RNA, 19 nt, Artificial Sequence
  Description of Artificial Sequence: Synthetic oligonucleotide
cacagacgucacacuggug

SEQ ID NO: 522374 - RNA, 19 nt, Artificial Sequence
  Description of Artificial Sequence: Synthetic oligonucleotide
gggucaugcucaguacaag

SEQ ID NO: 522375 - RNA, 19 nt, Artificial Sequence
  Description of Artificial Sequence: Synthetic oligonucleotide
guacgggcgucuucucauc

SEQ ID NO: 522376 - RNA, 19 nt, Artificial Sequence
  Description of Artificial Sequence: Synthetic oligonucleotide
caucgagcuuggaaaugaa

SEQ ID NO: 522377 - RNA, 19 nt, Artificial Sequence
  Description of Artificial Sequence: Synthetic oligonucleotide
ggcccgacgaauuuccaua

SEQ ID NO: 522378 - RNA, 19 nt, Artificial Sequence
  Description of Artificial Sequence: Synthetic oligonucleotide
caguacgggcgucuucuca

SEQ ID NO: 522379 - RNA, 19 nt, Artificial Sequence
  Description of Artificial Sequence: Synthetic oligonucleotide
guacaagacaaacgcccau

SEQ ID NO: 522380 - RNA, 19 nt, Artificial Sequence
  Description of Artificial Sequence: Synthetic oligonucleotide
cauguuuauggggacuccu

SEQ ID NO: 522381 - RNA, 19 nt, Artificial Sequence
  Description of Artificial Sequence: Synthetic oligonucleotide
aucauucccagaggucuuu

SEQ ID NO: 522382 - RNA, 19 nt, Artificial Sequence
  Description of Artificial Sequence: Synthetic oligonucleotide
cguggcauaugccccagac

SEQ ID NO: 522383 - RNA, 19 nt, Artificial Sequence
  Description of Artificial Sequence: Synthetic oligonucleotide
agcaucccuucucgaugcu

SEQ ID NO: 522384 - RNA, 19 nt, Artificial Sequence
  Description of Artificial Sequence: Synthetic oligonucleotide
ucucggcaguaaguccucu

SEQ ID NO: 522385 - RNA, 19 nt, Artificial Sequence
  Description of Artificial Sequence: Synthetic oligonucleotide
agacgucuugggccccuga

SEQ ID NO: 522386 - RNA, 19 nt, Artificial Sequence
  Description of Artificial Sequence: Synthetic oligonucleotide
gcauuaguaggugggcuga

SEQ ID NO: 522387 - RNA, 19 nt, Artificial Sequence
  Description of Artificial Sequence: Synthetic oligonucleotide
gcccgacgaauuuccauac

SEQ ID NO: 522388 - RNA, 19 nt, Artificial Sequence
  Description of Artificial Sequence: Synthetic oligonucleotide
cuugaguugcucgauucau

SEQ ID NO: 522389 - RNA, 19 nt, Artificial Sequence
  Description of Artificial Sequence: Synthetic oligonucleotide
gggcuaaugucacuagagu

SEQ ID NO: 522390 - RNA, 19 nt, Artificial Sequence
  Description of Artificial Sequence: Synthetic oligonucleotide
cuugccugguuauguggua

SEQ ID NO: 522391 - RNA, 19 nt, Artificial Sequence
  Description of Artificial Sequence: Synthetic oligonucleotide
gauggacccuuggcugaac

SEQ ID NO: 522392 - RNA, 19 nt, Artificial Sequence
  Description of Artificial Sequence: Synthetic oligonucleotide
cugaguguucugguccaca

SEQ ID NO: 522393 - RNA, 19 nt, Artificial Sequence
  Description of Artificial Sequence: Synthetic oligonucleotide
gggcgucuucucaucagcc

SEQ ID NO: 522394 - RNA, 19 nt, Artificial Sequence
  Description of Artificial Sequence: Synthetic oligonucleotide
cagcuugccaaggguguuc

SEQ ID NO: 522395 - RNA, 19 nt, Artificial Sequence
  Description of Artificial Sequence: Synthetic oligonucleotide
cacaaccuggagaccaccu

SEQ ID NO: 522396 - RNA, 19 nt, Artificial Sequence
  Description of Artificial Sequence: Synthetic oligonucleotide
gggcuaguguuuguccagc

SEQ ID NO: 522397 - RNA, 19 nt, Artificial Sequence
  Description of Artificial Sequence: Synthetic oligonucleotide
caucucacaaaaggaggcu

SEQ ID NO: 522398 - RNA, 19 nt, Artificial Sequence
  Description of Artificial Sequence: Synthetic oligonucleotide
cuacacacguaaggcggca

SEQ ID NO: 522399 - RNA, 19 nt, Artificial Sequence
  Description of Artificial Sequence: Synthetic oligonucleotide
gaccagcaagccugggcua

SEQ ID NO: 522400 - RNA, 19 nt, Artificial Sequence
  Description of Artificial Sequence: Synthetic oligonucleotide
augcucaguacaagacaaa

SEQ ID NO: 522401 - RNA, 19 nt, Artificial Sequence
  Description of Artificial Sequence: Synthetic oligonucleotide
ccacucucggcaguaaguc

SEQ ID NO: 522402 - RNA, 19 nt, Artificial Sequence
  Description of Artificial Sequence: Synthetic oligonucleotide
cgaauuuccauacaugguu

SEQ ID NO: 522403 - RNA, 19 nt, Artificial Sequence
  Description of Artificial Sequence: Synthetic oligonucleotide
ccaucgagcuuggaaauga

SEQ ID NO: 522404 - RNA, 19 nt, Artificial Sequence
  Description of Artificial Sequence: Synthetic oligonucleotide
cuggggcccgacgaauuuc

SEQ ID NO: 522405 - RNA, 19 nt, Artificial Sequence
  Description of Artificial Sequence: Synthetic oligonucleotide
cacucaccccaacuuccca

SEQ ID NO: 522406 - RNA, 19 nt, Artificial Sequence
  Description of Artificial Sequence: Synthetic oligonucleotide
cuucucgaugcugcuugca

SEQ ID NO: 522407 - RNA, 19 nt, Artificial Sequence
  Description of Artificial Sequence: Synthetic oligonucleotide
cugcgcauuugcgacuaga

SEQ ID NO: 522408 - RNA, 19 nt, Artificial Sequence
  Description of Artificial Sequence: Synthetic oligonucleotide
ccacaaguccccaugggcu

SEQ ID NO: 522409 - RNA, 19 nt, Artificial Sequence
  Description of Artificial Sequence: Synthetic oligonucleotide
auuccaguacgggcgucuu

SEQ ID NO: 522410 - RNA, 19 nt, Artificial Sequence
  Description of Artificial Sequence: Synthetic oligonucleotide
acacucaccuacacacgua

SEQ ID NO: 522411 - RNA, 19 nt, Artificial Sequence
  Description of Artificial Sequence: Synthetic oligonucleotide
gccugggugagugauuuaa

SEQ ID NO: 522412 - RNA, 19 nt, Artificial Sequence
  Description of Artificial Sequence: Synthetic oligonucleotide
ggggcacaucucacaaaag

SEQ ID NO: 522413 - RNA, 19 nt, Artificial Sequence
  Description of Artificial Sequence: Synthetic oligonucleotide
gcacucaccccaacuuccc

SEQ ID NO: 522414 - RNA, 19 nt, Artificial Sequence
  Description of Artificial Sequence: Synthetic oligonucleotide
cucggcaguaaguccucua

SEQ ID NO: 522415 - RNA, 19 nt, Artificial Sequence
  Description of Artificial Sequence: Synthetic oligonucleotide
ugcgggucgcuuggucaga

SEQ ID NO: 522416 - RNA, 19 nt, Artificial Sequence
  Description of Artificial Sequence: Synthetic oligonucleotide
ggggucaugcucaguacaa

SEQ ID NO: 522417 - RNA, 19 nt, Artificial Sequence
  Description of Artificial Sequence: Synthetic oligonucleotide
ggacccuuggcugaacacu

SEQ ID NO: 522418 - RNA, 19 nt, Artificial Sequence
  Description of Artificial Sequence: Synthetic oligonucleotide
acgguacccuggggucagc

SEQ ID NO: 522419 - RNA, 19 nt, Artificial Sequence
  Description of Artificial Sequence: Synthetic oligonucleotide
caagccugggcuaguguuu

SEQ ID NO: 522420 - RNA, 19 nt, Artificial Sequence
  Description of Artificial Sequence: Synthetic oligonucleotide
gugggcugaucagacgucu

SEQ ID NO: 522421 - RNA, 19 nt, Artificial Sequence
  Description of Artificial Sequence: Synthetic oligonucleotide
guguuuguccagccacuau

SEQ ID NO: 522422 - RNA, 19 nt, Artificial Sequence
  Description of Artificial Sequence: Synthetic oligonucleotide
ccuccccaaaacgguaccc

SEQ ID NO: 522423 - RNA, 19 nt, Artificial Sequence
  Description of Artificial Sequence: Synthetic oligonucleotide
cuccuaggggcugcacuca

SEQ ID NO: 522424 - RNA, 19 nt, Artificial Sequence
  Description of Artificial Sequence: Synthetic oligonucleotide
cagucggcgugguaaacuu

SEQ ID NO: 522425 - RNA, 19 nt, Artificial Sequence
  Description of Artificial Sequence: Synthetic oligonucleotide
ccacaaccuggagaccacc

SEQ ID NO: 522426 - RNA, 19 nt, Artificial Sequence
  Description of Artificial Sequence: Synthetic oligonucleotide
  modified_base (19)..(19): a, c, u, g, unknown or other
gggacuccuagugcagggn

SEQ ID NO: 522427 - RNA, 19 nt, Artificial Sequence
  Description of Artificial Sequence: Synthetic oligonucleotide
gguugggcccacagggguc

SEQ ID NO: 522428 - RNA, 19 nt, Artificial Sequence
  Description of Artificial Sequence: Synthetic oligonucleotide
ccgacgaauuuccauacau

SEQ ID NO: 522429 - RNA, 19 nt, Artificial Sequence
  Description of Artificial Sequence: Synthetic oligonucleotide
ggugcugaguugggagguc

SEQ ID NO: 522430 - RNA, 19 nt, Artificial Sequence
  Description of Artificial Sequence: Synthetic oligonucleotide
cagacgucuugggccccug

SEQ ID NO: 522431 - RNA, 19 nt, Artificial Sequence
  Description of Artificial Sequence: Synthetic oligonucleotide
uccuucuggcgagguccau

SEQ ID NO: 522432 - RNA, 19 nt, Artificial Sequence
  Description of Artificial Sequence: Synthetic oligonucleotide
ggucagcuugccugguuau

SEQ ID NO: 522433 - RNA, 19 nt, Artificial Sequence
  Description of Artificial Sequence: Synthetic oligonucleotide
gugagugauuuaacagcuu

SEQ ID NO: 522434 - RNA, 19 nt, Artificial Sequence
  Description of Artificial Sequence: Synthetic oligonucleotide
caccccaacuucccacacu

SEQ ID NO: 522435 - RNA, 19 nt, Artificial Sequence
  Description of Artificial Sequence: Synthetic oligonucleotide
gcauaugccccagaccuuu

SEQ ID NO: 522436 - RNA, 19 nt, Artificial Sequence
  Description of Artificial Sequence: Synthetic oligonucleotide
ccaguacgggcgucuucuc

SEQ ID NO: 522437 - RNA, 19 nt, Artificial Sequence
  Description of Artificial Sequence: Synthetic oligonucleotide
gcccaucgagcuuggaaau

SEQ ID NO: 522438 - RNA, 19 nt, Artificial Sequence
  Description of Artificial Sequence: Synthetic oligonucleotide
ccugguuaugugguauuua

SEQ ID NO: 522439 - RNA, 19 nt, Artificial Sequence
  Description of Artificial Sequence: Synthetic oligonucleotide
cauuaguaggugggcugau

SEQ ID NO: 522440 - RNA, 19 nt, Artificial Sequence
  Description of Artificial Sequence: Synthetic oligonucleotide
ucccugcgggucgcuuggu

SEQ ID NO: 522441 - RNA, 19 nt, Artificial Sequence
  Description of Artificial Sequence: Synthetic oligonucleotide
cccgacgaauuuccauaca

SEQ ID NO: 522442 - RNA, 19 nt, Artificial Sequence
  Description of Artificial Sequence: Synthetic oligonucleotide
gggcccgacgaauuuccau

SEQ ID NO: 522443 - RNA, 19 nt, Artificial Sequence
  Description of Artificial Sequence: Synthetic oligonucleotide
ggagggaaucugacacacu

SEQ ID NO: 522444 - RNA, 19 nt, Artificial Sequence
  Description of Artificial Sequence: Synthetic oligonucleotide
cccugcgggucgcuugguc

SEQ ID NO: 522445 - RNA, 19 nt, Artificial Sequence
  Description of Artificial Sequence: Synthetic oligonucleotide
  modified_base (2)..(2): a, c, u, g, unknown or other
cnccuugacuggggcccga

SEQ ID NO: 522446 - RNA, 19 nt, Artificial Sequence
  Description of Artificial Sequence: Synthetic oligonucleotide
ggcauaugccccagaccuu

SEQ ID NO: 522447 - RNA, 19 nt, Artificial Sequence
  Description of Artificial Sequence: Synthetic oligonucleotide
caaguccccaugggcuaau

SEQ ID NO: 522448 - RNA, 19 nt, Artificial Sequence
  Description of Artificial Sequence: Synthetic oligonucleotide
cacaggccugagugcuuuu

SEQ ID NO: 522449 - RNA, 19 nt, Artificial Sequence
  Description of Artificial Sequence: Synthetic oligonucleotide
ggacugggauuuggucccu

SEQ ID NO: 522450 - RNA, 19 nt, Artificial Sequence
  Description of Artificial Sequence: Synthetic oligonucleotide
ccguggcauaugccccaga

SEQ ID NO: 522451 - RNA, 19 nt, Artificial Sequence
  Description of Artificial Sequence: Synthetic oligonucleotide
gcgggucgcuuggucagau

SEQ ID NO: 522452 - RNA, 19 nt, Artificial Sequence
  Description of Artificial Sequence: Synthetic oligonucleotide
ccccagaccuuugcuggau

SEQ ID NO: 522453 - RNA, 19 nt, Artificial Sequence
  Description of Artificial Sequence: Synthetic oligonucleotide
cgggucgcuuggucagauu

SEQ ID NO: 522454 - RNA, 19 nt, Artificial Sequence
  Description of Artificial Sequence: Synthetic oligonucleotide
aauaccgcaucuuugaguc

SEQ ID NO: 522455 - RNA, 19 nt, Artificial Sequence
  Description of Artificial Sequence: Synthetic oligonucleotide
uccgcuaucaccaacagug

SEQ ID NO: 522456 - RNA, 19 nt, Artificial Sequence
  Description of Artificial Sequence: Synthetic oligonucleotide
acuuuuaggaucuuuacug

SEQ ID NO: 522457 - RNA, 19 nt, Artificial Sequence
  Description of Artificial Sequence: Synthetic oligonucleotide
uauucggcaagaaaacucg

SEQ ID NO: 522458 - RNA, 19 nt, Artificial Sequence
  Description of Artificial Sequence: Synthetic oligonucleotide
uguuuauagagacugcugc

SEQ ID NO: 522459 - RNA, 19 nt, Artificial Sequence
  Description of Artificial Sequence: Synthetic oligonucleotide
uguugcuugucuuagauga

SEQ ID NO: 522460 - RNA, 19 nt, Artificial Sequence
  Description of Artificial Sequence: Synthetic oligonucleotide
ucuuagaugaauccgugag

SEQ ID NO: 522461 - RNA, 19 nt, Artificial Sequence
  Description of Artificial Sequence: Synthetic oligonucleotide
aaaaccuaguauuccuggc

SEQ ID NO: 522462 - RNA, 19 nt, Artificial Sequence
  Description of Artificial Sequence: Synthetic oligonucleotide
agugcaagcauugaugucc

SEQ ID NO: 522463 - RNA, 19 nt, Artificial Sequence
  Description of Artificial Sequence: Synthetic oligonucleotide
ugucauauagcccaugaac

SEQ ID NO: 522464 - RNA, 19 nt, Artificial Sequence
  Description of Artificial Sequence: Synthetic oligonucleotide
ucaauuagcuggaacaucu

SEQ ID NO: 522465 - RNA, 19 nt, Artificial Sequence
  Description of Artificial Sequence: Synthetic oligonucleotide
gacgcauugucaaagaagg

SEQ ID NO: 522466 - RNA, 19 nt, Artificial Sequence
  Description of Artificial Sequence: Synthetic oligonucleotide
aaagccauugcugaucgac

SEQ ID NO: 522467 - RNA, 19 nt, Artificial Sequence
  Description of Artificial Sequence: Synthetic oligonucleotide
cauaguagguacuugguag

SEQ ID NO: 522468 - RNA, 19 nt, Artificial Sequence
  Description of Artificial Sequence: Synthetic oligonucleotide
aaugccauaggaguagacg

SEQ ID NO: 522469 - RNA, 19 nt, Artificial Sequence
  Description of Artificial Sequence: Synthetic oligonucleotide
auaguagguacuugguagc

SEQ ID NO: 522470 - RNA, 19 nt, Artificial Sequence
  Description of Artificial Sequence: Synthetic oligonucleotide
ugauuuucggcagagagug

SEQ ID NO: 522471 - RNA, 19 nt, Artificial Sequence
  Description of Artificial Sequence: Synthetic oligonucleotide
auuuggaaacagcaagagc

SEQ ID NO: 522472 - RNA, 19 nt, Artificial Sequence
  Description of Artificial Sequence: Synthetic oligonucleotide
aagaaaaccuaguauuccu

SEQ ID NO: 522473 - RNA, 19 nt, Artificial Sequence
  Description of Artificial Sequence: Synthetic oligonucleotide
ucgaauugcauccucaauc

SEQ ID NO: 522474 - RNA, 19 nt, Artificial Sequence
  Description of Artificial Sequence: Synthetic oligonucleotide
ugaucgacuuccaagcucc

SEQ ID NO: 522475 - RNA, 19 nt, Artificial Sequence
  Description of Artificial Sequence: Synthetic oligonucleotide
acugcaacaucuccgugcc

SEQ ID NO: 522476 - RNA, 19 nt, Artificial Sequence
  Description of Artificial Sequence: Synthetic oligonucleotide
agaagaucaggcuagcaug

SEQ ID NO: 522477 - RNA, 19 nt, Artificial Sequence
  Description of Artificial Sequence: Synthetic oligonucleotide
uucgcaugcaaauagucca

SEQ ID NO: 522478 - RNA, 19 nt, Artificial Sequence
  Description of Artificial Sequence: Synthetic oligonucleotide
gugacuucgaauugcaucc

SEQ ID NO: 522479 - RNA, 19 nt, Artificial Sequence
  Description of Artificial Sequence: Synthetic oligonucleotide
cuuacagacaaggaugugg

SEQ ID NO: 522480 - RNA, 19 nt, Artificial Sequence
  Description of Artificial Sequence: Synthetic oligonucleotide
ucucgauuguugaugugcg

SEQ ID NO: 522481 - RNA, 19 nt, Artificial Sequence
  Description of Artificial Sequence: Synthetic oligonucleotide
guaugugcuccauugaugc

SEQ ID NO: 522482 - RNA, 19 nt, Artificial Sequence
  Description of Artificial Sequence: Synthetic oligonucleotide
auaggaguagacgucagac

SEQ ID NO: 522483 - RNA, 19 nt, Artificial Sequence
  Description of Artificial Sequence: Synthetic oligonucleotide
uuauucggcaagaaaacuc

SEQ ID NO: 522484 - RNA, 19 nt, Artificial Sequence
  Description of Artificial Sequence: Synthetic oligonucleotide
uuugucauauagcccauga

SEQ ID NO: 522485 - RNA, 19 nt, Artificial Sequence
  Description of Artificial Sequence: Synthetic oligonucleotide
agagggaaccuucagagga

SEQ ID NO: 522486 - RNA, 19 nt, Artificial Sequence
  Description of Artificial Sequence: Synthetic oligonucleotide
gauuucaugucucugugga

SEQ ID NO: 522487 - RNA, 19 nt, Artificial Sequence
  Description of Artificial Sequence: Synthetic oligonucleotide
uuuacugcaacaucuccgu

SEQ ID NO: 522488 - RNA, 19 nt, Artificial Sequence
  Description of Artificial Sequence: Synthetic oligonucleotide
aaauaccgcaucuuugagu

SEQ ID NO: 522489 - RNA, 19 nt, Artificial Sequence
  Description of Artificial Sequence: Synthetic oligonucleotide
gaaacuuguagauuccgca

SEQ ID NO: 522490 - RNA, 19 nt, Artificial Sequence
  Description of Artificial Sequence: Synthetic oligonucleotide
gaucaggcuagcauggugg

SEQ ID NO: 522491 - RNA, 19 nt, Artificial Sequence
  Description of Artificial Sequence: Synthetic oligonucleotide
acucgaauaguguugcuug

SEQ ID NO: 522492 - RNA, 19 nt, Artificial Sequence
  Description of Artificial Sequence: Synthetic oligonucleotide
auuguuggauuucaugucu

SEQ ID NO: 522493 - RNA, 19 nt, Artificial Sequence
  Description of Artificial Sequence: Synthetic oligonucleotide
cauugaugcaguuuaaaca

SEQ ID NO: 522494 - RNA, 19 nt, Artificial Sequence
  Description of Artificial Sequence: Synthetic oligonucleotide
uuauccugcauucggauua

SEQ ID NO: 522495 - RNA, 19 nt, Artificial Sequence
  Description of Artificial Sequence: Synthetic oligonucleotide
aaacggguuguuauccugc

SEQ ID NO: 522496 - RNA, 19 nt, Artificial Sequence
  Description of Artificial Sequence: Synthetic oligonucleotide
agcuagaagacagguagcc

SEQ ID NO: 522497 - RNA, 19 nt, Artificial Sequence
  Description of Artificial Sequence: Synthetic oligonucleotide
ucagcugacuuguauaccu

SEQ ID NO: 522498 - RNA, 19 nt, Artificial Sequence
  Description of Artificial Sequence: Synthetic oligonucleotide
gaaaacucgaauaguguug

SEQ ID NO: 522499 - RNA, 19 nt, Artificial Sequence
  Description of Artificial Sequence: Synthetic oligonucleotide
uuuuaggcugcgaccaucc

SEQ ID NO: 522500 - RNA, 19 nt, Artificial Sequence
  Description of Artificial Sequence: Synthetic oligonucleotide
ugaaaacaugcauucugcc

SEQ ID NO: 522501 - RNA, 19 nt, Artificial Sequence
  Description of Artificial Sequence: Synthetic oligonucleotide
uucuuacagacaaggaugu

SEQ ID NO: 522502 - RNA, 19 nt, Artificial Sequence
  Description of Artificial Sequence: Synthetic oligonucleotide
aauaguguugcuugucuua

SEQ ID NO: 522503 - RNA, 19 nt, Artificial Sequence
  Description of Artificial Sequence: Synthetic oligonucleotide
uguuuugcgcaagacagcc

SEQ ID NO: 522504 - RNA, 19 nt, Artificial Sequence
  Description of Artificial Sequence: Synthetic oligonucleotide
uuuaggaucuuuacugcaa

SEQ ID NO: 522505 - RNA, 19 nt, Artificial Sequence
  Description of Artificial Sequence: Synthetic oligonucleotide
agggguuuuaggcugcgac

SEQ ID NO: 522506 - RNA, 19 nt, Artificial Sequence
  Description of Artificial Sequence: Synthetic oligonucleotide
agauuccgcacauugacca

SEQ ID NO: 522507 - RNA, 19 nt, Artificial Sequence
  Description of Artificial Sequence: Synthetic oligonucleotide
gaagaucaggcuagcaugg

SEQ ID NO: 522508 - RNA, 19 nt, Artificial Sequence
  Description of Artificial Sequence: Synthetic oligonucleotide
ugggacuccgcuaucacca

SEQ ID NO: 522509 - RNA, 19 nt, Artificial Sequence
  Description of Artificial Sequence: Synthetic oligonucleotide
agagugcaagcauugaugu

SEQ ID NO: 522510 - RNA, 19 nt, Artificial Sequence
  Description of Artificial Sequence: Synthetic oligonucleotide
cuucgcaugcaaauagucc

SEQ ID NO: 522511 - RNA, 19 nt, Artificial Sequence
  Description of Artificial Sequence: Synthetic oligonucleotide
guagauuccgcacauugac

SEQ ID NO: 522512 - RNA, 19 nt, Artificial Sequence
  Description of Artificial Sequence: Synthetic oligonucleotide
aggauauuaacaugccgug

SEQ ID NO: 522513 - RNA, 19 nt, Artificial Sequence
  Description of Artificial Sequence: Synthetic oligonucleotide
guucuucgcaugcaaauag

SEQ ID NO: 522514 - RNA, 19 nt, Artificial Sequence
  Description of Artificial Sequence: Synthetic oligonucleotide
agaaaacucgaauaguguu

SEQ ID NO: 522515 - RNA, 19 nt, Artificial Sequence
  Description of Artificial Sequence: Synthetic oligonucleotide
ugggucaaccacuuuuagg

SEQ ID NO: 522516 - RNA, 19 nt, Artificial Sequence
  Description of Artificial Sequence: Synthetic oligonucleotide
ggaacuagcaggcauccgg

SEQ ID NO: 522517 - RNA, 19 nt, Artificial Sequence
  Description of Artificial Sequence: Synthetic oligonucleotide
ugucugucgggcaauguca

SEQ ID NO: 522518 - RNA, 19 nt, Artificial Sequence
  Description of Artificial Sequence: Synthetic oligonucleotide
aagcuaaacggguuguuau

SEQ ID NO: 522519 - RNA, 19 nt, Artificial Sequence
  Description of Artificial Sequence: Synthetic oligonucleotide
uuggauuucaugucucugu

SEQ ID NO: 522520 - RNA, 19 nt, Artificial Sequence
  Description of Artificial Sequence: Synthetic oligonucleotide
ugcaaauaguccauucccu

SEQ ID NO: 522521 - RNA, 19 nt, Artificial Sequence
  Description of Artificial Sequence: Synthetic oligonucleotide
uguagauuccgcacauuga

SEQ ID NO: 522522 - RNA, 19 nt, Artificial Sequence
  Description of Artificial Sequence: Synthetic oligonucleotide
uuuauagagacugcugccu

SEQ ID NO: 522523 - RNA, 19 nt, Artificial Sequence
  Description of Artificial Sequence: Synthetic oligonucleotide
guagcuacagugcucauga

SEQ ID NO: 522524 - RNA, 19 nt, Artificial Sequence
  Description of Artificial Sequence: Synthetic oligonucleotide
ugagguguggaguaucugu

SEQ ID NO: 522525 - RNA, 19 nt, Artificial Sequence
  Description of Artificial Sequence: Synthetic oligonucleotide
uggauuucaugucucugug

SEQ ID NO: 522526 - RNA, 19 nt, Artificial Sequence
  Description of Artificial Sequence: Synthetic oligonucleotide
agugugggccgcccgaugc

SEQ ID NO: 522527 - RNA, 19 nt, Artificial Sequence
  Description of Artificial Sequence: Synthetic oligonucleotide
uuaggaucuuuacugcaac

SEQ ID NO: 522528 - RNA, 19 nt, Artificial Sequence
  Description of Artificial Sequence: Synthetic oligonucleotide
ucgauuguugaugugcgag

SEQ ID NO: 522529 - RNA, 19 nt, Artificial Sequence
  Description of Artificial Sequence: Synthetic oligonucleotide
aucuccgugccacuugccc

SEQ ID NO: 522530 - RNA, 19 nt, Artificial Sequence
  Description of Artificial Sequence: Synthetic oligonucleotide
uauuguuggauuucauguc

SEQ ID NO: 522531 - RNA, 19 nt, Artificial Sequence
  Description of Artificial Sequence: Synthetic oligonucleotide
cuagagauaggcugggcug

SEQ ID NO: 522532 - RNA, 19 nt, Artificial Sequence
  Description of Artificial Sequence: Synthetic oligonucleotide
acaucuccgugccacuugc

SEQ ID NO: 522533 - RNA, 19 nt, Artificial Sequence
  Description of Artificial Sequence: Synthetic oligonucleotide
gcugcgaccauccuguugg

SEQ ID NO: 522534 - RNA, 19 nt, Artificial Sequence
  Description of Artificial Sequence: Synthetic oligonucleotide
uuagaugaauccgugaguu

SEQ ID NO: 522535 - RNA, 19 nt, Artificial Sequence
  Description of Artificial Sequence: Synthetic oligonucleotide
agauucagcgugugggagg

SEQ ID NO: 522536 - RNA, 19 nt, Artificial Sequence
  Description of Artificial Sequence: Synthetic oligonucleotide
acuuaaaaccugagggagc

SEQ ID NO: 522537 - RNA, 19 nt, Artificial Sequence
  Description of Artificial Sequence: Synthetic oligonucleotide
uguagagccugcuaagauc

SEQ ID NO: 522538 - RNA, 19 nt, Artificial Sequence
  Description of Artificial Sequence: Synthetic oligonucleotide
ugacuuguauaccucugga

SEQ ID NO: 522539 - RNA, 19 nt, Artificial Sequence
  Description of Artificial Sequence: Synthetic oligonucleotide
cagagugcaagcauugaug

SEQ ID NO: 522540 - RNA, 19 nt, Artificial Sequence
  Description of Artificial Sequence: Synthetic oligonucleotide
guagguacuugguagcuac

SEQ ID NO: 522541 - RNA, 19 nt, Artificial Sequence
  Description of Artificial Sequence: Synthetic oligonucleotide
aguaauagcuugaaucucu

SEQ ID NO: 522542 - RNA, 19 nt, Artificial Sequence
  Description of Artificial Sequence: Synthetic oligonucleotide
ugucugauauuacuccagu

SEQ ID NO: 522543 - RNA, 19 nt, Artificial Sequence
  Description of Artificial Sequence: Synthetic oligonucleotide
ucuucgcaugcaaauaguc

SEQ ID NO: 522544 - RNA, 19 nt, Artificial Sequence
  Description of Artificial Sequence: Synthetic oligonucleotide
gggucaaccacuuuuagga

SEQ ID NO: 522545 - RNA, 19 nt, Artificial Sequence
  Description of Artificial Sequence: Synthetic oligonucleotide
aaguuaaggccuugugagu

SEQ ID NO: 522546 - RNA, 19 nt, Artificial Sequence
  Description of Artificial Sequence: Synthetic oligonucleotide
ugauauuacuccaguccac

SEQ ID NO: 522547 - RNA, 19 nt, Artificial Sequence
  Description of Artificial Sequence: Synthetic oligonucleotide
ucggcaagaaaacucgaau

SEQ ID NO: 522548 - RNA, 19 nt, Artificial Sequence
  Description of Artificial Sequence: Synthetic oligonucleotide
uuguuauccugcauucgga

SEQ ID NO: 522549 - RNA, 19 nt, Artificial Sequence
  Description of Artificial Sequence: Synthetic oligonucleotide
auccaauccgaguggacag

SEQ ID NO: 522550 - RNA, 19 nt, Artificial Sequence
  Description of Artificial Sequence: Synthetic oligonucleotide
gauaggcugggcugcagcc

SEQ ID NO: 522551 - RNA, 19 nt, Artificial Sequence
  Description of Artificial Sequence: Synthetic oligonucleotide
ucagaggcgcuccuguuga

SEQ ID NO: 522552 - RNA, 19 nt, Artificial Sequence
  Description of Artificial Sequence: Synthetic oligonucleotide
aacaucuccgugccacuug

SEQ ID NO: 522553 - RNA, 19 nt, Artificial Sequence
  Description of Artificial Sequence: Synthetic oligonucleotide
cuuugugcuggcacagggg

SEQ ID NO: 522554 - RNA, 19 nt, Artificial Sequence
  Description of Artificial Sequence: Synthetic oligonucleotide
gaacuagcaggcauccggg

SEQ ID NO: 522555 - RNA, 19 nt, Artificial Sequence
  Description of Artificial Sequence: Synthetic oligonucleotide
caguccacacacauaguag

SEQ ID NO: 522556 - RNA, 19 nt, Artificial Sequence
  Description of Artificial Sequence: Synthetic oligonucleotide
ucucgcauccgacgcauug

SEQ ID NO: 522557 - RNA, 19 nt, Artificial Sequence
  Description of Artificial Sequence: Synthetic oligonucleotide
ugcaacaucuccgugccac

SEQ ID NO: 522558 - RNA, 19 nt, Artificial Sequence
  Description of Artificial Sequence: Synthetic oligonucleotide
gucucgauuguugaugugc

SEQ ID NO: 522559 - RNA, 19 nt, Artificial Sequence
  Description of Artificial Sequence: Synthetic oligonucleotide
cuuccaagcucccuguaug

SEQ ID NO: 522560 - RNA, 19 nt, Artificial Sequence
  Description of Artificial Sequence: Synthetic oligonucleotide
aggagcccgauccaauccg

SEQ ID NO: 522561 - RNA, 19 nt, Artificial Sequence
  Description of Artificial Sequence: Synthetic oligonucleotide
ucaucugacgcccggcgcu

SEQ ID NO: 522562 - RNA, 19 nt, Artificial Sequence
  Description of Artificial Sequence: Synthetic oligonucleotide
uuguauaccucuggagaag

SEQ ID NO: 522563 - RNA, 19 nt, Artificial Sequence
  Description of Artificial Sequence: Synthetic oligonucleotide
uguuggauuucaugucucu

SEQ ID NO: 522564 - RNA, 19 nt, Artificial Sequence
  Description of Artificial Sequence: Synthetic oligonucleotide
caauuuucaccgugaggcc

SEQ ID NO: 522565 - RNA, 19 nt, Artificial Sequence
  Description of Artificial Sequence: Synthetic oligonucleotide
cugucugauauuacuccag

SEQ ID NO: 522566 - RNA, 19 nt, Artificial Sequence
  Description of Artificial Sequence: Synthetic oligonucleotide
ugcauucggauuacuucug

SEQ ID NO: 522567 - RNA, 19 nt, Artificial Sequence
  Description of Artificial Sequence: Synthetic oligonucleotide
uguuauccugcauucggau

SEQ ID NO: 522568 - RNA, 19 nt, Artificial Sequence
  Description of Artificial Sequence: Synthetic oligonucleotide
ugacgcccggcgcugauag

SEQ ID NO: 522569 - RNA, 19 nt, Artificial Sequence
  Description of Artificial Sequence: Synthetic oligonucleotide
guggccuaagaacagcuac

SEQ ID NO: 522570 - RNA, 19 nt, Artificial Sequence
  Description of Artificial Sequence: Synthetic oligonucleotide
uucuucgcaugcaaauagu

SEQ ID NO: 522571 - RNA, 19 nt, Artificial Sequence
  Description of Artificial Sequence: Synthetic oligonucleotide
uucggcaagaaaacucgaa

SEQ ID NO: 522572 - RNA, 19 nt, Artificial Sequence
  Description of Artificial Sequence: Synthetic oligonucleotide
gauccaauccgaguggaca

SEQ ID NO: 522573 - RNA, 19 nt, Artificial Sequence
  Description of Artificial Sequence: Synthetic oligonucleotide
aaccacuccagcgugacuu

SEQ ID NO: 522574 - RNA, 19 nt, Artificial Sequence
  Description of Artificial Sequence: Synthetic oligonucleotide
uaggaguagacgucagacu

SEQ ID NO: 522575 - RNA, 19 nt, Artificial Sequence
  Description of Artificial Sequence: Synthetic oligonucleotide
aacggguuguuauccugca

SEQ ID NO: 522576 - RNA, 19 nt, Artificial Sequence
  Description of Artificial Sequence: Synthetic oligonucleotide
aaacagacucucgcauccg

SEQ ID NO: 522577 - RNA, 19 nt, Artificial Sequence
  Description of Artificial Sequence: Synthetic oligonucleotide
uugaaucucucugcccacg

SEQ ID NO: 522578 - RNA, 19 nt, Artificial Sequence
  Description of Artificial Sequence: Synthetic oligonucleotide
uugucauauagcccaugaa

SEQ ID NO: 522579 - RNA, 19 nt, Artificial Sequence
  Description of Artificial Sequence: Synthetic oligonucleotide
ugucaauuagcuggaacau

SEQ ID NO: 522580 - RNA, 19 nt, Artificial Sequence
  Description of Artificial Sequence: Synthetic oligonucleotide
uagagauaggcugggcugc

SEQ ID NO: 522581 - RNA, 19 nt, Artificial Sequence
  Description of Artificial Sequence: Synthetic oligonucleotide
guugaccucugccucuggg

SEQ ID NO: 522582 - RNA, 19 nt, Artificial Sequence
  Description of Artificial Sequence: Synthetic oligonucleotide
uggucucgauuguugaugu

SEQ ID NO: 522583 - RNA, 19 nt, Artificial Sequence
  Description of Artificial Sequence: Synthetic oligonucleotide
acagauucagcguguggga

SEQ ID NO: 522584 - RNA, 19 nt, Artificial Sequence
  Description of Artificial Sequence: Synthetic oligonucleotide
gccaccucguuccugaagg

SEQ ID NO: 522585 - RNA, 19 nt, Artificial Sequence
  Description of Artificial Sequence: Synthetic oligonucleotide
uccgggaaacagacucucg

SEQ ID NO: 522586 - RNA, 19 nt, Artificial Sequence
  Description of Artificial Sequence: Synthetic oligonucleotide
acauaguagguacuuggua

SEQ ID NO: 522587 - RNA, 19 nt, Artificial Sequence
  Description of Artificial Sequence: Synthetic oligonucleotide
cacaaugccauaggaguag

SEQ ID NO: 522588 - RNA, 19 nt, Artificial Sequence
  Description of Artificial Sequence: Synthetic oligonucleotide
cugauucacugugacuucg

SEQ ID NO: 522589 - RNA, 19 nt, Artificial Sequence
  Description of Artificial Sequence: Synthetic oligonucleotide
uaccgcaucuuugagucca

SEQ ID NO: 522590 - RNA, 19 nt, Artificial Sequence
  Description of Artificial Sequence: Synthetic oligonucleotide
aggugaggcugauucacug

SEQ ID NO: 522591 - RNA, 19 nt, Artificial Sequence
  Description of Artificial Sequence: Synthetic oligonucleotide
uucgaauugcauccucaau

SEQ ID NO: 522592 - RNA, 19 nt, Artificial Sequence
  Description of Artificial Sequence: Synthetic oligonucleotide
auaccgcaucuuugagucc

SEQ ID NO: 522593 - RNA, 19 nt, Artificial Sequence
  Description of Artificial Sequence: Synthetic oligonucleotide
uaguccauucccugagcug

SEQ ID NO: 522594 - RNA, 19 nt, Artificial Sequence
  Description of Artificial Sequence: Synthetic oligonucleotide
ggauuucaugucucugugg

SEQ ID NO: 522595 - RNA, 19 nt, Artificial Sequence
  Description of Artificial Sequence: Synthetic oligonucleotide
acgcccggcgcugauagcc

SEQ ID NO: 522596 - RNA, 19 nt, Artificial Sequence
  Description of Artificial Sequence: Synthetic oligonucleotide
aacuagcaggcauccggga

SEQ ID NO: 522597 - RNA, 19 nt, Artificial Sequence
  Description of Artificial Sequence: Synthetic oligonucleotide
uuaaaaccugagggagccg

SEQ ID NO: 522598 - RNA, 19 nt, Artificial Sequence
  Description of Artificial Sequence: Synthetic oligonucleotide
uuugcgcaagacagccacc

SEQ ID NO: 522599 - RNA, 19 nt, Artificial Sequence
  Description of Artificial Sequence: Synthetic oligonucleotide
uucaaccugcugagaacca

SEQ ID NO: 522600 - RNA, 19 nt, Artificial Sequence
  Description of Artificial Sequence: Synthetic oligonucleotide
ccuacuucucuccaaggcc

SEQ ID NO: 522601 - RNA, 19 nt, Artificial Sequence
  Description of Artificial Sequence: Synthetic oligonucleotide
uuacugcaacaucuccgug

SEQ ID NO: 522602 - RNA, 19 nt, Artificial Sequence
  Description of Artificial Sequence: Synthetic oligonucleotide
uuccaagcucccuguaugu

SEQ ID NO: 522603 - RNA, 19 nt, Artificial Sequence
  Description of Artificial Sequence: Synthetic oligonucleotide
uaccucuggagaagaucag

SEQ ID NO: 522604 - RNA, 19 nt, Artificial Sequence
  Description of Artificial Sequence: Synthetic oligonucleotide
ugucgggcaaugucaauua

SEQ ID NO: 522605 - RNA, 19 nt, Artificial Sequence
  Description of Artificial Sequence: Synthetic oligonucleotide
cuugaaucucucugcccac

SEQ ID NO: 522606 - RNA, 19 nt, Artificial Sequence
  Description of Artificial Sequence: Synthetic oligonucleotide
gacaaggauguggcuagag

SEQ ID NO: 522607 - RNA, 19 nt, Artificial Sequence
  Description of Artificial Sequence: Synthetic oligonucleotide
uauccacggcccaccauga

SEQ ID NO: 522608 - RNA, 19 nt, Artificial Sequence
  Description of Artificial Sequence: Synthetic oligonucleotide
cugaucgacuuccaagcuc

SEQ ID NO: 522609 - RNA, 19 nt, Artificial Sequence
  Description of Artificial Sequence: Synthetic oligonucleotide
acacagucggccaccaauc

SEQ ID NO: 522610 - RNA, 19 nt, Artificial Sequence
  Description of Artificial Sequence: Synthetic oligonucleotide
uguucuucgcaugcaaaua

SEQ ID NO: 522611 - RNA, 19 nt, Artificial Sequence
  Description of Artificial Sequence: Synthetic oligonucleotide
ugggaacuagcaggcaucc

SEQ ID NO: 522612 - RNA, 19 nt, Artificial Sequence
  Description of Artificial Sequence: Synthetic oligonucleotide
cuggucucgauuguugaug

SEQ ID NO: 522613 - RNA, 19 nt, Artificial Sequence
  Description of Artificial Sequence: Synthetic oligonucleotide
cugggacuccgcuaucacc

SEQ ID NO: 522614 - RNA, 19 nt, Artificial Sequence
  Description of Artificial Sequence: Synthetic oligonucleotide
acuagcaggcauccgggaa

SEQ ID NO: 522615 - RNA, 19 nt, Artificial Sequence
  Description of Artificial Sequence: Synthetic oligonucleotide
ugcgaguagggaagcuccc

SEQ ID NO: 522616 - RNA, 19 nt, Artificial Sequence
  Description of Artificial Sequence: Synthetic oligonucleotide
gcuaaacggguuguuaucc

SEQ ID NO: 522617 - RNA, 19 nt, Artificial Sequence
  Description of Artificial Sequence: Synthetic oligonucleotide
ucggcagagagugcugaag

SEQ ID NO: 522618 - RNA, 19 nt, Artificial Sequence
  Description of Artificial Sequence: Synthetic oligonucleotide
aggcaacaugaaguuaagg

SEQ ID NO: 522619 - RNA, 19 nt, Artificial Sequence
  Description of Artificial Sequence: Synthetic oligonucleotide
auccgggaaacagacucuc

SEQ ID NO: 522620 - RNA, 19 nt, Artificial Sequence
  Description of Artificial Sequence: Synthetic oligonucleotide
ucaaccugcugagaaccac

SEQ ID NO: 522621 - RNA, 19 nt, Artificial Sequence
  Description of Artificial Sequence: Synthetic oligonucleotide
caaucauccugcuguccac

SEQ ID NO: 522622 - RNA, 19 nt, Artificial Sequence
  Description of Artificial Sequence: Synthetic oligonucleotide
ugugggaggcugcccgaag

SEQ ID NO: 522623 - RNA, 19 nt, Artificial Sequence
  Description of Artificial Sequence: Synthetic oligonucleotide
acuccgcuaucaccaacag

SEQ ID NO: 522624 - RNA, 19 nt, Artificial Sequence
  Description of Artificial Sequence: Synthetic oligonucleotide
uuucggcagagagugcuga

SEQ ID NO: 522625 - RNA, 19 nt, Artificial Sequence
  Description of Artificial Sequence: Synthetic oligonucleotide
gagcaccgugcuuggaaag

SEQ ID NO: 522626 - RNA, 19 nt, Artificial Sequence
  Description of Artificial Sequence: Synthetic oligonucleotide
uccgacgcauugucaaaga

SEQ ID NO: 522627 - RNA, 19 nt, Artificial Sequence
  Description of Artificial Sequence: Synthetic oligonucleotide
ucuggucucgauuguugau

SEQ ID NO: 522628 - RNA, 19 nt, Artificial Sequence
  Description of Artificial Sequence: Synthetic oligonucleotide
aagccauugcugaucgacu

SEQ ID NO: 522629 - RNA, 19 nt, Artificial Sequence
  Description of Artificial Sequence: Synthetic oligonucleotide
auccgacgcauugucaaag

SEQ ID NO: 522630 - RNA, 19 nt, Artificial Sequence
  Description of Artificial Sequence: Synthetic oligonucleotide
ucgcaugcaaauaguccau

SEQ ID NO: 522631 - RNA, 19 nt, Artificial Sequence
  Description of Artificial Sequence: Synthetic oligonucleotide
gaugugcgaguagggaagc

SEQ ID NO: 522632 - RNA, 19 nt, Artificial Sequence
  Description of Artificial Sequence: Synthetic oligonucleotide
guguggaguaucugugcug

SEQ ID NO: 522633 - RNA, 19 nt, Artificial Sequence
  Description of Artificial Sequence: Synthetic oligonucleotide
uggaagcuaaacggguugu

SEQ ID NO: 522634 - RNA, 19 nt, Artificial Sequence
  Description of Artificial Sequence: Synthetic oligonucleotide
guagagccugcuaagaucu

SEQ ID NO: 522635 - RNA, 19 nt, Artificial Sequence
  Description of Artificial Sequence: Synthetic oligonucleotide
ggaauuuggucuccuggac

SEQ ID NO: 522636 - RNA, 19 nt, Artificial Sequence
  Description of Artificial Sequence: Synthetic oligonucleotide
ccaccaaucucuucauugc

SEQ ID NO: 522637 - RNA, 19 nt, Artificial Sequence
  Description of Artificial Sequence: Synthetic oligonucleotide
gucuuagaugaauccguga

SEQ ID NO: 522638 - RNA, 19 nt, Artificial Sequence
  Description of Artificial Sequence: Synthetic oligonucleotide
acaugccguguuuugcgca

SEQ ID NO: 522639 - RNA, 19 nt, Artificial Sequence
  Description of Artificial Sequence: Synthetic oligonucleotide
ucuuacagacaaggaugug

SEQ ID NO: 522640 - RNA, 19 nt, Artificial Sequence
  Description of Artificial Sequence: Synthetic oligonucleotide
ucgaauaguguugcuuguc

SEQ ID NO: 522641 - RNA, 19 nt, Artificial Sequence
  Description of Artificial Sequence: Synthetic oligonucleotide
gugcccguucucuuugugc

SEQ ID NO: 522642 - RNA, 19 nt, Artificial Sequence
  Description of Artificial Sequence: Synthetic oligonucleotide
ucgcauccgacgcauuguc

SEQ ID NO: 522643 - RNA, 19 nt, Artificial Sequence
  Description of Artificial Sequence: Synthetic oligonucleotide
gaguagacgucagacugga

SEQ ID NO: 522644 - RNA, 19 nt, Artificial Sequence
  Description of Artificial Sequence: Synthetic oligonucleotide
aacaugaaguuaaggccuu

SEQ ID NO: 522645 - RNA, 19 nt, Artificial Sequence
  Description of Artificial Sequence: Synthetic oligonucleotide
cugcauucggauuacuucu

SEQ ID NO: 522646 - RNA, 19 nt, Artificial Sequence
  Description of Artificial Sequence: Synthetic oligonucleotide
gcuuauucggcaagaaaac

SEQ ID NO: 522647 - RNA, 19 nt, Artificial Sequence
  Description of Artificial Sequence: Synthetic oligonucleotide
cagcuacaucaucagcuag

SEQ ID NO: 522648 - RNA, 19 nt, Artificial Sequence
  Description of Artificial Sequence: Synthetic oligonucleotide
gaagcuaaacggguuguua

SEQ ID NO: 522649 - RNA, 19 nt, Artificial Sequence
  Description of Artificial Sequence: Synthetic oligonucleotide
guaauagcuugaaucucuc

SEQ ID NO: 522650 - RNA, 19 nt, Artificial Sequence
  Description of Artificial Sequence: Synthetic oligonucleotide
cagauucagcgugugggag

SEQ ID NO: 522651 - RNA, 19 nt, Artificial Sequence
  Description of Artificial Sequence: Synthetic oligonucleotide
agccauugcugaucgacuu

SEQ ID NO: 522652 - RNA, 19 nt, Artificial Sequence
  Description of Artificial Sequence: Synthetic oligonucleotide
gguuguuauccugcauucg

SEQ ID NO: 522653 - RNA, 19 nt, Artificial Sequence
  Description of Artificial Sequence: Synthetic oligonucleotide
uggagccaucaaauaccgc

SEQ ID NO: 522654 - RNA, 19 nt, Artificial Sequence
  Description of Artificial Sequence: Synthetic oligonucleotide
acgaggccuaauuuuguuu

SEQ ID NO: 522655 - RNA, 19 nt, Artificial Sequence
  Description of Artificial Sequence: Synthetic oligonucleotide
cuucgaauugcauccucaa

SEQ ID NO: 522656 - RNA, 19 nt, Artificial Sequence
  Description of Artificial Sequence: Synthetic oligonucleotide
gagugcaagcauugauguc

SEQ ID NO: 522657 - RNA, 19 nt, Artificial Sequence
  Description of Artificial Sequence: Synthetic oligonucleotide
gucaauuagcuggaacauc

SEQ ID NO: 522658 - RNA, 19 nt, Artificial Sequence
  Description of Artificial Sequence: Synthetic oligonucleotide
gcccgauccaauccgagug

SEQ ID NO: 522659 - RNA, 19 nt, Artificial Sequence
  Description of Artificial Sequence: Synthetic oligonucleotide
aaggugaggcugauucacu

SEQ ID NO: 522660 - RNA, 19 nt, Artificial Sequence
  Description of Artificial Sequence: Synthetic oligonucleotide
agaagacagguagccucgg

SEQ ID NO: 522661 - RNA, 19 nt, Artificial Sequence
  Description of Artificial Sequence: Synthetic oligonucleotide
caauuguuggagagaugca

SEQ ID NO: 522662 - RNA, 19 nt, Artificial Sequence
  Description of Artificial Sequence: Synthetic oligonucleotide
cuaagaacagcuacaucau

SEQ ID NO: 522663 - RNA, 19 nt, Artificial Sequence
  Description of Artificial Sequence: Synthetic oligonucleotide
uuacuccaguccacacaca

SEQ ID NO: 522664 - RNA, 19 nt, Artificial Sequence
  Description of Artificial Sequence: Synthetic oligonucleotide
uagaugaauccgugaguuu

SEQ ID NO: 522665 - RNA, 19 nt, Artificial Sequence
  Description of Artificial Sequence: Synthetic oligonucleotide
cuuagaugaauccgugagu

SEQ ID NO: 522666 - RNA, 19 nt, Artificial Sequence
  Description of Artificial Sequence: Synthetic oligonucleotide
gguccuuagcagcagcuuc

SEQ ID NO: 522667 - RNA, 19 nt, Artificial Sequence
  Description of Artificial Sequence: Synthetic oligonucleotide
ugccguguuuugcgcaaga

SEQ ID NO: 522668 - RNA, 19 nt, Artificial Sequence
  Description of Artificial Sequence: Synthetic oligonucleotide
agcccgauccaauccgagu

SEQ ID NO: 522669 - RNA, 19 nt, Artificial Sequence
  Description of Artificial Sequence: Synthetic oligonucleotide
agacgucagacuggaagcu

SEQ ID NO: 522670 - RNA, 19 nt, Artificial Sequence
  Description of Artificial Sequence: Synthetic oligonucleotide
uauccugcauucggauuac

SEQ ID NO: 522671 - RNA, 19 nt, Artificial Sequence
  Description of Artificial Sequence: Synthetic oligonucleotide
acacacauaguagguacuu

SEQ ID NO: 522672 - RNA, 19 nt, Artificial Sequence
  Description of Artificial Sequence: Synthetic oligonucleotide
gcugucugauauuacucca

SEQ ID NO: 522673 - RNA, 19 nt, Artificial Sequence
  Description of Artificial Sequence: Synthetic oligonucleotide
ccgggaaacagacucucgc

SEQ ID NO: 522674 - RNA, 19 nt, Artificial Sequence
  Description of Artificial Sequence: Synthetic oligonucleotide
gauuuucggcagagagugc

SEQ ID NO: 522675 - RNA, 19 nt, Artificial Sequence
  Description of Artificial Sequence: Synthetic oligonucleotide
cgacgcauugucaaagaag

SEQ ID NO: 522676 - RNA, 19 nt, Artificial Sequence
  Description of Artificial Sequence: Synthetic oligonucleotide
gaauaguguugcuugucuu

SEQ ID NO: 522677 - RNA, 19 nt, Artificial Sequence
  Description of Artificial Sequence: Synthetic oligonucleotide
cugcuaagaucuggggaag

SEQ ID NO: 522678 - RNA, 19 nt, Artificial Sequence
  Description of Artificial Sequence: Synthetic oligonucleotide
cccacgaggccuaauuuug

SEQ ID NO: 522679 - RNA, 19 nt, Artificial Sequence
  Description of Artificial Sequence: Synthetic oligonucleotide
agguagugcugggacuccg

SEQ ID NO: 522680 - RNA, 19 nt, Artificial Sequence
  Description of Artificial Sequence: Synthetic oligonucleotide
guuuuaggcugcgaccauc

SEQ ID NO: 522681 - RNA, 19 nt, Artificial Sequence
  Description of Artificial Sequence: Synthetic oligonucleotide
ugcccacgaggccuaauuu

SEQ ID NO: 522682 - RNA, 19 nt, Artificial Sequence
  Description of Artificial Sequence: Synthetic oligonucleotide
ugacuucgaauugcauccu

SEQ ID NO: 522683 - RNA, 19 nt, Artificial Sequence
  Description of Artificial Sequence: Synthetic oligonucleotide
caagagcugucugauauua

SEQ ID NO: 522684 - RNA, 19 nt, Artificial Sequence
  Description of Artificial Sequence: Synthetic oligonucleotide
auccgugaguuugccauca

SEQ ID NO: 522685 - RNA, 19 nt, Artificial Sequence
  Description of Artificial Sequence: Synthetic oligonucleotide
ggguuuuaggcugcgacca

SEQ ID NO: 522686 - RNA, 19 nt, Artificial Sequence
  Description of Artificial Sequence: Synthetic oligonucleotide
accuaguauuccuggcuuu

SEQ ID NO: 522687 - RNA, 19 nt, Artificial Sequence
  Description of Artificial Sequence: Synthetic oligonucleotide
gcgugugggaggcugcccg

SEQ ID NO: 522688 - RNA, 19 nt, Artificial Sequence
  Description of Artificial Sequence: Synthetic oligonucleotide
uucggcagagagugcugaa

SEQ ID NO: 522689 - RNA, 19 nt, Artificial Sequence
  Description of Artificial Sequence: Synthetic oligonucleotide
gacucucgcauccgacgca

SEQ ID NO: 522690 - RNA, 19 nt, Artificial Sequence
  Description of Artificial Sequence: Synthetic oligonucleotide
cgaauugcauccucaauca

SEQ ID NO: 522691 - RNA, 19 nt, Artificial Sequence
  Description of Artificial Sequence: Synthetic oligonucleotide
acaugaaguuaaggccuug

SEQ ID NO: 522692 - RNA, 19 nt, Artificial Sequence
  Description of Artificial Sequence: Synthetic oligonucleotide
ggccgcccgaugcagagag

SEQ ID NO: 522693 - RNA, 19 nt, Artificial Sequence
  Description of Artificial Sequence: Synthetic oligonucleotide
gcugaacaauuguuggaga

SEQ ID NO: 522694 - RNA, 19 nt, Artificial Sequence
  Description of Artificial Sequence: Synthetic oligonucleotide
ggggccauccauagcacag

SEQ ID NO: 522695 - RNA, 19 nt, Artificial Sequence
  Description of Artificial Sequence: Synthetic oligonucleotide
gcuagagauaggcugggcu

SEQ ID NO: 522696 - RNA, 19 nt, Artificial Sequence
  Description of Artificial Sequence: Synthetic oligonucleotide
aguagguacuugguagcua

SEQ ID NO: 522697 - RNA, 19 nt, Artificial Sequence
  Description of Artificial Sequence: Synthetic oligonucleotide
ugcgcaagacagccaccuc

SEQ ID NO: 522698 - RNA, 19 nt, Artificial Sequence
  Description of Artificial Sequence: Synthetic oligonucleotide
gagcccgauccaauccgag

SEQ ID NO: 522699 - RNA, 19 nt, Artificial Sequence
  Description of Artificial Sequence: Synthetic oligonucleotide
ggacguugaccucugccuc

SEQ ID NO: 522700 - RNA, 19 nt, Artificial Sequence
  Description of Artificial Sequence: Synthetic oligonucleotide
ucugucgggcaaugucaau

SEQ ID NO: 522701 - RNA, 19 nt, Artificial Sequence
  Description of Artificial Sequence: Synthetic oligonucleotide
gacguugaccucugccucu

SEQ ID NO: 522702 - RNA, 19 nt, Artificial Sequence
  Description of Artificial Sequence: Synthetic oligonucleotide
cuaaacggguuguuauccu

SEQ ID NO: 522703 - RNA, 19 nt, Artificial Sequence
  Description of Artificial Sequence: Synthetic oligonucleotide
caagcucccuguaugugcu

SEQ ID NO: 522704 - RNA, 19 nt, Artificial Sequence
  Description of Artificial Sequence: Synthetic oligonucleotide
cucgauuguugaugugcga

SEQ ID NO: 522705 - RNA, 19 nt, Artificial Sequence
  Description of Artificial Sequence: Synthetic oligonucleotide
caugccguguuuugcgcaa

SEQ ID NO: 522706 - RNA, 19 nt, Artificial Sequence
  Description of Artificial Sequence: Synthetic oligonucleotide
gguugggucaaccacuuuu

SEQ ID NO: 522707 - RNA, 19 nt, Artificial Sequence
  Description of Artificial Sequence: Synthetic oligonucleotide
agugccaaaggagcccgau

SEQ ID NO: 522708 - RNA, 19 nt, Artificial Sequence
  Description of Artificial Sequence: Synthetic oligonucleotide
gccggugggcuguucaacc

SEQ ID NO: 522709 - RNA, 19 nt, Artificial Sequence
  Description of Artificial Sequence: Synthetic oligonucleotide
aucagcuagaagacaggua

SEQ ID NO: 522710 - RNA, 19 nt, Artificial Sequence
  Description of Artificial Sequence: Synthetic oligonucleotide
gaucgacuuccaagcuccc

SEQ ID NO: 522711 - RNA, 19 nt, Artificial Sequence
  Description of Artificial Sequence: Synthetic oligonucleotide
gcugacuuguauaccucug

SEQ ID NO: 522712 - RNA, 19 nt, Artificial Sequence
  Description of Artificial Sequence: Synthetic oligonucleotide
cccgauccaauccgagugg

SEQ ID NO: 522713 - RNA, 19 nt, Artificial Sequence
  Description of Artificial Sequence: Synthetic oligonucleotide
cugcgaccauccuguuggg

SEQ ID NO: 522714 - RNA, 19 nt, Artificial Sequence
  Description of Artificial Sequence: Synthetic oligonucleotide
gaguggacguugaccucug

SEQ ID NO: 522715 - RNA, 19 nt, Artificial Sequence
  Description of Artificial Sequence: Synthetic oligonucleotide
gguguggaguaucugugcu

SEQ ID NO: 522716 - RNA, 19 nt, Artificial Sequence
  Description of Artificial Sequence: Synthetic oligonucleotide
uccgcacauugaccacugu

SEQ ID NO: 522717 - RNA, 19 nt, Artificial Sequence
  Description of Artificial Sequence: Synthetic oligonucleotide
auguggcuagagauaggcu

SEQ ID NO: 522718 - RNA, 19 nt, Artificial Sequence
  Description of Artificial Sequence: Synthetic oligonucleotide
acucucgcauccgacgcau

SEQ ID NO: 522719 - RNA, 19 nt, Artificial Sequence
  Description of Artificial Sequence: Synthetic oligonucleotide
guuauccugcauucggauu

SEQ ID NO: 522720 - RNA, 19 nt, Artificial Sequence
  Description of Artificial Sequence: Synthetic oligonucleotide
cacacagucggccaccaau

SEQ ID NO: 522721 - RNA, 19 nt, Artificial Sequence
  Description of Artificial Sequence: Synthetic oligonucleotide
ccgcuaucaccaacagugg

SEQ ID NO: 522722 - RNA, 19 nt, Artificial Sequence
  Description of Artificial Sequence: Synthetic oligonucleotide
gccuugugaguagucuagg

SEQ ID NO: 522723 - RNA, 19 nt, Artificial Sequence
  Description of Artificial Sequence: Synthetic oligonucleotide
acgccgggucccgucgugc

SEQ ID NO: 522724 - RNA, 19 nt, Artificial Sequence
  Description of Artificial Sequence: Synthetic oligonucleotide
cucgaauaguguugcuugu

SEQ ID NO: 522725 - RNA, 19 nt, Artificial Sequence
  Description of Artificial Sequence: Synthetic oligonucleotide
guagguguuuauagagacu

SEQ ID NO: 522726 - RNA, 19 nt, Artificial Sequence
  Description of Artificial Sequence: Synthetic oligonucleotide
acgcauugucaaagaaggu

SEQ ID NO: 522727 - RNA, 19 nt, Artificial Sequence
  Description of Artificial Sequence: Synthetic oligonucleotide
uccgugaguuugccaucau

SEQ ID NO: 522728 - RNA, 19 nt, Artificial Sequence
  Description of Artificial Sequence: Synthetic oligonucleotide
ucugacgcccggcgcugau

SEQ ID NO: 522729 - RNA, 19 nt, Artificial Sequence
  Description of Artificial Sequence: Synthetic oligonucleotide
cauccgacgcauugucaaa

SEQ ID NO: 522730 - RNA, 19 nt, Artificial Sequence
  Description of Artificial Sequence: Synthetic oligonucleotide
guagugcugggacuccgcu

SEQ ID NO: 522731 - RNA, 19 nt, Artificial Sequence
  Description of Artificial Sequence: Synthetic oligonucleotide
ccgcccgaugcagagaggg

SEQ ID NO: 522732 - RNA, 19 nt, Artificial Sequence
  Description of Artificial Sequence: Synthetic oligonucleotide
gagccaucaaauaccgcau

SEQ ID NO: 522733 - RNA, 19 nt, Artificial Sequence
  Description of Artificial Sequence: Synthetic oligonucleotide
ccgcacauugaccacuguc

SEQ ID NO: 522734 - RNA, 19 nt, Artificial Sequence
  Description of Artificial Sequence: Synthetic oligonucleotide
gguagugcugggacuccgc

SEQ ID NO: 522735 - RNA, 19 nt, Artificial Sequence
  Description of Artificial Sequence: Synthetic oligonucleotide
ggucucgauuguugaugug

SEQ ID NO: 522736 - RNA, 19 nt, Artificial Sequence
  Description of Artificial Sequence: Synthetic oligonucleotide
gggaaacagacucucgcau

SEQ ID NO: 522737 - RNA, 19 nt, Artificial Sequence
  Description of Artificial Sequence: Synthetic oligonucleotide
ccgaguggacagcaucacc

SEQ ID NO: 522738 - RNA, 19 nt, Artificial Sequence
  Description of Artificial Sequence: Synthetic oligonucleotide
caucugacgcccggcgcug

SEQ ID NO: 522739 - RNA, 19 nt, Artificial Sequence
  Description of Artificial Sequence: Synthetic oligonucleotide
augccguguuuugcgcaag

SEQ ID NO: 522740 - RNA, 19 nt, Artificial Sequence
  Description of Artificial Sequence: Synthetic oligonucleotide
augugcgaguagggaagcu

SEQ ID NO: 522741 - RNA, 19 nt, Artificial Sequence
  Description of Artificial Sequence: Synthetic oligonucleotide
ggucccgucgugcggcggc

SEQ ID NO: 522742 - RNA, 19 nt, Artificial Sequence
  Description of Artificial Sequence: Synthetic oligonucleotide
gcugggacuccgcuaucac

SEQ ID NO: 522743 - RNA, 19 nt, Artificial Sequence
  Description of Artificial Sequence: Synthetic oligonucleotide
agacaaggauguggcuaga

SEQ ID NO: 522744 - RNA, 19 nt, Artificial Sequence
  Description of Artificial Sequence: Synthetic oligonucleotide
gagccggugggcuguucaa

SEQ ID NO: 522745 - RNA, 19 nt, Artificial Sequence
  Description of Artificial Sequence: Synthetic oligonucleotide
cagcgugugggaggcugcc

SEQ ID NO: 522746 - RNA, 19 nt, Artificial Sequence
  Description of Artificial Sequence: Synthetic oligonucleotide
ucguuccugaaggccugaa

SEQ ID NO: 522747 - RNA, 19 nt, Artificial Sequence
  Description of Artificial Sequence: Synthetic oligonucleotide
gacgcccggcgcugauagc

SEQ ID NO: 522748 - RNA, 19 nt, Artificial Sequence
  Description of Artificial Sequence: Synthetic oligonucleotide
gcgaguagggaagcucccc

SEQ ID NO: 522749 - RNA, 19 nt, Artificial Sequence
  Description of Artificial Sequence: Synthetic oligonucleotide
ggaguggacguugaccucu

SEQ ID NO: 522750 - RNA, 19 nt, Artificial Sequence
  Description of Artificial Sequence: Synthetic oligonucleotide
ugguagcuacagugcucau

SEQ ID NO: 522751 - RNA, 19 nt, Artificial Sequence
  Description of Artificial Sequence: Synthetic oligonucleotide
uccgugccacuugcccuug

SEQ ID NO: 522752 - RNA, 19 nt, Artificial Sequence
  Description of Artificial Sequence: Synthetic oligonucleotide
cugagggagccgggccacg

SEQ ID NO: 522753 - RNA, 19 nt, Artificial Sequence
  Description of Artificial Sequence: Synthetic oligonucleotide
ucccgucgugcggcggcgg

SEQ ID NO: 522754 - RNA, 19 nt, Artificial Sequence
  Description of Artificial Sequence: Synthetic oligonucleotide
ccgugaguuugccaucauc

SEQ ID NO: 522755 - RNA, 19 nt, Artificial Sequence
  Description of Artificial Sequence: Synthetic oligonucleotide
cgcauugucaaagaaggua

SEQ ID NO: 522756 - RNA, 19 nt, Artificial Sequence
  Description of Artificial Sequence: Synthetic oligonucleotide
gucccgucgugcggcggcg

SEQ ID NO: 522757 - RNA, 19 nt, Artificial Sequence
  Description of Artificial Sequence: Synthetic oligonucleotide
cugucgggcaaugucaauu

SEQ ID NO: 522758 - RNA, 19 nt, Artificial Sequence
  Description of Artificial Sequence: Synthetic oligonucleotide
ggcgcuccuguugauuuuc

SEQ ID NO: 522759 - RNA, 19 nt, Artificial Sequence
  Description of Artificial Sequence: Synthetic oligonucleotide
gaaccacuccagcgugacu

SEQ ID NO: 522760 - RNA, 19 nt, Artificial Sequence
  Description of Artificial Sequence: Synthetic oligonucleotide
gcugaucgacuuccaagcu

SEQ ID NO: 522761 - RNA, 19 nt, Artificial Sequence
  Description of Artificial Sequence: Synthetic oligonucleotide
gggaguggacguugaccuc

SEQ ID NO: 522762 - RNA, 19 nt, Artificial Sequence
  Description of Artificial Sequence: Synthetic oligonucleotide
auccugcauucggauuacu

SEQ ID NO: 522763 - RNA, 19 nt, Artificial Sequence
  Description of Artificial Sequence: Synthetic oligonucleotide
gccguguuuugcgcaagac

SEQ ID NO: 522764 - RNA, 19 nt, Artificial Sequence
  Description of Artificial Sequence: Synthetic oligonucleotide
cacgccgggucccgucgug

SEQ ID NO: 522765 - RNA, 19 nt, Artificial Sequence
  Description of Artificial Sequence: Synthetic oligonucleotide
cacgaggccuaauuuuguu

SEQ ID NO: 522766 - RNA, 19 nt, Artificial Sequence
  Description of Artificial Sequence: Synthetic oligonucleotide
cgaauaguguugcuugucu

SEQ ID NO: 522767 - RNA, 19 nt, Artificial Sequence
  Description of Artificial Sequence: Synthetic oligonucleotide
cgauccaauccgaguggac

SEQ ID NO: 522768 - RNA, 19 nt, Artificial Sequence
  Description of Artificial Sequence: Synthetic oligonucleotide
ggccuaagaacagcuacau

SEQ ID NO: 522769 - RNA, 19 nt, Artificial Sequence
  Description of Artificial Sequence: Synthetic oligonucleotide
cucgcauccgacgcauugu

SEQ ID NO: 522770 - RNA, 19 nt, Artificial Sequence
  Description of Artificial Sequence: Synthetic oligonucleotide
ccgugcuuggaaagccauc

SEQ ID NO: 522771 - RNA, 19 nt, Artificial Sequence
  Description of Artificial Sequence: Synthetic oligonucleotide
cuccgcuaucaccaacagu

SEQ ID NO: 522772 - RNA, 19 nt, Artificial Sequence
  Description of Artificial Sequence: Synthetic oligonucleotide
guauaccucuggagaagau

SEQ ID NO: 522773 - RNA, 19 nt, Artificial Sequence
  Description of Artificial Sequence: Synthetic oligonucleotide
ggagcccgauccaauccga

SEQ ID NO: 522774 - RNA, 19 nt, Artificial Sequence
  Description of Artificial Sequence: Synthetic oligonucleotide
gguggccuaagaacagcua

SEQ ID NO: 522775 - RNA, 19 nt, Artificial Sequence
  Description of Artificial Sequence: Synthetic oligonucleotide
cgcuaucaccaacagugga

SEQ ID NO: 522776 - RNA, 19 nt, Artificial Sequence
  Description of Artificial Sequence: Synthetic oligonucleotide
cugcaacaucuccgugcca

SEQ ID NO: 522777 - RNA, 19 nt, Artificial Sequence
  Description of Artificial Sequence: Synthetic oligonucleotide
ccccgucaucagcucauac

SEQ ID NO: 522778 - RNA, 19 nt, Artificial Sequence
  Description of Artificial Sequence: Synthetic oligonucleotide
gcaacaucuccgugccacu

SEQ ID NO: 522779 - RNA, 19 nt, Artificial Sequence
  Description of Artificial Sequence: Synthetic oligonucleotide
cucguuccugaaggccuga

SEQ ID NO: 522780 - RNA, 19 nt, Artificial Sequence
  Description of Artificial Sequence: Synthetic oligonucleotide
ccgacgcauugucaaagaa

SEQ ID NO: 522781 - RNA, 19 nt, Artificial Sequence
  Description of Artificial Sequence: Synthetic oligonucleotide
caauccgaguggacagcau

SEQ ID NO: 522782 - RNA, 19 nt, Artificial Sequence
  Description of Artificial Sequence: Synthetic oligonucleotide
accgcaucuuugaguccaa

SEQ ID NO: 522783 - RNA, 19 nt, Artificial Sequence
  Description of Artificial Sequence: Synthetic oligonucleotide
gguuuuaggcugcgaccau

SEQ ID NO: 522784 - RNA, 19 nt, Artificial Sequence
  Description of Artificial Sequence: Synthetic oligonucleotide
agucggccaccaaucucuu

SEQ ID NO: 522785 - RNA, 19 nt, Artificial Sequence
  Description of Artificial Sequence: Synthetic oligonucleotide
gcccacgaggccuaauuuu

SEQ ID NO: 522786 - RNA, 19 nt, Artificial Sequence
  Description of Artificial Sequence: Synthetic oligonucleotide
ccgauccaauccgagugga

SEQ ID NO: 522787 - RNA, 19 nt, Artificial Sequence
  Description of Artificial Sequence: Synthetic oligonucleotide
cgcccgaugcagagagggc

SEQ ID NO: 522788 - RNA, 19 nt, Artificial Sequence
  Description of Artificial Sequence: Synthetic oligonucleotide
gccgggccacgccgggucc

SEQ ID NO: 522789 - RNA, 19 nt, Artificial Sequence
  Description of Artificial Sequence: Synthetic oligonucleotide
ccacgaggccuaauuuugu

SEQ ID NO: 522790 - RNA, 19 nt, Artificial Sequence
  Description of Artificial Sequence: Synthetic oligonucleotide
gggucccgucgugcggcgg

SEQ ID NO: 522791 - RNA, 19 nt, Artificial Sequence
  Description of Artificial Sequence: Synthetic oligonucleotide
gccgcccgaugcagagagg

SEQ ID NO: 522792 - RNA, 19 nt, Artificial Sequence
  Description of Artificial Sequence: Synthetic oligonucleotide
ccuaguauuccuggcuuuu

SEQ ID NO: 522793 - RNA, 19 nt, Artificial Sequence
  Description of Artificial Sequence: Synthetic oligonucleotide
ggcaugagguguggaguau

SEQ ID NO: 522794 - RNA, 19 nt, Artificial Sequence
  Description of Artificial Sequence: Synthetic oligonucleotide
cugacgcccggcgcugaua

SEQ ID NO: 522795 - RNA, 19 nt, Artificial Sequence
  Description of Artificial Sequence: Synthetic oligonucleotide
cgugugggaggcugcccga

SEQ ID NO: 522796 - RNA, 19 nt, Artificial Sequence
  Description of Artificial Sequence: Synthetic oligonucleotide
ccggugggcuguucaaccu

SEQ ID NO: 522797 - RNA, 19 nt, Artificial Sequence
  Description of Artificial Sequence: Synthetic oligonucleotide
cgacuuccaagcucccugu

SEQ ID NO: 522798 - RNA, 19 nt, Artificial Sequence
  Description of Artificial Sequence: Synthetic oligonucleotide
gagccgggccacgccgggu

SEQ ID NO: 522799 - RNA, 19 nt, Artificial Sequence
  Description of Artificial Sequence: Synthetic oligonucleotide
cucucgcauccgacgcauu

SEQ ID NO: 522800 - RNA, 19 nt, Artificial Sequence
  Description of Artificial Sequence: Synthetic oligonucleotide
gggccgcccgaugcagaga

SEQ ID NO: 522801 - RNA, 19 nt, Artificial Sequence
  Description of Artificial Sequence: Synthetic oligonucleotide
cgggccacgccgggucccg

SEQ ID NO: 522802 - RNA, 19 nt, Artificial Sequence
  Description of Artificial Sequence: Synthetic oligonucleotide
cccgaagguggagcaccgu

SEQ ID NO: 522803 - RNA, 19 nt, Artificial Sequence
  Description of Artificial Sequence: Synthetic oligonucleotide
ccacgccgggucccgucgu

SEQ ID NO: 522804 - RNA, 19 nt, Artificial Sequence
  Description of Artificial Sequence: Synthetic oligonucleotide
ccgugccacuugcccuugu

SEQ ID NO: 522805 - RNA, 19 nt, Artificial Sequence
  Description of Artificial Sequence: Synthetic oligonucleotide
gggccacgccgggucccgu

SEQ ID NO: 522806 - RNA, 19 nt, Artificial Sequence
  Description of Artificial Sequence: Synthetic oligonucleotide
aaugaaguuauguuaaccc

SEQ ID NO: 522807 - RNA, 19 nt, Artificial Sequence
  Description of Artificial Sequence: Synthetic oligonucleotide
aacgugaaaacauagcagg

SEQ ID NO: 522808 - RNA, 19 nt, Artificial Sequence
  Description of Artificial Sequence: Synthetic oligonucleotide
uauuauaagauguuaauac

SEQ ID NO: 522809 - RNA, 19 nt, Artificial Sequence
  Description of Artificial Sequence: Synthetic oligonucleotide
uucauuaauagacaaaaug

SEQ ID NO: 522810 - RNA, 19 nt, Artificial Sequence
  Description of Artificial Sequence: Synthetic oligonucleotide
uuauuaaugguguacaacc

SEQ ID NO: 522811 - RNA, 19 nt, Artificial Sequence
  Description of Artificial Sequence: Synthetic oligonucleotide
uguacaaccaaaauaauua

SEQ ID NO: 522812 - RNA, 19 nt, Artificial Sequence
  Description of Artificial Sequence: Synthetic oligonucleotide
aaacuauuguauuauaaga

SEQ ID NO: 522813 - RNA, 19 nt, Artificial Sequence
  Description of Artificial Sequence: Synthetic oligonucleotide
uaauguaggaguuucacgc

SEQ ID NO: 522814 - RNA, 19 nt, Artificial Sequence
  Description of Artificial Sequence: Synthetic oligonucleotide
aaugggauugaacacauga

SEQ ID NO: 522815 - RNA, 19 nt, Artificial Sequence
  Description of Artificial Sequence: Synthetic oligonucleotide
auucagaugcauuuauucc

SEQ ID NO: 522816 - RNA, 19 nt, Artificial Sequence
  Description of Artificial Sequence: Synthetic oligonucleotide
caagauaugcauuaaacac

SEQ ID NO: 522817 - RNA, 19 nt, Artificial Sequence
  Description of Artificial Sequence: Synthetic oligonucleotide
uuaauagacaaaaugcagu

SEQ ID NO: 522818 - RNA, 19 nt, Artificial Sequence
  Description of Artificial Sequence: Synthetic oligonucleotide
uaaauauaggaacaucacc

SEQ ID NO: 522819 - RNA, 19 nt, Artificial Sequence
  Description of Artificial Sequence: Synthetic oligonucleotide
aguauguuaaaucagcacu

SEQ ID NO: 522820 - RNA, 19 nt, Artificial Sequence
  Description of Artificial Sequence: Synthetic oligonucleotide
aauaauuacuaacgcacug

SEQ ID NO: 522821 - RNA, 19 nt, Artificial Sequence
  Description of Artificial Sequence: Synthetic oligonucleotide
uguuaaaucagcacuagaa

SEQ ID NO: 522822 - RNA, 19 nt, Artificial Sequence
  Description of Artificial Sequence: Synthetic oligonucleotide
augguaacaauccuauccc

SEQ ID NO: 522823 - RNA, 19 nt, Artificial Sequence
  Description of Artificial Sequence: Synthetic oligonucleotide
uuaguuauaacaacgugaa

SEQ ID NO: 522824 - RNA, 19 nt, Artificial Sequence
  Description of Artificial Sequence: Synthetic oligonucleotide
aagauaugcauuaaacacg

SEQ ID NO: 522825 - RNA, 19 nt, Artificial Sequence
  Description of Artificial Sequence: Synthetic oligonucleotide
uauaacaacgugaaaacau

SEQ ID NO: 522826 - RNA, 19 nt, Artificial Sequence
  Description of Artificial Sequence: Synthetic oligonucleotide
aagucauccggaaauauac

SEQ ID NO: 522827 - RNA, 19 nt, Artificial Sequence
  Description of Artificial Sequence: Synthetic oligonucleotide
aauuucagaugcuagugca

SEQ ID NO: 522828 - RNA, 19 nt, Artificial Sequence
  Description of Artificial Sequence: Synthetic oligonucleotide
aaauugguaagucuccaug

SEQ ID NO: 522829 - RNA, 19 nt, Artificial Sequence
  Description of Artificial Sequence: Synthetic oligonucleotide
aucauugcaauaaauauag

SEQ ID NO: 522830 - RNA, 19 nt, Artificial Sequence
  Description of Artificial Sequence: Synthetic oligonucleotide
uguugugucaguauguuaa

SEQ ID NO: 522831 - RNA, 19 nt, Artificial Sequence
  Description of Artificial Sequence: Synthetic oligonucleotide
acuauuguauuauaagaug

SEQ ID NO: 522832 - RNA, 19 nt, Artificial Sequence
  Description of Artificial Sequence: Synthetic oligonucleotide
auaauuacuaacgcacugc

SEQ ID NO: 522833 - RNA, 19 nt, Artificial Sequence
  Description of Artificial Sequence: Synthetic oligonucleotide
uccuucuagacucugcccg

SEQ ID NO: 522834 - RNA, 19 nt, Artificial Sequence
  Description of Artificial Sequence: Synthetic oligonucleotide
agcacuagaaaguucgggg

SEQ ID NO: 522835 - RNA, 19 nt, Artificial Sequence
  Description of Artificial Sequence: Synthetic oligonucleotide
uaagauuaauacuaaugga

SEQ ID NO: 522836 - RNA, 19 nt, Artificial Sequence
  Description of Artificial Sequence: Synthetic oligonucleotide
ugaagccuaagccaucugg

SEQ ID NO: 522837 - RNA, 19 nt, Artificial Sequence
  Description of Artificial Sequence: Synthetic oligonucleotide
uauagucuuacacugugga

SEQ ID NO: 522838 - RNA, 19 nt, Artificial Sequence
  Description of Artificial Sequence: Synthetic oligonucleotide
aauccuauccccaacucgg

SEQ ID NO: 522839 - RNA, 19 nt, Artificial Sequence
  Description of Artificial Sequence: Synthetic oligonucleotide
auuaagauuaauacuaaug

SEQ ID NO: 522840 - RNA, 19 nt, Artificial Sequence
  Description of Artificial Sequence: Synthetic oligonucleotide
aagauuaauacuaauggaa

SEQ ID NO: 522841 - RNA, 19 nt, Artificial Sequence
  Description of Artificial Sequence: Synthetic oligonucleotide
aaggaccagcuuuugauuc

SEQ ID NO: 522842 - RNA, 19 nt, Artificial Sequence
  Description of Artificial Sequence: Synthetic oligonucleotide
acaacgugaaaacauagca

SEQ ID NO: 522843 - RNA, 19 nt, Artificial Sequence
  Description of Artificial Sequence: Synthetic oligonucleotide
uccagaaaguggaagagug

SEQ ID NO: 522844 - RNA, 19 nt, Artificial Sequence
  Description of Artificial Sequence: Synthetic oligonucleotide
auuacuucaccauugcuga

SEQ ID NO: 522845 - RNA, 19 nt, Artificial Sequence
  Description of Artificial Sequence: Synthetic oligonucleotide
ugcaacaccguuuggaugc

SEQ ID NO: 522846 - RNA, 19 nt, Artificial Sequence
  Description of Artificial Sequence: Synthetic oligonucleotide
aguuucacgcucuaaaaug

SEQ ID NO: 522847 - RNA, 19 nt, Artificial Sequence
  Description of Artificial Sequence: Synthetic oligonucleotide
uaguaagacugcuaaacag

SEQ ID NO: 522848 - RNA, 19 nt, Artificial Sequence
  Description of Artificial Sequence: Synthetic oligonucleotide
aacaacgugaaaacauagc

SEQ ID NO: 522849 - RNA, 19 nt, Artificial Sequence
  Description of Artificial Sequence: Synthetic oligonucleotide
gauguuagcccagugaaag

SEQ ID NO: 522850 - RNA, 19 nt, Artificial Sequence
  Description of Artificial Sequence: Synthetic oligonucleotide
gauucagaugcauuuauuc

SEQ ID NO: 522851 - RNA, 19 nt, Artificial Sequence
  Description of Artificial Sequence: Synthetic oligonucleotide
uccuguuacaaauauagau

SEQ ID NO: 522852 - RNA, 19 nt, Artificial Sequence
  Description of Artificial Sequence: Synthetic oligonucleotide
acauaaauugguaagucuc

SEQ ID NO: 522853 - RNA, 19 nt, Artificial Sequence
  Description of Artificial Sequence: Synthetic oligonucleotide
uaguguuauagucuuacac

SEQ ID NO: 522854 - RNA, 19 nt, Artificial Sequence
  Description of Artificial Sequence: Synthetic oligonucleotide
auuaauagacaaaaugcag

SEQ ID NO: 522855 - RNA, 19 nt, Artificial Sequence
  Description of Artificial Sequence: Synthetic oligonucleotide
uuaguaagacugcuaaaca

SEQ ID NO: 522856 - RNA, 19 nt, Artificial Sequence
  Description of Artificial Sequence: Synthetic oligonucleotide
uguauuauaagauguuaau

SEQ ID NO: 522857 - RNA, 19 nt, Artificial Sequence
  Description of Artificial Sequence: Synthetic oligonucleotide
uugguuaaacugaugguug

SEQ ID NO: 522858 - RNA, 19 nt, Artificial Sequence
  Description of Artificial Sequence: Synthetic oligonucleotide
uucacuuuacauuuacaca

SEQ ID NO: 522859 - RNA, 19 nt, Artificial Sequence
  Description of Artificial Sequence: Synthetic oligonucleotide
aacaauagcacaguacacu

SEQ ID NO: 522860 - RNA, 19 nt, Artificial Sequence
  Description of Artificial Sequence: Synthetic oligonucleotide
uccggaaauauacugcuug

SEQ ID NO: 522861 - RNA, 19 nt, Artificial Sequence
  Description of Artificial Sequence: Synthetic oligonucleotide
uuuaauagggcagcaacug

SEQ ID NO: 522862 - RNA, 19 nt, Artificial Sequence
  Description of Artificial Sequence: Synthetic oligonucleotide
cuuaguaagacugcuaaac

SEQ ID NO: 522863 - RNA, 19 nt, Artificial Sequence
  Description of Artificial Sequence: Synthetic oligonucleotide
aaaguucggggcuccuucc

SEQ ID NO: 522864 - RNA, 19 nt, Artificial Sequence
  Description of Artificial Sequence: Synthetic oligonucleotide
cauugcaauaaauauagga

SEQ ID NO: 522865 - RNA, 19 nt, Artificial Sequence
  Description of Artificial Sequence: Synthetic oligonucleotide
uaacaacgugaaaacauag

SEQ ID NO: 522866 - RNA, 19 nt, Artificial Sequence
  Description of Artificial Sequence: Synthetic oligonucleotide
aguaagacugcuaaacagg

SEQ ID NO: 522867 - RNA, 19 nt, Artificial Sequence
  Description of Artificial Sequence: Synthetic oligonucleotide
agccuaagccaucuggucc

SEQ ID NO: 522868 - RNA, 19 nt, Artificial Sequence
  Description of Artificial Sequence: Synthetic oligonucleotide
augaauaugccccucauua

SEQ ID NO: 522869 - RNA, 19 nt, Artificial Sequence
  Description of Artificial Sequence: Synthetic oligonucleotide
cuaauguaggaguuucacg

SEQ ID NO: 522870 - RNA, 19 nt, Artificial Sequence
  Description of Artificial Sequence: Synthetic oligonucleotide
uuuaaagcuuaguaagacu

SEQ ID NO: 522871 - RNA, 19 nt, Artificial Sequence
  Description of Artificial Sequence: Synthetic oligonucleotide
ugucaguauguuaaaucag

SEQ ID NO: 522872 - RNA, 19 nt, Artificial Sequence
  Description of Artificial Sequence: Synthetic oligonucleotide
accaagauaugcauuaaac

SEQ ID NO: 522873 - RNA, 19 nt, Artificial Sequence
  Description of Artificial Sequence: Synthetic oligonucleotide
aagaaugcuauaauaaaau

SEQ ID NO: 522874 - RNA, 19 nt, Artificial Sequence
  Description of Artificial Sequence: Synthetic oligonucleotide
aacuauuguauuauaagau

SEQ ID NO: 522875 - RNA, 19 nt, Artificial Sequence
  Description of Artificial Sequence: Synthetic oligonucleotide
uuuuguccgcuuaaggaug

SEQ ID NO: 522876 - RNA, 19 nt, Artificial Sequence
  Description of Artificial Sequence: Synthetic oligonucleotide
auugcaauaaauauaggaa

SEQ ID NO: 522877 - RNA, 19 nt, Artificial Sequence
  Description of Artificial Sequence: Synthetic oligonucleotide
ugggcauugguuaaacuga

SEQ ID NO: 522878 - RNA, 19 nt, Artificial Sequence
  Description of Artificial Sequence: Synthetic oligonucleotide
guuauagucuuacacugug

SEQ ID NO: 522879 - RNA, 19 nt, Artificial Sequence
  Description of Artificial Sequence: Synthetic oligonucleotide
uuuaugucagguccaauua

SEQ ID NO: 522880 - RNA, 19 nt, Artificial Sequence
  Description of Artificial Sequence: Synthetic oligonucleotide
uuaauagggcagcaacugc

SEQ ID NO: 522881 - RNA, 19 nt, Artificial Sequence
  Description of Artificial Sequence: Synthetic oligonucleotide
aaguuaacugcuuggguau

SEQ ID NO: 522882 - RNA, 19 nt, Artificial Sequence
  Description of Artificial Sequence: Synthetic oligonucleotide
augaccugugaccacacuc

SEQ ID NO: 522883 - RNA, 19 nt, Artificial Sequence
  Description of Artificial Sequence: Synthetic oligonucleotide
uuucacgcucuaaaauggg

SEQ ID NO: 522884 - RNA, 19 nt, Artificial Sequence
  Description of Artificial Sequence: Synthetic oligonucleotide
uguacacuacuccuguuac

SEQ ID NO: 522885 - RNA, 19 nt, Artificial Sequence
  Description of Artificial Sequence: Synthetic oligonucleotide
gauguuaauacacagcaau

SEQ ID NO: 522886 - RNA, 19 nt, Artificial Sequence
  Description of Artificial Sequence: Synthetic oligonucleotide
gucauuaagauuaauacua

SEQ ID NO: 522887 - RNA, 19 nt, Artificial Sequence
  Description of Artificial Sequence: Synthetic oligonucleotide
aaaguuccacccuccgggg

SEQ ID NO: 522888 - RNA, 19 nt, Artificial Sequence
  Description of Artificial Sequence: Synthetic oligonucleotide
ugacagugccuuuuguccg

SEQ ID NO: 522889 - RNA, 19 nt, Artificial Sequence
  Description of Artificial Sequence: Synthetic oligonucleotide
caucaaguuaacugcuugg

SEQ ID NO: 522890 - RNA, 19 nt, Artificial Sequence
  Description of Artificial Sequence: Synthetic oligonucleotide
guaugagucaucccuuccg

SEQ ID NO: 522891 - RNA, 19 nt, Artificial Sequence
  Description of Artificial Sequence: Synthetic oligonucleotide
cacaugauaauuccucacc

SEQ ID NO: 522892 - RNA, 19 nt, Artificial Sequence
  Description of Artificial Sequence: Synthetic oligonucleotide
uccuaagucauccggaaau

SEQ ID NO: 522893 - RNA, 19 nt, Artificial Sequence
  Description of Artificial Sequence: Synthetic oligonucleotide
caacgugaaaacauagcag

SEQ ID NO: 522894 - RNA, 19 nt, Artificial Sequence
  Description of Artificial Sequence: Synthetic oligonucleotide
ucuaguguuauagucuuac

SEQ ID NO: 522895 - RNA, 19 nt, Artificial Sequence
  Description of Artificial Sequence: Synthetic oligonucleotide
uuuguccgcuuaaggaugg

SEQ ID NO: 522896 - RNA, 19 nt, Artificial Sequence
  Description of Artificial Sequence: Synthetic oligonucleotide
uccuaugucuuccauggcu

SEQ ID NO: 522897 - RNA, 19 nt, Artificial Sequence
  Description of Artificial Sequence: Synthetic oligonucleotide
auaugcauuaaacacgauu

SEQ ID NO: 522898 - RNA, 19 nt, Artificial Sequence
  Description of Artificial Sequence: Synthetic oligonucleotide
gucaccaacagcaauccgg

SEQ ID NO: 522899 - RNA, 19 nt, Artificial Sequence
  Description of Artificial Sequence: Synthetic oligonucleotide
aagccuaagccaucugguc

SEQ ID NO: 522900 - RNA, 19 nt, Artificial Sequence
  Description of Artificial Sequence: Synthetic oligonucleotide
cugggcauugguuaaacug

SEQ ID NO: 522901 - RNA, 19 nt, Artificial Sequence
  Description of Artificial Sequence: Synthetic oligonucleotide
aaccacaagggugacagug

SEQ ID NO: 522902 - RNA, 19 nt, Artificial Sequence
  Description of Artificial Sequence: Synthetic oligonucleotide
cagaaacuuauuuauucac

SEQ ID NO: 522903 - RNA, 19 nt, Artificial Sequence
  Description of Artificial Sequence: Synthetic oligonucleotide
gugacagugccuuuugucc

SEQ ID NO: 522904 - RNA, 19 nt, Artificial Sequence
  Description of Artificial Sequence: Synthetic oligonucleotide
uucgaguuacuuuccagug

SEQ ID NO: 522905 - RNA, 19 nt, Artificial Sequence
  Description of Artificial Sequence: Synthetic oligonucleotide
guuucacgcucuaaaaugg

SEQ ID NO: 522906 - RNA, 19 nt, Artificial Sequence
  Description of Artificial Sequence: Synthetic oligonucleotide
acaugauaauuccucacca

SEQ ID NO: 522907 - RNA, 19 nt, Artificial Sequence
  Description of Artificial Sequence: Synthetic oligonucleotide
aaaguggaagagugaagga

SEQ ID NO: 522908 - RNA, 19 nt, Artificial Sequence
  Description of Artificial Sequence: Synthetic oligonucleotide
aaacuuauuuauucacuuu

SEQ ID NO: 522909 - RNA, 19 nt, Artificial Sequence
  Description of Artificial Sequence: Synthetic oligonucleotide
uauguuaaaucagcacuag

SEQ ID NO: 522910 - RNA, 19 nt, Artificial Sequence
  Description of Artificial Sequence: Synthetic oligonucleotide
aaagcuuaguaagacugcu

SEQ ID NO: 522911 - RNA, 19 nt, Artificial Sequence
  Description of Artificial Sequence: Synthetic oligonucleotide
uucaauggagccaggggca

SEQ ID NO: 522912 - RNA, 19 nt, Artificial Sequence
  Description of Artificial Sequence: Synthetic oligonucleotide
caugagggcugccauaucc

SEQ ID NO: 522913 - RNA, 19 nt, Artificial Sequence
  Description of Artificial Sequence: Synthetic oligonucleotide
aauagacaaaaugcaguca

SEQ ID NO: 522914 - RNA, 19 nt, Artificial Sequence
  Description of Artificial Sequence: Synthetic oligonucleotide
ucuaauguaggaguuucac

SEQ ID NO: 522915 - RNA, 19 nt, Artificial Sequence
  Description of Artificial Sequence: Synthetic oligonucleotide
gagguccuaagucauccgg

SEQ ID NO: 522916 - RNA, 19 nt, Artificial Sequence
  Description of Artificial Sequence: Synthetic oligonucleotide
ucauugcaauaaauauagg

SEQ ID NO: 522917 - RNA, 19 nt, Artificial Sequence
  Description of Artificial Sequence: Synthetic oligonucleotide
ucaaguuaacugcuugggu

SEQ ID NO: 522918 - RNA, 19 nt, Artificial Sequence
  Description of Artificial Sequence: Synthetic oligonucleotide
uacuucaccauugcugagg

SEQ ID NO: 522919 - RNA, 19 nt, Artificial Sequence
  Description of Artificial Sequence: Synthetic oligonucleotide
cuuuagucuuaaacuauug

SEQ ID NO: 522920 - RNA, 19 nt, Artificial Sequence
  Description of Artificial Sequence: Synthetic oligonucleotide
uguuauagucuuacacugu

SEQ ID NO: 522921 - RNA, 19 nt, Artificial Sequence
  Description of Artificial Sequence: Synthetic oligonucleotide
gaugguugauucuucauua

SEQ ID NO: 522922 - RNA, 19 nt, Artificial Sequence
  Description of Artificial Sequence: Synthetic oligonucleotide
gucaguauguuaaaucagc

SEQ ID NO: 522923 - RNA, 19 nt, Artificial Sequence
  Description of Artificial Sequence: Synthetic oligonucleotide
agauuguugaccaaaacuu

SEQ ID NO: 522924 - RNA, 19 nt, Artificial Sequence
  Description of Artificial Sequence: Synthetic oligonucleotide
ucaccauuaaaaucugguc

SEQ ID NO: 522925 - RNA, 19 nt, Artificial Sequence
  Description of Artificial Sequence: Synthetic oligonucleotide
uuagacgcccgucuucugc

SEQ ID NO: 522926 - RNA, 19 nt, Artificial Sequence
  Description of Artificial Sequence: Synthetic oligonucleotide
aaguuccacccuccggggc

SEQ ID NO: 522927 - RNA, 19 nt, Artificial Sequence
  Description of Artificial Sequence: Synthetic oligonucleotide
gucauccggaaauauacug

SEQ ID NO: 522928 - RNA, 19 nt, Artificial Sequence
  Description of Artificial Sequence: Synthetic oligonucleotide
auguuagcccagugaaagc

SEQ ID NO: 522929 - RNA, 19 nt, Artificial Sequence
  Description of Artificial Sequence: Synthetic oligonucleotide
auagucuuacacuguggag

SEQ ID NO: 522930 - RNA, 19 nt, Artificial Sequence
  Description of Artificial Sequence: Synthetic oligonucleotide
uuagcccagugaaagcaag

SEQ ID NO: 522931 - RNA, 19 nt, Artificial Sequence
  Description of Artificial Sequence: Synthetic oligonucleotide
cuuaaucccugaauuucag

SEQ ID NO: 522932 - RNA, 19 nt, Artificial Sequence
  Description of Artificial Sequence: Synthetic oligonucleotide
uugaugaauaugccccuca

SEQ ID NO: 522933 - RNA, 19 nt, Artificial Sequence
  Description of Artificial Sequence: Synthetic oligonucleotide
ccauuauuccuccagauug

SEQ ID NO: 522934 - RNA, 19 nt, Artificial Sequence
  Description of Artificial Sequence: Synthetic oligonucleotide
auguaggaguuucacgcuc

SEQ ID NO: 522935 - RNA, 19 nt, Artificial Sequence
  Description of Artificial Sequence: Synthetic oligonucleotide
agauaugcauuaaacacga

SEQ ID NO: 522936 - RNA, 19 nt, Artificial Sequence
  Description of Artificial Sequence: Synthetic oligonucleotide
agaaugcuauaauaaaaua

SEQ ID NO: 522937 - RNA, 19 nt, Artificial Sequence
  Description of Artificial Sequence: Synthetic oligonucleotide
auugguuaaacugaugguu

SEQ ID NO: 522938 - RNA, 19 nt, Artificial Sequence
  Description of Artificial Sequence: Synthetic oligonucleotide
cucuguuacagcaggugag

SEQ ID NO: 522939 - RNA, 19 nt, Artificial Sequence
  Description of Artificial Sequence: Synthetic oligonucleotide
acaauccuauccccaacuc

SEQ ID NO: 522940 - RNA, 19 nt, Artificial Sequence
  Description of Artificial Sequence: Synthetic oligonucleotide
uucacgcucuaaaauggga

SEQ ID NO: 522941 - RNA, 19 nt, Artificial Sequence
  Description of Artificial Sequence: Synthetic oligonucleotide
aauccggccacucccgacu

SEQ ID NO: 522942 - RNA, 19 nt, Artificial Sequence
  Description of Artificial Sequence: Synthetic oligonucleotide
ucggucuaguguuauaguc

SEQ ID NO: 522943 - RNA, 19 nt, Artificial Sequence
  Description of Artificial Sequence: Synthetic oligonucleotide
auuauucugucuccaggcu

SEQ ID NO: 522944 - RNA, 19 nt, Artificial Sequence
  Description of Artificial Sequence: Synthetic oligonucleotide
agucuuacacuguggaggu

SEQ ID NO: 522945 - RNA, 19 nt, Artificial Sequence
  Description of Artificial Sequence: Synthetic oligonucleotide
uguaggaguuucacgcucu

SEQ ID NO: 522946 - RNA, 19 nt, Artificial Sequence
  Description of Artificial Sequence: Synthetic oligonucleotide
aagacacggguuggcaagc

SEQ ID NO: 522947 - RNA, 19 nt, Artificial Sequence
  Description of Artificial Sequence: Synthetic oligonucleotide
ucgaguuacuuuccaguga

SEQ ID NO: 522948 - RNA, 19 nt, Artificial Sequence
  Description of Artificial Sequence: Synthetic oligonucleotide
caagacacggguuggcaag

SEQ ID NO: 522949 - RNA, 19 nt, Artificial Sequence
  Description of Artificial Sequence: Synthetic oligonucleotide
ucacgcucuaaaaugggau

SEQ ID NO: 522950 - RNA, 19 nt, Artificial Sequence
  Description of Artificial Sequence: Synthetic oligonucleotide
agaaacuuauuuauucacu

SEQ ID NO: 522951 - RNA, 19 nt, Artificial Sequence
  Description of Artificial Sequence: Synthetic oligonucleotide
cucauuacuucaccauugc

SEQ ID NO: 522952 - RNA, 19 nt, Artificial Sequence
  Description of Artificial Sequence: Synthetic oligonucleotide
cugauucccagcgaguccg

SEQ ID NO: 522953 - RNA, 19 nt, Artificial Sequence
  Description of Artificial Sequence: Synthetic oligonucleotide
gaugguuguuuuccugaag

SEQ ID NO: 522954 - RNA, 19 nt, Artificial Sequence
  Description of Artificial Sequence: Synthetic oligonucleotide
uuuuagacgcccgucuucu

SEQ ID NO: 522955 - RNA, 19 nt, Artificial Sequence
  Description of Artificial Sequence: Synthetic oligonucleotide
acucuguuacagcagguga

SEQ ID NO: 522956 - RNA, 19 nt, Artificial Sequence
  Description of Artificial Sequence: Synthetic oligonucleotide
aaaaugggauugaacacau

SEQ ID NO: 522957 - RNA, 19 nt, Artificial Sequence
  Description of Artificial Sequence: Synthetic oligonucleotide
ugguuaaacugaugguuga

SEQ ID NO: 522958 - RNA, 19 nt, Artificial Sequence
  Description of Artificial Sequence: Synthetic oligonucleotide
uuggaugcaucauugcaau

SEQ ID NO: 522959 - RNA, 19 nt, Artificial Sequence
  Description of Artificial Sequence: Synthetic oligonucleotide
gaaaguucggggcuccuuc

SEQ ID NO: 522960 - RNA, 19 nt, Artificial Sequence
  Description of Artificial Sequence: Synthetic oligonucleotide
cauggguuacuccuucuag

SEQ ID NO: 522961 - RNA, 19 nt, Artificial Sequence
  Description of Artificial Sequence: Synthetic oligonucleotide
ugguaacaauccuaucccc

SEQ ID NO: 522962 - RNA, 19 nt, Artificial Sequence
  Description of Artificial Sequence: Synthetic oligonucleotide
aaacugaugguugauucuu

SEQ ID NO: 522963 - RNA, 19 nt, Artificial Sequence
  Description of Artificial Sequence: Synthetic oligonucleotide
gaaacuuauuuauucacuu

SEQ ID NO: 522964 - RNA, 19 nt, Artificial Sequence
  Description of Artificial Sequence: Synthetic oligonucleotide
auuguauuauaagauguua

SEQ ID NO: 522965 - RNA, 19 nt, Artificial Sequence
  Description of Artificial Sequence: Synthetic oligonucleotide
guuggcaagcucuugcuga

SEQ ID NO: 522966 - RNA, 19 nt, Artificial Sequence
  Description of Artificial Sequence: Synthetic oligonucleotide
uucuaauguaggaguuuca

SEQ ID NO: 522967 - RNA, 19 nt, Artificial Sequence
  Description of Artificial Sequence: Synthetic oligonucleotide
uuauucugucuccaggcuu

SEQ ID NO: 522968 - RNA, 19 nt, Artificial Sequence
  Description of Artificial Sequence: Synthetic oligonucleotide
acuagaaaguucggggcuc

SEQ ID NO: 522969 - RNA, 19 nt, Artificial Sequence
  Description of Artificial Sequence: Synthetic oligonucleotide
auaugccccucauuacuuc

SEQ ID NO: 522970 - RNA, 19 nt, Artificial Sequence
  Description of Artificial Sequence: Synthetic oligonucleotide
ugguugauucuucauuaau

SEQ ID NO: 522971 - RNA, 19 nt, Artificial Sequence
  Description of Artificial Sequence: Synthetic oligonucleotide
cuaugucuuccauggcugg

SEQ ID NO: 522972 - RNA, 19 nt, Artificial Sequence
  Description of Artificial Sequence: Synthetic oligonucleotide
ugcaucaaucucccaucag

SEQ ID NO: 522973 - RNA, 19 nt, Artificial Sequence
  Description of Artificial Sequence: Synthetic oligonucleotide
augaacaccaagauaugca

SEQ ID NO: 522974 - RNA, 19 nt, Artificial Sequence
  Description of Artificial Sequence: Synthetic oligonucleotide
auggguuacuccuucuaga

SEQ ID NO: 522975 - RNA, 19 nt, Artificial Sequence
  Description of Artificial Sequence: Synthetic oligonucleotide
aaccuguucaggagagaac

SEQ ID NO: 522976 - RNA, 19 nt, Artificial Sequence
  Description of Artificial Sequence: Synthetic oligonucleotide
acaguacacuaacauauuu

SEQ ID NO: 522977 - RNA, 19 nt, Artificial Sequence
  Description of Artificial Sequence: Synthetic oligonucleotide
uuguugugcaccacagaaa

SEQ ID NO: 522978 - RNA, 19 nt, Artificial Sequence
  Description of Artificial Sequence: Synthetic oligonucleotide
guuacugugccuagggaac

SEQ ID NO: 522979 - RNA, 19 nt, Artificial Sequence
  Description of Artificial Sequence: Synthetic oligonucleotide
auguuaaaucagcacuaga

SEQ ID NO: 522980 - RNA, 19 nt, Artificial Sequence
  Description of Artificial Sequence: Synthetic oligonucleotide
aggagagaaccacaagggu

SEQ ID NO: 522981 - RNA, 19 nt, Artificial Sequence
  Description of Artificial Sequence: Synthetic oligonucleotide
auauccuccuacaaugcug

SEQ ID NO: 522982 - RNA, 19 nt, Artificial Sequence
  Description of Artificial Sequence: Synthetic oligonucleotide
gucaauuuauuaauggugu

SEQ ID NO: 522983 - RNA, 19 nt, Artificial Sequence
  Description of Artificial Sequence: Synthetic oligonucleotide
ugaugaauaugccccucau

SEQ ID NO: 522984 - RNA, 19 nt, Artificial Sequence
  Description of Artificial Sequence: Synthetic oligonucleotide
acucccgacugauggcacc

SEQ ID NO: 522985 - RNA, 19 nt, Artificial Sequence
  Description of Artificial Sequence: Synthetic oligonucleotide
cugcuaaacagguccacuc

SEQ ID NO: 522986 - RNA, 19 nt, Artificial Sequence
  Description of Artificial Sequence: Synthetic oligonucleotide
ugauguuagcccagugaaa

SEQ ID NO: 522987 - RNA, 19 nt, Artificial Sequence
  Description of Artificial Sequence: Synthetic oligonucleotide
ugauucagaugcauuuauu

SEQ ID NO: 522988 - RNA, 19 nt, Artificial Sequence
  Description of Artificial Sequence: Synthetic oligonucleotide
acaccguuuggaugcauca

SEQ ID NO: 522989 - RNA, 19 nt, Artificial Sequence
  Description of Artificial Sequence: Synthetic oligonucleotide
uuuucaguguugugucagu

SEQ ID NO: 522990 - RNA, 19 nt, Artificial Sequence
  Description of Artificial Sequence: Synthetic oligonucleotide
guaacaauccuauccccaa

SEQ ID NO: 522991 - RNA, 19 nt, Artificial Sequence
  Description of Artificial Sequence: Synthetic oligonucleotide
cagauuguugaccaaaacu

SEQ ID NO: 522992 - RNA, 19 nt, Artificial Sequence
  Description of Artificial Sequence: Synthetic oligonucleotide
uccgcuuaaggauggcaac

SEQ ID NO: 522993 - RNA, 19 nt, Artificial Sequence
  Description of Artificial Sequence: Synthetic oligonucleotide
auucccagcgaguccgaag

SEQ ID NO: 522994 - RNA, 19 nt, Artificial Sequence
  Description of Artificial Sequence: Synthetic oligonucleotide
auaacaacgugaaaacaua

SEQ ID NO: 522995 - RNA, 19 nt, Artificial Sequence
  Description of Artificial Sequence: Synthetic oligonucleotide
uuacuucaccauugcugag

SEQ ID NO: 522996 - RNA, 19 nt, Artificial Sequence
  Description of Artificial Sequence: Synthetic oligonucleotide
agaaaguggaagagugaag

SEQ ID NO: 522997 - RNA, 19 nt, Artificial Sequence
  Description of Artificial Sequence: Synthetic oligonucleotide
agaugcuagugcauucuuc

SEQ ID NO: 522998 - RNA, 19 nt, Artificial Sequence
  Description of Artificial Sequence: Synthetic oligonucleotide
uaaacagguccacucuguu

SEQ ID NO: 522999 - RNA, 19 nt, Artificial Sequence
  Description of Artificial Sequence: Synthetic oligonucleotide
ugguccucggucuaguguu

SEQ ID NO: 523000 - RNA, 19 nt, Artificial Sequence
  Description of Artificial Sequence: Synthetic oligonucleotide
ucauggguuacuccuucua

SEQ ID NO: 523001 - RNA, 19 nt, Artificial Sequence
  Description of Artificial Sequence: Synthetic oligonucleotide
agucaccaacagcaauccg

SEQ ID NO: 523002 - RNA, 19 nt, Artificial Sequence
  Description of Artificial Sequence: Synthetic oligonucleotide
acgcucuaaaaugggauug

SEQ ID NO: 523003 - RNA, 19 nt, Artificial Sequence
  Description of Artificial Sequence: Synthetic oligonucleotide
uauucuaauguaggaguuu

SEQ ID NO: 523004 - RNA, 19 nt, Artificial Sequence
  Description of Artificial Sequence: Synthetic oligonucleotide
ccaagauaugcauuaaaca

SEQ ID NO: 523005 - RNA, 19 nt, Artificial Sequence
  Description of Artificial Sequence: Synthetic oligonucleotide
gcacuagaaaguucggggc

SEQ ID NO: 523006 - RNA, 19 nt, Artificial Sequence
  Description of Artificial Sequence: Synthetic oligonucleotide
uacacuguggagguccuaa

SEQ ID NO: 523007 - RNA, 19 nt, Artificial Sequence
  Description of Artificial Sequence: Synthetic oligonucleotide
guagccaacacaggguaac

SEQ ID NO: 523008 - RNA, 19 nt, Artificial Sequence
  Description of Artificial Sequence: Synthetic oligonucleotide
cuuuaauagggcagcaacu

SEQ ID NO: 523009 - RNA, 19 nt, Artificial Sequence
  Description of Artificial Sequence: Synthetic oligonucleotide
guauguuaaaucagcacua

SEQ ID NO: 523010 - RNA, 19 nt, Artificial Sequence
  Description of Artificial Sequence: Synthetic oligonucleotide
ccaacucggaguuucuggg

SEQ ID NO: 523011 - RNA, 19 nt, Artificial Sequence
  Description of Artificial Sequence: Synthetic oligonucleotide
cuugccugggcauugguua

SEQ ID NO: 523012 - RNA, 19 nt, Artificial Sequence
  Description of Artificial Sequence: Synthetic oligonucleotide
aaguucggggcuccuuccu

SEQ ID NO: 523013 - RNA, 19 nt, Artificial Sequence
  Description of Artificial Sequence: Synthetic oligonucleotide
ugccccucauuacuucacc

SEQ ID NO: 523014 - RNA, 19 nt, Artificial Sequence
  Description of Artificial Sequence: Synthetic oligonucleotide
uguagccaacacaggguaa

SEQ ID NO: 523015 - RNA, 19 nt, Artificial Sequence
  Description of Artificial Sequence: Synthetic oligonucleotide
accaguugucucaguaaac

SEQ ID NO: 523016 - RNA, 19 nt, Artificial Sequence
  Description of Artificial Sequence: Synthetic oligonucleotide
cagucaccaacagcaaucc

SEQ ID NO: 523017 - RNA, 19 nt, Artificial Sequence
  Description of Artificial Sequence: Synthetic oligonucleotide
cuuuuguccgcuuaaggau

SEQ ID NO: 523018 - RNA, 19 nt, Artificial Sequence
  Description of Artificial Sequence: Synthetic oligonucleotide
ugcugauucccagcgaguc

SEQ ID NO: 523019 - RNA, 19 nt, Artificial Sequence
  Description of Artificial Sequence: Synthetic oligonucleotide
aucaaucucccaucagcau

SEQ ID NO: 523020 - RNA, 19 nt, Artificial Sequence
  Description of Artificial Sequence: Synthetic oligonucleotide
cauuuacacaagaaugcua

SEQ ID NO: 523021 - RNA, 19 nt, Artificial Sequence
  Description of Artificial Sequence: Synthetic oligonucleotide
uacuccuguuacaaauaua

SEQ ID NO: 523022 - RNA, 19 nt, Artificial Sequence
  Description of Artificial Sequence: Synthetic oligonucleotide
accguuuggaugcaucauu

SEQ ID NO: 523023 - RNA, 19 nt, Artificial Sequence
  Description of Artificial Sequence: Synthetic oligonucleotide
uuacuaacgcacugccuuu

SEQ ID NO: 523024 - RNA, 19 nt, Artificial Sequence
  Description of Artificial Sequence: Synthetic oligonucleotide
ugaugaccugugaccacac

SEQ ID NO: 523025 - RNA, 19 nt, Artificial Sequence
  Description of Artificial Sequence: Synthetic oligonucleotide
cuagaaaguucggggcucc

SEQ ID NO: 523026 - RNA, 19 nt, Artificial Sequence
  Description of Artificial Sequence: Synthetic oligonucleotide
acugcuaaacagguccacu

SEQ ID NO: 523027 - RNA, 19 nt, Artificial Sequence
  Description of Artificial Sequence: Synthetic oligonucleotide
ugugccuagggaacacuuu

SEQ ID NO: 523028 - RNA, 19 nt, Artificial Sequence
  Description of Artificial Sequence: Synthetic oligonucleotide
uuccuaugucuuccauggc

SEQ ID NO: 523029 - RNA, 19 nt, Artificial Sequence
  Description of Artificial Sequence: Synthetic oligonucleotide
augguugauucuucauuaa

SEQ ID NO: 523030 - RNA, 19 nt, Artificial Sequence
  Description of Artificial Sequence: Synthetic oligonucleotide
aggcuacugucacucaccu

SEQ ID NO: 523031 - RNA, 19 nt, Artificial Sequence
  Description of Artificial Sequence: Synthetic oligonucleotide
acagaugguaacaauccua

SEQ ID NO: 523032 - RNA, 19 nt, Artificial Sequence
  Description of Artificial Sequence: Synthetic oligonucleotide
cagaaaguggaagagugaa

SEQ ID NO: 523033 - RNA, 19 nt, Artificial Sequence
  Description of Artificial Sequence: Synthetic oligonucleotide
cacucaccuggcuacuuug

SEQ ID NO: 523034 - RNA, 19 nt, Artificial Sequence
  Description of Artificial Sequence: Synthetic oligonucleotide
gguaugagucaucccuucc

SEQ ID NO: 523035 - RNA, 19 nt, Artificial Sequence
  Description of Artificial Sequence: Synthetic oligonucleotide
aauagggcagcaacugcuu

SEQ ID NO: 523036 - RNA, 19 nt, Artificial Sequence
  Description of Artificial Sequence: Synthetic oligonucleotide
ugauggcaccuccaugaau

SEQ ID NO: 523037 - RNA, 19 nt, Artificial Sequence
  Description of Artificial Sequence: Synthetic oligonucleotide
gaguuucacgcucuaaaau

SEQ ID NO: 523038 - RNA, 19 nt, Artificial Sequence
  Description of Artificial Sequence: Synthetic oligonucleotide
uuuagacgcccgucuucug

SEQ ID NO: 523039 - RNA, 19 nt, Artificial Sequence
  Description of Artificial Sequence: Synthetic oligonucleotide
ugccuuuuguccgcuuaag

SEQ ID NO: 523040 - RNA, 19 nt, Artificial Sequence
  Description of Artificial Sequence: Synthetic oligonucleotide
agugauucagaugcauuua

SEQ ID NO: 523041 - RNA, 19 nt, Artificial Sequence
  Description of Artificial Sequence: Synthetic oligonucleotide
uuggcaagcucuugcugau

SEQ ID NO: 523042 - RNA, 19 nt, Artificial Sequence
  Description of Artificial Sequence: Synthetic oligonucleotide
agugccuuuuguccgcuua

SEQ ID NO: 523043 - RNA, 19 nt, Artificial Sequence
  Description of Artificial Sequence: Synthetic oligonucleotide
ccucaauuauucugucucc

SEQ ID NO: 523044 - RNA, 19 nt, Artificial Sequence
  Description of Artificial Sequence: Synthetic oligonucleotide
cuaacauauuuucaguguu

SEQ ID NO: 523045 - RNA, 19 nt, Artificial Sequence
  Description of Artificial Sequence: Synthetic oligonucleotide
uccagugauucagaugcau

SEQ ID NO: 523046 - RNA, 19 nt, Artificial Sequence
  Description of Artificial Sequence: Synthetic oligonucleotide
cccguugacagcaaugauc

SEQ ID NO: 523047 - RNA, 19 nt, Artificial Sequence
  Description of Artificial Sequence: Synthetic oligonucleotide
cauccggaaauauacugcu

SEQ ID NO: 523048 - RNA, 19 nt, Artificial Sequence
  Description of Artificial Sequence: Synthetic oligonucleotide
guaagacugcuaaacaggu

SEQ ID NO: 523049 - RNA, 19 nt, Artificial Sequence
  Description of Artificial Sequence: Synthetic oligonucleotide
aaaugggauugaacacaug

SEQ ID NO: 523050 - RNA, 19 nt, Artificial Sequence
  Description of Artificial Sequence: Synthetic oligonucleotide
gaccugugaccacacucac

SEQ ID NO: 523051 - RNA, 19 nt, Artificial Sequence
  Description of Artificial Sequence: Synthetic oligonucleotide
gguugauucuucauuaaua

SEQ ID NO: 523052 - RNA, 19 nt, Artificial Sequence
  Description of Artificial Sequence: Synthetic oligonucleotide
ggcuggaugguuguuuucc

SEQ ID NO: 523053 - RNA, 19 nt, Artificial Sequence
  Description of Artificial Sequence: Synthetic oligonucleotide
acacggguuggcaagcucu

SEQ ID NO: 523054 - RNA, 19 nt, Artificial Sequence
  Description of Artificial Sequence: Synthetic oligonucleotide
gaagccuaagccaucuggu

SEQ ID NO: 523055 - RNA, 19 nt, Artificial Sequence
  Description of Artificial Sequence: Synthetic oligonucleotide
guuugaugaauaugccccu

SEQ ID NO: 523056 - RNA, 19 nt, Artificial Sequence
  Description of Artificial Sequence: Synthetic oligonucleotide
auggcuggaugguuguuuu

SEQ ID NO: 523057 - RNA, 19 nt, Artificial Sequence
  Description of Artificial Sequence: Synthetic oligonucleotide
augggauugaacacaugau

SEQ ID NO: 523058 - RNA, 19 nt, Artificial Sequence
  Description of Artificial Sequence: Synthetic oligonucleotide
guaagucuccaugagggcu

SEQ ID NO: 523059 - RNA, 19 nt, Artificial Sequence
  Description of Artificial Sequence: Synthetic oligonucleotide
ugaucugaucgccccuuuu

SEQ ID NO: 523060 - RNA, 19 nt, Artificial Sequence
  Description of Artificial Sequence: Synthetic oligonucleotide
cauuaagauuaauacuaau

SEQ ID NO: 523061 - RNA, 19 nt, Artificial Sequence
  Description of Artificial Sequence: Synthetic oligonucleotide
guacacuacuccuguuaca

SEQ ID NO: 523062 - RNA, 19 nt, Artificial Sequence
  Description of Artificial Sequence: Synthetic oligonucleotide
agucauccggaaauauacu

SEQ ID NO: 523063 - RNA, 19 nt, Artificial Sequence
  Description of Artificial Sequence: Synthetic oligonucleotide
uuccguggaugugccacag

SEQ ID NO: 523064 - RNA, 19 nt, Artificial Sequence
  Description of Artificial Sequence: Synthetic oligonucleotide
cauuauuccuccagauugu

SEQ ID NO: 523065 - RNA, 19 nt, Artificial Sequence
  Description of Artificial Sequence: Synthetic oligonucleotide
uuacuccuucuagacucug

SEQ ID NO: 523066 - RNA, 19 nt, Artificial Sequence
  Description of Artificial Sequence: Synthetic oligonucleotide
guucuuaaucccugaauuu

SEQ ID NO: 523067 - RNA, 19 nt, Artificial Sequence
  Description of Artificial Sequence: Synthetic oligonucleotide
cacuacuccuguuacaaau

SEQ ID NO: 523068 - RNA, 19 nt, Artificial Sequence
  Description of Artificial Sequence: Synthetic oligonucleotide
auuauuccuccagauuguu

SEQ ID NO: 523069 - RNA, 19 nt, Artificial Sequence
  Description of Artificial Sequence: Synthetic oligonucleotide
aagcuuaguaagacugcua

SEQ ID NO: 523070 - RNA, 19 nt, Artificial Sequence
  Description of Artificial Sequence: Synthetic oligonucleotide
ucugcccguugacagcaau

SEQ ID NO: 523071 - RNA, 19 nt, Artificial Sequence
  Description of Artificial Sequence: Synthetic oligonucleotide
cucaccaguugucucagua

SEQ ID NO: 523072 - RNA, 19 nt, Artificial Sequence
  Description of Artificial Sequence: Synthetic oligonucleotide
uagccaacacaggguaaca

SEQ ID NO: 523073 - RNA, 19 nt, Artificial Sequence
  Description of Artificial Sequence: Synthetic oligonucleotide
uucggggcuccuuccuaug

SEQ ID NO: 523074 - RNA, 19 nt, Artificial Sequence
  Description of Artificial Sequence: Synthetic oligonucleotide
ccugcaucaaucucccauc

SEQ ID NO: 523075 - RNA, 19 nt, Artificial Sequence
  Description of Artificial Sequence: Synthetic oligonucleotide
agguccuaagucauccgga

SEQ ID NO: 523076 - RNA, 19 nt, Artificial Sequence
  Description of Artificial Sequence: Synthetic oligonucleotide
accuggcuacuuugagaag

SEQ ID NO: 523077 - RNA, 19 nt, Artificial Sequence
  Description of Artificial Sequence: Synthetic oligonucleotide
ggaaaggaccagcuuuuga

SEQ ID NO: 523078 - RNA, 19 nt, Artificial Sequence
  Description of Artificial Sequence: Synthetic oligonucleotide
ccucggucuaguguuauag

SEQ ID NO: 523079 - RNA, 19 nt, Artificial Sequence
  Description of Artificial Sequence: Synthetic oligonucleotide
ugauucccagcgaguccga

SEQ ID NO: 523080 - RNA, 19 nt, Artificial Sequence
  Description of Artificial Sequence: Synthetic oligonucleotide
gacacggguuggcaagcuc

SEQ ID NO: 523081 - RNA, 19 nt, Artificial Sequence
  Description of Artificial Sequence: Synthetic oligonucleotide
caggguuacugugccuagg

SEQ ID NO: 523082 - RNA, 19 nt, Artificial Sequence
  Description of Artificial Sequence: Synthetic oligonucleotide
cagugauucagaugcauuu

SEQ ID NO: 523083 - RNA, 19 nt, Artificial Sequence
  Description of Artificial Sequence: Synthetic oligonucleotide
guguacaaccaaaauaauu

SEQ ID NO: 523084 - RNA, 19 nt, Artificial Sequence
  Description of Artificial Sequence: Synthetic oligonucleotide
augagggcugccauauccu

SEQ ID NO: 523085 - RNA, 19 nt, Artificial Sequence
  Description of Artificial Sequence: Synthetic oligonucleotide
gacgcccgucuucugcggc

SEQ ID NO: 523086 - RNA, 19 nt, Artificial Sequence
  Description of Artificial Sequence: Synthetic oligonucleotide
caauccggccacucccgac

SEQ ID NO: 523087 - RNA, 19 nt, Artificial Sequence
  Description of Artificial Sequence: Synthetic oligonucleotide
agacugcuaaacaggucca

SEQ ID NO: 523088 - RNA, 19 nt, Artificial Sequence
  Description of Artificial Sequence: Synthetic oligonucleotide
cugcaucaaucucccauca

SEQ ID NO: 523089 - RNA, 19 nt, Artificial Sequence
  Description of Artificial Sequence: Synthetic oligonucleotide
augcaucauugcaauaaau

SEQ ID NO: 523090 - RNA, 19 nt, Artificial Sequence
  Description of Artificial Sequence: Synthetic oligonucleotide
cucggaguuucuggguuug

SEQ ID NO: 523091 - RNA, 19 nt, Artificial Sequence
  Description of Artificial Sequence: Synthetic oligonucleotide
uccguggaugugccacaga

SEQ ID NO: 523092 - RNA, 19 nt, Artificial Sequence
  Description of Artificial Sequence: Synthetic oligonucleotide
cacuagaaaguucggggcu

SEQ ID NO: 523093 - RNA, 19 nt, Artificial Sequence
  Description of Artificial Sequence: Synthetic oligonucleotide
ccagauuguugaccaaaac

SEQ ID NO: 523094 - RNA, 19 nt, Artificial Sequence
  Description of Artificial Sequence: Synthetic oligonucleotide
ccguugacagcaaugaucu

SEQ ID NO: 523095 - RNA, 19 nt, Artificial Sequence
  Description of Artificial Sequence: Synthetic oligonucleotide
uaggaguuucacgcucuaa

SEQ ID NO: 523096 - RNA, 19 nt, Artificial Sequence
  Description of Artificial Sequence: Synthetic oligonucleotide
agguccaauuagagaaugu

SEQ ID NO: 523097 - RNA, 19 nt, Artificial Sequence
  Description of Artificial Sequence: Synthetic oligonucleotide
ggauugaacacaugauaau

SEQ ID NO: 523098 - RNA, 19 nt, Artificial Sequence
  Description of Artificial Sequence: Synthetic oligonucleotide
uacuaacgcacugccuuuu

SEQ ID NO: 523099 - RNA, 19 nt, Artificial Sequence
  Description of Artificial Sequence: Synthetic oligonucleotide
gccugcauucugcaguuca

SEQ ID NO: 523100 - RNA, 19 nt, Artificial Sequence
  Description of Artificial Sequence: Synthetic oligonucleotide
auccggccacucccgacug

SEQ ID NO: 523101 - RNA, 19 nt, Artificial Sequence
  Description of Artificial Sequence: Synthetic oligonucleotide
cuuccguggaugugccaca

SEQ ID NO: 523102 - RNA, 19 nt, Artificial Sequence
  Description of Artificial Sequence: Synthetic oligonucleotide
guccuaagucauccggaaa

SEQ ID NO: 523103 - RNA, 19 nt, Artificial Sequence
  Description of Artificial Sequence: Synthetic oligonucleotide
cuacuccuguuacaaauau

SEQ ID NO: 523104 - RNA, 19 nt, Artificial Sequence
  Description of Artificial Sequence: Synthetic oligonucleotide
cacagaugguaacaauccu

SEQ ID NO: 523105 - RNA, 19 nt, Artificial Sequence
  Description of Artificial Sequence: Synthetic oligonucleotide
caguguugugucaguaugu

SEQ ID NO: 523106 - RNA, 19 nt, Artificial Sequence
  Description of Artificial Sequence: Synthetic oligonucleotide
acucaccuggcuacuuuga

SEQ ID NO: 523107 - RNA, 19 nt, Artificial Sequence
  Description of Artificial Sequence: Synthetic oligonucleotide
cacucccgacugauggcac

SEQ ID NO: 523108 - RNA, 19 nt, Artificial Sequence
  Description of Artificial Sequence: Synthetic oligonucleotide
ccuuccguggaugugccac

SEQ ID NO: 523109 - RNA, 19 nt, Artificial Sequence
  Description of Artificial Sequence: Synthetic oligonucleotide
ggucuaguguuauagucuu

SEQ ID NO: 523110 - RNA, 19 nt, Artificial Sequence
  Description of Artificial Sequence: Synthetic oligonucleotide
caaugcugauucccagcga

SEQ ID NO: 523111 - RNA, 19 nt, Artificial Sequence
  Description of Artificial Sequence: Synthetic oligonucleotide
uggcaagcucuugcugaug

SEQ ID NO: 523112 - RNA, 19 nt, Artificial Sequence
  Description of Artificial Sequence: Synthetic oligonucleotide
acgcccgucuucugcggcu

SEQ ID NO: 523113 - RNA, 19 nt, Artificial Sequence
  Description of Artificial Sequence: Synthetic oligonucleotide
uuguccgcuuaaggauggc

SEQ ID NO: 523114 - RNA, 19 nt, Artificial Sequence
  Description of Artificial Sequence: Synthetic oligonucleotide
cuauccccaacucggaguu

SEQ ID NO: 523115 - RNA, 19 nt, Artificial Sequence
  Description of Artificial Sequence: Synthetic oligonucleotide
ccggaaauauacugcuuga

SEQ ID NO: 523116 - RNA, 19 nt, Artificial Sequence
  Description of Artificial Sequence: Synthetic oligonucleotide
auccuauccccaacucgga

SEQ ID NO: 523117 - RNA, 19 nt, Artificial Sequence
  Description of Artificial Sequence: Synthetic oligonucleotide
uucugcggcugcucccuuu

SEQ ID NO: 523118 - RNA, 19 nt, Artificial Sequence
  Description of Artificial Sequence: Synthetic oligonucleotide
agacacggguuggcaagcu

SEQ ID NO: 523119 - RNA, 19 nt, Artificial Sequence
  Description of Artificial Sequence: Synthetic oligonucleotide
cucggucuaguguuauagu

SEQ ID NO: 523120 - RNA, 19 nt, Artificial Sequence
  Description of Artificial Sequence: Synthetic oligonucleotide
cacgcucuaaaaugggauu

SEQ ID NO: 523121 - RNA, 19 nt, Artificial Sequence
  Description of Artificial Sequence: Synthetic oligonucleotide
agcgaguccgaaggucccu

SEQ ID NO: 523122 - RNA, 19 nt, Artificial Sequence
  Description of Artificial Sequence: Synthetic oligonucleotide
acggguuggcaagcucuug

SEQ ID NO: 523123 - RNA, 19 nt, Artificial Sequence
  Description of Artificial Sequence: Synthetic oligonucleotide
ccggacugucuucaagaac

SEQ ID NO: 523124 - RNA, 19 nt, Artificial Sequence
  Description of Artificial Sequence: Synthetic oligonucleotide
caaugaucugaucgccccu

SEQ ID NO: 523125 - RNA, 19 nt, Artificial Sequence
  Description of Artificial Sequence: Synthetic oligonucleotide
cccgacugauggcaccucc

SEQ ID NO: 523126 - RNA, 19 nt, Artificial Sequence
  Description of Artificial Sequence: Synthetic oligonucleotide
caacucggaguuucugggu

SEQ ID NO: 523127 - RNA, 19 nt, Artificial Sequence
  Description of Artificial Sequence: Synthetic oligonucleotide
gauucccagcgaguccgaa

SEQ ID NO: 523128 - RNA, 19 nt, Artificial Sequence
  Description of Artificial Sequence: Synthetic oligonucleotide
auccggaaauauacugcuu

SEQ ID NO: 523129 - RNA, 19 nt, Artificial Sequence
  Description of Artificial Sequence: Synthetic oligonucleotide
cugcaggcacguaaguaau

SEQ ID NO: 523130 - RNA, 19 nt, Artificial Sequence
  Description of Artificial Sequence: Synthetic oligonucleotide
cccgcucugggaguucugg

SEQ ID NO: 523131 - RNA, 19 nt, Artificial Sequence
  Description of Artificial Sequence: Synthetic oligonucleotide
ccuguucaggagagaacca

SEQ ID NO: 523132 - RNA, 19 nt, Artificial Sequence
  Description of Artificial Sequence: Synthetic oligonucleotide
gaguccgaaggucccuuuu

SEQ ID NO: 523133 - RNA, 19 nt, Artificial Sequence
  Description of Artificial Sequence: Synthetic oligonucleotide
gauaugcauuaaacacgau

SEQ ID NO: 523134 - RNA, 19 nt, Artificial Sequence
  Description of Artificial Sequence: Synthetic oligonucleotide
ccuuuagucuuaaacuauu

SEQ ID NO: 523135 - RNA, 19 nt, Artificial Sequence
  Description of Artificial Sequence: Synthetic oligonucleotide
gccauuauuccuccagauu

SEQ ID NO: 523136 - RNA, 19 nt, Artificial Sequence
  Description of Artificial Sequence: Synthetic oligonucleotide
cugugccuagggaacacuu

SEQ ID NO: 523137 - RNA, 19 nt, Artificial Sequence
  Description of Artificial Sequence: Synthetic oligonucleotide
gucuaguguuauagucuua

SEQ ID NO: 523138 - RNA, 19 nt, Artificial Sequence
  Description of Artificial Sequence: Synthetic oligonucleotide
caggcacguaaguaauuuu

SEQ ID NO: 523139 - RNA, 19 nt, Artificial Sequence
  Description of Artificial Sequence: Synthetic oligonucleotide
cggucuaguguuauagucu

SEQ ID NO: 523140 - RNA, 19 nt, Artificial Sequence
  Description of Artificial Sequence: Synthetic oligonucleotide
gcaauccggccacucccga

SEQ ID NO: 523141 - RNA, 19 nt, Artificial Sequence
  Description of Artificial Sequence: Synthetic oligonucleotide
gcaggcacguaaguaauuu

SEQ ID NO: 523142 - RNA, 19 nt, Artificial Sequence
  Description of Artificial Sequence: Synthetic oligonucleotide
ccgacugauggcaccucca

SEQ ID NO: 523143 - RNA, 19 nt, Artificial Sequence
  Description of Artificial Sequence: Synthetic oligonucleotide
cccagcgaguccgaagguc

SEQ ID NO: 523144 - RNA, 19 nt, Artificial Sequence
  Description of Artificial Sequence: Synthetic oligonucleotide
ccguggaugugccacagau

SEQ ID NO: 523145 - RNA, 19 nt, Artificial Sequence
  Description of Artificial Sequence: Synthetic oligonucleotide
ccacucccgacugauggca

SEQ ID NO: 523146 - RNA, 19 nt, Artificial Sequence
  Description of Artificial Sequence: Synthetic oligonucleotide
cucccgacugauggcaccu

SEQ ID NO: 523147 - RNA, 19 nt, Artificial Sequence
  Description of Artificial Sequence: Synthetic oligonucleotide
ccagugauucagaugcauu

SEQ ID NO: 523148 - RNA, 19 nt, Artificial Sequence
  Description of Artificial Sequence: Synthetic oligonucleotide
ggcuugcaucucugagguc

SEQ ID NO: 523149 - RNA, 19 nt, Artificial Sequence
  Description of Artificial Sequence: Synthetic oligonucleotide
cucuugccugggcauuggu

SEQ ID NO: 523150 - RNA, 19 nt, Artificial Sequence
  Description of Artificial Sequence: Synthetic oligonucleotide
cacggguuggcaagcucuu

SEQ ID NO: 523151 - RNA, 19 nt, Artificial Sequence
  Description of Artificial Sequence: Synthetic oligonucleotide
gcaacaccguuuggaugca

SEQ ID NO: 523152 - RNA, 19 nt, Artificial Sequence
  Description of Artificial Sequence: Synthetic oligonucleotide
cgcucuaaaaugggauuga

SEQ ID NO: 523153 - RNA, 19 nt, Artificial Sequence
  Description of Artificial Sequence: Synthetic oligonucleotide
caccguuuggaugcaucau

SEQ ID NO: 523154 - RNA, 19 nt, Artificial Sequence
  Description of Artificial Sequence: Synthetic oligonucleotide
ccaugagggcugccauauc

SEQ ID NO: 523155 - RNA, 19 nt, Artificial Sequence
  Description of Artificial Sequence: Synthetic oligonucleotide
ccccucauuacuucaccau

SEQ ID NO: 523156 - RNA, 19 nt, Artificial Sequence
  Description of Artificial Sequence: Synthetic oligonucleotide
caagggugacagugccuuu

SEQ ID NO: 523157 - RNA, 19 nt, Artificial Sequence
  Description of Artificial Sequence: Synthetic oligonucleotide
guccucggucuaguguuau

SEQ ID NO: 523158 - RNA, 19 nt, Artificial Sequence
  Description of Artificial Sequence: Synthetic oligonucleotide
ccaggcuucaagguccguu

SEQ ID NO: 523159 - RNA, 19 nt, Artificial Sequence
  Description of Artificial Sequence: Synthetic oligonucleotide
cgacugauggcaccuccau

SEQ ID NO: 523160 - RNA, 19 nt, Artificial Sequence
  Description of Artificial Sequence: Synthetic oligonucleotide
cgcccgucuucugcggcug

SEQ ID NO: 523161 - RNA, 19 nt, Artificial Sequence
  Description of Artificial Sequence: Synthetic oligonucleotide
gcgaguccgaaggucccuu

SEQ ID NO: 523162 - RNA, 19 nt, Artificial Sequence
  Description of Artificial Sequence: Synthetic oligonucleotide
aaaauguacacccacuccc

SEQ ID NO: 523163 - RNA, 19 nt, Artificial Sequence
  Description of Artificial Sequence: Synthetic oligonucleotide
uauaaaucagggaugaucc

SEQ ID NO: 523164 - RNA, 19 nt, Artificial Sequence
  Description of Artificial Sequence: Synthetic oligonucleotide
auugaaguuacuuagaaaa

SEQ ID NO: 523165 - RNA, 19 nt, Artificial Sequence
  Description of Artificial Sequence: Synthetic oligonucleotide
aauaagaauccuuagacuu

SEQ ID NO: 523166 - RNA, 19 nt, Artificial Sequence
  Description of Artificial Sequence: Synthetic oligonucleotide
ucuacuaccaagauagugc

SEQ ID NO: 523167 - RNA, 19 nt, Artificial Sequence
  Description of Artificial Sequence: Synthetic oligonucleotide
aauaacuauaaauaagaau

SEQ ID NO: 523168 - RNA, 19 nt, Artificial Sequence
  Description of Artificial Sequence: Synthetic oligonucleotide
aaugacuagaaaugaggac

SEQ ID NO: 523169 - RNA, 19 nt, Artificial Sequence
  Description of Artificial Sequence: Synthetic oligonucleotide
aacguaaucaaucaccaca

SEQ ID NO: 523170 - RNA, 19 nt, Artificial Sequence
  Description of Artificial Sequence: Synthetic oligonucleotide
  modified_base (16)..(16): a, c, u, g, unknown or other
uuauuuguuccuaagnuau

SEQ ID NO: 523171 - RNA, 19 nt, Artificial Sequence
  Description of Artificial Sequence: Synthetic oligonucleotide
agaauucuacaacaggccc

SEQ ID NO: 523172 - RNA, 19 nt, Artificial Sequence
  Description of Artificial Sequence: Synthetic oligonucleotide
uuucuuauuuaauugaagu

SEQ ID NO: 523173 - RNA, 19 nt, Artificial Sequence
  Description of Artificial Sequence: Synthetic oligonucleotide
ugaucaauaagguuucugc

SEQ ID NO: 523174 - RNA, 19 nt, Artificial Sequence
  Description of Artificial Sequence: Synthetic oligonucleotide
uucuuuaacaguauaguaa

SEQ ID NO: 523175 - RNA, 19 nt, Artificial Sequence
  Description of Artificial Sequence: Synthetic oligonucleotide
uaguuaaggugacugaucc

SEQ ID NO: 523176 - RNA, 19 nt, Artificial Sequence
  Description of Artificial Sequence: Synthetic oligonucleotide
acuuaagucacugagcuag

SEQ ID NO: 523177 - RNA, 19 nt, Artificial Sequence
  Description of Artificial Sequence: Synthetic oligonucleotide
aguuacuuagaaaauaauc

SEQ ID NO: 523178 - RNA, 19 nt, Artificial Sequence
  Description of Artificial Sequence: Synthetic oligonucleotide
ugaaaugccggcuaagaca

SEQ ID NO: 523179 - RNA, 19 nt, Artificial Sequence
  Description of Artificial Sequence: Synthetic oligonucleotide
augcaaauuuucuaggguc

SEQ ID NO: 523180 - RNA, 19 nt, Artificial Sequence
  Description of Artificial Sequence: Synthetic oligonucleotide
uauuaacuuacaaaauaac

SEQ ID NO: 523181 - RNA, 19 nt, Artificial Sequence
  Description of Artificial Sequence: Synthetic oligonucleotide
aaaugcugcauucucccag

SEQ ID NO: 523182 - RNA, 19 nt, Artificial Sequence
  Description of Artificial Sequence: Synthetic oligonucleotide
ucaacguaaucaaucacca

SEQ ID NO: 523183 - RNA, 19 nt, Artificial Sequence
  Description of Artificial Sequence: Synthetic oligonucleotide
uccuagcuaagcaugacag

SEQ ID NO: 523184 - RNA, 19 nt, Artificial Sequence
  Description of Artificial Sequence: Synthetic oligonucleotide
aaucagggaugauccaccc

SEQ ID NO: 523185 - RNA, 19 nt, Artificial Sequence
  Description of Artificial Sequence: Synthetic oligonucleotide
acaaaauaacccaguaucc

SEQ ID NO: 523186 - RNA, 19 nt, Artificial Sequence
  Description of Artificial Sequence: Synthetic oligonucleotide
aaaauuugccugcugcugu

SEQ ID NO: 523187 - RNA, 19 nt, Artificial Sequence
  Description of Artificial Sequence: Synthetic oligonucleotide
gugguuuucaaauuugagc

SEQ ID NO: 523188 - RNA, 19 nt, Artificial Sequence
  Description of Artificial Sequence: Synthetic oligonucleotide
uuaugggacgcauaguuug

SEQ ID NO: 523189 - RNA, 19 nt, Artificial Sequence
  Description of Artificial Sequence: Synthetic oligonucleotide
gaucaauaagguuucugcc

SEQ ID NO: 523190 - RNA, 19 nt, Artificial Sequence
  Description of Artificial Sequence: Synthetic oligonucleotide
auucuuacuaugccgcucg

SEQ ID NO: 523191 - RNA, 19 nt, Artificial Sequence
  Description of Artificial Sequence: Synthetic oligonucleotide
  modified_base (4)..(4): a, c, u, g, unknown or other
aagnuaugugaccaccuca

SEQ ID NO: 523192 - RNA, 19 nt, Artificial Sequence
  Description of Artificial Sequence: Synthetic oligonucleotide
aauucuacaacaggcccuc

SEQ ID NO: 523193 - RNA, 19 nt, Artificial Sequence
  Description of Artificial Sequence: Synthetic oligonucleotide
gauagugcaguagacauac

SEQ ID NO: 523194 - RNA, 19 nt, Artificial Sequence
  Description of Artificial Sequence: Synthetic oligonucleotide
ugugguuuucaaauuugag

SEQ ID NO: 523195 - RNA, 19 nt, Artificial Sequence
  Description of Artificial Sequence: Synthetic oligonucleotide
ugaccuucaugccugaucu

SEQ ID NO: 523196 - RNA, 19 nt, Artificial Sequence
  Description of Artificial Sequence: Synthetic oligonucleotide
uggaggaacauuucacgcg

SEQ ID NO: 523197 - RNA, 19 nt, Artificial Sequence
  Description of Artificial Sequence: Synthetic oligonucleotide
ucugcuauacaggacaccc

SEQ ID NO: 523198 - RNA, 19 nt, Artificial Sequence
  Description of Artificial Sequence: Synthetic oligonucleotide
ugcaccuuugaacaguggc

SEQ ID NO: 523199 - RNA, 19 nt, Artificial Sequence
  Description of Artificial Sequence: Synthetic oligonucleotide
aaaugacuagaaaugagga

SEQ ID NO: 523200 - RNA, 19 nt, Artificial Sequence
  Description of Artificial Sequence: Synthetic oligonucleotide
agaucacccucacugaagg

SEQ ID NO: 523201 - RNA, 19 nt, Artificial Sequence
  Description of Artificial Sequence: Synthetic oligonucleotide
aucaauaagguuucugcca

SEQ ID NO: 523202 - RNA, 19 nt, Artificial Sequence
  Description of Artificial Sequence: Synthetic oligonucleotide
gagucaguccugcugacgg

SEQ ID NO: 523203 - RNA, 19 nt, Artificial Sequence
  Description of Artificial Sequence: Synthetic oligonucleotide
auaaauuuccucaaugaga

SEQ ID NO: 523204 - RNA, 19 nt, Artificial Sequence
  Description of Artificial Sequence: Synthetic oligonucleotide
caacaguccaccuuugacc

SEQ ID NO: 523205 - RNA, 19 nt, Artificial Sequence
  Description of Artificial Sequence: Synthetic oligonucleotide
ugacugauccaaaugugug

SEQ ID NO: 523206 - RNA, 19 nt, Artificial Sequence
  Description of Artificial Sequence: Synthetic oligonucleotide
cucaaugagacagagcagc

SEQ ID NO: 523207 - RNA, 19 nt, Artificial Sequence
  Description of Artificial Sequence: Synthetic oligonucleotide
cuuacuaugccgcucgcag

SEQ ID NO: 523208 - RNA, 19 nt, Artificial Sequence
  Description of Artificial Sequence: Synthetic oligonucleotide
guguugaucagcaagaaca

SEQ ID NO: 523209 - RNA, 19 nt, Artificial Sequence
  Description of Artificial Sequence: Synthetic oligonucleotide
cuuguguugggcaaugaac

SEQ ID NO: 523210 - RNA, 19 nt, Artificial Sequence
  Description of Artificial Sequence: Synthetic oligonucleotide
  modified_base (10)..(10): a, c, u, g, unknown or other
guuccuaagnuaugugacc

SEQ ID NO: 523211 - RNA, 19 nt, Artificial Sequence
  Description of Artificial Sequence: Synthetic oligonucleotide
cauuucacgcgucuguugg

SEQ ID NO: 523212 - RNA, 19 nt, Artificial Sequence
  Description of Artificial Sequence: Synthetic oligonucleotide
aaggugacugauccaaaug

SEQ ID NO: 523213 - RNA, 19 nt, Artificial Sequence
  Description of Artificial Sequence: Synthetic oligonucleotide
acaggcaucuacuaccaag

SEQ ID NO: 523214 - RNA, 19 nt, Artificial Sequence
  Description of Artificial Sequence: Synthetic oligonucleotide
caguauaguaagauacagg

SEQ ID NO: 523215 - RNA, 19 nt, Artificial Sequence
  Description of Artificial Sequence: Synthetic oligonucleotide
ucaauaagguuucugccau

SEQ ID NO: 523216 - RNA, 19 nt, Artificial Sequence
  Description of Artificial Sequence: Synthetic oligonucleotide
augugagccuaacaauacc

SEQ ID NO: 523217 - RNA, 19 nt, Artificial Sequence
  Description of Artificial Sequence: Synthetic oligonucleotide
  modified_base (12)..(12): a, c, u, g, unknown or other
uuguuccuaagnuauguga

SEQ ID NO: 523218 - RNA, 19 nt, Artificial Sequence
  Description of Artificial Sequence: Synthetic oligonucleotide
cauucuacuugacuguacc

SEQ ID NO: 523219 - RNA, 19 nt, Artificial Sequence
  Description of Artificial Sequence: Synthetic oligonucleotide
ugcuaaucuuugcagaccu

SEQ ID NO: 523220 - RNA, 19 nt, Artificial Sequence
  Description of Artificial Sequence: Synthetic oligonucleotide
uuugaacaguggcucagag

SEQ ID NO: 523221 - RNA, 19 nt, Artificial Sequence
  Description of Artificial Sequence: Synthetic oligonucleotide
uacaacaggcccucgacug

SEQ ID NO: 523222 - RNA, 19 nt, Artificial Sequence
  Description of Artificial Sequence: Synthetic oligonucleotide
uguuacaguuuccacuucu

SEQ ID NO: 523223 - RNA, 19 nt, Artificial Sequence
  Description of Artificial Sequence: Synthetic oligonucleotide
cuucuauaaaucagggaug

SEQ ID NO: 523224 - RNA, 19 nt, Artificial Sequence
  Description of Artificial Sequence: Synthetic oligonucleotide
gaaaugccggcuaagacac

SEQ ID NO: 523225 - RNA, 19 nt, Artificial Sequence
  Description of Artificial Sequence: Synthetic oligonucleotide
guaaucaaucaccacacuc

SEQ ID NO: 523226 - RNA, 19 nt, Artificial Sequence
  Description of Artificial Sequence: Synthetic oligonucleotide
uucuuauuuaauugaaguu

SEQ ID NO: 523227 - RNA, 19 nt, Artificial Sequence
  Description of Artificial Sequence: Synthetic oligonucleotide
gucaacguaaucaaucacc

SEQ ID NO: 523228 - RNA, 19 nt, Artificial Sequence
  Description of Artificial Sequence: Synthetic oligonucleotide
uaugccuuacugagcaugc

SEQ ID NO: 523229 - RNA, 19 nt, Artificial Sequence
  Description of Artificial Sequence: Synthetic oligonucleotide
auguacacccacucccucc

SEQ ID NO: 523230 - RNA, 19 nt, Artificial Sequence
  Description of Artificial Sequence: Synthetic oligonucleotide
aaaccaacuaaaauacaga

SEQ ID NO: 523231 - RNA, 19 nt, Artificial Sequence
  Description of Artificial Sequence: Synthetic oligonucleotide
caaaauguacacccacucc

SEQ ID NO: 523232 - RNA, 19 nt, Artificial Sequence
  Description of Artificial Sequence: Synthetic oligonucleotide
ucuccuacccaccugcaca

SEQ ID NO: 523233 - RNA, 19 nt, Artificial Sequence
  Description of Artificial Sequence: Synthetic oligonucleotide
uaguaagauacagggagag

SEQ ID NO: 523234 - RNA, 19 nt, Artificial Sequence
  Description of Artificial Sequence: Synthetic oligonucleotide
aggugacugauccaaaugu

SEQ ID NO: 523235 - RNA, 19 nt, Artificial Sequence
  Description of Artificial Sequence: Synthetic oligonucleotide
ugaggacuaggucugggug

SEQ ID NO: 523236 - RNA, 19 nt, Artificial Sequence
  Description of Artificial Sequence: Synthetic oligonucleotide
ugacuuauuuguuccuaag

SEQ ID NO: 523237 - RNA, 19 nt, Artificial Sequence
  Description of Artificial Sequence: Synthetic oligonucleotide
cagaccaaaauuugccugc

SEQ ID NO: 523238 - RNA, 19 nt, Artificial Sequence
  Description of Artificial Sequence: Synthetic oligonucleotide
accacguuuaaauaacuau

SEQ ID NO: 523239 - RNA, 19 nt, Artificial Sequence
  Description of Artificial Sequence: Synthetic oligonucleotide
ugacaggcaugcaagagaa

SEQ ID NO: 523240 - RNA, 19 nt, Artificial Sequence
  Description of Artificial Sequence: Synthetic oligonucleotide
cagcuaaguagucaugucc

SEQ ID NO: 523241 - RNA, 19 nt, Artificial Sequence
  Description of Artificial Sequence: Synthetic oligonucleotide
aacccaguauccauagaac

SEQ ID NO: 523242 - RNA, 19 nt, Artificial Sequence
  Description of Artificial Sequence: Synthetic oligonucleotide
ggcuagaucacccucacug

SEQ ID NO: 523243 - RNA, 19 nt, Artificial Sequence
  Description of Artificial Sequence: Synthetic oligonucleotide
uacuaugccgcucgcagca

SEQ ID NO: 523244 - RNA, 19 nt, Artificial Sequence
  Description of Artificial Sequence: Synthetic oligonucleotide
acguaaucaaucaccacac

SEQ ID NO: 523245 - RNA, 19 nt, Artificial Sequence
  Description of Artificial Sequence: Synthetic oligonucleotide
uuacccaaggcagaccagg

SEQ ID NO: 523246 - RNA, 19 nt, Artificial Sequence
  Description of Artificial Sequence: Synthetic oligonucleotide
ucuacaacaggcccucgac

SEQ ID NO: 523247 - RNA, 19 nt, Artificial Sequence
  Description of Artificial Sequence: Synthetic oligonucleotide
cacaaggcagacaauguac

SEQ ID NO: 523248 - RNA, 19 nt, Artificial Sequence
  Description of Artificial Sequence: Synthetic oligonucleotide
cugagaggggcacugaggc

SEQ ID NO: 523249 - RNA, 19 nt, Artificial Sequence
  Description of Artificial Sequence: Synthetic oligonucleotide
  modified_base (5)..(5): a, c, u, g, unknown or other
uaagnuaugugaccaccuc

SEQ ID NO: 523250 - RNA, 19 nt, Artificial Sequence
  Description of Artificial Sequence: Synthetic oligonucleotide
  modified_base (9)..(9): a, c, u, g, unknown or other
uuccuaagnuaugugacca

SEQ ID NO: 523251 - RNA, 19 nt, Artificial Sequence
  Description of Artificial Sequence: Synthetic oligonucleotide
uccccuaucauuagaacua

SEQ ID NO: 523252 - RNA, 19 nt, Artificial Sequence
  Description of Artificial Sequence: Synthetic oligonucleotide
gaggcuuacaggcaucuac

SEQ ID NO: 523253 - RNA, 19 nt, Artificial Sequence
  Description of Artificial Sequence: Synthetic oligonucleotide
uaaauucuauguccauaug

SEQ ID NO: 523254 - RNA, 19 nt, Artificial Sequence
  Description of Artificial Sequence: Synthetic oligonucleotide
acuaccaagauagugcagu

SEQ ID NO: 523255 - RNA, 19 nt, Artificial Sequence
  Description of Artificial Sequence: Synthetic oligonucleotide
  modified_base (19)..(19): a, c, u, g, unknown or other
gacuuauuuguuccuaagn

SEQ ID NO: 523256 - RNA, 19 nt, Artificial Sequence
  Description of Artificial Sequence: Synthetic oligonucleotide
aagagguguacuggcgacc

SEQ ID NO: 523257 - RNA, 19 nt, Artificial Sequence
  Description of Artificial Sequence: Synthetic oligonucleotide
uacagauacugccuuuugu

SEQ ID NO: 523258 - RNA, 19 nt, Artificial Sequence
  Description of Artificial Sequence: Synthetic oligonucleotide
uguugggcaaugaacuuaa

SEQ ID NO: 523259 - RNA, 19 nt, Artificial Sequence
  Description of Artificial Sequence: Synthetic oligonucleotide
aacaguauaguaagauaca

SEQ ID NO: 523260 - RNA, 19 nt, Artificial Sequence
  Description of Artificial Sequence: Synthetic oligonucleotide
cucagaccagcugagaggg

SEQ ID NO: 523261 - RNA, 19 nt, Artificial Sequence
  Description of Artificial Sequence: Synthetic oligonucleotide
guaagauacagggagagaa

SEQ ID NO: 523262 - RNA, 19 nt, Artificial Sequence
  Description of Artificial Sequence: Synthetic oligonucleotide
aagcaugacaggcaugcaa

SEQ ID NO: 523263 - RNA, 19 nt, Artificial Sequence
  Description of Artificial Sequence: Synthetic oligonucleotide
uacugugugaaaugccggc

SEQ ID NO: 523264 - RNA, 19 nt, Artificial Sequence
  Description of Artificial Sequence: Synthetic oligonucleotide
aaugaggacuaggucuggg

SEQ ID NO: 523265 - RNA, 19 nt, Artificial Sequence
  Description of Artificial Sequence: Synthetic oligonucleotide
cuuggugacgguguuacag

SEQ ID NO: 523266 - RNA, 19 nt, Artificial Sequence
  Description of Artificial Sequence: Synthetic oligonucleotide
agaauccuuagacuuuaug

SEQ ID NO: 523267 - RNA, 19 nt, Artificial Sequence
  Description of Artificial Sequence: Synthetic oligonucleotide
aaauguuccccuuccuuua

SEQ ID NO: 523268 - RNA, 19 nt, Artificial Sequence
  Description of Artificial Sequence: Synthetic oligonucleotide
acaugaucaauaagguuuc

SEQ ID NO: 523269 - RNA, 19 nt, Artificial Sequence
  Description of Artificial Sequence: Synthetic oligonucleotide
ucuagaaggcccuguugcc

SEQ ID NO: 523270 - RNA, 19 nt, Artificial Sequence
  Description of Artificial Sequence: Synthetic oligonucleotide
acagauacugccuuuugua

SEQ ID NO: 523271 - RNA, 19 nt, Artificial Sequence
  Description of Artificial Sequence: Synthetic oligonucleotide
auuucacgcgucuguuggc

SEQ ID NO: 523272 - RNA, 19 nt, Artificial Sequence
  Description of Artificial Sequence: Synthetic oligonucleotide
cacugagcuaguuaaggug

SEQ ID NO: 523273 - RNA, 19 nt, Artificial Sequence
  Description of Artificial Sequence: Synthetic oligonucleotide
gaacucuuuugacaaauaa

SEQ ID NO: 523274 - RNA, 19 nt, Artificial Sequence
  Description of Artificial Sequence: Synthetic oligonucleotide
accugaugagagcagacca

SEQ ID NO: 523275 - RNA, 19 nt, Artificial Sequence
  Description of Artificial Sequence: Synthetic oligonucleotide
acccaguauccauagaacu

SEQ ID NO: 523276 - RNA, 19 nt, Artificial Sequence
  Description of Artificial Sequence: Synthetic oligonucleotide
ugaagaauacugaggcuua

SEQ ID NO: 523277 - RNA, 19 nt, Artificial Sequence
  Description of Artificial Sequence: Synthetic oligonucleotide
uccuggaggaacauuucac

SEQ ID NO: 523278 - RNA, 19 nt, Artificial Sequence
  Description of Artificial Sequence: Synthetic oligonucleotide
ugggacgcauaguuugugg

SEQ ID NO: 523279 - RNA, 19 nt, Artificial Sequence
  Description of Artificial Sequence: Synthetic oligonucleotide
agaauacucucaccccuuc

SEQ ID NO: 523280 - RNA, 19 nt, Artificial Sequence
  Description of Artificial Sequence: Synthetic oligonucleotide
ugugaaaugccggcuaaga

SEQ ID NO: 523281 - RNA, 19 nt, Artificial Sequence
  Description of Artificial Sequence: Synthetic oligonucleotide
agaagagguguacuggcga

SEQ ID NO: 523282 - RNA, 19 nt, Artificial Sequence
  Description of Artificial Sequence: Synthetic oligonucleotide
agagaaccugacuuauuug

SEQ ID NO: 523283 - RNA, 19 nt, Artificial Sequence
  Description of Artificial Sequence: Synthetic oligonucleotide
aauacagauacugccuuuu

SEQ ID NO: 523284 - RNA, 19 nt, Artificial Sequence
  Description of Artificial Sequence: Synthetic oligonucleotide
agugacgagucaguccugc

SEQ ID NO: 523285 - RNA, 19 nt, Artificial Sequence
  Description of Artificial Sequence: Synthetic oligonucleotide
gagcuaguuaaggugacug

SEQ ID NO: 523286 - RNA, 19 nt, Artificial Sequence
  Description of Artificial Sequence: Synthetic oligonucleotide
aaagcaggauucucucccu

SEQ ID NO: 523287 - RNA, 19 nt, Artificial Sequence
  Description of Artificial Sequence: Synthetic oligonucleotide
cuaguuaaggugacugauc

SEQ ID NO: 523288 - RNA, 19 nt, Artificial Sequence
  Description of Artificial Sequence: Synthetic oligonucleotide
guauucuagacauuuccaa

SEQ ID NO: 523289 - RNA, 19 nt, Artificial Sequence
  Description of Artificial Sequence: Synthetic oligonucleotide
agaauacagauacugccuu

SEQ ID NO: 523290 - RNA, 19 nt, Artificial Sequence
  Description of Artificial Sequence: Synthetic oligonucleotide
ugccggcuaagacacaucu

SEQ ID NO: 523291 - RNA, 19 nt, Artificial Sequence
  Description of Artificial Sequence: Synthetic oligonucleotide
aucuacuaccaagauagug

SEQ ID NO: 523292 - RNA, 19 nt, Artificial Sequence
  Description of Artificial Sequence: Synthetic oligonucleotide
uguucaacgggcugcccug

SEQ ID NO: 523293 - RNA, 19 nt, Artificial Sequence
  Description of Artificial Sequence: Synthetic oligonucleotide
aggcuacugugugaaaugc

SEQ ID NO: 523294 - RNA, 19 nt, Artificial Sequence
  Description of Artificial Sequence: Synthetic oligonucleotide
gaugugagccuaacaauac

SEQ ID NO: 523295 - RNA, 19 nt, Artificial Sequence
  Description of Artificial Sequence: Synthetic oligonucleotide
  modified_base (17)..(17): a, c, u, g, unknown or other
cuuauuuguuccuaagnua

SEQ ID NO: 523296 - RNA, 19 nt, Artificial Sequence
  Description of Artificial Sequence: Synthetic oligonucleotide
uugaccuucaugccugauc

SEQ ID NO: 523297 - RNA, 19 nt, Artificial Sequence
  Description of Artificial Sequence: Synthetic oligonucleotide
gaccaggucaacguaauca

SEQ ID NO: 523298 - RNA, 19 nt, Artificial Sequence
  Description of Artificial Sequence: Synthetic oligonucleotide
augucaacugagaagccuc

SEQ ID NO: 523299 - RNA, 19 nt, Artificial Sequence
  Description of Artificial Sequence: Synthetic oligonucleotide
cuagaaaugaggacuaggu

SEQ ID NO: 523300 - RNA, 19 nt, Artificial Sequence
  Description of Artificial Sequence: Synthetic oligonucleotide
cucgaugugagccuaacaa

SEQ ID NO: 523301 - RNA, 19 nt, Artificial Sequence
  Description of Artificial Sequence: Synthetic oligonucleotide
augauuuaaauaauucuua

SEQ ID NO: 523302 - RNA, 19 nt, Artificial Sequence
  Description of Artificial Sequence: Synthetic oligonucleotide
uguuaaauucuauguccau

SEQ ID NO: 523303 - RNA, 19 nt, Artificial Sequence
  Description of Artificial Sequence: Synthetic oligonucleotide
uucuacaacaggcccucga

SEQ ID NO: 523304 - RNA, 19 nt, Artificial Sequence
  Description of Artificial Sequence: Synthetic oligonucleotide
gacgagucaguccugcuga

SEQ ID NO: 523305 - RNA, 19 nt, Artificial Sequence
  Description of Artificial Sequence: Synthetic oligonucleotide
aaauguacacccacucccu

SEQ ID NO: 523306 - RNA, 19 nt, Artificial Sequence
  Description of Artificial Sequence: Synthetic oligonucleotide
acgguguuacaguuuccac

SEQ ID NO: 523307 - RNA, 19 nt, Artificial Sequence
  Description of Artificial Sequence: Synthetic oligonucleotide
uagcuaagcaugacaggca

SEQ ID NO: 523308 - RNA, 19 nt, Artificial Sequence
  Description of Artificial Sequence: Synthetic oligonucleotide
gaagagguguacuggcgac

SEQ ID NO: 523309 - RNA, 19 nt, Artificial Sequence
  Description of Artificial Sequence: Synthetic oligonucleotide
acugagcuaguuaagguga

SEQ ID NO: 523310 - RNA, 19 nt, Artificial Sequence
  Description of Artificial Sequence: Synthetic oligonucleotide
ugucaacugagaagccuca

SEQ ID NO: 523311 - RNA, 19 nt, Artificial Sequence
  Description of Artificial Sequence: Synthetic oligonucleotide
ugugugaaaugccggcuaa

SEQ ID NO: 523312 - RNA, 19 nt, Artificial Sequence
  Description of Artificial Sequence: Synthetic oligonucleotide
aaggcccuguugccuauuc

SEQ ID NO: 523313 - RNA, 19 nt, Artificial Sequence
  Description of Artificial Sequence: Synthetic oligonucleotide
uuucuagggucauggacuc

SEQ ID NO: 523314 - RNA, 19 nt, Artificial Sequence
  Description of Artificial Sequence: Synthetic oligonucleotide
uuuacccaaggcagaccag

SEQ ID NO: 523315 - RNA, 19 nt, Artificial Sequence
  Description of Artificial Sequence: Synthetic oligonucleotide
uuacuaugccgcucgcagc

SEQ ID NO: 523316 - RNA, 19 nt, Artificial Sequence
  Description of Artificial Sequence: Synthetic oligonucleotide
caaaauuugccugcugcug

SEQ ID NO: 523317 - RNA, 19 nt, Artificial Sequence
  Description of Artificial Sequence: Synthetic oligonucleotide
auguuaaauucuaugucca

SEQ ID NO: 523318 - RNA, 19 nt, Artificial Sequence
  Description of Artificial Sequence: Synthetic oligonucleotide
cuuuuacauggcaggcagg

SEQ ID NO: 523319 - RNA, 19 nt, Artificial Sequence
  Description of Artificial Sequence: Synthetic oligonucleotide
ucagacaggcuagaucacc

SEQ ID NO: 523320 - RNA, 19 nt, Artificial Sequence
  Description of Artificial Sequence: Synthetic oligonucleotide
ucgaugugagccuaacaau

SEQ ID NO: 523321 - RNA, 19 nt, Artificial Sequence
  Description of Artificial Sequence: Synthetic oligonucleotide
agagccgggauaccggcag

SEQ ID NO: 523322 - RNA, 19 nt, Artificial Sequence
  Description of Artificial Sequence: Synthetic oligonucleotide
aaugccggcuaagacacau

SEQ ID NO: 523323 - RNA, 19 nt, Artificial Sequence
  Description of Artificial Sequence: Synthetic oligonucleotide
gggucuaggaggcaguugc

SEQ ID NO: 523324 - RNA, 19 nt, Artificial Sequence
  Description of Artificial Sequence: Synthetic oligonucleotide
agcuaaguagucauguccu

SEQ ID NO: 523325 - RNA, 19 nt, Artificial Sequence
  Description of Artificial Sequence: Synthetic oligonucleotide
aaaugaggacuaggucugg

SEQ ID NO: 523326 - RNA, 19 nt, Artificial Sequence
  Description of Artificial Sequence: Synthetic oligonucleotide
cuucuuuaacaguauagua

SEQ ID NO: 523327 - RNA, 19 nt, Artificial Sequence
  Description of Artificial Sequence: Synthetic oligonucleotide
uucaugccugaucuuugca

SEQ ID NO: 523328 - RNA, 19 nt, Artificial Sequence
  Description of Artificial Sequence: Synthetic oligonucleotide
uuguaccugaugagagcag

SEQ ID NO: 523329 - RNA, 19 nt, Artificial Sequence
  Description of Artificial Sequence: Synthetic oligonucleotide
augaucaauaagguuucug

SEQ ID NO: 523330 - RNA, 19 nt, Artificial Sequence
  Description of Artificial Sequence: Synthetic oligonucleotide
uuggugacgguguuacagu

SEQ ID NO: 523331 - RNA, 19 nt, Artificial Sequence
  Description of Artificial Sequence: Synthetic oligonucleotide
uacugaggcuuacaggcau

SEQ ID NO: 523332 - RNA, 19 nt, Artificial Sequence
  Description of Artificial Sequence: Synthetic oligonucleotide
gugacgguguuacaguuuc

SEQ ID NO: 523333 - RNA, 19 nt, Artificial Sequence
  Description of Artificial Sequence: Synthetic oligonucleotide
aaguuacuuagaaaauaau

SEQ ID NO: 523334 - RNA, 19 nt, Artificial Sequence
  Description of Artificial Sequence: Synthetic oligonucleotide
cuuagacuuuaugggacgc

SEQ ID NO: 523335 - RNA, 19 nt, Artificial Sequence
  Description of Artificial Sequence: Synthetic oligonucleotide
uguuuagcuguggauggga

SEQ ID NO: 523336 - RNA, 19 nt, Artificial Sequence
  Description of Artificial Sequence: Synthetic oligonucleotide
gugaaaugccggcuaagac

SEQ ID NO: 523337 - RNA, 19 nt, Artificial Sequence
  Description of Artificial Sequence: Synthetic oligonucleotide
aucuccuacccaccugcac

SEQ ID NO: 523338 - RNA, 19 nt, Artificial Sequence
  Description of Artificial Sequence: Synthetic oligonucleotide
ugauccaaaugugugguuu

SEQ ID NO: 523339 - RNA, 19 nt, Artificial Sequence
  Description of Artificial Sequence: Synthetic oligonucleotide
aggaacauuucacgcgucu

SEQ ID NO: 523340 - RNA, 19 nt, Artificial Sequence
  Description of Artificial Sequence: Synthetic oligonucleotide
uuaaggugacugauccaaa

SEQ ID NO: 523341 - RNA, 19 nt, Artificial Sequence
  Description of Artificial Sequence: Synthetic oligonucleotide
gcgucuguuggcaacaugg

SEQ ID NO: 523342 - RNA, 19 nt, Artificial Sequence
  Description of Artificial Sequence: Synthetic oligonucleotide
ugccuuacugagcaugcuc

SEQ ID NO: 523343 - RNA, 19 nt, Artificial Sequence
  Description of Artificial Sequence: Synthetic oligonucleotide
ugcaaagacagcugucuuu

SEQ ID NO: 523344 - RNA, 19 nt, Artificial Sequence
  Description of Artificial Sequence: Synthetic oligonucleotide
ccggcuaagacacaucugc

SEQ ID NO: 523345 - RNA, 19 nt, Artificial Sequence
  Description of Artificial Sequence: Synthetic oligonucleotide
caccucauauuaaauaaaa

SEQ ID NO: 523346 - RNA, 19 nt, Artificial Sequence
  Description of Artificial Sequence: Synthetic oligonucleotide
cuggcgaccacaguaggag

SEQ ID NO: 523347 - RNA, 19 nt, Artificial Sequence
  Description of Artificial Sequence: Synthetic oligonucleotide
acauuucacgcgucuguug

SEQ ID NO: 523348 - RNA, 19 nt, Artificial Sequence
  Description of Artificial Sequence: Synthetic oligonucleotide
ugagccuaacaauaccauu

SEQ ID NO: 523349 - RNA, 19 nt, Artificial Sequence
  Description of Artificial Sequence: Synthetic oligonucleotide
ugggaguguggcucaaaug

SEQ ID NO: 523350 - RNA, 19 nt, Artificial Sequence
  Description of Artificial Sequence: Synthetic oligonucleotide
ggcccuguugccuauuccg

SEQ ID NO: 523351 - RNA, 19 nt, Artificial Sequence
  Description of Artificial Sequence: Synthetic oligonucleotide
gugugugcacauucuacug

SEQ ID NO: 523352 - RNA, 19 nt, Artificial Sequence
  Description of Artificial Sequence: Synthetic oligonucleotide
gaccaccucauauuaaaua

SEQ ID NO: 523353 - RNA, 19 nt, Artificial Sequence
  Description of Artificial Sequence: Synthetic oligonucleotide
ugaugagagcagaccaaaa

SEQ ID NO: 523354 - RNA, 19 nt, Artificial Sequence
  Description of Artificial Sequence: Synthetic oligonucleotide
  modified_base (3)..(3): a, c, u, g, unknown or other
agnuaugugaccaccucau

SEQ ID NO: 523355 - RNA, 19 nt, Artificial Sequence
  Description of Artificial Sequence: Synthetic oligonucleotide
aguuaaggugacugaucca

SEQ ID NO: 523356 - RNA, 19 nt, Artificial Sequence
  Description of Artificial Sequence: Synthetic oligonucleotide
  modified_base (7)..(7): a, c, u, g, unknown or other
ccuaagnuaugugaccacc

SEQ ID NO: 523357 - RNA, 19 nt, Artificial Sequence
  Description of Artificial Sequence: Synthetic oligonucleotide
caguguucuggaugagagg

SEQ ID NO: 523358 - RNA, 19 nt, Artificial Sequence
  Description of Artificial Sequence: Synthetic oligonucleotide
auaguaagauacagggaga

SEQ ID NO: 523359 - RNA, 19 nt, Artificial Sequence
  Description of Artificial Sequence: Synthetic oligonucleotide
aacuuaagucacugagcua

SEQ ID NO: 523360 - RNA, 19 nt, Artificial Sequence
  Description of Artificial Sequence: Synthetic oligonucleotide
gugcauguguucaacgggc

SEQ ID NO: 523361 - RNA, 19 nt, Artificial Sequence
  Description of Artificial Sequence: Synthetic oligonucleotide
uuuuccuauggaugauuua

SEQ ID NO: 523362 - RNA, 19 nt, Artificial Sequence
  Description of Artificial Sequence: Synthetic oligonucleotide
uuucacgcgucuguuggca

SEQ ID NO: 523363 - RNA, 19 nt, Artificial Sequence
  Description of Artificial Sequence: Synthetic oligonucleotide
aggcccuguugccuauucc

SEQ ID NO: 523364 - RNA, 19 nt, Artificial Sequence
  Description of Artificial Sequence: Synthetic oligonucleotide
cagaccagcugagaggggc

SEQ ID NO: 523365 - RNA, 19 nt, Artificial Sequence
  Description of Artificial Sequence: Synthetic oligonucleotide
  modified_base (8)..(8): a, c, u, g, unknown or other
uccuaagnuaugugaccac

SEQ ID NO: 523366 - RNA, 19 nt, Artificial Sequence
  Description of Artificial Sequence: Synthetic oligonucleotide
uuguggaauucaccagaac

SEQ ID NO: 523367 - RNA, 19 nt, Artificial Sequence
  Description of Artificial Sequence: Synthetic oligonucleotide
gacgguguuacaguuucca

SEQ ID NO: 523368 - RNA, 19 nt, Artificial Sequence
  Description of Artificial Sequence: Synthetic oligonucleotide
aacauuucacgcgucuguu

SEQ ID NO: 523369 - RNA, 19 nt, Artificial Sequence
  Description of Artificial Sequence: Synthetic oligonucleotide
gacaggcuagaucacccuc

SEQ ID NO: 523370 - RNA, 19 nt, Artificial Sequence
  Description of Artificial Sequence: Synthetic oligonucleotide
ggcaaugaacuuaagucac

SEQ ID NO: 523371 - RNA, 19 nt, Artificial Sequence
  Description of Artificial Sequence: Synthetic oligonucleotide
agaccaggucaacguaauc

SEQ ID NO: 523372 - RNA, 19 nt, Artificial Sequence
  Description of Artificial Sequence: Synthetic oligonucleotide
ucaacgggcugcccugucu

SEQ ID NO: 523373 - RNA, 19 nt, Artificial Sequence
  Description of Artificial Sequence: Synthetic oligonucleotide
guacuggcgaccacaguag

SEQ ID NO: 523374 - RNA, 19 nt, Artificial Sequence
  Description of Artificial Sequence: Synthetic oligonucleotide
gaaaugcugcauucuccca

SEQ ID NO: 523375 - RNA, 19 nt, Artificial Sequence
  Description of Artificial Sequence: Synthetic oligonucleotide
caacguaaucaaucaccac

SEQ ID NO: 523376 - RNA, 19 nt, Artificial Sequence
  Description of Artificial Sequence: Synthetic oligonucleotide
ucuuacuaugccgcucgca

SEQ ID NO: 523377 - RNA, 19 nt, Artificial Sequence
  Description of Artificial Sequence: Synthetic oligonucleotide
caccuuugaacaguggcuc

SEQ ID NO: 523378 - RNA, 19 nt, Artificial Sequence
  Description of Artificial Sequence: Synthetic oligonucleotide
auaagaauccuuagacuuu

SEQ ID NO: 523379 - RNA, 19 nt, Artificial Sequence
  Description of Artificial Sequence: Synthetic oligonucleotide
gaucacccucacugaaggc

SEQ ID NO: 523380 - RNA, 19 nt, Artificial Sequence
  Description of Artificial Sequence: Synthetic oligonucleotide
auagaacucuuuugacaaa

SEQ ID NO: 523381 - RNA, 19 nt, Artificial Sequence
  Description of Artificial Sequence: Synthetic oligonucleotide
agccuaacaauaccauuuu

SEQ ID NO: 523382 - RNA, 19 nt, Artificial Sequence
  Description of Artificial Sequence: Synthetic oligonucleotide
caugccugaucuuugcaaa

SEQ ID NO: 523383 - RNA, 19 nt, Artificial Sequence
  Description of Artificial Sequence: Synthetic oligonucleotide
gaccaaaauuugccugcug

SEQ ID NO: 523384 - RNA, 19 nt, Artificial Sequence
  Description of Artificial Sequence: Synthetic oligonucleotide
gaauucuacaacaggcccu

SEQ ID NO: 523385 - RNA, 19 nt, Artificial Sequence
  Description of Artificial Sequence: Synthetic oligonucleotide
ggagugacgagucaguccu

SEQ ID NO: 523386 - RNA, 19 nt, Artificial Sequence
  Description of Artificial Sequence: Synthetic oligonucleotide
cucgacugcauacaaauau

SEQ ID NO: 523387 - RNA, 19 nt, Artificial Sequence
  Description of Artificial Sequence: Synthetic oligonucleotide
gcaguugcuaaucuuugca

SEQ ID NO: 523388 - RNA, 19 nt, Artificial Sequence
  Description of Artificial Sequence: Synthetic oligonucleotide
cacuucuauaaaucaggga

SEQ ID NO: 523389 - RNA, 19 nt, Artificial Sequence
  Description of Artificial Sequence: Synthetic oligonucleotide
caaauuuucuagggucaug

SEQ ID NO: 523390 - RNA, 19 nt, Artificial Sequence
  Description of Artificial Sequence: Synthetic oligonucleotide
cuccuacccaccugcacac

SEQ ID NO: 523391 - RNA, 19 nt, Artificial Sequence
  Description of Artificial Sequence: Synthetic oligonucleotide
agagguguacuggcgacca

SEQ ID NO: 523392 - RNA, 19 nt, Artificial Sequence
  Description of Artificial Sequence: Synthetic oligonucleotide
accuuugaacaguggcuca

SEQ ID NO: 523393 - RNA, 19 nt, Artificial Sequence
  Description of Artificial Sequence: Synthetic oligonucleotide
cauuucuuguguugggcaa

SEQ ID NO: 523394 - RNA, 19 nt, Artificial Sequence
  Description of Artificial Sequence: Synthetic oligonucleotide
  modified_base (6)..(6): a, c, u, g, unknown or other
cuaagnuaugugaccaccu

SEQ ID NO: 523395 - RNA, 19 nt, Artificial Sequence
  Description of Artificial Sequence: Synthetic oligonucleotide
agacaggcuagaucacccu

SEQ ID NO: 523396 - RNA, 19 nt, Artificial Sequence
  Description of Artificial Sequence: Synthetic oligonucleotide
guauccauagaacucuuuu

SEQ ID NO: 523397 - RNA, 19 nt, Artificial Sequence
  Description of Artificial Sequence: Synthetic oligonucleotide
acuugagagaccacguuua

SEQ ID NO: 523398 - RNA, 19 nt, Artificial Sequence
  Description of Artificial Sequence: Synthetic oligonucleotide
gguauucuagacauuucca

SEQ ID NO: 523399 - RNA, 19 nt, Artificial Sequence
  Description of Artificial Sequence: Synthetic oligonucleotide
ccauaugccuuacugagca

SEQ ID NO: 523400 - RNA, 19 nt, Artificial Sequence
  Description of Artificial Sequence: Synthetic oligonucleotide
ugagcuaguuaaggugacu

SEQ ID NO: 523401 - RNA, 19 nt, Artificial Sequence
  Description of Artificial Sequence: Synthetic oligonucleotide
gcuuacaggcaucuacuac

SEQ ID NO: 523402 - RNA, 19 nt, Artificial Sequence
  Description of Artificial Sequence: Synthetic oligonucleotide
guaggcagggaccccugug

SEQ ID NO: 523403 - RNA, 19 nt, Artificial Sequence
  Description of Artificial Sequence: Synthetic oligonucleotide
cuguuuagcuguggauggg

SEQ ID NO: 523404 - RNA, 19 nt, Artificial Sequence
  Description of Artificial Sequence: Synthetic oligonucleotide
ugccugaucuuugcaaauc

SEQ ID NO: 523405 - RNA, 19 nt, Artificial Sequence
  Description of Artificial Sequence: Synthetic oligonucleotide
ucacgcgucuguuggcaac

SEQ ID NO: 523406 - RNA, 19 nt, Artificial Sequence
  Description of Artificial Sequence: Synthetic oligonucleotide
acaggcuagaucacccuca

SEQ ID NO: 523407 - RNA, 19 nt, Artificial Sequence
  Description of Artificial Sequence: Synthetic oligonucleotide
aggcuuacaggcaucuacu

SEQ ID NO: 523408 - RNA, 19 nt, Artificial Sequence
  Description of Artificial Sequence: Synthetic oligonucleotide
  modified_base (2)..(2): a, c, u, g, unknown or other
gnuaugugaccaccucaua

SEQ ID NO: 523409 - RNA, 19 nt, Artificial Sequence
  Description of Artificial Sequence: Synthetic oligonucleotide
cuccccuaucauuagaacu

SEQ ID NO: 523410 - RNA, 19 nt, Artificial Sequence
  Description of Artificial Sequence: Synthetic oligonucleotide
agaacaggaaacaccgguu

SEQ ID NO: 523411 - RNA, 19 nt, Artificial Sequence
  Description of Artificial Sequence: Synthetic oligonucleotide
uggugacgguguuacaguu

SEQ ID NO: 523412 - RNA, 19 nt, Artificial Sequence
  Description of Artificial Sequence: Synthetic oligonucleotide
ucuauaaaucagggaugau

SEQ ID NO: 523413 - RNA, 19 nt, Artificial Sequence
  Description of Artificial Sequence: Synthetic oligonucleotide
uuaagucacugagcuaguu

SEQ ID NO: 523414 - RNA, 19 nt, Artificial Sequence
  Description of Artificial Sequence: Synthetic oligonucleotide
gacugcauacaaauaugua

SEQ ID NO: 523415 - RNA, 19 nt, Artificial Sequence
  Description of Artificial Sequence: Synthetic oligonucleotide
augccugaucuuugcaaau

SEQ ID NO: 523416 - RNA, 19 nt, Artificial Sequence
  Description of Artificial Sequence: Synthetic oligonucleotide
cugaagaauacugaggcuu

SEQ ID NO: 523417 - RNA, 19 nt, Artificial Sequence
  Description of Artificial Sequence: Synthetic oligonucleotide
gguguuacaguuuccacuu

SEQ ID NO: 523418 - RNA, 19 nt, Artificial Sequence
  Description of Artificial Sequence: Synthetic oligonucleotide
caggcuagaucacccucac

SEQ ID NO: 523419 - RNA, 19 nt, Artificial Sequence
  Description of Artificial Sequence: Synthetic oligonucleotide
guaccaacaguccaccuuu

SEQ ID NO: 523420 - RNA, 19 nt, Artificial Sequence
  Description of Artificial Sequence: Synthetic oligonucleotide
gucaacugagaagccucag

SEQ ID NO: 523421 - RNA, 19 nt, Artificial Sequence
  Description of Artificial Sequence: Synthetic oligonucleotide
ugacggagaggugggccag

SEQ ID NO: 523422 - RNA, 19 nt, Artificial Sequence
  Description of Artificial Sequence: Synthetic oligonucleotide
gucucucagaccagcugag

SEQ ID NO: 523423 - RNA, 19 nt, Artificial Sequence
  Description of Artificial Sequence: Synthetic oligonucleotide
acauucuacugugcaugug

SEQ ID NO: 523424 - RNA, 19 nt, Artificial Sequence
  Description of Artificial Sequence: Synthetic oligonucleotide
guagacauacaugaucaau

SEQ ID NO: 523425 - RNA, 19 nt, Artificial Sequence
  Description of Artificial Sequence: Synthetic oligonucleotide
cccaccugcacacuggcug

SEQ ID NO: 523426 - RNA, 19 nt, Artificial Sequence
  Description of Artificial Sequence: Synthetic oligonucleotide
uuccgagggucuguuuagc

SEQ ID NO: 523427 - RNA, 19 nt, Artificial Sequence
  Description of Artificial Sequence: Synthetic oligonucleotide
gugugaaaugccggcuaag

SEQ ID NO: 523428 - RNA, 19 nt, Artificial Sequence
  Description of Artificial Sequence: Synthetic oligonucleotide
cuaagacacaucugcuaua

SEQ ID NO: 523429 - RNA, 19 nt, Artificial Sequence
  Description of Artificial Sequence: Synthetic oligonucleotide
gaccacguuuaaauaacua

SEQ ID NO: 523430 - RNA, 19 nt, Artificial Sequence
  Description of Artificial Sequence: Synthetic oligonucleotide
gguguacuggcgaccacag

SEQ ID NO: 523431 - RNA, 19 nt, Artificial Sequence
  Description of Artificial Sequence: Synthetic oligonucleotide
gcuaagacacaucugcuau

SEQ ID NO: 523432 - RNA, 19 nt, Artificial Sequence
  Description of Artificial Sequence: Synthetic oligonucleotide
ugaaggcuacugugugaaa

SEQ ID NO: 523433 - RNA, 19 nt, Artificial Sequence
  Description of Artificial Sequence: Synthetic oligonucleotide
uucacgcgucuguuggcaa

SEQ ID NO: 523434 - RNA, 19 nt, Artificial Sequence
  Description of Artificial Sequence: Synthetic oligonucleotide
gacaccuuggugacggugu

SEQ ID NO: 523435 - RNA, 19 nt, Artificial Sequence
  Description of Artificial Sequence: Synthetic oligonucleotide
gauccaaaugugugguuuu

SEQ ID NO: 523436 - RNA, 19 nt, Artificial Sequence
  Description of Artificial Sequence: Synthetic oligonucleotide
gcuagaucacccucacuga

SEQ ID NO: 523437 - RNA, 19 nt, Artificial Sequence
  Description of Artificial Sequence: Synthetic oligonucleotide
uugacuguaccugguccua

SEQ ID NO: 523438 - RNA, 19 nt, Artificial Sequence
  Description of Artificial Sequence: Synthetic oligonucleotide
cuuacugagcaugcucaga

SEQ ID NO: 523439 - RNA, 19 nt, Artificial Sequence
  Description of Artificial Sequence: Synthetic oligonucleotide
gaauacagauacugccuuu

SEQ ID NO: 523440 - RNA, 19 nt, Artificial Sequence
  Description of Artificial Sequence: Synthetic oligonucleotide
cuggggugauuuguguaug

SEQ ID NO: 523441 - RNA, 19 nt, Artificial Sequence
  Description of Artificial Sequence: Synthetic oligonucleotide
agcccggaaaugcugcauu

SEQ ID NO: 523442 - RNA, 19 nt, Artificial Sequence
  Description of Artificial Sequence: Synthetic oligonucleotide
aaugggaguguggcucaaa

SEQ ID NO: 523443 - RNA, 19 nt, Artificial Sequence
  Description of Artificial Sequence: Synthetic oligonucleotide
acuccucgauuugugucug

SEQ ID NO: 523444 - RNA, 19 nt, Artificial Sequence
  Description of Artificial Sequence: Synthetic oligonucleotide
cugcuauacaggacaccca

SEQ ID NO: 523445 - RNA, 19 nt, Artificial Sequence
  Description of Artificial Sequence: Synthetic oligonucleotide
caguaggaggcacuugaaa

SEQ ID NO: 523446 - RNA, 19 nt, Artificial Sequence
  Description of Artificial Sequence: Synthetic oligonucleotide
cuaccaagauagugcagua

SEQ ID NO: 523447 - RNA, 19 nt, Artificial Sequence
  Description of Artificial Sequence: Synthetic oligonucleotide
gcauguguucaacgggcug

SEQ ID NO: 523448 - RNA, 19 nt, Artificial Sequence
  Description of Artificial Sequence: Synthetic oligonucleotide
ggcgaccacaguaggaggc

SEQ ID NO: 523449 - RNA, 19 nt, Artificial Sequence
  Description of Artificial Sequence: Synthetic oligonucleotide
cacuccucgauuugugucu

SEQ ID NO: 523450 - RNA, 19 nt, Artificial Sequence
  Description of Artificial Sequence: Synthetic oligonucleotide
ggcaucuacuaccaagaua

SEQ ID NO: 523451 - RNA, 19 nt, Artificial Sequence
  Description of Artificial Sequence: Synthetic oligonucleotide
guguucaacgggcugcccu

SEQ ID NO: 523452 - RNA, 19 nt, Artificial Sequence
  Description of Artificial Sequence: Synthetic oligonucleotide
acuggcgaccacaguagga

SEQ ID NO: 523453 - RNA, 19 nt, Artificial Sequence
  Description of Artificial Sequence: Synthetic oligonucleotide
uucaacgggcugcccuguc

SEQ ID NO: 523454 - RNA, 19 nt, Artificial Sequence
  Description of Artificial Sequence: Synthetic oligonucleotide
cuaugccgcucgcagcauc

SEQ ID NO: 523455 - RNA, 19 nt, Artificial Sequence
  Description of Artificial Sequence: Synthetic oligonucleotide
cauggaauucaacuucuuu

SEQ ID NO: 523456 - RNA, 19 nt, Artificial Sequence
  Description of Artificial Sequence: Synthetic oligonucleotide
cuuugaacaguggcucaga

SEQ ID NO: 523457 - RNA, 19 nt, Artificial Sequence
  Description of Artificial Sequence: Synthetic oligonucleotide
gacggagaggugggccagg

SEQ ID NO: 523458 - RNA, 19 nt, Artificial Sequence
  Description of Artificial Sequence: Synthetic oligonucleotide
gcaugcucagaagagaaua

SEQ ID NO: 523459 - RNA, 19 nt, Artificial Sequence
  Description of Artificial Sequence: Synthetic oligonucleotide
accacaguaggaggcacuu

SEQ ID NO: 523460 - RNA, 19 nt, Artificial Sequence
  Description of Artificial Sequence: Synthetic oligonucleotide
ccuuuuguaccugaugaga

SEQ ID NO: 523461 - RNA, 19 nt, Artificial Sequence
  Description of Artificial Sequence: Synthetic oligonucleotide
uccugcugacggagaggug

SEQ ID NO: 523462 - RNA, 19 nt, Artificial Sequence
  Description of Artificial Sequence: Synthetic oligonucleotide
agggaccccugugguauuc

SEQ ID NO: 523463 - RNA, 19 nt, Artificial Sequence
  Description of Artificial Sequence: Synthetic oligonucleotide
aguauccauagaacucuuu

SEQ ID NO: 523464 - RNA, 19 nt, Artificial Sequence
  Description of Artificial Sequence: Synthetic oligonucleotide
guguuacaguuuccacuuc

SEQ ID NO: 523465 - RNA, 19 nt, Artificial Sequence
  Description of Artificial Sequence: Synthetic oligonucleotide
gaggaacauuucacgcguc

SEQ ID NO: 523466 - RNA, 19 nt, Artificial Sequence
  Description of Artificial Sequence: Synthetic oligonucleotide
aggcuagaucacccucacu

SEQ ID NO: 523467 - RNA, 19 nt, Artificial Sequence
  Description of Artificial Sequence: Synthetic oligonucleotide
ccgggauaccggcagcucc

SEQ ID NO: 523468 - RNA, 19 nt, Artificial Sequence
  Description of Artificial Sequence: Synthetic oligonucleotide
cacuugagagaccacguuu

SEQ ID NO: 523469 - RNA, 19 nt, Artificial Sequence
  Description of Artificial Sequence: Synthetic oligonucleotide
ggaguguggcucaaauguc

SEQ ID NO: 523470 - RNA, 19 nt, Artificial Sequence
  Description of Artificial Sequence: Synthetic oligonucleotide
cuacaacaggcccucgacu

SEQ ID NO: 523471 - RNA, 19 nt, Artificial Sequence
  Description of Artificial Sequence: Synthetic oligonucleotide
cuuaagucacugagcuagu

SEQ ID NO: 523472 - RNA, 19 nt, Artificial Sequence
  Description of Artificial Sequence: Synthetic oligonucleotide
augccggcuaagacacauc

SEQ ID NO: 523473 - RNA, 19 nt, Artificial Sequence
  Description of Artificial Sequence: Synthetic oligonucleotide
ggcagcuaaguagucaugu

SEQ ID NO: 523474 - RNA, 19 nt, Artificial Sequence
  Description of Artificial Sequence: Synthetic oligonucleotide
aaaugccggcuaagacaca

SEQ ID NO: 523475 - RNA, 19 nt, Artificial Sequence
  Description of Artificial Sequence: Synthetic oligonucleotide
gguaccaacaguccaccuu

SEQ ID NO: 523476 - RNA, 19 nt, Artificial Sequence
  Description of Artificial Sequence: Synthetic oligonucleotide
caguuuccacuucuauaaa

SEQ ID NO: 523477 - RNA, 19 nt, Artificial Sequence
  Description of Artificial Sequence: Synthetic oligonucleotide
agccgggauaccggcagcu

SEQ ID NO: 523478 - RNA, 19 nt, Artificial Sequence
  Description of Artificial Sequence: Synthetic oligonucleotide
cgaugugagccuaacaaua

SEQ ID NO: 523479 - RNA, 19 nt, Artificial Sequence
  Description of Artificial Sequence: Synthetic oligonucleotide
gagugacgagucaguccug

SEQ ID NO: 523480 - RNA, 19 nt, Artificial Sequence
  Description of Artificial Sequence: Synthetic oligonucleotide
acauggaauucaacuucuu

SEQ ID NO: 523481 - RNA, 19 nt, Artificial Sequence
  Description of Artificial Sequence: Synthetic oligonucleotide
gcuaguuaaggugacugau

SEQ ID NO: 523482 - RNA, 19 nt, Artificial Sequence
  Description of Artificial Sequence: Synthetic oligonucleotide
gccugaucuuugcaaaucu

SEQ ID NO: 523483 - RNA, 19 nt, Artificial Sequence
  Description of Artificial Sequence: Synthetic oligonucleotide
cugggccacuugagagacc

SEQ ID NO: 523484 - RNA, 19 nt, Artificial Sequence
  Description of Artificial Sequence: Synthetic oligonucleotide
gcuaagcaugacaggcaug

SEQ ID NO: 523485 - RNA, 19 nt, Artificial Sequence
  Description of Artificial Sequence: Synthetic oligonucleotide
ccaguauccauagaacucu

SEQ ID NO: 523486 - RNA, 19 nt, Artificial Sequence
  Description of Artificial Sequence: Synthetic oligonucleotide
ggcuuacaggcaucuacua

SEQ ID NO: 523487 - RNA, 19 nt, Artificial Sequence
  Description of Artificial Sequence: Synthetic oligonucleotide
cacgcgucuguuggcaaca

SEQ ID NO: 523488 - RNA, 19 nt, Artificial Sequence
  Description of Artificial Sequence: Synthetic oligonucleotide
ccccugugguauucuagac

SEQ ID NO: 523489 - RNA, 19 nt, Artificial Sequence
  Description of Artificial Sequence: Synthetic oligonucleotide
gcccggaaaugcugcauuc

SEQ ID NO: 523490 - RNA, 19 nt, Artificial Sequence
  Description of Artificial Sequence: Synthetic oligonucleotide
ggucuguuuagcuguggau

SEQ ID NO: 523491 - RNA, 19 nt, Artificial Sequence
  Description of Artificial Sequence: Synthetic oligonucleotide
gcagaccaggucaacguaa

SEQ ID NO: 523492 - RNA, 19 nt, Artificial Sequence
  Description of Artificial Sequence: Synthetic oligonucleotide
gugcacgugccugugggua

SEQ ID NO: 523493 - RNA, 19 nt, Artificial Sequence
  Description of Artificial Sequence: Synthetic oligonucleotide
ggggagugacgagucaguc

SEQ ID NO: 523494 - RNA, 19 nt, Artificial Sequence
  Description of Artificial Sequence: Synthetic oligonucleotide
cuagggucauggacucucu

SEQ ID NO: 523495 - RNA, 19 nt, Artificial Sequence
  Description of Artificial Sequence: Synthetic oligonucleotide
cccucgacugcauacaaau

SEQ ID NO: 523496 - RNA, 19 nt, Artificial Sequence
  Description of Artificial Sequence: Synthetic oligonucleotide
cgugccuguggguaccaac

SEQ ID NO: 523497 - RNA, 19 nt, Artificial Sequence
  Description of Artificial Sequence: Synthetic oligonucleotide
aggggucuaggaggcaguu

SEQ ID NO: 523498 - RNA, 19 nt, Artificial Sequence
  Description of Artificial Sequence: Synthetic oligonucleotide
acuaugccgcucgcagcau

SEQ ID NO: 523499 - RNA, 19 nt, Artificial Sequence
  Description of Artificial Sequence: Synthetic oligonucleotide
gugacgagucaguccugcu

SEQ ID NO: 523500 - RNA, 19 nt, Artificial Sequence
  Description of Artificial Sequence: Synthetic oligonucleotide
cccuccccuaucauuagaa

SEQ ID NO: 523501 - RNA, 19 nt, Artificial Sequence
  Description of Artificial Sequence: Synthetic oligonucleotide
ggggucuaggaggcaguug

SEQ ID NO: 523502 - RNA, 19 nt, Artificial Sequence
  Description of Artificial Sequence: Synthetic oligonucleotide
ggcucgaugugagccuaac

SEQ ID NO: 523503 - RNA, 19 nt, Artificial Sequence
  Description of Artificial Sequence: Synthetic oligonucleotide
gcaaugaacuuaagucacu

SEQ ID NO: 523504 - RNA, 19 nt, Artificial Sequence
  Description of Artificial Sequence: Synthetic oligonucleotide
caugaucaauaagguuucu

SEQ ID NO: 523505 - RNA, 19 nt, Artificial Sequence
  Description of Artificial Sequence: Synthetic oligonucleotide
gccggcuaagacacaucug

SEQ ID NO: 523506 - RNA, 19 nt, Artificial Sequence
  Description of Artificial Sequence: Synthetic oligonucleotide
cuccucgauuugugucuga

SEQ ID NO: 523507 - RNA, 19 nt, Artificial Sequence
  Description of Artificial Sequence: Synthetic oligonucleotide
gaggggucuaggaggcagu

SEQ ID NO: 523508 - RNA, 19 nt, Artificial Sequence
  Description of Artificial Sequence: Synthetic oligonucleotide
cgguguuacaguuuccacu

SEQ ID NO: 523509 - RNA, 19 nt, Artificial Sequence
  Description of Artificial Sequence: Synthetic oligonucleotide
cugcaaagacagcugucuu

SEQ ID NO: 523510 - RNA, 19 nt, Artificial Sequence
  Description of Artificial Sequence: Synthetic oligonucleotide
cucaccccuucacucugua

SEQ ID NO: 523511 - RNA, 19 nt, Artificial Sequence
  Description of Artificial Sequence: Synthetic oligonucleotide
gcaaauuuucuagggucau

SEQ ID NO: 523512 - RNA, 19 nt, Artificial Sequence
  Description of Artificial Sequence: Synthetic oligonucleotide
caauaagguuucugccauu

SEQ ID NO: 523513 - RNA, 19 nt, Artificial Sequence
  Description of Artificial Sequence: Synthetic oligonucleotide
gcgaccacaguaggaggca

SEQ ID NO: 523514 - RNA, 19 nt, Artificial Sequence
  Description of Artificial Sequence: Synthetic oligonucleotide
ccugacuuauuuguuccua

SEQ ID NO: 523515 - RNA, 19 nt, Artificial Sequence
  Description of Artificial Sequence: Synthetic oligonucleotide
acccaccugcacacuggcu

SEQ ID NO: 523516 - RNA, 19 nt, Artificial Sequence
  Description of Artificial Sequence: Synthetic oligonucleotide
guguacuggcgaccacagu

SEQ ID NO: 523517 - RNA, 19 nt, Artificial Sequence
  Description of Artificial Sequence: Synthetic oligonucleotide
ggcccucgacugcauacaa

SEQ ID NO: 523518 - RNA, 19 nt, Artificial Sequence
  Description of Artificial Sequence: Synthetic oligonucleotide
acgcgucuguuggcaacau

SEQ ID NO: 523519 - RNA, 19 nt, Artificial Sequence
  Description of Artificial Sequence: Synthetic oligonucleotide
ggaccccugugguauucua

SEQ ID NO: 523520 - RNA, 19 nt, Artificial Sequence
  Description of Artificial Sequence: Synthetic oligonucleotide
guucaacgggcugcccugu

SEQ ID NO: 523521 - RNA, 19 nt, Artificial Sequence
  Description of Artificial Sequence: Synthetic oligonucleotide
ggguaccaacaguccaccu

SEQ ID NO: 523522 - RNA, 19 nt, Artificial Sequence
  Description of Artificial Sequence: Synthetic oligonucleotide
acgugccuguggguaccaa

SEQ ID NO: 523523 - RNA, 19 nt, Artificial Sequence
  Description of Artificial Sequence: Synthetic oligonucleotide
cgcgucuguuggcaacaug

SEQ ID NO: 523524 - RNA, 19 nt, Artificial Sequence
  Description of Artificial Sequence: Synthetic oligonucleotide
gccgggauaccggcagcuc

SEQ ID NO: 523525 - RNA, 19 nt, Artificial Sequence
  Description of Artificial Sequence: Synthetic oligonucleotide
gcccucgacugcauacaaa

SEQ ID NO: 523526 - RNA, 19 nt, Artificial Sequence
  Description of Artificial Sequence: Synthetic oligonucleotide
gggccacuugagagaccac

SEQ ID NO: 523527 - RNA, 19 nt, Artificial Sequence
  Description of Artificial Sequence: Synthetic oligonucleotide
ggauaccggcagcuccuuu

SEQ ID NO: 523528 - RNA, 19 nt, Artificial Sequence
  Description of Artificial Sequence: Synthetic oligonucleotide
gggaccccugugguauucu

SEQ ID NO: 523529 - RNA, 19 nt, Artificial Sequence
  Description of Artificial Sequence: Synthetic oligonucleotide
ccccuaucauuagaacuau

SEQ ID NO: 523530 - RNA, 19 nt, Artificial Sequence
  Description of Artificial Sequence: Synthetic oligonucleotide
cccuaucauuagaacuauu

SEQ ID NO: 523531 - RNA, 19 nt, Artificial Sequence
  Description of Artificial Sequence: Synthetic oligonucleotide
gggauaccggcagcuccuu

SEQ ID NO: 523532 - RNA, 19 nt, Artificial Sequence
  Description of Artificial Sequence: Synthetic oligonucleotide
aaauguuacacaucgcugc

SEQ ID NO: 523533 - RNA, 19 nt, Artificial Sequence
  Description of Artificial Sequence: Synthetic oligonucleotide
uucaauuugagccuuagag

SEQ ID NO: 523534 - RNA, 19 nt, Artificial Sequence
  Description of Artificial Sequence: Synthetic oligonucleotide
aaugacuuaaauaucuugc

SEQ ID NO: 523535 - RNA, 19 nt, Artificial Sequence
  Description of Artificial Sequence: Synthetic oligonucleotide
uuagaggugacaaagaugu

SEQ ID NO: 523536 - RNA, 19 nt, Artificial Sequence
  Description of Artificial Sequence: Synthetic oligonucleotide
aauacugucugcuuuggag

SEQ ID NO: 523537 - RNA, 19 nt, Artificial Sequence
  Description of Artificial Sequence: Synthetic oligonucleotide
aaaugaaagagcucucgac

SEQ ID NO: 523538 - RNA, 19 nt, Artificial Sequence
  Description of Artificial Sequence: Synthetic oligonucleotide
ucaucaaccaacaucgaag

SEQ ID NO: 523539 - RNA, 19 nt, Artificial Sequence
  Description of Artificial Sequence: Synthetic oligonucleotide
aauguuacacaucgcugcc

SEQ ID NO: 523540 - RNA, 19 nt, Artificial Sequence
  Description of Artificial Sequence: Synthetic oligonucleotide
aauacauaugcccuggaga

SEQ ID NO: 523541 - RNA, 19 nt, Artificial Sequence
  Description of Artificial Sequence: Synthetic oligonucleotide
ugauauaacuggcugaggc

SEQ ID NO: 523542 - RNA, 19 nt, Artificial Sequence
  Description of Artificial Sequence: Synthetic oligonucleotide
auuaagaaaucacucgcac

SEQ ID NO: 523543 - RNA, 19 nt, Artificial Sequence
  Description of Artificial Sequence: Synthetic oligonucleotide
uauucuaaggacuuuguga

SEQ ID NO: 523544 - RNA, 19 nt, Artificial Sequence
  Description of Artificial Sequence: Synthetic oligonucleotide
ggaauuuugagacugacag

SEQ ID NO: 523545 - RNA, 19 nt, Artificial Sequence
  Description of Artificial Sequence: Synthetic oligonucleotide
gaggguaggaaucaagugg

SEQ ID NO: 523546 - RNA, 19 nt, Artificial Sequence
  Description of Artificial Sequence: Synthetic oligonucleotide
cuagauguccaauauacag

SEQ ID NO: 523547 - RNA, 19 nt, Artificial Sequence
  Description of Artificial Sequence: Synthetic oligonucleotide
acaauaugcuuccuuagcg

SEQ ID NO: 523548 - RNA, 19 nt, Artificial Sequence
  Description of Artificial Sequence: Synthetic oligonucleotide
agaucugagauacacagug

SEQ ID NO: 523549 - RNA, 19 nt, Artificial Sequence
  Description of Artificial Sequence: Synthetic oligonucleotide
agaaauguuacacaucgcu

SEQ ID NO: 523550 - RNA, 19 nt, Artificial Sequence
  Description of Artificial Sequence: Synthetic oligonucleotide
uguauugcauaccauaguc

SEQ ID NO: 523551 - RNA, 19 nt, Artificial Sequence
  Description of Artificial Sequence: Synthetic oligonucleotide
uuuaauguaguggagaaau

SEQ ID NO: 523552 - RNA, 19 nt, Artificial Sequence
  Description of Artificial Sequence: Synthetic oligonucleotide
ucuaggaaccgaauaagug

SEQ ID NO: 523553 - RNA, 19 nt, Artificial Sequence
  Description of Artificial Sequence: Synthetic oligonucleotide
ggauugaaaagauacacag

SEQ ID NO: 523554 - RNA, 19 nt, Artificial Sequence
  Description of Artificial Sequence: Synthetic oligonucleotide
ugagccuuagagaagauau

SEQ ID NO: 523555 - RNA, 19 nt, Artificial Sequence
  Description of Artificial Sequence: Synthetic oligonucleotide
aaucaagugggugacaaug

SEQ ID NO: 523556 - RNA, 19 nt, Artificial Sequence
  Description of Artificial Sequence: Synthetic oligonucleotide
uauugcauaccauaguccu

SEQ ID NO: 523557 - RNA, 19 nt, Artificial Sequence
  Description of Artificial Sequence: Synthetic oligonucleotide
ugaauugcagucagcauug

SEQ ID NO: 523558 - RNA, 19 nt, Artificial Sequence
  Description of Artificial Sequence: Synthetic oligonucleotide
ucaauuugagccuuagaga

SEQ ID NO: 523559 - RNA, 19 nt, Artificial Sequence
  Description of Artificial Sequence: Synthetic oligonucleotide
uguacacacacacacguac

SEQ ID NO: 523560 - RNA, 19 nt, Artificial Sequence
  Description of Artificial Sequence: Synthetic oligonucleotide
uguaguggagaaauguuac

SEQ ID NO: 523561 - RNA, 19 nt, Artificial Sequence
  Description of Artificial Sequence: Synthetic oligonucleotide
aauaguaaccuugucauuu

SEQ ID NO: 523562 - RNA, 19 nt, Artificial Sequence
  Description of Artificial Sequence: Synthetic oligonucleotide
accaacguauucuaaggac

SEQ ID NO: 523563 - RNA, 19 nt, Artificial Sequence
  Description of Artificial Sequence: Synthetic oligonucleotide
gaaaccgcccaauauacug

SEQ ID NO: 523564 - RNA, 19 nt, Artificial Sequence
  Description of Artificial Sequence: Synthetic oligonucleotide
aaguugcuaaugcuguuuc

SEQ ID NO: 523565 - RNA, 19 nt, Artificial Sequence
  Description of Artificial Sequence: Synthetic oligonucleotide
ugcaaaacacaacggaccc

SEQ ID NO: 523566 - RNA, 19 nt, Artificial Sequence
  Description of Artificial Sequence: Synthetic oligonucleotide
uuagagaagauauucuuua

SEQ ID NO: 523567 - RNA, 19 nt, Artificial Sequence
  Description of Artificial Sequence: Synthetic oligonucleotide
uucaccaacguauucuaag

SEQ ID NO: 523568 - RNA, 19 nt, Artificial Sequence
  Description of Artificial Sequence: Synthetic oligonucleotide
uacacacacacacacacac

SEQ ID NO: 523569 - RNA, 19 nt, Artificial Sequence
  Description of Artificial Sequence: Synthetic oligonucleotide
acagucuaugauccgaaac

SEQ ID NO: 523570 - RNA, 19 nt, Artificial Sequence
  Description of Artificial Sequence: Synthetic oligonucleotide
ucugagauacacagugagg

SEQ ID NO: 523571 - RNA, 19 nt, Artificial Sequence
  Description of Artificial Sequence: Synthetic oligonucleotide
uuuccguauagcauggaca

SEQ ID NO: 523572 - RNA, 19 nt, Artificial Sequence
  Description of Artificial Sequence: Synthetic oligonucleotide
ugucgaaagcgcaagaaaa

SEQ ID NO: 523573 - RNA, 19 nt, Artificial Sequence
  Description of Artificial Sequence: Synthetic oligonucleotide
ugacuuaaauaucuugcca

SEQ ID NO: 523574 - RNA, 19 nt, Artificial Sequence
  Description of Artificial Sequence: Synthetic oligonucleotide
aaaguuaguugguaaugga

SEQ ID NO: 523575 - RNA, 19 nt, Artificial Sequence
  Description of Artificial Sequence: Synthetic oligonucleotide
auugauauaacuggcugag

SEQ ID NO: 523576 - RNA, 19 nt, Artificial Sequence
  Description of Artificial Sequence: Synthetic oligonucleotide
cacauguacacacacacac

SEQ ID NO: 523577 - RNA, 19 nt, Artificial Sequence
  Description of Artificial Sequence: Synthetic oligonucleotide
auuuccguauagcauggac

SEQ ID NO: 523578 - RNA, 19 nt, Artificial Sequence
  Description of Artificial Sequence: Synthetic oligonucleotide
aguuuaaauaguaaccuug

SEQ ID NO: 523579 - RNA, 19 nt, Artificial Sequence
  Description of Artificial Sequence: Synthetic oligonucleotide
uuacaaaugcuccuagagu

SEQ ID NO: 523580 - RNA, 19 nt, Artificial Sequence
  Description of Artificial Sequence: Synthetic oligonucleotide
aucugagauacacagugag

SEQ ID NO: 523581 - RNA, 19 nt, Artificial Sequence
  Description of Artificial Sequence: Synthetic oligonucleotide
caucaaccaacaucgaagg

SEQ ID NO: 523582 - RNA, 19 nt, Artificial Sequence
  Description of Artificial Sequence: Synthetic oligonucleotide
ugaagauuguggcucucgg

SEQ ID NO: 523583 - RNA, 19 nt, Artificial Sequence
  Description of Artificial Sequence: Synthetic oligonucleotide
ugcuuuagaggugacaaag

SEQ ID NO: 523584 - RNA, 19 nt, Artificial Sequence
  Description of Artificial Sequence: Synthetic oligonucleotide
aacuguauugcauaccaua

SEQ ID NO: 523585 - RNA, 19 nt, Artificial Sequence
  Description of Artificial Sequence: Synthetic oligonucleotide
augaucuuauaguaaagga

SEQ ID NO: 523586 - RNA, 19 nt, Artificial Sequence
  Description of Artificial Sequence: Synthetic oligonucleotide
uucgguaacccacuggaug

SEQ ID NO: 523587 - RNA, 19 nt, Artificial Sequence
  Description of Artificial Sequence: Synthetic oligonucleotide
uucccaaaaucacaguuga

SEQ ID NO: 523588 - RNA, 19 nt, Artificial Sequence
  Description of Artificial Sequence: Synthetic oligonucleotide
uguccaauauacagaagca

SEQ ID NO: 523589 - RNA, 19 nt, Artificial Sequence
  Description of Artificial Sequence: Synthetic oligonucleotide
uuaagaaaucacucgcaca

SEQ ID NO: 523590 - RNA, 19 nt, Artificial Sequence
  Description of Artificial Sequence: Synthetic oligonucleotide
cacacguacacacacacac

SEQ ID NO: 523591 - RNA, 19 nt, Artificial Sequence
  Description of Artificial Sequence: Synthetic oligonucleotide
aggacuuaacaagaauucc

SEQ ID NO: 523592 - RNA, 19 nt, Artificial Sequence
  Description of Artificial Sequence: Synthetic oligonucleotide
gacaauaugcuuccuuagc

SEQ ID NO: 523593 - RNA, 19 nt, Artificial Sequence
  Description of Artificial Sequence: Synthetic oligonucleotide
aaacuguccgucaggaacg

SEQ ID NO: 523594 - RNA, 19 nt, Artificial Sequence
  Description of Artificial Sequence: Synthetic oligonucleotide
uguguuuggcaucuuaauc

SEQ ID NO: 523595 - RNA, 19 nt, Artificial Sequence
  Description of Artificial Sequence: Synthetic oligonucleotide
uaggaaccgaauaagugcu

SEQ ID NO: 523596 - RNA, 19 nt, Artificial Sequence
  Description of Artificial Sequence: Synthetic oligonucleotide
ucaucacuggaagagaggc

SEQ ID NO: 523597 - RNA, 19 nt, Artificial Sequence
  Description of Artificial Sequence: Synthetic oligonucleotide
auacauaugcccuggagau

SEQ ID NO: 523598 - RNA, 19 nt, Artificial Sequence
  Description of Artificial Sequence: Synthetic oligonucleotide
uggcagauuuaucagaaaa

SEQ ID NO: 523599 - RNA, 19 nt, Artificial Sequence
  Description of Artificial Sequence: Synthetic oligonucleotide
ugccaaauaguucuacugu

SEQ ID NO: 523600 - RNA, 19 nt, Artificial Sequence
  Description of Artificial Sequence: Synthetic oligonucleotide
caaaguuaguugguaaugg

SEQ ID NO: 523601 - RNA, 19 nt, Artificial Sequence
  Description of Artificial Sequence: Synthetic oligonucleotide
aauagcuguugccugaaua

SEQ ID NO: 523602 - RNA, 19 nt, Artificial Sequence
  Description of Artificial Sequence: Synthetic oligonucleotide
guaacuguauugcauacca

SEQ ID NO: 523603 - RNA, 19 nt, Artificial Sequence
  Description of Artificial Sequence: Synthetic oligonucleotide
aaaccgcccaauauacugc

SEQ ID NO: 523604 - RNA, 19 nt, Artificial Sequence
  Description of Artificial Sequence: Synthetic oligonucleotide
cauuugcaaaacacaacgg

SEQ ID NO: 523605 - RNA, 19 nt, Artificial Sequence
  Description of Artificial Sequence: Synthetic oligonucleotide
ucaaccaacaucgaaggaa

SEQ ID NO: 523606 - RNA, 19 nt, Artificial Sequence
  Description of Artificial Sequence: Synthetic oligonucleotide
ugauuuuacaaaugcuccu

SEQ ID NO: 523607 - RNA, 19 nt, Artificial Sequence
  Description of Artificial Sequence: Synthetic oligonucleotide
ucccaaauaaggcuuuaug

SEQ ID NO: 523608 - RNA, 19 nt, Artificial Sequence
  Description of Artificial Sequence: Synthetic oligonucleotide
aacuugaaguucacugacc

SEQ ID NO: 523609 - RNA, 19 nt, Artificial Sequence
  Description of Artificial Sequence: Synthetic oligonucleotide
aucacucgcacaugcacac

SEQ ID NO: 523610 - RNA, 19 nt, Artificial Sequence
  Description of Artificial Sequence: Synthetic oligonucleotide
agcauucauaccaauuagc

SEQ ID NO: 523611 - RNA, 19 nt, Artificial Sequence
  Description of Artificial Sequence: Synthetic oligonucleotide
uucccaugaucccauacgc

SEQ ID NO: 523612 - RNA, 19 nt, Artificial Sequence
  Description of Artificial Sequence: Synthetic oligonucleotide
auaguaaccuugucauuuc

SEQ ID NO: 523613 - RNA, 19 nt, Artificial Sequence
  Description of Artificial Sequence: Synthetic oligonucleotide
caaccaacaucgaaggaag

SEQ ID NO: 523614 - RNA, 19 nt, Artificial Sequence
  Description of Artificial Sequence: Synthetic oligonucleotide
gaaauguuacacaucgcug

SEQ ID NO: 523615 - RNA, 19 nt, Artificial Sequence
  Description of Artificial Sequence: Synthetic oligonucleotide
cuuagcgccgucaucacug

SEQ ID NO: 523616 - RNA, 19 nt, Artificial Sequence
  Description of Artificial Sequence: Synthetic oligonucleotide
ugcuauaugcuucccuuug

SEQ ID NO: 523617 - RNA, 19 nt, Artificial Sequence
  Description of Artificial Sequence: Synthetic oligonucleotide
uucguaagugguaccaaca

SEQ ID NO: 523618 - RNA, 19 nt, Artificial Sequence
  Description of Artificial Sequence: Synthetic oligonucleotide
agccuuagagaagauauuc

SEQ ID NO: 523619 - RNA, 19 nt, Artificial Sequence
  Description of Artificial Sequence: Synthetic oligonucleotide
accgccauccaucauucac

SEQ ID NO: 523620 - RNA, 19 nt, Artificial Sequence
  Description of Artificial Sequence: Synthetic oligonucleotide
ucuuguacuuucaggcacc

SEQ ID NO: 523621 - RNA, 19 nt, Artificial Sequence
  Description of Artificial Sequence: Synthetic oligonucleotide
uuugcuauaugcuucccuu

SEQ ID NO: 523622 - RNA, 19 nt, Artificial Sequence
  Description of Artificial Sequence: Synthetic oligonucleotide
uuccguauagcauggacaa

SEQ ID NO: 523623 - RNA, 19 nt, Artificial Sequence
  Description of Artificial Sequence: Synthetic oligonucleotide
agcgcaagaaaagcgaggg

SEQ ID NO: 523624 - RNA, 19 nt, Artificial Sequence
  Description of Artificial Sequence: Synthetic oligonucleotide
uuauacacuugguaacugu

SEQ ID NO: 523625 - RNA, 19 nt, Artificial Sequence
  Description of Artificial Sequence: Synthetic oligonucleotide
aaacaacgcuccuucucuc

SEQ ID NO: 523626 - RNA, 19 nt, Artificial Sequence
  Description of Artificial Sequence: Synthetic oligonucleotide
aagaauucccaugauccca

SEQ ID NO: 523627 - RNA, 19 nt, Artificial Sequence
  Description of Artificial Sequence: Synthetic oligonucleotide
uucaucaaccaacaucgaa

SEQ ID NO: 523628 - RNA, 19 nt, Artificial Sequence
  Description of Artificial Sequence: Synthetic oligonucleotide
aagagcgccacuggcaagg

SEQ ID NO: 523629 - RNA, 19 nt, Artificial Sequence
  Description of Artificial Sequence: Synthetic oligonucleotide
uguugccugaauaaaugaa

SEQ ID NO: 523630 - RNA, 19 nt, Artificial Sequence
  Description of Artificial Sequence: Synthetic oligonucleotide
cacacacacacguacacac

SEQ ID NO: 523631 - RNA, 19 nt, Artificial Sequence
  Description of Artificial Sequence: Synthetic oligonucleotide
aaaggauugaaaagauaca

SEQ ID NO: 523632 - RNA, 19 nt, Artificial Sequence
  Description of Artificial Sequence: Synthetic oligonucleotide
accuugucauuucagcuag

SEQ ID NO: 523633 - RNA, 19 nt, Artificial Sequence
  Description of Artificial Sequence: Synthetic oligonucleotide
auagcuguugccugaauaa

SEQ ID NO: 523634 - RNA, 19 nt, Artificial Sequence
  Description of Artificial Sequence: Synthetic oligonucleotide
ucagcuaguuguuccaugu

SEQ ID NO: 523635 - RNA, 19 nt, Artificial Sequence
  Description of Artificial Sequence: Synthetic oligonucleotide
cacacacacacacacacac

SEQ ID NO: 523636 - RNA, 19 nt, Artificial Sequence
  Description of Artificial Sequence: Synthetic oligonucleotide
gaaaacaacgcuccuucuc

SEQ ID NO: 523637 - RNA, 19 nt, Artificial Sequence
  Description of Artificial Sequence: Synthetic oligonucleotide
auauaacuggcugaggcug

SEQ ID NO: 523638 - RNA, 19 nt, Artificial Sequence
  Description of Artificial Sequence: Synthetic oligonucleotide
caggacuuaacaagaauuc

SEQ ID NO: 523639 - RNA, 19 nt, Artificial Sequence
  Description of Artificial Sequence: Synthetic oligonucleotide
aaagcgcaagaaaagcgag

SEQ ID NO: 523640 - RNA, 19 nt, Artificial Sequence
  Description of Artificial Sequence: Synthetic oligonucleotide
aguggagaaauguuacaca

SEQ ID NO: 523641 - RNA, 19 nt, Artificial Sequence
  Description of Artificial Sequence: Synthetic oligonucleotide
acuguauugcauaccauag

SEQ ID NO: 523642 - RNA, 19 nt, Artificial Sequence
  Description of Artificial Sequence: Synthetic oligonucleotide
cuuugggcgauguuucugc

SEQ ID NO: 523643 - RNA, 19 nt, Artificial Sequence
  Description of Artificial Sequence: Synthetic oligonucleotide
ucaaguaggcauuggaauu

SEQ ID NO: 523644 - RNA, 19 nt, Artificial Sequence
  Description of Artificial Sequence: Synthetic oligonucleotide
uccgucaggaacgucgugg

SEQ ID NO: 523645 - RNA, 19 nt, Artificial Sequence
  Description of Artificial Sequence: Synthetic oligonucleotide
aaggaguagcucaagguca

SEQ ID NO: 523646 - RNA, 19 nt, Artificial Sequence
  Description of Artificial Sequence: Synthetic oligonucleotide
ucgaggauguuauacacuu

SEQ ID NO: 523647 - RNA, 19 nt, Artificial Sequence
  Description of Artificial Sequence: Synthetic oligonucleotide
aggguaggaaucaaguggg

SEQ ID NO: 523648 - RNA, 19 nt, Artificial Sequence
  Description of Artificial Sequence: Synthetic oligonucleotide
auuugagccuuagagaaga

SEQ ID NO: 523649 - RNA, 19 nt, Artificial Sequence
  Description of Artificial Sequence: Synthetic oligonucleotide
uguauccucuucaaaguua

SEQ ID NO: 523650 - RNA, 19 nt, Artificial Sequence
  Description of Artificial Sequence: Synthetic oligonucleotide
acacaacggacccaugauc

SEQ ID NO: 523651 - RNA, 19 nt, Artificial Sequence
  Description of Artificial Sequence: Synthetic oligonucleotide
guuucgguaacccacugga

SEQ ID NO: 523652 - RNA, 19 nt, Artificial Sequence
  Description of Artificial Sequence: Synthetic oligonucleotide
ucucgaggauguuauacac

SEQ ID NO: 523653 - RNA, 19 nt, Artificial Sequence
  Description of Artificial Sequence: Synthetic oligonucleotide
aaccuugucauuucagcua

SEQ ID NO: 523654 - RNA, 19 nt, Artificial Sequence
  Description of Artificial Sequence: Synthetic oligonucleotide
uaguggagaaauguuacac

SEQ ID NO: 523655 - RNA, 19 nt, Artificial Sequence
  Description of Artificial Sequence: Synthetic oligonucleotide
aacacaacggacccaugau

SEQ ID NO: 523656 - RNA, 19 nt, Artificial Sequence
  Description of Artificial Sequence: Synthetic oligonucleotide
ugucuggagaguuucguaa

SEQ ID NO: 523657 - RNA, 19 nt, Artificial Sequence
  Description of Artificial Sequence: Synthetic oligonucleotide
uggacaauaugcuuccuua

SEQ ID NO: 523658 - RNA, 19 nt, Artificial Sequence
  Description of Artificial Sequence: Synthetic oligonucleotide
uacacacacacacguacac

SEQ ID NO: 523659 - RNA, 19 nt, Artificial Sequence
  Description of Artificial Sequence: Synthetic oligonucleotide
uccgaaacaguaacuucug

SEQ ID NO: 523660 - RNA, 19 nt, Artificial Sequence
  Description of Artificial Sequence: Synthetic oligonucleotide
uugguaacuguauugcaua

SEQ ID NO: 523661 - RNA, 19 nt, Artificial Sequence
  Description of Artificial Sequence: Synthetic oligonucleotide
aggaacgucguggacacgg

SEQ ID NO: 523662 - RNA, 19 nt, Artificial Sequence
  Description of Artificial Sequence: Synthetic oligonucleotide
guaaacagucuaugauccg

SEQ ID NO: 523663 - RNA, 19 nt, Artificial Sequence
  Description of Artificial Sequence: Synthetic oligonucleotide
ucuuauaguaaaggauuga

SEQ ID NO: 523664 - RNA, 19 nt, Artificial Sequence
  Description of Artificial Sequence: Synthetic oligonucleotide
uaugugcauuugcaaaaca

SEQ ID NO: 523665 - RNA, 19 nt, Artificial Sequence
  Description of Artificial Sequence: Synthetic oligonucleotide
agucuaugauccgaaacag

SEQ ID NO: 523666 - RNA, 19 nt, Artificial Sequence
  Description of Artificial Sequence: Synthetic oligonucleotide
cacguacacacacacacac

SEQ ID NO: 523667 - RNA, 19 nt, Artificial Sequence
  Description of Artificial Sequence: Synthetic oligonucleotide
cauagggauggacaugaag

SEQ ID NO: 523668 - RNA, 19 nt, Artificial Sequence
  Description of Artificial Sequence: Synthetic oligonucleotide
gcacacaauacauaugccc

SEQ ID NO: 523669 - RNA, 19 nt, Artificial Sequence
  Description of Artificial Sequence: Synthetic oligonucleotide
ucaggaacgucguggacac

SEQ ID NO: 523670 - RNA, 19 nt, Artificial Sequence
  Description of Artificial Sequence: Synthetic oligonucleotide
gaaagcgcaagaaaagcga

SEQ ID NO: 523671 - RNA, 19 nt, Artificial Sequence
  Description of Artificial Sequence: Synthetic oligonucleotide
caauacauaugcccuggag

SEQ ID NO: 523672 - RNA, 19 nt, Artificial Sequence
  Description of Artificial Sequence: Synthetic oligonucleotide
uuaauacuucaccaacgua

SEQ ID NO: 523673 - RNA, 19 nt, Artificial Sequence
  Description of Artificial Sequence: Synthetic oligonucleotide
agccuuuaaacucaagaua

SEQ ID NO: 523674 - RNA, 19 nt, Artificial Sequence
  Description of Artificial Sequence: Synthetic oligonucleotide
uaguugguaauggaucaag

SEQ ID NO: 523675 - RNA, 19 nt, Artificial Sequence
  Description of Artificial Sequence: Synthetic oligonucleotide
gagaaaccgcccaauauac

SEQ ID NO: 523676 - RNA, 19 nt, Artificial Sequence
  Description of Artificial Sequence: Synthetic oligonucleotide
aacaacgcuccuucucucu

SEQ ID NO: 523677 - RNA, 19 nt, Artificial Sequence
  Description of Artificial Sequence: Synthetic oligonucleotide
cagucuaugauccgaaaca

SEQ ID NO: 523678 - RNA, 19 nt, Artificial Sequence
  Description of Artificial Sequence: Synthetic oligonucleotide
aaccgcuuaagagcgccac

SEQ ID NO: 523679 - RNA, 19 nt, Artificial Sequence
  Description of Artificial Sequence: Synthetic oligonucleotide
ugcccaggacuuaacaaga

SEQ ID NO: 523680 - RNA, 19 nt, Artificial Sequence
  Description of Artificial Sequence: Synthetic oligonucleotide
ugucucgaggauguuauac

SEQ ID NO: 523681 - RNA, 19 nt, Artificial Sequence
  Description of Artificial Sequence: Synthetic oligonucleotide
cacugggaaguucagcuag

SEQ ID NO: 523682 - RNA, 19 nt, Artificial Sequence
  Description of Artificial Sequence: Synthetic oligonucleotide
ugauucaggguugcuacug

SEQ ID NO: 523683 - RNA, 19 nt, Artificial Sequence
  Description of Artificial Sequence: Synthetic oligonucleotide
aaauaaggcuuuauguauu

SEQ ID NO: 523684 - RNA, 19 nt, Artificial Sequence
  Description of Artificial Sequence: Synthetic oligonucleotide
cacacacacguacacacac

SEQ ID NO: 523685 - RNA, 19 nt, Artificial Sequence
  Description of Artificial Sequence: Synthetic oligonucleotide
cacacacguacacacacac

SEQ ID NO: 523686 - RNA, 19 nt, Artificial Sequence
  Description of Artificial Sequence: Synthetic oligonucleotide
aaucacucgcacaugcaca

SEQ ID NO: 523687 - RNA, 19 nt, Artificial Sequence
  Description of Artificial Sequence: Synthetic oligonucleotide
agauaaaaguuugcuauau

SEQ ID NO: 523688 - RNA, 19 nt, Artificial Sequence
  Description of Artificial Sequence: Synthetic oligonucleotide
ggacuuaacaagaauuccc

SEQ ID NO: 523689 - RNA, 19 nt, Artificial Sequence
  Description of Artificial Sequence: Synthetic oligonucleotide
gaaaagauacacagcuuga

SEQ ID NO: 523690 - RNA, 19 nt, Artificial Sequence
  Description of Artificial Sequence: Synthetic oligonucleotide
ugugcccaggacuuaacaa

SEQ ID NO: 523691 - RNA, 19 nt, Artificial Sequence
  Description of Artificial Sequence: Synthetic oligonucleotide
auauacugcucaaugacau

SEQ ID NO: 523692 - RNA, 19 nt, Artificial Sequence
  Description of Artificial Sequence: Synthetic oligonucleotide
cuuaagagcgccacuggca

SEQ ID NO: 523693 - RNA, 19 nt, Artificial Sequence
  Description of Artificial Sequence: Synthetic oligonucleotide
ucaaccgcuuaagagcgcc

SEQ ID NO: 523694 - RNA, 19 nt, Artificial Sequence
  Description of Artificial Sequence: Synthetic oligonucleotide
aaccgcccaauauacugcu

SEQ ID NO: 523695 - RNA, 19 nt, Artificial Sequence
  Description of Artificial Sequence: Synthetic oligonucleotide
aacgucguggacacggcag

SEQ ID NO: 523696 - RNA, 19 nt, Artificial Sequence
  Description of Artificial Sequence: Synthetic oligonucleotide
uucuaaggacuuugugacc

SEQ ID NO: 523697 - RNA, 19 nt, Artificial Sequence
  Description of Artificial Sequence: Synthetic oligonucleotide
accaauuagcaagucaggu

SEQ ID NO: 523698 - RNA, 19 nt, Artificial Sequence
  Description of Artificial Sequence: Synthetic oligonucleotide
augcauugcagguucucug

SEQ ID NO: 523699 - RNA, 19 nt, Artificial Sequence
  Description of Artificial Sequence: Synthetic oligonucleotide
ugauccgaaacaguaacuu

SEQ ID NO: 523700 - RNA, 19 nt, Artificial Sequence
  Description of Artificial Sequence: Synthetic oligonucleotide
uaguaaccuugucauuuca

SEQ ID NO: 523701 - RNA, 19 nt, Artificial Sequence
  Description of Artificial Sequence: Synthetic oligonucleotide
aguuucguaagugguacca

SEQ ID NO: 523702 - RNA, 19 nt, Artificial Sequence
  Description of Artificial Sequence: Synthetic oligonucleotide
gauauaacuggcugaggcu

SEQ ID NO: 523703 - RNA, 19 nt, Artificial Sequence
  Description of Artificial Sequence: Synthetic oligonucleotide
ugguaacuguauugcauac

SEQ ID NO: 523704 - RNA, 19 nt, Artificial Sequence
  Description of Artificial Sequence: Synthetic oligonucleotide
uugauauaacuggcugagg

SEQ ID NO: 523705 - RNA, 19 nt, Artificial Sequence
  Description of Artificial Sequence: Synthetic oligonucleotide
auaucuugccacaacuuga

SEQ ID NO: 523706 - RNA, 19 nt, Artificial Sequence
  Description of Artificial Sequence: Synthetic oligonucleotide
augaagauuguggcucucg

SEQ ID NO: 523707 - RNA, 19 nt, Artificial Sequence
  Description of Artificial Sequence: Synthetic oligonucleotide
uaggacucuccagaaaaca

SEQ ID NO: 523708 - RNA, 19 nt, Artificial Sequence
  Description of Artificial Sequence: Synthetic oligonucleotide
gucuggagaguuucguaag

SEQ ID NO: 523709 - RNA, 19 nt, Artificial Sequence
  Description of Artificial Sequence: Synthetic oligonucleotide
uaauacugucugcuuugga

SEQ ID NO: 523710 - RNA, 19 nt, Artificial Sequence
  Description of Artificial Sequence: Synthetic oligonucleotide
ucccaugaucccauacgcc

SEQ ID NO: 523711 - RNA, 19 nt, Artificial Sequence
  Description of Artificial Sequence: Synthetic oligonucleotide
uaugcccuggagauacaga

SEQ ID NO: 523712 - RNA, 19 nt, Artificial Sequence
  Description of Artificial Sequence: Synthetic oligonucleotide
acauguacacacacacacg

SEQ ID NO: 523713 - RNA, 19 nt, Artificial Sequence
  Description of Artificial Sequence: Synthetic oligonucleotide
ugugugcggaagcaguaaa

SEQ ID NO: 523714 - RNA, 19 nt, Artificial Sequence
  Description of Artificial Sequence: Synthetic oligonucleotide
gaaguucacugaccaacac

SEQ ID NO: 523715 - RNA, 19 nt, Artificial Sequence
  Description of Artificial Sequence: Synthetic oligonucleotide
acguauucuaaggacuuug

SEQ ID NO: 523716 - RNA, 19 nt, Artificial Sequence
  Description of Artificial Sequence: Synthetic oligonucleotide
gagauaaaaguuugcuaua

SEQ ID NO: 523717 - RNA, 19 nt, Artificial Sequence
  Description of Artificial Sequence: Synthetic oligonucleotide
aguaaccuugucauuucag

SEQ ID NO: 523718 - RNA, 19 nt, Artificial Sequence
  Description of Artificial Sequence: Synthetic oligonucleotide
uuagcgccgucaucacugg

SEQ ID NO: 523719 - RNA, 19 nt, Artificial Sequence
  Description of Artificial Sequence: Synthetic oligonucleotide
cacacacacacacacguca

SEQ ID NO: 523720 - RNA, 19 nt, Artificial Sequence
  Description of Artificial Sequence: Synthetic oligonucleotide
gcugauucaggguugcuac

SEQ ID NO: 523721 - RNA, 19 nt, Artificial Sequence
  Description of Artificial Sequence: Synthetic oligonucleotide
acaugaagauuguggcucu

SEQ ID NO: 523722 - RNA, 19 nt, Artificial Sequence
  Description of Artificial Sequence: Synthetic oligonucleotide
cucggugucuuguacuuuc

SEQ ID NO: 523723 - RNA, 19 nt, Artificial Sequence
  Description of Artificial Sequence: Synthetic oligonucleotide
ucccuuugggcgauguuuc

SEQ ID NO: 523724 - RNA, 19 nt, Artificial Sequence
  Description of Artificial Sequence: Synthetic oligonucleotide
gguaggacucuccagaaaa

SEQ ID NO: 523725 - RNA, 19 nt, Artificial Sequence
  Description of Artificial Sequence: Synthetic oligonucleotide
ugcuaaugcuguuucggua

SEQ ID NO: 523726 - RNA, 19 nt, Artificial Sequence
  Description of Artificial Sequence: Synthetic oligonucleotide
uuacacugggaaguucagc

SEQ ID NO: 523727 - RNA, 19 nt, Artificial Sequence
  Description of Artificial Sequence: Synthetic oligonucleotide
ggacaauaugcuuccuuag

SEQ ID NO: 523728 - RNA, 19 nt, Artificial Sequence
  Description of Artificial Sequence: Synthetic oligonucleotide
aacaucgaaggaagcugag

SEQ ID NO: 523729 - RNA, 19 nt, Artificial Sequence
  Description of Artificial Sequence: Synthetic oligonucleotide
cccaauauacugcucaaug

SEQ ID NO: 523730 - RNA, 19 nt, Artificial Sequence
  Description of Artificial Sequence: Synthetic oligonucleotide
guugccugaauaaaugaaa

SEQ ID NO: 523731 - RNA, 19 nt, Artificial Sequence
  Description of Artificial Sequence: Synthetic oligonucleotide
aguuugcuauaugcuuccc

SEQ ID NO: 523732 - RNA, 19 nt, Artificial Sequence
  Description of Artificial Sequence: Synthetic oligonucleotide
gcuugcaccacuccgugcc

SEQ ID NO: 523733 - RNA, 19 nt, Artificial Sequence
  Description of Artificial Sequence: Synthetic oligonucleotide
uuaucaugcauugcagguu

SEQ ID NO: 523734 - RNA, 19 nt, Artificial Sequence
  Description of Artificial Sequence: Synthetic oligonucleotide
aaacagucuaugauccgaa

SEQ ID NO: 523735 - RNA, 19 nt, Artificial Sequence
  Description of Artificial Sequence: Synthetic oligonucleotide
ugugcugauucaggguugc

SEQ ID NO: 523736 - RNA, 19 nt, Artificial Sequence
  Description of Artificial Sequence: Synthetic oligonucleotide
auuagcaagucagguucag

SEQ ID NO: 523737 - RNA, 19 nt, Artificial Sequence
  Description of Artificial Sequence: Synthetic oligonucleotide
uccuagaguuacacuggga

SEQ ID NO: 523738 - RNA, 19 nt, Artificial Sequence
  Description of Artificial Sequence: Synthetic oligonucleotide
cauguacacacacacacgu

SEQ ID NO: 523739 - RNA, 19 nt, Artificial Sequence
  Description of Artificial Sequence: Synthetic oligonucleotide
guaguggagaaauguuaca

SEQ ID NO: 523740 - RNA, 19 nt, Artificial Sequence
  Description of Artificial Sequence: Synthetic oligonucleotide
gauggacaugaagauugug

SEQ ID NO: 523741 - RNA, 19 nt, Artificial Sequence
  Description of Artificial Sequence: Synthetic oligonucleotide
cuaaucgaggaggagguga

SEQ ID NO: 523742 - RNA, 19 nt, Artificial Sequence
  Description of Artificial Sequence: Synthetic oligonucleotide
uguccgucaggaacgucgu

SEQ ID NO: 523743 - RNA, 19 nt, Artificial Sequence
  Description of Artificial Sequence: Synthetic oligonucleotide
uaacaagaauucccaugau

SEQ ID NO: 523744 - RNA, 19 nt, Artificial Sequence
  Description of Artificial Sequence: Synthetic oligonucleotide
ccuaauacugucugcuuug

SEQ ID NO: 523745 - RNA, 19 nt, Artificial Sequence
  Description of Artificial Sequence: Synthetic oligonucleotide
acacacacacacacgucac

SEQ ID NO: 523746 - RNA, 19 nt, Artificial Sequence
  Description of Artificial Sequence: Synthetic oligonucleotide
gaggugaggagccuuuaaa

SEQ ID NO: 523747 - RNA, 19 nt, Artificial Sequence
  Description of Artificial Sequence: Synthetic oligonucleotide
uaacuguauugcauaccau

SEQ ID NO: 523748 - RNA, 19 nt, Artificial Sequence
  Description of Artificial Sequence: Synthetic oligonucleotide
cuaggugagauaaaaguuu

SEQ ID NO: 523749 - RNA, 19 nt, Artificial Sequence
  Description of Artificial Sequence: Synthetic oligonucleotide
ugcuacugucucgaggaug

SEQ ID NO: 523750 - RNA, 19 nt, Artificial Sequence
  Description of Artificial Sequence: Synthetic oligonucleotide
gagaaauguuacacaucgc

SEQ ID NO: 523751 - RNA, 19 nt, Artificial Sequence
  Description of Artificial Sequence: Synthetic oligonucleotide
ccgaauaagugcuucuuug

SEQ ID NO: 523752 - RNA, 19 nt, Artificial Sequence
  Description of Artificial Sequence: Synthetic oligonucleotide
gcauucauaccaauuagca

SEQ ID NO: 523753 - RNA, 19 nt, Artificial Sequence
  Description of Artificial Sequence: Synthetic oligonucleotide
cucaagauaggauuuccgu

SEQ ID NO: 523754 - RNA, 19 nt, Artificial Sequence
  Description of Artificial Sequence: Synthetic oligonucleotide
cacgucacuuuccagucuc

SEQ ID NO: 523755 - RNA, 19 nt, Artificial Sequence
  Description of Artificial Sequence: Synthetic oligonucleotide
cuaaugcuguuucgguaac

SEQ ID NO: 523756 - RNA, 19 nt, Artificial Sequence
  Description of Artificial Sequence: Synthetic oligonucleotide
cuaugauccgaaacaguaa

SEQ ID NO: 523757 - RNA, 19 nt, Artificial Sequence
  Description of Artificial Sequence: Synthetic oligonucleotide
gucaggaacgucguggaca

SEQ ID NO: 523758 - RNA, 19 nt, Artificial Sequence
  Description of Artificial Sequence: Synthetic oligonucleotide
uucccuuugggcgauguuu

SEQ ID NO: 523759 - RNA, 19 nt, Artificial Sequence
  Description of Artificial Sequence: Synthetic oligonucleotide
uuagcaagucagguucaga

SEQ ID NO: 523760 - RNA, 19 nt, Artificial Sequence
  Description of Artificial Sequence: Synthetic oligonucleotide
acugucucgaggauguuau

SEQ ID NO: 523761 - RNA, 19 nt, Artificial Sequence
  Description of Artificial Sequence: Synthetic oligonucleotide
aucaaccaacaucgaagga

SEQ ID NO: 523762 - RNA, 19 nt, Artificial Sequence
  Description of Artificial Sequence: Synthetic oligonucleotide
cguacacacacacacacac

SEQ ID NO: 523763 - RNA, 19 nt, Artificial Sequence
  Description of Artificial Sequence: Synthetic oligonucleotide
uaagagcgccacuggcaag

SEQ ID NO: 523764 - RNA, 19 nt, Artificial Sequence
  Description of Artificial Sequence: Synthetic oligonucleotide
aguugguaauggaucaaga

SEQ ID NO: 523765 - RNA, 19 nt, Artificial Sequence
  Description of Artificial Sequence: Synthetic oligonucleotide
aaccgaauaagugcuucuu

SEQ ID NO: 523766 - RNA, 19 nt, Artificial Sequence
  Description of Artificial Sequence: Synthetic oligonucleotide
uauacugcucaaugacauu

SEQ ID NO: 523767 - RNA, 19 nt, Artificial Sequence
  Description of Artificial Sequence: Synthetic oligonucleotide
cgaaacaguaacuucugug

SEQ ID NO: 523768 - RNA, 19 nt, Artificial Sequence
  Description of Artificial Sequence: Synthetic oligonucleotide
uuucgguaacccacuggau

SEQ ID NO: 523769 - RNA, 19 nt, Artificial Sequence
  Description of Artificial Sequence: Synthetic oligonucleotide
cucucuugucgaaagcgca

SEQ ID NO: 523770 - RNA, 19 nt, Artificial Sequence
  Description of Artificial Sequence: Synthetic oligonucleotide
uggccuaggugagauaaaa

SEQ ID NO: 523771 - RNA, 19 nt, Artificial Sequence
  Description of Artificial Sequence: Synthetic oligonucleotide
agagacugagugaggguag

SEQ ID NO: 523772 - RNA, 19 nt, Artificial Sequence
  Description of Artificial Sequence: Synthetic oligonucleotide
ggagaaaccgcccaauaua

SEQ ID NO: 523773 - RNA, 19 nt, Artificial Sequence
  Description of Artificial Sequence: Synthetic oligonucleotide
ugguucaaguaggcauugg

SEQ ID NO: 523774 - RNA, 19 nt, Artificial Sequence
  Description of Artificial Sequence: Synthetic oligonucleotide
cacaacggacccaugaucu

SEQ ID NO: 523775 - RNA, 19 nt, Artificial Sequence
  Description of Artificial Sequence: Synthetic oligonucleotide
accgaauaagugcuucuuu

SEQ ID NO: 523776 - RNA, 19 nt, Artificial Sequence
  Description of Artificial Sequence: Synthetic oligonucleotide
cccacuggaugccaaauag

SEQ ID NO: 523777 - RNA, 19 nt, Artificial Sequence
  Description of Artificial Sequence: Synthetic oligonucleotide
uugggcgauguuucugcca

SEQ ID NO: 523778 - RNA, 19 nt, Artificial Sequence
  Description of Artificial Sequence: Synthetic oligonucleotide
auguaguggagaaauguua

SEQ ID NO: 523779 - RNA, 19 nt, Artificial Sequence
  Description of Artificial Sequence: Synthetic oligonucleotide
ggauuuccguauagcaugg

SEQ ID NO: 523780 - RNA, 19 nt, Artificial Sequence
  Description of Artificial Sequence: Synthetic oligonucleotide
ucggugucuuguacuuuca

SEQ ID NO: 523781 - RNA, 19 nt, Artificial Sequence
  Description of Artificial Sequence: Synthetic oligonucleotide
acacacacacacacacacg

SEQ ID NO: 523782 - RNA, 19 nt, Artificial Sequence
  Description of Artificial Sequence: Synthetic oligonucleotide
cuuuagaggugacaaagau

SEQ ID NO: 523783 - RNA, 19 nt, Artificial Sequence
  Description of Artificial Sequence: Synthetic oligonucleotide
gcuaucuucccaaaaucac

SEQ ID NO: 523784 - RNA, 19 nt, Artificial Sequence
  Description of Artificial Sequence: Synthetic oligonucleotide
ugaauagcuguugccugaa

SEQ ID NO: 523785 - RNA, 19 nt, Artificial Sequence
  Description of Artificial Sequence: Synthetic oligonucleotide
agugggugacaaugugcug

SEQ ID NO: 523786 - RNA, 19 nt, Artificial Sequence
  Description of Artificial Sequence: Synthetic oligonucleotide
cacacacacacacacacgu

SEQ ID NO: 523787 - RNA, 19 nt, Artificial Sequence
  Description of Artificial Sequence: Synthetic oligonucleotide
aguguaagguggcuaucuu

SEQ ID NO: 523788 - RNA, 19 nt, Artificial Sequence
  Description of Artificial Sequence: Synthetic oligonucleotide
gcucucgacaugaaguugc

SEQ ID NO: 523789 - RNA, 19 nt, Artificial Sequence
  Description of Artificial Sequence: Synthetic oligonucleotide
gaucugagauacacaguga

SEQ ID NO: 523790 - RNA, 19 nt, Artificial Sequence
  Description of Artificial Sequence: Synthetic oligonucleotide
cgauguuucugccaaggcc

SEQ ID NO: 523791 - RNA, 19 nt, Artificial Sequence
  Description of Artificial Sequence: Synthetic oligonucleotide
aagcugaauuauugauaua

SEQ ID NO: 523792 - RNA, 19 nt, Artificial Sequence
  Description of Artificial Sequence: Synthetic oligonucleotide
gcuccuagaguuacacugg

SEQ ID NO: 523793 - RNA, 19 nt, Artificial Sequence
  Description of Artificial Sequence: Synthetic oligonucleotide
caguaugggugcuaaucga

SEQ ID NO: 523794 - RNA, 19 nt, Artificial Sequence
  Description of Artificial Sequence: Synthetic oligonucleotide
aacguauucuaaggacuuu

SEQ ID NO: 523795 - RNA, 19 nt, Artificial Sequence
  Description of Artificial Sequence: Synthetic oligonucleotide
gguguuuuaugugcauuug

SEQ ID NO: 523796 - RNA, 19 nt, Artificial Sequence
  Description of Artificial Sequence: Synthetic oligonucleotide
uugagccuuagagaagaua

SEQ ID NO: 523797 - RNA, 19 nt, Artificial Sequence
  Description of Artificial Sequence: Synthetic oligonucleotide
augucuggagaguuucgua

SEQ ID NO: 523798 - RNA, 19 nt, Artificial Sequence
  Description of Artificial Sequence: Synthetic oligonucleotide
gaaccgaauaagugcuucu

SEQ ID NO: 523799 - RNA, 19 nt, Artificial Sequence
  Description of Artificial Sequence: Synthetic oligonucleotide
aacggacccaugaucuuau

SEQ ID NO: 523800 - RNA, 19 nt, Artificial Sequence
  Description of Artificial Sequence: Synthetic oligonucleotide
uagcuguugccugaauaaa

SEQ ID NO: 523801 - RNA, 19 nt, Artificial Sequence
  Description of Artificial Sequence: Synthetic oligonucleotide
acacacacacacacacguc

SEQ ID NO: 523802 - RNA, 19 nt, Artificial Sequence
  Description of Artificial Sequence: Synthetic oligonucleotide
ccaacaucgaaggaagcug

SEQ ID NO: 523803 - RNA, 19 nt, Artificial Sequence
  Description of Artificial Sequence: Synthetic oligonucleotide
acacacacacacguacaca

SEQ ID NO: 523804 - RNA, 19 nt, Artificial Sequence
  Description of Artificial Sequence: Synthetic oligonucleotide
gaacgucguggacacggca

SEQ ID NO: 523805 - RNA, 19 nt, Artificial Sequence
  Description of Artificial Sequence: Synthetic oligonucleotide
guuugcuauaugcuucccu

SEQ ID NO: 523806 - RNA, 19 nt, Artificial Sequence
  Description of Artificial Sequence: Synthetic oligonucleotide
ucgcugccuaauacugucu

SEQ ID NO: 523807 - RNA, 19 nt, Artificial Sequence
  Description of Artificial Sequence: Synthetic oligonucleotide
cuugucgaaagcgcaagaa

SEQ ID NO: 523808 - RNA, 19 nt, Artificial Sequence
  Description of Artificial Sequence: Synthetic oligonucleotide
guaauggaucaagauuuaa

SEQ ID NO: 523809 - RNA, 19 nt, Artificial Sequence
  Description of Artificial Sequence: Synthetic oligonucleotide
acacacacacacgucacuu

SEQ ID NO: 523810 - RNA, 19 nt, Artificial Sequence
  Description of Artificial Sequence: Synthetic oligonucleotide
ugcauaccauaguccugga

SEQ ID NO: 523811 - RNA, 19 nt, Artificial Sequence
  Description of Artificial Sequence: Synthetic oligonucleotide
caaggccccauuugagcuc

SEQ ID NO: 523812 - RNA, 19 nt, Artificial Sequence
  Description of Artificial Sequence: Synthetic oligonucleotide
guacacacacacacguaca

SEQ ID NO: 523813 - RNA, 19 nt, Artificial Sequence
  Description of Artificial Sequence: Synthetic oligonucleotide
cccaugaucuuauaguaaa

SEQ ID NO: 523814 - RNA, 19 nt, Artificial Sequence
  Description of Artificial Sequence: Synthetic oligonucleotide
ucauagggauggacaugaa

SEQ ID NO: 523815 - RNA, 19 nt, Artificial Sequence
  Description of Artificial Sequence: Synthetic oligonucleotide
cuugaaguucacugaccaa

SEQ ID NO: 523816 - RNA, 19 nt, Artificial Sequence
  Description of Artificial Sequence: Synthetic oligonucleotide
gaguguaagguggcuaucu

SEQ ID NO: 523817 - RNA, 19 nt, Artificial Sequence
  Description of Artificial Sequence: Synthetic oligonucleotide
ggaaucaagugggugacaa

SEQ ID NO: 523818 - RNA, 19 nt, Artificial Sequence
  Description of Artificial Sequence: Synthetic oligonucleotide
aacuguccgucaggaacgu

SEQ ID NO: 523819 - RNA, 19 nt, Artificial Sequence
  Description of Artificial Sequence: Synthetic oligonucleotide
agggagaaaccgcccaaua

SEQ ID NO: 523820 - RNA, 19 nt, Artificial Sequence
  Description of Artificial Sequence: Synthetic oligonucleotide
cccaugaucccauacgcca

SEQ ID NO: 523821 - RNA, 19 nt, Artificial Sequence
  Description of Artificial Sequence: Synthetic oligonucleotide
accgcuuaagagcgccacu

SEQ ID NO: 523822 - RNA, 19 nt, Artificial Sequence
  Description of Artificial Sequence: Synthetic oligonucleotide
ugguaccaacagccucuag

SEQ ID NO: 523823 - RNA, 19 nt, Artificial Sequence
  Description of Artificial Sequence: Synthetic oligonucleotide
cacuggcaagguaggacuc

SEQ ID NO: 523824 - RNA, 19 nt, Artificial Sequence
  Description of Artificial Sequence: Synthetic oligonucleotide
gcugccuaauacugucugc

SEQ ID NO: 523825 - RNA, 19 nt, Artificial Sequence
  Description of Artificial Sequence: Synthetic oligonucleotide
acagcuugacugagaaagu

SEQ ID NO: 523826 - RNA, 19 nt, Artificial Sequence
  Description of Artificial Sequence: Synthetic oligonucleotide
cuuuaauguaguggagaaa

SEQ ID NO: 523827 - RNA, 19 nt, Artificial Sequence
  Description of Artificial Sequence: Synthetic oligonucleotide
uccuuagcgccgucaucac

SEQ ID NO: 523828 - RNA, 19 nt, Artificial Sequence
  Description of Artificial Sequence: Synthetic oligonucleotide
agguaggacucuccagaaa

SEQ ID NO: 523829 - RNA, 19 nt, Artificial Sequence
  Description of Artificial Sequence: Synthetic oligonucleotide
guucacugaccaacaccag

SEQ ID NO: 523830 - RNA, 19 nt, Artificial Sequence
  Description of Artificial Sequence: Synthetic oligonucleotide
gccaaauaguucuacugua

SEQ ID NO: 523831 - RNA, 19 nt, Artificial Sequence
  Description of Artificial Sequence: Synthetic oligonucleotide
agaaaccgcccaauauacu

SEQ ID NO: 523832 - RNA, 19 nt, Artificial Sequence
  Description of Artificial Sequence: Synthetic oligonucleotide
ugcuuccuuagcgccguca

SEQ ID NO: 523833 - RNA, 19 nt, Artificial Sequence
  Description of Artificial Sequence: Synthetic oligonucleotide
ggaaccgaauaagugcuuc

SEQ ID NO: 523834 - RNA, 19 nt, Artificial Sequence
  Description of Artificial Sequence: Synthetic oligonucleotide
gcaacugguucaaguaggc

SEQ ID NO: 523835 - RNA, 19 nt, Artificial Sequence
  Description of Artificial Sequence: Synthetic oligonucleotide
gccaguaugggugcuaauc

SEQ ID NO: 523836 - RNA, 19 nt, Artificial Sequence
  Description of Artificial Sequence: Synthetic oligonucleotide
uacauaugcccuggagaua

SEQ ID NO: 523837 - RNA, 19 nt, Artificial Sequence
  Description of Artificial Sequence: Synthetic oligonucleotide
aaccgccauccaucauuca

SEQ ID NO: 523838 - RNA, 19 nt, Artificial Sequence
  Description of Artificial Sequence: Synthetic oligonucleotide
acacguacacacacacaca

SEQ ID NO: 523839 - RNA, 19 nt, Artificial Sequence
  Description of Artificial Sequence: Synthetic oligonucleotide
gcugcaacccugcacugga

SEQ ID NO: 523840 - RNA, 19 nt, Artificial Sequence
  Description of Artificial Sequence: Synthetic oligonucleotide
cuguauugcauaccauagu

SEQ ID NO: 523841 - RNA, 19 nt, Artificial Sequence
  Description of Artificial Sequence: Synthetic oligonucleotide
guacacacacacacacaca

SEQ ID NO: 523842 - RNA, 19 nt, Artificial Sequence
  Description of Artificial Sequence: Synthetic oligonucleotide
gagcucucgacaugaaguu

SEQ ID NO: 523843 - RNA, 19 nt, Artificial Sequence
  Description of Artificial Sequence: Synthetic oligonucleotide
ggugcuaaucgaggaggag

SEQ ID NO: 523844 - RNA, 19 nt, Artificial Sequence
  Description of Artificial Sequence: Synthetic oligonucleotide
acacacacacacacacaca

SEQ ID NO: 523845 - RNA, 19 nt, Artificial Sequence
  Description of Artificial Sequence: Synthetic oligonucleotide
gcgcaagaaaagcgagggg

SEQ ID NO: 523846 - RNA, 19 nt, Artificial Sequence
  Description of Artificial Sequence: Synthetic oligonucleotide
acacacacguacacacaca

SEQ ID NO: 523847 - RNA, 19 nt, Artificial Sequence
  Description of Artificial Sequence: Synthetic oligonucleotide
caacguauucuaaggacuu

SEQ ID NO: 523848 - RNA, 19 nt, Artificial Sequence
  Description of Artificial Sequence: Synthetic oligonucleotide
gcauugcagguucucugug

SEQ ID NO: 523849 - RNA, 19 nt, Artificial Sequence
  Description of Artificial Sequence: Synthetic oligonucleotide
agcgccgucaucacuggaa

SEQ ID NO: 523850 - RNA, 19 nt, Artificial Sequence
  Description of Artificial Sequence: Synthetic oligonucleotide
cauuugagcucugaauccu

SEQ ID NO: 523851 - RNA, 19 nt, Artificial Sequence
  Description of Artificial Sequence: Synthetic oligonucleotide
acacacacacguacacaca

SEQ ID NO: 523852 - RNA, 19 nt, Artificial Sequence
  Description of Artificial Sequence: Synthetic oligonucleotide
ccaacguauucuaaggacu

SEQ ID NO: 523853 - RNA, 19 nt, Artificial Sequence
  Description of Artificial Sequence: Synthetic oligonucleotide
ucccauacgccagcugcaa

SEQ ID NO: 523854 - RNA, 19 nt, Artificial Sequence
  Description of Artificial Sequence: Synthetic oligonucleotide
cucgaggauguuauacacu

SEQ ID NO: 523855 - RNA, 19 nt, Artificial Sequence
  Description of Artificial Sequence: Synthetic oligonucleotide
acguacacacacacacaca

SEQ ID NO: 523856 - RNA, 19 nt, Artificial Sequence
  Description of Artificial Sequence: Synthetic oligonucleotide
gcagaaccgccauccauca

SEQ ID NO: 523857 - RNA, 19 nt, Artificial Sequence
  Description of Artificial Sequence: Synthetic oligonucleotide
auacgccagcugcaacccu

SEQ ID NO: 523858 - RNA, 19 nt, Artificial Sequence
  Description of Artificial Sequence: Synthetic oligonucleotide
gcgccgucaucacuggaag

SEQ ID NO: 523859 - RNA, 19 nt, Artificial Sequence
  Description of Artificial Sequence: Synthetic oligonucleotide
cugccuaauacugucugcu

SEQ ID NO: 523860 - RNA, 19 nt, Artificial Sequence
  Description of Artificial Sequence: Synthetic oligonucleotide
acacacguacacacacaca

SEQ ID NO: 523861 - RNA, 19 nt, Artificial Sequence
  Description of Artificial Sequence: Synthetic oligonucleotide
aucccauacgccagcugca

SEQ ID NO: 523862 - RNA, 19 nt, Artificial Sequence
  Description of Artificial Sequence: Synthetic oligonucleotide
ugucugcuuuggaguguaa

SEQ ID NO: 523863 - RNA, 19 nt, Artificial Sequence
  Description of Artificial Sequence: Synthetic oligonucleotide
cuguguuuggcaucuuaau

SEQ ID NO: 523864 - RNA, 19 nt, Artificial Sequence
  Description of Artificial Sequence: Synthetic oligonucleotide
uagcgccgucaucacugga

SEQ ID NO: 523865 - RNA, 19 nt, Artificial Sequence
  Description of Artificial Sequence: Synthetic oligonucleotide
ucucgacaugaaguugcua

SEQ ID NO: 523866 - RNA, 19 nt, Artificial Sequence
  Description of Artificial Sequence: Synthetic oligonucleotide
aggaaucaagugggugaca

SEQ ID NO: 523867 - RNA, 19 nt, Artificial Sequence
  Description of Artificial Sequence: Synthetic oligonucleotide
uccguauagcauggacaau

SEQ ID NO: 523868 - RNA, 19 nt, Artificial Sequence
  Description of Artificial Sequence: Synthetic oligonucleotide
gacacggcagaaccgccau

SEQ ID NO: 523869 - RNA, 19 nt, Artificial Sequence
  Description of Artificial Sequence: Synthetic oligonucleotide
caugcauugcagguucucu

SEQ ID NO: 523870 - RNA, 19 nt, Artificial Sequence
  Description of Artificial Sequence: Synthetic oligonucleotide
cagcuagauguccaauaua

SEQ ID NO: 523871 - RNA, 19 nt, Artificial Sequence
  Description of Artificial Sequence: Synthetic oligonucleotide
gggcuugcaccacuccgug

SEQ ID NO: 523872 - RNA, 19 nt, Artificial Sequence
  Description of Artificial Sequence: Synthetic oligonucleotide
auguacacacacacacgua

SEQ ID NO: 523873 - RNA, 19 nt, Artificial Sequence
  Description of Artificial Sequence: Synthetic oligonucleotide
ccgcuuaagagcgccacug

SEQ ID NO: 523874 - RNA, 19 nt, Artificial Sequence
  Description of Artificial Sequence: Synthetic oligonucleotide
caaguaggcauuggaauuu

SEQ ID NO: 523875 - RNA, 19 nt, Artificial Sequence
  Description of Artificial Sequence: Synthetic oligonucleotide
accgcccaauauacugcuc

SEQ ID NO: 523876 - RNA, 19 nt, Artificial Sequence
  Description of Artificial Sequence: Synthetic oligonucleotide
ccgcccaauauacugcuca

SEQ ID NO: 523877 - RNA, 19 nt, Artificial Sequence
  Description of Artificial Sequence: Synthetic oligonucleotide
gguaauggaucaagauuua

SEQ ID NO: 523878 - RNA, 19 nt, Artificial Sequence
  Description of Artificial Sequence: Synthetic oligonucleotide
gcugcccaagaucugagau

SEQ ID NO: 523879 - RNA, 19 nt, Artificial Sequence
  Description of Artificial Sequence: Synthetic oligonucleotide
caaccgcuuaagagcgcca

SEQ ID NO: 523880 - RNA, 19 nt, Artificial Sequence
  Description of Artificial Sequence: Synthetic oligonucleotide
cgcuuaagagcgccacugg

SEQ ID NO: 523881 - RNA, 19 nt, Artificial Sequence
  Description of Artificial Sequence: Synthetic oligonucleotide
ggcuugcaccacuccgugc

SEQ ID NO: 523882 - RNA, 19 nt, Artificial Sequence
  Description of Artificial Sequence: Synthetic oligonucleotide
guccgucaggaacgucgug

SEQ ID NO: 523883 - RNA, 19 nt, Artificial Sequence
  Description of Artificial Sequence: Synthetic oligonucleotide
gaauagcuguugccugaau

SEQ ID NO: 523884 - RNA, 19 nt, Artificial Sequence
  Description of Artificial Sequence: Synthetic oligonucleotide
ggaacgucguggacacggc

SEQ ID NO: 523885 - RNA, 19 nt, Artificial Sequence
  Description of Artificial Sequence: Synthetic oligonucleotide
caacuugaggccagaugau

SEQ ID NO: 523886 - RNA, 19 nt, Artificial Sequence
  Description of Artificial Sequence: Synthetic oligonucleotide
cugugcuauuuuguagcaa

SEQ ID NO: 523887 - RNA, 19 nt, Artificial Sequence
  Description of Artificial Sequence: Synthetic oligonucleotide
cuuugugaccauggcagau

SEQ ID NO: 523888 - RNA, 19 nt, Artificial Sequence
  Description of Artificial Sequence: Synthetic oligonucleotide
cacacacacacacgucacu

SEQ ID NO: 523889 - RNA, 19 nt, Artificial Sequence
  Description of Artificial Sequence: Synthetic oligonucleotide
cucucgacaugaaguugcu

SEQ ID NO: 523890 - RNA, 19 nt, Artificial Sequence
  Description of Artificial Sequence: Synthetic oligonucleotide
cgcugccuaauacugucug

SEQ ID NO: 523891 - RNA, 19 nt, Artificial Sequence
  Description of Artificial Sequence: Synthetic oligonucleotide
gccuaauacugucugcuuu

SEQ ID NO: 523892 - RNA, 19 nt, Artificial Sequence
  Description of Artificial Sequence: Synthetic oligonucleotide
cuggccuaggugagauaaa

SEQ ID NO: 523893 - RNA, 19 nt, Artificial Sequence
  Description of Artificial Sequence: Synthetic oligonucleotide
ggucacaaacacccaugcu

SEQ ID NO: 523894 - RNA, 19 nt, Artificial Sequence
  Description of Artificial Sequence: Synthetic oligonucleotide
acgucacuuuccagucucu

SEQ ID NO: 523895 - RNA, 19 nt, Artificial Sequence
  Description of Artificial Sequence: Synthetic oligonucleotide
cgaggauguuauacacuug

SEQ ID NO: 523896 - RNA, 19 nt, Artificial Sequence
  Description of Artificial Sequence: Synthetic oligonucleotide
agagcgccacuggcaaggu

SEQ ID NO: 523897 - RNA, 19 nt, Artificial Sequence
  Description of Artificial Sequence: Synthetic oligonucleotide
ggguugcuacugucucgag

SEQ ID NO: 523898 - RNA, 19 nt, Artificial Sequence
  Description of Artificial Sequence: Synthetic oligonucleotide
aggaaccgaauaagugcuu

SEQ ID NO: 523899 - RNA, 19 nt, Artificial Sequence
  Description of Artificial Sequence: Synthetic oligonucleotide
ggaguguaagguggcuauc

SEQ ID NO: 523900 - RNA, 19 nt, Artificial Sequence
  Description of Artificial Sequence: Synthetic oligonucleotide
gcauuggaauuuugagacu

SEQ ID NO: 523901 - RNA, 19 nt, Artificial Sequence
  Description of Artificial Sequence: Synthetic oligonucleotide
gagccuuagagaagauauu

SEQ ID NO: 523902 - RNA, 19 nt, Artificial Sequence
  Description of Artificial Sequence: Synthetic oligonucleotide
gggcgauguuucugccaag

SEQ ID NO: 523903 - RNA, 19 nt, Artificial Sequence
  Description of Artificial Sequence: Synthetic oligonucleotide
ggacacggcagaaccgcca

SEQ ID NO: 523904 - RNA, 19 nt, Artificial Sequence
  Description of Artificial Sequence: Synthetic oligonucleotide
caggaacgucguggacacg

SEQ ID NO: 523905 - RNA, 19 nt, Artificial Sequence
  Description of Artificial Sequence: Synthetic oligonucleotide
guucagcuagauguccaau

SEQ ID NO: 523906 - RNA, 19 nt, Artificial Sequence
  Description of Artificial Sequence: Synthetic oligonucleotide
caggcaccugaagaugaaa

SEQ ID NO: 523907 - RNA, 19 nt, Artificial Sequence
  Description of Artificial Sequence: Synthetic oligonucleotide
acggacccaugaucuuaua

SEQ ID NO: 523908 - RNA, 19 nt, Artificial Sequence
  Description of Artificial Sequence: Synthetic oligonucleotide
gugucccugaagagcugga

SEQ ID NO: 523909 - RNA, 19 nt, Artificial Sequence
  Description of Artificial Sequence: Synthetic oligonucleotide
cugucucgaggauguuaua

SEQ ID NO: 523910 - RNA, 19 nt, Artificial Sequence
  Description of Artificial Sequence: Synthetic oligonucleotide
accuggccuaggugagaua

SEQ ID NO: 523911 - RNA, 19 nt, Artificial Sequence
  Description of Artificial Sequence: Synthetic oligonucleotide
cugcaacccugcacuggaa

SEQ ID NO: 523912 - RNA, 19 nt, Artificial Sequence
  Description of Artificial Sequence: Synthetic oligonucleotide
caacccugcacuggaaauu

SEQ ID NO: 523913 - RNA, 19 nt, Artificial Sequence
  Description of Artificial Sequence: Synthetic oligonucleotide
caguaacuucugugcuuua

SEQ ID NO: 523914 - RNA, 19 nt, Artificial Sequence
  Description of Artificial Sequence: Synthetic oligonucleotide
gagcgccacuggcaaggua

SEQ ID NO: 523915 - RNA, 19 nt, Artificial Sequence
  Description of Artificial Sequence: Synthetic oligonucleotide
gugguaccaacagccucua

SEQ ID NO: 523916 - RNA, 19 nt, Artificial Sequence
  Description of Artificial Sequence: Synthetic oligonucleotide
ccccauuugagcucugaau

SEQ ID NO: 523917 - RNA, 19 nt, Artificial Sequence
  Description of Artificial Sequence: Synthetic oligonucleotide
gcauaccauaguccuggau

SEQ ID NO: 523918 - RNA, 19 nt, Artificial Sequence
  Description of Artificial Sequence: Synthetic oligonucleotide
cguauagcauggacaauau

SEQ ID NO: 523919 - RNA, 19 nt, Artificial Sequence
  Description of Artificial Sequence: Synthetic oligonucleotide
acccugcacuggaaauuuu

SEQ ID NO: 523920 - RNA, 19 nt, Artificial Sequence
  Description of Artificial Sequence: Synthetic oligonucleotide
ccgucaucacuggaagaga

SEQ ID NO: 523921 - RNA, 19 nt, Artificial Sequence
  Description of Artificial Sequence: Synthetic oligonucleotide
ggccccauuugagcucuga

SEQ ID NO: 523922 - RNA, 19 nt, Artificial Sequence
  Description of Artificial Sequence: Synthetic oligonucleotide
ccgaaacaguaacuucugu

SEQ ID NO: 523923 - RNA, 19 nt, Artificial Sequence
  Description of Artificial Sequence: Synthetic oligonucleotide
ggguaggaaucaagugggu

SEQ ID NO: 523924 - RNA, 19 nt, Artificial Sequence
  Description of Artificial Sequence: Synthetic oligonucleotide
cgcccaauauacugcucaa

SEQ ID NO: 523925 - RNA, 19 nt, Artificial Sequence
  Description of Artificial Sequence: Synthetic oligonucleotide
gcccaauauacugcucaau

SEQ ID NO: 523926 - RNA, 19 nt, Artificial Sequence
  Description of Artificial Sequence: Synthetic oligonucleotide
ccuuagcgccgucaucacu

SEQ ID NO: 523927 - RNA, 19 nt, Artificial Sequence
  Description of Artificial Sequence: Synthetic oligonucleotide
cgccgucaucacuggaaga

SEQ ID NO: 523928 - RNA, 19 nt, Artificial Sequence
  Description of Artificial Sequence: Synthetic oligonucleotide
ccuugucauuucagcuagu

SEQ ID NO: 523929 - RNA, 19 nt, Artificial Sequence
  Description of Artificial Sequence: Synthetic oligonucleotide
aaugaaucgcuuuuauccg

SEQ ID NO: 523930 - RNA, 19 nt, Artificial Sequence
  Description of Artificial Sequence: Synthetic oligonucleotide
agcuuaggcaauuugaugg

SEQ ID NO: 523931 - RNA, 19 nt, Artificial Sequence
  Description of Artificial Sequence: Synthetic oligonucleotide
ugagaugccugcuugaugg

SEQ ID NO: 523932 - RNA, 19 nt, Artificial Sequence
  Description of Artificial Sequence: Synthetic oligonucleotide
aguacaacggccuugcacg

SEQ ID NO: 523933 - RNA, 19 nt, Artificial Sequence
  Description of Artificial Sequence: Synthetic oligonucleotide
acgaggugcaaauacaugc

SEQ ID NO: 523934 - RNA, 19 nt, Artificial Sequence
  Description of Artificial Sequence: Synthetic oligonucleotide
aacgccaucugacagcagc

SEQ ID NO: 523935 - RNA, 19 nt, Artificial Sequence
  Description of Artificial Sequence: Synthetic oligonucleotide
uuuaucucgaggccaaugg

SEQ ID NO: 523936 - RNA, 19 nt, Artificial Sequence
  Description of Artificial Sequence: Synthetic oligonucleotide
uuagucacaaagcaaaccu

SEQ ID NO: 523937 - RNA, 19 nt, Artificial Sequence
  Description of Artificial Sequence: Synthetic oligonucleotide
uucuauauugggcagguca

SEQ ID NO: 523938 - RNA, 19 nt, Artificial Sequence
  Description of Artificial Sequence: Synthetic oligonucleotide
aaugcgauagggcucagga

SEQ ID NO: 523939 - RNA, 19 nt, Artificial Sequence
  Description of Artificial Sequence: Synthetic oligonucleotide
uuuuauccgaccaaugcga

SEQ ID NO: 523940 - RNA, 19 nt, Artificial Sequence
  Description of Artificial Sequence: Synthetic oligonucleotide
guugcuaacaaacuucuug

SEQ ID NO: 523941 - RNA, 19 nt, Artificial Sequence
  Description of Artificial Sequence: Synthetic oligonucleotide
aaguacgggaguugaaacg

SEQ ID NO: 523942 - RNA, 19 nt, Artificial Sequence
  Description of Artificial Sequence: Synthetic oligonucleotide
ucugauaccugacacuuug

SEQ ID NO: 523943 - RNA, 19 nt, Artificial Sequence
  Description of Artificial Sequence: Synthetic oligonucleotide
ugcgauagggcucaggagc

SEQ ID NO: 523944 - RNA, 19 nt, Artificial Sequence
  Description of Artificial Sequence: Synthetic oligonucleotide
uguucuaacgccaucugac

SEQ ID NO: 523945 - RNA, 19 nt, Artificial Sequence
  Description of Artificial Sequence: Synthetic oligonucleotide
ugaacuguuuggccgaggg

SEQ ID NO: 523946 - RNA, 19 nt, Artificial Sequence
  Description of Artificial Sequence: Synthetic oligonucleotide
uugaauguggaguaaguac

SEQ ID NO: 523947 - RNA, 19 nt, Artificial Sequence
  Description of Artificial Sequence: Synthetic oligonucleotide
cuucgaguaauccuggagg

SEQ ID NO: 523948 - RNA, 19 nt, Artificial Sequence
  Description of Artificial Sequence: Synthetic oligonucleotide
auugaagaaauaugcaaca

SEQ ID NO: 523949 - RNA, 19 nt, Artificial Sequence
  Description of Artificial Sequence: Synthetic oligonucleotide
cuguagaacuuguugaucc

SEQ ID NO: 523950 - RNA, 19 nt, Artificial Sequence
  Description of Artificial Sequence: Synthetic oligonucleotide
agaacuauuccgucucagc

SEQ ID NO: 523951 - RNA, 19 nt, Artificial Sequence
  Description of Artificial Sequence: Synthetic oligonucleotide
uuagugucagccauggcca

SEQ ID NO: 523952 - RNA, 19 nt, Artificial Sequence
  Description of Artificial Sequence: Synthetic oligonucleotide
uguucagccgaaaugcuug

SEQ ID NO: 523953 - RNA, 19 nt, Artificial Sequence
  Description of Artificial Sequence: Synthetic oligonucleotide
uuugucuuuacagagcuac

SEQ ID NO: 523954 - RNA, 19 nt, Artificial Sequence
  Description of Artificial Sequence: Synthetic oligonucleotide
uuaacugcagcugaggcca

SEQ ID NO: 523955 - RNA, 19 nt, Artificial Sequence
  Description of Artificial Sequence: Synthetic oligonucleotide
uguucagaggguuacgggc

SEQ ID NO: 523956 - RNA, 19 nt, Artificial Sequence
  Description of Artificial Sequence: Synthetic oligonucleotide
aaaugcuugggcugccggg

SEQ ID NO: 523957 - RNA, 19 nt, Artificial Sequence
  Description of Artificial Sequence: Synthetic oligonucleotide
guagagcagaacuauuccg

SEQ ID NO: 523958 - RNA, 19 nt, Artificial Sequence
  Description of Artificial Sequence: Synthetic oligonucleotide
aaaccucacacaaacagcu

SEQ ID NO: 523959 - RNA, 19 nt, Artificial Sequence
  Description of Artificial Sequence: Synthetic oligonucleotide
ucuauauugggcaggucac

SEQ ID NO: 523960 - RNA, 19 nt, Artificial Sequence
  Description of Artificial Sequence: Synthetic oligonucleotide
acaaugaaucgcuuuuauc

SEQ ID NO: 523961 - RNA, 19 nt, Artificial Sequence
  Description of Artificial Sequence: Synthetic oligonucleotide
ucuguaccguagaaggccg

SEQ ID NO: 523962 - RNA, 19 nt, Artificial Sequence
  Description of Artificial Sequence: Synthetic oligonucleotide
aaucgcuuuuauccgacca

SEQ ID NO: 523963 - RNA, 19 nt, Artificial Sequence
  Description of Artificial Sequence: Synthetic oligonucleotide
aacuguuuggccgaggggu

SEQ ID NO: 523964 - RNA, 19 nt, Artificial Sequence
  Description of Artificial Sequence: Synthetic oligonucleotide
gauauggucccugaggaug

SEQ ID NO: 523965 - RNA, 19 nt, Artificial Sequence
  Description of Artificial Sequence: Synthetic oligonucleotide
uucuaacgccaucugacag

SEQ ID NO: 523966 - RNA, 19 nt, Artificial Sequence
  Description of Artificial Sequence: Synthetic oligonucleotide
aguacgggaguugaaacgg

SEQ ID NO: 523967 - RNA, 19 nt, Artificial Sequence
  Description of Artificial Sequence: Synthetic oligonucleotide
aauccuucugacaacccuc

SEQ ID NO: 523968 - RNA, 19 nt, Artificial Sequence
  Description of Artificial Sequence: Synthetic oligonucleotide
uagagcagaacuauuccgu

SEQ ID NO: 523969 - RNA, 19 nt, Artificial Sequence
  Description of Artificial Sequence: Synthetic oligonucleotide
aagacugcggcucuccacu

SEQ ID NO: 523970 - RNA, 19 nt, Artificial Sequence
  Description of Artificial Sequence: Synthetic oligonucleotide
auggaaguuguagcgaagc

SEQ ID NO: 523971 - RNA, 19 nt, Artificial Sequence
  Description of Artificial Sequence: Synthetic oligonucleotide
uuaggcaauuugauggcug

SEQ ID NO: 523972 - RNA, 19 nt, Artificial Sequence
  Description of Artificial Sequence: Synthetic oligonucleotide
gaaugcacgaaguacugca

SEQ ID NO: 523973 - RNA, 19 nt, Artificial Sequence
  Description of Artificial Sequence: Synthetic oligonucleotide
gucgcaguaacugaggaag

SEQ ID NO: 523974 - RNA, 19 nt, Artificial Sequence
  Description of Artificial Sequence: Synthetic oligonucleotide
uacugcacggcuuagucac

SEQ ID NO: 523975 - RNA, 19 nt, Artificial Sequence
  Description of Artificial Sequence: Synthetic oligonucleotide
ggucacgccaaucugaucc

SEQ ID NO: 523976 - RNA, 19 nt, Artificial Sequence
  Description of Artificial Sequence: Synthetic oligonucleotide
gaacuauuccgucucagca

SEQ ID NO: 523977 - RNA, 19 nt, Artificial Sequence
  Description of Artificial Sequence: Synthetic oligonucleotide
gaaguuguagcgaagcuuc

SEQ ID NO: 523978 - RNA, 19 nt, Artificial Sequence
  Description of Artificial Sequence: Synthetic oligonucleotide
acugguaacccaugcggac

SEQ ID NO: 523979 - RNA, 19 nt, Artificial Sequence
  Description of Artificial Sequence: Synthetic oligonucleotide
ugcacugguaacccaugcg

SEQ ID NO: 523980 - RNA, 19 nt, Artificial Sequence
  Description of Artificial Sequence: Synthetic oligonucleotide
aacccaugcggacuaagca

SEQ ID NO: 523981 - RNA, 19 nt, Artificial Sequence
  Description of Artificial Sequence: Synthetic oligonucleotide
ucagccgaaaugcuugggc

SEQ ID NO: 523982 - RNA, 19 nt, Artificial Sequence
  Description of Artificial Sequence: Synthetic oligonucleotide
uaucucgaggccaauggcu

SEQ ID NO: 523983 - RNA, 19 nt, Artificial Sequence
  Description of Artificial Sequence: Synthetic oligonucleotide
auauugggcaggucacgcc

SEQ ID NO: 523984 - RNA, 19 nt, Artificial Sequence
  Description of Artificial Sequence: Synthetic oligonucleotide
auaccugacacuuugcauu

SEQ ID NO: 523985 - RNA, 19 nt, Artificial Sequence
  Description of Artificial Sequence: Synthetic oligonucleotide
acaacacucagcuggcaag

SEQ ID NO: 523986 - RNA, 19 nt, Artificial Sequence
  Description of Artificial Sequence: Synthetic oligonucleotide
uaccguagaaggccgaggc

SEQ ID NO: 523987 - RNA, 19 nt, Artificial Sequence
  Description of Artificial Sequence: Synthetic oligonucleotide
uaaguacgggaguugaaac

SEQ ID NO: 523988 - RNA, 19 nt, Artificial Sequence
  Description of Artificial Sequence: Synthetic oligonucleotide
acacuuugcauucccuuuc

SEQ ID NO: 523989 - RNA, 19 nt, Artificial Sequence
  Description of Artificial Sequence: Synthetic oligonucleotide
uuuguucuaacgccaucug

SEQ ID NO: 523990 - RNA, 19 nt, Artificial Sequence
  Description of Artificial Sequence: Synthetic oligonucleotide
uuaucucgaggccaauggc

SEQ ID NO: 523991 - RNA, 19 nt, Artificial Sequence
  Description of Artificial Sequence: Synthetic oligonucleotide
aaugguugugccgguuccc

SEQ ID NO: 523992 - RNA, 19 nt, Artificial Sequence
  Description of Artificial Sequence: Synthetic oligonucleotide
gaauguggaguaaguacgg

SEQ ID NO: 523993 - RNA, 19 nt, Artificial Sequence
  Description of Artificial Sequence: Synthetic oligonucleotide
uacuuuaacugcagcugag

SEQ ID NO: 523994 - RNA, 19 nt, Artificial Sequence
  Description of Artificial Sequence: Synthetic oligonucleotide
acggcuuagucacaaagca

SEQ ID NO: 523995 - RNA, 19 nt, Artificial Sequence
  Description of Artificial Sequence: Synthetic oligonucleotide
guaguagucgcaguaacug

SEQ ID NO: 523996 - RNA, 19 nt, Artificial Sequence
  Description of Artificial Sequence: Synthetic oligonucleotide
aacaccguggagcuagggu

SEQ ID NO: 523997 - RNA, 19 nt, Artificial Sequence
  Description of Artificial Sequence: Synthetic oligonucleotide
aaugcacgaaguacugcac

SEQ ID NO: 523998 - RNA, 19 nt, Artificial Sequence
  Description of Artificial Sequence: Synthetic oligonucleotide
cuuagucacaaagcaaacc

SEQ ID NO: 523999 - RNA, 19 nt, Artificial Sequence
  Description of Artificial Sequence: Synthetic oligonucleotide
uguugaacuguuuggccga

SEQ ID NO: 524000 - RNA, 19 nt, Artificial Sequence
  Description of Artificial Sequence: Synthetic oligonucleotide
gaaaugcuugggcugccgg

SEQ ID NO: 524001 - RNA, 19 nt, Artificial Sequence
  Description of Artificial Sequence: Synthetic oligonucleotide
uauauugggcaggucacgc

SEQ ID NO: 524002 - RNA, 19 nt, Artificial Sequence
  Description of Artificial Sequence: Synthetic oligonucleotide
acuauuccgucucagcagu

SEQ ID NO: 524003 - RNA, 19 nt, Artificial Sequence
  Description of Artificial Sequence: Synthetic oligonucleotide
agagcuacuuuuauugaag

SEQ ID NO: 524004 - RNA, 19 nt, Artificial Sequence
  Description of Artificial Sequence: Synthetic oligonucleotide
aaacgguucaugccacuga

SEQ ID NO: 524005 - RNA, 19 nt, Artificial Sequence
  Description of Artificial Sequence: Synthetic oligonucleotide
uguagcgaagcuucuuugu

SEQ ID NO: 524006 - RNA, 19 nt, Artificial Sequence
  Description of Artificial Sequence: Synthetic oligonucleotide
acgggcgugguuuggaggg

SEQ ID NO: 524007 - RNA, 19 nt, Artificial Sequence
  Description of Artificial Sequence: Synthetic oligonucleotide
ugaaucgcuuuuauccgac

SEQ ID NO: 524008 - RNA, 19 nt, Artificial Sequence
  Description of Artificial Sequence: Synthetic oligonucleotide
acccaugcggacuaagcag

SEQ ID NO: 524009 - RNA, 19 nt, Artificial Sequence
  Description of Artificial Sequence: Synthetic oligonucleotide
agaaugcacgaaguacugc

SEQ ID NO: 524010 - RNA, 19 nt, Artificial Sequence
  Description of Artificial Sequence: Synthetic oligonucleotide
ugaugguccgguaggggcc

SEQ ID NO: 524011 - RNA, 19 nt, Artificial Sequence
  Description of Artificial Sequence: Synthetic oligonucleotide
agaggcucaggaaacagag

SEQ ID NO: 524012 - RNA, 19 nt, Artificial Sequence
  Description of Artificial Sequence: Synthetic oligonucleotide
ucuugcuugccacccacga

SEQ ID NO: 524013 - RNA, 19 nt, Artificial Sequence
  Description of Artificial Sequence: Synthetic oligonucleotide
agcgaagcuucuuuguucu

SEQ ID NO: 524014 - RNA, 19 nt, Artificial Sequence
  Description of Artificial Sequence: Synthetic oligonucleotide
cacggcuuagucacaaagc

SEQ ID NO: 524015 - RNA, 19 nt, Artificial Sequence
  Description of Artificial Sequence: Synthetic oligonucleotide
ugugccgguucccagugug

SEQ ID NO: 524016 - RNA, 19 nt, Artificial Sequence
  Description of Artificial Sequence: Synthetic oligonucleotide
cuugucguccaccacaaca

SEQ ID NO: 524017 - RNA, 19 nt, Artificial Sequence
  Description of Artificial Sequence: Synthetic oligonucleotide
gguagagcagaacuauucc

SEQ ID NO: 524018 - RNA, 19 nt, Artificial Sequence
  Description of Artificial Sequence: Synthetic oligonucleotide
guaucccgcacggugaugg

SEQ ID NO: 524019 - RNA, 19 nt, Artificial Sequence
  Description of Artificial Sequence: Synthetic oligonucleotide
cagcacuucuauauugggc

SEQ ID NO: 524020 - RNA, 19 nt, Artificial Sequence
  Description of Artificial Sequence: Synthetic oligonucleotide
cagcguaagcuucagcacc

SEQ ID NO: 524021 - RNA, 19 nt, Artificial Sequence
  Description of Artificial Sequence: Synthetic oligonucleotide
ucgcaguaacugaggaagg

SEQ ID NO: 524022 - RNA, 19 nt, Artificial Sequence
  Description of Artificial Sequence: Synthetic oligonucleotide
aggucagacaugguauccc

SEQ ID NO: 524023 - RNA, 19 nt, Artificial Sequence
  Description of Artificial Sequence: Synthetic oligonucleotide
gugaacaccguggagcuag

SEQ ID NO: 524024 - RNA, 19 nt, Artificial Sequence
  Description of Artificial Sequence: Synthetic oligonucleotide
agccuaguaauguugcuaa

SEQ ID NO: 524025 - RNA, 19 nt, Artificial Sequence
  Description of Artificial Sequence: Synthetic oligonucleotide
uuugggcucugauaccuga

SEQ ID NO: 524026 - RNA, 19 nt, Artificial Sequence
  Description of Artificial Sequence: Synthetic oligonucleotide
ucccgcacggugauggucc

SEQ ID NO: 524027 - RNA, 19 nt, Artificial Sequence
  Description of Artificial Sequence: Synthetic oligonucleotide
caccauacuguccagccug

SEQ ID NO: 524028 - RNA, 19 nt, Artificial Sequence
  Description of Artificial Sequence: Synthetic oligonucleotide
uccgguaggggcccgaggu

SEQ ID NO: 524029 - RNA, 19 nt, Artificial Sequence
  Description of Artificial Sequence: Synthetic oligonucleotide
gucuguaccguagaaggcc

SEQ ID NO: 524030 - RNA, 19 nt, Artificial Sequence
  Description of Artificial Sequence: Synthetic oligonucleotide
uaagcagcgcagcguaagc

SEQ ID NO: 524031 - RNA, 19 nt, Artificial Sequence
  Description of Artificial Sequence: Synthetic oligonucleotide
uggaaguuguagcgaagcu

SEQ ID NO: 524032 - RNA, 19 nt, Artificial Sequence
  Description of Artificial Sequence: Synthetic oligonucleotide
uugaaacgguucaugccac

SEQ ID NO: 524033 - RNA, 19 nt, Artificial Sequence
  Description of Artificial Sequence: Synthetic oligonucleotide
augaaucgcuuuuauccga

SEQ ID NO: 524034 - RNA, 19 nt, Artificial Sequence
  Description of Artificial Sequence: Synthetic oligonucleotide
uuuauccgaccaaugcgau

SEQ ID NO: 524035 - RNA, 19 nt, Artificial Sequence
  Description of Artificial Sequence: Synthetic oligonucleotide
guagaagcggucaggcccg

SEQ ID NO: 524036 - RNA, 19 nt, Artificial Sequence
  Description of Artificial Sequence: Synthetic oligonucleotide
caguacaacggccuugcac

SEQ ID NO: 524037 - RNA, 19 nt, Artificial Sequence
  Description of Artificial Sequence: Synthetic oligonucleotide
acaacggccuugcacguca

SEQ ID NO: 524038 - RNA, 19 nt, Artificial Sequence
  Description of Artificial Sequence: Synthetic oligonucleotide
gaaacgguucaugccacug

SEQ ID NO: 524039 - RNA, 19 nt, Artificial Sequence
  Description of Artificial Sequence: Synthetic oligonucleotide
uuccgucucagcaguuucc

SEQ ID NO: 524040 - RNA, 19 nt, Artificial Sequence
  Description of Artificial Sequence: Synthetic oligonucleotide
cacaucgcccuucuguggc

SEQ ID NO: 524041 - RNA, 19 nt, Artificial Sequence
  Description of Artificial Sequence: Synthetic oligonucleotide
cuauauugggcaggucacg

SEQ ID NO: 524042 - RNA, 19 nt, Artificial Sequence
  Description of Artificial Sequence: Synthetic oligonucleotide
acgccaaucugauccuggg

SEQ ID NO: 524043 - RNA, 19 nt, Artificial Sequence
  Description of Artificial Sequence: Synthetic oligonucleotide
uuacagagcuacuuuuauu

SEQ ID NO: 524044 - RNA, 19 nt, Artificial Sequence
  Description of Artificial Sequence: Synthetic oligonucleotide
uacgggcgugguuuggagg

SEQ ID NO: 524045 - RNA, 19 nt, Artificial Sequence
  Description of Artificial Sequence: Synthetic oligonucleotide
ugucccgaaagcccuggga

SEQ ID NO: 524046 - RNA, 19 nt, Artificial Sequence
  Description of Artificial Sequence: Synthetic oligonucleotide
acaccguggagcuaggguu

SEQ ID NO: 524047 - RNA, 19 nt, Artificial Sequence
  Description of Artificial Sequence: Synthetic oligonucleotide
uagcgaagcuucuuuguuc

SEQ ID NO: 524048 - RNA, 19 nt, Artificial Sequence
  Description of Artificial Sequence: Synthetic oligonucleotide
ggucagacaugguaucccg

SEQ ID NO: 524049 - RNA, 19 nt, Artificial Sequence
  Description of Artificial Sequence: Synthetic oligonucleotide
aacacguccaggguccgca

SEQ ID NO: 524050 - RNA, 19 nt, Artificial Sequence
  Description of Artificial Sequence: Synthetic oligonucleotide
augcggacuaagcagcgca

SEQ ID NO: 524051 - RNA, 19 nt, Artificial Sequence
  Description of Artificial Sequence: Synthetic oligonucleotide
gagaucucaggugccgagg

SEQ ID NO: 524052 - RNA, 19 nt, Artificial Sequence
  Description of Artificial Sequence: Synthetic oligonucleotide
cauggccaaagucacugug

SEQ ID NO: 524053 - RNA, 19 nt, Artificial Sequence
  Description of Artificial Sequence: Synthetic oligonucleotide
cagcuuaggcaauuugaug

SEQ ID NO: 524054 - RNA, 19 nt, Artificial Sequence
  Description of Artificial Sequence: Synthetic oligonucleotide
ugcggacuaagcagcgcag

SEQ ID NO: 524055 - RNA, 19 nt, Artificial Sequence
  Description of Artificial Sequence: Synthetic oligonucleotide
ugucuuuacagagcuacuu

SEQ ID NO: 524056 - RNA, 19 nt, Artificial Sequence
  Description of Artificial Sequence: Synthetic oligonucleotide
cauggaaguuguagcgaag

SEQ ID NO: 524057 - RNA, 19 nt, Artificial Sequence
  Description of Artificial Sequence: Synthetic oligonucleotide
accguagaaggccgaggcg

SEQ ID NO: 524058 - RNA, 19 nt, Artificial Sequence
  Description of Artificial Sequence: Synthetic oligonucleotide
acuucuauauugggcaggu

SEQ ID NO: 524059 - RNA, 19 nt, Artificial Sequence
  Description of Artificial Sequence: Synthetic oligonucleotide
gaaucgcuuuuauccgacc

SEQ ID NO: 524060 - RNA, 19 nt, Artificial Sequence
  Description of Artificial Sequence: Synthetic oligonucleotide
agggaguuggucagcuugc

SEQ ID NO: 524061 - RNA, 19 nt, Artificial Sequence
  Description of Artificial Sequence: Synthetic oligonucleotide
uaccugacacuuugcauuc

SEQ ID NO: 524062 - RNA, 19 nt, Artificial Sequence
  Description of Artificial Sequence: Synthetic oligonucleotide
cacgccaaucugauccugg

SEQ ID NO: 524063 - RNA, 19 nt, Artificial Sequence
  Description of Artificial Sequence: Synthetic oligonucleotide
auguugcuaacaaacuucu

SEQ ID NO: 524064 - RNA, 19 nt, Artificial Sequence
  Description of Artificial Sequence: Synthetic oligonucleotide
accucacacaaacagcuua

SEQ ID NO: 524065 - RNA, 19 nt, Artificial Sequence
  Description of Artificial Sequence: Synthetic oligonucleotide
uuguucagccgaaaugcuu

SEQ ID NO: 524066 - RNA, 19 nt, Artificial Sequence
  Description of Artificial Sequence: Synthetic oligonucleotide
cagcagcacuucuauauug

SEQ ID NO: 524067 - RNA, 19 nt, Artificial Sequence
  Description of Artificial Sequence: Synthetic oligonucleotide
cuaagcagcgcagcguaag

SEQ ID NO: 524068 - RNA, 19 nt, Artificial Sequence
  Description of Artificial Sequence: Synthetic oligonucleotide
aaacacguccaggguccgc

SEQ ID NO: 524069 - RNA, 19 nt, Artificial Sequence
  Description of Artificial Sequence: Synthetic oligonucleotide
uuacgggcgugguuuggag

SEQ ID NO: 524070 - RNA, 19 nt, Artificial Sequence
  Description of Artificial Sequence: Synthetic oligonucleotide
gaccguggaauguucuuca

SEQ ID NO: 524071 - RNA, 19 nt, Artificial Sequence
  Description of Artificial Sequence: Synthetic oligonucleotide
gaauccuucugacaacccu

SEQ ID NO: 524072 - RNA, 19 nt, Artificial Sequence
  Description of Artificial Sequence: Synthetic oligonucleotide
augcgauagggcucaggag

SEQ ID NO: 524073 - RNA, 19 nt, Artificial Sequence
  Description of Artificial Sequence: Synthetic oligonucleotide
gaggucagacaugguaucc

SEQ ID NO: 524074 - RNA, 19 nt, Artificial Sequence
  Description of Artificial Sequence: Synthetic oligonucleotide
ucccgaaagcccugggagc

SEQ ID NO: 524075 - RNA, 19 nt, Artificial Sequence
  Description of Artificial Sequence: Synthetic oligonucleotide
cacuuugcauucccuuucc

SEQ ID NO: 524076 - RNA, 19 nt, Artificial Sequence
  Description of Artificial Sequence: Synthetic oligonucleotide
cucgauggcccacaguguc

SEQ ID NO: 524077 - RNA, 19 nt, Artificial Sequence
  Description of Artificial Sequence: Synthetic oligonucleotide
cauguggggcucuggguag

SEQ ID NO: 524078 - RNA, 19 nt, Artificial Sequence
  Description of Artificial Sequence: Synthetic oligonucleotide
guucuaacgccaucugaca

SEQ ID NO: 524079 - RNA, 19 nt, Artificial Sequence
  Description of Artificial Sequence: Synthetic oligonucleotide
cacguugcaguccucugug

SEQ ID NO: 524080 - RNA, 19 nt, Artificial Sequence
  Description of Artificial Sequence: Synthetic oligonucleotide
cacuucuauauugggcagg

SEQ ID NO: 524081 - RNA, 19 nt, Artificial Sequence
  Description of Artificial Sequence: Synthetic oligonucleotide
ugaacaccguggagcuagg

SEQ ID NO: 524082 - RNA, 19 nt, Artificial Sequence
  Description of Artificial Sequence: Synthetic oligonucleotide
guaaguacgggaguugaaa

SEQ ID NO: 524083 - RNA, 19 nt, Artificial Sequence
  Description of Artificial Sequence: Synthetic oligonucleotide
cuuuguucagaggguuacg

SEQ ID NO: 524084 - RNA, 19 nt, Artificial Sequence
  Description of Artificial Sequence: Synthetic oligonucleotide
cuuuaucucgaggccaaug

SEQ ID NO: 524085 - RNA, 19 nt, Artificial Sequence
  Description of Artificial Sequence: Synthetic oligonucleotide
cacgaggugcaaauacaug

SEQ ID NO: 524086 - RNA, 19 nt, Artificial Sequence
  Description of Artificial Sequence: Synthetic oligonucleotide
agcuaggguuguucagccg

SEQ ID NO: 524087 - RNA, 19 nt, Artificial Sequence
  Description of Artificial Sequence: Synthetic oligonucleotide
uagaggccggcccaauggu

SEQ ID NO: 524088 - RNA, 19 nt, Artificial Sequence
  Description of Artificial Sequence: Synthetic oligonucleotide
uucaugccacugaaacccu

SEQ ID NO: 524089 - RNA, 19 nt, Artificial Sequence
  Description of Artificial Sequence: Synthetic oligonucleotide
uugcauuguaggccucaga

SEQ ID NO: 524090 - RNA, 19 nt, Artificial Sequence
  Description of Artificial Sequence: Synthetic oligonucleotide
uucagccgaaaugcuuggg

SEQ ID NO: 524091 - RNA, 19 nt, Artificial Sequence
  Description of Artificial Sequence: Synthetic oligonucleotide
accagcuuaagcagcacgu

SEQ ID NO: 524092 - RNA, 19 nt, Artificial Sequence
  Description of Artificial Sequence: Synthetic oligonucleotide
aagcagcgcagcguaagcu

SEQ ID NO: 524093 - RNA, 19 nt, Artificial Sequence
  Description of Artificial Sequence: Synthetic oligonucleotide
cuuaagcagcacguugcag

SEQ ID NO: 524094 - RNA, 19 nt, Artificial Sequence
  Description of Artificial Sequence: Synthetic oligonucleotide
agcaccauggagcgcuuga

SEQ ID NO: 524095 - RNA, 19 nt, Artificial Sequence
  Description of Artificial Sequence: Synthetic oligonucleotide
ugaaacgguucaugccacu

SEQ ID NO: 524096 - RNA, 19 nt, Artificial Sequence
  Description of Artificial Sequence: Synthetic oligonucleotide
ugguaacccaugcggacua

SEQ ID NO: 524097 - RNA, 19 nt, Artificial Sequence
  Description of Artificial Sequence: Synthetic oligonucleotide
acgggaguugaaacgguuc

SEQ ID NO: 524098 - RNA, 19 nt, Artificial Sequence
  Description of Artificial Sequence: Synthetic oligonucleotide
gguuagccuaguaauguug

SEQ ID NO: 524099 - RNA, 19 nt, Artificial Sequence
  Description of Artificial Sequence: Synthetic oligonucleotide
cauggagcgcuugaaggac

SEQ ID NO: 524100 - RNA, 19 nt, Artificial Sequence
  Description of Artificial Sequence: Synthetic oligonucleotide
caagacugcggcucuccac

SEQ ID NO: 524101 - RNA, 19 nt, Artificial Sequence
  Description of Artificial Sequence: Synthetic oligonucleotide
gauggcucgccuccguguc

SEQ ID NO: 524102 - RNA, 19 nt, Artificial Sequence
  Description of Artificial Sequence: Synthetic oligonucleotide
uuacccaccugccgguguc

SEQ ID NO: 524103 - RNA, 19 nt, Artificial Sequence
  Description of Artificial Sequence: Synthetic oligonucleotide
ucgauggcccacagugucu

SEQ ID NO: 524104 - RNA, 19 nt, Artificial Sequence
  Description of Artificial Sequence: Synthetic oligonucleotide
ugccgaagaaccgguaggu

SEQ ID NO: 524105 - RNA, 19 nt, Artificial Sequence
  Description of Artificial Sequence: Synthetic oligonucleotide
accauacuguccagccugc

SEQ ID NO: 524106 - RNA, 19 nt, Artificial Sequence
  Description of Artificial Sequence: Synthetic oligonucleotide
gcacggcuuagucacaaag

SEQ ID NO: 524107 - RNA, 19 nt, Artificial Sequence
  Description of Artificial Sequence: Synthetic oligonucleotide
gguugguaggccgaguccc

SEQ ID NO: 524108 - RNA, 19 nt, Artificial Sequence
  Description of Artificial Sequence: Synthetic oligonucleotide
aggguuguucagccgaaau

SEQ ID NO: 524109 - RNA, 19 nt, Artificial Sequence
  Description of Artificial Sequence: Synthetic oligonucleotide
ggcuuagucacaaagcaaa

SEQ ID NO: 524110 - RNA, 19 nt, Artificial Sequence
  Description of Artificial Sequence: Synthetic oligonucleotide
auacagagcuuuaucucga

SEQ ID NO: 524111 - RNA, 19 nt, Artificial Sequence
  Description of Artificial Sequence: Synthetic oligonucleotide
auuacccaccugccggugu

SEQ ID NO: 524112 - RNA, 19 nt, Artificial Sequence
  Description of Artificial Sequence: Synthetic oligonucleotide
ugggagcgggcacacuccc

SEQ ID NO: 524113 - RNA, 19 nt, Artificial Sequence
  Description of Artificial Sequence: Synthetic oligonucleotide
ggagcuaggguuguucagc

SEQ ID NO: 524114 - RNA, 19 nt, Artificial Sequence
  Description of Artificial Sequence: Synthetic oligonucleotide
cagagcuacuuuuauugaa

SEQ ID NO: 524115 - RNA, 19 nt, Artificial Sequence
  Description of Artificial Sequence: Synthetic oligonucleotide
ggaguugaaacgguucaug

SEQ ID NO: 524116 - RNA, 19 nt, Artificial Sequence
  Description of Artificial Sequence: Synthetic oligonucleotide
uacgggaguugaaacgguu

SEQ ID NO: 524117 - RNA, 19 nt, Artificial Sequence
  Description of Artificial Sequence: Synthetic oligonucleotide
aggguuacgggcgugguuu

SEQ ID NO: 524118 - RNA, 19 nt, Artificial Sequence
  Description of Artificial Sequence: Synthetic oligonucleotide
gaggccggcccaaugguug

SEQ ID NO: 524119 - RNA, 19 nt, Artificial Sequence
  Description of Artificial Sequence: Synthetic oligonucleotide
ccucacacaaacagcuuag

SEQ ID NO: 524120 - RNA, 19 nt, Artificial Sequence
  Description of Artificial Sequence: Synthetic oligonucleotide
gcuaggguuguucagccga

SEQ ID NO: 524121 - RNA, 19 nt, Artificial Sequence
  Description of Artificial Sequence: Synthetic oligonucleotide
cuaacgccaucugacagca

SEQ ID NO: 524122 - RNA, 19 nt, Artificial Sequence
  Description of Artificial Sequence: Synthetic oligonucleotide
uugaacuguuuggccgagg

SEQ ID NO: 524123 - RNA, 19 nt, Artificial Sequence
  Description of Artificial Sequence: Synthetic oligonucleotide
uguugcuaacaaacuucuu

SEQ ID NO: 524124 - RNA, 19 nt, Artificial Sequence
  Description of Artificial Sequence: Synthetic oligonucleotide
cugggagcgggcacacucc

SEQ ID NO: 524125 - RNA, 19 nt, Artificial Sequence
  Description of Artificial Sequence: Synthetic oligonucleotide
cauagaggccggcccaaug

SEQ ID NO: 524126 - RNA, 19 nt, Artificial Sequence
  Description of Artificial Sequence: Synthetic oligonucleotide
uuauccgaccaaugcgaua

SEQ ID NO: 524127 - RNA, 19 nt, Artificial Sequence
  Description of Artificial Sequence: Synthetic oligonucleotide
agcacguugcaguccucug

SEQ ID NO: 524128 - RNA, 19 nt, Artificial Sequence
  Description of Artificial Sequence: Synthetic oligonucleotide
uggaaccaagacugcggcu

SEQ ID NO: 524129 - RNA, 19 nt, Artificial Sequence
  Description of Artificial Sequence: Synthetic oligonucleotide
gcugccgaagaaccgguag

SEQ ID NO: 524130 - RNA, 19 nt, Artificial Sequence
  Description of Artificial Sequence: Synthetic oligonucleotide
guugguaggccgagucccg

SEQ ID NO: 524131 - RNA, 19 nt, Artificial Sequence
  Description of Artificial Sequence: Synthetic oligonucleotide
gugcacugguaacccaugc

SEQ ID NO: 524132 - RNA, 19 nt, Artificial Sequence
  Description of Artificial Sequence: Synthetic oligonucleotide
guacugcacggcuuaguca

SEQ ID NO: 524133 - RNA, 19 nt, Artificial Sequence
  Description of Artificial Sequence: Synthetic oligonucleotide
cucugugaacaccguggag

SEQ ID NO: 524134 - RNA, 19 nt, Artificial Sequence
  Description of Artificial Sequence: Synthetic oligonucleotide
cucgccuccgugucugggc

SEQ ID NO: 524135 - RNA, 19 nt, Artificial Sequence
  Description of Artificial Sequence: Synthetic oligonucleotide
agcacgaggugcaaauaca

SEQ ID NO: 524136 - RNA, 19 nt, Artificial Sequence
  Description of Artificial Sequence: Synthetic oligonucleotide
auggccaaagucacugugu

SEQ ID NO: 524137 - RNA, 19 nt, Artificial Sequence
  Description of Artificial Sequence: Synthetic oligonucleotide
aggggcagaucugauagaa

SEQ ID NO: 524138 - RNA, 19 nt, Artificial Sequence
  Description of Artificial Sequence: Synthetic oligonucleotide
uggguagagcagaacuauu

SEQ ID NO: 524139 - RNA, 19 nt, Artificial Sequence
  Description of Artificial Sequence: Synthetic oligonucleotide
cagacaugguaucccgcac

SEQ ID NO: 524140 - RNA, 19 nt, Artificial Sequence
  Description of Artificial Sequence: Synthetic oligonucleotide
uggccgguaguagucgcag

SEQ ID NO: 524141 - RNA, 19 nt, Artificial Sequence
  Description of Artificial Sequence: Synthetic oligonucleotide
agguuagccuaguaauguu

SEQ ID NO: 524142 - RNA, 19 nt, Artificial Sequence
  Description of Artificial Sequence: Synthetic oligonucleotide
auucgggcagccaccaaug

SEQ ID NO: 524143 - RNA, 19 nt, Artificial Sequence
  Description of Artificial Sequence: Synthetic oligonucleotide
cccaugcggacuaagcagc

SEQ ID NO: 524144 - RNA, 19 nt, Artificial Sequence
  Description of Artificial Sequence: Synthetic oligonucleotide
cuuugggcucugauaccug

SEQ ID NO: 524145 - RNA, 19 nt, Artificial Sequence
  Description of Artificial Sequence: Synthetic oligonucleotide
gaugguccgguaggggccc

SEQ ID NO: 524146 - RNA, 19 nt, Artificial Sequence
  Description of Artificial Sequence: Synthetic oligonucleotide
cacugguaacccaugcgga

SEQ ID NO: 524147 - RNA, 19 nt, Artificial Sequence
  Description of Artificial Sequence: Synthetic oligonucleotide
cagccagaaaacacgucca

SEQ ID NO: 524148 - RNA, 19 nt, Artificial Sequence
  Description of Artificial Sequence: Synthetic oligonucleotide
guaacccaugcggacuaag

SEQ ID NO: 524149 - RNA, 19 nt, Artificial Sequence
  Description of Artificial Sequence: Synthetic oligonucleotide
agugcauguggggcucugg

SEQ ID NO: 524150 - RNA, 19 nt, Artificial Sequence
  Description of Artificial Sequence: Synthetic oligonucleotide
ccuucgaguaauccuggag

SEQ ID NO: 524151 - RNA, 19 nt, Artificial Sequence
  Description of Artificial Sequence: Synthetic oligonucleotide
gucaggcccgcccuucgag

SEQ ID NO: 524152 - RNA, 19 nt, Artificial Sequence
  Description of Artificial Sequence: Synthetic oligonucleotide
agcguaagcuucagcacca

SEQ ID NO: 524153 - RNA, 19 nt, Artificial Sequence
  Description of Artificial Sequence: Synthetic oligonucleotide
gaccaaugcgauagggcuc

SEQ ID NO: 524154 - RNA, 19 nt, Artificial Sequence
  Description of Artificial Sequence: Synthetic oligonucleotide
uauuccgucucagcaguuu

SEQ ID NO: 524155 - RNA, 19 nt, Artificial Sequence
  Description of Artificial Sequence: Synthetic oligonucleotide
aaguuguagcgaagcuucu

SEQ ID NO: 524156 - RNA, 19 nt, Artificial Sequence
  Description of Artificial Sequence: Synthetic oligonucleotide
gccagaaaacacguccagg

SEQ ID NO: 524157 - RNA, 19 nt, Artificial Sequence
  Description of Artificial Sequence: Synthetic oligonucleotide
gaacaccguggagcuaggg

SEQ ID NO: 524158 - RNA, 19 nt, Artificial Sequence
  Description of Artificial Sequence: Synthetic oligonucleotide
aggucacgccaaucugauc

SEQ ID NO: 524159 - RNA, 19 nt, Artificial Sequence
  Description of Artificial Sequence: Synthetic oligonucleotide
cagaggguuacgggcgugg

SEQ ID NO: 524160 - RNA, 19 nt, Artificial Sequence
  Description of Artificial Sequence: Synthetic oligonucleotide
auccgaccaaugcgauagg

SEQ ID NO: 524161 - RNA, 19 nt, Artificial Sequence
  Description of Artificial Sequence: Synthetic oligonucleotide
ucuugauguccagcccuca

SEQ ID NO: 524162 - RNA, 19 nt, Artificial Sequence
  Description of Artificial Sequence: Synthetic oligonucleotide
ggguagagcagaacuauuc

SEQ ID NO: 524163 - RNA, 19 nt, Artificial Sequence
  Description of Artificial Sequence: Synthetic oligonucleotide
gggucgcagagcuugccag

SEQ ID NO: 524164 - RNA, 19 nt, Artificial Sequence
  Description of Artificial Sequence: Synthetic oligonucleotide
aacggccuugcacgucacu

SEQ ID NO: 524165 - RNA, 19 nt, Artificial Sequence
  Description of Artificial Sequence: Synthetic oligonucleotide
guggcggcacagcauuacc

SEQ ID NO: 524166 - RNA, 19 nt, Artificial Sequence
  Description of Artificial Sequence: Synthetic oligonucleotide
ucgaggccaauggcuuugg

SEQ ID NO: 524167 - RNA, 19 nt, Artificial Sequence
  Description of Artificial Sequence: Synthetic oligonucleotide
ugguaggccgagucccgca

SEQ ID NO: 524168 - RNA, 19 nt, Artificial Sequence
  Description of Artificial Sequence: Synthetic oligonucleotide
gaaccgguaggugucccga

SEQ ID NO: 524169 - RNA, 19 nt, Artificial Sequence
  Description of Artificial Sequence: Synthetic oligonucleotide
gcagcguaagcuucagcac

SEQ ID NO: 524170 - RNA, 19 nt, Artificial Sequence
  Description of Artificial Sequence: Synthetic oligonucleotide
cacaacacucagcuggcaa

SEQ ID NO: 524171 - RNA, 19 nt, Artificial Sequence
  Description of Artificial Sequence: Synthetic oligonucleotide
aggggucgcagagcuugcc

SEQ ID NO: 524172 - RNA, 19 nt, Artificial Sequence
  Description of Artificial Sequence: Synthetic oligonucleotide
aaacccuggcagggugguc

SEQ ID NO: 524173 - RNA, 19 nt, Artificial Sequence
  Description of Artificial Sequence: Synthetic oligonucleotide
aaccgguaggugucccgaa

SEQ ID NO: 524174 - RNA, 19 nt, Artificial Sequence
  Description of Artificial Sequence: Synthetic oligonucleotide
uugguaggccgagucccgc

SEQ ID NO: 524175 - RNA, 19 nt, Artificial Sequence
  Description of Artificial Sequence: Synthetic oligonucleotide
agcuuuaucucgaggccaa

SEQ ID NO: 524176 - RNA, 19 nt, Artificial Sequence
  Description of Artificial Sequence: Synthetic oligonucleotide
ccuaguaauguugcuaaca

SEQ ID NO: 524177 - RNA, 19 nt, Artificial Sequence
  Description of Artificial Sequence: Synthetic oligonucleotide
aucccgcacggugaugguc

SEQ ID NO: 524178 - RNA, 19 nt, Artificial Sequence
  Description of Artificial Sequence: Synthetic oligonucleotide
gucuuuacagagcuacuuu

SEQ ID NO: 524179 - RNA, 19 nt, Artificial Sequence
  Description of Artificial Sequence: Synthetic oligonucleotide
ucacgccaaucugauccug

SEQ ID NO: 524180 - RNA, 19 nt, Artificial Sequence
  Description of Artificial Sequence: Synthetic oligonucleotide
gucuugcuugccacccacg

SEQ ID NO: 524181 - RNA, 19 nt, Artificial Sequence
  Description of Artificial Sequence: Synthetic oligonucleotide
caaugggcucauguccuug

SEQ ID NO: 524182 - RNA, 19 nt, Artificial Sequence
  Description of Artificial Sequence: Synthetic oligonucleotide
aguaaguacgggaguugaa

SEQ ID NO: 524183 - RNA, 19 nt, Artificial Sequence
  Description of Artificial Sequence: Synthetic oligonucleotide
ggcggcacagcauuaccca

SEQ ID NO: 524184 - RNA, 19 nt, Artificial Sequence
  Description of Artificial Sequence: Synthetic oligonucleotide
gaccccacgcauggcgccg

SEQ ID NO: 524185 - RNA, 19 nt, Artificial Sequence
  Description of Artificial Sequence: Synthetic oligonucleotide
cugaggccaucuccugagc

SEQ ID NO: 524186 - RNA, 19 nt, Artificial Sequence
  Description of Artificial Sequence: Synthetic oligonucleotide
uaacgccaucugacagcag

SEQ ID NO: 524187 - RNA, 19 nt, Artificial Sequence
  Description of Artificial Sequence: Synthetic oligonucleotide
acaucgcccuucuguggca

SEQ ID NO: 524188 - RNA, 19 nt, Artificial Sequence
  Description of Artificial Sequence: Synthetic oligonucleotide
aucucgaggccaauggcuu

SEQ ID NO: 524189 - RNA, 19 nt, Artificial Sequence
  Description of Artificial Sequence: Synthetic oligonucleotide
ggccgagucccgcagcugc

SEQ ID NO: 524190 - RNA, 19 nt, Artificial Sequence
  Description of Artificial Sequence: Synthetic oligonucleotide
aggggcccgagguuagccu

SEQ ID NO: 524191 - RNA, 19 nt, Artificial Sequence
  Description of Artificial Sequence: Synthetic oligonucleotide
ggucgcagagcuugccagc

SEQ ID NO: 524192 - RNA, 19 nt, Artificial Sequence
  Description of Artificial Sequence: Synthetic oligonucleotide
guaggccgagucccgcagc

SEQ ID NO: 524193 - RNA, 19 nt, Artificial Sequence
  Description of Artificial Sequence: Synthetic oligonucleotide
cccgaaagcccugggagcg

SEQ ID NO: 524194 - RNA, 19 nt, Artificial Sequence
  Description of Artificial Sequence: Synthetic oligonucleotide
ucgaguaauccuggagguu

SEQ ID NO: 524195 - RNA, 19 nt, Artificial Sequence
  Description of Artificial Sequence: Synthetic oligonucleotide
agaagcggucaggcccgcc

SEQ ID NO: 524196 - RNA, 19 nt, Artificial Sequence
  Description of Artificial Sequence: Synthetic oligonucleotide
cgagguuagccuaguaaug

SEQ ID NO: 524197 - RNA, 19 nt, Artificial Sequence
  Description of Artificial Sequence: Synthetic oligonucleotide
guuacgggcgugguuugga

SEQ ID NO: 524198 - RNA, 19 nt, Artificial Sequence
  Description of Artificial Sequence: Synthetic oligonucleotide
cucaggccuguagaacuug

SEQ ID NO: 524199 - RNA, 19 nt, Artificial Sequence
  Description of Artificial Sequence: Synthetic oligonucleotide
ggagcgggcacacucccuc

SEQ ID NO: 524200 - RNA, 19 nt, Artificial Sequence
  Description of Artificial Sequence: Synthetic oligonucleotide
ccaugcggacuaagcagcg

SEQ ID NO: 524201 - RNA, 19 nt, Artificial Sequence
  Description of Artificial Sequence: Synthetic oligonucleotide
guagcgaagcuucuuuguu

SEQ ID NO: 524202 - RNA, 19 nt, Artificial Sequence
  Description of Artificial Sequence: Synthetic oligonucleotide
aaccucacacaaacagcuu

SEQ ID NO: 524203 - RNA, 19 nt, Artificial Sequence
  Description of Artificial Sequence: Synthetic oligonucleotide
accguggaauguucuucau

SEQ ID NO: 524204 - RNA, 19 nt, Artificial Sequence
  Description of Artificial Sequence: Synthetic oligonucleotide
cagccgaaaugcuugggcu

SEQ ID NO: 524205 - RNA, 19 nt, Artificial Sequence
  Description of Artificial Sequence: Synthetic oligonucleotide
uaucccgcacggugauggu

SEQ ID NO: 524206 - RNA, 19 nt, Artificial Sequence
  Description of Artificial Sequence: Synthetic oligonucleotide
ugcacggcuuagucacaaa

SEQ ID NO: 524207 - RNA, 19 nt, Artificial Sequence
  Description of Artificial Sequence: Synthetic oligonucleotide
guccgguaggggcccgagg

SEQ ID NO: 524208 - RNA, 19 nt, Artificial Sequence
  Description of Artificial Sequence: Synthetic oligonucleotide
cggacuaagcagcgcagcg

SEQ ID NO: 524209 - RNA, 19 nt, Artificial Sequence
  Description of Artificial Sequence: Synthetic oligonucleotide
cacgaaguacugcacggcu

SEQ ID NO: 524210 - RNA, 19 nt, Artificial Sequence
  Description of Artificial Sequence: Synthetic oligonucleotide
uugugccgguucccagugu

SEQ ID NO: 524211 - RNA, 19 nt, Artificial Sequence
  Description of Artificial Sequence: Synthetic oligonucleotide
acgccaucugacagcagca

SEQ ID NO: 524212 - RNA, 19 nt, Artificial Sequence
  Description of Artificial Sequence: Synthetic oligonucleotide
auggcucgccuccgugucu

SEQ ID NO: 524213 - RNA, 19 nt, Artificial Sequence
  Description of Artificial Sequence: Synthetic oligonucleotide
ccagccaugaccagcuuaa

SEQ ID NO: 524214 - RNA, 19 nt, Artificial Sequence
  Description of Artificial Sequence: Synthetic oligonucleotide
uacaacggccuugcacguc

SEQ ID NO: 524215 - RNA, 19 nt, Artificial Sequence
  Description of Artificial Sequence: Synthetic oligonucleotide
agcgcagcguaagcuucag

SEQ ID NO: 524216 - RNA, 19 nt, Artificial Sequence
  Description of Artificial Sequence: Synthetic oligonucleotide
cauucgggcagccaccaau

SEQ ID NO: 524217 - RNA, 19 nt, Artificial Sequence
  Description of Artificial Sequence: Synthetic oligonucleotide
agaggguuacgggcguggu

SEQ ID NO: 524218 - RNA, 19 nt, Artificial Sequence
  Description of Artificial Sequence: Synthetic oligonucleotide
gaucucaggugccgaggcu

SEQ ID NO: 524219 - RNA, 19 nt, Artificial Sequence
  Description of Artificial Sequence: Synthetic oligonucleotide
acgaaguacugcacggcuu

SEQ ID NO: 524220 - RNA, 19 nt, Artificial Sequence
  Description of Artificial Sequence: Synthetic oligonucleotide
cuucuauauugggcagguc

SEQ ID NO: 524221 - RNA, 19 nt, Artificial Sequence
  Description of Artificial Sequence: Synthetic oligonucleotide
cauuacccaccugccggug

SEQ ID NO: 524222 - RNA, 19 nt, Artificial Sequence
  Description of Artificial Sequence: Synthetic oligonucleotide
gggugguccaccacacagc

SEQ ID NO: 524223 - RNA, 19 nt, Artificial Sequence
  Description of Artificial Sequence: Synthetic oligonucleotide
gguuacgggcgugguuugg

SEQ ID NO: 524224 - RNA, 19 nt, Artificial Sequence
  Description of Artificial Sequence: Synthetic oligonucleotide
gcugccgggucccacaucu

SEQ ID NO: 524225 - RNA, 19 nt, Artificial Sequence
  Description of Artificial Sequence: Synthetic oligonucleotide
gagcgggcacacucccuca

SEQ ID NO: 524226 - RNA, 19 nt, Artificial Sequence
  Description of Artificial Sequence: Synthetic oligonucleotide
gaaacccuggcaggguggu

SEQ ID NO: 524227 - RNA, 19 nt, Artificial Sequence
  Description of Artificial Sequence: Synthetic oligonucleotide
gaggggucgcagagcuugc

SEQ ID NO: 524228 - RNA, 19 nt, Artificial Sequence
  Description of Artificial Sequence: Synthetic oligonucleotide
ugugaacaccguggagcua

SEQ ID NO: 524229 - RNA, 19 nt, Artificial Sequence
  Description of Artificial Sequence: Synthetic oligonucleotide
cacaucucgauggcccaca

SEQ ID NO: 524230 - RNA, 19 nt, Artificial Sequence
  Description of Artificial Sequence: Synthetic oligonucleotide
gguaggggcccgagguuag

SEQ ID NO: 524231 - RNA, 19 nt, Artificial Sequence
  Description of Artificial Sequence: Synthetic oligonucleotide
gcuccguucuggaucucag

SEQ ID NO: 524232 - RNA, 19 nt, Artificial Sequence
  Description of Artificial Sequence: Synthetic oligonucleotide
gcagaacuauuccgucuca

SEQ ID NO: 524233 - RNA, 19 nt, Artificial Sequence
  Description of Artificial Sequence: Synthetic oligonucleotide
auugggcaggucacgccaa

SEQ ID NO: 524234 - RNA, 19 nt, Artificial Sequence
  Description of Artificial Sequence: Synthetic oligonucleotide
ggaaguuguagcgaagcuu

SEQ ID NO: 524235 - RNA, 19 nt, Artificial Sequence
  Description of Artificial Sequence: Synthetic oligonucleotide
ggcgccggugcugcuacgg

SEQ ID NO: 524236 - RNA, 19 nt, Artificial Sequence
  Description of Artificial Sequence: Synthetic oligonucleotide
acuaagcagcgcagcguaa

SEQ ID NO: 524237 - RNA, 19 nt, Artificial Sequence
  Description of Artificial Sequence: Synthetic oligonucleotide
guacaacggccuugcacgu

SEQ ID NO: 524238 - RNA, 19 nt, Artificial Sequence
  Description of Artificial Sequence: Synthetic oligonucleotide
cgcuuuuauccgaccaaug

SEQ ID NO: 524239 - RNA, 19 nt, Artificial Sequence
  Description of Artificial Sequence: Synthetic oligonucleotide
ggguuacgggcgugguuug

SEQ ID NO: 524240 - RNA, 19 nt, Artificial Sequence
  Description of Artificial Sequence: Synthetic oligonucleotide
caggucacgccaaucugau

SEQ ID NO: 524241 - RNA, 19 nt, Artificial Sequence
  Description of Artificial Sequence: Synthetic oligonucleotide
uagaagcggucaggcccgc

SEQ ID NO: 524242 - RNA, 19 nt, Artificial Sequence
  Description of Artificial Sequence: Synthetic oligonucleotide
ccgagguuagccuaguaau

SEQ ID NO: 524243 - RNA, 19 nt, Artificial Sequence
  Description of Artificial Sequence: Synthetic oligonucleotide
gcggacuaagcagcgcagc

SEQ ID NO: 524244 - RNA, 19 nt, Artificial Sequence
  Description of Artificial Sequence: Synthetic oligonucleotide
acgcauggcgccggugcug

SEQ ID NO: 524245 - RNA, 19 nt, Artificial Sequence
  Description of Artificial Sequence: Synthetic oligonucleotide
gcgauagggcucaggagca

SEQ ID NO: 524246 - RNA, 19 nt, Artificial Sequence
  Description of Artificial Sequence: Synthetic oligonucleotide
cgguaggugucccgaaagc

SEQ ID NO: 524247 - RNA, 19 nt, Artificial Sequence
  Description of Artificial Sequence: Synthetic oligonucleotide
gccgaagaaccgguaggug

SEQ ID NO: 524248 - RNA, 19 nt, Artificial Sequence
  Description of Artificial Sequence: Synthetic oligonucleotide
uugggcugccgggucccac

SEQ ID NO: 524249 - RNA, 19 nt, Artificial Sequence
  Description of Artificial Sequence: Synthetic oligonucleotide
aggcccgcccuucgaguaa

SEQ ID NO: 524250 - RNA, 19 nt, Artificial Sequence
  Description of Artificial Sequence: Synthetic oligonucleotide
ggauggguugguaggccga

SEQ ID NO: 524251 - RNA, 19 nt, Artificial Sequence
  Description of Artificial Sequence: Synthetic oligonucleotide
gcguggccgguaguagucg

SEQ ID NO: 524252 - RNA, 19 nt, Artificial Sequence
  Description of Artificial Sequence: Synthetic oligonucleotide
guggccgguaguagucgca

SEQ ID NO: 524253 - RNA, 19 nt, Artificial Sequence
  Description of Artificial Sequence: Synthetic oligonucleotide
cuacggccauucuucuugu

SEQ ID NO: 524254 - RNA, 19 nt, Artificial Sequence
  Description of Artificial Sequence: Synthetic oligonucleotide
cugcacggcuuagucacaa

SEQ ID NO: 524255 - RNA, 19 nt, Artificial Sequence
  Description of Artificial Sequence: Synthetic oligonucleotide
ccgcagcuuaggcaauuug

SEQ ID NO: 524256 - RNA, 19 nt, Artificial Sequence
  Description of Artificial Sequence: Synthetic oligonucleotide
ccggcccaaugguugugcc

SEQ ID NO: 524257 - RNA, 19 nt, Artificial Sequence
  Description of Artificial Sequence: Synthetic oligonucleotide
gaggguuacgggcgugguu

SEQ ID NO: 524258 - RNA, 19 nt, Artificial Sequence
  Description of Artificial Sequence: Synthetic oligonucleotide
caggcccgcccuucgagua

SEQ ID NO: 524259 - RNA, 19 nt, Artificial Sequence
  Description of Artificial Sequence: Synthetic oligonucleotide
augguccgguaggggcccg

SEQ ID NO: 524260 - RNA, 19 nt, Artificial Sequence
  Description of Artificial Sequence: Synthetic oligonucleotide
cccgcccuucgaguaaucc

SEQ ID NO: 524261 - RNA, 19 nt, Artificial Sequence
  Description of Artificial Sequence: Synthetic oligonucleotide
guacgggaguugaaacggu

SEQ ID NO: 524262 - RNA, 19 nt, Artificial Sequence
  Description of Artificial Sequence: Synthetic oligonucleotide
gcauuacccaccugccggu

SEQ ID NO: 524263 - RNA, 19 nt, Artificial Sequence
  Description of Artificial Sequence: Synthetic oligonucleotide
agcggucaggcccgcccuu

SEQ ID NO: 524264 - RNA, 19 nt, Artificial Sequence
  Description of Artificial Sequence: Synthetic oligonucleotide
cguggccgguaguagucgc

SEQ ID NO: 524265 - RNA, 19 nt, Artificial Sequence
  Description of Artificial Sequence: Synthetic oligonucleotide
gguaucccgcacggugaug

SEQ ID NO: 524266 - RNA, 19 nt, Artificial Sequence
  Description of Artificial Sequence: Synthetic oligonucleotide
gcucgccuccgugucuggg

SEQ ID NO: 524267 - RNA, 19 nt, Artificial Sequence
  Description of Artificial Sequence: Synthetic oligonucleotide
ggcuccguucuggaucuca

SEQ ID NO: 524268 - RNA, 19 nt, Artificial Sequence
  Description of Artificial Sequence: Synthetic oligonucleotide
cguggagcuaggguuguuc

SEQ ID NO: 524269 - RNA, 19 nt, Artificial Sequence
  Description of Artificial Sequence: Synthetic oligonucleotide
gccggcccaaugguugugc

SEQ ID NO: 524270 - RNA, 19 nt, Artificial Sequence
  Description of Artificial Sequence: Synthetic oligonucleotide
cgccggugcugcuacggcc

SEQ ID NO: 524271 - RNA, 19 nt, Artificial Sequence
  Description of Artificial Sequence: Synthetic oligonucleotide
gguccgguaggggcccgag

SEQ ID NO: 524272 - RNA, 19 nt, Artificial Sequence
  Description of Artificial Sequence: Synthetic oligonucleotide
gcacgaggugcaaauacau

SEQ ID NO: 524273 - RNA, 19 nt, Artificial Sequence
  Description of Artificial Sequence: Synthetic oligonucleotide
guuuggccgaggggucgca

SEQ ID NO: 524274 - RNA, 19 nt, Artificial Sequence
  Description of Artificial Sequence: Synthetic oligonucleotide
ggggcccgagguuagccua

SEQ ID NO: 524275 - RNA, 19 nt, Artificial Sequence
  Description of Artificial Sequence: Synthetic oligonucleotide
cucugauaccugacacuuu

SEQ ID NO: 524276 - RNA, 19 nt, Artificial Sequence
  Description of Artificial Sequence: Synthetic oligonucleotide
caucucgauggcccacagu

SEQ ID NO: 524277 - RNA, 19 nt, Artificial Sequence
  Description of Artificial Sequence: Synthetic oligonucleotide
ggucaggcccgcccuucga

SEQ ID NO: 524278 - RNA, 19 nt, Artificial Sequence
  Description of Artificial Sequence: Synthetic oligonucleotide
gcgcccauagaggccggcc

SEQ ID NO: 524279 - RNA, 19 nt, Artificial Sequence
  Description of Artificial Sequence: Synthetic oligonucleotide
gcgccggugcugcuacggc

SEQ ID NO: 524280 - RNA, 19 nt, Artificial Sequence
  Description of Artificial Sequence: Synthetic oligonucleotide
ccgaaagcccugggagcgg

SEQ ID NO: 524281 - RNA, 19 nt, Artificial Sequence
  Description of Artificial Sequence: Synthetic oligonucleotide
cacuccagaacagcagguu

SEQ ID NO: 524282 - RNA, 19 nt, Artificial Sequence
  Description of Artificial Sequence: Synthetic oligonucleotide
ccaagacugcggcucucca

SEQ ID NO: 524283 - RNA, 19 nt, Artificial Sequence
  Description of Artificial Sequence: Synthetic oligonucleotide
cacgcauggcgccggugcu

SEQ ID NO: 524284 - RNA, 19 nt, Artificial Sequence
  Description of Artificial Sequence: Synthetic oligonucleotide
cuauuccgucucagcaguu

SEQ ID NO: 524285 - RNA, 19 nt, Artificial Sequence
  Description of Artificial Sequence: Synthetic oligonucleotide
ccaagaugauggcucgccu

SEQ ID NO: 524286 - RNA, 19 nt, Artificial Sequence
  Description of Artificial Sequence: Synthetic oligonucleotide
gggcgugguuuggaggguc

SEQ ID NO: 524287 - RNA, 19 nt, Artificial Sequence
  Description of Artificial Sequence: Synthetic oligonucleotide
ggccgaggggucgcagagc

SEQ ID NO: 524288 - RNA, 19 nt, Artificial Sequence
  Description of Artificial Sequence: Synthetic oligonucleotide
gguaacccaugcggacuaa

SEQ ID NO: 524289 - RNA, 19 nt, Artificial Sequence
  Description of Artificial Sequence: Synthetic oligonucleotide
ccgcccuucgaguaauccu

SEQ ID NO: 524290 - RNA, 19 nt, Artificial Sequence
  Description of Artificial Sequence: Synthetic oligonucleotide
cggucaggcccgcccuucg

SEQ ID NO: 524291 - RNA, 19 nt, Artificial Sequence
  Description of Artificial Sequence: Synthetic oligonucleotide
ggggaccguggaauguucu

SEQ ID NO: 524292 - RNA, 19 nt, Artificial Sequence
  Description of Artificial Sequence: Synthetic oligonucleotide
ggcgcccauagaggccggc

SEQ ID NO: 524293 - RNA, 19 nt, Artificial Sequence
  Description of Artificial Sequence: Synthetic oligonucleotide
cagggaggucagacauggu

SEQ ID NO: 524294 - RNA, 19 nt, Artificial Sequence
  Description of Artificial Sequence: Synthetic oligonucleotide
ggccggcccaaugguugug

SEQ ID NO: 524295 - RNA, 19 nt, Artificial Sequence
  Description of Artificial Sequence: Synthetic oligonucleotide
ggagcacacggcccugcuu

SEQ ID NO: 524296 - RNA, 19 nt, Artificial Sequence
  Description of Artificial Sequence: Synthetic oligonucleotide
gcggcaggcaccaggggau

SEQ ID NO: 524297 - RNA, 19 nt, Artificial Sequence
  Description of Artificial Sequence: Synthetic oligonucleotide
ggcgugguuuggagggucu

SEQ ID NO: 524298 - RNA, 19 nt, Artificial Sequence
  Description of Artificial Sequence: Synthetic oligonucleotide
cgagucccgcagcugccuc

SEQ ID NO: 524299 - RNA, 19 nt, Artificial Sequence
  Description of Artificial Sequence: Synthetic oligonucleotide
ccgcacggugaugguccgg

SEQ ID NO: 524300 - RNA, 19 nt, Artificial Sequence
  Description of Artificial Sequence: Synthetic oligonucleotide
gcccgagguuagccuagua

SEQ ID NO: 524301 - RNA, 19 nt, Artificial Sequence
  Description of Artificial Sequence: Synthetic oligonucleotide
cccacgcauggcgccggug

SEQ ID NO: 524302 - RNA, 19 nt, Artificial Sequence
  Description of Artificial Sequence: Synthetic oligonucleotide
gcccaaugguugugccggu

SEQ ID NO: 524303 - RNA, 19 nt, Artificial Sequence
  Description of Artificial Sequence: Synthetic oligonucleotide
ccgaggcggaucugugggu

SEQ ID NO: 524304 - RNA, 19 nt, Artificial Sequence
  Description of Artificial Sequence: Synthetic oligonucleotide
cgcacggugaugguccggu

SEQ ID NO: 524305 - RNA, 19 nt, Artificial Sequence
  Description of Artificial Sequence: Synthetic oligonucleotide
ggcccgagguuagccuagu

SEQ ID NO: 524306 - RNA, 19 nt, Artificial Sequence
  Description of Artificial Sequence: Synthetic oligonucleotide
gcguaagcuucagcaccau

SEQ ID NO: 524307 - RNA, 19 nt, Artificial Sequence
  Description of Artificial Sequence: Synthetic oligonucleotide
ccgaggcuccguucuggau

SEQ ID NO: 524308 - RNA, 19 nt, Artificial Sequence
  Description of Artificial Sequence: Synthetic oligonucleotide
gcccgcccuucgaguaauc

SEQ ID NO: 524309 - RNA, 19 nt, Artificial Sequence
  Description of Artificial Sequence: Synthetic oligonucleotide
gcgugguuuggagggucuu

SEQ ID NO: 524310 - RNA, 19 nt, Artificial Sequence
  Description of Artificial Sequence: Synthetic oligonucleotide
ccgguaggggcccgagguu

SEQ ID NO: 524311 - RNA, 19 nt, Artificial Sequence
  Description of Artificial Sequence: Synthetic oligonucleotide
ccauagaggccggcccaau

SEQ ID NO: 524312 - RNA, 19 nt, Artificial Sequence
  Description of Artificial Sequence: Synthetic oligonucleotide
cgauagggcucaggagcau

SEQ ID NO: 524313 - RNA, 19 nt, Artificial Sequence
  Description of Artificial Sequence: Synthetic oligonucleotide
ccgaggggucgcagagcuu

SEQ ID NO: 524314 - RNA, 19 nt, Artificial Sequence
  Description of Artificial Sequence: Synthetic oligonucleotide
ccguggagcuaggguuguu

SEQ ID NO: 524315 - RNA, 19 nt, Artificial Sequence
  Description of Artificial Sequence: Synthetic oligonucleotide
cggugcugcuacggccauu

SEQ ID NO: 524316 - RNA, 19 nt, Artificial Sequence
  Description of Artificial Sequence: Synthetic oligonucleotide
uauugcagcauacagauag

SEQ ID NO: 524317 - RNA, 19 nt, Artificial Sequence
  Description of Artificial Sequence: Synthetic oligonucleotide
aacuuacuuggcuagaagc

SEQ ID NO: 524318 - RNA, 19 nt, Artificial Sequence
  Description of Artificial Sequence: Synthetic oligonucleotide
aaaucagucgcaguuaucc

SEQ ID NO: 524319 - RNA, 19 nt, Artificial Sequence
  Description of Artificial Sequence: Synthetic oligonucleotide
uuuaauagaguuuggaucu

SEQ ID NO: 524320 - RNA, 19 nt, Artificial Sequence
  Description of Artificial Sequence: Synthetic oligonucleotide
uuuaaaagaacaguuaucu

SEQ ID NO: 524321 - RNA, 19 nt, Artificial Sequence
  Description of Artificial Sequence: Synthetic oligonucleotide
uagaguuuggaucugaagc

SEQ ID NO: 524322 - RNA, 19 nt, Artificial Sequence
  Description of Artificial Sequence: Synthetic oligonucleotide
uuaauugcaagaaauugug

SEQ ID NO: 524323 - RNA, 19 nt, Artificial Sequence
  Description of Artificial Sequence: Synthetic oligonucleotide
ugaucuuuaacacauuaug

SEQ ID NO: 524324 - RNA, 19 nt, Artificial Sequence
  Description of Artificial Sequence: Synthetic oligonucleotide
aacguaaauccuuuaauug

SEQ ID NO: 524325 - RNA, 19 nt, Artificial Sequence
  Description of Artificial Sequence: Synthetic oligonucleotide
acguaaauccuuuaauugc

SEQ ID NO: 524326 - RNA, 19 nt, Artificial Sequence
  Description of Artificial Sequence: Synthetic oligonucleotide
aauauuuaccaauguuacg

SEQ ID NO: 524327 - RNA, 19 nt, Artificial Sequence
  Description of Artificial Sequence: Synthetic oligonucleotide
uuuguuaggaggauaaugu

SEQ ID NO: 524328 - RNA, 19 nt, Artificial Sequence
  Description of Artificial Sequence: Synthetic oligonucleotide
aacauuuacuccucgaaga

SEQ ID NO: 524329 - RNA, 19 nt, Artificial Sequence
  Description of Artificial Sequence: Synthetic oligonucleotide
agacgaagaccuuacacgc

SEQ ID NO: 524330 - RNA, 19 nt, Artificial Sequence
  Description of Artificial Sequence: Synthetic oligonucleotide
gauaaugugacugcagccg

SEQ ID NO: 524331 - RNA, 19 nt, Artificial Sequence
  Description of Artificial Sequence: Synthetic oligonucleotide
uuguccaaaauaaucaaac

SEQ ID NO: 524332 - RNA, 19 nt, Artificial Sequence
  Description of Artificial Sequence: Synthetic oligonucleotide
aaacaaauacugguugagc

SEQ ID NO: 524333 - RNA, 19 nt, Artificial Sequence
  Description of Artificial Sequence: Synthetic oligonucleotide
uaugaagcgugacagacga

SEQ ID NO: 524334 - RNA, 19 nt, Artificial Sequence
  Description of Artificial Sequence: Synthetic oligonucleotide
aaaacguaaauccuuuaau

SEQ ID NO: 524335 - RNA, 19 nt, Artificial Sequence
  Description of Artificial Sequence: Synthetic oligonucleotide
uuuuauaccaucgucuucu

SEQ ID NO: 524336 - RNA, 19 nt, Artificial Sequence
  Description of Artificial Sequence: Synthetic oligonucleotide
uuagugacuuguaugaagu

SEQ ID NO: 524337 - RNA, 19 nt, Artificial Sequence
  Description of Artificial Sequence: Synthetic oligonucleotide
aaaacauuuacuccucgaa

SEQ ID NO: 524338 - RNA, 19 nt, Artificial Sequence
  Description of Artificial Sequence: Synthetic oligonucleotide
uuggcuagaagcaagacuu

SEQ ID NO: 524339 - RNA, 19 nt, Artificial Sequence
  Description of Artificial Sequence: Synthetic oligonucleotide
aaacguaaauccuuuaauu

SEQ ID NO: 524340 - RNA, 19 nt, Artificial Sequence
  Description of Artificial Sequence: Synthetic oligonucleotide
uguuaggaggauaauguga

SEQ ID NO: 524341 - RNA, 19 nt, Artificial Sequence
  Description of Artificial Sequence: Synthetic oligonucleotide
ugaaugaugaagaccucag

SEQ ID NO: 524342 - RNA, 19 nt, Artificial Sequence
  Description of Artificial Sequence: Synthetic oligonucleotide
uuagccagucaucuaaaag

SEQ ID NO: 524343 - RNA, 19 nt, Artificial Sequence
  Description of Artificial Sequence: Synthetic oligonucleotide
cauaugaaugguuuugaag

SEQ ID NO: 524344 - RNA, 19 nt, Artificial Sequence
  Description of Artificial Sequence: Synthetic oligonucleotide
uccucgaagaacaugccag

SEQ ID NO: 524345 - RNA, 19 nt, Artificial Sequence
  Description of Artificial Sequence: Synthetic oligonucleotide
cagacgaagaccuuacacg

SEQ ID NO: 524346 - RNA, 19 nt, Artificial Sequence
  Description of Artificial Sequence: Synthetic oligonucleotide
uccuuuaauugcaagaaau

SEQ ID NO: 524347 - RNA, 19 nt, Artificial Sequence
  Description of Artificial Sequence: Synthetic oligonucleotide
ucuaaaagcgucuccagaa

SEQ ID NO: 524348 - RNA, 19 nt, Artificial Sequence
  Description of Artificial Sequence: Synthetic oligonucleotide
aaacacuuuuauaccaucg

SEQ ID NO: 524349 - RNA, 19 nt, Artificial Sequence
  Description of Artificial Sequence: Synthetic oligonucleotide
uaaaacguaaauccuuuaa

SEQ ID NO: 524350 - RNA, 19 nt, Artificial Sequence
  Description of Artificial Sequence: Synthetic oligonucleotide
aacaguuaucuuccuuugg

SEQ ID NO: 524351 - RNA, 19 nt, Artificial Sequence
  Description of Artificial Sequence: Synthetic oligonucleotide
aauguuacgucuccugccu

SEQ ID NO: 524352 - RNA, 19 nt, Artificial Sequence
  Description of Artificial Sequence: Synthetic oligonucleotide
uuuuguuaggaggauaaug

SEQ ID NO: 524353 - RNA, 19 nt, Artificial Sequence
  Description of Artificial Sequence: Synthetic oligonucleotide
aggucuuaaaacaugcucg

SEQ ID NO: 524354 - RNA, 19 nt, Artificial Sequence
  Description of Artificial Sequence: Synthetic oligonucleotide
aaacuagaguuccacucag

SEQ ID NO: 524355 - RNA, 19 nt, Artificial Sequence
  Description of Artificial Sequence: Synthetic oligonucleotide
aaucagucgcaguuauccg

SEQ ID NO: 524356 - RNA, 19 nt, Artificial Sequence
  Description of Artificial Sequence: Synthetic oligonucleotide
ucgcauguaaaacauuuac

SEQ ID NO: 524357 - RNA, 19 nt, Artificial Sequence
  Description of Artificial Sequence: Synthetic oligonucleotide
gguaccaacaaucuggcug

SEQ ID NO: 524358 - RNA, 19 nt, Artificial Sequence
  Description of Artificial Sequence: Synthetic oligonucleotide
uucgaagggcaacaagacg

SEQ ID NO: 524359 - RNA, 19 nt, Artificial Sequence
  Description of Artificial Sequence: Synthetic oligonucleotide
auaaugugacugcagccgg

SEQ ID NO: 524360 - RNA, 19 nt, Artificial Sequence
  Description of Artificial Sequence: Synthetic oligonucleotide
uguaaaacguaaauccuuu

SEQ ID NO: 524361 - RNA, 19 nt, Artificial Sequence
  Description of Artificial Sequence: Synthetic oligonucleotide
uagaugucauguuuacggg

SEQ ID NO: 524362 - RNA, 19 nt, Artificial Sequence
  Description of Artificial Sequence: Synthetic oligonucleotide
agaguuuggaucugaagcu

SEQ ID NO: 524363 - RNA, 19 nt, Artificial Sequence
  Description of Artificial Sequence: Synthetic oligonucleotide
aaugugacugcagccgggc

SEQ ID NO: 524364 - RNA, 19 nt, Artificial Sequence
  Description of Artificial Sequence: Synthetic oligonucleotide
uuacgcaugauuagucuug

SEQ ID NO: 524365 - RNA, 19 nt, Artificial Sequence
  Description of Artificial Sequence: Synthetic oligonucleotide
cuuagcaaacuagaguucc

SEQ ID NO: 524366 - RNA, 19 nt, Artificial Sequence
  Description of Artificial Sequence: Synthetic oligonucleotide
uccuguuacaacaucaauu

SEQ ID NO: 524367 - RNA, 19 nt, Artificial Sequence
  Description of Artificial Sequence: Synthetic oligonucleotide
gaugucauguuuacgggag

SEQ ID NO: 524368 - RNA, 19 nt, Artificial Sequence
  Description of Artificial Sequence: Synthetic oligonucleotide
caggauuggguuauuuugg

SEQ ID NO: 524369 - RNA, 19 nt, Artificial Sequence
  Description of Artificial Sequence: Synthetic oligonucleotide
ugugugcuagacaugguac

SEQ ID NO: 524370 - RNA, 19 nt, Artificial Sequence
  Description of Artificial Sequence: Synthetic oligonucleotide
uaaaacauuuacuccucga

SEQ ID NO: 524371 - RNA, 19 nt, Artificial Sequence
  Description of Artificial Sequence: Synthetic oligonucleotide
acaguuaucuuccuuuggu

SEQ ID NO: 524372 - RNA, 19 nt, Artificial Sequence
  Description of Artificial Sequence: Synthetic oligonucleotide
uuugguuggcaucucgaug

SEQ ID NO: 524373 - RNA, 19 nt, Artificial Sequence
  Description of Artificial Sequence: Synthetic oligonucleotide
ugucaacuuacuuggcuag

SEQ ID NO: 524374 - RNA, 19 nt, Artificial Sequence
  Description of Artificial Sequence: Synthetic oligonucleotide
guaccaacaaucuggcugc

SEQ ID NO: 524375 - RNA, 19 nt, Artificial Sequence
  Description of Artificial Sequence: Synthetic oligonucleotide
agcaagacuucguucuuac

SEQ ID NO: 524376 - RNA, 19 nt, Artificial Sequence
  Description of Artificial Sequence: Synthetic oligonucleotide
auuuugcaggauuuggaug

SEQ ID NO: 524377 - RNA, 19 nt, Artificial Sequence
  Description of Artificial Sequence: Synthetic oligonucleotide
ugauuagucuugacuguag

SEQ ID NO: 524378 - RNA, 19 nt, Artificial Sequence
  Description of Artificial Sequence: Synthetic oligonucleotide
uaaaagcgucuccagaagu

SEQ ID NO: 524379 - RNA, 19 nt, Artificial Sequence
  Description of Artificial Sequence: Synthetic oligonucleotide
acuagaguuccacucaggu

SEQ ID NO: 524380 - RNA, 19 nt, Artificial Sequence
  Description of Artificial Sequence: Synthetic oligonucleotide
aagugcuaugaacacacaa

SEQ ID NO: 524381 - RNA, 19 nt, Artificial Sequence
  Description of Artificial Sequence: Synthetic oligonucleotide
uuaccaauguuacgucucc

SEQ ID NO: 524382 - RNA, 19 nt, Artificial Sequence
  Description of Artificial Sequence: Synthetic oligonucleotide
ugaguucacguucugcugu

SEQ ID NO: 524383 - RNA, 19 nt, Artificial Sequence
  Description of Artificial Sequence: Synthetic oligonucleotide
aagacuucguucuuacuuu

SEQ ID NO: 524384 - RNA, 19 nt, Artificial Sequence
  Description of Artificial Sequence: Synthetic oligonucleotide
ucacuuggaaaggacacag

SEQ ID NO: 524385 - RNA, 19 nt, Artificial Sequence
  Description of Artificial Sequence: Synthetic oligonucleotide
auguuuacgggagaaagug

SEQ ID NO: 524386 - RNA, 19 nt, Artificial Sequence
  Description of Artificial Sequence: Synthetic oligonucleotide
ugcucggaaggucucacag

SEQ ID NO: 524387 - RNA, 19 nt, Artificial Sequence
  Description of Artificial Sequence: Synthetic oligonucleotide
agguauguguagcaucuuc

SEQ ID NO: 524388 - RNA, 19 nt, Artificial Sequence
  Description of Artificial Sequence: Synthetic oligonucleotide
aggauuuggaugcacugug

SEQ ID NO: 524389 - RNA, 19 nt, Artificial Sequence
  Description of Artificial Sequence: Synthetic oligonucleotide
ugcuaugaacacacaacug

SEQ ID NO: 524390 - RNA, 19 nt, Artificial Sequence
  Description of Artificial Sequence: Synthetic oligonucleotide
guuaggaggauaaugugac

SEQ ID NO: 524391 - RNA, 19 nt, Artificial Sequence
  Description of Artificial Sequence: Synthetic oligonucleotide
auacugguugagcaaugac

SEQ ID NO: 524392 - RNA, 19 nt, Artificial Sequence
  Description of Artificial Sequence: Synthetic oligonucleotide
uuggggaaucacuagggca

SEQ ID NO: 524393 - RNA, 19 nt, Artificial Sequence
  Description of Artificial Sequence: Synthetic oligonucleotide
uauccgacuggcuuucugc

SEQ ID NO: 524394 - RNA, 19 nt, Artificial Sequence
  Description of Artificial Sequence: Synthetic oligonucleotide
uaauugcaagaaauugugu

SEQ ID NO: 524395 - RNA, 19 nt, Artificial Sequence
  Description of Artificial Sequence: Synthetic oligonucleotide
aguuaggaugguuugguau

SEQ ID NO: 524396 - RNA, 19 nt, Artificial Sequence
  Description of Artificial Sequence: Synthetic oligonucleotide
uucggcaucaggauauuuc

SEQ ID NO: 524397 - RNA, 19 nt, Artificial Sequence
  Description of Artificial Sequence: Synthetic oligonucleotide
ucggcaucaggauauuuca

SEQ ID NO: 524398 - RNA, 19 nt, Artificial Sequence
  Description of Artificial Sequence: Synthetic oligonucleotide
uuacacgcuuucuugagaa

SEQ ID NO: 524399 - RNA, 19 nt, Artificial Sequence
  Description of Artificial Sequence: Synthetic oligonucleotide
gauagccuaugucauuggc

SEQ ID NO: 524400 - RNA, 19 nt, Artificial Sequence
  Description of Artificial Sequence: Synthetic oligonucleotide
uggggaaucacuagggcau

SEQ ID NO: 524401 - RNA, 19 nt, Artificial Sequence
  Description of Artificial Sequence: Synthetic oligonucleotide
gauucaaugagggauauau

SEQ ID NO: 524402 - RNA, 19 nt, Artificial Sequence
  Description of Artificial Sequence: Synthetic oligonucleotide
uuucagaacagaucugaau

SEQ ID NO: 524403 - RNA, 19 nt, Artificial Sequence
  Description of Artificial Sequence: Synthetic oligonucleotide
ugguugagcaaugacauau

SEQ ID NO: 524404 - RNA, 19 nt, Artificial Sequence
  Description of Artificial Sequence: Synthetic oligonucleotide
ggucuuaaaacaugcucgg

SEQ ID NO: 524405 - RNA, 19 nt, Artificial Sequence
  Description of Artificial Sequence: Synthetic oligonucleotide
ugguauuucuguagaguga

SEQ ID NO: 524406 - RNA, 19 nt, Artificial Sequence
  Description of Artificial Sequence: Synthetic oligonucleotide
uucuggaggcuucgaaggg

SEQ ID NO: 524407 - RNA, 19 nt, Artificial Sequence
  Description of Artificial Sequence: Synthetic oligonucleotide
uaaugugacugcagccggg

SEQ ID NO: 524408 - RNA, 19 nt, Artificial Sequence
  Description of Artificial Sequence: Synthetic oligonucleotide
gaccuuacacgcuuucuug

SEQ ID NO: 524409 - RNA, 19 nt, Artificial Sequence
  Description of Artificial Sequence: Synthetic oligonucleotide
acgucuccugccuacaaag

SEQ ID NO: 524410 - RNA, 19 nt, Artificial Sequence
  Description of Artificial Sequence: Synthetic oligonucleotide
cuaaaagcgucuccagaag

SEQ ID NO: 524411 - RNA, 19 nt, Artificial Sequence
  Description of Artificial Sequence: Synthetic oligonucleotide
agugacuuguaugaaguca

SEQ ID NO: 524412 - RNA, 19 nt, Artificial Sequence
  Description of Artificial Sequence: Synthetic oligonucleotide
ucucaaaaguccucugccu

SEQ ID NO: 524413 - RNA, 19 nt, Artificial Sequence
  Description of Artificial Sequence: Synthetic oligonucleotide
agccagucaucuaaaagcg

SEQ ID NO: 524414 - RNA, 19 nt, Artificial Sequence
  Description of Artificial Sequence: Synthetic oligonucleotide
caggucuuaaaacaugcuc

SEQ ID NO: 524415 - RNA, 19 nt, Artificial Sequence
  Description of Artificial Sequence: Synthetic oligonucleotide
gcuaugaacacacaacuga

SEQ ID NO: 524416 - RNA, 19 nt, Artificial Sequence
  Description of Artificial Sequence: Synthetic oligonucleotide
uccuuugguuggcaucucg

SEQ ID NO: 524417 - RNA, 19 nt, Artificial Sequence
  Description of Artificial Sequence: Synthetic oligonucleotide
uuagcaaacuagaguucca

SEQ ID NO: 524418 - RNA, 19 nt, Artificial Sequence
  Description of Artificial Sequence: Synthetic oligonucleotide
acaacugacugucugugau

SEQ ID NO: 524419 - RNA, 19 nt, Artificial Sequence
  Description of Artificial Sequence: Synthetic oligonucleotide
agcugauucaaugagggau

SEQ ID NO: 524420 - RNA, 19 nt, Artificial Sequence
  Description of Artificial Sequence: Synthetic oligonucleotide
accaauguuacgucuccug

SEQ ID NO: 524421 - RNA, 19 nt, Artificial Sequence
  Description of Artificial Sequence: Synthetic oligonucleotide
aaagcgucuccagaaguca

SEQ ID NO: 524422 - RNA, 19 nt, Artificial Sequence
  Description of Artificial Sequence: Synthetic oligonucleotide
augcacugugaccaaaugu

SEQ ID NO: 524423 - RNA, 19 nt, Artificial Sequence
  Description of Artificial Sequence: Synthetic oligonucleotide
acauuuacuccucgaagaa

SEQ ID NO: 524424 - RNA, 19 nt, Artificial Sequence
  Description of Artificial Sequence: Synthetic oligonucleotide
gaugcacugugaccaaaug

SEQ ID NO: 524425 - RNA, 19 nt, Artificial Sequence
  Description of Artificial Sequence: Synthetic oligonucleotide
ucugcuguugaggaucagc

SEQ ID NO: 524426 - RNA, 19 nt, Artificial Sequence
  Description of Artificial Sequence: Synthetic oligonucleotide
cagacuaccuugguuacgc

SEQ ID NO: 524427 - RNA, 19 nt, Artificial Sequence
  Description of Artificial Sequence: Synthetic oligonucleotide
uagacaugguaccaacaau

SEQ ID NO: 524428 - RNA, 19 nt, Artificial Sequence
  Description of Artificial Sequence: Synthetic oligonucleotide
acuuacuuggcuagaagca

SEQ ID NO: 524429 - RNA, 19 nt, Artificial Sequence
  Description of Artificial Sequence: Synthetic oligonucleotide
agauagccuaugucauugg

SEQ ID NO: 524430 - RNA, 19 nt, Artificial Sequence
  Description of Artificial Sequence: Synthetic oligonucleotide
cucagugaaugaugaagac

SEQ ID NO: 524431 - RNA, 19 nt, Artificial Sequence
  Description of Artificial Sequence: Synthetic oligonucleotide
gcuuuugagcuugaggugg

SEQ ID NO: 524432 - RNA, 19 nt, Artificial Sequence
  Description of Artificial Sequence: Synthetic oligonucleotide
uugguuacgcaugauuagu

SEQ ID NO: 524433 - RNA, 19 nt, Artificial Sequence
  Description of Artificial Sequence: Synthetic oligonucleotide
ugcuugcuaugucauucag

SEQ ID NO: 524434 - RNA, 19 nt, Artificial Sequence
  Description of Artificial Sequence: Synthetic oligonucleotide
aagggcaacaagacgguga

SEQ ID NO: 524435 - RNA, 19 nt, Artificial Sequence
  Description of Artificial Sequence: Synthetic oligonucleotide
uguuacgucuccugccuac

SEQ ID NO: 524436 - RNA, 19 nt, Artificial Sequence
  Description of Artificial Sequence: Synthetic oligonucleotide
ugguuacgcaugauuaguc

SEQ ID NO: 524437 - RNA, 19 nt, Artificial Sequence
  Description of Artificial Sequence: Synthetic oligonucleotide
augucaacuuacuuggcua

SEQ ID NO: 524438 - RNA, 19 nt, Artificial Sequence
  Description of Artificial Sequence: Synthetic oligonucleotide
ucgccucgcauguaaaaca

SEQ ID NO: 524439 - RNA, 19 nt, Artificial Sequence
  Description of Artificial Sequence: Synthetic oligonucleotide
cuuuugagcuugagguggc

SEQ ID NO: 524440 - RNA, 19 nt, Artificial Sequence
  Description of Artificial Sequence: Synthetic oligonucleotide
aacuagaguuccacucagg

SEQ ID NO: 524441 - RNA, 19 nt, Artificial Sequence
  Description of Artificial Sequence: Synthetic oligonucleotide
auuggguuauuuuggugaa

SEQ ID NO: 524442 - RNA, 19 nt, Artificial Sequence
  Description of Artificial Sequence: Synthetic oligonucleotide
agcaaacuagaguuccacu

SEQ ID NO: 524443 - RNA, 19 nt, Artificial Sequence
  Description of Artificial Sequence: Synthetic oligonucleotide
guaugaagcgugacagacg

SEQ ID NO: 524444 - RNA, 19 nt, Artificial Sequence
  Description of Artificial Sequence: Synthetic oligonucleotide
ugcuagacaugguaccaac

SEQ ID NO: 524445 - RNA, 19 nt, Artificial Sequence
  Description of Artificial Sequence: Synthetic oligonucleotide
gucuuagccagucaucuaa

SEQ ID NO: 524446 - RNA, 19 nt, Artificial Sequence
  Description of Artificial Sequence: Synthetic oligonucleotide
ucuuagccagucaucuaaa

SEQ ID NO: 524447 - RNA, 19 nt, Artificial Sequence
  Description of Artificial Sequence: Synthetic oligonucleotide
ucguucuuacuuuguuuca

SEQ ID NO: 524448 - RNA, 19 nt, Artificial Sequence
  Description of Artificial Sequence: Synthetic oligonucleotide
ucaacuuacuuggcuagaa

SEQ ID NO: 524449 - RNA, 19 nt, Artificial Sequence
  Description of Artificial Sequence: Synthetic oligonucleotide
aauagaguuuggaucugaa

SEQ ID NO: 524450 - RNA, 19 nt, Artificial Sequence
  Description of Artificial Sequence: Synthetic oligonucleotide
agacuucguucuuacuuug

SEQ ID NO: 524451 - RNA, 19 nt, Artificial Sequence
  Description of Artificial Sequence: Synthetic oligonucleotide
ucagacuaccuugguuacg

SEQ ID NO: 524452 - RNA, 19 nt, Artificial Sequence
  Description of Artificial Sequence: Synthetic oligonucleotide
cuuuuauaccaucgucuuc

SEQ ID NO: 524453 - RNA, 19 nt, Artificial Sequence
  Description of Artificial Sequence: Synthetic oligonucleotide
acuguauccgacuggcuuu

SEQ ID NO: 524454 - RNA, 19 nt, Artificial Sequence
  Description of Artificial Sequence: Synthetic oligonucleotide
ucaggcgcgucugagacaa

SEQ ID NO: 524455 - RNA, 19 nt, Artificial Sequence
  Description of Artificial Sequence: Synthetic oligonucleotide
ggacugaacuucuugugug

SEQ ID NO: 524456 - RNA, 19 nt, Artificial Sequence
  Description of Artificial Sequence: Synthetic oligonucleotide
aagaccuuacacgcuuucu

SEQ ID NO: 524457 - RNA, 19 nt, Artificial Sequence
  Description of Artificial Sequence: Synthetic oligonucleotide
uugcucuccacuguucaug

SEQ ID NO: 524458 - RNA, 19 nt, Artificial Sequence
  Description of Artificial Sequence: Synthetic oligonucleotide
agaccuuacacgcuuucuu

SEQ ID NO: 524459 - RNA, 19 nt, Artificial Sequence
  Description of Artificial Sequence: Synthetic oligonucleotide
uagcaaacuagaguuccac

SEQ ID NO: 524460 - RNA, 19 nt, Artificial Sequence
  Description of Artificial Sequence: Synthetic oligonucleotide
uuuacgggagaaagugcua

SEQ ID NO: 524461 - RNA, 19 nt, Artificial Sequence
  Description of Artificial Sequence: Synthetic oligonucleotide
auagccuaugucauuggca

SEQ ID NO: 524462 - RNA, 19 nt, Artificial Sequence
  Description of Artificial Sequence: Synthetic oligonucleotide
uagucuugacuguaguguu

SEQ ID NO: 524463 - RNA, 19 nt, Artificial Sequence
  Description of Artificial Sequence: Synthetic oligonucleotide
uuauaccaucgucuucuaa

SEQ ID NO: 524464 - RNA, 19 nt, Artificial Sequence
  Description of Artificial Sequence: Synthetic oligonucleotide
cuugacuguaguguuccac

SEQ ID NO: 524465 - RNA, 19 nt, Artificial Sequence
  Description of Artificial Sequence: Synthetic oligonucleotide
acaagacggugauguauug

SEQ ID NO: 524466 - RNA, 19 nt, Artificial Sequence
  Description of Artificial Sequence: Synthetic oligonucleotide
uuacgggagaaagugcuau

SEQ ID NO: 524467 - RNA, 19 nt, Artificial Sequence
  Description of Artificial Sequence: Synthetic oligonucleotide
cucagacuaccuugguuac

SEQ ID NO: 524468 - RNA, 19 nt, Artificial Sequence
  Description of Artificial Sequence: Synthetic oligonucleotide
uccacucagguaucuugug

SEQ ID NO: 524469 - RNA, 19 nt, Artificial Sequence
  Description of Artificial Sequence: Synthetic oligonucleotide
uacgggagaaagugcuaug

SEQ ID NO: 524470 - RNA, 19 nt, Artificial Sequence
  Description of Artificial Sequence: Synthetic oligonucleotide
gguuuugaaguggaggcug

SEQ ID NO: 524471 - RNA, 19 nt, Artificial Sequence
  Description of Artificial Sequence: Synthetic oligonucleotide
cagcugaacugcugggagg

SEQ ID NO: 524472 - RNA, 19 nt, Artificial Sequence
  Description of Artificial Sequence: Synthetic oligonucleotide
gugaaugaugaagaccuca

SEQ ID NO: 524473 - RNA, 19 nt, Artificial Sequence
  Description of Artificial Sequence: Synthetic oligonucleotide
uagggcauuuugucuuagc

SEQ ID NO: 524474 - RNA, 19 nt, Artificial Sequence
  Description of Artificial Sequence: Synthetic oligonucleotide
ugacuuguaugaagucauc

SEQ ID NO: 524475 - RNA, 19 nt, Artificial Sequence
  Description of Artificial Sequence: Synthetic oligonucleotide
gucauucagucucaaaagu

SEQ ID NO: 524476 - RNA, 19 nt, Artificial Sequence
  Description of Artificial Sequence: Synthetic oligonucleotide
uacgucuccugccuacaaa

SEQ ID NO: 524477 - RNA, 19 nt, Artificial Sequence
  Description of Artificial Sequence: Synthetic oligonucleotide
ggcuagaagcaagacuucg

SEQ ID NO: 524478 - RNA, 19 nt, Artificial Sequence
  Description of Artificial Sequence: Synthetic oligonucleotide
cucgaagaacaugccagag

SEQ ID NO: 524479 - RNA, 19 nt, Artificial Sequence
  Description of Artificial Sequence: Synthetic oligonucleotide
ccaauguuacgucuccugc

SEQ ID NO: 524480 - RNA, 19 nt, Artificial Sequence
  Description of Artificial Sequence: Synthetic oligonucleotide
uaccaucgucuucuaaauc

SEQ ID NO: 524481 - RNA, 19 nt, Artificial Sequence
  Description of Artificial Sequence: Synthetic oligonucleotide
accuugguuacgcaugauu

SEQ ID NO: 524482 - RNA, 19 nt, Artificial Sequence
  Description of Artificial Sequence: Synthetic oligonucleotide
uagugacuuguaugaaguc

SEQ ID NO: 524483 - RNA, 19 nt, Artificial Sequence
  Description of Artificial Sequence: Synthetic oligonucleotide
auccgacuggcuuucugcu

SEQ ID NO: 524484 - RNA, 19 nt, Artificial Sequence
  Description of Artificial Sequence: Synthetic oligonucleotide
acuggcgaacagguggccg

SEQ ID NO: 524485 - RNA, 19 nt, Artificial Sequence
  Description of Artificial Sequence: Synthetic oligonucleotide
cuaugucauuggcacuagc

SEQ ID NO: 524486 - RNA, 19 nt, Artificial Sequence
  Description of Artificial Sequence: Synthetic oligonucleotide
acgcaugauuagucuugac

SEQ ID NO: 524487 - RNA, 19 nt, Artificial Sequence
  Description of Artificial Sequence: Synthetic oligonucleotide
cuacaaagaugucaacuua

SEQ ID NO: 524488 - RNA, 19 nt, Artificial Sequence
  Description of Artificial Sequence: Synthetic oligonucleotide
gggugaacuuuugaguucc

SEQ ID NO: 524489 - RNA, 19 nt, Artificial Sequence
  Description of Artificial Sequence: Synthetic oligonucleotide
gaagcuucggcaucaggau

SEQ ID NO: 524490 - RNA, 19 nt, Artificial Sequence
  Description of Artificial Sequence: Synthetic oligonucleotide
gcaggauuuggaugcacug

SEQ ID NO: 524491 - RNA, 19 nt, Artificial Sequence
  Description of Artificial Sequence: Synthetic oligonucleotide
uuuauaccaucgucuucua

SEQ ID NO: 524492 - RNA, 19 nt, Artificial Sequence
  Description of Artificial Sequence: Synthetic oligonucleotide
gaucucgccucgcauguaa

SEQ ID NO: 524493 - RNA, 19 nt, Artificial Sequence
  Description of Artificial Sequence: Synthetic oligonucleotide
cuuacacgcuuucuugaga

SEQ ID NO: 524494 - RNA, 19 nt, Artificial Sequence
  Description of Artificial Sequence: Synthetic oligonucleotide
uuacgucuccugccuacaa

SEQ ID NO: 524495 - RNA, 19 nt, Artificial Sequence
  Description of Artificial Sequence: Synthetic oligonucleotide
cucgccucgcauguaaaac

SEQ ID NO: 524496 - RNA, 19 nt, Artificial Sequence
  Description of Artificial Sequence: Synthetic oligonucleotide
uggugaauacaaagaucuu

SEQ ID NO: 524497 - RNA, 19 nt, Artificial Sequence
  Description of Artificial Sequence: Synthetic oligonucleotide
uuaggaugguuugguauuu

SEQ ID NO: 524498 - RNA, 19 nt, Artificial Sequence
  Description of Artificial Sequence: Synthetic oligonucleotide
aggucucacaggaccuugc

SEQ ID NO: 524499 - RNA, 19 nt, Artificial Sequence
  Description of Artificial Sequence: Synthetic oligonucleotide
gaagcgugacagacgaaga

SEQ ID NO: 524500 - RNA, 19 nt, Artificial Sequence
  Description of Artificial Sequence: Synthetic oligonucleotide
guaaaacguaaauccuuua

SEQ ID NO: 524501 - RNA, 19 nt, Artificial Sequence
  Description of Artificial Sequence: Synthetic oligonucleotide
gaggcuucgaagggcaaca

SEQ ID NO: 524502 - RNA, 19 nt, Artificial Sequence
  Description of Artificial Sequence: Synthetic oligonucleotide
cuuacuuggcuagaagcaa

SEQ ID NO: 524503 - RNA, 19 nt, Artificial Sequence
  Description of Artificial Sequence: Synthetic oligonucleotide
ggcaacaagacggugaugu

SEQ ID NO: 524504 - RNA, 19 nt, Artificial Sequence
  Description of Artificial Sequence: Synthetic oligonucleotide
cacugaguucacguucugc

SEQ ID NO: 524505 - RNA, 19 nt, Artificial Sequence
  Description of Artificial Sequence: Synthetic oligonucleotide
gcagaucucgccucgcaug

SEQ ID NO: 524506 - RNA, 19 nt, Artificial Sequence
  Description of Artificial Sequence: Synthetic oligonucleotide
ccgacuggcuuucugcugg

SEQ ID NO: 524507 - RNA, 19 nt, Artificial Sequence
  Description of Artificial Sequence: Synthetic oligonucleotide
gugauguauugcagcauac

SEQ ID NO: 524508 - RNA, 19 nt, Artificial Sequence
  Description of Artificial Sequence: Synthetic oligonucleotide
caugauuagucuugacugu

SEQ ID NO: 524509 - RNA, 19 nt, Artificial Sequence
  Description of Artificial Sequence: Synthetic oligonucleotide
ugggaccucagugaaugau

SEQ ID NO: 524510 - RNA, 19 nt, Artificial Sequence
  Description of Artificial Sequence: Synthetic oligonucleotide
cauguuuacgggagaaagu

SEQ ID NO: 524511 - RNA, 19 nt, Artificial Sequence
  Description of Artificial Sequence: Synthetic oligonucleotide
aggcgcgucugagacaaag

SEQ ID NO: 524512 - RNA, 19 nt, Artificial Sequence
  Description of Artificial Sequence: Synthetic oligonucleotide
cuguaaaacguaaauccuu

SEQ ID NO: 524513 - RNA, 19 nt, Artificial Sequence
  Description of Artificial Sequence: Synthetic oligonucleotide
cuaccuugguuacgcauga

SEQ ID NO: 524514 - RNA, 19 nt, Artificial Sequence
  Description of Artificial Sequence: Synthetic oligonucleotide
cuccugccuacaaagaugu

SEQ ID NO: 524515 - RNA, 19 nt, Artificial Sequence
  Description of Artificial Sequence: Synthetic oligonucleotide
cacucagguaucuugugcu

SEQ ID NO: 524516 - RNA, 19 nt, Artificial Sequence
  Description of Artificial Sequence: Synthetic oligonucleotide
uucguccaggcugucuucu

SEQ ID NO: 524517 - RNA, 19 nt, Artificial Sequence
  Description of Artificial Sequence: Synthetic oligonucleotide
ggaucagccucagacuacc

SEQ ID NO: 524518 - RNA, 19 nt, Artificial Sequence
  Description of Artificial Sequence: Synthetic oligonucleotide
uugcaccagacuugauguc

SEQ ID NO: 524519 - RNA, 19 nt, Artificial Sequence
  Description of Artificial Sequence: Synthetic oligonucleotide
guuacgcaugauuagucuu

SEQ ID NO: 524520 - RNA, 19 nt, Artificial Sequence
  Description of Artificial Sequence: Synthetic oligonucleotide
agccuaugucauuggcacu

SEQ ID NO: 524521 - RNA, 19 nt, Artificial Sequence
  Description of Artificial Sequence: Synthetic oligonucleotide
ugguaccaacaaucuggcu

SEQ ID NO: 524522 - RNA, 19 nt, Artificial Sequence
  Description of Artificial Sequence: Synthetic oligonucleotide
ccucagacuaccuugguua

SEQ ID NO: 524523 - RNA, 19 nt, Artificial Sequence
  Description of Artificial Sequence: Synthetic oligonucleotide
cacguucugcuguuucguc

SEQ ID NO: 524524 - RNA, 19 nt, Artificial Sequence
  Description of Artificial Sequence: Synthetic oligonucleotide
ccuugguuacgcaugauua

SEQ ID NO: 524525 - RNA, 19 nt, Artificial Sequence
  Description of Artificial Sequence: Synthetic oligonucleotide
caugcucggaaggucucac

SEQ ID NO: 524526 - RNA, 19 nt, Artificial Sequence
  Description of Artificial Sequence: Synthetic oligonucleotide
gugacuuguaugaagucau

SEQ ID NO: 524527 - RNA, 19 nt, Artificial Sequence
  Description of Artificial Sequence: Synthetic oligonucleotide
cugcuugcuaugucauuca

SEQ ID NO: 524528 - RNA, 19 nt, Artificial Sequence
  Description of Artificial Sequence: Synthetic oligonucleotide
cuucugcgcuuucagcuga

SEQ ID NO: 524529 - RNA, 19 nt, Artificial Sequence
  Description of Artificial Sequence: Synthetic oligonucleotide
gugacagacgaagaccuua

SEQ ID NO: 524530 - RNA, 19 nt, Artificial Sequence
  Description of Artificial Sequence: Synthetic oligonucleotide
aggcugggugaacuuuuga

SEQ ID NO: 524531 - RNA, 19 nt, Artificial Sequence
  Description of Artificial Sequence: Synthetic oligonucleotide
cucgcauguaaaacauuua

SEQ ID NO: 524532 - RNA, 19 nt, Artificial Sequence
  Description of Artificial Sequence: Synthetic oligonucleotide
agacuaccuugguuacgca

SEQ ID NO: 524533 - RNA, 19 nt, Artificial Sequence
  Description of Artificial Sequence: Synthetic oligonucleotide
gguuacgcaugauuagucu

SEQ ID NO: 524534 - RNA, 19 nt, Artificial Sequence
  Description of Artificial Sequence: Synthetic oligonucleotide
gaaguggaggcugggugaa

SEQ ID NO: 524535 - RNA, 19 nt, Artificial Sequence
  Description of Artificial Sequence: Synthetic oligonucleotide
cagucaucuaaaagcgucu

SEQ ID NO: 524536 - RNA, 19 nt, Artificial Sequence
  Description of Artificial Sequence: Synthetic oligonucleotide
ggaccucagugaaugauga

SEQ ID NO: 524537 - RNA, 19 nt, Artificial Sequence
  Description of Artificial Sequence: Synthetic oligonucleotide
acgcagaucucgccucgca

SEQ ID NO: 524538 - RNA, 19 nt, Artificial Sequence
  Description of Artificial Sequence: Synthetic oligonucleotide
ccucaggcgcgucugagac

SEQ ID NO: 524539 - RNA, 19 nt, Artificial Sequence
  Description of Artificial Sequence: Synthetic oligonucleotide
caucuuuagugacuuguau

SEQ ID NO: 524540 - RNA, 19 nt, Artificial Sequence
  Description of Artificial Sequence: Synthetic oligonucleotide
ugauucaaugagggauaua

SEQ ID NO: 524541 - RNA, 19 nt, Artificial Sequence
  Description of Artificial Sequence: Synthetic oligonucleotide
caaagaugucaacuuacuu

SEQ ID NO: 524542 - RNA, 19 nt, Artificial Sequence
  Description of Artificial Sequence: Synthetic oligonucleotide
aagguauguguagcaucuu

SEQ ID NO: 524543 - RNA, 19 nt, Artificial Sequence
  Description of Artificial Sequence: Synthetic oligonucleotide
cuguauccgacuggcuuuc

SEQ ID NO: 524544 - RNA, 19 nt, Artificial Sequence
  Description of Artificial Sequence: Synthetic oligonucleotide
ucgcaguuauccgcaaauu

SEQ ID NO: 524545 - RNA, 19 nt, Artificial Sequence
  Description of Artificial Sequence: Synthetic oligonucleotide
aggaucugauccaucuuua

SEQ ID NO: 524546 - RNA, 19 nt, Artificial Sequence
  Description of Artificial Sequence: Synthetic oligonucleotide
ucugcgcuuucagcugaca

SEQ ID NO: 524547 - RNA, 19 nt, Artificial Sequence
  Description of Artificial Sequence: Synthetic oligonucleotide
acaugcucggaaggucuca

SEQ ID NO: 524548 - RNA, 19 nt, Artificial Sequence
  Description of Artificial Sequence: Synthetic oligonucleotide
guuacgucuccugccuaca

SEQ ID NO: 524549 - RNA, 19 nt, Artificial Sequence
  Description of Artificial Sequence: Synthetic oligonucleotide
cuuugguuggcaucucgau

SEQ ID NO: 524550 - RNA, 19 nt, Artificial Sequence
  Description of Artificial Sequence: Synthetic oligonucleotide
gacugagaaucuguaguau

SEQ ID NO: 524551 - RNA, 19 nt, Artificial Sequence
  Description of Artificial Sequence: Synthetic oligonucleotide
gucauguuuacgggagaaa

SEQ ID NO: 524552 - RNA, 19 nt, Artificial Sequence
  Description of Artificial Sequence: Synthetic oligonucleotide
auguuacgucuccugccua

SEQ ID NO: 524553 - RNA, 19 nt, Artificial Sequence
  Description of Artificial Sequence: Synthetic oligonucleotide
cagcugauucaaugaggga

SEQ ID NO: 524554 - RNA, 19 nt, Artificial Sequence
  Description of Artificial Sequence: Synthetic oligonucleotide
uguugccucugaggugugu

SEQ ID NO: 524555 - RNA, 19 nt, Artificial Sequence
  Description of Artificial Sequence: Synthetic oligonucleotide
gcugauucaaugagggaua

SEQ ID NO: 524556 - RNA, 19 nt, Artificial Sequence
  Description of Artificial Sequence: Synthetic oligonucleotide
cacugugaccaaauguuuu

SEQ ID NO: 524557 - RNA, 19 nt, Artificial Sequence
  Description of Artificial Sequence: Synthetic oligonucleotide
caucucgauguugccucug

SEQ ID NO: 524558 - RNA, 19 nt, Artificial Sequence
  Description of Artificial Sequence: Synthetic oligonucleotide
ggauuuggaugcacuguga

SEQ ID NO: 524559 - RNA, 19 nt, Artificial Sequence
  Description of Artificial Sequence: Synthetic oligonucleotide
ggcacuagccugaauuaaa

SEQ ID NO: 524560 - RNA, 19 nt, Artificial Sequence
  Description of Artificial Sequence: Synthetic oligonucleotide
uaccaacaaucuggcugca

SEQ ID NO: 524561 - RNA, 19 nt, Artificial Sequence
  Description of Artificial Sequence: Synthetic oligonucleotide
gacgaagaccuuacacgcu

SEQ ID NO: 524562 - RNA, 19 nt, Artificial Sequence
  Description of Artificial Sequence: Synthetic oligonucleotide
cagaucucgccucgcaugu

SEQ ID NO: 524563 - RNA, 19 nt, Artificial Sequence
  Description of Artificial Sequence: Synthetic oligonucleotide
gaguuuggaucugaagcuu

SEQ ID NO: 524564 - RNA, 19 nt, Artificial Sequence
  Description of Artificial Sequence: Synthetic oligonucleotide
caguuaucuuccuuugguu

SEQ ID NO: 524565 - RNA, 19 nt, Artificial Sequence
  Description of Artificial Sequence: Synthetic oligonucleotide
cgcgucugagacaaagcug

SEQ ID NO: 524566 - RNA, 19 nt, Artificial Sequence
  Description of Artificial Sequence: Synthetic oligonucleotide
caguuaggaugguuuggua

SEQ ID NO: 524567 - RNA, 19 nt, Artificial Sequence
  Description of Artificial Sequence: Synthetic oligonucleotide
cuugaaggaucugauccau

SEQ ID NO: 524568 - RNA, 19 nt, Artificial Sequence
  Description of Artificial Sequence: Synthetic oligonucleotide
gacuucguucuuacuuugu

SEQ ID NO: 524569 - RNA, 19 nt, Artificial Sequence
  Description of Artificial Sequence: Synthetic oligonucleotide
caggauuuggaugcacugu

SEQ ID NO: 524570 - RNA, 19 nt, Artificial Sequence
  Description of Artificial Sequence: Synthetic oligonucleotide
gugagugaccagauucugu

SEQ ID NO: 524571 - RNA, 19 nt, Artificial Sequence
  Description of Artificial Sequence: Synthetic oligonucleotide
ggcgcgucugagacaaagc

SEQ ID NO: 524572 - RNA, 19 nt, Artificial Sequence
  Description of Artificial Sequence: Synthetic oligonucleotide
ccucgaagaacaugccaga

SEQ ID NO: 524573 - RNA, 19 nt, Artificial Sequence
  Description of Artificial Sequence: Synthetic oligonucleotide
gcgcgucugagacaaagcu

SEQ ID NO: 524574 - RNA, 19 nt, Artificial Sequence
  Description of Artificial Sequence: Synthetic oligonucleotide
ccucgcauguaaaacauuu

SEQ ID NO: 524575 - RNA, 19 nt, Artificial Sequence
  Description of Artificial Sequence: Synthetic oligonucleotide
ggugaacuuuugaguuccc

SEQ ID NO: 524576 - RNA, 19 nt, Artificial Sequence
  Description of Artificial Sequence: Synthetic oligonucleotide
cucaggcgcgucugagaca

SEQ ID NO: 524577 - RNA, 19 nt, Artificial Sequence
  Description of Artificial Sequence: Synthetic oligonucleotide
cuccuguuacaacaucaau

SEQ ID NO: 524578 - RNA, 19 nt, Artificial Sequence
  Description of Artificial Sequence: Synthetic oligonucleotide
cgcaugauuagucuugacu

SEQ ID NO: 524579 - RNA, 19 nt, Artificial Sequence
  Description of Artificial Sequence: Synthetic oligonucleotide
cgcauguaaaacauuuacu

SEQ ID NO: 524580 - RNA, 19 nt, Artificial Sequence
  Description of Artificial Sequence: Synthetic oligonucleotide
uaccuugguuacgcaugau

SEQ ID NO: 524581 - RNA, 19 nt, Artificial Sequence
  Description of Artificial Sequence: Synthetic oligonucleotide
gcgcuuucagcugacacgu

SEQ ID NO: 524582 - RNA, 19 nt, Artificial Sequence
  Description of Artificial Sequence: Synthetic oligonucleotide
gcagaauagcaggucuuaa

SEQ ID NO: 524583 - RNA, 19 nt, Artificial Sequence
  Description of Artificial Sequence: Synthetic oligonucleotide
guggccgucuucuuuccuu

SEQ ID NO: 524584 - RNA, 19 nt, Artificial Sequence
  Description of Artificial Sequence: Synthetic oligonucleotide
guguagcaucuucucaguu

SEQ ID NO: 524585 - RNA, 19 nt, Artificial Sequence
  Description of Artificial Sequence: Synthetic oligonucleotide
ggucucacaggaccuugcu

SEQ ID NO: 524586 - RNA, 19 nt, Artificial Sequence
  Description of Artificial Sequence: Synthetic oligonucleotide
guauugcagcauacagaua

SEQ ID NO: 524587 - RNA, 19 nt, Artificial Sequence
  Description of Artificial Sequence: Synthetic oligonucleotide
aggcuucgaagggcaacaa

SEQ ID NO: 524588 - RNA, 19 nt, Artificial Sequence
  Description of Artificial Sequence: Synthetic oligonucleotide
auccugcaguaaauauuua

SEQ ID NO: 524589 - RNA, 19 nt, Artificial Sequence
  Description of Artificial Sequence: Synthetic oligonucleotide
gcuugcuaugucauucagu

SEQ ID NO: 524590 - RNA, 19 nt, Artificial Sequence
  Description of Artificial Sequence: Synthetic oligonucleotide
cagucgcaguuauccgcaa

SEQ ID NO: 524591 - RNA, 19 nt, Artificial Sequence
  Description of Artificial Sequence: Synthetic oligonucleotide
gguugagcaaugacauauu

SEQ ID NO: 524592 - RNA, 19 nt, Artificial Sequence
  Description of Artificial Sequence: Synthetic oligonucleotide
gccucagacuaccuugguu

SEQ ID NO: 524593 - RNA, 19 nt, Artificial Sequence
  Description of Artificial Sequence: Synthetic oligonucleotide
gcauuuugucuuagccagu

SEQ ID NO: 524594 - RNA, 19 nt, Artificial Sequence
  Description of Artificial Sequence: Synthetic oligonucleotide
cuucggcaucaggauauuu

SEQ ID NO: 524595 - RNA, 19 nt, Artificial Sequence
  Description of Artificial Sequence: Synthetic oligonucleotide
cauuggcacuagccugaau

SEQ ID NO: 524596 - RNA, 19 nt, Artificial Sequence
  Description of Artificial Sequence: Synthetic oligonucleotide
ggggaaucacuagggcauu

SEQ ID NO: 524597 - RNA, 19 nt, Artificial Sequence
  Description of Artificial Sequence: Synthetic oligonucleotide
caggcgcgucugagacaaa

SEQ ID NO: 524598 - RNA, 19 nt, Artificial Sequence
  Description of Artificial Sequence: Synthetic oligonucleotide
cgcagaucucgccucgcau

SEQ ID NO: 524599 - RNA, 19 nt, Artificial Sequence
  Description of Artificial Sequence: Synthetic oligonucleotide
gcuucggcaucaggauauu

SEQ ID NO: 524600 - RNA, 19 nt, Artificial Sequence
  Description of Artificial Sequence: Synthetic oligonucleotide
cgugacagacgaagaccuu

SEQ ID NO: 524601 - RNA, 19 nt, Artificial Sequence
  Description of Artificial Sequence: Synthetic oligonucleotide
uuuaucaagagucacaggg

SEQ ID NO: 524602 - RNA, 19 nt, Artificial Sequence
  Description of Artificial Sequence: Synthetic oligonucleotide
aagcaauucuaccaggugc

SEQ ID NO: 524603 - RNA, 19 nt, Artificial Sequence
  Description of Artificial Sequence: Synthetic oligonucleotide
acugcuaaggaacugacgg

SEQ ID NO: 524604 - RNA, 19 nt, Artificial Sequence
  Description of Artificial Sequence: Synthetic oligonucleotide
ugagcaaacagcauggccu

SEQ ID NO: 524605 - RNA, 19 nt, Artificial Sequence
  Description of Artificial Sequence: Synthetic oligonucleotide
gacacuccgaucuagacgc

SEQ ID NO: 524606 - RNA, 19 nt, Artificial Sequence
  Description of Artificial Sequence: Synthetic oligonucleotide
uccccuauagcacugaggc

SEQ ID NO: 524607 - RNA, 19 nt, Artificial Sequence
  Description of Artificial Sequence: Synthetic oligonucleotide
agucacauuucacaugagc

SEQ ID NO: 524608 - RNA, 19 nt, Artificial Sequence
  Description of Artificial Sequence: Synthetic oligonucleotide
aaguuuugcagcugcucgc

SEQ ID NO: 524609 - RNA, 19 nt, Artificial Sequence
  Description of Artificial Sequence: Synthetic oligonucleotide
agugucaacagacaggcca

SEQ ID NO: 524610 - RNA, 19 nt, Artificial Sequence
  Description of Artificial Sequence: Synthetic oligonucleotide
ugaaccuugccauauugag

SEQ ID NO: 524611 - RNA, 19 nt, Artificial Sequence
  Description of Artificial Sequence: Synthetic oligonucleotide
agucaagccauccucauug

SEQ ID NO: 524612 - RNA, 19 nt, Artificial Sequence
  Description of Artificial Sequence: Synthetic oligonucleotide
ugugcuugaguucuagcag

SEQ ID NO: 524613 - RNA, 19 nt, Artificial Sequence
  Description of Artificial Sequence: Synthetic oligonucleotide
agucguuucgggcagcagc

SEQ ID NO: 524614 - RNA, 19 nt, Artificial Sequence
  Description of Artificial Sequence: Synthetic oligonucleotide
accucaacugcucagcugg

SEQ ID NO: 524615 - RNA, 19 nt, Artificial Sequence
  Description of Artificial Sequence: Synthetic oligonucleotide
gaaaugaggaguucuacca

SEQ ID NO: 524616 - RNA, 19 nt, Artificial Sequence
  Description of Artificial Sequence: Synthetic oligonucleotide
auuagcagcggcgaugugc

SEQ ID NO: 524617 - RNA, 19 nt, Artificial Sequence
  Description of Artificial Sequence: Synthetic oligonucleotide
ugaaaugaggaguucuacc

SEQ ID NO: 524618 - RNA, 19 nt, Artificial Sequence
  Description of Artificial Sequence: Synthetic oligonucleotide
uugaguucuagcaguuugg

SEQ ID NO: 524619 - RNA, 19 nt, Artificial Sequence
  Description of Artificial Sequence: Synthetic oligonucleotide
ugcgauacagguuggugcg

SEQ ID NO: 524620 - RNA, 19 nt, Artificial Sequence
  Description of Artificial Sequence: Synthetic oligonucleotide
aaugaggaguucuaccaga

SEQ ID NO: 524621 - RNA, 19 nt, Artificial Sequence
  Description of Artificial Sequence: Synthetic oligonucleotide
aaccccacugcuaaggaac

SEQ ID NO: 524622 - RNA, 19 nt, Artificial Sequence
  Description of Artificial Sequence: Synthetic oligonucleotide
uguccagcacucacuaucg

SEQ ID NO: 524623 - RNA, 19 nt, Artificial Sequence
  Description of Artificial Sequence: Synthetic oligonucleotide
aucaguauugacugccagg

SEQ ID NO: 524624 - RNA, 19 nt, Artificial Sequence
  Description of Artificial Sequence: Synthetic oligonucleotide
uuaguuggcaaacagccuu

SEQ ID NO: 524625 - RNA, 19 nt, Artificial Sequence
  Description of Artificial Sequence: Synthetic oligonucleotide
caaacuaugaccaggccca

SEQ ID NO: 524626 - RNA, 19 nt, Artificial Sequence
  Description of Artificial Sequence: Synthetic oligonucleotide
agacacuccgaucuagacg

SEQ ID NO: 524627 - RNA, 19 nt, Artificial Sequence
  Description of Artificial Sequence: Synthetic oligonucleotide
uucagaucagccccauggg

SEQ ID NO: 524628 - RNA, 19 nt, Artificial Sequence
  Description of Artificial Sequence: Synthetic oligonucleotide
uauuggcuccccuauagca

SEQ ID NO: 524629 - RNA, 19 nt, Artificial Sequence
  Description of Artificial Sequence: Synthetic oligonucleotide
uugcgauacagguuggugc

SEQ ID NO: 524630 - RNA, 19 nt, Artificial Sequence
  Description of Artificial Sequence: Synthetic oligonucleotide
acggacuuccuccaagucg

SEQ ID NO: 524631 - RNA, 19 nt, Artificial Sequence
  Description of Artificial Sequence: Synthetic oligonucleotide
uuaucaagagucacagggu

SEQ ID NO: 524632 - RNA, 19 nt, Artificial Sequence
  Description of Artificial Sequence: Synthetic oligonucleotide
uuagcagcggcgaugugca

SEQ ID NO: 524633 - RNA, 19 nt, Artificial Sequence
  Description of Artificial Sequence: Synthetic oligonucleotide
cuugaguucuagcaguuug

SEQ ID NO: 524634 - RNA, 19 nt, Artificial Sequence
  Description of Artificial Sequence: Synthetic oligonucleotide
acuugguguccucuguccc

SEQ ID NO: 524635 - RNA, 19 nt, Artificial Sequence
  Description of Artificial Sequence: Synthetic oligonucleotide
uggaaguggguacagggcu

SEQ ID NO: 524636 - RNA, 19 nt, Artificial Sequence
  Description of Artificial Sequence: Synthetic oligonucleotide
auggucgcucccuauggcc

SEQ ID NO: 524637 - RNA, 19 nt, Artificial Sequence
  Description of Artificial Sequence: Synthetic oligonucleotide
cacaggacucaacugauag

SEQ ID NO: 524638 - RNA, 19 nt, Artificial Sequence
  Description of Artificial Sequence: Synthetic oligonucleotide
uuaccugcugggcacgccg

SEQ ID NO: 524639 - RNA, 19 nt, Artificial Sequence
  Description of Artificial Sequence: Synthetic oligonucleotide
acuaugaccaggcccagcu

SEQ ID NO: 524640 - RNA, 19 nt, Artificial Sequence
  Description of Artificial Sequence: Synthetic oligonucleotide
ucacauuucacaugagcaa

SEQ ID NO: 524641 - RNA, 19 nt, Artificial Sequence
  Description of Artificial Sequence: Synthetic oligonucleotide
gcuggcaugggauugaacc

SEQ ID NO: 524642 - RNA, 19 nt, Artificial Sequence
  Description of Artificial Sequence: Synthetic oligonucleotide
cacaucuuuaccugcuggg

SEQ ID NO: 524643 - RNA, 19 nt, Artificial Sequence
  Description of Artificial Sequence: Synthetic oligonucleotide
aacugauaggagacacucc

SEQ ID NO: 524644 - RNA, 19 nt, Artificial Sequence
  Description of Artificial Sequence: Synthetic oligonucleotide
gauaccaugauuggccaug

SEQ ID NO: 524645 - RNA, 19 nt, Artificial Sequence
  Description of Artificial Sequence: Synthetic oligonucleotide
cuccuugcgauacagguug

SEQ ID NO: 524646 - RNA, 19 nt, Artificial Sequence
  Description of Artificial Sequence: Synthetic oligonucleotide
uaguccaucccugagcaag

SEQ ID NO: 524647 - RNA, 19 nt, Artificial Sequence
  Description of Artificial Sequence: Synthetic oligonucleotide
aucgcgagcauugacauca

SEQ ID NO: 524648 - RNA, 19 nt, Artificial Sequence
  Description of Artificial Sequence: Synthetic oligonucleotide
gaaccuugccauauugagg

SEQ ID NO: 524649 - RNA, 19 nt, Artificial Sequence
  Description of Artificial Sequence: Synthetic oligonucleotide
ugggugauaccaugauugg

SEQ ID NO: 524650 - RNA, 19 nt, Artificial Sequence
  Description of Artificial Sequence: Synthetic oligonucleotide
uugaaccuugccauauuga

SEQ ID NO: 524651 - RNA, 19 nt, Artificial Sequence
  Description of Artificial Sequence: Synthetic oligonucleotide
agacgcuuggaguacaggu

SEQ ID NO: 524652 - RNA, 19 nt, Artificial Sequence
  Description of Artificial Sequence: Synthetic oligonucleotide
cuugccauauugaggaguc

SEQ ID NO: 524653 - RNA, 19 nt, Artificial Sequence
  Description of Artificial Sequence: Synthetic oligonucleotide
gaacccauuagcagcggcg

SEQ ID NO: 524654 - RNA, 19 nt, Artificial Sequence
  Description of Artificial Sequence: Synthetic oligonucleotide
aaacagccuuuaucaagag

SEQ ID NO: 524655 - RNA, 19 nt, Artificial Sequence
  Description of Artificial Sequence: Synthetic oligonucleotide
acuugauguccgccggugc

SEQ ID NO: 524656 - RNA, 19 nt, Artificial Sequence
  Description of Artificial Sequence: Synthetic oligonucleotide
acugaacccauuagcagcg

SEQ ID NO: 524657 - RNA, 19 nt, Artificial Sequence
  Description of Artificial Sequence: Synthetic oligonucleotide
gacucaacugauaggagac

SEQ ID NO: 524658 - RNA, 19 nt, Artificial Sequence
  Description of Artificial Sequence: Synthetic oligonucleotide
ucccugacaaggcugagau

SEQ ID NO: 524659 - RNA, 19 nt, Artificial Sequence
  Description of Artificial Sequence: Synthetic oligonucleotide
ugccguuuaaguucugcca

SEQ ID NO: 524660 - RNA, 19 nt, Artificial Sequence
  Description of Artificial Sequence: Synthetic oligonucleotide
uccaagucguuucgggcag

SEQ ID NO: 524661 - RNA, 19 nt, Artificial Sequence
  Description of Artificial Sequence: Synthetic oligonucleotide
cuucccaagacuugguguc

SEQ ID NO: 524662 - RNA, 19 nt, Artificial Sequence
  Description of Artificial Sequence: Synthetic oligonucleotide
gcuggaaguggguacaggg

SEQ ID NO: 524663 - RNA, 19 nt, Artificial Sequence
  Description of Artificial Sequence: Synthetic oligonucleotide
gaggucucagugucaacag

SEQ ID NO: 524664 - RNA, 19 nt, Artificial Sequence
  Description of Artificial Sequence: Synthetic oligonucleotide
ucaacugauaggagacacu

SEQ ID NO: 524665 - RNA, 19 nt, Artificial Sequence
  Description of Artificial Sequence: Synthetic oligonucleotide
guuggugcgaugugucagg

SEQ ID NO: 524666 - RNA, 19 nt, Artificial Sequence
  Description of Artificial Sequence: Synthetic oligonucleotide
gacuugguguccucugucc

SEQ ID NO: 524667 - RNA, 19 nt, Artificial Sequence
  Description of Artificial Sequence: Synthetic oligonucleotide
ugguccuuagcgcucgggc

SEQ ID NO: 524668 - RNA, 19 nt, Artificial Sequence
  Description of Artificial Sequence: Synthetic oligonucleotide
ggagucacauuucacauga

SEQ ID NO: 524669 - RNA, 19 nt, Artificial Sequence
  Description of Artificial Sequence: Synthetic oligonucleotide
gaucuagacgcuuggagua

SEQ ID NO: 524670 - RNA, 19 nt, Artificial Sequence
  Description of Artificial Sequence: Synthetic oligonucleotide
cucgaggcaauccaguguc

SEQ ID NO: 524671 - RNA, 19 nt, Artificial Sequence
  Description of Artificial Sequence: Synthetic oligonucleotide
ugaguucuagcaguuuggc

SEQ ID NO: 524672 - RNA, 19 nt, Artificial Sequence
  Description of Artificial Sequence: Synthetic oligonucleotide
cauaguccaucccugagca

SEQ ID NO: 524673 - RNA, 19 nt, Artificial Sequence
  Description of Artificial Sequence: Synthetic oligonucleotide
ucaagccauccucauuggc

SEQ ID NO: 524674 - RNA, 19 nt, Artificial Sequence
  Description of Artificial Sequence: Synthetic oligonucleotide
uauugaggagucacauuuc

SEQ ID NO: 524675 - RNA, 19 nt, Artificial Sequence
  Description of Artificial Sequence: Synthetic oligonucleotide
ccaaacuaugaccaggccc

SEQ ID NO: 524676 - RNA, 19 nt, Artificial Sequence
  Description of Artificial Sequence: Synthetic oligonucleotide
gaugcagauggccacaggu

SEQ ID NO: 524677 - RNA, 19 nt, Artificial Sequence
  Description of Artificial Sequence: Synthetic oligonucleotide
aacuaugaccaggcccagc

SEQ ID NO: 524678 - RNA, 19 nt, Artificial Sequence
  Description of Artificial Sequence: Synthetic oligonucleotide
caugggauugaaccuugcc

SEQ ID NO: 524679 - RNA, 19 nt, Artificial Sequence
  Description of Artificial Sequence: Synthetic oligonucleotide
ugaacccauuagcagcggc

SEQ ID NO: 524680 - RNA, 19 nt, Artificial Sequence
  Description of Artificial Sequence: Synthetic oligonucleotide
ucucgaggcaauccagugu

SEQ ID NO: 524681 - RNA, 19 nt, Artificial Sequence
  Description of Artificial Sequence: Synthetic oligonucleotide
uccauggucgcucccuaug

SEQ ID NO: 524682 - RNA, 19 nt, Artificial Sequence
  Description of Artificial Sequence: Synthetic oligonucleotide
agugcagucaagccauccu

SEQ ID NO: 524683 - RNA, 19 nt, Artificial Sequence
  Description of Artificial Sequence: Synthetic oligonucleotide
agcacucacuaucgcgagc

SEQ ID NO: 524684 - RNA, 19 nt, Artificial Sequence
  Description of Artificial Sequence: Synthetic oligonucleotide
ggagauuugcaccacguga

SEQ ID NO: 524685 - RNA, 19 nt, Artificial Sequence
  Description of Artificial Sequence: Synthetic oligonucleotide
acuaucgcgagcauugaca

SEQ ID NO: 524686 - RNA, 19 nt, Artificial Sequence
  Description of Artificial Sequence: Synthetic oligonucleotide
uuuuggagggccaggccaa

SEQ ID NO: 524687 - RNA, 19 nt, Artificial Sequence
  Description of Artificial Sequence: Synthetic oligonucleotide
uugaggagucacauuucac

SEQ ID NO: 524688 - RNA, 19 nt, Artificial Sequence
  Description of Artificial Sequence: Synthetic oligonucleotide
ucuuguauuggcuccccua

SEQ ID NO: 524689 - RNA, 19 nt, Artificial Sequence
  Description of Artificial Sequence: Synthetic oligonucleotide
ugauuggggcaccacaauu

SEQ ID NO: 524690 - RNA, 19 nt, Artificial Sequence
  Description of Artificial Sequence: Synthetic oligonucleotide
uggucgcucccuauggccc

SEQ ID NO: 524691 - RNA, 19 nt, Artificial Sequence
  Description of Artificial Sequence: Synthetic oligonucleotide
gaggucauucagcaugcac

SEQ ID NO: 524692 - RNA, 19 nt, Artificial Sequence
  Description of Artificial Sequence: Synthetic oligonucleotide
agccuuuaucaagagucac

SEQ ID NO: 524693 - RNA, 19 nt, Artificial Sequence
  Description of Artificial Sequence: Synthetic oligonucleotide
uccauucagaucagcccca

SEQ ID NO: 524694 - RNA, 19 nt, Artificial Sequence
  Description of Artificial Sequence: Synthetic oligonucleotide
accucacugaacccauuag

SEQ ID NO: 524695 - RNA, 19 nt, Artificial Sequence
  Description of Artificial Sequence: Synthetic oligonucleotide
guuggggcuaaccccacug

SEQ ID NO: 524696 - RNA, 19 nt, Artificial Sequence
  Description of Artificial Sequence: Synthetic oligonucleotide
uguccgccggugcagcagg

SEQ ID NO: 524697 - RNA, 19 nt, Artificial Sequence
  Description of Artificial Sequence: Synthetic oligonucleotide
agcaauucuaccaggugca

SEQ ID NO: 524698 - RNA, 19 nt, Artificial Sequence
  Description of Artificial Sequence: Synthetic oligonucleotide
cuuccgaggcuuuaggcca

SEQ ID NO: 524699 - RNA, 19 nt, Artificial Sequence
  Description of Artificial Sequence: Synthetic oligonucleotide
cuaccagaugcagauggcc

SEQ ID NO: 524700 - RNA, 19 nt, Artificial Sequence
  Description of Artificial Sequence: Synthetic oligonucleotide
aggagauuugcaccacgug

SEQ ID NO: 524701 - RNA, 19 nt, Artificial Sequence
  Description of Artificial Sequence: Synthetic oligonucleotide
gagauuugcaccacgugaa

SEQ ID NO: 524702 - RNA, 19 nt, Artificial Sequence
  Description of Artificial Sequence: Synthetic oligonucleotide
caggguagccaccucacug

SEQ ID NO: 524703 - RNA, 19 nt, Artificial Sequence
  Description of Artificial Sequence: Synthetic oligonucleotide
gucucaccaccuuuccacg

SEQ ID NO: 524704 - RNA, 19 nt, Artificial Sequence
  Description of Artificial Sequence: Synthetic oligonucleotide
ugacugcugccacacgaug

SEQ ID NO: 524705 - RNA, 19 nt, Artificial Sequence
  Description of Artificial Sequence: Synthetic oligonucleotide
uccacaggacucaacugau

SEQ ID NO: 524706 - RNA, 19 nt, Artificial Sequence
  Description of Artificial Sequence: Synthetic oligonucleotide
gccguuuaaguucugccag

SEQ ID NO: 524707 - RNA, 19 nt, Artificial Sequence
  Description of Artificial Sequence: Synthetic oligonucleotide
aggggcauuguucuccaca

SEQ ID NO: 524708 - RNA, 19 nt, Artificial Sequence
  Description of Artificial Sequence: Synthetic oligonucleotide
ggugcgaugugucaggcuc

SEQ ID NO: 524709 - RNA, 19 nt, Artificial Sequence
  Description of Artificial Sequence: Synthetic oligonucleotide
guggaugucugcccacagg

SEQ ID NO: 524710 - RNA, 19 nt, Artificial Sequence
  Description of Artificial Sequence: Synthetic oligonucleotide
ugacggacuuccuccaagu

SEQ ID NO: 524711 - RNA, 19 nt, Artificial Sequence
  Description of Artificial Sequence: Synthetic oligonucleotide
uacagguuggugcgaugug

SEQ ID NO: 524712 - RNA, 19 nt, Artificial Sequence
  Description of Artificial Sequence: Synthetic oligonucleotide
caagacuugguguccucug

SEQ ID NO: 524713 - RNA, 19 nt, Artificial Sequence
  Description of Artificial Sequence: Synthetic oligonucleotide
guguggugugccuuguccc

SEQ ID NO: 524714 - RNA, 19 nt, Artificial Sequence
  Description of Artificial Sequence: Synthetic oligonucleotide
auaccaugauuggccaugg

SEQ ID NO: 524715 - RNA, 19 nt, Artificial Sequence
  Description of Artificial Sequence: Synthetic oligonucleotide
aucuagacgcuuggaguac

SEQ ID NO: 524716 - RNA, 19 nt, Artificial Sequence
  Description of Artificial Sequence: Synthetic oligonucleotide
guauuggcuccccuauagc

SEQ ID NO: 524717 - RNA, 19 nt, Artificial Sequence
  Description of Artificial Sequence: Synthetic oligonucleotide
uuagcgcucgggcuggcuc

SEQ ID NO: 524718 - RNA, 19 nt, Artificial Sequence
  Description of Artificial Sequence: Synthetic oligonucleotide
cuugcgauacagguuggug

SEQ ID NO: 524719 - RNA, 19 nt, Artificial Sequence
  Description of Artificial Sequence: Synthetic oligonucleotide
uggggcuaaccccacugcu

SEQ ID NO: 524720 - RNA, 19 nt, Artificial Sequence
  Description of Artificial Sequence: Synthetic oligonucleotide
gugagcuugagcaggggug

SEQ ID NO: 524721 - RNA, 19 nt, Artificial Sequence
  Description of Artificial Sequence: Synthetic oligonucleotide
guagggagggcaguguggc

SEQ ID NO: 524722 - RNA, 19 nt, Artificial Sequence
  Description of Artificial Sequence: Synthetic oligonucleotide
augugucaggcucacucgu

SEQ ID NO: 524723 - RNA, 19 nt, Artificial Sequence
  Description of Artificial Sequence: Synthetic oligonucleotide
ccuacuuggccauugugug

SEQ ID NO: 524724 - RNA, 19 nt, Artificial Sequence
  Description of Artificial Sequence: Synthetic oligonucleotide
ggucuggucaccucagagc

SEQ ID NO: 524725 - RNA, 19 nt, Artificial Sequence
  Description of Artificial Sequence: Synthetic oligonucleotide
gucucgaggcaauccagug

SEQ ID NO: 524726 - RNA, 19 nt, Artificial Sequence
  Description of Artificial Sequence: Synthetic oligonucleotide
gugucaacagacaggccag

SEQ ID NO: 524727 - RNA, 19 nt, Artificial Sequence
  Description of Artificial Sequence: Synthetic oligonucleotide
acgugaaaugaggaguucu

SEQ ID NO: 524728 - RNA, 19 nt, Artificial Sequence
  Description of Artificial Sequence: Synthetic oligonucleotide
ggacucaacugauaggaga

SEQ ID NO: 524729 - RNA, 19 nt, Artificial Sequence
  Description of Artificial Sequence: Synthetic oligonucleotide
caugcuccuugcgauacag

SEQ ID NO: 524730 - RNA, 19 nt, Artificial Sequence
  Description of Artificial Sequence: Synthetic oligonucleotide
cuccaagucguuucgggca

SEQ ID NO: 524731 - RNA, 19 nt, Artificial Sequence
  Description of Artificial Sequence: Synthetic oligonucleotide
gucguuucgggcagcagcc

SEQ ID NO: 524732 - RNA, 19 nt, Artificial Sequence
  Description of Artificial Sequence: Synthetic oligonucleotide
ggcucuuaccuccucauca

SEQ ID NO: 524733 - RNA, 19 nt, Artificial Sequence
  Description of Artificial Sequence: Synthetic oligonucleotide
caaugcagcacuggugcag

SEQ ID NO: 524734 - RNA, 19 nt, Artificial Sequence
  Description of Artificial Sequence: Synthetic oligonucleotide
agguagggagggcagugug

SEQ ID NO: 524735 - RNA, 19 nt, Artificial Sequence
  Description of Artificial Sequence: Synthetic oligonucleotide
uagacgcuuggaguacagg

SEQ ID NO: 524736 - RNA, 19 nt, Artificial Sequence
  Description of Artificial Sequence: Synthetic oligonucleotide
guccuuagcgcucgggcug

SEQ ID NO: 524737 - RNA, 19 nt, Artificial Sequence
  Description of Artificial Sequence: Synthetic oligonucleotide
cugacggacuuccuccaag

SEQ ID NO: 524738 - RNA, 19 nt, Artificial Sequence
  Description of Artificial Sequence: Synthetic oligonucleotide
ugugucaggcucacucguc

SEQ ID NO: 524739 - RNA, 19 nt, Artificial Sequence
  Description of Artificial Sequence: Synthetic oligonucleotide
cucuuaccuccucaucacc

SEQ ID NO: 524740 - RNA, 19 nt, Artificial Sequence
  Description of Artificial Sequence: Synthetic oligonucleotide
cuagacgcuuggaguacag

SEQ ID NO: 524741 - RNA, 19 nt, Artificial Sequence
  Description of Artificial Sequence: Synthetic oligonucleotide
gcuaaccccacugcuaagg

SEQ ID NO: 524742 - RNA, 19 nt, Artificial Sequence
  Description of Artificial Sequence: Synthetic oligonucleotide
aaacuaugaccaggcccag

SEQ ID NO: 524743 - RNA, 19 nt, Artificial Sequence
  Description of Artificial Sequence: Synthetic oligonucleotide
cagucucgaggcaauccag

SEQ ID NO: 524744 - RNA, 19 nt, Artificial Sequence
  Description of Artificial Sequence: Synthetic oligonucleotide
caucaccacacaagucgag

SEQ ID NO: 524745 - RNA, 19 nt, Artificial Sequence
  Description of Artificial Sequence: Synthetic oligonucleotide
ucuagacgcuuggaguaca

SEQ ID NO: 524746 - RNA, 19 nt, Artificial Sequence
  Description of Artificial Sequence: Synthetic oligonucleotide
ccucacugaacccauuagc

SEQ ID NO: 524747 - RNA, 19 nt, Artificial Sequence
  Description of Artificial Sequence: Synthetic oligonucleotide
ugcucgcugccguuuaagu

SEQ ID NO: 524748 - RNA, 19 nt, Artificial Sequence
  Description of Artificial Sequence: Synthetic oligonucleotide
aguuuugcagcugcucgcu

SEQ ID NO: 524749 - RNA, 19 nt, Artificial Sequence
  Description of Artificial Sequence: Synthetic oligonucleotide
cauggucgcucccuauggc

SEQ ID NO: 524750 - RNA, 19 nt, Artificial Sequence
  Description of Artificial Sequence: Synthetic oligonucleotide
cuccgaucuagacgcuugg

SEQ ID NO: 524751 - RNA, 19 nt, Artificial Sequence
  Description of Artificial Sequence: Synthetic oligonucleotide
gggauuuuccauucagauc

SEQ ID NO: 524752 - RNA, 19 nt, Artificial Sequence
  Description of Artificial Sequence: Synthetic oligonucleotide
cuugauguccgccggugca

SEQ ID NO: 524753 - RNA, 19 nt, Artificial Sequence
  Description of Artificial Sequence: Synthetic oligonucleotide
accuuuccacggcugccgg

SEQ ID NO: 524754 - RNA, 19 nt, Artificial Sequence
  Description of Artificial Sequence: Synthetic oligonucleotide
agauuugcaccacgugaaa

SEQ ID NO: 524755 - RNA, 19 nt, Artificial Sequence
  Description of Artificial Sequence: Synthetic oligonucleotide
aagucgaggggcgucucgu

SEQ ID NO: 524756 - RNA, 19 nt, Artificial Sequence
  Description of Artificial Sequence: Synthetic oligonucleotide
cauuguucuccacaggacu

SEQ ID NO: 524757 - RNA, 19 nt, Artificial Sequence
  Description of Artificial Sequence: Synthetic oligonucleotide
ggcacuugauguccgccgg

SEQ ID NO: 524758 - RNA, 19 nt, Artificial Sequence
  Description of Artificial Sequence: Synthetic oligonucleotide
uccuuagcgcucgggcugg

SEQ ID NO: 524759 - RNA, 19 nt, Artificial Sequence
  Description of Artificial Sequence: Synthetic oligonucleotide
agcagucuguggccugagg

SEQ ID NO: 524760 - RNA, 19 nt, Artificial Sequence
  Description of Artificial Sequence: Synthetic oligonucleotide
cagguuggugcgauguguc

SEQ ID NO: 524761 - RNA, 19 nt, Artificial Sequence
  Description of Artificial Sequence: Synthetic oligonucleotide
ucgaggggcgucucgucca

SEQ ID NO: 524762 - RNA, 19 nt, Artificial Sequence
  Description of Artificial Sequence: Synthetic oligonucleotide
cuugggcaugcuccuugcg

SEQ ID NO: 524763 - RNA, 19 nt, Artificial Sequence
  Description of Artificial Sequence: Synthetic oligonucleotide
aggagacacuccgaucuag

SEQ ID NO: 524764 - RNA, 19 nt, Artificial Sequence
  Description of Artificial Sequence: Synthetic oligonucleotide
uuguauuggcuccccuaua

SEQ ID NO: 524765 - RNA, 19 nt, Artificial Sequence
  Description of Artificial Sequence: Synthetic oligonucleotide
ugccggcacuugauguccg

SEQ ID NO: 524766 - RNA, 19 nt, Artificial Sequence
  Description of Artificial Sequence: Synthetic oligonucleotide
aggucucagugucaacaga

SEQ ID NO: 524767 - RNA, 19 nt, Artificial Sequence
  Description of Artificial Sequence: Synthetic oligonucleotide
uagcgcucgggcuggcucc

SEQ ID NO: 524768 - RNA, 19 nt, Artificial Sequence
  Description of Artificial Sequence: Synthetic oligonucleotide
gugugccuugucccggacg

SEQ ID NO: 524769 - RNA, 19 nt, Artificial Sequence
  Description of Artificial Sequence: Synthetic oligonucleotide
ugauaccaugauuggccau

SEQ ID NO: 524770 - RNA, 19 nt, Artificial Sequence
  Description of Artificial Sequence: Synthetic oligonucleotide
gucgaggggcgucucgucc

SEQ ID NO: 524771 - RNA, 19 nt, Artificial Sequence
  Description of Artificial Sequence: Synthetic oligonucleotide
ugacugccaggagauuugc

SEQ ID NO: 524772 - RNA, 19 nt, Artificial Sequence
  Description of Artificial Sequence: Synthetic oligonucleotide
ucccaucaguauugacugc

SEQ ID NO: 524773 - RNA, 19 nt, Artificial Sequence
  Description of Artificial Sequence: Synthetic oligonucleotide
acacaagucgaggggcguc

SEQ ID NO: 524774 - RNA, 19 nt, Artificial Sequence
  Description of Artificial Sequence: Synthetic oligonucleotide
guuucgggcagcagccucc

SEQ ID NO: 524775 - RNA, 19 nt, Artificial Sequence
  Description of Artificial Sequence: Synthetic oligonucleotide
caguauugacugccaggag

SEQ ID NO: 524776 - RNA, 19 nt, Artificial Sequence
  Description of Artificial Sequence: Synthetic oligonucleotide
cacuaucgcgagcauugac

SEQ ID NO: 524777 - RNA, 19 nt, Artificial Sequence
  Description of Artificial Sequence: Synthetic oligonucleotide
cagcacucacuaucgcgag

SEQ ID NO: 524778 - RNA, 19 nt, Artificial Sequence
  Description of Artificial Sequence: Synthetic oligonucleotide
ccggacgagggcaucaggg

SEQ ID NO: 524779 - RNA, 19 nt, Artificial Sequence
  Description of Artificial Sequence: Synthetic oligonucleotide
ggccacaagcaauucuacc

SEQ ID NO: 524780 - RNA, 19 nt, Artificial Sequence
  Description of Artificial Sequence: Synthetic oligonucleotide
uuuaccugcugggcacgcc

SEQ ID NO: 524781 - RNA, 19 nt, Artificial Sequence
  Description of Artificial Sequence: Synthetic oligonucleotide
gguuggugcgaugugucag

SEQ ID NO: 524782 - RNA, 19 nt, Artificial Sequence
  Description of Artificial Sequence: Synthetic oligonucleotide
agguuggugcgauguguca

SEQ ID NO: 524783 - RNA, 19 nt, Artificial Sequence
  Description of Artificial Sequence: Synthetic oligonucleotide
ccccaaacuaugaccaggc

SEQ ID NO: 524784 - RNA, 19 nt, Artificial Sequence
  Description of Artificial Sequence: Synthetic oligonucleotide
guucuagcaguuuggcucu

SEQ ID NO: 524785 - RNA, 19 nt, Artificial Sequence
  Description of Artificial Sequence: Synthetic oligonucleotide
uuggugcgaugugucaggc

SEQ ID NO: 524786 - RNA, 19 nt, Artificial Sequence
  Description of Artificial Sequence: Synthetic oligonucleotide
gcucacucgucucaccacc

SEQ ID NO: 524787 - RNA, 19 nt, Artificial Sequence
  Description of Artificial Sequence: Synthetic oligonucleotide
acuccgaucuagacgcuug

SEQ ID NO: 524788 - RNA, 19 nt, Artificial Sequence
  Description of Artificial Sequence: Synthetic oligonucleotide
uauggcccuucuugccuug

SEQ ID NO: 524789 - RNA, 19 nt, Artificial Sequence
  Description of Artificial Sequence: Synthetic oligonucleotide
ccgaucuagacgcuuggag

SEQ ID NO: 524790 - RNA, 19 nt, Artificial Sequence
  Description of Artificial Sequence: Synthetic oligonucleotide
cccaucaguauugacugcc

SEQ ID NO: 524791 - RNA, 19 nt, Artificial Sequence
  Description of Artificial Sequence: Synthetic oligonucleotide
cagccuuuaucaagaguca

SEQ ID NO: 524792 - RNA, 19 nt, Artificial Sequence
  Description of Artificial Sequence: Synthetic oligonucleotide
gguagggagggcagugugg

SEQ ID NO: 524793 - RNA, 19 nt, Artificial Sequence
  Description of Artificial Sequence: Synthetic oligonucleotide
ugucaggcucacucgucuc

SEQ ID NO: 524794 - RNA, 19 nt, Artificial Sequence
  Description of Artificial Sequence: Synthetic oligonucleotide
caccucaacugcucagcug

SEQ ID NO: 524795 - RNA, 19 nt, Artificial Sequence
  Description of Artificial Sequence: Synthetic oligonucleotide
cuaaccccacugcuaagga

SEQ ID NO: 524796 - RNA, 19 nt, Artificial Sequence
  Description of Artificial Sequence: Synthetic oligonucleotide
aagucguuucgggcagcag

SEQ ID NO: 524797 - RNA, 19 nt, Artificial Sequence
  Description of Artificial Sequence: Synthetic oligonucleotide
cucugcauaguccaucccu

SEQ ID NO: 524798 - RNA, 19 nt, Artificial Sequence
  Description of Artificial Sequence: Synthetic oligonucleotide
uuguguggucuggucaccu

SEQ ID NO: 524799 - RNA, 19 nt, Artificial Sequence
  Description of Artificial Sequence: Synthetic oligonucleotide
ucgaggcaauccagugucu

SEQ ID NO: 524800 - RNA, 19 nt, Artificial Sequence
  Description of Artificial Sequence: Synthetic oligonucleotide
uaggagacacuccgaucua

SEQ ID NO: 524801 - RNA, 19 nt, Artificial Sequence
  Description of Artificial Sequence: Synthetic oligonucleotide
uggcaugggauugaaccuu

SEQ ID NO: 524802 - RNA, 19 nt, Artificial Sequence
  Description of Artificial Sequence: Synthetic oligonucleotide
acucaacugauaggagaca

SEQ ID NO: 524803 - RNA, 19 nt, Artificial Sequence
  Description of Artificial Sequence: Synthetic oligonucleotide
uccgaucuagacgcuugga

SEQ ID NO: 524804 - RNA, 19 nt, Artificial Sequence
  Description of Artificial Sequence: Synthetic oligonucleotide
cugccggcacuugaugucc

SEQ ID NO: 524805 - RNA, 19 nt, Artificial Sequence
  Description of Artificial Sequence: Synthetic oligonucleotide
cgucucaccaccuuuccac

SEQ ID NO: 524806 - RNA, 19 nt, Artificial Sequence
  Description of Artificial Sequence: Synthetic oligonucleotide
aucaagagucacaggguaa

SEQ ID NO: 524807 - RNA, 19 nt, Artificial Sequence
  Description of Artificial Sequence: Synthetic oligonucleotide
cuaugaccaggcccagcug

SEQ ID NO: 524808 - RNA, 19 nt, Artificial Sequence
  Description of Artificial Sequence: Synthetic oligonucleotide
agucucgaggcaauccagu

SEQ ID NO: 524809 - RNA, 19 nt, Artificial Sequence
  Description of Artificial Sequence: Synthetic oligonucleotide
cagugucuguucauccuca

SEQ ID NO: 524810 - RNA, 19 nt, Artificial Sequence
  Description of Artificial Sequence: Synthetic oligonucleotide
ggagcucagcgucugucug

SEQ ID NO: 524811 - RNA, 19 nt, Artificial Sequence
  Description of Artificial Sequence: Synthetic oligonucleotide
cuuguauuggcuccccuau

SEQ ID NO: 524812 - RNA, 19 nt, Artificial Sequence
  Description of Artificial Sequence: Synthetic oligonucleotide
ccauggucgcucccuaugg

SEQ ID NO: 524813 - RNA, 19 nt, Artificial Sequence
  Description of Artificial Sequence: Synthetic oligonucleotide
ucacuaucgcgagcauuga

SEQ ID NO: 524814 - RNA, 19 nt, Artificial Sequence
  Description of Artificial Sequence: Synthetic oligonucleotide
guauugacugccaggagau

SEQ ID NO: 524815 - RNA, 19 nt, Artificial Sequence
  Description of Artificial Sequence: Synthetic oligonucleotide
gggcucuuguauuggcucc

SEQ ID NO: 524816 - RNA, 19 nt, Artificial Sequence
  Description of Artificial Sequence: Synthetic oligonucleotide
uaucgcgagcauugacauc

SEQ ID NO: 524817 - RNA, 19 nt, Artificial Sequence
  Description of Artificial Sequence: Synthetic oligonucleotide
gauuggggcaccacaauuu

SEQ ID NO: 524818 - RNA, 19 nt, Artificial Sequence
  Description of Artificial Sequence: Synthetic oligonucleotide
ccaguaggcugcagcaugc

SEQ ID NO: 524819 - RNA, 19 nt, Artificial Sequence
  Description of Artificial Sequence: Synthetic oligonucleotide
ucccaagacuugguguccu

SEQ ID NO: 524820 - RNA, 19 nt, Artificial Sequence
  Description of Artificial Sequence: Synthetic oligonucleotide
ggugguggaugucugccca

SEQ ID NO: 524821 - RNA, 19 nt, Artificial Sequence
  Description of Artificial Sequence: Synthetic oligonucleotide
cuuuccacggcugccggca

SEQ ID NO: 524822 - RNA, 19 nt, Artificial Sequence
  Description of Artificial Sequence: Synthetic oligonucleotide
ucgcgagcauugacaucag

SEQ ID NO: 524823 - RNA, 19 nt, Artificial Sequence
  Description of Artificial Sequence: Synthetic oligonucleotide
cuaucgcgagcauugacau

SEQ ID NO: 524824 - RNA, 19 nt, Artificial Sequence
  Description of Artificial Sequence: Synthetic oligonucleotide
cauucagaucagccccaug

SEQ ID NO: 524825 - RNA, 19 nt, Artificial Sequence
  Description of Artificial Sequence: Synthetic oligonucleotide
gccccaaacuaugaccagg

SEQ ID NO: 524826 - RNA, 19 nt, Artificial Sequence
  Description of Artificial Sequence: Synthetic oligonucleotide
gaggcaauccagugucugu

SEQ ID NO: 524827 - RNA, 19 nt, Artificial Sequence
  Description of Artificial Sequence: Synthetic oligonucleotide
gcagucucgaggcaaucca

SEQ ID NO: 524828 - RNA, 19 nt, Artificial Sequence
  Description of Artificial Sequence: Synthetic oligonucleotide
gggcgucucguccaccagg

SEQ ID NO: 524829 - RNA, 19 nt, Artificial Sequence
  Description of Artificial Sequence: Synthetic oligonucleotide
cuuuaccugcugggcacgc

SEQ ID NO: 524830 - RNA, 19 nt, Artificial Sequence
  Description of Artificial Sequence: Synthetic oligonucleotide
gggugauaccaugauuggc

SEQ ID NO: 524831 - RNA, 19 nt, Artificial Sequence
  Description of Artificial Sequence: Synthetic oligonucleotide
ccagcacucacuaucgcga

SEQ ID NO: 524832 - RNA, 19 nt, Artificial Sequence
  Description of Artificial Sequence: Synthetic oligonucleotide
ggcaucaggggcauuguuc

SEQ ID NO: 524833 - RNA, 19 nt, Artificial Sequence
  Description of Artificial Sequence: Synthetic oligonucleotide
aggcaauccagugucuguu

SEQ ID NO: 524834 - RNA, 19 nt, Artificial Sequence
  Description of Artificial Sequence: Synthetic oligonucleotide
gagcuugagcagggguggg

SEQ ID NO: 524835 - RNA, 19 nt, Artificial Sequence
  Description of Artificial Sequence: Synthetic oligonucleotide
gcaauccagugucuguuca

SEQ ID NO: 524836 - RNA, 19 nt, Artificial Sequence
  Description of Artificial Sequence: Synthetic oligonucleotide
caugauuggccauggcagu

SEQ ID NO: 524837 - RNA, 19 nt, Artificial Sequence
  Description of Artificial Sequence: Synthetic oligonucleotide
uugccauauugaggaguca

SEQ ID NO: 524838 - RNA, 19 nt, Artificial Sequence
  Description of Artificial Sequence: Synthetic oligonucleotide
ccaggagauuugcaccacg

SEQ ID NO: 524839 - RNA, 19 nt, Artificial Sequence
  Description of Artificial Sequence: Synthetic oligonucleotide
acugacggacuuccuccaa

SEQ ID NO: 524840 - RNA, 19 nt, Artificial Sequence
  Description of Artificial Sequence: Synthetic oligonucleotide
agcaacgcugggagggaag

SEQ ID NO: 524841 - RNA, 19 nt, Artificial Sequence
  Description of Artificial Sequence: Synthetic oligonucleotide
cuggcaugggauugaaccu

SEQ ID NO: 524842 - RNA, 19 nt, Artificial Sequence
  Description of Artificial Sequence: Synthetic oligonucleotide
ggcugauuggggcaccaca

SEQ ID NO: 524843 - RNA, 19 nt, Artificial Sequence
  Description of Artificial Sequence: Synthetic oligonucleotide
guccagcacucacuaucgc

SEQ ID NO: 524844 - RNA, 19 nt, Artificial Sequence
  Description of Artificial Sequence: Synthetic oligonucleotide
ccacacgauggccucuugg

SEQ ID NO: 524845 - RNA, 19 nt, Artificial Sequence
  Description of Artificial Sequence: Synthetic oligonucleotide
cugaacccauuagcagcgg

SEQ ID NO: 524846 - RNA, 19 nt, Artificial Sequence
  Description of Artificial Sequence: Synthetic oligonucleotide
uuccauggucgcucccuau

SEQ ID NO: 524847 - RNA, 19 nt, Artificial Sequence
  Description of Artificial Sequence: Synthetic oligonucleotide
gauguccgccggugcagca

SEQ ID NO: 524848 - RNA, 19 nt, Artificial Sequence
  Description of Artificial Sequence: Synthetic oligonucleotide
auaguccaucccugagcaa

SEQ ID NO: 524849 - RNA, 19 nt, Artificial Sequence
  Description of Artificial Sequence: Synthetic oligonucleotide
caggagauuugcaccacgu

SEQ ID NO: 524850 - RNA, 19 nt, Artificial Sequence
  Description of Artificial Sequence: Synthetic oligonucleotide
gccuuuaucaagagucaca

SEQ ID NO: 524851 - RNA, 19 nt, Artificial Sequence
  Description of Artificial Sequence: Synthetic oligonucleotide
cugccaguguguggugugc

SEQ ID NO: 524852 - RNA, 19 nt, Artificial Sequence
  Description of Artificial Sequence: Synthetic oligonucleotide
caguuguucugaagccaca

SEQ ID NO: 524853 - RNA, 19 nt, Artificial Sequence
  Description of Artificial Sequence: Synthetic oligonucleotide
agagcaacgcugggaggga

SEQ ID NO: 524854 - RNA, 19 nt, Artificial Sequence
  Description of Artificial Sequence: Synthetic oligonucleotide
gugucaggcucacucgucu

SEQ ID NO: 524855 - RNA, 19 nt, Artificial Sequence
  Description of Artificial Sequence: Synthetic oligonucleotide
caugguccuuagcgcucgg

SEQ ID NO: 524856 - RNA, 19 nt, Artificial Sequence
  Description of Artificial Sequence: Synthetic oligonucleotide
ucccggacgagggcaucag

SEQ ID NO: 524857 - RNA, 19 nt, Artificial Sequence
  Description of Artificial Sequence: Synthetic oligonucleotide
ggcccauagguacagcucu

SEQ ID NO: 524858 - RNA, 19 nt, Artificial Sequence
  Description of Artificial Sequence: Synthetic oligonucleotide
gcugccguuuaaguucugc

SEQ ID NO: 524859 - RNA, 19 nt, Artificial Sequence
  Description of Artificial Sequence: Synthetic oligonucleotide
caacgcugggagggaagag

SEQ ID NO: 524860 - RNA, 19 nt, Artificial Sequence
  Description of Artificial Sequence: Synthetic oligonucleotide
ggcaugcuccuugcgauac

SEQ ID NO: 524861 - RNA, 19 nt, Artificial Sequence
  Description of Artificial Sequence: Synthetic oligonucleotide
gggucgcugaaguuuugca

SEQ ID NO: 524862 - RNA, 19 nt, Artificial Sequence
  Description of Artificial Sequence: Synthetic oligonucleotide
gcugccggcacuugauguc

SEQ ID NO: 524863 - RNA, 19 nt, Artificial Sequence
  Description of Artificial Sequence: Synthetic oligonucleotide
cccaaacuaugaccaggcc

SEQ ID NO: 524864 - RNA, 19 nt, Artificial Sequence
  Description of Artificial Sequence: Synthetic oligonucleotide
caugggccacaagcaauuc

SEQ ID NO: 524865 - RNA, 19 nt, Artificial Sequence
  Description of Artificial Sequence: Synthetic oligonucleotide
gcugauuggggcaccacaa

SEQ ID NO: 524866 - RNA, 19 nt, Artificial Sequence
  Description of Artificial Sequence: Synthetic oligonucleotide
gggcacgccgcuucugggc

SEQ ID NO: 524867 - RNA, 19 nt, Artificial Sequence
  Description of Artificial Sequence: Synthetic oligonucleotide
cuggugcagugcagucaag

SEQ ID NO: 524868 - RNA, 19 nt, Artificial Sequence
  Description of Artificial Sequence: Synthetic oligonucleotide
ucguuucgggcagcagccu

SEQ ID NO: 524869 - RNA, 19 nt, Artificial Sequence
  Description of Artificial Sequence: Synthetic oligonucleotide
gguggguccccaguuguuc

SEQ ID NO: 524870 - RNA, 19 nt, Artificial Sequence
  Description of Artificial Sequence: Synthetic oligonucleotide
gcccuucaggggugggucg

SEQ ID NO: 524871 - RNA, 19 nt, Artificial Sequence
  Description of Artificial Sequence: Synthetic oligonucleotide
cggcacuugauguccgccg

SEQ ID NO: 524872 - RNA, 19 nt, Artificial Sequence
  Description of Artificial Sequence: Synthetic oligonucleotide
caagucguuucgggcagca

SEQ ID NO: 524873 - RNA, 19 nt, Artificial Sequence
  Description of Artificial Sequence: Synthetic oligonucleotide
gcuggugagcggugacugc

SEQ ID NO: 524874 - RNA, 19 nt, Artificial Sequence
  Description of Artificial Sequence: Synthetic oligonucleotide
cuuggaguacaggugcccu

SEQ ID NO: 524875 - RNA, 19 nt, Artificial Sequence
  Description of Artificial Sequence: Synthetic oligonucleotide
guggucuggucaccucaga

SEQ ID NO: 524876 - RNA, 19 nt, Artificial Sequence
  Description of Artificial Sequence: Synthetic oligonucleotide
guggguccccaguuguucu

SEQ ID NO: 524877 - RNA, 19 nt, Artificial Sequence
  Description of Artificial Sequence: Synthetic oligonucleotide
gcugcccuaaggggcagag

SEQ ID NO: 524878 - RNA, 19 nt, Artificial Sequence
  Description of Artificial Sequence: Synthetic oligonucleotide
cccuacuuggccauugugu

SEQ ID NO: 524879 - RNA, 19 nt, Artificial Sequence
  Description of Artificial Sequence: Synthetic oligonucleotide
ggcacgccgcuucugggca

SEQ ID NO: 524880 - RNA, 19 nt, Artificial Sequence
  Description of Artificial Sequence: Synthetic oligonucleotide
gcuugagcagggguggguc

SEQ ID NO: 524881 - RNA, 19 nt, Artificial Sequence
  Description of Artificial Sequence: Synthetic oligonucleotide
ugcagcagaguggccccau

SEQ ID NO: 524882 - RNA, 19 nt, Artificial Sequence
  Description of Artificial Sequence: Synthetic oligonucleotide
gggucaccaggccagagau

SEQ ID NO: 524883 - RNA, 19 nt, Artificial Sequence
  Description of Artificial Sequence: Synthetic oligonucleotide
cugcccuaaggggcagagc

SEQ ID NO: 524884 - RNA, 19 nt, Artificial Sequence
  Description of Artificial Sequence: Synthetic oligonucleotide
ugccacacgauggccucuu

SEQ ID NO: 524885 - RNA, 19 nt, Artificial Sequence
  Description of Artificial Sequence: Synthetic oligonucleotide
cccgcaggagugcaucuug

SEQ ID NO: 524886 - RNA, 19 nt, Artificial Sequence
  Description of Artificial Sequence: Synthetic oligonucleotide
gugcgaugugucaggcuca

SEQ ID NO: 524887 - RNA, 19 nt, Artificial Sequence
  Description of Artificial Sequence: Synthetic oligonucleotide
uccgccggugcagcaggga

SEQ ID NO: 524888 - RNA, 19 nt, Artificial Sequence
  Description of Artificial Sequence: Synthetic oligonucleotide
agggcugauuggggcacca

SEQ ID NO: 524889 - RNA, 19 nt, Artificial Sequence
  Description of Artificial Sequence: Synthetic oligonucleotide
caauccagugucuguucau

SEQ ID NO: 524890 - RNA, 19 nt, Artificial Sequence
  Description of Artificial Sequence: Synthetic oligonucleotide
cacggcugccggcacuuga

SEQ ID NO: 524891 - RNA, 19 nt, Artificial Sequence
  Description of Artificial Sequence: Synthetic oligonucleotide
uggcagucucgaggcaauc

SEQ ID NO: 524892 - RNA, 19 nt, Artificial Sequence
  Description of Artificial Sequence: Synthetic oligonucleotide
gcggugacugcugccacac

SEQ ID NO: 524893 - RNA, 19 nt, Artificial Sequence
  Description of Artificial Sequence: Synthetic oligonucleotide
ggcuggacuggcacccuug

SEQ ID NO: 524894 - RNA, 19 nt, Artificial Sequence
  Description of Artificial Sequence: Synthetic oligonucleotide
ugggcccgcaggagugcau

SEQ ID NO: 524895 - RNA, 19 nt, Artificial Sequence
  Description of Artificial Sequence: Synthetic oligonucleotide
acggcugccggcacuugau

SEQ ID NO: 524896 - RNA, 19 nt, Artificial Sequence
  Description of Artificial Sequence: Synthetic oligonucleotide
gguagccaccucacugaac

SEQ ID NO: 524897 - RNA, 19 nt, Artificial Sequence
  Description of Artificial Sequence: Synthetic oligonucleotide
cugauuggggcaccacaau

SEQ ID NO: 524898 - RNA, 19 nt, Artificial Sequence
  Description of Artificial Sequence: Synthetic oligonucleotide
gugccuugucccggacgag

SEQ ID NO: 524899 - RNA, 19 nt, Artificial Sequence
  Description of Artificial Sequence: Synthetic oligonucleotide
cacgccgcuucugggcaug

SEQ ID NO: 524900 - RNA, 19 nt, Artificial Sequence
  Description of Artificial Sequence: Synthetic oligonucleotide
ccgccggugcagcagggag

SEQ ID NO: 524901 - RNA, 19 nt, Artificial Sequence
  Description of Artificial Sequence: Synthetic oligonucleotide
ccccuacuuggccauugug

SEQ ID NO: 524902 - RNA, 19 nt, Artificial Sequence
  Description of Artificial Sequence: Synthetic oligonucleotide
gugggucgcugaaguuuug

SEQ ID NO: 524903 - RNA, 19 nt, Artificial Sequence
  Description of Artificial Sequence: Synthetic oligonucleotide
ggagcgcuggcggcccugg

SEQ ID NO: 524904 - RNA, 19 nt, Artificial Sequence
  Description of Artificial Sequence: Synthetic oligonucleotide
gucccggacgagggcauca

SEQ ID NO: 524905 - RNA, 19 nt, Artificial Sequence
  Description of Artificial Sequence: Synthetic oligonucleotide
cuauggcccuucuugccuu

SEQ ID NO: 524906 - RNA, 19 nt, Artificial Sequence
  Description of Artificial Sequence: Synthetic oligonucleotide
ggugcaccuggccccagua

SEQ ID NO: 524907 - RNA, 19 nt, Artificial Sequence
  Description of Artificial Sequence: Synthetic oligonucleotide
gccggcacuugauguccgc

SEQ ID NO: 524908 - RNA, 19 nt, Artificial Sequence
  Description of Artificial Sequence: Synthetic oligonucleotide
cgaggcaauccagugucug

SEQ ID NO: 524909 - RNA, 19 nt, Artificial Sequence
  Description of Artificial Sequence: Synthetic oligonucleotide
gugacugcugccacacgau

SEQ ID NO: 524910 - RNA, 19 nt, Artificial Sequence
  Description of Artificial Sequence: Synthetic oligonucleotide
ccggcacuugauguccgcc

SEQ ID NO: 524911 - RNA, 19 nt, Artificial Sequence
  Description of Artificial Sequence: Synthetic oligonucleotide
gcucagcgucugucugccg

SEQ ID NO: 524912 - RNA, 19 nt, Artificial Sequence
  Description of Artificial Sequence: Synthetic oligonucleotide
ccuauggcccuucuugccu

SEQ ID NO: 524913 - RNA, 19 nt, Artificial Sequence
  Description of Artificial Sequence: Synthetic oligonucleotide
gcuaaggaacugacggacu

SEQ ID NO: 524914 - RNA, 19 nt, Artificial Sequence
  Description of Artificial Sequence: Synthetic oligonucleotide
cccggacgagggcaucagg

SEQ ID NO: 524915 - RNA, 19 nt, Artificial Sequence
  Description of Artificial Sequence: Synthetic oligonucleotide
ggggcuaaccccacugcua

SEQ ID NO: 524916 - RNA, 19 nt, Artificial Sequence
  Description of Artificial Sequence: Synthetic oligonucleotide
cacucgucucaccaccuuu

SEQ ID NO: 524917 - RNA, 19 nt, Artificial Sequence
  Description of Artificial Sequence: Synthetic oligonucleotide
cccuucaggggugggucgc

SEQ ID NO: 524918 - RNA, 19 nt, Artificial Sequence
  Description of Artificial Sequence: Synthetic oligonucleotide
ggcaggacugacaccucaa

SEQ ID NO: 524919 - RNA, 19 nt, Artificial Sequence
  Description of Artificial Sequence: Synthetic oligonucleotide
agcgcucgggcuggcuccu

SEQ ID NO: 524920 - RNA, 19 nt, Artificial Sequence
  Description of Artificial Sequence: Synthetic oligonucleotide
cccaagacuugguguccuc

SEQ ID NO: 524921 - RNA, 19 nt, Artificial Sequence
  Description of Artificial Sequence: Synthetic oligonucleotide
acacuccgaucuagacgcu

SEQ ID NO: 524922 - RNA, 19 nt, Artificial Sequence
  Description of Artificial Sequence: Synthetic oligonucleotide
gugcucggccaugguggug

SEQ ID NO: 524923 - RNA, 19 nt, Artificial Sequence
  Description of Artificial Sequence: Synthetic oligonucleotide
gcucgcugccguuuaaguu

SEQ ID NO: 524924 - RNA, 19 nt, Artificial Sequence
  Description of Artificial Sequence: Synthetic oligonucleotide
gccaggagauuugcaccac

SEQ ID NO: 524925 - RNA, 19 nt, Artificial Sequence
  Description of Artificial Sequence: Synthetic oligonucleotide
ccauuagcagcggcgaugu

SEQ ID NO: 524926 - RNA, 19 nt, Artificial Sequence
  Description of Artificial Sequence: Synthetic oligonucleotide
cacacaagucgaggggcgu

SEQ ID NO: 524927 - RNA, 19 nt, Artificial Sequence
  Description of Artificial Sequence: Synthetic oligonucleotide
cuccaaggucucaggcccu

SEQ ID NO: 524928 - RNA, 19 nt, Artificial Sequence
  Description of Artificial Sequence: Synthetic oligonucleotide
ggugggucgcugaaguuuu

SEQ ID NO: 524929 - RNA, 19 nt, Artificial Sequence
  Description of Artificial Sequence: Synthetic oligonucleotide
ccccuauagcacugaggca

SEQ ID NO: 524930 - RNA, 19 nt, Artificial Sequence
  Description of Artificial Sequence: Synthetic oligonucleotide
cagucaagccauccucauu

SEQ ID NO: 524931 - RNA, 19 nt, Artificial Sequence
  Description of Artificial Sequence: Synthetic oligonucleotide
ccaagucguuucgggcagc

SEQ ID NO: 524932 - RNA, 19 nt, Artificial Sequence
  Description of Artificial Sequence: Synthetic oligonucleotide
gggugggucgcugaaguuu

SEQ ID NO: 524933 - RNA, 19 nt, Artificial Sequence
  Description of Artificial Sequence: Synthetic oligonucleotide
ggucgcucccuauggcccu

SEQ ID NO: 524934 - RNA, 19 nt, Artificial Sequence
  Description of Artificial Sequence: Synthetic oligonucleotide
ggaggucauucagcaugca

SEQ ID NO: 524935 - RNA, 19 nt, Artificial Sequence
  Description of Artificial Sequence: Synthetic oligonucleotide
cagguagggagggcagugu

SEQ ID NO: 524936 - RNA, 19 nt, Artificial Sequence
  Description of Artificial Sequence: Synthetic oligonucleotide
ccaccagggauuuuccauu

SEQ ID NO: 524937 - RNA, 19 nt, Artificial Sequence
  Description of Artificial Sequence: Synthetic oligonucleotide
gcgauacagguuggugcga

SEQ ID NO: 524938 - RNA, 19 nt, Artificial Sequence
  Description of Artificial Sequence: Synthetic oligonucleotide
cagggguggguccccaguu

SEQ ID NO: 524939 - RNA, 19 nt, Artificial Sequence
  Description of Artificial Sequence: Synthetic oligonucleotide
ccacaggacucaacugaua

SEQ ID NO: 524940 - RNA, 19 nt, Artificial Sequence
  Description of Artificial Sequence: Synthetic oligonucleotide
gggcugauuggggcaccac

SEQ ID NO: 524941 - RNA, 19 nt, Artificial Sequence
  Description of Artificial Sequence: Synthetic oligonucleotide
cuuagcgcucgggcuggcu

SEQ ID NO: 524942 - RNA, 19 nt, Artificial Sequence
  Description of Artificial Sequence: Synthetic oligonucleotide
gcuccuugcgauacagguu

SEQ ID NO: 524943 - RNA, 19 nt, Artificial Sequence
  Description of Artificial Sequence: Synthetic oligonucleotide
ccaaggucucaggcccuuc

SEQ ID NO: 524944 - RNA, 19 nt, Artificial Sequence
  Description of Artificial Sequence: Synthetic oligonucleotide
cacuccgaucuagacgcuu

SEQ ID NO: 524945 - RNA, 19 nt, Artificial Sequence
  Description of Artificial Sequence: Synthetic oligonucleotide
ggccauuguguggucuggu

SEQ ID NO: 524946 - RNA, 19 nt, Artificial Sequence
  Description of Artificial Sequence: Synthetic oligonucleotide
cggugacugcugccacacg

SEQ ID NO: 524947 - RNA, 19 nt, Artificial Sequence
  Description of Artificial Sequence: Synthetic oligonucleotide
gggagcgcuggcggcccug

SEQ ID NO: 524948 - RNA, 19 nt, Artificial Sequence
  Description of Artificial Sequence: Synthetic oligonucleotide
gcgucucguccaccaggga

SEQ ID NO: 524949 - RNA, 19 nt, Artificial Sequence
  Description of Artificial Sequence: Synthetic oligonucleotide
ccgaggcuuuaggccagac

SEQ ID NO: 524950 - RNA, 19 nt, Artificial Sequence
  Description of Artificial Sequence: Synthetic oligonucleotide
caugguccaaagggucauu

SEQ ID NO: 524951 - RNA, 19 nt, Artificial Sequence
  Description of Artificial Sequence: Synthetic oligonucleotide
ccgcaggagugcaucuugu

SEQ ID NO: 524952 - RNA, 19 nt, Artificial Sequence
  Description of Artificial Sequence: Synthetic oligonucleotide
ccuuagcgcucgggcuggc

SEQ ID NO: 524953 - RNA, 19 nt, Artificial Sequence
  Description of Artificial Sequence: Synthetic oligonucleotide
ccuugcgauacagguuggu

SEQ ID NO: 524954 - RNA, 19 nt, Artificial Sequence
  Description of Artificial Sequence: Synthetic oligonucleotide
cagcugcucgcugccguuu

SEQ ID NO: 524955 - RNA, 19 nt, Artificial Sequence
  Description of Artificial Sequence: Synthetic oligonucleotide
gucgcucccuauggcccuu

SEQ ID NO: 524956 - RNA, 19 nt, Artificial Sequence
  Description of Artificial Sequence: Synthetic oligonucleotide
ccauucagaucagccccau

SEQ ID NO: 524957 - RNA, 19 nt, Artificial Sequence
  Description of Artificial Sequence: Synthetic oligonucleotide
cgcaggagugcaucuuguu

SEQ ID NO: 524958 - RNA, 19 nt, Artificial Sequence
  Description of Artificial Sequence: Synthetic oligonucleotide
ggguggguccccaguuguu

SEQ ID NO: 524959 - RNA, 19 nt, Artificial Sequence
  Description of Artificial Sequence: Synthetic oligonucleotide
gcacgccgcuucugggcau

SEQ ID NO: 524960 - RNA, 19 nt, Artificial Sequence
  Description of Artificial Sequence: Synthetic oligonucleotide
gcgaugugucaggcucacu

SEQ ID NO: 524961 - RNA, 19 nt, Artificial Sequence
  Description of Artificial Sequence: Synthetic oligonucleotide
ggacuuccuccaagucguu

SEQ ID NO: 524962 - RNA, 19 nt, Artificial Sequence
  Description of Artificial Sequence: Synthetic oligonucleotide
gccgcuccugggugcucau

SEQ ID NO: 524963 - RNA, 19 nt, Artificial Sequence
  Description of Artificial Sequence: Synthetic oligonucleotide
aaaucuaggaaugaguucc

SEQ ID NO: 524964 - RNA, 19 nt, Artificial Sequence
  Description of Artificial Sequence: Synthetic oligonucleotide
uuaguaaugacuuuccaag

SEQ ID NO: 524965 - RNA, 19 nt, Artificial Sequence
  Description of Artificial Sequence: Synthetic oligonucleotide
uuaaucaugccaaugaagu

SEQ ID NO: 524966 - RNA, 19 nt, Artificial Sequence
  Description of Artificial Sequence: Synthetic oligonucleotide
aagucgaucauucucagga

SEQ ID NO: 524967 - RNA, 19 nt, Artificial Sequence
  Description of Artificial Sequence: Synthetic oligonucleotide
ucuguuuaaauguaagcag

SEQ ID NO: 524968 - RNA, 19 nt, Artificial Sequence
  Description of Artificial Sequence: Synthetic oligonucleotide
uauaaauccauugaucaag

SEQ ID NO: 524969 - RNA, 19 nt, Artificial Sequence
  Description of Artificial Sequence: Synthetic oligonucleotide
aaaugcucgauccggaguc

SEQ ID NO: 524970 - RNA, 19 nt, Artificial Sequence
  Description of Artificial Sequence: Synthetic oligonucleotide
uuuguuacacuucaagaug

SEQ ID NO: 524971 - RNA, 19 nt, Artificial Sequence
  Description of Artificial Sequence: Synthetic oligonucleotide
gaucaugcagguuagucgg

SEQ ID NO: 524972 - RNA, 19 nt, Artificial Sequence
  Description of Artificial Sequence: Synthetic oligonucleotide
ugagcuaugacuuucuuaa

SEQ ID NO: 524973 - RNA, 19 nt, Artificial Sequence
  Description of Artificial Sequence: Synthetic oligonucleotide
ucucgaaccagaaauagga

SEQ ID NO: 524974 - RNA, 19 nt, Artificial Sequence
  Description of Artificial Sequence: Synthetic oligonucleotide
aaugcuuaucgucuuuggg

SEQ ID NO: 524975 - RNA, 19 nt, Artificial Sequence
  Description of Artificial Sequence: Synthetic oligonucleotide
aauuccucugaucaugcag

SEQ ID NO: 524976 - RNA, 19 nt, Artificial Sequence
  Description of Artificial Sequence: Synthetic oligonucleotide
ugaucaugcagguuagucg

SEQ ID NO: 524977 - RNA, 19 nt, Artificial Sequence
  Description of Artificial Sequence: Synthetic oligonucleotide
aggacagagguguagauuc

SEQ ID NO: 524978 - RNA, 19 nt, Artificial Sequence
  Description of Artificial Sequence: Synthetic oligonucleotide
aaaaucacggccgaaggag

SEQ ID NO: 524979 - RNA, 19 nt, Artificial Sequence
  Description of Artificial Sequence: Synthetic oligonucleotide
gucaacuuugucuaugugg

SEQ ID NO: 524980 - RNA, 19 nt, Artificial Sequence
  Description of Artificial Sequence: Synthetic oligonucleotide
aauuauugacuggagcugg

SEQ ID NO: 524981 - RNA, 19 nt, Artificial Sequence
  Description of Artificial Sequence: Synthetic oligonucleotide
acagccaugccucugugcc

SEQ ID NO: 524982 - RNA, 19 nt, Artificial Sequence
  Description of Artificial Sequence: Synthetic oligonucleotide
ucaaaaucacggccgaagg

SEQ ID NO: 524983 - RNA, 19 nt, Artificial Sequence
  Description of Artificial Sequence: Synthetic oligonucleotide
cuauugaagaaggagaggc

SEQ ID NO: 524984 - RNA, 19 nt, Artificial Sequence
  Description of Artificial Sequence: Synthetic oligonucleotide
aaauccaacccauggcggg

SEQ ID NO: 524985 - RNA, 19 nt, Artificial Sequence
  Description of Artificial Sequence: Synthetic oligonucleotide
aagauagguguccuggcuc

SEQ ID NO: 524986 - RNA, 19 nt, Artificial Sequence
  Description of Artificial Sequence: Synthetic oligonucleotide
guuacgaagguccccaugg

SEQ ID NO: 524987 - RNA, 19 nt, Artificial Sequence
  Description of Artificial Sequence: Synthetic oligonucleotide
uuuuccaccgagaaaagaa

SEQ ID NO: 524988 - RNA, 19 nt, Artificial Sequence
  Description of Artificial Sequence: Synthetic oligonucleotide
agcacaguuaauguagucc

SEQ ID NO: 524989 - RNA, 19 nt, Artificial Sequence
  Description of Artificial Sequence: Synthetic oligonucleotide
acgaacucagcccugaaag

SEQ ID NO: 524990 - RNA, 19 nt, Artificial Sequence
  Description of Artificial Sequence: Synthetic oligonucleotide
cauaagggcauucaggaug

SEQ ID NO: 524991 - RNA, 19 nt, Artificial Sequence
  Description of Artificial Sequence: Synthetic oligonucleotide
gaucaauugcacaagaaca

SEQ ID NO: 524992 - RNA, 19 nt, Artificial Sequence
  Description of Artificial Sequence: Synthetic oligonucleotide
uccacauaaaaucuaggaa

SEQ ID NO: 524993 - RNA, 19 nt, Artificial Sequence
  Description of Artificial Sequence: Synthetic oligonucleotide
uucgugaaaugccugcagg

SEQ ID NO: 524994 - RNA, 19 nt, Artificial Sequence
  Description of Artificial Sequence: Synthetic oligonucleotide
ucuaggaaugaguucccgg

SEQ ID NO: 524995 - RNA, 19 nt, Artificial Sequence
  Description of Artificial Sequence: Synthetic oligonucleotide
ucuuaauuauugacuggag

SEQ ID NO: 524996 - RNA, 19 nt, Artificial Sequence
  Description of Artificial Sequence: Synthetic oligonucleotide
augugguaaagauaggugu

SEQ ID NO: 524997 - RNA, 19 nt, Artificial Sequence
  Description of Artificial Sequence: Synthetic oligonucleotide
ucucguuucgugaaaugcc

SEQ ID NO: 524998 - RNA, 19 nt, Artificial Sequence
  Description of Artificial Sequence: Synthetic oligonucleotide
aucuguuuaaauguaagca

SEQ ID NO: 524999 - RNA, 19 nt, Artificial Sequence
  Description of Artificial Sequence: Synthetic oligonucleotide
uguagauucggauuuuguc

SEQ ID NO: 525000 - RNA, 19 nt, Artificial Sequence
  Description of Artificial Sequence: Synthetic oligonucleotide
aggaauuuguuacacuuca

SEQ ID NO: 525001 - RNA, 19 nt, Artificial Sequence
  Description of Artificial Sequence: Synthetic oligonucleotide
aaccugaccagaaugcagg

SEQ ID NO: 525002 - RNA, 19 nt, Artificial Sequence
  Description of Artificial Sequence: Synthetic oligonucleotide
ucacacucuuuaaucaugc

SEQ ID NO: 525003 - RNA, 19 nt, Artificial Sequence
  Description of Artificial Sequence: Synthetic oligonucleotide
uauugaagaaggagaggcc

SEQ ID NO: 525004 - RNA, 19 nt, Artificial Sequence
  Description of Artificial Sequence: Synthetic oligonucleotide
ucaauugcacaagaacagg

SEQ ID NO: 525005 - RNA, 19 nt, Artificial Sequence
  Description of Artificial Sequence: Synthetic oligonucleotide
aaauccccguuuuggagag

SEQ ID NO: 525006 - RNA, 19 nt, Artificial Sequence
  Description of Artificial Sequence: Synthetic oligonucleotide
ugaaauccccguuuuggag

SEQ ID NO: 525007 - RNA, 19 nt, Artificial Sequence
  Description of Artificial Sequence: Synthetic oligonucleotide
gagauaggacaacagcucc

SEQ ID NO: 525008 - RNA, 19 nt, Artificial Sequence
  Description of Artificial Sequence: Synthetic oligonucleotide
gaaugaggccaauagcagc

SEQ ID NO: 525009 - RNA, 19 nt, Artificial Sequence
  Description of Artificial Sequence: Synthetic oligonucleotide
uggacucaacauaaaagcu

SEQ ID NO: 525010 - RNA, 19 nt, Artificial Sequence
  Description of Artificial Sequence: Synthetic oligonucleotide
ucgaaccagaaauaggacu

SEQ ID NO: 525011 - RNA, 19 nt, Artificial Sequence
  Description of Artificial Sequence: Synthetic oligonucleotide
gaugauccggcacaaucag

SEQ ID NO: 525012 - RNA, 19 nt, Artificial Sequence
  Description of Artificial Sequence: Synthetic oligonucleotide
ugugguaaagauagguguc

SEQ ID NO: 525013 - RNA, 19 nt, Artificial Sequence
  Description of Artificial Sequence: Synthetic oligonucleotide
ucggauuuugucaucacua

SEQ ID NO: 525014 - RNA, 19 nt, Artificial Sequence
  Description of Artificial Sequence: Synthetic oligonucleotide
aucaauugcacaagaacag

SEQ ID NO: 525015 - RNA, 19 nt, Artificial Sequence
  Description of Artificial Sequence: Synthetic oligonucleotide
uguuuccuuagccgugucg

SEQ ID NO: 525016 - RNA, 19 nt, Artificial Sequence
  Description of Artificial Sequence: Synthetic oligonucleotide
ugcuuaucgucuuugggac

SEQ ID NO: 525017 - RNA, 19 nt, Artificial Sequence
  Description of Artificial Sequence: Synthetic oligonucleotide
gacaucacggaguucaaga

SEQ ID NO: 525018 - RNA, 19 nt, Artificial Sequence
  Description of Artificial Sequence: Synthetic oligonucleotide
ugggcuagaaugcuauuga

SEQ ID NO: 525019 - RNA, 19 nt, Artificial Sequence
  Description of Artificial Sequence: Synthetic oligonucleotide
auaaaaucuaggaaugagu

SEQ ID NO: 525020 - RNA, 19 nt, Artificial Sequence
  Description of Artificial Sequence: Synthetic oligonucleotide
aauccaacccauggcgggc

SEQ ID NO: 525021 - RNA, 19 nt, Artificial Sequence
  Description of Artificial Sequence: Synthetic oligonucleotide
ugauccggcacaaucagua

SEQ ID NO: 525022 - RNA, 19 nt, Artificial Sequence
  Description of Artificial Sequence: Synthetic oligonucleotide
uccggcacaaucaguaaug

SEQ ID NO: 525023 - RNA, 19 nt, Artificial Sequence
  Description of Artificial Sequence: Synthetic oligonucleotide
ucaguaauguagagaagaa

SEQ ID NO: 525024 - RNA, 19 nt, Artificial Sequence
  Description of Artificial Sequence: Synthetic oligonucleotide
gcuagaaugcuauugaaga

SEQ ID NO: 525025 - RNA, 19 nt, Artificial Sequence
  Description of Artificial Sequence: Synthetic oligonucleotide
uuucgugaaaugccugcag

SEQ ID NO: 525026 - RNA, 19 nt, Artificial Sequence
  Description of Artificial Sequence: Synthetic oligonucleotide
uguucaaaaucacggccga

SEQ ID NO: 525027 - RNA, 19 nt, Artificial Sequence
  Description of Artificial Sequence: Synthetic oligonucleotide
uccaccgagaaaagaacug

SEQ ID NO: 525028 - RNA, 19 nt, Artificial Sequence
  Description of Artificial Sequence: Synthetic oligonucleotide
agccgugucguucacguuc

SEQ ID NO: 525029 - RNA, 19 nt, Artificial Sequence
  Description of Artificial Sequence: Synthetic oligonucleotide
uuuccaccgagaaaagaac

SEQ ID NO: 525030 - RNA, 19 nt, Artificial Sequence
  Description of Artificial Sequence: Synthetic oligonucleotide
aucaagugggccagcaucc

SEQ ID NO: 525031 - RNA, 19 nt, Artificial Sequence
  Description of Artificial Sequence: Synthetic oligonucleotide
aggcauguuuccuuagccg

SEQ ID NO: 525032 - RNA, 19 nt, Artificial Sequence
  Description of Artificial Sequence: Synthetic oligonucleotide
uucucguuucgugaaaugc

SEQ ID NO: 525033 - RNA, 19 nt, Artificial Sequence
  Description of Artificial Sequence: Synthetic oligonucleotide
uggugcuugauaaaggcuu

SEQ ID NO: 525034 - RNA, 19 nt, Artificial Sequence
  Description of Artificial Sequence: Synthetic oligonucleotide
uagaugcgcucauagacca

SEQ ID NO: 525035 - RNA, 19 nt, Artificial Sequence
  Description of Artificial Sequence: Synthetic oligonucleotide
aguaggcccgggcauacac

SEQ ID NO: 525036 - RNA, 19 nt, Artificial Sequence
  Description of Artificial Sequence: Synthetic oligonucleotide
uuagccgugucguucacgu

SEQ ID NO: 525037 - RNA, 19 nt, Artificial Sequence
  Description of Artificial Sequence: Synthetic oligonucleotide
aaggcgcuucggcuggucc

SEQ ID NO: 525038 - RNA, 19 nt, Artificial Sequence
  Description of Artificial Sequence: Synthetic oligonucleotide
ucacacuauggaucaauug

SEQ ID NO: 525039 - RNA, 19 nt, Artificial Sequence
  Description of Artificial Sequence: Synthetic oligonucleotide
gaaauccccguuuuggaga

SEQ ID NO: 525040 - RNA, 19 nt, Artificial Sequence
  Description of Artificial Sequence: Synthetic oligonucleotide
ucaaaugcucgauccggag

SEQ ID NO: 525041 - RNA, 19 nt, Artificial Sequence
  Description of Artificial Sequence: Synthetic oligonucleotide
aguguucacuucucguuuc

SEQ ID NO: 525042 - RNA, 19 nt, Artificial Sequence
  Description of Artificial Sequence: Synthetic oligonucleotide
cucuuuucguccuccagag

SEQ ID NO: 525043 - RNA, 19 nt, Artificial Sequence
  Description of Artificial Sequence: Synthetic oligonucleotide
ucgucacacucuuuaauca

SEQ ID NO: 525044 - RNA, 19 nt, Artificial Sequence
  Description of Artificial Sequence: Synthetic oligonucleotide
uucggauuuugucaucacu

SEQ ID NO: 525045 - RNA, 19 nt, Artificial Sequence
  Description of Artificial Sequence: Synthetic oligonucleotide
aguuuagccccagcgaacg

SEQ ID NO: 525046 - RNA, 19 nt, Artificial Sequence
  Description of Artificial Sequence: Synthetic oligonucleotide
uuccaagcuucauugagaa

SEQ ID NO: 525047 - RNA, 19 nt, Artificial Sequence
  Description of Artificial Sequence: Synthetic oligonucleotide
caagagcaaagcauuguug

SEQ ID NO: 525048 - RNA, 19 nt, Artificial Sequence
  Description of Artificial Sequence: Synthetic oligonucleotide
uagauucggauuuugucau

SEQ ID NO: 525049 - RNA, 19 nt, Artificial Sequence
  Description of Artificial Sequence: Synthetic oligonucleotide
acuauggaucaauugcaca

SEQ ID NO: 525050 - RNA, 19 nt, Artificial Sequence
  Description of Artificial Sequence: Synthetic oligonucleotide
ggggaaaugaucugguaag

SEQ ID NO: 525051 - RNA, 19 nt, Artificial Sequence
  Description of Artificial Sequence: Synthetic oligonucleotide
gaucugguaaggcgcuucg

SEQ ID NO: 525052 - RNA, 19 nt, Artificial Sequence
  Description of Artificial Sequence: Synthetic oligonucleotide
uuugucuaugugguaaaga

SEQ ID NO: 525053 - RNA, 19 nt, Artificial Sequence
  Description of Artificial Sequence: Synthetic oligonucleotide
uuccaccgagaaaagaacu

SEQ ID NO: 525054 - RNA, 19 nt, Artificial Sequence
  Description of Artificial Sequence: Synthetic oligonucleotide
ucacguugagaaguucucg

SEQ ID NO: 525055 - RNA, 19 nt, Artificial Sequence
  Description of Artificial Sequence: Synthetic oligonucleotide
ugaagucgaucauucucag

SEQ ID NO: 525056 - RNA, 19 nt, Artificial Sequence
  Description of Artificial Sequence: Synthetic oligonucleotide
uguacucuacccauaccuc

SEQ ID NO: 525057 - RNA, 19 nt, Artificial Sequence
  Description of Artificial Sequence: Synthetic oligonucleotide
guggcaacgaacucagccc

SEQ ID NO: 525058 - RNA, 19 nt, Artificial Sequence
  Description of Artificial Sequence: Synthetic oligonucleotide
gguggcaacgaacucagcc

SEQ ID NO: 525059 - RNA, 19 nt, Artificial Sequence
  Description of Artificial Sequence: Synthetic oligonucleotide
aaguuuagccccagcgaac

SEQ ID NO: 525060 - RNA, 19 nt, Artificial Sequence
  Description of Artificial Sequence: Synthetic oligonucleotide
uguuuccauugccaaccgg

SEQ ID NO: 525061 - RNA, 19 nt, Artificial Sequence
  Description of Artificial Sequence: Synthetic oligonucleotide
uuauugacuggagcugggg

SEQ ID NO: 525062 - RNA, 19 nt, Artificial Sequence
  Description of Artificial Sequence: Synthetic oligonucleotide
ucgugcauggucuugcaaa

SEQ ID NO: 525063 - RNA, 19 nt, Artificial Sequence
  Description of Artificial Sequence: Synthetic oligonucleotide
aaucacggccgaaggagac

SEQ ID NO: 525064 - RNA, 19 nt, Artificial Sequence
  Description of Artificial Sequence: Synthetic oligonucleotide
ucguucacguucucugggg

SEQ ID NO: 525065 - RNA, 19 nt, Artificial Sequence
  Description of Artificial Sequence: Synthetic oligonucleotide
ucaaugcuuaucgucuuug

SEQ ID NO: 525066 - RNA, 19 nt, Artificial Sequence
  Description of Artificial Sequence: Synthetic oligonucleotide
caaugcuuaucgucuuugg

SEQ ID NO: 525067 - RNA, 19 nt, Artificial Sequence
  Description of Artificial Sequence: Synthetic oligonucleotide
cuaggaaugaguucccgga

SEQ ID NO: 525068 - RNA, 19 nt, Artificial Sequence
  Description of Artificial Sequence: Synthetic oligonucleotide
acucuacccauaccucagc

SEQ ID NO: 525069 - RNA, 19 nt, Artificial Sequence
  Description of Artificial Sequence: Synthetic oligonucleotide
ugucuaugugguaaagaua

SEQ ID NO: 525070 - RNA, 19 nt, Artificial Sequence
  Description of Artificial Sequence: Synthetic oligonucleotide
caucacggaguucaagagc

SEQ ID NO: 525071 - RNA, 19 nt, Artificial Sequence
  Description of Artificial Sequence: Synthetic oligonucleotide
caaccgguucacacuaugg

SEQ ID NO: 525072 - RNA, 19 nt, Artificial Sequence
  Description of Artificial Sequence: Synthetic oligonucleotide
uguuacgaagguccccaug

SEQ ID NO: 525073 - RNA, 19 nt, Artificial Sequence
  Description of Artificial Sequence: Synthetic oligonucleotide
uacccauaccucagcacag

SEQ ID NO: 525074 - RNA, 19 nt, Artificial Sequence
  Description of Artificial Sequence: Synthetic oligonucleotide
agcuaugacuuucuuaauu

SEQ ID NO: 525075 - RNA, 19 nt, Artificial Sequence
  Description of Artificial Sequence: Synthetic oligonucleotide
ucgugaaaugccugcaggu

SEQ ID NO: 525076 - RNA, 19 nt, Artificial Sequence
  Description of Artificial Sequence: Synthetic oligonucleotide
auucggauuuugucaucac

SEQ ID NO: 525077 - RNA, 19 nt, Artificial Sequence
  Description of Artificial Sequence: Synthetic oligonucleotide
agaacagguuccagguugc

SEQ ID NO: 525078 - RNA, 19 nt, Artificial Sequence
  Description of Artificial Sequence: Synthetic oligonucleotide
agauagguguccuggcuca

SEQ ID NO: 525079 - RNA, 19 nt, Artificial Sequence
  Description of Artificial Sequence: Synthetic oligonucleotide
ugguaaggcgcuucggcug

SEQ ID NO: 525080 - RNA, 19 nt, Artificial Sequence
  Description of Artificial Sequence: Synthetic oligonucleotide
ucaugcagguuagucgggg

SEQ ID NO: 525081 - RNA, 19 nt, Artificial Sequence
  Description of Artificial Sequence: Synthetic oligonucleotide
gcauacacggacacgagcg

SEQ ID NO: 525082 - RNA, 19 nt, Artificial Sequence
  Description of Artificial Sequence: Synthetic oligonucleotide
cuuggggaagccagacucg

SEQ ID NO: 525083 - RNA, 19 nt, Artificial Sequence
  Description of Artificial Sequence: Synthetic oligonucleotide
gauaggacaacagcuccac

SEQ ID NO: 525084 - RNA, 19 nt, Artificial Sequence
  Description of Artificial Sequence: Synthetic oligonucleotide
ccaagcuucauugagaauc

SEQ ID NO: 525085 - RNA, 19 nt, Artificial Sequence
  Description of Artificial Sequence: Synthetic oligonucleotide
gacagagguguagauucgg

SEQ ID NO: 525086 - RNA, 19 nt, Artificial Sequence
  Description of Artificial Sequence: Synthetic oligonucleotide
uggcaacgaacucagcccu

SEQ ID NO: 525087 - RNA, 19 nt, Artificial Sequence
  Description of Artificial Sequence: Synthetic oligonucleotide
ugaaaugccugcaggugua

SEQ ID NO: 525088 - RNA, 19 nt, Artificial Sequence
  Description of Artificial Sequence: Synthetic oligonucleotide
cuugauaacgucagccaga

SEQ ID NO: 525089 - RNA, 19 nt, Artificial Sequence
  Description of Artificial Sequence: Synthetic oligonucleotide
acaguuaauguaguccuga

SEQ ID NO: 525090 - RNA, 19 nt, Artificial Sequence
  Description of Artificial Sequence: Synthetic oligonucleotide
aagcuacacaggcccggac

SEQ ID NO: 525091 - RNA, 19 nt, Artificial Sequence
  Description of Artificial Sequence: Synthetic oligonucleotide
gucguucacguucucuggg

SEQ ID NO: 525092 - RNA, 19 nt, Artificial Sequence
  Description of Artificial Sequence: Synthetic oligonucleotide
gauucggauuuugucauca

SEQ ID NO: 525093 - RNA, 19 nt, Artificial Sequence
  Description of Artificial Sequence: Synthetic oligonucleotide
cacuauggaucaauugcac

SEQ ID NO: 525094 - RNA, 19 nt, Artificial Sequence
  Description of Artificial Sequence: Synthetic oligonucleotide
cuacccauaccucagcaca

SEQ ID NO: 525095 - RNA, 19 nt, Artificial Sequence
  Description of Artificial Sequence: Synthetic oligonucleotide
caccgagaaaagaacugag

SEQ ID NO: 525096 - RNA, 19 nt, Artificial Sequence
  Description of Artificial Sequence: Synthetic oligonucleotide
uugauaacgucagccagaa

SEQ ID NO: 525097 - RNA, 19 nt, Artificial Sequence
  Description of Artificial Sequence: Synthetic oligonucleotide
aaaucguggaagugagcua

SEQ ID NO: 525098 - RNA, 19 nt, Artificial Sequence
  Description of Artificial Sequence: Synthetic oligonucleotide
cauacacggacacgagcgg

SEQ ID NO: 525099 - RNA, 19 nt, Artificial Sequence
  Description of Artificial Sequence: Synthetic oligonucleotide
auaggacuccauguucugg

SEQ ID NO: 525100 - RNA, 19 nt, Artificial Sequence
  Description of Artificial Sequence: Synthetic oligonucleotide
cccuucaugacuuuucuug

SEQ ID NO: 525101 - RNA, 19 nt, Artificial Sequence
  Description of Artificial Sequence: Synthetic oligonucleotide
caguuaauguaguccugag

SEQ ID NO: 525102 - RNA, 19 nt, Artificial Sequence
  Description of Artificial Sequence: Synthetic oligonucleotide
acacuauggaucaauugca

SEQ ID NO: 525103 - RNA, 19 nt, Artificial Sequence
  Description of Artificial Sequence: Synthetic oligonucleotide
auuguugccuaguuucuua

SEQ ID NO: 525104 - RNA, 19 nt, Artificial Sequence
  Description of Artificial Sequence: Synthetic oligonucleotide
uucacacuauggaucaauu

SEQ ID NO: 525105 - RNA, 19 nt, Artificial Sequence
  Description of Artificial Sequence: Synthetic oligonucleotide
ugagaaucugaagucgauc

SEQ ID NO: 525106 - RNA, 19 nt, Artificial Sequence
  Description of Artificial Sequence: Synthetic oligonucleotide
agacucgucacacucuuua

SEQ ID NO: 525107 - RNA, 19 nt, Artificial Sequence
  Description of Artificial Sequence: Synthetic oligonucleotide
augggcuagaaugcuauug

SEQ ID NO: 525108 - RNA, 19 nt, Artificial Sequence
  Description of Artificial Sequence: Synthetic oligonucleotide
ucguuucgugaaaugccug

SEQ ID NO: 525109 - RNA, 19 nt, Artificial Sequence
  Description of Artificial Sequence: Synthetic oligonucleotide
uccgugaaucuguuuaaau

SEQ ID NO: 525110 - RNA, 19 nt, Artificial Sequence
  Description of Artificial Sequence: Synthetic oligonucleotide
guaagcuacacaggcccgg

SEQ ID NO: 525111 - RNA, 19 nt, Artificial Sequence
  Description of Artificial Sequence: Synthetic oligonucleotide
guuguuacgaaggucccca

SEQ ID NO: 525112 - RNA, 19 nt, Artificial Sequence
  Description of Artificial Sequence: Synthetic oligonucleotide
uguugccuaguuucuuaca

SEQ ID NO: 525113 - RNA, 19 nt, Artificial Sequence
  Description of Artificial Sequence: Synthetic oligonucleotide
acggacacgagcggguccc

SEQ ID NO: 525114 - RNA, 19 nt, Artificial Sequence
  Description of Artificial Sequence: Synthetic oligonucleotide
aggagaugcuuggggaagc

SEQ ID NO: 525115 - RNA, 19 nt, Artificial Sequence
  Description of Artificial Sequence: Synthetic oligonucleotide
gguugcaaaacaucgaccu

SEQ ID NO: 525116 - RNA, 19 nt, Artificial Sequence
  Description of Artificial Sequence: Synthetic oligonucleotide
uucuacccgaacacucucu

SEQ ID NO: 525117 - RNA, 19 nt, Artificial Sequence
  Description of Artificial Sequence: Synthetic oligonucleotide
auacacggacacgagcggg

SEQ ID NO: 525118 - RNA, 19 nt, Artificial Sequence
  Description of Artificial Sequence: Synthetic oligonucleotide
ucccggauagaagcgaucu

SEQ ID NO: 525119 - RNA, 19 nt, Artificial Sequence
  Description of Artificial Sequence: Synthetic oligonucleotide
ucuugcaaaugugcauaag

SEQ ID NO: 525120 - RNA, 19 nt, Artificial Sequence
  Description of Artificial Sequence: Synthetic oligonucleotide
uuccauugccaaccgguuc

SEQ ID NO: 525121 - RNA, 19 nt, Artificial Sequence
  Description of Artificial Sequence: Synthetic oligonucleotide
uuuccauugccaaccgguu

SEQ ID NO: 525122 - RNA, 19 nt, Artificial Sequence
  Description of Artificial Sequence: Synthetic oligonucleotide
uaggaaugaguucccggau

SEQ ID NO: 525123 - RNA, 19 nt, Artificial Sequence
  Description of Artificial Sequence: Synthetic oligonucleotide
gucuccgugaaucuguuua

SEQ ID NO: 525124 - RNA, 19 nt, Artificial Sequence
  Description of Artificial Sequence: Synthetic oligonucleotide
ccgugaaucuguuuaaaug

SEQ ID NO: 525125 - RNA, 19 nt, Artificial Sequence
  Description of Artificial Sequence: Synthetic oligonucleotide
aaaucacggccgaaggaga

SEQ ID NO: 525126 - RNA, 19 nt, Artificial Sequence
  Description of Artificial Sequence: Synthetic oligonucleotide
acagagucgugcauggucu

SEQ ID NO: 525127 - RNA, 19 nt, Artificial Sequence
  Description of Artificial Sequence: Synthetic oligonucleotide
ugaccagaaugcagguaga

SEQ ID NO: 525128 - RNA, 19 nt, Artificial Sequence
  Description of Artificial Sequence: Synthetic oligonucleotide
ucuccgugaaucuguuuaa

SEQ ID NO: 525129 - RNA, 19 nt, Artificial Sequence
  Description of Artificial Sequence: Synthetic oligonucleotide
agaaacggcagaaacuuuu

SEQ ID NO: 525130 - RNA, 19 nt, Artificial Sequence
  Description of Artificial Sequence: Synthetic oligonucleotide
acgagcggguccccaauuc

SEQ ID NO: 525131 - RNA, 19 nt, Artificial Sequence
  Description of Artificial Sequence: Synthetic oligonucleotide
uuuagccccagcgaacgaa

SEQ ID NO: 525132 - RNA, 19 nt, Artificial Sequence
  Description of Artificial Sequence: Synthetic oligonucleotide
ucuacccgaacacucucuu

SEQ ID NO: 525133 - RNA, 19 nt, Artificial Sequence
  Description of Artificial Sequence: Synthetic oligonucleotide
uugccuaguuucuuacauc

SEQ ID NO: 525134 - RNA, 19 nt, Artificial Sequence
  Description of Artificial Sequence: Synthetic oligonucleotide
cauaaaagcugagcugcug

SEQ ID NO: 525135 - RNA, 19 nt, Artificial Sequence
  Description of Artificial Sequence: Synthetic oligonucleotide
aguaagcuacacaggcccg

SEQ ID NO: 525136 - RNA, 19 nt, Artificial Sequence
  Description of Artificial Sequence: Synthetic oligonucleotide
acucgucacacucuuuaau

SEQ ID NO: 525137 - RNA, 19 nt, Artificial Sequence
  Description of Artificial Sequence: Synthetic oligonucleotide
caugcagguuagucggggc

SEQ ID NO: 525138 - RNA, 19 nt, Artificial Sequence
  Description of Artificial Sequence: Synthetic oligonucleotide
gguaaggcgcuucggcugg

SEQ ID NO: 525139 - RNA, 19 nt, Artificial Sequence
  Description of Artificial Sequence: Synthetic oligonucleotide
ugguaaagauagguguccu

SEQ ID NO: 525140 - RNA, 19 nt, Artificial Sequence
  Description of Artificial Sequence: Synthetic oligonucleotide
agagggagauaggacaaca

SEQ ID NO: 525141 - RNA, 19 nt, Artificial Sequence
  Description of Artificial Sequence: Synthetic oligonucleotide
cuucucguuucgugaaaug

SEQ ID NO: 525142 - RNA, 19 nt, Artificial Sequence
  Description of Artificial Sequence: Synthetic oligonucleotide
aggcgcuucggcugguccg

SEQ ID NO: 525143 - RNA, 19 nt, Artificial Sequence
  Description of Artificial Sequence: Synthetic oligonucleotide
gguaaagauagguguccug

SEQ ID NO: 525144 - RNA, 19 nt, Artificial Sequence
  Description of Artificial Sequence: Synthetic oligonucleotide
ucacggccgaaggagacca

SEQ ID NO: 525145 - RNA, 19 nt, Artificial Sequence
  Description of Artificial Sequence: Synthetic oligonucleotide
caaaaucacggccgaagga

SEQ ID NO: 525146 - RNA, 19 nt, Artificial Sequence
  Description of Artificial Sequence: Synthetic oligonucleotide
cuauuguccucccaggugu

SEQ ID NO: 525147 - RNA, 19 nt, Artificial Sequence
  Description of Artificial Sequence: Synthetic oligonucleotide
gguuagucggggcaggcac

SEQ ID NO: 525148 - RNA, 19 nt, Artificial Sequence
  Description of Artificial Sequence: Synthetic oligonucleotide
ggccaaggcaaccugacca

SEQ ID NO: 525149 - RNA, 19 nt, Artificial Sequence
  Description of Artificial Sequence: Synthetic oligonucleotide
uccgucagcaaagccucag

SEQ ID NO: 525150 - RNA, 19 nt, Artificial Sequence
  Description of Artificial Sequence: Synthetic oligonucleotide
agccagaacaguguucacu

SEQ ID NO: 525151 - RNA, 19 nt, Artificial Sequence
  Description of Artificial Sequence: Synthetic oligonucleotide
gguguaguccuggaucacg

SEQ ID NO: 525152 - RNA, 19 nt, Artificial Sequence
  Description of Artificial Sequence: Synthetic oligonucleotide
uggaucacguugagaaguu

SEQ ID NO: 525153 - RNA, 19 nt, Artificial Sequence
  Description of Artificial Sequence: Synthetic oligonucleotide
gaguacagagggagauagg

SEQ ID NO: 525154 - RNA, 19 nt, Artificial Sequence
  Description of Artificial Sequence: Synthetic oligonucleotide
uccgcacacauggaguaga

SEQ ID NO: 525155 - RNA, 19 nt, Artificial Sequence
  Description of Artificial Sequence: Synthetic oligonucleotide
gaucacguugagaaguucu

SEQ ID NO: 525156 - RNA, 19 nt, Artificial Sequence
  Description of Artificial Sequence: Synthetic oligonucleotide
gcuauugaagaaggagagg

SEQ ID NO: 525157 - RNA, 19 nt, Artificial Sequence
  Description of Artificial Sequence: Synthetic oligonucleotide
aaaugccugcagguguacu

SEQ ID NO: 525158 - RNA, 19 nt, Artificial Sequence
  Description of Artificial Sequence: Synthetic oligonucleotide
auccggcacaaucaguaau

SEQ ID NO: 525159 - RNA, 19 nt, Artificial Sequence
  Description of Artificial Sequence: Synthetic oligonucleotide
ucuuuucguccuccagagu

SEQ ID NO: 525160 - RNA, 19 nt, Artificial Sequence
  Description of Artificial Sequence: Synthetic oligonucleotide
cucaaaugcucgauccgga

SEQ ID NO: 525161 - RNA, 19 nt, Artificial Sequence
  Description of Artificial Sequence: Synthetic oligonucleotide
acuucuacccgaacacucu

SEQ ID NO: 525162 - RNA, 19 nt, Artificial Sequence
  Description of Artificial Sequence: Synthetic oligonucleotide
accgagaaaagaacugaga

SEQ ID NO: 525163 - RNA, 19 nt, Artificial Sequence
  Description of Artificial Sequence: Synthetic oligonucleotide
gaugacaggguccuugguu

SEQ ID NO: 525164 - RNA, 19 nt, Artificial Sequence
  Description of Artificial Sequence: Synthetic oligonucleotide
cuucuacccgaacacucuc

SEQ ID NO: 525165 - RNA, 19 nt, Artificial Sequence
  Description of Artificial Sequence: Synthetic oligonucleotide
guugccuaguuucuuacau

SEQ ID NO: 525166 - RNA, 19 nt, Artificial Sequence
  Description of Artificial Sequence: Synthetic oligonucleotide
uaagcuacacaggcccgga

SEQ ID NO: 525167 - RNA, 19 nt, Artificial Sequence
  Description of Artificial Sequence: Synthetic oligonucleotide
aaugcucgauccggaguca

SEQ ID NO: 525168 - RNA, 19 nt, Artificial Sequence
  Description of Artificial Sequence: Synthetic oligonucleotide
ucguggaagugagcuauga

SEQ ID NO: 525169 - RNA, 19 nt, Artificial Sequence
  Description of Artificial Sequence: Synthetic oligonucleotide
ugaucugguaaggcgcuuc

SEQ ID NO: 525170 - RNA, 19 nt, Artificial Sequence
  Description of Artificial Sequence: Synthetic oligonucleotide
ugcucgauccggagucaug

SEQ ID NO: 525171 - RNA, 19 nt, Artificial Sequence
  Description of Artificial Sequence: Synthetic oligonucleotide
ucggcugguccgcacacau

SEQ ID NO: 525172 - RNA, 19 nt, Artificial Sequence
  Description of Artificial Sequence: Synthetic oligonucleotide
ccaagggcaaguacucagg

SEQ ID NO: 525173 - RNA, 19 nt, Artificial Sequence
  Description of Artificial Sequence: Synthetic oligonucleotide
aguucuuguugaggcuuuc

SEQ ID NO: 525174 - RNA, 19 nt, Artificial Sequence
  Description of Artificial Sequence: Synthetic oligonucleotide
aucaaugcuuaucgucuuu

SEQ ID NO: 525175 - RNA, 19 nt, Artificial Sequence
  Description of Artificial Sequence: Synthetic oligonucleotide
cuuagccgugucguucacg

SEQ ID NO: 525176 - RNA, 19 nt, Artificial Sequence
  Description of Artificial Sequence: Synthetic oligonucleotide
auaggacaacagcuccaca

SEQ ID NO: 525177 - RNA, 19 nt, Artificial Sequence
  Description of Artificial Sequence: Synthetic oligonucleotide
ggagaggaauuuguuacac

SEQ ID NO: 525178 - RNA, 19 nt, Artificial Sequence
  Description of Artificial Sequence: Synthetic oligonucleotide
ucccaucaaugcuuaucgu

SEQ ID NO: 525179 - RNA, 19 nt, Artificial Sequence
  Description of Artificial Sequence: Synthetic oligonucleotide
caucuccgucagcaaagcc

SEQ ID NO: 525180 - RNA, 19 nt, Artificial Sequence
  Description of Artificial Sequence: Synthetic oligonucleotide
acguucucuggggaaauga

SEQ ID NO: 525181 - RNA, 19 nt, Artificial Sequence
  Description of Artificial Sequence: Synthetic oligonucleotide
aguucccggauagaagcga

SEQ ID NO: 525182 - RNA, 19 nt, Artificial Sequence
  Description of Artificial Sequence: Synthetic oligonucleotide
guaaugacuuuccaagcuu

SEQ ID NO: 525183 - RNA, 19 nt, Artificial Sequence
  Description of Artificial Sequence: Synthetic oligonucleotide
ccgagaaaagaacugagaa

SEQ ID NO: 525184 - RNA, 19 nt, Artificial Sequence
  Description of Artificial Sequence: Synthetic oligonucleotide
acccauggcgggcgaguac

SEQ ID NO: 525185 - RNA, 19 nt, Artificial Sequence
  Description of Artificial Sequence: Synthetic oligonucleotide
acaucgaccuggacucaac

SEQ ID NO: 525186 - RNA, 19 nt, Artificial Sequence
  Description of Artificial Sequence: Synthetic oligonucleotide
acuucucguuucgugaaau

SEQ ID NO: 525187 - RNA, 19 nt, Artificial Sequence
  Description of Artificial Sequence: Synthetic oligonucleotide
guuucgugaaaugccugca

SEQ ID NO: 525188 - RNA, 19 nt, Artificial Sequence
  Description of Artificial Sequence: Synthetic oligonucleotide
auccaacccauggcgggcg

SEQ ID NO: 525189 - RNA, 19 nt, Artificial Sequence
  Description of Artificial Sequence: Synthetic oligonucleotide
gagaggaauuuguuacacu

SEQ ID NO: 525190 - RNA, 19 nt, Artificial Sequence
  Description of Artificial Sequence: Synthetic oligonucleotide
cagccgucuuucuggagug

SEQ ID NO: 525191 - RNA, 19 nt, Artificial Sequence
  Description of Artificial Sequence: Synthetic oligonucleotide
guaggcccgggcauacacg

SEQ ID NO: 525192 - RNA, 19 nt, Artificial Sequence
  Description of Artificial Sequence: Synthetic oligonucleotide
ggguaggaguccucaaaug

SEQ ID NO: 525193 - RNA, 19 nt, Artificial Sequence
  Description of Artificial Sequence: Synthetic oligonucleotide
caucacugccucacacaac

SEQ ID NO: 525194 - RNA, 19 nt, Artificial Sequence
  Description of Artificial Sequence: Synthetic oligonucleotide
ggugaugaagcaguaagcu

SEQ ID NO: 525195 - RNA, 19 nt, Artificial Sequence
  Description of Artificial Sequence: Synthetic oligonucleotide
cccaagggcaaguacucag

SEQ ID NO: 525196 - RNA, 19 nt, Artificial Sequence
  Description of Artificial Sequence: Synthetic oligonucleotide
ggaugauccggcacaauca

SEQ ID NO: 525197 - RNA, 19 nt, Artificial Sequence
  Description of Artificial Sequence: Synthetic oligonucleotide
cucguuucgugaaaugccu

SEQ ID NO: 525198 - RNA, 19 nt, Artificial Sequence
  Description of Artificial Sequence: Synthetic oligonucleotide
agugagcuaugacuuucuu

SEQ ID NO: 525199 - RNA, 19 nt, Artificial Sequence
  Description of Artificial Sequence: Synthetic oligonucleotide
caaaugugcauaagggcau

SEQ ID NO: 525200 - RNA, 19 nt, Artificial Sequence
  Description of Artificial Sequence: Synthetic oligonucleotide
gcucuggcgcuucagggcc

SEQ ID NO: 525201 - RNA, 19 nt, Artificial Sequence
  Description of Artificial Sequence: Synthetic oligonucleotide
gauccggcacaaucaguaa

SEQ ID NO: 525202 - RNA, 19 nt, Artificial Sequence
  Description of Artificial Sequence: Synthetic oligonucleotide
uaucgucuuugggacuucu

SEQ ID NO: 525203 - RNA, 19 nt, Artificial Sequence
  Description of Artificial Sequence: Synthetic oligonucleotide
cguuucgugaaaugccugc

SEQ ID NO: 525204 - RNA, 19 nt, Artificial Sequence
  Description of Artificial Sequence: Synthetic oligonucleotide
cucuacccauaccucagca

SEQ ID NO: 525205 - RNA, 19 nt, Artificial Sequence
  Description of Artificial Sequence: Synthetic oligonucleotide
ugauaacgucagccagaac

SEQ ID NO: 525206 - RNA, 19 nt, Artificial Sequence
  Description of Artificial Sequence: Synthetic oligonucleotide
caguaauguagagaagaaa

SEQ ID NO: 525207 - RNA, 19 nt, Artificial Sequence
  Description of Artificial Sequence: Synthetic oligonucleotide
cgugaaucuguuuaaaugu

SEQ ID NO: 525208 - RNA, 19 nt, Artificial Sequence
  Description of Artificial Sequence: Synthetic oligonucleotide
cgaguacagagggagauag

SEQ ID NO: 525209 - RNA, 19 nt, Artificial Sequence
  Description of Artificial Sequence: Synthetic oligonucleotide
ucugaucaugcagguuagu

SEQ ID NO: 525210 - RNA, 19 nt, Artificial Sequence
  Description of Artificial Sequence: Synthetic oligonucleotide
agagucgugcauggucuug

SEQ ID NO: 525211 - RNA, 19 nt, Artificial Sequence
  Description of Artificial Sequence: Synthetic oligonucleotide
aauccccguuuuggagagg

SEQ ID NO: 525212 - RNA, 19 nt, Artificial Sequence
  Description of Artificial Sequence: Synthetic oligonucleotide
agugccaaguuuagcccca

SEQ ID NO: 525213 - RNA, 19 nt, Artificial Sequence
  Description of Artificial Sequence: Synthetic oligonucleotide
acacggacacgagcggguc

SEQ ID NO: 525214 - RNA, 19 nt, Artificial Sequence
  Description of Artificial Sequence: Synthetic oligonucleotide
agcggguccccaauuccuc

SEQ ID NO: 525215 - RNA, 19 nt, Artificial Sequence
  Description of Artificial Sequence: Synthetic oligonucleotide
uucguccuccagagugaga

SEQ ID NO: 525216 - RNA, 19 nt, Artificial Sequence
  Description of Artificial Sequence: Synthetic oligonucleotide
caucgaccuggacucaaca

SEQ ID NO: 525217 - RNA, 19 nt, Artificial Sequence
  Description of Artificial Sequence: Synthetic oligonucleotide
ggacagagguguagauucg

SEQ ID NO: 525218 - RNA, 19 nt, Artificial Sequence
  Description of Artificial Sequence: Synthetic oligonucleotide
guuggccaaggcaaccuga

SEQ ID NO: 525219 - RNA, 19 nt, Artificial Sequence
  Description of Artificial Sequence: Synthetic oligonucleotide
cacggacacgagcgggucc

SEQ ID NO: 525220 - RNA, 19 nt, Artificial Sequence
  Description of Artificial Sequence: Synthetic oligonucleotide
ccaucaaugcuuaucgucu

SEQ ID NO: 525221 - RNA, 19 nt, Artificial Sequence
  Description of Artificial Sequence: Synthetic oligonucleotide
uuguuacgaagguccccau

SEQ ID NO: 525222 - RNA, 19 nt, Artificial Sequence
  Description of Artificial Sequence: Synthetic oligonucleotide
caauuccucugaucaugca

SEQ ID NO: 525223 - RNA, 19 nt, Artificial Sequence
  Description of Artificial Sequence: Synthetic oligonucleotide
ccaaguuuagccccagcga

SEQ ID NO: 525224 - RNA, 19 nt, Artificial Sequence
  Description of Artificial Sequence: Synthetic oligonucleotide
uccaacccauggcgggcga

SEQ ID NO: 525225 - RNA, 19 nt, Artificial Sequence
  Description of Artificial Sequence: Synthetic oligonucleotide
caaaugcucgauccggagu

SEQ ID NO: 525226 - RNA, 19 nt, Artificial Sequence
  Description of Artificial Sequence: Synthetic oligonucleotide
acaaguaggcccgggcaua

SEQ ID NO: 525227 - RNA, 19 nt, Artificial Sequence
  Description of Artificial Sequence: Synthetic oligonucleotide
cuggugcuugauaaaggcu

SEQ ID NO: 525228 - RNA, 19 nt, Artificial Sequence
  Description of Artificial Sequence: Synthetic oligonucleotide
cagagggagauaggacaac

SEQ ID NO: 525229 - RNA, 19 nt, Artificial Sequence
  Description of Artificial Sequence: Synthetic oligonucleotide
aucgucuuugggacuucug

SEQ ID NO: 525230 - RNA, 19 nt, Artificial Sequence
  Description of Artificial Sequence: Synthetic oligonucleotide
gugcauggucuugcaaaug

SEQ ID NO: 525231 - RNA, 19 nt, Artificial Sequence
  Description of Artificial Sequence: Synthetic oligonucleotide
uggaguagaugcgcucaua

SEQ ID NO: 525232 - RNA, 19 nt, Artificial Sequence
  Description of Artificial Sequence: Synthetic oligonucleotide
gcauguuuccuuagccgug

SEQ ID NO: 525233 - RNA, 19 nt, Artificial Sequence
  Description of Artificial Sequence: Synthetic oligonucleotide
uuaucgucuuugggacuuc

SEQ ID NO: 525234 - RNA, 19 nt, Artificial Sequence
  Description of Artificial Sequence: Synthetic oligonucleotide
agguuagucggggcaggca

SEQ ID NO: 525235 - RNA, 19 nt, Artificial Sequence
  Description of Artificial Sequence: Synthetic oligonucleotide
guuuagccccagcgaacga

SEQ ID NO: 525236 - RNA, 19 nt, Artificial Sequence
  Description of Artificial Sequence: Synthetic oligonucleotide
guucacacuauggaucaau

SEQ ID NO: 525237 - RNA, 19 nt, Artificial Sequence
  Description of Artificial Sequence: Synthetic oligonucleotide
augauccggcacaaucagu

SEQ ID NO: 525238 - RNA, 19 nt, Artificial Sequence
  Description of Artificial Sequence: Synthetic oligonucleotide
caucacuauuguccuccca

SEQ ID NO: 525239 - RNA, 19 nt, Artificial Sequence
  Description of Artificial Sequence: Synthetic oligonucleotide
acacgagcggguccccaau

SEQ ID NO: 525240 - RNA, 19 nt, Artificial Sequence
  Description of Artificial Sequence: Synthetic oligonucleotide
guuacacuucaagauggau

SEQ ID NO: 525241 - RNA, 19 nt, Artificial Sequence
  Description of Artificial Sequence: Synthetic oligonucleotide
cacuauuguccucccaggu

SEQ ID NO: 525242 - RNA, 19 nt, Artificial Sequence
  Description of Artificial Sequence: Synthetic oligonucleotide
acacuucaagauggaugcu

SEQ ID NO: 525243 - RNA, 19 nt, Artificial Sequence
  Description of Artificial Sequence: Synthetic oligonucleotide
aaguaggcccgggcauaca

SEQ ID NO: 525244 - RNA, 19 nt, Artificial Sequence
  Description of Artificial Sequence: Synthetic oligonucleotide
ggagaugcuuggggaagcc

SEQ ID NO: 525245 - RNA, 19 nt, Artificial Sequence
  Description of Artificial Sequence: Synthetic oligonucleotide
ccaaccgguucacacuaug

SEQ ID NO: 525246 - RNA, 19 nt, Artificial Sequence
  Description of Artificial Sequence: Synthetic oligonucleotide
cggcagaaacuuuuccacc

SEQ ID NO: 525247 - RNA, 19 nt, Artificial Sequence
  Description of Artificial Sequence: Synthetic oligonucleotide
agguugacagagaguuggu

SEQ ID NO: 525248 - RNA, 19 nt, Artificial Sequence
  Description of Artificial Sequence: Synthetic oligonucleotide
gcccggacaaaugcagccg

SEQ ID NO: 525249 - RNA, 19 nt, Artificial Sequence
  Description of Artificial Sequence: Synthetic oligonucleotide
gaacagguuccagguugca

SEQ ID NO: 525250 - RNA, 19 nt, Artificial Sequence
  Description of Artificial Sequence: Synthetic oligonucleotide
uccccguuuuggagaggaa

SEQ ID NO: 525251 - RNA, 19 nt, Artificial Sequence
  Description of Artificial Sequence: Synthetic oligonucleotide
caaagcauuguugccuagu

SEQ ID NO: 525252 - RNA, 19 nt, Artificial Sequence
  Description of Artificial Sequence: Synthetic oligonucleotide
guguagauucggauuuugu

SEQ ID NO: 525253 - RNA, 19 nt, Artificial Sequence
  Description of Artificial Sequence: Synthetic oligonucleotide
ccgucagcaaagccucagg

SEQ ID NO: 525254 - RNA, 19 nt, Artificial Sequence
  Description of Artificial Sequence: Synthetic oligonucleotide
cacggaguucaagagcaaa

SEQ ID NO: 525255 - RNA, 19 nt, Artificial Sequence
  Description of Artificial Sequence: Synthetic oligonucleotide
gcaaccugaccagaaugca

SEQ ID NO: 525256 - RNA, 19 nt, Artificial Sequence
  Description of Artificial Sequence: Synthetic oligonucleotide
cacguucucuggggaaaug

SEQ ID NO: 525257 - RNA, 19 nt, Artificial Sequence
  Description of Artificial Sequence: Synthetic oligonucleotide
gucgugcauggucuugcaa

SEQ ID NO: 525258 - RNA, 19 nt, Artificial Sequence
  Description of Artificial Sequence: Synthetic oligonucleotide
cgaacacucucuuucugga

SEQ ID NO: 525259 - RNA, 19 nt, Artificial Sequence
  Description of Artificial Sequence: Synthetic oligonucleotide
gaguccucaaaugcucgau

SEQ ID NO: 525260 - RNA, 19 nt, Artificial Sequence
  Description of Artificial Sequence: Synthetic oligonucleotide
ccaccgagaaaagaacuga

SEQ ID NO: 525261 - RNA, 19 nt, Artificial Sequence
  Description of Artificial Sequence: Synthetic oligonucleotide
caucaaugcuuaucgucuu

SEQ ID NO: 525262 - RNA, 19 nt, Artificial Sequence
  Description of Artificial Sequence: Synthetic oligonucleotide
cacuucucguuucgugaaa

SEQ ID NO: 525263 - RNA, 19 nt, Artificial Sequence
  Description of Artificial Sequence: Synthetic oligonucleotide
uaaggcgcuucggcugguc

SEQ ID NO: 525264 - RNA, 19 nt, Artificial Sequence
  Description of Artificial Sequence: Synthetic oligonucleotide
gagcggguccccaauuccu

SEQ ID NO: 525265 - RNA, 19 nt, Artificial Sequence
  Description of Artificial Sequence: Synthetic oligonucleotide
cuccgugaaucuguuuaaa

SEQ ID NO: 525266 - RNA, 19 nt, Artificial Sequence
  Description of Artificial Sequence: Synthetic oligonucleotide
cgagcggguccccaauucc

SEQ ID NO: 525267 - RNA, 19 nt, Artificial Sequence
  Description of Artificial Sequence: Synthetic oligonucleotide
augcucgauccggagucau

SEQ ID NO: 525268 - RNA, 19 nt, Artificial Sequence
  Description of Artificial Sequence: Synthetic oligonucleotide
ggaucacguugagaaguuc

SEQ ID NO: 525269 - RNA, 19 nt, Artificial Sequence
  Description of Artificial Sequence: Synthetic oligonucleotide
ggcgcuucggcugguccgc

SEQ ID NO: 525270 - RNA, 19 nt, Artificial Sequence
  Description of Artificial Sequence: Synthetic oligonucleotide
ccagaaacggcagaaacuu

SEQ ID NO: 525271 - RNA, 19 nt, Artificial Sequence
  Description of Artificial Sequence: Synthetic oligonucleotide
gcucgauccggagucaugu

SEQ ID NO: 525272 - RNA, 19 nt, Artificial Sequence
  Description of Artificial Sequence: Synthetic oligonucleotide
uagccgugucguucacguu

SEQ ID NO: 525273 - RNA, 19 nt, Artificial Sequence
  Description of Artificial Sequence: Synthetic oligonucleotide
ccauaccucagcacaguua

SEQ ID NO: 525274 - RNA, 19 nt, Artificial Sequence
  Description of Artificial Sequence: Synthetic oligonucleotide
cuccgucagcaaagccuca

SEQ ID NO: 525275 - RNA, 19 nt, Artificial Sequence
  Description of Artificial Sequence: Synthetic oligonucleotide
guucccggauagaagcgau

SEQ ID NO: 525276 - RNA, 19 nt, Artificial Sequence
  Description of Artificial Sequence: Synthetic oligonucleotide
gcuuaucgucuuugggacu

SEQ ID NO: 525277 - RNA, 19 nt, Artificial Sequence
  Description of Artificial Sequence: Synthetic oligonucleotide
ccggacaaaugcagccguc

SEQ ID NO: 525278 - RNA, 19 nt, Artificial Sequence
  Description of Artificial Sequence: Synthetic oligonucleotide
ccauggcgggcgaguacag

SEQ ID NO: 525279 - RNA, 19 nt, Artificial Sequence
  Description of Artificial Sequence: Synthetic oligonucleotide
gcauaagggcauucaggau

SEQ ID NO: 525280 - RNA, 19 nt, Artificial Sequence
  Description of Artificial Sequence: Synthetic oligonucleotide
ggacaaaugcagccgucuu

SEQ ID NO: 525281 - RNA, 19 nt, Artificial Sequence
  Description of Artificial Sequence: Synthetic oligonucleotide
cagaaacggcagaaacuuu

SEQ ID NO: 525282 - RNA, 19 nt, Artificial Sequence
  Description of Artificial Sequence: Synthetic oligonucleotide
gauagguguccuggcucau

SEQ ID NO: 525283 - RNA, 19 nt, Artificial Sequence
  Description of Artificial Sequence: Synthetic oligonucleotide
cuacccgaacacucucuuu

SEQ ID NO: 525284 - RNA, 19 nt, Artificial Sequence
  Description of Artificial Sequence: Synthetic oligonucleotide
cccguuuuggagaggaauu

SEQ ID NO: 525285 - RNA, 19 nt, Artificial Sequence
  Description of Artificial Sequence: Synthetic oligonucleotide
cguucacguucucugggga

SEQ ID NO: 525286 - RNA, 19 nt, Artificial Sequence
  Description of Artificial Sequence: Synthetic oligonucleotide
caugggcuagaaugcuauu

SEQ ID NO: 525287 - RNA, 19 nt, Artificial Sequence
  Description of Artificial Sequence: Synthetic oligonucleotide
gguugacagagaguugguu

SEQ ID NO: 525288 - RNA, 19 nt, Artificial Sequence
  Description of Artificial Sequence: Synthetic oligonucleotide
cgauccggagucaugugcu

SEQ ID NO: 525289 - RNA, 19 nt, Artificial Sequence
  Description of Artificial Sequence: Synthetic oligonucleotide
cgacacaaguaggcccggg

SEQ ID NO: 525290 - RNA, 19 nt, Artificial Sequence
  Description of Artificial Sequence: Synthetic oligonucleotide
cggauuuugucaucacuau

SEQ ID NO: 525291 - RNA, 19 nt, Artificial Sequence
  Description of Artificial Sequence: Synthetic oligonucleotide
gcgaguacagagggagaua

SEQ ID NO: 525292 - RNA, 19 nt, Artificial Sequence
  Description of Artificial Sequence: Synthetic oligonucleotide
cagagucgugcauggucuu

SEQ ID NO: 525293 - RNA, 19 nt, Artificial Sequence
  Description of Artificial Sequence: Synthetic oligonucleotide
cgucacacucuuuaaucau

SEQ ID NO: 525294 - RNA, 19 nt, Artificial Sequence
  Description of Artificial Sequence: Synthetic oligonucleotide
gcacucugaaauccccguu

SEQ ID NO: 525295 - RNA, 19 nt, Artificial Sequence
  Description of Artificial Sequence: Synthetic oligonucleotide
gcggguccccaauuccucu

SEQ ID NO: 525296 - RNA, 19 nt, Artificial Sequence
  Description of Artificial Sequence: Synthetic oligonucleotide
ggacacgagcgggucccca

SEQ ID NO: 525297 - RNA, 19 nt, Artificial Sequence
  Description of Artificial Sequence: Synthetic oligonucleotide
cccggacaaaugcagccgu

SEQ ID NO: 525298 - RNA, 19 nt, Artificial Sequence
  Description of Artificial Sequence: Synthetic oligonucleotide
gguccccaauuccucugau

SEQ ID NO: 525299 - RNA, 19 nt, Artificial Sequence
  Description of Artificial Sequence: Synthetic oligonucleotide
cacgagcggguccccaauu

SEQ ID NO: 525300 - RNA, 19 nt, Artificial Sequence
  Description of Artificial Sequence: Synthetic oligonucleotide
guaaggcgcuucggcuggu

SEQ ID NO: 525301 - RNA, 19 nt, Artificial Sequence
  Description of Artificial Sequence: Synthetic oligonucleotide
ccccguuuuggagaggaau

SEQ ID NO: 525302 - RNA, 19 nt, Artificial Sequence
  Description of Artificial Sequence: Synthetic oligonucleotide
ccccaagggcaaguacuca

SEQ ID NO: 525303 - RNA, 19 nt, Artificial Sequence
  Description of Artificial Sequence: Synthetic oligonucleotide
ccguuuuggagaggaauuu

SEQ ID NO: 525304 - RNA, 19 nt, Artificial Sequence
  Description of Artificial Sequence: Synthetic oligonucleotide
cggacaaaugcagccgucu

SEQ ID NO: 525305 - RNA, 19 nt, Artificial Sequence
  Description of Artificial Sequence: Synthetic oligonucleotide
ccccguacaggcugucauu

SEQ ID NO: 525306 - RNA, 19 nt, Artificial Sequence
  Description of Artificial Sequence: Synthetic oligonucleotide
cggacacgagcgggucccc

SEQ ID NO: 525307 - RNA, 19 nt, Artificial Sequence
  Description of Artificial Sequence: Synthetic oligonucleotide
cccggauagaagcgaucuu

SEQ ID NO: 525308 - RNA, 19 nt, Artificial Sequence
  Description of Artificial Sequence: Synthetic oligonucleotide
gccaaccgguucacacuau

SEQ ID NO: 525309 - RNA, 19 nt, Artificial Sequence
  Description of Artificial Sequence: Synthetic oligonucleotide
gcgcuucggcugguccgca

SEQ ID NO: 525310 - RNA, 19 nt, Artificial Sequence
  Description of Artificial Sequence: Synthetic oligonucleotide
aacgucaaaacuuugcggc

SEQ ID NO: 525311 - RNA, 19 nt, Artificial Sequence
  Description of Artificial Sequence: Synthetic oligonucleotide
gaaugauuggugcugaucg

SEQ ID NO: 525312 - RNA, 19 nt, Artificial Sequence
  Description of Artificial Sequence: Synthetic oligonucleotide
aauguguaaacccagcucu

SEQ ID NO: 525313 - RNA, 19 nt, Artificial Sequence
  Description of Artificial Sequence: Synthetic oligonucleotide
auagauaagacuuaucccu

SEQ ID NO: 525314 - RNA, 19 nt, Artificial Sequence
  Description of Artificial Sequence: Synthetic oligonucleotide
aaagguuaaaauuggguca

SEQ ID NO: 525315 - RNA, 19 nt, Artificial Sequence
  Description of Artificial Sequence: Synthetic oligonucleotide
uaagaccucagguagaggg

SEQ ID NO: 525316 - RNA, 19 nt, Artificial Sequence
  Description of Artificial Sequence: Synthetic oligonucleotide
uuagaugagcaucauaaug

SEQ ID NO: 525317 - RNA, 19 nt, Artificial Sequence
  Description of Artificial Sequence: Synthetic oligonucleotide
uuggaauuaaguaauucug

SEQ ID NO: 525318 - RNA, 19 nt, Artificial Sequence
  Description of Artificial Sequence: Synthetic oligonucleotide
gauggaaaucucuaugagg

SEQ ID NO: 525319 - RNA, 19 nt, Artificial Sequence
  Description of Artificial Sequence: Synthetic oligonucleotide
ucuaucauguucaugauuu

SEQ ID NO: 525320 - RNA, 19 nt, Artificial Sequence
  Description of Artificial Sequence: Synthetic oligonucleotide
uucaucgagaguuucauug

SEQ ID NO: 525321 - RNA, 19 nt, Artificial Sequence
  Description of Artificial Sequence: Synthetic oligonucleotide
aaacgucaaaacuuugcgg

SEQ ID NO: 525322 - RNA, 19 nt, Artificial Sequence
  Description of Artificial Sequence: Synthetic oligonucleotide
uuaaaauugggucacugaa

SEQ ID NO: 525323 - RNA, 19 nt, Artificial Sequence
  Description of Artificial Sequence: Synthetic oligonucleotide
auggauaaucuccuuaugg

SEQ ID NO: 525324 - RNA, 19 nt, Artificial Sequence
  Description of Artificial Sequence: Synthetic oligonucleotide
guuuauuaaguuucguagg

SEQ ID NO: 525325 - RNA, 19 nt, Artificial Sequence
  Description of Artificial Sequence: Synthetic oligonucleotide
ucauaaugcuucuuaagag

SEQ ID NO: 525326 - RNA, 19 nt, Artificial Sequence
  Description of Artificial Sequence: Synthetic oligonucleotide
aaauugauuugcucaagug

SEQ ID NO: 525327 - RNA, 19 nt, Artificial Sequence
  Description of Artificial Sequence: Synthetic oligonucleotide
uuuuccuagguuuauuaag

SEQ ID NO: 525328 - RNA, 19 nt, Artificial Sequence
  Description of Artificial Sequence: Synthetic oligonucleotide
ugaacauaucaaucaaagg

SEQ ID NO: 525329 - RNA, 19 nt, Artificial Sequence
  Description of Artificial Sequence: Synthetic oligonucleotide
gaauuaaguaauucugcag

SEQ ID NO: 525330 - RNA, 19 nt, Artificial Sequence
  Description of Artificial Sequence: Synthetic oligonucleotide
uggaauuaaguaauucugc

SEQ ID NO: 525331 - RNA, 19 nt, Artificial Sequence
  Description of Artificial Sequence: Synthetic oligonucleotide
gguuuauuaaguuucguag

SEQ ID NO: 525332 - RNA, 19 nt, Artificial Sequence
  Description of Artificial Sequence: Synthetic oligonucleotide
uacuguauaggcaugcucu

SEQ ID NO: 525333 - RNA, 19 nt, Artificial Sequence
  Description of Artificial Sequence: Synthetic oligonucleotide
uauuaaguuucguaggcca

SEQ ID NO: 525334 - RNA, 19 nt, Artificial Sequence
  Description of Artificial Sequence: Synthetic oligonucleotide
cauagauaagacuuauccc

SEQ ID NO: 525335 - RNA, 19 nt, Artificial Sequence
  Description of Artificial Sequence: Synthetic oligonucleotide
agaaguaacagucuccaca

SEQ ID NO: 525336 - RNA, 19 nt, Artificial Sequence
  Description of Artificial Sequence: Synthetic oligonucleotide
acuuuguauaugaugaugg

SEQ ID NO: 525337 - RNA, 19 nt, Artificial Sequence
  Description of Artificial Sequence: Synthetic oligonucleotide
aaaacuuugcggcgcuucg

SEQ ID NO: 525338 - RNA, 19 nt, Artificial Sequence
  Description of Artificial Sequence: Synthetic oligonucleotide
agcgccuaggacuugagac

SEQ ID NO: 525339 - RNA, 19 nt, Artificial Sequence
  Description of Artificial Sequence: Synthetic oligonucleotide
uuuccuagguuuauuaagu

SEQ ID NO: 525340 - RNA, 19 nt, Artificial Sequence
  Description of Artificial Sequence: Synthetic oligonucleotide
gaaauuucgauagugccug

SEQ ID NO: 525341 - RNA, 19 nt, Artificial Sequence
  Description of Artificial Sequence: Synthetic oligonucleotide
ucaugauuuucucugguac

SEQ ID NO: 525342 - RNA, 19 nt, Artificial Sequence
  Description of Artificial Sequence: Synthetic oligonucleotide
gcauagauaagacuuaucc

SEQ ID NO: 525343 - RNA, 19 nt, Artificial Sequence
  Description of Artificial Sequence: Synthetic oligonucleotide
ucuuuucuaaacucugugc

SEQ ID NO: 525344 - RNA, 19 nt, Artificial Sequence
  Description of Artificial Sequence: Synthetic oligonucleotide
aaugauuggugcugaucgg

SEQ ID NO: 525345 - RNA, 19 nt, Artificial Sequence
  Description of Artificial Sequence: Synthetic oligonucleotide
aacauugcgguacguguuc

SEQ ID NO: 525346 - RNA, 19 nt, Artificial Sequence
  Description of Artificial Sequence: Synthetic oligonucleotide
auaguaguguaugugauug

SEQ ID NO: 525347 - RNA, 19 nt, Artificial Sequence
  Description of Artificial Sequence: Synthetic oligonucleotide
aaacuuacauauuuucuuu

SEQ ID NO: 525348 - RNA, 19 nt, Artificial Sequence
  Description of Artificial Sequence: Synthetic oligonucleotide
ugcucauauuugaagagug

SEQ ID NO: 525349 - RNA, 19 nt, Artificial Sequence
  Description of Artificial Sequence: Synthetic oligonucleotide
gaaauuuucaucgagaguu

SEQ ID NO: 525350 - RNA, 19 nt, Artificial Sequence
  Description of Artificial Sequence: Synthetic oligonucleotide
uucaucgaaugauuggugc

SEQ ID NO: 525351 - RNA, 19 nt, Artificial Sequence
  Description of Artificial Sequence: Synthetic oligonucleotide
agaacuugaacccaauuua

SEQ ID NO: 525352 - RNA, 19 nt, Artificial Sequence
  Description of Artificial Sequence: Synthetic oligonucleotide
ugaugcuucucacugguac

SEQ ID NO: 525353 - RNA, 19 nt, Artificial Sequence
  Description of Artificial Sequence: Synthetic oligonucleotide
cuuuguauaugaugauggg

SEQ ID NO: 525354 - RNA, 19 nt, Artificial Sequence
  Description of Artificial Sequence: Synthetic oligonucleotide
uagaaucauagcauucacc

SEQ ID NO: 525355 - RNA, 19 nt, Artificial Sequence
  Description of Artificial Sequence: Synthetic oligonucleotide
uuaugggugauggaaaucu

SEQ ID NO: 525356 - RNA, 19 nt, Artificial Sequence
  Description of Artificial Sequence: Synthetic oligonucleotide
uaugugauuggcaaagcua

SEQ ID NO: 525357 - RNA, 19 nt, Artificial Sequence
  Description of Artificial Sequence: Synthetic oligonucleotide
uugaucuauucacuaagcu

SEQ ID NO: 525358 - RNA, 19 nt, Artificial Sequence
  Description of Artificial Sequence: Synthetic oligonucleotide
ugaucuauucacuaagcua

SEQ ID NO: 525359 - RNA, 19 nt, Artificial Sequence
  Description of Artificial Sequence: Synthetic oligonucleotide
uugaauuguuccauaacau

SEQ ID NO: 525360 - RNA, 19 nt, Artificial Sequence
  Description of Artificial Sequence: Synthetic oligonucleotide
ucuaugaggacacggccca

SEQ ID NO: 525361 - RNA, 19 nt, Artificial Sequence
  Description of Artificial Sequence: Synthetic oligonucleotide
ugcaaacuuacauauuuuc

SEQ ID NO: 525362 - RNA, 19 nt, Artificial Sequence
  Description of Artificial Sequence: Synthetic oligonucleotide
aucauguucaguccaguug

SEQ ID NO: 525363 - RNA, 19 nt, Artificial Sequence
  Description of Artificial Sequence: Synthetic oligonucleotide
ugggcaaagcuaaguaagg

SEQ ID NO: 525364 - RNA, 19 nt, Artificial Sequence
  Description of Artificial Sequence: Synthetic oligonucleotide
uucgauagugccugcaccc

SEQ ID NO: 525365 - RNA, 19 nt, Artificial Sequence
  Description of Artificial Sequence: Synthetic oligonucleotide
aaauuucgauagugccugc

SEQ ID NO: 525366 - RNA, 19 nt, Artificial Sequence
  Description of Artificial Sequence: Synthetic oligonucleotide
cuucucucgaucaugggug

SEQ ID NO: 525367 - RNA, 19 nt, Artificial Sequence
  Description of Artificial Sequence: Synthetic oligonucleotide
uuguuccauaacauugcgg

SEQ ID NO: 525368 - RNA, 19 nt, Artificial Sequence
  Description of Artificial Sequence: Synthetic oligonucleotide
ucccguuugcauuacuagg

SEQ ID NO: 525369 - RNA, 19 nt, Artificial Sequence
  Description of Artificial Sequence: Synthetic oligonucleotide
uuucuuaugggugauggaa

SEQ ID NO: 525370 - RNA, 19 nt, Artificial Sequence
  Description of Artificial Sequence: Synthetic oligonucleotide
uuucgauagugccugcacc

SEQ ID NO: 525371 - RNA, 19 nt, Artificial Sequence
  Description of Artificial Sequence: Synthetic oligonucleotide
ugaaauuuucaucgagagu

SEQ ID NO: 525372 - RNA, 19 nt, Artificial Sequence
  Description of Artificial Sequence: Synthetic oligonucleotide
guuugcauuacuaggagac

SEQ ID NO: 525373 - RNA, 19 nt, Artificial Sequence
  Description of Artificial Sequence: Synthetic oligonucleotide
ucgucuugcagguaagacc

SEQ ID NO: 525374 - RNA, 19 nt, Artificial Sequence
  Description of Artificial Sequence: Synthetic oligonucleotide
uucuuaagagcacaggcuu

SEQ ID NO: 525375 - RNA, 19 nt, Artificial Sequence
  Description of Artificial Sequence: Synthetic oligonucleotide
uccauaacauugcgguacg

SEQ ID NO: 525376 - RNA, 19 nt, Artificial Sequence
  Description of Artificial Sequence: Synthetic oligonucleotide
ucuuugugcucauauuuga

SEQ ID NO: 525377 - RNA, 19 nt, Artificial Sequence
  Description of Artificial Sequence: Synthetic oligonucleotide
gaugauaacacugcucuuc

SEQ ID NO: 525378 - RNA, 19 nt, Artificial Sequence
  Description of Artificial Sequence: Synthetic oligonucleotide
ucauauacuuuacgucaag

SEQ ID NO: 525379 - RNA, 19 nt, Artificial Sequence
  Description of Artificial Sequence: Synthetic oligonucleotide
cuuuacgucaaguucuguc

SEQ ID NO: 525380 - RNA, 19 nt, Artificial Sequence
  Description of Artificial Sequence: Synthetic oligonucleotide
accuucaucgaaugauugg

SEQ ID NO: 525381 - RNA, 19 nt, Artificial Sequence
  Description of Artificial Sequence: Synthetic oligonucleotide
gacuuaucccuuauucugg

SEQ ID NO: 525382 - RNA, 19 nt, Artificial Sequence
  Description of Artificial Sequence: Synthetic oligonucleotide
auacuuuacgucaaguucu

SEQ ID NO: 525383 - RNA, 19 nt, Artificial Sequence
  Description of Artificial Sequence: Synthetic oligonucleotide
uuauuaaguuucguaggcc

SEQ ID NO: 525384 - RNA, 19 nt, Artificial Sequence
  Description of Artificial Sequence: Synthetic oligonucleotide
uugcuuacuguauaggcau

SEQ ID NO: 525385 - RNA, 19 nt, Artificial Sequence
  Description of Artificial Sequence: Synthetic oligonucleotide
cacuaagcuauucauuuac

SEQ ID NO: 525386 - RNA, 19 nt, Artificial Sequence
  Description of Artificial Sequence: Synthetic oligonucleotide
uuugcauuacuaggagacg

SEQ ID NO: 525387 - RNA, 19 nt, Artificial Sequence
  Description of Artificial Sequence: Synthetic oligonucleotide
ugaauuguuccauaacauu

SEQ ID NO: 525388 - RNA, 19 nt, Artificial Sequence
  Description of Artificial Sequence: Synthetic oligonucleotide
uguauaugaugaugggaac

SEQ ID NO: 525389 - RNA, 19 nt, Artificial Sequence
  Description of Artificial Sequence: Synthetic oligonucleotide
cauuacuaggagacguggg

SEQ ID NO: 525390 - RNA, 19 nt, Artificial Sequence
  Description of Artificial Sequence: Synthetic oligonucleotide
acuaagcuauucauuuacc

SEQ ID NO: 525391 - RNA, 19 nt, Artificial Sequence
  Description of Artificial Sequence: Synthetic oligonucleotide
auugcgguacguguucucc

SEQ ID NO: 525392 - RNA, 19 nt, Artificial Sequence
  Description of Artificial Sequence: Synthetic oligonucleotide
uuaucccuuauucuggcua

SEQ ID NO: 525393 - RNA, 19 nt, Artificial Sequence
  Description of Artificial Sequence: Synthetic oligonucleotide
cagauagucaggagguggg

SEQ ID NO: 525394 - RNA, 19 nt, Artificial Sequence
  Description of Artificial Sequence: Synthetic oligonucleotide
cuaaguaaggucuuguugu

SEQ ID NO: 525395 - RNA, 19 nt, Artificial Sequence
  Description of Artificial Sequence: Synthetic oligonucleotide
uguauaggcaugcucugau

SEQ ID NO: 525396 - RNA, 19 nt, Artificial Sequence
  Description of Artificial Sequence: Synthetic oligonucleotide
aacuuacauauuuucuuua

SEQ ID NO: 525397 - RNA, 19 nt, Artificial Sequence
  Description of Artificial Sequence: Synthetic oligonucleotide
ucuuguuguugccagcagu

SEQ ID NO: 525398 - RNA, 19 nt, Artificial Sequence
  Description of Artificial Sequence: Synthetic oligonucleotide
gaucuauucacuaagcuau

SEQ ID NO: 525399 - RNA, 19 nt, Artificial Sequence
  Description of Artificial Sequence: Synthetic oligonucleotide
ucgagaguuucauugaguu

SEQ ID NO: 525400 - RNA, 19 nt, Artificial Sequence
  Description of Artificial Sequence: Synthetic oligonucleotide
guuaaaauugggucacuga

SEQ ID NO: 525401 - RNA, 19 nt, Artificial Sequence
  Description of Artificial Sequence: Synthetic oligonucleotide
ugcauuacuaggagacgug

SEQ ID NO: 525402 - RNA, 19 nt, Artificial Sequence
  Description of Artificial Sequence: Synthetic oligonucleotide
uuugguggguauuuagaaa

SEQ ID NO: 525403 - RNA, 19 nt, Artificial Sequence
  Description of Artificial Sequence: Synthetic oligonucleotide
ucaucgaaugauuggugcu

SEQ ID NO: 525404 - RNA, 19 nt, Artificial Sequence
  Description of Artificial Sequence: Synthetic oligonucleotide
aaagcuaaguaaggucuug

SEQ ID NO: 525405 - RNA, 19 nt, Artificial Sequence
  Description of Artificial Sequence: Synthetic oligonucleotide
ucaucgagaguuucauuga

SEQ ID NO: 525406 - RNA, 19 nt, Artificial Sequence
  Description of Artificial Sequence: Synthetic oligonucleotide
acgucaaaacuuugcggcg

SEQ ID NO: 525407 - RNA, 19 nt, Artificial Sequence
  Description of Artificial Sequence: Synthetic oligonucleotide
caucacaacagguuuccug

SEQ ID NO: 525408 - RNA, 19 nt, Artificial Sequence
  Description of Artificial Sequence: Synthetic oligonucleotide
ggugucaugcucuccauag

SEQ ID NO: 525409 - RNA, 19 nt, Artificial Sequence
  Description of Artificial Sequence: Synthetic oligonucleotide
aucguaguaggcuuuuccu

SEQ ID NO: 525410 - RNA, 19 nt, Artificial Sequence
  Description of Artificial Sequence: Synthetic oligonucleotide
cucuguuaaacugagaaaa

SEQ ID NO: 525411 - RNA, 19 nt, Artificial Sequence
  Description of Artificial Sequence: Synthetic oligonucleotide
ugaucggucauuugucacu

SEQ ID NO: 525412 - RNA, 19 nt, Artificial Sequence
  Description of Artificial Sequence: Synthetic oligonucleotide
ugauuggcaaagcuacagu

SEQ ID NO: 525413 - RNA, 19 nt, Artificial Sequence
  Description of Artificial Sequence: Synthetic oligonucleotide
uuacuguauaggcaugcuc

SEQ ID NO: 525414 - RNA, 19 nt, Artificial Sequence
  Description of Artificial Sequence: Synthetic oligonucleotide
caucguaguaggcuuuucc

SEQ ID NO: 525415 - RNA, 19 nt, Artificial Sequence
  Description of Artificial Sequence: Synthetic oligonucleotide
cauaucaaucaaagggcug

SEQ ID NO: 525416 - RNA, 19 nt, Artificial Sequence
  Description of Artificial Sequence: Synthetic oligonucleotide
guuggccggaguuucacag

SEQ ID NO: 525417 - RNA, 19 nt, Artificial Sequence
  Description of Artificial Sequence: Synthetic oligonucleotide
uaguaguguaugugauugg

SEQ ID NO: 525418 - RNA, 19 nt, Artificial Sequence
  Description of Artificial Sequence: Synthetic oligonucleotide
uacuuuacgucaaguucug

SEQ ID NO: 525419 - RNA, 19 nt, Artificial Sequence
  Description of Artificial Sequence: Synthetic oligonucleotide
ucuuaugggugauggaaau

SEQ ID NO: 525420 - RNA, 19 nt, Artificial Sequence
  Description of Artificial Sequence: Synthetic oligonucleotide
ggugauggaaaucucuaug

SEQ ID NO: 525421 - RNA, 19 nt, Artificial Sequence
  Description of Artificial Sequence: Synthetic oligonucleotide
uugcauuacuaggagacgu

SEQ ID NO: 525422 - RNA, 19 nt, Artificial Sequence
  Description of Artificial Sequence: Synthetic oligonucleotide
uuuucaucgagaguuucau

SEQ ID NO: 525423 - RNA, 19 nt, Artificial Sequence
  Description of Artificial Sequence: Synthetic oligonucleotide
auaaauugauuugcucaag

SEQ ID NO: 525424 - RNA, 19 nt, Artificial Sequence
  Description of Artificial Sequence: Synthetic oligonucleotide
uuacuaggagacgugggug

SEQ ID NO: 525425 - RNA, 19 nt, Artificial Sequence
  Description of Artificial Sequence: Synthetic oligonucleotide
auugcuuacuguauaggca

SEQ ID NO: 525426 - RNA, 19 nt, Artificial Sequence
  Description of Artificial Sequence: Synthetic oligonucleotide
gcuaaguaaggucuuguug

SEQ ID NO: 525427 - RNA, 19 nt, Artificial Sequence
  Description of Artificial Sequence: Synthetic oligonucleotide
aacuugaacccaauuuacu

SEQ ID NO: 525428 - RNA, 19 nt, Artificial Sequence
  Description of Artificial Sequence: Synthetic oligonucleotide
uucuaaacucugugcagcu

SEQ ID NO: 525429 - RNA, 19 nt, Artificial Sequence
  Description of Artificial Sequence: Synthetic oligonucleotide
aucgucuugcagguaagac

SEQ ID NO: 525430 - RNA, 19 nt, Artificial Sequence
  Description of Artificial Sequence: Synthetic oligonucleotide
uguggcgucccagacacug

SEQ ID NO: 525431 - RNA, 19 nt, Artificial Sequence
  Description of Artificial Sequence: Synthetic oligonucleotide
cuugagacuugaguggccc

SEQ ID NO: 525432 - RNA, 19 nt, Artificial Sequence
  Description of Artificial Sequence: Synthetic oligonucleotide
uacuaggagacgugggugu

SEQ ID NO: 525433 - RNA, 19 nt, Artificial Sequence
  Description of Artificial Sequence: Synthetic oligonucleotide
ugugauuggcaaagcuaca

SEQ ID NO: 525434 - RNA, 19 nt, Artificial Sequence
  Description of Artificial Sequence: Synthetic oligonucleotide
gugauuggcaaagcuacag

SEQ ID NO: 525435 - RNA, 19 nt, Artificial Sequence
  Description of Artificial Sequence: Synthetic oligonucleotide
guuaaacugagaaaauaaa

SEQ ID NO: 525436 - RNA, 19 nt, Artificial Sequence
  Description of Artificial Sequence: Synthetic oligonucleotide
agcuacagugcuuguccac

SEQ ID NO: 525437 - RNA, 19 nt, Artificial Sequence
  Description of Artificial Sequence: Synthetic oligonucleotide
cuucaucgaaugauuggug

SEQ ID NO: 525438 - RNA, 19 nt, Artificial Sequence
  Description of Artificial Sequence: Synthetic oligonucleotide
ggcauucauauacuuuacg

SEQ ID NO: 525439 - RNA, 19 nt, Artificial Sequence
  Description of Artificial Sequence: Synthetic oligonucleotide
uguaagcugggaucuucug

SEQ ID NO: 525440 - RNA, 19 nt, Artificial Sequence
  Description of Artificial Sequence: Synthetic oligonucleotide
ugggaugauaacacugcuc

SEQ ID NO: 525441 - RNA, 19 nt, Artificial Sequence
  Description of Artificial Sequence: Synthetic oligonucleotide
acuuugcggcgcuucgagc

SEQ ID NO: 525442 - RNA, 19 nt, Artificial Sequence
  Description of Artificial Sequence: Synthetic oligonucleotide
caucgagaguuucauugag

SEQ ID NO: 525443 - RNA, 19 nt, Artificial Sequence
  Description of Artificial Sequence: Synthetic oligonucleotide
ugggugauggaaaucucua

SEQ ID NO: 525444 - RNA, 19 nt, Artificial Sequence
  Description of Artificial Sequence: Synthetic oligonucleotide
ugcugaucggucauuuguc

SEQ ID NO: 525445 - RNA, 19 nt, Artificial Sequence
  Description of Artificial Sequence: Synthetic oligonucleotide
aaucaggcauccucugaaa

SEQ ID NO: 525446 - RNA, 19 nt, Artificial Sequence
  Description of Artificial Sequence: Synthetic oligonucleotide
gucccguuugcauuacuag

SEQ ID NO: 525447 - RNA, 19 nt, Artificial Sequence
  Description of Artificial Sequence: Synthetic oligonucleotide
aguugcaacagaaacugau

SEQ ID NO: 525448 - RNA, 19 nt, Artificial Sequence
  Description of Artificial Sequence: Synthetic oligonucleotide
gcagugugagggaagaugg

SEQ ID NO: 525449 - RNA, 19 nt, Artificial Sequence
  Description of Artificial Sequence: Synthetic oligonucleotide
aggagcucggagguaaacg

SEQ ID NO: 525450 - RNA, 19 nt, Artificial Sequence
  Description of Artificial Sequence: Synthetic oligonucleotide
ugauuugcucaaguggggu

SEQ ID NO: 525451 - RNA, 19 nt, Artificial Sequence
  Description of Artificial Sequence: Synthetic oligonucleotide
agacugaaggugauaguag

SEQ ID NO: 525452 - RNA, 19 nt, Artificial Sequence
  Description of Artificial Sequence: Synthetic oligonucleotide
uggcauucauauacuuuac

SEQ ID NO: 525453 - RNA, 19 nt, Artificial Sequence
  Description of Artificial Sequence: Synthetic oligonucleotide
ugauuggugcugaucgguc

SEQ ID NO: 525454 - RNA, 19 nt, Artificial Sequence
  Description of Artificial Sequence: Synthetic oligonucleotide
aagcuaaguaaggucuugu

SEQ ID NO: 525455 - RNA, 19 nt, Artificial Sequence
  Description of Artificial Sequence: Synthetic oligonucleotide
cucggagguaaacguagcc

SEQ ID NO: 525456 - RNA, 19 nt, Artificial Sequence
  Description of Artificial Sequence: Synthetic oligonucleotide
aguguaugugauuggcaaa

SEQ ID NO: 525457 - RNA, 19 nt, Artificial Sequence
  Description of Artificial Sequence: Synthetic oligonucleotide
uguggcaucuggucuggac

SEQ ID NO: 525458 - RNA, 19 nt, Artificial Sequence
  Description of Artificial Sequence: Synthetic oligonucleotide
gguggguauuuagaaaggg

SEQ ID NO: 525459 - RNA, 19 nt, Artificial Sequence
  Description of Artificial Sequence: Synthetic oligonucleotide
cuugcagguaagaccucag

SEQ ID NO: 525460 - RNA, 19 nt, Artificial Sequence
  Description of Artificial Sequence: Synthetic oligonucleotide
uuguggcaucacaacaggu

SEQ ID NO: 525461 - RNA, 19 nt, Artificial Sequence
  Description of Artificial Sequence: Synthetic oligonucleotide
aacccaauuuacugcuuuu

SEQ ID NO: 525462 - RNA, 19 nt, Artificial Sequence
  Description of Artificial Sequence: Synthetic oligonucleotide
caucgaaugauuggugcug

SEQ ID NO: 525463 - RNA, 19 nt, Artificial Sequence
  Description of Artificial Sequence: Synthetic oligonucleotide
caaacuuacauauuuucuu

SEQ ID NO: 525464 - RNA, 19 nt, Artificial Sequence
  Description of Artificial Sequence: Synthetic oligonucleotide
ggcaaagcuaaguaagguc

SEQ ID NO: 525465 - RNA, 19 nt, Artificial Sequence
  Description of Artificial Sequence: Synthetic oligonucleotide
cagguagagggacuagcag

SEQ ID NO: 525466 - RNA, 19 nt, Artificial Sequence
  Description of Artificial Sequence: Synthetic oligonucleotide
guacuuuuguggcaucaca

SEQ ID NO: 525467 - RNA, 19 nt, Artificial Sequence
  Description of Artificial Sequence: Synthetic oligonucleotide
ucguaggccaggauugaau

SEQ ID NO: 525468 - RNA, 19 nt, Artificial Sequence
  Description of Artificial Sequence: Synthetic oligonucleotide
guauaggcaugcucugaug

SEQ ID NO: 525469 - RNA, 19 nt, Artificial Sequence
  Description of Artificial Sequence: Synthetic oligonucleotide
ucggucauuugucacuguu

SEQ ID NO: 525470 - RNA, 19 nt, Artificial Sequence
  Description of Artificial Sequence: Synthetic oligonucleotide
aggugauaguaguguaugu

SEQ ID NO: 525471 - RNA, 19 nt, Artificial Sequence
  Description of Artificial Sequence: Synthetic oligonucleotide
acuccaucguaguaggcuu

SEQ ID NO: 525472 - RNA, 19 nt, Artificial Sequence
  Description of Artificial Sequence: Synthetic oligonucleotide
uuugcggcgcuucgagcug

SEQ ID NO: 525473 - RNA, 19 nt, Artificial Sequence
  Description of Artificial Sequence: Synthetic oligonucleotide
ucgagagucggccgccgcc

SEQ ID NO: 525474 - RNA, 19 nt, Artificial Sequence
  Description of Artificial Sequence: Synthetic oligonucleotide
gguaagaccucagguagag

SEQ ID NO: 525475 - RNA, 19 nt, Artificial Sequence
  Description of Artificial Sequence: Synthetic oligonucleotide
ugaugcaaacuuacauauu

SEQ ID NO: 525476 - RNA, 19 nt, Artificial Sequence
  Description of Artificial Sequence: Synthetic oligonucleotide
cuucuuaagagcacaggcu

SEQ ID NO: 525477 - RNA, 19 nt, Artificial Sequence
  Description of Artificial Sequence: Synthetic oligonucleotide
uggcaucacaacagguuuc

SEQ ID NO: 525478 - RNA, 19 nt, Artificial Sequence
  Description of Artificial Sequence: Synthetic oligonucleotide
augauuggugcugaucggu

SEQ ID NO: 525479 - RNA, 19 nt, Artificial Sequence
  Description of Artificial Sequence: Synthetic oligonucleotide
gacuugaguggcccucgag

SEQ ID NO: 525480 - RNA, 19 nt, Artificial Sequence
  Description of Artificial Sequence: Synthetic oligonucleotide
gguuaaaauugggucacug

SEQ ID NO: 525481 - RNA, 19 nt, Artificial Sequence
  Description of Artificial Sequence: Synthetic oligonucleotide
gagaaguaacagucuccac

SEQ ID NO: 525482 - RNA, 19 nt, Artificial Sequence
  Description of Artificial Sequence: Synthetic oligonucleotide
uacgucaaguucugucuuc

SEQ ID NO: 525483 - RNA, 19 nt, Artificial Sequence
  Description of Artificial Sequence: Synthetic oligonucleotide
uuccuagguuuauuaaguu

SEQ ID NO: 525484 - RNA, 19 nt, Artificial Sequence
  Description of Artificial Sequence: Synthetic oligonucleotide
ugcagucccguuugcauua

SEQ ID NO: 525485 - RNA, 19 nt, Artificial Sequence
  Description of Artificial Sequence: Synthetic oligonucleotide
uccgccgccaaaacgucaa

SEQ ID NO: 525486 - RNA, 19 nt, Artificial Sequence
  Description of Artificial Sequence: Synthetic oligonucleotide
gguauuuagaaaggguguc

SEQ ID NO: 525487 - RNA, 19 nt, Artificial Sequence
  Description of Artificial Sequence: Synthetic oligonucleotide
ggcgcuucgagcugcgagg

SEQ ID NO: 525488 - RNA, 19 nt, Artificial Sequence
  Description of Artificial Sequence: Synthetic oligonucleotide
gcuguggcgucccagacac

SEQ ID NO: 525489 - RNA, 19 nt, Artificial Sequence
  Description of Artificial Sequence: Synthetic oligonucleotide
aaagggugucauaaucuuu

SEQ ID NO: 525490 - RNA, 19 nt, Artificial Sequence
  Description of Artificial Sequence: Synthetic oligonucleotide
agcuaaguaaggucuuguu

SEQ ID NO: 525491 - RNA, 19 nt, Artificial Sequence
  Description of Artificial Sequence: Synthetic oligonucleotide
cucgaucaugggugaaggc

SEQ ID NO: 525492 - RNA, 19 nt, Artificial Sequence
  Description of Artificial Sequence: Synthetic oligonucleotide
aaacuuugcggcgcuucga

SEQ ID NO: 525493 - RNA, 19 nt, Artificial Sequence
  Description of Artificial Sequence: Synthetic oligonucleotide
uggccggaguuucacagua

SEQ ID NO: 525494 - RNA, 19 nt, Artificial Sequence
  Description of Artificial Sequence: Synthetic oligonucleotide
ggacacuggggcuuugaag

SEQ ID NO: 525495 - RNA, 19 nt, Artificial Sequence
  Description of Artificial Sequence: Synthetic oligonucleotide
cauauuugaagaguggcau

SEQ ID NO: 525496 - RNA, 19 nt, Artificial Sequence
  Description of Artificial Sequence: Synthetic oligonucleotide
ccagauagucaggaggugg

SEQ ID NO: 525497 - RNA, 19 nt, Artificial Sequence
  Description of Artificial Sequence: Synthetic oligonucleotide
acguguucuccgugagccg

SEQ ID NO: 525498 - RNA, 19 nt, Artificial Sequence
  Description of Artificial Sequence: Synthetic oligonucleotide
guuucuuaugggugaugga

SEQ ID NO: 525499 - RNA, 19 nt, Artificial Sequence
  Description of Artificial Sequence: Synthetic oligonucleotide
gauaguaguguaugugauu

SEQ ID NO: 525500 - RNA, 19 nt, Artificial Sequence
  Description of Artificial Sequence: Synthetic oligonucleotide
uggcgucccagacacuggu

SEQ ID NO: 525501 - RNA, 19 nt, Artificial Sequence
  Description of Artificial Sequence: Synthetic oligonucleotide
cuuaugggugauggaaauc

SEQ ID NO: 525502 - RNA, 19 nt, Artificial Sequence
  Description of Artificial Sequence: Synthetic oligonucleotide
ggauugaauuguuccauaa

SEQ ID NO: 525503 - RNA, 19 nt, Artificial Sequence
  Description of Artificial Sequence: Synthetic oligonucleotide
aucgaaugauuggugcuga

SEQ ID NO: 525504 - RNA, 19 nt, Artificial Sequence
  Description of Artificial Sequence: Synthetic oligonucleotide
uuucaucgagaguuucauu

SEQ ID NO: 525505 - RNA, 19 nt, Artificial Sequence
  Description of Artificial Sequence: Synthetic oligonucleotide
guaguguaugugauuggca

SEQ ID NO: 525506 - RNA, 19 nt, Artificial Sequence
  Description of Artificial Sequence: Synthetic oligonucleotide
guggccgccggacuccagg

SEQ ID NO: 525507 - RNA, 19 nt, Artificial Sequence
  Description of Artificial Sequence: Synthetic oligonucleotide
gccgccaaaacgucaaaac

SEQ ID NO: 525508 - RNA, 19 nt, Artificial Sequence
  Description of Artificial Sequence: Synthetic oligonucleotide
uuucguaggccaggauuga

SEQ ID NO: 525509 - RNA, 19 nt, Artificial Sequence
  Description of Artificial Sequence: Synthetic oligonucleotide
gauagugccugcacccguc

SEQ ID NO: 525510 - RNA, 19 nt, Artificial Sequence
  Description of Artificial Sequence: Synthetic oligonucleotide
cuccauagagccagccguc

SEQ ID NO: 525511 - RNA, 19 nt, Artificial Sequence
  Description of Artificial Sequence: Synthetic oligonucleotide
uggcccucgagagucggcc

SEQ ID NO: 525512 - RNA, 19 nt, Artificial Sequence
  Description of Artificial Sequence: Synthetic oligonucleotide
agacccaguggcaaucucu

SEQ ID NO: 525513 - RNA, 19 nt, Artificial Sequence
  Description of Artificial Sequence: Synthetic oligonucleotide
cucggggaugagcagugug

SEQ ID NO: 525514 - RNA, 19 nt, Artificial Sequence
  Description of Artificial Sequence: Synthetic oligonucleotide
aucgagaguuucauugagu

SEQ ID NO: 525515 - RNA, 19 nt, Artificial Sequence
  Description of Artificial Sequence: Synthetic oligonucleotide
gcaaagcuaaguaaggucu

SEQ ID NO: 525516 - RNA, 19 nt, Artificial Sequence
  Description of Artificial Sequence: Synthetic oligonucleotide
gucagcccgagagagccag

SEQ ID NO: 525517 - RNA, 19 nt, Artificial Sequence
  Description of Artificial Sequence: Synthetic oligonucleotide
cuuugcggcgcuucgagcu

SEQ ID NO: 525518 - RNA, 19 nt, Artificial Sequence
  Description of Artificial Sequence: Synthetic oligonucleotide
uuggccggaguuucacagu

SEQ ID NO: 525519 - RNA, 19 nt, Artificial Sequence
  Description of Artificial Sequence: Synthetic oligonucleotide
gugcugaucggucauuugu

SEQ ID NO: 525520 - RNA, 19 nt, Artificial Sequence
  Description of Artificial Sequence: Synthetic oligonucleotide
cucuugucugaaguggcuc

SEQ ID NO: 525521 - RNA, 19 nt, Artificial Sequence
  Description of Artificial Sequence: Synthetic oligonucleotide
gagucggccgccgccacag

SEQ ID NO: 525522 - RNA, 19 nt, Artificial Sequence
  Description of Artificial Sequence: Synthetic oligonucleotide
gccggaguuucacaguagc

SEQ ID NO: 525523 - RNA, 19 nt, Artificial Sequence
  Description of Artificial Sequence: Synthetic oligonucleotide
aggcacaaaagcauagaua

SEQ ID NO: 525524 - RNA, 19 nt, Artificial Sequence
  Description of Artificial Sequence: Synthetic oligonucleotide
auaagaacuugaacccaau

SEQ ID NO: 525525 - RNA, 19 nt, Artificial Sequence
  Description of Artificial Sequence: Synthetic oligonucleotide
caugcucugaugcaaacuu

SEQ ID NO: 525526 - RNA, 19 nt, Artificial Sequence
  Description of Artificial Sequence: Synthetic oligonucleotide
gcuucgagcugcgaggagc

SEQ ID NO: 525527 - RNA, 19 nt, Artificial Sequence
  Description of Artificial Sequence: Synthetic oligonucleotide
cuacagugcuuguccacca

SEQ ID NO: 525528 - RNA, 19 nt, Artificial Sequence
  Description of Artificial Sequence: Synthetic oligonucleotide
agauagucaggagguggga

SEQ ID NO: 525529 - RNA, 19 nt, Artificial Sequence
  Description of Artificial Sequence: Synthetic oligonucleotide
cuccgggagggcgagcgcg

SEQ ID NO: 525530 - RNA, 19 nt, Artificial Sequence
  Description of Artificial Sequence: Synthetic oligonucleotide
aguggcccucgagagucgg

SEQ ID NO: 525531 - RNA, 19 nt, Artificial Sequence
  Description of Artificial Sequence: Synthetic oligonucleotide
ccaaaacgucaaaacuuug

SEQ ID NO: 525532 - RNA, 19 nt, Artificial Sequence
  Description of Artificial Sequence: Synthetic oligonucleotide
gauuugcucaagugggguu

SEQ ID NO: 525533 - RNA, 19 nt, Artificial Sequence
  Description of Artificial Sequence: Synthetic oligonucleotide
cccguuugcauuacuagga

SEQ ID NO: 525534 - RNA, 19 nt, Artificial Sequence
  Description of Artificial Sequence: Synthetic oligonucleotide
cauugcgguacguguucuc

SEQ ID NO: 525535 - RNA, 19 nt, Artificial Sequence
  Description of Artificial Sequence: Synthetic oligonucleotide
guuccauaacauugcggua

SEQ ID NO: 525536 - RNA, 19 nt, Artificial Sequence
  Description of Artificial Sequence: Synthetic oligonucleotide
cagugcuuguccaccagaa

SEQ ID NO: 525537 - RNA, 19 nt, Artificial Sequence
  Description of Artificial Sequence: Synthetic oligonucleotide
uucguaggccaggauugaa

SEQ ID NO: 525538 - RNA, 19 nt, Artificial Sequence
  Description of Artificial Sequence: Synthetic oligonucleotide
gccgccacagccgucagcc

SEQ ID NO: 525539 - RNA, 19 nt, Artificial Sequence
  Description of Artificial Sequence: Synthetic oligonucleotide
gcgagaaguaacagucucc

SEQ ID NO: 525540 - RNA, 19 nt, Artificial Sequence
  Description of Artificial Sequence: Synthetic oligonucleotide
acauugcgguacguguucu

SEQ ID NO: 525541 - RNA, 19 nt, Artificial Sequence
  Description of Artificial Sequence: Synthetic oligonucleotide
gguacuuuuguggcaucac

SEQ ID NO: 525542 - RNA, 19 nt, Artificial Sequence
  Description of Artificial Sequence: Synthetic oligonucleotide
cagcaacaucgucuugcag

SEQ ID NO: 525543 - RNA, 19 nt, Artificial Sequence
  Description of Artificial Sequence: Synthetic oligonucleotide
ccguuugcauuacuaggag

SEQ ID NO: 525544 - RNA, 19 nt, Artificial Sequence
  Description of Artificial Sequence: Synthetic oligonucleotide
gcacaaaagcauagauaag

SEQ ID NO: 525545 - RNA, 19 nt, Artificial Sequence
  Description of Artificial Sequence: Synthetic oligonucleotide
ugcagccaucugcaaugaa

SEQ ID NO: 525546 - RNA, 19 nt, Artificial Sequence
  Description of Artificial Sequence: Synthetic oligonucleotide
gucuccgccgccaaaacgu

SEQ ID NO: 525547 - RNA, 19 nt, Artificial Sequence
  Description of Artificial Sequence: Synthetic oligonucleotide
ggugcugaucggucauuug

SEQ ID NO: 525548 - RNA, 19 nt, Artificial Sequence
  Description of Artificial Sequence: Synthetic oligonucleotide
ggagcucggagguaaacgu

SEQ ID NO: 525549 - RNA, 19 nt, Artificial Sequence
  Description of Artificial Sequence: Synthetic oligonucleotide
agacuugaguggcccucga

SEQ ID NO: 525550 - RNA, 19 nt, Artificial Sequence
  Description of Artificial Sequence: Synthetic oligonucleotide
gagacccaguggcaaucuc

SEQ ID NO: 525551 - RNA, 19 nt, Artificial Sequence
  Description of Artificial Sequence: Synthetic oligonucleotide
agguaagaccucagguaga

SEQ ID NO: 525552 - RNA, 19 nt, Artificial Sequence
  Description of Artificial Sequence: Synthetic oligonucleotide
agcagucuugggagcaucu

SEQ ID NO: 525553 - RNA, 19 nt, Artificial Sequence
  Description of Artificial Sequence: Synthetic oligonucleotide
gagcgccuaggacuugaga

SEQ ID NO: 525554 - RNA, 19 nt, Artificial Sequence
  Description of Artificial Sequence: Synthetic oligonucleotide
acuuuacgucaaguucugu

SEQ ID NO: 525555 - RNA, 19 nt, Artificial Sequence
  Description of Artificial Sequence: Synthetic oligonucleotide
agacguggguguggcaucu

SEQ ID NO: 525556 - RNA, 19 nt, Artificial Sequence
  Description of Artificial Sequence: Synthetic oligonucleotide
uccaucguaguaggcuuuu

SEQ ID NO: 525557 - RNA, 19 nt, Artificial Sequence
  Description of Artificial Sequence: Synthetic oligonucleotide
gugggaugauaacacugcu

SEQ ID NO: 525558 - RNA, 19 nt, Artificial Sequence
  Description of Artificial Sequence: Synthetic oligonucleotide
agccagcgcgcgucuccgc

SEQ ID NO: 525559 - RNA, 19 nt, Artificial Sequence
  Description of Artificial Sequence: Synthetic oligonucleotide
cucgagagucggccgccgc

SEQ ID NO: 525560 - RNA, 19 nt, Artificial Sequence
  Description of Artificial Sequence: Synthetic oligonucleotide
agguuaaaauugggucacu

SEQ ID NO: 525561 - RNA, 19 nt, Artificial Sequence
  Description of Artificial Sequence: Synthetic oligonucleotide
cuguauaggcaugcucuga

SEQ ID NO: 525562 - RNA, 19 nt, Artificial Sequence
  Description of Artificial Sequence: Synthetic oligonucleotide
aucggucauuugucacugu

SEQ ID NO: 525563 - RNA, 19 nt, Artificial Sequence
  Description of Artificial Sequence: Synthetic oligonucleotide
aucaaucaaagggcuggua

SEQ ID NO: 525564 - RNA, 19 nt, Artificial Sequence
  Description of Artificial Sequence: Synthetic oligonucleotide
ccugcuagaaucauagcau

SEQ ID NO: 525565 - RNA, 19 nt, Artificial Sequence
  Description of Artificial Sequence: Synthetic oligonucleotide
gccgguucaccuccuccgg

SEQ ID NO: 525566 - RNA, 19 nt, Artificial Sequence
  Description of Artificial Sequence: Synthetic oligonucleotide
agucggccgccgccacagc

SEQ ID NO: 525567 - RNA, 19 nt, Artificial Sequence
  Description of Artificial Sequence: Synthetic oligonucleotide
caguugcaacagaaacuga

SEQ ID NO: 525568 - RNA, 19 nt, Artificial Sequence
  Description of Artificial Sequence: Synthetic oligonucleotide
cuaugaggacacggcccag

SEQ ID NO: 525569 - RNA, 19 nt, Artificial Sequence
  Description of Artificial Sequence: Synthetic oligonucleotide
cacuccaucguaguaggcu

SEQ ID NO: 525570 - RNA, 19 nt, Artificial Sequence
  Description of Artificial Sequence: Synthetic oligonucleotide
cuucgagcugcgaggagcu

SEQ ID NO: 525571 - RNA, 19 nt, Artificial Sequence
  Description of Artificial Sequence: Synthetic oligonucleotide
caaagcuaaguaaggucuu

SEQ ID NO: 525572 - RNA, 19 nt, Artificial Sequence
  Description of Artificial Sequence: Synthetic oligonucleotide
ucucucgaucaugggugaa

SEQ ID NO: 525573 - RNA, 19 nt, Artificial Sequence
  Description of Artificial Sequence: Synthetic oligonucleotide
cuuaucccuuauucuggcu

SEQ ID NO: 525574 - RNA, 19 nt, Artificial Sequence
  Description of Artificial Sequence: Synthetic oligonucleotide
cgucaaaacuuugcggcgc

SEQ ID NO: 525575 - RNA, 19 nt, Artificial Sequence
  Description of Artificial Sequence: Synthetic oligonucleotide
gacgcggcggggccucgug

SEQ ID NO: 525576 - RNA, 19 nt, Artificial Sequence
  Description of Artificial Sequence: Synthetic oligonucleotide
cuuacuguauaggcaugcu

SEQ ID NO: 525577 - RNA, 19 nt, Artificial Sequence
  Description of Artificial Sequence: Synthetic oligonucleotide
agcuuggaauuaaguaauu

SEQ ID NO: 525578 - RNA, 19 nt, Artificial Sequence
  Description of Artificial Sequence: Synthetic oligonucleotide
caucgucuugcagguaaga

SEQ ID NO: 525579 - RNA, 19 nt, Artificial Sequence
  Description of Artificial Sequence: Synthetic oligonucleotide
ggcccucgagagucggccg

SEQ ID NO: 525580 - RNA, 19 nt, Artificial Sequence
  Description of Artificial Sequence: Synthetic oligonucleotide
caucauguucaguccaguu

SEQ ID NO: 525581 - RNA, 19 nt, Artificial Sequence
  Description of Artificial Sequence: Synthetic oligonucleotide
agcgcgcgucuccgccgcc

SEQ ID NO: 525582 - RNA, 19 nt, Artificial Sequence
  Description of Artificial Sequence: Synthetic oligonucleotide
ccuucaucgaaugauuggu

SEQ ID NO: 525583 - RNA, 19 nt, Artificial Sequence
  Description of Artificial Sequence: Synthetic oligonucleotide
guucuccgugagccgguuc

SEQ ID NO: 525584 - RNA, 19 nt, Artificial Sequence
  Description of Artificial Sequence: Synthetic oligonucleotide
cgccacagccgucagcccg

SEQ ID NO: 525585 - RNA, 19 nt, Artificial Sequence
  Description of Artificial Sequence: Synthetic oligonucleotide
gccaaaacgucaaaacuuu

SEQ ID NO: 525586 - RNA, 19 nt, Artificial Sequence
  Description of Artificial Sequence: Synthetic oligonucleotide
cgucuccgccgccaaaacg

SEQ ID NO: 525587 - RNA, 19 nt, Artificial Sequence
  Description of Artificial Sequence: Synthetic oligonucleotide
ccguccagcaacaucgucu

SEQ ID NO: 525588 - RNA, 19 nt, Artificial Sequence
  Description of Artificial Sequence: Synthetic oligonucleotide
agggacuagcaggauccuu

SEQ ID NO: 525589 - RNA, 19 nt, Artificial Sequence
  Description of Artificial Sequence: Synthetic oligonucleotide
cauagagccagccguccuu

SEQ ID NO: 525590 - RNA, 19 nt, Artificial Sequence
  Description of Artificial Sequence: Synthetic oligonucleotide
cguuugcauuacuaggaga

SEQ ID NO: 525591 - RNA, 19 nt, Artificial Sequence
  Description of Artificial Sequence: Synthetic oligonucleotide
gcccucgagagucggccgc

SEQ ID NO: 525592 - RNA, 19 nt, Artificial Sequence
  Description of Artificial Sequence: Synthetic oligonucleotide
ccggaguuucacaguagca

SEQ ID NO: 525593 - RNA, 19 nt, Artificial Sequence
  Description of Artificial Sequence: Synthetic oligonucleotide
caccggggcagcuuggaau

SEQ ID NO: 525594 - RNA, 19 nt, Artificial Sequence
  Description of Artificial Sequence: Synthetic oligonucleotide
gcgccuaggacuugagacu

SEQ ID NO: 525595 - RNA, 19 nt, Artificial Sequence
  Description of Artificial Sequence: Synthetic oligonucleotide
gcgguacguguucuccgug

SEQ ID NO: 525596 - RNA, 19 nt, Artificial Sequence
  Description of Artificial Sequence: Synthetic oligonucleotide
gguauggauuggacagaga

SEQ ID NO: 525597 - RNA, 19 nt, Artificial Sequence
  Description of Artificial Sequence: Synthetic oligonucleotide
cggaguuucacaguagcaa

SEQ ID NO: 525598 - RNA, 19 nt, Artificial Sequence
  Description of Artificial Sequence: Synthetic oligonucleotide
ccgccaaaacgucaaaacu

SEQ ID NO: 525599 - RNA, 19 nt, Artificial Sequence
  Description of Artificial Sequence: Synthetic oligonucleotide
cagccgucagcccgagaga

SEQ ID NO: 525600 - RNA, 19 nt, Artificial Sequence
  Description of Artificial Sequence: Synthetic oligonucleotide
gggacuagcaggauccuuu

SEQ ID NO: 525601 - RNA, 19 nt, Artificial Sequence
  Description of Artificial Sequence: Synthetic oligonucleotide
ugcgaggagcucggaggua

SEQ ID NO: 525602 - RNA, 19 nt, Artificial Sequence
  Description of Artificial Sequence: Synthetic oligonucleotide
cagugugagggaagauggu

SEQ ID NO: 525603 - RNA, 19 nt, Artificial Sequence
  Description of Artificial Sequence: Synthetic oligonucleotide
ugcacccguccagcaacau

SEQ ID NO: 525604 - RNA, 19 nt, Artificial Sequence
  Description of Artificial Sequence: Synthetic oligonucleotide
ggccggaguuucacaguag

SEQ ID NO: 525605 - RNA, 19 nt, Artificial Sequence
  Description of Artificial Sequence: Synthetic oligonucleotide
ccgagagagccagcgcgcg

SEQ ID NO: 525606 - RNA, 19 nt, Artificial Sequence
  Description of Artificial Sequence: Synthetic oligonucleotide
gaggacgcggcggggccuc

SEQ ID NO: 525607 - RNA, 19 nt, Artificial Sequence
  Description of Artificial Sequence: Synthetic oligonucleotide
uugcucaagugggguucau

SEQ ID NO: 525608 - RNA, 19 nt, Artificial Sequence
  Description of Artificial Sequence: Synthetic oligonucleotide
guggcccucgagagucggc

SEQ ID NO: 525609 - RNA, 19 nt, Artificial Sequence
  Description of Artificial Sequence: Synthetic oligonucleotide
cauugaaaucaggcauccu

SEQ ID NO: 525610 - RNA, 19 nt, Artificial Sequence
  Description of Artificial Sequence: Synthetic oligonucleotide
cacuggggcuuugaaggua

SEQ ID NO: 525611 - RNA, 19 nt, Artificial Sequence
  Description of Artificial Sequence: Synthetic oligonucleotide
gggagcgccuaggacuuga

SEQ ID NO: 525612 - RNA, 19 nt, Artificial Sequence
  Description of Artificial Sequence: Synthetic oligonucleotide
gcaugcucugaugcaaacu

SEQ ID NO: 525613 - RNA, 19 nt, Artificial Sequence
  Description of Artificial Sequence: Synthetic oligonucleotide
cggcgcuucgagcugcgag

SEQ ID NO: 525614 - RNA, 19 nt, Artificial Sequence
  Description of Artificial Sequence: Synthetic oligonucleotide
acccguccagcaacaucgu

SEQ ID NO: 525615 - RNA, 19 nt, Artificial Sequence
  Description of Artificial Sequence: Synthetic oligonucleotide
gcgucuccgccgccaaaac

SEQ ID NO: 525616 - RNA, 19 nt, Artificial Sequence
  Description of Artificial Sequence: Synthetic oligonucleotide
cuccaucguaguaggcuuu

SEQ ID NO: 525617 - RNA, 19 nt, Artificial Sequence
  Description of Artificial Sequence: Synthetic oligonucleotide
accccucgcuuugguggug

SEQ ID NO: 525618 - RNA, 19 nt, Artificial Sequence
  Description of Artificial Sequence: Synthetic oligonucleotide
cgguacguguucuccguga

SEQ ID NO: 525619 - RNA, 19 nt, Artificial Sequence
  Description of Artificial Sequence: Synthetic oligonucleotide
aggacgcggcggggccucg

SEQ ID NO: 525620 - RNA, 19 nt, Artificial Sequence
  Description of Artificial Sequence: Synthetic oligonucleotide
ccucgagagucggccgccg

SEQ ID NO: 525621 - RNA, 19 nt, Artificial Sequence
  Description of Artificial Sequence: Synthetic oligonucleotide
cccucgagagucggccgcc

SEQ ID NO: 525622 - RNA, 19 nt, Artificial Sequence
  Description of Artificial Sequence: Synthetic oligonucleotide
gcgcuucgagcugcgagga

SEQ ID NO: 525623 - RNA, 19 nt, Artificial Sequence
  Description of Artificial Sequence: Synthetic oligonucleotide
ggagacccaguggcaaucu

SEQ ID NO: 525624 - RNA, 19 nt, Artificial Sequence
  Description of Artificial Sequence: Synthetic oligonucleotide
gcagucccguuugcauuac

SEQ ID NO: 525625 - RNA, 19 nt, Artificial Sequence
  Description of Artificial Sequence: Synthetic oligonucleotide
ccuccgggagggcgagcgc

SEQ ID NO: 525626 - RNA, 19 nt, Artificial Sequence
  Description of Artificial Sequence: Synthetic oligonucleotide
ccucugaaauuucgauagu

SEQ ID NO: 525627 - RNA, 19 nt, Artificial Sequence
  Description of Artificial Sequence: Synthetic oligonucleotide
gggaaccaaccccucgcuu

SEQ ID NO: 525628 - RNA, 19 nt, Artificial Sequence
  Description of Artificial Sequence: Synthetic oligonucleotide
ccgccacagccgucagccc

SEQ ID NO: 525629 - RNA, 19 nt, Artificial Sequence
  Description of Artificial Sequence: Synthetic oligonucleotide
ccauagagccagccguccu

SEQ ID NO: 525630 - RNA, 19 nt, Artificial Sequence
  Description of Artificial Sequence: Synthetic oligonucleotide
cgcuucgagcugcgaggag

SEQ ID NO: 525631 - RNA, 19 nt, Artificial Sequence
  Description of Artificial Sequence: Synthetic oligonucleotide
cccucgcuuuggugguguc

SEQ ID NO: 525632 - RNA, 19 nt, Artificial Sequence
  Description of Artificial Sequence: Synthetic oligonucleotide
cggcgggagcgccuaggac

SEQ ID NO: 525633 - RNA, 19 nt, Artificial Sequence
  Description of Artificial Sequence: Synthetic oligonucleotide
cuguggcgucccagacacu

SEQ ID NO: 525634 - RNA, 19 nt, Artificial Sequence
  Description of Artificial Sequence: Synthetic oligonucleotide
ggacacggcccagcucugu

SEQ ID NO: 525635 - RNA, 19 nt, Artificial Sequence
  Description of Artificial Sequence: Synthetic oligonucleotide
ccauaacauugcgguacgu

SEQ ID NO: 525636 - RNA, 19 nt, Artificial Sequence
  Description of Artificial Sequence: Synthetic oligonucleotide
ccgccgccaaaacgucaaa

SEQ ID NO: 525637 - RNA, 19 nt, Artificial Sequence
  Description of Artificial Sequence: Synthetic oligonucleotide
gcggcgcuucgagcugcga

SEQ ID NO: 525638 - RNA, 19 nt, Artificial Sequence
  Description of Artificial Sequence: Synthetic oligonucleotide
ccggggcagcuuggaauua

SEQ ID NO: 525639 - RNA, 19 nt, Artificial Sequence
  Description of Artificial Sequence: Synthetic oligonucleotide
cgggagcgccuaggacuug

SEQ ID NO: 525640 - RNA, 19 nt, Artificial Sequence
  Description of Artificial Sequence: Synthetic oligonucleotide
ggacgcggcggggccucgu

SEQ ID NO: 525641 - RNA, 19 nt, Artificial Sequence
  Description of Artificial Sequence: Synthetic oligonucleotide
uuuaauaccaacuauauag

SEQ ID NO: 525642 - RNA, 19 nt, Artificial Sequence
  Description of Artificial Sequence: Synthetic oligonucleotide
aaaacuuacucccugagag

SEQ ID NO: 525643 - RNA, 19 nt, Artificial Sequence
  Description of Artificial Sequence: Synthetic oligonucleotide
aacgaaaacagccucuugg

SEQ ID NO: 525644 - RNA, 19 nt, Artificial Sequence
  Description of Artificial Sequence: Synthetic oligonucleotide
ugauuuauugcuuuuaaug

SEQ ID NO: 525645 - RNA, 19 nt, Artificial Sequence
  Description of Artificial Sequence: Synthetic oligonucleotide
uuaacaacaguuaaaggca

SEQ ID NO: 525646 - RNA, 19 nt, Artificial Sequence
  Description of Artificial Sequence: Synthetic oligonucleotide
gacuaugucaaguaaagag

SEQ ID NO: 525647 - RNA, 19 nt, Artificial Sequence
  Description of Artificial Sequence: Synthetic oligonucleotide
aauuguaucacuuccuaca

SEQ ID NO: 525648 - RNA, 19 nt, Artificial Sequence
  Description of Artificial Sequence: Synthetic oligonucleotide
uaacccucaaauaauaaag

SEQ ID NO: 525649 - RNA, 19 nt, Artificial Sequence
  Description of Artificial Sequence: Synthetic oligonucleotide
caaauuuaguaacugaggg

SEQ ID NO: 525650 - RNA, 19 nt, Artificial Sequence
  Description of Artificial Sequence: Synthetic oligonucleotide
aauuuaguaacugaggggu

SEQ ID NO: 525651 - RNA, 19 nt, Artificial Sequence
  Description of Artificial Sequence: Synthetic oligonucleotide
uuaacugaauuacacagug

SEQ ID NO: 525652 - RNA, 19 nt, Artificial Sequence
  Description of Artificial Sequence: Synthetic oligonucleotide
gacagcugaacuuugacag

SEQ ID NO: 525653 - RNA, 19 nt, Artificial Sequence
  Description of Artificial Sequence: Synthetic oligonucleotide
accacuacugauuuauugc

SEQ ID NO: 525654 - RNA, 19 nt, Artificial Sequence
  Description of Artificial Sequence: Synthetic oligonucleotide
aacaccauaaaauaagaua

SEQ ID NO: 525655 - RNA, 19 nt, Artificial Sequence
  Description of Artificial Sequence: Synthetic oligonucleotide
aaauuguaucacuuccuac

SEQ ID NO: 525656 - RNA, 19 nt, Artificial Sequence
  Description of Artificial Sequence: Synthetic oligonucleotide
aacaaacgaaaacagccuc

SEQ ID NO: 525657 - RNA, 19 nt, Artificial Sequence
  Description of Artificial Sequence: Synthetic oligonucleotide
uuaacagucaucaggacaa

SEQ ID NO: 525658 - RNA, 19 nt, Artificial Sequence
  Description of Artificial Sequence: Synthetic oligonucleotide
aaguaaagaguucagagua

SEQ ID NO: 525659 - RNA, 19 nt, Artificial Sequence
  Description of Artificial Sequence: Synthetic oligonucleotide
ucuuggauccacauuagag

SEQ ID NO: 525660 - RNA, 19 nt, Artificial Sequence
  Description of Artificial Sequence: Synthetic oligonucleotide
uagugaaggaguuaacugg

SEQ ID NO: 525661 - RNA, 19 nt, Artificial Sequence
  Description of Artificial Sequence: Synthetic oligonucleotide
uuuauugcuuuuaauguga

SEQ ID NO: 525662 - RNA, 19 nt, Artificial Sequence
  Description of Artificial Sequence: Synthetic oligonucleotide
acucuaaauacaaagaauc

SEQ ID NO: 525663 - RNA, 19 nt, Artificial Sequence
  Description of Artificial Sequence: Synthetic oligonucleotide
uuauuaguaaaguagguua

SEQ ID NO: 525664 - RNA, 19 nt, Artificial Sequence
  Description of Artificial Sequence: Synthetic oligonucleotide
uuugagacuacuugagggg

SEQ ID NO: 525665 - RNA, 19 nt, Artificial Sequence
  Description of Artificial Sequence: Synthetic oligonucleotide
aacaauaauuugugccacc

SEQ ID NO: 525666 - RNA, 19 nt, Artificial Sequence
  Description of Artificial Sequence: Synthetic oligonucleotide
aaagacaucauaauuggca

SEQ ID NO: 525667 - RNA, 19 nt, Artificial Sequence
  Description of Artificial Sequence: Synthetic oligonucleotide
acaaauguaaauauuaccu

SEQ ID NO: 525668 - RNA, 19 nt, Artificial Sequence
  Description of Artificial Sequence: Synthetic oligonucleotide
uuuauaacugcuacgaauu

SEQ ID NO: 525669 - RNA, 19 nt, Artificial Sequence
  Description of Artificial Sequence: Synthetic oligonucleotide
aaagucuuacucuugacuu

SEQ ID NO: 525670 - RNA, 19 nt, Artificial Sequence
  Description of Artificial Sequence: Synthetic oligonucleotide
aaacagaugaagcccaugu

SEQ ID NO: 525671 - RNA, 19 nt, Artificial Sequence
  Description of Artificial Sequence: Synthetic oligonucleotide
aauugaaguggguacugag

SEQ ID NO: 525672 - RNA, 19 nt, Artificial Sequence
  Description of Artificial Sequence: Synthetic oligonucleotide
aguaaaguagguuaccacu

SEQ ID NO: 525673 - RNA, 19 nt, Artificial Sequence
  Description of Artificial Sequence: Synthetic oligonucleotide
uaagucggaagauuaaccc

SEQ ID NO: 525674 - RNA, 19 nt, Artificial Sequence
  Description of Artificial Sequence: Synthetic oligonucleotide
aacuauauagugaaggagu

SEQ ID NO: 525675 - RNA, 19 nt, Artificial Sequence
  Description of Artificial Sequence: Synthetic oligonucleotide
aaacaauaauuugugccac

SEQ ID NO: 525676 - RNA, 19 nt, Artificial Sequence
  Description of Artificial Sequence: Synthetic oligonucleotide
uguucuuacaggcugcucu

SEQ ID NO: 525677 - RNA, 19 nt, Artificial Sequence
  Description of Artificial Sequence: Synthetic oligonucleotide
gauagaauacugaagauaa

SEQ ID NO: 525678 - RNA, 19 nt, Artificial Sequence
  Description of Artificial Sequence: Synthetic oligonucleotide
uuaauaccaacuauauagu

SEQ ID NO: 525679 - RNA, 19 nt, Artificial Sequence
  Description of Artificial Sequence: Synthetic oligonucleotide
agccuaugcauccaacucc

SEQ ID NO: 525680 - RNA, 19 nt, Artificial Sequence
  Description of Artificial Sequence: Synthetic oligonucleotide
auagugaaggaguuaacug

SEQ ID NO: 525681 - RNA, 19 nt, Artificial Sequence
  Description of Artificial Sequence: Synthetic oligonucleotide
gaucucagugacuuaacag

SEQ ID NO: 525682 - RNA, 19 nt, Artificial Sequence
  Description of Artificial Sequence: Synthetic oligonucleotide
uuauguaccacugaguuua

SEQ ID NO: 525683 - RNA, 19 nt, Artificial Sequence
  Description of Artificial Sequence: Synthetic oligonucleotide
uauauagugaaggaguuaa

SEQ ID NO: 525684 - RNA, 19 nt, Artificial Sequence
  Description of Artificial Sequence: Synthetic oligonucleotide
aaacuuacucccugagagg

SEQ ID NO: 525685 - RNA, 19 nt, Artificial Sequence
  Description of Artificial Sequence: Synthetic oligonucleotide
ugcagcacccauaaaagug

SEQ ID NO: 525686 - RNA, 19 nt, Artificial Sequence
  Description of Artificial Sequence: Synthetic oligonucleotide
uuaaacugcagagaggugu

SEQ ID NO: 525687 - RNA, 19 nt, Artificial Sequence
  Description of Artificial Sequence: Synthetic oligonucleotide
uguaucacuuccuacacau

SEQ ID NO: 525688 - RNA, 19 nt, Artificial Sequence
  Description of Artificial Sequence: Synthetic oligonucleotide
ugagcguaaagucuuacuc

SEQ ID NO: 525689 - RNA, 19 nt, Artificial Sequence
  Description of Artificial Sequence: Synthetic oligonucleotide
uaugcauccaacuccagaa

SEQ ID NO: 525690 - RNA, 19 nt, Artificial Sequence
  Description of Artificial Sequence: Synthetic oligonucleotide
cuaauggcauccauguucc

SEQ ID NO: 525691 - RNA, 19 nt, Artificial Sequence
  Description of Artificial Sequence: Synthetic oligonucleotide
ugauaaggguucuaaggag

SEQ ID NO: 525692 - RNA, 19 nt, Artificial Sequence
  Description of Artificial Sequence: Synthetic oligonucleotide
ucuuacucaaacugugacc

SEQ ID NO: 525693 - RNA, 19 nt, Artificial Sequence
  Description of Artificial Sequence: Synthetic oligonucleotide
auuuuaacagucaucagga

SEQ ID NO: 525694 - RNA, 19 nt, Artificial Sequence
  Description of Artificial Sequence: Synthetic oligonucleotide
agucuuaacugaauuacac

SEQ ID NO: 525695 - RNA, 19 nt, Artificial Sequence
  Description of Artificial Sequence: Synthetic oligonucleotide
uuaacccucaaauaauaaa

SEQ ID NO: 525696 - RNA, 19 nt, Artificial Sequence
  Description of Artificial Sequence: Synthetic oligonucleotide
caauguaugguaccgcucc

SEQ ID NO: 525697 - RNA, 19 nt, Artificial Sequence
  Description of Artificial Sequence: Synthetic oligonucleotide
ugcuauuuguuccauuaga

SEQ ID NO: 525698 - RNA, 19 nt, Artificial Sequence
  Description of Artificial Sequence: Synthetic oligonucleotide
uugcaaaacauuucaguac

SEQ ID NO: 525699 - RNA, 19 nt, Artificial Sequence
  Description of Artificial Sequence: Synthetic oligonucleotide
uaccguuccuguaagucgg

SEQ ID NO: 525700 - RNA, 19 nt, Artificial Sequence
  Description of Artificial Sequence: Synthetic oligonucleotide
uauagugaaggaguuaacu

SEQ ID NO: 525701 - RNA, 19 nt, Artificial Sequence
  Description of Artificial Sequence: Synthetic oligonucleotide
uguuggaaaaccagaaaau

SEQ ID NO: 525702 - RNA, 19 nt, Artificial Sequence
  Description of Artificial Sequence: Synthetic oligonucleotide
uucuuacucaaacugugac

SEQ ID NO: 525703 - RNA, 19 nt, Artificial Sequence
  Description of Artificial Sequence: Synthetic oligonucleotide
ucuuguuggaaaaccagaa

SEQ ID NO: 525704 - RNA, 19 nt, Artificial Sequence
  Description of Artificial Sequence: Synthetic oligonucleotide
cagacuaugucaaguaaag

SEQ ID NO: 525705 - RNA, 19 nt, Artificial Sequence
  Description of Artificial Sequence: Synthetic oligonucleotide
cuugaaagcuucaaguuca

SEQ ID NO: 525706 - RNA, 19 nt, Artificial Sequence
  Description of Artificial Sequence: Synthetic oligonucleotide
uauuaccuuaaaacaauaa

SEQ ID NO: 525707 - RNA, 19 nt, Artificial Sequence
  Description of Artificial Sequence: Synthetic oligonucleotide
uacgaauugaaguggguac

SEQ ID NO: 525708 - RNA, 19 nt, Artificial Sequence
  Description of Artificial Sequence: Synthetic oligonucleotide
gauaaggguucuaaggagc

SEQ ID NO: 525709 - RNA, 19 nt, Artificial Sequence
  Description of Artificial Sequence: Synthetic oligonucleotide
ugcuacgaauugaaguggg

SEQ ID NO: 525710 - RNA, 19 nt, Artificial Sequence
  Description of Artificial Sequence: Synthetic oligonucleotide
uaaaacuuacucccugaga

SEQ ID NO: 525711 - RNA, 19 nt, Artificial Sequence
  Description of Artificial Sequence: Synthetic oligonucleotide
gacuuuauaacugcuacga

SEQ ID NO: 525712 - RNA, 19 nt, Artificial Sequence
  Description of Artificial Sequence: Synthetic oligonucleotide
ugugcuauuuguuccauua

SEQ ID NO: 525713 - RNA, 19 nt, Artificial Sequence
  Description of Artificial Sequence: Synthetic oligonucleotide
aauaagauauuuagcaguu

SEQ ID NO: 525714 - RNA, 19 nt, Artificial Sequence
  Description of Artificial Sequence: Synthetic oligonucleotide
guuuugagacuacuugagg

SEQ ID NO: 525715 - RNA, 19 nt, Artificial Sequence
  Description of Artificial Sequence: Synthetic oligonucleotide
aaaguagguuaccacuacu

SEQ ID NO: 525716 - RNA, 19 nt, Artificial Sequence
  Description of Artificial Sequence: Synthetic oligonucleotide
auuuguuccauuagagcac

SEQ ID NO: 525717 - RNA, 19 nt, Artificial Sequence
  Description of Artificial Sequence: Synthetic oligonucleotide
aaugugacgaacaccagau

SEQ ID NO: 525718 - RNA, 19 nt, Artificial Sequence
  Description of Artificial Sequence: Synthetic oligonucleotide
uuauaacugcuacgaauug

SEQ ID NO: 525719 - RNA, 19 nt, Artificial Sequence
  Description of Artificial Sequence: Synthetic oligonucleotide
aagucuuacucuugacuug

SEQ ID NO: 525720 - RNA, 19 nt, Artificial Sequence
  Description of Artificial Sequence: Synthetic oligonucleotide
uguaugguaccgcuccucc

SEQ ID NO: 525721 - RNA, 19 nt, Artificial Sequence
  Description of Artificial Sequence: Synthetic oligonucleotide
auaaggguucuaaggagcc

SEQ ID NO: 525722 - RNA, 19 nt, Artificial Sequence
  Description of Artificial Sequence: Synthetic oligonucleotide
uuaacaggaagcucuuacu

SEQ ID NO: 525723 - RNA, 19 nt, Artificial Sequence
  Description of Artificial Sequence: Synthetic oligonucleotide
uugugauugagcguaaagu

SEQ ID NO: 525724 - RNA, 19 nt, Artificial Sequence
  Description of Artificial Sequence: Synthetic oligonucleotide
agauaaucuggauucugug

SEQ ID NO: 525725 - RNA, 19 nt, Artificial Sequence
  Description of Artificial Sequence: Synthetic oligonucleotide
ucuuuauguaccacugagu

SEQ ID NO: 525726 - RNA, 19 nt, Artificial Sequence
  Description of Artificial Sequence: Synthetic oligonucleotide
cuaccguuccuguaagucg

SEQ ID NO: 525727 - RNA, 19 nt, Artificial Sequence
  Description of Artificial Sequence: Synthetic oligonucleotide
ucuaaggagccuaugcauc

SEQ ID NO: 525728 - RNA, 19 nt, Artificial Sequence
  Description of Artificial Sequence: Synthetic oligonucleotide
gaaaccucugacuaucauc

SEQ ID NO: 525729 - RNA, 19 nt, Artificial Sequence
  Description of Artificial Sequence: Synthetic oligonucleotide
cuaaggagccuaugcaucc

SEQ ID NO: 525730 - RNA, 19 nt, Artificial Sequence
  Description of Artificial Sequence: Synthetic oligonucleotide
agguguauugauagaauac

SEQ ID NO: 525731 - RNA, 19 nt, Artificial Sequence
  Description of Artificial Sequence: Synthetic oligonucleotide
aacuuacucccugagaggu

SEQ ID NO: 525732 - RNA, 19 nt, Artificial Sequence
  Description of Artificial Sequence: Synthetic oligonucleotide
uaaaguagguuaccacuac

SEQ ID NO: 525733 - RNA, 19 nt, Artificial Sequence
  Description of Artificial Sequence: Synthetic oligonucleotide
uucgcauacaagguauggg

SEQ ID NO: 525734 - RNA, 19 nt, Artificial Sequence
  Description of Artificial Sequence: Synthetic oligonucleotide
gugauaaggguucuaagga

SEQ ID NO: 525735 - RNA, 19 nt, Artificial Sequence
  Description of Artificial Sequence: Synthetic oligonucleotide
acagaaaccucugacuauc

SEQ ID NO: 525736 - RNA, 19 nt, Artificial Sequence
  Description of Artificial Sequence: Synthetic oligonucleotide
acuaugucaaguaaagagu

SEQ ID NO: 525737 - RNA, 19 nt, Artificial Sequence
  Description of Artificial Sequence: Synthetic oligonucleotide
aacucuaaauacaaagaau

SEQ ID NO: 525738 - RNA, 19 nt, Artificial Sequence
  Description of Artificial Sequence: Synthetic oligonucleotide
ugauugagcguaaagucuu

SEQ ID NO: 525739 - RNA, 19 nt, Artificial Sequence
  Description of Artificial Sequence: Synthetic oligonucleotide
aagauaaucuggauucugu

SEQ ID NO: 525740 - RNA, 19 nt, Artificial Sequence
  Description of Artificial Sequence: Synthetic oligonucleotide
ugugcagauuuucauacuu

SEQ ID NO: 525741 - RNA, 19 nt, Artificial Sequence
  Description of Artificial Sequence: Synthetic oligonucleotide
ucggacauguacauaucca

SEQ ID NO: 525742 - RNA, 19 nt, Artificial Sequence
  Description of Artificial Sequence: Synthetic oligonucleotide
uucuucgcauacaagguau

SEQ ID NO: 525743 - RNA, 19 nt, Artificial Sequence
  Description of Artificial Sequence: Synthetic oligonucleotide
uguaagucggaagauuaac

SEQ ID NO: 525744 - RNA, 19 nt, Artificial Sequence
  Description of Artificial Sequence: Synthetic oligonucleotide
uaguaaaguagguuaccac

SEQ ID NO: 525745 - RNA, 19 nt, Artificial Sequence
  Description of Artificial Sequence: Synthetic oligonucleotide
aacauaccaaaaugucgga

SEQ ID NO: 525746 - RNA, 19 nt, Artificial Sequence
  Description of Artificial Sequence: Synthetic oligonucleotide
ugaccugcgugcccaaccg

SEQ ID NO: 525747 - RNA, 19 nt, Artificial Sequence
  Description of Artificial Sequence: Synthetic oligonucleotide
agucggaagauuaacccuc

SEQ ID NO: 525748 - RNA, 19 nt, Artificial Sequence
  Description of Artificial Sequence: Synthetic oligonucleotide
uucuaaggagccuaugcau

SEQ ID NO: 525749 - RNA, 19 nt, Artificial Sequence
  Description of Artificial Sequence: Synthetic oligonucleotide
aaggaguuaacugguggug

SEQ ID NO: 525750 - RNA, 19 nt, Artificial Sequence
  Description of Artificial Sequence: Synthetic oligonucleotide
agcuucuaggugaaaacac

SEQ ID NO: 525751 - RNA, 19 nt, Artificial Sequence
  Description of Artificial Sequence: Synthetic oligonucleotide
gacaaagucaacuccugaa

SEQ ID NO: 525752 - RNA, 19 nt, Artificial Sequence
  Description of Artificial Sequence: Synthetic oligonucleotide
agugacuuaacaggaagcu

SEQ ID NO: 525753 - RNA, 19 nt, Artificial Sequence
  Description of Artificial Sequence: Synthetic oligonucleotide
uaugucaaguaaagaguuc

SEQ ID NO: 525754 - RNA, 19 nt, Artificial Sequence
  Description of Artificial Sequence: Synthetic oligonucleotide
guaagucggaagauuaacc

SEQ ID NO: 525755 - RNA, 19 nt, Artificial Sequence
  Description of Artificial Sequence: Synthetic oligonucleotide
aaacgaaaacagccucuug

SEQ ID NO: 525756 - RNA, 19 nt, Artificial Sequence
  Description of Artificial Sequence: Synthetic oligonucleotide
aaauaaccuucuuccucug

SEQ ID NO: 525757 - RNA, 19 nt, Artificial Sequence
  Description of Artificial Sequence: Synthetic oligonucleotide
cuuacaggcugcucuauuc

SEQ ID NO: 525758 - RNA, 19 nt, Artificial Sequence
  Description of Artificial Sequence: Synthetic oligonucleotide
ugauccaaggacucagagu

SEQ ID NO: 525759 - RNA, 19 nt, Artificial Sequence
  Description of Artificial Sequence: Synthetic oligonucleotide
acgaacaccagaucugaca

SEQ ID NO: 525760 - RNA, 19 nt, Artificial Sequence
  Description of Artificial Sequence: Synthetic oligonucleotide
cuuacucccugagaggucc

SEQ ID NO: 525761 - RNA, 19 nt, Artificial Sequence
  Description of Artificial Sequence: Synthetic oligonucleotide
ucaacuccugaacaguuuu

SEQ ID NO: 525762 - RNA, 19 nt, Artificial Sequence
  Description of Artificial Sequence: Synthetic oligonucleotide
uguuacacuccuuaacauu

SEQ ID NO: 525763 - RNA, 19 nt, Artificial Sequence
  Description of Artificial Sequence: Synthetic oligonucleotide
uuucuucgcauacaaggua

SEQ ID NO: 525764 - RNA, 19 nt, Artificial Sequence
  Description of Artificial Sequence: Synthetic oligonucleotide
gcaaauuuaguaacugagg

SEQ ID NO: 525765 - RNA, 19 nt, Artificial Sequence
  Description of Artificial Sequence: Synthetic oligonucleotide
aauguaugguaccgcuccu

SEQ ID NO: 525766 - RNA, 19 nt, Artificial Sequence
  Description of Artificial Sequence: Synthetic oligonucleotide
acucaacauaccaaaaugu

SEQ ID NO: 525767 - RNA, 19 nt, Artificial Sequence
  Description of Artificial Sequence: Synthetic oligonucleotide
agaucugacagcugaacuu

SEQ ID NO: 525768 - RNA, 19 nt, Artificial Sequence
  Description of Artificial Sequence: Synthetic oligonucleotide
uguuccagagacacauccu

SEQ ID NO: 525769 - RNA, 19 nt, Artificial Sequence
  Description of Artificial Sequence: Synthetic oligonucleotide
guucuaaggagccuaugca

SEQ ID NO: 525770 - RNA, 19 nt, Artificial Sequence
  Description of Artificial Sequence: Synthetic oligonucleotide
aaaacagaugaagcccaug

SEQ ID NO: 525771 - RNA, 19 nt, Artificial Sequence
  Description of Artificial Sequence: Synthetic oligonucleotide
gucggacauguacauaucc

SEQ ID NO: 525772 - RNA, 19 nt, Artificial Sequence
  Description of Artificial Sequence: Synthetic oligonucleotide
cagguugaaagcuuuguga

SEQ ID NO: 525773 - RNA, 19 nt, Artificial Sequence
  Description of Artificial Sequence: Synthetic oligonucleotide
accgacucaacauaccaaa

SEQ ID NO: 525774 - RNA, 19 nt, Artificial Sequence
  Description of Artificial Sequence: Synthetic oligonucleotide
cucuagcccaugcaggccg

SEQ ID NO: 525775 - RNA, 19 nt, Artificial Sequence
  Description of Artificial Sequence: Synthetic oligonucleotide
uccauuugcacgccacaga

SEQ ID NO: 525776 - RNA, 19 nt, Artificial Sequence
  Description of Artificial Sequence: Synthetic oligonucleotide
acugucaucuaacucuaaa

SEQ ID NO: 525777 - RNA, 19 nt, Artificial Sequence
  Description of Artificial Sequence: Synthetic oligonucleotide
uauacaucugggcgccgcc

SEQ ID NO: 525778 - RNA, 19 nt, Artificial Sequence
  Description of Artificial Sequence: Synthetic oligonucleotide
uuuauguaccacugaguuu

SEQ ID NO: 525779 - RNA, 19 nt, Artificial Sequence
  Description of Artificial Sequence: Synthetic oligonucleotide
uaaacugcagagaggugua

SEQ ID NO: 525780 - RNA, 19 nt, Artificial Sequence
  Description of Artificial Sequence: Synthetic oligonucleotide
uugagcguaaagucuuacu

SEQ ID NO: 525781 - RNA, 19 nt, Artificial Sequence
  Description of Artificial Sequence: Synthetic oligonucleotide
ucuucgcauacaagguaug

SEQ ID NO: 525782 - RNA, 19 nt, Artificial Sequence
  Description of Artificial Sequence: Synthetic oligonucleotide
auugagcguaaagucuuac

SEQ ID NO: 525783 - RNA, 19 nt, Artificial Sequence
  Description of Artificial Sequence: Synthetic oligonucleotide
ucuuacuguuuguucuuac

SEQ ID NO: 525784 - RNA, 19 nt, Artificial Sequence
  Description of Artificial Sequence: Synthetic oligonucleotide
agcguaaagucuuacucuu

SEQ ID NO: 525785 - RNA, 19 nt, Artificial Sequence
  Description of Artificial Sequence: Synthetic oligonucleotide
cuucgcauacaagguaugg

SEQ ID NO: 525786 - RNA, 19 nt, Artificial Sequence
  Description of Artificial Sequence: Synthetic oligonucleotide
auaaaagugucaagaaaau

SEQ ID NO: 525787 - RNA, 19 nt, Artificial Sequence
  Description of Artificial Sequence: Synthetic oligonucleotide
caucaaauauccuggugga

SEQ ID NO: 525788 - RNA, 19 nt, Artificial Sequence
  Description of Artificial Sequence: Synthetic oligonucleotide
cuuuauaacugcuacgaau

SEQ ID NO: 525789 - RNA, 19 nt, Artificial Sequence
  Description of Artificial Sequence: Synthetic oligonucleotide
gagccuaugcauccaacuc

SEQ ID NO: 525790 - RNA, 19 nt, Artificial Sequence
  Description of Artificial Sequence: Synthetic oligonucleotide
cuuacucaaacugugaccu

SEQ ID NO: 525791 - RNA, 19 nt, Artificial Sequence
  Description of Artificial Sequence: Synthetic oligonucleotide
auguaaauauuaccuuaaa

SEQ ID NO: 525792 - RNA, 19 nt, Artificial Sequence
  Description of Artificial Sequence: Synthetic oligonucleotide
agcuuugugauugagcgua

SEQ ID NO: 525793 - RNA, 19 nt, Artificial Sequence
  Description of Artificial Sequence: Synthetic oligonucleotide
gugccgaaaauacaaaugu

SEQ ID NO: 525794 - RNA, 19 nt, Artificial Sequence
  Description of Artificial Sequence: Synthetic oligonucleotide
ugcucauauuucugcauaa

SEQ ID NO: 525795 - RNA, 19 nt, Artificial Sequence
  Description of Artificial Sequence: Synthetic oligonucleotide
ugucuccucaguccagucu

SEQ ID NO: 525796 - RNA, 19 nt, Artificial Sequence
  Description of Artificial Sequence: Synthetic oligonucleotide
ugacgaacaccagaucuga

SEQ ID NO: 525797 - RNA, 19 nt, Artificial Sequence
  Description of Artificial Sequence: Synthetic oligonucleotide
uugagacuacuugaggggu

SEQ ID NO: 525798 - RNA, 19 nt, Artificial Sequence
  Description of Artificial Sequence: Synthetic oligonucleotide
ucgccauucuuccucccgc

SEQ ID NO: 525799 - RNA, 19 nt, Artificial Sequence
  Description of Artificial Sequence: Synthetic oligonucleotide
ugccgaaaauacaaaugua

SEQ ID NO: 525800 - RNA, 19 nt, Artificial Sequence
  Description of Artificial Sequence: Synthetic oligonucleotide
ugcauuaccacagcuugau

SEQ ID NO: 525801 - RNA, 19 nt, Artificial Sequence
  Description of Artificial Sequence: Synthetic oligonucleotide
auauagugaaggaguuaac

SEQ ID NO: 525802 - RNA, 19 nt, Artificial Sequence
  Description of Artificial Sequence: Synthetic oligonucleotide
gagagguguauugauagaa

SEQ ID NO: 525803 - RNA, 19 nt, Artificial Sequence
  Description of Artificial Sequence: Synthetic oligonucleotide
gaguuaacugguggugccg

SEQ ID NO: 525804 - RNA, 19 nt, Artificial Sequence
  Description of Artificial Sequence: Synthetic oligonucleotide
gaaggaguuaacugguggu

SEQ ID NO: 525805 - RNA, 19 nt, Artificial Sequence
  Description of Artificial Sequence: Synthetic oligonucleotide
agucuuacucuugacuuga

SEQ ID NO: 525806 - RNA, 19 nt, Artificial Sequence
  Description of Artificial Sequence: Synthetic oligonucleotide
gugcuauuuguuccauuag

SEQ ID NO: 525807 - RNA, 19 nt, Artificial Sequence
  Description of Artificial Sequence: Synthetic oligonucleotide
acuuuauaacugcuacgaa

SEQ ID NO: 525808 - RNA, 19 nt, Artificial Sequence
  Description of Artificial Sequence: Synthetic oligonucleotide
guccacgucgcucuccucc

SEQ ID NO: 525809 - RNA, 19 nt, Artificial Sequence
  Description of Artificial Sequence: Synthetic oligonucleotide
caaguaaagaguucagagu

SEQ ID NO: 525810 - RNA, 19 nt, Artificial Sequence
  Description of Artificial Sequence: Synthetic oligonucleotide
agcucaaucccaucacuau

SEQ ID NO: 525811 - RNA, 19 nt, Artificial Sequence
  Description of Artificial Sequence: Synthetic oligonucleotide
ugagacuacuugagggguc

SEQ ID NO: 525812 - RNA, 19 nt, Artificial Sequence
  Description of Artificial Sequence: Synthetic oligonucleotide
agccagcucaaucccauca

SEQ ID NO: 525813 - RNA, 19 nt, Artificial Sequence
  Description of Artificial Sequence: Synthetic oligonucleotide
cugcuacgaauugaagugg

SEQ ID NO: 525814 - RNA, 19 nt, Artificial Sequence
  Description of Artificial Sequence: Synthetic oligonucleotide
gagcguaaagucuuacucu

SEQ ID NO: 525815 - RNA, 19 nt, Artificial Sequence
  Description of Artificial Sequence: Synthetic oligonucleotide
ggugccgaaaauacaaaug

SEQ ID NO: 525816 - RNA, 19 nt, Artificial Sequence
  Description of Artificial Sequence: Synthetic oligonucleotide
agagcuaagcugccaaguu

SEQ ID NO: 525817 - RNA, 19 nt, Artificial Sequence
  Description of Artificial Sequence: Synthetic oligonucleotide
uuacucaaacugugaccug

SEQ ID NO: 525818 - RNA, 19 nt, Artificial Sequence
  Description of Artificial Sequence: Synthetic oligonucleotide
gucgccauucuuccucccg

SEQ ID NO: 525819 - RNA, 19 nt, Artificial Sequence
  Description of Artificial Sequence: Synthetic oligonucleotide
acgaauugaaguggguacu

SEQ ID NO: 525820 - RNA, 19 nt, Artificial Sequence
  Description of Artificial Sequence: Synthetic oligonucleotide
acuauauagugaaggaguu

SEQ ID NO: 525821 - RNA, 19 nt, Artificial Sequence
  Description of Artificial Sequence: Synthetic oligonucleotide
uugugcagauuuucauacu

SEQ ID NO: 525822 - RNA, 19 nt, Artificial Sequence
  Description of Artificial Sequence: Synthetic oligonucleotide
uccaucauuuugucgucau

SEQ ID NO: 525823 - RNA, 19 nt, Artificial Sequence
  Description of Artificial Sequence: Synthetic oligonucleotide
ggaguuaacugguggugcc

SEQ ID NO: 525824 - RNA, 19 nt, Artificial Sequence
  Description of Artificial Sequence: Synthetic oligonucleotide
ugucccgcugguccgggcc

SEQ ID NO: 525825 - RNA, 19 nt, Artificial Sequence
  Description of Artificial Sequence: Synthetic oligonucleotide
gugacgaacaccagaucug

SEQ ID NO: 525826 - RNA, 19 nt, Artificial Sequence
  Description of Artificial Sequence: Synthetic oligonucleotide
guuaccacuacugauuuau

SEQ ID NO: 525827 - RNA, 19 nt, Artificial Sequence
  Description of Artificial Sequence: Synthetic oligonucleotide
uaaucuggauucugugaua

SEQ ID NO: 525828 - RNA, 19 nt, Artificial Sequence
  Description of Artificial Sequence: Synthetic oligonucleotide
ucccaccgacucaacauac

SEQ ID NO: 525829 - RNA, 19 nt, Artificial Sequence
  Description of Artificial Sequence: Synthetic oligonucleotide
auuaacccucaaauaauaa

SEQ ID NO: 525830 - RNA, 19 nt, Artificial Sequence
  Description of Artificial Sequence: Synthetic oligonucleotide
cuuaacugaauuacacagu

SEQ ID NO: 525831 - RNA, 19 nt, Artificial Sequence
  Description of Artificial Sequence: Synthetic oligonucleotide
cacugaguuuaaacugcag

SEQ ID NO: 525832 - RNA, 19 nt, Artificial Sequence
  Description of Artificial Sequence: Synthetic oligonucleotide
guaaaguagguuaccacua

SEQ ID NO: 525833 - RNA, 19 nt, Artificial Sequence
  Description of Artificial Sequence: Synthetic oligonucleotide
uugcauugugcagauuuuc

SEQ ID NO: 525834 - RNA, 19 nt, Artificial Sequence
  Description of Artificial Sequence: Synthetic oligonucleotide
ucuuacaggcugcucuauu

SEQ ID NO: 525835 - RNA, 19 nt, Artificial Sequence
  Description of Artificial Sequence: Synthetic oligonucleotide
caguucaucuuguuggaaa

SEQ ID NO: 525836 - RNA, 19 nt, Artificial Sequence
  Description of Artificial Sequence: Synthetic oligonucleotide
auguaugguaccgcuccuc

SEQ ID NO: 525837 - RNA, 19 nt, Artificial Sequence
  Description of Artificial Sequence: Synthetic oligonucleotide
cagucuuaacugaauuaca

SEQ ID NO: 525838 - RNA, 19 nt, Artificial Sequence
  Description of Artificial Sequence: Synthetic oligonucleotide
gugaccugcgugcccaacc

SEQ ID NO: 525839 - RNA, 19 nt, Artificial Sequence
  Description of Artificial Sequence: Synthetic oligonucleotide
aacccuagcagcacauaaa

SEQ ID NO: 525840 - RNA, 19 nt, Artificial Sequence
  Description of Artificial Sequence: Synthetic oligonucleotide
agacuaugucaaguaaaga

SEQ ID NO: 525841 - RNA, 19 nt, Artificial Sequence
  Description of Artificial Sequence: Synthetic oligonucleotide
auuuugucgucaucuucuu

SEQ ID NO: 525842 - RNA, 19 nt, Artificial Sequence
  Description of Artificial Sequence: Synthetic oligonucleotide
acaugauucugaaccguca

SEQ ID NO: 525843 - RNA, 19 nt, Artificial Sequence
  Description of Artificial Sequence: Synthetic oligonucleotide
gagacuacuugagggguca

SEQ ID NO: 525844 - RNA, 19 nt, Artificial Sequence
  Description of Artificial Sequence: Synthetic oligonucleotide
auacaucugggcgccgccg

SEQ ID NO: 525845 - RNA, 19 nt, Artificial Sequence
  Description of Artificial Sequence: Synthetic oligonucleotide
ucuagcccaugcaggccgc

SEQ ID NO: 525846 - RNA, 19 nt, Artificial Sequence
  Description of Artificial Sequence: Synthetic oligonucleotide
aguuaacugguggugccga

SEQ ID NO: 525847 - RNA, 19 nt, Artificial Sequence
  Description of Artificial Sequence: Synthetic oligonucleotide
uuagagcaccuuucugcuc

SEQ ID NO: 525848 - RNA, 19 nt, Artificial Sequence
  Description of Artificial Sequence: Synthetic oligonucleotide
ugguccgggcccgacaacc

SEQ ID NO: 525849 - RNA, 19 nt, Artificial Sequence
  Description of Artificial Sequence: Synthetic oligonucleotide
acgccacagagcucuucac

SEQ ID NO: 525850 - RNA, 19 nt, Artificial Sequence
  Description of Artificial Sequence: Synthetic oligonucleotide
cucucucuuuggaccagag

SEQ ID NO: 525851 - RNA, 19 nt, Artificial Sequence
  Description of Artificial Sequence: Synthetic oligonucleotide
auauuaccuuaaaacaaua

SEQ ID NO: 525852 - RNA, 19 nt, Artificial Sequence
  Description of Artificial Sequence: Synthetic oligonucleotide
uccgggcccgacaaccgcc

SEQ ID NO: 525853 - RNA, 19 nt, Artificial Sequence
  Description of Artificial Sequence: Synthetic oligonucleotide
acauaccaaaaugucggau

SEQ ID NO: 525854 - RNA, 19 nt, Artificial Sequence
  Description of Artificial Sequence: Synthetic oligonucleotide
gccgaaaauacaaauguaa

SEQ ID NO: 525855 - RNA, 19 nt, Artificial Sequence
  Description of Artificial Sequence: Synthetic oligonucleotide
cauaccaaaaugucggauu

SEQ ID NO: 525856 - RNA, 19 nt, Artificial Sequence
  Description of Artificial Sequence: Synthetic oligonucleotide
auacaagguaugggugguc

SEQ ID NO: 525857 - RNA, 19 nt, Artificial Sequence
  Description of Artificial Sequence: Synthetic oligonucleotide
cagaguuaugcagagcuaa

SEQ ID NO: 525858 - RNA, 19 nt, Artificial Sequence
  Description of Artificial Sequence: Synthetic oligonucleotide
uaaggagccuaugcaucca

SEQ ID NO: 525859 - RNA, 19 nt, Artificial Sequence
  Description of Artificial Sequence: Synthetic oligonucleotide
acugacuuuauaacugcua

SEQ ID NO: 525860 - RNA, 19 nt, Artificial Sequence
  Description of Artificial Sequence: Synthetic oligonucleotide
cuuauuaguaaaguagguu

SEQ ID NO: 525861 - RNA, 19 nt, Artificial Sequence
  Description of Artificial Sequence: Synthetic oligonucleotide
agagguguauugauagaau

SEQ ID NO: 525862 - RNA, 19 nt, Artificial Sequence
  Description of Artificial Sequence: Synthetic oligonucleotide
ggcaagccagcucaauccc

SEQ ID NO: 525863 - RNA, 19 nt, Artificial Sequence
  Description of Artificial Sequence: Synthetic oligonucleotide
uauguaccacugaguuuaa

SEQ ID NO: 525864 - RNA, 19 nt, Artificial Sequence
  Description of Artificial Sequence: Synthetic oligonucleotide
ggaucucagugacuuaaca

SEQ ID NO: 525865 - RNA, 19 nt, Artificial Sequence
  Description of Artificial Sequence: Synthetic oligonucleotide
guuucuucgcauacaaggu

SEQ ID NO: 525866 - RNA, 19 nt, Artificial Sequence
  Description of Artificial Sequence: Synthetic oligonucleotide
uccuguaagucggaagauu

SEQ ID NO: 525867 - RNA, 19 nt, Artificial Sequence
  Description of Artificial Sequence: Synthetic oligonucleotide
cuacgaauugaagugggua

SEQ ID NO: 525868 - RNA, 19 nt, Artificial Sequence
  Description of Artificial Sequence: Synthetic oligonucleotide
aucccaccgacucaacaua

SEQ ID NO: 525869 - RNA, 19 nt, Artificial Sequence
  Description of Artificial Sequence: Synthetic oligonucleotide
uccucuuucugucgccauu

SEQ ID NO: 525870 - RNA, 19 nt, Artificial Sequence
  Description of Artificial Sequence: Synthetic oligonucleotide
agucggacauguacauauc

SEQ ID NO: 525871 - RNA, 19 nt, Artificial Sequence
  Description of Artificial Sequence: Synthetic oligonucleotide
acuuacucccugagagguc

SEQ ID NO: 525872 - RNA, 19 nt, Artificial Sequence
  Description of Artificial Sequence: Synthetic oligonucleotide
guucuuacaggcugcucua

SEQ ID NO: 525873 - RNA, 19 nt, Artificial Sequence
  Description of Artificial Sequence: Synthetic oligonucleotide
ucggaagauuaacccucaa

SEQ ID NO: 525874 - RNA, 19 nt, Artificial Sequence
  Description of Artificial Sequence: Synthetic oligonucleotide
cuguaagucggaagauuaa

SEQ ID NO: 525875 - RNA, 19 nt, Artificial Sequence
  Description of Artificial Sequence: Synthetic oligonucleotide
caucaggacaaagucaacu

SEQ ID NO: 525876 - RNA, 19 nt, Artificial Sequence
  Description of Artificial Sequence: Synthetic oligonucleotide
cagcuucuaggugaaaaca

SEQ ID NO: 525877 - RNA, 19 nt, Artificial Sequence
  Description of Artificial Sequence: Synthetic oligonucleotide
ggcccgacaaccgccaccg

SEQ ID NO: 525878 - RNA, 19 nt, Artificial Sequence
  Description of Artificial Sequence: Synthetic oligonucleotide
ccaguuuacuuauuaguaa

SEQ ID NO: 525879 - RNA, 19 nt, Artificial Sequence
  Description of Artificial Sequence: Synthetic oligonucleotide
uuccuguaagucggaagau

SEQ ID NO: 525880 - RNA, 19 nt, Artificial Sequence
  Description of Artificial Sequence: Synthetic oligonucleotide
cagcuaccguuccuguaag

SEQ ID NO: 525881 - RNA, 19 nt, Artificial Sequence
  Description of Artificial Sequence: Synthetic oligonucleotide
cagcaagauuccauuugca

SEQ ID NO: 525882 - RNA, 19 nt, Artificial Sequence
  Description of Artificial Sequence: Synthetic oligonucleotide
aaccgcagguacugacuuu

SEQ ID NO: 525883 - RNA, 19 nt, Artificial Sequence
  Description of Artificial Sequence: Synthetic oligonucleotide
gcuaccguuccuguaaguc

SEQ ID NO: 525884 - RNA, 19 nt, Artificial Sequence
  Description of Artificial Sequence: Synthetic oligonucleotide
uccucccuucagaaacaaa

SEQ ID NO: 525885 - RNA, 19 nt, Artificial Sequence
  Description of Artificial Sequence: Synthetic oligonucleotide
cucuuggauccacauuaga

SEQ ID NO: 525886 - RNA, 19 nt, Artificial Sequence
  Description of Artificial Sequence: Synthetic oligonucleotide
accgcagguacugacuuua

SEQ ID NO: 525887 - RNA, 19 nt, Artificial Sequence
  Description of Artificial Sequence: Synthetic oligonucleotide
ccuguaagucggaagauua

SEQ ID NO: 525888 - RNA, 19 nt, Artificial Sequence
  Description of Artificial Sequence: Synthetic oligonucleotide
acuauacaucugggcgccg

SEQ ID NO: 525889 - RNA, 19 nt, Artificial Sequence
  Description of Artificial Sequence: Synthetic oligonucleotide
gacgaacaccagaucugac

SEQ ID NO: 525890 - RNA, 19 nt, Artificial Sequence
  Description of Artificial Sequence: Synthetic oligonucleotide
gaccugcgugcccaaccgc

SEQ ID NO: 525891 - RNA, 19 nt, Artificial Sequence
  Description of Artificial Sequence: Synthetic oligonucleotide
cuauauagugaaggaguua

SEQ ID NO: 525892 - RNA, 19 nt, Artificial Sequence
  Description of Artificial Sequence: Synthetic oligonucleotide
agcuaccguuccuguaagu

SEQ ID NO: 525893 - RNA, 19 nt, Artificial Sequence
  Description of Artificial Sequence: Synthetic oligonucleotide
uccccgccaguccucggga

SEQ ID NO: 525894 - RNA, 19 nt, Artificial Sequence
  Description of Artificial Sequence: Synthetic oligonucleotide
uucuuacaggcugcucuau

SEQ ID NO: 525895 - RNA, 19 nt, Artificial Sequence
  Description of Artificial Sequence: Synthetic oligonucleotide
cuuugacagcagugggaca

SEQ ID NO: 525896 - RNA, 19 nt, Artificial Sequence
  Description of Artificial Sequence: Synthetic oligonucleotide
guacugagccaaagauuac

SEQ ID NO: 525897 - RNA, 19 nt, Artificial Sequence
  Description of Artificial Sequence: Synthetic oligonucleotide
ccucgggaagcuucagggg

SEQ ID NO: 525898 - RNA, 19 nt, Artificial Sequence
  Description of Artificial Sequence: Synthetic oligonucleotide
agcacccauaaaaguguca

SEQ ID NO: 525899 - RNA, 19 nt, Artificial Sequence
  Description of Artificial Sequence: Synthetic oligonucleotide
caccgacucaacauaccaa

SEQ ID NO: 525900 - RNA, 19 nt, Artificial Sequence
  Description of Artificial Sequence: Synthetic oligonucleotide
aucugggcgccgccgccag

SEQ ID NO: 525901 - RNA, 19 nt, Artificial Sequence
  Description of Artificial Sequence: Synthetic oligonucleotide
gauugagcguaaagucuua

SEQ ID NO: 525902 - RNA, 19 nt, Artificial Sequence
  Description of Artificial Sequence: Synthetic oligonucleotide
ggagccuaugcauccaacu

SEQ ID NO: 525903 - RNA, 19 nt, Artificial Sequence
  Description of Artificial Sequence: Synthetic oligonucleotide
accugcgugcccaaccgca

SEQ ID NO: 525904 - RNA, 19 nt, Artificial Sequence
  Description of Artificial Sequence: Synthetic oligonucleotide
gucggaagauuaacccuca

SEQ ID NO: 525905 - RNA, 19 nt, Artificial Sequence
  Description of Artificial Sequence: Synthetic oligonucleotide
gugccacccaguuuacuua

SEQ ID NO: 525906 - RNA, 19 nt, Artificial Sequence
  Description of Artificial Sequence: Synthetic oligonucleotide
guaccgcuccucccuucag

SEQ ID NO: 525907 - RNA, 19 nt, Artificial Sequence
  Description of Artificial Sequence: Synthetic oligonucleotide
uacucccugagagguccca

SEQ ID NO: 525908 - RNA, 19 nt, Artificial Sequence
  Description of Artificial Sequence: Synthetic oligonucleotide
gugcagcacccauaaaagu

SEQ ID NO: 525909 - RNA, 19 nt, Artificial Sequence
  Description of Artificial Sequence: Synthetic oligonucleotide
ccaguccucgggaagcuuc

SEQ ID NO: 525910 - RNA, 19 nt, Artificial Sequence
  Description of Artificial Sequence: Synthetic oligonucleotide
caguuugacuuccugcaau

SEQ ID NO: 525911 - RNA, 19 nt, Artificial Sequence
  Description of Artificial Sequence: Synthetic oligonucleotide
ggggacacguccacgucgc

SEQ ID NO: 525912 - RNA, 19 nt, Artificial Sequence
  Description of Artificial Sequence: Synthetic oligonucleotide
gguaccgcuccucccuuca

SEQ ID NO: 525913 - RNA, 19 nt, Artificial Sequence
  Description of Artificial Sequence: Synthetic oligonucleotide
caugucccgcugguccggg

SEQ ID NO: 525914 - RNA, 19 nt, Artificial Sequence
  Description of Artificial Sequence: Synthetic oligonucleotide
ugguaccgcuccucccuuc

SEQ ID NO: 525915 - RNA, 19 nt, Artificial Sequence
  Description of Artificial Sequence: Synthetic oligonucleotide
cuuugugauugagcguaaa

SEQ ID NO: 525916 - RNA, 19 nt, Artificial Sequence
  Description of Artificial Sequence: Synthetic oligonucleotide
gcaauguaugguaccgcuc

SEQ ID NO: 525917 - RNA, 19 nt, Artificial Sequence
  Description of Artificial Sequence: Synthetic oligonucleotide
gcguaaagucuuacucuug

SEQ ID NO: 525918 - RNA, 19 nt, Artificial Sequence
  Description of Artificial Sequence: Synthetic oligonucleotide
gcagcacccauaaaagugu

SEQ ID NO: 525919 - RNA, 19 nt, Artificial Sequence
  Description of Artificial Sequence: Synthetic oligonucleotide
ccacugaguuuaaacugca

SEQ ID NO: 525920 - RNA, 19 nt, Artificial Sequence
  Description of Artificial Sequence: Synthetic oligonucleotide
acuccagaauggggaacau

SEQ ID NO: 525921 - RNA, 19 nt, Artificial Sequence
  Description of Artificial Sequence: Synthetic oligonucleotide
aggccgcuccgugugauuu

SEQ ID NO: 525922 - RNA, 19 nt, Artificial Sequence
  Description of Artificial Sequence: Synthetic oligonucleotide
auguaccacugaguuuaaa

SEQ ID NO: 525923 - RNA, 19 nt, Artificial Sequence
  Description of Artificial Sequence: Synthetic oligonucleotide
gggcccgacaaccgccacc

SEQ ID NO: 525924 - RNA, 19 nt, Artificial Sequence
  Description of Artificial Sequence: Synthetic oligonucleotide
caaccgcagguacugacuu

SEQ ID NO: 525925 - RNA, 19 nt, Artificial Sequence
  Description of Artificial Sequence: Synthetic oligonucleotide
caggcaccggcgggaagug

SEQ ID NO: 525926 - RNA, 19 nt, Artificial Sequence
  Description of Artificial Sequence: Synthetic oligonucleotide
agacuacuugaggggucaa

SEQ ID NO: 525927 - RNA, 19 nt, Artificial Sequence
  Description of Artificial Sequence: Synthetic oligonucleotide
cgugcccaaccgcagguac

SEQ ID NO: 525928 - RNA, 19 nt, Artificial Sequence
  Description of Artificial Sequence: Synthetic oligonucleotide
cugguccgggcccgacaac

SEQ ID NO: 525929 - RNA, 19 nt, Artificial Sequence
  Description of Artificial Sequence: Synthetic oligonucleotide
gucaacuccugaacaguuu

SEQ ID NO: 525930 - RNA, 19 nt, Artificial Sequence
  Description of Artificial Sequence: Synthetic oligonucleotide
cccgccaguccucgggaag

SEQ ID NO: 525931 - RNA, 19 nt, Artificial Sequence
  Description of Artificial Sequence: Synthetic oligonucleotide
ccgacucaacauaccaaaa

SEQ ID NO: 525932 - RNA, 19 nt, Artificial Sequence
  Description of Artificial Sequence: Synthetic oligonucleotide
ugcacgccacagagcucuu

SEQ ID NO: 525933 - RNA, 19 nt, Artificial Sequence
  Description of Artificial Sequence: Synthetic oligonucleotide
ggguacugagccaaagauu

SEQ ID NO: 525934 - RNA, 19 nt, Artificial Sequence
  Description of Artificial Sequence: Synthetic oligonucleotide
ccaaccgcagguacugacu

SEQ ID NO: 525935 - RNA, 19 nt, Artificial Sequence
  Description of Artificial Sequence: Synthetic oligonucleotide
gccuccccgccaguccucg

SEQ ID NO: 525936 - RNA, 19 nt, Artificial Sequence
  Description of Artificial Sequence: Synthetic oligonucleotide
cgacucaacauaccaaaau

SEQ ID NO: 525937 - RNA, 19 nt, Artificial Sequence
  Description of Artificial Sequence: Synthetic oligonucleotide
ggccgcuccgugugauuuc

SEQ ID NO: 525938 - RNA, 19 nt, Artificial Sequence
  Description of Artificial Sequence: Synthetic oligonucleotide
gcuuugugauugagcguaa

SEQ ID NO: 525939 - RNA, 19 nt, Artificial Sequence
  Description of Artificial Sequence: Synthetic oligonucleotide
ccggcgggaagugggaaga

SEQ ID NO: 525940 - RNA, 19 nt, Artificial Sequence
  Description of Artificial Sequence: Synthetic oligonucleotide
cgcuccgugugauuucuua

SEQ ID NO: 525941 - RNA, 19 nt, Artificial Sequence
  Description of Artificial Sequence: Synthetic oligonucleotide
caccggcgggaagugggaa

SEQ ID NO: 525942 - RNA, 19 nt, Artificial Sequence
  Description of Artificial Sequence: Synthetic oligonucleotide
gcaccggcgggaaguggga

SEQ ID NO: 525943 - RNA, 19 nt, Artificial Sequence
  Description of Artificial Sequence: Synthetic oligonucleotide
gcacgccacagagcucuuc

SEQ ID NO: 525944 - RNA, 19 nt, Artificial Sequence
  Description of Artificial Sequence: Synthetic oligonucleotide
gccgcuccgugugauuucu

SEQ ID NO: 525945 - RNA, 19 nt, Artificial Sequence
  Description of Artificial Sequence: Synthetic oligonucleotide
cgcagguacugacuuuaua

SEQ ID NO: 525946 - RNA, 19 nt, Artificial Sequence
  Description of Artificial Sequence: Synthetic oligonucleotide
ccacgucgcucuccuccuc

SEQ ID NO: 525947 - RNA, 19 nt, Artificial Sequence
  Description of Artificial Sequence: Synthetic oligonucleotide
ccgggcccgacaaccgcca

SEQ ID NO: 525948 - RNA, 19 nt, Artificial Sequence
  Description of Artificial Sequence: Synthetic oligonucleotide
gcccgacaaccgccaccgc

SEQ ID NO: 525949 - RNA, 19 nt, Artificial Sequence
  Description of Artificial Sequence: Synthetic oligonucleotide
ccguuccuguaagucggaa

SEQ ID NO: 525950 - RNA, 19 nt, Artificial Sequence
  Description of Artificial Sequence: Synthetic oligonucleotide
gcgugcccaaccgcaggua

SEQ ID NO: 525951 - RNA, 19 nt, Artificial Sequence
  Description of Artificial Sequence: Synthetic oligonucleotide
gcaggccgcuccgugugau

SEQ ID NO: 525952 - RNA, 19 nt, Artificial Sequence
  Description of Artificial Sequence: Synthetic oligonucleotide
ccccgccaguccucgggaa

SEQ ID NO: 525953 - RNA, 19 nt, Artificial Sequence
  Description of Artificial Sequence: Synthetic oligonucleotide
cgacaaccgccaccgccaa

SEQ ID NO: 525954 - RNA, 19 nt, Artificial Sequence
  Description of Artificial Sequence: Synthetic oligonucleotide
cgggcccgacaaccgccac

SEQ ID NO: 525955 - RNA, 19 nt, Artificial Sequence
  Description of Artificial Sequence: Synthetic oligonucleotide
ccgcagguacugacuuuau

SEQ ID NO: 525956 - RNA, 19 nt, Artificial Sequence
  Description of Artificial Sequence: Synthetic oligonucleotide
cccgcugguccgggcccga

SEQ ID NO: 525957 - RNA, 19 nt, Artificial Sequence
  Description of Artificial Sequence: Synthetic oligonucleotide
ccgcuccgugugauuucuu

SEQ ID NO: 525958 - RNA, 19 nt, Artificial Sequence
  Description of Artificial Sequence: Synthetic oligonucleotide
acacuauacacucaggucc

SEQ ID NO: 525959 - RNA, 19 nt, Artificial Sequence
  Description of Artificial Sequence: Synthetic oligonucleotide
aaccucaaaaccuuguggc

SEQ ID NO: 525960 - RNA, 19 nt, Artificial Sequence
  Description of Artificial Sequence: Synthetic oligonucleotide
cauauauuagguuaggacc

SEQ ID NO: 525961 - RNA, 19 nt, Artificial Sequence
  Description of Artificial Sequence: Synthetic oligonucleotide
uuagguuaggaccacaagg

SEQ ID NO: 525962 - RNA, 19 nt, Artificial Sequence
  Description of Artificial Sequence: Synthetic oligonucleotide
aaaacugucccuguguucc

SEQ ID NO: 525963 - RNA, 19 nt, Artificial Sequence
  Description of Artificial Sequence: Synthetic oligonucleotide
aaacaaaaugugcacgacc

SEQ ID NO: 525964 - RNA, 19 nt, Artificial Sequence
  Description of Artificial Sequence: Synthetic oligonucleotide
aauacuacuguaggaagcc

SEQ ID NO: 525965 - RNA, 19 nt, Artificial Sequence
  Description of Artificial Sequence: Synthetic oligonucleotide
gacguaaauaaauauaaug

SEQ ID NO: 525966 - RNA, 19 nt, Artificial Sequence
  Description of Artificial Sequence: Synthetic oligonucleotide
gaggagauaauccacauac

SEQ ID NO: 525967 - RNA, 19 nt, Artificial Sequence
  Description of Artificial Sequence: Synthetic oligonucleotide
uacauuaauuccuuucugg

SEQ ID NO: 525968 - RNA, 19 nt, Artificial Sequence
  Description of Artificial Sequence: Synthetic oligonucleotide
ucaguaggaaccuccaucg

SEQ ID NO: 525969 - RNA, 19 nt, Artificial Sequence
  Description of Artificial Sequence: Synthetic oligonucleotide
aaauacuacuguaggaagc

SEQ ID NO: 525970 - RNA, 19 nt, Artificial Sequence
  Description of Artificial Sequence: Synthetic oligonucleotide
agauaauccacauacacau

SEQ ID NO: 525971 - RNA, 19 nt, Artificial Sequence
  Description of Artificial Sequence: Synthetic oligonucleotide
uguggcauauaauaauagg

SEQ ID NO: 525972 - RNA, 19 nt, Artificial Sequence
  Description of Artificial Sequence: Synthetic oligonucleotide
agaaaugcaaugucugugg

SEQ ID NO: 525973 - RNA, 19 nt, Artificial Sequence
  Description of Artificial Sequence: Synthetic oligonucleotide
agcacaagcaccaaaaggg

SEQ ID NO: 525974 - RNA, 19 nt, Artificial Sequence
  Description of Artificial Sequence: Synthetic oligonucleotide
auagguaucaagcugccug

SEQ ID NO: 525975 - RNA, 19 nt, Artificial Sequence
  Description of Artificial Sequence: Synthetic oligonucleotide
uaauugugccccaagacca

SEQ ID NO: 525976 - RNA, 19 nt, Artificial Sequence
  Description of Artificial Sequence: Synthetic oligonucleotide
agaaauagguaucaagcug

SEQ ID NO: 525977 - RNA, 19 nt, Artificial Sequence
  Description of Artificial Sequence: Synthetic oligonucleotide
augaccacacuauacacuc

SEQ ID NO: 525978 - RNA, 19 nt, Artificial Sequence
  Description of Artificial Sequence: Synthetic oligonucleotide
agagaucucaucucaacuc

SEQ ID NO: 525979 - RNA, 19 nt, Artificial Sequence
  Description of Artificial Sequence: Synthetic oligonucleotide
uagguuaggaccacaaggc

SEQ ID NO: 525980 - RNA, 19 nt, Artificial Sequence
  Description of Artificial Sequence: Synthetic oligonucleotide
aaaugugcacgaccaaagg

SEQ ID NO: 525981 - RNA, 19 nt, Artificial Sequence
  Description of Artificial Sequence: Synthetic oligonucleotide
auguaucuaaccuuucuuc

SEQ ID NO: 525982 - RNA, 19 nt, Artificial Sequence
  Description of Artificial Sequence: Synthetic oligonucleotide
ucaagaucaagucacgguc

SEQ ID NO: 525983 - RNA, 19 nt, Artificial Sequence
  Description of Artificial Sequence: Synthetic oligonucleotide
uucucauagagcucuauug

SEQ ID NO: 525984 - RNA, 19 nt, Artificial Sequence
  Description of Artificial Sequence: Synthetic oligonucleotide
ggcucuaucacuugcaucg

SEQ ID NO: 525985 - RNA, 19 nt, Artificial Sequence
  Description of Artificial Sequence: Synthetic oligonucleotide
caagauuuaggcuuccgcc

SEQ ID NO: 525986 - RNA, 19 nt, Artificial Sequence
  Description of Artificial Sequence: Synthetic oligonucleotide
auaugaccacacuauacac

SEQ ID NO: 525987 - RNA, 19 nt, Artificial Sequence
  Description of Artificial Sequence: Synthetic oligonucleotide
uuuugcuaugccaagaguu

SEQ ID NO: 525988 - RNA, 19 nt, Artificial Sequence
  Description of Artificial Sequence: Synthetic oligonucleotide
aaugugcacgaccaaagga

SEQ ID NO: 525989 - RNA, 19 nt, Artificial Sequence
  Description of Artificial Sequence: Synthetic oligonucleotide
guaauugugccccaagacc

SEQ ID NO: 525990 - RNA, 19 nt, Artificial Sequence
  Description of Artificial Sequence: Synthetic oligonucleotide
aaaagccacagguggauug

SEQ ID NO: 525991 - RNA, 19 nt, Artificial Sequence
  Description of Artificial Sequence: Synthetic oligonucleotide
uaggcuuccgcccucuucg

SEQ ID NO: 525992 - RNA, 19 nt, Artificial Sequence
  Description of Artificial Sequence: Synthetic oligonucleotide
agagcccuagcccucagcc

SEQ ID NO: 525993 - RNA, 19 nt, Artificial Sequence
  Description of Artificial Sequence: Synthetic oligonucleotide
aacucuuugggguaauaga

SEQ ID NO: 525994 - RNA, 19 nt, Artificial Sequence
  Description of Artificial Sequence: Synthetic oligonucleotide
auagcuaccaccgagcgug

SEQ ID NO: 525995 - RNA, 19 nt, Artificial Sequence
  Description of Artificial Sequence: Synthetic oligonucleotide
ucucaucucaacucuuugg

SEQ ID NO: 525996 - RNA, 19 nt, Artificial Sequence
  Description of Artificial Sequence: Synthetic oligonucleotide
aaaaugugcacgaccaaag

SEQ ID NO: 525997 - RNA, 19 nt, Artificial Sequence
  Description of Artificial Sequence: Synthetic oligonucleotide
ugucauagcgcccacugug

SEQ ID NO: 525998 - RNA, 19 nt, Artificial Sequence
  Description of Artificial Sequence: Synthetic oligonucleotide
ucucauagagcucuauugu

SEQ ID NO: 525999 - RNA, 19 nt, Artificial Sequence
  Description of Artificial Sequence: Synthetic oligonucleotide
uguaucuaaccuuucuucu

SEQ ID NO: 526000 - RNA, 19 nt, Artificial Sequence
  Description of Artificial Sequence: Synthetic oligonucleotide
ucuaucacuugcaucgggc

SEQ ID NO: 526001 - RNA, 19 nt, Artificial Sequence
  Description of Artificial Sequence: Synthetic oligonucleotide
caaaggaccacauauauua

SEQ ID NO: 526002 - RNA, 19 nt, Artificial Sequence
  Description of Artificial Sequence: Synthetic oligonucleotide
auagguacucuauauaaau

SEQ ID NO: 526003 - RNA, 19 nt, Artificial Sequence
  Description of Artificial Sequence: Synthetic oligonucleotide
uguaaagaguugauguccu

SEQ ID NO: 526004 - RNA, 19 nt, Artificial Sequence
  Description of Artificial Sequence: Synthetic oligonucleotide
gauacagauccucaagaac

SEQ ID NO: 526005 - RNA, 19 nt, Artificial Sequence
  Description of Artificial Sequence: Synthetic oligonucleotide
uggaggugauuccuuaggg

SEQ ID NO: 526006 - RNA, 19 nt, Artificial Sequence
  Description of Artificial Sequence: Synthetic oligonucleotide
cacgcuacaaauacuacug

SEQ ID NO: 526007 - RNA, 19 nt, Artificial Sequence
  Description of Artificial Sequence: Synthetic oligonucleotide
ugcaguguuaucuccucgg

SEQ ID NO: 526008 - RNA, 19 nt, Artificial Sequence
  Description of Artificial Sequence: Synthetic oligonucleotide
uccguaaguaugcccaggg

SEQ ID NO: 526009 - RNA, 19 nt, Artificial Sequence
  Description of Artificial Sequence: Synthetic oligonucleotide
accacccauauacacagac

SEQ ID NO: 526010 - RNA, 19 nt, Artificial Sequence
  Description of Artificial Sequence: Synthetic oligonucleotide
aaaccuuguggcuaaucca

SEQ ID NO: 526011 - RNA, 19 nt, Artificial Sequence
  Description of Artificial Sequence: Synthetic oligonucleotide
caaauacuacuguaggaag

SEQ ID NO: 526012 - RNA, 19 nt, Artificial Sequence
  Description of Artificial Sequence: Synthetic oligonucleotide
aggugagacagguagagcu

SEQ ID NO: 526013 - RNA, 19 nt, Artificial Sequence
  Description of Artificial Sequence: Synthetic oligonucleotide
auacagauccucaagaaca

SEQ ID NO: 526014 - RNA, 19 nt, Artificial Sequence
  Description of Artificial Sequence: Synthetic oligonucleotide
uuggaguagaaaugcaaug

SEQ ID NO: 526015 - RNA, 19 nt, Artificial Sequence
  Description of Artificial Sequence: Synthetic oligonucleotide
ucaucucaacucuuugggg

SEQ ID NO: 526016 - RNA, 19 nt, Artificial Sequence
  Description of Artificial Sequence: Synthetic oligonucleotide
aagcugaggagauaaucca

SEQ ID NO: 526017 - RNA, 19 nt, Artificial Sequence
  Description of Artificial Sequence: Synthetic oligonucleotide
aagggacguaaauaaauau

SEQ ID NO: 526018 - RNA, 19 nt, Artificial Sequence
  Description of Artificial Sequence: Synthetic oligonucleotide
uucaagaucaagucacggu

SEQ ID NO: 526019 - RNA, 19 nt, Artificial Sequence
  Description of Artificial Sequence: Synthetic oligonucleotide
caaccacccauauacacag

SEQ ID NO: 526020 - RNA, 19 nt, Artificial Sequence
  Description of Artificial Sequence: Synthetic oligonucleotide
auagagggacuacaaaucu

SEQ ID NO: 526021 - RNA, 19 nt, Artificial Sequence
  Description of Artificial Sequence: Synthetic oligonucleotide
ggcuacacuagacagacag

SEQ ID NO: 526022 - RNA, 19 nt, Artificial Sequence
  Description of Artificial Sequence: Synthetic oligonucleotide
aaauauaucucuggguaau

SEQ ID NO: 526023 - RNA, 19 nt, Artificial Sequence
  Description of Artificial Sequence: Synthetic oligonucleotide
uguguaaagaguugauguc

SEQ ID NO: 526024 - RNA, 19 nt, Artificial Sequence
  Description of Artificial Sequence: Synthetic oligonucleotide
acuaaggagagaaggacuc

SEQ ID NO: 526025 - RNA, 19 nt, Artificial Sequence
  Description of Artificial Sequence: Synthetic oligonucleotide
uacuacuguaggaagccug

SEQ ID NO: 526026 - RNA, 19 nt, Artificial Sequence
  Description of Artificial Sequence: Synthetic oligonucleotide
ucacgcuacaaauacuacu

SEQ ID NO: 526027 - RNA, 19 nt, Artificial Sequence
  Description of Artificial Sequence: Synthetic oligonucleotide
agagacaauuucuggaggu

SEQ ID NO: 526028 - RNA, 19 nt, Artificial Sequence
  Description of Artificial Sequence: Synthetic oligonucleotide
ugugcacgaccaaaggacc

SEQ ID NO: 526029 - RNA, 19 nt, Artificial Sequence
  Description of Artificial Sequence: Synthetic oligonucleotide
auuagguuaggaccacaag

SEQ ID NO: 526030 - RNA, 19 nt, Artificial Sequence
  Description of Artificial Sequence: Synthetic oligonucleotide
gaauaugaccacacuauac

SEQ ID NO: 526031 - RNA, 19 nt, Artificial Sequence
  Description of Artificial Sequence: Synthetic oligonucleotide
aaacugucccuguguuccc

SEQ ID NO: 526032 - RNA, 19 nt, Artificial Sequence
  Description of Artificial Sequence: Synthetic oligonucleotide
uuguggcuaauccaugucu

SEQ ID NO: 526033 - RNA, 19 nt, Artificial Sequence
  Description of Artificial Sequence: Synthetic oligonucleotide
ggagauaauccacauacac

SEQ ID NO: 526034 - RNA, 19 nt, Artificial Sequence
  Description of Artificial Sequence: Synthetic oligonucleotide
auggaagaauccugauggc

SEQ ID NO: 526035 - RNA, 19 nt, Artificial Sequence
  Description of Artificial Sequence: Synthetic oligonucleotide
uaugggccuauucaugugu

SEQ ID NO: 526036 - RNA, 19 nt, Artificial Sequence
  Description of Artificial Sequence: Synthetic oligonucleotide
uuaauuccuuucuggggcc

SEQ ID NO: 526037 - RNA, 19 nt, Artificial Sequence
  Description of Artificial Sequence: Synthetic oligonucleotide
uggggacucaagauuuagg

SEQ ID NO: 526038 - RNA, 19 nt, Artificial Sequence
  Description of Artificial Sequence: Synthetic oligonucleotide
aaguaugcccaggggaugg

SEQ ID NO: 526039 - RNA, 19 nt, Artificial Sequence
  Description of Artificial Sequence: Synthetic oligonucleotide
uuugcuaugccaagaguuu

SEQ ID NO: 526040 - RNA, 19 nt, Artificial Sequence
  Description of Artificial Sequence: Synthetic oligonucleotide
auaauagguacucuauaua

SEQ ID NO: 526041 - RNA, 19 nt, Artificial Sequence
  Description of Artificial Sequence: Synthetic oligonucleotide
agggacauaccacuguuca

SEQ ID NO: 526042 - RNA, 19 nt, Artificial Sequence
  Description of Artificial Sequence: Synthetic oligonucleotide
ucaagucacgguccguaag

SEQ ID NO: 526043 - RNA, 19 nt, Artificial Sequence
  Description of Artificial Sequence: Synthetic oligonucleotide
uugcaucgggcccugaggc

SEQ ID NO: 526044 - RNA, 19 nt, Artificial Sequence
  Description of Artificial Sequence: Synthetic oligonucleotide
ugcccacucaguaggaacc

SEQ ID NO: 526045 - RNA, 19 nt, Artificial Sequence
  Description of Artificial Sequence: Synthetic oligonucleotide
ucagagaucucaucucaac

SEQ ID NO: 526046 - RNA, 19 nt, Artificial Sequence
  Description of Artificial Sequence: Synthetic oligonucleotide
cuaucacuugcaucgggcc

SEQ ID NO: 526047 - RNA, 19 nt, Artificial Sequence
  Description of Artificial Sequence: Synthetic oligonucleotide
ugucuguggacaacaaauc

SEQ ID NO: 526048 - RNA, 19 nt, Artificial Sequence
  Description of Artificial Sequence: Synthetic oligonucleotide
uacuguaggaagccuggug

SEQ ID NO: 526049 - RNA, 19 nt, Artificial Sequence
  Description of Artificial Sequence: Synthetic oligonucleotide
caguacauuaauuccuuuc

SEQ ID NO: 526050 - RNA, 19 nt, Artificial Sequence
  Description of Artificial Sequence: Synthetic oligonucleotide
cagcagguugcacagauug

SEQ ID NO: 526051 - RNA, 19 nt, Artificial Sequence
  Description of Artificial Sequence: Synthetic oligonucleotide
agugcaguguuaucuccuc

SEQ ID NO: 526052 - RNA, 19 nt, Artificial Sequence
  Description of Artificial Sequence: Synthetic oligonucleotide
gcuacaaauacuacuguag

SEQ ID NO: 526053 - RNA, 19 nt, Artificial Sequence
  Description of Artificial Sequence: Synthetic oligonucleotide
gacuagagagcucagagau

SEQ ID NO: 526054 - RNA, 19 nt, Artificial Sequence
  Description of Artificial Sequence: Synthetic oligonucleotide
caacccacucacaaucucc

SEQ ID NO: 526055 - RNA, 19 nt, Artificial Sequence
  Description of Artificial Sequence: Synthetic oligonucleotide
ggggacucaagauuuaggc

SEQ ID NO: 526056 - RNA, 19 nt, Artificial Sequence
  Description of Artificial Sequence: Synthetic oligonucleotide
ucacgguccguaaguaugc

SEQ ID NO: 526057 - RNA, 19 nt, Artificial Sequence
  Description of Artificial Sequence: Synthetic oligonucleotide
auggagagccccucuucgc

SEQ ID NO: 526058 - RNA, 19 nt, Artificial Sequence
  Description of Artificial Sequence: Synthetic oligonucleotide
cuaaagcaucugaauuucc

SEQ ID NO: 526059 - RNA, 19 nt, Artificial Sequence
  Description of Artificial Sequence: Synthetic oligonucleotide
uccuaugggccuauucaug

SEQ ID NO: 526060 - RNA, 19 nt, Artificial Sequence
  Description of Artificial Sequence: Synthetic oligonucleotide
cauagugcaguguuaucuc

SEQ ID NO: 526061 - RNA, 19 nt, Artificial Sequence
  Description of Artificial Sequence: Synthetic oligonucleotide
cacaauuagcccagccagg

SEQ ID NO: 526062 - RNA, 19 nt, Artificial Sequence
  Description of Artificial Sequence: Synthetic oligonucleotide
cuugcaucgggcccugagg

SEQ ID NO: 526063 - RNA, 19 nt, Artificial Sequence
  Description of Artificial Sequence: Synthetic oligonucleotide
agauuuaggcuuccgcccu

SEQ ID NO: 526064 - RNA, 19 nt, Artificial Sequence
  Description of Artificial Sequence: Synthetic oligonucleotide
uacaguugacuuccccuug

SEQ ID NO: 526065 - RNA, 19 nt, Artificial Sequence
  Description of Artificial Sequence: Synthetic oligonucleotide
agacacaucauuucucaua

SEQ ID NO: 526066 - RNA, 19 nt, Artificial Sequence
  Description of Artificial Sequence: Synthetic oligonucleotide
acgguccguaaguaugccc

SEQ ID NO: 526067 - RNA, 19 nt, Artificial Sequence
  Description of Artificial Sequence: Synthetic oligonucleotide
uggguaauugugccccaag

SEQ ID NO: 526068 - RNA, 19 nt, Artificial Sequence
  Description of Artificial Sequence: Synthetic oligonucleotide
auaucucuggguaauugug

SEQ ID NO: 526069 - RNA, 19 nt, Artificial Sequence
  Description of Artificial Sequence: Synthetic oligonucleotide
uggaagaauccugauggcu

SEQ ID NO: 526070 - RNA, 19 nt, Artificial Sequence
  Description of Artificial Sequence: Synthetic oligonucleotide
gguaauugugccccaagac

SEQ ID NO: 526071 - RNA, 19 nt, Artificial Sequence
  Description of Artificial Sequence: Synthetic oligonucleotide
ggaggugauuccuuagggg

SEQ ID NO: 526072 - RNA, 19 nt, Artificial Sequence
  Description of Artificial Sequence: Synthetic oligonucleotide
gaggugauuccuuaggggu

SEQ ID NO: 526073 - RNA, 19 nt, Artificial Sequence
  Description of Artificial Sequence: Synthetic oligonucleotide
cuccaacccacucacaauc

SEQ ID NO: 526074 - RNA, 19 nt, Artificial Sequence
  Description of Artificial Sequence: Synthetic oligonucleotide
agguugcacagauuggcug

SEQ ID NO: 526075 - RNA, 19 nt, Artificial Sequence
  Description of Artificial Sequence: Synthetic oligonucleotide
cacagggaccacaauuagc

SEQ ID NO: 526076 - RNA, 19 nt, Artificial Sequence
  Description of Artificial Sequence: Synthetic oligonucleotide
gggacuacaaaucuucaga

SEQ ID NO: 526077 - RNA, 19 nt, Artificial Sequence
  Description of Artificial Sequence: Synthetic oligonucleotide
aaccuuguggcuaauccau

SEQ ID NO: 526078 - RNA, 19 nt, Artificial Sequence
  Description of Artificial Sequence: Synthetic oligonucleotide
ggacuacaaaucuucagac

SEQ ID NO: 526079 - RNA, 19 nt, Artificial Sequence
  Description of Artificial Sequence: Synthetic oligonucleotide
ccuauucauguguaaagag

SEQ ID NO: 526080 - RNA, 19 nt, Artificial Sequence
  Description of Artificial Sequence: Synthetic oligonucleotide
guaucaagcugccugccca

SEQ ID NO: 526081 - RNA, 19 nt, Artificial Sequence
  Description of Artificial Sequence: Synthetic oligonucleotide
aagggacauaccacuguuc

SEQ ID NO: 526082 - RNA, 19 nt, Artificial Sequence
  Description of Artificial Sequence: Synthetic oligonucleotide
acaauuagcccagccagga

SEQ ID NO: 526083 - RNA, 19 nt, Artificial Sequence
  Description of Artificial Sequence: Synthetic oligonucleotide
uauauuagguuaggaccac

SEQ ID NO: 526084 - RNA, 19 nt, Artificial Sequence
  Description of Artificial Sequence: Synthetic oligonucleotide
accucaaaaccuuguggcu

SEQ ID NO: 526085 - RNA, 19 nt, Artificial Sequence
  Description of Artificial Sequence: Synthetic oligonucleotide
ggccuauucauguguaaag

SEQ ID NO: 526086 - RNA, 19 nt, Artificial Sequence
  Description of Artificial Sequence: Synthetic oligonucleotide
agacaauuucuggagguga

SEQ ID NO: 526087 - RNA, 19 nt, Artificial Sequence
  Description of Artificial Sequence: Synthetic oligonucleotide
guaauagagggacuacaaa

SEQ ID NO: 526088 - RNA, 19 nt, Artificial Sequence
  Description of Artificial Sequence: Synthetic oligonucleotide
gucacgguccguaaguaug

SEQ ID NO: 526089 - RNA, 19 nt, Artificial Sequence
  Description of Artificial Sequence: Synthetic oligonucleotide
cucuaucacuugcaucggg

SEQ ID NO: 526090 - RNA, 19 nt, Artificial Sequence
  Description of Artificial Sequence: Synthetic oligonucleotide
accaagcaacuccuccaac

SEQ ID NO: 526091 - RNA, 19 nt, Artificial Sequence
  Description of Artificial Sequence: Synthetic oligonucleotide
aauagguaucaagcugccu

SEQ ID NO: 526092 - RNA, 19 nt, Artificial Sequence
  Description of Artificial Sequence: Synthetic oligonucleotide
uacgcggguagccccuacg

SEQ ID NO: 526093 - RNA, 19 nt, Artificial Sequence
  Description of Artificial Sequence: Synthetic oligonucleotide
gaagccuggugcugacuag

SEQ ID NO: 526094 - RNA, 19 nt, Artificial Sequence
  Description of Artificial Sequence: Synthetic oligonucleotide
auugugccccaagaccagc

SEQ ID NO: 526095 - RNA, 19 nt, Artificial Sequence
  Description of Artificial Sequence: Synthetic oligonucleotide
gagaucucaucucaacucu

SEQ ID NO: 526096 - RNA, 19 nt, Artificial Sequence
  Description of Artificial Sequence: Synthetic oligonucleotide
ugucccuguguucccaccu

SEQ ID NO: 526097 - RNA, 19 nt, Artificial Sequence
  Description of Artificial Sequence: Synthetic oligonucleotide
gaccacaauuagcccagcc

SEQ ID NO: 526098 - RNA, 19 nt, Artificial Sequence
  Description of Artificial Sequence: Synthetic oligonucleotide
augaccacucucccucauc

SEQ ID NO: 526099 - RNA, 19 nt, Artificial Sequence
  Description of Artificial Sequence: Synthetic oligonucleotide
aacccacucacaaucucca

SEQ ID NO: 526100 - RNA, 19 nt, Artificial Sequence
  Description of Artificial Sequence: Synthetic oligonucleotide
cccacaaacaaaaugugca

SEQ ID NO: 526101 - RNA, 19 nt, Artificial Sequence
  Description of Artificial Sequence: Synthetic oligonucleotide
gggacguaaauaaauauaa

SEQ ID NO: 526102 - RNA, 19 nt, Artificial Sequence
  Description of Artificial Sequence: Synthetic oligonucleotide
auccuaugggccuauucau

SEQ ID NO: 526103 - RNA, 19 nt, Artificial Sequence
  Description of Artificial Sequence: Synthetic oligonucleotide
aguugacuuccccuuggcu

SEQ ID NO: 526104 - RNA, 19 nt, Artificial Sequence
  Description of Artificial Sequence: Synthetic oligonucleotide
aauauaucucuggguaauu

SEQ ID NO: 526105 - RNA, 19 nt, Artificial Sequence
  Description of Artificial Sequence: Synthetic oligonucleotide
guucaaagccacagggacc

SEQ ID NO: 526106 - RNA, 19 nt, Artificial Sequence
  Description of Artificial Sequence: Synthetic oligonucleotide
ccuguuuggaguagaaaug

SEQ ID NO: 526107 - RNA, 19 nt, Artificial Sequence
  Description of Artificial Sequence: Synthetic oligonucleotide
cuagacagacagacuucag

SEQ ID NO: 526108 - RNA, 19 nt, Artificial Sequence
  Description of Artificial Sequence: Synthetic oligonucleotide
gucauagcgcccacugugg

SEQ ID NO: 526109 - RNA, 19 nt, Artificial Sequence
  Description of Artificial Sequence: Synthetic oligonucleotide
uacgagaaccaggccagag

SEQ ID NO: 526110 - RNA, 19 nt, Artificial Sequence
  Description of Artificial Sequence: Synthetic oligonucleotide
aguaaccucaaaaccuugu

SEQ ID NO: 526111 - RNA, 19 nt, Artificial Sequence
  Description of Artificial Sequence: Synthetic oligonucleotide
cacagcacaagcaccaaaa

SEQ ID NO: 526112 - RNA, 19 nt, Artificial Sequence
  Description of Artificial Sequence: Synthetic oligonucleotide
uagagggacuacaaaucuu

SEQ ID NO: 526113 - RNA, 19 nt, Artificial Sequence
  Description of Artificial Sequence: Synthetic oligonucleotide
uggcuaauccaugucucca

SEQ ID NO: 526114 - RNA, 19 nt, Artificial Sequence
  Description of Artificial Sequence: Synthetic oligonucleotide
cuuguggcuaauccauguc

SEQ ID NO: 526115 - RNA, 19 nt, Artificial Sequence
  Description of Artificial Sequence: Synthetic oligonucleotide
ugggguaauagagggacua

SEQ ID NO: 526116 - RNA, 19 nt, Artificial Sequence
  Description of Artificial Sequence: Synthetic oligonucleotide
ccuacgagaaccaggccag

SEQ ID NO: 526117 - RNA, 19 nt, Artificial Sequence
  Description of Artificial Sequence: Synthetic oligonucleotide
cacucucccucauccagag

SEQ ID NO: 526118 - RNA, 19 nt, Artificial Sequence
  Description of Artificial Sequence: Synthetic oligonucleotide
caucucaacucuuuggggu

SEQ ID NO: 526119 - RNA, 19 nt, Artificial Sequence
  Description of Artificial Sequence: Synthetic oligonucleotide
ugaccacacuauacacuca

SEQ ID NO: 526120 - RNA, 19 nt, Artificial Sequence
  Description of Artificial Sequence: Synthetic oligonucleotide
uugugccccaagaccagcu

SEQ ID NO: 526121 - RNA, 19 nt, Artificial Sequence
  Description of Artificial Sequence: Synthetic oligonucleotide
cacuauacacucaggucca

SEQ ID NO: 526122 - RNA, 19 nt, Artificial Sequence
  Description of Artificial Sequence: Synthetic oligonucleotide
agggacguaaauaaauaua

SEQ ID NO: 526123 - RNA, 19 nt, Artificial Sequence
  Description of Artificial Sequence: Synthetic oligonucleotide
gacucaagauuuaggcuuc

SEQ ID NO: 526124 - RNA, 19 nt, Artificial Sequence
  Description of Artificial Sequence: Synthetic oligonucleotide
aucucaacucuuuggggua

SEQ ID NO: 526125 - RNA, 19 nt, Artificial Sequence
  Description of Artificial Sequence: Synthetic oligonucleotide
acgcuacaaauacuacugu

SEQ ID NO: 526126 - RNA, 19 nt, Artificial Sequence
  Description of Artificial Sequence: Synthetic oligonucleotide
cucaucugucauagcgccc

SEQ ID NO: 526127 - RNA, 19 nt, Artificial Sequence
  Description of Artificial Sequence: Synthetic oligonucleotide
ggaggaaaucugcugcccc

SEQ ID NO: 526128 - RNA, 19 nt, Artificial Sequence
  Description of Artificial Sequence: Synthetic oligonucleotide
guacucuauauaaauuaaa

SEQ ID NO: 526129 - RNA, 19 nt, Artificial Sequence
  Description of Artificial Sequence: Synthetic oligonucleotide
uggauugcuucuggggaug

SEQ ID NO: 526130 - RNA, 19 nt, Artificial Sequence
  Description of Artificial Sequence: Synthetic oligonucleotide
caguaaccucaaaaccuug

SEQ ID NO: 526131 - RNA, 19 nt, Artificial Sequence
  Description of Artificial Sequence: Synthetic oligonucleotide
uucgacccacuccacuuuc

SEQ ID NO: 526132 - RNA, 19 nt, Artificial Sequence
  Description of Artificial Sequence: Synthetic oligonucleotide
ucgacccacuccacuuucc

SEQ ID NO: 526133 - RNA, 19 nt, Artificial Sequence
  Description of Artificial Sequence: Synthetic oligonucleotide
gguuugaggggucucccug

SEQ ID NO: 526134 - RNA, 19 nt, Artificial Sequence
  Description of Artificial Sequence: Synthetic oligonucleotide
uucccaaggguuguugguc

SEQ ID NO: 526135 - RNA, 19 nt, Artificial Sequence
  Description of Artificial Sequence: Synthetic oligonucleotide
guccugggaggucacauga

SEQ ID NO: 526136 - RNA, 19 nt, Artificial Sequence
  Description of Artificial Sequence: Synthetic oligonucleotide
cagaacuggugcaggcggc

SEQ ID NO: 526137 - RNA, 19 nt, Artificial Sequence
  Description of Artificial Sequence: Synthetic oligonucleotide
uuucgacccacuccacuuu

SEQ ID NO: 526138 - RNA, 19 nt, Artificial Sequence
  Description of Artificial Sequence: Synthetic oligonucleotide
aguaugcccaggggauggc

SEQ ID NO: 526139 - RNA, 19 nt, Artificial Sequence
  Description of Artificial Sequence: Synthetic oligonucleotide
ggacuaaggagagaaggac

SEQ ID NO: 526140 - RNA, 19 nt, Artificial Sequence
  Description of Artificial Sequence: Synthetic oligonucleotide
ggucaaggguccccgaagc

SEQ ID NO: 526141 - RNA, 19 nt, Artificial Sequence
  Description of Artificial Sequence: Synthetic oligonucleotide
gguagccccuacgagaacc

SEQ ID NO: 526142 - RNA, 19 nt, Artificial Sequence
  Description of Artificial Sequence: Synthetic oligonucleotide
caccuaacccacagggcug

SEQ ID NO: 526143 - RNA, 19 nt, Artificial Sequence
  Description of Artificial Sequence: Synthetic oligonucleotide
ugcacgaccaaaggaccac

SEQ ID NO: 526144 - RNA, 19 nt, Artificial Sequence
  Description of Artificial Sequence: Synthetic oligonucleotide
ucccugcuggugucaaaag

SEQ ID NO: 526145 - RNA, 19 nt, Artificial Sequence
  Description of Artificial Sequence: Synthetic oligonucleotide
caguaggaaccuccaucgg

SEQ ID NO: 526146 - RNA, 19 nt, Artificial Sequence
  Description of Artificial Sequence: Synthetic oligonucleotide
uggcucuaucacuugcauc

SEQ ID NO: 526147 - RNA, 19 nt, Artificial Sequence
  Description of Artificial Sequence: Synthetic oligonucleotide
ugcaucgggcccugaggcc

SEQ ID NO: 526148 - RNA, 19 nt, Artificial Sequence
  Description of Artificial Sequence: Synthetic oligonucleotide
gguaucaagcugccugccc

SEQ ID NO: 526149 - RNA, 19 nt, Artificial Sequence
  Description of Artificial Sequence: Synthetic oligonucleotide
ccuguguucccaccuaacc

SEQ ID NO: 526150 - RNA, 19 nt, Artificial Sequence
  Description of Artificial Sequence: Synthetic oligonucleotide
ugcugacuagagagcucag

SEQ ID NO: 526151 - RNA, 19 nt, Artificial Sequence
  Description of Artificial Sequence: Synthetic oligonucleotide
gugcugacuagagagcuca

SEQ ID NO: 526152 - RNA, 19 nt, Artificial Sequence
  Description of Artificial Sequence: Synthetic oligonucleotide
gauuuaggcuuccgcccuc

SEQ ID NO: 526153 - RNA, 19 nt, Artificial Sequence
  Description of Artificial Sequence: Synthetic oligonucleotide
guuggcuacacuagacaga

SEQ ID NO: 526154 - RNA, 19 nt, Artificial Sequence
  Description of Artificial Sequence: Synthetic oligonucleotide
aucuaaccuuucuucuaaa

SEQ ID NO: 526155 - RNA, 19 nt, Artificial Sequence
  Description of Artificial Sequence: Synthetic oligonucleotide
gagcccuagcccucagccc

SEQ ID NO: 526156 - RNA, 19 nt, Artificial Sequence
  Description of Artificial Sequence: Synthetic oligonucleotide
auauuagguuaggaccaca

SEQ ID NO: 526157 - RNA, 19 nt, Artificial Sequence
  Description of Artificial Sequence: Synthetic oligonucleotide
gcucuauuguggcauauaa

SEQ ID NO: 526158 - RNA, 19 nt, Artificial Sequence
  Description of Artificial Sequence: Synthetic oligonucleotide
caauuagcccagccaggac

SEQ ID NO: 526159 - RNA, 19 nt, Artificial Sequence
  Description of Artificial Sequence: Synthetic oligonucleotide
gguaauagagggacuacaa

SEQ ID NO: 526160 - RNA, 19 nt, Artificial Sequence
  Description of Artificial Sequence: Synthetic oligonucleotide
ggucauuccccagaauaug

SEQ ID NO: 526161 - RNA, 19 nt, Artificial Sequence
  Description of Artificial Sequence: Synthetic oligonucleotide
gaggaaaucugcugccccu

SEQ ID NO: 526162 - RNA, 19 nt, Artificial Sequence
  Description of Artificial Sequence: Synthetic oligonucleotide
aagcggcucaggugagaca

SEQ ID NO: 526163 - RNA, 19 nt, Artificial Sequence
  Description of Artificial Sequence: Synthetic oligonucleotide
uugcuaugccaagaguuuu

SEQ ID NO: 526164 - RNA, 19 nt, Artificial Sequence
  Description of Artificial Sequence: Synthetic oligonucleotide
cccauagcuaccaccgagc

SEQ ID NO: 526165 - RNA, 19 nt, Artificial Sequence
  Description of Artificial Sequence: Synthetic oligonucleotide
cccaagaccagcucaugac

SEQ ID NO: 526166 - RNA, 19 nt, Artificial Sequence
  Description of Artificial Sequence: Synthetic oligonucleotide
guaaguaugcccaggggau

SEQ ID NO: 526167 - RNA, 19 nt, Artificial Sequence
  Description of Artificial Sequence: Synthetic oligonucleotide
guccguaaguaugcccagg

SEQ ID NO: 526168 - RNA, 19 nt, Artificial Sequence
  Description of Artificial Sequence: Synthetic oligonucleotide
gaccccaaagaggaggaaa

SEQ ID NO: 526169 - RNA, 19 nt, Artificial Sequence
  Description of Artificial Sequence: Synthetic oligonucleotide
ugggccuauucauguguaa

SEQ ID NO: 526170 - RNA, 19 nt, Artificial Sequence
  Description of Artificial Sequence: Synthetic oligonucleotide
ccgagcgugccccagagac

SEQ ID NO: 526171 - RNA, 19 nt, Artificial Sequence
  Description of Artificial Sequence: Synthetic oligonucleotide
auacuacuguaggaagccu

SEQ ID NO: 526172 - RNA, 19 nt, Artificial Sequence
  Description of Artificial Sequence: Synthetic oligonucleotide
guaggaagccuggugcuga

SEQ ID NO: 526173 - RNA, 19 nt, Artificial Sequence
  Description of Artificial Sequence: Synthetic oligonucleotide
gcuggugucaaaagcuggc

SEQ ID NO: 526174 - RNA, 19 nt, Artificial Sequence
  Description of Artificial Sequence: Synthetic oligonucleotide
aggagauaauccacauaca

SEQ ID NO: 526175 - RNA, 19 nt, Artificial Sequence
  Description of Artificial Sequence: Synthetic oligonucleotide
gagcgugccccagagacaa

SEQ ID NO: 526176 - RNA, 19 nt, Artificial Sequence
  Description of Artificial Sequence: Synthetic oligonucleotide
gcaguguuaucuccucggc

SEQ ID NO: 526177 - RNA, 19 nt, Artificial Sequence
  Description of Artificial Sequence: Synthetic oligonucleotide
aagucacgguccguaagua

SEQ ID NO: 526178 - RNA, 19 nt, Artificial Sequence
  Description of Artificial Sequence: Synthetic oligonucleotide
ggguaauugugccccaaga

SEQ ID NO: 526179 - RNA, 19 nt, Artificial Sequence
  Description of Artificial Sequence: Synthetic oligonucleotide
cagagaucucaucucaacu

SEQ ID NO: 526180 - RNA, 19 nt, Artificial Sequence
  Description of Artificial Sequence: Synthetic oligonucleotide
cucaggugagacagguaga

SEQ ID NO: 526181 - RNA, 19 nt, Artificial Sequence
  Description of Artificial Sequence: Synthetic oligonucleotide
cacacaucucccauagcua

SEQ ID NO: 526182 - RNA, 19 nt, Artificial Sequence
  Description of Artificial Sequence: Synthetic oligonucleotide
acgcggguagccccuacga

SEQ ID NO: 526183 - RNA, 19 nt, Artificial Sequence
  Description of Artificial Sequence: Synthetic oligonucleotide
acgaccaaaggaccacaua

SEQ ID NO: 526184 - RNA, 19 nt, Artificial Sequence
  Description of Artificial Sequence: Synthetic oligonucleotide
cccucuucguccugggagg

SEQ ID NO: 526185 - RNA, 19 nt, Artificial Sequence
  Description of Artificial Sequence: Synthetic oligonucleotide
cccauauacacagacacaa

SEQ ID NO: 526186 - RNA, 19 nt, Artificial Sequence
  Description of Artificial Sequence: Synthetic oligonucleotide
ugauuccuuaggggugucu

SEQ ID NO: 526187 - RNA, 19 nt, Artificial Sequence
  Description of Artificial Sequence: Synthetic oligonucleotide
auuuaggcuuccgcccucu

SEQ ID NO: 526188 - RNA, 19 nt, Artificial Sequence
  Description of Artificial Sequence: Synthetic oligonucleotide
gguccguaaguaugcccag

SEQ ID NO: 526189 - RNA, 19 nt, Artificial Sequence
  Description of Artificial Sequence: Synthetic oligonucleotide
gguuaggaccacaaggcaa

SEQ ID NO: 526190 - RNA, 19 nt, Artificial Sequence
  Description of Artificial Sequence: Synthetic oligonucleotide
caagucacgguccguaagu

SEQ ID NO: 526191 - RNA, 19 nt, Artificial Sequence
  Description of Artificial Sequence: Synthetic oligonucleotide
ccaaaagggacauaccacu

SEQ ID NO: 526192 - RNA, 19 nt, Artificial Sequence
  Description of Artificial Sequence: Synthetic oligonucleotide
agcuaccaccgagcgugcc

SEQ ID NO: 526193 - RNA, 19 nt, Artificial Sequence
  Description of Artificial Sequence: Synthetic oligonucleotide
gcauagugcaguguuaucu

SEQ ID NO: 526194 - RNA, 19 nt, Artificial Sequence
  Description of Artificial Sequence: Synthetic oligonucleotide
acaauuucuggaggugauu

SEQ ID NO: 526195 - RNA, 19 nt, Artificial Sequence
  Description of Artificial Sequence: Synthetic oligonucleotide
guccccgaagcugaggaga

SEQ ID NO: 526196 - RNA, 19 nt, Artificial Sequence
  Description of Artificial Sequence: Synthetic oligonucleotide
gugccccaagaccagcuca

SEQ ID NO: 526197 - RNA, 19 nt, Artificial Sequence
  Description of Artificial Sequence: Synthetic oligonucleotide
gccuauucauguguaaaga

SEQ ID NO: 526198 - RNA, 19 nt, Artificial Sequence
  Description of Artificial Sequence: Synthetic oligonucleotide
ccacauauauuagguuagg

SEQ ID NO: 526199 - RNA, 19 nt, Artificial Sequence
  Description of Artificial Sequence: Synthetic oligonucleotide
ggguaauagagggacuaca

SEQ ID NO: 526200 - RNA, 19 nt, Artificial Sequence
  Description of Artificial Sequence: Synthetic oligonucleotide
gguugcacagauuggcugu

SEQ ID NO: 526201 - RNA, 19 nt, Artificial Sequence
  Description of Artificial Sequence: Synthetic oligonucleotide
gccggcucaucugucauag

SEQ ID NO: 526202 - RNA, 19 nt, Artificial Sequence
  Description of Artificial Sequence: Synthetic oligonucleotide
accuaacccacagggcugu

SEQ ID NO: 526203 - RNA, 19 nt, Artificial Sequence
  Description of Artificial Sequence: Synthetic oligonucleotide
ugccccuacgcggguagcc

SEQ ID NO: 526204 - RNA, 19 nt, Artificial Sequence
  Description of Artificial Sequence: Synthetic oligonucleotide
caccgagcgugccccagag

SEQ ID NO: 526205 - RNA, 19 nt, Artificial Sequence
  Description of Artificial Sequence: Synthetic oligonucleotide
ggaccucuguaaaagccac

SEQ ID NO: 526206 - RNA, 19 nt, Artificial Sequence
  Description of Artificial Sequence: Synthetic oligonucleotide
uagcuaccaccgagcgugc

SEQ ID NO: 526207 - RNA, 19 nt, Artificial Sequence
  Description of Artificial Sequence: Synthetic oligonucleotide
cuuucgacccacuccacuu

SEQ ID NO: 526208 - RNA, 19 nt, Artificial Sequence
  Description of Artificial Sequence: Synthetic oligonucleotide
gcggguagccccuacgaga

SEQ ID NO: 526209 - RNA, 19 nt, Artificial Sequence
  Description of Artificial Sequence: Synthetic oligonucleotide
cucuauuguggcauauaau

SEQ ID NO: 526210 - RNA, 19 nt, Artificial Sequence
  Description of Artificial Sequence: Synthetic oligonucleotide
ccguaaguaugcccagggg

SEQ ID NO: 526211 - RNA, 19 nt, Artificial Sequence
  Description of Artificial Sequence: Synthetic oligonucleotide
gccacggguagauggaaga

SEQ ID NO: 526212 - RNA, 19 nt, Artificial Sequence
  Description of Artificial Sequence: Synthetic oligonucleotide
aggcgcgcauagugcagug

SEQ ID NO: 526213 - RNA, 19 nt, Artificial Sequence
  Description of Artificial Sequence: Synthetic oligonucleotide
caguaggcauggccauggc

SEQ ID NO: 526214 - RNA, 19 nt, Artificial Sequence
  Description of Artificial Sequence: Synthetic oligonucleotide
cuucguccugggaggucac

SEQ ID NO: 526215 - RNA, 19 nt, Artificial Sequence
  Description of Artificial Sequence: Synthetic oligonucleotide
acaccacaucccaggcgcg

SEQ ID NO: 526216 - RNA, 19 nt, Artificial Sequence
  Description of Artificial Sequence: Synthetic oligonucleotide
gcucuaucacuugcaucgg

SEQ ID NO: 526217 - RNA, 19 nt, Artificial Sequence
  Description of Artificial Sequence: Synthetic oligonucleotide
caucugucauagcgcccac

SEQ ID NO: 526218 - RNA, 19 nt, Artificial Sequence
  Description of Artificial Sequence: Synthetic oligonucleotide
ugacuuccccuuggcuccc

SEQ ID NO: 526219 - RNA, 19 nt, Artificial Sequence
  Description of Artificial Sequence: Synthetic oligonucleotide
gugcacgaccaaaggacca

SEQ ID NO: 526220 - RNA, 19 nt, Artificial Sequence
  Description of Artificial Sequence: Synthetic oligonucleotide
cuaacccacagggcuguca

SEQ ID NO: 526221 - RNA, 19 nt, Artificial Sequence
  Description of Artificial Sequence: Synthetic oligonucleotide
gcaccaaaagggacauacc

SEQ ID NO: 526222 - RNA, 19 nt, Artificial Sequence
  Description of Artificial Sequence: Synthetic oligonucleotide
aucugucauagcgcccacu

SEQ ID NO: 526223 - RNA, 19 nt, Artificial Sequence
  Description of Artificial Sequence: Synthetic oligonucleotide
cagguugcacagauuggcu

SEQ ID NO: 526224 - RNA, 19 nt, Artificial Sequence
  Description of Artificial Sequence: Synthetic oligonucleotide
gcugccccuacgcggguag

SEQ ID NO: 526225 - RNA, 19 nt, Artificial Sequence
  Description of Artificial Sequence: Synthetic oligonucleotide
uucguccugggaggucaca

SEQ ID NO: 526226 - RNA, 19 nt, Artificial Sequence
  Description of Artificial Sequence: Synthetic oligonucleotide
gggguaauagagggacuac

SEQ ID NO: 526227 - RNA, 19 nt, Artificial Sequence
  Description of Artificial Sequence: Synthetic oligonucleotide
ccuaugggccuauucaugu

SEQ ID NO: 526228 - RNA, 19 nt, Artificial Sequence
  Description of Artificial Sequence: Synthetic oligonucleotide
acuauacacucagguccaa

SEQ ID NO: 526229 - RNA, 19 nt, Artificial Sequence
  Description of Artificial Sequence: Synthetic oligonucleotide
ccacacuauacacucaggu

SEQ ID NO: 526230 - RNA, 19 nt, Artificial Sequence
  Description of Artificial Sequence: Synthetic oligonucleotide
cagaccccgagccggcuca

SEQ ID NO: 526231 - RNA, 19 nt, Artificial Sequence
  Description of Artificial Sequence: Synthetic oligonucleotide
caucgggcccugaggccug

SEQ ID NO: 526232 - RNA, 19 nt, Artificial Sequence
  Description of Artificial Sequence: Synthetic oligonucleotide
cgguccguaaguaugccca

SEQ ID NO: 526233 - RNA, 19 nt, Artificial Sequence
  Description of Artificial Sequence: Synthetic oligonucleotide
ccaccuaacccacagggcu

SEQ ID NO: 526234 - RNA, 19 nt, Artificial Sequence
  Description of Artificial Sequence: Synthetic oligonucleotide
cguggccuccaccuggugc

SEQ ID NO: 526235 - RNA, 19 nt, Artificial Sequence
  Description of Artificial Sequence: Synthetic oligonucleotide
gggguuugaggggucuccc

SEQ ID NO: 526236 - RNA, 19 nt, Artificial Sequence
  Description of Artificial Sequence: Synthetic oligonucleotide
ccaacccacucacaaucuc

SEQ ID NO: 526237 - RNA, 19 nt, Artificial Sequence
  Description of Artificial Sequence: Synthetic oligonucleotide
cauagcuaccaccgagcgu

SEQ ID NO: 526238 - RNA, 19 nt, Artificial Sequence
  Description of Artificial Sequence: Synthetic oligonucleotide
augggccuauucaugugua

SEQ ID NO: 526239 - RNA, 19 nt, Artificial Sequence
  Description of Artificial Sequence: Synthetic oligonucleotide
gcggcucuuuaucagaaau

SEQ ID NO: 526240 - RNA, 19 nt, Artificial Sequence
  Description of Artificial Sequence: Synthetic oligonucleotide
gcuacacuagacagacaga

SEQ ID NO: 526241 - RNA, 19 nt, Artificial Sequence
  Description of Artificial Sequence: Synthetic oligonucleotide
agccggcucaucugucaua

SEQ ID NO: 526242 - RNA, 19 nt, Artificial Sequence
  Description of Artificial Sequence: Synthetic oligonucleotide
gguuccauucuaaaauauu

SEQ ID NO: 526243 - RNA, 19 nt, Artificial Sequence
  Description of Artificial Sequence: Synthetic oligonucleotide
uaccaccgagcgugcccca

SEQ ID NO: 526244 - RNA, 19 nt, Artificial Sequence
  Description of Artificial Sequence: Synthetic oligonucleotide
cuacgcggguagccccuac

SEQ ID NO: 526245 - RNA, 19 nt, Artificial Sequence
  Description of Artificial Sequence: Synthetic oligonucleotide
cccuguguucccaccuaac

SEQ ID NO: 526246 - RNA, 19 nt, Artificial Sequence
  Description of Artificial Sequence: Synthetic oligonucleotide
cccgaagcugaggagauaa

SEQ ID NO: 526247 - RNA, 19 nt, Artificial Sequence
  Description of Artificial Sequence: Synthetic oligonucleotide
ccuuguggcuaauccaugu

SEQ ID NO: 526248 - RNA, 19 nt, Artificial Sequence
  Description of Artificial Sequence: Synthetic oligonucleotide
cuggggccuuccccauuug

SEQ ID NO: 526249 - RNA, 19 nt, Artificial Sequence
  Description of Artificial Sequence: Synthetic oligonucleotide
ccugaugccacagcccgca

SEQ ID NO: 526250 - RNA, 19 nt, Artificial Sequence
  Description of Artificial Sequence: Synthetic oligonucleotide
caccacaaccacccauaua

SEQ ID NO: 526251 - RNA, 19 nt, Artificial Sequence
  Description of Artificial Sequence: Synthetic oligonucleotide
ccccuacgcggguagcccc

SEQ ID NO: 526252 - RNA, 19 nt, Artificial Sequence
  Description of Artificial Sequence: Synthetic oligonucleotide
ccccaagaccagcucauga

SEQ ID NO: 526253 - RNA, 19 nt, Artificial Sequence
  Description of Artificial Sequence: Synthetic oligonucleotide
cacggguagauggaagaau

SEQ ID NO: 526254 - RNA, 19 nt, Artificial Sequence
  Description of Artificial Sequence: Synthetic oligonucleotide
cacgaccaaaggaccacau

SEQ ID NO: 526255 - RNA, 19 nt, Artificial Sequence
  Description of Artificial Sequence: Synthetic oligonucleotide
gcucaugaccacucucccu

SEQ ID NO: 526256 - RNA, 19 nt, Artificial Sequence
  Description of Artificial Sequence: Synthetic oligonucleotide
ggccacgaaggccacgggu

SEQ ID NO: 526257 - RNA, 19 nt, Artificial Sequence
  Description of Artificial Sequence: Synthetic oligonucleotide
cuacgagaaccaggccaga

SEQ ID NO: 526258 - RNA, 19 nt, Artificial Sequence
  Description of Artificial Sequence: Synthetic oligonucleotide
agcccgcaagcggcucagg

SEQ ID NO: 526259 - RNA, 19 nt, Artificial Sequence
  Description of Artificial Sequence: Synthetic oligonucleotide
ggaaccuccaucggggcuu

SEQ ID NO: 526260 - RNA, 19 nt, Artificial Sequence
  Description of Artificial Sequence: Synthetic oligonucleotide
gccccuacgcggguagccc

SEQ ID NO: 526261 - RNA, 19 nt, Artificial Sequence
  Description of Artificial Sequence: Synthetic oligonucleotide
ggcggcucuuuaucagaaa

SEQ ID NO: 526262 - RNA, 19 nt, Artificial Sequence
  Description of Artificial Sequence: Synthetic oligonucleotide
cugccccuacgcggguagc

SEQ ID NO: 526263 - RNA, 19 nt, Artificial Sequence
  Description of Artificial Sequence: Synthetic oligonucleotide
cgcauagugcaguguuauc

SEQ ID NO: 526264 - RNA, 19 nt, Artificial Sequence
  Description of Artificial Sequence: Synthetic oligonucleotide
ggcuuccgcccucuucguc

SEQ ID NO: 526265 - RNA, 19 nt, Artificial Sequence
  Description of Artificial Sequence: Synthetic oligonucleotide
cgcggguagccccuacgag

SEQ ID NO: 526266 - RNA, 19 nt, Artificial Sequence
  Description of Artificial Sequence: Synthetic oligonucleotide
ggguuugaggggucucccu

SEQ ID NO: 526267 - RNA, 19 nt, Artificial Sequence
  Description of Artificial Sequence: Synthetic oligonucleotide
aaccuccaucggggcuuca

SEQ ID NO: 526268 - RNA, 19 nt, Artificial Sequence
  Description of Artificial Sequence: Synthetic oligonucleotide
gggaggucacaugaggguu

SEQ ID NO: 526269 - RNA, 19 nt, Artificial Sequence
  Description of Artificial Sequence: Synthetic oligonucleotide
gcccaguggcucuaucacu

SEQ ID NO: 526270 - RNA, 19 nt, Artificial Sequence
  Description of Artificial Sequence: Synthetic oligonucleotide
gcggcucaggugagacagg

SEQ ID NO: 526271 - RNA, 19 nt, Artificial Sequence
  Description of Artificial Sequence: Synthetic oligonucleotide
ccccgagccggcucaucug

SEQ ID NO: 526272 - RNA, 19 nt, Artificial Sequence
  Description of Artificial Sequence: Synthetic oligonucleotide
gcgcgcauagugcaguguu

SEQ ID NO: 526273 - RNA, 19 nt, Artificial Sequence
  Description of Artificial Sequence: Synthetic oligonucleotide
ccuuucgacccacuccacu

SEQ ID NO: 526274 - RNA, 19 nt, Artificial Sequence
  Description of Artificial Sequence: Synthetic oligonucleotide
ccgcccucuucguccuggg

SEQ ID NO: 526275 - RNA, 19 nt, Artificial Sequence
  Description of Artificial Sequence: Synthetic oligonucleotide
cugaugccacagcccgcaa

SEQ ID NO: 526276 - RNA, 19 nt, Artificial Sequence
  Description of Artificial Sequence: Synthetic oligonucleotide
caggcgcgcauagugcagu

SEQ ID NO: 526277 - RNA, 19 nt, Artificial Sequence
  Description of Artificial Sequence: Synthetic oligonucleotide
ggauugcuucuggggaugu

SEQ ID NO: 526278 - RNA, 19 nt, Artificial Sequence
  Description of Artificial Sequence: Synthetic oligonucleotide
ccgagccggcucaucuguc

SEQ ID NO: 526279 - RNA, 19 nt, Artificial Sequence
  Description of Artificial Sequence: Synthetic oligonucleotide
gcccgcaagcggcucaggu

SEQ ID NO: 526280 - RNA, 19 nt, Artificial Sequence
  Description of Artificial Sequence: Synthetic oligonucleotide
ccacggguagauggaagaa

SEQ ID NO: 526281 - RNA, 19 nt, Artificial Sequence
  Description of Artificial Sequence: Synthetic oligonucleotide
cgagcgugccccagagaca

SEQ ID NO: 526282 - RNA, 19 nt, Artificial Sequence
  Description of Artificial Sequence: Synthetic oligonucleotide
caucccaggcgcgcauagu

SEQ ID NO: 526283 - RNA, 19 nt, Artificial Sequence
  Description of Artificial Sequence: Synthetic oligonucleotide
cccgagccggcucaucugu

SEQ ID NO: 526284 - RNA, 19 nt, Artificial Sequence
  Description of Artificial Sequence: Synthetic oligonucleotide
ccaccgagcgugccccaga

SEQ ID NO: 526285 - RNA, 19 nt, Artificial Sequence
  Description of Artificial Sequence: Synthetic oligonucleotide
cgcgcauagugcaguguua

SEQ ID NO: 526286 - RNA, 19 nt, Artificial Sequence
  Description of Artificial Sequence: Synthetic oligonucleotide
agcgugccccagagacaau

SEQ ID NO: 526287 - RNA, 19 nt, Artificial Sequence
  Description of Artificial Sequence: Synthetic oligonucleotide
gcgugccccagagacaauu

SEQ ID NO: 526288 - RNA, 19 nt, Artificial Sequence
  Description of Artificial Sequence: Synthetic oligonucleotide
ggcgcgcauagugcagugu

SEQ ID NO: 526289 - RNA, 19 nt, Artificial Sequence
  Description of Artificial Sequence: Synthetic oligonucleotide
cccuacgcggguagccccu

SEQ ID NO: 526290 - RNA, 19 nt, Artificial Sequence
  Description of Artificial Sequence: Synthetic oligonucleotide
ccuacgcggguagccccua

SEQ ID NO: 526291 - RNA, 19 nt, Artificial Sequence
  Description of Artificial Sequence: Synthetic oligonucleotide
ccccgaagcugaggagaua

SEQ ID NO: 526292 - RNA, 19 nt, Artificial Sequence
  Description of Artificial Sequence: Synthetic oligonucleotide
aaaacaauggcacagaaag

SEQ ID NO: 526293 - RNA, 19 nt, Artificial Sequence
  Description of Artificial Sequence: Synthetic oligonucleotide
auaaauaugcacuugaucu

SEQ ID NO: 526294 - RNA, 19 nt, Artificial Sequence
  Description of Artificial Sequence: Synthetic oligonucleotide
ucuaaauucacucauuuga

SEQ ID NO: 526295 - RNA, 19 nt, Artificial Sequence
  Description of Artificial Sequence: Synthetic oligonucleotide
aaaacaaaacaaaacaaac

SEQ ID NO: 526296 - RNA, 19 nt, Artificial Sequence
  Description of Artificial Sequence: Synthetic oligonucleotide
aauccuauacaaaagggcc

SEQ ID NO: 526297 - RNA, 19 nt, Artificial Sequence
  Description of Artificial Sequence: Synthetic oligonucleotide
aauagagccgaucaccuac

SEQ ID NO: 526298 - RNA, 19 nt, Artificial Sequence
  Description of Artificial Sequence: Synthetic oligonucleotide
agcauaauauaauucacac

SEQ ID NO: 526299 - RNA, 19 nt, Artificial Sequence
  Description of Artificial Sequence: Synthetic oligonucleotide
aaggcuacuguacuugucc

SEQ ID NO: 526300 - RNA, 19 nt, Artificial Sequence
  Description of Artificial Sequence: Synthetic oligonucleotide
uguaaguuaaaacauuucu

SEQ ID NO: 526301 - RNA, 19 nt, Artificial Sequence
  Description of Artificial Sequence: Synthetic oligonucleotide
uuccaauugaaaauaaaag

SEQ ID NO: 526302 - RNA, 19 nt, Artificial Sequence
  Description of Artificial Sequence: Synthetic oligonucleotide
aaacaaaacaaaacaaaac

SEQ ID NO: 526303 - RNA, 19 nt, Artificial Sequence
  Description of Artificial Sequence: Synthetic oligonucleotide
ucuacaggcaaacuuacag

SEQ ID NO: 526304 - RNA, 19 nt, Artificial Sequence
  Description of Artificial Sequence: Synthetic oligonucleotide
aacggaacuaaauaguuca

SEQ ID NO: 526305 - RNA, 19 nt, Artificial Sequence
  Description of Artificial Sequence: Synthetic oligonucleotide
aacuaaauaguucagguuu

SEQ ID NO: 526306 - RNA, 19 nt, Artificial Sequence
  Description of Artificial Sequence: Synthetic oligonucleotide
aaaaguuuuguucucacaa

SEQ ID NO: 526307 - RNA, 19 nt, Artificial Sequence
  Description of Artificial Sequence: Synthetic oligonucleotide
gaaauuucuaaauucacuc

SEQ ID NO: 526308 - RNA, 19 nt, Artificial Sequence
  Description of Artificial Sequence: Synthetic oligonucleotide
aacaucuaaagccaaauaa

SEQ ID NO: 526309 - RNA, 19 nt, Artificial Sequence
  Description of Artificial Sequence: Synthetic oligonucleotide
aaacuuacaggccucaucu

SEQ ID NO: 526310 - RNA, 19 nt, Artificial Sequence
  Description of Artificial Sequence: Synthetic oligonucleotide
uuucauagaacgaucggag

SEQ ID NO: 526311 - RNA, 19 nt, Artificial Sequence
  Description of Artificial Sequence: Synthetic oligonucleotide
aaagccauuaacuuuggaa

SEQ ID NO: 526312 - RNA, 19 nt, Artificial Sequence
  Description of Artificial Sequence: Synthetic oligonucleotide
ucaaauauaacaaggucau

SEQ ID NO: 526313 - RNA, 19 nt, Artificial Sequence
  Description of Artificial Sequence: Synthetic oligonucleotide
auaauguaucauuuugugg

SEQ ID NO: 526314 - RNA, 19 nt, Artificial Sequence
  Description of Artificial Sequence: Synthetic oligonucleotide
aaaacaaaacaaaacaaaa

SEQ ID NO: 526315 - RNA, 19 nt, Artificial Sequence
  Description of Artificial Sequence: Synthetic oligonucleotide
uuucuuauaaaaggaacag

SEQ ID NO: 526316 - RNA, 19 nt, Artificial Sequence
  Description of Artificial Sequence: Synthetic oligonucleotide
aacaaguaguauuugaguu

SEQ ID NO: 526317 - RNA, 19 nt, Artificial Sequence
  Description of Artificial Sequence: Synthetic oligonucleotide
ugacaaauagcuuuggcaa

SEQ ID NO: 526318 - RNA, 19 nt, Artificial Sequence
  Description of Artificial Sequence: Synthetic oligonucleotide
uuuagguugaccacuuggc

SEQ ID NO: 526319 - RNA, 19 nt, Artificial Sequence
  Description of Artificial Sequence: Synthetic oligonucleotide
aaucagaggaccuccgcuc

SEQ ID NO: 526320 - RNA, 19 nt, Artificial Sequence
  Description of Artificial Sequence: Synthetic oligonucleotide
acaaugguuaaagaugccc

SEQ ID NO: 526321 - RNA, 19 nt, Artificial Sequence
  Description of Artificial Sequence: Synthetic oligonucleotide
uuaaauacagauuggcaaa

SEQ ID NO: 526322 - RNA, 19 nt, Artificial Sequence
  Description of Artificial Sequence: Synthetic oligonucleotide
aagcaaaugcacuuuguca

SEQ ID NO: 526323 - RNA, 19 nt, Artificial Sequence
  Description of Artificial Sequence: Synthetic oligonucleotide
uguagcugauuacuaaaag

SEQ ID NO: 526324 - RNA, 19 nt, Artificial Sequence
  Description of Artificial Sequence: Synthetic oligonucleotide
uggaguaugucucuguaca

SEQ ID NO: 526325 - RNA, 19 nt, Artificial Sequence
  Description of Artificial Sequence: Synthetic oligonucleotide
uuuguaaguuaaaacauuu

SEQ ID NO: 526326 - RNA, 19 nt, Artificial Sequence
  Description of Artificial Sequence: Synthetic oligonucleotide
acgacauaaugacaaauag

SEQ ID NO: 526327 - RNA, 19 nt, Artificial Sequence
  Description of Artificial Sequence: Synthetic oligonucleotide
acuugaucucacuccaugc

SEQ ID NO: 526328 - RNA, 19 nt, Artificial Sequence
  Description of Artificial Sequence: Synthetic oligonucleotide
agagaagccucgcauuucc

SEQ ID NO: 526329 - RNA, 19 nt, Artificial Sequence
  Description of Artificial Sequence: Synthetic oligonucleotide
uuaaacaagagcugggcaa

SEQ ID NO: 526330 - RNA, 19 nt, Artificial Sequence
  Description of Artificial Sequence: Synthetic oligonucleotide
uuuaaacaagagcugggca

SEQ ID NO: 526331 - RNA, 19 nt, Artificial Sequence
  Description of Artificial Sequence: Synthetic oligonucleotide
aacuaguguucagaaauac

SEQ ID NO: 526332 - RNA, 19 nt, Artificial Sequence
  Description of Artificial Sequence: Synthetic oligonucleotide
agguaacggaacuaaauag

SEQ ID NO: 526333 - RNA, 19 nt, Artificial Sequence
  Description of Artificial Sequence: Synthetic oligonucleotide
uuugucaacgagagaagcc

SEQ ID NO: 526334 - RNA, 19 nt, Artificial Sequence
  Description of Artificial Sequence: Synthetic oligonucleotide
agauuuugugggucaaagc

SEQ ID NO: 526335 - RNA, 19 nt, Artificial Sequence
  Description of Artificial Sequence: Synthetic oligonucleotide
ucucuugcugaccuggccg

SEQ ID NO: 526336 - RNA, 19 nt, Artificial Sequence
  Description of Artificial Sequence: Synthetic oligonucleotide
ugaacuauacauuuccaau

SEQ ID NO: 526337 - RNA, 19 nt, Artificial Sequence
  Description of Artificial Sequence: Synthetic oligonucleotide
ugcauuuugacaacccuac

SEQ ID NO: 526338 - RNA, 19 nt, Artificial Sequence
  Description of Artificial Sequence: Synthetic oligonucleotide
aagcacaaugguuaaagau

SEQ ID NO: 526339 - RNA, 19 nt, Artificial Sequence
  Description of Artificial Sequence: Synthetic oligonucleotide
cuuuagguugaccacuugg

SEQ ID NO: 526340 - RNA, 19 nt, Artificial Sequence
  Description of Artificial Sequence: Synthetic oligonucleotide
aacgaucggagucucuuuc

SEQ ID NO: 526341 - RNA, 19 nt, Artificial Sequence
  Description of Artificial Sequence: Synthetic oligonucleotide
gacaacccuacacaaauug

SEQ ID NO: 526342 - RNA, 19 nt, Artificial Sequence
  Description of Artificial Sequence: Synthetic oligonucleotide
ucauagaacgaucggaguc

SEQ ID NO: 526343 - RNA, 19 nt, Artificial Sequence
  Description of Artificial Sequence: Synthetic oligonucleotide
aagguaacggaacuaaaua

SEQ ID NO: 526344 - RNA, 19 nt, Artificial Sequence
  Description of Artificial Sequence: Synthetic oligonucleotide
aacaauggcacagaaagua

SEQ ID NO: 526345 - RNA, 19 nt, Artificial Sequence
  Description of Artificial Sequence: Synthetic oligonucleotide
aucaacagacgacauaaug

SEQ ID NO: 526346 - RNA, 19 nt, Artificial Sequence
  Description of Artificial Sequence: Synthetic oligonucleotide
gcugcauucguuuuagucg

SEQ ID NO: 526347 - RNA, 19 nt, Artificial Sequence
  Description of Artificial Sequence: Synthetic oligonucleotide
aaccauuguagucuuggca

SEQ ID NO: 526348 - RNA, 19 nt, Artificial Sequence
  Description of Artificial Sequence: Synthetic oligonucleotide
caaaacaaaacaaaacaaa

SEQ ID NO: 526349 - RNA, 19 nt, Artificial Sequence
  Description of Artificial Sequence: Synthetic oligonucleotide
cuuacaugaucaacagacg

SEQ ID NO: 526350 - RNA, 19 nt, Artificial Sequence
  Description of Artificial Sequence: Synthetic oligonucleotide
aaauaugcacuugaucuca

SEQ ID NO: 526351 - RNA, 19 nt, Artificial Sequence
  Description of Artificial Sequence: Synthetic oligonucleotide
uguauugccaauguuugcu

SEQ ID NO: 526352 - RNA, 19 nt, Artificial Sequence
  Description of Artificial Sequence: Synthetic oligonucleotide
uccaaugguugaaagucag

SEQ ID NO: 526353 - RNA, 19 nt, Artificial Sequence
  Description of Artificial Sequence: Synthetic oligonucleotide
uuuaaaaguucagaacugu

SEQ ID NO: 526354 - RNA, 19 nt, Artificial Sequence
  Description of Artificial Sequence: Synthetic oligonucleotide
aacccuacacaaauugugg

SEQ ID NO: 526355 - RNA, 19 nt, Artificial Sequence
  Description of Artificial Sequence: Synthetic oligonucleotide
uucguuuuagucguggucu

SEQ ID NO: 526356 - RNA, 19 nt, Artificial Sequence
  Description of Artificial Sequence: Synthetic oligonucleotide
uuacauccuauuuuagaca

SEQ ID NO: 526357 - RNA, 19 nt, Artificial Sequence
  Description of Artificial Sequence: Synthetic oligonucleotide
agaacaagccgacgugacc

SEQ ID NO: 526358 - RNA, 19 nt, Artificial Sequence
  Description of Artificial Sequence: Synthetic oligonucleotide
agccaaauaaaagguaacg

SEQ ID NO: 526359 - RNA, 19 nt, Artificial Sequence
  Description of Artificial Sequence: Synthetic oligonucleotide
agcacaaugguuaaagaug

SEQ ID NO: 526360 - RNA, 19 nt, Artificial Sequence
  Description of Artificial Sequence: Synthetic oligonucleotide
acaaccauuguagucuugg

SEQ ID NO: 526361 - RNA, 19 nt, Artificial Sequence
  Description of Artificial Sequence: Synthetic oligonucleotide
ugggguacaauuaaacaua

SEQ ID NO: 526362 - RNA, 19 nt, Artificial Sequence
  Description of Artificial Sequence: Synthetic oligonucleotide
ggcaauccuauacaaaagg

SEQ ID NO: 526363 - RNA, 19 nt, Artificial Sequence
  Description of Artificial Sequence: Synthetic oligonucleotide
gaacaagccgacgugaccc

SEQ ID NO: 526364 - RNA, 19 nt, Artificial Sequence
  Description of Artificial Sequence: Synthetic oligonucleotide
ucucaguaggagaacuugc

SEQ ID NO: 526365 - RNA, 19 nt, Artificial Sequence
  Description of Artificial Sequence: Synthetic oligonucleotide
uggcaauaaaacuguuccg

SEQ ID NO: 526366 - RNA, 19 nt, Artificial Sequence
  Description of Artificial Sequence: Synthetic oligonucleotide
uugaucucacuccaugcug

SEQ ID NO: 526367 - RNA, 19 nt, Artificial Sequence
  Description of Artificial Sequence: Synthetic oligonucleotide
uuggccguuauguaaauau

SEQ ID NO: 526368 - RNA, 19 nt, Artificial Sequence
  Description of Artificial Sequence: Synthetic oligonucleotide
acuguggggaaaucacagc

SEQ ID NO: 526369 - RNA, 19 nt, Artificial Sequence
  Description of Artificial Sequence: Synthetic oligonucleotide
uggaacaaguaguauuuga

SEQ ID NO: 526370 - RNA, 19 nt, Artificial Sequence
  Description of Artificial Sequence: Synthetic oligonucleotide
auguaaauauuaaaaggug

SEQ ID NO: 526371 - RNA, 19 nt, Artificial Sequence
  Description of Artificial Sequence: Synthetic oligonucleotide
aacgagagaagccucgcau

SEQ ID NO: 526372 - RNA, 19 nt, Artificial Sequence
  Description of Artificial Sequence: Synthetic oligonucleotide
ugcacuugaucucacucca

SEQ ID NO: 526373 - RNA, 19 nt, Artificial Sequence
  Description of Artificial Sequence: Synthetic oligonucleotide
uuuugacaacccuacacaa

SEQ ID NO: 526374 - RNA, 19 nt, Artificial Sequence
  Description of Artificial Sequence: Synthetic oligonucleotide
cacacauacaaaaggcuac

SEQ ID NO: 526375 - RNA, 19 nt, Artificial Sequence
  Description of Artificial Sequence: Synthetic oligonucleotide
aacuguggggaaaucacag

SEQ ID NO: 526376 - RNA, 19 nt, Artificial Sequence
  Description of Artificial Sequence: Synthetic oligonucleotide
aaaugcacuuugucaacga

SEQ ID NO: 526377 - RNA, 19 nt, Artificial Sequence
  Description of Artificial Sequence: Synthetic oligonucleotide
ugggugguuuguaaaaugu

SEQ ID NO: 526378 - RNA, 19 nt, Artificial Sequence
  Description of Artificial Sequence: Synthetic oligonucleotide
ugaucucacuccaugcuga

SEQ ID NO: 526379 - RNA, 19 nt, Artificial Sequence
  Description of Artificial Sequence: Synthetic oligonucleotide
aucuaaagccaaauaaaag

SEQ ID NO: 526380 - RNA, 19 nt, Artificial Sequence
  Description of Artificial Sequence: Synthetic oligonucleotide
aaagguaacggaacuaaau

SEQ ID NO: 526381 - RNA, 19 nt, Artificial Sequence
  Description of Artificial Sequence: Synthetic oligonucleotide
caacccuacacaaauugug

SEQ ID NO: 526382 - RNA, 19 nt, Artificial Sequence
  Description of Artificial Sequence: Synthetic oligonucleotide
uuuugugggucaaagccau

SEQ ID NO: 526383 - RNA, 19 nt, Artificial Sequence
  Description of Artificial Sequence: Synthetic oligonucleotide
uuuuagucguggucucugg

SEQ ID NO: 526384 - RNA, 19 nt, Artificial Sequence
  Description of Artificial Sequence: Synthetic oligonucleotide
agugauguagcugauuacu

SEQ ID NO: 526385 - RNA, 19 nt, Artificial Sequence
  Description of Artificial Sequence: Synthetic oligonucleotide
auccuauacaaaagggccc

SEQ ID NO: 526386 - RNA, 19 nt, Artificial Sequence
  Description of Artificial Sequence: Synthetic oligonucleotide
aauugugggauuucaucuu

SEQ ID NO: 526387 - RNA, 19 nt, Artificial Sequence
  Description of Artificial Sequence: Synthetic oligonucleotide
acccuacacaaauuguggg

SEQ ID NO: 526388 - RNA, 19 nt, Artificial Sequence
  Description of Artificial Sequence: Synthetic oligonucleotide
ugucguucuguauucuuca

SEQ ID NO: 526389 - RNA, 19 nt, Artificial Sequence
  Description of Artificial Sequence: Synthetic oligonucleotide
uugucaacgagagaagccu

SEQ ID NO: 526390 - RNA, 19 nt, Artificial Sequence
  Description of Artificial Sequence: Synthetic oligonucleotide
agagacaaaacuaggagau

SEQ ID NO: 526391 - RNA, 19 nt, Artificial Sequence
  Description of Artificial Sequence: Synthetic oligonucleotide
guuuaaacaagagcugggc

SEQ ID NO: 526392 - RNA, 19 nt, Artificial Sequence
  Description of Artificial Sequence: Synthetic oligonucleotide
uuagucguggucucuggca

SEQ ID NO: 526393 - RNA, 19 nt, Artificial Sequence
  Description of Artificial Sequence: Synthetic oligonucleotide
gagccgaucaccuacaccu

SEQ ID NO: 526394 - RNA, 19 nt, Artificial Sequence
  Description of Artificial Sequence: Synthetic oligonucleotide
uuuagucguggucucuggc

SEQ ID NO: 526395 - RNA, 19 nt, Artificial Sequence
  Description of Artificial Sequence: Synthetic oligonucleotide
ugauguagcugauuacuaa

SEQ ID NO: 526396 - RNA, 19 nt, Artificial Sequence
  Description of Artificial Sequence: Synthetic oligonucleotide
uagucguggucucuggcag

SEQ ID NO: 526397 - RNA, 19 nt, Artificial Sequence
  Description of Artificial Sequence: Synthetic oligonucleotide
aggcuacuguacuuguccc

SEQ ID NO: 526398 - RNA, 19 nt, Artificial Sequence
  Description of Artificial Sequence: Synthetic oligonucleotide
uaacggaacuaaauaguuc

SEQ ID NO: 526399 - RNA, 19 nt, Artificial Sequence
  Description of Artificial Sequence: Synthetic oligonucleotide
agagccgaucaccuacacc

SEQ ID NO: 526400 - RNA, 19 nt, Artificial Sequence
  Description of Artificial Sequence: Synthetic oligonucleotide
gauguagcugauuacuaaa

SEQ ID NO: 526401 - RNA, 19 nt, Artificial Sequence
  Description of Artificial Sequence: Synthetic oligonucleotide
aacccucaaaucccuacca

SEQ ID NO: 526402 - RNA, 19 nt, Artificial Sequence
  Description of Artificial Sequence: Synthetic oligonucleotide
aaugaacuauacauuucca

SEQ ID NO: 526403 - RNA, 19 nt, Artificial Sequence
  Description of Artificial Sequence: Synthetic oligonucleotide
aauaugcacuugaucucac

SEQ ID NO: 526404 - RNA, 19 nt, Artificial Sequence
  Description of Artificial Sequence: Synthetic oligonucleotide
uaguauuugaguugucuuu

SEQ ID NO: 526405 - RNA, 19 nt, Artificial Sequence
  Description of Artificial Sequence: Synthetic oligonucleotide
agacaaaacuaggagauaa

SEQ ID NO: 526406 - RNA, 19 nt, Artificial Sequence
  Description of Artificial Sequence: Synthetic oligonucleotide
auauuguuuaucccaggau

SEQ ID NO: 526407 - RNA, 19 nt, Artificial Sequence
  Description of Artificial Sequence: Synthetic oligonucleotide
uugggugguuuguaaaaug

SEQ ID NO: 526408 - RNA, 19 nt, Artificial Sequence
  Description of Artificial Sequence: Synthetic oligonucleotide
acuguuugcugcccuauca

SEQ ID NO: 526409 - RNA, 19 nt, Artificial Sequence
  Description of Artificial Sequence: Synthetic oligonucleotide
uguuugucguucuguauuc

SEQ ID NO: 526410 - RNA, 19 nt, Artificial Sequence
  Description of Artificial Sequence: Synthetic oligonucleotide
ucuuaccaaacuugucuga

SEQ ID NO: 526411 - RNA, 19 nt, Artificial Sequence
  Description of Artificial Sequence: Synthetic oligonucleotide
gguuuguaaaauguugucc

SEQ ID NO: 526412 - RNA, 19 nt, Artificial Sequence
  Description of Artificial Sequence: Synthetic oligonucleotide
cacuuugucaacgagagaa

SEQ ID NO: 526413 - RNA, 19 nt, Artificial Sequence
  Description of Artificial Sequence: Synthetic oligonucleotide
uguggggaaaucacagcac

SEQ ID NO: 526414 - RNA, 19 nt, Artificial Sequence
  Description of Artificial Sequence: Synthetic oligonucleotide
aacuaggagauaaaacaaa

SEQ ID NO: 526415 - RNA, 19 nt, Artificial Sequence
  Description of Artificial Sequence: Synthetic oligonucleotide
auaaaaggaacaguuuaaa

SEQ ID NO: 526416 - RNA, 19 nt, Artificial Sequence
  Description of Artificial Sequence: Synthetic oligonucleotide
aacacucugccaucuuaca

SEQ ID NO: 526417 - RNA, 19 nt, Artificial Sequence
  Description of Artificial Sequence: Synthetic oligonucleotide
ucucuuuagguugaccacu

SEQ ID NO: 526418 - RNA, 19 nt, Artificial Sequence
  Description of Artificial Sequence: Synthetic oligonucleotide
aucugcauuuugacaaccc

SEQ ID NO: 526419 - RNA, 19 nt, Artificial Sequence
  Description of Artificial Sequence: Synthetic oligonucleotide
gacaacagaggucuuggaa

SEQ ID NO: 526420 - RNA, 19 nt, Artificial Sequence
  Description of Artificial Sequence: Synthetic oligonucleotide
ugaggcaugaaugcagccu

SEQ ID NO: 526421 - RNA, 19 nt, Artificial Sequence
  Description of Artificial Sequence: Synthetic oligonucleotide
gaaccuggggaacacgcac

SEQ ID NO: 526422 - RNA, 19 nt, Artificial Sequence
  Description of Artificial Sequence: Synthetic oligonucleotide
aaaggcuacuguacuuguc

SEQ ID NO: 526423 - RNA, 19 nt, Artificial Sequence
  Description of Artificial Sequence: Synthetic oligonucleotide
ggugguuuguaaaauguug

SEQ ID NO: 526424 - RNA, 19 nt, Artificial Sequence
  Description of Artificial Sequence: Synthetic oligonucleotide
ccuauauuccugcuguucc

SEQ ID NO: 526425 - RNA, 19 nt, Artificial Sequence
  Description of Artificial Sequence: Synthetic oligonucleotide
auccccuugaucaagcuga

SEQ ID NO: 526426 - RNA, 19 nt, Artificial Sequence
  Description of Artificial Sequence: Synthetic oligonucleotide
gauuggcaaaccccuuggc

SEQ ID NO: 526427 - RNA, 19 nt, Artificial Sequence
  Description of Artificial Sequence: Synthetic oligonucleotide
ucuggaccacuguauaaaa

SEQ ID NO: 526428 - RNA, 19 nt, Artificial Sequence
  Description of Artificial Sequence: Synthetic oligonucleotide
uucuggaccacuguauaaa

SEQ ID NO: 526429 - RNA, 19 nt, Artificial Sequence
  Description of Artificial Sequence: Synthetic oligonucleotide
aaacaauggcacagaaagu

SEQ ID NO: 526430 - RNA, 19 nt, Artificial Sequence
  Description of Artificial Sequence: Synthetic oligonucleotide
ugucccuuuuacauccuau

SEQ ID NO: 526431 - RNA, 19 nt, Artificial Sequence
  Description of Artificial Sequence: Synthetic oligonucleotide
gaagccucgcauuucccca

SEQ ID NO: 526432 - RNA, 19 nt, Artificial Sequence
  Description of Artificial Sequence: Synthetic oligonucleotide
aguauuugaguugucuuuu

SEQ ID NO: 526433 - RNA, 19 nt, Artificial Sequence
  Description of Artificial Sequence: Synthetic oligonucleotide
cuguuugcugcccuaucag

SEQ ID NO: 526434 - RNA, 19 nt, Artificial Sequence
  Description of Artificial Sequence: Synthetic oligonucleotide
ucaaagaaauagagccgau

SEQ ID NO: 526435 - RNA, 19 nt, Artificial Sequence
  Description of Artificial Sequence: Synthetic oligonucleotide
ugggugcucugacaguagc

SEQ ID NO: 526436 - RNA, 19 nt, Artificial Sequence
  Description of Artificial Sequence: Synthetic oligonucleotide
cuguggggaaaucacagca

SEQ ID NO: 526437 - RNA, 19 nt, Artificial Sequence
  Description of Artificial Sequence: Synthetic oligonucleotide
ucuuuagguugaccacuug

SEQ ID NO: 526438 - RNA, 19 nt, Artificial Sequence
  Description of Artificial Sequence: Synthetic oligonucleotide
gaaguagcagcuuggggcu

SEQ ID NO: 526439 - RNA, 19 nt, Artificial Sequence
  Description of Artificial Sequence: Synthetic oligonucleotide
cacagaacaagccgacgug

SEQ ID NO: 526440 - RNA, 19 nt, Artificial Sequence
  Description of Artificial Sequence: Synthetic oligonucleotide
cucaguaggagaacuugca

SEQ ID NO: 526441 - RNA, 19 nt, Artificial Sequence
  Description of Artificial Sequence: Synthetic oligonucleotide
gacgacauaaugacaaaua

SEQ ID NO: 526442 - RNA, 19 nt, Artificial Sequence
  Description of Artificial Sequence: Synthetic oligonucleotide
auccuauuuuagacaaaac

SEQ ID NO: 526443 - RNA, 19 nt, Artificial Sequence
  Description of Artificial Sequence: Synthetic oligonucleotide
agaacacucugccaucuua

SEQ ID NO: 526444 - RNA, 19 nt, Artificial Sequence
  Description of Artificial Sequence: Synthetic oligonucleotide
ugcacagaacaagccgacg

SEQ ID NO: 526445 - RNA, 19 nt, Artificial Sequence
  Description of Artificial Sequence: Synthetic oligonucleotide
aacaagccgacgugacccu

SEQ ID NO: 526446 - RNA, 19 nt, Artificial Sequence
  Description of Artificial Sequence: Synthetic oligonucleotide
guuuuagucguggucucug

SEQ ID NO: 526447 - RNA, 19 nt, Artificial Sequence
  Description of Artificial Sequence: Synthetic oligonucleotide
uguacacuguuugcugccc

SEQ ID NO: 526448 - RNA, 19 nt, Artificial Sequence
  Description of Artificial Sequence: Synthetic oligonucleotide
gaaauagagccgaucaccu

SEQ ID NO: 526449 - RNA, 19 nt, Artificial Sequence
  Description of Artificial Sequence: Synthetic oligonucleotide
acuaguguucagaaauacu

SEQ ID NO: 526450 - RNA, 19 nt, Artificial Sequence
  Description of Artificial Sequence: Synthetic oligonucleotide
uccuauauuccugcuguuc

SEQ ID NO: 526451 - RNA, 19 nt, Artificial Sequence
  Description of Artificial Sequence: Synthetic oligonucleotide
auagaacgaucggagucuc

SEQ ID NO: 526452 - RNA, 19 nt, Artificial Sequence
  Description of Artificial Sequence: Synthetic oligonucleotide
cauccuauuuuagacaaaa

SEQ ID NO: 526453 - RNA, 19 nt, Artificial Sequence
  Description of Artificial Sequence: Synthetic oligonucleotide
guacuugucccuuuuacau

SEQ ID NO: 526454 - RNA, 19 nt, Artificial Sequence
  Description of Artificial Sequence: Synthetic oligonucleotide
auaugcacuugaucucacu

SEQ ID NO: 526455 - RNA, 19 nt, Artificial Sequence
  Description of Artificial Sequence: Synthetic oligonucleotide
cucgcauuuccccagugca

SEQ ID NO: 526456 - RNA, 19 nt, Artificial Sequence
  Description of Artificial Sequence: Synthetic oligonucleotide
cagaacaagccgacgugac

SEQ ID NO: 526457 - RNA, 19 nt, Artificial Sequence
  Description of Artificial Sequence: Synthetic oligonucleotide
acagaacaagccgacguga

SEQ ID NO: 526458 - RNA, 19 nt, Artificial Sequence
  Description of Artificial Sequence: Synthetic oligonucleotide
cgacauaaugacaaauagc

SEQ ID NO: 526459 - RNA, 19 nt, Artificial Sequence
  Description of Artificial Sequence: Synthetic oligonucleotide
gugggucaaagccauuaac

SEQ ID NO: 526460 - RNA, 19 nt, Artificial Sequence
  Description of Artificial Sequence: Synthetic oligonucleotide
aggucauacaaaagcauaa

SEQ ID NO: 526461 - RNA, 19 nt, Artificial Sequence
  Description of Artificial Sequence: Synthetic oligonucleotide
uuggggcuuuuacaaacau

SEQ ID NO: 526462 - RNA, 19 nt, Artificial Sequence
  Description of Artificial Sequence: Synthetic oligonucleotide
augaucaacagacgacaua

SEQ ID NO: 526463 - RNA, 19 nt, Artificial Sequence
  Description of Artificial Sequence: Synthetic oligonucleotide
agucguggucucuggcagg

SEQ ID NO: 526464 - RNA, 19 nt, Artificial Sequence
  Description of Artificial Sequence: Synthetic oligonucleotide
guggaguaugucucuguac

SEQ ID NO: 526465 - RNA, 19 nt, Artificial Sequence
  Description of Artificial Sequence: Synthetic oligonucleotide
caaacauuccucucacaaa

SEQ ID NO: 526466 - RNA, 19 nt, Artificial Sequence
  Description of Artificial Sequence: Synthetic oligonucleotide
uggggaaaucacagcacau

SEQ ID NO: 526467 - RNA, 19 nt, Artificial Sequence
  Description of Artificial Sequence: Synthetic oligonucleotide
ugggcacaaccauuguagu

SEQ ID NO: 526468 - RNA, 19 nt, Artificial Sequence
  Description of Artificial Sequence: Synthetic oligonucleotide
agcaacuaguguucagaaa

SEQ ID NO: 526469 - RNA, 19 nt, Artificial Sequence
  Description of Artificial Sequence: Synthetic oligonucleotide
uuacaggccucaucuuggu

SEQ ID NO: 526470 - RNA, 19 nt, Artificial Sequence
  Description of Artificial Sequence: Synthetic oligonucleotide
auugggugguuuguaaaau

SEQ ID NO: 526471 - RNA, 19 nt, Artificial Sequence
  Description of Artificial Sequence: Synthetic oligonucleotide
agacgacauaaugacaaau

SEQ ID NO: 526472 - RNA, 19 nt, Artificial Sequence
  Description of Artificial Sequence: Synthetic oligonucleotide
agaacgaucggagucucuu

SEQ ID NO: 526473 - RNA, 19 nt, Artificial Sequence
  Description of Artificial Sequence: Synthetic oligonucleotide
uucaagugauguagcugau

SEQ ID NO: 526474 - RNA, 19 nt, Artificial Sequence
  Description of Artificial Sequence: Synthetic oligonucleotide
acaacccuacacaaauugu

SEQ ID NO: 526475 - RNA, 19 nt, Artificial Sequence
  Description of Artificial Sequence: Synthetic oligonucleotide
aaguaguauuugaguuguc

SEQ ID NO: 526476 - RNA, 19 nt, Artificial Sequence
  Description of Artificial Sequence: Synthetic oligonucleotide
acgaucggagucucuuuca

SEQ ID NO: 526477 - RNA, 19 nt, Artificial Sequence
  Description of Artificial Sequence: Synthetic oligonucleotide
uggccguuauguaaauauu

SEQ ID NO: 526478 - RNA, 19 nt, Artificial Sequence
  Description of Artificial Sequence: Synthetic oligonucleotide
aggaaaugugcugaauuua

SEQ ID NO: 526479 - RNA, 19 nt, Artificial Sequence
  Description of Artificial Sequence: Synthetic oligonucleotide
ucguuuuagucguggucuc

SEQ ID NO: 526480 - RNA, 19 nt, Artificial Sequence
  Description of Artificial Sequence: Synthetic oligonucleotide
caaugguugaaagucaggu

SEQ ID NO: 526481 - RNA, 19 nt, Artificial Sequence
  Description of Artificial Sequence: Synthetic oligonucleotide
aaaccccuuggccguuaug

SEQ ID NO: 526482 - RNA, 19 nt, Artificial Sequence
  Description of Artificial Sequence: Synthetic oligonucleotide
aagccgacgugacccuuga

SEQ ID NO: 526483 - RNA, 19 nt, Artificial Sequence
  Description of Artificial Sequence: Synthetic oligonucleotide
cuuggggcuuuuacaaaca

SEQ ID NO: 526484 - RNA, 19 nt, Artificial Sequence
  Description of Artificial Sequence: Synthetic oligonucleotide
ucgcauuuccccagugcau

SEQ ID NO: 526485 - RNA, 19 nt, Artificial Sequence
  Description of Artificial Sequence: Synthetic oligonucleotide
guaguauuugaguugucuu

SEQ ID NO: 526486 - RNA, 19 nt, Artificial Sequence
  Description of Artificial Sequence: Synthetic oligonucleotide
ugacaacccuacacaaauu

SEQ ID NO: 526487 - RNA, 19 nt, Artificial Sequence
  Description of Artificial Sequence: Synthetic oligonucleotide
ucggagucucuuucaucug

SEQ ID NO: 526488 - RNA, 19 nt, Artificial Sequence
  Description of Artificial Sequence: Synthetic oligonucleotide
cagccuugucagaacacuc

SEQ ID NO: 526489 - RNA, 19 nt, Artificial Sequence
  Description of Artificial Sequence: Synthetic oligonucleotide
ugcauucguuuuagucgug

SEQ ID NO: 526490 - RNA, 19 nt, Artificial Sequence
  Description of Artificial Sequence: Synthetic oligonucleotide
acggaacuaaauaguucag

SEQ ID NO: 526491 - RNA, 19 nt, Artificial Sequence
  Description of Artificial Sequence: Synthetic oligonucleotide
ccaauguuugcugucaguc

SEQ ID NO: 526492 - RNA, 19 nt, Artificial Sequence
  Description of Artificial Sequence: Synthetic oligonucleotide
cacugaaggugggauuggg

SEQ ID NO: 526493 - RNA, 19 nt, Artificial Sequence
  Description of Artificial Sequence: Synthetic oligonucleotide
agaguucucuuuagguuga

SEQ ID NO: 526494 - RNA, 19 nt, Artificial Sequence
  Description of Artificial Sequence: Synthetic oligonucleotide
agccggucuacaggcaaac

SEQ ID NO: 526495 - RNA, 19 nt, Artificial Sequence
  Description of Artificial Sequence: Synthetic oligonucleotide
gucagaacacucugccauc

SEQ ID NO: 526496 - RNA, 19 nt, Artificial Sequence
  Description of Artificial Sequence: Synthetic oligonucleotide
ggggaaaucacagcacaug

SEQ ID NO: 526497 - RNA, 19 nt, Artificial Sequence
  Description of Artificial Sequence: Synthetic oligonucleotide
agauccccuugaucaagcu

SEQ ID NO: 526498 - RNA, 19 nt, Artificial Sequence
  Description of Artificial Sequence: Synthetic oligonucleotide
uagagccgaucaccuacac

SEQ ID NO: 526499 - RNA, 19 nt, Artificial Sequence
  Description of Artificial Sequence: Synthetic oligonucleotide
caggcaaacuuacaggccu

SEQ ID NO: 526500 - RNA, 19 nt, Artificial Sequence
  Description of Artificial Sequence: Synthetic oligonucleotide
gcauucguuuuagucgugg

SEQ ID NO: 526501 - RNA, 19 nt, Artificial Sequence
  Description of Artificial Sequence: Synthetic oligonucleotide
ggcaauaaaacuguuccgu

SEQ ID NO: 526502 - RNA, 19 nt, Artificial Sequence
  Description of Artificial Sequence: Synthetic oligonucleotide
cugcauucguuuuagucgu

SEQ ID NO: 526503 - RNA, 19 nt, Artificial Sequence
  Description of Artificial Sequence: Synthetic oligonucleotide
ggugacaacagaggucuug

SEQ ID NO: 526504 - RNA, 19 nt, Artificial Sequence
  Description of Artificial Sequence: Synthetic oligonucleotide
uagaacgaucggagucucu

SEQ ID NO: 526505 - RNA, 19 nt, Artificial Sequence
  Description of Artificial Sequence: Synthetic oligonucleotide
gggcaauaaaaugaggaaa

SEQ ID NO: 526506 - RNA, 19 nt, Artificial Sequence
  Description of Artificial Sequence: Synthetic oligonucleotide
gguaacggaacuaaauagu

SEQ ID NO: 526507 - RNA, 19 nt, Artificial Sequence
  Description of Artificial Sequence: Synthetic oligonucleotide
cauagaacgaucggagucu

SEQ ID NO: 526508 - RNA, 19 nt, Artificial Sequence
  Description of Artificial Sequence: Synthetic oligonucleotide
acccucaaaucccuaccaa

SEQ ID NO: 526509 - RNA, 19 nt, Artificial Sequence
  Description of Artificial Sequence: Synthetic oligonucleotide
acugaaggugggauugggu

SEQ ID NO: 526510 - RNA, 19 nt, Artificial Sequence
  Description of Artificial Sequence: Synthetic oligonucleotide
guaacggaacuaaauaguu

SEQ ID NO: 526511 - RNA, 19 nt, Artificial Sequence
  Description of Artificial Sequence: Synthetic oligonucleotide
uuccccuacugcaccuccu

SEQ ID NO: 526512 - RNA, 19 nt, Artificial Sequence
  Description of Artificial Sequence: Synthetic oligonucleotide
cugggugcucugacaguag

SEQ ID NO: 526513 - RNA, 19 nt, Artificial Sequence
  Description of Artificial Sequence: Synthetic oligonucleotide
gcccuaucagauuucagaa

SEQ ID NO: 526514 - RNA, 19 nt, Artificial Sequence
  Description of Artificial Sequence: Synthetic oligonucleotide
ccgacgugacccuugaguc

SEQ ID NO: 526515 - RNA, 19 nt, Artificial Sequence
  Description of Artificial Sequence: Synthetic oligonucleotide
gucguggucucuggcaggc

SEQ ID NO: 526516 - RNA, 19 nt, Artificial Sequence
  Description of Artificial Sequence: Synthetic oligonucleotide
cagcaacuaguguucagaa

SEQ ID NO: 526517 - RNA, 19 nt, Artificial Sequence
  Description of Artificial Sequence: Synthetic oligonucleotide
auagagccgaucaccuaca

SEQ ID NO: 526518 - RNA, 19 nt, Artificial Sequence
  Description of Artificial Sequence: Synthetic oligonucleotide
cuauauuccugcuguuccu

SEQ ID NO: 526519 - RNA, 19 nt, Artificial Sequence
  Description of Artificial Sequence: Synthetic oligonucleotide
guaucauuuuguggggaaa

SEQ ID NO: 526520 - RNA, 19 nt, Artificial Sequence
  Description of Artificial Sequence: Synthetic oligonucleotide
gcuuacauacaaccacaga

SEQ ID NO: 526521 - RNA, 19 nt, Artificial Sequence
  Description of Artificial Sequence: Synthetic oligonucleotide
cggaacuaaauaguucagg

SEQ ID NO: 526522 - RNA, 19 nt, Artificial Sequence
  Description of Artificial Sequence: Synthetic oligonucleotide
guggucucuggcaggccgg

SEQ ID NO: 526523 - RNA, 19 nt, Artificial Sequence
  Description of Artificial Sequence: Synthetic oligonucleotide
caaucagaggaccuccgcu

SEQ ID NO: 526524 - RNA, 19 nt, Artificial Sequence
  Description of Artificial Sequence: Synthetic oligonucleotide
cuggccggcucuguauugc

SEQ ID NO: 526525 - RNA, 19 nt, Artificial Sequence
  Description of Artificial Sequence: Synthetic oligonucleotide
ugggauugggugguuugua

SEQ ID NO: 526526 - RNA, 19 nt, Artificial Sequence
  Description of Artificial Sequence: Synthetic oligonucleotide
uagcuuuggcaauccuaua

SEQ ID NO: 526527 - RNA, 19 nt, Artificial Sequence
  Description of Artificial Sequence: Synthetic oligonucleotide
gugauguagcugauuacua

SEQ ID NO: 526528 - RNA, 19 nt, Artificial Sequence
  Description of Artificial Sequence: Synthetic oligonucleotide
gccaucuuacaugaucaac

SEQ ID NO: 526529 - RNA, 19 nt, Artificial Sequence
  Description of Artificial Sequence: Synthetic oligonucleotide
aggccggaguccccucagg

SEQ ID NO: 526530 - RNA, 19 nt, Artificial Sequence
  Description of Artificial Sequence: Synthetic oligonucleotide
gggcacaaccauuguaguc

SEQ ID NO: 526531 - RNA, 19 nt, Artificial Sequence
  Description of Artificial Sequence: Synthetic oligonucleotide
cacuguuugcugcccuauc

SEQ ID NO: 526532 - RNA, 19 nt, Artificial Sequence
  Description of Artificial Sequence: Synthetic oligonucleotide
gccguuauguaaauauuaa

SEQ ID NO: 526533 - RNA, 19 nt, Artificial Sequence
  Description of Artificial Sequence: Synthetic oligonucleotide
caacgagagaagccucgca

SEQ ID NO: 526534 - RNA, 19 nt, Artificial Sequence
  Description of Artificial Sequence: Synthetic oligonucleotide
ggccguuauguaaauauua

SEQ ID NO: 526535 - RNA, 19 nt, Artificial Sequence
  Description of Artificial Sequence: Synthetic oligonucleotide
cauucguuuuagucguggu

SEQ ID NO: 526536 - RNA, 19 nt, Artificial Sequence
  Description of Artificial Sequence: Synthetic oligonucleotide
gcugauuacuaaaaguuuu

SEQ ID NO: 526537 - RNA, 19 nt, Artificial Sequence
  Description of Artificial Sequence: Synthetic oligonucleotide
ccguuauguaaauauuaaa

SEQ ID NO: 526538 - RNA, 19 nt, Artificial Sequence
  Description of Artificial Sequence: Synthetic oligonucleotide
caugaucaacagacgacau

SEQ ID NO: 526539 - RNA, 19 nt, Artificial Sequence
  Description of Artificial Sequence: Synthetic oligonucleotide
acacuguuugcugcccuau

SEQ ID NO: 526540 - RNA, 19 nt, Artificial Sequence
  Description of Artificial Sequence: Synthetic oligonucleotide
ccucgcauuuccccagugc

SEQ ID NO: 526541 - RNA, 19 nt, Artificial Sequence
  Description of Artificial Sequence: Synthetic oligonucleotide
gggauugggugguuuguaa

SEQ ID NO: 526542 - RNA, 19 nt, Artificial Sequence
  Description of Artificial Sequence: Synthetic oligonucleotide
gggguacaauuaaacauaa

SEQ ID NO: 526543 - RNA, 19 nt, Artificial Sequence
  Description of Artificial Sequence: Synthetic oligonucleotide
ggggaugcugacucaagcu

SEQ ID NO: 526544 - RNA, 19 nt, Artificial Sequence
  Description of Artificial Sequence: Synthetic oligonucleotide
uggucucuggcaggccgga

SEQ ID NO: 526545 - RNA, 19 nt, Artificial Sequence
  Description of Artificial Sequence: Synthetic oligonucleotide
gaucucacuccaugcugau

SEQ ID NO: 526546 - RNA, 19 nt, Artificial Sequence
  Description of Artificial Sequence: Synthetic oligonucleotide
gaacgaucggagucucuuu

SEQ ID NO: 526547 - RNA, 19 nt, Artificial Sequence
  Description of Artificial Sequence: Synthetic oligonucleotide
acagauuggcaaaccccuu

SEQ ID NO: 526548 - RNA, 19 nt, Artificial Sequence
  Description of Artificial Sequence: Synthetic oligonucleotide
cucuuuagguugaccacuu

SEQ ID NO: 526549 - RNA, 19 nt, Artificial Sequence
  Description of Artificial Sequence: Synthetic oligonucleotide
gccgaucaccuacaccuuc

SEQ ID NO: 526550 - RNA, 19 nt, Artificial Sequence
  Description of Artificial Sequence: Synthetic oligonucleotide
cuacacaaauugugggauu

SEQ ID NO: 526551 - RNA, 19 nt, Artificial Sequence
  Description of Artificial Sequence: Synthetic oligonucleotide
accuccgcucugacguguc

SEQ ID NO: 526552 - RNA, 19 nt, Artificial Sequence
  Description of Artificial Sequence: Synthetic oligonucleotide
guuugucguucuguauucu

SEQ ID NO: 526553 - RNA, 19 nt, Artificial Sequence
  Description of Artificial Sequence: Synthetic oligonucleotide
ggaaccuggggaacacgca

SEQ ID NO: 526554 - RNA, 19 nt, Artificial Sequence
  Description of Artificial Sequence: Synthetic oligonucleotide
gcugcccuaucagauuuca

SEQ ID NO: 526555 - RNA, 19 nt, Artificial Sequence
  Description of Artificial Sequence: Synthetic oligonucleotide
cccuuggccguuauguaaa

SEQ ID NO: 526556 - RNA, 19 nt, Artificial Sequence
  Description of Artificial Sequence: Synthetic oligonucleotide
gcagccggucuacaggcaa

SEQ ID NO: 526557 - RNA, 19 nt, Artificial Sequence
  Description of Artificial Sequence: Synthetic oligonucleotide
acgugacccuugagucugg

SEQ ID NO: 526558 - RNA, 19 nt, Artificial Sequence
  Description of Artificial Sequence: Synthetic oligonucleotide
ggcuacuguacuugucccu

SEQ ID NO: 526559 - RNA, 19 nt, Artificial Sequence
  Description of Artificial Sequence: Synthetic oligonucleotide
cugaggguacugcuguuuu

SEQ ID NO: 526560 - RNA, 19 nt, Artificial Sequence
  Description of Artificial Sequence: Synthetic oligonucleotide
ggaguccccucaggcaagc

SEQ ID NO: 526561 - RNA, 19 nt, Artificial Sequence
  Description of Artificial Sequence: Synthetic oligonucleotide
agggcccuguccaaacauu

SEQ ID NO: 526562 - RNA, 19 nt, Artificial Sequence
  Description of Artificial Sequence: Synthetic oligonucleotide
cccuuuuacauccuauuuu

SEQ ID NO: 526563 - RNA, 19 nt, Artificial Sequence
  Description of Artificial Sequence: Synthetic oligonucleotide
gugggauugggugguuugu

SEQ ID NO: 526564 - RNA, 19 nt, Artificial Sequence
  Description of Artificial Sequence: Synthetic oligonucleotide
aaggugggauugggugguu

SEQ ID NO: 526565 - RNA, 19 nt, Artificial Sequence
  Description of Artificial Sequence: Synthetic oligonucleotide
ccuacacaaauugugggau

SEQ ID NO: 526566 - RNA, 19 nt, Artificial Sequence
  Description of Artificial Sequence: Synthetic oligonucleotide
gcagccuugucagaacacu

SEQ ID NO: 526567 - RNA, 19 nt, Artificial Sequence
  Description of Artificial Sequence: Synthetic oligonucleotide
cgcucugacgugucucuug

SEQ ID NO: 526568 - RNA, 19 nt, Artificial Sequence
  Description of Artificial Sequence: Synthetic oligonucleotide
gccucgcauuuccccagug

SEQ ID NO: 526569 - RNA, 19 nt, Artificial Sequence
  Description of Artificial Sequence: Synthetic oligonucleotide
ccucaucuugguccgugga

SEQ ID NO: 526570 - RNA, 19 nt, Artificial Sequence
  Description of Artificial Sequence: Synthetic oligonucleotide
ccuacugcaccuccugcua

SEQ ID NO: 526571 - RNA, 19 nt, Artificial Sequence
  Description of Artificial Sequence: Synthetic oligonucleotide
gcuacuguacuugucccuu

SEQ ID NO: 526572 - RNA, 19 nt, Artificial Sequence
  Description of Artificial Sequence: Synthetic oligonucleotide
gaccuccgcucugacgugu

SEQ ID NO: 526573 - RNA, 19 nt, Artificial Sequence
  Description of Artificial Sequence: Synthetic oligonucleotide
agccgaucaccuacaccuu

SEQ ID NO: 526574 - RNA, 19 nt, Artificial Sequence
  Description of Artificial Sequence: Synthetic oligonucleotide
gcaggccggaguccccuca

SEQ ID NO: 526575 - RNA, 19 nt, Artificial Sequence
  Description of Artificial Sequence: Synthetic oligonucleotide
cguggaguaugucucugua

SEQ ID NO: 526576 - RNA, 19 nt, Artificial Sequence
  Description of Artificial Sequence: Synthetic oligonucleotide
ccggucuacaggcaaacuu

SEQ ID NO: 526577 - RNA, 19 nt, Artificial Sequence
  Description of Artificial Sequence: Synthetic oligonucleotide
cuguuccguucauauuguu

SEQ ID NO: 526578 - RNA, 19 nt, Artificial Sequence
  Description of Artificial Sequence: Synthetic oligonucleotide
caaaccccuuggccguuau

SEQ ID NO: 526579 - RNA, 19 nt, Artificial Sequence
  Description of Artificial Sequence: Synthetic oligonucleotide
ggcaggccggaguccccuc

SEQ ID NO: 526580 - RNA, 19 nt, Artificial Sequence
  Description of Artificial Sequence: Synthetic oligonucleotide
ccguggaguaugucucugu

SEQ ID NO: 526581 - RNA, 19 nt, Artificial Sequence
  Description of Artificial Sequence: Synthetic oligonucleotide
cccucaggcaagccaggcu

SEQ ID NO: 526582 - RNA, 19 nt, Artificial Sequence
  Description of Artificial Sequence: Synthetic oligonucleotide
cgaucggagucucuuucau

SEQ ID NO: 526583 - RNA, 19 nt, Artificial Sequence
  Description of Artificial Sequence: Synthetic oligonucleotide
ccuuggccguuauguaaau

SEQ ID NO: 526584 - RNA, 19 nt, Artificial Sequence
  Description of Artificial Sequence: Synthetic oligonucleotide
gcacuugaucucacuccau

SEQ ID NO: 526585 - RNA, 19 nt, Artificial Sequence
  Description of Artificial Sequence: Synthetic oligonucleotide
gccggucuacaggcaaacu

SEQ ID NO: 526586 - RNA, 19 nt, Artificial Sequence
  Description of Artificial Sequence: Synthetic oligonucleotide
cguuuuagucguggucucu

SEQ ID NO: 526587 - RNA, 19 nt, Artificial Sequence
  Description of Artificial Sequence: Synthetic oligonucleotide
cgcauuuccccagugcauu

SEQ ID NO: 526588 - RNA, 19 nt, Artificial Sequence
  Description of Artificial Sequence: Synthetic oligonucleotide
ggcaaaccccuuggccguu

SEQ ID NO: 526589 - RNA, 19 nt, Artificial Sequence
  Description of Artificial Sequence: Synthetic oligonucleotide
aauaccuuguccuugaaac

SEQ ID NO: 526590 - RNA, 19 nt, Artificial Sequence
  Description of Artificial Sequence: Synthetic oligonucleotide
ucaaaugagauauuaaacc

SEQ ID NO: 526591 - RNA, 19 nt, Artificial Sequence
  Description of Artificial Sequence: Synthetic oligonucleotide
aagacuauaccauggaagg

SEQ ID NO: 526592 - RNA, 19 nt, Artificial Sequence
  Description of Artificial Sequence: Synthetic oligonucleotide
aagaacgaguaauaaaccg

SEQ ID NO: 526593 - RNA, 19 nt, Artificial Sequence
  Description of Artificial Sequence: Synthetic oligonucleotide
aaugagauauuaaaccagc

SEQ ID NO: 526594 - RNA, 19 nt, Artificial Sequence
  Description of Artificial Sequence: Synthetic oligonucleotide
ugagauauuaaaccagcgg

SEQ ID NO: 526595 - RNA, 19 nt, Artificial Sequence
  Description of Artificial Sequence: Synthetic oligonucleotide
acgaguaauaaaccgagcg

SEQ ID NO: 526596 - RNA, 19 nt, Artificial Sequence
  Description of Artificial Sequence: Synthetic oligonucleotide
agauaaaagcgccagaugu

SEQ ID NO: 526597 - RNA, 19 nt, Artificial Sequence
  Description of Artificial Sequence: Synthetic oligonucleotide
aaagacuauaccauggaag

SEQ ID NO: 526598 - RNA, 19 nt, Artificial Sequence
  Description of Artificial Sequence: Synthetic oligonucleotide
uaucaaaugagauauuaaa

SEQ ID NO: 526599 - RNA, 19 nt, Artificial Sequence
  Description of Artificial Sequence: Synthetic oligonucleotide
aaaagcgccagaugucagc

SEQ ID NO: 526600 - RNA, 19 nt, Artificial Sequence
  Description of Artificial Sequence: Synthetic oligonucleotide
uacucuguagcaaugaggu

SEQ ID NO: 526601 - RNA, 19 nt, Artificial Sequence
  Description of Artificial Sequence: Synthetic oligonucleotide
cuuagguaaguccagaaac

SEQ ID NO: 526602 - RNA, 19 nt, Artificial Sequence
  Description of Artificial Sequence: Synthetic oligonucleotide
aaugagguucuucacuaag

SEQ ID NO: 526603 - RNA, 19 nt, Artificial Sequence
  Description of Artificial Sequence: Synthetic oligonucleotide
uccaacuuagguaagucca

SEQ ID NO: 526604 - RNA, 19 nt, Artificial Sequence
  Description of Artificial Sequence: Synthetic oligonucleotide
aucaaaugagauauuaaac

SEQ ID NO: 526605 - RNA, 19 nt, Artificial Sequence
  Description of Artificial Sequence: Synthetic oligonucleotide
agcuguuguaacuuccucc

SEQ ID NO: 526606 - RNA, 19 nt, Artificial Sequence
  Description of Artificial Sequence: Synthetic oligonucleotide
uuauuauuguccauaccca

SEQ ID NO: 526607 - RNA, 19 nt, Artificial Sequence
  Description of Artificial Sequence: Synthetic oligonucleotide
auaugguaaggauacugcg

SEQ ID NO: 526608 - RNA, 19 nt, Artificial Sequence
  Description of Artificial Sequence: Synthetic oligonucleotide
ugaaguuugugacaaggac

SEQ ID NO: 526609 - RNA, 19 nt, Artificial Sequence
  Description of Artificial Sequence: Synthetic oligonucleotide
uaugguaaggauacugcgc

SEQ ID NO: 526610 - RNA, 19 nt, Artificial Sequence
  Description of Artificial Sequence: Synthetic oligonucleotide
uauuauuguccauacccag

SEQ ID NO: 526611 - RNA, 19 nt, Artificial Sequence
  Description of Artificial Sequence: Synthetic oligonucleotide
uucacuaagguguaauugu

SEQ ID NO: 526612 - RNA, 19 nt, Artificial Sequence
  Description of Artificial Sequence: Synthetic oligonucleotide
agaguuuagucaccugugc

SEQ ID NO: 526613 - RNA, 19 nt, Artificial Sequence
  Description of Artificial Sequence: Synthetic oligonucleotide
auagccuuggucucugucg

SEQ ID NO: 526614 - RNA, 19 nt, Artificial Sequence
  Description of Artificial Sequence: Synthetic oligonucleotide
uaauaaaccgagcguuggg

SEQ ID NO: 526615 - RNA, 19 nt, Artificial Sequence
  Description of Artificial Sequence: Synthetic oligonucleotide
uuuagcuccaagaguuuag

SEQ ID NO: 526616 - RNA, 19 nt, Artificial Sequence
  Description of Artificial Sequence: Synthetic oligonucleotide
auugcggcuucuuaaguuc

SEQ ID NO: 526617 - RNA, 19 nt, Artificial Sequence
  Description of Artificial Sequence: Synthetic oligonucleotide
cauuguugacguaagggag

SEQ ID NO: 526618 - RNA, 19 nt, Artificial Sequence
  Description of Artificial Sequence: Synthetic oligonucleotide
gauaugguaaggauacugc

SEQ ID NO: 526619 - RNA, 19 nt, Artificial Sequence
  Description of Artificial Sequence: Synthetic oligonucleotide
uauuaaaccagcgguagac

SEQ ID NO: 526620 - RNA, 19 nt, Artificial Sequence
  Description of Artificial Sequence: Synthetic oligonucleotide
uaugcaucguggcuugagg

SEQ ID NO: 526621 - RNA, 19 nt, Artificial Sequence
  Description of Artificial Sequence: Synthetic oligonucleotide
auagauagaggguauucca

SEQ ID NO: 526622 - RNA, 19 nt, Artificial Sequence
  Description of Artificial Sequence: Synthetic oligonucleotide
uaaaauaccuuguccuuga

SEQ ID NO: 526623 - RNA, 19 nt, Artificial Sequence
  Description of Artificial Sequence: Synthetic oligonucleotide
ccaagaacgaguaauaaac

SEQ ID NO: 526624 - RNA, 19 nt, Artificial Sequence
  Description of Artificial Sequence: Synthetic oligonucleotide
gagauauuaaaccagcggu

SEQ ID NO: 526625 - RNA, 19 nt, Artificial Sequence
  Description of Artificial Sequence: Synthetic oligonucleotide
agaugagggacauuguuga

SEQ ID NO: 526626 - RNA, 19 nt, Artificial Sequence
  Description of Artificial Sequence: Synthetic oligonucleotide
acuaagguguaauuguccu

SEQ ID NO: 526627 - RNA, 19 nt, Artificial Sequence
  Description of Artificial Sequence: Synthetic oligonucleotide
gauccuuuagucuggcccc

SEQ ID NO: 526628 - RNA, 19 nt, Artificial Sequence
  Description of Artificial Sequence: Synthetic oligonucleotide
caagaacgaguaauaaacc

SEQ ID NO: 526629 - RNA, 19 nt, Artificial Sequence
  Description of Artificial Sequence: Synthetic oligonucleotide
augcaucguggcuugaggc

SEQ ID NO: 526630 - RNA, 19 nt, Artificial Sequence
  Description of Artificial Sequence: Synthetic oligonucleotide
guagacgucagcgugaaug

SEQ ID NO: 526631 - RNA, 19 nt, Artificial Sequence
  Description of Artificial Sequence: Synthetic oligonucleotide
uaauucagguacucuguag

SEQ ID NO: 526632 - RNA, 19 nt, Artificial Sequence
  Description of Artificial Sequence: Synthetic oligonucleotide
acucgugaugagcacauuc

SEQ ID NO: 526633 - RNA, 19 nt, Artificial Sequence
  Description of Artificial Sequence: Synthetic oligonucleotide
aggaccucaccacagggcg

SEQ ID NO: 526634 - RNA, 19 nt, Artificial Sequence
  Description of Artificial Sequence: Synthetic oligonucleotide
uggcauguaaggcuggagc

SEQ ID NO: 526635 - RNA, 19 nt, Artificial Sequence
  Description of Artificial Sequence: Synthetic oligonucleotide
uacugcgcaaggcaucucg

SEQ ID NO: 526636 - RNA, 19 nt, Artificial Sequence
  Description of Artificial Sequence: Synthetic oligonucleotide
augguaaggauacugcgca

SEQ ID NO: 526637 - RNA, 19 nt, Artificial Sequence
  Description of Artificial Sequence: Synthetic oligonucleotide
gauagaggguauuccacug

SEQ ID NO: 526638 - RNA, 19 nt, Artificial Sequence
  Description of Artificial Sequence: Synthetic oligonucleotide
uuauuguccauacccagua

SEQ ID NO: 526639 - RNA, 19 nt, Artificial Sequence
  Description of Artificial Sequence: Synthetic oligonucleotide
aauaaaccgagcguugggu

SEQ ID NO: 526640 - RNA, 19 nt, Artificial Sequence
  Description of Artificial Sequence: Synthetic oligonucleotide
uuaaaccagcgguagacgu

SEQ ID NO: 526641 - RNA, 19 nt, Artificial Sequence
  Description of Artificial Sequence: Synthetic oligonucleotide
aagaugagggacauuguug

SEQ ID NO: 526642 - RNA, 19 nt, Artificial Sequence
  Description of Artificial Sequence: Synthetic oligonucleotide
acaaaugaaguuugugaca

SEQ ID NO: 526643 - RNA, 19 nt, Artificial Sequence
  Description of Artificial Sequence: Synthetic oligonucleotide
uggggugagacccucuucc

SEQ ID NO: 526644 - RNA, 19 nt, Artificial Sequence
  Description of Artificial Sequence: Synthetic oligonucleotide
uguauaguuggcugugaug

SEQ ID NO: 526645 - RNA, 19 nt, Artificial Sequence
  Description of Artificial Sequence: Synthetic oligonucleotide
uuuaauccguuuccagggc

SEQ ID NO: 526646 - RNA, 19 nt, Artificial Sequence
  Description of Artificial Sequence: Synthetic oligonucleotide
cucgugaugagcacauucc

SEQ ID NO: 526647 - RNA, 19 nt, Artificial Sequence
  Description of Artificial Sequence: Synthetic oligonucleotide
auagccacagaagggacac

SEQ ID NO: 526648 - RNA, 19 nt, Artificial Sequence
  Description of Artificial Sequence: Synthetic oligonucleotide
auagaggguauuccacugg

SEQ ID NO: 526649 - RNA, 19 nt, Artificial Sequence
  Description of Artificial Sequence: Synthetic oligonucleotide
ucuuucgccaugaacuggu

SEQ ID NO: 526650 - RNA, 19 nt, Artificial Sequence
  Description of Artificial Sequence: Synthetic oligonucleotide
guaaggauacugcgcaagg

SEQ ID NO: 526651 - RNA, 19 nt, Artificial Sequence
  Description of Artificial Sequence: Synthetic oligonucleotide
auaaaauaccuuguccuug

SEQ ID NO: 526652 - RNA, 19 nt, Artificial Sequence
  Description of Artificial Sequence: Synthetic oligonucleotide
gagacccucuuccauagcc

SEQ ID NO: 526653 - RNA, 19 nt, Artificial Sequence
  Description of Artificial Sequence: Synthetic oligonucleotide
uagauagaggguauuccac

SEQ ID NO: 526654 - RNA, 19 nt, Artificial Sequence
  Description of Artificial Sequence: Synthetic oligonucleotide
guaauaaaccgagcguugg

SEQ ID NO: 526655 - RNA, 19 nt, Artificial Sequence
  Description of Artificial Sequence: Synthetic oligonucleotide
gauccgaaccuuuuccagc

SEQ ID NO: 526656 - RNA, 19 nt, Artificial Sequence
  Description of Artificial Sequence: Synthetic oligonucleotide
agauaugguaaggauacug

SEQ ID NO: 526657 - RNA, 19 nt, Artificial Sequence
  Description of Artificial Sequence: Synthetic oligonucleotide
agcagggaucccuguaucc

SEQ ID NO: 526658 - RNA, 19 nt, Artificial Sequence
  Description of Artificial Sequence: Synthetic oligonucleotide
ucggauccgaaccuuuucc

SEQ ID NO: 526659 - RNA, 19 nt, Artificial Sequence
  Description of Artificial Sequence: Synthetic oligonucleotide
uagaggguauuccacuggc

SEQ ID NO: 526660 - RNA, 19 nt, Artificial Sequence
  Description of Artificial Sequence: Synthetic oligonucleotide
uagagccgaacaaggaaag

SEQ ID NO: 526661 - RNA, 19 nt, Artificial Sequence
  Description of Artificial Sequence: Synthetic oligonucleotide
auuguugacguaagggagg

SEQ ID NO: 526662 - RNA, 19 nt, Artificial Sequence
  Description of Artificial Sequence: Synthetic oligonucleotide
uggucuguauaguuggcug

SEQ ID NO: 526663 - RNA, 19 nt, Artificial Sequence
  Description of Artificial Sequence: Synthetic oligonucleotide
agauagaggguauuccacu

SEQ ID NO: 526664 - RNA, 19 nt, Artificial Sequence
  Description of Artificial Sequence: Synthetic oligonucleotide
uuaggaguuucaauggguu

SEQ ID NO: 526665 - RNA, 19 nt, Artificial Sequence
  Description of Artificial Sequence: Synthetic oligonucleotide
aaauaccuuguccuugaaa

SEQ ID NO: 526666 - RNA, 19 nt, Artificial Sequence
  Description of Artificial Sequence: Synthetic oligonucleotide
caugucgagauaugguaag

SEQ ID NO: 526667 - RNA, 19 nt, Artificial Sequence
  Description of Artificial Sequence: Synthetic oligonucleotide
uucgccaugaacugguaaa

SEQ ID NO: 526668 - RNA, 19 nt, Artificial Sequence
  Description of Artificial Sequence: Synthetic oligonucleotide
uccaaacacuccuaucccc

SEQ ID NO: 526669 - RNA, 19 nt, Artificial Sequence
  Description of Artificial Sequence: Synthetic oligonucleotide
auaaaccgagcguugggug

SEQ ID NO: 526670 - RNA, 19 nt, Artificial Sequence
  Description of Artificial Sequence: Synthetic oligonucleotide
ugucgcuguaccauacuca

SEQ ID NO: 526671 - RNA, 19 nt, Artificial Sequence
  Description of Artificial Sequence: Synthetic oligonucleotide
auuaaaccagcgguagacg

SEQ ID NO: 526672 - RNA, 19 nt, Artificial Sequence
  Description of Artificial Sequence: Synthetic oligonucleotide
guaagcaccaucucaggca

SEQ ID NO: 526673 - RNA, 19 nt, Artificial Sequence
  Description of Artificial Sequence: Synthetic oligonucleotide
uuguugacguaagggaggg

SEQ ID NO: 526674 - RNA, 19 nt, Artificial Sequence
  Description of Artificial Sequence: Synthetic oligonucleotide
gacuauaccauggaaggga

SEQ ID NO: 526675 - RNA, 19 nt, Artificial Sequence
  Description of Artificial Sequence: Synthetic oligonucleotide
acagauuuccuguggggug

SEQ ID NO: 526676 - RNA, 19 nt, Artificial Sequence
  Description of Artificial Sequence: Synthetic oligonucleotide
guaccuugcaaagacauca

SEQ ID NO: 526677 - RNA, 19 nt, Artificial Sequence
  Description of Artificial Sequence: Synthetic oligonucleotide
cuucacuaagguguaauug

SEQ ID NO: 526678 - RNA, 19 nt, Artificial Sequence
  Description of Artificial Sequence: Synthetic oligonucleotide
cuccuagagccgaacaagg

SEQ ID NO: 526679 - RNA, 19 nt, Artificial Sequence
  Description of Artificial Sequence: Synthetic oligonucleotide
ucaggccgaauguacagca

SEQ ID NO: 526680 - RNA, 19 nt, Artificial Sequence
  Description of Artificial Sequence: Synthetic oligonucleotide
agaacgaguaauaaaccga

SEQ ID NO: 526681 - RNA, 19 nt, Artificial Sequence
  Description of Artificial Sequence: Synthetic oligonucleotide
ugguggugcgaccaaaagu

SEQ ID NO: 526682 - RNA, 19 nt, Artificial Sequence
  Description of Artificial Sequence: Synthetic oligonucleotide
aaaggacugacugugccaa

SEQ ID NO: 526683 - RNA, 19 nt, Artificial Sequence
  Description of Artificial Sequence: Synthetic oligonucleotide
uauugguugccaugucgag

SEQ ID NO: 526684 - RNA, 19 nt, Artificial Sequence
  Description of Artificial Sequence: Synthetic oligonucleotide
gcuucuuaaguucaauggc

SEQ ID NO: 526685 - RNA, 19 nt, Artificial Sequence
  Description of Artificial Sequence: Synthetic oligonucleotide
cauucacuugaauguauug

SEQ ID NO: 526686 - RNA, 19 nt, Artificial Sequence
  Description of Artificial Sequence: Synthetic oligonucleotide
guaucuugcagcacaaaac

SEQ ID NO: 526687 - RNA, 19 nt, Artificial Sequence
  Description of Artificial Sequence: Synthetic oligonucleotide
cuuagacacaaacaugcca

SEQ ID NO: 526688 - RNA, 19 nt, Artificial Sequence
  Description of Artificial Sequence: Synthetic oligonucleotide
ugcaucguggcuugaggcc

SEQ ID NO: 526689 - RNA, 19 nt, Artificial Sequence
  Description of Artificial Sequence: Synthetic oligonucleotide
augagauauuaaaccagcg

SEQ ID NO: 526690 - RNA, 19 nt, Artificial Sequence
  Description of Artificial Sequence: Synthetic oligonucleotide
ucagguacucuguagcaau

SEQ ID NO: 526691 - RNA, 19 nt, Artificial Sequence
  Description of Artificial Sequence: Synthetic oligonucleotide
uaccacauagauagagggu

SEQ ID NO: 526692 - RNA, 19 nt, Artificial Sequence
  Description of Artificial Sequence: Synthetic oligonucleotide
acaccugucacugugccug

SEQ ID NO: 526693 - RNA, 19 nt, Artificial Sequence
  Description of Artificial Sequence: Synthetic oligonucleotide
gauaaaagcgccagauguc

SEQ ID NO: 526694 - RNA, 19 nt, Artificial Sequence
  Description of Artificial Sequence: Synthetic oligonucleotide
gaaagacuauaccauggaa

SEQ ID NO: 526695 - RNA, 19 nt, Artificial Sequence
  Description of Artificial Sequence: Synthetic oligonucleotide
agcgguagacgucagcgug

SEQ ID NO: 526696 - RNA, 19 nt, Artificial Sequence
  Description of Artificial Sequence: Synthetic oligonucleotide
uuugcauugcggcuucuua

SEQ ID NO: 526697 - RNA, 19 nt, Artificial Sequence
  Description of Artificial Sequence: Synthetic oligonucleotide
ggaacauugucuuucgcca

SEQ ID NO: 526698 - RNA, 19 nt, Artificial Sequence
  Description of Artificial Sequence: Synthetic oligonucleotide
ucgugaugagcacauuccu

SEQ ID NO: 526699 - RNA, 19 nt, Artificial Sequence
  Description of Artificial Sequence: Synthetic oligonucleotide
acuuagguaaguccagaaa

SEQ ID NO: 526700 - RNA, 19 nt, Artificial Sequence
  Description of Artificial Sequence: Synthetic oligonucleotide
aacugguaaagguccacuu

SEQ ID NO: 526701 - RNA, 19 nt, Artificial Sequence
  Description of Artificial Sequence: Synthetic oligonucleotide
aggcagcuauguuuacugc

SEQ ID NO: 526702 - RNA, 19 nt, Artificial Sequence
  Description of Artificial Sequence: Synthetic oligonucleotide
uuuccuguggggugagacc

SEQ ID NO: 526703 - RNA, 19 nt, Artificial Sequence
  Description of Artificial Sequence: Synthetic oligonucleotide
aguaauaaaccgagcguug

SEQ ID NO: 526704 - RNA, 19 nt, Artificial Sequence
  Description of Artificial Sequence: Synthetic oligonucleotide
gagccgaacaaggaaagac

SEQ ID NO: 526705 - RNA, 19 nt, Artificial Sequence
  Description of Artificial Sequence: Synthetic oligonucleotide
gagaggaccucaccacagg

SEQ ID NO: 526706 - RNA, 19 nt, Artificial Sequence
  Description of Artificial Sequence: Synthetic oligonucleotide
uaaaccagcgguagacguc

SEQ ID NO: 526707 - RNA, 19 nt, Artificial Sequence
  Description of Artificial Sequence: Synthetic oligonucleotide
aaaccgagcguuggguguc

SEQ ID NO: 526708 - RNA, 19 nt, Artificial Sequence
  Description of Artificial Sequence: Synthetic oligonucleotide
cauuuguaucugcuguggc

SEQ ID NO: 526709 - RNA, 19 nt, Artificial Sequence
  Description of Artificial Sequence: Synthetic oligonucleotide
ucauagccacagaagggac

SEQ ID NO: 526710 - RNA, 19 nt, Artificial Sequence
  Description of Artificial Sequence: Synthetic oligonucleotide
ugccaugucgagauauggu

SEQ ID NO: 526711 - RNA, 19 nt, Artificial Sequence
  Description of Artificial Sequence: Synthetic oligonucleotide
uccuagagccgaacaagga

SEQ ID NO: 526712 - RNA, 19 nt, Artificial Sequence
  Description of Artificial Sequence: Synthetic oligonucleotide
aguuggcugugauggacag

SEQ ID NO: 526713 - RNA, 19 nt, Artificial Sequence
  Description of Artificial Sequence: Synthetic oligonucleotide
uuaugcaucguggcuugag

SEQ ID NO: 526714 - RNA, 19 nt, Artificial Sequence
  Description of Artificial Sequence: Synthetic oligonucleotide
gcuuuuccaacuuagguaa

SEQ ID NO: 526715 - RNA, 19 nt, Artificial Sequence
  Description of Artificial Sequence: Synthetic oligonucleotide
cagguguuccccauuugag

SEQ ID NO: 526716 - RNA, 19 nt, Artificial Sequence
  Description of Artificial Sequence: Synthetic oligonucleotide
auaauucagguacucugua

SEQ ID NO: 526717 - RNA, 19 nt, Artificial Sequence
  Description of Artificial Sequence: Synthetic oligonucleotide
gaagcgcgcacacugcuca

SEQ ID NO: 526718 - RNA, 19 nt, Artificial Sequence
  Description of Artificial Sequence: Synthetic oligonucleotide
gauaugggccagcagacgu

SEQ ID NO: 526719 - RNA, 19 nt, Artificial Sequence
  Description of Artificial Sequence: Synthetic oligonucleotide
cuagagccgaacaaggaaa

SEQ ID NO: 526720 - RNA, 19 nt, Artificial Sequence
  Description of Artificial Sequence: Synthetic oligonucleotide
cagauaaaagcgccagaug

SEQ ID NO: 526721 - RNA, 19 nt, Artificial Sequence
  Description of Artificial Sequence: Synthetic oligonucleotide
uaauccguuuccagggcuc

SEQ ID NO: 526722 - RNA, 19 nt, Artificial Sequence
  Description of Artificial Sequence: Synthetic oligonucleotide
auuauuguccauacccagu

SEQ ID NO: 526723 - RNA, 19 nt, Artificial Sequence
  Description of Artificial Sequence: Synthetic oligonucleotide
ucacugccaggcaaugucu

SEQ ID NO: 526724 - RNA, 19 nt, Artificial Sequence
  Description of Artificial Sequence: Synthetic oligonucleotide
ggcaucucggauccgaacc

SEQ ID NO: 526725 - RNA, 19 nt, Artificial Sequence
  Description of Artificial Sequence: Synthetic oligonucleotide
agguaaguccagaaacagg

SEQ ID NO: 526726 - RNA, 19 nt, Artificial Sequence
  Description of Artificial Sequence: Synthetic oligonucleotide
uuagcuccaagaguuuagu

SEQ ID NO: 526727 - RNA, 19 nt, Artificial Sequence
  Description of Artificial Sequence: Synthetic oligonucleotide
gggaguaccuugcaaagac

SEQ ID NO: 526728 - RNA, 19 nt, Artificial Sequence
  Description of Artificial Sequence: Synthetic oligonucleotide
gguaagcaccaucucaggc

SEQ ID NO: 526729 - RNA, 19 nt, Artificial Sequence
  Description of Artificial Sequence: Synthetic oligonucleotide
cacaaaaccccgugucagc

SEQ ID NO: 526730 - RNA, 19 nt, Artificial Sequence
  Description of Artificial Sequence: Synthetic oligonucleotide
uugacguaagggagggcac

SEQ ID NO: 526731 - RNA, 19 nt, Artificial Sequence
  Description of Artificial Sequence: Synthetic oligonucleotide
agcgcugccucaaauuuuc

SEQ ID NO: 526732 - RNA, 19 nt, Artificial Sequence
  Description of Artificial Sequence: Synthetic oligonucleotide
ucgccaugaacugguaaag

SEQ ID NO: 526733 - RNA, 19 nt, Artificial Sequence
  Description of Artificial Sequence: Synthetic oligonucleotide
uugaggucucugguuaugc

SEQ ID NO: 526734 - RNA, 19 nt, Artificial Sequence
  Description of Artificial Sequence: Synthetic oligonucleotide
gguacaaaugaaguuugug

SEQ ID NO: 526735 - RNA, 19 nt, Artificial Sequence
  Description of Artificial Sequence: Synthetic oligonucleotide
auacccaguaaagugacuu

SEQ ID NO: 526736 - RNA, 19 nt, Artificial Sequence
  Description of Artificial Sequence: Synthetic oligonucleotide
ggcagcuauguuuacugcc

SEQ ID NO: 526737 - RNA, 19 nt, Artificial Sequence
  Description of Artificial Sequence: Synthetic oligonucleotide
gaagccaagaacgaguaau

SEQ ID NO: 526738 - RNA, 19 nt, Artificial Sequence
  Description of Artificial Sequence: Synthetic oligonucleotide
ugguggcgcuaacuguugg

SEQ ID NO: 526739 - RNA, 19 nt, Artificial Sequence
  Description of Artificial Sequence: Synthetic oligonucleotide
augucgagauaugguaagg

SEQ ID NO: 526740 - RNA, 19 nt, Artificial Sequence
  Description of Artificial Sequence: Synthetic oligonucleotide
uggugcgaccaaaaguauc

SEQ ID NO: 526741 - RNA, 19 nt, Artificial Sequence
  Description of Artificial Sequence: Synthetic oligonucleotide
uugcggcuucuuaaguuca

SEQ ID NO: 526742 - RNA, 19 nt, Artificial Sequence
  Description of Artificial Sequence: Synthetic oligonucleotide
aggcaucucggauccgaac

SEQ ID NO: 526743 - RNA, 19 nt, Artificial Sequence
  Description of Artificial Sequence: Synthetic oligonucleotide
uuccuuuaauccguuucca

SEQ ID NO: 526744 - RNA, 19 nt, Artificial Sequence
  Description of Artificial Sequence: Synthetic oligonucleotide
ugcgcaaggcaucucggau

SEQ ID NO: 526745 - RNA, 19 nt, Artificial Sequence
  Description of Artificial Sequence: Synthetic oligonucleotide
aggccgaauguacagcaga

SEQ ID NO: 526746 - RNA, 19 nt, Artificial Sequence
  Description of Artificial Sequence: Synthetic oligonucleotide
agauauuaaaccagcggua

SEQ ID NO: 526747 - RNA, 19 nt, Artificial Sequence
  Description of Artificial Sequence: Synthetic oligonucleotide
caagaguuuagucaccugu

SEQ ID NO: 526748 - RNA, 19 nt, Artificial Sequence
  Description of Artificial Sequence: Synthetic oligonucleotide
agaauuucccauccucaua

SEQ ID NO: 526749 - RNA, 19 nt, Artificial Sequence
  Description of Artificial Sequence: Synthetic oligonucleotide
cucccacuggucuguauag

SEQ ID NO: 526750 - RNA, 19 nt, Artificial Sequence
  Description of Artificial Sequence: Synthetic oligonucleotide
augaccugcuguuaaggua

SEQ ID NO: 526751 - RNA, 19 nt, Artificial Sequence
  Description of Artificial Sequence: Synthetic oligonucleotide
guauugguugccaugucga

SEQ ID NO: 526752 - RNA, 19 nt, Artificial Sequence
  Description of Artificial Sequence: Synthetic oligonucleotide
aguaccuugcaaagacauc

SEQ ID NO: 526753 - RNA, 19 nt, Artificial Sequence
  Description of Artificial Sequence: Synthetic oligonucleotide
ugcgaccaaaaguaucaaa

SEQ ID NO: 526754 - RNA, 19 nt, Artificial Sequence
  Description of Artificial Sequence: Synthetic oligonucleotide
agacgucugucauccuggg

SEQ ID NO: 526755 - RNA, 19 nt, Artificial Sequence
  Description of Artificial Sequence: Synthetic oligonucleotide
aggguauuccacuggcgga

SEQ ID NO: 526756 - RNA, 19 nt, Artificial Sequence
  Description of Artificial Sequence: Synthetic oligonucleotide
ggucucugguuaugcaucg

SEQ ID NO: 526757 - RNA, 19 nt, Artificial Sequence
  Description of Artificial Sequence: Synthetic oligonucleotide
ugguuaugcaucguggcuu

SEQ ID NO: 526758 - RNA, 19 nt, Artificial Sequence
  Description of Artificial Sequence: Synthetic oligonucleotide
accagcgguagacgucagc

SEQ ID NO: 526759 - RNA, 19 nt, Artificial Sequence
  Description of Artificial Sequence: Synthetic oligonucleotide
cauuugaggucucugguua

SEQ ID NO: 526760 - RNA, 19 nt, Artificial Sequence
  Description of Artificial Sequence: Synthetic oligonucleotide
ggauccgaaccuuuuccag

SEQ ID NO: 526761 - RNA, 19 nt, Artificial Sequence
  Description of Artificial Sequence: Synthetic oligonucleotide
ugaccggcagacuuugcau

SEQ ID NO: 526762 - RNA, 19 nt, Artificial Sequence
  Description of Artificial Sequence: Synthetic oligonucleotide
cuguuaagguacaaaugaa

SEQ ID NO: 526763 - RNA, 19 nt, Artificial Sequence
  Description of Artificial Sequence: Synthetic oligonucleotide
gcuauguuuacugccacac

SEQ ID NO: 526764 - RNA, 19 nt, Artificial Sequence
  Description of Artificial Sequence: Synthetic oligonucleotide
uucagguacucuguagcaa

SEQ ID NO: 526765 - RNA, 19 nt, Artificial Sequence
  Description of Artificial Sequence: Synthetic oligonucleotide
ggaaagacuauaccaugga

SEQ ID NO: 526766 - RNA, 19 nt, Artificial Sequence
  Description of Artificial Sequence: Synthetic oligonucleotide
agcaaccuuuggaagaugu

SEQ ID NO: 526767 - RNA, 19 nt, Artificial Sequence
  Description of Artificial Sequence: Synthetic oligonucleotide
acaaggacgcggcaggcua

SEQ ID NO: 526768 - RNA, 19 nt, Artificial Sequence
  Description of Artificial Sequence: Synthetic oligonucleotide
agcuccuagagccgaacaa

SEQ ID NO: 526769 - RNA, 19 nt, Artificial Sequence
  Description of Artificial Sequence: Synthetic oligonucleotide
ggugcgaccaaaaguauca

SEQ ID NO: 526770 - RNA, 19 nt, Artificial Sequence
  Description of Artificial Sequence: Synthetic oligonucleotide
gaguaauaaaccgagcguu

SEQ ID NO: 526771 - RNA, 19 nt, Artificial Sequence
  Description of Artificial Sequence: Synthetic oligonucleotide
gaugaccugcuguuaaggu

SEQ ID NO: 526772 - RNA, 19 nt, Artificial Sequence
  Description of Artificial Sequence: Synthetic oligonucleotide
ucuucccuagccagucuuc

SEQ ID NO: 526773 - RNA, 19 nt, Artificial Sequence
  Description of Artificial Sequence: Synthetic oligonucleotide
gugguggugcgaccaaaag

SEQ ID NO: 526774 - RNA, 19 nt, Artificial Sequence
  Description of Artificial Sequence: Synthetic oligonucleotide
caaaggacugacugugcca

SEQ ID NO: 526775 - RNA, 19 nt, Artificial Sequence
  Description of Artificial Sequence: Synthetic oligonucleotide
gguuaugcaucguggcuug

SEQ ID NO: 526776 - RNA, 19 nt, Artificial Sequence
  Description of Artificial Sequence: Synthetic oligonucleotide
agccgaacaaggaaagacu

SEQ ID NO: 526777 - RNA, 19 nt, Artificial Sequence
  Description of Artificial Sequence: Synthetic oligonucleotide
gguggugcgaccaaaagua

SEQ ID NO: 526778 - RNA, 19 nt, Artificial Sequence
  Description of Artificial Sequence: Synthetic oligonucleotide
auuugaggucucugguuau

SEQ ID NO: 526779 - RNA, 19 nt, Artificial Sequence
  Description of Artificial Sequence: Synthetic oligonucleotide
cuucccuagccagucuucc

SEQ ID NO: 526780 - RNA, 19 nt, Artificial Sequence
  Description of Artificial Sequence: Synthetic oligonucleotide
cugucgcuguaccauacuc

SEQ ID NO: 526781 - RNA, 19 nt, Artificial Sequence
  Description of Artificial Sequence: Synthetic oligonucleotide
cacacgcccuccacaaagc

SEQ ID NO: 526782 - RNA, 19 nt, Artificial Sequence
  Description of Artificial Sequence: Synthetic oligonucleotide
aaccgagcguugggugucc

SEQ ID NO: 526783 - RNA, 19 nt, Artificial Sequence
  Description of Artificial Sequence: Synthetic oligonucleotide
cucgggccucuucauagcc

SEQ ID NO: 526784 - RNA, 19 nt, Artificial Sequence
  Description of Artificial Sequence: Synthetic oligonucleotide
auaugggccagcagacguc

SEQ ID NO: 526785 - RNA, 19 nt, Artificial Sequence
  Description of Artificial Sequence: Synthetic oligonucleotide
acaggcaacacuggaugcu

SEQ ID NO: 526786 - RNA, 19 nt, Artificial Sequence
  Description of Artificial Sequence: Synthetic oligonucleotide
cauagccacagaagggaca

SEQ ID NO: 526787 - RNA, 19 nt, Artificial Sequence
  Description of Artificial Sequence: Synthetic oligonucleotide
agcgugaauggcaugguau

SEQ ID NO: 526788 - RNA, 19 nt, Artificial Sequence
  Description of Artificial Sequence: Synthetic oligonucleotide
agcaaggcagcuauguuua

SEQ ID NO: 526789 - RNA, 19 nt, Artificial Sequence
  Description of Artificial Sequence: Synthetic oligonucleotide
gugaccggcagacuuugca

SEQ ID NO: 526790 - RNA, 19 nt, Artificial Sequence
  Description of Artificial Sequence: Synthetic oligonucleotide
uuagucaccugugcagcaa

SEQ ID NO: 526791 - RNA, 19 nt, Artificial Sequence
  Description of Artificial Sequence: Synthetic oligonucleotide
cagguacucuguagcaaug

SEQ ID NO: 526792 - RNA, 19 nt, Artificial Sequence
  Description of Artificial Sequence: Synthetic oligonucleotide
ucgggccucuucauagcca

SEQ ID NO: 526793 - RNA, 19 nt, Artificial Sequence
  Description of Artificial Sequence: Synthetic oligonucleotide
agggcacucgugaugagca

SEQ ID NO: 526794 - RNA, 19 nt, Artificial Sequence
  Description of Artificial Sequence: Synthetic oligonucleotide
ugacguaagggagggcacu

SEQ ID NO: 526795 - RNA, 19 nt, Artificial Sequence
  Description of Artificial Sequence: Synthetic oligonucleotide
uggcccucaggccgaaugu

SEQ ID NO: 526796 - RNA, 19 nt, Artificial Sequence
  Description of Artificial Sequence: Synthetic oligonucleotide
ccaacuuagguaaguccag

SEQ ID NO: 526797 - RNA, 19 nt, Artificial Sequence
  Description of Artificial Sequence: Synthetic oligonucleotide
uacccaguaaagugacuuu

SEQ ID NO: 526798 - RNA, 19 nt, Artificial Sequence
  Description of Artificial Sequence: Synthetic oligonucleotide
aaccccgugucagcaaccu

SEQ ID NO: 526799 - RNA, 19 nt, Artificial Sequence
  Description of Artificial Sequence: Synthetic oligonucleotide
gauacugcgcaaggcaucu

SEQ ID NO: 526800 - RNA, 19 nt, Artificial Sequence
  Description of Artificial Sequence: Synthetic oligonucleotide
ggcgcuaacuguuggcaug

SEQ ID NO: 526801 - RNA, 19 nt, Artificial Sequence
  Description of Artificial Sequence: Synthetic oligonucleotide
ucucggauccgaaccuuuu

SEQ ID NO: 526802 - RNA, 19 nt, Artificial Sequence
  Description of Artificial Sequence: Synthetic oligonucleotide
guugccaugucgagauaug

SEQ ID NO: 526803 - RNA, 19 nt, Artificial Sequence
  Description of Artificial Sequence: Synthetic oligonucleotide
gagcguuggguguccaguc

SEQ ID NO: 526804 - RNA, 19 nt, Artificial Sequence
  Description of Artificial Sequence: Synthetic oligonucleotide
agcguuggguguccaguca

SEQ ID NO: 526805 - RNA, 19 nt, Artificial Sequence
  Description of Artificial Sequence: Synthetic oligonucleotide
gcuccuagagccgaacaag

SEQ ID NO: 526806 - RNA, 19 nt, Artificial Sequence
  Description of Artificial Sequence: Synthetic oligonucleotide
ggguaagcaccaucucagg

SEQ ID NO: 526807 - RNA, 19 nt, Artificial Sequence
  Description of Artificial Sequence: Synthetic oligonucleotide
gcuugaggccaucucgaag

SEQ ID NO: 526808 - RNA, 19 nt, Artificial Sequence
  Description of Artificial Sequence: Synthetic oligonucleotide
acguaagggagggcacucg

SEQ ID NO: 526809 - RNA, 19 nt, Artificial Sequence
  Description of Artificial Sequence: Synthetic oligonucleotide
ugguaaggauacugcgcaa

SEQ ID NO: 526810 - RNA, 19 nt, Artificial Sequence
  Description of Artificial Sequence: Synthetic oligonucleotide
ggguauuccacuggcggag

SEQ ID NO: 526811 - RNA, 19 nt, Artificial Sequence
  Description of Artificial Sequence: Synthetic oligonucleotide
ucggacaauguugcccugu

SEQ ID NO: 526812 - RNA, 19 nt, Artificial Sequence
  Description of Artificial Sequence: Synthetic oligonucleotide
gucgagauaugguaaggau

SEQ ID NO: 526813 - RNA, 19 nt, Artificial Sequence
  Description of Artificial Sequence: Synthetic oligonucleotide
gccaagaacgaguaauaaa

SEQ ID NO: 526814 - RNA, 19 nt, Artificial Sequence
  Description of Artificial Sequence: Synthetic oligonucleotide
uccaaagcgcugccucaaa

SEQ ID NO: 526815 - RNA, 19 nt, Artificial Sequence
  Description of Artificial Sequence: Synthetic oligonucleotide
caagggcacagguguuccc

SEQ ID NO: 526816 - RNA, 19 nt, Artificial Sequence
  Description of Artificial Sequence: Synthetic oligonucleotide
acccaguaaagugacuuua

SEQ ID NO: 526817 - RNA, 19 nt, Artificial Sequence
  Description of Artificial Sequence: Synthetic oligonucleotide
gguggcgcuaacuguuggc

SEQ ID NO: 526818 - RNA, 19 nt, Artificial Sequence
  Description of Artificial Sequence: Synthetic oligonucleotide
ugucagcagggaucccugu

SEQ ID NO: 526819 - RNA, 19 nt, Artificial Sequence
  Description of Artificial Sequence: Synthetic oligonucleotide
agguccacuuguucuggau

SEQ ID NO: 526820 - RNA, 19 nt, Artificial Sequence
  Description of Artificial Sequence: Synthetic oligonucleotide
gacguaagggagggcacuc

SEQ ID NO: 526821 - RNA, 19 nt, Artificial Sequence
  Description of Artificial Sequence: Synthetic oligonucleotide
uggcgcuaacuguuggcau

SEQ ID NO: 526822 - RNA, 19 nt, Artificial Sequence
  Description of Artificial Sequence: Synthetic oligonucleotide
cagggcgugaccggcagac

SEQ ID NO: 526823 - RNA, 19 nt, Artificial Sequence
  Description of Artificial Sequence: Synthetic oligonucleotide
augaacugguaaaggucca

SEQ ID NO: 526824 - RNA, 19 nt, Artificial Sequence
  Description of Artificial Sequence: Synthetic oligonucleotide
ccacuggucuguauaguug

SEQ ID NO: 526825 - RNA, 19 nt, Artificial Sequence
  Description of Artificial Sequence: Synthetic oligonucleotide
gaacauugucuuucgccau

SEQ ID NO: 526826 - RNA, 19 nt, Artificial Sequence
  Description of Artificial Sequence: Synthetic oligonucleotide
agagccgaacaaggaaaga

SEQ ID NO: 526827 - RNA, 19 nt, Artificial Sequence
  Description of Artificial Sequence: Synthetic oligonucleotide
gaugguggcgcuaacuguu

SEQ ID NO: 526828 - RNA, 19 nt, Artificial Sequence
  Description of Artificial Sequence: Synthetic oligonucleotide
guggcgcuaacuguuggca

SEQ ID NO: 526829 - RNA, 19 nt, Artificial Sequence
  Description of Artificial Sequence: Synthetic oligonucleotide
gucagcaaggaagcgcgca

SEQ ID NO: 526830 - RNA, 19 nt, Artificial Sequence
  Description of Artificial Sequence: Synthetic oligonucleotide
gcuucccaugcccuuuucc

SEQ ID NO: 526831 - RNA, 19 nt, Artificial Sequence
  Description of Artificial Sequence: Synthetic oligonucleotide
acaguaucuugcagcacaa

SEQ ID NO: 526832 - RNA, 19 nt, Artificial Sequence
  Description of Artificial Sequence: Synthetic oligonucleotide
cagacuuugcauugcggcu

SEQ ID NO: 526833 - RNA, 19 nt, Artificial Sequence
  Description of Artificial Sequence: Synthetic oligonucleotide
augguauuugucacagauu

SEQ ID NO: 526834 - RNA, 19 nt, Artificial Sequence
  Description of Artificial Sequence: Synthetic oligonucleotide
caacuuagguaaguccaga

SEQ ID NO: 526835 - RNA, 19 nt, Artificial Sequence
  Description of Artificial Sequence: Synthetic oligonucleotide
ggugagacccucuuccaua

SEQ ID NO: 526836 - RNA, 19 nt, Artificial Sequence
  Description of Artificial Sequence: Synthetic oligonucleotide
gguauuccacuggcggagg

SEQ ID NO: 526837 - RNA, 19 nt, Artificial Sequence
  Description of Artificial Sequence: Synthetic oligonucleotide
cagcagggaucccuguauc

SEQ ID NO: 526838 - RNA, 19 nt, Artificial Sequence
  Description of Artificial Sequence: Synthetic oligonucleotide
caaugagguucuucacuaa

SEQ ID NO: 526839 - RNA, 19 nt, Artificial Sequence
  Description of Artificial Sequence: Synthetic oligonucleotide
gcgaccaaaaguaucaaau

SEQ ID NO: 526840 - RNA, 19 nt, Artificial Sequence
  Description of Artificial Sequence: Synthetic oligonucleotide
caacaguaucuugcagcac

SEQ ID NO: 526841 - RNA, 19 nt, Artificial Sequence
  Description of Artificial Sequence: Synthetic oligonucleotide
gaggcgggaguaccuugca

SEQ ID NO: 526842 - RNA, 19 nt, Artificial Sequence
  Description of Artificial Sequence: Synthetic oligonucleotide
gcuaacuguuggcauguaa

SEQ ID NO: 526843 - RNA, 19 nt, Artificial Sequence
  Description of Artificial Sequence: Synthetic oligonucleotide
ccuagagccgaacaaggaa

SEQ ID NO: 526844 - RNA, 19 nt, Artificial Sequence
  Description of Artificial Sequence: Synthetic oligonucleotide
caccugucacugugccugc

SEQ ID NO: 526845 - RNA, 19 nt, Artificial Sequence
  Description of Artificial Sequence: Synthetic oligonucleotide
cacaccgcagcugcucaac

SEQ ID NO: 526846 - RNA, 19 nt, Artificial Sequence
  Description of Artificial Sequence: Synthetic oligonucleotide
gcggucagcaaggaagcgc

SEQ ID NO: 526847 - RNA, 19 nt, Artificial Sequence
  Description of Artificial Sequence: Synthetic oligonucleotide
augguggcgcuaacuguug

SEQ ID NO: 526848 - RNA, 19 nt, Artificial Sequence
  Description of Artificial Sequence: Synthetic oligonucleotide
uccguuuccagggcucauu

SEQ ID NO: 526849 - RNA, 19 nt, Artificial Sequence
  Description of Artificial Sequence: Synthetic oligonucleotide
auacugcgcaaggcaucuc

SEQ ID NO: 526850 - RNA, 19 nt, Artificial Sequence
  Description of Artificial Sequence: Synthetic oligonucleotide
ggaggcgggaguaccuugc

SEQ ID NO: 526851 - RNA, 19 nt, Artificial Sequence
  Description of Artificial Sequence: Synthetic oligonucleotide
cucggacaauguugcccug

SEQ ID NO: 526852 - RNA, 19 nt, Artificial Sequence
  Description of Artificial Sequence: Synthetic oligonucleotide
caaagcgcugccucaaauu

SEQ ID NO: 526853 - RNA, 19 nt, Artificial Sequence
  Description of Artificial Sequence: Synthetic oligonucleotide
ccaugucgagauaugguaa

SEQ ID NO: 526854 - RNA, 19 nt, Artificial Sequence
  Description of Artificial Sequence: Synthetic oligonucleotide
aggcgggaguaccuugcaa

SEQ ID NO: 526855 - RNA, 19 nt, Artificial Sequence
  Description of Artificial Sequence: Synthetic oligonucleotide
gcaacacuggaugcugcug

SEQ ID NO: 526856 - RNA, 19 nt, Artificial Sequence
  Description of Artificial Sequence: Synthetic oligonucleotide
gcguuggguguccagucac

SEQ ID NO: 526857 - RNA, 19 nt, Artificial Sequence
  Description of Artificial Sequence: Synthetic oligonucleotide
ucguggcuugaggccaucu

SEQ ID NO: 526858 - RNA, 19 nt, Artificial Sequence
  Description of Artificial Sequence: Synthetic oligonucleotide
gaccggcagacuuugcauu

SEQ ID NO: 526859 - RNA, 19 nt, Artificial Sequence
  Description of Artificial Sequence: Synthetic oligonucleotide
gucugucauccuggguaag

SEQ ID NO: 526860 - RNA, 19 nt, Artificial Sequence
  Description of Artificial Sequence: Synthetic oligonucleotide
ggaguaccuugcaaagaca

SEQ ID NO: 526861 - RNA, 19 nt, Artificial Sequence
  Description of Artificial Sequence: Synthetic oligonucleotide
gcaucguggcuugaggcca

SEQ ID NO: 526862 - RNA, 19 nt, Artificial Sequence
  Description of Artificial Sequence: Synthetic oligonucleotide
ugcccgcugccuguccacc

SEQ ID NO: 526863 - RNA, 19 nt, Artificial Sequence
  Description of Artificial Sequence: Synthetic oligonucleotide
cccgugucagcaaccuuug

SEQ ID NO: 526864 - RNA, 19 nt, Artificial Sequence
  Description of Artificial Sequence: Synthetic oligonucleotide
gagauaugguaaggauacu

SEQ ID NO: 526865 - RNA, 19 nt, Artificial Sequence
  Description of Artificial Sequence: Synthetic oligonucleotide
agcgcgcacacugcucaca

SEQ ID NO: 526866 - RNA, 19 nt, Artificial Sequence
  Description of Artificial Sequence: Synthetic oligonucleotide
gacgucugucauccugggu

SEQ ID NO: 526867 - RNA, 19 nt, Artificial Sequence
  Description of Artificial Sequence: Synthetic oligonucleotide
ugguugccaugucgagaua

SEQ ID NO: 526868 - RNA, 19 nt, Artificial Sequence
  Description of Artificial Sequence: Synthetic oligonucleotide
cauacccaguaaagugacu

SEQ ID NO: 526869 - RNA, 19 nt, Artificial Sequence
  Description of Artificial Sequence: Synthetic oligonucleotide
gacaaggacgcggcaggcu

SEQ ID NO: 526870 - RNA, 19 nt, Artificial Sequence
  Description of Artificial Sequence: Synthetic oligonucleotide
ccaguaaagugacuuuaua

SEQ ID NO: 526871 - RNA, 19 nt, Artificial Sequence
  Description of Artificial Sequence: Synthetic oligonucleotide
caaacaugccagcucuguu

SEQ ID NO: 526872 - RNA, 19 nt, Artificial Sequence
  Description of Artificial Sequence: Synthetic oligonucleotide
cgaacaaggaaagacuaua

SEQ ID NO: 526873 - RNA, 19 nt, Artificial Sequence
  Description of Artificial Sequence: Synthetic oligonucleotide
cauugucuuucgccaugaa

SEQ ID NO: 526874 - RNA, 19 nt, Artificial Sequence
  Description of Artificial Sequence: Synthetic oligonucleotide
cuuucgccaugaacuggua

SEQ ID NO: 526875 - RNA, 19 nt, Artificial Sequence
  Description of Artificial Sequence: Synthetic oligonucleotide
cgccaugaacugguaaagg

SEQ ID NO: 526876 - RNA, 19 nt, Artificial Sequence
  Description of Artificial Sequence: Synthetic oligonucleotide
cagucgcuuuuccaacuua

SEQ ID NO: 526877 - RNA, 19 nt, Artificial Sequence
  Description of Artificial Sequence: Synthetic oligonucleotide
ccggcucuuagagaauuuc

SEQ ID NO: 526878 - RNA, 19 nt, Artificial Sequence
  Description of Artificial Sequence: Synthetic oligonucleotide
cgaguaauaaaccgagcgu

SEQ ID NO: 526879 - RNA, 19 nt, Artificial Sequence
  Description of Artificial Sequence: Synthetic oligonucleotide
ggcuggagcaugacagaca

SEQ ID NO: 526880 - RNA, 19 nt, Artificial Sequence
  Description of Artificial Sequence: Synthetic oligonucleotide
gugcgaccaaaaguaucaa

SEQ ID NO: 526881 - RNA, 19 nt, Artificial Sequence
  Description of Artificial Sequence: Synthetic oligonucleotide
ggcuugaggccaucucgaa

SEQ ID NO: 526882 - RNA, 19 nt, Artificial Sequence
  Description of Artificial Sequence: Synthetic oligonucleotide
ggaagcgcgcacacugcuc

SEQ ID NO: 526883 - RNA, 19 nt, Artificial Sequence
  Description of Artificial Sequence: Synthetic oligonucleotide
cccucaggccgaauguaca

SEQ ID NO: 526884 - RNA, 19 nt, Artificial Sequence
  Description of Artificial Sequence: Synthetic oligonucleotide
gcgugaccggcagacuuug

SEQ ID NO: 526885 - RNA, 19 nt, Artificial Sequence
  Description of Artificial Sequence: Synthetic oligonucleotide
gggcacucgugaugagcac

SEQ ID NO: 526886 - RNA, 19 nt, Artificial Sequence
  Description of Artificial Sequence: Synthetic oligonucleotide
acgcggcaggcuagcagug

SEQ ID NO: 526887 - RNA, 19 nt, Artificial Sequence
  Description of Artificial Sequence: Synthetic oligonucleotide
gcgugaauggcaugguauu

SEQ ID NO: 526888 - RNA, 19 nt, Artificial Sequence
  Description of Artificial Sequence: Synthetic oligonucleotide
gcagggaucccuguauccu

SEQ ID NO: 526889 - RNA, 19 nt, Artificial Sequence
  Description of Artificial Sequence: Synthetic oligonucleotide
caguaucuugcagcacaaa

SEQ ID NO: 526890 - RNA, 19 nt, Artificial Sequence
  Description of Artificial Sequence: Synthetic oligonucleotide
ccaggagauaugggccagc

SEQ ID NO: 526891 - RNA, 19 nt, Artificial Sequence
  Description of Artificial Sequence: Synthetic oligonucleotide
gcgguagacgucagcguga

SEQ ID NO: 526892 - RNA, 19 nt, Artificial Sequence
  Description of Artificial Sequence: Synthetic oligonucleotide
agggcgugaccggcagacu

SEQ ID NO: 526893 - RNA, 19 nt, Artificial Sequence
  Description of Artificial Sequence: Synthetic oligonucleotide
cggauccgaaccuuuucca

SEQ ID NO: 526894 - RNA, 19 nt, Artificial Sequence
  Description of Artificial Sequence: Synthetic oligonucleotide
ccgagcguuggguguccag

SEQ ID NO: 526895 - RNA, 19 nt, Artificial Sequence
  Description of Artificial Sequence: Synthetic oligonucleotide
cccaguaaagugacuuuau

SEQ ID NO: 526896 - RNA, 19 nt, Artificial Sequence
  Description of Artificial Sequence: Synthetic oligonucleotide
accgagcguugggugucca

SEQ ID NO: 526897 - RNA, 19 nt, Artificial Sequence
  Description of Artificial Sequence: Synthetic oligonucleotide
gggugagacccucuuccau

SEQ ID NO: 526898 - RNA, 19 nt, Artificial Sequence
  Description of Artificial Sequence: Synthetic oligonucleotide
ccaagaugagggacauugu

SEQ ID NO: 526899 - RNA, 19 nt, Artificial Sequence
  Description of Artificial Sequence: Synthetic oligonucleotide
guggugcgaccaaaaguau

SEQ ID NO: 526900 - RNA, 19 nt, Artificial Sequence
  Description of Artificial Sequence: Synthetic oligonucleotide
ggccgaauguacagcagau

SEQ ID NO: 526901 - RNA, 19 nt, Artificial Sequence
  Description of Artificial Sequence: Synthetic oligonucleotide
ccgaacaaggaaagacuau

SEQ ID NO: 526902 - RNA, 19 nt, Artificial Sequence
  Description of Artificial Sequence: Synthetic oligonucleotide
ccccgugucagcaaccuuu

SEQ ID NO: 526903 - RNA, 19 nt, Artificial Sequence
  Description of Artificial Sequence: Synthetic oligonucleotide
gucucugguuaugcaucgu

SEQ ID NO: 526904 - RNA, 19 nt, Artificial Sequence
  Description of Artificial Sequence: Synthetic oligonucleotide
gcgcuaacuguuggcaugu

SEQ ID NO: 526905 - RNA, 19 nt, Artificial Sequence
  Description of Artificial Sequence: Synthetic oligonucleotide
cgugaccggcagacuuugc

SEQ ID NO: 526906 - RNA, 19 nt, Artificial Sequence
  Description of Artificial Sequence: Synthetic oligonucleotide
gcacucgugaugagcacau

SEQ ID NO: 526907 - RNA, 19 nt, Artificial Sequence
  Description of Artificial Sequence: Synthetic oligonucleotide
cgggaguaccuugcaaaga

SEQ ID NO: 526908 - RNA, 19 nt, Artificial Sequence
  Description of Artificial Sequence: Synthetic oligonucleotide
cccuagccagucuuccagu

SEQ ID NO: 526909 - RNA, 19 nt, Artificial Sequence
  Description of Artificial Sequence: Synthetic oligonucleotide
cacuggcggaggcgggagu

SEQ ID NO: 526910 - RNA, 19 nt, Artificial Sequence
  Description of Artificial Sequence: Synthetic oligonucleotide
gcgcugccucaaauuuuca

SEQ ID NO: 526911 - RNA, 19 nt, Artificial Sequence
  Description of Artificial Sequence: Synthetic oligonucleotide
ggcgugaccggcagacuuu

SEQ ID NO: 526912 - RNA, 19 nt, Artificial Sequence
  Description of Artificial Sequence: Synthetic oligonucleotide
cgagcguuggguguccagu

SEQ ID NO: 526913 - RNA, 19 nt, Artificial Sequence
  Description of Artificial Sequence: Synthetic oligonucleotide
cguuggguguccagucacu

SEQ ID NO: 526914 - RNA, 19 nt, Artificial Sequence
  Description of Artificial Sequence: Synthetic oligonucleotide
cgugaauggcaugguauuu

SEQ ID NO: 526915 - RNA, 19 nt, Artificial Sequence
  Description of Artificial Sequence: Synthetic oligonucleotide
gccagucuuccagucgcuu

SEQ ID NO: 526916 - RNA, 19 nt, Artificial Sequence
  Description of Artificial Sequence: Synthetic oligonucleotide
cacucgugaugagcacauu

SEQ ID NO: 526917 - RNA, 19 nt, Artificial Sequence
  Description of Artificial Sequence: Synthetic oligonucleotide
cccggcucuuagagaauuu

SEQ ID NO: 526918 - RNA, 19 nt, Artificial Sequence
  Description of Artificial Sequence: Synthetic oligonucleotide
gcggaggcgggaguaccuu

SEQ ID NO: 526919 - RNA, 19 nt, Artificial Sequence
  Description of Artificial Sequence: Synthetic oligonucleotide
ccccggcucuuagagaauu

SEQ ID NO: 526920 - RNA, 19 nt, Artificial Sequence
  Description of Artificial Sequence: Synthetic oligonucleotide
cgcuaacuguuggcaugua

SEQ ID NO: 526921 - RNA, 19 nt, Artificial Sequence
  Description of Artificial Sequence: Synthetic oligonucleotide
aaugauucccaacaguaag

SEQ ID NO: 526922 - RNA, 19 nt, Artificial Sequence
  Description of Artificial Sequence: Synthetic oligonucleotide
gaugguacgacacagggcc

SEQ ID NO: 526923 - RNA, 19 nt, Artificial Sequence
  Description of Artificial Sequence: Synthetic oligonucleotide
aaagcguggaaugucaagc

SEQ ID NO: 526924 - RNA, 19 nt, Artificial Sequence
  Description of Artificial Sequence: Synthetic oligonucleotide
uuaaagaaguugaaggcug

SEQ ID NO: 526925 - RNA, 19 nt, Artificial Sequence
  Description of Artificial Sequence: Synthetic oligonucleotide
guaucugucgaucucaagg

SEQ ID NO: 526926 - RNA, 19 nt, Artificial Sequence
  Description of Artificial Sequence: Synthetic oligonucleotide
uauaagacagauacgcuug

SEQ ID NO: 526927 - RNA, 19 nt, Artificial Sequence
  Description of Artificial Sequence: Synthetic oligonucleotide
aagacagauacgcuuggag

SEQ ID NO: 526928 - RNA, 19 nt, Artificial Sequence
  Description of Artificial Sequence: Synthetic oligonucleotide
uucaguucggcaaaccaag

SEQ ID NO: 526929 - RNA, 19 nt, Artificial Sequence
  Description of Artificial Sequence: Synthetic oligonucleotide
agccccacaaaucaugccc

SEQ ID NO: 526930 - RNA, 19 nt, Artificial Sequence
  Description of Artificial Sequence: Synthetic oligonucleotide
aguucggcaaaccaaguag

SEQ ID NO: 526931 - RNA, 19 nt, Artificial Sequence
  Description of Artificial Sequence: Synthetic oligonucleotide
cuuauagauccccagcucc

SEQ ID NO: 526932 - RNA, 19 nt, Artificial Sequence
  Description of Artificial Sequence: Synthetic oligonucleotide
aaaccaaguagaggcaggc

SEQ ID NO: 526933 - RNA, 19 nt, Artificial Sequence
  Description of Artificial Sequence: Synthetic oligonucleotide
aaacaaugauucccaacag

SEQ ID NO: 526934 - RNA, 19 nt, Artificial Sequence
  Description of Artificial Sequence: Synthetic oligonucleotide
uaauuccuuacauugcuca

SEQ ID NO: 526935 - RNA, 19 nt, Artificial Sequence
  Description of Artificial Sequence: Synthetic oligonucleotide
ucuucgaauucugugagcc

SEQ ID NO: 526936 - RNA, 19 nt, Artificial Sequence
  Description of Artificial Sequence: Synthetic oligonucleotide
caaguaaagacuccagggc

SEQ ID NO: 526937 - RNA, 19 nt, Artificial Sequence
  Description of Artificial Sequence: Synthetic oligonucleotide
cucgccaagagcaggaacg

SEQ ID NO: 526938 - RNA, 19 nt, Artificial Sequence
  Description of Artificial Sequence: Synthetic oligonucleotide
caggagauugagcaaagcg

SEQ ID NO: 526939 - RNA, 19 nt, Artificial Sequence
  Description of Artificial Sequence: Synthetic oligonucleotide
ucaagcacgggucuauagc

SEQ ID NO: 526940 - RNA, 19 nt, Artificial Sequence
  Description of Artificial Sequence: Synthetic oligonucleotide
cuucauucucugcagaagc

SEQ ID NO: 526941 - RNA, 19 nt, Artificial Sequence
  Description of Artificial Sequence: Synthetic oligonucleotide
uccuuauagauccccagcu

SEQ ID NO: 526942 - RNA, 19 nt, Artificial Sequence
  Description of Artificial Sequence: Synthetic oligonucleotide
uaucucaccuucaacuucu

SEQ ID NO: 526943 - RNA, 19 nt, Artificial Sequence
  Description of Artificial Sequence: Synthetic oligonucleotide
uugagcaaagcguggaaug

SEQ ID NO: 526944 - RNA, 19 nt, Artificial Sequence
  Description of Artificial Sequence: Synthetic oligonucleotide
acaaguuggcaagagcccc

SEQ ID NO: 526945 - RNA, 19 nt, Artificial Sequence
  Description of Artificial Sequence: Synthetic oligonucleotide
auaucucaccuucaacuuc

SEQ ID NO: 526946 - RNA, 19 nt, Artificial Sequence
  Description of Artificial Sequence: Synthetic oligonucleotide
ucuuugacgguucuccgga

SEQ ID NO: 526947 - RNA, 19 nt, Artificial Sequence
  Description of Artificial Sequence: Synthetic oligonucleotide
acgagggagggucacauuc

SEQ ID NO: 526948 - RNA, 19 nt, Artificial Sequence
  Description of Artificial Sequence: Synthetic oligonucleotide
uaucugucgaucucaaggu

SEQ ID NO: 526949 - RNA, 19 nt, Artificial Sequence
  Description of Artificial Sequence: Synthetic oligonucleotide
ucuucgucaggaugguacg

SEQ ID NO: 526950 - RNA, 19 nt, Artificial Sequence
  Description of Artificial Sequence: Synthetic oligonucleotide
caagcacgggucuauagcc

SEQ ID NO: 526951 - RNA, 19 nt, Artificial Sequence
  Description of Artificial Sequence: Synthetic oligonucleotide
ggaagaaagcuucaaauca

SEQ ID NO: 526952 - RNA, 19 nt, Artificial Sequence
  Description of Artificial Sequence: Synthetic oligonucleotide
auaagacagauacgcuugg

SEQ ID NO: 526953 - RNA, 19 nt, Artificial Sequence
  Description of Artificial Sequence: Synthetic oligonucleotide
acaaaucaugcccgugagc

SEQ ID NO: 526954 - RNA, 19 nt, Artificial Sequence
  Description of Artificial Sequence: Synthetic oligonucleotide
acugagauccagcuccccg

SEQ ID NO: 526955 - RNA, 19 nt, Artificial Sequence
  Description of Artificial Sequence: Synthetic oligonucleotide
aucuucgucaggaugguac

SEQ ID NO: 526956 - RNA, 19 nt, Artificial Sequence
  Description of Artificial Sequence: Synthetic oligonucleotide
ucggagaugcccaggcugg

SEQ ID NO: 526957 - RNA, 19 nt, Artificial Sequence
  Description of Artificial Sequence: Synthetic oligonucleotide
uucggcaaaccaaguagag

SEQ ID NO: 526958 - RNA, 19 nt, Artificial Sequence
  Description of Artificial Sequence: Synthetic oligonucleotide
acagauacgcuuggagucc

SEQ ID NO: 526959 - RNA, 19 nt, Artificial Sequence
  Description of Artificial Sequence: Synthetic oligonucleotide
ucgucgaugccacugagau

SEQ ID NO: 526960 - RNA, 19 nt, Artificial Sequence
  Description of Artificial Sequence: Synthetic oligonucleotide
aaucccucuucauucucug

SEQ ID NO: 526961 - RNA, 19 nt, Artificial Sequence
  Description of Artificial Sequence: Synthetic oligonucleotide
guacacauucaccuggagc

SEQ ID NO: 526962 - RNA, 19 nt, Artificial Sequence
  Description of Artificial Sequence: Synthetic oligonucleotide
gacgcaaggcucuccaucc

SEQ ID NO: 526963 - RNA, 19 nt, Artificial Sequence
  Description of Artificial Sequence: Synthetic oligonucleotide
ggaacuuaagagcaaggcc

SEQ ID NO: 526964 - RNA, 19 nt, Artificial Sequence
  Description of Artificial Sequence: Synthetic oligonucleotide
gaggucaagaagcauguga

SEQ ID NO: 526965 - RNA, 19 nt, Artificial Sequence
  Description of Artificial Sequence: Synthetic oligonucleotide
uuauagauccccagcuccu

SEQ ID NO: 526966 - RNA, 19 nt, Artificial Sequence
  Description of Artificial Sequence: Synthetic oligonucleotide
cuccgugacagcuucuugg

SEQ ID NO: 526967 - RNA, 19 nt, Artificial Sequence
  Description of Artificial Sequence: Synthetic oligonucleotide
gaacgucuuccccagcacg

SEQ ID NO: 526968 - RNA, 19 nt, Artificial Sequence
  Description of Artificial Sequence: Synthetic oligonucleotide
accggagccauccuuugac

SEQ ID NO: 526969 - RNA, 19 nt, Artificial Sequence
  Description of Artificial Sequence: Synthetic oligonucleotide
cacguacacauucaccugg

SEQ ID NO: 526970 - RNA, 19 nt, Artificial Sequence
  Description of Artificial Sequence: Synthetic oligonucleotide
auaaacucgucaaugguga

SEQ ID NO: 526971 - RNA, 19 nt, Artificial Sequence
  Description of Artificial Sequence: Synthetic oligonucleotide
uguguagacaccagagguc

SEQ ID NO: 526972 - RNA, 19 nt, Artificial Sequence
  Description of Artificial Sequence: Synthetic oligonucleotide
uuugacgguucuccggaag

SEQ ID NO: 526973 - RNA, 19 nt, Artificial Sequence
  Description of Artificial Sequence: Synthetic oligonucleotide
gauggagucggagaugccc

SEQ ID NO: 526974 - RNA, 19 nt, Artificial Sequence
  Description of Artificial Sequence: Synthetic oligonucleotide
uaaagaaguugaaggcugu

SEQ ID NO: 526975 - RNA, 19 nt, Artificial Sequence
  Description of Artificial Sequence: Synthetic oligonucleotide
acaguaagugugauggagg

SEQ ID NO: 526976 - RNA, 19 nt, Artificial Sequence
  Description of Artificial Sequence: Synthetic oligonucleotide
acaacucggcuuuuacccg

SEQ ID NO: 526977 - RNA, 19 nt, Artificial Sequence
  Description of Artificial Sequence: Synthetic oligonucleotide
gcuguuaaggucccgaagc

SEQ ID NO: 526978 - RNA, 19 nt, Artificial Sequence
  Description of Artificial Sequence: Synthetic oligonucleotide
uguggaguccucaccggag

SEQ ID NO: 526979 - RNA, 19 nt, Artificial Sequence
  Description of Artificial Sequence: Synthetic oligonucleotide
aaucaagcagggugguacu

SEQ ID NO: 526980 - RNA, 19 nt, Artificial Sequence
  Description of Artificial Sequence: Synthetic oligonucleotide
aggucaagaagcaugugag

SEQ ID NO: 526981 - RNA, 19 nt, Artificial Sequence
  Description of Artificial Sequence: Synthetic oligonucleotide
cucacggccaucuuaaaga

SEQ ID NO: 526982 - RNA, 19 nt, Artificial Sequence
  Description of Artificial Sequence: Synthetic oligonucleotide
ugcuguuaaggucccgaag

SEQ ID NO: 526983 - RNA, 19 nt, Artificial Sequence
  Description of Artificial Sequence: Synthetic oligonucleotide
  modified_base (4)..(4): a, c, u, g, unknown or other
gacnccuuucccaaguuca

SEQ ID NO: 526984 - RNA, 19 nt, Artificial Sequence
  Description of Artificial Sequence: Synthetic oligonucleotide
aaucaugcccgugagccgu

SEQ ID NO: 526985 - RNA, 19 nt, Artificial Sequence
  Description of Artificial Sequence: Synthetic oligonucleotide
ucggcaaaccaaguagagg

SEQ ID NO: 526986 - RNA, 19 nt, Artificial Sequence
  Description of Artificial Sequence: Synthetic oligonucleotide
aggagauugagcaaagcgu

SEQ ID NO: 526987 - RNA, 19 nt, Artificial Sequence
  Description of Artificial Sequence: Synthetic oligonucleotide
ucaaggucgucgaugccac

SEQ ID NO: 526988 - RNA, 19 nt, Artificial Sequence
  Description of Artificial Sequence: Synthetic oligonucleotide
agcacgggucuauagccgg

SEQ ID NO: 526989 - RNA, 19 nt, Artificial Sequence
  Description of Artificial Sequence: Synthetic oligonucleotide
uucuccggaagucaugcau

SEQ ID NO: 526990 - RNA, 19 nt, Artificial Sequence
  Description of Artificial Sequence: Synthetic oligonucleotide
cuucgucaccgucacagcc

SEQ ID NO: 526991 - RNA, 19 nt, Artificial Sequence
  Description of Artificial Sequence: Synthetic oligonucleotide
ucauacgcagcuuccucug

SEQ ID NO: 526992 - RNA, 19 nt, Artificial Sequence
  Description of Artificial Sequence: Synthetic oligonucleotide
ucuauagccggugcguuga

SEQ ID NO: 526993 - RNA, 19 nt, Artificial Sequence
  Description of Artificial Sequence: Synthetic oligonucleotide
uggauaucucaccuucaac

SEQ ID NO: 526994 - RNA, 19 nt, Artificial Sequence
  Description of Artificial Sequence: Synthetic oligonucleotide
auagccuccccagcggugc

SEQ ID NO: 526995 - RNA, 19 nt, Artificial Sequence
  Description of Artificial Sequence: Synthetic oligonucleotide
aucugucgaucucaagguc

SEQ ID NO: 526996 - RNA, 19 nt, Artificial Sequence
  Description of Artificial Sequence: Synthetic oligonucleotide
uugacgguucuccggaagu

SEQ ID NO: 526997 - RNA, 19 nt, Artificial Sequence
  Description of Artificial Sequence: Synthetic oligonucleotide
agccguaaucauugccacc

SEQ ID NO: 526998 - RNA, 19 nt, Artificial Sequence
  Description of Artificial Sequence: Synthetic oligonucleotide
uuacccgggcuucugacuc

SEQ ID NO: 526999 - RNA, 19 nt, Artificial Sequence
  Description of Artificial Sequence: Synthetic oligonucleotide
uggagugucuucgaauucu

SEQ ID NO: 527000 - RNA, 19 nt, Artificial Sequence
  Description of Artificial Sequence: Synthetic oligonucleotide
ucuccggaagucaugcauc

SEQ ID NO: 527001 - RNA, 19 nt, Artificial Sequence
  Description of Artificial Sequence: Synthetic oligonucleotide
caaagcguggaaugucaag

SEQ ID NO: 527002 - RNA, 19 nt, Artificial Sequence
  Description of Artificial Sequence: Synthetic oligonucleotide
ggagauugagcaaagcgug

SEQ ID NO: 527003 - RNA, 19 nt, Artificial Sequence
  Description of Artificial Sequence: Synthetic oligonucleotide
augcccgugagccguggcc

SEQ ID NO: 527004 - RNA, 19 nt, Artificial Sequence
  Description of Artificial Sequence: Synthetic oligonucleotide
uuuuacccgggcuucugac

SEQ ID NO: 527005 - RNA, 19 nt, Artificial Sequence
  Description of Artificial Sequence: Synthetic oligonucleotide
auacgcuuggaguccagca

SEQ ID NO: 527006 - RNA, 19 nt, Artificial Sequence
  Description of Artificial Sequence: Synthetic oligonucleotide
cacaaaucaugcccgugag

SEQ ID NO: 527007 - RNA, 19 nt, Artificial Sequence
  Description of Artificial Sequence: Synthetic oligonucleotide
ugagcaaagcguggaaugu

SEQ ID NO: 527008 - RNA, 19 nt, Artificial Sequence
  Description of Artificial Sequence: Synthetic oligonucleotide
agcgacacgaacuggccga

SEQ ID NO: 527009 - RNA, 19 nt, Artificial Sequence
  Description of Artificial Sequence: Synthetic oligonucleotide
acagccguaaucauugcca

SEQ ID NO: 527010 - RNA, 19 nt, Artificial Sequence
  Description of Artificial Sequence: Synthetic oligonucleotide
ugacgcaaggcucuccauc

SEQ ID NO: 527011 - RNA, 19 nt, Artificial Sequence
  Description of Artificial Sequence: Synthetic oligonucleotide
gucggagaugcccaggcug

SEQ ID NO: 527012 - RNA, 19 nt, Artificial Sequence
  Description of Artificial Sequence: Synthetic oligonucleotide
aggaacgucuuccccagca

SEQ ID NO: 527013 - RNA, 19 nt, Artificial Sequence
  Description of Artificial Sequence: Synthetic oligonucleotide
agcagggugguacuugacu

SEQ ID NO: 527014 - RNA, 19 nt, Artificial Sequence
  Description of Artificial Sequence: Synthetic oligonucleotide
accgucacagccguaauca

SEQ ID NO: 527015 - RNA, 19 nt, Artificial Sequence
  Description of Artificial Sequence: Synthetic oligonucleotide
uaaagacuccagggcaagg

SEQ ID NO: 527016 - RNA, 19 nt, Artificial Sequence
  Description of Artificial Sequence: Synthetic oligonucleotide
ucgagcaccgagccgucag

SEQ ID NO: 527017 - RNA, 19 nt, Artificial Sequence
  Description of Artificial Sequence: Synthetic oligonucleotide
uccucgagcaccgagccgu

SEQ ID NO: 527018 - RNA, 19 nt, Artificial Sequence
  Description of Artificial Sequence: Synthetic oligonucleotide
aagcacgggucuauagccg

SEQ ID NO: 527019 - RNA, 19 nt, Artificial Sequence
  Description of Artificial Sequence: Synthetic oligonucleotide
  modified_base (5)..(5): a, c, u, g, unknown or other
ugacnccuuucccaaguuc

SEQ ID NO: 527020 - RNA, 19 nt, Artificial Sequence
  Description of Artificial Sequence: Synthetic oligonucleotide
ucggcuuuuacccgggcuu

SEQ ID NO: 527021 - RNA, 19 nt, Artificial Sequence
  Description of Artificial Sequence: Synthetic oligonucleotide
  modified_base (16)..(16): a, c, u, g, unknown or other
uucugugcucgugacnccu

SEQ ID NO: 527022 - RNA, 19 nt, Artificial Sequence
  Description of Artificial Sequence: Synthetic oligonucleotide
ucgaauucugugagccucu

SEQ ID NO: 527023 - RNA, 19 nt, Artificial Sequence
  Description of Artificial Sequence: Synthetic oligonucleotide
uuuacccgggcuucugacu

SEQ ID NO: 527024 - RNA, 19 nt, Artificial Sequence
  Description of Artificial Sequence: Synthetic oligonucleotide
uccccaaauuccaggagau

SEQ ID NO: 527025 - RNA, 19 nt, Artificial Sequence
  Description of Artificial Sequence: Synthetic oligonucleotide
acgggucuauagccggugc

SEQ ID NO: 527026 - RNA, 19 nt, Artificial Sequence
  Description of Artificial Sequence: Synthetic oligonucleotide
ggugcguugaugcagagcu

SEQ ID NO: 527027 - RNA, 19 nt, Artificial Sequence
  Description of Artificial Sequence: Synthetic oligonucleotide
caaucuucauaaacucguc

SEQ ID NO: 527028 - RNA, 19 nt, Artificial Sequence
  Description of Artificial Sequence: Synthetic oligonucleotide
acgacacagggccacucuc

SEQ ID NO: 527029 - RNA, 19 nt, Artificial Sequence
  Description of Artificial Sequence: Synthetic oligonucleotide
uccgugacagcuucuuggu

SEQ ID NO: 527030 - RNA, 19 nt, Artificial Sequence
  Description of Artificial Sequence: Synthetic oligonucleotide
gucaagcacgggucuauag

SEQ ID NO: 527031 - RNA, 19 nt, Artificial Sequence
  Description of Artificial Sequence: Synthetic oligonucleotide
cacaugggccauuuuccgc

SEQ ID NO: 527032 - RNA, 19 nt, Artificial Sequence
  Description of Artificial Sequence: Synthetic oligonucleotide
agauugagcaaagcgugga

SEQ ID NO: 527033 - RNA, 19 nt, Artificial Sequence
  Description of Artificial Sequence: Synthetic oligonucleotide
ucucgauagccuccccagc

SEQ ID NO: 527034 - RNA, 19 nt, Artificial Sequence
  Description of Artificial Sequence: Synthetic oligonucleotide
ucaguucggcaaaccaagu

SEQ ID NO: 527035 - RNA, 19 nt, Artificial Sequence
  Description of Artificial Sequence: Synthetic oligonucleotide
cacagccguaaucauugcc

SEQ ID NO: 527036 - RNA, 19 nt, Artificial Sequence
  Description of Artificial Sequence: Synthetic oligonucleotide
aggggccaaguaaagacuc

SEQ ID NO: 527037 - RNA, 19 nt, Artificial Sequence
  Description of Artificial Sequence: Synthetic oligonucleotide
ggucacauuccucuuccag

SEQ ID NO: 527038 - RNA, 19 nt, Artificial Sequence
  Description of Artificial Sequence: Synthetic oligonucleotide
aacgucuuccccagcacgu

SEQ ID NO: 527039 - RNA, 19 nt, Artificial Sequence
  Description of Artificial Sequence: Synthetic oligonucleotide
cuauaagacagauacgcuu

SEQ ID NO: 527040 - RNA, 19 nt, Artificial Sequence
  Description of Artificial Sequence: Synthetic oligonucleotide
uguguacgagggaggguca

SEQ ID NO: 527041 - RNA, 19 nt, Artificial Sequence
  Description of Artificial Sequence: Synthetic oligonucleotide
ucaaaucaagcaggguggu

SEQ ID NO: 527042 - RNA, 19 nt, Artificial Sequence
  Description of Artificial Sequence: Synthetic oligonucleotide
uacgacacagggccacucu

SEQ ID NO: 527043 - RNA, 19 nt, Artificial Sequence
  Description of Artificial Sequence: Synthetic oligonucleotide
gauaucucaccuucaacuu

SEQ ID NO: 527044 - RNA, 19 nt, Artificial Sequence
  Description of Artificial Sequence: Synthetic oligonucleotide
ggcaagagccccuuuugcc

SEQ ID NO: 527045 - RNA, 19 nt, Artificial Sequence
  Description of Artificial Sequence: Synthetic oligonucleotide
uggcugcaaccaaaagugc

SEQ ID NO: 527046 - RNA, 19 nt, Artificial Sequence
  Description of Artificial Sequence: Synthetic oligonucleotide
ucuucgucaccgucacagc

SEQ ID NO: 527047 - RNA, 19 nt, Artificial Sequence
  Description of Artificial Sequence: Synthetic oligonucleotide
acacuuugaccacacugau

SEQ ID NO: 527048 - RNA, 19 nt, Artificial Sequence
  Description of Artificial Sequence: Synthetic oligonucleotide
uuggagugucuucgaauuc

SEQ ID NO: 527049 - RNA, 19 nt, Artificial Sequence
  Description of Artificial Sequence: Synthetic oligonucleotide
ucgucaggaugguacgaca

SEQ ID NO: 527050 - RNA, 19 nt, Artificial Sequence
  Description of Artificial Sequence: Synthetic oligonucleotide
  modified_base (3)..(3): a, c, u, g, unknown or other
acnccuuucccaaguucac

SEQ ID NO: 527051 - RNA, 19 nt, Artificial Sequence
  Description of Artificial Sequence: Synthetic oligonucleotide
gauacgcuuggaguccagc

SEQ ID NO: 527052 - RNA, 19 nt, Artificial Sequence
  Description of Artificial Sequence: Synthetic oligonucleotide
uucccgaugcuugucccag

SEQ ID NO: 527053 - RNA, 19 nt, Artificial Sequence
  Description of Artificial Sequence: Synthetic oligonucleotide
uucgucaggaugguacgac

SEQ ID NO: 527054 - RNA, 19 nt, Artificial Sequence
  Description of Artificial Sequence: Synthetic oligonucleotide
cacuuugaccacacugaug

SEQ ID NO: 527055 - RNA, 19 nt, Artificial Sequence
  Description of Artificial Sequence: Synthetic oligonucleotide
cacccuugcuguuaagguc

SEQ ID NO: 527056 - RNA, 19 nt, Artificial Sequence
  Description of Artificial Sequence: Synthetic oligonucleotide
uaagacagauacgcuugga

SEQ ID NO: 527057 - RNA, 19 nt, Artificial Sequence
  Description of Artificial Sequence: Synthetic oligonucleotide
gaugcuugucccaggguca

SEQ ID NO: 527058 - RNA, 19 nt, Artificial Sequence
  Description of Artificial Sequence: Synthetic oligonucleotide
ucuguagcguucugugcuc

SEQ ID NO: 527059 - RNA, 19 nt, Artificial Sequence
  Description of Artificial Sequence: Synthetic oligonucleotide
gcagcgaucacaugggcca

SEQ ID NO: 527060 - RNA, 19 nt, Artificial Sequence
  Description of Artificial Sequence: Synthetic oligonucleotide
caaugauucccaacaguaa

SEQ ID NO: 527061 - RNA, 19 nt, Artificial Sequence
  Description of Artificial Sequence: Synthetic oligonucleotide
cagccguaaucauugccac

SEQ ID NO: 527062 - RNA, 19 nt, Artificial Sequence
  Description of Artificial Sequence: Synthetic oligonucleotide
ucccggauggagucggaga

SEQ ID NO: 527063 - RNA, 19 nt, Artificial Sequence
  Description of Artificial Sequence: Synthetic oligonucleotide
aguaaagacuccagggcaa

SEQ ID NO: 527064 - RNA, 19 nt, Artificial Sequence
  Description of Artificial Sequence: Synthetic oligonucleotide
cauuuuccgcccucggguc

SEQ ID NO: 527065 - RNA, 19 nt, Artificial Sequence
  Description of Artificial Sequence: Synthetic oligonucleotide
ccuagguugggguuuugcc

SEQ ID NO: 527066 - RNA, 19 nt, Artificial Sequence
  Description of Artificial Sequence: Synthetic oligonucleotide
aacuggccgaccgccgacg

SEQ ID NO: 527067 - RNA, 19 nt, Artificial Sequence
  Description of Artificial Sequence: Synthetic oligonucleotide
agcaaagcguggaauguca

SEQ ID NO: 527068 - RNA, 19 nt, Artificial Sequence
  Description of Artificial Sequence: Synthetic oligonucleotide
uaagugugauggaggccac

SEQ ID NO: 527069 - RNA, 19 nt, Artificial Sequence
  Description of Artificial Sequence: Synthetic oligonucleotide
gucuauagccggugcguug

SEQ ID NO: 527070 - RNA, 19 nt, Artificial Sequence
  Description of Artificial Sequence: Synthetic oligonucleotide
uccaccgccuagguugggg

SEQ ID NO: 527071 - RNA, 19 nt, Artificial Sequence
  Description of Artificial Sequence: Synthetic oligonucleotide
accguccagcgacacgaac

SEQ ID NO: 527072 - RNA, 19 nt, Artificial Sequence
  Description of Artificial Sequence: Synthetic oligonucleotide
cagcgacacgaacuggccg

SEQ ID NO: 527073 - RNA, 19 nt, Artificial Sequence
  Description of Artificial Sequence: Synthetic oligonucleotide
guccuccucacagaacggg

SEQ ID NO: 527074 - RNA, 19 nt, Artificial Sequence
  Description of Artificial Sequence: Synthetic oligonucleotide
uuuugccuuuggccggcug

SEQ ID NO: 527075 - RNA, 19 nt, Artificial Sequence
  Description of Artificial Sequence: Synthetic oligonucleotide
cugaagugucuuugggguc

SEQ ID NO: 527076 - RNA, 19 nt, Artificial Sequence
  Description of Artificial Sequence: Synthetic oligonucleotide
  modified_base (13)..(13): a, c, u, g, unknown or other
ugugcucgugacnccuuuc

SEQ ID NO: 527077 - RNA, 19 nt, Artificial Sequence
  Description of Artificial Sequence: Synthetic oligonucleotide
uugcuguuaaggucccgaa

SEQ ID NO: 527078 - RNA, 19 nt, Artificial Sequence
  Description of Artificial Sequence: Synthetic oligonucleotide
ugcaaccaaaagugcugcu

SEQ ID NO: 527079 - RNA, 19 nt, Artificial Sequence
  Description of Artificial Sequence: Synthetic oligonucleotide
aggggcgacggccugugug

SEQ ID NO: 527080 - RNA, 19 nt, Artificial Sequence
  Description of Artificial Sequence: Synthetic oligonucleotide
aacgggcuggguguggagu

SEQ ID NO: 527081 - RNA, 19 nt, Artificial Sequence
  Description of Artificial Sequence: Synthetic oligonucleotide
ugguuggagugucuucgaa

SEQ ID NO: 527082 - RNA, 19 nt, Artificial Sequence
  Description of Artificial Sequence: Synthetic oligonucleotide
auuuuccgcccucggguca

SEQ ID NO: 527083 - RNA, 19 nt, Artificial Sequence
  Description of Artificial Sequence: Synthetic oligonucleotide
uggccgaccgccgacgagc

SEQ ID NO: 527084 - RNA, 19 nt, Artificial Sequence
  Description of Artificial Sequence: Synthetic oligonucleotide
ugaccucuuugacgguucu

SEQ ID NO: 527085 - RNA, 19 nt, Artificial Sequence
  Description of Artificial Sequence: Synthetic oligonucleotide
cacgaacuggccgaccgcc

SEQ ID NO: 527086 - RNA, 19 nt, Artificial Sequence
  Description of Artificial Sequence: Synthetic oligonucleotide
augaccucuuugacgguuc

SEQ ID NO: 527087 - RNA, 19 nt, Artificial Sequence
  Description of Artificial Sequence: Synthetic oligonucleotide
cucgucaauggugagcuga

SEQ ID NO: 527088 - RNA, 19 nt, Artificial Sequence
  Description of Artificial Sequence: Synthetic oligonucleotide
guucggcaaaccaaguaga

SEQ ID NO: 527089 - RNA, 19 nt, Artificial Sequence
  Description of Artificial Sequence: Synthetic oligonucleotide
ucaccggagccauccuuug

SEQ ID NO: 527090 - RNA, 19 nt, Artificial Sequence
  Description of Artificial Sequence: Synthetic oligonucleotide
agcggugcuggccaggauu

SEQ ID NO: 527091 - RNA, 19 nt, Artificial Sequence
  Description of Artificial Sequence: Synthetic oligonucleotide
  modified_base (10)..(10): a, c, u, g, unknown or other
gcucgugacnccuuuccca

SEQ ID NO: 527092 - RNA, 19 nt, Artificial Sequence
  Description of Artificial Sequence: Synthetic oligonucleotide
cuguuaaggucccgaagca

SEQ ID NO: 527093 - RNA, 19 nt, Artificial Sequence
  Description of Artificial Sequence: Synthetic oligonucleotide
gaaugucaagcacgggucu

SEQ ID NO: 527094 - RNA, 19 nt, Artificial Sequence
  Description of Artificial Sequence: Synthetic oligonucleotide
gagcucccgguaaaagucc

SEQ ID NO: 527095 - RNA, 19 nt, Artificial Sequence
  Description of Artificial Sequence: Synthetic oligonucleotide
gcucacggccaucuuaaag

SEQ ID NO: 527096 - RNA, 19 nt, Artificial Sequence
  Description of Artificial Sequence: Synthetic oligonucleotide
gucaggaugguacgacaca

SEQ ID NO: 527097 - RNA, 19 nt, Artificial Sequence
  Description of Artificial Sequence: Synthetic oligonucleotide
cucccgguaaaaguccuug

SEQ ID NO: 527098 - RNA, 19 nt, Artificial Sequence
  Description of Artificial Sequence: Synthetic oligonucleotide
ucccgguaaaaguccuugu

SEQ ID NO: 527099 - RNA, 19 nt, Artificial Sequence
  Description of Artificial Sequence: Synthetic oligonucleotide
gcugcaaccaaaagugcug

SEQ ID NO: 527100 - RNA, 19 nt, Artificial Sequence
  Description of Artificial Sequence: Synthetic oligonucleotide
guuccuucggagccgccac

SEQ ID NO: 527101 - RNA, 19 nt, Artificial Sequence
  Description of Artificial Sequence: Synthetic oligonucleotide
gauucccaacaguaagugu

SEQ ID NO: 527102 - RNA, 19 nt, Artificial Sequence
  Description of Artificial Sequence: Synthetic oligonucleotide
ucacagccguaaucauugc

SEQ ID NO: 527103 - RNA, 19 nt, Artificial Sequence
  Description of Artificial Sequence: Synthetic oligonucleotide
  modified_base (8)..(8): a, c, u, g, unknown or other
ucgugacnccuuucccaag

SEQ ID NO: 527104 - RNA, 19 nt, Artificial Sequence
  Description of Artificial Sequence: Synthetic oligonucleotide
ugaccccuauaagacagau

SEQ ID NO: 527105 - RNA, 19 nt, Artificial Sequence
  Description of Artificial Sequence: Synthetic oligonucleotide
uguagcguucugugcucgu

SEQ ID NO: 527106 - RNA, 19 nt, Artificial Sequence
  Description of Artificial Sequence: Synthetic oligonucleotide
uguacgagggagggucaca

SEQ ID NO: 527107 - RNA, 19 nt, Artificial Sequence
  Description of Artificial Sequence: Synthetic oligonucleotide
uauagccggugcguugaug

SEQ ID NO: 527108 - RNA, 19 nt, Artificial Sequence
  Description of Artificial Sequence: Synthetic oligonucleotide
ugcccgugagccguggccc

SEQ ID NO: 527109 - RNA, 19 nt, Artificial Sequence
  Description of Artificial Sequence: Synthetic oligonucleotide
gauguggcgccgaccauuc

SEQ ID NO: 527110 - RNA, 19 nt, Artificial Sequence
  Description of Artificial Sequence: Synthetic oligonucleotide
  modified_base (9)..(9): a, c, u, g, unknown or other
cucgugacnccuuucccaa

SEQ ID NO: 527111 - RNA, 19 nt, Artificial Sequence
  Description of Artificial Sequence: Synthetic oligonucleotide
gagcaaagcguggaauguc

SEQ ID NO: 527112 - RNA, 19 nt, Artificial Sequence
  Description of Artificial Sequence: Synthetic oligonucleotide
ugguacgacacagggccac

SEQ ID NO: 527113 - RNA, 19 nt, Artificial Sequence
  Description of Artificial Sequence: Synthetic oligonucleotide
ggcugugaguccucccugg

SEQ ID NO: 527114 - RNA, 19 nt, Artificial Sequence
  Description of Artificial Sequence: Synthetic oligonucleotide
uuccuucggagccgccacc

SEQ ID NO: 527115 - RNA, 19 nt, Artificial Sequence
  Description of Artificial Sequence: Synthetic oligonucleotide
gacaccucaugguucuucu

SEQ ID NO: 527116 - RNA, 19 nt, Artificial Sequence
  Description of Artificial Sequence: Synthetic oligonucleotide
cuggauaucucaccuucaa

SEQ ID NO: 527117 - RNA, 19 nt, Artificial Sequence
  Description of Artificial Sequence: Synthetic oligonucleotide
gauagccuccccagcggug

SEQ ID NO: 527118 - RNA, 19 nt, Artificial Sequence
  Description of Artificial Sequence: Synthetic oligonucleotide
ccgguaaaaguccuuguuc

SEQ ID NO: 527119 - RNA, 19 nt, Artificial Sequence
  Description of Artificial Sequence: Synthetic oligonucleotide
gacgguucuccggaaguca

SEQ ID NO: 527120 - RNA, 19 nt, Artificial Sequence
  Description of Artificial Sequence: Synthetic oligonucleotide
ucccgaugcuugucccagg

SEQ ID NO: 527121 - RNA, 19 nt, Artificial Sequence
  Description of Artificial Sequence: Synthetic oligonucleotide
agugucuuuggggucccca

SEQ ID NO: 527122 - RNA, 19 nt, Artificial Sequence
  Description of Artificial Sequence: Synthetic oligonucleotide
cuguagcguucugugcucg

SEQ ID NO: 527123 - RNA, 19 nt, Artificial Sequence
  Description of Artificial Sequence: Synthetic oligonucleotide
aggucgcugaggucaagaa

SEQ ID NO: 527124 - RNA, 19 nt, Artificial Sequence
  Description of Artificial Sequence: Synthetic oligonucleotide
ggccauggaagaaagcuuc

SEQ ID NO: 527125 - RNA, 19 nt, Artificial Sequence
  Description of Artificial Sequence: Synthetic oligonucleotide
cugcaccucggacacgaug

SEQ ID NO: 527126 - RNA, 19 nt, Artificial Sequence
  Description of Artificial Sequence: Synthetic oligonucleotide
ugacgguucuccggaaguc

SEQ ID NO: 527127 - RNA, 19 nt, Artificial Sequence
  Description of Artificial Sequence: Synthetic oligonucleotide
gaacgggcuggguguggag

SEQ ID NO: 527128 - RNA, 19 nt, Artificial Sequence
  Description of Artificial Sequence: Synthetic oligonucleotide
gagcaccgagccgucagcc

SEQ ID NO: 527129 - RNA, 19 nt, Artificial Sequence
  Description of Artificial Sequence: Synthetic oligonucleotide
cuuuuacccgggcuucuga

SEQ ID NO: 527130 - RNA, 19 nt, Artificial Sequence
  Description of Artificial Sequence: Synthetic oligonucleotide
ugggugggcuacucccacc

SEQ ID NO: 527131 - RNA, 19 nt, Artificial Sequence
  Description of Artificial Sequence: Synthetic oligonucleotide
cucccgcauccacaacucg

SEQ ID NO: 527132 - RNA, 19 nt, Artificial Sequence
  Description of Artificial Sequence: Synthetic oligonucleotide
uccccguccccugaagugu

SEQ ID NO: 527133 - RNA, 19 nt, Artificial Sequence
  Description of Artificial Sequence: Synthetic oligonucleotide
gugagccucuuccgcagug

SEQ ID NO: 527134 - RNA, 19 nt, Artificial Sequence
  Description of Artificial Sequence: Synthetic oligonucleotide
guagcguucugugcucgug

SEQ ID NO: 527135 - RNA, 19 nt, Artificial Sequence
  Description of Artificial Sequence: Synthetic oligonucleotide
agccgucaucuucgucacc

SEQ ID NO: 527136 - RNA, 19 nt, Artificial Sequence
  Description of Artificial Sequence: Synthetic oligonucleotide
agcgcugacgcaaggcucu

SEQ ID NO: 527137 - RNA, 19 nt, Artificial Sequence
  Description of Artificial Sequence: Synthetic oligonucleotide
acauggaauccaccgccua

SEQ ID NO: 527138 - RNA, 19 nt, Artificial Sequence
  Description of Artificial Sequence: Synthetic oligonucleotide
agccggugcguugaugcag

SEQ ID NO: 527139 - RNA, 19 nt, Artificial Sequence
  Description of Artificial Sequence: Synthetic oligonucleotide
gaacuggccgaccgccgac

SEQ ID NO: 527140 - RNA, 19 nt, Artificial Sequence
  Description of Artificial Sequence: Synthetic oligonucleotide
ggucucaaccucuucccga

SEQ ID NO: 527141 - RNA, 19 nt, Artificial Sequence
  Description of Artificial Sequence: Synthetic oligonucleotide
gcugugaguccucccuggg

SEQ ID NO: 527142 - RNA, 19 nt, Artificial Sequence
  Description of Artificial Sequence: Synthetic oligonucleotide
gucaccgucacagccguaa

SEQ ID NO: 527143 - RNA, 19 nt, Artificial Sequence
  Description of Artificial Sequence: Synthetic oligonucleotide
ccuuauagauccccagcuc

SEQ ID NO: 527144 - RNA, 19 nt, Artificial Sequence
  Description of Artificial Sequence: Synthetic oligonucleotide
ggggcgacggccugugugc

SEQ ID NO: 527145 - RNA, 19 nt, Artificial Sequence
  Description of Artificial Sequence: Synthetic oligonucleotide
gaccacacugaugaccucu

SEQ ID NO: 527146 - RNA, 19 nt, Artificial Sequence
  Description of Artificial Sequence: Synthetic oligonucleotide
guugggguuuugccagcac

SEQ ID NO: 527147 - RNA, 19 nt, Artificial Sequence
  Description of Artificial Sequence: Synthetic oligonucleotide
ugguggauguggcgccgac

SEQ ID NO: 527148 - RNA, 19 nt, Artificial Sequence
  Description of Artificial Sequence: Synthetic oligonucleotide
acgcagcuuccucugucca

SEQ ID NO: 527149 - RNA, 19 nt, Artificial Sequence
  Description of Artificial Sequence: Synthetic oligonucleotide
ggcgccgaccauucuguag

SEQ ID NO: 527150 - RNA, 19 nt, Artificial Sequence
  Description of Artificial Sequence: Synthetic oligonucleotide
agaacgggcugggugugga

SEQ ID NO: 527151 - RNA, 19 nt, Artificial Sequence
  Description of Artificial Sequence: Synthetic oligonucleotide
ccggcuguuuucuagcuca

SEQ ID NO: 527152 - RNA, 19 nt, Artificial Sequence
  Description of Artificial Sequence: Synthetic oligonucleotide
cccugggugggcuacuccc

SEQ ID NO: 527153 - RNA, 19 nt, Artificial Sequence
  Description of Artificial Sequence: Synthetic oligonucleotide
ccacaaaucaugcccguga

SEQ ID NO: 527154 - RNA, 19 nt, Artificial Sequence
  Description of Artificial Sequence: Synthetic oligonucleotide
ggagugucuucgaauucug

SEQ ID NO: 527155 - RNA, 19 nt, Artificial Sequence
  Description of Artificial Sequence: Synthetic oligonucleotide
acgaacuggccgaccgccg

SEQ ID NO: 527156 - RNA, 19 nt, Artificial Sequence
  Description of Artificial Sequence: Synthetic oligonucleotide
ggccaaguaaagacuccag

SEQ ID NO: 527157 - RNA, 19 nt, Artificial Sequence
  Description of Artificial Sequence: Synthetic oligonucleotide
ccgaagguacucagcauuc

SEQ ID NO: 527158 - RNA, 19 nt, Artificial Sequence
  Description of Artificial Sequence: Synthetic oligonucleotide
cgaugcuugucccaggguc

SEQ ID NO: 527159 - RNA, 19 nt, Artificial Sequence
  Description of Artificial Sequence: Synthetic oligonucleotide
gggcuucugacucguucag

SEQ ID NO: 527160 - RNA, 19 nt, Artificial Sequence
  Description of Artificial Sequence: Synthetic oligonucleotide
cuucccgaugcuuguccca

SEQ ID NO: 527161 - RNA, 19 nt, Artificial Sequence
  Description of Artificial Sequence: Synthetic oligonucleotide
acguacacauucaccugga

SEQ ID NO: 527162 - RNA, 19 nt, Artificial Sequence
  Description of Artificial Sequence: Synthetic oligonucleotide
ucaccuggagcaggucgcu

SEQ ID NO: 527163 - RNA, 19 nt, Artificial Sequence
  Description of Artificial Sequence: Synthetic oligonucleotide
caguucggcaaaccaagua

SEQ ID NO: 527164 - RNA, 19 nt, Artificial Sequence
  Description of Artificial Sequence: Synthetic oligonucleotide
acucgucaauggugagcug

SEQ ID NO: 527165 - RNA, 19 nt, Artificial Sequence
  Description of Artificial Sequence: Synthetic oligonucleotide
ggucgucgaugccacugag

SEQ ID NO: 527166 - RNA, 19 nt, Artificial Sequence
  Description of Artificial Sequence: Synthetic oligonucleotide
acgcaaggcucuccauccu

SEQ ID NO: 527167 - RNA, 19 nt, Artificial Sequence
  Description of Artificial Sequence: Synthetic oligonucleotide
ggcaaggggccaaguaaag

SEQ ID NO: 527168 - RNA, 19 nt, Artificial Sequence
  Description of Artificial Sequence: Synthetic oligonucleotide
uccucaccggagccauccu

SEQ ID NO: 527169 - RNA, 19 nt, Artificial Sequence
  Description of Artificial Sequence: Synthetic oligonucleotide
ccgcccucgggucaggugc

SEQ ID NO: 527170 - RNA, 19 nt, Artificial Sequence
  Description of Artificial Sequence: Synthetic oligonucleotide
acuggccgaccgccgacga

SEQ ID NO: 527171 - RNA, 19 nt, Artificial Sequence
  Description of Artificial Sequence: Synthetic oligonucleotide
guccagcgacacgaacugg

SEQ ID NO: 527172 - RNA, 19 nt, Artificial Sequence
  Description of Artificial Sequence: Synthetic oligonucleotide
gaccauucuguagcguucu

SEQ ID NO: 527173 - RNA, 19 nt, Artificial Sequence
  Description of Artificial Sequence: Synthetic oligonucleotide
cccaucugaccccuauaag

SEQ ID NO: 527174 - RNA, 19 nt, Artificial Sequence
  Description of Artificial Sequence: Synthetic oligonucleotide
acggccugugugcauccaa

SEQ ID NO: 527175 - RNA, 19 nt, Artificial Sequence
  Description of Artificial Sequence: Synthetic oligonucleotide
ugucaagcacgggucuaua

SEQ ID NO: 527176 - RNA, 19 nt, Artificial Sequence
  Description of Artificial Sequence: Synthetic oligonucleotide
cacgggucuauagccggug

SEQ ID NO: 527177 - RNA, 19 nt, Artificial Sequence
  Description of Artificial Sequence: Synthetic oligonucleotide
caugcccgugagccguggc

SEQ ID NO: 527178 - RNA, 19 nt, Artificial Sequence
  Description of Artificial Sequence: Synthetic oligonucleotide
uggauguggcgccgaccau

SEQ ID NO: 527179 - RNA, 19 nt, Artificial Sequence
  Description of Artificial Sequence: Synthetic oligonucleotide
ugaccacacugaugaccuc

SEQ ID NO: 527180 - RNA, 19 nt, Artificial Sequence
  Description of Artificial Sequence: Synthetic oligonucleotide
  modified_base (2)..(2): a, c, u, g, unknown or other
cnccuuucccaaguucaca

SEQ ID NO: 527181 - RNA, 19 nt, Artificial Sequence
  Description of Artificial Sequence: Synthetic oligonucleotide
cugaccccuauaagacaga

SEQ ID NO: 527182 - RNA, 19 nt, Artificial Sequence
  Description of Artificial Sequence: Synthetic oligonucleotide
cagaacgggcugggugugg

SEQ ID NO: 527183 - RNA, 19 nt, Artificial Sequence
  Description of Artificial Sequence: Synthetic oligonucleotide
gguuggagugucuucgaau

SEQ ID NO: 527184 - RNA, 19 nt, Artificial Sequence
  Description of Artificial Sequence: Synthetic oligonucleotide
gggccaaguaaagacucca

SEQ ID NO: 527185 - RNA, 19 nt, Artificial Sequence
  Description of Artificial Sequence: Synthetic oligonucleotide
uggcucccggcguuugcaa

SEQ ID NO: 527186 - RNA, 19 nt, Artificial Sequence
  Description of Artificial Sequence: Synthetic oligonucleotide
agauacgcuuggaguccag

SEQ ID NO: 527187 - RNA, 19 nt, Artificial Sequence
  Description of Artificial Sequence: Synthetic oligonucleotide
cuucgucaggaugguacga

SEQ ID NO: 527188 - RNA, 19 nt, Artificial Sequence
  Description of Artificial Sequence: Synthetic oligonucleotide
cuuugacgguucuccggaa

SEQ ID NO: 527189 - RNA, 19 nt, Artificial Sequence
  Description of Artificial Sequence: Synthetic oligonucleotide
acgguucuccggaagucau

SEQ ID NO: 527190 - RNA, 19 nt, Artificial Sequence
  Description of Artificial Sequence: Synthetic oligonucleotide
ggcucccggcguuugcaag

SEQ ID NO: 527191 - RNA, 19 nt, Artificial Sequence
  Description of Artificial Sequence: Synthetic oligonucleotide
gucgucgaugccacugaga

SEQ ID NO: 527192 - RNA, 19 nt, Artificial Sequence
  Description of Artificial Sequence: Synthetic oligonucleotide
cucccggcguuugcaagac

SEQ ID NO: 527193 - RNA, 19 nt, Artificial Sequence
  Description of Artificial Sequence: Synthetic oligonucleotide
guguacgagggagggucac

SEQ ID NO: 527194 - RNA, 19 nt, Artificial Sequence
  Description of Artificial Sequence: Synthetic oligonucleotide
cguccagcgacacgaacug

SEQ ID NO: 527195 - RNA, 19 nt, Artificial Sequence
  Description of Artificial Sequence: Synthetic oligonucleotide
gggcugugaguccucccug

SEQ ID NO: 527196 - RNA, 19 nt, Artificial Sequence
  Description of Artificial Sequence: Synthetic oligonucleotide
accgccuagguugggguuu

SEQ ID NO: 527197 - RNA, 19 nt, Artificial Sequence
  Description of Artificial Sequence: Synthetic oligonucleotide
cacauggaauccaccgccu

SEQ ID NO: 527198 - RNA, 19 nt, Artificial Sequence
  Description of Artificial Sequence: Synthetic oligonucleotide
cauucaccuggagcagguc

SEQ ID NO: 527199 - RNA, 19 nt, Artificial Sequence
  Description of Artificial Sequence: Synthetic oligonucleotide
ggccugugugcauccaauc

SEQ ID NO: 527200 - RNA, 19 nt, Artificial Sequence
  Description of Artificial Sequence: Synthetic oligonucleotide
ccuauaagacagauacgcu

SEQ ID NO: 527201 - RNA, 19 nt, Artificial Sequence
  Description of Artificial Sequence: Synthetic oligonucleotide
guacgacacagggccacuc

SEQ ID NO: 527202 - RNA, 19 nt, Artificial Sequence
  Description of Artificial Sequence: Synthetic oligonucleotide
gguggauguggcgccgacc

SEQ ID NO: 527203 - RNA, 19 nt, Artificial Sequence
  Description of Artificial Sequence: Synthetic oligonucleotide
cuggccgaccgccgacgag

SEQ ID NO: 527204 - RNA, 19 nt, Artificial Sequence
  Description of Artificial Sequence: Synthetic oligonucleotide
ccacuuaguagccgucauc

SEQ ID NO: 527205 - RNA, 19 nt, Artificial Sequence
  Description of Artificial Sequence: Synthetic oligonucleotide
ggcugcaaccaaaagugcu

SEQ ID NO: 527206 - RNA, 19 nt, Artificial Sequence
  Description of Artificial Sequence: Synthetic oligonucleotide
cagauacgcuuggagucca

SEQ ID NO: 527207 - RNA, 19 nt, Artificial Sequence
  Description of Artificial Sequence: Synthetic oligonucleotide
cgggucuauagccggugcg

SEQ ID NO: 527208 - RNA, 19 nt, Artificial Sequence
  Description of Artificial Sequence: Synthetic oligonucleotide
gaccccuauaagacagaua

SEQ ID NO: 527209 - RNA, 19 nt, Artificial Sequence
  Description of Artificial Sequence: Synthetic oligonucleotide
ucccggcguuugcaagacu

SEQ ID NO: 527210 - RNA, 19 nt, Artificial Sequence
  Description of Artificial Sequence: Synthetic oligonucleotide
gcucccggcguuugcaaga

SEQ ID NO: 527211 - RNA, 19 nt, Artificial Sequence
  Description of Artificial Sequence: Synthetic oligonucleotide
ccgaccgccgacgagccgc

SEQ ID NO: 527212 - RNA, 19 nt, Artificial Sequence
  Description of Artificial Sequence: Synthetic oligonucleotide
gcuuuuacccgggcuucug

SEQ ID NO: 527213 - RNA, 19 nt, Artificial Sequence
  Description of Artificial Sequence: Synthetic oligonucleotide
ccauuuuccgcccucgggu

SEQ ID NO: 527214 - RNA, 19 nt, Artificial Sequence
  Description of Artificial Sequence: Synthetic oligonucleotide
cucaccggagccauccuuu

SEQ ID NO: 527215 - RNA, 19 nt, Artificial Sequence
  Description of Artificial Sequence: Synthetic oligonucleotide
augguacgacacagggcca

SEQ ID NO: 527216 - RNA, 19 nt, Artificial Sequence
  Description of Artificial Sequence: Synthetic oligonucleotide
ggacaccucaugguucuuc

SEQ ID NO: 527217 - RNA, 19 nt, Artificial Sequence
  Description of Artificial Sequence: Synthetic oligonucleotide
gccuagguugggguuuugc

SEQ ID NO: 527218 - RNA, 19 nt, Artificial Sequence
  Description of Artificial Sequence: Synthetic oligonucleotide
cucggcuuuuacccgggcu

SEQ ID NO: 527219 - RNA, 19 nt, Artificial Sequence
  Description of Artificial Sequence: Synthetic oligonucleotide
ccucgccaagagcaggaac

SEQ ID NO: 527220 - RNA, 19 nt, Artificial Sequence
  Description of Artificial Sequence: Synthetic oligonucleotide
caaaucaagcaggguggua

SEQ ID NO: 527221 - RNA, 19 nt, Artificial Sequence
  Description of Artificial Sequence: Synthetic oligonucleotide
guacgagggagggucacau

SEQ ID NO: 527222 - RNA, 19 nt, Artificial Sequence
  Description of Artificial Sequence: Synthetic oligonucleotide
ccgggcuucugacucguuc

SEQ ID NO: 527223 - RNA, 19 nt, Artificial Sequence
  Description of Artificial Sequence: Synthetic oligonucleotide
ccaggguaggggaacuuaa

SEQ ID NO: 527224 - RNA, 19 nt, Artificial Sequence
  Description of Artificial Sequence: Synthetic oligonucleotide
aucaugcccgugagccgug

SEQ ID NO: 527225 - RNA, 19 nt, Artificial Sequence
  Description of Artificial Sequence: Synthetic oligonucleotide
caccggagccauccuuuga

SEQ ID NO: 527226 - RNA, 19 nt, Artificial Sequence
  Description of Artificial Sequence: Synthetic oligonucleotide
cauacgcagcuuccucugu

SEQ ID NO: 527227 - RNA, 19 nt, Artificial Sequence
  Description of Artificial Sequence: Synthetic oligonucleotide
ccggcguuugcaagacuuc

SEQ ID NO: 527228 - RNA, 19 nt, Artificial Sequence
  Description of Artificial Sequence: Synthetic oligonucleotide
cugacugguuggagugucu

SEQ ID NO: 527229 - RNA, 19 nt, Artificial Sequence
  Description of Artificial Sequence: Synthetic oligonucleotide
ccuccgugacagcuucuug

SEQ ID NO: 527230 - RNA, 19 nt, Artificial Sequence
  Description of Artificial Sequence: Synthetic oligonucleotide
cccacaaaucaugcccgug

SEQ ID NO: 527231 - RNA, 19 nt, Artificial Sequence
  Description of Artificial Sequence: Synthetic oligonucleotide
  modified_base (6)..(6): a, c, u, g, unknown or other
gugacnccuuucccaaguu

SEQ ID NO: 527232 - RNA, 19 nt, Artificial Sequence
  Description of Artificial Sequence: Synthetic oligonucleotide
uggcgccgaccauucugua

SEQ ID NO: 527233 - RNA, 19 nt, Artificial Sequence
  Description of Artificial Sequence: Synthetic oligonucleotide
gugcguugaugcagagcuc

SEQ ID NO: 527234 - RNA, 19 nt, Artificial Sequence
  Description of Artificial Sequence: Synthetic oligonucleotide
gcacucccggauggagucg

SEQ ID NO: 527235 - RNA, 19 nt, Artificial Sequence
  Description of Artificial Sequence: Synthetic oligonucleotide
gccggcuguuuucuagcuc

SEQ ID NO: 527236 - RNA, 19 nt, Artificial Sequence
  Description of Artificial Sequence: Synthetic oligonucleotide
gggucuauagccggugcgu

SEQ ID NO: 527237 - RNA, 19 nt, Artificial Sequence
  Description of Artificial Sequence: Synthetic oligonucleotide
ggucucccguuccuucgga

SEQ ID NO: 527238 - RNA, 19 nt, Artificial Sequence
  Description of Artificial Sequence: Synthetic oligonucleotide
auccaccgccuagguuggg

SEQ ID NO: 527239 - RNA, 19 nt, Artificial Sequence
  Description of Artificial Sequence: Synthetic oligonucleotide
ggauggagucggagaugcc

SEQ ID NO: 527240 - RNA, 19 nt, Artificial Sequence
  Description of Artificial Sequence: Synthetic oligonucleotide
agcgaucacaugggccauu

SEQ ID NO: 527241 - RNA, 19 nt, Artificial Sequence
  Description of Artificial Sequence: Synthetic oligonucleotide
guccccacuuggggaggag

SEQ ID NO: 527242 - RNA, 19 nt, Artificial Sequence
  Description of Artificial Sequence: Synthetic oligonucleotide
  modified_base (14)..(14): a, c, u, g, unknown or other
cugugcucgugacnccuuu

SEQ ID NO: 527243 - RNA, 19 nt, Artificial Sequence
  Description of Artificial Sequence: Synthetic oligonucleotide
cgucuuccccagcacguac

SEQ ID NO: 527244 - RNA, 19 nt, Artificial Sequence
  Description of Artificial Sequence: Synthetic oligonucleotide
cagcaccguccagcgacac

SEQ ID NO: 527245 - RNA, 19 nt, Artificial Sequence
  Description of Artificial Sequence: Synthetic oligonucleotide
  modified_base (7)..(7): a, c, u, g, unknown or other
cgugacnccuuucccaagu

SEQ ID NO: 527246 - RNA, 19 nt, Artificial Sequence
  Description of Artificial Sequence: Synthetic oligonucleotide
gugguggauguggcgccga

SEQ ID NO: 527247 - RNA, 19 nt, Artificial Sequence
  Description of Artificial Sequence: Synthetic oligonucleotide
gccggugcguugaugcaga

SEQ ID NO: 527248 - RNA, 19 nt, Artificial Sequence
  Description of Artificial Sequence: Synthetic oligonucleotide
gcccgugagccguggcccc

SEQ ID NO: 527249 - RNA, 19 nt, Artificial Sequence
  Description of Artificial Sequence: Synthetic oligonucleotide
ccggagccauccuuugaca

SEQ ID NO: 527250 - RNA, 19 nt, Artificial Sequence
  Description of Artificial Sequence: Synthetic oligonucleotide
cccgaagguacucagcauu

SEQ ID NO: 527251 - RNA, 19 nt, Artificial Sequence
  Description of Artificial Sequence: Synthetic oligonucleotide
ggcuacucccacccuugcu

SEQ ID NO: 527252 - RNA, 19 nt, Artificial Sequence
  Description of Artificial Sequence: Synthetic oligonucleotide
ggccgaccgccgacgagcc

SEQ ID NO: 527253 - RNA, 19 nt, Artificial Sequence
  Description of Artificial Sequence: Synthetic oligonucleotide
gcgacacgaacuggccgac

SEQ ID NO: 527254 - RNA, 19 nt, Artificial Sequence
  Description of Artificial Sequence: Synthetic oligonucleotide
ggauguggcgccgaccauu

SEQ ID NO: 527255 - RNA, 19 nt, Artificial Sequence
  Description of Artificial Sequence: Synthetic oligonucleotide
ccgaccauucuguagcguu

SEQ ID NO: 527256 - RNA, 19 nt, Artificial Sequence
  Description of Artificial Sequence: Synthetic oligonucleotide
cugacgcaaggcucuccau

SEQ ID NO: 527257 - RNA, 19 nt, Artificial Sequence
  Description of Artificial Sequence: Synthetic oligonucleotide
caccguccagcgacacgaa

SEQ ID NO: 527258 - RNA, 19 nt, Artificial Sequence
  Description of Artificial Sequence: Synthetic oligonucleotide
ccggugcguugaugcagag

SEQ ID NO: 527259 - RNA, 19 nt, Artificial Sequence
  Description of Artificial Sequence: Synthetic oligonucleotide
cgacggccugugugcaucc

SEQ ID NO: 527260 - RNA, 19 nt, Artificial Sequence
  Description of Artificial Sequence: Synthetic oligonucleotide
gccgaccgccgacgagccg

SEQ ID NO: 527261 - RNA, 19 nt, Artificial Sequence
  Description of Artificial Sequence: Synthetic oligonucleotide
ggccggcuguuuucuagcu

SEQ ID NO: 527262 - RNA, 19 nt, Artificial Sequence
  Description of Artificial Sequence: Synthetic oligonucleotide
ccguaaucauugccaccca

SEQ ID NO: 527263 - RNA, 19 nt, Artificial Sequence
  Description of Artificial Sequence: Synthetic oligonucleotide
cccggcguuugcaagacuu

SEQ ID NO: 527264 - RNA, 19 nt, Artificial Sequence
  Description of Artificial Sequence: Synthetic oligonucleotide
cgaacuggccgaccgccga

SEQ ID NO: 527265 - RNA, 19 nt, Artificial Sequence
  Description of Artificial Sequence: Synthetic oligonucleotide
gguacgacacagggccacu

SEQ ID NO: 527266 - RNA, 19 nt, Artificial Sequence
  Description of Artificial Sequence: Synthetic oligonucleotide
caaggucgucgaugccacu

SEQ ID NO: 527267 - RNA, 19 nt, Artificial Sequence
  Description of Artificial Sequence: Synthetic oligonucleotide
ggucuauagccggugcguu

SEQ ID NO: 527268 - RNA, 19 nt, Artificial Sequence
  Description of Artificial Sequence: Synthetic oligonucleotide
cccgguaaaaguccuuguu

SEQ ID NO: 527269 - RNA, 19 nt, Artificial Sequence
  Description of Artificial Sequence: Synthetic oligonucleotide
cggugcguugaugcagagc

SEQ ID NO: 527270 - RNA, 19 nt, Artificial Sequence
  Description of Artificial Sequence: Synthetic oligonucleotide
cuauagccggugcguugau

SEQ ID NO: 527271 - RNA, 19 nt, Artificial Sequence
  Description of Artificial Sequence: Synthetic oligonucleotide
ggcguuugcaagacuucuu

SEQ ID NO: 527272 - RNA, 19 nt, Artificial Sequence
  Description of Artificial Sequence: Synthetic oligonucleotide
cggcuuuuacccgggcuuc

SEQ ID NO: 527273 - RNA, 19 nt, Artificial Sequence
  Description of Artificial Sequence: Synthetic oligonucleotide
gccuuuggccggcuguuuu

SEQ ID NO: 527274 - RNA, 19 nt, Artificial Sequence
  Description of Artificial Sequence: Synthetic oligonucleotide
caccgccuagguugggguu

SEQ ID NO: 527275 - RNA, 19 nt, Artificial Sequence
  Description of Artificial Sequence: Synthetic oligonucleotide
cguaaucauugccacccau

SEQ ID NO: 527276 - RNA, 19 nt, Artificial Sequence
  Description of Artificial Sequence: Synthetic oligonucleotide
ccguuccuucggagccgcc

SEQ ID NO: 527277 - RNA, 19 nt, Artificial Sequence
  Description of Artificial Sequence: Synthetic oligonucleotide
ccaccgccuagguuggggu

SEQ ID NO: 527278 - RNA, 19 nt, Artificial Sequence
  Description of Artificial Sequence: Synthetic oligonucleotide
gggcgacggccugugugca

SEQ ID NO: 527279 - RNA, 19 nt, Artificial Sequence
  Description of Artificial Sequence: Synthetic oligonucleotide
cggagaugcccaggcuggc

SEQ ID NO: 527280 - RNA, 19 nt, Artificial Sequence
  Description of Artificial Sequence: Synthetic oligonucleotide
ccgccgcuguucuccacga

SEQ ID NO: 527281 - RNA, 19 nt, Artificial Sequence
  Description of Artificial Sequence: Synthetic oligonucleotide
gcgaucacaugggccauuu

SEQ ID NO: 527282 - RNA, 19 nt, Artificial Sequence
  Description of Artificial Sequence: Synthetic oligonucleotide
ccgugagccguggccccag

SEQ ID NO: 527283 - RNA, 19 nt, Artificial Sequence
  Description of Artificial Sequence: Synthetic oligonucleotide
cgauagccuccccagcggu

SEQ ID NO: 527284 - RNA, 19 nt, Artificial Sequence
  Description of Artificial Sequence: Synthetic oligonucleotide
gcacgggucuauagccggu

SEQ ID NO: 527285 - RNA, 19 nt, Artificial Sequence
  Description of Artificial Sequence: Synthetic oligonucleotide
gccgaccauucuguagcgu

SEQ ID NO: 527286 - RNA, 19 nt, Artificial Sequence
  Description of Artificial Sequence: Synthetic oligonucleotide
ccgaugcuugucccagggu

SEQ ID NO: 527287 - RNA, 19 nt, Artificial Sequence
  Description of Artificial Sequence: Synthetic oligonucleotide
ccgcauccacaacucggcu

SEQ ID NO: 527288 - RNA, 19 nt, Artificial Sequence
  Description of Artificial Sequence: Synthetic oligonucleotide
ccucggacacgaugauguu

SEQ ID NO: 527289 - RNA, 19 nt, Artificial Sequence
  Description of Artificial Sequence: Synthetic oligonucleotide
cccucgccaagagcaggaa

SEQ ID NO: 527290 - RNA, 19 nt, Artificial Sequence
  Description of Artificial Sequence: Synthetic oligonucleotide
cagcggugcuggccaggau

SEQ ID NO: 527291 - RNA, 19 nt, Artificial Sequence
  Description of Artificial Sequence: Synthetic oligonucleotide
cgcccucgggucaggugcu

SEQ ID NO: 527292 - RNA, 19 nt, Artificial Sequence
  Description of Artificial Sequence: Synthetic oligonucleotide
ccgccuagguugggguuuu

SEQ ID NO: 527293 - RNA, 19 nt, Artificial Sequence
  Description of Artificial Sequence: Synthetic oligonucleotide
cccgggcuucugacucguu

SEQ ID NO: 527294 - RNA, 19 nt, Artificial Sequence
  Description of Artificial Sequence: Synthetic oligonucleotide
aaauaaguuacuuggaaac

SEQ ID NO: 527295 - RNA, 19 nt, Artificial Sequence
  Description of Artificial Sequence: Synthetic oligonucleotide
uaauaaaugacaaaggccc

SEQ ID NO: 527296 - RNA, 19 nt, Artificial Sequence
  Description of Artificial Sequence: Synthetic oligonucleotide
aaugucugcaccucaaagc

SEQ ID NO: 527297 - RNA, 19 nt, Artificial Sequence
  Description of Artificial Sequence: Synthetic oligonucleotide
uauauauuuauauauauau

SEQ ID NO: 527298 - RNA, 19 nt, Artificial Sequence
  Description of Artificial Sequence: Synthetic oligonucleotide
uuuauauauauauauauaa

SEQ ID NO: 527299 - RNA, 19 nt, Artificial Sequence
  Description of Artificial Sequence: Synthetic oligonucleotide
uauauauauauuuauauau

SEQ ID NO: 527300 - RNA, 19 nt, Artificial Sequence
  Description of Artificial Sequence: Synthetic oligonucleotide
uauauuuauauauauauau

SEQ ID NO: 527301 - RNA, 19 nt, Artificial Sequence
  Description of Artificial Sequence: Synthetic oligonucleotide
uauauauauauauauaaaa

SEQ ID NO: 527302 - RNA, 19 nt, Artificial Sequence
  Description of Artificial Sequence: Synthetic oligonucleotide
agaauuaugggccagcuag

SEQ ID NO: 527303 - RNA, 19 nt, Artificial Sequence
  Description of Artificial Sequence: Synthetic oligonucleotide
uauauauauauauuuauau

SEQ ID NO: 527304 - RNA, 19 nt, Artificial Sequence
  Description of Artificial Sequence: Synthetic oligonucleotide
aaagauuuauuuucucuuc

SEQ ID NO: 527305 - RNA, 19 nt, Artificial Sequence
  Description of Artificial Sequence: Synthetic oligonucleotide
ucucuugcagucuagaggg

SEQ ID NO: 527306 - RNA, 19 nt, Artificial Sequence
  Description of Artificial Sequence: Synthetic oligonucleotide
uauuuauauauauauauau

SEQ ID NO: 527307 - RNA, 19 nt, Artificial Sequence
  Description of Artificial Sequence: Synthetic oligonucleotide
uuuguauauauauauauuu

SEQ ID NO: 527308 - RNA, 19 nt, Artificial Sequence
  Description of Artificial Sequence: Synthetic oligonucleotide
aaaaccaucccacaucaug

SEQ ID NO: 527309 - RNA, 19 nt, Artificial Sequence
  Description of Artificial Sequence: Synthetic oligonucleotide
uguauaaugugcugggagg

SEQ ID NO: 527310 - RNA, 19 nt, Artificial Sequence
  Description of Artificial Sequence: Synthetic oligonucleotide
aacuucaagauucaaggcu

SEQ ID NO: 527311 - RNA, 19 nt, Artificial Sequence
  Description of Artificial Sequence: Synthetic oligonucleotide
uauauauauuuauauauau

SEQ ID NO: 527312 - RNA, 19 nt, Artificial Sequence
  Description of Artificial Sequence: Synthetic oligonucleotide
ugcauaguuucauagauga

SEQ ID NO: 527313 - RNA, 19 nt, Artificial Sequence
  Description of Artificial Sequence: Synthetic oligonucleotide
uuauauauauauauauaaa

SEQ ID NO: 527314 - RNA, 19 nt, Artificial Sequence
  Description of Artificial Sequence: Synthetic oligonucleotide
acgccaauggaacaaaagc

SEQ ID NO: 527315 - RNA, 19 nt, Artificial Sequence
  Description of Artificial Sequence: Synthetic oligonucleotide
agugcaaaaucucaggcag

SEQ ID NO: 527316 - RNA, 19 nt, Artificial Sequence
  Description of Artificial Sequence: Synthetic oligonucleotide
ugaacagcaacacugcccc

SEQ ID NO: 527317 - RNA, 19 nt, Artificial Sequence
  Description of Artificial Sequence: Synthetic oligonucleotide
uguauauauauauauuuau

SEQ ID NO: 527318 - RNA, 19 nt, Artificial Sequence
  Description of Artificial Sequence: Synthetic oligonucleotide
ugucguaugucucaaccgg

SEQ ID NO: 527319 - RNA, 19 nt, Artificial Sequence
  Description of Artificial Sequence: Synthetic oligonucleotide
uuacuuggaaacaggaaag

SEQ ID NO: 527320 - RNA, 19 nt, Artificial Sequence
  Description of Artificial Sequence: Synthetic oligonucleotide
uuuacagcucacauugggg

SEQ ID NO: 527321 - RNA, 19 nt, Artificial Sequence
  Description of Artificial Sequence: Synthetic oligonucleotide
aguuuguauauauauauau

SEQ ID NO: 527322 - RNA, 19 nt, Artificial Sequence
  Description of Artificial Sequence: Synthetic oligonucleotide
acagauuugugauugucuc

SEQ ID NO: 527323 - RNA, 19 nt, Artificial Sequence
  Description of Artificial Sequence: Synthetic oligonucleotide
uuaugggccagcuagcugc

SEQ ID NO: 527324 - RNA, 19 nt, Artificial Sequence
  Description of Artificial Sequence: Synthetic oligonucleotide
cuugccugaauguacaaag

SEQ ID NO: 527325 - RNA, 19 nt, Artificial Sequence
  Description of Artificial Sequence: Synthetic oligonucleotide
uaaguagugcaaaaucuca

SEQ ID NO: 527326 - RNA, 19 nt, Artificial Sequence
  Description of Artificial Sequence: Synthetic oligonucleotide
uggaaaguuuccuaggaug

SEQ ID NO: 527327 - RNA, 19 nt, Artificial Sequence
  Description of Artificial Sequence: Synthetic oligonucleotide
auggagcaggacuagagac

SEQ ID NO: 527328 - RNA, 19 nt, Artificial Sequence
  Description of Artificial Sequence: Synthetic oligonucleotide
aagaagugacugauaaagc

SEQ ID NO: 527329 - RNA, 19 nt, Artificial Sequence
  Description of Artificial Sequence: Synthetic oligonucleotide
aaagccucaucccaccaag

SEQ ID NO: 527330 - RNA, 19 nt, Artificial Sequence
  Description of Artificial Sequence: Synthetic oligonucleotide
uccauucuaacucccaggc

SEQ ID NO: 527331 - RNA, 19 nt, Artificial Sequence
  Description of Artificial Sequence: Synthetic oligonucleotide
agaaauaaccagcagcccu

SEQ ID NO: 527332 - RNA, 19 nt, Artificial Sequence
  Description of Artificial Sequence: Synthetic oligonucleotide
aaugaauguucaaagccag

SEQ ID NO: 527333 - RNA, 19 nt, Artificial Sequence
  Description of Artificial Sequence: Synthetic oligonucleotide
uuguauauauauauauuua

SEQ ID NO: 527334 - RNA, 19 nt, Artificial Sequence
  Description of Artificial Sequence: Synthetic oligonucleotide
auauauauauauuuauaua

SEQ ID NO: 527335 - RNA, 19 nt, Artificial Sequence
  Description of Artificial Sequence: Synthetic oligonucleotide
uaaccagcagcccucacag

SEQ ID NO: 527336 - RNA, 19 nt, Artificial Sequence
  Description of Artificial Sequence: Synthetic oligonucleotide
gaugauacccugcaauagc

SEQ ID NO: 527337 - RNA, 19 nt, Artificial Sequence
  Description of Artificial Sequence: Synthetic oligonucleotide
cauagaugaaugaauguuc

SEQ ID NO: 527338 - RNA, 19 nt, Artificial Sequence
  Description of Artificial Sequence: Synthetic oligonucleotide
uuuuaucacuuaucguggg

SEQ ID NO: 527339 - RNA, 19 nt, Artificial Sequence
  Description of Artificial Sequence: Synthetic oligonucleotide
acauucuugucacaagcuc

SEQ ID NO: 527340 - RNA, 19 nt, Artificial Sequence
  Description of Artificial Sequence: Synthetic oligonucleotide
guuuaaguagugcaaaauc

SEQ ID NO: 527341 - RNA, 19 nt, Artificial Sequence
  Description of Artificial Sequence: Synthetic oligonucleotide
caagauucaaggcucuucc

SEQ ID NO: 527342 - RNA, 19 nt, Artificial Sequence
  Description of Artificial Sequence: Synthetic oligonucleotide
cuuuacagcucacauuggg

SEQ ID NO: 527343 - RNA, 19 nt, Artificial Sequence
  Description of Artificial Sequence: Synthetic oligonucleotide
ugacugauaaagcuggguc

SEQ ID NO: 527344 - RNA, 19 nt, Artificial Sequence
  Description of Artificial Sequence: Synthetic oligonucleotide
uuacagaagggaagaauca

SEQ ID NO: 527345 - RNA, 19 nt, Artificial Sequence
  Description of Artificial Sequence: Synthetic oligonucleotide
gauucaaggcucuuccuug

SEQ ID NO: 527346 - RNA, 19 nt, Artificial Sequence
  Description of Artificial Sequence: Synthetic oligonucleotide
uuaucacuuaucgugggag

SEQ ID NO: 527347 - RNA, 19 nt, Artificial Sequence
  Description of Artificial Sequence: Synthetic oligonucleotide
agccugucuauguauaggg

SEQ ID NO: 527348 - RNA, 19 nt, Artificial Sequence
  Description of Artificial Sequence: Synthetic oligonucleotide
ucuauguauagggaggggc

SEQ ID NO: 527349 - RNA, 19 nt, Artificial Sequence
  Description of Artificial Sequence: Synthetic oligonucleotide
gaagguaacaaagggauga

SEQ ID NO: 527350 - RNA, 19 nt, Artificial Sequence
  Description of Artificial Sequence: Synthetic oligonucleotide
auucaaggcucuuccuugc

SEQ ID NO: 527351 - RNA, 19 nt, Artificial Sequence
  Description of Artificial Sequence: Synthetic oligonucleotide
gaaaacaaugcugggcagg

SEQ ID NO: 527352 - RNA, 19 nt, Artificial Sequence
  Description of Artificial Sequence: Synthetic oligonucleotide
acuggauucaacagcuugc

SEQ ID NO: 527353 - RNA, 19 nt, Artificial Sequence
  Description of Artificial Sequence: Synthetic oligonucleotide
acuucaagauucaaggcuc

SEQ ID NO: 527354 - RNA, 19 nt, Artificial Sequence
  Description of Artificial Sequence: Synthetic oligonucleotide
gucuagaggguaaagacag

SEQ ID NO: 527355 - RNA, 19 nt, Artificial Sequence
  Description of Artificial Sequence: Synthetic oligonucleotide
agcaggacuagagacaggg

SEQ ID NO: 527356 - RNA, 19 nt, Artificial Sequence
  Description of Artificial Sequence: Synthetic oligonucleotide
guagugcaaaaucucaggc

SEQ ID NO: 527357 - RNA, 19 nt, Artificial Sequence
  Description of Artificial Sequence: Synthetic oligonucleotide
augaacagcaacacugccc

SEQ ID NO: 527358 - RNA, 19 nt, Artificial Sequence
  Description of Artificial Sequence: Synthetic oligonucleotide
cuaugaacagcaacacugc

SEQ ID NO: 527359 - RNA, 19 nt, Artificial Sequence
  Description of Artificial Sequence: Synthetic oligonucleotide
ugucuauguauagggaggg

SEQ ID NO: 527360 - RNA, 19 nt, Artificial Sequence
  Description of Artificial Sequence: Synthetic oligonucleotide
ugagggugcauauggagca

SEQ ID NO: 527361 - RNA, 19 nt, Artificial Sequence
  Description of Artificial Sequence: Synthetic oligonucleotide
aguacccagggguugaaag

SEQ ID NO: 527362 - RNA, 19 nt, Artificial Sequence
  Description of Artificial Sequence: Synthetic oligonucleotide
ucuucuugccugaauguac

SEQ ID NO: 527363 - RNA, 19 nt, Artificial Sequence
  Description of Artificial Sequence: Synthetic oligonucleotide
agagcaacgccaauggaac

SEQ ID NO: 527364 - RNA, 19 nt, Artificial Sequence
  Description of Artificial Sequence: Synthetic oligonucleotide
gaagguagucugcacacug

SEQ ID NO: 527365 - RNA, 19 nt, Artificial Sequence
  Description of Artificial Sequence: Synthetic oligonucleotide
uugccugaauguacaaagg

SEQ ID NO: 527366 - RNA, 19 nt, Artificial Sequence
  Description of Artificial Sequence: Synthetic oligonucleotide
aaggggauuucccacuugu

SEQ ID NO: 527367 - RNA, 19 nt, Artificial Sequence
  Description of Artificial Sequence: Synthetic oligonucleotide
aaggcaagcggguggacug

SEQ ID NO: 527368 - RNA, 19 nt, Artificial Sequence
  Description of Artificial Sequence: Synthetic oligonucleotide
ggagaaauaaccagcagcc

SEQ ID NO: 527369 - RNA, 19 nt, Artificial Sequence
  Description of Artificial Sequence: Synthetic oligonucleotide
uuuaucacuuaucguggga

SEQ ID NO: 527370 - RNA, 19 nt, Artificial Sequence
  Description of Artificial Sequence: Synthetic oligonucleotide
uucccuacuccaauguccc

SEQ ID NO: 527371 - RNA, 19 nt, Artificial Sequence
  Description of Artificial Sequence: Synthetic oligonucleotide
uaucccaccuccuucgagc

SEQ ID NO: 527372 - RNA, 19 nt, Artificial Sequence
  Description of Artificial Sequence: Synthetic oligonucleotide
aaaacaaugcugggcagga

SEQ ID NO: 527373 - RNA, 19 nt, Artificial Sequence
  Description of Artificial Sequence: Synthetic oligonucleotide
ugguaucccaccuccuucg

SEQ ID NO: 527374 - RNA, 19 nt, Artificial Sequence
  Description of Artificial Sequence: Synthetic oligonucleotide
ugauaaagcugggucauca

SEQ ID NO: 527375 - RNA, 19 nt, Artificial Sequence
  Description of Artificial Sequence: Synthetic oligonucleotide
ugugcuuacugucucccac

SEQ ID NO: 527376 - RNA, 19 nt, Artificial Sequence
  Description of Artificial Sequence: Synthetic oligonucleotide
gaagucagagccaucuacc

SEQ ID NO: 527377 - RNA, 19 nt, Artificial Sequence
  Description of Artificial Sequence: Synthetic oligonucleotide
ucccagaguacccaggggu

SEQ ID NO: 527378 - RNA, 19 nt, Artificial Sequence
  Description of Artificial Sequence: Synthetic oligonucleotide
cuuaucgugggagacuugc

SEQ ID NO: 527379 - RNA, 19 nt, Artificial Sequence
  Description of Artificial Sequence: Synthetic oligonucleotide
auaccuugcugccauauau

SEQ ID NO: 527380 - RNA, 19 nt, Artificial Sequence
  Description of Artificial Sequence: Synthetic oligonucleotide
  modified_base (14)..(14): a, c, u, g, unknown or other
accaagugcacucnggcuu

SEQ ID NO: 527381 - RNA, 19 nt, Artificial Sequence
  Description of Artificial Sequence: Synthetic oligonucleotide
aagccugucuauguauagg

SEQ ID NO: 527382 - RNA, 19 nt, Artificial Sequence
  Description of Artificial Sequence: Synthetic oligonucleotide
agagccaucuaccuuccug

SEQ ID NO: 527383 - RNA, 19 nt, Artificial Sequence
  Description of Artificial Sequence: Synthetic oligonucleotide
uguguggacaucaggcgcu

SEQ ID NO: 527384 - RNA, 19 nt, Artificial Sequence
  Description of Artificial Sequence: Synthetic oligonucleotide
uaugucucaaccggguuug

SEQ ID NO: 527385 - RNA, 19 nt, Artificial Sequence
  Description of Artificial Sequence: Synthetic oligonucleotide
auuuauauauauauauaua

SEQ ID NO: 527386 - RNA, 19 nt, Artificial Sequence
  Description of Artificial Sequence: Synthetic oligonucleotide
aucacuuaucgugggagac

SEQ ID NO: 527387 - RNA, 19 nt, Artificial Sequence
  Description of Artificial Sequence: Synthetic oligonucleotide
gauacccugcaauagcaga

SEQ ID NO: 527388 - RNA, 19 nt, Artificial Sequence
  Description of Artificial Sequence: Synthetic oligonucleotide
cugucguaugucucaaccg

SEQ ID NO: 527389 - RNA, 19 nt, Artificial Sequence
  Description of Artificial Sequence: Synthetic oligonucleotide
ugauacccugcaauagcag

SEQ ID NO: 527390 - RNA, 19 nt, Artificial Sequence
  Description of Artificial Sequence: Synthetic oligonucleotide
gaaggugcggggccggucg

SEQ ID NO: 527391 - RNA, 19 nt, Artificial Sequence
  Description of Artificial Sequence: Synthetic oligonucleotide
caaccuugcaacucaggag

SEQ ID NO: 527392 - RNA, 19 nt, Artificial Sequence
  Description of Artificial Sequence: Synthetic oligonucleotide
aauaaccagcagcccucac

SEQ ID NO: 527393 - RNA, 19 nt, Artificial Sequence
  Description of Artificial Sequence: Synthetic oligonucleotide
aauuaugggccagcuagcu

SEQ ID NO: 527394 - RNA, 19 nt, Artificial Sequence
  Description of Artificial Sequence: Synthetic oligonucleotide
uaguuucauagaugaauga

SEQ ID NO: 527395 - RNA, 19 nt, Artificial Sequence
  Description of Artificial Sequence: Synthetic oligonucleotide
aacgucccaacuucaagau

SEQ ID NO: 527396 - RNA, 19 nt, Artificial Sequence
  Description of Artificial Sequence: Synthetic oligonucleotide
uuucccagcacacaaccuu

SEQ ID NO: 527397 - RNA, 19 nt, Artificial Sequence
  Description of Artificial Sequence: Synthetic oligonucleotide
aacgccaauggaacaaaag

SEQ ID NO: 527398 - RNA, 19 nt, Artificial Sequence
  Description of Artificial Sequence: Synthetic oligonucleotide
aaguuacuuggaaacagga

SEQ ID NO: 527399 - RNA, 19 nt, Artificial Sequence
  Description of Artificial Sequence: Synthetic oligonucleotide
ucgagccugacauuuccag

SEQ ID NO: 527400 - RNA, 19 nt, Artificial Sequence
  Description of Artificial Sequence: Synthetic oligonucleotide
auauauauauuuauauaua

SEQ ID NO: 527401 - RNA, 19 nt, Artificial Sequence
  Description of Artificial Sequence: Synthetic oligonucleotide
ucggcguccagaucaauga

SEQ ID NO: 527402 - RNA, 19 nt, Artificial Sequence
  Description of Artificial Sequence: Synthetic oligonucleotide
auccucgccaccugauacc

SEQ ID NO: 527403 - RNA, 19 nt, Artificial Sequence
  Description of Artificial Sequence: Synthetic oligonucleotide
aacaaagggaugauacccu

SEQ ID NO: 527404 - RNA, 19 nt, Artificial Sequence
  Description of Artificial Sequence: Synthetic oligonucleotide
aguuucauagaugaaugaa

SEQ ID NO: 527405 - RNA, 19 nt, Artificial Sequence
  Description of Artificial Sequence: Synthetic oligonucleotide
gagucaacgucccaacuuc

SEQ ID NO: 527406 - RNA, 19 nt, Artificial Sequence
  Description of Artificial Sequence: Synthetic oligonucleotide
cuuccauucuaacucccag

SEQ ID NO: 527407 - RNA, 19 nt, Artificial Sequence
  Description of Artificial Sequence: Synthetic oligonucleotide
auauuuauauauauauaua

SEQ ID NO: 527408 - RNA, 19 nt, Artificial Sequence
  Description of Artificial Sequence: Synthetic oligonucleotide
uuuccuaggaugcccuagu

SEQ ID NO: 527409 - RNA, 19 nt, Artificial Sequence
  Description of Artificial Sequence: Synthetic oligonucleotide
uaucacuuaucgugggaga

SEQ ID NO: 527410 - RNA, 19 nt, Artificial Sequence
  Description of Artificial Sequence: Synthetic oligonucleotide
gagauucccuacuccaaug

SEQ ID NO: 527411 - RNA, 19 nt, Artificial Sequence
  Description of Artificial Sequence: Synthetic oligonucleotide
agggaugauacccugcaau

SEQ ID NO: 527412 - RNA, 19 nt, Artificial Sequence
  Description of Artificial Sequence: Synthetic oligonucleotide
uguugucugguaguguggc

SEQ ID NO: 527413 - RNA, 19 nt, Artificial Sequence
  Description of Artificial Sequence: Synthetic oligonucleotide
gacaucaggcgcugggaag

SEQ ID NO: 527414 - RNA, 19 nt, Artificial Sequence
  Description of Artificial Sequence: Synthetic oligonucleotide
auuaaauccaacagagcaa

SEQ ID NO: 527415 - RNA, 19 nt, Artificial Sequence
  Description of Artificial Sequence: Synthetic oligonucleotide
accggguuugcauccacuc

SEQ ID NO: 527416 - RNA, 19 nt, Artificial Sequence
  Description of Artificial Sequence: Synthetic oligonucleotide
auauauauuuauauauaua

SEQ ID NO: 527417 - RNA, 19 nt, Artificial Sequence
  Description of Artificial Sequence: Synthetic oligonucleotide
ugcuuacugucucccaccc

SEQ ID NO: 527418 - RNA, 19 nt, Artificial Sequence
  Description of Artificial Sequence: Synthetic oligonucleotide
caaugaugagauucccuac

SEQ ID NO: 527419 - RNA, 19 nt, Artificial Sequence
  Description of Artificial Sequence: Synthetic oligonucleotide
uugucugguaguguggcca

SEQ ID NO: 527420 - RNA, 19 nt, Artificial Sequence
  Description of Artificial Sequence: Synthetic oligonucleotide
aaacuccaggagaaauaac

SEQ ID NO: 527421 - RNA, 19 nt, Artificial Sequence
  Description of Artificial Sequence: Synthetic oligonucleotide
auauauuuauauauauaua

SEQ ID NO: 527422 - RNA, 19 nt, Artificial Sequence
  Description of Artificial Sequence: Synthetic oligonucleotide
aacuaccccacagccuccc

SEQ ID NO: 527423 - RNA, 19 nt, Artificial Sequence
  Description of Artificial Sequence: Synthetic oligonucleotide
guauauauauauauuuaua

SEQ ID NO: 527424 - RNA, 19 nt, Artificial Sequence
  Description of Artificial Sequence: Synthetic oligonucleotide
gauacaggaucagccagug

SEQ ID NO: 527425 - RNA, 19 nt, Artificial Sequence
  Description of Artificial Sequence: Synthetic oligonucleotide
cagaucggcguccagauca

SEQ ID NO: 527426 - RNA, 19 nt, Artificial Sequence
  Description of Artificial Sequence: Synthetic oligonucleotide
auuggggcucggcacgcgc

SEQ ID NO: 527427 - RNA, 19 nt, Artificial Sequence
  Description of Artificial Sequence: Synthetic oligonucleotide
agauucaaggcucuuccuu

SEQ ID NO: 527428 - RNA, 19 nt, Artificial Sequence
  Description of Artificial Sequence: Synthetic oligonucleotide
  modified_base (8)..(8): a, c, u, g, unknown or other
ugcacucnggcuugggugu

SEQ ID NO: 527429 - RNA, 19 nt, Artificial Sequence
  Description of Artificial Sequence: Synthetic oligonucleotide
uguuuucuagcuucagcua

SEQ ID NO: 527430 - RNA, 19 nt, Artificial Sequence
  Description of Artificial Sequence: Synthetic oligonucleotide
ucguaugucucaaccgggu

SEQ ID NO: 527431 - RNA, 19 nt, Artificial Sequence
  Description of Artificial Sequence: Synthetic oligonucleotide
ucaagauucaaggcucuuc

SEQ ID NO: 527432 - RNA, 19 nt, Artificial Sequence
  Description of Artificial Sequence: Synthetic oligonucleotide
ccugucuauguauagggag

SEQ ID NO: 527433 - RNA, 19 nt, Artificial Sequence
  Description of Artificial Sequence: Synthetic oligonucleotide
auuaugggccagcuagcug

SEQ ID NO: 527434 - RNA, 19 nt, Artificial Sequence
  Description of Artificial Sequence: Synthetic oligonucleotide
uuggguguauaaugugcug

SEQ ID NO: 527435 - RNA, 19 nt, Artificial Sequence
  Description of Artificial Sequence: Synthetic oligonucleotide
agagucaacgucccaacuu

SEQ ID NO: 527436 - RNA, 19 nt, Artificial Sequence
  Description of Artificial Sequence: Synthetic oligonucleotide
uccuaggaugcccuaguaa

SEQ ID NO: 527437 - RNA, 19 nt, Artificial Sequence
  Description of Artificial Sequence: Synthetic oligonucleotide
  modified_base (9)..(9): a, c, u, g, unknown or other
gugcacucnggcuugggug

SEQ ID NO: 527438 - RNA, 19 nt, Artificial Sequence
  Description of Artificial Sequence: Synthetic oligonucleotide
cucaaccggguuugcaucc

SEQ ID NO: 527439 - RNA, 19 nt, Artificial Sequence
  Description of Artificial Sequence: Synthetic oligonucleotide
ggacaucuuagagucaacg

SEQ ID NO: 527440 - RNA, 19 nt, Artificial Sequence
  Description of Artificial Sequence: Synthetic oligonucleotide
cugaauguacaaaggacaa

SEQ ID NO: 527441 - RNA, 19 nt, Artificial Sequence
  Description of Artificial Sequence: Synthetic oligonucleotide
auacccugcaauagcagag

SEQ ID NO: 527442 - RNA, 19 nt, Artificial Sequence
  Description of Artificial Sequence: Synthetic oligonucleotide
cuugcaacucaggagaaca

SEQ ID NO: 527443 - RNA, 19 nt, Artificial Sequence
  Description of Artificial Sequence: Synthetic oligonucleotide
uacagcucacauuggggcu

SEQ ID NO: 527444 - RNA, 19 nt, Artificial Sequence
  Description of Artificial Sequence: Synthetic oligonucleotide
aaggaguagcccaagugau

SEQ ID NO: 527445 - RNA, 19 nt, Artificial Sequence
  Description of Artificial Sequence: Synthetic oligonucleotide
agauuugugauugucucuu

SEQ ID NO: 527446 - RNA, 19 nt, Artificial Sequence
  Description of Artificial Sequence: Synthetic oligonucleotide
gaauuaugggccagcuagc

SEQ ID NO: 527447 - RNA, 19 nt, Artificial Sequence
  Description of Artificial Sequence: Synthetic oligonucleotide
uaucgugggagacuugcuu

SEQ ID NO: 527448 - RNA, 19 nt, Artificial Sequence
  Description of Artificial Sequence: Synthetic oligonucleotide
guacacuuuacagaaggga

SEQ ID NO: 527449 - RNA, 19 nt, Artificial Sequence
  Description of Artificial Sequence: Synthetic oligonucleotide
gagaaauaaccagcagccc

SEQ ID NO: 527450 - RNA, 19 nt, Artificial Sequence
  Description of Artificial Sequence: Synthetic oligonucleotide
caacgucccaacuucaaga

SEQ ID NO: 527451 - RNA, 19 nt, Artificial Sequence
  Description of Artificial Sequence: Synthetic oligonucleotide
caucccaccaagugcacuc

SEQ ID NO: 527452 - RNA, 19 nt, Artificial Sequence
  Description of Artificial Sequence: Synthetic oligonucleotide
cauccucgccaccugauac

SEQ ID NO: 527453 - RNA, 19 nt, Artificial Sequence
  Description of Artificial Sequence: Synthetic oligonucleotide
aguagcccaagugauggug

SEQ ID NO: 527454 - RNA, 19 nt, Artificial Sequence
  Description of Artificial Sequence: Synthetic oligonucleotide
acaagcucccuguuagccu

SEQ ID NO: 527455 - RNA, 19 nt, Artificial Sequence
  Description of Artificial Sequence: Synthetic oligonucleotide
uggauucaacagcuugcug

SEQ ID NO: 527456 - RNA, 19 nt, Artificial Sequence
  Description of Artificial Sequence: Synthetic oligonucleotide
aguaaagacaaaggggauu

SEQ ID NO: 527457 - RNA, 19 nt, Artificial Sequence
  Description of Artificial Sequence: Synthetic oligonucleotide
ugcucucaaacugucauuu

SEQ ID NO: 527458 - RNA, 19 nt, Artificial Sequence
  Description of Artificial Sequence: Synthetic oligonucleotide
agccucaucccaccaagug

SEQ ID NO: 527459 - RNA, 19 nt, Artificial Sequence
  Description of Artificial Sequence: Synthetic oligonucleotide
gcugccauauauuggcucc

SEQ ID NO: 527460 - RNA, 19 nt, Artificial Sequence
  Description of Artificial Sequence: Synthetic oligonucleotide
uagagucaacgucccaacu

SEQ ID NO: 527461 - RNA, 19 nt, Artificial Sequence
  Description of Artificial Sequence: Synthetic oligonucleotide
cacaagcucccuguuagcc

SEQ ID NO: 527462 - RNA, 19 nt, Artificial Sequence
  Description of Artificial Sequence: Synthetic oligonucleotide
ucucaaccggguuugcauc

SEQ ID NO: 527463 - RNA, 19 nt, Artificial Sequence
  Description of Artificial Sequence: Synthetic oligonucleotide
ggauucaacagcuugcugu

SEQ ID NO: 527464 - RNA, 19 nt, Artificial Sequence
  Description of Artificial Sequence: Synthetic oligonucleotide
aagcggguggacuggggca

SEQ ID NO: 527465 - RNA, 19 nt, Artificial Sequence
  Description of Artificial Sequence: Synthetic oligonucleotide
ggaggggaagguaacaaag

SEQ ID NO: 527466 - RNA, 19 nt, Artificial Sequence
  Description of Artificial Sequence: Synthetic oligonucleotide
ggcagguuuaaguagugca

SEQ ID NO: 527467 - RNA, 19 nt, Artificial Sequence
  Description of Artificial Sequence: Synthetic oligonucleotide
agguuuaaguagugcaaaa

SEQ ID NO: 527468 - RNA, 19 nt, Artificial Sequence
  Description of Artificial Sequence: Synthetic oligonucleotide
uuaucgugggagacuugcu

SEQ ID NO: 527469 - RNA, 19 nt, Artificial Sequence
  Description of Artificial Sequence: Synthetic oligonucleotide
aaauaaccagcagcccuca

SEQ ID NO: 527470 - RNA, 19 nt, Artificial Sequence
  Description of Artificial Sequence: Synthetic oligonucleotide
ugaauguacaaaggacaaa

SEQ ID NO: 527471 - RNA, 19 nt, Artificial Sequence
  Description of Artificial Sequence: Synthetic oligonucleotide
uccagaucggcguccagau

SEQ ID NO: 527472 - RNA, 19 nt, Artificial Sequence
  Description of Artificial Sequence: Synthetic oligonucleotide
aaugggauccaaggguaaa

SEQ ID NO: 527473 - RNA, 19 nt, Artificial Sequence
  Description of Artificial Sequence: Synthetic oligonucleotide
ucuuagagucaacguccca

SEQ ID NO: 527474 - RNA, 19 nt, Artificial Sequence
  Description of Artificial Sequence: Synthetic oligonucleotide
caccucaaagccucauccc

SEQ ID NO: 527475 - RNA, 19 nt, Artificial Sequence
  Description of Artificial Sequence: Synthetic oligonucleotide
acagcucacauuggggcuc

SEQ ID NO: 527476 - RNA, 19 nt, Artificial Sequence
  Description of Artificial Sequence: Synthetic oligonucleotide
aaguaaagacaaaggggau

SEQ ID NO: 527477 - RNA, 19 nt, Artificial Sequence
  Description of Artificial Sequence: Synthetic oligonucleotide
augauacccugcaauagca

SEQ ID NO: 527478 - RNA, 19 nt, Artificial Sequence
  Description of Artificial Sequence: Synthetic oligonucleotide
cugggcuuugugcuuacug

SEQ ID NO: 527479 - RNA, 19 nt, Artificial Sequence
  Description of Artificial Sequence: Synthetic oligonucleotide
uauguauagggaggggcuc

SEQ ID NO: 527480 - RNA, 19 nt, Artificial Sequence
  Description of Artificial Sequence: Synthetic oligonucleotide
gucguaugucucaaccggg

SEQ ID NO: 527481 - RNA, 19 nt, Artificial Sequence
  Description of Artificial Sequence: Synthetic oligonucleotide
uucgagccugacauuucca

SEQ ID NO: 527482 - RNA, 19 nt, Artificial Sequence
  Description of Artificial Sequence: Synthetic oligonucleotide
ugucacaagcucccuguua

SEQ ID NO: 527483 - RNA, 19 nt, Artificial Sequence
  Description of Artificial Sequence: Synthetic oligonucleotide
cacacaaccuugcaacuca

SEQ ID NO: 527484 - RNA, 19 nt, Artificial Sequence
  Description of Artificial Sequence: Synthetic oligonucleotide
ugcugccauauauuggcuc

SEQ ID NO: 527485 - RNA, 19 nt, Artificial Sequence
  Description of Artificial Sequence: Synthetic oligonucleotide
acccugcaauagcagagag

SEQ ID NO: 527486 - RNA, 19 nt, Artificial Sequence
  Description of Artificial Sequence: Synthetic oligonucleotide
caccaaggcaagcgggugg

SEQ ID NO: 527487 - RNA, 19 nt, Artificial Sequence
  Description of Artificial Sequence: Synthetic oligonucleotide
uaugggccagcuagcugcc

SEQ ID NO: 527488 - RNA, 19 nt, Artificial Sequence
  Description of Artificial Sequence: Synthetic oligonucleotide
gugcuuacugucucccacc

SEQ ID NO: 527489 - RNA, 19 nt, Artificial Sequence
  Description of Artificial Sequence: Synthetic oligonucleotide
gaagcugagggugcauaug

SEQ ID NO: 527490 - RNA, 19 nt, Artificial Sequence
  Description of Artificial Sequence: Synthetic oligonucleotide
cauguugcugcaagauguc

SEQ ID NO: 527491 - RNA, 19 nt, Artificial Sequence
  Description of Artificial Sequence: Synthetic oligonucleotide
ucacuuaucgugggagacu

SEQ ID NO: 527492 - RNA, 19 nt, Artificial Sequence
  Description of Artificial Sequence: Synthetic oligonucleotide
aucgugggagacuugcuuu

SEQ ID NO: 527493 - RNA, 19 nt, Artificial Sequence
  Description of Artificial Sequence: Synthetic oligonucleotide
gcaaggaguagcccaagug

SEQ ID NO: 527494 - RNA, 19 nt, Artificial Sequence
  Description of Artificial Sequence: Synthetic oligonucleotide
gggucagaggugcuaagag

SEQ ID NO: 527495 - RNA, 19 nt, Artificial Sequence
  Description of Artificial Sequence: Synthetic oligonucleotide
ucugcacacuggauucaac

SEQ ID NO: 527496 - RNA, 19 nt, Artificial Sequence
  Description of Artificial Sequence: Synthetic oligonucleotide
ggaugauacccugcaauag

SEQ ID NO: 527497 - RNA, 19 nt, Artificial Sequence
  Description of Artificial Sequence: Synthetic oligonucleotide
cucacauuggggcucggca

SEQ ID NO: 527498 - RNA, 19 nt, Artificial Sequence
  Description of Artificial Sequence: Synthetic oligonucleotide
ccaacuaccccacagccuc

SEQ ID NO: 527499 - RNA, 19 nt, Artificial Sequence
  Description of Artificial Sequence: Synthetic oligonucleotide
  modified_base (3)..(3): a, c, u, g, unknown or other
ucnggcuuggguguauaau

SEQ ID NO: 527500 - RNA, 19 nt, Artificial Sequence
  Description of Artificial Sequence: Synthetic oligonucleotide
ugguuuugcuguuguugcu

SEQ ID NO: 527501 - RNA, 19 nt, Artificial Sequence
  Description of Artificial Sequence: Synthetic oligonucleotide
acaaaggcccagaauuaug

SEQ ID NO: 527502 - RNA, 19 nt, Artificial Sequence
  Description of Artificial Sequence: Synthetic oligonucleotide
aggaaagguuuguggguca

SEQ ID NO: 527503 - RNA, 19 nt, Artificial Sequence
  Description of Artificial Sequence: Synthetic oligonucleotide
  modified_base (16)..(16): a, c, u, g, unknown or other
ccaccaagugcacucnggc

SEQ ID NO: 527504 - RNA, 19 nt, Artificial Sequence
  Description of Artificial Sequence: Synthetic oligonucleotide
cagcauuggagcugguauc

SEQ ID NO: 527505 - RNA, 19 nt, Artificial Sequence
  Description of Artificial Sequence: Synthetic oligonucleotide
cuuccggaggcuccacugc

SEQ ID NO: 527506 - RNA, 19 nt, Artificial Sequence
  Description of Artificial Sequence: Synthetic oligonucleotide
  modified_base (18)..(18): a, c, u, g, unknown or other
ucccaccaagugcacucng

SEQ ID NO: 527507 - RNA, 19 nt, Artificial Sequence
  Description of Artificial Sequence: Synthetic oligonucleotide
cuauguauagggaggggcu

SEQ ID NO: 527508 - RNA, 19 nt, Artificial Sequence
  Description of Artificial Sequence: Synthetic oligonucleotide
uauuggcuccugcucuggu

SEQ ID NO: 527509 - RNA, 19 nt, Artificial Sequence
  Description of Artificial Sequence: Synthetic oligonucleotide
caauuaagaaaaggaagua

SEQ ID NO: 527510 - RNA, 19 nt, Artificial Sequence
  Description of Artificial Sequence: Synthetic oligonucleotide
ccagcuugccccaaccugc

SEQ ID NO: 527511 - RNA, 19 nt, Artificial Sequence
  Description of Artificial Sequence: Synthetic oligonucleotide
cuugucacaagcucccugu

SEQ ID NO: 527512 - RNA, 19 nt, Artificial Sequence
  Description of Artificial Sequence: Synthetic oligonucleotide
uccuucgagccugacauuu

SEQ ID NO: 527513 - RNA, 19 nt, Artificial Sequence
  Description of Artificial Sequence: Synthetic oligonucleotide
uugugcuuacugucuccca

SEQ ID NO: 527514 - RNA, 19 nt, Artificial Sequence
  Description of Artificial Sequence: Synthetic oligonucleotide
  modified_base (11)..(11): a, c, u, g, unknown or other
aagugcacucnggcuuggg

SEQ ID NO: 527515 - RNA, 19 nt, Artificial Sequence
  Description of Artificial Sequence: Synthetic oligonucleotide
gcccaagugaugguggugg

SEQ ID NO: 527516 - RNA, 19 nt, Artificial Sequence
  Description of Artificial Sequence: Synthetic oligonucleotide
aggcuggaaucuguggauc

SEQ ID NO: 527517 - RNA, 19 nt, Artificial Sequence
  Description of Artificial Sequence: Synthetic oligonucleotide
cuugcagucuagaggguaa

SEQ ID NO: 527518 - RNA, 19 nt, Artificial Sequence
  Description of Artificial Sequence: Synthetic oligonucleotide
caguuuguauauauauaua

SEQ ID NO: 527519 - RNA, 19 nt, Artificial Sequence
  Description of Artificial Sequence: Synthetic oligonucleotide
gccucaucccaccaagugc

SEQ ID NO: 527520 - RNA, 19 nt, Artificial Sequence
  Description of Artificial Sequence: Synthetic oligonucleotide
guuuguauauauauauauu

SEQ ID NO: 527521 - RNA, 19 nt, Artificial Sequence
  Description of Artificial Sequence: Synthetic oligonucleotide
ugucucaaccggguuugca

SEQ ID NO: 527522 - RNA, 19 nt, Artificial Sequence
  Description of Artificial Sequence: Synthetic oligonucleotide
auguauagggaggggcuca

SEQ ID NO: 527523 - RNA, 19 nt, Artificial Sequence
  Description of Artificial Sequence: Synthetic oligonucleotide
agcuaggggaggaggcagc

SEQ ID NO: 527524 - RNA, 19 nt, Artificial Sequence
  Description of Artificial Sequence: Synthetic oligonucleotide
ugucucccacccaucucac

SEQ ID NO: 527525 - RNA, 19 nt, Artificial Sequence
  Description of Artificial Sequence: Synthetic oligonucleotide
gucgacacuccugucacca

SEQ ID NO: 527526 - RNA, 19 nt, Artificial Sequence
  Description of Artificial Sequence: Synthetic oligonucleotide
aucggcguccagaucaaug

SEQ ID NO: 527527 - RNA, 19 nt, Artificial Sequence
  Description of Artificial Sequence: Synthetic oligonucleotide
cuccaaugucccauucauc

SEQ ID NO: 527528 - RNA, 19 nt, Artificial Sequence
  Description of Artificial Sequence: Synthetic oligonucleotide
uucuugccugaauguacaa

SEQ ID NO: 527529 - RNA, 19 nt, Artificial Sequence
  Description of Artificial Sequence: Synthetic oligonucleotide
ucugcaccucaaagccuca

SEQ ID NO: 527530 - RNA, 19 nt, Artificial Sequence
  Description of Artificial Sequence: Synthetic oligonucleotide
uucuaacucccaggcaggu

SEQ ID NO: 527531 - RNA, 19 nt, Artificial Sequence
  Description of Artificial Sequence: Synthetic oligonucleotide
accuccuucgagccugaca

SEQ ID NO: 527532 - RNA, 19 nt, Artificial Sequence
  Description of Artificial Sequence: Synthetic oligonucleotide
ugccauauauuggcuccug

SEQ ID NO: 527533 - RNA, 19 nt, Artificial Sequence
  Description of Artificial Sequence: Synthetic oligonucleotide
agacaggaggggaagguaa

SEQ ID NO: 527534 - RNA, 19 nt, Artificial Sequence
  Description of Artificial Sequence: Synthetic oligonucleotide
ccugcaauagcagagagcu

SEQ ID NO: 527535 - RNA, 19 nt, Artificial Sequence
  Description of Artificial Sequence: Synthetic oligonucleotide
gagcaacgccaauggaaca

SEQ ID NO: 527536 - RNA, 19 nt, Artificial Sequence
  Description of Artificial Sequence: Synthetic oligonucleotide
caucucacucucccaaaga

SEQ ID NO: 527537 - RNA, 19 nt, Artificial Sequence
  Description of Artificial Sequence: Synthetic oligonucleotide
uguggacaucaggcgcugg

SEQ ID NO: 527538 - RNA, 19 nt, Artificial Sequence
  Description of Artificial Sequence: Synthetic oligonucleotide
cuaacucccaggcagguuu

SEQ ID NO: 527539 - RNA, 19 nt, Artificial Sequence
  Description of Artificial Sequence: Synthetic oligonucleotide
gagggugcauauggagcag

SEQ ID NO: 527540 - RNA, 19 nt, Artificial Sequence
  Description of Artificial Sequence: Synthetic oligonucleotide
acagcuaggggaggaggca

SEQ ID NO: 527541 - RNA, 19 nt, Artificial Sequence
  Description of Artificial Sequence: Synthetic oligonucleotide
gcugcauaguuucauagau

SEQ ID NO: 527542 - RNA, 19 nt, Artificial Sequence
  Description of Artificial Sequence: Synthetic oligonucleotide
gcccuaguaauaaaugaca

SEQ ID NO: 527543 - RNA, 19 nt, Artificial Sequence
  Description of Artificial Sequence: Synthetic oligonucleotide
caagcucccuguuagccua

SEQ ID NO: 527544 - RNA, 19 nt, Artificial Sequence
  Description of Artificial Sequence: Synthetic oligonucleotide
ucaaccggguuugcaucca

SEQ ID NO: 527545 - RNA, 19 nt, Artificial Sequence
  Description of Artificial Sequence: Synthetic oligonucleotide
agcggguggacuggggcag

SEQ ID NO: 527546 - RNA, 19 nt, Artificial Sequence
  Description of Artificial Sequence: Synthetic oligonucleotide
ggaagguaacaaagggaug

SEQ ID NO: 527547 - RNA, 19 nt, Artificial Sequence
  Description of Artificial Sequence: Synthetic oligonucleotide
ccagggaaagugaagcuga

SEQ ID NO: 527548 - RNA, 19 nt, Artificial Sequence
  Description of Artificial Sequence: Synthetic oligonucleotide
uaacucccaggcagguuua

SEQ ID NO: 527549 - RNA, 19 nt, Artificial Sequence
  Description of Artificial Sequence: Synthetic oligonucleotide
uugucacaagcucccuguu

SEQ ID NO: 527550 - RNA, 19 nt, Artificial Sequence
  Description of Artificial Sequence: Synthetic oligonucleotide
ggcgcugggaaggggaagg

SEQ ID NO: 527551 - RNA, 19 nt, Artificial Sequence
  Description of Artificial Sequence: Synthetic oligonucleotide
gccauauauuggcuccugc

SEQ ID NO: 527552 - RNA, 19 nt, Artificial Sequence
  Description of Artificial Sequence: Synthetic oligonucleotide
uguauagggaggggcucau

SEQ ID NO: 527553 - RNA, 19 nt, Artificial Sequence
  Description of Artificial Sequence: Synthetic oligonucleotide
augucucaaccggguuugc

SEQ ID NO: 527554 - RNA, 19 nt, Artificial Sequence
  Description of Artificial Sequence: Synthetic oligonucleotide
aggaugcccuaguaauaaa

SEQ ID NO: 527555 - RNA, 19 nt, Artificial Sequence
  Description of Artificial Sequence: Synthetic oligonucleotide
agggguugaaagccacuuu

SEQ ID NO: 527556 - RNA, 19 nt, Artificial Sequence
  Description of Artificial Sequence: Synthetic oligonucleotide
gcguccagaucaaugauga

SEQ ID NO: 527557 - RNA, 19 nt, Artificial Sequence
  Description of Artificial Sequence: Synthetic oligonucleotide
aaccggguuugcauccacu

SEQ ID NO: 527558 - RNA, 19 nt, Artificial Sequence
  Description of Artificial Sequence: Synthetic oligonucleotide
ggggaagguaacaaaggga

SEQ ID NO: 527559 - RNA, 19 nt, Artificial Sequence
  Description of Artificial Sequence: Synthetic oligonucleotide
ucgacacuccugucaccac

SEQ ID NO: 527560 - RNA, 19 nt, Artificial Sequence
  Description of Artificial Sequence: Synthetic oligonucleotide
cucggcacgcgccuuguca

SEQ ID NO: 527561 - RNA, 19 nt, Artificial Sequence
  Description of Artificial Sequence: Synthetic oligonucleotide
uucaagauucaaggcucuu

SEQ ID NO: 527562 - RNA, 19 nt, Artificial Sequence
  Description of Artificial Sequence: Synthetic oligonucleotide
aggaucagccaguggccaa

SEQ ID NO: 527563 - RNA, 19 nt, Artificial Sequence
  Description of Artificial Sequence: Synthetic oligonucleotide
acucccaggcagguuuaag

SEQ ID NO: 527564 - RNA, 19 nt, Artificial Sequence
  Description of Artificial Sequence: Synthetic oligonucleotide
  modified_base (17)..(17): a, c, u, g, unknown or other
cccaccaagugcacucngg

SEQ ID NO: 527565 - RNA, 19 nt, Artificial Sequence
  Description of Artificial Sequence: Synthetic oligonucleotide
uccggaggcuccacugcuc

SEQ ID NO: 527566 - RNA, 19 nt, Artificial Sequence
  Description of Artificial Sequence: Synthetic oligonucleotide
gccaauggaacaaaagcua

SEQ ID NO: 527567 - RNA, 19 nt, Artificial Sequence
  Description of Artificial Sequence: Synthetic oligonucleotide
ccaucucacucucccaaag

SEQ ID NO: 527568 - RNA, 19 nt, Artificial Sequence
  Description of Artificial Sequence: Synthetic oligonucleotide
cuggcauguugcugcaaga

SEQ ID NO: 527569 - RNA, 19 nt, Artificial Sequence
  Description of Artificial Sequence: Synthetic oligonucleotide
uugcagucuagaggguaaa

SEQ ID NO: 527570 - RNA, 19 nt, Artificial Sequence
  Description of Artificial Sequence: Synthetic oligonucleotide
cagauuugugauugucucu

SEQ ID NO: 527571 - RNA, 19 nt, Artificial Sequence
  Description of Artificial Sequence: Synthetic oligonucleotide
cucccuguuagccuaggcu

SEQ ID NO: 527572 - RNA, 19 nt, Artificial Sequence
  Description of Artificial Sequence: Synthetic oligonucleotide
ggucaucacuuucccagca

SEQ ID NO: 527573 - RNA, 19 nt, Artificial Sequence
  Description of Artificial Sequence: Synthetic oligonucleotide
cucccaggcagguuuaagu

SEQ ID NO: 527574 - RNA, 19 nt, Artificial Sequence
  Description of Artificial Sequence: Synthetic oligonucleotide
caucaggcgcugggaaggg

SEQ ID NO: 527575 - RNA, 19 nt, Artificial Sequence
  Description of Artificial Sequence: Synthetic oligonucleotide
gacaaaggcccagaauuau

SEQ ID NO: 527576 - RNA, 19 nt, Artificial Sequence
  Description of Artificial Sequence: Synthetic oligonucleotide
aaggugcggggccggucga

SEQ ID NO: 527577 - RNA, 19 nt, Artificial Sequence
  Description of Artificial Sequence: Synthetic oligonucleotide
cuucaagauucaaggcucu

SEQ ID NO: 527578 - RNA, 19 nt, Artificial Sequence
  Description of Artificial Sequence: Synthetic oligonucleotide
ucuaacucccaggcagguu

SEQ ID NO: 527579 - RNA, 19 nt, Artificial Sequence
  Description of Artificial Sequence: Synthetic oligonucleotide
cacugucguaugucucaac

SEQ ID NO: 527580 - RNA, 19 nt, Artificial Sequence
  Description of Artificial Sequence: Synthetic oligonucleotide
ucccuacuccaauguccca

SEQ ID NO: 527581 - RNA, 19 nt, Artificial Sequence
  Description of Artificial Sequence: Synthetic oligonucleotide
ugcggggccggucgacacu

SEQ ID NO: 527582 - RNA, 19 nt, Artificial Sequence
  Description of Artificial Sequence: Synthetic oligonucleotide
ggguaaagacaggagggga

SEQ ID NO: 527583 - RNA, 19 nt, Artificial Sequence
  Description of Artificial Sequence: Synthetic oligonucleotide
accugauaccuugcugcca

SEQ ID NO: 527584 - RNA, 19 nt, Artificial Sequence
  Description of Artificial Sequence: Synthetic oligonucleotide
acgucccaacuucaagauu

SEQ ID NO: 527585 - RNA, 19 nt, Artificial Sequence
  Description of Artificial Sequence: Synthetic oligonucleotide
cugauaaagcugggucauc

SEQ ID NO: 527586 - RNA, 19 nt, Artificial Sequence
  Description of Artificial Sequence: Synthetic oligonucleotide
caaccggguuugcauccac

SEQ ID NO: 527587 - RNA, 19 nt, Artificial Sequence
  Description of Artificial Sequence: Synthetic oligonucleotide
ccuaggaugcccuaguaau

SEQ ID NO: 527588 - RNA, 19 nt, Artificial Sequence
  Description of Artificial Sequence: Synthetic oligonucleotide
ucccaccuccuucgagccu

SEQ ID NO: 527589 - RNA, 19 nt, Artificial Sequence
  Description of Artificial Sequence: Synthetic oligonucleotide
cuaagagccccaagccugu

SEQ ID NO: 527590 - RNA, 19 nt, Artificial Sequence
  Description of Artificial Sequence: Synthetic oligonucleotide
caacgccaauggaacaaaa

SEQ ID NO: 527591 - RNA, 19 nt, Artificial Sequence
  Description of Artificial Sequence: Synthetic oligonucleotide
ccggguuugcauccacucc

SEQ ID NO: 527592 - RNA, 19 nt, Artificial Sequence
  Description of Artificial Sequence: Synthetic oligonucleotide
  modified_base (4)..(4): a, c, u, g, unknown or other
cucnggcuuggguguauaa

SEQ ID NO: 527593 - RNA, 19 nt, Artificial Sequence
  Description of Artificial Sequence: Synthetic oligonucleotide
ccaucuaccuuccugcucu

SEQ ID NO: 527594 - RNA, 19 nt, Artificial Sequence
  Description of Artificial Sequence: Synthetic oligonucleotide
ggauuucccacuuguuccu

SEQ ID NO: 527595 - RNA, 19 nt, Artificial Sequence
  Description of Artificial Sequence: Synthetic oligonucleotide
cuggaaaguuuccuaggau

SEQ ID NO: 527596 - RNA, 19 nt, Artificial Sequence
  Description of Artificial Sequence: Synthetic oligonucleotide
cuuucccagcacacaaccu

SEQ ID NO: 527597 - RNA, 19 nt, Artificial Sequence
  Description of Artificial Sequence: Synthetic oligonucleotide
cccacugucguaugucuca

SEQ ID NO: 527598 - RNA, 19 nt, Artificial Sequence
  Description of Artificial Sequence: Synthetic oligonucleotide
gucccaacuucaagauuca

SEQ ID NO: 527599 - RNA, 19 nt, Artificial Sequence
  Description of Artificial Sequence: Synthetic oligonucleotide
ccauauauuggcuccugcu

SEQ ID NO: 527600 - RNA, 19 nt, Artificial Sequence
  Description of Artificial Sequence: Synthetic oligonucleotide
acuuaucgugggagacuug

SEQ ID NO: 527601 - RNA, 19 nt, Artificial Sequence
  Description of Artificial Sequence: Synthetic oligonucleotide
cagaguacccagggguuga

SEQ ID NO: 527602 - RNA, 19 nt, Artificial Sequence
  Description of Artificial Sequence: Synthetic oligonucleotide
guguggacaucaggcgcug

SEQ ID NO: 527603 - RNA, 19 nt, Artificial Sequence
  Description of Artificial Sequence: Synthetic oligonucleotide
gcucucaaacugucauuuc

SEQ ID NO: 527604 - RNA, 19 nt, Artificial Sequence
  Description of Artificial Sequence: Synthetic oligonucleotide
aucccacaucaugggaaga

SEQ ID NO: 527605 - RNA, 19 nt, Artificial Sequence
  Description of Artificial Sequence: Synthetic oligonucleotide
  modified_base (15)..(15): a, c, u, g, unknown or other
caccaagugcacucnggcu

SEQ ID NO: 527606 - RNA, 19 nt, Artificial Sequence
  Description of Artificial Sequence: Synthetic oligonucleotide
ggucgacacuccugucacc

SEQ ID NO: 527607 - RNA, 19 nt, Artificial Sequence
  Description of Artificial Sequence: Synthetic oligonucleotide
gaguagcccaagugauggu

SEQ ID NO: 527608 - RNA, 19 nt, Artificial Sequence
  Description of Artificial Sequence: Synthetic oligonucleotide
cgccaauggaacaaaagcu

SEQ ID NO: 527609 - RNA, 19 nt, Artificial Sequence
  Description of Artificial Sequence: Synthetic oligonucleotide
gccaucuaccuuccugcuc

SEQ ID NO: 527610 - RNA, 19 nt, Artificial Sequence
  Description of Artificial Sequence: Synthetic oligonucleotide
ccuuccauucuaacuccca

SEQ ID NO: 527611 - RNA, 19 nt, Artificial Sequence
  Description of Artificial Sequence: Synthetic oligonucleotide
ggcaagcggguggacuggg

SEQ ID NO: 527612 - RNA, 19 nt, Artificial Sequence
  Description of Artificial Sequence: Synthetic oligonucleotide
agcauccucgccaccugau

SEQ ID NO: 527613 - RNA, 19 nt, Artificial Sequence
  Description of Artificial Sequence: Synthetic oligonucleotide
accuugcaacucaggagaa

SEQ ID NO: 527614 - RNA, 19 nt, Artificial Sequence
  Description of Artificial Sequence: Synthetic oligonucleotide
ggaugcccuaguaauaaau

SEQ ID NO: 527615 - RNA, 19 nt, Artificial Sequence
  Description of Artificial Sequence: Synthetic oligonucleotide
gguaguguggccacagcau

SEQ ID NO: 527616 - RNA, 19 nt, Artificial Sequence
  Description of Artificial Sequence: Synthetic oligonucleotide
gguaucccaccuccuucga

SEQ ID NO: 527617 - RNA, 19 nt, Artificial Sequence
  Description of Artificial Sequence: Synthetic oligonucleotide
agaguacccagggguugaa

SEQ ID NO: 527618 - RNA, 19 nt, Artificial Sequence
  Description of Artificial Sequence: Synthetic oligonucleotide
gugcggggccggucgacac

SEQ ID NO: 527619 - RNA, 19 nt, Artificial Sequence
  Description of Artificial Sequence: Synthetic oligonucleotide
cacuuaucgugggagacuu

SEQ ID NO: 527620 - RNA, 19 nt, Artificial Sequence
  Description of Artificial Sequence: Synthetic oligonucleotide
agaucggcguccagaucaa

SEQ ID NO: 527621 - RNA, 19 nt, Artificial Sequence
  Description of Artificial Sequence: Synthetic oligonucleotide
cccaaugggagggcugagc

SEQ ID NO: 527622 - RNA, 19 nt, Artificial Sequence
  Description of Artificial Sequence: Synthetic oligonucleotide
ccaagugauggugguggug

SEQ ID NO: 527623 - RNA, 19 nt, Artificial Sequence
  Description of Artificial Sequence: Synthetic oligonucleotide
aggggauuucccacuuguu

SEQ ID NO: 527624 - RNA, 19 nt, Artificial Sequence
  Description of Artificial Sequence: Synthetic oligonucleotide
caaggcaagcggguggacu

SEQ ID NO: 527625 - RNA, 19 nt, Artificial Sequence
  Description of Artificial Sequence: Synthetic oligonucleotide
  modified_base (5)..(5): a, c, u, g, unknown or other
acucnggcuuggguguaua

SEQ ID NO: 527626 - RNA, 19 nt, Artificial Sequence
  Description of Artificial Sequence: Synthetic oligonucleotide
gggaggcaaggaguagccc

SEQ ID NO: 527627 - RNA, 19 nt, Artificial Sequence
  Description of Artificial Sequence: Synthetic oligonucleotide
cggucgacacuccugucac

SEQ ID NO: 527628 - RNA, 19 nt, Artificial Sequence
  Description of Artificial Sequence: Synthetic oligonucleotide
ccaagccugucuauguaua

SEQ ID NO: 527629 - RNA, 19 nt, Artificial Sequence
  Description of Artificial Sequence: Synthetic oligonucleotide
caaaggggauuucccacuu

SEQ ID NO: 527630 - RNA, 19 nt, Artificial Sequence
  Description of Artificial Sequence: Synthetic oligonucleotide
ccuugcaacucaggagaac

SEQ ID NO: 527631 - RNA, 19 nt, Artificial Sequence
  Description of Artificial Sequence: Synthetic oligonucleotide
ccggucgacacuccuguca

SEQ ID NO: 527632 - RNA, 19 nt, Artificial Sequence
  Description of Artificial Sequence: Synthetic oligonucleotide
ccucccuguuccccaacac

SEQ ID NO: 527633 - RNA, 19 nt, Artificial Sequence
  Description of Artificial Sequence: Synthetic oligonucleotide
ccugacauuuccaguuucu

SEQ ID NO: 527634 - RNA, 19 nt, Artificial Sequence
  Description of Artificial Sequence: Synthetic oligonucleotide
gcucacauuggggcucggc

SEQ ID NO: 527635 - RNA, 19 nt, Artificial Sequence
  Description of Artificial Sequence: Synthetic oligonucleotide
gcucccaaugggagggcug

SEQ ID NO: 527636 - RNA, 19 nt, Artificial Sequence
  Description of Artificial Sequence: Synthetic oligonucleotide
cugcaauagcagagagcua

SEQ ID NO: 527637 - RNA, 19 nt, Artificial Sequence
  Description of Artificial Sequence: Synthetic oligonucleotide
cagcagcccucacagauuu

SEQ ID NO: 527638 - RNA, 19 nt, Artificial Sequence
  Description of Artificial Sequence: Synthetic oligonucleotide
gcauaguuucauagaugaa

SEQ ID NO: 527639 - RNA, 19 nt, Artificial Sequence
  Description of Artificial Sequence: Synthetic oligonucleotide
ccugauaccuugcugccau

SEQ ID NO: 527640 - RNA, 19 nt, Artificial Sequence
  Description of Artificial Sequence: Synthetic oligonucleotide
ggccggucgacacuccugu

SEQ ID NO: 527641 - RNA, 19 nt, Artificial Sequence
  Description of Artificial Sequence: Synthetic oligonucleotide
acacuggauucaacagcuu

SEQ ID NO: 527642 - RNA, 19 nt, Artificial Sequence
  Description of Artificial Sequence: Synthetic oligonucleotide
cagcaacacugccccuuca

SEQ ID NO: 527643 - RNA, 19 nt, Artificial Sequence
  Description of Artificial Sequence: Synthetic oligonucleotide
ccccacugucguaugucuc

SEQ ID NO: 527644 - RNA, 19 nt, Artificial Sequence
  Description of Artificial Sequence: Synthetic oligonucleotide
ccagcugcauaguuucaua

SEQ ID NO: 527645 - RNA, 19 nt, Artificial Sequence
  Description of Artificial Sequence: Synthetic oligonucleotide
ggcacgcgccuugucagca

SEQ ID NO: 527646 - RNA, 19 nt, Artificial Sequence
  Description of Artificial Sequence: Synthetic oligonucleotide
cuguuagccuaggcuggaa

SEQ ID NO: 527647 - RNA, 19 nt, Artificial Sequence
  Description of Artificial Sequence: Synthetic oligonucleotide
gggcucggcacgcgccuug

SEQ ID NO: 527648 - RNA, 19 nt, Artificial Sequence
  Description of Artificial Sequence: Synthetic oligonucleotide
gcaggacuagagacaggga

SEQ ID NO: 527649 - RNA, 19 nt, Artificial Sequence
  Description of Artificial Sequence: Synthetic oligonucleotide
ggaagguagucugcacacu

SEQ ID NO: 527650 - RNA, 19 nt, Artificial Sequence
  Description of Artificial Sequence: Synthetic oligonucleotide
gggccggucgacacuccug

SEQ ID NO: 527651 - RNA, 19 nt, Artificial Sequence
  Description of Artificial Sequence: Synthetic oligonucleotide
agcuagcugcccagcugaa

SEQ ID NO: 527652 - RNA, 19 nt, Artificial Sequence
  Description of Artificial Sequence: Synthetic oligonucleotide
ccagaucggcguccagauc

SEQ ID NO: 527653 - RNA, 19 nt, Artificial Sequence
  Description of Artificial Sequence: Synthetic oligonucleotide
cacugcucaaggacaucuu

SEQ ID NO: 527654 - RNA, 19 nt, Artificial Sequence
  Description of Artificial Sequence: Synthetic oligonucleotide
ccccaacacugcuacagcu

SEQ ID NO: 527655 - RNA, 19 nt, Artificial Sequence
  Description of Artificial Sequence: Synthetic oligonucleotide
cucugguuuugcuguuguu

SEQ ID NO: 527656 - RNA, 19 nt, Artificial Sequence
  Description of Artificial Sequence: Synthetic oligonucleotide
ccagaauuaugggccagcu

SEQ ID NO: 527657 - RNA, 19 nt, Artificial Sequence
  Description of Artificial Sequence: Synthetic oligonucleotide
ccuguuagccuaggcugga

SEQ ID NO: 527658 - RNA, 19 nt, Artificial Sequence
  Description of Artificial Sequence: Synthetic oligonucleotide
cccaagccugucuauguau

SEQ ID NO: 527659 - RNA, 19 nt, Artificial Sequence
  Description of Artificial Sequence: Synthetic oligonucleotide
gguuugcauccacuccuuu

SEQ ID NO: 527660 - RNA, 19 nt, Artificial Sequence
  Description of Artificial Sequence: Synthetic oligonucleotide
caccuccuucgagccugac

SEQ ID NO: 527661 - RNA, 19 nt, Artificial Sequence
  Description of Artificial Sequence: Synthetic oligonucleotide
gaucggcguccagaucaau

SEQ ID NO: 527662 - RNA, 19 nt, Artificial Sequence
  Description of Artificial Sequence: Synthetic oligonucleotide
gggccucugagagguaggu

SEQ ID NO: 527663 - RNA, 19 nt, Artificial Sequence
  Description of Artificial Sequence: Synthetic oligonucleotide
gccggucgacacuccuguc

SEQ ID NO: 527664 - RNA, 19 nt, Artificial Sequence
  Description of Artificial Sequence: Synthetic oligonucleotide
cggcacgcgccuugucagc

SEQ ID NO: 527665 - RNA, 19 nt, Artificial Sequence
  Description of Artificial Sequence: Synthetic oligonucleotide
ccccaagccugucuaugua

SEQ ID NO: 527666 - RNA, 19 nt, Artificial Sequence
  Description of Artificial Sequence: Synthetic oligonucleotide
ccacugucguaugucucaa

SEQ ID NO: 527667 - RNA, 19 nt, Artificial Sequence
  Description of Artificial Sequence: Synthetic oligonucleotide
  modified_base (7)..(7): a, c, u, g, unknown or other
gcacucnggcuugggugua

SEQ ID NO: 527668 - RNA, 19 nt, Artificial Sequence
  Description of Artificial Sequence: Synthetic oligonucleotide
cccuacuccaaugucccau

SEQ ID NO: 527669 - RNA, 19 nt, Artificial Sequence
  Description of Artificial Sequence: Synthetic oligonucleotide
ggggccggucgacacuccu

SEQ ID NO: 527670 - RNA, 19 nt, Artificial Sequence
  Description of Artificial Sequence: Synthetic oligonucleotide
gcucggcacgcgccuuguc

SEQ ID NO: 527671 - RNA, 19 nt, Artificial Sequence
  Description of Artificial Sequence: Synthetic oligonucleotide
cugcaccucaaagccucau

SEQ ID NO: 527672 - RNA, 19 nt, Artificial Sequence
  Description of Artificial Sequence: Synthetic oligonucleotide
cccucacagauuugugauu

SEQ ID NO: 527673 - RNA, 19 nt, Artificial Sequence
  Description of Artificial Sequence: Synthetic oligonucleotide
  modified_base (6)..(6): a, c, u, g, unknown or other
cacucnggcuuggguguau

SEQ ID NO: 527674 - RNA, 19 nt, Artificial Sequence
  Description of Artificial Sequence: Synthetic oligonucleotide
ccagcagcccucacagauu

SEQ ID NO: 527675 - RNA, 19 nt, Artificial Sequence
  Description of Artificial Sequence: Synthetic oligonucleotide
ggcucggcacgcgccuugu

SEQ ID NO: 527676 - RNA, 19 nt, Artificial Sequence
  Description of Artificial Sequence: Synthetic oligonucleotide
cccuuccggaggcuccacu

SEQ ID NO: 527677 - RNA, 19 nt, Artificial Sequence
  Description of Artificial Sequence: Synthetic oligonucleotide
cggaggcuccacugcucaa

SEQ ID NO: 527678 - RNA, 19 nt, Artificial Sequence
  Description of Artificial Sequence: Synthetic oligonucleotide
cggcguccagaucaaugau

SEQ ID NO: 527679 - RNA, 19 nt, Artificial Sequence
  Description of Artificial Sequence: Synthetic oligonucleotide
cgcgccuugucagcauccu

SEQ ID NO: 527680 - RNA, 19 nt, Artificial Sequence
  Description of Artificial Sequence: Synthetic oligonucleotide
ggggcucggcacgcgccuu

SEQ ID NO: 527681 - RNA, 19 nt, Artificial Sequence
  Description of Artificial Sequence: Synthetic oligonucleotide
acuaauaaauuguucaggg

SEQ ID NO: 527682 - RNA, 19 nt, Artificial Sequence
  Description of Artificial Sequence: Synthetic oligonucleotide
uuaauucuaaggaacagcc

SEQ ID NO: 527683 - RNA, 19 nt, Artificial Sequence
  Description of Artificial Sequence: Synthetic oligonucleotide
agaguugucagucugaaag

SEQ ID NO: 527684 - RNA, 19 nt, Artificial Sequence
  Description of Artificial Sequence: Synthetic oligonucleotide
uuugccaccgaaaagagca

SEQ ID NO: 527685 - RNA, 19 nt, Artificial Sequence
  Description of Artificial Sequence: Synthetic oligonucleotide
ucgaauaucaguaacacua

SEQ ID NO: 527686 - RNA, 19 nt, Artificial Sequence
  Description of Artificial Sequence: Synthetic oligonucleotide
uugacuaauaaauuguuca

SEQ ID NO: 527687 - RNA, 19 nt, Artificial Sequence
  Description of Artificial Sequence: Synthetic oligonucleotide
aguaacacuagggagaucg

SEQ ID NO: 527688 - RNA, 19 nt, Artificial Sequence
  Description of Artificial Sequence: Synthetic oligonucleotide
auugauguaugugagaagg

SEQ ID NO: 527689 - RNA, 19 nt, Artificial Sequence
  Description of Artificial Sequence: Synthetic oligonucleotide
cugacuaucauccgaaucg

SEQ ID NO: 527690 - RNA, 19 nt, Artificial Sequence
  Description of Artificial Sequence: Synthetic oligonucleotide
uauuuucuagacauccucg

SEQ ID NO: 527691 - RNA, 19 nt, Artificial Sequence
  Description of Artificial Sequence: Synthetic oligonucleotide
ugagaaaaguauuucagca

SEQ ID NO: 527692 - RNA, 19 nt, Artificial Sequence
  Description of Artificial Sequence: Synthetic oligonucleotide
gaguaaucgacccauuugg

SEQ ID NO: 527693 - RNA, 19 nt, Artificial Sequence
  Description of Artificial Sequence: Synthetic oligonucleotide
uagaaauucaccugaaaug

SEQ ID NO: 527694 - RNA, 19 nt, Artificial Sequence
  Description of Artificial Sequence: Synthetic oligonucleotide
uuuggugacccacugaaag

SEQ ID NO: 527695 - RNA, 19 nt, Artificial Sequence
  Description of Artificial Sequence: Synthetic oligonucleotide
uuauuaacaaggaaugcac

SEQ ID NO: 527696 - RNA, 19 nt, Artificial Sequence
  Description of Artificial Sequence: Synthetic oligonucleotide
aaggaaugcacuuuuccag

SEQ ID NO: 527697 - RNA, 19 nt, Artificial Sequence
  Description of Artificial Sequence: Synthetic oligonucleotide
ucguauacaucacacagcc

SEQ ID NO: 527698 - RNA, 19 nt, Artificial Sequence
  Description of Artificial Sequence: Synthetic oligonucleotide
agaaccuaagagucaaugc

SEQ ID NO: 527699 - RNA, 19 nt, Artificial Sequence
  Description of Artificial Sequence: Synthetic oligonucleotide
cuaucaagugcuuagcagg

SEQ ID NO: 527700 - RNA, 19 nt, Artificial Sequence
  Description of Artificial Sequence: Synthetic oligonucleotide
uugauaaguggaaauacug

SEQ ID NO: 527701 - RNA, 19 nt, Artificial Sequence
  Description of Artificial Sequence: Synthetic oligonucleotide
auauuuucuagacauccuc

SEQ ID NO: 527702 - RNA, 19 nt, Artificial Sequence
  Description of Artificial Sequence: Synthetic oligonucleotide
uguccaauaagccuuuuca

SEQ ID NO: 527703 - RNA, 19 nt, Artificial Sequence
  Description of Artificial Sequence: Synthetic oligonucleotide
uuucuagacauccucgaag

SEQ ID NO: 527704 - RNA, 19 nt, Artificial Sequence
  Description of Artificial Sequence: Synthetic oligonucleotide
aaucgcauccccaaucugc

SEQ ID NO: 527705 - RNA, 19 nt, Artificial Sequence
  Description of Artificial Sequence: Synthetic oligonucleotide
aaaauguauggccauaguu

SEQ ID NO: 527706 - RNA, 19 nt, Artificial Sequence
  Description of Artificial Sequence: Synthetic oligonucleotide
uaucaguaacacuagggag

SEQ ID NO: 527707 - RNA, 19 nt, Artificial Sequence
  Description of Artificial Sequence: Synthetic oligonucleotide
gauaauuugggguaccaca

SEQ ID NO: 527708 - RNA, 19 nt, Artificial Sequence
  Description of Artificial Sequence: Synthetic oligonucleotide
uucaaaucaugccuaagcu

SEQ ID NO: 527709 - RNA, 19 nt, Artificial Sequence
  Description of Artificial Sequence: Synthetic oligonucleotide
uuuaucagauuuuaaccac

SEQ ID NO: 527710 - RNA, 19 nt, Artificial Sequence
  Description of Artificial Sequence: Synthetic oligonucleotide
aucgccaccauccaugagg

SEQ ID NO: 527711 - RNA, 19 nt, Artificial Sequence
  Description of Artificial Sequence: Synthetic oligonucleotide
uaaucgacccauuugguga

SEQ ID NO: 527712 - RNA, 19 nt, Artificial Sequence
  Description of Artificial Sequence: Synthetic oligonucleotide
caucguauacaucacacag

SEQ ID NO: 527713 - RNA, 19 nt, Artificial Sequence
  Description of Artificial Sequence: Synthetic oligonucleotide
aacaagggagcauccuccc

SEQ ID NO: 527714 - RNA, 19 nt, Artificial Sequence
  Description of Artificial Sequence: Synthetic oligonucleotide
aggaaugcacuuuuccagc

SEQ ID NO: 527715 - RNA, 19 nt, Artificial Sequence
  Description of Artificial Sequence: Synthetic oligonucleotide
agugguuccagucuggcug

SEQ ID NO: 527716 - RNA, 19 nt, Artificial Sequence
  Description of Artificial Sequence: Synthetic oligonucleotide
auuuguuggaguaaucgac

SEQ ID NO: 527717 - RNA, 19 nt, Artificial Sequence
  Description of Artificial Sequence: Synthetic oligonucleotide
caugcuagcuaucaagugc

SEQ ID NO: 527718 - RNA, 19 nt, Artificial Sequence
  Description of Artificial Sequence: Synthetic oligonucleotide
gaaccuaagagucaaugca

SEQ ID NO: 527719 - RNA, 19 nt, Artificial Sequence
  Description of Artificial Sequence: Synthetic oligonucleotide
aauaaauuguucaggggca

SEQ ID NO: 527720 - RNA, 19 nt, Artificial Sequence
  Description of Artificial Sequence: Synthetic oligonucleotide
cuagcuaucaagugcuuag

SEQ ID NO: 527721 - RNA, 19 nt, Artificial Sequence
  Description of Artificial Sequence: Synthetic oligonucleotide
aagagcaucauuaaggcuu

SEQ ID NO: 527722 - RNA, 19 nt, Artificial Sequence
  Description of Artificial Sequence: Synthetic oligonucleotide
aaagucgccaaccuucagu

SEQ ID NO: 527723 - RNA, 19 nt, Artificial Sequence
  Description of Artificial Sequence: Synthetic oligonucleotide
uuugugguuucgaauggag

SEQ ID NO: 527724 - RNA, 19 nt, Artificial Sequence
  Description of Artificial Sequence: Synthetic oligonucleotide
cuugaguccagacacaauc

SEQ ID NO: 527725 - RNA, 19 nt, Artificial Sequence
  Description of Artificial Sequence: Synthetic oligonucleotide
augguacuaucuucaaggc

SEQ ID NO: 527726 - RNA, 19 nt, Artificial Sequence
  Description of Artificial Sequence: Synthetic oligonucleotide
cauuguauaccuugcuucc

SEQ ID NO: 527727 - RNA, 19 nt, Artificial Sequence
  Description of Artificial Sequence: Synthetic oligonucleotide
uucacaguuaagcagccaa

SEQ ID NO: 527728 - RNA, 19 nt, Artificial Sequence
  Description of Artificial Sequence: Synthetic oligonucleotide
uaucagauuuuaaccacug

SEQ ID NO: 527729 - RNA, 19 nt, Artificial Sequence
  Description of Artificial Sequence: Synthetic oligonucleotide
ucuuagcugggcuugauaa

SEQ ID NO: 527730 - RNA, 19 nt, Artificial Sequence
  Description of Artificial Sequence: Synthetic oligonucleotide
aggaacuacagucagucgu

SEQ ID NO: 527731 - RNA, 19 nt, Artificial Sequence
  Description of Artificial Sequence: Synthetic oligonucleotide
uuuauugugugugucauua

SEQ ID NO: 527732 - RNA, 19 nt, Artificial Sequence
  Description of Artificial Sequence: Synthetic oligonucleotide
uauuaacaaggaaugcacu

SEQ ID NO: 527733 - RNA, 19 nt, Artificial Sequence
  Description of Artificial Sequence: Synthetic oligonucleotide
uguugaaaaggacuccaac

SEQ ID NO: 527734 - RNA, 19 nt, Artificial Sequence
  Description of Artificial Sequence: Synthetic oligonucleotide
auaggguccacucaaaauu

SEQ ID NO: 527735 - RNA, 19 nt, Artificial Sequence
  Description of Artificial Sequence: Synthetic oligonucleotide
uuaucagauuuuaaccacu

SEQ ID NO: 527736 - RNA, 19 nt, Artificial Sequence
  Description of Artificial Sequence: Synthetic oligonucleotide
cugauucacagccaugucc

SEQ ID NO: 527737 - RNA, 19 nt, Artificial Sequence
  Description of Artificial Sequence: Synthetic oligonucleotide
agggagaucgccaccaucc

SEQ ID NO: 527738 - RNA, 19 nt, Artificial Sequence
  Description of Artificial Sequence: Synthetic oligonucleotide
aguaucggacuucuggcuc

SEQ ID NO: 527739 - RNA, 19 nt, Artificial Sequence
  Description of Artificial Sequence: Synthetic oligonucleotide
augguagaaauucaccuga

SEQ ID NO: 527740 - RNA, 19 nt, Artificial Sequence
  Description of Artificial Sequence: Synthetic oligonucleotide
aacguuuauuaacaaggaa

SEQ ID NO: 527741 - RNA, 19 nt, Artificial Sequence
  Description of Artificial Sequence: Synthetic oligonucleotide
uguugaggacuucagggga

SEQ ID NO: 527742 - RNA, 19 nt, Artificial Sequence
  Description of Artificial Sequence: Synthetic oligonucleotide
ucgcugggaaaacagaaca

SEQ ID NO: 527743 - RNA, 19 nt, Artificial Sequence
  Description of Artificial Sequence: Synthetic oligonucleotide
augccgaaugaugucaucc

SEQ ID NO: 527744 - RNA, 19 nt, Artificial Sequence
  Description of Artificial Sequence: Synthetic oligonucleotide
ucuguaagagcauguucag

SEQ ID NO: 527745 - RNA, 19 nt, Artificial Sequence
  Description of Artificial Sequence: Synthetic oligonucleotide
uuggugacccacugaaagg

SEQ ID NO: 527746 - RNA, 19 nt, Artificial Sequence
  Description of Artificial Sequence: Synthetic oligonucleotide
ucccuuaugcaccuguaug

SEQ ID NO: 527747 - RNA, 19 nt, Artificial Sequence
  Description of Artificial Sequence: Synthetic oligonucleotide
aaugcaucuuucugcaaaa

SEQ ID NO: 527748 - RNA, 19 nt, Artificial Sequence
  Description of Artificial Sequence: Synthetic oligonucleotide
aagcuuguaaaugucuuca

SEQ ID NO: 527749 - RNA, 19 nt, Artificial Sequence
  Description of Artificial Sequence: Synthetic oligonucleotide
uaccuugcuucccuuaugc

SEQ ID NO: 527750 - RNA, 19 nt, Artificial Sequence
  Description of Artificial Sequence: Synthetic oligonucleotide
caugguagaaauucaccug

SEQ ID NO: 527751 - RNA, 19 nt, Artificial Sequence
  Description of Artificial Sequence: Synthetic oligonucleotide
ugaggaacuacagucaguc

SEQ ID NO: 527752 - RNA, 19 nt, Artificial Sequence
  Description of Artificial Sequence: Synthetic oligonucleotide
guauauucacaguuccaag

SEQ ID NO: 527753 - RNA, 19 nt, Artificial Sequence
  Description of Artificial Sequence: Synthetic oligonucleotide
uaauaguggacuguuuucu

SEQ ID NO: 527754 - RNA, 19 nt, Artificial Sequence
  Description of Artificial Sequence: Synthetic oligonucleotide
auggccauaguucacaguu

SEQ ID NO: 527755 - RNA, 19 nt, Artificial Sequence
  Description of Artificial Sequence: Synthetic oligonucleotide
agcaucguauacaucacac

SEQ ID NO: 527756 - RNA, 19 nt, Artificial Sequence
  Description of Artificial Sequence: Synthetic oligonucleotide
acguuuauuaacaaggaau

SEQ ID NO: 527757 - RNA, 19 nt, Artificial Sequence
  Description of Artificial Sequence: Synthetic oligonucleotide
aagucaacuguacaccuua

SEQ ID NO: 527758 - RNA, 19 nt, Artificial Sequence
  Description of Artificial Sequence: Synthetic oligonucleotide
uucgugaagguacuugagu

SEQ ID NO: 527759 - RNA, 19 nt, Artificial Sequence
  Description of Artificial Sequence: Synthetic oligonucleotide
uuuuaaccacuggaggagg

SEQ ID NO: 527760 - RNA, 19 nt, Artificial Sequence
  Description of Artificial Sequence: Synthetic oligonucleotide
caaguuccgcauaauagug

SEQ ID NO: 527761 - RNA, 19 nt, Artificial Sequence
  Description of Artificial Sequence: Synthetic oligonucleotide
ugaguccagacacaaucug

SEQ ID NO: 527762 - RNA, 19 nt, Artificial Sequence
  Description of Artificial Sequence: Synthetic oligonucleotide
aagauuucuuguucgugaa

SEQ ID NO: 527763 - RNA, 19 nt, Artificial Sequence
  Description of Artificial Sequence: Synthetic oligonucleotide
agucccauaggguccacuc

SEQ ID NO: 527764 - RNA, 19 nt, Artificial Sequence
  Description of Artificial Sequence: Synthetic oligonucleotide
cauaguucacaguuaagca

SEQ ID NO: 527765 - RNA, 19 nt, Artificial Sequence
  Description of Artificial Sequence: Synthetic oligonucleotide
auaagccuuuucaagacag

SEQ ID NO: 527766 - RNA, 19 nt, Artificial Sequence
  Description of Artificial Sequence: Synthetic oligonucleotide
ugcucuuugggaauacagu

SEQ ID NO: 527767 - RNA, 19 nt, Artificial Sequence
  Description of Artificial Sequence: Synthetic oligonucleotide
ucugacuaucauccgaauc

SEQ ID NO: 527768 - RNA, 19 nt, Artificial Sequence
  Description of Artificial Sequence: Synthetic oligonucleotide
guaaucgacccauuuggug

SEQ ID NO: 527769 - RNA, 19 nt, Artificial Sequence
  Description of Artificial Sequence: Synthetic oligonucleotide
ucccaugguacuaucuuca

SEQ ID NO: 527770 - RNA, 19 nt, Artificial Sequence
  Description of Artificial Sequence: Synthetic oligonucleotide
auaguggacuguuuucuug

SEQ ID NO: 527771 - RNA, 19 nt, Artificial Sequence
  Description of Artificial Sequence: Synthetic oligonucleotide
gucgccaaccuucaguucc

SEQ ID NO: 527772 - RNA, 19 nt, Artificial Sequence
  Description of Artificial Sequence: Synthetic oligonucleotide
cagaacauuggccaaguuc

SEQ ID NO: 527773 - RNA, 19 nt, Artificial Sequence
  Description of Artificial Sequence: Synthetic oligonucleotide
ugggguaccacauauuguu

SEQ ID NO: 527774 - RNA, 19 nt, Artificial Sequence
  Description of Artificial Sequence: Synthetic oligonucleotide
aguuccgcauaauagugga

SEQ ID NO: 527775 - RNA, 19 nt, Artificial Sequence
  Description of Artificial Sequence: Synthetic oligonucleotide
ucaaggaaaauugcauucu

SEQ ID NO: 527776 - RNA, 19 nt, Artificial Sequence
  Description of Artificial Sequence: Synthetic oligonucleotide
aaguuccgcauaauagugg

SEQ ID NO: 527777 - RNA, 19 nt, Artificial Sequence
  Description of Artificial Sequence: Synthetic oligonucleotide
cuucgaauaucaguaacac

SEQ ID NO: 527778 - RNA, 19 nt, Artificial Sequence
  Description of Artificial Sequence: Synthetic oligonucleotide
uuggauuguccaaagucaa

SEQ ID NO: 527779 - RNA, 19 nt, Artificial Sequence
  Description of Artificial Sequence: Synthetic oligonucleotide
aucaguaacacuagggaga

SEQ ID NO: 527780 - RNA, 19 nt, Artificial Sequence
  Description of Artificial Sequence: Synthetic oligonucleotide
caacuguagugguaggcgg

SEQ ID NO: 527781 - RNA, 19 nt, Artificial Sequence
  Description of Artificial Sequence: Synthetic oligonucleotide
acacuagggagaucgccac

SEQ ID NO: 527782 - RNA, 19 nt, Artificial Sequence
  Description of Artificial Sequence: Synthetic oligonucleotide
gagaaccuaagagucaaug

SEQ ID NO: 527783 - RNA, 19 nt, Artificial Sequence
  Description of Artificial Sequence: Synthetic oligonucleotide
ucaaaucaugccuaagcuu

SEQ ID NO: 527784 - RNA, 19 nt, Artificial Sequence
  Description of Artificial Sequence: Synthetic oligonucleotide
aagucgccaaccuucaguu

SEQ ID NO: 527785 - RNA, 19 nt, Artificial Sequence
  Description of Artificial Sequence: Synthetic oligonucleotide
uuccgcauaauaguggacu

SEQ ID NO: 527786 - RNA, 19 nt, Artificial Sequence
  Description of Artificial Sequence: Synthetic oligonucleotide
uccggcauauuuucuagac

SEQ ID NO: 527787 - RNA, 19 nt, Artificial Sequence
  Description of Artificial Sequence: Synthetic oligonucleotide
aacacuagggagaucgcca

SEQ ID NO: 527788 - RNA, 19 nt, Artificial Sequence
  Description of Artificial Sequence: Synthetic oligonucleotide
agauaauuugggguaccac

SEQ ID NO: 527789 - RNA, 19 nt, Artificial Sequence
  Description of Artificial Sequence: Synthetic oligonucleotide
cagguugaaagcacucucc

SEQ ID NO: 527790 - RNA, 19 nt, Artificial Sequence
  Description of Artificial Sequence: Synthetic oligonucleotide
caacagcuagaagagagcc

SEQ ID NO: 527791 - RNA, 19 nt, Artificial Sequence
  Description of Artificial Sequence: Synthetic oligonucleotide
uauaccuugcuucccuuau

SEQ ID NO: 527792 - RNA, 19 nt, Artificial Sequence
  Description of Artificial Sequence: Synthetic oligonucleotide
uucgaauaucaguaacacu

SEQ ID NO: 527793 - RNA, 19 nt, Artificial Sequence
  Description of Artificial Sequence: Synthetic oligonucleotide
ucgaauggaggccuuccca

SEQ ID NO: 527794 - RNA, 19 nt, Artificial Sequence
  Description of Artificial Sequence: Synthetic oligonucleotide
agucaugccgaaugauguc

SEQ ID NO: 527795 - RNA, 19 nt, Artificial Sequence
  Description of Artificial Sequence: Synthetic oligonucleotide
uaguggacuguuuucuugu

SEQ ID NO: 527796 - RNA, 19 nt, Artificial Sequence
  Description of Artificial Sequence: Synthetic oligonucleotide
cuaucauccgaaucgcauc

SEQ ID NO: 527797 - RNA, 19 nt, Artificial Sequence
  Description of Artificial Sequence: Synthetic oligonucleotide
ucauccgaaucgcaucccc

SEQ ID NO: 527798 - RNA, 19 nt, Artificial Sequence
  Description of Artificial Sequence: Synthetic oligonucleotide
guuuguuuuccacugcgga

SEQ ID NO: 527799 - RNA, 19 nt, Artificial Sequence
  Description of Artificial Sequence: Synthetic oligonucleotide
uccgcauaauaguggacug

SEQ ID NO: 527800 - RNA, 19 nt, Artificial Sequence
  Description of Artificial Sequence: Synthetic oligonucleotide
caugugggcgccauuguug

SEQ ID NO: 527801 - RNA, 19 nt, Artificial Sequence
  Description of Artificial Sequence: Synthetic oligonucleotide
uugauguaugugagaaggu

SEQ ID NO: 527802 - RNA, 19 nt, Artificial Sequence
  Description of Artificial Sequence: Synthetic oligonucleotide
gcuaucaagugcuuagcag

SEQ ID NO: 527803 - RNA, 19 nt, Artificial Sequence
  Description of Artificial Sequence: Synthetic oligonucleotide
ugauguaugugagaaggua

SEQ ID NO: 527804 - RNA, 19 nt, Artificial Sequence
  Description of Artificial Sequence: Synthetic oligonucleotide
cuuccggcauauuuucuag

SEQ ID NO: 527805 - RNA, 19 nt, Artificial Sequence
  Description of Artificial Sequence: Synthetic oligonucleotide
agccugucuggagugaagc

SEQ ID NO: 527806 - RNA, 19 nt, Artificial Sequence
  Description of Artificial Sequence: Synthetic oligonucleotide
uaacacuagggagaucgcc

SEQ ID NO: 527807 - RNA, 19 nt, Artificial Sequence
  Description of Artificial Sequence: Synthetic oligonucleotide
augcucuguaucccgccgc

SEQ ID NO: 527808 - RNA, 19 nt, Artificial Sequence
  Description of Artificial Sequence: Synthetic oligonucleotide
uucgaauggaggccuuccc

SEQ ID NO: 527809 - RNA, 19 nt, Artificial Sequence
  Description of Artificial Sequence: Synthetic oligonucleotide
ggcgccauuguugaaaagg

SEQ ID NO: 527810 - RNA, 19 nt, Artificial Sequence
  Description of Artificial Sequence: Synthetic oligonucleotide
agcuaucaagugcuuagca

SEQ ID NO: 527811 - RNA, 19 nt, Artificial Sequence
  Description of Artificial Sequence: Synthetic oligonucleotide
caccgaaaagagcagcagc

SEQ ID NO: 527812 - RNA, 19 nt, Artificial Sequence
  Description of Artificial Sequence: Synthetic oligonucleotide
agguugaaagcacucucca

SEQ ID NO: 527813 - RNA, 19 nt, Artificial Sequence
  Description of Artificial Sequence: Synthetic oligonucleotide
ggaguaaucgacccauuug

SEQ ID NO: 527814 - RNA, 19 nt, Artificial Sequence
  Description of Artificial Sequence: Synthetic oligonucleotide
ugacuaucauccgaaucgc

SEQ ID NO: 527815 - RNA, 19 nt, Artificial Sequence
  Description of Artificial Sequence: Synthetic oligonucleotide
agucguaccaccaccuguc

SEQ ID NO: 527816 - RNA, 19 nt, Artificial Sequence
  Description of Artificial Sequence: Synthetic oligonucleotide
aaccuaagagucaaugcau

SEQ ID NO: 527817 - RNA, 19 nt, Artificial Sequence
  Description of Artificial Sequence: Synthetic oligonucleotide
ucuagacauccucgaagga

SEQ ID NO: 527818 - RNA, 19 nt, Artificial Sequence
  Description of Artificial Sequence: Synthetic oligonucleotide
aguucacaguuaagcagcc

SEQ ID NO: 527819 - RNA, 19 nt, Artificial Sequence
  Description of Artificial Sequence: Synthetic oligonucleotide
uaguaucggacuucuggcu

SEQ ID NO: 527820 - RNA, 19 nt, Artificial Sequence
  Description of Artificial Sequence: Synthetic oligonucleotide
aguggacuguuuucuuguc

SEQ ID NO: 527821 - RNA, 19 nt, Artificial Sequence
  Description of Artificial Sequence: Synthetic oligonucleotide
uguaugugagaagguauuc

SEQ ID NO: 527822 - RNA, 19 nt, Artificial Sequence
  Description of Artificial Sequence: Synthetic oligonucleotide
ugccgaaugaugucaucca

SEQ ID NO: 527823 - RNA, 19 nt, Artificial Sequence
  Description of Artificial Sequence: Synthetic oligonucleotide
cauuuggugacccacugaa

SEQ ID NO: 527824 - RNA, 19 nt, Artificial Sequence
  Description of Artificial Sequence: Synthetic oligonucleotide
ggauauccuguccucauug

SEQ ID NO: 527825 - RNA, 19 nt, Artificial Sequence
  Description of Artificial Sequence: Synthetic oligonucleotide
gcauuguauaccuugcuuc

SEQ ID NO: 527826 - RNA, 19 nt, Artificial Sequence
  Description of Artificial Sequence: Synthetic oligonucleotide
uuguugaaaaggacuccaa

SEQ ID NO: 527827 - RNA, 19 nt, Artificial Sequence
  Description of Artificial Sequence: Synthetic oligonucleotide
acugcggauguuccagauc

SEQ ID NO: 527828 - RNA, 19 nt, Artificial Sequence
  Description of Artificial Sequence: Synthetic oligonucleotide
aggucuucgaauaucagua

SEQ ID NO: 527829 - RNA, 19 nt, Artificial Sequence
  Description of Artificial Sequence: Synthetic oligonucleotide
agaaagaagucaugccgaa

SEQ ID NO: 527830 - RNA, 19 nt, Artificial Sequence
  Description of Artificial Sequence: Synthetic oligonucleotide
ucauuauaucuugcuuugc

SEQ ID NO: 527831 - RNA, 19 nt, Artificial Sequence
  Description of Artificial Sequence: Synthetic oligonucleotide
accgaaaagagcagcagca

SEQ ID NO: 527832 - RNA, 19 nt, Artificial Sequence
  Description of Artificial Sequence: Synthetic oligonucleotide
uggaguaaucgacccauuu

SEQ ID NO: 527833 - RNA, 19 nt, Artificial Sequence
  Description of Artificial Sequence: Synthetic oligonucleotide
ugucugauucacagccaug

SEQ ID NO: 527834 - RNA, 19 nt, Artificial Sequence
  Description of Artificial Sequence: Synthetic oligonucleotide
uguagccuuuaaacaacaa

SEQ ID NO: 527835 - RNA, 19 nt, Artificial Sequence
  Description of Artificial Sequence: Synthetic oligonucleotide
uaggguccacucaaaauuu

SEQ ID NO: 527836 - RNA, 19 nt, Artificial Sequence
  Description of Artificial Sequence: Synthetic oligonucleotide
uucccaugguacuaucuuc

SEQ ID NO: 527837 - RNA, 19 nt, Artificial Sequence
  Description of Artificial Sequence: Synthetic oligonucleotide
augucugauucacagccau

SEQ ID NO: 527838 - RNA, 19 nt, Artificial Sequence
  Description of Artificial Sequence: Synthetic oligonucleotide
auucacaguuccaaguccu

SEQ ID NO: 527839 - RNA, 19 nt, Artificial Sequence
  Description of Artificial Sequence: Synthetic oligonucleotide
ucagucguaccaccaccug

SEQ ID NO: 527840 - RNA, 19 nt, Artificial Sequence
  Description of Artificial Sequence: Synthetic oligonucleotide
ggagagauaauuuggggua

SEQ ID NO: 527841 - RNA, 19 nt, Artificial Sequence
  Description of Artificial Sequence: Synthetic oligonucleotide
accgucacuugacuaauaa

SEQ ID NO: 527842 - RNA, 19 nt, Artificial Sequence
  Description of Artificial Sequence: Synthetic oligonucleotide
gaggucuucgaauaucagu

SEQ ID NO: 527843 - RNA, 19 nt, Artificial Sequence
  Description of Artificial Sequence: Synthetic oligonucleotide
guuaagcagccaaaagcug

SEQ ID NO: 527844 - RNA, 19 nt, Artificial Sequence
  Description of Artificial Sequence: Synthetic oligonucleotide
auauccuguccucauugau

SEQ ID NO: 527845 - RNA, 19 nt, Artificial Sequence
  Description of Artificial Sequence: Synthetic oligonucleotide
gagagauaauuugggguac

SEQ ID NO: 527846 - RNA, 19 nt, Artificial Sequence
  Description of Artificial Sequence: Synthetic oligonucleotide
augcuagcuaucaagugcu

SEQ ID NO: 527847 - RNA, 19 nt, Artificial Sequence
  Description of Artificial Sequence: Synthetic oligonucleotide
acuaucauccgaaucgcau

SEQ ID NO: 527848 - RNA, 19 nt, Artificial Sequence
  Description of Artificial Sequence: Synthetic oligonucleotide
acuagggagaucgccacca

SEQ ID NO: 527849 - RNA, 19 nt, Artificial Sequence
  Description of Artificial Sequence: Synthetic oligonucleotide
augugagccauggaccguc

SEQ ID NO: 527850 - RNA, 19 nt, Artificial Sequence
  Description of Artificial Sequence: Synthetic oligonucleotide
aacacuucccaugguacua

SEQ ID NO: 527851 - RNA, 19 nt, Artificial Sequence
  Description of Artificial Sequence: Synthetic oligonucleotide
aauucuuagcugggcuuga

SEQ ID NO: 527852 - RNA, 19 nt, Artificial Sequence
  Description of Artificial Sequence: Synthetic oligonucleotide
cccuucaggaaguauauuc

SEQ ID NO: 527853 - RNA, 19 nt, Artificial Sequence
  Description of Artificial Sequence: Synthetic oligonucleotide
augugggcgccauuguuga

SEQ ID NO: 527854 - RNA, 19 nt, Artificial Sequence
  Description of Artificial Sequence: Synthetic oligonucleotide
uucccuuaugcaccuguau

SEQ ID NO: 527855 - RNA, 19 nt, Artificial Sequence
  Description of Artificial Sequence: Synthetic oligonucleotide
cauuauaucuugcuuugcu

SEQ ID NO: 527856 - RNA, 19 nt, Artificial Sequence
  Description of Artificial Sequence: Synthetic oligonucleotide
aguauuccaagagaaugua

SEQ ID NO: 527857 - RNA, 19 nt, Artificial Sequence
  Description of Artificial Sequence: Synthetic oligonucleotide
auaccuugcuucccuuaug

SEQ ID NO: 527858 - RNA, 19 nt, Artificial Sequence
  Description of Artificial Sequence: Synthetic oligonucleotide
ggggcuguaauaaauaaaa

SEQ ID NO: 527859 - RNA, 19 nt, Artificial Sequence
  Description of Artificial Sequence: Synthetic oligonucleotide
uaugcaccuguauguuucu

SEQ ID NO: 527860 - RNA, 19 nt, Artificial Sequence
  Description of Artificial Sequence: Synthetic oligonucleotide
uagcuaucaagugcuuagc

SEQ ID NO: 527861 - RNA, 19 nt, Artificial Sequence
  Description of Artificial Sequence: Synthetic oligonucleotide
aucauccgaaucgcauccc

SEQ ID NO: 527862 - RNA, 19 nt, Artificial Sequence
  Description of Artificial Sequence: Synthetic oligonucleotide
ggaaugcacuuuuccagcc

SEQ ID NO: 527863 - RNA, 19 nt, Artificial Sequence
  Description of Artificial Sequence: Synthetic oligonucleotide
gaacuguauggcaacagcu

SEQ ID NO: 527864 - RNA, 19 nt, Artificial Sequence
  Description of Artificial Sequence: Synthetic oligonucleotide
gauguaugugagaagguau

SEQ ID NO: 527865 - RNA, 19 nt, Artificial Sequence
  Description of Artificial Sequence: Synthetic oligonucleotide
caacuguacaccuuaggcu

SEQ ID NO: 527866 - RNA, 19 nt, Artificial Sequence
  Description of Artificial Sequence: Synthetic oligonucleotide
ugagguaguaucggacuuc

SEQ ID NO: 527867 - RNA, 19 nt, Artificial Sequence
  Description of Artificial Sequence: Synthetic oligonucleotide
ugcucuguaucccgccgcu

SEQ ID NO: 527868 - RNA, 19 nt, Artificial Sequence
  Description of Artificial Sequence: Synthetic oligonucleotide
acuugacuaauaaauuguu

SEQ ID NO: 527869 - RNA, 19 nt, Artificial Sequence
  Description of Artificial Sequence: Synthetic oligonucleotide
agaucgccaccauccauga

SEQ ID NO: 527870 - RNA, 19 nt, Artificial Sequence
  Description of Artificial Sequence: Synthetic oligonucleotide
cauaauaguggacuguuuu

SEQ ID NO: 527871 - RNA, 19 nt, Artificial Sequence
  Description of Artificial Sequence: Synthetic oligonucleotide
ugccaagcgucccucugac

SEQ ID NO: 527872 - RNA, 19 nt, Artificial Sequence
  Description of Artificial Sequence: Synthetic oligonucleotide
auuugugguuucgaaugga

SEQ ID NO: 527873 - RNA, 19 nt, Artificial Sequence
  Description of Artificial Sequence: Synthetic oligonucleotide
gagauaauuugggguacca

SEQ ID NO: 527874 - RNA, 19 nt, Artificial Sequence
  Description of Artificial Sequence: Synthetic oligonucleotide
aucaugccuaagcuuguaa

SEQ ID NO: 527875 - RNA, 19 nt, Artificial Sequence
  Description of Artificial Sequence: Synthetic oligonucleotide
auaaauuguucaggggcau

SEQ ID NO: 527876 - RNA, 19 nt, Artificial Sequence
  Description of Artificial Sequence: Synthetic oligonucleotide
ucgaaggacucuugccacu

SEQ ID NO: 527877 - RNA, 19 nt, Artificial Sequence
  Description of Artificial Sequence: Synthetic oligonucleotide
guucgugaagguacuugag

SEQ ID NO: 527878 - RNA, 19 nt, Artificial Sequence
  Description of Artificial Sequence: Synthetic oligonucleotide
auccgaaucgcauccccaa

SEQ ID NO: 527879 - RNA, 19 nt, Artificial Sequence
  Description of Artificial Sequence: Synthetic oligonucleotide
aguaaucgacccauuuggu

SEQ ID NO: 527880 - RNA, 19 nt, Artificial Sequence
  Description of Artificial Sequence: Synthetic oligonucleotide
uggcaacuguagugguagg

SEQ ID NO: 527881 - RNA, 19 nt, Artificial Sequence
  Description of Artificial Sequence: Synthetic oligonucleotide
aguugucagucugaaaguu

SEQ ID NO: 527882 - RNA, 19 nt, Artificial Sequence
  Description of Artificial Sequence: Synthetic oligonucleotide
gucaugccgaaugauguca

SEQ ID NO: 527883 - RNA, 19 nt, Artificial Sequence
  Description of Artificial Sequence: Synthetic oligonucleotide
accgucuacugcaguauuc

SEQ ID NO: 527884 - RNA, 19 nt, Artificial Sequence
  Description of Artificial Sequence: Synthetic oligonucleotide
uguauaccuugcuucccuu

SEQ ID NO: 527885 - RNA, 19 nt, Artificial Sequence
  Description of Artificial Sequence: Synthetic oligonucleotide
guucccuagcuugagaucu

SEQ ID NO: 527886 - RNA, 19 nt, Artificial Sequence
  Description of Artificial Sequence: Synthetic oligonucleotide
auguauggccauaguucac

SEQ ID NO: 527887 - RNA, 19 nt, Artificial Sequence
  Description of Artificial Sequence: Synthetic oligonucleotide
ucgccaaccuucaguucca

SEQ ID NO: 527888 - RNA, 19 nt, Artificial Sequence
  Description of Artificial Sequence: Synthetic oligonucleotide
cauauuuucuagacauccu

SEQ ID NO: 527889 - RNA, 19 nt, Artificial Sequence
  Description of Artificial Sequence: Synthetic oligonucleotide
gggagagauaauuuggggu

SEQ ID NO: 527890 - RNA, 19 nt, Artificial Sequence
  Description of Artificial Sequence: Synthetic oligonucleotide
uggauauccuguccucauu

SEQ ID NO: 527891 - RNA, 19 nt, Artificial Sequence
  Description of Artificial Sequence: Synthetic oligonucleotide
aaggacguggucagcugcu

SEQ ID NO: 527892 - RNA, 19 nt, Artificial Sequence
  Description of Artificial Sequence: Synthetic oligonucleotide
cugccugagguaguaucgg

SEQ ID NO: 527893 - RNA, 19 nt, Artificial Sequence
  Description of Artificial Sequence: Synthetic oligonucleotide
ugggcgccauuguugaaaa

SEQ ID NO: 527894 - RNA, 19 nt, Artificial Sequence
  Description of Artificial Sequence: Synthetic oligonucleotide
gaacuacagucagucguac

SEQ ID NO: 527895 - RNA, 19 nt, Artificial Sequence
  Description of Artificial Sequence: Synthetic oligonucleotide
auguaugugagaagguauu

SEQ ID NO: 527896 - RNA, 19 nt, Artificial Sequence
  Description of Artificial Sequence: Synthetic oligonucleotide
ucgacccauuuggugaccc

SEQ ID NO: 527897 - RNA, 19 nt, Artificial Sequence
  Description of Artificial Sequence: Synthetic oligonucleotide
uccgaaucgcauccccaau

SEQ ID NO: 527898 - RNA, 19 nt, Artificial Sequence
  Description of Artificial Sequence: Synthetic oligonucleotide
cauccaaacugggacgguc

SEQ ID NO: 527899 - RNA, 19 nt, Artificial Sequence
  Description of Artificial Sequence: Synthetic oligonucleotide
gagccgaggucuucgaaua

SEQ ID NO: 527900 - RNA, 19 nt, Artificial Sequence
  Description of Artificial Sequence: Synthetic oligonucleotide
gcaugcuagcuaucaagug

SEQ ID NO: 527901 - RNA, 19 nt, Artificial Sequence
  Description of Artificial Sequence: Synthetic oligonucleotide
cuaagcuuguaaaugucuu

SEQ ID NO: 527902 - RNA, 19 nt, Artificial Sequence
  Description of Artificial Sequence: Synthetic oligonucleotide
agucaacuguacaccuuag

SEQ ID NO: 527903 - RNA, 19 nt, Artificial Sequence
  Description of Artificial Sequence: Synthetic oligonucleotide
uacuaucuucaaggcauuc

SEQ ID NO: 527904 - RNA, 19 nt, Artificial Sequence
  Description of Artificial Sequence: Synthetic oligonucleotide
ugugagccauggaccgucu

SEQ ID NO: 527905 - RNA, 19 nt, Artificial Sequence
  Description of Artificial Sequence: Synthetic oligonucleotide
uaucccgccgcuggcuucc

SEQ ID NO: 527906 - RNA, 19 nt, Artificial Sequence
  Description of Artificial Sequence: Synthetic oligonucleotide
ucugaaaguuguggauauc

SEQ ID NO: 527907 - RNA, 19 nt, Artificial Sequence
  Description of Artificial Sequence: Synthetic oligonucleotide
agacauccucgaaggacuc

SEQ ID NO: 527908 - RNA, 19 nt, Artificial Sequence
  Description of Artificial Sequence: Synthetic oligonucleotide
cuuagcaggggccagcaau

SEQ ID NO: 527909 - RNA, 19 nt, Artificial Sequence
  Description of Artificial Sequence: Synthetic oligonucleotide
guaugugagaagguauucu

SEQ ID NO: 527910 - RNA, 19 nt, Artificial Sequence
  Description of Artificial Sequence: Synthetic oligonucleotide
aucgacccauuuggugacc

SEQ ID NO: 527911 - RNA, 19 nt, Artificial Sequence
  Description of Artificial Sequence: Synthetic oligonucleotide
ugggacgguccucuggguu

SEQ ID NO: 527912 - RNA, 19 nt, Artificial Sequence
  Description of Artificial Sequence: Synthetic oligonucleotide
guaacacuagggagaucgc

SEQ ID NO: 527913 - RNA, 19 nt, Artificial Sequence
  Description of Artificial Sequence: Synthetic oligonucleotide
cacuagggagaucgccacc

SEQ ID NO: 527914 - RNA, 19 nt, Artificial Sequence
  Description of Artificial Sequence: Synthetic oligonucleotide
gaucgccaccauccaugag

SEQ ID NO: 527915 - RNA, 19 nt, Artificial Sequence
  Description of Artificial Sequence: Synthetic oligonucleotide
cauccgaaucgcaucccca

SEQ ID NO: 527916 - RNA, 19 nt, Artificial Sequence
  Description of Artificial Sequence: Synthetic oligonucleotide
caugccgaaugaugucauc

SEQ ID NO: 527917 - RNA, 19 nt, Artificial Sequence
  Description of Artificial Sequence: Synthetic oligonucleotide
gguacccaaagccauauuu

SEQ ID NO: 527918 - RNA, 19 nt, Artificial Sequence
  Description of Artificial Sequence: Synthetic oligonucleotide
ggcaacuguagugguaggc

SEQ ID NO: 527919 - RNA, 19 nt, Artificial Sequence
  Description of Artificial Sequence: Synthetic oligonucleotide
gucguaccaccaccugucc

SEQ ID NO: 527920 - RNA, 19 nt, Artificial Sequence
  Description of Artificial Sequence: Synthetic oligonucleotide
uucccuagcuugagaucuc

SEQ ID NO: 527921 - RNA, 19 nt, Artificial Sequence
  Description of Artificial Sequence: Synthetic oligonucleotide
ccuuaggcuggucugguuc

SEQ ID NO: 527922 - RNA, 19 nt, Artificial Sequence
  Description of Artificial Sequence: Synthetic oligonucleotide
gacuaucauccgaaucgca

SEQ ID NO: 527923 - RNA, 19 nt, Artificial Sequence
  Description of Artificial Sequence: Synthetic oligonucleotide
gcaucguauacaucacaca

SEQ ID NO: 527924 - RNA, 19 nt, Artificial Sequence
  Description of Artificial Sequence: Synthetic oligonucleotide
cauaggguccacucaaaau

SEQ ID NO: 527925 - RNA, 19 nt, Artificial Sequence
  Description of Artificial Sequence: Synthetic oligonucleotide
cgaauggaggccuucccag

SEQ ID NO: 527926 - RNA, 19 nt, Artificial Sequence
  Description of Artificial Sequence: Synthetic oligonucleotide
uuggaguaaucgacccauu

SEQ ID NO: 527927 - RNA, 19 nt, Artificial Sequence
  Description of Artificial Sequence: Synthetic oligonucleotide
uaucggacuucuggcucug

SEQ ID NO: 527928 - RNA, 19 nt, Artificial Sequence
  Description of Artificial Sequence: Synthetic oligonucleotide
ucgcauccccaaucugcug

SEQ ID NO: 527929 - RNA, 19 nt, Artificial Sequence
  Description of Artificial Sequence: Synthetic oligonucleotide
ccacaaguguaauucaaaa

SEQ ID NO: 527930 - RNA, 19 nt, Artificial Sequence
  Description of Artificial Sequence: Synthetic oligonucleotide
gugucauuauaucuugcuu

SEQ ID NO: 527931 - RNA, 19 nt, Artificial Sequence
  Description of Artificial Sequence: Synthetic oligonucleotide
gucccauaggguccacuca

SEQ ID NO: 527932 - RNA, 19 nt, Artificial Sequence
  Description of Artificial Sequence: Synthetic oligonucleotide
guaucggacuucuggcucu

SEQ ID NO: 527933 - RNA, 19 nt, Artificial Sequence
  Description of Artificial Sequence: Synthetic oligonucleotide
ccgucuacugcaguauucc

SEQ ID NO: 527934 - RNA, 19 nt, Artificial Sequence
  Description of Artificial Sequence: Synthetic oligonucleotide
aggacguggucagcugcuc

SEQ ID NO: 527935 - RNA, 19 nt, Artificial Sequence
  Description of Artificial Sequence: Synthetic oligonucleotide
gucacuugacuaauaaauu

SEQ ID NO: 527936 - RNA, 19 nt, Artificial Sequence
  Description of Artificial Sequence: Synthetic oligonucleotide
auggaccgucuacugcagu

SEQ ID NO: 527937 - RNA, 19 nt, Artificial Sequence
  Description of Artificial Sequence: Synthetic oligonucleotide
cagccacaaguguaauuca

SEQ ID NO: 527938 - RNA, 19 nt, Artificial Sequence
  Description of Artificial Sequence: Synthetic oligonucleotide
ccaaguuccgcauaauagu

SEQ ID NO: 527939 - RNA, 19 nt, Artificial Sequence
  Description of Artificial Sequence: Synthetic oligonucleotide
agguagagccgaggucuuc

SEQ ID NO: 527940 - RNA, 19 nt, Artificial Sequence
  Description of Artificial Sequence: Synthetic oligonucleotide
agggcauauuccauucgau

SEQ ID NO: 527941 - RNA, 19 nt, Artificial Sequence
  Description of Artificial Sequence: Synthetic oligonucleotide
guagagccgaggucuucga

SEQ ID NO: 527942 - RNA, 19 nt, Artificial Sequence
  Description of Artificial Sequence: Synthetic oligonucleotide
cgucacuugacuaauaaau

SEQ ID NO: 527943 - RNA, 19 nt, Artificial Sequence
  Description of Artificial Sequence: Synthetic oligonucleotide
guuccgcauaauaguggac

SEQ ID NO: 527944 - RNA, 19 nt, Artificial Sequence
  Description of Artificial Sequence: Synthetic oligonucleotide
acccauuuggugacccacu

SEQ ID NO: 527945 - RNA, 19 nt, Artificial Sequence
  Description of Artificial Sequence: Synthetic oligonucleotide
cccauuuggugacccacug

SEQ ID NO: 527946 - RNA, 19 nt, Artificial Sequence
  Description of Artificial Sequence: Synthetic oligonucleotide
ccgaaucgcauccccaauc

SEQ ID NO: 527947 - RNA, 19 nt, Artificial Sequence
  Description of Artificial Sequence: Synthetic oligonucleotide
ggguccacucaaaauuuuc

SEQ ID NO: 527948 - RNA, 19 nt, Artificial Sequence
  Description of Artificial Sequence: Synthetic oligonucleotide
cuucccuuaugcaccugua

SEQ ID NO: 527949 - RNA, 19 nt, Artificial Sequence
  Description of Artificial Sequence: Synthetic oligonucleotide
gcgccauuguugaaaagga

SEQ ID NO: 527950 - RNA, 19 nt, Artificial Sequence
  Description of Artificial Sequence: Synthetic oligonucleotide
gccauaguucacaguuaag

SEQ ID NO: 527951 - RNA, 19 nt, Artificial Sequence
  Description of Artificial Sequence: Synthetic oligonucleotide
guagugguaggcggcugga

SEQ ID NO: 527952 - RNA, 19 nt, Artificial Sequence
  Description of Artificial Sequence: Synthetic oligonucleotide
acuugaguccagacacaau

SEQ ID NO: 527953 - RNA, 19 nt, Artificial Sequence
  Description of Artificial Sequence: Synthetic oligonucleotide
ggccaaguuccgcauaaua

SEQ ID NO: 527954 - RNA, 19 nt, Artificial Sequence
  Description of Artificial Sequence: Synthetic oligonucleotide
ggcauuguauaccuugcuu

SEQ ID NO: 527955 - RNA, 19 nt, Artificial Sequence
  Description of Artificial Sequence: Synthetic oligonucleotide
gccugagguaguaucggac

SEQ ID NO: 527956 - RNA, 19 nt, Artificial Sequence
  Description of Artificial Sequence: Synthetic oligonucleotide
gucagucguaccaccaccu

SEQ ID NO: 527957 - RNA, 19 nt, Artificial Sequence
  Description of Artificial Sequence: Synthetic oligonucleotide
guaucccgccgcuggcuuc

SEQ ID NO: 527958 - RNA, 19 nt, Artificial Sequence
  Description of Artificial Sequence: Synthetic oligonucleotide
cagucguaccaccaccugu

SEQ ID NO: 527959 - RNA, 19 nt, Artificial Sequence
  Description of Artificial Sequence: Synthetic oligonucleotide
gccgaaugaugucauccaa

SEQ ID NO: 527960 - RNA, 19 nt, Artificial Sequence
  Description of Artificial Sequence: Synthetic oligonucleotide
cugaggaacuacagucagu

SEQ ID NO: 527961 - RNA, 19 nt, Artificial Sequence
  Description of Artificial Sequence: Synthetic oligonucleotide
agagaaccuaagagucaau

SEQ ID NO: 527962 - RNA, 19 nt, Artificial Sequence
  Description of Artificial Sequence: Synthetic oligonucleotide
ccuaagagucaaugcaucu

SEQ ID NO: 527963 - RNA, 19 nt, Artificial Sequence
  Description of Artificial Sequence: Synthetic oligonucleotide
gccacaaguguaauucaaa

SEQ ID NO: 527964 - RNA, 19 nt, Artificial Sequence
  Description of Artificial Sequence: Synthetic oligonucleotide
ggucugguuccagcagucc

SEQ ID NO: 527965 - RNA, 19 nt, Artificial Sequence
  Description of Artificial Sequence: Synthetic oligonucleotide
gguaggcggcuggagcucc

SEQ ID NO: 527966 - RNA, 19 nt, Artificial Sequence
  Description of Artificial Sequence: Synthetic oligonucleotide
cggcauauuuucuagacau

SEQ ID NO: 527967 - RNA, 19 nt, Artificial Sequence
  Description of Artificial Sequence: Synthetic oligonucleotide
cugagguaguaucggacuu

SEQ ID NO: 527968 - RNA, 19 nt, Artificial Sequence
  Description of Artificial Sequence: Synthetic oligonucleotide
gggguaccacauauuguuc

SEQ ID NO: 527969 - RNA, 19 nt, Artificial Sequence
  Description of Artificial Sequence: Synthetic oligonucleotide
ccggcauauuuucuagaca

SEQ ID NO: 527970 - RNA, 19 nt, Artificial Sequence
  Description of Artificial Sequence: Synthetic oligonucleotide
uggccaaguuccgcauaau

SEQ ID NO: 527971 - RNA, 19 nt, Artificial Sequence
  Description of Artificial Sequence: Synthetic oligonucleotide
gaccgucuacugcaguauu

SEQ ID NO: 527972 - RNA, 19 nt, Artificial Sequence
  Description of Artificial Sequence: Synthetic oligonucleotide
gccgaggucuucgaauauc

SEQ ID NO: 527973 - RNA, 19 nt, Artificial Sequence
  Description of Artificial Sequence: Synthetic oligonucleotide
gggcaucugucgcugggaa

SEQ ID NO: 527974 - RNA, 19 nt, Artificial Sequence
  Description of Artificial Sequence: Synthetic oligonucleotide
caagcgucccucugacuau

SEQ ID NO: 527975 - RNA, 19 nt, Artificial Sequence
  Description of Artificial Sequence: Synthetic oligonucleotide
gggcgccauuguugaaaag

SEQ ID NO: 527976 - RNA, 19 nt, Artificial Sequence
  Description of Artificial Sequence: Synthetic oligonucleotide
ccgucacuugacuaauaaa

SEQ ID NO: 527977 - RNA, 19 nt, Artificial Sequence
  Description of Artificial Sequence: Synthetic oligonucleotide
cuucuauguuccagugguu

SEQ ID NO: 527978 - RNA, 19 nt, Artificial Sequence
  Description of Artificial Sequence: Synthetic oligonucleotide
aggcucaugugggcgccau

SEQ ID NO: 527979 - RNA, 19 nt, Artificial Sequence
  Description of Artificial Sequence: Synthetic oligonucleotide
gcggcuggagcuccucauc

SEQ ID NO: 527980 - RNA, 19 nt, Artificial Sequence
  Description of Artificial Sequence: Synthetic oligonucleotide
caguaacacuagggagauc

SEQ ID NO: 527981 - RNA, 19 nt, Artificial Sequence
  Description of Artificial Sequence: Synthetic oligonucleotide
caccgucacuugacuaaua

SEQ ID NO: 527982 - RNA, 19 nt, Artificial Sequence
  Description of Artificial Sequence: Synthetic oligonucleotide
gugagccauggaccgucua

SEQ ID NO: 527983 - RNA, 19 nt, Artificial Sequence
  Description of Artificial Sequence: Synthetic oligonucleotide
gaggcucaugugggcgcca

SEQ ID NO: 527984 - RNA, 19 nt, Artificial Sequence
  Description of Artificial Sequence: Synthetic oligonucleotide
guacuaucuucaaggcauu

SEQ ID NO: 527985 - RNA, 19 nt, Artificial Sequence
  Description of Artificial Sequence: Synthetic oligonucleotide
ggacguggucagcugcucu

SEQ ID NO: 527986 - RNA, 19 nt, Artificial Sequence
  Description of Artificial Sequence: Synthetic oligonucleotide
gagucccauaggguccacu

SEQ ID NO: 527987 - RNA, 19 nt, Artificial Sequence
  Description of Artificial Sequence: Synthetic oligonucleotide
gccuaaggcccagaugucu

SEQ ID NO: 527988 - RNA, 19 nt, Artificial Sequence
  Description of Artificial Sequence: Synthetic oligonucleotide
cuagggagaucgccaccau

SEQ ID NO: 527989 - RNA, 19 nt, Artificial Sequence
  Description of Artificial Sequence: Synthetic oligonucleotide
ggaccgucuacugcaguau

SEQ ID NO: 527990 - RNA, 19 nt, Artificial Sequence
  Description of Artificial Sequence: Synthetic oligonucleotide
ggacagcaugcuagcuauc

SEQ ID NO: 527991 - RNA, 19 nt, Artificial Sequence
  Description of Artificial Sequence: Synthetic oligonucleotide
gcuuagcaggggccagcaa

SEQ ID NO: 527992 - RNA, 19 nt, Artificial Sequence
  Description of Artificial Sequence: Synthetic oligonucleotide
cgcauaauaguggacuguu

SEQ ID NO: 527993 - RNA, 19 nt, Artificial Sequence
  Description of Artificial Sequence: Synthetic oligonucleotide
ccgcauaauaguggacugu

SEQ ID NO: 527994 - RNA, 19 nt, Artificial Sequence
  Description of Artificial Sequence: Synthetic oligonucleotide
cgacccauuuggugaccca

SEQ ID NO: 527995 - RNA, 19 nt, Artificial Sequence
  Description of Artificial Sequence: Synthetic oligonucleotide
guaggcggcuggagcuccu

SEQ ID NO: 527996 - RNA, 19 nt, Artificial Sequence
  Description of Artificial Sequence: Synthetic oligonucleotide
ccccaaucugcuguuuguu

SEQ ID NO: 527997 - RNA, 19 nt, Artificial Sequence
  Description of Artificial Sequence: Synthetic oligonucleotide
ucaauaauagcauucaugg

SEQ ID NO: 527998 - RNA, 19 nt, Artificial Sequence
  Description of Artificial Sequence: Synthetic oligonucleotide
auauuuauguuguugaucc

SEQ ID NO: 527999 - RNA, 19 nt, Artificial Sequence
  Description of Artificial Sequence: Synthetic oligonucleotide
ucauaagauauacugaacg

SEQ ID NO: 528000 - RNA, 19 nt, Artificial Sequence
  Description of Artificial Sequence: Synthetic oligonucleotide
agagcaaggauagagaugc

SEQ ID NO: 528001 - RNA, 19 nt, Artificial Sequence
  Description of Artificial Sequence: Synthetic oligonucleotide
ugcauauucaguaauaggu

SEQ ID NO: 528002 - RNA, 19 nt, Artificial Sequence
  Description of Artificial Sequence: Synthetic oligonucleotide
aaacacaauacucuucuuc

SEQ ID NO: 528003 - RNA, 19 nt, Artificial Sequence
  Description of Artificial Sequence: Synthetic oligonucleotide
auauacugaacguauauag

SEQ ID NO: 528004 - RNA, 19 nt, Artificial Sequence
  Description of Artificial Sequence: Synthetic oligonucleotide
gaucuuucaaacucaagcg

SEQ ID NO: 528005 - RNA, 19 nt, Artificial Sequence
  Description of Artificial Sequence: Synthetic oligonucleotide
aggugaaauuaucagaacc

SEQ ID NO: 528006 - RNA, 19 nt, Artificial Sequence
  Description of Artificial Sequence: Synthetic oligonucleotide
ucaguaauagguaacuugc

SEQ ID NO: 528007 - RNA, 19 nt, Artificial Sequence
  Description of Artificial Sequence: Synthetic oligonucleotide
ucugaagaaaccuuauccg

SEQ ID NO: 528008 - RNA, 19 nt, Artificial Sequence
  Description of Artificial Sequence: Synthetic oligonucleotide
caugaaaacauauuguuuc

SEQ ID NO: 528009 - RNA, 19 nt, Artificial Sequence
  Description of Artificial Sequence: Synthetic oligonucleotide
cuuaccaauccuuuggugg

SEQ ID NO: 528010 - RNA, 19 nt, Artificial Sequence
  Description of Artificial Sequence: Synthetic oligonucleotide
uucuuauucacuuuaaaau

SEQ ID NO: 528011 - RNA, 19 nt, Artificial Sequence
  Description of Artificial Sequence: Synthetic oligonucleotide
aaacacaucacgccgcuuc

SEQ ID NO: 528012 - RNA, 19 nt, Artificial Sequence
  Description of Artificial Sequence: Synthetic oligonucleotide
agaaaaguaaagucuggcg

SEQ ID NO: 528013 - RNA, 19 nt, Artificial Sequence
  Description of Artificial Sequence: Synthetic oligonucleotide
gaggaaaucaguaucaggc

SEQ ID NO: 528014 - RNA, 19 nt, Artificial Sequence
  Description of Artificial Sequence: Synthetic oligonucleotide
aucaguaaauguuauuuuc

SEQ ID NO: 528015 - RNA, 19 nt, Artificial Sequence
  Description of Artificial Sequence: Synthetic oligonucleotide
cacagcaagaccaagagac

SEQ ID NO: 528016 - RNA, 19 nt, Artificial Sequence
  Description of Artificial Sequence: Synthetic oligonucleotide
ucuaacguuucccacuugg

SEQ ID NO: 528017 - RNA, 19 nt, Artificial Sequence
  Description of Artificial Sequence: Synthetic oligonucleotide
acugaaauaagcucgaaau

SEQ ID NO: 528018 - RNA, 19 nt, Artificial Sequence
  Description of Artificial Sequence: Synthetic oligonucleotide
uucucuuuaagauccaacc

SEQ ID NO: 528019 - RNA, 19 nt, Artificial Sequence
  Description of Artificial Sequence: Synthetic oligonucleotide
guauauaggagacaaaaca

SEQ ID NO: 528020 - RNA, 19 nt, Artificial Sequence
  Description of Artificial Sequence: Synthetic oligonucleotide
ucaucaagaacuagcaucu

SEQ ID NO: 528021 - RNA, 19 nt, Artificial Sequence
  Description of Artificial Sequence: Synthetic oligonucleotide
aguaauagguaacuugcuc

SEQ ID NO: 528022 - RNA, 19 nt, Artificial Sequence
  Description of Artificial Sequence: Synthetic oligonucleotide
ugcguaaaaccucaaaugu

SEQ ID NO: 528023 - RNA, 19 nt, Artificial Sequence
  Description of Artificial Sequence: Synthetic oligonucleotide
ucuuucaaacucaagcgug

SEQ ID NO: 528024 - RNA, 19 nt, Artificial Sequence
  Description of Artificial Sequence: Synthetic oligonucleotide
aagcucgaaauucuucuac

SEQ ID NO: 528025 - RNA, 19 nt, Artificial Sequence
  Description of Artificial Sequence: Synthetic oligonucleotide
uuugcguaaaaccucaaau

SEQ ID NO: 528026 - RNA, 19 nt, Artificial Sequence
  Description of Artificial Sequence: Synthetic oligonucleotide
uuccuuaccaauccuuugg

SEQ ID NO: 528027 - RNA, 19 nt, Artificial Sequence
  Description of Artificial Sequence: Synthetic oligonucleotide
uguacaucguccaaguccu

SEQ ID NO: 528028 - RNA, 19 nt, Artificial Sequence
  Description of Artificial Sequence: Synthetic oligonucleotide
cagcucacaaacuauauag

SEQ ID NO: 528029 - RNA, 19 nt, Artificial Sequence
  Description of Artificial Sequence: Synthetic oligonucleotide
ugacuuuugaguaagugua

SEQ ID NO: 528030 - RNA, 19 nt, Artificial Sequence
  Description of Artificial Sequence: Synthetic oligonucleotide
auacugaacguauauagga

SEQ ID NO: 528031 - RNA, 19 nt, Artificial Sequence
  Description of Artificial Sequence: Synthetic oligonucleotide
aggaaaucaguaucaggcc

SEQ ID NO: 528032 - RNA, 19 nt, Artificial Sequence
  Description of Artificial Sequence: Synthetic oligonucleotide
acucaagcgugccaggucc

SEQ ID NO: 528033 - RNA, 19 nt, Artificial Sequence
  Description of Artificial Sequence: Synthetic oligonucleotide
ucuggugcagcucacaaac

SEQ ID NO: 528034 - RNA, 19 nt, Artificial Sequence
  Description of Artificial Sequence: Synthetic oligonucleotide
aguggcuugauuccuuacc

SEQ ID NO: 528035 - RNA, 19 nt, Artificial Sequence
  Description of Artificial Sequence: Synthetic oligonucleotide
uuuugaguaaguguaacac

SEQ ID NO: 528036 - RNA, 19 nt, Artificial Sequence
  Description of Artificial Sequence: Synthetic oligonucleotide
uucaugaacccaaauguac

SEQ ID NO: 528037 - RNA, 19 nt, Artificial Sequence
  Description of Artificial Sequence: Synthetic oligonucleotide
ugaagaaaccuuauccgug

SEQ ID NO: 528038 - RNA, 19 nt, Artificial Sequence
  Description of Artificial Sequence: Synthetic oligonucleotide
cuuuuagacgucuuucccg

SEQ ID NO: 528039 - RNA, 19 nt, Artificial Sequence
  Description of Artificial Sequence: Synthetic oligonucleotide
ucuuauucacuuuaaaauu

SEQ ID NO: 528040 - RNA, 19 nt, Artificial Sequence
  Description of Artificial Sequence: Synthetic oligonucleotide
uuaccaauccuuugguggg

SEQ ID NO: 528041 - RNA, 19 nt, Artificial Sequence
  Description of Artificial Sequence: Synthetic oligonucleotide
aagaagucgaccuggugug

SEQ ID NO: 528042 - RNA, 19 nt, Artificial Sequence
  Description of Artificial Sequence: Synthetic oligonucleotide
ugugcaaacgaguauauuu

SEQ ID NO: 528043 - RNA, 19 nt, Artificial Sequence
  Description of Artificial Sequence: Synthetic oligonucleotide
ucuuugucgaacuuguccu

SEQ ID NO: 528044 - RNA, 19 nt, Artificial Sequence
  Description of Artificial Sequence: Synthetic oligonucleotide
aaaaguaaagucuggcguu

SEQ ID NO: 528045 - RNA, 19 nt, Artificial Sequence
  Description of Artificial Sequence: Synthetic oligonucleotide
aacauauuguuucauccau

SEQ ID NO: 528046 - RNA, 19 nt, Artificial Sequence
  Description of Artificial Sequence: Synthetic oligonucleotide
uugcguaaaaccucaaaug

SEQ ID NO: 528047 - RNA, 19 nt, Artificial Sequence
  Description of Artificial Sequence: Synthetic oligonucleotide
acagagaauauuuaguuuu

SEQ ID NO: 528048 - RNA, 19 nt, Artificial Sequence
  Description of Artificial Sequence: Synthetic oligonucleotide
ucaucauuggugagggagg

SEQ ID NO: 528049 - RNA, 19 nt, Artificial Sequence
  Description of Artificial Sequence: Synthetic oligonucleotide
agauugguggcaugaaaac

SEQ ID NO: 528050 - RNA, 19 nt, Artificial Sequence
  Description of Artificial Sequence: Synthetic oligonucleotide
cacuggaauaagaaaagcc

SEQ ID NO: 528051 - RNA, 19 nt, Artificial Sequence
  Description of Artificial Sequence: Synthetic oligonucleotide
uacugaacguauauaggag

SEQ ID NO: 528052 - RNA, 19 nt, Artificial Sequence
  Description of Artificial Sequence: Synthetic oligonucleotide
agaacuagcaucugaagau

SEQ ID NO: 528053 - RNA, 19 nt, Artificial Sequence
  Description of Artificial Sequence: Synthetic oligonucleotide
gaguaggugaaauuaucag

SEQ ID NO: 528054 - RNA, 19 nt, Artificial Sequence
  Description of Artificial Sequence: Synthetic oligonucleotide
aguaggugaaauuaucaga

SEQ ID NO: 528055 - RNA, 19 nt, Artificial Sequence
  Description of Artificial Sequence: Synthetic oligonucleotide
uaaguguaacaccagcucu

SEQ ID NO: 528056 - RNA, 19 nt, Artificial Sequence
  Description of Artificial Sequence: Synthetic oligonucleotide
ucaagaacuagcaucugaa

SEQ ID NO: 528057 - RNA, 19 nt, Artificial Sequence
  Description of Artificial Sequence: Synthetic oligonucleotide
agcucgaaauucuucuacc

SEQ ID NO: 528058 - RNA, 19 nt, Artificial Sequence
  Description of Artificial Sequence: Synthetic oligonucleotide
uuuauguuguugauccucu

SEQ ID NO: 528059 - RNA, 19 nt, Artificial Sequence
  Description of Artificial Sequence: Synthetic oligonucleotide
gaaaccuuauccguggugc

SEQ ID NO: 528060 - RNA, 19 nt, Artificial Sequence
  Description of Artificial Sequence: Synthetic oligonucleotide
auauaguucuguuccaaug

SEQ ID NO: 528061 - RNA, 19 nt, Artificial Sequence
  Description of Artificial Sequence: Synthetic oligonucleotide
gugugcuuggaucaaaucc

SEQ ID NO: 528062 - RNA, 19 nt, Artificial Sequence
  Description of Artificial Sequence: Synthetic oligonucleotide
acuuaucaggaucuggaag

SEQ ID NO: 528063 - RNA, 19 nt, Artificial Sequence
  Description of Artificial Sequence: Synthetic oligonucleotide
uuuuagacgucuuucccga

SEQ ID NO: 528064 - RNA, 19 nt, Artificial Sequence
  Description of Artificial Sequence: Synthetic oligonucleotide
guaauagguaacuugcuca

SEQ ID NO: 528065 - RNA, 19 nt, Artificial Sequence
  Description of Artificial Sequence: Synthetic oligonucleotide
ucaugaacccaaauguacu

SEQ ID NO: 528066 - RNA, 19 nt, Artificial Sequence
  Description of Artificial Sequence: Synthetic oligonucleotide
aauauuuaguuuugacuuu

SEQ ID NO: 528067 - RNA, 19 nt, Artificial Sequence
  Description of Artificial Sequence: Synthetic oligonucleotide
uugagaacagguucagugc

SEQ ID NO: 528068 - RNA, 19 nt, Artificial Sequence
  Description of Artificial Sequence: Synthetic oligonucleotide
aacuugcucacauuaaaua

SEQ ID NO: 528069 - RNA, 19 nt, Artificial Sequence
  Description of Artificial Sequence: Synthetic oligonucleotide
auacucuucuucuuuaggu

SEQ ID NO: 528070 - RNA, 19 nt, Artificial Sequence
  Description of Artificial Sequence: Synthetic oligonucleotide
uuucgauaaugcuucauuc

SEQ ID NO: 528071 - RNA, 19 nt, Artificial Sequence
  Description of Artificial Sequence: Synthetic oligonucleotide
ucuuuaagauccaacccaa

SEQ ID NO: 528072 - RNA, 19 nt, Artificial Sequence
  Description of Artificial Sequence: Synthetic oligonucleotide
uaaagucuggcguuucuug

SEQ ID NO: 528073 - RNA, 19 nt, Artificial Sequence
  Description of Artificial Sequence: Synthetic oligonucleotide
uguuucauccauguguuga

SEQ ID NO: 528074 - RNA, 19 nt, Artificial Sequence
  Description of Artificial Sequence: Synthetic oligonucleotide
uuuagguggcuucucaaaa

SEQ ID NO: 528075 - RNA, 19 nt, Artificial Sequence
  Description of Artificial Sequence: Synthetic oligonucleotide
gauagagaugccugggcgc

SEQ ID NO: 528076 - RNA, 19 nt, Artificial Sequence
  Description of Artificial Sequence: Synthetic oligonucleotide
uuugacuuuugaguaagug

SEQ ID NO: 528077 - RNA, 19 nt, Artificial Sequence
  Description of Artificial Sequence: Synthetic oligonucleotide
uaauagguaacuugcucac

SEQ ID NO: 528078 - RNA, 19 nt, Artificial Sequence
  Description of Artificial Sequence: Synthetic oligonucleotide
cuucauaagauauacugaa

SEQ ID NO: 528079 - RNA, 19 nt, Artificial Sequence
  Description of Artificial Sequence: Synthetic oligonucleotide
aggauagagaugccugggc

SEQ ID NO: 528080 - RNA, 19 nt, Artificial Sequence
  Description of Artificial Sequence: Synthetic oligonucleotide
uacugaaccucuuugcaac

SEQ ID NO: 528081 - RNA, 19 nt, Artificial Sequence
  Description of Artificial Sequence: Synthetic oligonucleotide
aaaaccucaaaugucugau

SEQ ID NO: 528082 - RNA, 19 nt, Artificial Sequence
  Description of Artificial Sequence: Synthetic oligonucleotide
ucugucgaagaacugcaca

SEQ ID NO: 528083 - RNA, 19 nt, Artificial Sequence
  Description of Artificial Sequence: Synthetic oligonucleotide
cuaaagacaggccuguauc

SEQ ID NO: 528084 - RNA, 19 nt, Artificial Sequence
  Description of Artificial Sequence: Synthetic oligonucleotide
ucaggaucuuucaaacuca

SEQ ID NO: 528085 - RNA, 19 nt, Artificial Sequence
  Description of Artificial Sequence: Synthetic oligonucleotide
uacuuugcguaaaaccuca

SEQ ID NO: 528086 - RNA, 19 nt, Artificial Sequence
  Description of Artificial Sequence: Synthetic oligonucleotide
uggcaugaaaacauauugu

SEQ ID NO: 528087 - RNA, 19 nt, Artificial Sequence
  Description of Artificial Sequence: Synthetic oligonucleotide
uucauaagauauacugaac

SEQ ID NO: 528088 - RNA, 19 nt, Artificial Sequence
  Description of Artificial Sequence: Synthetic oligonucleotide
acugaacguauauaggaga

SEQ ID NO: 528089 - RNA, 19 nt, Artificial Sequence
  Description of Artificial Sequence: Synthetic oligonucleotide
ucagcuucguguuucaaau

SEQ ID NO: 528090 - RNA, 19 nt, Artificial Sequence
  Description of Artificial Sequence: Synthetic oligonucleotide
uagacgucuuucccgaugc

SEQ ID NO: 528091 - RNA, 19 nt, Artificial Sequence
  Description of Artificial Sequence: Synthetic oligonucleotide
agauauacugaacguauau

SEQ ID NO: 528092 - RNA, 19 nt, Artificial Sequence
  Description of Artificial Sequence: Synthetic oligonucleotide
uaacguuucccacuuggcu

SEQ ID NO: 528093 - RNA, 19 nt, Artificial Sequence
  Description of Artificial Sequence: Synthetic oligonucleotide
aaggcucuaacguuuccca

SEQ ID NO: 528094 - RNA, 19 nt, Artificial Sequence
  Description of Artificial Sequence: Synthetic oligonucleotide
aacucaagcgugccagguc

SEQ ID NO: 528095 - RNA, 19 nt, Artificial Sequence
  Description of Artificial Sequence: Synthetic oligonucleotide
aaggauagagaugccuggg

SEQ ID NO: 528096 - RNA, 19 nt, Artificial Sequence
  Description of Artificial Sequence: Synthetic oligonucleotide
ugucuaaguugauaccacc

SEQ ID NO: 528097 - RNA, 19 nt, Artificial Sequence
  Description of Artificial Sequence: Synthetic oligonucleotide
auccaacccaaacacauca

SEQ ID NO: 528098 - RNA, 19 nt, Artificial Sequence
  Description of Artificial Sequence: Synthetic oligonucleotide
gaagaagucgaccuggugu

SEQ ID NO: 528099 - RNA, 19 nt, Artificial Sequence
  Description of Artificial Sequence: Synthetic oligonucleotide
auggagagcaaggauagag

SEQ ID NO: 528100 - RNA, 19 nt, Artificial Sequence
  Description of Artificial Sequence: Synthetic oligonucleotide
auaauagcauucauggugu

SEQ ID NO: 528101 - RNA, 19 nt, Artificial Sequence
  Description of Artificial Sequence: Synthetic oligonucleotide
uggacauuuucucacugaa

SEQ ID NO: 528102 - RNA, 19 nt, Artificial Sequence
  Description of Artificial Sequence: Synthetic oligonucleotide
aaucuguggccacugcuga

SEQ ID NO: 528103 - RNA, 19 nt, Artificial Sequence
  Description of Artificial Sequence: Synthetic oligonucleotide
uucuuggugucacucauau

SEQ ID NO: 528104 - RNA, 19 nt, Artificial Sequence
  Description of Artificial Sequence: Synthetic oligonucleotide
aaacgaguauauuuauguu

SEQ ID NO: 528105 - RNA, 19 nt, Artificial Sequence
  Description of Artificial Sequence: Synthetic oligonucleotide
uuagacgucuuucccgaug

SEQ ID NO: 528106 - RNA, 19 nt, Artificial Sequence
  Description of Artificial Sequence: Synthetic oligonucleotide
aagauugguggcaugaaaa

SEQ ID NO: 528107 - RNA, 19 nt, Artificial Sequence
  Description of Artificial Sequence: Synthetic oligonucleotide
aucaagaacuagcaucuga

SEQ ID NO: 528108 - RNA, 19 nt, Artificial Sequence
  Description of Artificial Sequence: Synthetic oligonucleotide
aaaucuuggucuugggcua

SEQ ID NO: 528109 - RNA, 19 nt, Artificial Sequence
  Description of Artificial Sequence: Synthetic oligonucleotide
cucaauauugagaacaggu

SEQ ID NO: 528110 - RNA, 19 nt, Artificial Sequence
  Description of Artificial Sequence: Synthetic oligonucleotide
guaaguguaacaccagcuc

SEQ ID NO: 528111 - RNA, 19 nt, Artificial Sequence
  Description of Artificial Sequence: Synthetic oligonucleotide
uccguggugccacagcaag

SEQ ID NO: 528112 - RNA, 19 nt, Artificial Sequence
  Description of Artificial Sequence: Synthetic oligonucleotide
uggagagcaaggauagaga

SEQ ID NO: 528113 - RNA, 19 nt, Artificial Sequence
  Description of Artificial Sequence: Synthetic oligonucleotide
guugauaccaccaguguca

SEQ ID NO: 528114 - RNA, 19 nt, Artificial Sequence
  Description of Artificial Sequence: Synthetic oligonucleotide
acgaguauauuuauguugu

SEQ ID NO: 528115 - RNA, 19 nt, Artificial Sequence
  Description of Artificial Sequence: Synthetic oligonucleotide
guucguagcagauuucuga

SEQ ID NO: 528116 - RNA, 19 nt, Artificial Sequence
  Description of Artificial Sequence: Synthetic oligonucleotide
uugucuaaguugauaccac

SEQ ID NO: 528117 - RNA, 19 nt, Artificial Sequence
  Description of Artificial Sequence: Synthetic oligonucleotide
acguauauaggagacaaaa

SEQ ID NO: 528118 - RNA, 19 nt, Artificial Sequence
  Description of Artificial Sequence: Synthetic oligonucleotide
acuucuguacuuaucagga

SEQ ID NO: 528119 - RNA, 19 nt, Artificial Sequence
  Description of Artificial Sequence: Synthetic oligonucleotide
ggauagagaugccugggcg

SEQ ID NO: 528120 - RNA, 19 nt, Artificial Sequence
  Description of Artificial Sequence: Synthetic oligonucleotide
gugaaauuaucagaacccc

SEQ ID NO: 528121 - RNA, 19 nt, Artificial Sequence
  Description of Artificial Sequence: Synthetic oligonucleotide
cuugacacuggauuuagaa

SEQ ID NO: 528122 - RNA, 19 nt, Artificial Sequence
  Description of Artificial Sequence: Synthetic oligonucleotide
uauauaguucuguuccaau

SEQ ID NO: 528123 - RNA, 19 nt, Artificial Sequence
  Description of Artificial Sequence: Synthetic oligonucleotide
accucaaaugucugauagg

SEQ ID NO: 528124 - RNA, 19 nt, Artificial Sequence
  Description of Artificial Sequence: Synthetic oligonucleotide
caaaugucugauaggccag

SEQ ID NO: 528125 - RNA, 19 nt, Artificial Sequence
  Description of Artificial Sequence: Synthetic oligonucleotide
gaacguauauaggagacaa

SEQ ID NO: 528126 - RNA, 19 nt, Artificial Sequence
  Description of Artificial Sequence: Synthetic oligonucleotide
cuuugccuuaauuuucuuc

SEQ ID NO: 528127 - RNA, 19 nt, Artificial Sequence
  Description of Artificial Sequence: Synthetic oligonucleotide
uguguggcugagaaaagua

SEQ ID NO: 528128 - RNA, 19 nt, Artificial Sequence
  Description of Artificial Sequence: Synthetic oligonucleotide
cuaacguuucccacuuggc

SEQ ID NO: 528129 - RNA, 19 nt, Artificial Sequence
  Description of Artificial Sequence: Synthetic oligonucleotide
cuuaucaggaucuggaagu

SEQ ID NO: 528130 - RNA, 19 nt, Artificial Sequence
  Description of Artificial Sequence: Synthetic oligonucleotide
ucgaguaggugaaauuauc

SEQ ID NO: 528131 - RNA, 19 nt, Artificial Sequence
  Description of Artificial Sequence: Synthetic oligonucleotide
uucaaacucaagcgugcca

SEQ ID NO: 528132 - RNA, 19 nt, Artificial Sequence
  Description of Artificial Sequence: Synthetic oligonucleotide
uucguagcagauuucugaa

SEQ ID NO: 528133 - RNA, 19 nt, Artificial Sequence
  Description of Artificial Sequence: Synthetic oligonucleotide
auaagauauacugaacgua

SEQ ID NO: 528134 - RNA, 19 nt, Artificial Sequence
  Description of Artificial Sequence: Synthetic oligonucleotide
acugugaggaaaucaguau

SEQ ID NO: 528135 - RNA, 19 nt, Artificial Sequence
  Description of Artificial Sequence: Synthetic oligonucleotide
uguauccaaaggcucuaac

SEQ ID NO: 528136 - RNA, 19 nt, Artificial Sequence
  Description of Artificial Sequence: Synthetic oligonucleotide
aguaaguguaacaccagcu

SEQ ID NO: 528137 - RNA, 19 nt, Artificial Sequence
  Description of Artificial Sequence: Synthetic oligonucleotide
uucuuuccuacuuugcgua

SEQ ID NO: 528138 - RNA, 19 nt, Artificial Sequence
  Description of Artificial Sequence: Synthetic oligonucleotide
auuccuuaccaauccuuug

SEQ ID NO: 528139 - RNA, 19 nt, Artificial Sequence
  Description of Artificial Sequence: Synthetic oligonucleotide
cugugaggaaaucaguauc

SEQ ID NO: 528140 - RNA, 19 nt, Artificial Sequence
  Description of Artificial Sequence: Synthetic oligonucleotide
cuugucuaaguugauacca

SEQ ID NO: 528141 - RNA, 19 nt, Artificial Sequence
  Description of Artificial Sequence: Synthetic oligonucleotide
ucucgaguaggugaaauua

SEQ ID NO: 528142 - RNA, 19 nt, Artificial Sequence
  Description of Artificial Sequence: Synthetic oligonucleotide
guccuuuacagauuugguc

SEQ ID NO: 528143 - RNA, 19 nt, Artificial Sequence
  Description of Artificial Sequence: Synthetic oligonucleotide
ugaagaagucgaccuggug

SEQ ID NO: 528144 - RNA, 19 nt, Artificial Sequence
  Description of Artificial Sequence: Synthetic oligonucleotide
ccuauacucuucuuugucg

SEQ ID NO: 528145 - RNA, 19 nt, Artificial Sequence
  Description of Artificial Sequence: Synthetic oligonucleotide
aacuagcaucugaagauug

SEQ ID NO: 528146 - RNA, 19 nt, Artificial Sequence
  Description of Artificial Sequence: Synthetic oligonucleotide
aacacaucacgccgcuuca

SEQ ID NO: 528147 - RNA, 19 nt, Artificial Sequence
  Description of Artificial Sequence: Synthetic oligonucleotide
aucaugauucuuuccuacu

SEQ ID NO: 528148 - RNA, 19 nt, Artificial Sequence
  Description of Artificial Sequence: Synthetic oligonucleotide
ugguuguacaucguccaag

SEQ ID NO: 528149 - RNA, 19 nt, Artificial Sequence
  Description of Artificial Sequence: Synthetic oligonucleotide
auauuguuucauccaugug

SEQ ID NO: 528150 - RNA, 19 nt, Artificial Sequence
  Description of Artificial Sequence: Synthetic oligonucleotide
agaaaccuuauccguggug

SEQ ID NO: 528151 - RNA, 19 nt, Artificial Sequence
  Description of Artificial Sequence: Synthetic oligonucleotide
gaaaucaguaucaggccca

SEQ ID NO: 528152 - RNA, 19 nt, Artificial Sequence
  Description of Artificial Sequence: Synthetic oligonucleotide
aaggcgguauaaggcuucc

SEQ ID NO: 528153 - RNA, 19 nt, Artificial Sequence
  Description of Artificial Sequence: Synthetic oligonucleotide
cuauacucuucuuugucga

SEQ ID NO: 528154 - RNA, 19 nt, Artificial Sequence
  Description of Artificial Sequence: Synthetic oligonucleotide
acuagcaucugaagauugg

SEQ ID NO: 528155 - RNA, 19 nt, Artificial Sequence
  Description of Artificial Sequence: Synthetic oligonucleotide
uccuuaccaauccuuuggu

SEQ ID NO: 528156 - RNA, 19 nt, Artificial Sequence
  Description of Artificial Sequence: Synthetic oligonucleotide
uuccaacacuggaauaaga

SEQ ID NO: 528157 - RNA, 19 nt, Artificial Sequence
  Description of Artificial Sequence: Synthetic oligonucleotide
uuuccuacuuugcguaaaa

SEQ ID NO: 528158 - RNA, 19 nt, Artificial Sequence
  Description of Artificial Sequence: Synthetic oligonucleotide
ugcaaacgaguauauuuau

SEQ ID NO: 528159 - RNA, 19 nt, Artificial Sequence
  Description of Artificial Sequence: Synthetic oligonucleotide
cuggaauaagaaaagccaa

SEQ ID NO: 528160 - RNA, 19 nt, Artificial Sequence
  Description of Artificial Sequence: Synthetic oligonucleotide
aagaaaccuuauccguggu

SEQ ID NO: 528161 - RNA, 19 nt, Artificial Sequence
  Description of Artificial Sequence: Synthetic oligonucleotide
uuauccguggugccacagc

SEQ ID NO: 528162 - RNA, 19 nt, Artificial Sequence
  Description of Artificial Sequence: Synthetic oligonucleotide
guacuuaucaggaucugga

SEQ ID NO: 528163 - RNA, 19 nt, Artificial Sequence
  Description of Artificial Sequence: Synthetic oligonucleotide
uuacagauuuggucugugu

SEQ ID NO: 528164 - RNA, 19 nt, Artificial Sequence
  Description of Artificial Sequence: Synthetic oligonucleotide
uuaucaggaucuggaagug

SEQ ID NO: 528165 - RNA, 19 nt, Artificial Sequence
  Description of Artificial Sequence: Synthetic oligonucleotide
aaacccuguacagguacug

SEQ ID NO: 528166 - RNA, 19 nt, Artificial Sequence
  Description of Artificial Sequence: Synthetic oligonucleotide
gauugguggcaugaaaaca

SEQ ID NO: 528167 - RNA, 19 nt, Artificial Sequence
  Description of Artificial Sequence: Synthetic oligonucleotide
agauccaacccaaacacau

SEQ ID NO: 528168 - RNA, 19 nt, Artificial Sequence
  Description of Artificial Sequence: Synthetic oligonucleotide
cauaagauauacugaacgu

SEQ ID NO: 528169 - RNA, 19 nt, Artificial Sequence
  Description of Artificial Sequence: Synthetic oligonucleotide
uggugcagcucacaaacua

SEQ ID NO: 528170 - RNA, 19 nt, Artificial Sequence
  Description of Artificial Sequence: Synthetic oligonucleotide
uauuuauguuguugauccu

SEQ ID NO: 528171 - RNA, 19 nt, Artificial Sequence
  Description of Artificial Sequence: Synthetic oligonucleotide
uacuuaucaggaucuggaa

SEQ ID NO: 528172 - RNA, 19 nt, Artificial Sequence
  Description of Artificial Sequence: Synthetic oligonucleotide
gaacccaaauguacucagg

SEQ ID NO: 528173 - RNA, 19 nt, Artificial Sequence
  Description of Artificial Sequence: Synthetic oligonucleotide
gaagauugguggcaugaaa

SEQ ID NO: 528174 - RNA, 19 nt, Artificial Sequence
  Description of Artificial Sequence: Synthetic oligonucleotide
ucgaagaacugcacaggaa

SEQ ID NO: 528175 - RNA, 19 nt, Artificial Sequence
  Description of Artificial Sequence: Synthetic oligonucleotide
aaggcuuccaacacuggaa

SEQ ID NO: 528176 - RNA, 19 nt, Artificial Sequence
  Description of Artificial Sequence: Synthetic oligonucleotide
ugggaagauuuucaauaau

SEQ ID NO: 528177 - RNA, 19 nt, Artificial Sequence
  Description of Artificial Sequence: Synthetic oligonucleotide
aggcucuaacguuucccac

SEQ ID NO: 528178 - RNA, 19 nt, Artificial Sequence
  Description of Artificial Sequence: Synthetic oligonucleotide
ggcuggauugcuucagugg

SEQ ID NO: 528179 - RNA, 19 nt, Artificial Sequence
  Description of Artificial Sequence: Synthetic oligonucleotide
caaacucaagcgugccagg

SEQ ID NO: 528180 - RNA, 19 nt, Artificial Sequence
  Description of Artificial Sequence: Synthetic oligonucleotide
caucauuggugagggaggg

SEQ ID NO: 528181 - RNA, 19 nt, Artificial Sequence
  Description of Artificial Sequence: Synthetic oligonucleotide
uaggccaguucucgaguag

SEQ ID NO: 528182 - RNA, 19 nt, Artificial Sequence
  Description of Artificial Sequence: Synthetic oligonucleotide
ucguucguagcagauuucu

SEQ ID NO: 528183 - RNA, 19 nt, Artificial Sequence
  Description of Artificial Sequence: Synthetic oligonucleotide
acaucacgccgcuucacug

SEQ ID NO: 528184 - RNA, 19 nt, Artificial Sequence
  Description of Artificial Sequence: Synthetic oligonucleotide
auaguucuguuccaaugua

SEQ ID NO: 528185 - RNA, 19 nt, Artificial Sequence
  Description of Artificial Sequence: Synthetic oligonucleotide
accuuauccguggugccac

SEQ ID NO: 528186 - RNA, 19 nt, Artificial Sequence
  Description of Artificial Sequence: Synthetic oligonucleotide
guggcuugauuccuuacca

SEQ ID NO: 528187 - RNA, 19 nt, Artificial Sequence
  Description of Artificial Sequence: Synthetic oligonucleotide
ugauccucucagcuucgug

SEQ ID NO: 528188 - RNA, 19 nt, Artificial Sequence
  Description of Artificial Sequence: Synthetic oligonucleotide
acauuuucucacugaaaua

SEQ ID NO: 528189 - RNA, 19 nt, Artificial Sequence
  Description of Artificial Sequence: Synthetic oligonucleotide
gauuccucagaacuucugu

SEQ ID NO: 528190 - RNA, 19 nt, Artificial Sequence
  Description of Artificial Sequence: Synthetic oligonucleotide
uaucaggcccaucuucauc

SEQ ID NO: 528191 - RNA, 19 nt, Artificial Sequence
  Description of Artificial Sequence: Synthetic oligonucleotide
uucguguuucaaauccuuu

SEQ ID NO: 528192 - RNA, 19 nt, Artificial Sequence
  Description of Artificial Sequence: Synthetic oligonucleotide
cuugccagauccagucuug

SEQ ID NO: 528193 - RNA, 19 nt, Artificial Sequence
  Description of Artificial Sequence: Synthetic oligonucleotide
uaagcucgaaauucuucua

SEQ ID NO: 528194 - RNA, 19 nt, Artificial Sequence
  Description of Artificial Sequence: Synthetic oligonucleotide
acauauuguuucauccaug

SEQ ID NO: 528195 - RNA, 19 nt, Artificial Sequence
  Description of Artificial Sequence: Synthetic oligonucleotide
uuugugaagaauggacauu

SEQ ID NO: 528196 - RNA, 19 nt, Artificial Sequence
  Description of Artificial Sequence: Synthetic oligonucleotide
aaguguaacaccagcucuu

SEQ ID NO: 528197 - RNA, 19 nt, Artificial Sequence
  Description of Artificial Sequence: Synthetic oligonucleotide
uuucccuugcaaagccaac

SEQ ID NO: 528198 - RNA, 19 nt, Artificial Sequence
  Description of Artificial Sequence: Synthetic oligonucleotide
ugaaggcgguauaaggcuu

SEQ ID NO: 528199 - RNA, 19 nt, Artificial Sequence
  Description of Artificial Sequence: Synthetic oligonucleotide
ugaaccagcuccccuucau

SEQ ID NO: 528200 - RNA, 19 nt, Artificial Sequence
  Description of Artificial Sequence: Synthetic oligonucleotide
uucuagucuucuuccacuu

SEQ ID NO: 528201 - RNA, 19 nt, Artificial Sequence
  Description of Artificial Sequence: Synthetic oligonucleotide
ccauggagagcaaggauag

SEQ ID NO: 528202 - RNA, 19 nt, Artificial Sequence
  Description of Artificial Sequence: Synthetic oligonucleotide
agaagucgaccuggugugc

SEQ ID NO: 528203 - RNA, 19 nt, Artificial Sequence
  Description of Artificial Sequence: Synthetic oligonucleotide
aaccuuauccguggugcca

SEQ ID NO: 528204 - RNA, 19 nt, Artificial Sequence
  Description of Artificial Sequence: Synthetic oligonucleotide
gucuaaguugauaccacca

SEQ ID NO: 528205 - RNA, 19 nt, Artificial Sequence
  Description of Artificial Sequence: Synthetic oligonucleotide
uccacugaaggcgguauaa

SEQ ID NO: 528206 - RNA, 19 nt, Artificial Sequence
  Description of Artificial Sequence: Synthetic oligonucleotide
aagauauacugaacguaua

SEQ ID NO: 528207 - RNA, 19 nt, Artificial Sequence
  Description of Artificial Sequence: Synthetic oligonucleotide
uuguuucauccauguguug

SEQ ID NO: 528208 - RNA, 19 nt, Artificial Sequence
  Description of Artificial Sequence: Synthetic oligonucleotide
cuuugucgaacuuguccuc

SEQ ID NO: 528209 - RNA, 19 nt, Artificial Sequence
  Description of Artificial Sequence: Synthetic oligonucleotide
agcauucauggugucagca

SEQ ID NO: 528210 - RNA, 19 nt, Artificial Sequence
  Description of Artificial Sequence: Synthetic oligonucleotide
cuguuccaauguagcaggg

SEQ ID NO: 528211 - RNA, 19 nt, Artificial Sequence
  Description of Artificial Sequence: Synthetic oligonucleotide
aggcuuccaacacuggaau

SEQ ID NO: 528212 - RNA, 19 nt, Artificial Sequence
  Description of Artificial Sequence: Synthetic oligonucleotide
ugucgaacuuguccucuuc

SEQ ID NO: 528213 - RNA, 19 nt, Artificial Sequence
  Description of Artificial Sequence: Synthetic oligonucleotide
gcucacauuaaauacuucu

SEQ ID NO: 528214 - RNA, 19 nt, Artificial Sequence
  Description of Artificial Sequence: Synthetic oligonucleotide
uucucgaguaggugaaauu

SEQ ID NO: 528215 - RNA, 19 nt, Artificial Sequence
  Description of Artificial Sequence: Synthetic oligonucleotide
gaccuggugugcaaacgag

SEQ ID NO: 528216 - RNA, 19 nt, Artificial Sequence
  Description of Artificial Sequence: Synthetic oligonucleotide
ucuuuccuacuuugcguaa

SEQ ID NO: 528217 - RNA, 19 nt, Artificial Sequence
  Description of Artificial Sequence: Synthetic oligonucleotide
aaaucaguaucaggcccau

SEQ ID NO: 528218 - RNA, 19 nt, Artificial Sequence
  Description of Artificial Sequence: Synthetic oligonucleotide
aucacgccgcuucacugug

SEQ ID NO: 528219 - RNA, 19 nt, Artificial Sequence
  Description of Artificial Sequence: Synthetic oligonucleotide
gcaagaccaagagacagug

SEQ ID NO: 528220 - RNA, 19 nt, Artificial Sequence
  Description of Artificial Sequence: Synthetic oligonucleotide
ugcucacauuaaauacuuc

SEQ ID NO: 528221 - RNA, 19 nt, Artificial Sequence
  Description of Artificial Sequence: Synthetic oligonucleotide
ccuacuuugcguaaaaccu

SEQ ID NO: 528222 - RNA, 19 nt, Artificial Sequence
  Description of Artificial Sequence: Synthetic oligonucleotide
uaauagcauucaugguguc

SEQ ID NO: 528223 - RNA, 19 nt, Artificial Sequence
  Description of Artificial Sequence: Synthetic oligonucleotide
cuggauugauuuugaucuc

SEQ ID NO: 528224 - RNA, 19 nt, Artificial Sequence
  Description of Artificial Sequence: Synthetic oligonucleotide
ucaguggcuugauuccuua

SEQ ID NO: 528225 - RNA, 19 nt, Artificial Sequence
  Description of Artificial Sequence: Synthetic oligonucleotide
uaucaggaucuggaagugu

SEQ ID NO: 528226 - RNA, 19 nt, Artificial Sequence
  Description of Artificial Sequence: Synthetic oligonucleotide
uucaguggcuugauuccuu

SEQ ID NO: 528227 - RNA, 19 nt, Artificial Sequence
  Description of Artificial Sequence: Synthetic oligonucleotide
cacugaaauaagcucgaaa

SEQ ID NO: 528228 - RNA, 19 nt, Artificial Sequence
  Description of Artificial Sequence: Synthetic oligonucleotide
aagucgaccuggugugcaa

SEQ ID NO: 528229 - RNA, 19 nt, Artificial Sequence
  Description of Artificial Sequence: Synthetic oligonucleotide
gaaccagcuccccuucauc

SEQ ID NO: 528230 - RNA, 19 nt, Artificial Sequence
  Description of Artificial Sequence: Synthetic oligonucleotide
aggccuguauccaaaggcu

SEQ ID NO: 528231 - RNA, 19 nt, Artificial Sequence
  Description of Artificial Sequence: Synthetic oligonucleotide
augccgacuucuugguugu

SEQ ID NO: 528232 - RNA, 19 nt, Artificial Sequence
  Description of Artificial Sequence: Synthetic oligonucleotide
agcgugccagguccuuuac

SEQ ID NO: 528233 - RNA, 19 nt, Artificial Sequence
  Description of Artificial Sequence: Synthetic oligonucleotide
aagcgugccagguccuuua

SEQ ID NO: 528234 - RNA, 19 nt, Artificial Sequence
  Description of Artificial Sequence: Synthetic oligonucleotide
aauccuuuggugggcugau

SEQ ID NO: 528235 - RNA, 19 nt, Artificial Sequence
  Description of Artificial Sequence: Synthetic oligonucleotide
cuaaguugauaccaccagu

SEQ ID NO: 528236 - RNA, 19 nt, Artificial Sequence
  Description of Artificial Sequence: Synthetic oligonucleotide
gugcaaacgaguauauuua

SEQ ID NO: 528237 - RNA, 19 nt, Artificial Sequence
  Description of Artificial Sequence: Synthetic oligonucleotide
auaggccaguucucgagua

SEQ ID NO: 528238 - RNA, 19 nt, Artificial Sequence
  Description of Artificial Sequence: Synthetic oligonucleotide
aaugucugauaggccaguu

SEQ ID NO: 528239 - RNA, 19 nt, Artificial Sequence
  Description of Artificial Sequence: Synthetic oligonucleotide
uuccuacuuugcguaaaac

SEQ ID NO: 528240 - RNA, 19 nt, Artificial Sequence
  Description of Artificial Sequence: Synthetic oligonucleotide
cuuugcguaaaaccucaaa

SEQ ID NO: 528241 - RNA, 19 nt, Artificial Sequence
  Description of Artificial Sequence: Synthetic oligonucleotide
gauccaacccaaacacauc

SEQ ID NO: 528242 - RNA, 19 nt, Artificial Sequence
  Description of Artificial Sequence: Synthetic oligonucleotide
cugaaggcgguauaaggcu

SEQ ID NO: 528243 - RNA, 19 nt, Artificial Sequence
  Description of Artificial Sequence: Synthetic oligonucleotide
cacgccgcuucacugugag

SEQ ID NO: 528244 - RNA, 19 nt, Artificial Sequence
  Description of Artificial Sequence: Synthetic oligonucleotide
aacguauauaggagacaaa

SEQ ID NO: 528245 - RNA, 19 nt, Artificial Sequence
  Description of Artificial Sequence: Synthetic oligonucleotide
uggauugcuucaguggcuu

SEQ ID NO: 528246 - RNA, 19 nt, Artificial Sequence
  Description of Artificial Sequence: Synthetic oligonucleotide
gaaggcgguauaaggcuuc

SEQ ID NO: 528247 - RNA, 19 nt, Artificial Sequence
  Description of Artificial Sequence: Synthetic oligonucleotide
cuauauaguucuguuccaa

SEQ ID NO: 528248 - RNA, 19 nt, Artificial Sequence
  Description of Artificial Sequence: Synthetic oligonucleotide
uaccaauccuuuggugggc

SEQ ID NO: 528249 - RNA, 19 nt, Artificial Sequence
  Description of Artificial Sequence: Synthetic oligonucleotide
guacuuucuucuggagaag

SEQ ID NO: 528250 - RNA, 19 nt, Artificial Sequence
  Description of Artificial Sequence: Synthetic oligonucleotide
gacuuuugaguaaguguaa

SEQ ID NO: 528251 - RNA, 19 nt, Artificial Sequence
  Description of Artificial Sequence: Synthetic oligonucleotide
gcaaacgaguauauuuaug

SEQ ID NO: 528252 - RNA, 19 nt, Artificial Sequence
  Description of Artificial Sequence: Synthetic oligonucleotide
agcaagaccaagagacagu

SEQ ID NO: 528253 - RNA, 19 nt, Artificial Sequence
  Description of Artificial Sequence: Synthetic oligonucleotide
gaagucgaccuggugugca

SEQ ID NO: 528254 - RNA, 19 nt, Artificial Sequence
  Description of Artificial Sequence: Synthetic oligonucleotide
uuuagacgucuuucccgau

SEQ ID NO: 528255 - RNA, 19 nt, Artificial Sequence
  Description of Artificial Sequence: Synthetic oligonucleotide
acacaucacgccgcuucac

SEQ ID NO: 528256 - RNA, 19 nt, Artificial Sequence
  Description of Artificial Sequence: Synthetic oligonucleotide
gagacagugcauauucagu

SEQ ID NO: 528257 - RNA, 19 nt, Artificial Sequence
  Description of Artificial Sequence: Synthetic oligonucleotide
cuuauccguggugccacag

SEQ ID NO: 528258 - RNA, 19 nt, Artificial Sequence
  Description of Artificial Sequence: Synthetic oligonucleotide
uucccgaugcuuugccuua

SEQ ID NO: 528259 - RNA, 19 nt, Artificial Sequence
  Description of Artificial Sequence: Synthetic oligonucleotide
caauaauagcauucauggu

SEQ ID NO: 528260 - RNA, 19 nt, Artificial Sequence
  Description of Artificial Sequence: Synthetic oligonucleotide
gucacucauauucuguuuu

SEQ ID NO: 528261 - RNA, 19 nt, Artificial Sequence
  Description of Artificial Sequence: Synthetic oligonucleotide
cuuuaagauccaacccaaa

SEQ ID NO: 528262 - RNA, 19 nt, Artificial Sequence
  Description of Artificial Sequence: Synthetic oligonucleotide
ccaaauguacucaggaucu

SEQ ID NO: 528263 - RNA, 19 nt, Artificial Sequence
  Description of Artificial Sequence: Synthetic oligonucleotide
aucugaagauugguggcau

SEQ ID NO: 528264 - RNA, 19 nt, Artificial Sequence
  Description of Artificial Sequence: Synthetic oligonucleotide
gcgguauaaggcuuccaac

SEQ ID NO: 528265 - RNA, 19 nt, Artificial Sequence
  Description of Artificial Sequence: Synthetic oligonucleotide
aucguucguagcagauuuc

SEQ ID NO: 528266 - RNA, 19 nt, Artificial Sequence
  Description of Artificial Sequence: Synthetic oligonucleotide
ggcgguauaaggcuuccaa

SEQ ID NO: 528267 - RNA, 19 nt, Artificial Sequence
  Description of Artificial Sequence: Synthetic oligonucleotide
gcuugauuccuuaccaauc

SEQ ID NO: 528268 - RNA, 19 nt, Artificial Sequence
  Description of Artificial Sequence: Synthetic oligonucleotide
gacacuggauuuagaaggu

SEQ ID NO: 528269 - RNA, 19 nt, Artificial Sequence
  Description of Artificial Sequence: Synthetic oligonucleotide
caucaguaaauguuauuuu

SEQ ID NO: 528270 - RNA, 19 nt, Artificial Sequence
  Description of Artificial Sequence: Synthetic oligonucleotide
ggagagcaaggauagagau

SEQ ID NO: 528271 - RNA, 19 nt, Artificial Sequence
  Description of Artificial Sequence: Synthetic oligonucleotide
caucguucguagcagauuu

SEQ ID NO: 528272 - RNA, 19 nt, Artificial Sequence
  Description of Artificial Sequence: Synthetic oligonucleotide
acgucuuucccgaugcuuu

SEQ ID NO: 528273 - RNA, 19 nt, Artificial Sequence
  Description of Artificial Sequence: Synthetic oligonucleotide
ucacugaaauaagcucgaa

SEQ ID NO: 528274 - RNA, 19 nt, Artificial Sequence
  Description of Artificial Sequence: Synthetic oligonucleotide
cauuguagacuuccauucu

SEQ ID NO: 528275 - RNA, 19 nt, Artificial Sequence
  Description of Artificial Sequence: Synthetic oligonucleotide
ccuuaccaauccuuuggug

SEQ ID NO: 528276 - RNA, 19 nt, Artificial Sequence
  Description of Artificial Sequence: Synthetic oligonucleotide
gcguaaaaccucaaauguc

SEQ ID NO: 528277 - RNA, 19 nt, Artificial Sequence
  Description of Artificial Sequence: Synthetic oligonucleotide
gaagugugcuuggaucaaa

SEQ ID NO: 528278 - RNA, 19 nt, Artificial Sequence
  Description of Artificial Sequence: Synthetic oligonucleotide
ccucaauauugagaacagg

SEQ ID NO: 528279 - RNA, 19 nt, Artificial Sequence
  Description of Artificial Sequence: Synthetic oligonucleotide
accaauccuuuggugggcu

SEQ ID NO: 528280 - RNA, 19 nt, Artificial Sequence
  Description of Artificial Sequence: Synthetic oligonucleotide
cacagagaauauuuaguuu

SEQ ID NO: 528281 - RNA, 19 nt, Artificial Sequence
  Description of Artificial Sequence: Synthetic oligonucleotide
caucaagaacuagcaucug

SEQ ID NO: 528282 - RNA, 19 nt, Artificial Sequence
  Description of Artificial Sequence: Synthetic oligonucleotide
cuuugagcucuuucuuuua

SEQ ID NO: 528283 - RNA, 19 nt, Artificial Sequence
  Description of Artificial Sequence: Synthetic oligonucleotide
acaucguucguagcagauu

SEQ ID NO: 528284 - RNA, 19 nt, Artificial Sequence
  Description of Artificial Sequence: Synthetic oligonucleotide
caguaauagguaacuugcu

SEQ ID NO: 528285 - RNA, 19 nt, Artificial Sequence
  Description of Artificial Sequence: Synthetic oligonucleotide
uugccuugucuaaguugau

SEQ ID NO: 528286 - RNA, 19 nt, Artificial Sequence
  Description of Artificial Sequence: Synthetic oligonucleotide
gguaacuugcucacauuaa

SEQ ID NO: 528287 - RNA, 19 nt, Artificial Sequence
  Description of Artificial Sequence: Synthetic oligonucleotide
ucacgccgcuucacuguga

SEQ ID NO: 528288 - RNA, 19 nt, Artificial Sequence
  Description of Artificial Sequence: Synthetic oligonucleotide
cucgaguaggugaaauuau

SEQ ID NO: 528289 - RNA, 19 nt, Artificial Sequence
  Description of Artificial Sequence: Synthetic oligonucleotide
gauccagucuuggcagcuc

SEQ ID NO: 528290 - RNA, 19 nt, Artificial Sequence
  Description of Artificial Sequence: Synthetic oligonucleotide
ccggcagaaaacccuguac

SEQ ID NO: 528291 - RNA, 19 nt, Artificial Sequence
  Description of Artificial Sequence: Synthetic oligonucleotide
gaacuagcaucugaagauu

SEQ ID NO: 528292 - RNA, 19 nt, Artificial Sequence
  Description of Artificial Sequence: Synthetic oligonucleotide
cucuaacguuucccacuug

SEQ ID NO: 528293 - RNA, 19 nt, Artificial Sequence
  Description of Artificial Sequence: Synthetic oligonucleotide
ggcucuaacguuucccacu

SEQ ID NO: 528294 - RNA, 19 nt, Artificial Sequence
  Description of Artificial Sequence: Synthetic oligonucleotide
gagcaaggauagagaugcc

SEQ ID NO: 528295 - RNA, 19 nt, Artificial Sequence
  Description of Artificial Sequence: Synthetic oligonucleotide
cuggcguuucuugggaaga

SEQ ID NO: 528296 - RNA, 19 nt, Artificial Sequence
  Description of Artificial Sequence: Synthetic oligonucleotide
acgccgcuucacugugagg

SEQ ID NO: 528297 - RNA, 19 nt, Artificial Sequence
  Description of Artificial Sequence: Synthetic oligonucleotide
gcucgaaauucuucuaccu

SEQ ID NO: 528298 - RNA, 19 nt, Artificial Sequence
  Description of Artificial Sequence: Synthetic oligonucleotide
cuucguguuucaaauccuu

SEQ ID NO: 528299 - RNA, 19 nt, Artificial Sequence
  Description of Artificial Sequence: Synthetic oligonucleotide
agaaaacccuguacaggua

SEQ ID NO: 528300 - RNA, 19 nt, Artificial Sequence
  Description of Artificial Sequence: Synthetic oligonucleotide
cuucaucaagaacuagcau

SEQ ID NO: 528301 - RNA, 19 nt, Artificial Sequence
  Description of Artificial Sequence: Synthetic oligonucleotide
ggauugcuucaguggcuug

SEQ ID NO: 528302 - RNA, 19 nt, Artificial Sequence
  Description of Artificial Sequence: Synthetic oligonucleotide
gcuaaagacaggccuguau

SEQ ID NO: 528303 - RNA, 19 nt, Artificial Sequence
  Description of Artificial Sequence: Synthetic oligonucleotide
caucacgccgcuucacugu

SEQ ID NO: 528304 - RNA, 19 nt, Artificial Sequence
  Description of Artificial Sequence: Synthetic oligonucleotide
ugcuaaagacaggccugua

SEQ ID NO: 528305 - RNA, 19 nt, Artificial Sequence
  Description of Artificial Sequence: Synthetic oligonucleotide
guagcaggggugcuguauu

SEQ ID NO: 528306 - RNA, 19 nt, Artificial Sequence
  Description of Artificial Sequence: Synthetic oligonucleotide
acuggccaaggugcauucu

SEQ ID NO: 528307 - RNA, 19 nt, Artificial Sequence
  Description of Artificial Sequence: Synthetic oligonucleotide
agucgaccuggugugcaaa

SEQ ID NO: 528308 - RNA, 19 nt, Artificial Sequence
  Description of Artificial Sequence: Synthetic oligonucleotide
ucaagcgugccagguccuu

SEQ ID NO: 528309 - RNA, 19 nt, Artificial Sequence
  Description of Artificial Sequence: Synthetic oligonucleotide
ccgacuucuugguuguaca

SEQ ID NO: 528310 - RNA, 19 nt, Artificial Sequence
  Description of Artificial Sequence: Synthetic oligonucleotide
ggccuguauccaaaggcuc

SEQ ID NO: 528311 - RNA, 19 nt, Artificial Sequence
  Description of Artificial Sequence: Synthetic oligonucleotide
guaucaggcccaucuucau

SEQ ID NO: 528312 - RNA, 19 nt, Artificial Sequence
  Description of Artificial Sequence: Synthetic oligonucleotide
cacaucguucguagcagau

SEQ ID NO: 528313 - RNA, 19 nt, Artificial Sequence
  Description of Artificial Sequence: Synthetic oligonucleotide
gacgucuuucccgaugcuu

SEQ ID NO: 528314 - RNA, 19 nt, Artificial Sequence
  Description of Artificial Sequence: Synthetic oligonucleotide
cguucguagcagauuucug

SEQ ID NO: 528315 - RNA, 19 nt, Artificial Sequence
  Description of Artificial Sequence: Synthetic oligonucleotide
ucccgaugcuuugccuuaa

SEQ ID NO: 528316 - RNA, 19 nt, Artificial Sequence
  Description of Artificial Sequence: Synthetic oligonucleotide
gggugcuguauuuugcuuu

SEQ ID NO: 528317 - RNA, 19 nt, Artificial Sequence
  Description of Artificial Sequence: Synthetic oligonucleotide
ggugcuguauuuugcuuuu

SEQ ID NO: 528318 - RNA, 19 nt, Artificial Sequence
  Description of Artificial Sequence: Synthetic oligonucleotide
cuuuccaugccgacuucuu

SEQ ID NO: 528319 - RNA, 19 nt, Artificial Sequence
  Description of Artificial Sequence: Synthetic oligonucleotide
gguccuuuacagauuuggu

SEQ ID NO: 528320 - RNA, 19 nt, Artificial Sequence
  Description of Artificial Sequence: Synthetic oligonucleotide
cugcuaaagacaggccugu

SEQ ID NO: 528321 - RNA, 19 nt, Artificial Sequence
  Description of Artificial Sequence: Synthetic oligonucleotide
cuggugugcaaacgaguau

SEQ ID NO: 528322 - RNA, 19 nt, Artificial Sequence
  Description of Artificial Sequence: Synthetic oligonucleotide
gguggcaugaaaacauauu

SEQ ID NO: 528323 - RNA, 19 nt, Artificial Sequence
  Description of Artificial Sequence: Synthetic oligonucleotide
ggaagugugcuuggaucaa

SEQ ID NO: 528324 - RNA, 19 nt, Artificial Sequence
  Description of Artificial Sequence: Synthetic oligonucleotide
cacucauauucuguuuuau

SEQ ID NO: 528325 - RNA, 19 nt, Artificial Sequence
  Description of Artificial Sequence: Synthetic oligonucleotide
aggcgguauaaggcuucca

SEQ ID NO: 528326 - RNA, 19 nt, Artificial Sequence
  Description of Artificial Sequence: Synthetic oligonucleotide
cgauaaugcuucauucucu

SEQ ID NO: 528327 - RNA, 19 nt, Artificial Sequence
  Description of Artificial Sequence: Synthetic oligonucleotide
cuggugcagcucacaaacu

SEQ ID NO: 528328 - RNA, 19 nt, Artificial Sequence
  Description of Artificial Sequence: Synthetic oligonucleotide
gcucuaacguuucccacuu

SEQ ID NO: 528329 - RNA, 19 nt, Artificial Sequence
  Description of Artificial Sequence: Synthetic oligonucleotide
ggugcagcucacaaacuau

SEQ ID NO: 528330 - RNA, 19 nt, Artificial Sequence
  Description of Artificial Sequence: Synthetic oligonucleotide
gccuguauccaaaggcucu

SEQ ID NO: 528331 - RNA, 19 nt, Artificial Sequence
  Description of Artificial Sequence: Synthetic oligonucleotide
agccggcagaaaacccugu

SEQ ID NO: 528332 - RNA, 19 nt, Artificial Sequence
  Description of Artificial Sequence: Synthetic oligonucleotide
cccauguccaagauucuau

SEQ ID NO: 528333 - RNA, 19 nt, Artificial Sequence
  Description of Artificial Sequence: Synthetic oligonucleotide
cucaagcgugccagguccu

SEQ ID NO: 528334 - RNA, 19 nt, Artificial Sequence
  Description of Artificial Sequence: Synthetic oligonucleotide
ccacaucguucguagcaga

SEQ ID NO: 528335 - RNA, 19 nt, Artificial Sequence
  Description of Artificial Sequence: Synthetic oligonucleotide
guacaucguccaaguccuc

SEQ ID NO: 528336 - RNA, 19 nt, Artificial Sequence
  Description of Artificial Sequence: Synthetic oligonucleotide
gcguuucuugggaagauuu

SEQ ID NO: 528337 - RNA, 19 nt, Artificial Sequence
  Description of Artificial Sequence: Synthetic oligonucleotide
auccuuuggugggcugauu

SEQ ID NO: 528338 - RNA, 19 nt, Artificial Sequence
  Description of Artificial Sequence: Synthetic oligonucleotide
gugugcaaacgaguauauu

SEQ ID NO: 528339 - RNA, 19 nt, Artificial Sequence
  Description of Artificial Sequence: Synthetic oligonucleotide
caaauguacucaggaucuu

SEQ ID NO: 528340 - RNA, 19 nt, Artificial Sequence
  Description of Artificial Sequence: Synthetic oligonucleotide
ugccgacuucuugguugua

SEQ ID NO: 528341 - RNA, 19 nt, Artificial Sequence
  Description of Artificial Sequence: Synthetic oligonucleotide
ccguggugccacagcaaga

SEQ ID NO: 528342 - RNA, 19 nt, Artificial Sequence
  Description of Artificial Sequence: Synthetic oligonucleotide
ccuuauccguggugccaca

SEQ ID NO: 528343 - RNA, 19 nt, Artificial Sequence
  Description of Artificial Sequence: Synthetic oligonucleotide
caagcgugccagguccuuu

SEQ ID NO: 528344 - RNA, 19 nt, Artificial Sequence
  Description of Artificial Sequence: Synthetic oligonucleotide
caaacacaucacgccgcuu

SEQ ID NO: 528345 - RNA, 19 nt, Artificial Sequence
  Description of Artificial Sequence: Synthetic oligonucleotide
ccgcuucacugugaggaaa

SEQ ID NO: 528346 - RNA, 19 nt, Artificial Sequence
  Description of Artificial Sequence: Synthetic oligonucleotide
cgcuucacugugaggaaau

SEQ ID NO: 528347 - RNA, 19 nt, Artificial Sequence
  Description of Artificial Sequence: Synthetic oligonucleotide
ccgaugcuuugccuuaauu

SEQ ID NO: 528348 - RNA, 19 nt, Artificial Sequence
  Description of Artificial Sequence: Synthetic oligonucleotide
ccacuggccaaggugcauu

SEQ ID NO: 528349 - RNA, 19 nt, Artificial Sequence
  Description of Artificial Sequence: Synthetic oligonucleotide
ccaugccgacuucuugguu

SEQ ID NO: 528350 - RNA, 19 nt, Artificial Sequence
  Description of Artificial Sequence: Synthetic oligonucleotide
cccgaugcuuugccuuaau

SEQ ID NO: 528351 - RNA, 19 nt, Artificial Sequence
  Description of Artificial Sequence: Synthetic oligonucleotide
uauuacuugcccuagaggg

SEQ ID NO: 528352 - RNA, 19 nt, Artificial Sequence
  Description of Artificial Sequence: Synthetic oligonucleotide
aauagcaaccucuugcccc

SEQ ID NO: 528353 - RNA, 19 nt, Artificial Sequence
  Description of Artificial Sequence: Synthetic oligonucleotide
aaauuguuaacuacaaacc

SEQ ID NO: 528354 - RNA, 19 nt, Artificial Sequence
  Description of Artificial Sequence: Synthetic oligonucleotide
gaaauuguuaacuacaaac

SEQ ID NO: 528355 - RNA, 19 nt, Artificial Sequence
  Description of Artificial Sequence: Synthetic oligonucleotide
aaaaucgcagcauauacag

SEQ ID NO: 528356 - RNA, 19 nt, Artificial Sequence
  Description of Artificial Sequence: Synthetic oligonucleotide
uuugccaauauaaagagcu

SEQ ID NO: 528357 - RNA, 19 nt, Artificial Sequence
  Description of Artificial Sequence: Synthetic oligonucleotide
uucuauauugcuuuaaaag

SEQ ID NO: 528358 - RNA, 19 nt, Artificial Sequence
  Description of Artificial Sequence: Synthetic oligonucleotide
ugaaccauuacuauuaacu

SEQ ID NO: 528359 - RNA, 19 nt, Artificial Sequence
  Description of Artificial Sequence: Synthetic oligonucleotide
gaauagaucacuuugguuc

SEQ ID NO: 528360 - RNA, 19 nt, Artificial Sequence
  Description of Artificial Sequence: Synthetic oligonucleotide
auuacaacuagccuagaac

SEQ ID NO: 528361 - RNA, 19 nt, Artificial Sequence
  Description of Artificial Sequence: Synthetic oligonucleotide
aaucugaggagaaacaggc

SEQ ID NO: 528362 - RNA, 19 nt, Artificial Sequence
  Description of Artificial Sequence: Synthetic oligonucleotide
uuaacuacaaaccccaaac

SEQ ID NO: 528363 - RNA, 19 nt, Artificial Sequence
  Description of Artificial Sequence: Synthetic oligonucleotide
aaacugaaauacuacaugu

SEQ ID NO: 528364 - RNA, 19 nt, Artificial Sequence
  Description of Artificial Sequence: Synthetic oligonucleotide
auuacagguuaguuuaucc

SEQ ID NO: 528365 - RNA, 19 nt, Artificial Sequence
  Description of Artificial Sequence: Synthetic oligonucleotide
uuaguuauaaauauagauu

SEQ ID NO: 528366 - RNA, 19 nt, Artificial Sequence
  Description of Artificial Sequence: Synthetic oligonucleotide
aauguaaggcuagcgaugc

SEQ ID NO: 528367 - RNA, 19 nt, Artificial Sequence
  Description of Artificial Sequence: Synthetic oligonucleotide
aaaucacaauucuauauug

SEQ ID NO: 528368 - RNA, 19 nt, Artificial Sequence
  Description of Artificial Sequence: Synthetic oligonucleotide
uuuaaauccugaaaauuca

SEQ ID NO: 528369 - RNA, 19 nt, Artificial Sequence
  Description of Artificial Sequence: Synthetic oligonucleotide
agaagaauagaucacuuug

SEQ ID NO: 528370 - RNA, 19 nt, Artificial Sequence
  Description of Artificial Sequence: Synthetic oligonucleotide
uuaaaacaugucaagcucc

SEQ ID NO: 528371 - RNA, 19 nt, Artificial Sequence
  Description of Artificial Sequence: Synthetic oligonucleotide
ucaguuuaagcucuaaacu

SEQ ID NO: 528372 - RNA, 19 nt, Artificial Sequence
  Description of Artificial Sequence: Synthetic oligonucleotide
accagauaaaucuuuacag

SEQ ID NO: 528373 - RNA, 19 nt, Artificial Sequence
  Description of Artificial Sequence: Synthetic oligonucleotide
uuuuggacccuaaagcagg

SEQ ID NO: 528374 - RNA, 19 nt, Artificial Sequence
  Description of Artificial Sequence: Synthetic oligonucleotide
ugcaaaauaggguugauuc

SEQ ID NO: 528375 - RNA, 19 nt, Artificial Sequence
  Description of Artificial Sequence: Synthetic oligonucleotide
aauggacaugcaaauaacc

SEQ ID NO: 528376 - RNA, 19 nt, Artificial Sequence
  Description of Artificial Sequence: Synthetic oligonucleotide
ugaaugacaaaguccgucg

SEQ ID NO: 528377 - RNA, 19 nt, Artificial Sequence
  Description of Artificial Sequence: Synthetic oligonucleotide
aaaccagauaaaucuuuac

SEQ ID NO: 528378 - RNA, 19 nt, Artificial Sequence
  Description of Artificial Sequence: Synthetic oligonucleotide
auuguuaacuacaaacccc

SEQ ID NO: 528379 - RNA, 19 nt, Artificial Sequence
  Description of Artificial Sequence: Synthetic oligonucleotide
aaaguugacucuuucacau

SEQ ID NO: 528380 - RNA, 19 nt, Artificial Sequence
  Description of Artificial Sequence: Synthetic oligonucleotide
uuaagcucuaaacugaaau

SEQ ID NO: 528381 - RNA, 19 nt, Artificial Sequence
  Description of Artificial Sequence: Synthetic oligonucleotide
aaucacaauucuauauugc

SEQ ID NO: 528382 - RNA, 19 nt, Artificial Sequence
  Description of Artificial Sequence: Synthetic oligonucleotide
uacuacauguacaacagcu

SEQ ID NO: 528383 - RNA, 19 nt, Artificial Sequence
  Description of Artificial Sequence: Synthetic oligonucleotide
agauuauuaguccucuuuc

SEQ ID NO: 528384 - RNA, 19 nt, Artificial Sequence
  Description of Artificial Sequence: Synthetic oligonucleotide
aaaauaguaguuugcuugu

SEQ ID NO: 528385 - RNA, 19 nt, Artificial Sequence
  Description of Artificial Sequence: Synthetic oligonucleotide
uucaguuuaagcucuaaac

SEQ ID NO: 528386 - RNA, 19 nt, Artificial Sequence
  Description of Artificial Sequence: Synthetic oligonucleotide
aaauggauaaaagacuaug

SEQ ID NO: 528387 - RNA, 19 nt, Artificial Sequence
  Description of Artificial Sequence: Synthetic oligonucleotide
uccuuuuggacccuaaagc

SEQ ID NO: 528388 - RNA, 19 nt, Artificial Sequence
  Description of Artificial Sequence: Synthetic oligonucleotide
aguuaaaacaugucaagcu

SEQ ID NO: 528389 - RNA, 19 nt, Artificial Sequence
  Description of Artificial Sequence: Synthetic oligonucleotide
uuaauagcaaccucuugcc

SEQ ID NO: 528390 - RNA, 19 nt, Artificial Sequence
  Description of Artificial Sequence: Synthetic oligonucleotide
acuauuacagguuaguuua

SEQ ID NO: 528391 - RNA, 19 nt, Artificial Sequence
  Description of Artificial Sequence: Synthetic oligonucleotide
agacugucucuuuauaccc

SEQ ID NO: 528392 - RNA, 19 nt, Artificial Sequence
  Description of Artificial Sequence: Synthetic oligonucleotide
auuagcaugcaagaacucc

SEQ ID NO: 528393 - RNA, 19 nt, Artificial Sequence
  Description of Artificial Sequence: Synthetic oligonucleotide
uugauuagcaugcaagaac

SEQ ID NO: 528394 - RNA, 19 nt, Artificial Sequence
  Description of Artificial Sequence: Synthetic oligonucleotide
aaugguuauuacuugcccu

SEQ ID NO: 528395 - RNA, 19 nt, Artificial Sequence
  Description of Artificial Sequence: Synthetic oligonucleotide
uuauuacuugcccuagagg

SEQ ID NO: 528396 - RNA, 19 nt, Artificial Sequence
  Description of Artificial Sequence: Synthetic oligonucleotide
uguaacaguucuuuggcug

SEQ ID NO: 528397 - RNA, 19 nt, Artificial Sequence
  Description of Artificial Sequence: Synthetic oligonucleotide
cuaaaguugacucuuucac

SEQ ID NO: 528398 - RNA, 19 nt, Artificial Sequence
  Description of Artificial Sequence: Synthetic oligonucleotide
uacaacaucagugagugac

SEQ ID NO: 528399 - RNA, 19 nt, Artificial Sequence
  Description of Artificial Sequence: Synthetic oligonucleotide
ucuguugagggaaaagccc

SEQ ID NO: 528400 - RNA, 19 nt, Artificial Sequence
  Description of Artificial Sequence: Synthetic oligonucleotide
uacagguuaguuuauccag

SEQ ID NO: 528401 - RNA, 19 nt, Artificial Sequence
  Description of Artificial Sequence: Synthetic oligonucleotide
auaggguugauucaaacaa

SEQ ID NO: 528402 - RNA, 19 nt, Artificial Sequence
  Description of Artificial Sequence: Synthetic oligonucleotide
uugaauuuaggcacaagaa

SEQ ID NO: 528403 - RNA, 19 nt, Artificial Sequence
  Description of Artificial Sequence: Synthetic oligonucleotide
agucauaauucucuuacug

SEQ ID NO: 528404 - RNA, 19 nt, Artificial Sequence
  Description of Artificial Sequence: Synthetic oligonucleotide
agcuacauaauuccuauca

SEQ ID NO: 528405 - RNA, 19 nt, Artificial Sequence
  Description of Artificial Sequence: Synthetic oligonucleotide
aauuaacuaauaaaucaca

SEQ ID NO: 528406 - RNA, 19 nt, Artificial Sequence
  Description of Artificial Sequence: Synthetic oligonucleotide
auuauuacaacuagccuag

SEQ ID NO: 528407 - RNA, 19 nt, Artificial Sequence
  Description of Artificial Sequence: Synthetic oligonucleotide
cuacauguacaacagcugg

SEQ ID NO: 528408 - RNA, 19 nt, Artificial Sequence
  Description of Artificial Sequence: Synthetic oligonucleotide
aacuauuacagguuaguuu

SEQ ID NO: 528409 - RNA, 19 nt, Artificial Sequence
  Description of Artificial Sequence: Synthetic oligonucleotide
accagaauuucauuaauga

SEQ ID NO: 528410 - RNA, 19 nt, Artificial Sequence
  Description of Artificial Sequence: Synthetic oligonucleotide
uauucuacucacuuguuaa

SEQ ID NO: 528411 - RNA, 19 nt, Artificial Sequence
  Description of Artificial Sequence: Synthetic oligonucleotide
agcaagguacuccaucacc

SEQ ID NO: 528412 - RNA, 19 nt, Artificial Sequence
  Description of Artificial Sequence: Synthetic oligonucleotide
guacuuugcuauuucaucc

SEQ ID NO: 528413 - RNA, 19 nt, Artificial Sequence
  Description of Artificial Sequence: Synthetic oligonucleotide
ucaagcuagauaaugguuu

SEQ ID NO: 528414 - RNA, 19 nt, Artificial Sequence
  Description of Artificial Sequence: Synthetic oligonucleotide
caguuuaagcucuaaacug

SEQ ID NO: 528415 - RNA, 19 nt, Artificial Sequence
  Description of Artificial Sequence: Synthetic oligonucleotide
guuauuacuugcccuagag

SEQ ID NO: 528416 - RNA, 19 nt, Artificial Sequence
  Description of Artificial Sequence: Synthetic oligonucleotide
guaucaaugauuuaguuau

SEQ ID NO: 528417 - RNA, 19 nt, Artificial Sequence
  Description of Artificial Sequence: Synthetic oligonucleotide
ucggagucagguuugaaug

SEQ ID NO: 528418 - RNA, 19 nt, Artificial Sequence
  Description of Artificial Sequence: Synthetic oligonucleotide
ucauuauuacaacuagccu

SEQ ID NO: 528419 - RNA, 19 nt, Artificial Sequence
  Description of Artificial Sequence: Synthetic oligonucleotide
aaaugaaccauuacuauua

SEQ ID NO: 528420 - RNA, 19 nt, Artificial Sequence
  Description of Artificial Sequence: Synthetic oligonucleotide
auauacagacacucguuuc

SEQ ID NO: 528421 - RNA, 19 nt, Artificial Sequence
  Description of Artificial Sequence: Synthetic oligonucleotide
uguuacaacaucagugagu

SEQ ID NO: 528422 - RNA, 19 nt, Artificial Sequence
  Description of Artificial Sequence: Synthetic oligonucleotide
cacguugucacuuuugaug

SEQ ID NO: 528423 - RNA, 19 nt, Artificial Sequence
  Description of Artificial Sequence: Synthetic oligonucleotide
uuaacugagccuuccauuc

SEQ ID NO: 528424 - RNA, 19 nt, Artificial Sequence
  Description of Artificial Sequence: Synthetic oligonucleotide
aaguuuaacugagccuucc

SEQ ID NO: 528425 - RNA, 19 nt, Artificial Sequence
  Description of Artificial Sequence: Synthetic oligonucleotide
uuucuauacauguaacaaa

SEQ ID NO: 528426 - RNA, 19 nt, Artificial Sequence
  Description of Artificial Sequence: Synthetic oligonucleotide
caguaaguuuaacugagcc

SEQ ID NO: 528427 - RNA, 19 nt, Artificial Sequence
  Description of Artificial Sequence: Synthetic oligonucleotide
aguaaguuuaacugagccu

SEQ ID NO: 528428 - RNA, 19 nt, Artificial Sequence
  Description of Artificial Sequence: Synthetic oligonucleotide
uaauggguugggaacacug

SEQ ID NO: 528429 - RNA, 19 nt, Artificial Sequence
  Description of Artificial Sequence: Synthetic oligonucleotide
cuccaugugaugcagacug

SEQ ID NO: 528430 - RNA, 19 nt, Artificial Sequence
  Description of Artificial Sequence: Synthetic oligonucleotide
aauaauggguugggaacac

SEQ ID NO: 528431 - RNA, 19 nt, Artificial Sequence
  Description of Artificial Sequence: Synthetic oligonucleotide
cauuauuacaacuagccua

SEQ ID NO: 528432 - RNA, 19 nt, Artificial Sequence
  Description of Artificial Sequence: Synthetic oligonucleotide
uuacagguuaguuuaucca

SEQ ID NO: 528433 - RNA, 19 nt, Artificial Sequence
  Description of Artificial Sequence: Synthetic oligonucleotide
aaacucacuaccaugaauu

SEQ ID NO: 528434 - RNA, 19 nt, Artificial Sequence
  Description of Artificial Sequence: Synthetic oligonucleotide
agcuagauaaugguuuggc

SEQ ID NO: 528435 - RNA, 19 nt, Artificial Sequence
  Description of Artificial Sequence: Synthetic oligonucleotide
cuuuauaccccucagagua

SEQ ID NO: 528436 - RNA, 19 nt, Artificial Sequence
  Description of Artificial Sequence: Synthetic oligonucleotide
ugacccaccauguacuuug

SEQ ID NO: 528437 - RNA, 19 nt, Artificial Sequence
  Description of Artificial Sequence: Synthetic oligonucleotide
cagacugucucuuuauacc

SEQ ID NO: 528438 - RNA, 19 nt, Artificial Sequence
  Description of Artificial Sequence: Synthetic oligonucleotide
aaauaaccauccaagaaau

SEQ ID NO: 528439 - RNA, 19 nt, Artificial Sequence
  Description of Artificial Sequence: Synthetic oligonucleotide
agguucaaaucucucuugg

SEQ ID NO: 528440 - RNA, 19 nt, Artificial Sequence
  Description of Artificial Sequence: Synthetic oligonucleotide
auaaaagacuaugaggccu

SEQ ID NO: 528441 - RNA, 19 nt, Artificial Sequence
  Description of Artificial Sequence: Synthetic oligonucleotide
uaaaacaugucaagcuccu

SEQ ID NO: 528442 - RNA, 19 nt, Artificial Sequence
  Description of Artificial Sequence: Synthetic oligonucleotide
uuaaauccugaaaauucaa

SEQ ID NO: 528443 - RNA, 19 nt, Artificial Sequence
  Description of Artificial Sequence: Synthetic oligonucleotide
auacuacauguacaacagc

SEQ ID NO: 528444 - RNA, 19 nt, Artificial Sequence
  Description of Artificial Sequence: Synthetic oligonucleotide
cuuuuggacccuaaagcag

SEQ ID NO: 528445 - RNA, 19 nt, Artificial Sequence
  Description of Artificial Sequence: Synthetic oligonucleotide
uuauuaguccucuuucuau

SEQ ID NO: 528446 - RNA, 19 nt, Artificial Sequence
  Description of Artificial Sequence: Synthetic oligonucleotide
cuaaagccaaaucugagga

SEQ ID NO: 528447 - RNA, 19 nt, Artificial Sequence
  Description of Artificial Sequence: Synthetic oligonucleotide
ucuacucacuuguuaaaac

SEQ ID NO: 528448 - RNA, 19 nt, Artificial Sequence
  Description of Artificial Sequence: Synthetic oligonucleotide
uggacccuaaagcaggggc

SEQ ID NO: 528449 - RNA, 19 nt, Artificial Sequence
  Description of Artificial Sequence: Synthetic oligonucleotide
uagaacuuaccaagguuca

SEQ ID NO: 528450 - RNA, 19 nt, Artificial Sequence
  Description of Artificial Sequence: Synthetic oligonucleotide
agugggcggcacuaaaggc

SEQ ID NO: 528451 - RNA, 19 nt, Artificial Sequence
  Description of Artificial Sequence: Synthetic oligonucleotide
aacuuaccaagguucaaau

SEQ ID NO: 528452 - RNA, 19 nt, Artificial Sequence
  Description of Artificial Sequence: Synthetic oligonucleotide
uucugcuacucccaaauau

SEQ ID NO: 528453 - RNA, 19 nt, Artificial Sequence
  Description of Artificial Sequence: Synthetic oligonucleotide
uauuacaacuagccuagaa

SEQ ID NO: 528454 - RNA, 19 nt, Artificial Sequence
  Description of Artificial Sequence: Synthetic oligonucleotide
acguugucacuuuugaugu

SEQ ID NO: 528455 - RNA, 19 nt, Artificial Sequence
  Description of Artificial Sequence: Synthetic oligonucleotide
auauagauuauuaguccuc

SEQ ID NO: 528456 - RNA, 19 nt, Artificial Sequence
  Description of Artificial Sequence: Synthetic oligonucleotide
uacuuugcuauuucauccc

SEQ ID NO: 528457 - RNA, 19 nt, Artificial Sequence
  Description of Artificial Sequence: Synthetic oligonucleotide
uggaaauguaaggcuagcg

SEQ ID NO: 528458 - RNA, 19 nt, Artificial Sequence
  Description of Artificial Sequence: Synthetic oligonucleotide
gagugggcggcacuaaagg

SEQ ID NO: 528459 - RNA, 19 nt, Artificial Sequence
  Description of Artificial Sequence: Synthetic oligonucleotide
cuguggaucacuugauuag

SEQ ID NO: 528460 - RNA, 19 nt, Artificial Sequence
  Description of Artificial Sequence: Synthetic oligonucleotide
uggacaugcaaauaaccau

SEQ ID NO: 528461 - RNA, 19 nt, Artificial Sequence
  Description of Artificial Sequence: Synthetic oligonucleotide
uaagcucuaaacugaaaua

SEQ ID NO: 528462 - RNA, 19 nt, Artificial Sequence
  Description of Artificial Sequence: Synthetic oligonucleotide
caaaucugaggagaaacag

SEQ ID NO: 528463 - RNA, 19 nt, Artificial Sequence
  Description of Artificial Sequence: Synthetic oligonucleotide
caaacaacucaucuccuac

SEQ ID NO: 528464 - RNA, 19 nt, Artificial Sequence
  Description of Artificial Sequence: Synthetic oligonucleotide
guggcgucaagcuagauaa

SEQ ID NO: 528465 - RNA, 19 nt, Artificial Sequence
  Description of Artificial Sequence: Synthetic oligonucleotide
ucuguggaucacuugauua

SEQ ID NO: 528466 - RNA, 19 nt, Artificial Sequence
  Description of Artificial Sequence: Synthetic oligonucleotide
uuuaacugagccuuccauu

SEQ ID NO: 528467 - RNA, 19 nt, Artificial Sequence
  Description of Artificial Sequence: Synthetic oligonucleotide
agagcuacauaauuccuau

SEQ ID NO: 528468 - RNA, 19 nt, Artificial Sequence
  Description of Artificial Sequence: Synthetic oligonucleotide
uuacugcaauuucucuugg

SEQ ID NO: 528469 - RNA, 19 nt, Artificial Sequence
  Description of Artificial Sequence: Synthetic oligonucleotide
acaacaguaugcaaacauc

SEQ ID NO: 528470 - RNA, 19 nt, Artificial Sequence
  Description of Artificial Sequence: Synthetic oligonucleotide
acuagccuagaacuuacca

SEQ ID NO: 528471 - RNA, 19 nt, Artificial Sequence
  Description of Artificial Sequence: Synthetic oligonucleotide
uaguuuauccaggucagga

SEQ ID NO: 528472 - RNA, 19 nt, Artificial Sequence
  Description of Artificial Sequence: Synthetic oligonucleotide
caaugguuauuacuugccc

SEQ ID NO: 528473 - RNA, 19 nt, Artificial Sequence
  Description of Artificial Sequence: Synthetic oligonucleotide
agcgguugcucuucauugc

SEQ ID NO: 528474 - RNA, 19 nt, Artificial Sequence
  Description of Artificial Sequence: Synthetic oligonucleotide
ugcuucuuuagcugccagg

SEQ ID NO: 528475 - RNA, 19 nt, Artificial Sequence
  Description of Artificial Sequence: Synthetic oligonucleotide
acgaaggggagagaagacc

SEQ ID NO: 528476 - RNA, 19 nt, Artificial Sequence
  Description of Artificial Sequence: Synthetic oligonucleotide
acaauucagaaggaacggg

SEQ ID NO: 528477 - RNA, 19 nt, Artificial Sequence
  Description of Artificial Sequence: Synthetic oligonucleotide
caaguauggaaauacccca

SEQ ID NO: 528478 - RNA, 19 nt, Artificial Sequence
  Description of Artificial Sequence: Synthetic oligonucleotide
auuaacuaauaaaucacaa

SEQ ID NO: 528479 - RNA, 19 nt, Artificial Sequence
  Description of Artificial Sequence: Synthetic oligonucleotide
uugacucuuucacauuugu

SEQ ID NO: 528480 - RNA, 19 nt, Artificial Sequence
  Description of Artificial Sequence: Synthetic oligonucleotide
ugagugggcggcacuaaag

SEQ ID NO: 528481 - RNA, 19 nt, Artificial Sequence
  Description of Artificial Sequence: Synthetic oligonucleotide
ucacaauucuauauugcuu

SEQ ID NO: 528482 - RNA, 19 nt, Artificial Sequence
  Description of Artificial Sequence: Synthetic oligonucleotide
cagguaacuguccaagaag

SEQ ID NO: 528483 - RNA, 19 nt, Artificial Sequence
  Description of Artificial Sequence: Synthetic oligonucleotide
aaagcccuuguggagucac

SEQ ID NO: 528484 - RNA, 19 nt, Artificial Sequence
  Description of Artificial Sequence: Synthetic oligonucleotide
ucugcuacucccaaauauu

SEQ ID NO: 528485 - RNA, 19 nt, Artificial Sequence
  Description of Artificial Sequence: Synthetic oligonucleotide
acaucaauaauggguuggg

SEQ ID NO: 528486 - RNA, 19 nt, Artificial Sequence
  Description of Artificial Sequence: Synthetic oligonucleotide
uagcgguugcucuucauug

SEQ ID NO: 528487 - RNA, 19 nt, Artificial Sequence
  Description of Artificial Sequence: Synthetic oligonucleotide
cucgaaucugacauucaag

SEQ ID NO: 528488 - RNA, 19 nt, Artificial Sequence
  Description of Artificial Sequence: Synthetic oligonucleotide
gaaccauuacuauuaacua

SEQ ID NO: 528489 - RNA, 19 nt, Artificial Sequence
  Description of Artificial Sequence: Synthetic oligonucleotide
cuacauaauuccuaucaca

SEQ ID NO: 528490 - RNA, 19 nt, Artificial Sequence
  Description of Artificial Sequence: Synthetic oligonucleotide
cuguaaauuaaucugcuua

SEQ ID NO: 528491 - RNA, 19 nt, Artificial Sequence
  Description of Artificial Sequence: Synthetic oligonucleotide
ucuuuauaccccucagagu

SEQ ID NO: 528492 - RNA, 19 nt, Artificial Sequence
  Description of Artificial Sequence: Synthetic oligonucleotide
caagcuagauaaugguuug

SEQ ID NO: 528493 - RNA, 19 nt, Artificial Sequence
  Description of Artificial Sequence: Synthetic oligonucleotide
aguuuaagcucuaaacuga

SEQ ID NO: 528494 - RNA, 19 nt, Artificial Sequence
  Description of Artificial Sequence: Synthetic oligonucleotide
uuaguccucuuucuauaca

SEQ ID NO: 528495 - RNA, 19 nt, Artificial Sequence
  Description of Artificial Sequence: Synthetic oligonucleotide
auuggcaugugucccacgu

SEQ ID NO: 528496 - RNA, 19 nt, Artificial Sequence
  Description of Artificial Sequence: Synthetic oligonucleotide
gaaauguaaggcuagcgau

SEQ ID NO: 528497 - RNA, 19 nt, Artificial Sequence
  Description of Artificial Sequence: Synthetic oligonucleotide
uccgucgccagcaauggac

SEQ ID NO: 528498 - RNA, 19 nt, Artificial Sequence
  Description of Artificial Sequence: Synthetic oligonucleotide
cuccuuuuggacccuaaag

SEQ ID NO: 528499 - RNA, 19 nt, Artificial Sequence
  Description of Artificial Sequence: Synthetic oligonucleotide
aucaccagaauuucauuaa

SEQ ID NO: 528500 - RNA, 19 nt, Artificial Sequence
  Description of Artificial Sequence: Synthetic oligonucleotide
auauugacauuucauuauu

SEQ ID NO: 528501 - RNA, 19 nt, Artificial Sequence
  Description of Artificial Sequence: Synthetic oligonucleotide
uuacuugcccuagagggug

SEQ ID NO: 528502 - RNA, 19 nt, Artificial Sequence
  Description of Artificial Sequence: Synthetic oligonucleotide
cacgacuccuuuuggaccc

SEQ ID NO: 528503 - RNA, 19 nt, Artificial Sequence
  Description of Artificial Sequence: Synthetic oligonucleotide
ccuaaagccaaaucugagg

SEQ ID NO: 528504 - RNA, 19 nt, Artificial Sequence
  Description of Artificial Sequence: Synthetic oligonucleotide
uacuguagugacagaguca

SEQ ID NO: 528505 - RNA, 19 nt, Artificial Sequence
  Description of Artificial Sequence: Synthetic oligonucleotide
cauuacuauuaacuauuac

SEQ ID NO: 528506 - RNA, 19 nt, Artificial Sequence
  Description of Artificial Sequence: Synthetic oligonucleotide
auuaacuauuacagguuag

SEQ ID NO: 528507 - RNA, 19 nt, Artificial Sequence
  Description of Artificial Sequence: Synthetic oligonucleotide
uccacgacuccuuuuggac

SEQ ID NO: 528508 - RNA, 19 nt, Artificial Sequence
  Description of Artificial Sequence: Synthetic oligonucleotide
uaaccucggagucagguuu

SEQ ID NO: 528509 - RNA, 19 nt, Artificial Sequence
  Description of Artificial Sequence: Synthetic oligonucleotide
aagcuagauaaugguuugg

SEQ ID NO: 528510 - RNA, 19 nt, Artificial Sequence
  Description of Artificial Sequence: Synthetic oligonucleotide
uuaacuauguugggauucu

SEQ ID NO: 528511 - RNA, 19 nt, Artificial Sequence
  Description of Artificial Sequence: Synthetic oligonucleotide
cauaaggcggggcauuggc

SEQ ID NO: 528512 - RNA, 19 nt, Artificial Sequence
  Description of Artificial Sequence: Synthetic oligonucleotide
aucaagcgcugucugcugg

SEQ ID NO: 528513 - RNA, 19 nt, Artificial Sequence
  Description of Artificial Sequence: Synthetic oligonucleotide
aacggguuaagggaaggga

SEQ ID NO: 528514 - RNA, 19 nt, Artificial Sequence
  Description of Artificial Sequence: Synthetic oligonucleotide
agggaagugagugggcggc

SEQ ID NO: 528515 - RNA, 19 nt, Artificial Sequence
  Description of Artificial Sequence: Synthetic oligonucleotide
guuaacuauguugggauuc

SEQ ID NO: 528516 - RNA, 19 nt, Artificial Sequence
  Description of Artificial Sequence: Synthetic oligonucleotide
caacaccuaaaaucgcagc

SEQ ID NO: 528517 - RNA, 19 nt, Artificial Sequence
  Description of Artificial Sequence: Synthetic oligonucleotide
uccuaucacacuugccuug

SEQ ID NO: 528518 - RNA, 19 nt, Artificial Sequence
  Description of Artificial Sequence: Synthetic oligonucleotide
auauucuacucacuuguua

SEQ ID NO: 528519 - RNA, 19 nt, Artificial Sequence
  Description of Artificial Sequence: Synthetic oligonucleotide
cucacuaccaugaauuucu

SEQ ID NO: 528520 - RNA, 19 nt, Artificial Sequence
  Description of Artificial Sequence: Synthetic oligonucleotide
gauuauuaguccucuuucu

SEQ ID NO: 528521 - RNA, 19 nt, Artificial Sequence
  Description of Artificial Sequence: Synthetic oligonucleotide
ggaaauguaaggcuagcga

SEQ ID NO: 528522 - RNA, 19 nt, Artificial Sequence
  Description of Artificial Sequence: Synthetic oligonucleotide
agaauagaucacuuugguu

SEQ ID NO: 528523 - RNA, 19 nt, Artificial Sequence
  Description of Artificial Sequence: Synthetic oligonucleotide
aaccccuuuucuccacauc

SEQ ID NO: 528524 - RNA, 19 nt, Artificial Sequence
  Description of Artificial Sequence: Synthetic oligonucleotide
aacuagccuagaacuuacc

SEQ ID NO: 528525 - RNA, 19 nt, Artificial Sequence
  Description of Artificial Sequence: Synthetic oligonucleotide
aaaagcacguugucacuuu

SEQ ID NO: 528526 - RNA, 19 nt, Artificial Sequence
  Description of Artificial Sequence: Synthetic oligonucleotide
ucgccagcaauggacaugc

SEQ ID NO: 528527 - RNA, 19 nt, Artificial Sequence
  Description of Artificial Sequence: Synthetic oligonucleotide
augguuauuacuugcccua

SEQ ID NO: 528528 - RNA, 19 nt, Artificial Sequence
  Description of Artificial Sequence: Synthetic oligonucleotide
uaggguugauucaaacaaa

SEQ ID NO: 528529 - RNA, 19 nt, Artificial Sequence
  Description of Artificial Sequence: Synthetic oligonucleotide
caguuuacugccaugagcu

SEQ ID NO: 528530 - RNA, 19 nt, Artificial Sequence
  Description of Artificial Sequence: Synthetic oligonucleotide
acucacuaccaugaauuuc

SEQ ID NO: 528531 - RNA, 19 nt, Artificial Sequence
  Description of Artificial Sequence: Synthetic oligonucleotide
ggaucacuugauuagcaug

SEQ ID NO: 528532 - RNA, 19 nt, Artificial Sequence
  Description of Artificial Sequence: Synthetic oligonucleotide
aucaaugauuuaguuauaa

SEQ ID NO: 528533 - RNA, 19 nt, Artificial Sequence
  Description of Artificial Sequence: Synthetic oligonucleotide
ugucaagcuccuuugccaa

SEQ ID NO: 528534 - RNA, 19 nt, Artificial Sequence
  Description of Artificial Sequence: Synthetic oligonucleotide
ggguggaugcaaaauaggg

SEQ ID NO: 528535 - RNA, 19 nt, Artificial Sequence
  Description of Artificial Sequence: Synthetic oligonucleotide
guaacaguucuuuggcuga

SEQ ID NO: 528536 - RNA, 19 nt, Artificial Sequence
  Description of Artificial Sequence: Synthetic oligonucleotide
agagucaucacaacaguau

SEQ ID NO: 528537 - RNA, 19 nt, Artificial Sequence
  Description of Artificial Sequence: Synthetic oligonucleotide
uuagcgguugcucuucauu

SEQ ID NO: 528538 - RNA, 19 nt, Artificial Sequence
  Description of Artificial Sequence: Synthetic oligonucleotide
cuguuacaacaucagugag

SEQ ID NO: 528539 - RNA, 19 nt, Artificial Sequence
  Description of Artificial Sequence: Synthetic oligonucleotide
uuuauaccccucagaguaa

SEQ ID NO: 528540 - RNA, 19 nt, Artificial Sequence
  Description of Artificial Sequence: Synthetic oligonucleotide
uacaacuagccuagaacuu

SEQ ID NO: 528541 - RNA, 19 nt, Artificial Sequence
  Description of Artificial Sequence: Synthetic oligonucleotide
uucuacucacuuguuaaaa

SEQ ID NO: 528542 - RNA, 19 nt, Artificial Sequence
  Description of Artificial Sequence: Synthetic oligonucleotide
acaacucaucuccuaccag

SEQ ID NO: 528543 - RNA, 19 nt, Artificial Sequence
  Description of Artificial Sequence: Synthetic oligonucleotide
guuaacuacaaaccccaaa

SEQ ID NO: 528544 - RNA, 19 nt, Artificial Sequence
  Description of Artificial Sequence: Synthetic oligonucleotide
acuacauguacaacagcug

SEQ ID NO: 528545 - RNA, 19 nt, Artificial Sequence
  Description of Artificial Sequence: Synthetic oligonucleotide
uaaguuuaacugagccuuc

SEQ ID NO: 528546 - RNA, 19 nt, Artificial Sequence
  Description of Artificial Sequence: Synthetic oligonucleotide
acuuugcuauuucaucccu

SEQ ID NO: 528547 - RNA, 19 nt, Artificial Sequence
  Description of Artificial Sequence: Synthetic oligonucleotide
uaaggcggggcauuggcau

SEQ ID NO: 528548 - RNA, 19 nt, Artificial Sequence
  Description of Artificial Sequence: Synthetic oligonucleotide
aaguccgucgccagcaaug

SEQ ID NO: 528549 - RNA, 19 nt, Artificial Sequence
  Description of Artificial Sequence: Synthetic oligonucleotide
aguuuaacugagccuucca

SEQ ID NO: 528550 - RNA, 19 nt, Artificial Sequence
  Description of Artificial Sequence: Synthetic oligonucleotide
gccucagugauguuagcgg

SEQ ID NO: 528551 - RNA, 19 nt, Artificial Sequence
  Description of Artificial Sequence: Synthetic oligonucleotide
guaaguuuaacugagccuu

SEQ ID NO: 528552 - RNA, 19 nt, Artificial Sequence
  Description of Artificial Sequence: Synthetic oligonucleotide
auaaagcccgagcggaaga

SEQ ID NO: 528553 - RNA, 19 nt, Artificial Sequence
  Description of Artificial Sequence: Synthetic oligonucleotide
caacuagccuagaacuuac

SEQ ID NO: 528554 - RNA, 19 nt, Artificial Sequence
  Description of Artificial Sequence: Synthetic oligonucleotide
cuagccuagaacuuaccaa

SEQ ID NO: 528555 - RNA, 19 nt, Artificial Sequence
  Description of Artificial Sequence: Synthetic oligonucleotide
aucugcuuaauagcaaccu

SEQ ID NO: 528556 - RNA, 19 nt, Artificial Sequence
  Description of Artificial Sequence: Synthetic oligonucleotide
caggaucuacuguagugac

SEQ ID NO: 528557 - RNA, 19 nt, Artificial Sequence
  Description of Artificial Sequence: Synthetic oligonucleotide
uacgaaggggagagaagac

SEQ ID NO: 528558 - RNA, 19 nt, Artificial Sequence
  Description of Artificial Sequence: Synthetic oligonucleotide
gaacggguuaagggaaggg

SEQ ID NO: 528559 - RNA, 19 nt, Artificial Sequence
  Description of Artificial Sequence: Synthetic oligonucleotide
auucuacucacuuguuaaa

SEQ ID NO: 528560 - RNA, 19 nt, Artificial Sequence
  Description of Artificial Sequence: Synthetic oligonucleotide
gcuagauaaugguuuggcc

SEQ ID NO: 528561 - RNA, 19 nt, Artificial Sequence
  Description of Artificial Sequence: Synthetic oligonucleotide
gcaauggacaugcaaauaa

SEQ ID NO: 528562 - RNA, 19 nt, Artificial Sequence
  Description of Artificial Sequence: Synthetic oligonucleotide
ucccaaaagcacguuguca

SEQ ID NO: 528563 - RNA, 19 nt, Artificial Sequence
  Description of Artificial Sequence: Synthetic oligonucleotide
ugguuauuacuugcccuag

SEQ ID NO: 528564 - RNA, 19 nt, Artificial Sequence
  Description of Artificial Sequence: Synthetic oligonucleotide
aggcuagcgaugcagucca

SEQ ID NO: 528565 - RNA, 19 nt, Artificial Sequence
  Description of Artificial Sequence: Synthetic oligonucleotide
caguccacgacuccuuuug

SEQ ID NO: 528566 - RNA, 19 nt, Artificial Sequence
  Description of Artificial Sequence: Synthetic oligonucleotide
uuauaccccucagaguaac

SEQ ID NO: 528567 - RNA, 19 nt, Artificial Sequence
  Description of Artificial Sequence: Synthetic oligonucleotide
agcgcugucugcuggaaau

SEQ ID NO: 528568 - RNA, 19 nt, Artificial Sequence
  Description of Artificial Sequence: Synthetic oligonucleotide
aguggcgucaagcuagaua

SEQ ID NO: 528569 - RNA, 19 nt, Artificial Sequence
  Description of Artificial Sequence: Synthetic oligonucleotide
aaagcacguugucacuuuu

SEQ ID NO: 528570 - RNA, 19 nt, Artificial Sequence
  Description of Artificial Sequence: Synthetic oligonucleotide
gcaacaauucagaaggaac

SEQ ID NO: 528571 - RNA, 19 nt, Artificial Sequence
  Description of Artificial Sequence: Synthetic oligonucleotide
gaacuuaccaagguucaaa

SEQ ID NO: 528572 - RNA, 19 nt, Artificial Sequence
  Description of Artificial Sequence: Synthetic oligonucleotide
aaguauggaaauaccccaa

SEQ ID NO: 528573 - RNA, 19 nt, Artificial Sequence
  Description of Artificial Sequence: Synthetic oligonucleotide
cuacgaaggggagagaaga

SEQ ID NO: 528574 - RNA, 19 nt, Artificial Sequence
  Description of Artificial Sequence: Synthetic oligonucleotide
cauaaagcccgagcggaag

SEQ ID NO: 528575 - RNA, 19 nt, Artificial Sequence
  Description of Artificial Sequence: Synthetic oligonucleotide
uguuaacuacaaaccccaa

SEQ ID NO: 528576 - RNA, 19 nt, Artificial Sequence
  Description of Artificial Sequence: Synthetic oligonucleotide
gacugucucuuuauacccc

SEQ ID NO: 528577 - RNA, 19 nt, Artificial Sequence
  Description of Artificial Sequence: Synthetic oligonucleotide
ucagaaggaacggguuaag

SEQ ID NO: 528578 - RNA, 19 nt, Artificial Sequence
  Description of Artificial Sequence: Synthetic oligonucleotide
uuaaccucggagucagguu

SEQ ID NO: 528579 - RNA, 19 nt, Artificial Sequence
  Description of Artificial Sequence: Synthetic oligonucleotide
uauaccccucagaguaaca

SEQ ID NO: 528580 - RNA, 19 nt, Artificial Sequence
  Description of Artificial Sequence: Synthetic oligonucleotide
ugguuccuaaagccaaauc

SEQ ID NO: 528581 - RNA, 19 nt, Artificial Sequence
  Description of Artificial Sequence: Synthetic oligonucleotide
ugcuacucccaaauauuuu

SEQ ID NO: 528582 - RNA, 19 nt, Artificial Sequence
  Description of Artificial Sequence: Synthetic oligonucleotide
uuccuaucacacuugccuu

SEQ ID NO: 528583 - RNA, 19 nt, Artificial Sequence
  Description of Artificial Sequence: Synthetic oligonucleotide
gcuacauaauuccuaucac

SEQ ID NO: 528584 - RNA, 19 nt, Artificial Sequence
  Description of Artificial Sequence: Synthetic oligonucleotide
acaacuagccuagaacuua

SEQ ID NO: 528585 - RNA, 19 nt, Artificial Sequence
  Description of Artificial Sequence: Synthetic oligonucleotide
aauauucuacucacuuguu

SEQ ID NO: 528586 - RNA, 19 nt, Artificial Sequence
  Description of Artificial Sequence: Synthetic oligonucleotide
aguuaacuauguugggauu

SEQ ID NO: 528587 - RNA, 19 nt, Artificial Sequence
  Description of Artificial Sequence: Synthetic oligonucleotide
cacucguuuccaagggaag

SEQ ID NO: 528588 - RNA, 19 nt, Artificial Sequence
  Description of Artificial Sequence: Synthetic oligonucleotide
acacuugccuugaauuuag

SEQ ID NO: 528589 - RNA, 19 nt, Artificial Sequence
  Description of Artificial Sequence: Synthetic oligonucleotide
auuacuugcccuagagggu

SEQ ID NO: 528590 - RNA, 19 nt, Artificial Sequence
  Description of Artificial Sequence: Synthetic oligonucleotide
acaauucuauauugcuuua

SEQ ID NO: 528591 - RNA, 19 nt, Artificial Sequence
  Description of Artificial Sequence: Synthetic oligonucleotide
cuagcgaugcaguccacga

SEQ ID NO: 528592 - RNA, 19 nt, Artificial Sequence
  Description of Artificial Sequence: Synthetic oligonucleotide
agcucuaaacugaaauacu

SEQ ID NO: 528593 - RNA, 19 nt, Artificial Sequence
  Description of Artificial Sequence: Synthetic oligonucleotide
cagauaaaucuuuacaguu

SEQ ID NO: 528594 - RNA, 19 nt, Artificial Sequence
  Description of Artificial Sequence: Synthetic oligonucleotide
aguccgucgccagcaaugg

SEQ ID NO: 528595 - RNA, 19 nt, Artificial Sequence
  Description of Artificial Sequence: Synthetic oligonucleotide
uacugcaauuucucuuggu

SEQ ID NO: 528596 - RNA, 19 nt, Artificial Sequence
  Description of Artificial Sequence: Synthetic oligonucleotide
agcaacaauucagaaggaa

SEQ ID NO: 528597 - RNA, 19 nt, Artificial Sequence
  Description of Artificial Sequence: Synthetic oligonucleotide
caauucagaaggaacgggu

SEQ ID NO: 528598 - RNA, 19 nt, Artificial Sequence
  Description of Artificial Sequence: Synthetic oligonucleotide
accccaaggagacaaccaa

SEQ ID NO: 528599 - RNA, 19 nt, Artificial Sequence
  Description of Artificial Sequence: Synthetic oligonucleotide
ugcagacugucucuuuaua

SEQ ID NO: 528600 - RNA, 19 nt, Artificial Sequence
  Description of Artificial Sequence: Synthetic oligonucleotide
uguuagcgguugcucuuca

SEQ ID NO: 528601 - RNA, 19 nt, Artificial Sequence
  Description of Artificial Sequence: Synthetic oligonucleotide
aaaucgcagcauauacaga

SEQ ID NO: 528602 - RNA, 19 nt, Artificial Sequence
  Description of Artificial Sequence: Synthetic oligonucleotide
ucaagcgcugucugcugga

SEQ ID NO: 528603 - RNA, 19 nt, Artificial Sequence
  Description of Artificial Sequence: Synthetic oligonucleotide
gcgucaagcuagauaaugg

SEQ ID NO: 528604 - RNA, 19 nt, Artificial Sequence
  Description of Artificial Sequence: Synthetic oligonucleotide
acucguuuccaagggaaga

SEQ ID NO: 528605 - RNA, 19 nt, Artificial Sequence
  Description of Artificial Sequence: Synthetic oligonucleotide
agucagguuugaaugacaa

SEQ ID NO: 528606 - RNA, 19 nt, Artificial Sequence
  Description of Artificial Sequence: Synthetic oligonucleotide
aaauaguaguuugcuuguu

SEQ ID NO: 528607 - RNA, 19 nt, Artificial Sequence
  Description of Artificial Sequence: Synthetic oligonucleotide
auguuagcgguugcucuuc

SEQ ID NO: 528608 - RNA, 19 nt, Artificial Sequence
  Description of Artificial Sequence: Synthetic oligonucleotide
aggguugauucaaacaaaa

SEQ ID NO: 528609 - RNA, 19 nt, Artificial Sequence
  Description of Artificial Sequence: Synthetic oligonucleotide
uuucugcuacucccaaaua

SEQ ID NO: 528610 - RNA, 19 nt, Artificial Sequence
  Description of Artificial Sequence: Synthetic oligonucleotide
agggaugcuguaacaguuc

SEQ ID NO: 528611 - RNA, 19 nt, Artificial Sequence
  Description of Artificial Sequence: Synthetic oligonucleotide
cuggaaauguaaggcuagc

SEQ ID NO: 528612 - RNA, 19 nt, Artificial Sequence
  Description of Artificial Sequence: Synthetic oligonucleotide
auacagacacucguuucca

SEQ ID NO: 528613 - RNA, 19 nt, Artificial Sequence
  Description of Artificial Sequence: Synthetic oligonucleotide
cacagcauaaggcggggca

SEQ ID NO: 528614 - RNA, 19 nt, Artificial Sequence
  Description of Artificial Sequence: Synthetic oligonucleotide
cuugauuagcaugcaagaa

SEQ ID NO: 528615 - RNA, 19 nt, Artificial Sequence
  Description of Artificial Sequence: Synthetic oligonucleotide
uuggacccuaaagcagggg

SEQ ID NO: 528616 - RNA, 19 nt, Artificial Sequence
  Description of Artificial Sequence: Synthetic oligonucleotide
cuauuaacuauuacagguu

SEQ ID NO: 528617 - RNA, 19 nt, Artificial Sequence
  Description of Artificial Sequence: Synthetic oligonucleotide
aauaaccauccaagaaauu

SEQ ID NO: 528618 - RNA, 19 nt, Artificial Sequence
  Description of Artificial Sequence: Synthetic oligonucleotide
cuaugaggccucagugaug

SEQ ID NO: 528619 - RNA, 19 nt, Artificial Sequence
  Description of Artificial Sequence: Synthetic oligonucleotide
aucugacauucaaguaugg

SEQ ID NO: 528620 - RNA, 19 nt, Artificial Sequence
  Description of Artificial Sequence: Synthetic oligonucleotide
acuccuuuuggacccuaaa

SEQ ID NO: 528621 - RNA, 19 nt, Artificial Sequence
  Description of Artificial Sequence: Synthetic oligonucleotide
uaaagcccgagcggaagaa

SEQ ID NO: 528622 - RNA, 19 nt, Artificial Sequence
  Description of Artificial Sequence: Synthetic oligonucleotide
ggcgucaagcuagauaaug

SEQ ID NO: 528623 - RNA, 19 nt, Artificial Sequence
  Description of Artificial Sequence: Synthetic oligonucleotide
auaaugguuuggccaguuu

SEQ ID NO: 528624 - RNA, 19 nt, Artificial Sequence
  Description of Artificial Sequence: Synthetic oligonucleotide
uuacaacaucagugaguga

SEQ ID NO: 528625 - RNA, 19 nt, Artificial Sequence
  Description of Artificial Sequence: Synthetic oligonucleotide
cacuugccuugaauuuagg

SEQ ID NO: 528626 - RNA, 19 nt, Artificial Sequence
  Description of Artificial Sequence: Synthetic oligonucleotide
ucguccaugcagguuucug

SEQ ID NO: 528627 - RNA, 19 nt, Artificial Sequence
  Description of Artificial Sequence: Synthetic oligonucleotide
ccagcaauggacaugcaaa

SEQ ID NO: 528628 - RNA, 19 nt, Artificial Sequence
  Description of Artificial Sequence: Synthetic oligonucleotide
gagcuacauaauuccuauc

SEQ ID NO: 528629 - RNA, 19 nt, Artificial Sequence
  Description of Artificial Sequence: Synthetic oligonucleotide
cuccuaccagguaacuguc

SEQ ID NO: 528630 - RNA, 19 nt, Artificial Sequence
  Description of Artificial Sequence: Synthetic oligonucleotide
gugauguuagcgguugcuc

SEQ ID NO: 528631 - RNA, 19 nt, Artificial Sequence
  Description of Artificial Sequence: Synthetic oligonucleotide
uugguuccuaaagccaaau

SEQ ID NO: 528632 - RNA, 19 nt, Artificial Sequence
  Description of Artificial Sequence: Synthetic oligonucleotide
gaacuccaaggccuguaaa

SEQ ID NO: 528633 - RNA, 19 nt, Artificial Sequence
  Description of Artificial Sequence: Synthetic oligonucleotide
aguccucuuucuauacaug

SEQ ID NO: 528634 - RNA, 19 nt, Artificial Sequence
  Description of Artificial Sequence: Synthetic oligonucleotide
gaagaagaauagaucacuu

SEQ ID NO: 528635 - RNA, 19 nt, Artificial Sequence
  Description of Artificial Sequence: Synthetic oligonucleotide
caucaagcgcugucugcug

SEQ ID NO: 528636 - RNA, 19 nt, Artificial Sequence
  Description of Artificial Sequence: Synthetic oligonucleotide
uuauuacaacuagccuaga

SEQ ID NO: 528637 - RNA, 19 nt, Artificial Sequence
  Description of Artificial Sequence: Synthetic oligonucleotide
gaggagaaacaggcauaag

SEQ ID NO: 528638 - RNA, 19 nt, Artificial Sequence
  Description of Artificial Sequence: Synthetic oligonucleotide
cauuggcaugugucccacg

SEQ ID NO: 528639 - RNA, 19 nt, Artificial Sequence
  Description of Artificial Sequence: Synthetic oligonucleotide
acggguuaagggaagggaa

SEQ ID NO: 528640 - RNA, 19 nt, Artificial Sequence
  Description of Artificial Sequence: Synthetic oligonucleotide
aucacuugauuagcaugca

SEQ ID NO: 528641 - RNA, 19 nt, Artificial Sequence
  Description of Artificial Sequence: Synthetic oligonucleotide
cauauacagacacucguuu

SEQ ID NO: 528642 - RNA, 19 nt, Artificial Sequence
  Description of Artificial Sequence: Synthetic oligonucleotide
guuaagggaagggaaggcu

SEQ ID NO: 528643 - RNA, 19 nt, Artificial Sequence
  Description of Artificial Sequence: Synthetic oligonucleotide
gcaagguacuccaucacca

SEQ ID NO: 528644 - RNA, 19 nt, Artificial Sequence
  Description of Artificial Sequence: Synthetic oligonucleotide
ggaacggguuaagggaagg

SEQ ID NO: 528645 - RNA, 19 nt, Artificial Sequence
  Description of Artificial Sequence: Synthetic oligonucleotide
aguuuacugccaugagcuu

SEQ ID NO: 528646 - RNA, 19 nt, Artificial Sequence
  Description of Artificial Sequence: Synthetic oligonucleotide
gccaauauaaagagcuaca

SEQ ID NO: 528647 - RNA, 19 nt, Artificial Sequence
  Description of Artificial Sequence: Synthetic oligonucleotide
augcaaaauaggguugauu

SEQ ID NO: 528648 - RNA, 19 nt, Artificial Sequence
  Description of Artificial Sequence: Synthetic oligonucleotide
ccacgacuccuuuuggacc

SEQ ID NO: 528649 - RNA, 19 nt, Artificial Sequence
  Description of Artificial Sequence: Synthetic oligonucleotide
guccacgacuccuuuugga

SEQ ID NO: 528650 - RNA, 19 nt, Artificial Sequence
  Description of Artificial Sequence: Synthetic oligonucleotide
agaacuuaccaagguucaa

SEQ ID NO: 528651 - RNA, 19 nt, Artificial Sequence
  Description of Artificial Sequence: Synthetic oligonucleotide
ggaugcaaaauaggguuga

SEQ ID NO: 528652 - RNA, 19 nt, Artificial Sequence
  Description of Artificial Sequence: Synthetic oligonucleotide
gcuagcgaugcaguccacg

SEQ ID NO: 528653 - RNA, 19 nt, Artificial Sequence
  Description of Artificial Sequence: Synthetic oligonucleotide
gggaaggcuacgaagggga

SEQ ID NO: 528654 - RNA, 19 nt, Artificial Sequence
  Description of Artificial Sequence: Synthetic oligonucleotide
auaaggcggggcauuggca

SEQ ID NO: 528655 - RNA, 19 nt, Artificial Sequence
  Description of Artificial Sequence: Synthetic oligonucleotide
guaaaccagauaaaucuuu

SEQ ID NO: 528656 - RNA, 19 nt, Artificial Sequence
  Description of Artificial Sequence: Synthetic oligonucleotide
accccucagaguaacaauu

SEQ ID NO: 528657 - RNA, 19 nt, Artificial Sequence
  Description of Artificial Sequence: Synthetic oligonucleotide
caugugaugcagacugucu

SEQ ID NO: 528658 - RNA, 19 nt, Artificial Sequence
  Description of Artificial Sequence: Synthetic oligonucleotide
ccgagcggaagaagaauag

SEQ ID NO: 528659 - RNA, 19 nt, Artificial Sequence
  Description of Artificial Sequence: Synthetic oligonucleotide
caccuaaaaucgcagcaua

SEQ ID NO: 528660 - RNA, 19 nt, Artificial Sequence
  Description of Artificial Sequence: Synthetic oligonucleotide
caucaauaauggguuggga

SEQ ID NO: 528661 - RNA, 19 nt, Artificial Sequence
  Description of Artificial Sequence: Synthetic oligonucleotide
cggcacuaaaggcauaaag

SEQ ID NO: 528662 - RNA, 19 nt, Artificial Sequence
  Description of Artificial Sequence: Synthetic oligonucleotide
caaacucacuaccaugaau

SEQ ID NO: 528663 - RNA, 19 nt, Artificial Sequence
  Description of Artificial Sequence: Synthetic oligonucleotide
cucggagucagguuugaau

SEQ ID NO: 528664 - RNA, 19 nt, Artificial Sequence
  Description of Artificial Sequence: Synthetic oligonucleotide
ggguugggaacacuguaaa

SEQ ID NO: 528665 - RNA, 19 nt, Artificial Sequence
  Description of Artificial Sequence: Synthetic oligonucleotide
cacacuugccuugaauuua

SEQ ID NO: 528666 - RNA, 19 nt, Artificial Sequence
  Description of Artificial Sequence: Synthetic oligonucleotide
agugacccaccagcaaggu

SEQ ID NO: 528667 - RNA, 19 nt, Artificial Sequence
  Description of Artificial Sequence: Synthetic oligonucleotide
cgucaguaaguuuaacuga

SEQ ID NO: 528668 - RNA, 19 nt, Artificial Sequence
  Description of Artificial Sequence: Synthetic oligonucleotide
uaacuauguugggauucuu

SEQ ID NO: 528669 - RNA, 19 nt, Artificial Sequence
  Description of Artificial Sequence: Synthetic oligonucleotide
caugugucccacguggucu

SEQ ID NO: 528670 - RNA, 19 nt, Artificial Sequence
  Description of Artificial Sequence: Synthetic oligonucleotide
gaagugagugggcggcacu

SEQ ID NO: 528671 - RNA, 19 nt, Artificial Sequence
  Description of Artificial Sequence: Synthetic oligonucleotide
gacccaccauguacuuugc

SEQ ID NO: 528672 - RNA, 19 nt, Artificial Sequence
  Description of Artificial Sequence: Synthetic oligonucleotide
uggcgucaagcuagauaau

SEQ ID NO: 528673 - RNA, 19 nt, Artificial Sequence
  Description of Artificial Sequence: Synthetic oligonucleotide
agccaaaucugaggagaaa

SEQ ID NO: 528674 - RNA, 19 nt, Artificial Sequence
  Description of Artificial Sequence: Synthetic oligonucleotide
gucaagcuagauaaugguu

SEQ ID NO: 528675 - RNA, 19 nt, Artificial Sequence
  Description of Artificial Sequence: Synthetic oligonucleotide
gcauaaggcggggcauugg

SEQ ID NO: 528676 - RNA, 19 nt, Artificial Sequence
  Description of Artificial Sequence: Synthetic oligonucleotide
agugagugggcggcacuaa

SEQ ID NO: 528677 - RNA, 19 nt, Artificial Sequence
  Description of Artificial Sequence: Synthetic oligonucleotide
cuauuacagguuaguuuau

SEQ ID NO: 528678 - RNA, 19 nt, Artificial Sequence
  Description of Artificial Sequence: Synthetic oligonucleotide
ccaugugaugcagacuguc

SEQ ID NO: 528679 - RNA, 19 nt, Artificial Sequence
  Description of Artificial Sequence: Synthetic oligonucleotide
gaaccccuuuucuccacau

SEQ ID NO: 528680 - RNA, 19 nt, Artificial Sequence
  Description of Artificial Sequence: Synthetic oligonucleotide
caauuccuucuuugguugu

SEQ ID NO: 528681 - RNA, 19 nt, Artificial Sequence
  Description of Artificial Sequence: Synthetic oligonucleotide
ccuaaaaucgcagcauaua

SEQ ID NO: 528682 - RNA, 19 nt, Artificial Sequence
  Description of Artificial Sequence: Synthetic oligonucleotide
caggaucaguggcgucaag

SEQ ID NO: 528683 - RNA, 19 nt, Artificial Sequence
  Description of Artificial Sequence: Synthetic oligonucleotide
ggaagugagugggcggcac

SEQ ID NO: 528684 - RNA, 19 nt, Artificial Sequence
  Description of Artificial Sequence: Synthetic oligonucleotide
ccauuacuauuaacuauua

SEQ ID NO: 528685 - RNA, 19 nt, Artificial Sequence
  Description of Artificial Sequence: Synthetic oligonucleotide
agcccgagcggaagaagaa

SEQ ID NO: 528686 - RNA, 19 nt, Artificial Sequence
  Description of Artificial Sequence: Synthetic oligonucleotide
caaaguccgucgccagcaa

SEQ ID NO: 528687 - RNA, 19 nt, Artificial Sequence
  Description of Artificial Sequence: Synthetic oligonucleotide
accucggagucagguuuga

SEQ ID NO: 528688 - RNA, 19 nt, Artificial Sequence
  Description of Artificial Sequence: Synthetic oligonucleotide
ggacccuaaagcaggggcu

SEQ ID NO: 528689 - RNA, 19 nt, Artificial Sequence
  Description of Artificial Sequence: Synthetic oligonucleotide
cccgagcggaagaagaaua

SEQ ID NO: 528690 - RNA, 19 nt, Artificial Sequence
  Description of Artificial Sequence: Synthetic oligonucleotide
ccuaucacacuugccuuga

SEQ ID NO: 528691 - RNA, 19 nt, Artificial Sequence
  Description of Artificial Sequence: Synthetic oligonucleotide
guuagcgguugcucuucau

SEQ ID NO: 528692 - RNA, 19 nt, Artificial Sequence
  Description of Artificial Sequence: Synthetic oligonucleotide
cccuuucaguuuaagcucu

SEQ ID NO: 528693 - RNA, 19 nt, Artificial Sequence
  Description of Artificial Sequence: Synthetic oligonucleotide
cgaaucugacauucaagua

SEQ ID NO: 528694 - RNA, 19 nt, Artificial Sequence
  Description of Artificial Sequence: Synthetic oligonucleotide
guccgucgccagcaaugga

SEQ ID NO: 528695 - RNA, 19 nt, Artificial Sequence
  Description of Artificial Sequence: Synthetic oligonucleotide
acgacuccuuuuggacccu

SEQ ID NO: 528696 - RNA, 19 nt, Artificial Sequence
  Description of Artificial Sequence: Synthetic oligonucleotide
gcauauacagacacucguu

SEQ ID NO: 528697 - RNA, 19 nt, Artificial Sequence
  Description of Artificial Sequence: Synthetic oligonucleotide
gcgaugcaguccacgacuc

SEQ ID NO: 528698 - RNA, 19 nt, Artificial Sequence
  Description of Artificial Sequence: Synthetic oligonucleotide
ccgucgccagcaauggaca

SEQ ID NO: 528699 - RNA, 19 nt, Artificial Sequence
  Description of Artificial Sequence: Synthetic oligonucleotide
caagcuccuuugccaauau

SEQ ID NO: 528700 - RNA, 19 nt, Artificial Sequence
  Description of Artificial Sequence: Synthetic oligonucleotide
caccauguacuuugcuauu

SEQ ID NO: 528701 - RNA, 19 nt, Artificial Sequence
  Description of Artificial Sequence: Synthetic oligonucleotide
gcauaaagcccgagcggaa

SEQ ID NO: 528702 - RNA, 19 nt, Artificial Sequence
  Description of Artificial Sequence: Synthetic oligonucleotide
gcacguugucacuuuugau

SEQ ID NO: 528703 - RNA, 19 nt, Artificial Sequence
  Description of Artificial Sequence: Synthetic oligonucleotide
gggaagugagugggcggca

SEQ ID NO: 528704 - RNA, 19 nt, Artificial Sequence
  Description of Artificial Sequence: Synthetic oligonucleotide
caucuccgucaguaaguuu

SEQ ID NO: 528705 - RNA, 19 nt, Artificial Sequence
  Description of Artificial Sequence: Synthetic oligonucleotide
cagcauaaggcggggcauu

SEQ ID NO: 528706 - RNA, 19 nt, Artificial Sequence
  Description of Artificial Sequence: Synthetic oligonucleotide
gcggcacuaaaggcauaaa

SEQ ID NO: 528707 - RNA, 19 nt, Artificial Sequence
  Description of Artificial Sequence: Synthetic oligonucleotide
ggcggggcauuggcaugug

SEQ ID NO: 528708 - RNA, 19 nt, Artificial Sequence
  Description of Artificial Sequence: Synthetic oligonucleotide
ggcuagcgaugcaguccac

SEQ ID NO: 528709 - RNA, 19 nt, Artificial Sequence
  Description of Artificial Sequence: Synthetic oligonucleotide
gcccgagcggaagaagaau

SEQ ID NO: 528710 - RNA, 19 nt, Artificial Sequence
  Description of Artificial Sequence: Synthetic oligonucleotide
gcggggcauuggcaugugu

SEQ ID NO: 528711 - RNA, 19 nt, Artificial Sequence
  Description of Artificial Sequence: Synthetic oligonucleotide
ccucggagucagguuugaa

SEQ ID NO: 528712 - RNA, 19 nt, Artificial Sequence
  Description of Artificial Sequence: Synthetic oligonucleotide
caguggcgucaagcuagau

SEQ ID NO: 528713 - RNA, 19 nt, Artificial Sequence
  Description of Artificial Sequence: Synthetic oligonucleotide
cgacuccuuuuggacccua

SEQ ID NO: 528714 - RNA, 19 nt, Artificial Sequence
  Description of Artificial Sequence: Synthetic oligonucleotide
acuaguauugaccagggcc

SEQ ID NO: 528715 - RNA, 19 nt, Artificial Sequence
  Description of Artificial Sequence: Synthetic oligonucleotide
aacauaaucucuccguacc

SEQ ID NO: 528716 - RNA, 19 nt, Artificial Sequence
  Description of Artificial Sequence: Synthetic oligonucleotide
uauuuuagcaucuuuacca

SEQ ID NO: 528717 - RNA, 19 nt, Artificial Sequence
  Description of Artificial Sequence: Synthetic oligonucleotide
aaugucucuuucuaguccc

SEQ ID NO: 528718 - RNA, 19 nt, Artificial Sequence
  Description of Artificial Sequence: Synthetic oligonucleotide
ugagcuaccacuuuaaaac

SEQ ID NO: 528719 - RNA, 19 nt, Artificial Sequence
  Description of Artificial Sequence: Synthetic oligonucleotide
aagacaugagcacagucac

SEQ ID NO: 528720 - RNA, 19 nt, Artificial Sequence
  Description of Artificial Sequence: Synthetic oligonucleotide
aaauucuauaaacugcuca

SEQ ID NO: 528721 - RNA, 19 nt, Artificial Sequence
  Description of Artificial Sequence: Synthetic oligonucleotide
ucaauuguaauuccaacac

SEQ ID NO: 528722 - RNA, 19 nt, Artificial Sequence
  Description of Artificial Sequence: Synthetic oligonucleotide
uggaaguuggcucauagcc

SEQ ID NO: 528723 - RNA, 19 nt, Artificial Sequence
  Description of Artificial Sequence: Synthetic oligonucleotide
uucauagacacucugcacc

SEQ ID NO: 528724 - RNA, 19 nt, Artificial Sequence
  Description of Artificial Sequence: Synthetic oligonucleotide
ucagaugacaaucacaaau

SEQ ID NO: 528725 - RNA, 19 nt, Artificial Sequence
  Description of Artificial Sequence: Synthetic oligonucleotide
agaguugggagcuaacagc

SEQ ID NO: 528726 - RNA, 19 nt, Artificial Sequence
  Description of Artificial Sequence: Synthetic oligonucleotide
uuucuagucccacauuugg

SEQ ID NO: 528727 - RNA, 19 nt, Artificial Sequence
  Description of Artificial Sequence: Synthetic oligonucleotide
aauaaucaggucuggucuc

SEQ ID NO: 528728 - RNA, 19 nt, Artificial Sequence
  Description of Artificial Sequence: Synthetic oligonucleotide
ggagcuaacagccacaggg

SEQ ID NO: 528729 - RNA, 19 nt, Artificial Sequence
  Description of Artificial Sequence: Synthetic oligonucleotide
aaucacaaaugaugauggc

SEQ ID NO: 528730 - RNA, 19 nt, Artificial Sequence
  Description of Artificial Sequence: Synthetic oligonucleotide
gaaauuuagagggaucccg

SEQ ID NO: 528731 - RNA, 19 nt, Artificial Sequence
  Description of Artificial Sequence: Synthetic oligonucleotide
caagcuuaucaauacaacc

SEQ ID NO: 528732 - RNA, 19 nt, Artificial Sequence
  Description of Artificial Sequence: Synthetic oligonucleotide
cuaguauugaccagggccc

SEQ ID NO: 528733 - RNA, 19 nt, Artificial Sequence
  Description of Artificial Sequence: Synthetic oligonucleotide
aagggucguaucuagcacg

SEQ ID NO: 528734 - RNA, 19 nt, Artificial Sequence
  Description of Artificial Sequence: Synthetic oligonucleotide
guaggauacagcuucaaac

SEQ ID NO: 528735 - RNA, 19 nt, Artificial Sequence
  Description of Artificial Sequence: Synthetic oligonucleotide
uauaaauaaucuucuccug

SEQ ID NO: 528736 - RNA, 19 nt, Artificial Sequence
  Description of Artificial Sequence: Synthetic oligonucleotide
guuggaaugauucacaugu

SEQ ID NO: 528737 - RNA, 19 nt, Artificial Sequence
  Description of Artificial Sequence: Synthetic oligonucleotide
aguuccacggaucaccagg

SEQ ID NO: 528738 - RNA, 19 nt, Artificial Sequence
  Description of Artificial Sequence: Synthetic oligonucleotide
aacgccuccacccaauuca

SEQ ID NO: 528739 - RNA, 19 nt, Artificial Sequence
  Description of Artificial Sequence: Synthetic oligonucleotide
uccguaagucaacaugucg

SEQ ID NO: 528740 - RNA, 19 nt, Artificial Sequence
  Description of Artificial Sequence: Synthetic oligonucleotide
ucaucuuccggguauauaa

SEQ ID NO: 528741 - RNA, 19 nt, Artificial Sequence
  Description of Artificial Sequence: Synthetic oligonucleotide
cuuucgauagugagaaggg

SEQ ID NO: 528742 - RNA, 19 nt, Artificial Sequence
  Description of Artificial Sequence: Synthetic oligonucleotide
ucguaaauauuguuugaag

SEQ ID NO: 528743 - RNA, 19 nt, Artificial Sequence
  Description of Artificial Sequence: Synthetic oligonucleotide
aaauuuagagggaucccgg

SEQ ID NO: 528744 - RNA, 19 nt, Artificial Sequence
  Description of Artificial Sequence: Synthetic oligonucleotide
aaccaaggccuuucgauag

SEQ ID NO: 528745 - RNA, 19 nt, Artificial Sequence
  Description of Artificial Sequence: Synthetic oligonucleotide
uuuagagggaucccggcug

SEQ ID NO: 528746 - RNA, 19 nt, Artificial Sequence
  Description of Artificial Sequence: Synthetic oligonucleotide
uggacuaguauugaccagg

SEQ ID NO: 528747 - RNA, 19 nt, Artificial Sequence
  Description of Artificial Sequence: Synthetic oligonucleotide
uucgauagugagaagggac

SEQ ID NO: 528748 - RNA, 19 nt, Artificial Sequence
  Description of Artificial Sequence: Synthetic oligonucleotide
gauggacuaguauugacca

SEQ ID NO: 528749 - RNA, 19 nt, Artificial Sequence
  Description of Artificial Sequence: Synthetic oligonucleotide
aauucaaaucggaaggucu

SEQ ID NO: 528750 - RNA, 19 nt, Artificial Sequence
  Description of Artificial Sequence: Synthetic oligonucleotide
aaugccaacucucgcaggu

SEQ ID NO: 528751 - RNA, 19 nt, Artificial Sequence
  Description of Artificial Sequence: Synthetic oligonucleotide
auaaucucuccguaccaac

SEQ ID NO: 528752 - RNA, 19 nt, Artificial Sequence
  Description of Artificial Sequence: Synthetic oligonucleotide
gaauuuagaaacugggaaa

SEQ ID NO: 528753 - RNA, 19 nt, Artificial Sequence
  Description of Artificial Sequence: Synthetic oligonucleotide
ucguaucuagcacggauag

SEQ ID NO: 528754 - RNA, 19 nt, Artificial Sequence
  Description of Artificial Sequence: Synthetic oligonucleotide
cuauaaacugcucaauguc

SEQ ID NO: 528755 - RNA, 19 nt, Artificial Sequence
  Description of Artificial Sequence: Synthetic oligonucleotide
uuuagcugcucuaaccgcu

SEQ ID NO: 528756 - RNA, 19 nt, Artificial Sequence
  Description of Artificial Sequence: Synthetic oligonucleotide
auaagggucguaucuagca

SEQ ID NO: 528757 - RNA, 19 nt, Artificial Sequence
  Description of Artificial Sequence: Synthetic oligonucleotide
uacacacgaguccaugggg

SEQ ID NO: 528758 - RNA, 19 nt, Artificial Sequence
  Description of Artificial Sequence: Synthetic oligonucleotide
caugccgaaccccugaugc

SEQ ID NO: 528759 - RNA, 19 nt, Artificial Sequence
  Description of Artificial Sequence: Synthetic oligonucleotide
gauugccucguaaauauug

SEQ ID NO: 528760 - RNA, 19 nt, Artificial Sequence
  Description of Artificial Sequence: Synthetic oligonucleotide
auuguuugaaguguggccu

SEQ ID NO: 528761 - RNA, 19 nt, Artificial Sequence
  Description of Artificial Sequence: Synthetic oligonucleotide
cuucaaaccaucaggacga

SEQ ID NO: 528762 - RNA, 19 nt, Artificial Sequence
  Description of Artificial Sequence: Synthetic oligonucleotide
acucgguacacacgagucc

SEQ ID NO: 528763 - RNA, 19 nt, Artificial Sequence
  Description of Artificial Sequence: Synthetic oligonucleotide
ucucgaacuauggaaacgc

SEQ ID NO: 528764 - RNA, 19 nt, Artificial Sequence
  Description of Artificial Sequence: Synthetic oligonucleotide
auggaaguuggcucauagc

SEQ ID NO: 528765 - RNA, 19 nt, Artificial Sequence
  Description of Artificial Sequence: Synthetic oligonucleotide
ucgauagugagaagggacu

SEQ ID NO: 528766 - RNA, 19 nt, Artificial Sequence
  Description of Artificial Sequence: Synthetic oligonucleotide
ucuccguaccaacucaacc

SEQ ID NO: 528767 - RNA, 19 nt, Artificial Sequence
  Description of Artificial Sequence: Synthetic oligonucleotide
uaucacugcgauuuucccc

SEQ ID NO: 528768 - RNA, 19 nt, Artificial Sequence
  Description of Artificial Sequence: Synthetic oligonucleotide
ugaccaagcugcuuuagcu

SEQ ID NO: 528769 - RNA, 19 nt, Artificial Sequence
  Description of Artificial Sequence: Synthetic oligonucleotide
ucgaccaggucacugggag

SEQ ID NO: 528770 - RNA, 19 nt, Artificial Sequence
  Description of Artificial Sequence: Synthetic oligonucleotide
agauaagggucguaucuag

SEQ ID NO: 528771 - RNA, 19 nt, Artificial Sequence
  Description of Artificial Sequence: Synthetic oligonucleotide
caccaaaugacucccagug

SEQ ID NO: 528772 - RNA, 19 nt, Artificial Sequence
  Description of Artificial Sequence: Synthetic oligonucleotide
aggaagguuucccagccuc

SEQ ID NO: 528773 - RNA, 19 nt, Artificial Sequence
  Description of Artificial Sequence: Synthetic oligonucleotide
aacuugggaaccaaggccu

SEQ ID NO: 528774 - RNA, 19 nt, Artificial Sequence
  Description of Artificial Sequence: Synthetic oligonucleotide
gaaguguggccugauaaag

SEQ ID NO: 528775 - RNA, 19 nt, Artificial Sequence
  Description of Artificial Sequence: Synthetic oligonucleotide
acuauggaaacgccuccac

SEQ ID NO: 528776 - RNA, 19 nt, Artificial Sequence
  Description of Artificial Sequence: Synthetic oligonucleotide
ugcaagaagguagauugcc

SEQ ID NO: 528777 - RNA, 19 nt, Artificial Sequence
  Description of Artificial Sequence: Synthetic oligonucleotide
auaaacugcucaaugucuc

SEQ ID NO: 528778 - RNA, 19 nt, Artificial Sequence
  Description of Artificial Sequence: Synthetic oligonucleotide
cacaaucuacugaggaugg

SEQ ID NO: 528779 - RNA, 19 nt, Artificial Sequence
  Description of Artificial Sequence: Synthetic oligonucleotide
aaaugccaacucucgcagg

SEQ ID NO: 528780 - RNA, 19 nt, Artificial Sequence
  Description of Artificial Sequence: Synthetic oligonucleotide
gaugaguacucaaaaucug

SEQ ID NO: 528781 - RNA, 19 nt, Artificial Sequence
  Description of Artificial Sequence: Synthetic oligonucleotide
uuucgguaguaguuccugg

SEQ ID NO: 528782 - RNA, 19 nt, Artificial Sequence
  Description of Artificial Sequence: Synthetic oligonucleotide
uccuaaacacagcacauuu

SEQ ID NO: 528783 - RNA, 19 nt, Artificial Sequence
  Description of Artificial Sequence: Synthetic oligonucleotide
ucgaacuauggaaacgccu

SEQ ID NO: 528784 - RNA, 19 nt, Artificial Sequence
  Description of Artificial Sequence: Synthetic oligonucleotide
cuagacuccuccauacagc

SEQ ID NO: 528785 - RNA, 19 nt, Artificial Sequence
  Description of Artificial Sequence: Synthetic oligonucleotide
ucugcacucgguacacacg

SEQ ID NO: 528786 - RNA, 19 nt, Artificial Sequence
  Description of Artificial Sequence: Synthetic oligonucleotide
aggauggacuaguauugac

SEQ ID NO: 528787 - RNA, 19 nt, Artificial Sequence
  Description of Artificial Sequence: Synthetic oligonucleotide
gcacggauagcucucaugg

SEQ ID NO: 528788 - RNA, 19 nt, Artificial Sequence
  Description of Artificial Sequence: Synthetic oligonucleotide
aaacgccuccacccaauuc

SEQ ID NO: 528789 - RNA, 19 nt, Artificial Sequence
  Description of Artificial Sequence: Synthetic oligonucleotide
agcuucaaaccaucaggac

SEQ ID NO: 528790 - RNA, 19 nt, Artificial Sequence
  Description of Artificial Sequence: Synthetic oligonucleotide
ugcaaaugccaacucucgc

SEQ ID NO: 528791 - RNA, 19 nt, Artificial Sequence
  Description of Artificial Sequence: Synthetic oligonucleotide
uggccaguuggaaugauuc

SEQ ID NO: 528792 - RNA, 19 nt, Artificial Sequence
  Description of Artificial Sequence: Synthetic oligonucleotide
agccuagacuccuccauac

SEQ ID NO: 528793 - RNA, 19 nt, Artificial Sequence
  Description of Artificial Sequence: Synthetic oligonucleotide
auuucaagacaugagcaca

SEQ ID NO: 528794 - RNA, 19 nt, Artificial Sequence
  Description of Artificial Sequence: Synthetic oligonucleotide
uggcaacauaaucucuccg

SEQ ID NO: 528795 - RNA, 19 nt, Artificial Sequence
  Description of Artificial Sequence: Synthetic oligonucleotide
gagcuaccacuuuaaaacc

SEQ ID NO: 528796 - RNA, 19 nt, Artificial Sequence
  Description of Artificial Sequence: Synthetic oligonucleotide
auucaaaucggaaggucuc

SEQ ID NO: 528797 - RNA, 19 nt, Artificial Sequence
  Description of Artificial Sequence: Synthetic oligonucleotide
aaucuacugaggauggacu

SEQ ID NO: 528798 - RNA, 19 nt, Artificial Sequence
  Description of Artificial Sequence: Synthetic oligonucleotide
cagaauacuugauugccuc

SEQ ID NO: 528799 - RNA, 19 nt, Artificial Sequence
  Description of Artificial Sequence: Synthetic oligonucleotide
uccacccaauucaaaucgg

SEQ ID NO: 528800 - RNA, 19 nt, Artificial Sequence
  Description of Artificial Sequence: Synthetic oligonucleotide
cuuaucaauacaacccaca

SEQ ID NO: 528801 - RNA, 19 nt, Artificial Sequence
  Description of Artificial Sequence: Synthetic oligonucleotide
gaacuacacuuccauacac

SEQ ID NO: 528802 - RNA, 19 nt, Artificial Sequence
  Description of Artificial Sequence: Synthetic oligonucleotide
ucacuggaacuacacuucc

SEQ ID NO: 528803 - RNA, 19 nt, Artificial Sequence
  Description of Artificial Sequence: Synthetic oligonucleotide
caucauaugagcuaccacu

SEQ ID NO: 528804 - RNA, 19 nt, Artificial Sequence
  Description of Artificial Sequence: Synthetic oligonucleotide
gaacuauggaaacgccucc

SEQ ID NO: 528805 - RNA, 19 nt, Artificial Sequence
  Description of Artificial Sequence: Synthetic oligonucleotide
uuccguagccucaggaggc

SEQ ID NO: 528806 - RNA, 19 nt, Artificial Sequence
  Description of Artificial Sequence: Synthetic oligonucleotide
cauggaaguuggcucauag

SEQ ID NO: 528807 - RNA, 19 nt, Artificial Sequence
  Description of Artificial Sequence: Synthetic oligonucleotide
cuuuagcugcucuaaccgc

SEQ ID NO: 528808 - RNA, 19 nt, Artificial Sequence
  Description of Artificial Sequence: Synthetic oligonucleotide
ucugagcccaaauggguca

SEQ ID NO: 528809 - RNA, 19 nt, Artificial Sequence
  Description of Artificial Sequence: Synthetic oligonucleotide
uaagggucguaucuagcac

SEQ ID NO: 528810 - RNA, 19 nt, Artificial Sequence
  Description of Artificial Sequence: Synthetic oligonucleotide
ucgugcauccguaagucaa

SEQ ID NO: 528811 - RNA, 19 nt, Artificial Sequence
  Description of Artificial Sequence: Synthetic oligonucleotide
ucuacugaggauggacuag

SEQ ID NO: 528812 - RNA, 19 nt, Artificial Sequence
  Description of Artificial Sequence: Synthetic oligonucleotide
augagcuaccacuuuaaaa

SEQ ID NO: 528813 - RNA, 19 nt, Artificial Sequence
  Description of Artificial Sequence: Synthetic oligonucleotide
ucgcuucaugcaauaauca

SEQ ID NO: 528814 - RNA, 19 nt, Artificial Sequence
  Description of Artificial Sequence: Synthetic oligonucleotide
uacuugauugccucguaaa

SEQ ID NO: 528815 - RNA, 19 nt, Artificial Sequence
  Description of Artificial Sequence: Synthetic oligonucleotide
ugucgcuucaugcaauaau

SEQ ID NO: 528816 - RNA, 19 nt, Artificial Sequence
  Description of Artificial Sequence: Synthetic oligonucleotide
uagucccacauuuggcagg

SEQ ID NO: 528817 - RNA, 19 nt, Artificial Sequence
  Description of Artificial Sequence: Synthetic oligonucleotide
caucuuuaccauguagggg

SEQ ID NO: 528818 - RNA, 19 nt, Artificial Sequence
  Description of Artificial Sequence: Synthetic oligonucleotide
acugcgauuuuccccgauc

SEQ ID NO: 528819 - RNA, 19 nt, Artificial Sequence
  Description of Artificial Sequence: Synthetic oligonucleotide
uucacauguugccuucaca

SEQ ID NO: 528820 - RNA, 19 nt, Artificial Sequence
  Description of Artificial Sequence: Synthetic oligonucleotide
agcucgaccaggucacugg

SEQ ID NO: 528821 - RNA, 19 nt, Artificial Sequence
  Description of Artificial Sequence: Synthetic oligonucleotide
caacauaaucucuccguac

SEQ ID NO: 528822 - RNA, 19 nt, Artificial Sequence
  Description of Artificial Sequence: Synthetic oligonucleotide
uccaccuuauccacagugu

SEQ ID NO: 528823 - RNA, 19 nt, Artificial Sequence
  Description of Artificial Sequence: Synthetic oligonucleotide
gaagguagauugccguggc

SEQ ID NO: 528824 - RNA, 19 nt, Artificial Sequence
  Description of Artificial Sequence: Synthetic oligonucleotide
aucaugcaaauuuucggau

SEQ ID NO: 528825 - RNA, 19 nt, Artificial Sequence
  Description of Artificial Sequence: Synthetic oligonucleotide
cucacuggaacuacacuuc

SEQ ID NO: 528826 - RNA, 19 nt, Artificial Sequence
  Description of Artificial Sequence: Synthetic oligonucleotide
cuauggaaacgccuccacc

SEQ ID NO: 528827 - RNA, 19 nt, Artificial Sequence
  Description of Artificial Sequence: Synthetic oligonucleotide
uagagcuauucuuucugcu

SEQ ID NO: 528828 - RNA, 19 nt, Artificial Sequence
  Description of Artificial Sequence: Synthetic oligonucleotide
uggcuaugcacaguggacc

SEQ ID NO: 528829 - RNA, 19 nt, Artificial Sequence
  Description of Artificial Sequence: Synthetic oligonucleotide
aucuagcacggauagcucu

SEQ ID NO: 528830 - RNA, 19 nt, Artificial Sequence
  Description of Artificial Sequence: Synthetic oligonucleotide
uucgguaguaguuccuggu

SEQ ID NO: 528831 - RNA, 19 nt, Artificial Sequence
  Description of Artificial Sequence: Synthetic oligonucleotide
cugcgauuuuccccgaucc

SEQ ID NO: 528832 - RNA, 19 nt, Artificial Sequence
  Description of Artificial Sequence: Synthetic oligonucleotide
ccuuucgauagugagaagg

SEQ ID NO: 528833 - RNA, 19 nt, Artificial Sequence
  Description of Artificial Sequence: Synthetic oligonucleotide
cuuauccacagugugacca

SEQ ID NO: 528834 - RNA, 19 nt, Artificial Sequence
  Description of Artificial Sequence: Synthetic oligonucleotide
ugacucccagugcaaaucu

SEQ ID NO: 528835 - RNA, 19 nt, Artificial Sequence
  Description of Artificial Sequence: Synthetic oligonucleotide
uucaaaucggaaggucucc

SEQ ID NO: 528836 - RNA, 19 nt, Artificial Sequence
  Description of Artificial Sequence: Synthetic oligonucleotide
gacaaggggcaucggaaug

SEQ ID NO: 528837 - RNA, 19 nt, Artificial Sequence
  Description of Artificial Sequence: Synthetic oligonucleotide
ccguaagucaacaugucgc

SEQ ID NO: 528838 - RNA, 19 nt, Artificial Sequence
  Description of Artificial Sequence: Synthetic oligonucleotide
acauaaucucuccguacca

SEQ ID NO: 528839 - RNA, 19 nt, Artificial Sequence
  Description of Artificial Sequence: Synthetic oligonucleotide
aacuacacuuccauacaca

SEQ ID NO: 528840 - RNA, 19 nt, Artificial Sequence
  Description of Artificial Sequence: Synthetic oligonucleotide
guugggagcuaacagccac

SEQ ID NO: 528841 - RNA, 19 nt, Artificial Sequence
  Description of Artificial Sequence: Synthetic oligonucleotide
caaucuacugaggauggac

SEQ ID NO: 528842 - RNA, 19 nt, Artificial Sequence
  Description of Artificial Sequence: Synthetic oligonucleotide
uauggccggacuuugugau

SEQ ID NO: 528843 - RNA, 19 nt, Artificial Sequence
  Description of Artificial Sequence: Synthetic oligonucleotide
uuguuugaaguguggccug

SEQ ID NO: 528844 - RNA, 19 nt, Artificial Sequence
  Description of Artificial Sequence: Synthetic oligonucleotide
uauucccuguaaaacugau

SEQ ID NO: 528845 - RNA, 19 nt, Artificial Sequence
  Description of Artificial Sequence: Synthetic oligonucleotide
guaucuagcacggauagcu

SEQ ID NO: 528846 - RNA, 19 nt, Artificial Sequence
  Description of Artificial Sequence: Synthetic oligonucleotide
uaugagcuaccacuuuaaa

SEQ ID NO: 528847 - RNA, 19 nt, Artificial Sequence
  Description of Artificial Sequence: Synthetic oligonucleotide
ugggaaccaaggccuuucg

SEQ ID NO: 528848 - RNA, 19 nt, Artificial Sequence
  Description of Artificial Sequence: Synthetic oligonucleotide
gauaagggucguaucuagc

SEQ ID NO: 528849 - RNA, 19 nt, Artificial Sequence
  Description of Artificial Sequence: Synthetic oligonucleotide
uuucgauagugagaaggga

SEQ ID NO: 528850 - RNA, 19 nt, Artificial Sequence
  Description of Artificial Sequence: Synthetic oligonucleotide
gaaugucucucugcacucg

SEQ ID NO: 528851 - RNA, 19 nt, Artificial Sequence
  Description of Artificial Sequence: Synthetic oligonucleotide
uggaccaugucugcucagg

SEQ ID NO: 528852 - RNA, 19 nt, Artificial Sequence
  Description of Artificial Sequence: Synthetic oligonucleotide
auugccguggccauuauuu

SEQ ID NO: 528853 - RNA, 19 nt, Artificial Sequence
  Description of Artificial Sequence: Synthetic oligonucleotide
aacuauggaaacgccucca

SEQ ID NO: 528854 - RNA, 19 nt, Artificial Sequence
  Description of Artificial Sequence: Synthetic oligonucleotide
agaugcgcaggugaggcag

SEQ ID NO: 528855 - RNA, 19 nt, Artificial Sequence
  Description of Artificial Sequence: Synthetic oligonucleotide
caucggaaugucucucugc

SEQ ID NO: 528856 - RNA, 19 nt, Artificial Sequence
  Description of Artificial Sequence: Synthetic oligonucleotide
auagugagaagggacugca

SEQ ID NO: 528857 - RNA, 19 nt, Artificial Sequence
  Description of Artificial Sequence: Synthetic oligonucleotide
cucggcacuguauuccaag

SEQ ID NO: 528858 - RNA, 19 nt, Artificial Sequence
  Description of Artificial Sequence: Synthetic oligonucleotide
augaguacucaaaaucuga

SEQ ID NO: 528859 - RNA, 19 nt, Artificial Sequence
  Description of Artificial Sequence: Synthetic oligonucleotide
cucaaccugguauggccgg

SEQ ID NO: 528860 - RNA, 19 nt, Artificial Sequence
  Description of Artificial Sequence: Synthetic oligonucleotide
auggccaaaggaguugauc

SEQ ID NO: 528861 - RNA, 19 nt, Artificial Sequence
  Description of Artificial Sequence: Synthetic oligonucleotide
gcaauaaucaggucugguc

SEQ ID NO: 528862 - RNA, 19 nt, Artificial Sequence
  Description of Artificial Sequence: Synthetic oligonucleotide
auacacaugcagcucucga

SEQ ID NO: 528863 - RNA, 19 nt, Artificial Sequence
  Description of Artificial Sequence: Synthetic oligonucleotide
ucaauacaacccacauccu

SEQ ID NO: 528864 - RNA, 19 nt, Artificial Sequence
  Description of Artificial Sequence: Synthetic oligonucleotide
cucucgaacuauggaaacg

SEQ ID NO: 528865 - RNA, 19 nt, Artificial Sequence
  Description of Artificial Sequence: Synthetic oligonucleotide
cagugcaaaucucauuuuc

SEQ ID NO: 528866 - RNA, 19 nt, Artificial Sequence
  Description of Artificial Sequence: Synthetic oligonucleotide
cucgaacuauggaaacgcc

SEQ ID NO: 528867 - RNA, 19 nt, Artificial Sequence
  Description of Artificial Sequence: Synthetic oligonucleotide
gguaguaguuccuggugcc

SEQ ID NO: 528868 - RNA, 19 nt, Artificial Sequence
  Description of Artificial Sequence: Synthetic oligonucleotide
caucucggcacuguauucc

SEQ ID NO: 528869 - RNA, 19 nt, Artificial Sequence
  Description of Artificial Sequence: Synthetic oligonucleotide
gcauccguaagucaacaug

SEQ ID NO: 528870 - RNA, 19 nt, Artificial Sequence
  Description of Artificial Sequence: Synthetic oligonucleotide
aggggcaucggaaugucuc

SEQ ID NO: 528871 - RNA, 19 nt, Artificial Sequence
  Description of Artificial Sequence: Synthetic oligonucleotide
ucuuucgguaguaguuccu

SEQ ID NO: 528872 - RNA, 19 nt, Artificial Sequence
  Description of Artificial Sequence: Synthetic oligonucleotide
ugauucacauguugccuuc

SEQ ID NO: 528873 - RNA, 19 nt, Artificial Sequence
  Description of Artificial Sequence: Synthetic oligonucleotide
cuggcuaugcacaguggac

SEQ ID NO: 528874 - RNA, 19 nt, Artificial Sequence
  Description of Artificial Sequence: Synthetic oligonucleotide
gugccugugguuaaagggc

SEQ ID NO: 528875 - RNA, 19 nt, Artificial Sequence
  Description of Artificial Sequence: Synthetic oligonucleotide
gucgcuucaugcaauaauc

SEQ ID NO: 528876 - RNA, 19 nt, Artificial Sequence
  Description of Artificial Sequence: Synthetic oligonucleotide
ggauggacuaguauugacc

SEQ ID NO: 528877 - RNA, 19 nt, Artificial Sequence
  Description of Artificial Sequence: Synthetic oligonucleotide
cacuuccauacacaugcag

SEQ ID NO: 528878 - RNA, 19 nt, Artificial Sequence
  Description of Artificial Sequence: Synthetic oligonucleotide
uuuggcaggucaggcauca

SEQ ID NO: 528879 - RNA, 19 nt, Artificial Sequence
  Description of Artificial Sequence: Synthetic oligonucleotide
ugcgauuuuccccgaucca

SEQ ID NO: 528880 - RNA, 19 nt, Artificial Sequence
  Description of Artificial Sequence: Synthetic oligonucleotide
acgaaaagcaggguucuca

SEQ ID NO: 528881 - RNA, 19 nt, Artificial Sequence
  Description of Artificial Sequence: Synthetic oligonucleotide
guaucucuggccucuguca

SEQ ID NO: 528882 - RNA, 19 nt, Artificial Sequence
  Description of Artificial Sequence: Synthetic oligonucleotide
auggacuaguauugaccag

SEQ ID NO: 528883 - RNA, 19 nt, Artificial Sequence
  Description of Artificial Sequence: Synthetic oligonucleotide
ugcugaaauuuagagggau

SEQ ID NO: 528884 - RNA, 19 nt, Artificial Sequence
  Description of Artificial Sequence: Synthetic oligonucleotide
guaagacugggaugaguac

SEQ ID NO: 528885 - RNA, 19 nt, Artificial Sequence
  Description of Artificial Sequence: Synthetic oligonucleotide
acucaaccugguauggccg

SEQ ID NO: 528886 - RNA, 19 nt, Artificial Sequence
  Description of Artificial Sequence: Synthetic oligonucleotide
cauccguaagucaacaugu

SEQ ID NO: 528887 - RNA, 19 nt, Artificial Sequence
  Description of Artificial Sequence: Synthetic oligonucleotide
aaaugacucccagugcaaa

SEQ ID NO: 528888 - RNA, 19 nt, Artificial Sequence
  Description of Artificial Sequence: Synthetic oligonucleotide
uccacggaucaccagggua

SEQ ID NO: 528889 - RNA, 19 nt, Artificial Sequence
  Description of Artificial Sequence: Synthetic oligonucleotide
uaucuagcacggauagcuc

SEQ ID NO: 528890 - RNA, 19 nt, Artificial Sequence
  Description of Artificial Sequence: Synthetic oligonucleotide
gaccaugucugcucaggac

SEQ ID NO: 528891 - RNA, 19 nt, Artificial Sequence
  Description of Artificial Sequence: Synthetic oligonucleotide
caaccccugauaucacugc

SEQ ID NO: 528892 - RNA, 19 nt, Artificial Sequence
  Description of Artificial Sequence: Synthetic oligonucleotide
gaaccaaggccuuucgaua

SEQ ID NO: 528893 - RNA, 19 nt, Artificial Sequence
  Description of Artificial Sequence: Synthetic oligonucleotide
ugcaauaaucaggucuggu

SEQ ID NO: 528894 - RNA, 19 nt, Artificial Sequence
  Description of Artificial Sequence: Synthetic oligonucleotide
cacucgguacacacgaguc

SEQ ID NO: 528895 - RNA, 19 nt, Artificial Sequence
  Description of Artificial Sequence: Synthetic oligonucleotide
agcacggauagcucucaug

SEQ ID NO: 528896 - RNA, 19 nt, Artificial Sequence
  Description of Artificial Sequence: Synthetic oligonucleotide
agaauguccugaucaggau

SEQ ID NO: 528897 - RNA, 19 nt, Artificial Sequence
  Description of Artificial Sequence: Synthetic oligonucleotide
ugacaaggggcaucggaau

SEQ ID NO: 528898 - RNA, 19 nt, Artificial Sequence
  Description of Artificial Sequence: Synthetic oligonucleotide
cugcaagaagguagauugc

SEQ ID NO: 528899 - RNA, 19 nt, Artificial Sequence
  Description of Artificial Sequence: Synthetic oligonucleotide
gugaccaagcugcuuuagc

SEQ ID NO: 528900 - RNA, 19 nt, Artificial Sequence
  Description of Artificial Sequence: Synthetic oligonucleotide
ucauaugagcuaccacuuu

SEQ ID NO: 528901 - RNA, 19 nt, Artificial Sequence
  Description of Artificial Sequence: Synthetic oligonucleotide
gacuaguauugaccagggc

SEQ ID NO: 528902 - RNA, 19 nt, Artificial Sequence
  Description of Artificial Sequence: Synthetic oligonucleotide
uagcccaucuuucgguagu

SEQ ID NO: 528903 - RNA, 19 nt, Artificial Sequence
  Description of Artificial Sequence: Synthetic oligonucleotide
ggucaggcaucauaugagc

SEQ ID NO: 528904 - RNA, 19 nt, Artificial Sequence
  Description of Artificial Sequence: Synthetic oligonucleotide
aucuacugaggauggacua

SEQ ID NO: 528905 - RNA, 19 nt, Artificial Sequence
  Description of Artificial Sequence: Synthetic oligonucleotide
ugauaucacugcgauuuuc

SEQ ID NO: 528906 - RNA, 19 nt, Artificial Sequence
  Description of Artificial Sequence: Synthetic oligonucleotide
auggaaacgccuccaccca

SEQ ID NO: 528907 - RNA, 19 nt, Artificial Sequence
  Description of Artificial Sequence: Synthetic oligonucleotide
gguucucacaucucggcac

SEQ ID NO: 528908 - RNA, 19 nt, Artificial Sequence
  Description of Artificial Sequence: Synthetic oligonucleotide
aaucaggucuggucucaau

SEQ ID NO: 528909 - RNA, 19 nt, Artificial Sequence
  Description of Artificial Sequence: Synthetic oligonucleotide
uuagcaucuuuaccaugua

SEQ ID NO: 528910 - RNA, 19 nt, Artificial Sequence
  Description of Artificial Sequence: Synthetic oligonucleotide
aguagccuagacuccucca

SEQ ID NO: 528911 - RNA, 19 nt, Artificial Sequence
  Description of Artificial Sequence: Synthetic oligonucleotide
cauaugagcuaccacuuua

SEQ ID NO: 528912 - RNA, 19 nt, Artificial Sequence
  Description of Artificial Sequence: Synthetic oligonucleotide
auugccucguaaauauugu

SEQ ID NO: 528913 - RNA, 19 nt, Artificial Sequence
  Description of Artificial Sequence: Synthetic oligonucleotide
agccacaacagcaauccca

SEQ ID NO: 528914 - RNA, 19 nt, Artificial Sequence
  Description of Artificial Sequence: Synthetic oligonucleotide
gcaaaugccaacucucgca

SEQ ID NO: 528915 - RNA, 19 nt, Artificial Sequence
  Description of Artificial Sequence: Synthetic oligonucleotide
ggccugauaaagcaucaug

SEQ ID NO: 528916 - RNA, 19 nt, Artificial Sequence
  Description of Artificial Sequence: Synthetic oligonucleotide
ggagaauagcuccuguauc

SEQ ID NO: 528917 - RNA, 19 nt, Artificial Sequence
  Description of Artificial Sequence: Synthetic oligonucleotide
gugccaaccccugauauca

SEQ ID NO: 528918 - RNA, 19 nt, Artificial Sequence
  Description of Artificial Sequence: Synthetic oligonucleotide
uggccggacuuugugauga

SEQ ID NO: 528919 - RNA, 19 nt, Artificial Sequence
  Description of Artificial Sequence: Synthetic oligonucleotide
accgcugucuugucugcag

SEQ ID NO: 528920 - RNA, 19 nt, Artificial Sequence
  Description of Artificial Sequence: Synthetic oligonucleotide
cuaugcacaguggaccaug

SEQ ID NO: 528921 - RNA, 19 nt, Artificial Sequence
  Description of Artificial Sequence: Synthetic oligonucleotide
ccucagaugacaaucacaa

SEQ ID NO: 528922 - RNA, 19 nt, Artificial Sequence
  Description of Artificial Sequence: Synthetic oligonucleotide
gcaagaagguagauugccg

SEQ ID NO: 528923 - RNA, 19 nt, Artificial Sequence
  Description of Artificial Sequence: Synthetic oligonucleotide
agggucguaucuagcacgg

SEQ ID NO: 528924 - RNA, 19 nt, Artificial Sequence
  Description of Artificial Sequence: Synthetic oligonucleotide
acaaggggcaucggaaugu

SEQ ID NO: 528925 - RNA, 19 nt, Artificial Sequence
  Description of Artificial Sequence: Synthetic oligonucleotide
gguauggccggacuuugug

SEQ ID NO: 528926 - RNA, 19 nt, Artificial Sequence
  Description of Artificial Sequence: Synthetic oligonucleotide
uacaacccacauccucagc

SEQ ID NO: 528927 - RNA, 19 nt, Artificial Sequence
  Description of Artificial Sequence: Synthetic oligonucleotide
auaaucaggucuggucuca

SEQ ID NO: 528928 - RNA, 19 nt, Artificial Sequence
  Description of Artificial Sequence: Synthetic oligonucleotide
cacauauauucccuguaaa

SEQ ID NO: 528929 - RNA, 19 nt, Artificial Sequence
  Description of Artificial Sequence: Synthetic oligonucleotide
uugccaugcucuacuccug

SEQ ID NO: 528930 - RNA, 19 nt, Artificial Sequence
  Description of Artificial Sequence: Synthetic oligonucleotide
uguuugaaguguggccuga

SEQ ID NO: 528931 - RNA, 19 nt, Artificial Sequence
  Description of Artificial Sequence: Synthetic oligonucleotide
ugucugcucaggacagaac

SEQ ID NO: 528932 - RNA, 19 nt, Artificial Sequence
  Description of Artificial Sequence: Synthetic oligonucleotide
uguguaagacugggaugag

SEQ ID NO: 528933 - RNA, 19 nt, Artificial Sequence
  Description of Artificial Sequence: Synthetic oligonucleotide
caguagccuagacuccucc

SEQ ID NO: 528934 - RNA, 19 nt, Artificial Sequence
  Description of Artificial Sequence: Synthetic oligonucleotide
aucucggcacuguauucca

SEQ ID NO: 528935 - RNA, 19 nt, Artificial Sequence
  Description of Artificial Sequence: Synthetic oligonucleotide
aucauaugagcuaccacuu

SEQ ID NO: 528936 - RNA, 19 nt, Artificial Sequence
  Description of Artificial Sequence: Synthetic oligonucleotide
cuagaguugggagcuaaca

SEQ ID NO: 528937 - RNA, 19 nt, Artificial Sequence
  Description of Artificial Sequence: Synthetic oligonucleotide
caagaagguagauugccgu

SEQ ID NO: 528938 - RNA, 19 nt, Artificial Sequence
  Description of Artificial Sequence: Synthetic oligonucleotide
cuacaugggcacacaaaga

SEQ ID NO: 528939 - RNA, 19 nt, Artificial Sequence
  Description of Artificial Sequence: Synthetic oligonucleotide
ugggcacacaaagagggua

SEQ ID NO: 528940 - RNA, 19 nt, Artificial Sequence
  Description of Artificial Sequence: Synthetic oligonucleotide
cugcacucgguacacacga

SEQ ID NO: 528941 - RNA, 19 nt, Artificial Sequence
  Description of Artificial Sequence: Synthetic oligonucleotide
guauggccggacuuuguga

SEQ ID NO: 528942 - RNA, 19 nt, Artificial Sequence
  Description of Artificial Sequence: Synthetic oligonucleotide
auaugagcuaccacuuuaa

SEQ ID NO: 528943 - RNA, 19 nt, Artificial Sequence
  Description of Artificial Sequence: Synthetic oligonucleotide
ugagcugacaaggggcauc

SEQ ID NO: 528944 - RNA, 19 nt, Artificial Sequence
  Description of Artificial Sequence: Synthetic oligonucleotide
auccguaagucaacauguc

SEQ ID NO: 528945 - RNA, 19 nt, Artificial Sequence
  Description of Artificial Sequence: Synthetic oligonucleotide
ggacuaguauugaccaggg

SEQ ID NO: 528946 - RNA, 19 nt, Artificial Sequence
  Description of Artificial Sequence: Synthetic oligonucleotide
gaaccccugaugcugaaau

SEQ ID NO: 528947 - RNA, 19 nt, Artificial Sequence
  Description of Artificial Sequence: Synthetic oligonucleotide
ucggaaugucucucugcac

SEQ ID NO: 528948 - RNA, 19 nt, Artificial Sequence
  Description of Artificial Sequence: Synthetic oligonucleotide
cuugauugccucguaaaua

SEQ ID NO: 528949 - RNA, 19 nt, Artificial Sequence
  Description of Artificial Sequence: Synthetic oligonucleotide
agccucgugcauccguaag

SEQ ID NO: 528950 - RNA, 19 nt, Artificial Sequence
  Description of Artificial Sequence: Synthetic oligonucleotide
cgaacuauggaaacgccuc

SEQ ID NO: 528951 - RNA, 19 nt, Artificial Sequence
  Description of Artificial Sequence: Synthetic oligonucleotide
ugccguggccauuauuuua

SEQ ID NO: 528952 - RNA, 19 nt, Artificial Sequence
  Description of Artificial Sequence: Synthetic oligonucleotide
gcuggcgccaagcuuauca

SEQ ID NO: 528953 - RNA, 19 nt, Artificial Sequence
  Description of Artificial Sequence: Synthetic oligonucleotide
uugggaaccaaggccuuuc

SEQ ID NO: 528954 - RNA, 19 nt, Artificial Sequence
  Description of Artificial Sequence: Synthetic oligonucleotide
aaccccugaugcugaaauu

SEQ ID NO: 528955 - RNA, 19 nt, Artificial Sequence
  Description of Artificial Sequence: Synthetic oligonucleotide
ggaugaguacucaaaaucu

SEQ ID NO: 528956 - RNA, 19 nt, Artificial Sequence
  Description of Artificial Sequence: Synthetic oligonucleotide
cuaccacuuuaaaaccaca

SEQ ID NO: 528957 - RNA, 19 nt, Artificial Sequence
  Description of Artificial Sequence: Synthetic oligonucleotide
cucuccguaccaacucaac

SEQ ID NO: 528958 - RNA, 19 nt, Artificial Sequence
  Description of Artificial Sequence: Synthetic oligonucleotide
gaugcgcaggugaggcagg

SEQ ID NO: 528959 - RNA, 19 nt, Artificial Sequence
  Description of Artificial Sequence: Synthetic oligonucleotide
ucucacaucucggcacugu

SEQ ID NO: 528960 - RNA, 19 nt, Artificial Sequence
  Description of Artificial Sequence: Synthetic oligonucleotide
gacaaucacaaaugaugau

SEQ ID NO: 528961 - RNA, 19 nt, Artificial Sequence
  Description of Artificial Sequence: Synthetic oligonucleotide
ugcauccguaagucaacau

SEQ ID NO: 528962 - RNA, 19 nt, Artificial Sequence
  Description of Artificial Sequence: Synthetic oligonucleotide
ggugucucuggccacaucu

SEQ ID NO: 528963 - RNA, 19 nt, Artificial Sequence
  Description of Artificial Sequence: Synthetic oligonucleotide
ugauugccucguaaauauu

SEQ ID NO: 528964 - RNA, 19 nt, Artificial Sequence
  Description of Artificial Sequence: Synthetic oligonucleotide
acucucgcagguugccaug

SEQ ID NO: 528965 - RNA, 19 nt, Artificial Sequence
  Description of Artificial Sequence: Synthetic oligonucleotide
accccugaugcugaaauuu

SEQ ID NO: 528966 - RNA, 19 nt, Artificial Sequence
  Description of Artificial Sequence: Synthetic oligonucleotide
uaguauugaccagggcccu

SEQ ID NO: 528967 - RNA, 19 nt, Artificial Sequence
  Description of Artificial Sequence: Synthetic oligonucleotide
agcagcaugccgaaccccu

SEQ ID NO: 528968 - RNA, 19 nt, Artificial Sequence
  Description of Artificial Sequence: Synthetic oligonucleotide
accacaaucuuuggccagu

SEQ ID NO: 528969 - RNA, 19 nt, Artificial Sequence
  Description of Artificial Sequence: Synthetic oligonucleotide
gccaaaggaguugaucugc

SEQ ID NO: 528970 - RNA, 19 nt, Artificial Sequence
  Description of Artificial Sequence: Synthetic oligonucleotide
gaggauggacuaguauuga

SEQ ID NO: 528971 - RNA, 19 nt, Artificial Sequence
  Description of Artificial Sequence: Synthetic oligonucleotide
ggcaacauaaucucuccgu

SEQ ID NO: 528972 - RNA, 19 nt, Artificial Sequence
  Description of Artificial Sequence: Synthetic oligonucleotide
gccguggccauuauuuuag

SEQ ID NO: 528973 - RNA, 19 nt, Artificial Sequence
  Description of Artificial Sequence: Synthetic oligonucleotide
gcuaccacuuuaaaaccac

SEQ ID NO: 528974 - RNA, 19 nt, Artificial Sequence
  Description of Artificial Sequence: Synthetic oligonucleotide
acugauguguggacaucug

SEQ ID NO: 528975 - RNA, 19 nt, Artificial Sequence
  Description of Artificial Sequence: Synthetic oligonucleotide
caccccaaucuccagccuc

SEQ ID NO: 528976 - RNA, 19 nt, Artificial Sequence
  Description of Artificial Sequence: Synthetic oligonucleotide
guuuugcacaucacagcca

SEQ ID NO: 528977 - RNA, 19 nt, Artificial Sequence
  Description of Artificial Sequence: Synthetic oligonucleotide
uguccugaucaggaucuuc

SEQ ID NO: 528978 - RNA, 19 nt, Artificial Sequence
  Description of Artificial Sequence: Synthetic oligonucleotide
guccugaugggcuuugccu

SEQ ID NO: 528979 - RNA, 19 nt, Artificial Sequence
  Description of Artificial Sequence: Synthetic oligonucleotide
ccaaccccugauaucacug

SEQ ID NO: 528980 - RNA, 19 nt, Artificial Sequence
  Description of Artificial Sequence: Synthetic oligonucleotide
gguaggauacagcuucaaa

SEQ ID NO: 528981 - RNA, 19 nt, Artificial Sequence
  Description of Artificial Sequence: Synthetic oligonucleotide
ccuuguaaucuguagccca

SEQ ID NO: 528982 - RNA, 19 nt, Artificial Sequence
  Description of Artificial Sequence: Synthetic oligonucleotide
augccgaaccccugaugcu

SEQ ID NO: 528983 - RNA, 19 nt, Artificial Sequence
  Description of Artificial Sequence: Synthetic oligonucleotide
uuccaaccucccugguucu

SEQ ID NO: 528984 - RNA, 19 nt, Artificial Sequence
  Description of Artificial Sequence: Synthetic oligonucleotide
cguaaauauuguuugaagu

SEQ ID NO: 528985 - RNA, 19 nt, Artificial Sequence
  Description of Artificial Sequence: Synthetic oligonucleotide
auggccggacuuugugaug

SEQ ID NO: 528986 - RNA, 19 nt, Artificial Sequence
  Description of Artificial Sequence: Synthetic oligonucleotide
cauaaucucuccguaccaa

SEQ ID NO: 528987 - RNA, 19 nt, Artificial Sequence
  Description of Artificial Sequence: Synthetic oligonucleotide
aaccucccugguucucaca

SEQ ID NO: 528988 - RNA, 19 nt, Artificial Sequence
  Description of Artificial Sequence: Synthetic oligonucleotide
aggcaucauaugagcuacc

SEQ ID NO: 528989 - RNA, 19 nt, Artificial Sequence
  Description of Artificial Sequence: Synthetic oligonucleotide
guauugaccagggcccuga

SEQ ID NO: 528990 - RNA, 19 nt, Artificial Sequence
  Description of Artificial Sequence: Synthetic oligonucleotide
gcaucauaugagcuaccac

SEQ ID NO: 528991 - RNA, 19 nt, Artificial Sequence
  Description of Artificial Sequence: Synthetic oligonucleotide
cucucgcagguugccaugc

SEQ ID NO: 528992 - RNA, 19 nt, Artificial Sequence
  Description of Artificial Sequence: Synthetic oligonucleotide
cccugaugcugaaauuuag

SEQ ID NO: 528993 - RNA, 19 nt, Artificial Sequence
  Description of Artificial Sequence: Synthetic oligonucleotide
gcugacaaggggcaucgga

SEQ ID NO: 528994 - RNA, 19 nt, Artificial Sequence
  Description of Artificial Sequence: Synthetic oligonucleotide
cacggaucaccaggguagg

SEQ ID NO: 528995 - RNA, 19 nt, Artificial Sequence
  Description of Artificial Sequence: Synthetic oligonucleotide
gcucgaccaggucacuggg

SEQ ID NO: 528996 - RNA, 19 nt, Artificial Sequence
  Description of Artificial Sequence: Synthetic oligonucleotide
aggccuuucgauagugaga

SEQ ID NO: 528997 - RNA, 19 nt, Artificial Sequence
  Description of Artificial Sequence: Synthetic oligonucleotide
acgagggcgaggauccgag

SEQ ID NO: 528998 - RNA, 19 nt, Artificial Sequence
  Description of Artificial Sequence: Synthetic oligonucleotide
uugccguggccauuauuuu

SEQ ID NO: 528999 - RNA, 19 nt, Artificial Sequence
  Description of Artificial Sequence: Synthetic oligonucleotide
caucuuccggguauauaaa

SEQ ID NO: 529000 - RNA, 19 nt, Artificial Sequence
  Description of Artificial Sequence: Synthetic oligonucleotide
gcucucgaacuauggaaac

SEQ ID NO: 529001 - RNA, 19 nt, Artificial Sequence
  Description of Artificial Sequence: Synthetic oligonucleotide
ggcuaugcacaguggacca

SEQ ID NO: 529002 - RNA, 19 nt, Artificial Sequence
  Description of Artificial Sequence: Synthetic oligonucleotide
uggcgccaagcuuaucaau

SEQ ID NO: 529003 - RNA, 19 nt, Artificial Sequence
  Description of Artificial Sequence: Synthetic oligonucleotide
ccggguauauaaauaaucu

SEQ ID NO: 529004 - RNA, 19 nt, Artificial Sequence
  Description of Artificial Sequence: Synthetic oligonucleotide
gcuuaucaauacaacccac

SEQ ID NO: 529005 - RNA, 19 nt, Artificial Sequence
  Description of Artificial Sequence: Synthetic oligonucleotide
ugccaaccccugauaucac

SEQ ID NO: 529006 - RNA, 19 nt, Artificial Sequence
  Description of Artificial Sequence: Synthetic oligonucleotide
gucguaucuagcacggaua

SEQ ID NO: 529007 - RNA, 19 nt, Artificial Sequence
  Description of Artificial Sequence: Synthetic oligonucleotide
ccugauaucacugcgauuu

SEQ ID NO: 529008 - RNA, 19 nt, Artificial Sequence
  Description of Artificial Sequence: Synthetic oligonucleotide
ggcaucauaugagcuacca

SEQ ID NO: 529009 - RNA, 19 nt, Artificial Sequence
  Description of Artificial Sequence: Synthetic oligonucleotide
ccaguuggaaugauucaca

SEQ ID NO: 529010 - RNA, 19 nt, Artificial Sequence
  Description of Artificial Sequence: Synthetic oligonucleotide
guagccuagacuccuccau

SEQ ID NO: 529011 - RNA, 19 nt, Artificial Sequence
  Description of Artificial Sequence: Synthetic oligonucleotide
gcucauagccuguguaaga

SEQ ID NO: 529012 - RNA, 19 nt, Artificial Sequence
  Description of Artificial Sequence: Synthetic oligonucleotide
gucccucagaugacaauca

SEQ ID NO: 529013 - RNA, 19 nt, Artificial Sequence
  Description of Artificial Sequence: Synthetic oligonucleotide
cucagaugacaaucacaaa

SEQ ID NO: 529014 - RNA, 19 nt, Artificial Sequence
  Description of Artificial Sequence: Synthetic oligonucleotide
cuggcaguccugaugggcu

SEQ ID NO: 529015 - RNA, 19 nt, Artificial Sequence
  Description of Artificial Sequence: Synthetic oligonucleotide
cacggauagcucucaugga

SEQ ID NO: 529016 - RNA, 19 nt, Artificial Sequence
  Description of Artificial Sequence: Synthetic oligonucleotide
aaggggcaucggaaugucu

SEQ ID NO: 529017 - RNA, 19 nt, Artificial Sequence
  Description of Artificial Sequence: Synthetic oligonucleotide
caggugucgcuucaugcaa

SEQ ID NO: 529018 - RNA, 19 nt, Artificial Sequence
  Description of Artificial Sequence: Synthetic oligonucleotide
gggagaauagcuccuguau

SEQ ID NO: 529019 - RNA, 19 nt, Artificial Sequence
  Description of Artificial Sequence: Synthetic oligonucleotide
cucgugcauccguaaguca

SEQ ID NO: 529020 - RNA, 19 nt, Artificial Sequence
  Description of Artificial Sequence: Synthetic oligonucleotide
uggcagacggcuggcgcca

SEQ ID NO: 529021 - RNA, 19 nt, Artificial Sequence
  Description of Artificial Sequence: Synthetic oligonucleotide
cucagcucuuccuuuccua

SEQ ID NO: 529022 - RNA, 19 nt, Artificial Sequence
  Description of Artificial Sequence: Synthetic oligonucleotide
aguugggagcuaacagcca

SEQ ID NO: 529023 - RNA, 19 nt, Artificial Sequence
  Description of Artificial Sequence: Synthetic oligonucleotide
uagcacggauagcucucau

SEQ ID NO: 529024 - RNA, 19 nt, Artificial Sequence
  Description of Artificial Sequence: Synthetic oligonucleotide
gacgaaaagcaggguucuc

SEQ ID NO: 529025 - RNA, 19 nt, Artificial Sequence
  Description of Artificial Sequence: Synthetic oligonucleotide
cagauaagggucguaucua

SEQ ID NO: 529026 - RNA, 19 nt, Artificial Sequence
  Description of Artificial Sequence: Synthetic oligonucleotide
uucaaaccaucaggacgaa

SEQ ID NO: 529027 - RNA, 19 nt, Artificial Sequence
  Description of Artificial Sequence: Synthetic oligonucleotide
agacugggaugaguacuca

SEQ ID NO: 529028 - RNA, 19 nt, Artificial Sequence
  Description of Artificial Sequence: Synthetic oligonucleotide
gacucccagugcaaaucuc

SEQ ID NO: 529029 - RNA, 19 nt, Artificial Sequence
  Description of Artificial Sequence: Synthetic oligonucleotide
gggagcuaacagccacagg

SEQ ID NO: 529030 - RNA, 19 nt, Artificial Sequence
  Description of Artificial Sequence: Synthetic oligonucleotide
caaggggcaucggaauguc

SEQ ID NO: 529031 - RNA, 19 nt, Artificial Sequence
  Description of Artificial Sequence: Synthetic oligonucleotide
ggaccaugucugcucagga

SEQ ID NO: 529032 - RNA, 19 nt, Artificial Sequence
  Description of Artificial Sequence: Synthetic oligonucleotide
gaaugugccugugguuaaa

SEQ ID NO: 529033 - RNA, 19 nt, Artificial Sequence
  Description of Artificial Sequence: Synthetic oligonucleotide
gugcauccguaagucaaca

SEQ ID NO: 529034 - RNA, 19 nt, Artificial Sequence
  Description of Artificial Sequence: Synthetic oligonucleotide
caguuggaaugauucacau

SEQ ID NO: 529035 - RNA, 19 nt, Artificial Sequence
  Description of Artificial Sequence: Synthetic oligonucleotide
ggccaguuggaaugauuca

SEQ ID NO: 529036 - RNA, 19 nt, Artificial Sequence
  Description of Artificial Sequence: Synthetic oligonucleotide
gucaggcaucauaugagcu

SEQ ID NO: 529037 - RNA, 19 nt, Artificial Sequence
  Description of Artificial Sequence: Synthetic oligonucleotide
uggccugauaaagcaucau

SEQ ID NO: 529038 - RNA, 19 nt, Artificial Sequence
  Description of Artificial Sequence: Synthetic oligonucleotide
cuggcgccaagcuuaucaa

SEQ ID NO: 529039 - RNA, 19 nt, Artificial Sequence
  Description of Artificial Sequence: Synthetic oligonucleotide
ggucguaucuagcacggau

SEQ ID NO: 529040 - RNA, 19 nt, Artificial Sequence
  Description of Artificial Sequence: Synthetic oligonucleotide
uggcaguccugaugggcuu

SEQ ID NO: 529041 - RNA, 19 nt, Artificial Sequence
  Description of Artificial Sequence: Synthetic oligonucleotide
gguuaaagggcagaaucau

SEQ ID NO: 529042 - RNA, 19 nt, Artificial Sequence
  Description of Artificial Sequence: Synthetic oligonucleotide
ccauguaggggccuuguaa

SEQ ID NO: 529043 - RNA, 19 nt, Artificial Sequence
  Description of Artificial Sequence: Synthetic oligonucleotide
guaaucuguagcccaucuu

SEQ ID NO: 529044 - RNA, 19 nt, Artificial Sequence
  Description of Artificial Sequence: Synthetic oligonucleotide
cucuaaccgcugucuuguc

SEQ ID NO: 529045 - RNA, 19 nt, Artificial Sequence
  Description of Artificial Sequence: Synthetic oligonucleotide
cuagcacggauagcucuca

SEQ ID NO: 529046 - RNA, 19 nt, Artificial Sequence
  Description of Artificial Sequence: Synthetic oligonucleotide
cucgaccaggucacuggga

SEQ ID NO: 529047 - RNA, 19 nt, Artificial Sequence
  Description of Artificial Sequence: Synthetic oligonucleotide
auccgagccaccagcucga

SEQ ID NO: 529048 - RNA, 19 nt, Artificial Sequence
  Description of Artificial Sequence: Synthetic oligonucleotide
cgauccaugcucuucuaga

SEQ ID NO: 529049 - RNA, 19 nt, Artificial Sequence
  Description of Artificial Sequence: Synthetic oligonucleotide
ccacccaauucaaaucgga

SEQ ID NO: 529050 - RNA, 19 nt, Artificial Sequence
  Description of Artificial Sequence: Synthetic oligonucleotide
gagcccaaaugggucaccu

SEQ ID NO: 529051 - RNA, 19 nt, Artificial Sequence
  Description of Artificial Sequence: Synthetic oligonucleotide
cccagugcaaaucucauuu

SEQ ID NO: 529052 - RNA, 19 nt, Artificial Sequence
  Description of Artificial Sequence: Synthetic oligonucleotide
ccucgugcauccguaaguc

SEQ ID NO: 529053 - RNA, 19 nt, Artificial Sequence
  Description of Artificial Sequence: Synthetic oligonucleotide
ggugucgcuucaugcaaua

SEQ ID NO: 529054 - RNA, 19 nt, Artificial Sequence
  Description of Artificial Sequence: Synthetic oligonucleotide
uccaaccucccugguucuc

SEQ ID NO: 529055 - RNA, 19 nt, Artificial Sequence
  Description of Artificial Sequence: Synthetic oligonucleotide
agauugccguggccauuau

SEQ ID NO: 529056 - RNA, 19 nt, Artificial Sequence
  Description of Artificial Sequence: Synthetic oligonucleotide
cagaugcgcaggugaggca

SEQ ID NO: 529057 - RNA, 19 nt, Artificial Sequence
  Description of Artificial Sequence: Synthetic oligonucleotide
guguaagacugggaugagu

SEQ ID NO: 529058 - RNA, 19 nt, Artificial Sequence
  Description of Artificial Sequence: Synthetic oligonucleotide
gaaacgccuccacccaauu

SEQ ID NO: 529059 - RNA, 19 nt, Artificial Sequence
  Description of Artificial Sequence: Synthetic oligonucleotide
aggugucgcuucaugcaau

SEQ ID NO: 529060 - RNA, 19 nt, Artificial Sequence
  Description of Artificial Sequence: Synthetic oligonucleotide
gcucuaaccgcugucuugu

SEQ ID NO: 529061 - RNA, 19 nt, Artificial Sequence
  Description of Artificial Sequence: Synthetic oligonucleotide
caguccugaugggcuuugc

SEQ ID NO: 529062 - RNA, 19 nt, Artificial Sequence
  Description of Artificial Sequence: Synthetic oligonucleotide
gauugccguggccauuauu

SEQ ID NO: 529063 - RNA, 19 nt, Artificial Sequence
  Description of Artificial Sequence: Synthetic oligonucleotide
gcuagaguugggagcuaac

SEQ ID NO: 529064 - RNA, 19 nt, Artificial Sequence
  Description of Artificial Sequence: Synthetic oligonucleotide
ggcaucggaaugucucucu

SEQ ID NO: 529065 - RNA, 19 nt, Artificial Sequence
  Description of Artificial Sequence: Synthetic oligonucleotide
gccuagacuccuccauaca

SEQ ID NO: 529066 - RNA, 19 nt, Artificial Sequence
  Description of Artificial Sequence: Synthetic oligonucleotide
gcacucgguacacacgagu

SEQ ID NO: 529067 - RNA, 19 nt, Artificial Sequence
  Description of Artificial Sequence: Synthetic oligonucleotide
cugggagaauagcuccugu

SEQ ID NO: 529068 - RNA, 19 nt, Artificial Sequence
  Description of Artificial Sequence: Synthetic oligonucleotide
uuccccgauccaugcucuu

SEQ ID NO: 529069 - RNA, 19 nt, Artificial Sequence
  Description of Artificial Sequence: Synthetic oligonucleotide
ggacgaaaagcaggguucu

SEQ ID NO: 529070 - RNA, 19 nt, Artificial Sequence
  Description of Artificial Sequence: Synthetic oligonucleotide
gccuuucgauagugagaag

SEQ ID NO: 529071 - RNA, 19 nt, Artificial Sequence
  Description of Artificial Sequence: Synthetic oligonucleotide
agcccaucuuucgguagua

SEQ ID NO: 529072 - RNA, 19 nt, Artificial Sequence
  Description of Artificial Sequence: Synthetic oligonucleotide
gacggcuggcgccaagcuu

SEQ ID NO: 529073 - RNA, 19 nt, Artificial Sequence
  Description of Artificial Sequence: Synthetic oligonucleotide
augccaacucucgcagguu

SEQ ID NO: 529074 - RNA, 19 nt, Artificial Sequence
  Description of Artificial Sequence: Synthetic oligonucleotide
cacgagggcgaggauccga

SEQ ID NO: 529075 - RNA, 19 nt, Artificial Sequence
  Description of Artificial Sequence: Synthetic oligonucleotide
gcgaggauccgagccacca

SEQ ID NO: 529076 - RNA, 19 nt, Artificial Sequence
  Description of Artificial Sequence: Synthetic oligonucleotide
gccucgugcauccguaagu

SEQ ID NO: 529077 - RNA, 19 nt, Artificial Sequence
  Description of Artificial Sequence: Synthetic oligonucleotide
ggcuagaguugggagcuaa

SEQ ID NO: 529078 - RNA, 19 nt, Artificial Sequence
  Description of Artificial Sequence: Synthetic oligonucleotide
cguaucuagcacggauagc

SEQ ID NO: 529079 - RNA, 19 nt, Artificial Sequence
  Description of Artificial Sequence: Synthetic oligonucleotide
gcgauuuuccccgauccau

SEQ ID NO: 529080 - RNA, 19 nt, Artificial Sequence
  Description of Artificial Sequence: Synthetic oligonucleotide
uggccccuguuggugucuc

SEQ ID NO: 529081 - RNA, 19 nt, Artificial Sequence
  Description of Artificial Sequence: Synthetic oligonucleotide
cccaucuuucgguaguagu

SEQ ID NO: 529082 - RNA, 19 nt, Artificial Sequence
  Description of Artificial Sequence: Synthetic oligonucleotide
ccaauucaaaucggaaggu

SEQ ID NO: 529083 - RNA, 19 nt, Artificial Sequence
  Description of Artificial Sequence: Synthetic oligonucleotide
gggcgaggauccgagccac

SEQ ID NO: 529084 - RNA, 19 nt, Artificial Sequence
  Description of Artificial Sequence: Synthetic oligonucleotide
cagccucgugcauccguaa

SEQ ID NO: 529085 - RNA, 19 nt, Artificial Sequence
  Description of Artificial Sequence: Synthetic oligonucleotide
augcucuucuagagcuauu

SEQ ID NO: 529086 - RNA, 19 nt, Artificial Sequence
  Description of Artificial Sequence: Synthetic oligonucleotide
cggguauauaaauaaucuu

SEQ ID NO: 529087 - RNA, 19 nt, Artificial Sequence
  Description of Artificial Sequence: Synthetic oligonucleotide
guagauugccguggccauu

SEQ ID NO: 529088 - RNA, 19 nt, Artificial Sequence
  Description of Artificial Sequence: Synthetic oligonucleotide
ggaaacgccuccacccaau

SEQ ID NO: 529089 - RNA, 19 nt, Artificial Sequence
  Description of Artificial Sequence: Synthetic oligonucleotide
cucauggaaguuggcucau

SEQ ID NO: 529090 - RNA, 19 nt, Artificial Sequence
  Description of Artificial Sequence: Synthetic oligonucleotide
cgguacacacgaguccaug

SEQ ID NO: 529091 - RNA, 19 nt, Artificial Sequence
  Description of Artificial Sequence: Synthetic oligonucleotide
gcacgagggcgaggauccg

SEQ ID NO: 529092 - RNA, 19 nt, Artificial Sequence
  Description of Artificial Sequence: Synthetic oligonucleotide
cggacuuugugaugaauuu

SEQ ID NO: 529093 - RNA, 19 nt, Artificial Sequence
  Description of Artificial Sequence: Synthetic oligonucleotide
ccgcugucuugucugcaga

SEQ ID NO: 529094 - RNA, 19 nt, Artificial Sequence
  Description of Artificial Sequence: Synthetic oligonucleotide
ccaugcucuucuagagcua

SEQ ID NO: 529095 - RNA, 19 nt, Artificial Sequence
  Description of Artificial Sequence: Synthetic oligonucleotide
gcucuacuccugagcugac

SEQ ID NO: 529096 - RNA, 19 nt, Artificial Sequence
  Description of Artificial Sequence: Synthetic oligonucleotide
gggucguaucuagcacgga

SEQ ID NO: 529097 - RNA, 19 nt, Artificial Sequence
  Description of Artificial Sequence: Synthetic oligonucleotide
ggccggacuuugugaugaa

SEQ ID NO: 529098 - RNA, 19 nt, Artificial Sequence
  Description of Artificial Sequence: Synthetic oligonucleotide
gcuaugcacaguggaccau

SEQ ID NO: 529099 - RNA, 19 nt, Artificial Sequence
  Description of Artificial Sequence: Synthetic oligonucleotide
caggugaggcaggcucucu

SEQ ID NO: 529100 - RNA, 19 nt, Artificial Sequence
  Description of Artificial Sequence: Synthetic oligonucleotide
cccgauccaugcucuucua

SEQ ID NO: 529101 - RNA, 19 nt, Artificial Sequence
  Description of Artificial Sequence: Synthetic oligonucleotide
ggcagacggcuggcgccaa

SEQ ID NO: 529102 - RNA, 19 nt, Artificial Sequence
  Description of Artificial Sequence: Synthetic oligonucleotide
cggcuggcgccaagcuuau

SEQ ID NO: 529103 - RNA, 19 nt, Artificial Sequence
  Description of Artificial Sequence: Synthetic oligonucleotide
aaauugaaggcucaguagc

SEQ ID NO: 529104 - RNA, 19 nt, Artificial Sequence
  Description of Artificial Sequence: Synthetic oligonucleotide
gaaccaaagaaauugaagg

SEQ ID NO: 529105 - RNA, 19 nt, Artificial Sequence
  Description of Artificial Sequence: Synthetic oligonucleotide
cuaauaaauaacacgagcg

SEQ ID NO: 529106 - RNA, 19 nt, Artificial Sequence
  Description of Artificial Sequence: Synthetic oligonucleotide
uguaauauuaguuuaauuu

SEQ ID NO: 529107 - RNA, 19 nt, Artificial Sequence
  Description of Artificial Sequence: Synthetic oligonucleotide
aaugucguugaugaguucc

SEQ ID NO: 529108 - RNA, 19 nt, Artificial Sequence
  Description of Artificial Sequence: Synthetic oligonucleotide
  modified_base (2)..(2): a, c, u, g, unknown or other
  modified_base (10)..(10): a, c, u, g, unknown or other
unuugggucnuuaaauugc

SEQ ID NO: 529109 - RNA, 19 nt, Artificial Sequence
  Description of Artificial Sequence: Synthetic oligonucleotide
uuaccaacaaucuucagca

SEQ ID NO: 529110 - RNA, 19 nt, Artificial Sequence
  Description of Artificial Sequence: Synthetic oligonucleotide
aauugccacaacuuucccc

SEQ ID NO: 529111 - RNA, 19 nt, Artificial Sequence
  Description of Artificial Sequence: Synthetic oligonucleotide
ucaccaauggaaaauguag

SEQ ID NO: 529112 - RNA, 19 nt, Artificial Sequence
  Description of Artificial Sequence: Synthetic oligonucleotide
uuaacuuuagcucugucaa

SEQ ID NO: 529113 - RNA, 19 nt, Artificial Sequence
  Description of Artificial Sequence: Synthetic oligonucleotide
caaacgaccaguuacuucc

SEQ ID NO: 529114 - RNA, 19 nt, Artificial Sequence
  Description of Artificial Sequence: Synthetic oligonucleotide
aguuacuucccauagaacu

SEQ ID NO: 529115 - RNA, 19 nt, Artificial Sequence
  Description of Artificial Sequence: Synthetic oligonucleotide
acaccaauguuuuacaaag

SEQ ID NO: 529116 - RNA, 19 nt, Artificial Sequence
  Description of Artificial Sequence: Synthetic oligonucleotide
aacaauuugacggccaguc

SEQ ID NO: 529117 - RNA, 19 nt, Artificial Sequence
  Description of Artificial Sequence: Synthetic oligonucleotide
uucauggucaacgugagag

SEQ ID NO: 529118 - RNA, 19 nt, Artificial Sequence
  Description of Artificial Sequence: Synthetic oligonucleotide
uuaacugagacaucuuaag

SEQ ID NO: 529119 - RNA, 19 nt, Artificial Sequence
  Description of Artificial Sequence: Synthetic oligonucleotide
uguuggacugauuucaaag

SEQ ID NO: 529120 - RNA, 19 nt, Artificial Sequence
  Description of Artificial Sequence: Synthetic oligonucleotide
  modified_base (3)..(3): a, c, u, g, unknown or other
ucnuuaaauugccacaacu

SEQ ID NO: 529121 - RNA, 19 nt, Artificial Sequence
  Description of Artificial Sequence: Synthetic oligonucleotide
aguagcaugauuuaccuau

SEQ ID NO: 529122 - RNA, 19 nt, Artificial Sequence
  Description of Artificial Sequence: Synthetic oligonucleotide
uagauaaccggcuugguga

SEQ ID NO: 529123 - RNA, 19 nt, Artificial Sequence
  Description of Artificial Sequence: Synthetic oligonucleotide
caaguuaccaacaaucuuc

SEQ ID NO: 529124 - RNA, 19 nt, Artificial Sequence
  Description of Artificial Sequence: Synthetic oligonucleotide
aagaucaggagguugacau

SEQ ID NO: 529125 - RNA, 19 nt, Artificial Sequence
  Description of Artificial Sequence: Synthetic oligonucleotide
accaacaaucuucagcagc

SEQ ID NO: 529126 - RNA, 19 nt, Artificial Sequence
  Description of Artificial Sequence: Synthetic oligonucleotide
aacaaaugaccuuuuauuu

SEQ ID NO: 529127 - RNA, 19 nt, Artificial Sequence
  Description of Artificial Sequence: Synthetic oligonucleotide
aacggucuuuguuaguugg

SEQ ID NO: 529128 - RNA, 19 nt, Artificial Sequence
  Description of Artificial Sequence: Synthetic oligonucleotide
uuuauaacuuuuaauccaa

SEQ ID NO: 529129 - RNA, 19 nt, Artificial Sequence
  Description of Artificial Sequence: Synthetic oligonucleotide
aauguagauaaccggcuug

SEQ ID NO: 529130 - RNA, 19 nt, Artificial Sequence
  Description of Artificial Sequence: Synthetic oligonucleotide
aacucuguaauauuaguuu

SEQ ID NO: 529131 - RNA, 19 nt, Artificial Sequence
  Description of Artificial Sequence: Synthetic oligonucleotide
ucugguacgacugagagau

SEQ ID NO: 529132 - RNA, 19 nt, Artificial Sequence
  Description of Artificial Sequence: Synthetic oligonucleotide
gaaauugaaggcucaguag

SEQ ID NO: 529133 - RNA, 19 nt, Artificial Sequence
  Description of Artificial Sequence: Synthetic oligonucleotide
caauuaccacuuaagaggg

SEQ ID NO: 529134 - RNA, 19 nt, Artificial Sequence
  Description of Artificial Sequence: Synthetic oligonucleotide
gauuuaccuauucuuuugg

SEQ ID NO: 529135 - RNA, 19 nt, Artificial Sequence
  Description of Artificial Sequence: Synthetic oligonucleotide
aagaacgcccuuuucaugu

SEQ ID NO: 529136 - RNA, 19 nt, Artificial Sequence
  Description of Artificial Sequence: Synthetic oligonucleotide
aauuuccagaagaacgccc

SEQ ID NO: 529137 - RNA, 19 nt, Artificial Sequence
  Description of Artificial Sequence: Synthetic oligonucleotide
guaaaugucaugauggcug

SEQ ID NO: 529138 - RNA, 19 nt, Artificial Sequence
  Description of Artificial Sequence: Synthetic oligonucleotide
auagcucuuguaguaaucc

SEQ ID NO: 529139 - RNA, 19 nt, Artificial Sequence
  Description of Artificial Sequence: Synthetic oligonucleotide
uuauuggccuucaauacac

SEQ ID NO: 529140 - RNA, 19 nt, Artificial Sequence
  Description of Artificial Sequence: Synthetic oligonucleotide
uccuucauggucaacguga

SEQ ID NO: 529141 - RNA, 19 nt, Artificial Sequence
  Description of Artificial Sequence: Synthetic oligonucleotide
gcagcuaauaaauaacacg

SEQ ID NO: 529142 - RNA, 19 nt, Artificial Sequence
  Description of Artificial Sequence: Synthetic oligonucleotide
uuuggcgcaguucuaacug

SEQ ID NO: 529143 - RNA, 19 nt, Artificial Sequence
  Description of Artificial Sequence: Synthetic oligonucleotide
aguucuaacugguauucag

SEQ ID NO: 529144 - RNA, 19 nt, Artificial Sequence
  Description of Artificial Sequence: Synthetic oligonucleotide
aacugauuugcuuggagau

SEQ ID NO: 529145 - RNA, 19 nt, Artificial Sequence
  Description of Artificial Sequence: Synthetic oligonucleotide
uccacguuaaauuuauccu

SEQ ID NO: 529146 - RNA, 19 nt, Artificial Sequence
  Description of Artificial Sequence: Synthetic oligonucleotide
aaugucaugauggcugguc

SEQ ID NO: 529147 - RNA, 19 nt, Artificial Sequence
  Description of Artificial Sequence: Synthetic oligonucleotide
agaacaaagguuuccaaau

SEQ ID NO: 529148 - RNA, 19 nt, Artificial Sequence
  Description of Artificial Sequence: Synthetic oligonucleotide
cagcuaauaaauaacacga

SEQ ID NO: 529149 - RNA, 19 nt, Artificial Sequence
  Description of Artificial Sequence: Synthetic oligonucleotide
acugagacaucuuaaggca

SEQ ID NO: 529150 - RNA, 19 nt, Artificial Sequence
  Description of Artificial Sequence: Synthetic oligonucleotide
  modified_base (7)..(7): a, c, u, g, unknown or other
ugggucnuuaaauugccac

SEQ ID NO: 529151 - RNA, 19 nt, Artificial Sequence
  Description of Artificial Sequence: Synthetic oligonucleotide
uguuaguuggagcccaacc

SEQ ID NO: 529152 - RNA, 19 nt, Artificial Sequence
  Description of Artificial Sequence: Synthetic oligonucleotide
uagcaauuaccacuuaaga

SEQ ID NO: 529153 - RNA, 19 nt, Artificial Sequence
  Description of Artificial Sequence: Synthetic oligonucleotide
cacguuaaauuuauccugc

SEQ ID NO: 529154 - RNA, 19 nt, Artificial Sequence
  Description of Artificial Sequence: Synthetic oligonucleotide
  modified_base (3)..(3): a, c, u, g, unknown or other
  modified_base (11)..(11): a, c, u, g, unknown or other
cunuugggucnuuaaauug

SEQ ID NO: 529155 - RNA, 19 nt, Artificial Sequence
  Description of Artificial Sequence: Synthetic oligonucleotide
guaucgguaguacagcaag

SEQ ID NO: 529156 - RNA, 19 nt, Artificial Sequence
  Description of Artificial Sequence: Synthetic oligonucleotide
agaaauugaaggcucagua

SEQ ID NO: 529157 - RNA, 19 nt, Artificial Sequence
  Description of Artificial Sequence: Synthetic oligonucleotide
uuaccuauucuuuuggaua

SEQ ID NO: 529158 - RNA, 19 nt, Artificial Sequence
  Description of Artificial Sequence: Synthetic oligonucleotide
uguguguagcaacaauuug

SEQ ID NO: 529159 - RNA, 19 nt, Artificial Sequence
  Description of Artificial Sequence: Synthetic oligonucleotide
  modified_base (5)..(5): a, c, u, g, unknown or other
  modified_base (13)..(13): a, c, u, g, unknown or other
uccunuugggucnuuaaau

SEQ ID NO: 529160 - RNA, 19 nt, Artificial Sequence
  Description of Artificial Sequence: Synthetic oligonucleotide
aacugaacggucuuuguua

SEQ ID NO: 529161 - RNA, 19 nt, Artificial Sequence
  Description of Artificial Sequence: Synthetic oligonucleotide
gaaaaggucuccaagggca

SEQ ID NO: 529162 - RNA, 19 nt, Artificial Sequence
  Description of Artificial Sequence: Synthetic oligonucleotide
aaaauguagauaaccggcu

SEQ ID NO: 529163 - RNA, 19 nt, Artificial Sequence
  Description of Artificial Sequence: Synthetic oligonucleotide
gcuaauaaauaacacgagc

SEQ ID NO: 529164 - RNA, 19 nt, Artificial Sequence
  Description of Artificial Sequence: Synthetic oligonucleotide
ugaugauuucaccaaugga

SEQ ID NO: 529165 - RNA, 19 nt, Artificial Sequence
  Description of Artificial Sequence: Synthetic oligonucleotide
aaagaaauugaaggcucag

SEQ ID NO: 529166 - RNA, 19 nt, Artificial Sequence
  Description of Artificial Sequence: Synthetic oligonucleotide
acaauuugacggccagucc

SEQ ID NO: 529167 - RNA, 19 nt, Artificial Sequence
  Description of Artificial Sequence: Synthetic oligonucleotide
ugaccuuuuauuucauaca

SEQ ID NO: 529168 - RNA, 19 nt, Artificial Sequence
  Description of Artificial Sequence: Synthetic oligonucleotide
cagcaaguuaccaacaauc

SEQ ID NO: 529169 - RNA, 19 nt, Artificial Sequence
  Description of Artificial Sequence: Synthetic oligonucleotide
gaggaauuugucugucacg

SEQ ID NO: 529170 - RNA, 19 nt, Artificial Sequence
  Description of Artificial Sequence: Synthetic oligonucleotide
uggagcaucuuugcaaugg

SEQ ID NO: 529171 - RNA, 19 nt, Artificial Sequence
  Description of Artificial Sequence: Synthetic oligonucleotide
uacaaaggcaauugugugu

SEQ ID NO: 529172 - RNA, 19 nt, Artificial Sequence
  Description of Artificial Sequence: Synthetic oligonucleotide
uggccuucaauacacacau

SEQ ID NO: 529173 - RNA, 19 nt, Artificial Sequence
  Description of Artificial Sequence: Synthetic oligonucleotide
agcauaacaaacaccaaug

SEQ ID NO: 529174 - RNA, 19 nt, Artificial Sequence
  Description of Artificial Sequence: Synthetic oligonucleotide
uggacuggcagcaaacgac

SEQ ID NO: 529175 - RNA, 19 nt, Artificial Sequence
  Description of Artificial Sequence: Synthetic oligonucleotide
cauccuuacaguuaacuga

SEQ ID NO: 529176 - RNA, 19 nt, Artificial Sequence
  Description of Artificial Sequence: Synthetic oligonucleotide
guagcaauuaccacuuaag

SEQ ID NO: 529177 - RNA, 19 nt, Artificial Sequence
  Description of Artificial Sequence: Synthetic oligonucleotide
aauaacuucaugacugcaa

SEQ ID NO: 529178 - RNA, 19 nt, Artificial Sequence
  Description of Artificial Sequence: Synthetic oligonucleotide
aaccgucugaauuucuggu

SEQ ID NO: 529179 - RNA, 19 nt, Artificial Sequence
  Description of Artificial Sequence: Synthetic oligonucleotide
agcuuauuggccuucaaua

SEQ ID NO: 529180 - RNA, 19 nt, Artificial Sequence
  Description of Artificial Sequence: Synthetic oligonucleotide
uuagggugggacuccacag

SEQ ID NO: 529181 - RNA, 19 nt, Artificial Sequence
  Description of Artificial Sequence: Synthetic oligonucleotide
acugaacggucuuuguuag

SEQ ID NO: 529182 - RNA, 19 nt, Artificial Sequence
  Description of Artificial Sequence: Synthetic oligonucleotide
ucaauacacacaucaguaa

SEQ ID NO: 529183 - RNA, 19 nt, Artificial Sequence
  Description of Artificial Sequence: Synthetic oligonucleotide
uaccuauucuuuuggauaa

SEQ ID NO: 529184 - RNA, 19 nt, Artificial Sequence
  Description of Artificial Sequence: Synthetic oligonucleotide
uuaguuggagcccaaccau

SEQ ID NO: 529185 - RNA, 19 nt, Artificial Sequence
  Description of Artificial Sequence: Synthetic oligonucleotide
aaauguagauaaccggcuu

SEQ ID NO: 529186 - RNA, 19 nt, Artificial Sequence
  Description of Artificial Sequence: Synthetic oligonucleotide
agagauacuucugucuuag

SEQ ID NO: 529187 - RNA, 19 nt, Artificial Sequence
  Description of Artificial Sequence: Synthetic oligonucleotide
acuuccaaggaguaaugga

SEQ ID NO: 529188 - RNA, 19 nt, Artificial Sequence
  Description of Artificial Sequence: Synthetic oligonucleotide
cuaacugguauucaggaaa

SEQ ID NO: 529189 - RNA, 19 nt, Artificial Sequence
  Description of Artificial Sequence: Synthetic oligonucleotide
uaaauaacacgagcguggc

SEQ ID NO: 529190 - RNA, 19 nt, Artificial Sequence
  Description of Artificial Sequence: Synthetic oligonucleotide
agcaaguccugauagugca

SEQ ID NO: 529191 - RNA, 19 nt, Artificial Sequence
  Description of Artificial Sequence: Synthetic oligonucleotide
aaacugaacggucuuuguu

SEQ ID NO: 529192 - RNA, 19 nt, Artificial Sequence
  Description of Artificial Sequence: Synthetic oligonucleotide
aguuggagcccaaccaucc

SEQ ID NO: 529193 - RNA, 19 nt, Artificial Sequence
  Description of Artificial Sequence: Synthetic oligonucleotide
agcaugauuuaccuauucu

SEQ ID NO: 529194 - RNA, 19 nt, Artificial Sequence
  Description of Artificial Sequence: Synthetic oligonucleotide
agagcauccuuacaguuaa

SEQ ID NO: 529195 - RNA, 19 nt, Artificial Sequence
  Description of Artificial Sequence: Synthetic oligonucleotide
auuuuauguuuuaugcaag

SEQ ID NO: 529196 - RNA, 19 nt, Artificial Sequence
  Description of Artificial Sequence: Synthetic oligonucleotide
guucuaacugguauucagg

SEQ ID NO: 529197 - RNA, 19 nt, Artificial Sequence
  Description of Artificial Sequence: Synthetic oligonucleotide
gaccaguuacuucccauag

SEQ ID NO: 529198 - RNA, 19 nt, Artificial Sequence
  Description of Artificial Sequence: Synthetic oligonucleotide
ucccuaauuaaaauagcuu

SEQ ID NO: 529199 - RNA, 19 nt, Artificial Sequence
  Description of Artificial Sequence: Synthetic oligonucleotide
aaugaagcgcaucccguaa

SEQ ID NO: 529200 - RNA, 19 nt, Artificial Sequence
  Description of Artificial Sequence: Synthetic oligonucleotide
guagauaaccggcuuggug

SEQ ID NO: 529201 - RNA, 19 nt, Artificial Sequence
  Description of Artificial Sequence: Synthetic oligonucleotide
acuuaagagggaaugugag

SEQ ID NO: 529202 - RNA, 19 nt, Artificial Sequence
  Description of Artificial Sequence: Synthetic oligonucleotide
ucagaauacucguccacgu

SEQ ID NO: 529203 - RNA, 19 nt, Artificial Sequence
  Description of Artificial Sequence: Synthetic oligonucleotide
aguuaacugagacaucuua

SEQ ID NO: 529204 - RNA, 19 nt, Artificial Sequence
  Description of Artificial Sequence: Synthetic oligonucleotide
uccggggucacaucauagg

SEQ ID NO: 529205 - RNA, 19 nt, Artificial Sequence
  Description of Artificial Sequence: Synthetic oligonucleotide
gcugagaggaauuugucug

SEQ ID NO: 529206 - RNA, 19 nt, Artificial Sequence
  Description of Artificial Sequence: Synthetic oligonucleotide
gaacaaaugaccuuuuauu

SEQ ID NO: 529207 - RNA, 19 nt, Artificial Sequence
  Description of Artificial Sequence: Synthetic oligonucleotide
auccuuacaguuaacugag

SEQ ID NO: 529208 - RNA, 19 nt, Artificial Sequence
  Description of Artificial Sequence: Synthetic oligonucleotide
agaauacucguccacguua

SEQ ID NO: 529209 - RNA, 19 nt, Artificial Sequence
  Description of Artificial Sequence: Synthetic oligonucleotide
ugauuccggauauccuugg

SEQ ID NO: 529210 - RNA, 19 nt, Artificial Sequence
  Description of Artificial Sequence: Synthetic oligonucleotide
gacgucacaagcaguuugg

SEQ ID NO: 529211 - RNA, 19 nt, Artificial Sequence
  Description of Artificial Sequence: Synthetic oligonucleotide
aagcgcaucccguaaggga

SEQ ID NO: 529212 - RNA, 19 nt, Artificial Sequence
  Description of Artificial Sequence: Synthetic oligonucleotide
gucguugaugaguuccugg

SEQ ID NO: 529213 - RNA, 19 nt, Artificial Sequence
  Description of Artificial Sequence: Synthetic oligonucleotide
uacuuccaaggaguaaugg

SEQ ID NO: 529214 - RNA, 19 nt, Artificial Sequence
  Description of Artificial Sequence: Synthetic oligonucleotide
uauagcucuuguaguaauc

SEQ ID NO: 529215 - RNA, 19 nt, Artificial Sequence
  Description of Artificial Sequence: Synthetic oligonucleotide
uggccuuagaguucagagc

SEQ ID NO: 529216 - RNA, 19 nt, Artificial Sequence
  Description of Artificial Sequence: Synthetic oligonucleotide
ugacuagaucagaauacuc

SEQ ID NO: 529217 - RNA, 19 nt, Artificial Sequence
  Description of Artificial Sequence: Synthetic oligonucleotide
aguaaacucuguaauauua

SEQ ID NO: 529218 - RNA, 19 nt, Artificial Sequence
  Description of Artificial Sequence: Synthetic oligonucleotide
agauaaccggcuuggugag

SEQ ID NO: 529219 - RNA, 19 nt, Artificial Sequence
  Description of Artificial Sequence: Synthetic oligonucleotide
uacagcaaguuaccaacaa

SEQ ID NO: 529220 - RNA, 19 nt, Artificial Sequence
  Description of Artificial Sequence: Synthetic oligonucleotide
guuuugaauucuucuggac

SEQ ID NO: 529221 - RNA, 19 nt, Artificial Sequence
  Description of Artificial Sequence: Synthetic oligonucleotide
uuggcgcaguucuaacugg

SEQ ID NO: 529222 - RNA, 19 nt, Artificial Sequence
  Description of Artificial Sequence: Synthetic oligonucleotide
ggugagggugacuagauca

SEQ ID NO: 529223 - RNA, 19 nt, Artificial Sequence
  Description of Artificial Sequence: Synthetic oligonucleotide
caaggaguaauggaggauc

SEQ ID NO: 529224 - RNA, 19 nt, Artificial Sequence
  Description of Artificial Sequence: Synthetic oligonucleotide
uguaucgguaguacagcaa

SEQ ID NO: 529225 - RNA, 19 nt, Artificial Sequence
  Description of Artificial Sequence: Synthetic oligonucleotide
gaagaacgcccuuuucaug

SEQ ID NO: 529226 - RNA, 19 nt, Artificial Sequence
  Description of Artificial Sequence: Synthetic oligonucleotide
gcccucauguuccugaugg

SEQ ID NO: 529227 - RNA, 19 nt, Artificial Sequence
  Description of Artificial Sequence: Synthetic oligonucleotide
uggacugauuucaaagaua

SEQ ID NO: 529228 - RNA, 19 nt, Artificial Sequence
  Description of Artificial Sequence: Synthetic oligonucleotide
ggcaaugaagcgcaucccg

SEQ ID NO: 529229 - RNA, 19 nt, Artificial Sequence
  Description of Artificial Sequence: Synthetic oligonucleotide
ugauuucaccaauggaaaa

SEQ ID NO: 529230 - RNA, 19 nt, Artificial Sequence
  Description of Artificial Sequence: Synthetic oligonucleotide
aaauaacacgagcguggca

SEQ ID NO: 529231 - RNA, 19 nt, Artificial Sequence
  Description of Artificial Sequence: Synthetic oligonucleotide
caugcagcgaauccuucag

SEQ ID NO: 529232 - RNA, 19 nt, Artificial Sequence
  Description of Artificial Sequence: Synthetic oligonucleotide
gagaguguggguguugaug

SEQ ID NO: 529233 - RNA, 19 nt, Artificial Sequence
  Description of Artificial Sequence: Synthetic oligonucleotide
aaacgaccaguuacuuccc

SEQ ID NO: 529234 - RNA, 19 nt, Artificial Sequence
  Description of Artificial Sequence: Synthetic oligonucleotide
auuuggcgcaguucuaacu

SEQ ID NO: 529235 - RNA, 19 nt, Artificial Sequence
  Description of Artificial Sequence: Synthetic oligonucleotide
augcagcgaauccuucagc

SEQ ID NO: 529236 - RNA, 19 nt, Artificial Sequence
  Description of Artificial Sequence: Synthetic oligonucleotide
aacacgagcguggcaggac

SEQ ID NO: 529237 - RNA, 19 nt, Artificial Sequence
  Description of Artificial Sequence: Synthetic oligonucleotide
agcuaauaaauaacacgag

SEQ ID NO: 529238 - RNA, 19 nt, Artificial Sequence
  Description of Artificial Sequence: Synthetic oligonucleotide
cacaacuuuccccuaucag

SEQ ID NO: 529239 - RNA, 19 nt, Artificial Sequence
  Description of Artificial Sequence: Synthetic oligonucleotide
ugcggacaggucaaugaug

SEQ ID NO: 529240 - RNA, 19 nt, Artificial Sequence
  Description of Artificial Sequence: Synthetic oligonucleotide
ucuagccuugucuucacuu

SEQ ID NO: 529241 - RNA, 19 nt, Artificial Sequence
  Description of Artificial Sequence: Synthetic oligonucleotide
ucguccacguuaaauuuau

SEQ ID NO: 529242 - RNA, 19 nt, Artificial Sequence
  Description of Artificial Sequence: Synthetic oligonucleotide
ggccaguccaaauucuugg

SEQ ID NO: 529243 - RNA, 19 nt, Artificial Sequence
  Description of Artificial Sequence: Synthetic oligonucleotide
auguaucgguaguacagca

SEQ ID NO: 529244 - RNA, 19 nt, Artificial Sequence
  Description of Artificial Sequence: Synthetic oligonucleotide
gccaaguuauccaagcagg

SEQ ID NO: 529245 - RNA, 19 nt, Artificial Sequence
  Description of Artificial Sequence: Synthetic oligonucleotide
uaucgguaguacagcaagu

SEQ ID NO: 529246 - RNA, 19 nt, Artificial Sequence
  Description of Artificial Sequence: Synthetic oligonucleotide
cuuaagagggaaugugaga

SEQ ID NO: 529247 - RNA, 19 nt, Artificial Sequence
  Description of Artificial Sequence: Synthetic oligonucleotide
ugggacgucacaagcaguu

SEQ ID NO: 529248 - RNA, 19 nt, Artificial Sequence
  Description of Artificial Sequence: Synthetic oligonucleotide
aacucccaugaacuuggcu

SEQ ID NO: 529249 - RNA, 19 nt, Artificial Sequence
  Description of Artificial Sequence: Synthetic oligonucleotide
augucaugauggcugguca

SEQ ID NO: 529250 - RNA, 19 nt, Artificial Sequence
  Description of Artificial Sequence: Synthetic oligonucleotide
agcaaguuaccaacaaucu

SEQ ID NO: 529251 - RNA, 19 nt, Artificial Sequence
  Description of Artificial Sequence: Synthetic oligonucleotide
gaacggucuuuguuaguug

SEQ ID NO: 529252 - RNA, 19 nt, Artificial Sequence
  Description of Artificial Sequence: Synthetic oligonucleotide
caaagaaauugaaggcuca

SEQ ID NO: 529253 - RNA, 19 nt, Artificial Sequence
  Description of Artificial Sequence: Synthetic oligonucleotide
acagcaaguuaccaacaau

SEQ ID NO: 529254 - RNA, 19 nt, Artificial Sequence
  Description of Artificial Sequence: Synthetic oligonucleotide
ugguccaacaggagagugu

SEQ ID NO: 529255 - RNA, 19 nt, Artificial Sequence
  Description of Artificial Sequence: Synthetic oligonucleotide
uagcaugauuuaccuauuc

SEQ ID NO: 529256 - RNA, 19 nt, Artificial Sequence
  Description of Artificial Sequence: Synthetic oligonucleotide
gcuuauuggccuucaauac

SEQ ID NO: 529257 - RNA, 19 nt, Artificial Sequence
  Description of Artificial Sequence: Synthetic oligonucleotide
uccccuaucagggacucga

SEQ ID NO: 529258 - RNA, 19 nt, Artificial Sequence
  Description of Artificial Sequence: Synthetic oligonucleotide
  modified_base (8)..(8): a, c, u, g, unknown or other
uugggucnuuaaauugcca

SEQ ID NO: 529259 - RNA, 19 nt, Artificial Sequence
  Description of Artificial Sequence: Synthetic oligonucleotide
ccacguuaaauuuauccug

SEQ ID NO: 529260 - RNA, 19 nt, Artificial Sequence
  Description of Artificial Sequence: Synthetic oligonucleotide
ccaaagaaauugaaggcuc

SEQ ID NO: 529261 - RNA, 19 nt, Artificial Sequence
  Description of Artificial Sequence: Synthetic oligonucleotide
ggugacuagaucagaauac

SEQ ID NO: 529262 - RNA, 19 nt, Artificial Sequence
  Description of Artificial Sequence: Synthetic oligonucleotide
  modified_base (4)..(4): a, c, u, g, unknown or other
gucnuuaaauugccacaac

SEQ ID NO: 529263 - RNA, 19 nt, Artificial Sequence
  Description of Artificial Sequence: Synthetic oligonucleotide
gaacgcccuuuucauguag

SEQ ID NO: 529264 - RNA, 19 nt, Artificial Sequence
  Description of Artificial Sequence: Synthetic oligonucleotide
aguaauggaggauccuaua

SEQ ID NO: 529265 - RNA, 19 nt, Artificial Sequence
  Description of Artificial Sequence: Synthetic oligonucleotide
gauggaguugucuagccuu

SEQ ID NO: 529266 - RNA, 19 nt, Artificial Sequence
  Description of Artificial Sequence: Synthetic oligonucleotide
  modified_base (2)..(2): a, c, u, g, unknown or other
cnuuaaauugccacaacuu

SEQ ID NO: 529267 - RNA, 19 nt, Artificial Sequence
  Description of Artificial Sequence: Synthetic oligonucleotide
aacgaccaguuacuuccca

SEQ ID NO: 529268 - RNA, 19 nt, Artificial Sequence
  Description of Artificial Sequence: Synthetic oligonucleotide
aauuugacggccaguccaa

SEQ ID NO: 529269 - RNA, 19 nt, Artificial Sequence
  Description of Artificial Sequence: Synthetic oligonucleotide
ugaugauugcugagaggaa

SEQ ID NO: 529270 - RNA, 19 nt, Artificial Sequence
  Description of Artificial Sequence: Synthetic oligonucleotide
ccuuacaguuaacugagac

SEQ ID NO: 529271 - RNA, 19 nt, Artificial Sequence
  Description of Artificial Sequence: Synthetic oligonucleotide
augccugaaacugaacggu

SEQ ID NO: 529272 - RNA, 19 nt, Artificial Sequence
  Description of Artificial Sequence: Synthetic oligonucleotide
uaccaacaaucuucagcag

SEQ ID NO: 529273 - RNA, 19 nt, Artificial Sequence
  Description of Artificial Sequence: Synthetic oligonucleotide
uguagucuugcugcugugu

SEQ ID NO: 529274 - RNA, 19 nt, Artificial Sequence
  Description of Artificial Sequence: Synthetic oligonucleotide
uugucugucacggcccuca

SEQ ID NO: 529275 - RNA, 19 nt, Artificial Sequence
  Description of Artificial Sequence: Synthetic oligonucleotide
ggucguugugcucuggagc

SEQ ID NO: 529276 - RNA, 19 nt, Artificial Sequence
  Description of Artificial Sequence: Synthetic oligonucleotide
agggugggacuccacagca

SEQ ID NO: 529277 - RNA, 19 nt, Artificial Sequence
  Description of Artificial Sequence: Synthetic oligonucleotide
aagagcauccuuacaguua

SEQ ID NO: 529278 - RNA, 19 nt, Artificial Sequence
  Description of Artificial Sequence: Synthetic oligonucleotide
ggucuuuguuaguuggagc

SEQ ID NO: 529279 - RNA, 19 nt, Artificial Sequence
  Description of Artificial Sequence: Synthetic oligonucleotide
ugccugaaacugaacgguc

SEQ ID NO: 529280 - RNA, 19 nt, Artificial Sequence
  Description of Artificial Sequence: Synthetic oligonucleotide
auuugucugucacggcccu

SEQ ID NO: 529281 - RNA, 19 nt, Artificial Sequence
  Description of Artificial Sequence: Synthetic oligonucleotide
cauuuggcgcaguucuaac

SEQ ID NO: 529282 - RNA, 19 nt, Artificial Sequence
  Description of Artificial Sequence: Synthetic oligonucleotide
uguguacuucagagaaauc

SEQ ID NO: 529283 - RNA, 19 nt, Artificial Sequence
  Description of Artificial Sequence: Synthetic oligonucleotide
gcaacaauuugacggccag

SEQ ID NO: 529284 - RNA, 19 nt, Artificial Sequence
  Description of Artificial Sequence: Synthetic oligonucleotide
cuuagggugggacuccaca

SEQ ID NO: 529285 - RNA, 19 nt, Artificial Sequence
  Description of Artificial Sequence: Synthetic oligonucleotide
cccuaauuaaaauagcuua

SEQ ID NO: 529286 - RNA, 19 nt, Artificial Sequence
  Description of Artificial Sequence: Synthetic oligonucleotide
ucuccgcugauuccggaua

SEQ ID NO: 529287 - RNA, 19 nt, Artificial Sequence
  Description of Artificial Sequence: Synthetic oligonucleotide
cugcaaccccuucauacug

SEQ ID NO: 529288 - RNA, 19 nt, Artificial Sequence
  Description of Artificial Sequence: Synthetic oligonucleotide
gaauacucguccacguuaa

SEQ ID NO: 529289 - RNA, 19 nt, Artificial Sequence
  Description of Artificial Sequence: Synthetic oligonucleotide
guacgacugagagaugcug

SEQ ID NO: 529290 - RNA, 19 nt, Artificial Sequence
  Description of Artificial Sequence: Synthetic oligonucleotide
ggccuuagaguucagagcu

SEQ ID NO: 529291 - RNA, 19 nt, Artificial Sequence
  Description of Artificial Sequence: Synthetic oligonucleotide
  modified_base (6)..(6): a, c, u, g, unknown or other
  modified_base (14)..(14): a, c, u, g, unknown or other
cuccunuugggucnuuaaa

SEQ ID NO: 529292 - RNA, 19 nt, Artificial Sequence
  Description of Artificial Sequence: Synthetic oligonucleotide
aggauccuauaaaggcagc

SEQ ID NO: 529293 - RNA, 19 nt, Artificial Sequence
  Description of Artificial Sequence: Synthetic oligonucleotide
acacgagcguggcaggaca

SEQ ID NO: 529294 - RNA, 19 nt, Artificial Sequence
  Description of Artificial Sequence: Synthetic oligonucleotide
uggcgcaguucuaacuggu

SEQ ID NO: 529295 - RNA, 19 nt, Artificial Sequence
  Description of Artificial Sequence: Synthetic oligonucleotide
  modified_base (6)..(6): a, c, u, g, unknown or other
gggucnuuaaauugccaca

SEQ ID NO: 529296 - RNA, 19 nt, Artificial Sequence
  Description of Artificial Sequence: Synthetic oligonucleotide
agcguggcaggacaucagu

SEQ ID NO: 529297 - RNA, 19 nt, Artificial Sequence
  Description of Artificial Sequence: Synthetic oligonucleotide
caagccgaggcucgccagg

SEQ ID NO: 529298 - RNA, 19 nt, Artificial Sequence
  Description of Artificial Sequence: Synthetic oligonucleotide
agggacucgauggugggca

SEQ ID NO: 529299 - RNA, 19 nt, Artificial Sequence
  Description of Artificial Sequence: Synthetic oligonucleotide
cuccggggucacaucauag

SEQ ID NO: 529300 - RNA, 19 nt, Artificial Sequence
  Description of Artificial Sequence: Synthetic oligonucleotide
gaagaucaggagguugaca

SEQ ID NO: 529301 - RNA, 19 nt, Artificial Sequence
  Description of Artificial Sequence: Synthetic oligonucleotide
uuucugcgcuggucugugg

SEQ ID NO: 529302 - RNA, 19 nt, Artificial Sequence
  Description of Artificial Sequence: Synthetic oligonucleotide
ggaccaggucuuuacuucc

SEQ ID NO: 529303 - RNA, 19 nt, Artificial Sequence
  Description of Artificial Sequence: Synthetic oligonucleotide
gauaaccggcuuggugagg

SEQ ID NO: 529304 - RNA, 19 nt, Artificial Sequence
  Description of Artificial Sequence: Synthetic oligonucleotide
cauuaacuuuagcucuguc

SEQ ID NO: 529305 - RNA, 19 nt, Artificial Sequence
  Description of Artificial Sequence: Synthetic oligonucleotide
ugucguugaugaguuccug

SEQ ID NO: 529306 - RNA, 19 nt, Artificial Sequence
  Description of Artificial Sequence: Synthetic oligonucleotide
aagggcauuuggcgcaguu

SEQ ID NO: 529307 - RNA, 19 nt, Artificial Sequence
  Description of Artificial Sequence: Synthetic oligonucleotide
cagagcugaugauugcuga

SEQ ID NO: 529308 - RNA, 19 nt, Artificial Sequence
  Description of Artificial Sequence: Synthetic oligonucleotide
accgucugaauuucuggua

SEQ ID NO: 529309 - RNA, 19 nt, Artificial Sequence
  Description of Artificial Sequence: Synthetic oligonucleotide
gguuuugauauagcucuug

SEQ ID NO: 529310 - RNA, 19 nt, Artificial Sequence
  Description of Artificial Sequence: Synthetic oligonucleotide
aacgcccuuuucauguagu

SEQ ID NO: 529311 - RNA, 19 nt, Artificial Sequence
  Description of Artificial Sequence: Synthetic oligonucleotide
ucuuuaggccagucugaau

SEQ ID NO: 529312 - RNA, 19 nt, Artificial Sequence
  Description of Artificial Sequence: Synthetic oligonucleotide
gucccuaauuaaaauagcu

SEQ ID NO: 529313 - RNA, 19 nt, Artificial Sequence
  Description of Artificial Sequence: Synthetic oligonucleotide
acauuaacuuuagcucugu

SEQ ID NO: 529314 - RNA, 19 nt, Artificial Sequence
  Description of Artificial Sequence: Synthetic oligonucleotide
gacgaggagagagccaaga

SEQ ID NO: 529315 - RNA, 19 nt, Artificial Sequence
  Description of Artificial Sequence: Synthetic oligonucleotide
aaaugucaugauggcuggu

SEQ ID NO: 529316 - RNA, 19 nt, Artificial Sequence
  Description of Artificial Sequence: Synthetic oligonucleotide
  modified_base (5)..(5): a, c, u, g, unknown or other
ggucnuuaaauugccacaa

SEQ ID NO: 529317 - RNA, 19 nt, Artificial Sequence
  Description of Artificial Sequence: Synthetic oligonucleotide
acgaccaguuacuucccau

SEQ ID NO: 529318 - RNA, 19 nt, Artificial Sequence
  Description of Artificial Sequence: Synthetic oligonucleotide
gagagauacuucugucuua

SEQ ID NO: 529319 - RNA, 19 nt, Artificial Sequence
  Description of Artificial Sequence: Synthetic oligonucleotide
ugccacaacuuuccccuau

SEQ ID NO: 529320 - RNA, 19 nt, Artificial Sequence
  Description of Artificial Sequence: Synthetic oligonucleotide
ugauugcugagaggaauuu

SEQ ID NO: 529321 - RNA, 19 nt, Artificial Sequence
  Description of Artificial Sequence: Synthetic oligonucleotide
uggugagggugacuagauc

SEQ ID NO: 529322 - RNA, 19 nt, Artificial Sequence
  Description of Artificial Sequence: Synthetic oligonucleotide
ucaugacugcaaccccuuc

SEQ ID NO: 529323 - RNA, 19 nt, Artificial Sequence
  Description of Artificial Sequence: Synthetic oligonucleotide
ggaacaaaugaccuuuuau

SEQ ID NO: 529324 - RNA, 19 nt, Artificial Sequence
  Description of Artificial Sequence: Synthetic oligonucleotide
augguccaacaggagagug

SEQ ID NO: 529325 - RNA, 19 nt, Artificial Sequence
  Description of Artificial Sequence: Synthetic oligonucleotide
agcgcaucccguaagggau

SEQ ID NO: 529326 - RNA, 19 nt, Artificial Sequence
  Description of Artificial Sequence: Synthetic oligonucleotide
cguuaaauuuauccugcag

SEQ ID NO: 529327 - RNA, 19 nt, Artificial Sequence
  Description of Artificial Sequence: Synthetic oligonucleotide
uaucuccgcugauuccgga

SEQ ID NO: 529328 - RNA, 19 nt, Artificial Sequence
  Description of Artificial Sequence: Synthetic oligonucleotide
gaggcguugccguuuugaa

SEQ ID NO: 529329 - RNA, 19 nt, Artificial Sequence
  Description of Artificial Sequence: Synthetic oligonucleotide
ccggggucacaucauaggg

SEQ ID NO: 529330 - RNA, 19 nt, Artificial Sequence
  Description of Artificial Sequence: Synthetic oligonucleotide
ugcgcuggucuguggugag

SEQ ID NO: 529331 - RNA, 19 nt, Artificial Sequence
  Description of Artificial Sequence: Synthetic oligonucleotide
ccgucugaauuucugguac

SEQ ID NO: 529332 - RNA, 19 nt, Artificial Sequence
  Description of Artificial Sequence: Synthetic oligonucleotide
uacuucugucuuagccagu

SEQ ID NO: 529333 - RNA, 19 nt, Artificial Sequence
  Description of Artificial Sequence: Synthetic oligonucleotide
ggacuggcagcaaacgacc

SEQ ID NO: 529334 - RNA, 19 nt, Artificial Sequence
  Description of Artificial Sequence: Synthetic oligonucleotide
aaguagcaauuaccacuua

SEQ ID NO: 529335 - RNA, 19 nt, Artificial Sequence
  Description of Artificial Sequence: Synthetic oligonucleotide
cuggacuggcagcaaacga

SEQ ID NO: 529336 - RNA, 19 nt, Artificial Sequence
  Description of Artificial Sequence: Synthetic oligonucleotide
aucuccgcugauuccggau

SEQ ID NO: 529337 - RNA, 19 nt, Artificial Sequence
  Description of Artificial Sequence: Synthetic oligonucleotide
augauugcugagaggaauu

SEQ ID NO: 529338 - RNA, 19 nt, Artificial Sequence
  Description of Artificial Sequence: Synthetic oligonucleotide
aguucagagcugaguacgu

SEQ ID NO: 529339 - RNA, 19 nt, Artificial Sequence
  Description of Artificial Sequence: Synthetic oligonucleotide
  modified_base (8)..(8): a, c, u, g, unknown or other
  modified_base (16)..(16): a, c, u, g, unknown or other
ugcuccunuugggucnuua

SEQ ID NO: 529340 - RNA, 19 nt, Artificial Sequence
  Description of Artificial Sequence: Synthetic oligonucleotide
aggcugagguuguuauccu

SEQ ID NO: 529341 - RNA, 19 nt, Artificial Sequence
  Description of Artificial Sequence: Synthetic oligonucleotide
uuuccccuaucagggacuc

SEQ ID NO: 529342 - RNA, 19 nt, Artificial Sequence
  Description of Artificial Sequence: Synthetic oligonucleotide
gugacuagaucagaauacu

SEQ ID NO: 529343 - RNA, 19 nt, Artificial Sequence
  Description of Artificial Sequence: Synthetic oligonucleotide
uuaaggcacccucgucuuu

SEQ ID NO: 529344 - RNA, 19 nt, Artificial Sequence
  Description of Artificial Sequence: Synthetic oligonucleotide
ccuauucuuuuggauaaac

SEQ ID NO: 529345 - RNA, 19 nt, Artificial Sequence
  Description of Artificial Sequence: Synthetic oligonucleotide
caaugaagcgcaucccgua

SEQ ID NO: 529346 - RNA, 19 nt, Artificial Sequence
  Description of Artificial Sequence: Synthetic oligonucleotide
uggcugcagcuaauaaaua

SEQ ID NO: 529347 - RNA, 19 nt, Artificial Sequence
  Description of Artificial Sequence: Synthetic oligonucleotide
cuggguucauguaucggua

SEQ ID NO: 529348 - RNA, 19 nt, Artificial Sequence
  Description of Artificial Sequence: Synthetic oligonucleotide
ccacuuaagagggaaugug

SEQ ID NO: 529349 - RNA, 19 nt, Artificial Sequence
  Description of Artificial Sequence: Synthetic oligonucleotide
augucguugaugaguuccu

SEQ ID NO: 529350 - RNA, 19 nt, Artificial Sequence
  Description of Artificial Sequence: Synthetic oligonucleotide
aggaguaauggaggauccu

SEQ ID NO: 529351 - RNA, 19 nt, Artificial Sequence
  Description of Artificial Sequence: Synthetic oligonucleotide
gggucguugugcucuggag

SEQ ID NO: 529352 - RNA, 19 nt, Artificial Sequence
  Description of Artificial Sequence: Synthetic oligonucleotide
ggcguugccguuuugaauu

SEQ ID NO: 529353 - RNA, 19 nt, Artificial Sequence
  Description of Artificial Sequence: Synthetic oligonucleotide
cuguguacuucagagaaau

SEQ ID NO: 529354 - RNA, 19 nt, Artificial Sequence
  Description of Artificial Sequence: Synthetic oligonucleotide
aggcaauuguguguagcaa

SEQ ID NO: 529355 - RNA, 19 nt, Artificial Sequence
  Description of Artificial Sequence: Synthetic oligonucleotide
aggcucgccaggugaccuc

SEQ ID NO: 529356 - RNA, 19 nt, Artificial Sequence
  Description of Artificial Sequence: Synthetic oligonucleotide
cuguaauauuaguuuaauu

SEQ ID NO: 529357 - RNA, 19 nt, Artificial Sequence
  Description of Artificial Sequence: Synthetic oligonucleotide
ggucccaagcucuguuagc

SEQ ID NO: 529358 - RNA, 19 nt, Artificial Sequence
  Description of Artificial Sequence: Synthetic oligonucleotide
cuugcuccggggucacauc

SEQ ID NO: 529359 - RNA, 19 nt, Artificial Sequence
  Description of Artificial Sequence: Synthetic oligonucleotide
ccuaauuaaaauagcuuau

SEQ ID NO: 529360 - RNA, 19 nt, Artificial Sequence
  Description of Artificial Sequence: Synthetic oligonucleotide
agaacgcccuuuucaugua

SEQ ID NO: 529361 - RNA, 19 nt, Artificial Sequence
  Description of Artificial Sequence: Synthetic oligonucleotide
cuguuggacugauuucaaa

SEQ ID NO: 529362 - RNA, 19 nt, Artificial Sequence
  Description of Artificial Sequence: Synthetic oligonucleotide
ugcuccggggucacaucau

SEQ ID NO: 529363 - RNA, 19 nt, Artificial Sequence
  Description of Artificial Sequence: Synthetic oligonucleotide
caucuuaaggcacccucgu

SEQ ID NO: 529364 - RNA, 19 nt, Artificial Sequence
  Description of Artificial Sequence: Synthetic oligonucleotide
agacaucuuaaggcacccu

SEQ ID NO: 529365 - RNA, 19 nt, Artificial Sequence
  Description of Artificial Sequence: Synthetic oligonucleotide
uuccccuaucagggacucg

SEQ ID NO: 529366 - RNA, 19 nt, Artificial Sequence
  Description of Artificial Sequence: Synthetic oligonucleotide
ggaguugucuagccuuguc

SEQ ID NO: 529367 - RNA, 19 nt, Artificial Sequence
  Description of Artificial Sequence: Synthetic oligonucleotide
gcucaguagcaugauuuac

SEQ ID NO: 529368 - RNA, 19 nt, Artificial Sequence
  Description of Artificial Sequence: Synthetic oligonucleotide
gacuggcagcaaacgacca

SEQ ID NO: 529369 - RNA, 19 nt, Artificial Sequence
  Description of Artificial Sequence: Synthetic oligonucleotide
cuaucagggacucgauggu

SEQ ID NO: 529370 - RNA, 19 nt, Artificial Sequence
  Description of Artificial Sequence: Synthetic oligonucleotide
gucccaagcucuguuagcu

SEQ ID NO: 529371 - RNA, 19 nt, Artificial Sequence
  Description of Artificial Sequence: Synthetic oligonucleotide
ccgguaucuccgcugauuc

SEQ ID NO: 529372 - RNA, 19 nt, Artificial Sequence
  Description of Artificial Sequence: Synthetic oligonucleotide
  modified_base (7)..(7): a, c, u, g, unknown or other
  modified_base (15)..(15): a, c, u, g, unknown or other
gcuccunuugggucnuuaa

SEQ ID NO: 529373 - RNA, 19 nt, Artificial Sequence
  Description of Artificial Sequence: Synthetic oligonucleotide
acgucacaagcaguuugga

SEQ ID NO: 529374 - RNA, 19 nt, Artificial Sequence
  Description of Artificial Sequence: Synthetic oligonucleotide
agcgaauccuucagcacuu

SEQ ID NO: 529375 - RNA, 19 nt, Artificial Sequence
  Description of Artificial Sequence: Synthetic oligonucleotide
auggggucguugugcucug

SEQ ID NO: 529376 - RNA, 19 nt, Artificial Sequence
  Description of Artificial Sequence: Synthetic oligonucleotide
acggucccaagcucuguua

SEQ ID NO: 529377 - RNA, 19 nt, Artificial Sequence
  Description of Artificial Sequence: Synthetic oligonucleotide
gcccagauuucugcgcugg

SEQ ID NO: 529378 - RNA, 19 nt, Artificial Sequence
  Description of Artificial Sequence: Synthetic oligonucleotide
cuuuccccuaucagggacu

SEQ ID NO: 529379 - RNA, 19 nt, Artificial Sequence
  Description of Artificial Sequence: Synthetic oligonucleotide
ccgcugauuccggauaucc

SEQ ID NO: 529380 - RNA, 19 nt, Artificial Sequence
  Description of Artificial Sequence: Synthetic oligonucleotide
gccuuucauuucccuaggc

SEQ ID NO: 529381 - RNA, 19 nt, Artificial Sequence
  Description of Artificial Sequence: Synthetic oligonucleotide
gcugauuccggauauccuu

SEQ ID NO: 529382 - RNA, 19 nt, Artificial Sequence
  Description of Artificial Sequence: Synthetic oligonucleotide
cuucauggucaacgugaga

SEQ ID NO: 529383 - RNA, 19 nt, Artificial Sequence
  Description of Artificial Sequence: Synthetic oligonucleotide
cguuuugaauucuucugga

SEQ ID NO: 529384 - RNA, 19 nt, Artificial Sequence
  Description of Artificial Sequence: Synthetic oligonucleotide
gguucauguaucgguagua

SEQ ID NO: 529385 - RNA, 19 nt, Artificial Sequence
  Description of Artificial Sequence: Synthetic oligonucleotide
  modified_base (4)..(4): a, c, u, g, unknown or other
  modified_base (12)..(12): a, c, u, g, unknown or other
ccunuugggucnuuaaauu

SEQ ID NO: 529386 - RNA, 19 nt, Artificial Sequence
  Description of Artificial Sequence: Synthetic oligonucleotide
cugccgguaucuccgcuga

SEQ ID NO: 529387 - RNA, 19 nt, Artificial Sequence
  Description of Artificial Sequence: Synthetic oligonucleotide
ggcugagguuguuauccuc

SEQ ID NO: 529388 - RNA, 19 nt, Artificial Sequence
  Description of Artificial Sequence: Synthetic oligonucleotide
uuugucugucacggcccuc

SEQ ID NO: 529389 - RNA, 19 nt, Artificial Sequence
  Description of Artificial Sequence: Synthetic oligonucleotide
gagcccaaccauccaggcu

SEQ ID NO: 529390 - RNA, 19 nt, Artificial Sequence
  Description of Artificial Sequence: Synthetic oligonucleotide
accuauucuuuuggauaaa

SEQ ID NO: 529391 - RNA, 19 nt, Artificial Sequence
  Description of Artificial Sequence: Synthetic oligonucleotide
auuugacggccaguccaaa

SEQ ID NO: 529392 - RNA, 19 nt, Artificial Sequence
  Description of Artificial Sequence: Synthetic oligonucleotide
gcaaguuaccaacaaucuu

SEQ ID NO: 529393 - RNA, 19 nt, Artificial Sequence
  Description of Artificial Sequence: Synthetic oligonucleotide
agcgaggcguugccguuuu

SEQ ID NO: 529394 - RNA, 19 nt, Artificial Sequence
  Description of Artificial Sequence: Synthetic oligonucleotide
gcggacaggucaaugaugu

SEQ ID NO: 529395 - RNA, 19 nt, Artificial Sequence
  Description of Artificial Sequence: Synthetic oligonucleotide
caguagcaugauuuaccua

SEQ ID NO: 529396 - RNA, 19 nt, Artificial Sequence
  Description of Artificial Sequence: Synthetic oligonucleotide
ucguugugcucuggagcaa

SEQ ID NO: 529397 - RNA, 19 nt, Artificial Sequence
  Description of Artificial Sequence: Synthetic oligonucleotide
gccacaacuuuccccuauc

SEQ ID NO: 529398 - RNA, 19 nt, Artificial Sequence
  Description of Artificial Sequence: Synthetic oligonucleotide
uccgcugauuccggauauc

SEQ ID NO: 529399 - RNA, 19 nt, Artificial Sequence
  Description of Artificial Sequence: Synthetic oligonucleotide
cugguacgacugagagaug

SEQ ID NO: 529400 - RNA, 19 nt, Artificial Sequence
  Description of Artificial Sequence: Synthetic oligonucleotide
  modified_base (19)..(19): a, c, u, g, unknown or other
gucuuagccagugcuccun

SEQ ID NO: 529401 - RNA, 19 nt, Artificial Sequence
  Description of Artificial Sequence: Synthetic oligonucleotide
gacggccaguccaaauucu

SEQ ID NO: 529402 - RNA, 19 nt, Artificial Sequence
  Description of Artificial Sequence: Synthetic oligonucleotide
gguccacggucccaagcuc

SEQ ID NO: 529403 - RNA, 19 nt, Artificial Sequence
  Description of Artificial Sequence: Synthetic oligonucleotide
gagcauccuuacaguuaac

SEQ ID NO: 529404 - RNA, 19 nt, Artificial Sequence
  Description of Artificial Sequence: Synthetic oligonucleotide
guacgucugcugcaguuuu

SEQ ID NO: 529405 - RNA, 19 nt, Artificial Sequence
  Description of Artificial Sequence: Synthetic oligonucleotide
acggccaguccaaauucuu

SEQ ID NO: 529406 - RNA, 19 nt, Artificial Sequence
  Description of Artificial Sequence: Synthetic oligonucleotide
ggggucguugugcucugga

SEQ ID NO: 529407 - RNA, 19 nt, Artificial Sequence
  Description of Artificial Sequence: Synthetic oligonucleotide
cuuuggguccacgguccca

SEQ ID NO: 529408 - RNA, 19 nt, Artificial Sequence
  Description of Artificial Sequence: Synthetic oligonucleotide
cggucccaagcucuguuag

SEQ ID NO: 529409 - RNA, 19 nt, Artificial Sequence
  Description of Artificial Sequence: Synthetic oligonucleotide
ugccgguaucuccgcugau

SEQ ID NO: 529410 - RNA, 19 nt, Artificial Sequence
  Description of Artificial Sequence: Synthetic oligonucleotide
ccucgccaaggucauccag

SEQ ID NO: 529411 - RNA, 19 nt, Artificial Sequence
  Description of Artificial Sequence: Synthetic oligonucleotide
gaggcucgccaggugaccu

SEQ ID NO: 529412 - RNA, 19 nt, Artificial Sequence
  Description of Artificial Sequence: Synthetic oligonucleotide
cugcggacaggucaaugau

SEQ ID NO: 529413 - RNA, 19 nt, Artificial Sequence
  Description of Artificial Sequence: Synthetic oligonucleotide
ccaggcuucucagaauaca

SEQ ID NO: 529414 - RNA, 19 nt, Artificial Sequence
  Description of Artificial Sequence: Synthetic oligonucleotide
gggugggacuccacagcag

SEQ ID NO: 529415 - RNA, 19 nt, Artificial Sequence
  Description of Artificial Sequence: Synthetic oligonucleotide
guugccguuuugaauucuu

SEQ ID NO: 529416 - RNA, 19 nt, Artificial Sequence
  Description of Artificial Sequence: Synthetic oligonucleotide
gcguugccguuuugaauuc

SEQ ID NO: 529417 - RNA, 19 nt, Artificial Sequence
  Description of Artificial Sequence: Synthetic oligonucleotide
cagaauacucguccacguu

SEQ ID NO: 529418 - RNA, 19 nt, Artificial Sequence
  Description of Artificial Sequence: Synthetic oligonucleotide
caacaauuugacggccagu

SEQ ID NO: 529419 - RNA, 19 nt, Artificial Sequence
  Description of Artificial Sequence: Synthetic oligonucleotide
cugggacgucacaagcagu

SEQ ID NO: 529420 - RNA, 19 nt, Artificial Sequence
  Description of Artificial Sequence: Synthetic oligonucleotide
guagcaugauuuaccuauu

SEQ ID NO: 529421 - RNA, 19 nt, Artificial Sequence
  Description of Artificial Sequence: Synthetic oligonucleotide
gucuagccuugucuucacu

SEQ ID NO: 529422 - RNA, 19 nt, Artificial Sequence
  Description of Artificial Sequence: Synthetic oligonucleotide
gggacucgauggugggcac

SEQ ID NO: 529423 - RNA, 19 nt, Artificial Sequence
  Description of Artificial Sequence: Synthetic oligonucleotide
gugccaagccgaggcucgc

SEQ ID NO: 529424 - RNA, 19 nt, Artificial Sequence
  Description of Artificial Sequence: Synthetic oligonucleotide
ccgaggcucgccaggugac

SEQ ID NO: 529425 - RNA, 19 nt, Artificial Sequence
  Description of Artificial Sequence: Synthetic oligonucleotide
ggcguccugaugguccaac

SEQ ID NO: 529426 - RNA, 19 nt, Artificial Sequence
  Description of Artificial Sequence: Synthetic oligonucleotide
ggacgaggagagagccaag

SEQ ID NO: 529427 - RNA, 19 nt, Artificial Sequence
  Description of Artificial Sequence: Synthetic oligonucleotide
ccagcgucagggaacuucu

SEQ ID NO: 529428 - RNA, 19 nt, Artificial Sequence
  Description of Artificial Sequence: Synthetic oligonucleotide
gguacgacugagagaugcu

SEQ ID NO: 529429 - RNA, 19 nt, Artificial Sequence
  Description of Artificial Sequence: Synthetic oligonucleotide
cuggagcaauggcguccug

SEQ ID NO: 529430 - RNA, 19 nt, Artificial Sequence
  Description of Artificial Sequence: Synthetic oligonucleotide
caucccguaagggauucuu

SEQ ID NO: 529431 - RNA, 19 nt, Artificial Sequence
  Description of Artificial Sequence: Synthetic oligonucleotide
cugaaacugaacggucuuu

SEQ ID NO: 529432 - RNA, 19 nt, Artificial Sequence
  Description of Artificial Sequence: Synthetic oligonucleotide
cuccgcugauuccggauau

SEQ ID NO: 529433 - RNA, 19 nt, Artificial Sequence
  Description of Artificial Sequence: Synthetic oligonucleotide
cacggcccucauguuccug

SEQ ID NO: 529434 - RNA, 19 nt, Artificial Sequence
  Description of Artificial Sequence: Synthetic oligonucleotide
ggcucgccaggugaccuca

SEQ ID NO: 529435 - RNA, 19 nt, Artificial Sequence
  Description of Artificial Sequence: Synthetic oligonucleotide
cgaccaguuacuucccaua

SEQ ID NO: 529436 - RNA, 19 nt, Artificial Sequence
  Description of Artificial Sequence: Synthetic oligonucleotide
gcuccggggucacaucaua

SEQ ID NO: 529437 - RNA, 19 nt, Artificial Sequence
  Description of Artificial Sequence: Synthetic oligonucleotide
gcuuagggugggacuccac

SEQ ID NO: 529438 - RNA, 19 nt, Artificial Sequence
  Description of Artificial Sequence: Synthetic oligonucleotide
cacgagcguggcaggacau

SEQ ID NO: 529439 - RNA, 19 nt, Artificial Sequence
  Description of Artificial Sequence: Synthetic oligonucleotide
ggcgcaguucuaacuggua

SEQ ID NO: 529440 - RNA, 19 nt, Artificial Sequence
  Description of Artificial Sequence: Synthetic oligonucleotide
cccugcggacaggucaaug

SEQ ID NO: 529441 - RNA, 19 nt, Artificial Sequence
  Description of Artificial Sequence: Synthetic oligonucleotide
cgaggcguugccguuuuga

SEQ ID NO: 529442 - RNA, 19 nt, Artificial Sequence
  Description of Artificial Sequence: Synthetic oligonucleotide
gcgcuggucuguggugagc

SEQ ID NO: 529443 - RNA, 19 nt, Artificial Sequence
  Description of Artificial Sequence: Synthetic oligonucleotide
gcucaucccucaccagcgu

SEQ ID NO: 529444 - RNA, 19 nt, Artificial Sequence
  Description of Artificial Sequence: Synthetic oligonucleotide
ccggcuuggugagggugac

SEQ ID NO: 529445 - RNA, 19 nt, Artificial Sequence
  Description of Artificial Sequence: Synthetic oligonucleotide
gcccaaccauccaggcuuc

SEQ ID NO: 529446 - RNA, 19 nt, Artificial Sequence
  Description of Artificial Sequence: Synthetic oligonucleotide
gcucgccaggugaccucag

SEQ ID NO: 529447 - RNA, 19 nt, Artificial Sequence
  Description of Artificial Sequence: Synthetic oligonucleotide
gccgguaucuccgcugauu

SEQ ID NO: 529448 - RNA, 19 nt, Artificial Sequence
  Description of Artificial Sequence: Synthetic oligonucleotide
cgcugauuccggauauccu

SEQ ID NO: 529449 - RNA, 19 nt, Artificial Sequence
  Description of Artificial Sequence: Synthetic oligonucleotide
gcagcgaggcguugccguu

SEQ ID NO: 529450 - RNA, 19 nt, Artificial Sequence
  Description of Artificial Sequence: Synthetic oligonucleotide
gggacgucacaagcaguuu

SEQ ID NO: 529451 - RNA, 19 nt, Artificial Sequence
  Description of Artificial Sequence: Synthetic oligonucleotide
caagggcauuuggcgcagu

SEQ ID NO: 529452 - RNA, 19 nt, Artificial Sequence
  Description of Artificial Sequence: Synthetic oligonucleotide
cagcgaggcguugccguuu

SEQ ID NO: 529453 - RNA, 19 nt, Artificial Sequence
  Description of Artificial Sequence: Synthetic oligonucleotide
ggcuugcuccggggucaca

SEQ ID NO: 529454 - RNA, 19 nt, Artificial Sequence
  Description of Artificial Sequence: Synthetic oligonucleotide
gcaucccguaagggauucu

SEQ ID NO: 529455 - RNA, 19 nt, Artificial Sequence
  Description of Artificial Sequence: Synthetic oligonucleotide
ccccuaucagggacucgau

SEQ ID NO: 529456 - RNA, 19 nt, Artificial Sequence
  Description of Artificial Sequence: Synthetic oligonucleotide
cguugccguuuugaauucu

SEQ ID NO: 529457 - RNA, 19 nt, Artificial Sequence
  Description of Artificial Sequence: Synthetic oligonucleotide
  modified_base (9)..(9): a, c, u, g, unknown or other
  modified_base (17)..(17): a, c, u, g, unknown or other
gugcuccunuugggucnuu

SEQ ID NO: 529458 - RNA, 19 nt, Artificial Sequence
  Description of Artificial Sequence: Synthetic oligonucleotide
cccaaccauccaggcuucu

SEQ ID NO: 529459 - RNA, 19 nt, Artificial Sequence
  Description of Artificial Sequence: Synthetic oligonucleotide
ccccugcggacaggucaau

SEQ ID NO: 529460 - RNA, 19 nt, Artificial Sequence
  Description of Artificial Sequence: Synthetic oligonucleotide
  modified_base (1)..(1): a, c, u, g, unknown or other
  modified_base (9)..(9): a, c, u, g, unknown or other
nuugggucnuuaaauugcc

SEQ ID NO: 529461 - RNA, 19 nt, Artificial Sequence
  Description of Artificial Sequence: Synthetic oligonucleotide
aaaacauagaagcagagcc

SEQ ID NO: 529462 - RNA, 19 nt, Artificial Sequence
  Description of Artificial Sequence: Synthetic oligonucleotide
aaucgaauuacuuuggagc

SEQ ID NO: 529463 - RNA, 19 nt, Artificial Sequence
  Description of Artificial Sequence: Synthetic oligonucleotide
gagauuuggauauagaccc

SEQ ID NO: 529464 - RNA, 19 nt, Artificial Sequence
  Description of Artificial Sequence: Synthetic oligonucleotide
agcaauuuagguuugguac

SEQ ID NO: 529465 - RNA, 19 nt, Artificial Sequence
  Description of Artificial Sequence: Synthetic oligonucleotide
auaauaaacgucuagaaaa

SEQ ID NO: 529466 - RNA, 19 nt, Artificial Sequence
  Description of Artificial Sequence: Synthetic oligonucleotide
aacauucaaaucuauccac

SEQ ID NO: 529467 - RNA, 19 nt, Artificial Sequence
  Description of Artificial Sequence: Synthetic oligonucleotide
aauaaaaucgaauuacuuu

SEQ ID NO: 529468 - RNA, 19 nt, Artificial Sequence
  Description of Artificial Sequence: Synthetic oligonucleotide
ucuacuuuaaguauggauc

SEQ ID NO: 529469 - RNA, 19 nt, Artificial Sequence
  Description of Artificial Sequence: Synthetic oligonucleotide
uuucagauaauaaacgucu

SEQ ID NO: 529470 - RNA, 19 nt, Artificial Sequence
  Description of Artificial Sequence: Synthetic oligonucleotide
uuagguuugguacugaaca

SEQ ID NO: 529471 - RNA, 19 nt, Artificial Sequence
  Description of Artificial Sequence: Synthetic oligonucleotide
ugaaauauaauauuuggua

SEQ ID NO: 529472 - RNA, 19 nt, Artificial Sequence
  Description of Artificial Sequence: Synthetic oligonucleotide
uuuaggaacacauacuucu

SEQ ID NO: 529473 - RNA, 19 nt, Artificial Sequence
  Description of Artificial Sequence: Synthetic oligonucleotide
aucgaauuacuuuggagcc

SEQ ID NO: 529474 - RNA, 19 nt, Artificial Sequence
  Description of Artificial Sequence: Synthetic oligonucleotide
aauacaccugucuagcauc

SEQ ID NO: 529475 - RNA, 19 nt, Artificial Sequence
  Description of Artificial Sequence: Synthetic oligonucleotide
uaaacgucuagaaaagugc

SEQ ID NO: 529476 - RNA, 19 nt, Artificial Sequence
  Description of Artificial Sequence: Synthetic oligonucleotide
acagcuaagaauuagugga

SEQ ID NO: 529477 - RNA, 19 nt, Artificial Sequence
  Description of Artificial Sequence: Synthetic oligonucleotide
ucuucccucaauaagaaga

SEQ ID NO: 529478 - RNA, 19 nt, Artificial Sequence
  Description of Artificial Sequence: Synthetic oligonucleotide
aauaauaacugauugccuu

SEQ ID NO: 529479 - RNA, 19 nt, Artificial Sequence
  Description of Artificial Sequence: Synthetic oligonucleotide
acuauauacaccaugauca

SEQ ID NO: 529480 - RNA, 19 nt, Artificial Sequence
  Description of Artificial Sequence: Synthetic oligonucleotide
aaacaaguacauucuuccc

SEQ ID NO: 529481 - RNA, 19 nt, Artificial Sequence
  Description of Artificial Sequence: Synthetic oligonucleotide
ucuaucugaaaacauagaa

SEQ ID NO: 529482 - RNA, 19 nt, Artificial Sequence
  Description of Artificial Sequence: Synthetic oligonucleotide
aaaucgaauuacuuuggag

SEQ ID NO: 529483 - RNA, 19 nt, Artificial Sequence
  Description of Artificial Sequence: Synthetic oligonucleotide
ugcagaaaauuucucaaag

SEQ ID NO: 529484 - RNA, 19 nt, Artificial Sequence
  Description of Artificial Sequence: Synthetic oligonucleotide
ucacuuauaacagaguuug

SEQ ID NO: 529485 - RNA, 19 nt, Artificial Sequence
  Description of Artificial Sequence: Synthetic oligonucleotide
uguagcaacaccaaugcaa

SEQ ID NO: 529486 - RNA, 19 nt, Artificial Sequence
  Description of Artificial Sequence: Synthetic oligonucleotide
uacuuuggagccuauaaag

SEQ ID NO: 529487 - RNA, 19 nt, Artificial Sequence
  Description of Artificial Sequence: Synthetic oligonucleotide
aaucacuuauaacagaguu

SEQ ID NO: 529488 - RNA, 19 nt, Artificial Sequence
  Description of Artificial Sequence: Synthetic oligonucleotide
uuauacuuaauaucccugc

SEQ ID NO: 529489 - RNA, 19 nt, Artificial Sequence
  Description of Artificial Sequence: Synthetic oligonucleotide
uuugcgguuaccuggauug

SEQ ID NO: 529490 - RNA, 19 nt, Artificial Sequence
  Description of Artificial Sequence: Synthetic oligonucleotide
aaaucuauccacaaguggu

SEQ ID NO: 529491 - RNA, 19 nt, Artificial Sequence
  Description of Artificial Sequence: Synthetic oligonucleotide
aaaguaggcaaucuggaau

SEQ ID NO: 529492 - RNA, 19 nt, Artificial Sequence
  Description of Artificial Sequence: Synthetic oligonucleotide
auuaccucuauuuaucuga

SEQ ID NO: 529493 - RNA, 19 nt, Artificial Sequence
  Description of Artificial Sequence: Synthetic oligonucleotide
ucagauaauaaacgucuag

SEQ ID NO: 529494 - RNA, 19 nt, Artificial Sequence
  Description of Artificial Sequence: Synthetic oligonucleotide
uaaugaaugacggauuucc

SEQ ID NO: 529495 - RNA, 19 nt, Artificial Sequence
  Description of Artificial Sequence: Synthetic oligonucleotide
aauaagaagacagagcauu

SEQ ID NO: 529496 - RNA, 19 nt, Artificial Sequence
  Description of Artificial Sequence: Synthetic oligonucleotide
ucccucaauaagaagacag

SEQ ID NO: 529497 - RNA, 19 nt, Artificial Sequence
  Description of Artificial Sequence: Synthetic oligonucleotide
aacucuauaauuugugaaa

SEQ ID NO: 529498 - RNA, 19 nt, Artificial Sequence
  Description of Artificial Sequence: Synthetic oligonucleotide
aguagaacacuugaauacc

SEQ ID NO: 529499 - RNA, 19 nt, Artificial Sequence
  Description of Artificial Sequence: Synthetic oligonucleotide
acuuaacucaaacagauuu

SEQ ID NO: 529500 - RNA, 19 nt, Artificial Sequence
  Description of Artificial Sequence: Synthetic oligonucleotide
acuuaauaucccugcaucg

SEQ ID NO: 529501 - RNA, 19 nt, Artificial Sequence
  Description of Artificial Sequence: Synthetic oligonucleotide
uacggaauguauuuuagac

SEQ ID NO: 529502 - RNA, 19 nt, Artificial Sequence
  Description of Artificial Sequence: Synthetic oligonucleotide
gacuauauggaucacucac

SEQ ID NO: 529503 - RNA, 19 nt, Artificial Sequence
  Description of Artificial Sequence: Synthetic oligonucleotide
augaacaaguccaauacac

SEQ ID NO: 529504 - RNA, 19 nt, Artificial Sequence
  Description of Artificial Sequence: Synthetic oligonucleotide
aauaccuaaaccguccuca

SEQ ID NO: 529505 - RNA, 19 nt, Artificial Sequence
  Description of Artificial Sequence: Synthetic oligonucleotide
uugaauaccuaaaccgucc

SEQ ID NO: 529506 - RNA, 19 nt, Artificial Sequence
  Description of Artificial Sequence: Synthetic oligonucleotide
aauaucccugcaucgaaug

SEQ ID NO: 529507 - RNA, 19 nt, Artificial Sequence
  Description of Artificial Sequence: Synthetic oligonucleotide
ucuauuuaucugaauggca

SEQ ID NO: 529508 - RNA, 19 nt, Artificial Sequence
  Description of Artificial Sequence: Synthetic oligonucleotide
ugaacaacauguaguguag

SEQ ID NO: 529509 - RNA, 19 nt, Artificial Sequence
  Description of Artificial Sequence: Synthetic oligonucleotide
cuaugaacaaguccaauac

SEQ ID NO: 529510 - RNA, 19 nt, Artificial Sequence
  Description of Artificial Sequence: Synthetic oligonucleotide
aguggaaaguauuuguaug

SEQ ID NO: 529511 - RNA, 19 nt, Artificial Sequence
  Description of Artificial Sequence: Synthetic oligonucleotide
aaugacggauuuccaaaag

SEQ ID NO: 529512 - RNA, 19 nt, Artificial Sequence
  Description of Artificial Sequence: Synthetic oligonucleotide
ucaaaucuauccacaagug

SEQ ID NO: 529513 - RNA, 19 nt, Artificial Sequence
  Description of Artificial Sequence: Synthetic oligonucleotide
ugaucacaauuaaugaaug

SEQ ID NO: 529514 - RNA, 19 nt, Artificial Sequence
  Description of Artificial Sequence: Synthetic oligonucleotide
uguaaguuacuccaaccac

SEQ ID NO: 529515 - RNA, 19 nt, Artificial Sequence
  Description of Artificial Sequence: Synthetic oligonucleotide
aaacgucuagaaaagugcg

SEQ ID NO: 529516 - RNA, 19 nt, Artificial Sequence
  Description of Artificial Sequence: Synthetic oligonucleotide
ucuaggacggaugugagca

SEQ ID NO: 529517 - RNA, 19 nt, Artificial Sequence
  Description of Artificial Sequence: Synthetic oligonucleotide
cucuauaaaguaaaaucug

SEQ ID NO: 529518 - RNA, 19 nt, Artificial Sequence
  Description of Artificial Sequence: Synthetic oligonucleotide
uggauaguccaaagaaggg

SEQ ID NO: 529519 - RNA, 19 nt, Artificial Sequence
  Description of Artificial Sequence: Synthetic oligonucleotide
uuaguagaacacuugaaua

SEQ ID NO: 529520 - RNA, 19 nt, Artificial Sequence
  Description of Artificial Sequence: Synthetic oligonucleotide
uauuuuagacuauauggau

SEQ ID NO: 529521 - RNA, 19 nt, Artificial Sequence
  Description of Artificial Sequence: Synthetic oligonucleotide
uguauggauaguccaaaga

SEQ ID NO: 529522 - RNA, 19 nt, Artificial Sequence
  Description of Artificial Sequence: Synthetic oligonucleotide
auggauaguccaaagaagg

SEQ ID NO: 529523 - RNA, 19 nt, Artificial Sequence
  Description of Artificial Sequence: Synthetic oligonucleotide
uagacuauauggaucacuc

SEQ ID NO: 529524 - RNA, 19 nt, Artificial Sequence
  Description of Artificial Sequence: Synthetic oligonucleotide
uucacaaaauaaaaucgaa

SEQ ID NO: 529525 - RNA, 19 nt, Artificial Sequence
  Description of Artificial Sequence: Synthetic oligonucleotide
ugaacaaguccaauacacc

SEQ ID NO: 529526 - RNA, 19 nt, Artificial Sequence
  Description of Artificial Sequence: Synthetic oligonucleotide
uuggauauagacccaagau

SEQ ID NO: 529527 - RNA, 19 nt, Artificial Sequence
  Description of Artificial Sequence: Synthetic oligonucleotide
aaaaucgaauuacuuugga

SEQ ID NO: 529528 - RNA, 19 nt, Artificial Sequence
  Description of Artificial Sequence: Synthetic oligonucleotide
caaaucuauccacaagugg

SEQ ID NO: 529529 - RNA, 19 nt, Artificial Sequence
  Description of Artificial Sequence: Synthetic oligonucleotide
uauacuuaauaucccugca

SEQ ID NO: 529530 - RNA, 19 nt, Artificial Sequence
  Description of Artificial Sequence: Synthetic oligonucleotide
aaggcccgcauccuugugc

SEQ ID NO: 529531 - RNA, 19 nt, Artificial Sequence
  Description of Artificial Sequence: Synthetic oligonucleotide
accuaaaccguccucauca

SEQ ID NO: 529532 - RNA, 19 nt, Artificial Sequence
  Description of Artificial Sequence: Synthetic oligonucleotide
aggccuaacacauccugcc

SEQ ID NO: 529533 - RNA, 19 nt, Artificial Sequence
  Description of Artificial Sequence: Synthetic oligonucleotide
auaguacuaaggcaagaag

SEQ ID NO: 529534 - RNA, 19 nt, Artificial Sequence
  Description of Artificial Sequence: Synthetic oligonucleotide
uacuuaauaucccugcauc

SEQ ID NO: 529535 - RNA, 19 nt, Artificial Sequence
  Description of Artificial Sequence: Synthetic oligonucleotide
cauacuucuacuuuaagua

SEQ ID NO: 529536 - RNA, 19 nt, Artificial Sequence
  Description of Artificial Sequence: Synthetic oligonucleotide
uuaugcaacagcaaauauu

SEQ ID NO: 529537 - RNA, 19 nt, Artificial Sequence
  Description of Artificial Sequence: Synthetic oligonucleotide
cacagcuaagaauuagugg

SEQ ID NO: 529538 - RNA, 19 nt, Artificial Sequence
  Description of Artificial Sequence: Synthetic oligonucleotide
auuuuagacuauauggauc

SEQ ID NO: 529539 - RNA, 19 nt, Artificial Sequence
  Description of Artificial Sequence: Synthetic oligonucleotide
aauaaggcuugaaagaaaa

SEQ ID NO: 529540 - RNA, 19 nt, Artificial Sequence
  Description of Artificial Sequence: Synthetic oligonucleotide
uaugaacaaguccaauaca

SEQ ID NO: 529541 - RNA, 19 nt, Artificial Sequence
  Description of Artificial Sequence: Synthetic oligonucleotide
guggugauaguacuaaggc

SEQ ID NO: 529542 - RNA, 19 nt, Artificial Sequence
  Description of Artificial Sequence: Synthetic oligonucleotide
uccagucuauaccucagag

SEQ ID NO: 529543 - RNA, 19 nt, Artificial Sequence
  Description of Artificial Sequence: Synthetic oligonucleotide
aaguccaauacaccugucu

SEQ ID NO: 529544 - RNA, 19 nt, Artificial Sequence
  Description of Artificial Sequence: Synthetic oligonucleotide
cagucuauaccucagagca

SEQ ID NO: 529545 - RNA, 19 nt, Artificial Sequence
  Description of Artificial Sequence: Synthetic oligonucleotide
ggaaacauggcucagucac

SEQ ID NO: 529546 - RNA, 19 nt, Artificial Sequence
  Description of Artificial Sequence: Synthetic oligonucleotide
ggggaaauccuccacaccg

SEQ ID NO: 529547 - RNA, 19 nt, Artificial Sequence
  Description of Artificial Sequence: Synthetic oligonucleotide
caacauguaguguagcaac

SEQ ID NO: 529548 - RNA, 19 nt, Artificial Sequence
  Description of Artificial Sequence: Synthetic oligonucleotide
uccucaucaacugagauuu

SEQ ID NO: 529549 - RNA, 19 nt, Artificial Sequence
  Description of Artificial Sequence: Synthetic oligonucleotide
auaaacgucuagaaaagug

SEQ ID NO: 529550 - RNA, 19 nt, Artificial Sequence
  Description of Artificial Sequence: Synthetic oligonucleotide
uucuacuuuaaguauggau

SEQ ID NO: 529551 - RNA, 19 nt, Artificial Sequence
  Description of Artificial Sequence: Synthetic oligonucleotide
gaucauuacauacuccuaa

SEQ ID NO: 529552 - RNA, 19 nt, Artificial Sequence
  Description of Artificial Sequence: Synthetic oligonucleotide
acagauauguaggaaaacu

SEQ ID NO: 529553 - RNA, 19 nt, Artificial Sequence
  Description of Artificial Sequence: Synthetic oligonucleotide
guauggauaguccaaagaa

SEQ ID NO: 529554 - RNA, 19 nt, Artificial Sequence
  Description of Artificial Sequence: Synthetic oligonucleotide
cuccacaucucuaggacgg

SEQ ID NO: 529555 - RNA, 19 nt, Artificial Sequence
  Description of Artificial Sequence: Synthetic oligonucleotide
aagggcucgcacuuugcgg

SEQ ID NO: 529556 - RNA, 19 nt, Artificial Sequence
  Description of Artificial Sequence: Synthetic oligonucleotide
aaguaggcaaucuggaaua

SEQ ID NO: 529557 - RNA, 19 nt, Artificial Sequence
  Description of Artificial Sequence: Synthetic oligonucleotide
aguacuaaggcaagaagug

SEQ ID NO: 529558 - RNA, 19 nt, Artificial Sequence
  Description of Artificial Sequence: Synthetic oligonucleotide
uuaauaucccugcaucgaa

SEQ ID NO: 529559 - RNA, 19 nt, Artificial Sequence
  Description of Artificial Sequence: Synthetic oligonucleotide
ugucuagcaucccauuacc

SEQ ID NO: 529560 - RNA, 19 nt, Artificial Sequence
  Description of Artificial Sequence: Synthetic oligonucleotide
gucuauaccucagagcagg

SEQ ID NO: 529561 - RNA, 19 nt, Artificial Sequence
  Description of Artificial Sequence: Synthetic oligonucleotide
uaaaccugcauaaucucua

SEQ ID NO: 529562 - RNA, 19 nt, Artificial Sequence
  Description of Artificial Sequence: Synthetic oligonucleotide
aguggugauaguacuaagg

SEQ ID NO: 529563 - RNA, 19 nt, Artificial Sequence
  Description of Artificial Sequence: Synthetic oligonucleotide
aaugcaagggcucgcacuu

SEQ ID NO: 529564 - RNA, 19 nt, Artificial Sequence
  Description of Artificial Sequence: Synthetic oligonucleotide
uuacuuuggagccuauaaa

SEQ ID NO: 529565 - RNA, 19 nt, Artificial Sequence
  Description of Artificial Sequence: Synthetic oligonucleotide
guaggugagacacacguuc

SEQ ID NO: 529566 - RNA, 19 nt, Artificial Sequence
  Description of Artificial Sequence: Synthetic oligonucleotide
agagcaggguauuuuccac

SEQ ID NO: 529567 - RNA, 19 nt, Artificial Sequence
  Description of Artificial Sequence: Synthetic oligonucleotide
acggauuuccaaaaguagg

SEQ ID NO: 529568 - RNA, 19 nt, Artificial Sequence
  Description of Artificial Sequence: Synthetic oligonucleotide
cagauauguaggaaaacuc

SEQ ID NO: 529569 - RNA, 19 nt, Artificial Sequence
  Description of Artificial Sequence: Synthetic oligonucleotide
uggaauacggaauguauuu

SEQ ID NO: 529570 - RNA, 19 nt, Artificial Sequence
  Description of Artificial Sequence: Synthetic oligonucleotide
ucuagcaucccauuaccuc

SEQ ID NO: 529571 - RNA, 19 nt, Artificial Sequence
  Description of Artificial Sequence: Synthetic oligonucleotide
aaauuucucaaagcgacuu

SEQ ID NO: 529572 - RNA, 19 nt, Artificial Sequence
  Description of Artificial Sequence: Synthetic oligonucleotide
ucggccuuagcauacagau

SEQ ID NO: 529573 - RNA, 19 nt, Artificial Sequence
  Description of Artificial Sequence: Synthetic oligonucleotide
aagugcguuuugcaccaac

SEQ ID NO: 529574 - RNA, 19 nt, Artificial Sequence
  Description of Artificial Sequence: Synthetic oligonucleotide
ggcaacguaauucucuagg

SEQ ID NO: 529575 - RNA, 19 nt, Artificial Sequence
  Description of Artificial Sequence: Synthetic oligonucleotide
ugcguuuugcaccaacaac

SEQ ID NO: 529576 - RNA, 19 nt, Artificial Sequence
  Description of Artificial Sequence: Synthetic oligonucleotide
aaucuauccacaaguggug

SEQ ID NO: 529577 - RNA, 19 nt, Artificial Sequence
  Description of Artificial Sequence: Synthetic oligonucleotide
acggaauguauuuuagacu

SEQ ID NO: 529578 - RNA, 19 nt, Artificial Sequence
  Description of Artificial Sequence: Synthetic oligonucleotide
guuuugcuggccuuggcgc

SEQ ID NO: 529579 - RNA, 19 nt, Artificial Sequence
  Description of Artificial Sequence: Synthetic oligonucleotide
cuauauggaucacucacuc

SEQ ID NO: 529580 - RNA, 19 nt, Artificial Sequence
  Description of Artificial Sequence: Synthetic oligonucleotide
ugcaaaugcaugccagaug

SEQ ID NO: 529581 - RNA, 19 nt, Artificial Sequence
  Description of Artificial Sequence: Synthetic oligonucleotide
aaacauagaagcagagccu

SEQ ID NO: 529582 - RNA, 19 nt, Artificial Sequence
  Description of Artificial Sequence: Synthetic oligonucleotide
uuggaugaauuuugaaagu

SEQ ID NO: 529583 - RNA, 19 nt, Artificial Sequence
  Description of Artificial Sequence: Synthetic oligonucleotide
uauagacccaagauucuau

SEQ ID NO: 529584 - RNA, 19 nt, Artificial Sequence
  Description of Artificial Sequence: Synthetic oligonucleotide
accgguugcagaccucucc

SEQ ID NO: 529585 - RNA, 19 nt, Artificial Sequence
  Description of Artificial Sequence: Synthetic oligonucleotide
cauguaguguagcaacacc

SEQ ID NO: 529586 - RNA, 19 nt, Artificial Sequence
  Description of Artificial Sequence: Synthetic oligonucleotide
aaucacaccuagcuuuuaa

SEQ ID NO: 529587 - RNA, 19 nt, Artificial Sequence
  Description of Artificial Sequence: Synthetic oligonucleotide
gaacaaguccaauacaccu

SEQ ID NO: 529588 - RNA, 19 nt, Artificial Sequence
  Description of Artificial Sequence: Synthetic oligonucleotide
uuguauggauaguccaaag

SEQ ID NO: 529589 - RNA, 19 nt, Artificial Sequence
  Description of Artificial Sequence: Synthetic oligonucleotide
caggguauuuuccaccccg

SEQ ID NO: 529590 - RNA, 19 nt, Artificial Sequence
  Description of Artificial Sequence: Synthetic oligonucleotide
uauccacaaguggugauag

SEQ ID NO: 529591 - RNA, 19 nt, Artificial Sequence
  Description of Artificial Sequence: Synthetic oligonucleotide
agauccaggaaugaaacau

SEQ ID NO: 529592 - RNA, 19 nt, Artificial Sequence
  Description of Artificial Sequence: Synthetic oligonucleotide
auuucucucucucucucug

SEQ ID NO: 529593 - RNA, 19 nt, Artificial Sequence
  Description of Artificial Sequence: Synthetic oligonucleotide
acuuauaacagaguuugaa

SEQ ID NO: 529594 - RNA, 19 nt, Artificial Sequence
  Description of Artificial Sequence: Synthetic oligonucleotide
gagaacgcacgccagugcc

SEQ ID NO: 529595 - RNA, 19 nt, Artificial Sequence
  Description of Artificial Sequence: Synthetic oligonucleotide
acaacagacaaacuauaua

SEQ ID NO: 529596 - RNA, 19 nt, Artificial Sequence
  Description of Artificial Sequence: Synthetic oligonucleotide
ugaauaccuaaaccguccu

SEQ ID NO: 529597 - RNA, 19 nt, Artificial Sequence
  Description of Artificial Sequence: Synthetic oligonucleotide
gaucacaauuaaugaauga

SEQ ID NO: 529598 - RNA, 19 nt, Artificial Sequence
  Description of Artificial Sequence: Synthetic oligonucleotide
auagacccaagauucuaug

SEQ ID NO: 529599 - RNA, 19 nt, Artificial Sequence
  Description of Artificial Sequence: Synthetic oligonucleotide
augaugugcugguggacac

SEQ ID NO: 529600 - RNA, 19 nt, Artificial Sequence
  Description of Artificial Sequence: Synthetic oligonucleotide
aguguagagggcauugggg

SEQ ID NO: 529601 - RNA, 19 nt, Artificial Sequence
  Description of Artificial Sequence: Synthetic oligonucleotide
aacaccaaugcaaaugcau

SEQ ID NO: 529602 - RNA, 19 nt, Artificial Sequence
  Description of Artificial Sequence: Synthetic oligonucleotide
aauuaguagaacacuugaa

SEQ ID NO: 529603 - RNA, 19 nt, Artificial Sequence
  Description of Artificial Sequence: Synthetic oligonucleotide
guauuuguauggauagucc

SEQ ID NO: 529604 - RNA, 19 nt, Artificial Sequence
  Description of Artificial Sequence: Synthetic oligonucleotide
agaacacuugaauaccuaa

SEQ ID NO: 529605 - RNA, 19 nt, Artificial Sequence
  Description of Artificial Sequence: Synthetic oligonucleotide
agauguuuauggaaaagga

SEQ ID NO: 529606 - RNA, 19 nt, Artificial Sequence
  Description of Artificial Sequence: Synthetic oligonucleotide
uuagacuauauggaucacu

SEQ ID NO: 529607 - RNA, 19 nt, Artificial Sequence
  Description of Artificial Sequence: Synthetic oligonucleotide
acauguaguguagcaacac

SEQ ID NO: 529608 - RNA, 19 nt, Artificial Sequence
  Description of Artificial Sequence: Synthetic oligonucleotide
guuccaauuaguagaacac

SEQ ID NO: 529609 - RNA, 19 nt, Artificial Sequence
  Description of Artificial Sequence: Synthetic oligonucleotide
uuaaauccccagcuccucu

SEQ ID NO: 529610 - RNA, 19 nt, Artificial Sequence
  Description of Artificial Sequence: Synthetic oligonucleotide
augacggauuuccaaaagu

SEQ ID NO: 529611 - RNA, 19 nt, Artificial Sequence
  Description of Artificial Sequence: Synthetic oligonucleotide
auacuuaauaucccugcau

SEQ ID NO: 529612 - RNA, 19 nt, Artificial Sequence
  Description of Artificial Sequence: Synthetic oligonucleotide
cauacagggccaaaucuuc

SEQ ID NO: 529613 - RNA, 19 nt, Artificial Sequence
  Description of Artificial Sequence: Synthetic oligonucleotide
gacacucagagaacgcacg

SEQ ID NO: 529614 - RNA, 19 nt, Artificial Sequence
  Description of Artificial Sequence: Synthetic oligonucleotide
ucacaccuagcuuuuaaau

SEQ ID NO: 529615 - RNA, 19 nt, Artificial Sequence
  Description of Artificial Sequence: Synthetic oligonucleotide
uauauggaucacucacuca

SEQ ID NO: 529616 - RNA, 19 nt, Artificial Sequence
  Description of Artificial Sequence: Synthetic oligonucleotide
acuugaauaccuaaaccgu

SEQ ID NO: 529617 - RNA, 19 nt, Artificial Sequence
  Description of Artificial Sequence: Synthetic oligonucleotide
agacccguggccugugccc

SEQ ID NO: 529618 - RNA, 19 nt, Artificial Sequence
  Description of Artificial Sequence: Synthetic oligonucleotide
cugaacaacauguagugua

SEQ ID NO: 529619 - RNA, 19 nt, Artificial Sequence
  Description of Artificial Sequence: Synthetic oligonucleotide
uugugaaauaaaccugcau

SEQ ID NO: 529620 - RNA, 19 nt, Artificial Sequence
  Description of Artificial Sequence: Synthetic oligonucleotide
caaaaguaggcaaucugga

SEQ ID NO: 529621 - RNA, 19 nt, Artificial Sequence
  Description of Artificial Sequence: Synthetic oligonucleotide
gacggaugugagcauagac

SEQ ID NO: 529622 - RNA, 19 nt, Artificial Sequence
  Description of Artificial Sequence: Synthetic oligonucleotide
aggcccgcauccuugugcc

SEQ ID NO: 529623 - RNA, 19 nt, Artificial Sequence
  Description of Artificial Sequence: Synthetic oligonucleotide
aacaacagacaaacuauau

SEQ ID NO: 529624 - RNA, 19 nt, Artificial Sequence
  Description of Artificial Sequence: Synthetic oligonucleotide
auacggaauguauuuuaga

SEQ ID NO: 529625 - RNA, 19 nt, Artificial Sequence
  Description of Artificial Sequence: Synthetic oligonucleotide
gccaaaucuucacaguagg

SEQ ID NO: 529626 - RNA, 19 nt, Artificial Sequence
  Description of Artificial Sequence: Synthetic oligonucleotide
ucucuaggacggaugugag

SEQ ID NO: 529627 - RNA, 19 nt, Artificial Sequence
  Description of Artificial Sequence: Synthetic oligonucleotide
uuccaccuuagcuccagag

SEQ ID NO: 529628 - RNA, 19 nt, Artificial Sequence
  Description of Artificial Sequence: Synthetic oligonucleotide
ccucuaucugaaaacauag

SEQ ID NO: 529629 - RNA, 19 nt, Artificial Sequence
  Description of Artificial Sequence: Synthetic oligonucleotide
uuuguucggccuuagcaua

SEQ ID NO: 529630 - RNA, 19 nt, Artificial Sequence
  Description of Artificial Sequence: Synthetic oligonucleotide
guuaccuggauugguagug

SEQ ID NO: 529631 - RNA, 19 nt, Artificial Sequence
  Description of Artificial Sequence: Synthetic oligonucleotide
acaccggcaacguaauucu

SEQ ID NO: 529632 - RNA, 19 nt, Artificial Sequence
  Description of Artificial Sequence: Synthetic oligonucleotide
auacaccugucuagcaucc

SEQ ID NO: 529633 - RNA, 19 nt, Artificial Sequence
  Description of Artificial Sequence: Synthetic oligonucleotide
cauuaccucuauuuaucug

SEQ ID NO: 529634 - RNA, 19 nt, Artificial Sequence
  Description of Artificial Sequence: Synthetic oligonucleotide
cuguaaguuacuccaacca

SEQ ID NO: 529635 - RNA, 19 nt, Artificial Sequence
  Description of Artificial Sequence: Synthetic oligonucleotide
uucucucucucucucugcu

SEQ ID NO: 529636 - RNA, 19 nt, Artificial Sequence
  Description of Artificial Sequence: Synthetic oligonucleotide
cagauaauaaacgucuaga

SEQ ID NO: 529637 - RNA, 19 nt, Artificial Sequence
  Description of Artificial Sequence: Synthetic oligonucleotide
uaauaucccugcaucgaau

SEQ ID NO: 529638 - RNA, 19 nt, Artificial Sequence
  Description of Artificial Sequence: Synthetic oligonucleotide
uccacaaguggugauagua

SEQ ID NO: 529639 - RNA, 19 nt, Artificial Sequence
  Description of Artificial Sequence: Synthetic oligonucleotide
gcacuuugcgguuaccugg

SEQ ID NO: 529640 - RNA, 19 nt, Artificial Sequence
  Description of Artificial Sequence: Synthetic oligonucleotide
uuaccuggauugguagugg

SEQ ID NO: 529641 - RNA, 19 nt, Artificial Sequence
  Description of Artificial Sequence: Synthetic oligonucleotide
aaauaaggcuugaaagaaa

SEQ ID NO: 529642 - RNA, 19 nt, Artificial Sequence
  Description of Artificial Sequence: Synthetic oligonucleotide
uucagauaauaaacgucua

SEQ ID NO: 529643 - RNA, 19 nt, Artificial Sequence
  Description of Artificial Sequence: Synthetic oligonucleotide
aacauguaguguagcaaca

SEQ ID NO: 529644 - RNA, 19 nt, Artificial Sequence
  Description of Artificial Sequence: Synthetic oligonucleotide
aaugaaugacggauuucca

SEQ ID NO: 529645 - RNA, 19 nt, Artificial Sequence
  Description of Artificial Sequence: Synthetic oligonucleotide
acucuauaauuugugaaau

SEQ ID NO: 529646 - RNA, 19 nt, Artificial Sequence
  Description of Artificial Sequence: Synthetic oligonucleotide
uuaggaacacauacuucua

SEQ ID NO: 529647 - RNA, 19 nt, Artificial Sequence
  Description of Artificial Sequence: Synthetic oligonucleotide
ugguugauccagccgcugc

SEQ ID NO: 529648 - RNA, 19 nt, Artificial Sequence
  Description of Artificial Sequence: Synthetic oligonucleotide
auaguugccguggaggccu

SEQ ID NO: 529649 - RNA, 19 nt, Artificial Sequence
  Description of Artificial Sequence: Synthetic oligonucleotide
ggagccuauaaagaugggg

SEQ ID NO: 529650 - RNA, 19 nt, Artificial Sequence
  Description of Artificial Sequence: Synthetic oligonucleotide
uaggugagacacacguucu

SEQ ID NO: 529651 - RNA, 19 nt, Artificial Sequence
  Description of Artificial Sequence: Synthetic oligonucleotide
uccauuucucucucucucu

SEQ ID NO: 529652 - RNA, 19 nt, Artificial Sequence
  Description of Artificial Sequence: Synthetic oligonucleotide
uggaugaauuuugaaaguu

SEQ ID NO: 529653 - RNA, 19 nt, Artificial Sequence
  Description of Artificial Sequence: Synthetic oligonucleotide
aaguauuuguauggauagu

SEQ ID NO: 529654 - RNA, 19 nt, Artificial Sequence
  Description of Artificial Sequence: Synthetic oligonucleotide
gaaugacggauuuccaaaa

SEQ ID NO: 529655 - RNA, 19 nt, Artificial Sequence
  Description of Artificial Sequence: Synthetic oligonucleotide
acacagcuaagaauuagug

SEQ ID NO: 529656 - RNA, 19 nt, Artificial Sequence
  Description of Artificial Sequence: Synthetic oligonucleotide
uuuugcuggccuuggcgca

SEQ ID NO: 529657 - RNA, 19 nt, Artificial Sequence
  Description of Artificial Sequence: Synthetic oligonucleotide
ccaccuaugaacaagucca

SEQ ID NO: 529658 - RNA, 19 nt, Artificial Sequence
  Description of Artificial Sequence: Synthetic oligonucleotide
ucgaaugauggcacugaaa

SEQ ID NO: 529659 - RNA, 19 nt, Artificial Sequence
  Description of Artificial Sequence: Synthetic oligonucleotide
uagaacacuugaauaccua

SEQ ID NO: 529660 - RNA, 19 nt, Artificial Sequence
  Description of Artificial Sequence: Synthetic oligonucleotide
acguucucccggcaguagg

SEQ ID NO: 529661 - RNA, 19 nt, Artificial Sequence
  Description of Artificial Sequence: Synthetic oligonucleotide
acuauauggaucacucacu

SEQ ID NO: 529662 - RNA, 19 nt, Artificial Sequence
  Description of Artificial Sequence: Synthetic oligonucleotide
cuaagaagcacacugguuu

SEQ ID NO: 529663 - RNA, 19 nt, Artificial Sequence
  Description of Artificial Sequence: Synthetic oligonucleotide
auaacugauugccuuuguu

SEQ ID NO: 529664 - RNA, 19 nt, Artificial Sequence
  Description of Artificial Sequence: Synthetic oligonucleotide
uuucucucucucucucugc

SEQ ID NO: 529665 - RNA, 19 nt, Artificial Sequence
  Description of Artificial Sequence: Synthetic oligonucleotide
gugagacacacguucuccc

SEQ ID NO: 529666 - RNA, 19 nt, Artificial Sequence
  Description of Artificial Sequence: Synthetic oligonucleotide
uucagcaauuuagguuugg

SEQ ID NO: 529667 - RNA, 19 nt, Artificial Sequence
  Description of Artificial Sequence: Synthetic oligonucleotide
auaguccaaagaagggagg

SEQ ID NO: 529668 - RNA, 19 nt, Artificial Sequence
  Description of Artificial Sequence: Synthetic oligonucleotide
aguaggcaaucuggaauac

SEQ ID NO: 529669 - RNA, 19 nt, Artificial Sequence
  Description of Artificial Sequence: Synthetic oligonucleotide
caccuagcuuuuaaauccc

SEQ ID NO: 529670 - RNA, 19 nt, Artificial Sequence
  Description of Artificial Sequence: Synthetic oligonucleotide
cuuaauaucccugcaucga

SEQ ID NO: 529671 - RNA, 19 nt, Artificial Sequence
  Description of Artificial Sequence: Synthetic oligonucleotide
gcacggaugucauagaaga

SEQ ID NO: 529672 - RNA, 19 nt, Artificial Sequence
  Description of Artificial Sequence: Synthetic oligonucleotide
uucggccuuagcauacaga

SEQ ID NO: 529673 - RNA, 19 nt, Artificial Sequence
  Description of Artificial Sequence: Synthetic oligonucleotide
aacgucuagaaaagugcgu

SEQ ID NO: 529674 - RNA, 19 nt, Artificial Sequence
  Description of Artificial Sequence: Synthetic oligonucleotide
aacgcacgccagugccucc

SEQ ID NO: 529675 - RNA, 19 nt, Artificial Sequence
  Description of Artificial Sequence: Synthetic oligonucleotide
cuccauuucucucucucuc

SEQ ID NO: 529676 - RNA, 19 nt, Artificial Sequence
  Description of Artificial Sequence: Synthetic oligonucleotide
auaucccugcaucgaauga

SEQ ID NO: 529677 - RNA, 19 nt, Artificial Sequence
  Description of Artificial Sequence: Synthetic oligonucleotide
aucacaccuagcuuuuaaa

SEQ ID NO: 529678 - RNA, 19 nt, Artificial Sequence
  Description of Artificial Sequence: Synthetic oligonucleotide
gcaaaugcaugccagaugu

SEQ ID NO: 529679 - RNA, 19 nt, Artificial Sequence
  Description of Artificial Sequence: Synthetic oligonucleotide
caagauucuaugacaacua

SEQ ID NO: 529680 - RNA, 19 nt, Artificial Sequence
  Description of Artificial Sequence: Synthetic oligonucleotide
uuuaaauccccagcuccuc

SEQ ID NO: 529681 - RNA, 19 nt, Artificial Sequence
  Description of Artificial Sequence: Synthetic oligonucleotide
gaauaccuaaaccguccuc

SEQ ID NO: 529682 - RNA, 19 nt, Artificial Sequence
  Description of Artificial Sequence: Synthetic oligonucleotide
guaggcaaucuggaauacg

SEQ ID NO: 529683 - RNA, 19 nt, Artificial Sequence
  Description of Artificial Sequence: Synthetic oligonucleotide
acaccugucuagcauccca

SEQ ID NO: 529684 - RNA, 19 nt, Artificial Sequence
  Description of Artificial Sequence: Synthetic oligonucleotide
auacaccaugaucacaauu

SEQ ID NO: 529685 - RNA, 19 nt, Artificial Sequence
  Description of Artificial Sequence: Synthetic oligonucleotide
acuccuaagucuccuuuaa

SEQ ID NO: 529686 - RNA, 19 nt, Artificial Sequence
  Description of Artificial Sequence: Synthetic oligonucleotide
aaauccccagcuccucuau

SEQ ID NO: 529687 - RNA, 19 nt, Artificial Sequence
  Description of Artificial Sequence: Synthetic oligonucleotide
caaagcgacuucugacagc

SEQ ID NO: 529688 - RNA, 19 nt, Artificial Sequence
  Description of Artificial Sequence: Synthetic oligonucleotide
ccaauuaguagaacacuug

SEQ ID NO: 529689 - RNA, 19 nt, Artificial Sequence
  Description of Artificial Sequence: Synthetic oligonucleotide
ucuauccacaaguggugau

SEQ ID NO: 529690 - RNA, 19 nt, Artificial Sequence
  Description of Artificial Sequence: Synthetic oligonucleotide
acuuuaaguauggaucuuu

SEQ ID NO: 529691 - RNA, 19 nt, Artificial Sequence
  Description of Artificial Sequence: Synthetic oligonucleotide
uggagccuauaaagauggg

SEQ ID NO: 529692 - RNA, 19 nt, Artificial Sequence
  Description of Artificial Sequence: Synthetic oligonucleotide
uaucccugcaucgaaugau

SEQ ID NO: 529693 - RNA, 19 nt, Artificial Sequence
  Description of Artificial Sequence: Synthetic oligonucleotide
caguuuugagcaaggccug

SEQ ID NO: 529694 - RNA, 19 nt, Artificial Sequence
  Description of Artificial Sequence: Synthetic oligonucleotide
cuaugacaacuacuuucag

SEQ ID NO: 529695 - RNA, 19 nt, Artificial Sequence
  Description of Artificial Sequence: Synthetic oligonucleotide
uaccuggauugguaguggc

SEQ ID NO: 529696 - RNA, 19 nt, Artificial Sequence
  Description of Artificial Sequence: Synthetic oligonucleotide
aguuuugagcaaggccugg

SEQ ID NO: 529697 - RNA, 19 nt, Artificial Sequence
  Description of Artificial Sequence: Synthetic oligonucleotide
accuagcuuuuaaaucccc

SEQ ID NO: 529698 - RNA, 19 nt, Artificial Sequence
  Description of Artificial Sequence: Synthetic oligonucleotide
ugguacugaacaacaugua

SEQ ID NO: 529699 - RNA, 19 nt, Artificial Sequence
  Description of Artificial Sequence: Synthetic oligonucleotide
cucuaggacggaugugagc

SEQ ID NO: 529700 - RNA, 19 nt, Artificial Sequence
  Description of Artificial Sequence: Synthetic oligonucleotide
guuguagcagugaguguag

SEQ ID NO: 529701 - RNA, 19 nt, Artificial Sequence
  Description of Artificial Sequence: Synthetic oligonucleotide
ugauugccuuuguucggcc

SEQ ID NO: 529702 - RNA, 19 nt, Artificial Sequence
  Description of Artificial Sequence: Synthetic oligonucleotide
auacuccuaagucuccuuu

SEQ ID NO: 529703 - RNA, 19 nt, Artificial Sequence
  Description of Artificial Sequence: Synthetic oligonucleotide
cuagcaucccauuaccucu

SEQ ID NO: 529704 - RNA, 19 nt, Artificial Sequence
  Description of Artificial Sequence: Synthetic oligonucleotide
cggauuuccaaaaguaggc

SEQ ID NO: 529705 - RNA, 19 nt, Artificial Sequence
  Description of Artificial Sequence: Synthetic oligonucleotide
caccuuagcuccagaggcc

SEQ ID NO: 529706 - RNA, 19 nt, Artificial Sequence
  Description of Artificial Sequence: Synthetic oligonucleotide
cuaaaccguccucaucaac

SEQ ID NO: 529707 - RNA, 19 nt, Artificial Sequence
  Description of Artificial Sequence: Synthetic oligonucleotide
ucgaauuacuuuggagccu

SEQ ID NO: 529708 - RNA, 19 nt, Artificial Sequence
  Description of Artificial Sequence: Synthetic oligonucleotide
ugcaucgaaugauggcacu

SEQ ID NO: 529709 - RNA, 19 nt, Artificial Sequence
  Description of Artificial Sequence: Synthetic oligonucleotide
aggaaacauggcucaguca

SEQ ID NO: 529710 - RNA, 19 nt, Artificial Sequence
  Description of Artificial Sequence: Synthetic oligonucleotide
uacuccuaagucuccuuua

SEQ ID NO: 529711 - RNA, 19 nt, Artificial Sequence
  Description of Artificial Sequence: Synthetic oligonucleotide
uauucccaccuaugaacaa

SEQ ID NO: 529712 - RNA, 19 nt, Artificial Sequence
  Description of Artificial Sequence: Synthetic oligonucleotide
cucuaucugaaaacauaga

SEQ ID NO: 529713 - RNA, 19 nt, Artificial Sequence
  Description of Artificial Sequence: Synthetic oligonucleotide
ucacaguaggugagacaca

SEQ ID NO: 529714 - RNA, 19 nt, Artificial Sequence
  Description of Artificial Sequence: Synthetic oligonucleotide
acgucuagaaaagugcguu

SEQ ID NO: 529715 - RNA, 19 nt, Artificial Sequence
  Description of Artificial Sequence: Synthetic oligonucleotide
uggauugguaguggcuuug

SEQ ID NO: 529716 - RNA, 19 nt, Artificial Sequence
  Description of Artificial Sequence: Synthetic oligonucleotide
augcaugccagauguuuau

SEQ ID NO: 529717 - RNA, 19 nt, Artificial Sequence
  Description of Artificial Sequence: Synthetic oligonucleotide
ucucucucucucugcuaag

SEQ ID NO: 529718 - RNA, 19 nt, Artificial Sequence
  Description of Artificial Sequence: Synthetic oligonucleotide
gugaguguagagggcauug

SEQ ID NO: 529719 - RNA, 19 nt, Artificial Sequence
  Description of Artificial Sequence: Synthetic oligonucleotide
auauagacccaagauucua

SEQ ID NO: 529720 - RNA, 19 nt, Artificial Sequence
  Description of Artificial Sequence: Synthetic oligonucleotide
ggauaguccaaagaaggga

SEQ ID NO: 529721 - RNA, 19 nt, Artificial Sequence
  Description of Artificial Sequence: Synthetic oligonucleotide
auaccuaaaccguccucau

SEQ ID NO: 529722 - RNA, 19 nt, Artificial Sequence
  Description of Artificial Sequence: Synthetic oligonucleotide
guacuaaggcaagaaguga

SEQ ID NO: 529723 - RNA, 19 nt, Artificial Sequence
  Description of Artificial Sequence: Synthetic oligonucleotide
acugaacaacauguagugu

SEQ ID NO: 529724 - RNA, 19 nt, Artificial Sequence
  Description of Artificial Sequence: Synthetic oligonucleotide
ccagucuauaccucagagc

SEQ ID NO: 529725 - RNA, 19 nt, Artificial Sequence
  Description of Artificial Sequence: Synthetic oligonucleotide
cccauuaccucuauuuauc

SEQ ID NO: 529726 - RNA, 19 nt, Artificial Sequence
  Description of Artificial Sequence: Synthetic oligonucleotide
caguaggugagacacacgu

SEQ ID NO: 529727 - RNA, 19 nt, Artificial Sequence
  Description of Artificial Sequence: Synthetic oligonucleotide
gagacccguggccugugcc

SEQ ID NO: 529728 - RNA, 19 nt, Artificial Sequence
  Description of Artificial Sequence: Synthetic oligonucleotide
cauuccaggccuaacacau

SEQ ID NO: 529729 - RNA, 19 nt, Artificial Sequence
  Description of Artificial Sequence: Synthetic oligonucleotide
agugcguuuugcaccaaca

SEQ ID NO: 529730 - RNA, 19 nt, Artificial Sequence
  Description of Artificial Sequence: Synthetic oligonucleotide
ucgcacuuugcgguuaccu

SEQ ID NO: 529731 - RNA, 19 nt, Artificial Sequence
  Description of Artificial Sequence: Synthetic oligonucleotide
uuuccaccccgucugccau

SEQ ID NO: 529732 - RNA, 19 nt, Artificial Sequence
  Description of Artificial Sequence: Synthetic oligonucleotide
ggcaaucuggaauacggaa

SEQ ID NO: 529733 - RNA, 19 nt, Artificial Sequence
  Description of Artificial Sequence: Synthetic oligonucleotide
auccagucuauaccucaga

SEQ ID NO: 529734 - RNA, 19 nt, Artificial Sequence
  Description of Artificial Sequence: Synthetic oligonucleotide
gaaacauggcucagucaca

SEQ ID NO: 529735 - RNA, 19 nt, Artificial Sequence
  Description of Artificial Sequence: Synthetic oligonucleotide
gguuugguacugaacaaca

SEQ ID NO: 529736 - RNA, 19 nt, Artificial Sequence
  Description of Artificial Sequence: Synthetic oligonucleotide
uugcgguuaccuggauugg

SEQ ID NO: 529737 - RNA, 19 nt, Artificial Sequence
  Description of Artificial Sequence: Synthetic oligonucleotide
auagacaggaaggcccgca

SEQ ID NO: 529738 - RNA, 19 nt, Artificial Sequence
  Description of Artificial Sequence: Synthetic oligonucleotide
agucuauaccucagagcag

SEQ ID NO: 529739 - RNA, 19 nt, Artificial Sequence
  Description of Artificial Sequence: Synthetic oligonucleotide
cagagaacgcacgccagug

SEQ ID NO: 529740 - RNA, 19 nt, Artificial Sequence
  Description of Artificial Sequence: Synthetic oligonucleotide
guucggccuuagcauacag

SEQ ID NO: 529741 - RNA, 19 nt, Artificial Sequence
  Description of Artificial Sequence: Synthetic oligonucleotide
accggcaacguaauucucu

SEQ ID NO: 529742 - RNA, 19 nt, Artificial Sequence
  Description of Artificial Sequence: Synthetic oligonucleotide
caucucuggccaguuguag

SEQ ID NO: 529743 - RNA, 19 nt, Artificial Sequence
  Description of Artificial Sequence: Synthetic oligonucleotide
cuuaacucaaacagauuuu

SEQ ID NO: 529744 - RNA, 19 nt, Artificial Sequence
  Description of Artificial Sequence: Synthetic oligonucleotide
ggccaguuguagcagugag

SEQ ID NO: 529745 - RNA, 19 nt, Artificial Sequence
  Description of Artificial Sequence: Synthetic oligonucleotide
gauauagacccaagauucu

SEQ ID NO: 529746 - RNA, 19 nt, Artificial Sequence
  Description of Artificial Sequence: Synthetic oligonucleotide
caaguggugauaguacuaa

SEQ ID NO: 529747 - RNA, 19 nt, Artificial Sequence
  Description of Artificial Sequence: Synthetic oligonucleotide
ccacaaguggugauaguac

SEQ ID NO: 529748 - RNA, 19 nt, Artificial Sequence
  Description of Artificial Sequence: Synthetic oligonucleotide
ggccaaaucuucacaguag

SEQ ID NO: 529749 - RNA, 19 nt, Artificial Sequence
  Description of Artificial Sequence: Synthetic oligonucleotide
uagcaucccauuaccucua

SEQ ID NO: 529750 - RNA, 19 nt, Artificial Sequence
  Description of Artificial Sequence: Synthetic oligonucleotide
accuuagcuccagaggccu

SEQ ID NO: 529751 - RNA, 19 nt, Artificial Sequence
  Description of Artificial Sequence: Synthetic oligonucleotide
ccuccacaucucuaggacg

SEQ ID NO: 529752 - RNA, 19 nt, Artificial Sequence
  Description of Artificial Sequence: Synthetic oligonucleotide
gagggcgcaggaaagaagu

SEQ ID NO: 529753 - RNA, 19 nt, Artificial Sequence
  Description of Artificial Sequence: Synthetic oligonucleotide
ugcgguuaccuggauuggu

SEQ ID NO: 529754 - RNA, 19 nt, Artificial Sequence
  Description of Artificial Sequence: Synthetic oligonucleotide
cucucucucucucugcuaa

SEQ ID NO: 529755 - RNA, 19 nt, Artificial Sequence
  Description of Artificial Sequence: Synthetic oligonucleotide
cacaaguggugauaguacu

SEQ ID NO: 529756 - RNA, 19 nt, Artificial Sequence
  Description of Artificial Sequence: Synthetic oligonucleotide
gcaauuuagguuugguacu

SEQ ID NO: 529757 - RNA, 19 nt, Artificial Sequence
  Description of Artificial Sequence: Synthetic oligonucleotide
acaacuacuuucagauaau

SEQ ID NO: 529758 - RNA, 19 nt, Artificial Sequence
  Description of Artificial Sequence: Synthetic oligonucleotide
cagcuaagaauuaguggaa

SEQ ID NO: 529759 - RNA, 19 nt, Artificial Sequence
  Description of Artificial Sequence: Synthetic oligonucleotide
caggugagcuugagcuucc

SEQ ID NO: 529760 - RNA, 19 nt, Artificial Sequence
  Description of Artificial Sequence: Synthetic oligonucleotide
aggacggaugugagcauag

SEQ ID NO: 529761 - RNA, 19 nt, Artificial Sequence
  Description of Artificial Sequence: Synthetic oligonucleotide
ugggaucccacagcauaca

SEQ ID NO: 529762 - RNA, 19 nt, Artificial Sequence
  Description of Artificial Sequence: Synthetic oligonucleotide
ccuaugaacaaguccaaua

SEQ ID NO: 529763 - RNA, 19 nt, Artificial Sequence
  Description of Artificial Sequence: Synthetic oligonucleotide
gugcguuuugcaccaacaa

SEQ ID NO: 529764 - RNA, 19 nt, Artificial Sequence
  Description of Artificial Sequence: Synthetic oligonucleotide
gaacgcacgccagugccuc

SEQ ID NO: 529765 - RNA, 19 nt, Artificial Sequence
  Description of Artificial Sequence: Synthetic oligonucleotide
agauuuggauauagaccca

SEQ ID NO: 529766 - RNA, 19 nt, Artificial Sequence
  Description of Artificial Sequence: Synthetic oligonucleotide
acaaguggugauaguacua

SEQ ID NO: 529767 - RNA, 19 nt, Artificial Sequence
  Description of Artificial Sequence: Synthetic oligonucleotide
ggauugguaguggcuuugg

SEQ ID NO: 529768 - RNA, 19 nt, Artificial Sequence
  Description of Artificial Sequence: Synthetic oligonucleotide
caacaccaaugcaaaugca

SEQ ID NO: 529769 - RNA, 19 nt, Artificial Sequence
  Description of Artificial Sequence: Synthetic oligonucleotide
auaccucagagcaggguau

SEQ ID NO: 529770 - RNA, 19 nt, Artificial Sequence
  Description of Artificial Sequence: Synthetic oligonucleotide
uaggacggaugugagcaua

SEQ ID NO: 529771 - RNA, 19 nt, Artificial Sequence
  Description of Artificial Sequence: Synthetic oligonucleotide
ggauguuuugcuggccuug

SEQ ID NO: 529772 - RNA, 19 nt, Artificial Sequence
  Description of Artificial Sequence: Synthetic oligonucleotide
guguagcaacaccaaugca

SEQ ID NO: 529773 - RNA, 19 nt, Artificial Sequence
  Description of Artificial Sequence: Synthetic oligonucleotide
ucucucucucucucugcua

SEQ ID NO: 529774 - RNA, 19 nt, Artificial Sequence
  Description of Artificial Sequence: Synthetic oligonucleotide
ccagauguuuauggaaaag

SEQ ID NO: 529775 - RNA, 19 nt, Artificial Sequence
  Description of Artificial Sequence: Synthetic oligonucleotide
auccacaaguggugauagu

SEQ ID NO: 529776 - RNA, 19 nt, Artificial Sequence
  Description of Artificial Sequence: Synthetic oligonucleotide
cuggaauacggaauguauu

SEQ ID NO: 529777 - RNA, 19 nt, Artificial Sequence
  Description of Artificial Sequence: Synthetic oligonucleotide
uacaccugucuagcauccc

SEQ ID NO: 529778 - RNA, 19 nt, Artificial Sequence
  Description of Artificial Sequence: Synthetic oligonucleotide
gaaggcccgcauccuugug

SEQ ID NO: 529779 - RNA, 19 nt, Artificial Sequence
  Description of Artificial Sequence: Synthetic oligonucleotide
gauugccuuuguucggccu

SEQ ID NO: 529780 - RNA, 19 nt, Artificial Sequence
  Description of Artificial Sequence: Synthetic oligonucleotide
cacuuauaacagaguuuga

SEQ ID NO: 529781 - RNA, 19 nt, Artificial Sequence
  Description of Artificial Sequence: Synthetic oligonucleotide
ggccuaacacauccugccc

SEQ ID NO: 529782 - RNA, 19 nt, Artificial Sequence
  Description of Artificial Sequence: Synthetic oligonucleotide
caaguccaauacaccuguc

SEQ ID NO: 529783 - RNA, 19 nt, Artificial Sequence
  Description of Artificial Sequence: Synthetic oligonucleotide
guugccguggaggccugag

SEQ ID NO: 529784 - RNA, 19 nt, Artificial Sequence
  Description of Artificial Sequence: Synthetic oligonucleotide
ccucucgggagcacagugg

SEQ ID NO: 529785 - RNA, 19 nt, Artificial Sequence
  Description of Artificial Sequence: Synthetic oligonucleotide
aggcaaucuggaauacgga

SEQ ID NO: 529786 - RNA, 19 nt, Artificial Sequence
  Description of Artificial Sequence: Synthetic oligonucleotide
ggacacucagagaacgcac

SEQ ID NO: 529787 - RNA, 19 nt, Artificial Sequence
  Description of Artificial Sequence: Synthetic oligonucleotide
uccaccccgucugccauac

SEQ ID NO: 529788 - RNA, 19 nt, Artificial Sequence
  Description of Artificial Sequence: Synthetic oligonucleotide
gcaucgaaugauggcacug

SEQ ID NO: 529789 - RNA, 19 nt, Artificial Sequence
  Description of Artificial Sequence: Synthetic oligonucleotide
ggaaaguauuuguauggau

SEQ ID NO: 529790 - RNA, 19 nt, Artificial Sequence
  Description of Artificial Sequence: Synthetic oligonucleotide
gacacacguucucccggca

SEQ ID NO: 529791 - RNA, 19 nt, Artificial Sequence
  Description of Artificial Sequence: Synthetic oligonucleotide
guucucccggcaguagggc

SEQ ID NO: 529792 - RNA, 19 nt, Artificial Sequence
  Description of Artificial Sequence: Synthetic oligonucleotide
gggccaaaucuucacagua

SEQ ID NO: 529793 - RNA, 19 nt, Artificial Sequence
  Description of Artificial Sequence: Synthetic oligonucleotide
cuauccacaaguggugaua

SEQ ID NO: 529794 - RNA, 19 nt, Artificial Sequence
  Description of Artificial Sequence: Synthetic oligonucleotide
cugaaugcaagggcucgca

SEQ ID NO: 529795 - RNA, 19 nt, Artificial Sequence
  Description of Artificial Sequence: Synthetic oligonucleotide
ccaagauucuaugacaacu

SEQ ID NO: 529796 - RNA, 19 nt, Artificial Sequence
  Description of Artificial Sequence: Synthetic oligonucleotide
cucucucucucugcuaaga

SEQ ID NO: 529797 - RNA, 19 nt, Artificial Sequence
  Description of Artificial Sequence: Synthetic oligonucleotide
gcacagauauguaggaaaa

SEQ ID NO: 529798 - RNA, 19 nt, Artificial Sequence
  Description of Artificial Sequence: Synthetic oligonucleotide
agaacgcacgccagugccu

SEQ ID NO: 529799 - RNA, 19 nt, Artificial Sequence
  Description of Artificial Sequence: Synthetic oligonucleotide
ugccuuuguucggccuuag

SEQ ID NO: 529800 - RNA, 19 nt, Artificial Sequence
  Description of Artificial Sequence: Synthetic oligonucleotide
ccauuucucucucucucuc

SEQ ID NO: 529801 - RNA, 19 nt, Artificial Sequence
  Description of Artificial Sequence: Synthetic oligonucleotide
aguaggugagacacacguu

SEQ ID NO: 529802 - RNA, 19 nt, Artificial Sequence
  Description of Artificial Sequence: Synthetic oligonucleotide
ggcaguagggcagccucag

SEQ ID NO: 529803 - RNA, 19 nt, Artificial Sequence
  Description of Artificial Sequence: Synthetic oligonucleotide
cauuucucucucucucucu

SEQ ID NO: 529804 - RNA, 19 nt, Artificial Sequence
  Description of Artificial Sequence: Synthetic oligonucleotide
ggaacuucugggcacggau

SEQ ID NO: 529805 - RNA, 19 nt, Artificial Sequence
  Description of Artificial Sequence: Synthetic oligonucleotide
gccagauguuuauggaaaa

SEQ ID NO: 529806 - RNA, 19 nt, Artificial Sequence
  Description of Artificial Sequence: Synthetic oligonucleotide
aggaacuucugggcacgga

SEQ ID NO: 529807 - RNA, 19 nt, Artificial Sequence
  Description of Artificial Sequence: Synthetic oligonucleotide
cugccauacauucuauauu

SEQ ID NO: 529808 - RNA, 19 nt, Artificial Sequence
  Description of Artificial Sequence: Synthetic oligonucleotide
cacguucucccggcaguag

SEQ ID NO: 529809 - RNA, 19 nt, Artificial Sequence
  Description of Artificial Sequence: Synthetic oligonucleotide
cgguuaccuggauugguag

SEQ ID NO: 529810 - RNA, 19 nt, Artificial Sequence
  Description of Artificial Sequence: Synthetic oligonucleotide
gcugaaugcaagggcucgc

SEQ ID NO: 529811 - RNA, 19 nt, Artificial Sequence
  Description of Artificial Sequence: Synthetic oligonucleotide
ggccuccacaucucuagga

SEQ ID NO: 529812 - RNA, 19 nt, Artificial Sequence
  Description of Artificial Sequence: Synthetic oligonucleotide
caccggcaacguaauucuc

SEQ ID NO: 529813 - RNA, 19 nt, Artificial Sequence
  Description of Artificial Sequence: Synthetic oligonucleotide
gacccguggccugugccca

SEQ ID NO: 529814 - RNA, 19 nt, Artificial Sequence
  Description of Artificial Sequence: Synthetic oligonucleotide
gguuaccuggauugguagu

SEQ ID NO: 529815 - RNA, 19 nt, Artificial Sequence
  Description of Artificial Sequence: Synthetic oligonucleotide
gcgcaggaaagaagucugg

SEQ ID NO: 529816 - RNA, 19 nt, Artificial Sequence
  Description of Artificial Sequence: Synthetic oligonucleotide
cuccucuaucugaaaacau

SEQ ID NO: 529817 - RNA, 19 nt, Artificial Sequence
  Description of Artificial Sequence: Synthetic oligonucleotide
gcaaucuggaauacggaau

SEQ ID NO: 529818 - RNA, 19 nt, Artificial Sequence
  Description of Artificial Sequence: Synthetic oligonucleotide
gucuagcaucccauuaccu

SEQ ID NO: 529819 - RNA, 19 nt, Artificial Sequence
  Description of Artificial Sequence: Synthetic oligonucleotide
cucgcacuuugcgguuacc

SEQ ID NO: 529820 - RNA, 19 nt, Artificial Sequence
  Description of Artificial Sequence: Synthetic oligonucleotide
acacguucucccggcagua

SEQ ID NO: 529821 - RNA, 19 nt, Artificial Sequence
  Description of Artificial Sequence: Synthetic oligonucleotide
cacaguggugggauguuuu

SEQ ID NO: 529822 - RNA, 19 nt, Artificial Sequence
  Description of Artificial Sequence: Synthetic oligonucleotide
ccauuaccucuauuuaucu

SEQ ID NO: 529823 - RNA, 19 nt, Artificial Sequence
  Description of Artificial Sequence: Synthetic oligonucleotide
gccuuuguucggccuuagc

SEQ ID NO: 529824 - RNA, 19 nt, Artificial Sequence
  Description of Artificial Sequence: Synthetic oligonucleotide
caccccgucugccauacau

SEQ ID NO: 529825 - RNA, 19 nt, Artificial Sequence
  Description of Artificial Sequence: Synthetic oligonucleotide
cuggaccgguugcagaccu

SEQ ID NO: 529826 - RNA, 19 nt, Artificial Sequence
  Description of Artificial Sequence: Synthetic oligonucleotide
ccgucugccauacauucua

SEQ ID NO: 529827 - RNA, 19 nt, Artificial Sequence
  Description of Artificial Sequence: Synthetic oligonucleotide
caccugucuagcaucccau

SEQ ID NO: 529828 - RNA, 19 nt, Artificial Sequence
  Description of Artificial Sequence: Synthetic oligonucleotide
gccuuggcgcagauccagg

SEQ ID NO: 529829 - RNA, 19 nt, Artificial Sequence
  Description of Artificial Sequence: Synthetic oligonucleotide
ggaauacggaauguauuuu

SEQ ID NO: 529830 - RNA, 19 nt, Artificial Sequence
  Description of Artificial Sequence: Synthetic oligonucleotide
ccucaucaacugagauuug

SEQ ID NO: 529831 - RNA, 19 nt, Artificial Sequence
  Description of Artificial Sequence: Synthetic oligonucleotide
gcgacuucugacagcucca

SEQ ID NO: 529832 - RNA, 19 nt, Artificial Sequence
  Description of Artificial Sequence: Synthetic oligonucleotide
cccgcauccuugugccaag

SEQ ID NO: 529833 - RNA, 19 nt, Artificial Sequence
  Description of Artificial Sequence: Synthetic oligonucleotide
ggcgcagauccaggaauga

SEQ ID NO: 529834 - RNA, 19 nt, Artificial Sequence
  Description of Artificial Sequence: Synthetic oligonucleotide
gcaaggccuggcuccuuuc

SEQ ID NO: 529835 - RNA, 19 nt, Artificial Sequence
  Description of Artificial Sequence: Synthetic oligonucleotide
cagagacccguggccugug

SEQ ID NO: 529836 - RNA, 19 nt, Artificial Sequence
  Description of Artificial Sequence: Synthetic oligonucleotide
ccuaaaccguccucaucaa

SEQ ID NO: 529837 - RNA, 19 nt, Artificial Sequence
  Description of Artificial Sequence: Synthetic oligonucleotide
ccggcaacguaauucucua

SEQ ID NO: 529838 - RNA, 19 nt, Artificial Sequence
  Description of Artificial Sequence: Synthetic oligonucleotide
ggaaggcccgcauccuugu

SEQ ID NO: 529839 - RNA, 19 nt, Artificial Sequence
  Description of Artificial Sequence: Synthetic oligonucleotide
cggcaacguaauucucuag

SEQ ID NO: 529840 - RNA, 19 nt, Artificial Sequence
  Description of Artificial Sequence: Synthetic oligonucleotide
cuaggacggaugugagcau

SEQ ID NO: 529841 - RNA, 19 nt, Artificial Sequence
  Description of Artificial Sequence: Synthetic oligonucleotide
ggacggaugugagcauaga

SEQ ID NO: 529842 - RNA, 19 nt, Artificial Sequence
  Description of Artificial Sequence: Synthetic oligonucleotide
gcgguuaccuggauuggua

SEQ ID NO: 529843 - RNA, 19 nt, Artificial Sequence
  Description of Artificial Sequence: Synthetic oligonucleotide
cgaauuacuuuggagccua

SEQ ID NO: 529844 - RNA, 19 nt, Artificial Sequence
  Description of Artificial Sequence: Synthetic oligonucleotide
gggauguuuugcuggccuu

SEQ ID NO: 529845 - RNA, 19 nt, Artificial Sequence
  Description of Artificial Sequence: Synthetic oligonucleotide
gcgcagauccaggaaugaa

SEQ ID NO: 529846 - RNA, 19 nt, Artificial Sequence
  Description of Artificial Sequence: Synthetic oligonucleotide
gcccgcauccuugugccaa

SEQ ID NO: 529847 - RNA, 19 nt, Artificial Sequence
  Description of Artificial Sequence: Synthetic oligonucleotide
ccguggccugugcccacgg

SEQ ID NO: 529848 - RNA, 19 nt, Artificial Sequence
  Description of Artificial Sequence: Synthetic oligonucleotide
cgguugcagaccucuccuc

SEQ ID NO: 529849 - RNA, 19 nt, Artificial Sequence
  Description of Artificial Sequence: Synthetic oligonucleotide
cccguggccugugcccacg

SEQ ID NO: 529850 - RNA, 19 nt, Artificial Sequence
  Description of Artificial Sequence: Synthetic oligonucleotide
ggcccgcauccuugugcca

SEQ ID NO: 529851 - RNA, 19 nt, Artificial Sequence
  Description of Artificial Sequence: Synthetic oligonucleotide
cggccuuagcauacagaua

SEQ ID NO: 529852 - RNA, 19 nt, Artificial Sequence
  Description of Artificial Sequence: Synthetic oligonucleotide
gggcucgcacuuugcgguu

SEQ ID NO: 529853 - RNA, 19 nt, Artificial Sequence
  Description of Artificial Sequence: Synthetic oligonucleotide
ccaccccgucugccauaca

SEQ ID NO: 529854 - RNA, 19 nt, Artificial Sequence
  Description of Artificial Sequence: Synthetic oligonucleotide
ccacaccggcaacguaauu

SEQ ID NO: 529855 - RNA, 19 nt, Artificial Sequence
  Description of Artificial Sequence: Synthetic oligonucleotide
cgcacgccagugccucccu

SEQ ID NO: 529856 - RNA, 19 nt, Artificial Sequence
  Description of Artificial Sequence: Synthetic oligonucleotide
ucuacugauccuaagaucc

SEQ ID NO: 529857 - RNA, 19 nt, Artificial Sequence
  Description of Artificial Sequence: Synthetic oligonucleotide
aaacuuaguagcuugagca

SEQ ID NO: 529858 - RNA, 19 nt, Artificial Sequence
  Description of Artificial Sequence: Synthetic oligonucleotide
ucggggaugacucugaugg

SEQ ID NO: 529859 - RNA, 19 nt, Artificial Sequence
  Description of Artificial Sequence: Synthetic oligonucleotide
ucuugugauaauuugacag

SEQ ID NO: 529860 - RNA, 19 nt, Artificial Sequence
  Description of Artificial Sequence: Synthetic oligonucleotide
uguauucucgcucagacug

SEQ ID NO: 529861 - RNA, 19 nt, Artificial Sequence
  Description of Artificial Sequence: Synthetic oligonucleotide
aguaguaccaaugagcugg

SEQ ID NO: 529862 - RNA, 19 nt, Artificial Sequence
  Description of Artificial Sequence: Synthetic oligonucleotide
uugaccucgaggaaaaugg

SEQ ID NO: 529863 - RNA, 19 nt, Artificial Sequence
  Description of Artificial Sequence: Synthetic oligonucleotide
uggacaacauuccagaacc

SEQ ID NO: 529864 - RNA, 19 nt, Artificial Sequence
  Description of Artificial Sequence: Synthetic oligonucleotide
accaagaauauauugaugu

SEQ ID NO: 529865 - RNA, 19 nt, Artificial Sequence
  Description of Artificial Sequence: Synthetic oligonucleotide
aaugauaccaugcgccagg

SEQ ID NO: 529866 - RNA, 19 nt, Artificial Sequence
  Description of Artificial Sequence: Synthetic oligonucleotide
acuuuaucaguccagugac

SEQ ID NO: 529867 - RNA, 19 nt, Artificial Sequence
  Description of Artificial Sequence: Synthetic oligonucleotide
aacacacucaacuugauuu

SEQ ID NO: 529868 - RNA, 19 nt, Artificial Sequence
  Description of Artificial Sequence: Synthetic oligonucleotide
aacguuucuuaugaggccc

SEQ ID NO: 529869 - RNA, 19 nt, Artificial Sequence
  Description of Artificial Sequence: Synthetic oligonucleotide
agaauuugacacuccaugg

SEQ ID NO: 529870 - RNA, 19 nt, Artificial Sequence
  Description of Artificial Sequence: Synthetic oligonucleotide
ugaguaguaccaaugagcu

SEQ ID NO: 529871 - RNA, 19 nt, Artificial Sequence
  Description of Artificial Sequence: Synthetic oligonucleotide
aaguacacggccuuggaug

SEQ ID NO: 529872 - RNA, 19 nt, Artificial Sequence
  Description of Artificial Sequence: Synthetic oligonucleotide
aguaguaucgaguuggggu

SEQ ID NO: 529873 - RNA, 19 nt, Artificial Sequence
  Description of Artificial Sequence: Synthetic oligonucleotide
agaauaucgaggaagcagc

SEQ ID NO: 529874 - RNA, 19 nt, Artificial Sequence
  Description of Artificial Sequence: Synthetic oligonucleotide
auuuaagagacccauggga

SEQ ID NO: 529875 - RNA, 19 nt, Artificial Sequence
  Description of Artificial Sequence: Synthetic oligonucleotide
uuacuggggaacuucacgg

SEQ ID NO: 529876 - RNA, 19 nt, Artificial Sequence
  Description of Artificial Sequence: Synthetic oligonucleotide
acuguugacguuaugacac

SEQ ID NO: 529877 - RNA, 19 nt, Artificial Sequence
  Description of Artificial Sequence: Synthetic oligonucleotide
aauuugacacuccaugggu

SEQ ID NO: 529878 - RNA, 19 nt, Artificial Sequence
  Description of Artificial Sequence: Synthetic oligonucleotide
caaacaauccagaaagccc

SEQ ID NO: 529879 - RNA, 19 nt, Artificial Sequence
  Description of Artificial Sequence: Synthetic oligonucleotide
ucuuccgugucauauaaug

SEQ ID NO: 529880 - RNA, 19 nt, Artificial Sequence
  Description of Artificial Sequence: Synthetic oligonucleotide
gauaauuugacagcaagga

SEQ ID NO: 529881 - RNA, 19 nt, Artificial Sequence
  Description of Artificial Sequence: Synthetic oligonucleotide
caugggauugccaaggaag

SEQ ID NO: 529882 - RNA, 19 nt, Artificial Sequence
  Description of Artificial Sequence: Synthetic oligonucleotide
gauaugaagccgcugacac

SEQ ID NO: 529883 - RNA, 19 nt, Artificial Sequence
  Description of Artificial Sequence: Synthetic oligonucleotide
guuaaugcgauuguaacug

SEQ ID NO: 529884 - RNA, 19 nt, Artificial Sequence
  Description of Artificial Sequence: Synthetic oligonucleotide
uugagauucucaaaguagu

SEQ ID NO: 529885 - RNA, 19 nt, Artificial Sequence
  Description of Artificial Sequence: Synthetic oligonucleotide
uucacaugcaccauuggcu

SEQ ID NO: 529886 - RNA, 19 nt, Artificial Sequence
  Description of Artificial Sequence: Synthetic oligonucleotide
aagucaacgucgaugcucc

SEQ ID NO: 529887 - RNA, 19 nt, Artificial Sequence
  Description of Artificial Sequence: Synthetic oligonucleotide
uuccgugucauauaaugag

SEQ ID NO: 529888 - RNA, 19 nt, Artificial Sequence
  Description of Artificial Sequence: Synthetic oligonucleotide
uuuaagagacccaugggau

SEQ ID NO: 529889 - RNA, 19 nt, Artificial Sequence
  Description of Artificial Sequence: Synthetic oligonucleotide
aacuuaguagcuugagcag

SEQ ID NO: 529890 - RNA, 19 nt, Artificial Sequence
  Description of Artificial Sequence: Synthetic oligonucleotide
ugcauaguuaauuucuugu

SEQ ID NO: 529891 - RNA, 19 nt, Artificial Sequence
  Description of Artificial Sequence: Synthetic oligonucleotide
uccgauuucacaugcacca

SEQ ID NO: 529892 - RNA, 19 nt, Artificial Sequence
  Description of Artificial Sequence: Synthetic oligonucleotide
aaccgaaugagugggaauc

SEQ ID NO: 529893 - RNA, 19 nt, Artificial Sequence
  Description of Artificial Sequence: Synthetic oligonucleotide
uggguaacguuucuuauga

SEQ ID NO: 529894 - RNA, 19 nt, Artificial Sequence
  Description of Artificial Sequence: Synthetic oligonucleotide
auggacaacauuccagaac

SEQ ID NO: 529895 - RNA, 19 nt, Artificial Sequence
  Description of Artificial Sequence: Synthetic oligonucleotide
gucauauuugaccucgagg

SEQ ID NO: 529896 - RNA, 19 nt, Artificial Sequence
  Description of Artificial Sequence: Synthetic oligonucleotide
uguaacgggaaguucuucc

SEQ ID NO: 529897 - RNA, 19 nt, Artificial Sequence
  Description of Artificial Sequence: Synthetic oligonucleotide
aagaauauauugaugugga

SEQ ID NO: 529898 - RNA, 19 nt, Artificial Sequence
  Description of Artificial Sequence: Synthetic oligonucleotide
gaaacuuaguagcuugagc

SEQ ID NO: 529899 - RNA, 19 nt, Artificial Sequence
  Description of Artificial Sequence: Synthetic oligonucleotide
uaugacacuggucaaccca

SEQ ID NO: 529900 - RNA, 19 nt, Artificial Sequence
  Description of Artificial Sequence: Synthetic oligonucleotide
gauaccaugcgccaggcca

SEQ ID NO: 529901 - RNA, 19 nt, Artificial Sequence
  Description of Artificial Sequence: Synthetic oligonucleotide
auugauguggaccaaggaa

SEQ ID NO: 529902 - RNA, 19 nt, Artificial Sequence
  Description of Artificial Sequence: Synthetic oligonucleotide
guaacguuucuuaugaggc

SEQ ID NO: 529903 - RNA, 19 nt, Artificial Sequence
  Description of Artificial Sequence: Synthetic oligonucleotide
aagacacccaauuccaccu

SEQ ID NO: 529904 - RNA, 19 nt, Artificial Sequence
  Description of Artificial Sequence: Synthetic oligonucleotide
uucucaaaguaguaucgag

SEQ ID NO: 529905 - RNA, 19 nt, Artificial Sequence
  Description of Artificial Sequence: Synthetic oligonucleotide
gguaacguuucuuaugagg

SEQ ID NO: 529906 - RNA, 19 nt, Artificial Sequence
  Description of Artificial Sequence: Synthetic oligonucleotide
uguaugcugagcucaagca

SEQ ID NO: 529907 - RNA, 19 nt, Artificial Sequence
  Description of Artificial Sequence: Synthetic oligonucleotide
gauuucucaguuuccgaag

SEQ ID NO: 529908 - RNA, 19 nt, Artificial Sequence
  Description of Artificial Sequence: Synthetic oligonucleotide
agaauauauugauguggac

SEQ ID NO: 529909 - RNA, 19 nt, Artificial Sequence
  Description of Artificial Sequence: Synthetic oligonucleotide
ugcgauuguaacuggaaga

SEQ ID NO: 529910 - RNA, 19 nt, Artificial Sequence
  Description of Artificial Sequence: Synthetic oligonucleotide
ugagucuuaacaugagcug

SEQ ID NO: 529911 - RNA, 19 nt, Artificial Sequence
  Description of Artificial Sequence: Synthetic oligonucleotide
uguaacuggaagagaauuc

SEQ ID NO: 529912 - RNA, 19 nt, Artificial Sequence
  Description of Artificial Sequence: Synthetic oligonucleotide
uuuccgaacccucugggcu

SEQ ID NO: 529913 - RNA, 19 nt, Artificial Sequence
  Description of Artificial Sequence: Synthetic oligonucleotide
uugauucccguaaggcucg

SEQ ID NO: 529914 - RNA, 19 nt, Artificial Sequence
  Description of Artificial Sequence: Synthetic oligonucleotide
uuaaugcgauuguaacugg

SEQ ID NO: 529915 - RNA, 19 nt, Artificial Sequence
  Description of Artificial Sequence: Synthetic oligonucleotide
ugaacgaccagcccaugca

SEQ ID NO: 529916 - RNA, 19 nt, Artificial Sequence
  Description of Artificial Sequence: Synthetic oligonucleotide
auaugaagccgcugacacc

SEQ ID NO: 529917 - RNA, 19 nt, Artificial Sequence
  Description of Artificial Sequence: Synthetic oligonucleotide
uauauugauguggaccaag

SEQ ID NO: 529918 - RNA, 19 nt, Artificial Sequence
  Description of Artificial Sequence: Synthetic oligonucleotide
uaagauccgagcugccugg

SEQ ID NO: 529919 - RNA, 19 nt, Artificial Sequence
  Description of Artificial Sequence: Synthetic oligonucleotide
agcaacgugguuuccgaac

SEQ ID NO: 529920 - RNA, 19 nt, Artificial Sequence
  Description of Artificial Sequence: Synthetic oligonucleotide
agcgccaucaaacaaucca

SEQ ID NO: 529921 - RNA, 19 nt, Artificial Sequence
  Description of Artificial Sequence: Synthetic oligonucleotide
agguguucgccacuggugg

SEQ ID NO: 529922 - RNA, 19 nt, Artificial Sequence
  Description of Artificial Sequence: Synthetic oligonucleotide
auccuaagauccgagcugc

SEQ ID NO: 529923 - RNA, 19 nt, Artificial Sequence
  Description of Artificial Sequence: Synthetic oligonucleotide
uccgugucauauaaugagc

SEQ ID NO: 529924 - RNA, 19 nt, Artificial Sequence
  Description of Artificial Sequence: Synthetic oligonucleotide
uauuugaccucgaggaaaa

SEQ ID NO: 529925 - RNA, 19 nt, Artificial Sequence
  Description of Artificial Sequence: Synthetic oligonucleotide
guaacgggaaguucuuccg

SEQ ID NO: 529926 - RNA, 19 nt, Artificial Sequence
  Description of Artificial Sequence: Synthetic oligonucleotide
cauuuaagagacccauggg

SEQ ID NO: 529927 - RNA, 19 nt, Artificial Sequence
  Description of Artificial Sequence: Synthetic oligonucleotide
ucucggucuacguaguccc

SEQ ID NO: 529928 - RNA, 19 nt, Artificial Sequence
  Description of Artificial Sequence: Synthetic oligonucleotide
acguugauucccguaaggc

SEQ ID NO: 529929 - RNA, 19 nt, Artificial Sequence
  Description of Artificial Sequence: Synthetic oligonucleotide
ucugauaaugucccugcaa

SEQ ID NO: 529930 - RNA, 19 nt, Artificial Sequence
  Description of Artificial Sequence: Synthetic oligonucleotide
ugaucagcacauccaagca

SEQ ID NO: 529931 - RNA, 19 nt, Artificial Sequence
  Description of Artificial Sequence: Synthetic oligonucleotide
guguaguggacguugauuc

SEQ ID NO: 529932 - RNA, 19 nt, Artificial Sequence
  Description of Artificial Sequence: Synthetic oligonucleotide
aggucgucauauuugaccu

SEQ ID NO: 529933 - RNA, 19 nt, Artificial Sequence
  Description of Artificial Sequence: Synthetic oligonucleotide
cuuccaaccgcacaagcac

SEQ ID NO: 529934 - RNA, 19 nt, Artificial Sequence
  Description of Artificial Sequence: Synthetic oligonucleotide
cacucaacuugauuugggg

SEQ ID NO: 529935 - RNA, 19 nt, Artificial Sequence
  Description of Artificial Sequence: Synthetic oligonucleotide
acaacauuccagaaccagg

SEQ ID NO: 529936 - RNA, 19 nt, Artificial Sequence
  Description of Artificial Sequence: Synthetic oligonucleotide
gacguugauucccguaagg

SEQ ID NO: 529937 - RNA, 19 nt, Artificial Sequence
  Description of Artificial Sequence: Synthetic oligonucleotide
uaacguuucuuaugaggcc

SEQ ID NO: 529938 - RNA, 19 nt, Artificial Sequence
  Description of Artificial Sequence: Synthetic oligonucleotide
ucccguaaggcucgcaaag

SEQ ID NO: 529939 - RNA, 19 nt, Artificial Sequence
  Description of Artificial Sequence: Synthetic oligonucleotide
aaaguccagagcaccugcc

SEQ ID NO: 529940 - RNA, 19 nt, Artificial Sequence
  Description of Artificial Sequence: Synthetic oligonucleotide
uagaggucgucauauuuga

SEQ ID NO: 529941 - RNA, 19 nt, Artificial Sequence
  Description of Artificial Sequence: Synthetic oligonucleotide
ucaacgucgaugcuccggu

SEQ ID NO: 529942 - RNA, 19 nt, Artificial Sequence
  Description of Artificial Sequence: Synthetic oligonucleotide
gucgucauauuugaccucg

SEQ ID NO: 529943 - RNA, 19 nt, Artificial Sequence
  Description of Artificial Sequence: Synthetic oligonucleotide
uuugaccucgaggaaaaug

SEQ ID NO: 529944 - RNA, 19 nt, Artificial Sequence
  Description of Artificial Sequence: Synthetic oligonucleotide
uucagcgccaucaaacaau

SEQ ID NO: 529945 - RNA, 19 nt, Artificial Sequence
  Description of Artificial Sequence: Synthetic oligonucleotide
uggacguugauucccguaa

SEQ ID NO: 529946 - RNA, 19 nt, Artificial Sequence
  Description of Artificial Sequence: Synthetic oligonucleotide
uugccaaggaagucuacug

SEQ ID NO: 529947 - RNA, 19 nt, Artificial Sequence
  Description of Artificial Sequence: Synthetic oligonucleotide
caugguaccugauguauuc

SEQ ID NO: 529948 - RNA, 19 nt, Artificial Sequence
  Description of Artificial Sequence: Synthetic oligonucleotide
guuaugacacuggucaacc

SEQ ID NO: 529949 - RNA, 19 nt, Artificial Sequence
  Description of Artificial Sequence: Synthetic oligonucleotide
ggaagagaauucuggaugc

SEQ ID NO: 529950 - RNA, 19 nt, Artificial Sequence
  Description of Artificial Sequence: Synthetic oligonucleotide
aagugaacacacucaacuu

SEQ ID NO: 529951 - RNA, 19 nt, Artificial Sequence
  Description of Artificial Sequence: Synthetic oligonucleotide
aguaccaaugagcugguua

SEQ ID NO: 529952 - RNA, 19 nt, Artificial Sequence
  Description of Artificial Sequence: Synthetic oligonucleotide
uaguggacguugauucccg

SEQ ID NO: 529953 - RNA, 19 nt, Artificial Sequence
  Description of Artificial Sequence: Synthetic oligonucleotide
auggguaacguuucuuaug

SEQ ID NO: 529954 - RNA, 19 nt, Artificial Sequence
  Description of Artificial Sequence: Synthetic oligonucleotide
uuugcauaguuaauuucuu

SEQ ID NO: 529955 - RNA, 19 nt, Artificial Sequence
  Description of Artificial Sequence: Synthetic oligonucleotide
cuaagauccgagcugccug

SEQ ID NO: 529956 - RNA, 19 nt, Artificial Sequence
  Description of Artificial Sequence: Synthetic oligonucleotide
uuuuauccaccaagaauau

SEQ ID NO: 529957 - RNA, 19 nt, Artificial Sequence
  Description of Artificial Sequence: Synthetic oligonucleotide
uaaugcgauuguaacugga

SEQ ID NO: 529958 - RNA, 19 nt, Artificial Sequence
  Description of Artificial Sequence: Synthetic oligonucleotide
agcagaauuugacacucca

SEQ ID NO: 529959 - RNA, 19 nt, Artificial Sequence
  Description of Artificial Sequence: Synthetic oligonucleotide
augcaaaguccagagcacc

SEQ ID NO: 529960 - RNA, 19 nt, Artificial Sequence
  Description of Artificial Sequence: Synthetic oligonucleotide
ugguuuccgaacccucugg

SEQ ID NO: 529961 - RNA, 19 nt, Artificial Sequence
  Description of Artificial Sequence: Synthetic oligonucleotide
aggaccuccgauuucacau

SEQ ID NO: 529962 - RNA, 19 nt, Artificial Sequence
  Description of Artificial Sequence: Synthetic oligonucleotide
uguaguggacguugauucc

SEQ ID NO: 529963 - RNA, 19 nt, Artificial Sequence
  Description of Artificial Sequence: Synthetic oligonucleotide
gauguggaccaaggaaucg

SEQ ID NO: 529964 - RNA, 19 nt, Artificial Sequence
  Description of Artificial Sequence: Synthetic oligonucleotide
gaagucuacugauccuaag

SEQ ID NO: 529965 - RNA, 19 nt, Artificial Sequence
  Description of Artificial Sequence: Synthetic oligonucleotide
guugauucccguaaggcuc

SEQ ID NO: 529966 - RNA, 19 nt, Artificial Sequence
  Description of Artificial Sequence: Synthetic oligonucleotide
uuuccgaaguuccuugcuc

SEQ ID NO: 529967 - RNA, 19 nt, Artificial Sequence
  Description of Artificial Sequence: Synthetic oligonucleotide
ugccgauuguccauugucu

SEQ ID NO: 529968 - RNA, 19 nt, Artificial Sequence
  Description of Artificial Sequence: Synthetic oligonucleotide
accuuccaaccgcacaagc

SEQ ID NO: 529969 - RNA, 19 nt, Artificial Sequence
  Description of Artificial Sequence: Synthetic oligonucleotide
caugugacuagcugccagc

SEQ ID NO: 529970 - RNA, 19 nt, Artificial Sequence
  Description of Artificial Sequence: Synthetic oligonucleotide
acggccuuggaugagauga

SEQ ID NO: 529971 - RNA, 19 nt, Artificial Sequence
  Description of Artificial Sequence: Synthetic oligonucleotide
guaaggcucgcaaagacca

SEQ ID NO: 529972 - RNA, 19 nt, Artificial Sequence
  Description of Artificial Sequence: Synthetic oligonucleotide
ugaggaguuccucuuggaa

SEQ ID NO: 529973 - RNA, 19 nt, Artificial Sequence
  Description of Artificial Sequence: Synthetic oligonucleotide
cucgagucgguccaucggg

SEQ ID NO: 529974 - RNA, 19 nt, Artificial Sequence
  Description of Artificial Sequence: Synthetic oligonucleotide
guagaggucgucauauuug

SEQ ID NO: 529975 - RNA, 19 nt, Artificial Sequence
  Description of Artificial Sequence: Synthetic oligonucleotide
ugauguggaccaaggaauc

SEQ ID NO: 529976 - RNA, 19 nt, Artificial Sequence
  Description of Artificial Sequence: Synthetic oligonucleotide
cuacugauccuaagauccg

SEQ ID NO: 529977 - RNA, 19 nt, Artificial Sequence
  Description of Artificial Sequence: Synthetic oligonucleotide
uauaaugagcgcucauuuu

SEQ ID NO: 529978 - RNA, 19 nt, Artificial Sequence
  Description of Artificial Sequence: Synthetic oligonucleotide
uuccgaaguuccuugcucu

SEQ ID NO: 529979 - RNA, 19 nt, Artificial Sequence
  Description of Artificial Sequence: Synthetic oligonucleotide
ucgaugcuccgguuaaugc

SEQ ID NO: 529980 - RNA, 19 nt, Artificial Sequence
  Description of Artificial Sequence: Synthetic oligonucleotide
gauccgagcugccuggcug

SEQ ID NO: 529981 - RNA, 19 nt, Artificial Sequence
  Description of Artificial Sequence: Synthetic oligonucleotide
uuauccaccugcacauccu

SEQ ID NO: 529982 - RNA, 19 nt, Artificial Sequence
  Description of Artificial Sequence: Synthetic oligonucleotide
guaccugauguauucucgc

SEQ ID NO: 529983 - RNA, 19 nt, Artificial Sequence
  Description of Artificial Sequence: Synthetic oligonucleotide
acaauccagaaagcccucc

SEQ ID NO: 529984 - RNA, 19 nt, Artificial Sequence
  Description of Artificial Sequence: Synthetic oligonucleotide
ucgagucgguccaucgggg

SEQ ID NO: 529985 - RNA, 19 nt, Artificial Sequence
  Description of Artificial Sequence: Synthetic oligonucleotide
uuaucaguccagugacccc

SEQ ID NO: 529986 - RNA, 19 nt, Artificial Sequence
  Description of Artificial Sequence: Synthetic oligonucleotide
aaaccgaaugagugggaau

SEQ ID NO: 529987 - RNA, 19 nt, Artificial Sequence
  Description of Artificial Sequence: Synthetic oligonucleotide
acaaggcagugguagaggu

SEQ ID NO: 529988 - RNA, 19 nt, Artificial Sequence
  Description of Artificial Sequence: Synthetic oligonucleotide
ucagcgccaucaaacaauc

SEQ ID NO: 529989 - RNA, 19 nt, Artificial Sequence
  Description of Artificial Sequence: Synthetic oligonucleotide
auauuugaccucgaggaaa

SEQ ID NO: 529990 - RNA, 19 nt, Artificial Sequence
  Description of Artificial Sequence: Synthetic oligonucleotide
uggucaacccaccaaugau

SEQ ID NO: 529991 - RNA, 19 nt, Artificial Sequence
  Description of Artificial Sequence: Synthetic oligonucleotide
ugaccucgaggaaaauggc

SEQ ID NO: 529992 - RNA, 19 nt, Artificial Sequence
  Description of Artificial Sequence: Synthetic oligonucleotide
uuaugacacuggucaaccc

SEQ ID NO: 529993 - RNA, 19 nt, Artificial Sequence
  Description of Artificial Sequence: Synthetic oligonucleotide
gacaaggcagugguagagg

SEQ ID NO: 529994 - RNA, 19 nt, Artificial Sequence
  Description of Artificial Sequence: Synthetic oligonucleotide
accgaaugagugggaaucc

SEQ ID NO: 529995 - RNA, 19 nt, Artificial Sequence
  Description of Artificial Sequence: Synthetic oligonucleotide
cugauccuaagauccgagc

SEQ ID NO: 529996 - RNA, 19 nt, Artificial Sequence
  Description of Artificial Sequence: Synthetic oligonucleotide
aggccagauaugaagccgc

SEQ ID NO: 529997 - RNA, 19 nt, Artificial Sequence
  Description of Artificial Sequence: Synthetic oligonucleotide
gaaucgucaaauuuauuuu

SEQ ID NO: 529998 - RNA, 19 nt, Artificial Sequence
  Description of Artificial Sequence: Synthetic oligonucleotide
aggcucuuugcauaguuaa

SEQ ID NO: 529999 - RNA, 19 nt, Artificial Sequence
  Description of Artificial Sequence: Synthetic oligonucleotide
cagggugaucagcacaucc

SEQ ID NO: 530000 - RNA, 19 nt, Artificial Sequence
  Description of Artificial Sequence: Synthetic oligonucleotide
ugcucgagucgguccaucg

SEQ ID NO: 530001 - RNA, 19 nt, Artificial Sequence
  Description of Artificial Sequence: Synthetic oligonucleotide
cugagucuuaacaugagcu

SEQ ID NO: 530002 - RNA, 19 nt, Artificial Sequence
  Description of Artificial Sequence: Synthetic oligonucleotide
uccccaggccaucugauaa

SEQ ID NO: 530003 - RNA, 19 nt, Artificial Sequence
  Description of Artificial Sequence: Synthetic oligonucleotide
uggaccaaggaaucgucaa

SEQ ID NO: 530004 - RNA, 19 nt, Artificial Sequence
  Description of Artificial Sequence: Synthetic oligonucleotide
gucagcgcgcucuuacugg

SEQ ID NO: 530005 - RNA, 19 nt, Artificial Sequence
  Description of Artificial Sequence: Synthetic oligonucleotide
gauucugccuggucauagc

SEQ ID NO: 530006 - RNA, 19 nt, Artificial Sequence
  Description of Artificial Sequence: Synthetic oligonucleotide
gaauaucgaggaagcagcc

SEQ ID NO: 530007 - RNA, 19 nt, Artificial Sequence
  Description of Artificial Sequence: Synthetic oligonucleotide
ucacaugcaccauuggcuu

SEQ ID NO: 530008 - RNA, 19 nt, Artificial Sequence
  Description of Artificial Sequence: Synthetic oligonucleotide
aagaaacuuaguagcuuga

SEQ ID NO: 530009 - RNA, 19 nt, Artificial Sequence
  Description of Artificial Sequence: Synthetic oligonucleotide
uguggaccaaggaaucguc

SEQ ID NO: 530010 - RNA, 19 nt, Artificial Sequence
  Description of Artificial Sequence: Synthetic oligonucleotide
gaacuucacggcauugacc

SEQ ID NO: 530011 - RNA, 19 nt, Artificial Sequence
  Description of Artificial Sequence: Synthetic oligonucleotide
ccgugucauauaaugagcg

SEQ ID NO: 530012 - RNA, 19 nt, Artificial Sequence
  Description of Artificial Sequence: Synthetic oligonucleotide
cugcacauccuguaugcug

SEQ ID NO: 530013 - RNA, 19 nt, Artificial Sequence
  Description of Artificial Sequence: Synthetic oligonucleotide
guaguggacguugauuccc

SEQ ID NO: 530014 - RNA, 19 nt, Artificial Sequence
  Description of Artificial Sequence: Synthetic oligonucleotide
ucgcaaagaccaauucuuc

SEQ ID NO: 530015 - RNA, 19 nt, Artificial Sequence
  Description of Artificial Sequence: Synthetic oligonucleotide
caauuccaccuuccaaccg

SEQ ID NO: 530016 - RNA, 19 nt, Artificial Sequence
  Description of Artificial Sequence: Synthetic oligonucleotide
uucucaguuuccgaaguuc

SEQ ID NO: 530017 - RNA, 19 nt, Artificial Sequence
  Description of Artificial Sequence: Synthetic oligonucleotide
gaccuccgauuucacaugc

SEQ ID NO: 530018 - RNA, 19 nt, Artificial Sequence
  Description of Artificial Sequence: Synthetic oligonucleotide
gguaccugauguauucucg

SEQ ID NO: 530019 - RNA, 19 nt, Artificial Sequence
  Description of Artificial Sequence: Synthetic oligonucleotide
gucuacugauccuaagauc

SEQ ID NO: 530020 - RNA, 19 nt, Artificial Sequence
  Description of Artificial Sequence: Synthetic oligonucleotide
ugacguuaugacacugguc

SEQ ID NO: 530021 - RNA, 19 nt, Artificial Sequence
  Description of Artificial Sequence: Synthetic oligonucleotide
gaugcuccgguuaaugcga

SEQ ID NO: 530022 - RNA, 19 nt, Artificial Sequence
  Description of Artificial Sequence: Synthetic oligonucleotide
ucaaaccgaaugaguggga

SEQ ID NO: 530023 - RNA, 19 nt, Artificial Sequence
  Description of Artificial Sequence: Synthetic oligonucleotide
uuccaaccgcacaagcacu

SEQ ID NO: 530024 - RNA, 19 nt, Artificial Sequence
  Description of Artificial Sequence: Synthetic oligonucleotide
uguugacguuaugacacug

SEQ ID NO: 530025 - RNA, 19 nt, Artificial Sequence
  Description of Artificial Sequence: Synthetic oligonucleotide
gaccucgaggaaaauggcc

SEQ ID NO: 530026 - RNA, 19 nt, Artificial Sequence
  Description of Artificial Sequence: Synthetic oligonucleotide
aagauccgagcugccuggc

SEQ ID NO: 530027 - RNA, 19 nt, Artificial Sequence
  Description of Artificial Sequence: Synthetic oligonucleotide
ugugacuagcugccagcug

SEQ ID NO: 530028 - RNA, 19 nt, Artificial Sequence
  Description of Artificial Sequence: Synthetic oligonucleotide
augauaccaugcgccaggc

SEQ ID NO: 530029 - RNA, 19 nt, Artificial Sequence
  Description of Artificial Sequence: Synthetic oligonucleotide
uaccugauguauucucgcu

SEQ ID NO: 530030 - RNA, 19 nt, Artificial Sequence
  Description of Artificial Sequence: Synthetic oligonucleotide
aguaucgaguugggguccc

SEQ ID NO: 530031 - RNA, 19 nt, Artificial Sequence
  Description of Artificial Sequence: Synthetic oligonucleotide
ugagcucaagcaugugacu

SEQ ID NO: 530032 - RNA, 19 nt, Artificial Sequence
  Description of Artificial Sequence: Synthetic oligonucleotide
ugguaccugauguauucuc

SEQ ID NO: 530033 - RNA, 19 nt, Artificial Sequence
  Description of Artificial Sequence: Synthetic oligonucleotide
uugaccugcacagcagggc

SEQ ID NO: 530034 - RNA, 19 nt, Artificial Sequence
  Description of Artificial Sequence: Synthetic oligonucleotide
cuuccgugucauauaauga

SEQ ID NO: 530035 - RNA, 19 nt, Artificial Sequence
  Description of Artificial Sequence: Synthetic oligonucleotide
auucccguaaggcucgcaa

SEQ ID NO: 530036 - RNA, 19 nt, Artificial Sequence
  Description of Artificial Sequence: Synthetic oligonucleotide
gcgauuguaacuggaagag

SEQ ID NO: 530037 - RNA, 19 nt, Artificial Sequence
  Description of Artificial Sequence: Synthetic oligonucleotide
cugaacgaccagcccaugc

SEQ ID NO: 530038 - RNA, 19 nt, Artificial Sequence
  Description of Artificial Sequence: Synthetic oligonucleotide
cuuggaugagaugagcaca

SEQ ID NO: 530039 - RNA, 19 nt, Artificial Sequence
  Description of Artificial Sequence: Synthetic oligonucleotide
auugaccugcacagcaggg

SEQ ID NO: 530040 - RNA, 19 nt, Artificial Sequence
  Description of Artificial Sequence: Synthetic oligonucleotide
aacgugguuuccgaacccu

SEQ ID NO: 530041 - RNA, 19 nt, Artificial Sequence
  Description of Artificial Sequence: Synthetic oligonucleotide
acacucaacuugauuuggg

SEQ ID NO: 530042 - RNA, 19 nt, Artificial Sequence
  Description of Artificial Sequence: Synthetic oligonucleotide
uuuccgcuggcagaagucu

SEQ ID NO: 530043 - RNA, 19 nt, Artificial Sequence
  Description of Artificial Sequence: Synthetic oligonucleotide
cagguuugcagggugauca

SEQ ID NO: 530044 - RNA, 19 nt, Artificial Sequence
  Description of Artificial Sequence: Synthetic oligonucleotide
acgggccugggauggacac

SEQ ID NO: 530045 - RNA, 19 nt, Artificial Sequence
  Description of Artificial Sequence: Synthetic oligonucleotide
gguuuccgaacccucuggg

SEQ ID NO: 530046 - RNA, 19 nt, Artificial Sequence
  Description of Artificial Sequence: Synthetic oligonucleotide
acuccauggguaacguuuc

SEQ ID NO: 530047 - RNA, 19 nt, Artificial Sequence
  Description of Artificial Sequence: Synthetic oligonucleotide
cucucggucuacguagucc

SEQ ID NO: 530048 - RNA, 19 nt, Artificial Sequence
  Description of Artificial Sequence: Synthetic oligonucleotide
ugaccucguucucauugcu

SEQ ID NO: 530049 - RNA, 19 nt, Artificial Sequence
  Description of Artificial Sequence: Synthetic oligonucleotide
uuaguagcuugagcagcag

SEQ ID NO: 530050 - RNA, 19 nt, Artificial Sequence
  Description of Artificial Sequence: Synthetic oligonucleotide
guauucucgcucagacugg

SEQ ID NO: 530051 - RNA, 19 nt, Artificial Sequence
  Description of Artificial Sequence: Synthetic oligonucleotide
agucugcuaucugcagugc

SEQ ID NO: 530052 - RNA, 19 nt, Artificial Sequence
  Description of Artificial Sequence: Synthetic oligonucleotide
ccaagaauauauugaugug

SEQ ID NO: 530053 - RNA, 19 nt, Artificial Sequence
  Description of Artificial Sequence: Synthetic oligonucleotide
uccaucggggaugacucug

SEQ ID NO: 530054 - RNA, 19 nt, Artificial Sequence
  Description of Artificial Sequence: Synthetic oligonucleotide
ggcugugucucucaccgcc

SEQ ID NO: 530055 - RNA, 19 nt, Artificial Sequence
  Description of Artificial Sequence: Synthetic oligonucleotide
accgcacaagcacuuccag

SEQ ID NO: 530056 - RNA, 19 nt, Artificial Sequence
  Description of Artificial Sequence: Synthetic oligonucleotide
ugauaccaugcgccaggcc

SEQ ID NO: 530057 - RNA, 19 nt, Artificial Sequence
  Description of Artificial Sequence: Synthetic oligonucleotide
ggugcacccgagugaaugg

SEQ ID NO: 530058 - RNA, 19 nt, Artificial Sequence
  Description of Artificial Sequence: Synthetic oligonucleotide
agagacccaugggauugcc

SEQ ID NO: 530059 - RNA, 19 nt, Artificial Sequence
  Description of Artificial Sequence: Synthetic oligonucleotide
caaugauaccaugcgccag

SEQ ID NO: 530060 - RNA, 19 nt, Artificial Sequence
  Description of Artificial Sequence: Synthetic oligonucleotide
agauugaucacagcaucuu

SEQ ID NO: 530061 - RNA, 19 nt, Artificial Sequence
  Description of Artificial Sequence: Synthetic oligonucleotide
ggccucucggucuacguag

SEQ ID NO: 530062 - RNA, 19 nt, Artificial Sequence
  Description of Artificial Sequence: Synthetic oligonucleotide
augggauugccaaggaagu

SEQ ID NO: 530063 - RNA, 19 nt, Artificial Sequence
  Description of Artificial Sequence: Synthetic oligonucleotide
uauucucgcucagacuggu

SEQ ID NO: 530064 - RNA, 19 nt, Artificial Sequence
  Description of Artificial Sequence: Synthetic oligonucleotide
ugucucucaccgccugggc

SEQ ID NO: 530065 - RNA, 19 nt, Artificial Sequence
  Description of Artificial Sequence: Synthetic oligonucleotide
cacggcauugaccugcaca

SEQ ID NO: 530066 - RNA, 19 nt, Artificial Sequence
  Description of Artificial Sequence: Synthetic oligonucleotide
agguuugcagggugaucag

SEQ ID NO: 530067 - RNA, 19 nt, Artificial Sequence
  Description of Artificial Sequence: Synthetic oligonucleotide
cucaacagaugagucagga

SEQ ID NO: 530068 - RNA, 19 nt, Artificial Sequence
  Description of Artificial Sequence: Synthetic oligonucleotide
acaucauuuaagagaccca

SEQ ID NO: 530069 - RNA, 19 nt, Artificial Sequence
  Description of Artificial Sequence: Synthetic oligonucleotide
aggaagucuacugauccua

SEQ ID NO: 530070 - RNA, 19 nt, Artificial Sequence
  Description of Artificial Sequence: Synthetic oligonucleotide
cucgcaaagaccaauucuu

SEQ ID NO: 530071 - RNA, 19 nt, Artificial Sequence
  Description of Artificial Sequence: Synthetic oligonucleotide
uccaaccgcacaagcacuu

SEQ ID NO: 530072 - RNA, 19 nt, Artificial Sequence
  Description of Artificial Sequence: Synthetic oligonucleotide
gguuaaugcgauuguaacu

SEQ ID NO: 530073 - RNA, 19 nt, Artificial Sequence
  Description of Artificial Sequence: Synthetic oligonucleotide
uucccguaaggcucgcaaa

SEQ ID NO: 530074 - RNA, 19 nt, Artificial Sequence
  Description of Artificial Sequence: Synthetic oligonucleotide
auuguaacuggaagagaau

SEQ ID NO: 530075 - RNA, 19 nt, Artificial Sequence
  Description of Artificial Sequence: Synthetic oligonucleotide
agggugaucagcacaucca

SEQ ID NO: 530076 - RNA, 19 nt, Artificial Sequence
  Description of Artificial Sequence: Synthetic oligonucleotide
cgaugcuccgguuaaugcg

SEQ ID NO: 530077 - RNA, 19 nt, Artificial Sequence
  Description of Artificial Sequence: Synthetic oligonucleotide
cauauuugaccucgaggaa

SEQ ID NO: 530078 - RNA, 19 nt, Artificial Sequence
  Description of Artificial Sequence: Synthetic oligonucleotide
gaacgaccagcccaugcaa

SEQ ID NO: 530079 - RNA, 19 nt, Artificial Sequence
  Description of Artificial Sequence: Synthetic oligonucleotide
gucgaugcuccgguuaaug

SEQ ID NO: 530080 - RNA, 19 nt, Artificial Sequence
  Description of Artificial Sequence: Synthetic oligonucleotide
gcaugugacuagcugccag

SEQ ID NO: 530081 - RNA, 19 nt, Artificial Sequence
  Description of Artificial Sequence: Synthetic oligonucleotide
ucggucuacguagucccca

SEQ ID NO: 530082 - RNA, 19 nt, Artificial Sequence
  Description of Artificial Sequence: Synthetic oligonucleotide
uaaggcucgcaaagaccaa

SEQ ID NO: 530083 - RNA, 19 nt, Artificial Sequence
  Description of Artificial Sequence: Synthetic oligonucleotide
ccaugcaagccacaucacc

SEQ ID NO: 530084 - RNA, 19 nt, Artificial Sequence
  Description of Artificial Sequence: Synthetic oligonucleotide
agcgcgcucuuacugggga

SEQ ID NO: 530085 - RNA, 19 nt, Artificial Sequence
  Description of Artificial Sequence: Synthetic oligonucleotide
ugaauggguccagauugau

SEQ ID NO: 530086 - RNA, 19 nt, Artificial Sequence
  Description of Artificial Sequence: Synthetic oligonucleotide
agucgguccaucggggaug

SEQ ID NO: 530087 - RNA, 19 nt, Artificial Sequence
  Description of Artificial Sequence: Synthetic oligonucleotide
gcuccgguuaaugcgauug

SEQ ID NO: 530088 - RNA, 19 nt, Artificial Sequence
  Description of Artificial Sequence: Synthetic oligonucleotide
gcugagcucaagcauguga

SEQ ID NO: 530089 - RNA, 19 nt, Artificial Sequence
  Description of Artificial Sequence: Synthetic oligonucleotide
gagcucaagcaugugacua

SEQ ID NO: 530090 - RNA, 19 nt, Artificial Sequence
  Description of Artificial Sequence: Synthetic oligonucleotide
augugacuagcugccagcu

SEQ ID NO: 530091 - RNA, 19 nt, Artificial Sequence
  Description of Artificial Sequence: Synthetic oligonucleotide
ugaguguggcugugucucu

SEQ ID NO: 530092 - RNA, 19 nt, Artificial Sequence
  Description of Artificial Sequence: Synthetic oligonucleotide
auuugacacuccaugggua

SEQ ID NO: 530093 - RNA, 19 nt, Artificial Sequence
  Description of Artificial Sequence: Synthetic oligonucleotide
gugcacccgagugaauggg

SEQ ID NO: 530094 - RNA, 19 nt, Artificial Sequence
  Description of Artificial Sequence: Synthetic oligonucleotide
agauguuggucagcgcgcu

SEQ ID NO: 530095 - RNA, 19 nt, Artificial Sequence
  Description of Artificial Sequence: Synthetic oligonucleotide
acguuaugacacuggucaa

SEQ ID NO: 530096 - RNA, 19 nt, Artificial Sequence
  Description of Artificial Sequence: Synthetic oligonucleotide
guaugcugagcucaagcau

SEQ ID NO: 530097 - RNA, 19 nt, Artificial Sequence
  Description of Artificial Sequence: Synthetic oligonucleotide
cguaaggcucgcaaagacc

SEQ ID NO: 530098 - RNA, 19 nt, Artificial Sequence
  Description of Artificial Sequence: Synthetic oligonucleotide
agucaacgucgaugcuccg

SEQ ID NO: 530099 - RNA, 19 nt, Artificial Sequence
  Description of Artificial Sequence: Synthetic oligonucleotide
ugggauugccaaggaaguc

SEQ ID NO: 530100 - RNA, 19 nt, Artificial Sequence
  Description of Artificial Sequence: Synthetic oligonucleotide
caucauuuaagagacccau

SEQ ID NO: 530101 - RNA, 19 nt, Artificial Sequence
  Description of Artificial Sequence: Synthetic oligonucleotide
cgguuaaugcgauuguaac

SEQ ID NO: 530102 - RNA, 19 nt, Artificial Sequence
  Description of Artificial Sequence: Synthetic oligonucleotide
cacuccauggguaacguuu

SEQ ID NO: 530103 - RNA, 19 nt, Artificial Sequence
  Description of Artificial Sequence: Synthetic oligonucleotide
ucgaggaaaauggccucuc

SEQ ID NO: 530104 - RNA, 19 nt, Artificial Sequence
  Description of Artificial Sequence: Synthetic oligonucleotide
cgugucauauaaugagcgc

SEQ ID NO: 530105 - RNA, 19 nt, Artificial Sequence
  Description of Artificial Sequence: Synthetic oligonucleotide
acuucacggcauugaccug

SEQ ID NO: 530106 - RNA, 19 nt, Artificial Sequence
  Description of Artificial Sequence: Synthetic oligonucleotide
cacaugcaccauuggcuuc

SEQ ID NO: 530107 - RNA, 19 nt, Artificial Sequence
  Description of Artificial Sequence: Synthetic oligonucleotide
aguggacguugauucccgu

SEQ ID NO: 530108 - RNA, 19 nt, Artificial Sequence
  Description of Artificial Sequence: Synthetic oligonucleotide
ugaccccuucagaaacauc

SEQ ID NO: 530109 - RNA, 19 nt, Artificial Sequence
  Description of Artificial Sequence: Synthetic oligonucleotide
gaccaaggaaucgucaaau

SEQ ID NO: 530110 - RNA, 19 nt, Artificial Sequence
  Description of Artificial Sequence: Synthetic oligonucleotide
auauauugauguggaccaa

SEQ ID NO: 530111 - RNA, 19 nt, Artificial Sequence
  Description of Artificial Sequence: Synthetic oligonucleotide
augguaccugauguauucu

SEQ ID NO: 530112 - RNA, 19 nt, Artificial Sequence
  Description of Artificial Sequence: Synthetic oligonucleotide
gcucgagucgguccaucgg

SEQ ID NO: 530113 - RNA, 19 nt, Artificial Sequence
  Description of Artificial Sequence: Synthetic oligonucleotide
cagggccugucucaaugac

SEQ ID NO: 530114 - RNA, 19 nt, Artificial Sequence
  Description of Artificial Sequence: Synthetic oligonucleotide
uggggaacuucacggcauu

SEQ ID NO: 530115 - RNA, 19 nt, Artificial Sequence
  Description of Artificial Sequence: Synthetic oligonucleotide
ggaccuccgauuucacaug

SEQ ID NO: 530116 - RNA, 19 nt, Artificial Sequence
  Description of Artificial Sequence: Synthetic oligonucleotide
uccauggguaacguuucuu

SEQ ID NO: 530117 - RNA, 19 nt, Artificial Sequence
  Description of Artificial Sequence: Synthetic oligonucleotide
acgugguuuccgaacccuc

SEQ ID NO: 530118 - RNA, 19 nt, Artificial Sequence
  Description of Artificial Sequence: Synthetic oligonucleotide
caaaccgaaugagugggaa

SEQ ID NO: 530119 - RNA, 19 nt, Artificial Sequence
  Description of Artificial Sequence: Synthetic oligonucleotide
caaggaccuccgauuucac

SEQ ID NO: 530120 - RNA, 19 nt, Artificial Sequence
  Description of Artificial Sequence: Synthetic oligonucleotide
gauguuggucagcgcgcuc

SEQ ID NO: 530121 - RNA, 19 nt, Artificial Sequence
  Description of Artificial Sequence: Synthetic oligonucleotide
ccugggaccgcugagugug

SEQ ID NO: 530122 - RNA, 19 nt, Artificial Sequence
  Description of Artificial Sequence: Synthetic oligonucleotide
uggugccgauuguccauug

SEQ ID NO: 530123 - RNA, 19 nt, Artificial Sequence
  Description of Artificial Sequence: Synthetic oligonucleotide
gcaaggaccuccgauuuca

SEQ ID NO: 530124 - RNA, 19 nt, Artificial Sequence
  Description of Artificial Sequence: Synthetic oligonucleotide
cuucagcgccaucaaacaa

SEQ ID NO: 530125 - RNA, 19 nt, Artificial Sequence
  Description of Artificial Sequence: Synthetic oligonucleotide
ugcagugcucgagucgguc

SEQ ID NO: 530126 - RNA, 19 nt, Artificial Sequence
  Description of Artificial Sequence: Synthetic oligonucleotide
gaccucguucucauugcuc

SEQ ID NO: 530127 - RNA, 19 nt, Artificial Sequence
  Description of Artificial Sequence: Synthetic oligonucleotide
ggguaacguuucuuaugag

SEQ ID NO: 530128 - RNA, 19 nt, Artificial Sequence
  Description of Artificial Sequence: Synthetic oligonucleotide
cagcgccaucaaacaaucc

SEQ ID NO: 530129 - RNA, 19 nt, Artificial Sequence
  Description of Artificial Sequence: Synthetic oligonucleotide
uccgaacccucugggcuug

SEQ ID NO: 530130 - RNA, 19 nt, Artificial Sequence
  Description of Artificial Sequence: Synthetic oligonucleotide
auagagcaugaagggcuga

SEQ ID NO: 530131 - RNA, 19 nt, Artificial Sequence
  Description of Artificial Sequence: Synthetic oligonucleotide
ugggauggacacgccgcug

SEQ ID NO: 530132 - RNA, 19 nt, Artificial Sequence
  Description of Artificial Sequence: Synthetic oligonucleotide
gguguucgccacugguggc

SEQ ID NO: 530133 - RNA, 19 nt, Artificial Sequence
  Description of Artificial Sequence: Synthetic oligonucleotide
ccguaaggcucgcaaagac

SEQ ID NO: 530134 - RNA, 19 nt, Artificial Sequence
  Description of Artificial Sequence: Synthetic oligonucleotide
cagugcucgagucggucca

SEQ ID NO: 530135 - RNA, 19 nt, Artificial Sequence
  Description of Artificial Sequence: Synthetic oligonucleotide
gcagcaacgugguuuccga

SEQ ID NO: 530136 - RNA, 19 nt, Artificial Sequence
  Description of Artificial Sequence: Synthetic oligonucleotide
auaccaugcgccaggccau

SEQ ID NO: 530137 - RNA, 19 nt, Artificial Sequence
  Description of Artificial Sequence: Synthetic oligonucleotide
guggaccaaggaaucguca

SEQ ID NO: 530138 - RNA, 19 nt, Artificial Sequence
  Description of Artificial Sequence: Synthetic oligonucleotide
caugaagggcugaguagua

SEQ ID NO: 530139 - RNA, 19 nt, Artificial Sequence
  Description of Artificial Sequence: Synthetic oligonucleotide
cuguaacgggaaguucuuc

SEQ ID NO: 530140 - RNA, 19 nt, Artificial Sequence
  Description of Artificial Sequence: Synthetic oligonucleotide
cagcgcgcucuuacugggg

SEQ ID NO: 530141 - RNA, 19 nt, Artificial Sequence
  Description of Artificial Sequence: Synthetic oligonucleotide
cugggaccgcugagugugg

SEQ ID NO: 530142 - RNA, 19 nt, Artificial Sequence
  Description of Artificial Sequence: Synthetic oligonucleotide
ccgauuguccauugucuuc

SEQ ID NO: 530143 - RNA, 19 nt, Artificial Sequence
  Description of Artificial Sequence: Synthetic oligonucleotide
ggcucgcaaagaccaauuc

SEQ ID NO: 530144 - RNA, 19 nt, Artificial Sequence
  Description of Artificial Sequence: Synthetic oligonucleotide
gaggcucuuugcauaguua

SEQ ID NO: 530145 - RNA, 19 nt, Artificial Sequence
  Description of Artificial Sequence: Synthetic oligonucleotide
ggaccaaggaaucgucaaa

SEQ ID NO: 530146 - RNA, 19 nt, Artificial Sequence
  Description of Artificial Sequence: Synthetic oligonucleotide
gaacccucugggcuugggu

SEQ ID NO: 530147 - RNA, 19 nt, Artificial Sequence
  Description of Artificial Sequence: Synthetic oligonucleotide
ucgcucagacuggugccga

SEQ ID NO: 530148 - RNA, 19 nt, Artificial Sequence
  Description of Artificial Sequence: Synthetic oligonucleotide
ggucaacccaccaaugaua

SEQ ID NO: 530149 - RNA, 19 nt, Artificial Sequence
  Description of Artificial Sequence: Synthetic oligonucleotide
accaugcgccaggccaugg

SEQ ID NO: 530150 - RNA, 19 nt, Artificial Sequence
  Description of Artificial Sequence: Synthetic oligonucleotide
guggacguugauucccgua

SEQ ID NO: 530151 - RNA, 19 nt, Artificial Sequence
  Description of Artificial Sequence: Synthetic oligonucleotide
uggacacgccgcugcugga

SEQ ID NO: 530152 - RNA, 19 nt, Artificial Sequence
  Description of Artificial Sequence: Synthetic oligonucleotide
gaacaacuucagcgccauc

SEQ ID NO: 530153 - RNA, 19 nt, Artificial Sequence
  Description of Artificial Sequence: Synthetic oligonucleotide
ccgguuaaugcgauuguaa

SEQ ID NO: 530154 - RNA, 19 nt, Artificial Sequence
  Description of Artificial Sequence: Synthetic oligonucleotide
ugauucccguaaggcucgc

SEQ ID NO: 530155 - RNA, 19 nt, Artificial Sequence
  Description of Artificial Sequence: Synthetic oligonucleotide
cguuaugacacuggucaac

SEQ ID NO: 530156 - RNA, 19 nt, Artificial Sequence
  Description of Artificial Sequence: Synthetic oligonucleotide
uccgagcugccuggcugag

SEQ ID NO: 530157 - RNA, 19 nt, Artificial Sequence
  Description of Artificial Sequence: Synthetic oligonucleotide
ggucgucauauuugaccuc

SEQ ID NO: 530158 - RNA, 19 nt, Artificial Sequence
  Description of Artificial Sequence: Synthetic oligonucleotide
ccgaaugagugggaauccc

SEQ ID NO: 530159 - RNA, 19 nt, Artificial Sequence
  Description of Artificial Sequence: Synthetic oligonucleotide
cugggacuuuuauuaauuu

SEQ ID NO: 530160 - RNA, 19 nt, Artificial Sequence
  Description of Artificial Sequence: Synthetic oligonucleotide
guacacggccuuggaugag

SEQ ID NO: 530161 - RNA, 19 nt, Artificial Sequence
  Description of Artificial Sequence: Synthetic oligonucleotide
cucauugcucagggguguc

SEQ ID NO: 530162 - RNA, 19 nt, Artificial Sequence
  Description of Artificial Sequence: Synthetic oligonucleotide
cucaagcaugugacuagcu

SEQ ID NO: 530163 - RNA, 19 nt, Artificial Sequence
  Description of Artificial Sequence: Synthetic oligonucleotide
ggacacgccgcugcuggag

SEQ ID NO: 530164 - RNA, 19 nt, Artificial Sequence
  Description of Artificial Sequence: Synthetic oligonucleotide
ggaaguguuuaaggauguc

SEQ ID NO: 530165 - RNA, 19 nt, Artificial Sequence
  Description of Artificial Sequence: Synthetic oligonucleotide
gacacgccgcugcuggagu

SEQ ID NO: 530166 - RNA, 19 nt, Artificial Sequence
  Description of Artificial Sequence: Synthetic oligonucleotide
gauucccguaaggcucgca

SEQ ID NO: 530167 - RNA, 19 nt, Artificial Sequence
  Description of Artificial Sequence: Synthetic oligonucleotide
cuguugacguuaugacacu

SEQ ID NO: 530168 - RNA, 19 nt, Artificial Sequence
  Description of Artificial Sequence: Synthetic oligonucleotide
gacgggccugggauggaca

SEQ ID NO: 530169 - RNA, 19 nt, Artificial Sequence
  Description of Artificial Sequence: Synthetic oligonucleotide
cacgccgcugcuggaguug

SEQ ID NO: 530170 - RNA, 19 nt, Artificial Sequence
  Description of Artificial Sequence: Synthetic oligonucleotide
ugcuccgguuaaugcgauu

SEQ ID NO: 530171 - RNA, 19 nt, Artificial Sequence
  Description of Artificial Sequence: Synthetic oligonucleotide
aggcucgcaaagaccaauu

SEQ ID NO: 530172 - RNA, 19 nt, Artificial Sequence
  Description of Artificial Sequence: Synthetic oligonucleotide
gccagauaugaagccgcug

SEQ ID NO: 530173 - RNA, 19 nt, Artificial Sequence
  Description of Artificial Sequence: Synthetic oligonucleotide
accuccgauuucacaugca

SEQ ID NO: 530174 - RNA, 19 nt, Artificial Sequence
  Description of Artificial Sequence: Synthetic oligonucleotide
caugcaccauuggcuucug

SEQ ID NO: 530175 - RNA, 19 nt, Artificial Sequence
  Description of Artificial Sequence: Synthetic oligonucleotide
cuacguaguccccacucuu

SEQ ID NO: 530176 - RNA, 19 nt, Artificial Sequence
  Description of Artificial Sequence: Synthetic oligonucleotide
ggggaacuucacggcauug

SEQ ID NO: 530177 - RNA, 19 nt, Artificial Sequence
  Description of Artificial Sequence: Synthetic oligonucleotide
cucgaggaaaauggccucu

SEQ ID NO: 530178 - RNA, 19 nt, Artificial Sequence
  Description of Artificial Sequence: Synthetic oligonucleotide
cauaggggugcacccgagu

SEQ ID NO: 530179 - RNA, 19 nt, Artificial Sequence
  Description of Artificial Sequence: Synthetic oligonucleotide
cagcaacgugguuuccgaa

SEQ ID NO: 530180 - RNA, 19 nt, Artificial Sequence
  Description of Artificial Sequence: Synthetic oligonucleotide
caugcgccaggccauggau

SEQ ID NO: 530181 - RNA, 19 nt, Artificial Sequence
  Description of Artificial Sequence: Synthetic oligonucleotide
ccuugcucuguaacgggaa

SEQ ID NO: 530182 - RNA, 19 nt, Artificial Sequence
  Description of Artificial Sequence: Synthetic oligonucleotide
guaguaccaaugagcuggu

SEQ ID NO: 530183 - RNA, 19 nt, Artificial Sequence
  Description of Artificial Sequence: Synthetic oligonucleotide
gcacccgagugaauggguc

SEQ ID NO: 530184 - RNA, 19 nt, Artificial Sequence
  Description of Artificial Sequence: Synthetic oligonucleotide
cuccgguuaaugcgauugu

SEQ ID NO: 530185 - RNA, 19 nt, Artificial Sequence
  Description of Artificial Sequence: Synthetic oligonucleotide
cuuccacuguugacguuau

SEQ ID NO: 530186 - RNA, 19 nt, Artificial Sequence
  Description of Artificial Sequence: Synthetic oligonucleotide
cuuccccaggccaucugau

SEQ ID NO: 530187 - RNA, 19 nt, Artificial Sequence
  Description of Artificial Sequence: Synthetic oligonucleotide
gugucacauagagcaugaa

SEQ ID NO: 530188 - RNA, 19 nt, Artificial Sequence
  Description of Artificial Sequence: Synthetic oligonucleotide
cgcaaagaccaauucuucu

SEQ ID NO: 530189 - RNA, 19 nt, Artificial Sequence
  Description of Artificial Sequence: Synthetic oligonucleotide
cucguccacugugggagaa

SEQ ID NO: 530190 - RNA, 19 nt, Artificial Sequence
  Description of Artificial Sequence: Synthetic oligonucleotide
gccgauuguccauugucuu

SEQ ID NO: 530191 - RNA, 19 nt, Artificial Sequence
  Description of Artificial Sequence: Synthetic oligonucleotide
ggugccgauuguccauugu

SEQ ID NO: 530192 - RNA, 19 nt, Artificial Sequence
  Description of Artificial Sequence: Synthetic oligonucleotide
gugcucgagucgguccauc

SEQ ID NO: 530193 - RNA, 19 nt, Artificial Sequence
  Description of Artificial Sequence: Synthetic oligonucleotide
ggacgggccugggauggac

SEQ ID NO: 530194 - RNA, 19 nt, Artificial Sequence
  Description of Artificial Sequence: Synthetic oligonucleotide
ccaaccgcacaagcacuuc

SEQ ID NO: 530195 - RNA, 19 nt, Artificial Sequence
  Description of Artificial Sequence: Synthetic oligonucleotide
ccagguuugcagggugauc

SEQ ID NO: 530196 - RNA, 19 nt, Artificial Sequence
  Description of Artificial Sequence: Synthetic oligonucleotide
ccucucggucuacguaguc

SEQ ID NO: 530197 - RNA, 19 nt, Artificial Sequence
  Description of Artificial Sequence: Synthetic oligonucleotide
cgcgcucuuacuggggaac

SEQ ID NO: 530198 - RNA, 19 nt, Artificial Sequence
  Description of Artificial Sequence: Synthetic oligonucleotide
gcucguccacugugggaga

SEQ ID NO: 530199 - RNA, 19 nt, Artificial Sequence
  Description of Artificial Sequence: Synthetic oligonucleotide
ccuaagauccgagcugccu

SEQ ID NO: 530200 - RNA, 19 nt, Artificial Sequence
  Description of Artificial Sequence: Synthetic oligonucleotide
caucggggaugacucugau

SEQ ID NO: 530201 - RNA, 19 nt, Artificial Sequence
  Description of Artificial Sequence: Synthetic oligonucleotide
gggaccgcugaguguggcu

SEQ ID NO: 530202 - RNA, 19 nt, Artificial Sequence
  Description of Artificial Sequence: Synthetic oligonucleotide
gccugaacgaccagcccau

SEQ ID NO: 530203 - RNA, 19 nt, Artificial Sequence
  Description of Artificial Sequence: Synthetic oligonucleotide
gcaugguaccugauguauu

SEQ ID NO: 530204 - RNA, 19 nt, Artificial Sequence
  Description of Artificial Sequence: Synthetic oligonucleotide
ggccagauaugaagccgcu

SEQ ID NO: 530205 - RNA, 19 nt, Artificial Sequence
  Description of Artificial Sequence: Synthetic oligonucleotide
ccugaacgaccagcccaug

SEQ ID NO: 530206 - RNA, 19 nt, Artificial Sequence
  Description of Artificial Sequence: Synthetic oligonucleotide
gcgcgcucuuacuggggaa

SEQ ID NO: 530207 - RNA, 19 nt, Artificial Sequence
  Description of Artificial Sequence: Synthetic oligonucleotide
cugcagugcucgagucggu

SEQ ID NO: 530208 - RNA, 19 nt, Artificial Sequence
  Description of Artificial Sequence: Synthetic oligonucleotide
ccgagugaauggguccaga

SEQ ID NO: 530209 - RNA, 19 nt, Artificial Sequence
  Description of Artificial Sequence: Synthetic oligonucleotide
caacgucgaugcuccgguu

SEQ ID NO: 530210 - RNA, 19 nt, Artificial Sequence
  Description of Artificial Sequence: Synthetic oligonucleotide
gcgcucuuacuggggaacu

SEQ ID NO: 530211 - RNA, 19 nt, Artificial Sequence
  Description of Artificial Sequence: Synthetic oligonucleotide
ggggugucacauagagcau

SEQ ID NO: 530212 - RNA, 19 nt, Artificial Sequence
  Description of Artificial Sequence: Synthetic oligonucleotide
ccgaacccucugggcuugg

SEQ ID NO: 530213 - RNA, 19 nt, Artificial Sequence
  Description of Artificial Sequence: Synthetic oligonucleotide
ccccaacauuuccauacuu

SEQ ID NO: 530214 - RNA, 19 nt, Artificial Sequence
  Description of Artificial Sequence: Synthetic oligonucleotide
gcucagacuggugccgauu

SEQ ID NO: 530215 - RNA, 19 nt, Artificial Sequence
  Description of Artificial Sequence: Synthetic oligonucleotide
gccucucggucuacguagu

SEQ ID NO: 530216 - RNA, 19 nt, Artificial Sequence
  Description of Artificial Sequence: Synthetic oligonucleotide
cucaccgccugggcuguuu

SEQ ID NO: 530217 - RNA, 19 nt, Artificial Sequence
  Description of Artificial Sequence: Synthetic oligonucleotide
gggacgggccugggaugga

SEQ ID NO: 530218 - RNA, 19 nt, Artificial Sequence
  Description of Artificial Sequence: Synthetic oligonucleotide
ccgauuucacaugcaccau

SEQ ID NO: 530219 - RNA, 19 nt, Artificial Sequence
  Description of Artificial Sequence: Synthetic oligonucleotide
caccugccacuggcuuggu

SEQ ID NO: 530220 - RNA, 19 nt, Artificial Sequence
  Description of Artificial Sequence: Synthetic oligonucleotide
cgcucagacuggugccgau

SEQ ID NO: 530221 - RNA, 19 nt, Artificial Sequence
  Description of Artificial Sequence: Synthetic oligonucleotide
gcagccccugugggccagu

SEQ ID NO: 530222 - RNA, 19 nt, Artificial Sequence
  Description of Artificial Sequence: Synthetic oligonucleotide
cgucgaugcuccgguuaau

SEQ ID NO: 530223 - RNA, 19 nt, Artificial Sequence
  Description of Artificial Sequence: Synthetic oligonucleotide
auaucuaucugauaaaugc

SEQ ID NO: 530224 - RNA, 19 nt, Artificial Sequence
  Description of Artificial Sequence: Synthetic oligonucleotide
aauuacucaguuuuaguuc

SEQ ID NO: 530225 - RNA, 19 nt, Artificial Sequence
  Description of Artificial Sequence: Synthetic oligonucleotide
auauuaauuaaccugaagu

SEQ ID NO: 530226 - RNA, 19 nt, Artificial Sequence
  Description of Artificial Sequence: Synthetic oligonucleotide
aauuguugccugcauauac

SEQ ID NO: 530227 - RNA, 19 nt, Artificial Sequence
  Description of Artificial Sequence: Synthetic oligonucleotide
aaguauaucuaucugauaa

SEQ ID NO: 530228 - RNA, 19 nt, Artificial Sequence
  Description of Artificial Sequence: Synthetic oligonucleotide
uuuuccaccaaccugauuc

SEQ ID NO: 530229 - RNA, 19 nt, Artificial Sequence
  Description of Artificial Sequence: Synthetic oligonucleotide
acuaccauacuuuagucac

SEQ ID NO: 530230 - RNA, 19 nt, Artificial Sequence
  Description of Artificial Sequence: Synthetic oligonucleotide
aaaugaaaagucacuaggc

SEQ ID NO: 530231 - RNA, 19 nt, Artificial Sequence
  Description of Artificial Sequence: Synthetic oligonucleotide
acaaguccuaccuauauac

SEQ ID NO: 530232 - RNA, 19 nt, Artificial Sequence
  Description of Artificial Sequence: Synthetic oligonucleotide
aaaccaacggaacccaagc

SEQ ID NO: 530233 - RNA, 19 nt, Artificial Sequence
  Description of Artificial Sequence: Synthetic oligonucleotide
uucaauaguucaaagagac

SEQ ID NO: 530234 - RNA, 19 nt, Artificial Sequence
  Description of Artificial Sequence: Synthetic oligonucleotide
aacauuggaacccucucac

SEQ ID NO: 530235 - RNA, 19 nt, Artificial Sequence
  Description of Artificial Sequence: Synthetic oligonucleotide
uacuauacagaacugaacu

SEQ ID NO: 530236 - RNA, 19 nt, Artificial Sequence
  Description of Artificial Sequence: Synthetic oligonucleotide
uucgauuccagaaacacca

SEQ ID NO: 530237 - RNA, 19 nt, Artificial Sequence
  Description of Artificial Sequence: Synthetic oligonucleotide
uacauguuaaauaauauuu

SEQ ID NO: 530238 - RNA, 19 nt, Artificial Sequence
  Description of Artificial Sequence: Synthetic oligonucleotide
aagaugcaaauacagauga

SEQ ID NO: 530239 - RNA, 19 nt, Artificial Sequence
  Description of Artificial Sequence: Synthetic oligonucleotide
aagauggugaauuucagau

SEQ ID NO: 530240 - RNA, 19 nt, Artificial Sequence
  Description of Artificial Sequence: Synthetic oligonucleotide
aaugaaaagucacuaggcu

SEQ ID NO: 530241 - RNA, 19 nt, Artificial Sequence
  Description of Artificial Sequence: Synthetic oligonucleotide
uauuaauuaaccugaaguc

SEQ ID NO: 530242 - RNA, 19 nt, Artificial Sequence
  Description of Artificial Sequence: Synthetic oligonucleotide
aaucguuuucuuuuccgac

SEQ ID NO: 530243 - RNA, 19 nt, Artificial Sequence
  Description of Artificial Sequence: Synthetic oligonucleotide
ucuagaauaccaaugguaa

SEQ ID NO: 530244 - RNA, 19 nt, Artificial Sequence
  Description of Artificial Sequence: Synthetic oligonucleotide
aaucuucaagauuagccag

SEQ ID NO: 530245 - RNA, 19 nt, Artificial Sequence
  Description of Artificial Sequence: Synthetic oligonucleotide
aaguccuaccuauauacuc

SEQ ID NO: 530246 - RNA, 19 nt, Artificial Sequence
  Description of Artificial Sequence: Synthetic oligonucleotide
aauacauuacccgaugcag

SEQ ID NO: 530247 - RNA, 19 nt, Artificial Sequence
  Description of Artificial Sequence: Synthetic oligonucleotide
aaauaccuaaguuguuuac

SEQ ID NO: 530248 - RNA, 19 nt, Artificial Sequence
  Description of Artificial Sequence: Synthetic oligonucleotide
auacuuauaaacuuuacuu

SEQ ID NO: 530249 - RNA, 19 nt, Artificial Sequence
  Description of Artificial Sequence: Synthetic oligonucleotide
aaguauucugccucacacc

SEQ ID NO: 530250 - RNA, 19 nt, Artificial Sequence
  Description of Artificial Sequence: Synthetic oligonucleotide
auagcagaguaguugaaac

SEQ ID NO: 530251 - RNA, 19 nt, Artificial Sequence
  Description of Artificial Sequence: Synthetic oligonucleotide
caguaaauauuaauuaacc

SEQ ID NO: 530252 - RNA, 19 nt, Artificial Sequence
  Description of Artificial Sequence: Synthetic oligonucleotide
aguuaaaccaacggaaccc

SEQ ID NO: 530253 - RNA, 19 nt, Artificial Sequence
  Description of Artificial Sequence: Synthetic oligonucleotide
ugagcauauauaauuguug

SEQ ID NO: 530254 - RNA, 19 nt, Artificial Sequence
  Description of Artificial Sequence: Synthetic oligonucleotide
ucugcaauuaacauuggaa

SEQ ID NO: 530255 - RNA, 19 nt, Artificial Sequence
  Description of Artificial Sequence: Synthetic oligonucleotide
uguagauaaauuauacuau

SEQ ID NO: 530256 - RNA, 19 nt, Artificial Sequence
  Description of Artificial Sequence: Synthetic oligonucleotide
uucaagauuagccagucuc

SEQ ID NO: 530257 - RNA, 19 nt, Artificial Sequence
  Description of Artificial Sequence: Synthetic oligonucleotide
uauaaggugaaugaauuca

SEQ ID NO: 530258 - RNA, 19 nt, Artificial Sequence
  Description of Artificial Sequence: Synthetic oligonucleotide
uuuuguagacuaaacuacc

SEQ ID NO: 530259 - RNA, 19 nt, Artificial Sequence
  Description of Artificial Sequence: Synthetic oligonucleotide
gacuaaacuaccuaccuac

SEQ ID NO: 530260 - RNA, 19 nt, Artificial Sequence
  Description of Artificial Sequence: Synthetic oligonucleotide
uguuacaguacaaauuaga

SEQ ID NO: 530261 - RNA, 19 nt, Artificial Sequence
  Description of Artificial Sequence: Synthetic oligonucleotide
uaccuauauacucaaagac

SEQ ID NO: 530262 - RNA, 19 nt, Artificial Sequence
  Description of Artificial Sequence: Synthetic oligonucleotide
ugcaauuaacauuggaacc

SEQ ID NO: 530263 - RNA, 19 nt, Artificial Sequence
  Description of Artificial Sequence: Synthetic oligonucleotide
ugcaaauaauuccuguugc

SEQ ID NO: 530264 - RNA, 19 nt, Artificial Sequence
  Description of Artificial Sequence: Synthetic oligonucleotide
agcaaguaauacuaugaac

SEQ ID NO: 530265 - RNA, 19 nt, Artificial Sequence
  Description of Artificial Sequence: Synthetic oligonucleotide
uggagaauacagcauauga

SEQ ID NO: 530266 - RNA, 19 nt, Artificial Sequence
  Description of Artificial Sequence: Synthetic oligonucleotide
ucaaaaguuagcacugggc

SEQ ID NO: 530267 - RNA, 19 nt, Artificial Sequence
  Description of Artificial Sequence: Synthetic oligonucleotide
agaauacauuacccgaugc

SEQ ID NO: 530268 - RNA, 19 nt, Artificial Sequence
  Description of Artificial Sequence: Synthetic oligonucleotide
uuauacaacuaccagugaa

SEQ ID NO: 530269 - RNA, 19 nt, Artificial Sequence
  Description of Artificial Sequence: Synthetic oligonucleotide
aauaccaaugguaagucca

SEQ ID NO: 530270 - RNA, 19 nt, Artificial Sequence
  Description of Artificial Sequence: Synthetic oligonucleotide
agcuagaaucucuuggggc

SEQ ID NO: 530271 - RNA, 19 nt, Artificial Sequence
  Description of Artificial Sequence: Synthetic oligonucleotide
uauaucuaucugauaaaug

SEQ ID NO: 530272 - RNA, 19 nt, Artificial Sequence
  Description of Artificial Sequence: Synthetic oligonucleotide
acacagaauacauuacccg

SEQ ID NO: 530273 - RNA, 19 nt, Artificial Sequence
  Description of Artificial Sequence: Synthetic oligonucleotide
uacugauacacaaaagagu

SEQ ID NO: 530274 - RNA, 19 nt, Artificial Sequence
  Description of Artificial Sequence: Synthetic oligonucleotide
ucuaauacuuauaaacuuu

SEQ ID NO: 530275 - RNA, 19 nt, Artificial Sequence
  Description of Artificial Sequence: Synthetic oligonucleotide
uuucaauaguucaaagaga

SEQ ID NO: 530276 - RNA, 19 nt, Artificial Sequence
  Description of Artificial Sequence: Synthetic oligonucleotide
ucuagugcuuguaugacgu

SEQ ID NO: 530277 - RNA, 19 nt, Artificial Sequence
  Description of Artificial Sequence: Synthetic oligonucleotide
gauguaagagccaaagccc

SEQ ID NO: 530278 - RNA, 19 nt, Artificial Sequence
  Description of Artificial Sequence: Synthetic oligonucleotide
aaaccugaacagcagacga

SEQ ID NO: 530279 - RNA, 19 nt, Artificial Sequence
  Description of Artificial Sequence: Synthetic oligonucleotide
uuuccaaacgagaacuggc

SEQ ID NO: 530280 - RNA, 19 nt, Artificial Sequence
  Description of Artificial Sequence: Synthetic oligonucleotide
acaauaaguaaacuacaug

SEQ ID NO: 530281 - RNA, 19 nt, Artificial Sequence
  Description of Artificial Sequence: Synthetic oligonucleotide
aaguauagcagaguaguug

SEQ ID NO: 530282 - RNA, 19 nt, Artificial Sequence
  Description of Artificial Sequence: Synthetic oligonucleotide
uaguguagauaaauuauac

SEQ ID NO: 530283 - RNA, 19 nt, Artificial Sequence
  Description of Artificial Sequence: Synthetic oligonucleotide
cuuguugcaaaucucguug

SEQ ID NO: 530284 - RNA, 19 nt, Artificial Sequence
  Description of Artificial Sequence: Synthetic oligonucleotide
auauaaggugaaugaauuc

SEQ ID NO: 530285 - RNA, 19 nt, Artificial Sequence
  Description of Artificial Sequence: Synthetic oligonucleotide
aacuuaaugacuuccuauu

SEQ ID NO: 530286 - RNA, 19 nt, Artificial Sequence
  Description of Artificial Sequence: Synthetic oligonucleotide
gguaaguccaccgagaugc

SEQ ID NO: 530287 - RNA, 19 nt, Artificial Sequence
  Description of Artificial Sequence: Synthetic oligonucleotide
ugaagcaaguaauacuaug

SEQ ID NO: 530288 - RNA, 19 nt, Artificial Sequence
  Description of Artificial Sequence: Synthetic oligonucleotide
caauaaguaaacuacaugu

SEQ ID NO: 530289 - RNA, 19 nt, Artificial Sequence
  Description of Artificial Sequence: Synthetic oligonucleotide
cuugagaagacccugccug

SEQ ID NO: 530290 - RNA, 19 nt, Artificial Sequence
  Description of Artificial Sequence: Synthetic oligonucleotide
uuuacuugagaaacauaca

SEQ ID NO: 530291 - RNA, 19 nt, Artificial Sequence
  Description of Artificial Sequence: Synthetic oligonucleotide
uuuuauaaccugaugcuuu

SEQ ID NO: 530292 - RNA, 19 nt, Artificial Sequence
  Description of Artificial Sequence: Synthetic oligonucleotide
auauccaugagccucaguu

SEQ ID NO: 530293 - RNA, 19 nt, Artificial Sequence
  Description of Artificial Sequence: Synthetic oligonucleotide
gaggauauaaggugaauga

SEQ ID NO: 530294 - RNA, 19 nt, Artificial Sequence
  Description of Artificial Sequence: Synthetic oligonucleotide
guguagauaaauuauacua

SEQ ID NO: 530295 - RNA, 19 nt, Artificial Sequence
  Description of Artificial Sequence: Synthetic oligonucleotide
auuccagaaacaccauuac

SEQ ID NO: 530296 - RNA, 19 nt, Artificial Sequence
  Description of Artificial Sequence: Synthetic oligonucleotide
uacacucaguuuaaaagac

SEQ ID NO: 530297 - RNA, 19 nt, Artificial Sequence
  Description of Artificial Sequence: Synthetic oligonucleotide
aaucucguuggcuuccgag

SEQ ID NO: 530298 - RNA, 19 nt, Artificial Sequence
  Description of Artificial Sequence: Synthetic oligonucleotide
acaaguauagcagaguagu

SEQ ID NO: 530299 - RNA, 19 nt, Artificial Sequence
  Description of Artificial Sequence: Synthetic oligonucleotide
auaaguaaacuacauguua

SEQ ID NO: 530300 - RNA, 19 nt, Artificial Sequence
  Description of Artificial Sequence: Synthetic oligonucleotide
uguaugacgugcuccggcg

SEQ ID NO: 530301 - RNA, 19 nt, Artificial Sequence
  Description of Artificial Sequence: Synthetic oligonucleotide
ugaaauggcauaguguaga

SEQ ID NO: 530302 - RNA, 19 nt, Artificial Sequence
  Description of Artificial Sequence: Synthetic oligonucleotide
cucaauuaugaugaugggg

SEQ ID NO: 530303 - RNA, 19 nt, Artificial Sequence
  Description of Artificial Sequence: Synthetic oligonucleotide
caaagcugaucuuacacug

SEQ ID NO: 530304 - RNA, 19 nt, Artificial Sequence
  Description of Artificial Sequence: Synthetic oligonucleotide
uauaaccugaugcuuucug

SEQ ID NO: 530305 - RNA, 19 nt, Artificial Sequence
  Description of Artificial Sequence: Synthetic oligonucleotide
uguucacugaccaaauaaa

SEQ ID NO: 530306 - RNA, 19 nt, Artificial Sequence
  Description of Artificial Sequence: Synthetic oligonucleotide
accaaugguaaguccaccg

SEQ ID NO: 530307 - RNA, 19 nt, Artificial Sequence
  Description of Artificial Sequence: Synthetic oligonucleotide
augaugucauaucaaaagu

SEQ ID NO: 530308 - RNA, 19 nt, Artificial Sequence
  Description of Artificial Sequence: Synthetic oligonucleotide
caguuuuacaaguauagca

SEQ ID NO: 530309 - RNA, 19 nt, Artificial Sequence
  Description of Artificial Sequence: Synthetic oligonucleotide
acuaccagugaauacauuu

SEQ ID NO: 530310 - RNA, 19 nt, Artificial Sequence
  Description of Artificial Sequence: Synthetic oligonucleotide
agagaagaugcaaauacag

SEQ ID NO: 530311 - RNA, 19 nt, Artificial Sequence
  Description of Artificial Sequence: Synthetic oligonucleotide
uucuagugcuuguaugacg

SEQ ID NO: 530312 - RNA, 19 nt, Artificial Sequence
  Description of Artificial Sequence: Synthetic oligonucleotide
ucaagauuagccagucucu

SEQ ID NO: 530313 - RNA, 19 nt, Artificial Sequence
  Description of Artificial Sequence: Synthetic oligonucleotide
auacuggggaaguauaucu

SEQ ID NO: 530314 - RNA, 19 nt, Artificial Sequence
  Description of Artificial Sequence: Synthetic oligonucleotide
acaaauuagaaaagccaac

SEQ ID NO: 530315 - RNA, 19 nt, Artificial Sequence
  Description of Artificial Sequence: Synthetic oligonucleotide
uuccaaacgagaacuggcc

SEQ ID NO: 530316 - RNA, 19 nt, Artificial Sequence
  Description of Artificial Sequence: Synthetic oligonucleotide
uaauuaaccugaagucugc

SEQ ID NO: 530317 - RNA, 19 nt, Artificial Sequence
  Description of Artificial Sequence: Synthetic oligonucleotide
gacuuggcaacugacacag

SEQ ID NO: 530318 - RNA, 19 nt, Artificial Sequence
  Description of Artificial Sequence: Synthetic oligonucleotide
uacagaaguuuaaaugacu

SEQ ID NO: 530319 - RNA, 19 nt, Artificial Sequence
  Description of Artificial Sequence: Synthetic oligonucleotide
gaacaauuuuacugaacug

SEQ ID NO: 530320 - RNA, 19 nt, Artificial Sequence
  Description of Artificial Sequence: Synthetic oligonucleotide
augaauucagugcagcagu

SEQ ID NO: 530321 - RNA, 19 nt, Artificial Sequence
  Description of Artificial Sequence: Synthetic oligonucleotide
aaaugacuuggcaacugac

SEQ ID NO: 530322 - RNA, 19 nt, Artificial Sequence
  Description of Artificial Sequence: Synthetic oligonucleotide
cuuccgaggauauaaggug

SEQ ID NO: 530323 - RNA, 19 nt, Artificial Sequence
  Description of Artificial Sequence: Synthetic oligonucleotide
uaacauuggaacccucuca

SEQ ID NO: 530324 - RNA, 19 nt, Artificial Sequence
  Description of Artificial Sequence: Synthetic oligonucleotide
aaguaaacuacauguuaaa

SEQ ID NO: 530325 - RNA, 19 nt, Artificial Sequence
  Description of Artificial Sequence: Synthetic oligonucleotide
gucacuaggcuucaaacac

SEQ ID NO: 530326 - RNA, 19 nt, Artificial Sequence
  Description of Artificial Sequence: Synthetic oligonucleotide
uuguugcaaaucucguugg

SEQ ID NO: 530327 - RNA, 19 nt, Artificial Sequence
  Description of Artificial Sequence: Synthetic oligonucleotide
ugcuaaaaccaaacaauaa

SEQ ID NO: 530328 - RNA, 19 nt, Artificial Sequence
  Description of Artificial Sequence: Synthetic oligonucleotide
uaaacuaccuaccuaccuu

SEQ ID NO: 530329 - RNA, 19 nt, Artificial Sequence
  Description of Artificial Sequence: Synthetic oligonucleotide
ugaucuuacacugaaccuc

SEQ ID NO: 530330 - RNA, 19 nt, Artificial Sequence
  Description of Artificial Sequence: Synthetic oligonucleotide
uauauacucaaagacugaa

SEQ ID NO: 530331 - RNA, 19 nt, Artificial Sequence
  Description of Artificial Sequence: Synthetic oligonucleotide
agaagacccugccugauug

SEQ ID NO: 530332 - RNA, 19 nt, Artificial Sequence
  Description of Artificial Sequence: Synthetic oligonucleotide
accuaaguuguuuacuuga

SEQ ID NO: 530333 - RNA, 19 nt, Artificial Sequence
  Description of Artificial Sequence: Synthetic oligonucleotide
uuuauaaccugaugcuuuc

SEQ ID NO: 530334 - RNA, 19 nt, Artificial Sequence
  Description of Artificial Sequence: Synthetic oligonucleotide
ucuuuaggccaccuaguca

SEQ ID NO: 530335 - RNA, 19 nt, Artificial Sequence
  Description of Artificial Sequence: Synthetic oligonucleotide
uuuuauugcuuggagaaua

SEQ ID NO: 530336 - RNA, 19 nt, Artificial Sequence
  Description of Artificial Sequence: Synthetic oligonucleotide
auacucaaagacugaagca

SEQ ID NO: 530337 - RNA, 19 nt, Artificial Sequence
  Description of Artificial Sequence: Synthetic oligonucleotide
uggggaaguauaucuaucu

SEQ ID NO: 530338 - RNA, 19 nt, Artificial Sequence
  Description of Artificial Sequence: Synthetic oligonucleotide
gaauacauuacccgaugca

SEQ ID NO: 530339 - RNA, 19 nt, Artificial Sequence
  Description of Artificial Sequence: Synthetic oligonucleotide
ucugagcauauauaauugu

SEQ ID NO: 530340 - RNA, 19 nt, Artificial Sequence
  Description of Artificial Sequence: Synthetic oligonucleotide
aauaaguaaacuacauguu

SEQ ID NO: 530341 - RNA, 19 nt, Artificial Sequence
  Description of Artificial Sequence: Synthetic oligonucleotide
aucucguuggcuuccgagg

SEQ ID NO: 530342 - RNA, 19 nt, Artificial Sequence
  Description of Artificial Sequence: Synthetic oligonucleotide
cuucauauagggcugguca

SEQ ID NO: 530343 - RNA, 19 nt, Artificial Sequence
  Description of Artificial Sequence: Synthetic oligonucleotide
auaucaaaaguuagcacug

SEQ ID NO: 530344 - RNA, 19 nt, Artificial Sequence
  Description of Artificial Sequence: Synthetic oligonucleotide
cuagucaagaaaauguaaa

SEQ ID NO: 530345 - RNA, 19 nt, Artificial Sequence
  Description of Artificial Sequence: Synthetic oligonucleotide
gagaugcauauacaguuac

SEQ ID NO: 530346 - RNA, 19 nt, Artificial Sequence
  Description of Artificial Sequence: Synthetic oligonucleotide
auaaaugcauaacaauauu

SEQ ID NO: 530347 - RNA, 19 nt, Artificial Sequence
  Description of Artificial Sequence: Synthetic oligonucleotide
cuaggcuucaaacacagaa

SEQ ID NO: 530348 - RNA, 19 nt, Artificial Sequence
  Description of Artificial Sequence: Synthetic oligonucleotide
uaucaaaaguuagcacugg

SEQ ID NO: 530349 - RNA, 19 nt, Artificial Sequence
  Description of Artificial Sequence: Synthetic oligonucleotide
caguuaaaccaacggaacc

SEQ ID NO: 530350 - RNA, 19 nt, Artificial Sequence
  Description of Artificial Sequence: Synthetic oligonucleotide
aaugacuuggcaacugaca

SEQ ID NO: 530351 - RNA, 19 nt, Artificial Sequence
  Description of Artificial Sequence: Synthetic oligonucleotide
caaauaauuccuguugcug

SEQ ID NO: 530352 - RNA, 19 nt, Artificial Sequence
  Description of Artificial Sequence: Synthetic oligonucleotide
ucaauaguucaaagagaca

SEQ ID NO: 530353 - RNA, 19 nt, Artificial Sequence
  Description of Artificial Sequence: Synthetic oligonucleotide
aaacuaccuaccuaccuuu

SEQ ID NO: 530354 - RNA, 19 nt, Artificial Sequence
  Description of Artificial Sequence: Synthetic oligonucleotide
uccuauuaccuuagguggc

SEQ ID NO: 530355 - RNA, 19 nt, Artificial Sequence
  Description of Artificial Sequence: Synthetic oligonucleotide
auuaugaugauggggacaa

SEQ ID NO: 530356 - RNA, 19 nt, Artificial Sequence
  Description of Artificial Sequence: Synthetic oligonucleotide
cugaauauccaugagccuc

SEQ ID NO: 530357 - RNA, 19 nt, Artificial Sequence
  Description of Artificial Sequence: Synthetic oligonucleotide
uuccgaggauauaagguga

SEQ ID NO: 530358 - RNA, 19 nt, Artificial Sequence
  Description of Artificial Sequence: Synthetic oligonucleotide
acuaccuaccuaccuuugg

SEQ ID NO: 530359 - RNA, 19 nt, Artificial Sequence
  Description of Artificial Sequence: Synthetic oligonucleotide
cuucgauuccagaaacacc

SEQ ID NO: 530360 - RNA, 19 nt, Artificial Sequence
  Description of Artificial Sequence: Synthetic oligonucleotide
augaaaagucacuaggcuu

SEQ ID NO: 530361 - RNA, 19 nt, Artificial Sequence
  Description of Artificial Sequence: Synthetic oligonucleotide
ucuagcuuuugcaaauaau

SEQ ID NO: 530362 - RNA, 19 nt, Artificial Sequence
  Description of Artificial Sequence: Synthetic oligonucleotide
uuaaaugacuuggcaacug

SEQ ID NO: 530363 - RNA, 19 nt, Artificial Sequence
  Description of Artificial Sequence: Synthetic oligonucleotide
uucuguuauacuggggaag

SEQ ID NO: 530364 - RNA, 19 nt, Artificial Sequence
  Description of Artificial Sequence: Synthetic oligonucleotide
uuguaugacgugcuccggc

SEQ ID NO: 530365 - RNA, 19 nt, Artificial Sequence
  Description of Artificial Sequence: Synthetic oligonucleotide
uaccuuugguacuuaaccu

SEQ ID NO: 530366 - RNA, 19 nt, Artificial Sequence
  Description of Artificial Sequence: Synthetic oligonucleotide
agcagaguaguugaaaccu

SEQ ID NO: 530367 - RNA, 19 nt, Artificial Sequence
  Description of Artificial Sequence: Synthetic oligonucleotide
uuauacuggggaaguauau

SEQ ID NO: 530368 - RNA, 19 nt, Artificial Sequence
  Description of Artificial Sequence: Synthetic oligonucleotide
auaaccugaugcuuucugu

SEQ ID NO: 530369 - RNA, 19 nt, Artificial Sequence
  Description of Artificial Sequence: Synthetic oligonucleotide
aguauaucuaucugauaaa

SEQ ID NO: 530370 - RNA, 19 nt, Artificial Sequence
  Description of Artificial Sequence: Synthetic oligonucleotide
uucugcaauuaacauugga

SEQ ID NO: 530371 - RNA, 19 nt, Artificial Sequence
  Description of Artificial Sequence: Synthetic oligonucleotide
guagauaaauuauacuaua

SEQ ID NO: 530372 - RNA, 19 nt, Artificial Sequence
  Description of Artificial Sequence: Synthetic oligonucleotide
gaugcacuggcugaggcug

SEQ ID NO: 530373 - RNA, 19 nt, Artificial Sequence
  Description of Artificial Sequence: Synthetic oligonucleotide
auuucccuuagcaaagguc

SEQ ID NO: 530374 - RNA, 19 nt, Artificial Sequence
  Description of Artificial Sequence: Synthetic oligonucleotide
acugaagcaaguaauacua

SEQ ID NO: 530375 - RNA, 19 nt, Artificial Sequence
  Description of Artificial Sequence: Synthetic oligonucleotide
agcaaguuaacacuucaua

SEQ ID NO: 530376 - RNA, 19 nt, Artificial Sequence
  Description of Artificial Sequence: Synthetic oligonucleotide
ucuguuauacuggggaagu

SEQ ID NO: 530377 - RNA, 19 nt, Artificial Sequence
  Description of Artificial Sequence: Synthetic oligonucleotide
acuaaacuaccuaccuacc

SEQ ID NO: 530378 - RNA, 19 nt, Artificial Sequence
  Description of Artificial Sequence: Synthetic oligonucleotide
ugacuuccuauuaccuuag

SEQ ID NO: 530379 - RNA, 19 nt, Artificial Sequence
  Description of Artificial Sequence: Synthetic oligonucleotide
ucuuuuccgacuuguugca

SEQ ID NO: 530380 - RNA, 19 nt, Artificial Sequence
  Description of Artificial Sequence: Synthetic oligonucleotide
accuauauacucaaagacu

SEQ ID NO: 530381 - RNA, 19 nt, Artificial Sequence
  Description of Artificial Sequence: Synthetic oligonucleotide
caccgagaugcauauacag

SEQ ID NO: 530382 - RNA, 19 nt, Artificial Sequence
  Description of Artificial Sequence: Synthetic oligonucleotide
uaucugauaaaugcauaac

SEQ ID NO: 530383 - RNA, 19 nt, Artificial Sequence
  Description of Artificial Sequence: Synthetic oligonucleotide
uguaaaugucacuguauuu

SEQ ID NO: 530384 - RNA, 19 nt, Artificial Sequence
  Description of Artificial Sequence: Synthetic oligonucleotide
aaugguaaguccaccgaga

SEQ ID NO: 530385 - RNA, 19 nt, Artificial Sequence
  Description of Artificial Sequence: Synthetic oligonucleotide
uuuacugaacuggagugaa

SEQ ID NO: 530386 - RNA, 19 nt, Artificial Sequence
  Description of Artificial Sequence: Synthetic oligonucleotide
guagacuaaacuaccuacc

SEQ ID NO: 530387 - RNA, 19 nt, Artificial Sequence
  Description of Artificial Sequence: Synthetic oligonucleotide
uacaacuaccagugaauac

SEQ ID NO: 530388 - RNA, 19 nt, Artificial Sequence
  Description of Artificial Sequence: Synthetic oligonucleotide
uacccgaugcaguaaauau

SEQ ID NO: 530389 - RNA, 19 nt, Artificial Sequence
  Description of Artificial Sequence: Synthetic oligonucleotide
ucucguuggcuuccgagga

SEQ ID NO: 530390 - RNA, 19 nt, Artificial Sequence
  Description of Artificial Sequence: Synthetic oligonucleotide
uguuauacuggggaaguau

SEQ ID NO: 530391 - RNA, 19 nt, Artificial Sequence
  Description of Artificial Sequence: Synthetic oligonucleotide
gauuggaugcacuggcuga

SEQ ID NO: 530392 - RNA, 19 nt, Artificial Sequence
  Description of Artificial Sequence: Synthetic oligonucleotide
ccuaccuauauacucaaag

SEQ ID NO: 530393 - RNA, 19 nt, Artificial Sequence
  Description of Artificial Sequence: Synthetic oligonucleotide
aacagcagacgacucuaga

SEQ ID NO: 530394 - RNA, 19 nt, Artificial Sequence
  Description of Artificial Sequence: Synthetic oligonucleotide
ugcucuucgauuccagaaa

SEQ ID NO: 530395 - RNA, 19 nt, Artificial Sequence
  Description of Artificial Sequence: Synthetic oligonucleotide
uacauuacccgaugcagua

SEQ ID NO: 530396 - RNA, 19 nt, Artificial Sequence
  Description of Artificial Sequence: Synthetic oligonucleotide
aaccugaacagcagacgac

SEQ ID NO: 530397 - RNA, 19 nt, Artificial Sequence
  Description of Artificial Sequence: Synthetic oligonucleotide
cuaucugauaaaugcauaa

SEQ ID NO: 530398 - RNA, 19 nt, Artificial Sequence
  Description of Artificial Sequence: Synthetic oligonucleotide
ucacaaguccuaccuauau

SEQ ID NO: 530399 - RNA, 19 nt, Artificial Sequence
  Description of Artificial Sequence: Synthetic oligonucleotide
uaccuaaguuguuuacuug

SEQ ID NO: 530400 - RNA, 19 nt, Artificial Sequence
  Description of Artificial Sequence: Synthetic oligonucleotide
ucaguuaaaagggcagaga

SEQ ID NO: 530401 - RNA, 19 nt, Artificial Sequence
  Description of Artificial Sequence: Synthetic oligonucleotide
aaccaacggaacccaagca

SEQ ID NO: 530402 - RNA, 19 nt, Artificial Sequence
  Description of Artificial Sequence: Synthetic oligonucleotide
aaccugaugcuuucuguaa

SEQ ID NO: 530403 - RNA, 19 nt, Artificial Sequence
  Description of Artificial Sequence: Synthetic oligonucleotide
aaacacuaccauacuuuag

SEQ ID NO: 530404 - RNA, 19 nt, Artificial Sequence
  Description of Artificial Sequence: Synthetic oligonucleotide
gcuuguaugacgugcuccg

SEQ ID NO: 530405 - RNA, 19 nt, Artificial Sequence
  Description of Artificial Sequence: Synthetic oligonucleotide
uuggcuuccgaggauauaa

SEQ ID NO: 530406 - RNA, 19 nt, Artificial Sequence
  Description of Artificial Sequence: Synthetic oligonucleotide
uauuucccuuagcaaaggu

SEQ ID NO: 530407 - RNA, 19 nt, Artificial Sequence
  Description of Artificial Sequence: Synthetic oligonucleotide
uauagcagaguaguugaaa

SEQ ID NO: 530408 - RNA, 19 nt, Artificial Sequence
  Description of Artificial Sequence: Synthetic oligonucleotide
uuaaaagggcagagaagau

SEQ ID NO: 530409 - RNA, 19 nt, Artificial Sequence
  Description of Artificial Sequence: Synthetic oligonucleotide
uagugcuuguaugacgugc

SEQ ID NO: 530410 - RNA, 19 nt, Artificial Sequence
  Description of Artificial Sequence: Synthetic oligonucleotide
uuuuccgacuuguugcaaa

SEQ ID NO: 530411 - RNA, 19 nt, Artificial Sequence
  Description of Artificial Sequence: Synthetic oligonucleotide
auauacucaaagacugaag

SEQ ID NO: 530412 - RNA, 19 nt, Artificial Sequence
  Description of Artificial Sequence: Synthetic oligonucleotide
cugaaauggcauaguguag

SEQ ID NO: 530413 - RNA, 19 nt, Artificial Sequence
  Description of Artificial Sequence: Synthetic oligonucleotide
acgugcuccggcgaaaucg

SEQ ID NO: 530414 - RNA, 19 nt, Artificial Sequence
  Description of Artificial Sequence: Synthetic oligonucleotide
aucugagcauauauaauug

SEQ ID NO: 530415 - RNA, 19 nt, Artificial Sequence
  Description of Artificial Sequence: Synthetic oligonucleotide
auaccaaugguaaguccac

SEQ ID NO: 530416 - RNA, 19 nt, Artificial Sequence
  Description of Artificial Sequence: Synthetic oligonucleotide
uacugaacuggagugaaau

SEQ ID NO: 530417 - RNA, 19 nt, Artificial Sequence
  Description of Artificial Sequence: Synthetic oligonucleotide
guuacagagaagcacuucu

SEQ ID NO: 530418 - RNA, 19 nt, Artificial Sequence
  Description of Artificial Sequence: Synthetic oligonucleotide
ggcucuuuaggccaccuag

SEQ ID NO: 530419 - RNA, 19 nt, Artificial Sequence
  Description of Artificial Sequence: Synthetic oligonucleotide
aguucucgggcgucguugg

SEQ ID NO: 530420 - RNA, 19 nt, Artificial Sequence
  Description of Artificial Sequence: Synthetic oligonucleotide
aacccucucacaaacacua

SEQ ID NO: 530421 - RNA, 19 nt, Artificial Sequence
  Description of Artificial Sequence: Synthetic oligonucleotide
cauaguguagauaaauuau

SEQ ID NO: 530422 - RNA, 19 nt, Artificial Sequence
  Description of Artificial Sequence: Synthetic oligonucleotide
cucuagaauaccaauggua

SEQ ID NO: 530423 - RNA, 19 nt, Artificial Sequence
  Description of Artificial Sequence: Synthetic oligonucleotide
gauauaaggugaaugaauu

SEQ ID NO: 530424 - RNA, 19 nt, Artificial Sequence
  Description of Artificial Sequence: Synthetic oligonucleotide
accaacggaacccaagcaa

SEQ ID NO: 530425 - RNA, 19 nt, Artificial Sequence
  Description of Artificial Sequence: Synthetic oligonucleotide
aauuaaccugaagucugca

SEQ ID NO: 530426 - RNA, 19 nt, Artificial Sequence
  Description of Artificial Sequence: Synthetic oligonucleotide
ucuuacacugaaccucaaa

SEQ ID NO: 530427 - RNA, 19 nt, Artificial Sequence
  Description of Artificial Sequence: Synthetic oligonucleotide
uggaugcacuggcugaggc

SEQ ID NO: 530428 - RNA, 19 nt, Artificial Sequence
  Description of Artificial Sequence: Synthetic oligonucleotide
accugauucaaaguauucu

SEQ ID NO: 530429 - RNA, 19 nt, Artificial Sequence
  Description of Artificial Sequence: Synthetic oligonucleotide
ugcuuguaugacgugcucc

SEQ ID NO: 530430 - RNA, 19 nt, Artificial Sequence
  Description of Artificial Sequence: Synthetic oligonucleotide
aagcuaucacucaauuaug

SEQ ID NO: 530431 - RNA, 19 nt, Artificial Sequence
  Description of Artificial Sequence: Synthetic oligonucleotide
uauacuggggaaguauauc

SEQ ID NO: 530432 - RNA, 19 nt, Artificial Sequence
  Description of Artificial Sequence: Synthetic oligonucleotide
cagaauacauuacccgaug

SEQ ID NO: 530433 - RNA, 19 nt, Artificial Sequence
  Description of Artificial Sequence: Synthetic oligonucleotide
uucagaugucgucaucauc

SEQ ID NO: 530434 - RNA, 19 nt, Artificial Sequence
  Description of Artificial Sequence: Synthetic oligonucleotide
caugagccucaguuaaacc

SEQ ID NO: 530435 - RNA, 19 nt, Artificial Sequence
  Description of Artificial Sequence: Synthetic oligonucleotide
ucuucgucuugagaagacc

SEQ ID NO: 530436 - RNA, 19 nt, Artificial Sequence
  Description of Artificial Sequence: Synthetic oligonucleotide
uucuucgucuugagaagac

SEQ ID NO: 530437 - RNA, 19 nt, Artificial Sequence
  Description of Artificial Sequence: Synthetic oligonucleotide
cagcuagaaucucuugggg

SEQ ID NO: 530438 - RNA, 19 nt, Artificial Sequence
  Description of Artificial Sequence: Synthetic oligonucleotide
ugccugauuggaugcacug

SEQ ID NO: 530439 - RNA, 19 nt, Artificial Sequence
  Description of Artificial Sequence: Synthetic oligonucleotide
gaacuuaaugacuuccuau

SEQ ID NO: 530440 - RNA, 19 nt, Artificial Sequence
  Description of Artificial Sequence: Synthetic oligonucleotide
aguccuaccuauauacuca

SEQ ID NO: 530441 - RNA, 19 nt, Artificial Sequence
  Description of Artificial Sequence: Synthetic oligonucleotide
uuacuucacugauguaaga

SEQ ID NO: 530442 - RNA, 19 nt, Artificial Sequence
  Description of Artificial Sequence: Synthetic oligonucleotide
aagacugaagcaaguaaua

SEQ ID NO: 530443 - RNA, 19 nt, Artificial Sequence
  Description of Artificial Sequence: Synthetic oligonucleotide
uuggagaauacagcauaug

SEQ ID NO: 530444 - RNA, 19 nt, Artificial Sequence
  Description of Artificial Sequence: Synthetic oligonucleotide
ugguaaguccaccgagaug

SEQ ID NO: 530445 - RNA, 19 nt, Artificial Sequence
  Description of Artificial Sequence: Synthetic oligonucleotide
acgacucuagaauaccaau

SEQ ID NO: 530446 - RNA, 19 nt, Artificial Sequence
  Description of Artificial Sequence: Synthetic oligonucleotide
uuacagagaagcacuucuu

SEQ ID NO: 530447 - RNA, 19 nt, Artificial Sequence
  Description of Artificial Sequence: Synthetic oligonucleotide
auuggaugcacuggcugag

SEQ ID NO: 530448 - RNA, 19 nt, Artificial Sequence
  Description of Artificial Sequence: Synthetic oligonucleotide
uucccuuagcaaaggucug

SEQ ID NO: 530449 - RNA, 19 nt, Artificial Sequence
  Description of Artificial Sequence: Synthetic oligonucleotide
uuaaaccaacggaacccaa

SEQ ID NO: 530450 - RNA, 19 nt, Artificial Sequence
  Description of Artificial Sequence: Synthetic oligonucleotide
aaagcugaucuuacacuga

SEQ ID NO: 530451 - RNA, 19 nt, Artificial Sequence
  Description of Artificial Sequence: Synthetic oligonucleotide
aagccaacagugacuaacu

SEQ ID NO: 530452 - RNA, 19 nt, Artificial Sequence
  Description of Artificial Sequence: Synthetic oligonucleotide
uaugacgugcuccggcgaa

SEQ ID NO: 530453 - RNA, 19 nt, Artificial Sequence
  Description of Artificial Sequence: Synthetic oligonucleotide
auuaccuuagguggcauuu

SEQ ID NO: 530454 - RNA, 19 nt, Artificial Sequence
  Description of Artificial Sequence: Synthetic oligonucleotide
auuggaacccucucacaaa

SEQ ID NO: 530455 - RNA, 19 nt, Artificial Sequence
  Description of Artificial Sequence: Synthetic oligonucleotide
augguaaguccaccgagau

SEQ ID NO: 530456 - RNA, 19 nt, Artificial Sequence
  Description of Artificial Sequence: Synthetic oligonucleotide
ugaacagcagacgacucua

SEQ ID NO: 530457 - RNA, 19 nt, Artificial Sequence
  Description of Artificial Sequence: Synthetic oligonucleotide
acuucauauagggcugguc

SEQ ID NO: 530458 - RNA, 19 nt, Artificial Sequence
  Description of Artificial Sequence: Synthetic oligonucleotide
uuuccgacuuguugcaaau

SEQ ID NO: 530459 - RNA, 19 nt, Artificial Sequence
  Description of Artificial Sequence: Synthetic oligonucleotide
cauuggaacccucucacaa

SEQ ID NO: 530460 - RNA, 19 nt, Artificial Sequence
  Description of Artificial Sequence: Synthetic oligonucleotide
caccuagucaagaaaaugu

SEQ ID NO: 530461 - RNA, 19 nt, Artificial Sequence
  Description of Artificial Sequence: Synthetic oligonucleotide
uggcuuccgaggauauaag

SEQ ID NO: 530462 - RNA, 19 nt, Artificial Sequence
  Description of Artificial Sequence: Synthetic oligonucleotide
uuucagaugucgucaucau

SEQ ID NO: 530463 - RNA, 19 nt, Artificial Sequence
  Description of Artificial Sequence: Synthetic oligonucleotide
ucgucuugagaagacccug

SEQ ID NO: 530464 - RNA, 19 nt, Artificial Sequence
  Description of Artificial Sequence: Synthetic oligonucleotide
agacuaaacuaccuaccua

SEQ ID NO: 530465 - RNA, 19 nt, Artificial Sequence
  Description of Artificial Sequence: Synthetic oligonucleotide
uacuguucacugaccaaau

SEQ ID NO: 530466 - RNA, 19 nt, Artificial Sequence
  Description of Artificial Sequence: Synthetic oligonucleotide
uccgaggauauaaggugaa

SEQ ID NO: 530467 - RNA, 19 nt, Artificial Sequence
  Description of Artificial Sequence: Synthetic oligonucleotide
aggauauaaggugaaugaa

SEQ ID NO: 530468 - RNA, 19 nt, Artificial Sequence
  Description of Artificial Sequence: Synthetic oligonucleotide
ccugauuggaugcacuggc

SEQ ID NO: 530469 - RNA, 19 nt, Artificial Sequence
  Description of Artificial Sequence: Synthetic oligonucleotide
uucacaaguccuaccuaua

SEQ ID NO: 530470 - RNA, 19 nt, Artificial Sequence
  Description of Artificial Sequence: Synthetic oligonucleotide
cacuaccauacuuuaguca

SEQ ID NO: 530471 - RNA, 19 nt, Artificial Sequence
  Description of Artificial Sequence: Synthetic oligonucleotide
agcuaucacucaauuauga

SEQ ID NO: 530472 - RNA, 19 nt, Artificial Sequence
  Description of Artificial Sequence: Synthetic oligonucleotide
aaacuacauguuaaauaau

SEQ ID NO: 530473 - RNA, 19 nt, Artificial Sequence
  Description of Artificial Sequence: Synthetic oligonucleotide
gacuuccuauuaccuuagg

SEQ ID NO: 530474 - RNA, 19 nt, Artificial Sequence
  Description of Artificial Sequence: Synthetic oligonucleotide
ggcuugcugcauuugaagc

SEQ ID NO: 530475 - RNA, 19 nt, Artificial Sequence
  Description of Artificial Sequence: Synthetic oligonucleotide
ccaccaaccugauucaaag

SEQ ID NO: 530476 - RNA, 19 nt, Artificial Sequence
  Description of Artificial Sequence: Synthetic oligonucleotide
acagaauacauuacccgau

SEQ ID NO: 530477 - RNA, 19 nt, Artificial Sequence
  Description of Artificial Sequence: Synthetic oligonucleotide
cuggggaaguauaucuauc

SEQ ID NO: 530478 - RNA, 19 nt, Artificial Sequence
  Description of Artificial Sequence: Synthetic oligonucleotide
cgacuuguugcaaaucucg

SEQ ID NO: 530479 - RNA, 19 nt, Artificial Sequence
  Description of Artificial Sequence: Synthetic oligonucleotide
uagugcuacugucuugcau

SEQ ID NO: 530480 - RNA, 19 nt, Artificial Sequence
  Description of Artificial Sequence: Synthetic oligonucleotide
acggaacccaagcaacugu

SEQ ID NO: 530481 - RNA, 19 nt, Artificial Sequence
  Description of Artificial Sequence: Synthetic oligonucleotide
aaaucucguuggcuuccga

SEQ ID NO: 530482 - RNA, 19 nt, Artificial Sequence
  Description of Artificial Sequence: Synthetic oligonucleotide
aguucacgaccaguucucg

SEQ ID NO: 530483 - RNA, 19 nt, Artificial Sequence
  Description of Artificial Sequence: Synthetic oligonucleotide
cagacgacucuagaauacc

SEQ ID NO: 530484 - RNA, 19 nt, Artificial Sequence
  Description of Artificial Sequence: Synthetic oligonucleotide
ccuaaguuguuuacuugag

SEQ ID NO: 530485 - RNA, 19 nt, Artificial Sequence
  Description of Artificial Sequence: Synthetic oligonucleotide
cagugcagcaguucacgac

SEQ ID NO: 530486 - RNA, 19 nt, Artificial Sequence
  Description of Artificial Sequence: Synthetic oligonucleotide
uggaacccucucacaaaca

SEQ ID NO: 530487 - RNA, 19 nt, Artificial Sequence
  Description of Artificial Sequence: Synthetic oligonucleotide
uccggcgaaaucguuuucu

SEQ ID NO: 530488 - RNA, 19 nt, Artificial Sequence
  Description of Artificial Sequence: Synthetic oligonucleotide
auuaaaauccuggcagcua

SEQ ID NO: 530489 - RNA, 19 nt, Artificial Sequence
  Description of Artificial Sequence: Synthetic oligonucleotide
ucucgggcgucguuggcca

SEQ ID NO: 530490 - RNA, 19 nt, Artificial Sequence
  Description of Artificial Sequence: Synthetic oligonucleotide
gggacaaugaugucauauc

SEQ ID NO: 530491 - RNA, 19 nt, Artificial Sequence
  Description of Artificial Sequence: Synthetic oligonucleotide
aaacgagaacuggccuuuc

SEQ ID NO: 530492 - RNA, 19 nt, Artificial Sequence
  Description of Artificial Sequence: Synthetic oligonucleotide
acauuggaacccucucaca

SEQ ID NO: 530493 - RNA, 19 nt, Artificial Sequence
  Description of Artificial Sequence: Synthetic oligonucleotide
uuauaaccugaugcuuucu

SEQ ID NO: 530494 - RNA, 19 nt, Artificial Sequence
  Description of Artificial Sequence: Synthetic oligonucleotide
auacaacuaccagugaaua

SEQ ID NO: 530495 - RNA, 19 nt, Artificial Sequence
  Description of Artificial Sequence: Synthetic oligonucleotide
uggggcuuuggugaauaca

SEQ ID NO: 530496 - RNA, 19 nt, Artificial Sequence
  Description of Artificial Sequence: Synthetic oligonucleotide
uuacccgaugcaguaaaua

SEQ ID NO: 530497 - RNA, 19 nt, Artificial Sequence
  Description of Artificial Sequence: Synthetic oligonucleotide
acugaacuggagugaaaua

SEQ ID NO: 530498 - RNA, 19 nt, Artificial Sequence
  Description of Artificial Sequence: Synthetic oligonucleotide
uuaggccaccuagucaaga

SEQ ID NO: 530499 - RNA, 19 nt, Artificial Sequence
  Description of Artificial Sequence: Synthetic oligonucleotide
cacgaccaguucucgggcg

SEQ ID NO: 530500 - RNA, 19 nt, Artificial Sequence
  Description of Artificial Sequence: Synthetic oligonucleotide
uaguaagaaucaugacaau

SEQ ID NO: 530501 - RNA, 19 nt, Artificial Sequence
  Description of Artificial Sequence: Synthetic oligonucleotide
uuagugcuacugucuugca

SEQ ID NO: 530502 - RNA, 19 nt, Artificial Sequence
  Description of Artificial Sequence: Synthetic oligonucleotide
aacuaccuaccuaccuuug

SEQ ID NO: 530503 - RNA, 19 nt, Artificial Sequence
  Description of Artificial Sequence: Synthetic oligonucleotide
cuuguaugacgugcuccgg

SEQ ID NO: 530504 - RNA, 19 nt, Artificial Sequence
  Description of Artificial Sequence: Synthetic oligonucleotide
uauuaccuuagguggcauu

SEQ ID NO: 530505 - RNA, 19 nt, Artificial Sequence
  Description of Artificial Sequence: Synthetic oligonucleotide
ccaacggaacccaagcaac

SEQ ID NO: 530506 - RNA, 19 nt, Artificial Sequence
  Description of Artificial Sequence: Synthetic oligonucleotide
gauuagccagucucugaaa

SEQ ID NO: 530507 - RNA, 19 nt, Artificial Sequence
  Description of Artificial Sequence: Synthetic oligonucleotide
uccaugagccucaguuaaa

SEQ ID NO: 530508 - RNA, 19 nt, Artificial Sequence
  Description of Artificial Sequence: Synthetic oligonucleotide
cuaaacuaccuaccuaccu

SEQ ID NO: 530509 - RNA, 19 nt, Artificial Sequence
  Description of Artificial Sequence: Synthetic oligonucleotide
caaaucucguuggcuuccg

SEQ ID NO: 530510 - RNA, 19 nt, Artificial Sequence
  Description of Artificial Sequence: Synthetic oligonucleotide
agccucaguuaaaccaacg

SEQ ID NO: 530511 - RNA, 19 nt, Artificial Sequence
  Description of Artificial Sequence: Synthetic oligonucleotide
gacgacucuagaauaccaa

SEQ ID NO: 530512 - RNA, 19 nt, Artificial Sequence
  Description of Artificial Sequence: Synthetic oligonucleotide
ucgauuccagaaacaccau

SEQ ID NO: 530513 - RNA, 19 nt, Artificial Sequence
  Description of Artificial Sequence: Synthetic oligonucleotide
gcuagaaucucuuggggcu

SEQ ID NO: 530514 - RNA, 19 nt, Artificial Sequence
  Description of Artificial Sequence: Synthetic oligonucleotide
cuguguaaaugucacugua

SEQ ID NO: 530515 - RNA, 19 nt, Artificial Sequence
  Description of Artificial Sequence: Synthetic oligonucleotide
cuagugcuuguaugacgug

SEQ ID NO: 530516 - RNA, 19 nt, Artificial Sequence
  Description of Artificial Sequence: Synthetic oligonucleotide
acgaccaguucucgggcgu

SEQ ID NO: 530517 - RNA, 19 nt, Artificial Sequence
  Description of Artificial Sequence: Synthetic oligonucleotide
gaccaguucucgggcgucg

SEQ ID NO: 530518 - RNA, 19 nt, Artificial Sequence
  Description of Artificial Sequence: Synthetic oligonucleotide
ggcgucguuggccacccgg

SEQ ID NO: 530519 - RNA, 19 nt, Artificial Sequence
  Description of Artificial Sequence: Synthetic oligonucleotide
uccuaccuauauacucaaa

SEQ ID NO: 530520 - RNA, 19 nt, Artificial Sequence
  Description of Artificial Sequence: Synthetic oligonucleotide
cugaucuuacacugaaccu

SEQ ID NO: 530521 - RNA, 19 nt, Artificial Sequence
  Description of Artificial Sequence: Synthetic oligonucleotide
caaacuuucuagugcuugu

SEQ ID NO: 530522 - RNA, 19 nt, Artificial Sequence
  Description of Artificial Sequence: Synthetic oligonucleotide
ccucucacaaacacuacca

SEQ ID NO: 530523 - RNA, 19 nt, Artificial Sequence
  Description of Artificial Sequence: Synthetic oligonucleotide
agagacaguuuuacaagua

SEQ ID NO: 530524 - RNA, 19 nt, Artificial Sequence
  Description of Artificial Sequence: Synthetic oligonucleotide
ccucaguuaaaccaacgga

SEQ ID NO: 530525 - RNA, 19 nt, Artificial Sequence
  Description of Artificial Sequence: Synthetic oligonucleotide
ccaagcaacuguuucacaa

SEQ ID NO: 530526 - RNA, 19 nt, Artificial Sequence
  Description of Artificial Sequence: Synthetic oligonucleotide
ggaacuuaaugacuuccua

SEQ ID NO: 530527 - RNA, 19 nt, Artificial Sequence
  Description of Artificial Sequence: Synthetic oligonucleotide
cgacucuagaauaccaaug

SEQ ID NO: 530528 - RNA, 19 nt, Artificial Sequence
  Description of Artificial Sequence: Synthetic oligonucleotide
gccucaucucaauauaaaa

SEQ ID NO: 530529 - RNA, 19 nt, Artificial Sequence
  Description of Artificial Sequence: Synthetic oligonucleotide
uuaccuuagguggcauuua

SEQ ID NO: 530530 - RNA, 19 nt, Artificial Sequence
  Description of Artificial Sequence: Synthetic oligonucleotide
ggcgaaaucguuuucuuuu

SEQ ID NO: 530531 - RNA, 19 nt, Artificial Sequence
  Description of Artificial Sequence: Synthetic oligonucleotide
auauagggcuggucaguua

SEQ ID NO: 530532 - RNA, 19 nt, Artificial Sequence
  Description of Artificial Sequence: Synthetic oligonucleotide
cuaccuaccuaccuuuggu

SEQ ID NO: 530533 - RNA, 19 nt, Artificial Sequence
  Description of Artificial Sequence: Synthetic oligonucleotide
guccuaccuauauacucaa

SEQ ID NO: 530534 - RNA, 19 nt, Artificial Sequence
  Description of Artificial Sequence: Synthetic oligonucleotide
accaugccucaucucaaua

SEQ ID NO: 530535 - RNA, 19 nt, Artificial Sequence
  Description of Artificial Sequence: Synthetic oligonucleotide
ggauauaaggugaaugaau

SEQ ID NO: 530536 - RNA, 19 nt, Artificial Sequence
  Description of Artificial Sequence: Synthetic oligonucleotide
uggccacccggacguuagg

SEQ ID NO: 530537 - RNA, 19 nt, Artificial Sequence
  Description of Artificial Sequence: Synthetic oligonucleotide
accuaccuuugguacuuaa

SEQ ID NO: 530538 - RNA, 19 nt, Artificial Sequence
  Description of Artificial Sequence: Synthetic oligonucleotide
aagcccucuuucauagcaa

SEQ ID NO: 530539 - RNA, 19 nt, Artificial Sequence
  Description of Artificial Sequence: Synthetic oligonucleotide
guaugacgugcuccggcga

SEQ ID NO: 530540 - RNA, 19 nt, Artificial Sequence
  Description of Artificial Sequence: Synthetic oligonucleotide
cacaaguccuaccuauaua

SEQ ID NO: 530541 - RNA, 19 nt, Artificial Sequence
  Description of Artificial Sequence: Synthetic oligonucleotide
gcagacgacucuagaauac

SEQ ID NO: 530542 - RNA, 19 nt, Artificial Sequence
  Description of Artificial Sequence: Synthetic oligonucleotide
ccaccuagucaagaaaaug

SEQ ID NO: 530543 - RNA, 19 nt, Artificial Sequence
  Description of Artificial Sequence: Synthetic oligonucleotide
cugaacagcagacgacucu

SEQ ID NO: 530544 - RNA, 19 nt, Artificial Sequence
  Description of Artificial Sequence: Synthetic oligonucleotide
acauuacccgaugcaguaa

SEQ ID NO: 530545 - RNA, 19 nt, Artificial Sequence
  Description of Artificial Sequence: Synthetic oligonucleotide
ccaugagccucaguuaaac

SEQ ID NO: 530546 - RNA, 19 nt, Artificial Sequence
  Description of Artificial Sequence: Synthetic oligonucleotide
caaguccuaccuauauacu

SEQ ID NO: 530547 - RNA, 19 nt, Artificial Sequence
  Description of Artificial Sequence: Synthetic oligonucleotide
aacuaccagugaauacauu

SEQ ID NO: 530548 - RNA, 19 nt, Artificial Sequence
  Description of Artificial Sequence: Synthetic oligonucleotide
uugggcggcuugcugcauu

SEQ ID NO: 530549 - RNA, 19 nt, Artificial Sequence
  Description of Artificial Sequence: Synthetic oligonucleotide
gaacccucucacaaacacu

SEQ ID NO: 530550 - RNA, 19 nt, Artificial Sequence
  Description of Artificial Sequence: Synthetic oligonucleotide
ugacgugcuccggcgaaau

SEQ ID NO: 530551 - RNA, 19 nt, Artificial Sequence
  Description of Artificial Sequence: Synthetic oligonucleotide
gugcuuguaugacgugcuc

SEQ ID NO: 530552 - RNA, 19 nt, Artificial Sequence
  Description of Artificial Sequence: Synthetic oligonucleotide
ucgggcgucguuggccacc

SEQ ID NO: 530553 - RNA, 19 nt, Artificial Sequence
  Description of Artificial Sequence: Synthetic oligonucleotide
auuacccgaugcaguaaau

SEQ ID NO: 530554 - RNA, 19 nt, Artificial Sequence
  Description of Artificial Sequence: Synthetic oligonucleotide
ccgacuuguugcaaaucuc

SEQ ID NO: 530555 - RNA, 19 nt, Artificial Sequence
  Description of Artificial Sequence: Synthetic oligonucleotide
ugggcggcuugcugcauuu

SEQ ID NO: 530556 - RNA, 19 nt, Artificial Sequence
  Description of Artificial Sequence: Synthetic oligonucleotide
guucucgggcgucguuggc

SEQ ID NO: 530557 - RNA, 19 nt, Artificial Sequence
  Description of Artificial Sequence: Synthetic oligonucleotide
gcccaaacuuucuagugcu

SEQ ID NO: 530558 - RNA, 19 nt, Artificial Sequence
  Description of Artificial Sequence: Synthetic oligonucleotide
cuaccauacuuuagucacu

SEQ ID NO: 530559 - RNA, 19 nt, Artificial Sequence
  Description of Artificial Sequence: Synthetic oligonucleotide
gacgugcuccggcgaaauc

SEQ ID NO: 530560 - RNA, 19 nt, Artificial Sequence
  Description of Artificial Sequence: Synthetic oligonucleotide
cugaagcaaguaauacuau

SEQ ID NO: 530561 - RNA, 19 nt, Artificial Sequence
  Description of Artificial Sequence: Synthetic oligonucleotide
ccugaacagcagacgacuc

SEQ ID NO: 530562 - RNA, 19 nt, Artificial Sequence
  Description of Artificial Sequence: Synthetic oligonucleotide
ggcggcuugcugcauuuga

SEQ ID NO: 530563 - RNA, 19 nt, Artificial Sequence
  Description of Artificial Sequence: Synthetic oligonucleotide
caaguauagcagaguaguu

SEQ ID NO: 530564 - RNA, 19 nt, Artificial Sequence
  Description of Artificial Sequence: Synthetic oligonucleotide
cucucacaaacacuaccau

SEQ ID NO: 530565 - RNA, 19 nt, Artificial Sequence
  Description of Artificial Sequence: Synthetic oligonucleotide
cagcaguucacgaccaguu

SEQ ID NO: 530566 - RNA, 19 nt, Artificial Sequence
  Description of Artificial Sequence: Synthetic oligonucleotide
accuuagguggcauuuauu

SEQ ID NO: 530567 - RNA, 19 nt, Artificial Sequence
  Description of Artificial Sequence: Synthetic oligonucleotide
cuucaagauuagccagucu

SEQ ID NO: 530568 - RNA, 19 nt, Artificial Sequence
  Description of Artificial Sequence: Synthetic oligonucleotide
ccucacaccaugccucauc

SEQ ID NO: 530569 - RNA, 19 nt, Artificial Sequence
  Description of Artificial Sequence: Synthetic oligonucleotide
guaaguccaccgagaugca

SEQ ID NO: 530570 - RNA, 19 nt, Artificial Sequence
  Description of Artificial Sequence: Synthetic oligonucleotide
caccaaccugauucaaagu

SEQ ID NO: 530571 - RNA, 19 nt, Artificial Sequence
  Description of Artificial Sequence: Synthetic oligonucleotide
caaacgagaacuggccuuu

SEQ ID NO: 530572 - RNA, 19 nt, Artificial Sequence
  Description of Artificial Sequence: Synthetic oligonucleotide
cuccggcgaaaucguuuuc

SEQ ID NO: 530573 - RNA, 19 nt, Artificial Sequence
  Description of Artificial Sequence: Synthetic oligonucleotide
augacgugcuccggcgaaa

SEQ ID NO: 530574 - RNA, 19 nt, Artificial Sequence
  Description of Artificial Sequence: Synthetic oligonucleotide
ggcauaguguagauaaauu

SEQ ID NO: 530575 - RNA, 19 nt, Artificial Sequence
  Description of Artificial Sequence: Synthetic oligonucleotide
cuuuuccgacuuguugcaa

SEQ ID NO: 530576 - RNA, 19 nt, Artificial Sequence
  Description of Artificial Sequence: Synthetic oligonucleotide
cauauagggcuggucaguu

SEQ ID NO: 530577 - RNA, 19 nt, Artificial Sequence
  Description of Artificial Sequence: Synthetic oligonucleotide
cugccugauuggaugcacu

SEQ ID NO: 530578 - RNA, 19 nt, Artificial Sequence
  Description of Artificial Sequence: Synthetic oligonucleotide
cuaccuaccuuugguacuu

SEQ ID NO: 530579 - RNA, 19 nt, Artificial Sequence
  Description of Artificial Sequence: Synthetic oligonucleotide
cucgggcgucguuggccac

SEQ ID NO: 530580 - RNA, 19 nt, Artificial Sequence
  Description of Artificial Sequence: Synthetic oligonucleotide
cgagaugcauauacaguua

SEQ ID NO: 530581 - RNA, 19 nt, Artificial Sequence
  Description of Artificial Sequence: Synthetic oligonucleotide
guuggccacccggacguua

SEQ ID NO: 530582 - RNA, 19 nt, Artificial Sequence
  Description of Artificial Sequence: Synthetic oligonucleotide
cuagaaucucuuggggcuu

SEQ ID NO: 530583 - RNA, 19 nt, Artificial Sequence
  Description of Artificial Sequence: Synthetic oligonucleotide
gcuccggcgaaaucguuuu

SEQ ID NO: 530584 - RNA, 19 nt, Artificial Sequence
  Description of Artificial Sequence: Synthetic oligonucleotide
cuauuaccuuagguggcau

SEQ ID NO: 530585 - RNA, 19 nt, Artificial Sequence
  Description of Artificial Sequence: Synthetic oligonucleotide
gcggcuugcugcauuugaa

SEQ ID NO: 530586 - RNA, 19 nt, Artificial Sequence
  Description of Artificial Sequence: Synthetic oligonucleotide
ccgaugcaguaaauauuaa

SEQ ID NO: 530587 - RNA, 19 nt, Artificial Sequence
  Description of Artificial Sequence: Synthetic oligonucleotide
cucguuggcuuccgaggau

SEQ ID NO: 530588 - RNA, 19 nt, Artificial Sequence
  Description of Artificial Sequence: Synthetic oligonucleotide
gccaccuagucaagaaaau

SEQ ID NO: 530589 - RNA, 19 nt, Artificial Sequence
  Description of Artificial Sequence: Synthetic oligonucleotide
gggcggcuugcugcauuug

SEQ ID NO: 530590 - RNA, 19 nt, Artificial Sequence
  Description of Artificial Sequence: Synthetic oligonucleotide
gggcgucguuggccacccg

SEQ ID NO: 530591 - RNA, 19 nt, Artificial Sequence
  Description of Artificial Sequence: Synthetic oligonucleotide
cgugcuccggcgaaaucgu

SEQ ID NO: 530592 - RNA, 19 nt, Artificial Sequence
  Description of Artificial Sequence: Synthetic oligonucleotide
ccggcgaaaucguuuucuu

SEQ ID NO: 530593 - RNA, 19 nt, Artificial Sequence
  Description of Artificial Sequence: Synthetic oligonucleotide
cgaccaguucucgggcguc

SEQ ID NO: 530594 - RNA, 19 nt, Artificial Sequence
  Description of Artificial Sequence: Synthetic oligonucleotide
ccgaggauauaaggugaau

SEQ ID NO: 530595 - RNA, 19 nt, Artificial Sequence
  Description of Artificial Sequence: Synthetic oligonucleotide
cguuggcuuccgaggauau

SEQ ID NO: 530596 - RNA, 19 nt, Artificial Sequence
  Description of Artificial Sequence: Synthetic oligonucleotide
cggcgaaaucguuuucuuu

SEQ ID NO: 530597 - RNA, 19 nt, Artificial Sequence
  Description of Artificial Sequence: Synthetic oligonucleotide
gugcuccggcgaaaucguu

SEQ ID NO: 530598 - RNA, 19 nt, Artificial Sequence
  Description of Artificial Sequence: Synthetic oligonucleotide
aaagauauacauuugagcu

SEQ ID NO: 530599 - RNA, 19 nt, Artificial Sequence
  Description of Artificial Sequence: Synthetic oligonucleotide
acaauauaaagccuaaggg

SEQ ID NO: 530600 - RNA, 19 nt, Artificial Sequence
  Description of Artificial Sequence: Synthetic oligonucleotide
ucuaccaagauuuucuugg

SEQ ID NO: 530601 - RNA, 19 nt, Artificial Sequence
  Description of Artificial Sequence: Synthetic oligonucleotide
ugacaauuggcaauuaggg

SEQ ID NO: 530602 - RNA, 19 nt, Artificial Sequence
  Description of Artificial Sequence: Synthetic oligonucleotide
aaacccguugaucauaugg

SEQ ID NO: 530603 - RNA, 19 nt, Artificial Sequence
  Description of Artificial Sequence: Synthetic oligonucleotide
ucauauaggaaauaaacuc

SEQ ID NO: 530604 - RNA, 19 nt, Artificial Sequence
  Description of Artificial Sequence: Synthetic oligonucleotide
aaccuguacaaacaccucc

SEQ ID NO: 530605 - RNA, 19 nt, Artificial Sequence
  Description of Artificial Sequence: Synthetic oligonucleotide
ugaacacuaaauuuaaaug

SEQ ID NO: 530606 - RNA, 19 nt, Artificial Sequence
  Description of Artificial Sequence: Synthetic oligonucleotide
uuccauauaacccuuaagu

SEQ ID NO: 530607 - RNA, 19 nt, Artificial Sequence
  Description of Artificial Sequence: Synthetic oligonucleotide
uuuauagacauaccggcag

SEQ ID NO: 530608 - RNA, 19 nt, Artificial Sequence
  Description of Artificial Sequence: Synthetic oligonucleotide
gaaagauauacauuugagc

SEQ ID NO: 530609 - RNA, 19 nt, Artificial Sequence
  Description of Artificial Sequence: Synthetic oligonucleotide
aagauauacauuugagcuc

SEQ ID NO: 530610 - RNA, 19 nt, Artificial Sequence
  Description of Artificial Sequence: Synthetic oligonucleotide
auaaacuccaucucucacc

SEQ ID NO: 530611 - RNA, 19 nt, Artificial Sequence
  Description of Artificial Sequence: Synthetic oligonucleotide
aauaaacuccaucucucac

SEQ ID NO: 530612 - RNA, 19 nt, Artificial Sequence
  Description of Artificial Sequence: Synthetic oligonucleotide
aaagauuacaaugacagaa

SEQ ID NO: 530613 - RNA, 19 nt, Artificial Sequence
  Description of Artificial Sequence: Synthetic oligonucleotide
auuuaagacuucuugguuc

SEQ ID NO: 530614 - RNA, 19 nt, Artificial Sequence
  Description of Artificial Sequence: Synthetic oligonucleotide
aauaucugugcaaaacugc

SEQ ID NO: 530615 - RNA, 19 nt, Artificial Sequence
  Description of Artificial Sequence: Synthetic oligonucleotide
aacauuaagauugcuauug

SEQ ID NO: 530616 - RNA, 19 nt, Artificial Sequence
  Description of Artificial Sequence: Synthetic oligonucleotide
uccaaaguaggguauauag

SEQ ID NO: 530617 - RNA, 19 nt, Artificial Sequence
  Description of Artificial Sequence: Synthetic oligonucleotide
cuuaacugguauuugaagc

SEQ ID NO: 530618 - RNA, 19 nt, Artificial Sequence
  Description of Artificial Sequence: Synthetic oligonucleotide
cucaccaucgguuuaaucc

SEQ ID NO: 530619 - RNA, 19 nt, Artificial Sequence
  Description of Artificial Sequence: Synthetic oligonucleotide
uuuaagacuucuugguucg

SEQ ID NO: 530620 - RNA, 19 nt, Artificial Sequence
  Description of Artificial Sequence: Synthetic oligonucleotide
uguagagagaacuagguuc

SEQ ID NO: 530621 - RNA, 19 nt, Artificial Sequence
  Description of Artificial Sequence: Synthetic oligonucleotide
gaauuugcagauaauagag

SEQ ID NO: 530622 - RNA, 19 nt, Artificial Sequence
  Description of Artificial Sequence: Synthetic oligonucleotide
aaaucaaauacaauaugag

SEQ ID NO: 530623 - RNA, 19 nt, Artificial Sequence
  Description of Artificial Sequence: Synthetic oligonucleotide
aucaguucacaauuuaaac

SEQ ID NO: 530624 - RNA, 19 nt, Artificial Sequence
  Description of Artificial Sequence: Synthetic oligonucleotide
cacaauauaaagccuaagg

SEQ ID NO: 530625 - RNA, 19 nt, Artificial Sequence
  Description of Artificial Sequence: Synthetic oligonucleotide
uuuggaggaauacacuggg

SEQ ID NO: 530626 - RNA, 19 nt, Artificial Sequence
  Description of Artificial Sequence: Synthetic oligonucleotide
aguuauaguucauggaagg

SEQ ID NO: 530627 - RNA, 19 nt, Artificial Sequence
  Description of Artificial Sequence: Synthetic oligonucleotide
aacaagaucgcacauucga

SEQ ID NO: 530628 - RNA, 19 nt, Artificial Sequence
  Description of Artificial Sequence: Synthetic oligonucleotide
caauaucuaacaaugcugc

SEQ ID NO: 530629 - RNA, 19 nt, Artificial Sequence
  Description of Artificial Sequence: Synthetic oligonucleotide
gaacugaaugaucagaaug

SEQ ID NO: 530630 - RNA, 19 nt, Artificial Sequence
  Description of Artificial Sequence: Synthetic oligonucleotide
auuagauauaucuguguuc

SEQ ID NO: 530631 - RNA, 19 nt, Artificial Sequence
  Description of Artificial Sequence: Synthetic oligonucleotide
uuauuuaagacuucuuggu

SEQ ID NO: 530632 - RNA, 19 nt, Artificial Sequence
  Description of Artificial Sequence: Synthetic oligonucleotide
auuaauuguucucaccauc

SEQ ID NO: 530633 - RNA, 19 nt, Artificial Sequence
  Description of Artificial Sequence: Synthetic oligonucleotide
aaaccgaacauaauuuugg

SEQ ID NO: 530634 - RNA, 19 nt, Artificial Sequence
  Description of Artificial Sequence: Synthetic oligonucleotide
auuacaaugacagaacuga

SEQ ID NO: 530635 - RNA, 19 nt, Artificial Sequence
  Description of Artificial Sequence: Synthetic oligonucleotide
uuuaacauuaagauugcua

SEQ ID NO: 530636 - RNA, 19 nt, Artificial Sequence
  Description of Artificial Sequence: Synthetic oligonucleotide
ugacagaacugaaugauca

SEQ ID NO: 530637 - RNA, 19 nt, Artificial Sequence
  Description of Artificial Sequence: Synthetic oligonucleotide
uugguaagggccaacgcgg

SEQ ID NO: 530638 - RNA, 19 nt, Artificial Sequence
  Description of Artificial Sequence: Synthetic oligonucleotide
ugaauuaccacuccauuuc

SEQ ID NO: 530639 - RNA, 19 nt, Artificial Sequence
  Description of Artificial Sequence: Synthetic oligonucleotide
uuaauuguucucaccaucu

SEQ ID NO: 530640 - RNA, 19 nt, Artificial Sequence
  Description of Artificial Sequence: Synthetic oligonucleotide
aggguauauagauuuguac

SEQ ID NO: 530641 - RNA, 19 nt, Artificial Sequence
  Description of Artificial Sequence: Synthetic oligonucleotide
ucuauacaaauuaaagguc

SEQ ID NO: 530642 - RNA, 19 nt, Artificial Sequence
  Description of Artificial Sequence: Synthetic oligonucleotide
aagauuacaaugacagaac

SEQ ID NO: 530643 - RNA, 19 nt, Artificial Sequence
  Description of Artificial Sequence: Synthetic oligonucleotide
uugagcucguaucugaaag

SEQ ID NO: 530644 - RNA, 19 nt, Artificial Sequence
  Description of Artificial Sequence: Synthetic oligonucleotide
uguaauaacucuccaauuu

SEQ ID NO: 530645 - RNA, 19 nt, Artificial Sequence
  Description of Artificial Sequence: Synthetic oligonucleotide
auauccaccaaauaucaca

SEQ ID NO: 530646 - RNA, 19 nt, Artificial Sequence
  Description of Artificial Sequence: Synthetic oligonucleotide
agaacuagguucugcauuc

SEQ ID NO: 530647 - RNA, 19 nt, Artificial Sequence
  Description of Artificial Sequence: Synthetic oligonucleotide
uuuacaacuccauauacuu

SEQ ID NO: 530648 - RNA, 19 nt, Artificial Sequence
  Description of Artificial Sequence: Synthetic oligonucleotide
uugaguaaaacaaggucca

SEQ ID NO: 530649 - RNA, 19 nt, Artificial Sequence
  Description of Artificial Sequence: Synthetic oligonucleotide
uggaggaauacacugggcc

SEQ ID NO: 530650 - RNA, 19 nt, Artificial Sequence
  Description of Artificial Sequence: Synthetic oligonucleotide
uuaauuauuccacuaggua

SEQ ID NO: 530651 - RNA, 19 nt, Artificial Sequence
  Description of Artificial Sequence: Synthetic oligonucleotide
uuaacugguauuugaagcu

SEQ ID NO: 530652 - RNA, 19 nt, Artificial Sequence
  Description of Artificial Sequence: Synthetic oligonucleotide
gaaacaagaucgcacauuc

SEQ ID NO: 530653 - RNA, 19 nt, Artificial Sequence
  Description of Artificial Sequence: Synthetic oligonucleotide
aaccgaacauaauuuuggg

SEQ ID NO: 530654 - RNA, 19 nt, Artificial Sequence
  Description of Artificial Sequence: Synthetic oligonucleotide
caccaauccacuuaacugg

SEQ ID NO: 530655 - RNA, 19 nt, Artificial Sequence
  Description of Artificial Sequence: Synthetic oligonucleotide
uuaugggucauuuuauaga

SEQ ID NO: 530656 - RNA, 19 nt, Artificial Sequence
  Description of Artificial Sequence: Synthetic oligonucleotide
acaauuggcaauuaggguu

SEQ ID NO: 530657 - RNA, 19 nt, Artificial Sequence
  Description of Artificial Sequence: Synthetic oligonucleotide
acaguuauaguucauggaa

SEQ ID NO: 530658 - RNA, 19 nt, Artificial Sequence
  Description of Artificial Sequence: Synthetic oligonucleotide
uuauagacauaccggcagg

SEQ ID NO: 530659 - RNA, 19 nt, Artificial Sequence
  Description of Artificial Sequence: Synthetic oligonucleotide
uaauaacucuccaauuuca

SEQ ID NO: 530660 - RNA, 19 nt, Artificial Sequence
  Description of Artificial Sequence: Synthetic oligonucleotide
aagaccaacccacuguucu

SEQ ID NO: 530661 - RNA, 19 nt, Artificial Sequence
  Description of Artificial Sequence: Synthetic oligonucleotide
aaauaaacuccaucucuca

SEQ ID NO: 530662 - RNA, 19 nt, Artificial Sequence
  Description of Artificial Sequence: Synthetic oligonucleotide
aaggcaguaacguuugggu

SEQ ID NO: 530663 - RNA, 19 nt, Artificial Sequence
  Description of Artificial Sequence: Synthetic oligonucleotide
cuugguaagggccaacgcg

SEQ ID NO: 530664 - RNA, 19 nt, Artificial Sequence
  Description of Artificial Sequence: Synthetic oligonucleotide
aacucaaacacgaugacaa

SEQ ID NO: 530665 - RNA, 19 nt, Artificial Sequence
  Description of Artificial Sequence: Synthetic oligonucleotide
accgaacauaauuuugggc

SEQ ID NO: 530666 - RNA, 19 nt, Artificial Sequence
  Description of Artificial Sequence: Synthetic oligonucleotide
auuauacaguuacugaaca

SEQ ID NO: 530667 - RNA, 19 nt, Artificial Sequence
  Description of Artificial Sequence: Synthetic oligonucleotide
ggcaugaucagaauuaugg

SEQ ID NO: 530668 - RNA, 19 nt, Artificial Sequence
  Description of Artificial Sequence: Synthetic oligonucleotide
aauaaaccgaacauaauuu

SEQ ID NO: 530669 - RNA, 19 nt, Artificial Sequence
  Description of Artificial Sequence: Synthetic oligonucleotide
agucuuauacugaacuucc

SEQ ID NO: 530670 - RNA, 19 nt, Artificial Sequence
  Description of Artificial Sequence: Synthetic oligonucleotide
cuuaugggucauuuuauag

SEQ ID NO: 530671 - RNA, 19 nt, Artificial Sequence
  Description of Artificial Sequence: Synthetic oligonucleotide
aguaauaccucuuuauuuu

SEQ ID NO: 530672 - RNA, 19 nt, Artificial Sequence
  Description of Artificial Sequence: Synthetic oligonucleotide
gcaauuaggguucaugugg

SEQ ID NO: 530673 - RNA, 19 nt, Artificial Sequence
  Description of Artificial Sequence: Synthetic oligonucleotide
agaauuauggcugacaauu

SEQ ID NO: 530674 - RNA, 19 nt, Artificial Sequence
  Description of Artificial Sequence: Synthetic oligonucleotide
ucuaauuuguaagcaacgc

SEQ ID NO: 530675 - RNA, 19 nt, Artificial Sequence
  Description of Artificial Sequence: Synthetic oligonucleotide
uauacauuugagcucguau

SEQ ID NO: 530676 - RNA, 19 nt, Artificial Sequence
  Description of Artificial Sequence: Synthetic oligonucleotide
aagccuaagggcuaaguaa

SEQ ID NO: 530677 - RNA, 19 nt, Artificial Sequence
  Description of Artificial Sequence: Synthetic oligonucleotide
uuacaauggucucagcaga

SEQ ID NO: 530678 - RNA, 19 nt, Artificial Sequence
  Description of Artificial Sequence: Synthetic oligonucleotide
ugagguuacaaaaggguaa

SEQ ID NO: 530679 - RNA, 19 nt, Artificial Sequence
  Description of Artificial Sequence: Synthetic oligonucleotide
cuacagcacaauauaaagc

SEQ ID NO: 530680 - RNA, 19 nt, Artificial Sequence
  Description of Artificial Sequence: Synthetic oligonucleotide
uacaguuugaugagguuac

SEQ ID NO: 530681 - RNA, 19 nt, Artificial Sequence
  Description of Artificial Sequence: Synthetic oligonucleotide
acagaauuaauagcauuac

SEQ ID NO: 530682 - RNA, 19 nt, Artificial Sequence
  Description of Artificial Sequence: Synthetic oligonucleotide
acuuaacugguauuugaag

SEQ ID NO: 530683 - RNA, 19 nt, Artificial Sequence
  Description of Artificial Sequence: Synthetic oligonucleotide
gaauacacugggccgaugc

SEQ ID NO: 530684 - RNA, 19 nt, Artificial Sequence
  Description of Artificial Sequence: Synthetic oligonucleotide
aagaucgcacauucgaagu

SEQ ID NO: 530685 - RNA, 19 nt, Artificial Sequence
  Description of Artificial Sequence: Synthetic oligonucleotide
uuuccauauaacccuuaag

SEQ ID NO: 530686 - RNA, 19 nt, Artificial Sequence
  Description of Artificial Sequence: Synthetic oligonucleotide
ucaaggagugucucgugcg

SEQ ID NO: 530687 - RNA, 19 nt, Artificial Sequence
  Description of Artificial Sequence: Synthetic oligonucleotide
gguuaauuauuccacuagg

SEQ ID NO: 530688 - RNA, 19 nt, Artificial Sequence
  Description of Artificial Sequence: Synthetic oligonucleotide
uacaccaauccacuuaacu

SEQ ID NO: 530689 - RNA, 19 nt, Artificial Sequence
  Description of Artificial Sequence: Synthetic oligonucleotide
ucugauaugauaagccuuu

SEQ ID NO: 530690 - RNA, 19 nt, Artificial Sequence
  Description of Artificial Sequence: Synthetic oligonucleotide
uuauggcugacaauuggca

SEQ ID NO: 530691 - RNA, 19 nt, Artificial Sequence
  Description of Artificial Sequence: Synthetic oligonucleotide
augucuuuauucuugaauu

SEQ ID NO: 530692 - RNA, 19 nt, Artificial Sequence
  Description of Artificial Sequence: Synthetic oligonucleotide
acauucgaaguccacuccg

SEQ ID NO: 530693 - RNA, 19 nt, Artificial Sequence
  Description of Artificial Sequence: Synthetic oligonucleotide
aacucuagugguauaagcu

SEQ ID NO: 530694 - RNA, 19 nt, Artificial Sequence
  Description of Artificial Sequence: Synthetic oligonucleotide
gauaauagagaaaugcuua

SEQ ID NO: 530695 - RNA, 19 nt, Artificial Sequence
  Description of Artificial Sequence: Synthetic oligonucleotide
auaauuuugggcauugaca

SEQ ID NO: 530696 - RNA, 19 nt, Artificial Sequence
  Description of Artificial Sequence: Synthetic oligonucleotide
uccauauacuucaccaaca

SEQ ID NO: 530697 - RNA, 19 nt, Artificial Sequence
  Description of Artificial Sequence: Synthetic oligonucleotide
aucgguuuaauccuuucca

SEQ ID NO: 530698 - RNA, 19 nt, Artificial Sequence
  Description of Artificial Sequence: Synthetic oligonucleotide
ucauaugggcguauuugag

SEQ ID NO: 530699 - RNA, 19 nt, Artificial Sequence
  Description of Artificial Sequence: Synthetic oligonucleotide
gaucauaugggcguauuug

SEQ ID NO: 530700 - RNA, 19 nt, Artificial Sequence
  Description of Artificial Sequence: Synthetic oligonucleotide
auguugaagaccaacccac

SEQ ID NO: 530701 - RNA, 19 nt, Artificial Sequence
  Description of Artificial Sequence: Synthetic oligonucleotide
aacccguugaucauauggg

SEQ ID NO: 530702 - RNA, 19 nt, Artificial Sequence
  Description of Artificial Sequence: Synthetic oligonucleotide
aauaccucuuuauuuucaa

SEQ ID NO: 530703 - RNA, 19 nt, Artificial Sequence
  Description of Artificial Sequence: Synthetic oligonucleotide
aacauuuugagguggcaua

SEQ ID NO: 530704 - RNA, 19 nt, Artificial Sequence
  Description of Artificial Sequence: Synthetic oligonucleotide
aaugaaggcaguaacguuu

SEQ ID NO: 530705 - RNA, 19 nt, Artificial Sequence
  Description of Artificial Sequence: Synthetic oligonucleotide
agauuuucuuggguggucc

SEQ ID NO: 530706 - RNA, 19 nt, Artificial Sequence
  Description of Artificial Sequence: Synthetic oligonucleotide
uuauacugaacuuccacuu

SEQ ID NO: 530707 - RNA, 19 nt, Artificial Sequence
  Description of Artificial Sequence: Synthetic oligonucleotide
aacgcgguaaacccguuga

SEQ ID NO: 530708 - RNA, 19 nt, Artificial Sequence
  Description of Artificial Sequence: Synthetic oligonucleotide
uuaggguucauguggguac

SEQ ID NO: 530709 - RNA, 19 nt, Artificial Sequence
  Description of Artificial Sequence: Synthetic oligonucleotide
uaauaccucuuuauuuuca

SEQ ID NO: 530710 - RNA, 19 nt, Artificial Sequence
  Description of Artificial Sequence: Synthetic oligonucleotide
aaccaaagcucaguuuuac

SEQ ID NO: 530711 - RNA, 19 nt, Artificial Sequence
  Description of Artificial Sequence: Synthetic oligonucleotide
aacuugguaagggccaacg

SEQ ID NO: 530712 - RNA, 19 nt, Artificial Sequence
  Description of Artificial Sequence: Synthetic oligonucleotide
augaucagaauuauggcug

SEQ ID NO: 530713 - RNA, 19 nt, Artificial Sequence
  Description of Artificial Sequence: Synthetic oligonucleotide
auauccaacuugguaaggg

SEQ ID NO: 530714 - RNA, 19 nt, Artificial Sequence
  Description of Artificial Sequence: Synthetic oligonucleotide
uuccacuagguaaaagaug

SEQ ID NO: 530715 - RNA, 19 nt, Artificial Sequence
  Description of Artificial Sequence: Synthetic oligonucleotide
uuaccuacaccaauccacu

SEQ ID NO: 530716 - RNA, 19 nt, Artificial Sequence
  Description of Artificial Sequence: Synthetic oligonucleotide
ucugucugauaugauaagc

SEQ ID NO: 530717 - RNA, 19 nt, Artificial Sequence
  Description of Artificial Sequence: Synthetic oligonucleotide
acccguugaucauaugggc

SEQ ID NO: 530718 - RNA, 19 nt, Artificial Sequence
  Description of Artificial Sequence: Synthetic oligonucleotide
guaagcaacgccaacuuug

SEQ ID NO: 530719 - RNA, 19 nt, Artificial Sequence
  Description of Artificial Sequence: Synthetic oligonucleotide
agcauuacaaaaguugaca

SEQ ID NO: 530720 - RNA, 19 nt, Artificial Sequence
  Description of Artificial Sequence: Synthetic oligonucleotide
acuugguaagggccaacgc

SEQ ID NO: 530721 - RNA, 19 nt, Artificial Sequence
  Description of Artificial Sequence: Synthetic oligonucleotide
guaauaacucuccaauuuc

SEQ ID NO: 530722 - RNA, 19 nt, Artificial Sequence
  Description of Artificial Sequence: Synthetic oligonucleotide
uauccaacuugguaagggc

SEQ ID NO: 530723 - RNA, 19 nt, Artificial Sequence
  Description of Artificial Sequence: Synthetic oligonucleotide
uugaaccucucagagaagc

SEQ ID NO: 530724 - RNA, 19 nt, Artificial Sequence
  Description of Artificial Sequence: Synthetic oligonucleotide
auaauagagaaaugcuuaa

SEQ ID NO: 530725 - RNA, 19 nt, Artificial Sequence
  Description of Artificial Sequence: Synthetic oligonucleotide
gaagaugaauuaccacucc

SEQ ID NO: 530726 - RNA, 19 nt, Artificial Sequence
  Description of Artificial Sequence: Synthetic oligonucleotide
aacauaauuuugggcauug

SEQ ID NO: 530727 - RNA, 19 nt, Artificial Sequence
  Description of Artificial Sequence: Synthetic oligonucleotide
aaagccuaagggcuaagua

SEQ ID NO: 530728 - RNA, 19 nt, Artificial Sequence
  Description of Artificial Sequence: Synthetic oligonucleotide
uccauauaacccuuaaguu

SEQ ID NO: 530729 - RNA, 19 nt, Artificial Sequence
  Description of Artificial Sequence: Synthetic oligonucleotide
ugagguggcauacccaaac

SEQ ID NO: 530730 - RNA, 19 nt, Artificial Sequence
  Description of Artificial Sequence: Synthetic oligonucleotide
uggcaauuaggguucaugu

SEQ ID NO: 530731 - RNA, 19 nt, Artificial Sequence
  Description of Artificial Sequence: Synthetic oligonucleotide
aucauaugggcguauuuga

SEQ ID NO: 530732 - RNA, 19 nt, Artificial Sequence
  Description of Artificial Sequence: Synthetic oligonucleotide
ugcauuaauuguucucacc

SEQ ID NO: 530733 - RNA, 19 nt, Artificial Sequence
  Description of Artificial Sequence: Synthetic oligonucleotide
gaaggcaguaacguuuggg

SEQ ID NO: 530734 - RNA, 19 nt, Artificial Sequence
  Description of Artificial Sequence: Synthetic oligonucleotide
uuauacaguuacugaacac

SEQ ID NO: 530735 - RNA, 19 nt, Artificial Sequence
  Description of Artificial Sequence: Synthetic oligonucleotide
agggauuauacaguuacug

SEQ ID NO: 530736 - RNA, 19 nt, Artificial Sequence
  Description of Artificial Sequence: Synthetic oligonucleotide
uuugugguacccaaauuuu

SEQ ID NO: 530737 - RNA, 19 nt, Artificial Sequence
  Description of Artificial Sequence: Synthetic oligonucleotide
agggcuaaguaauaccucu

SEQ ID NO: 530738 - RNA, 19 nt, Artificial Sequence
  Description of Artificial Sequence: Synthetic oligonucleotide
ugagcucugucugauauga

SEQ ID NO: 530739 - RNA, 19 nt, Artificial Sequence
  Description of Artificial Sequence: Synthetic oligonucleotide
uuaaaggucccaugaacau

SEQ ID NO: 530740 - RNA, 19 nt, Artificial Sequence
  Description of Artificial Sequence: Synthetic oligonucleotide
aguaguuacuccaaauucu

SEQ ID NO: 530741 - RNA, 19 nt, Artificial Sequence
  Description of Artificial Sequence: Synthetic oligonucleotide
cauaccggcaggcacaaug

SEQ ID NO: 530742 - RNA, 19 nt, Artificial Sequence
  Description of Artificial Sequence: Synthetic oligonucleotide
ucauugucuugcucugugg

SEQ ID NO: 530743 - RNA, 19 nt, Artificial Sequence
  Description of Artificial Sequence: Synthetic oligonucleotide
cugggagagucuuauacug

SEQ ID NO: 530744 - RNA, 19 nt, Artificial Sequence
  Description of Artificial Sequence: Synthetic oligonucleotide
auacacugggccgaugccc

SEQ ID NO: 530745 - RNA, 19 nt, Artificial Sequence
  Description of Artificial Sequence: Synthetic oligonucleotide
gcauuacaaaaguugacag

SEQ ID NO: 530746 - RNA, 19 nt, Artificial Sequence
  Description of Artificial Sequence: Synthetic oligonucleotide
auaaaccgaacauaauuuu

SEQ ID NO: 530747 - RNA, 19 nt, Artificial Sequence
  Description of Artificial Sequence: Synthetic oligonucleotide
guaaguuccaaaaucaaua

SEQ ID NO: 530748 - RNA, 19 nt, Artificial Sequence
  Description of Artificial Sequence: Synthetic oligonucleotide
gauaaucuacagcacaaua

SEQ ID NO: 530749 - RNA, 19 nt, Artificial Sequence
  Description of Artificial Sequence: Synthetic oligonucleotide
agaucgcacauucgaaguc

SEQ ID NO: 530750 - RNA, 19 nt, Artificial Sequence
  Description of Artificial Sequence: Synthetic oligonucleotide
gagguuacaaaaggguaag

SEQ ID NO: 530751 - RNA, 19 nt, Artificial Sequence
  Description of Artificial Sequence: Synthetic oligonucleotide
auaacccuuaaguuucugu

SEQ ID NO: 530752 - RNA, 19 nt, Artificial Sequence
  Description of Artificial Sequence: Synthetic oligonucleotide
cuccauuuccaaugaaggc

SEQ ID NO: 530753 - RNA, 19 nt, Artificial Sequence
  Description of Artificial Sequence: Synthetic oligonucleotide
agggccaacgcgguaaacc

SEQ ID NO: 530754 - RNA, 19 nt, Artificial Sequence
  Description of Artificial Sequence: Synthetic oligonucleotide
aauaugagcucugucugau

SEQ ID NO: 530755 - RNA, 19 nt, Artificial Sequence
  Description of Artificial Sequence: Synthetic oligonucleotide
agacuucuugguucgcugg

SEQ ID NO: 530756 - RNA, 19 nt, Artificial Sequence
  Description of Artificial Sequence: Synthetic oligonucleotide
guacugguuagcuagaacu

SEQ ID NO: 530757 - RNA, 19 nt, Artificial Sequence
  Description of Artificial Sequence: Synthetic oligonucleotide
aauguccuugcauuagaua

SEQ ID NO: 530758 - RNA, 19 nt, Artificial Sequence
  Description of Artificial Sequence: Synthetic oligonucleotide
auaugggcguauuugagua

SEQ ID NO: 530759 - RNA, 19 nt, Artificial Sequence
  Description of Artificial Sequence: Synthetic oligonucleotide
gagucuuauacugaacuuc

SEQ ID NO: 530760 - RNA, 19 nt, Artificial Sequence
  Description of Artificial Sequence: Synthetic oligonucleotide
uacuuaugggucauuuuau

SEQ ID NO: 530761 - RNA, 19 nt, Artificial Sequence
  Description of Artificial Sequence: Synthetic oligonucleotide
ggaggaauacacugggccg

SEQ ID NO: 530762 - RNA, 19 nt, Artificial Sequence
  Description of Artificial Sequence: Synthetic oligonucleotide
uggauuuaccuacaccaau

SEQ ID NO: 530763 - RNA, 19 nt, Artificial Sequence
  Description of Artificial Sequence: Synthetic oligonucleotide
ugaucagaauuauggcuga

SEQ ID NO: 530764 - RNA, 19 nt, Artificial Sequence
  Description of Artificial Sequence: Synthetic oligonucleotide
uccacagaaucuacaacaa

SEQ ID NO: 530765 - RNA, 19 nt, Artificial Sequence
  Description of Artificial Sequence: Synthetic oligonucleotide
ucaaacaacagggauuaua

SEQ ID NO: 530766 - RNA, 19 nt, Artificial Sequence
  Description of Artificial Sequence: Synthetic oligonucleotide
ugaaccucucagagaagcc

SEQ ID NO: 530767 - RNA, 19 nt, Artificial Sequence
  Description of Artificial Sequence: Synthetic oligonucleotide
uucgaacaauccaggaaga

SEQ ID NO: 530768 - RNA, 19 nt, Artificial Sequence
  Description of Artificial Sequence: Synthetic oligonucleotide
gcauuaauuguucucacca

SEQ ID NO: 530769 - RNA, 19 nt, Artificial Sequence
  Description of Artificial Sequence: Synthetic oligonucleotide
gguauaagcuuuuacaacu

SEQ ID NO: 530770 - RNA, 19 nt, Artificial Sequence
  Description of Artificial Sequence: Synthetic oligonucleotide
uauagacauaccggcaggc

SEQ ID NO: 530771 - RNA, 19 nt, Artificial Sequence
  Description of Artificial Sequence: Synthetic oligonucleotide
gaucgcacauucgaagucc

SEQ ID NO: 530772 - RNA, 19 nt, Artificial Sequence
  Description of Artificial Sequence: Synthetic oligonucleotide
acauuaagauugcuauugu

SEQ ID NO: 530773 - RNA, 19 nt, Artificial Sequence
  Description of Artificial Sequence: Synthetic oligonucleotide
caucgguuuaauccuuucc

SEQ ID NO: 530774 - RNA, 19 nt, Artificial Sequence
  Description of Artificial Sequence: Synthetic oligonucleotide
aagggcuaaguaauaccuc

SEQ ID NO: 530775 - RNA, 19 nt, Artificial Sequence
  Description of Artificial Sequence: Synthetic oligonucleotide
aaacaagaucgcacauucg

SEQ ID NO: 530776 - RNA, 19 nt, Artificial Sequence
  Description of Artificial Sequence: Synthetic oligonucleotide
uagguucugcauucuauac

SEQ ID NO: 530777 - RNA, 19 nt, Artificial Sequence
  Description of Artificial Sequence: Synthetic oligonucleotide
guugaagaccaacccacug

SEQ ID NO: 530778 - RNA, 19 nt, Artificial Sequence
  Description of Artificial Sequence: Synthetic oligonucleotide
guaacguuuggguuaauua

SEQ ID NO: 530779 - RNA, 19 nt, Artificial Sequence
  Description of Artificial Sequence: Synthetic oligonucleotide
uucucuaccccuuguuugu

SEQ ID NO: 530780 - RNA, 19 nt, Artificial Sequence
  Description of Artificial Sequence: Synthetic oligonucleotide
cauuacaaaaguugacaga

SEQ ID NO: 530781 - RNA, 19 nt, Artificial Sequence
  Description of Artificial Sequence: Synthetic oligonucleotide
ggguuaauuauuccacuag

SEQ ID NO: 530782 - RNA, 19 nt, Artificial Sequence
  Description of Artificial Sequence: Synthetic oligonucleotide
aauaacucuccaauuucau

SEQ ID NO: 530783 - RNA, 19 nt, Artificial Sequence
  Description of Artificial Sequence: Synthetic oligonucleotide
gaaucuacaacaacugugu

SEQ ID NO: 530784 - RNA, 19 nt, Artificial Sequence
  Description of Artificial Sequence: Synthetic oligonucleotide
ccaauaccaacucuagugg

SEQ ID NO: 530785 - RNA, 19 nt, Artificial Sequence
  Description of Artificial Sequence: Synthetic oligonucleotide
gaauuauggcugacaauug

SEQ ID NO: 530786 - RNA, 19 nt, Artificial Sequence
  Description of Artificial Sequence: Synthetic oligonucleotide
uaguuacuccaaauucucu

SEQ ID NO: 530787 - RNA, 19 nt, Artificial Sequence
  Description of Artificial Sequence: Synthetic oligonucleotide
auucgaaguccacuccgag

SEQ ID NO: 530788 - RNA, 19 nt, Artificial Sequence
  Description of Artificial Sequence: Synthetic oligonucleotide
ccgaacauaauuuugggca

SEQ ID NO: 530789 - RNA, 19 nt, Artificial Sequence
  Description of Artificial Sequence: Synthetic oligonucleotide
uuguagagagaacuagguu

SEQ ID NO: 530790 - RNA, 19 nt, Artificial Sequence
  Description of Artificial Sequence: Synthetic oligonucleotide
uguugaagaccaacccacu

SEQ ID NO: 530791 - RNA, 19 nt, Artificial Sequence
  Description of Artificial Sequence: Synthetic oligonucleotide
gcuucuucgaacaauccag

SEQ ID NO: 530792 - RNA, 19 nt, Artificial Sequence
  Description of Artificial Sequence: Synthetic oligonucleotide
acguuuggguuaauuauuc

SEQ ID NO: 530793 - RNA, 19 nt, Artificial Sequence
  Description of Artificial Sequence: Synthetic oligonucleotide
uggguuaauuauuccacua

SEQ ID NO: 530794 - RNA, 19 nt, Artificial Sequence
  Description of Artificial Sequence: Synthetic oligonucleotide
cacgggaaggaacuguggc

SEQ ID NO: 530795 - RNA, 19 nt, Artificial Sequence
  Description of Artificial Sequence: Synthetic oligonucleotide
aacacgggaaggaacugug

SEQ ID NO: 530796 - RNA, 19 nt, Artificial Sequence
  Description of Artificial Sequence: Synthetic oligonucleotide
caugaucagaauuauggcu

SEQ ID NO: 530797 - RNA, 19 nt, Artificial Sequence
  Description of Artificial Sequence: Synthetic oligonucleotide
uuugaaccucucagagaag

SEQ ID NO: 530798 - RNA, 19 nt, Artificial Sequence
  Description of Artificial Sequence: Synthetic oligonucleotide
cucuggauuuaccuacacc

SEQ ID NO: 530799 - RNA, 19 nt, Artificial Sequence
  Description of Artificial Sequence: Synthetic oligonucleotide
uacaauggucucagcagaa

SEQ ID NO: 530800 - RNA, 19 nt, Artificial Sequence
  Description of Artificial Sequence: Synthetic oligonucleotide
ugcuauuguagggaaacau

SEQ ID NO: 530801 - RNA, 19 nt, Artificial Sequence
  Description of Artificial Sequence: Synthetic oligonucleotide
auacugaacuuccacuuua

SEQ ID NO: 530802 - RNA, 19 nt, Artificial Sequence
  Description of Artificial Sequence: Synthetic oligonucleotide
aauaccaacucuaguggua

SEQ ID NO: 530803 - RNA, 19 nt, Artificial Sequence
  Description of Artificial Sequence: Synthetic oligonucleotide
ucguaucugaaagcaaaga

SEQ ID NO: 530804 - RNA, 19 nt, Artificial Sequence
  Description of Artificial Sequence: Synthetic oligonucleotide
uccaucucucaccaucggu

SEQ ID NO: 530805 - RNA, 19 nt, Artificial Sequence
  Description of Artificial Sequence: Synthetic oligonucleotide
ucgguuuaauccuuuccau

SEQ ID NO: 530806 - RNA, 19 nt, Artificial Sequence
  Description of Artificial Sequence: Synthetic oligonucleotide
ggcguauuugaguaaaaca

SEQ ID NO: 530807 - RNA, 19 nt, Artificial Sequence
  Description of Artificial Sequence: Synthetic oligonucleotide
accccuuguuuguaauaac

SEQ ID NO: 530808 - RNA, 19 nt, Artificial Sequence
  Description of Artificial Sequence: Synthetic oligonucleotide
guaguuacuccaaauucuc

SEQ ID NO: 530809 - RNA, 19 nt, Artificial Sequence
  Description of Artificial Sequence: Synthetic oligonucleotide
uguccuugcauuagauaua

SEQ ID NO: 530810 - RNA, 19 nt, Artificial Sequence
  Description of Artificial Sequence: Synthetic oligonucleotide
uuguagggaaacaucucuu

SEQ ID NO: 530811 - RNA, 19 nt, Artificial Sequence
  Description of Artificial Sequence: Synthetic oligonucleotide
agauugcuauuguagggaa

SEQ ID NO: 530812 - RNA, 19 nt, Artificial Sequence
  Description of Artificial Sequence: Synthetic oligonucleotide
agguggcauacccaaaccu

SEQ ID NO: 530813 - RNA, 19 nt, Artificial Sequence
  Description of Artificial Sequence: Synthetic oligonucleotide
ugguucgcugggaaaugag

SEQ ID NO: 530814 - RNA, 19 nt, Artificial Sequence
  Description of Artificial Sequence: Synthetic oligonucleotide
caaugacagaacugaauga

SEQ ID NO: 530815 - RNA, 19 nt, Artificial Sequence
  Description of Artificial Sequence: Synthetic oligonucleotide
acuuaugggucauuuuaua

SEQ ID NO: 530816 - RNA, 19 nt, Artificial Sequence
  Description of Artificial Sequence: Synthetic oligonucleotide
cguauuugaguaaaacaag

SEQ ID NO: 530817 - RNA, 19 nt, Artificial Sequence
  Description of Artificial Sequence: Synthetic oligonucleotide
uccacuccgagcagcuuug

SEQ ID NO: 530818 - RNA, 19 nt, Artificial Sequence
  Description of Artificial Sequence: Synthetic oligonucleotide
aaaguaggguauauagauu

SEQ ID NO: 530819 - RNA, 19 nt, Artificial Sequence
  Description of Artificial Sequence: Synthetic oligonucleotide
cacauucgaaguccacucc

SEQ ID NO: 530820 - RNA, 19 nt, Artificial Sequence
  Description of Artificial Sequence: Synthetic oligonucleotide
uaagacuucuugguucgcu

SEQ ID NO: 530821 - RNA, 19 nt, Artificial Sequence
  Description of Artificial Sequence: Synthetic oligonucleotide
uuguucucaccaucuauuu

SEQ ID NO: 530822 - RNA, 19 nt, Artificial Sequence
  Description of Artificial Sequence: Synthetic oligonucleotide
gaaccucucagagaagcca

SEQ ID NO: 530823 - RNA, 19 nt, Artificial Sequence
  Description of Artificial Sequence: Synthetic oligonucleotide
auaauuguagagagaacua

SEQ ID NO: 530824 - RNA, 19 nt, Artificial Sequence
  Description of Artificial Sequence: Synthetic oligonucleotide
acgggaaggaacuguggca

SEQ ID NO: 530825 - RNA, 19 nt, Artificial Sequence
  Description of Artificial Sequence: Synthetic oligonucleotide
uaccccuuguuuguaauaa

SEQ ID NO: 530826 - RNA, 19 nt, Artificial Sequence
  Description of Artificial Sequence: Synthetic oligonucleotide
uggcaauccuuagaagagc

SEQ ID NO: 530827 - RNA, 19 nt, Artificial Sequence
  Description of Artificial Sequence: Synthetic oligonucleotide
ggcaauuaggguucaugug

SEQ ID NO: 530828 - RNA, 19 nt, Artificial Sequence
  Description of Artificial Sequence: Synthetic oligonucleotide
guuaauuauuccacuaggu

SEQ ID NO: 530829 - RNA, 19 nt, Artificial Sequence
  Description of Artificial Sequence: Synthetic oligonucleotide
uaaagccuaagggcuaagu

SEQ ID NO: 530830 - RNA, 19 nt, Artificial Sequence
  Description of Artificial Sequence: Synthetic oligonucleotide
caaggagugucucgugcgc

SEQ ID NO: 530831 - RNA, 19 nt, Artificial Sequence
  Description of Artificial Sequence: Synthetic oligonucleotide
caaagauuacaaugacaga

SEQ ID NO: 530832 - RNA, 19 nt, Artificial Sequence
  Description of Artificial Sequence: Synthetic oligonucleotide
aaccccuaucuuuucuuuu

SEQ ID NO: 530833 - RNA, 19 nt, Artificial Sequence
  Description of Artificial Sequence: Synthetic oligonucleotide
gcgguaaacccguugauca

SEQ ID NO: 530834 - RNA, 19 nt, Artificial Sequence
  Description of Artificial Sequence: Synthetic oligonucleotide
uuaccacuccauuuccaau

SEQ ID NO: 530835 - RNA, 19 nt, Artificial Sequence
  Description of Artificial Sequence: Synthetic oligonucleotide
ucuaccccuuguuuguaau

SEQ ID NO: 530836 - RNA, 19 nt, Artificial Sequence
  Description of Artificial Sequence: Synthetic oligonucleotide
aggauaaucuacagcacaa

SEQ ID NO: 530837 - RNA, 19 nt, Artificial Sequence
  Description of Artificial Sequence: Synthetic oligonucleotide
cugaaugaucagaauguaa

SEQ ID NO: 530838 - RNA, 19 nt, Artificial Sequence
  Description of Artificial Sequence: Synthetic oligonucleotide
gaggaauacacugggccga

SEQ ID NO: 530839 - RNA, 19 nt, Artificial Sequence
  Description of Artificial Sequence: Synthetic oligonucleotide
guauaagcuuuuacaacuc

SEQ ID NO: 530840 - RNA, 19 nt, Artificial Sequence
  Description of Artificial Sequence: Synthetic oligonucleotide
ugacagccgucugucagag

SEQ ID NO: 530841 - RNA, 19 nt, Artificial Sequence
  Description of Artificial Sequence: Synthetic oligonucleotide
agaaccccuaucuuuucuu

SEQ ID NO: 530842 - RNA, 19 nt, Artificial Sequence
  Description of Artificial Sequence: Synthetic oligonucleotide
augagguuacaaaagggua

SEQ ID NO: 530843 - RNA, 19 nt, Artificial Sequence
  Description of Artificial Sequence: Synthetic oligonucleotide
cccguugaucauaugggcg

SEQ ID NO: 530844 - RNA, 19 nt, Artificial Sequence
  Description of Artificial Sequence: Synthetic oligonucleotide
cacuuaacugguauuugaa

SEQ ID NO: 530845 - RNA, 19 nt, Artificial Sequence
  Description of Artificial Sequence: Synthetic oligonucleotide
uucuaacagcaaagauuac

SEQ ID NO: 530846 - RNA, 19 nt, Artificial Sequence
  Description of Artificial Sequence: Synthetic oligonucleotide
ucucgugcgcugcuggcaa

SEQ ID NO: 530847 - RNA, 19 nt, Artificial Sequence
  Description of Artificial Sequence: Synthetic oligonucleotide
cauuuugagguggcauacc

SEQ ID NO: 530848 - RNA, 19 nt, Artificial Sequence
  Description of Artificial Sequence: Synthetic oligonucleotide
auuaggguucaugugggua

SEQ ID NO: 530849 - RNA, 19 nt, Artificial Sequence
  Description of Artificial Sequence: Synthetic oligonucleotide
ccaaaccuguacaaacacc

SEQ ID NO: 530850 - RNA, 19 nt, Artificial Sequence
  Description of Artificial Sequence: Synthetic oligonucleotide
acuagguucugcauucuau

SEQ ID NO: 530851 - RNA, 19 nt, Artificial Sequence
  Description of Artificial Sequence: Synthetic oligonucleotide
gugucucgugcgcugcugg

SEQ ID NO: 530852 - RNA, 19 nt, Artificial Sequence
  Description of Artificial Sequence: Synthetic oligonucleotide
guagagagaacuagguucu

SEQ ID NO: 530853 - RNA, 19 nt, Artificial Sequence
  Description of Artificial Sequence: Synthetic oligonucleotide
aaggagugucucgugcgcu

SEQ ID NO: 530854 - RNA, 19 nt, Artificial Sequence
  Description of Artificial Sequence: Synthetic oligonucleotide
gguucgcugggaaaugagg

SEQ ID NO: 530855 - RNA, 19 nt, Artificial Sequence
  Description of Artificial Sequence: Synthetic oligonucleotide
caauaugagcucugucuga

SEQ ID NO: 530856 - RNA, 19 nt, Artificial Sequence
  Description of Artificial Sequence: Synthetic oligonucleotide
uaugggcguauuugaguaa

SEQ ID NO: 530857 - RNA, 19 nt, Artificial Sequence
  Description of Artificial Sequence: Synthetic oligonucleotide
cuagguucugcauucuaua

SEQ ID NO: 530858 - RNA, 19 nt, Artificial Sequence
  Description of Artificial Sequence: Synthetic oligonucleotide
aggagugucucgugcgcug

SEQ ID NO: 530859 - RNA, 19 nt, Artificial Sequence
  Description of Artificial Sequence: Synthetic oligonucleotide
auagacauaccggcaggca

SEQ ID NO: 530860 - RNA, 19 nt, Artificial Sequence
  Description of Artificial Sequence: Synthetic oligonucleotide
agccuaagggcuaaguaau

SEQ ID NO: 530861 - RNA, 19 nt, Artificial Sequence
  Description of Artificial Sequence: Synthetic oligonucleotide
agacauaccggcaggcaca

SEQ ID NO: 530862 - RNA, 19 nt, Artificial Sequence
  Description of Artificial Sequence: Synthetic oligonucleotide
ugguaagggccaacgcggu

SEQ ID NO: 530863 - RNA, 19 nt, Artificial Sequence
  Description of Artificial Sequence: Synthetic oligonucleotide
ccaacaguacaguuugaug

SEQ ID NO: 530864 - RNA, 19 nt, Artificial Sequence
  Description of Artificial Sequence: Synthetic oligonucleotide
uugguucgcugggaaauga

SEQ ID NO: 530865 - RNA, 19 nt, Artificial Sequence
  Description of Artificial Sequence: Synthetic oligonucleotide
aguaacguuuggguuaauu

SEQ ID NO: 530866 - RNA, 19 nt, Artificial Sequence
  Description of Artificial Sequence: Synthetic oligonucleotide
agccgucugucagagacug

SEQ ID NO: 530867 - RNA, 19 nt, Artificial Sequence
  Description of Artificial Sequence: Synthetic oligonucleotide
uugcuauuguagggaaaca

SEQ ID NO: 530868 - RNA, 19 nt, Artificial Sequence
  Description of Artificial Sequence: Synthetic oligonucleotide
gggccaacgcgguaaaccc

SEQ ID NO: 530869 - RNA, 19 nt, Artificial Sequence
  Description of Artificial Sequence: Synthetic oligonucleotide
aauuggcaauuaggguuca

SEQ ID NO: 530870 - RNA, 19 nt, Artificial Sequence
  Description of Artificial Sequence: Synthetic oligonucleotide
uuaagacuucuugguucgc

SEQ ID NO: 530871 - RNA, 19 nt, Artificial Sequence
  Description of Artificial Sequence: Synthetic oligonucleotide
acugaaugaucagaaugua

SEQ ID NO: 530872 - RNA, 19 nt, Artificial Sequence
  Description of Artificial Sequence: Synthetic oligonucleotide
ucccaguaguuacuccaaa

SEQ ID NO: 530873 - RNA, 19 nt, Artificial Sequence
  Description of Artificial Sequence: Synthetic oligonucleotide
gcacauucgaaguccacuc

SEQ ID NO: 530874 - RNA, 19 nt, Artificial Sequence
  Description of Artificial Sequence: Synthetic oligonucleotide
cauucgaaguccacuccga

SEQ ID NO: 530875 - RNA, 19 nt, Artificial Sequence
  Description of Artificial Sequence: Synthetic oligonucleotide
cauaugggcguauuugagu

SEQ ID NO: 530876 - RNA, 19 nt, Artificial Sequence
  Description of Artificial Sequence: Synthetic oligonucleotide
acaagaucgcacauucgaa

SEQ ID NO: 530877 - RNA, 19 nt, Artificial Sequence
  Description of Artificial Sequence: Synthetic oligonucleotide
gcuauuguagggaaacauc

SEQ ID NO: 530878 - RNA, 19 nt, Artificial Sequence
  Description of Artificial Sequence: Synthetic oligonucleotide
acccaaaccuguacaaaca

SEQ ID NO: 530879 - RNA, 19 nt, Artificial Sequence
  Description of Artificial Sequence: Synthetic oligonucleotide
ucgaacaauccaggaagau

SEQ ID NO: 530880 - RNA, 19 nt, Artificial Sequence
  Description of Artificial Sequence: Synthetic oligonucleotide
ucucaccaucgguuuaauc

SEQ ID NO: 530881 - RNA, 19 nt, Artificial Sequence
  Description of Artificial Sequence: Synthetic oligonucleotide
caguuacugaacacgggaa

SEQ ID NO: 530882 - RNA, 19 nt, Artificial Sequence
  Description of Artificial Sequence: Synthetic oligonucleotide
agcacaauauaaagccuaa

SEQ ID NO: 530883 - RNA, 19 nt, Artificial Sequence
  Description of Artificial Sequence: Synthetic oligonucleotide
uggcauacccaaaccugua

SEQ ID NO: 530884 - RNA, 19 nt, Artificial Sequence
  Description of Artificial Sequence: Synthetic oligonucleotide
ccuaauuuaaacaguuaua

SEQ ID NO: 530885 - RNA, 19 nt, Artificial Sequence
  Description of Artificial Sequence: Synthetic oligonucleotide
cuggauuuaccuacaccaa

SEQ ID NO: 530886 - RNA, 19 nt, Artificial Sequence
  Description of Artificial Sequence: Synthetic oligonucleotide
guaagggccaacgcgguaa

SEQ ID NO: 530887 - RNA, 19 nt, Artificial Sequence
  Description of Artificial Sequence: Synthetic oligonucleotide
cuugguucgcugggaaaug

SEQ ID NO: 530888 - RNA, 19 nt, Artificial Sequence
  Description of Artificial Sequence: Synthetic oligonucleotide
augggcguauuugaguaaa

SEQ ID NO: 530889 - RNA, 19 nt, Artificial Sequence
  Description of Artificial Sequence: Synthetic oligonucleotide
ugggcguauuugaguaaaa

SEQ ID NO: 530890 - RNA, 19 nt, Artificial Sequence
  Description of Artificial Sequence: Synthetic oligonucleotide
acauaauuuugggcauuga

SEQ ID NO: 530891 - RNA, 19 nt, Artificial Sequence
  Description of Artificial Sequence: Synthetic oligonucleotide
gggagagucuuauacugaa

SEQ ID NO: 530892 - RNA, 19 nt, Artificial Sequence
  Description of Artificial Sequence: Synthetic oligonucleotide
ggcauacccaaaccuguac

SEQ ID NO: 530893 - RNA, 19 nt, Artificial Sequence
  Description of Artificial Sequence: Synthetic oligonucleotide
gauugcuauuguagggaaa

SEQ ID NO: 530894 - RNA, 19 nt, Artificial Sequence
  Description of Artificial Sequence: Synthetic oligonucleotide
ucgcacauucgaaguccac

SEQ ID NO: 530895 - RNA, 19 nt, Artificial Sequence
  Description of Artificial Sequence: Synthetic oligonucleotide
cuacaccaauccacuuaac

SEQ ID NO: 530896 - RNA, 19 nt, Artificial Sequence
  Description of Artificial Sequence: Synthetic oligonucleotide
caacgcgguaaacccguug

SEQ ID NO: 530897 - RNA, 19 nt, Artificial Sequence
  Description of Artificial Sequence: Synthetic oligonucleotide
guucgcugggaaaugaggu

SEQ ID NO: 530898 - RNA, 19 nt, Artificial Sequence
  Description of Artificial Sequence: Synthetic oligonucleotide
gcuaaguaauaccucuuua

SEQ ID NO: 530899 - RNA, 19 nt, Artificial Sequence
  Description of Artificial Sequence: Synthetic oligonucleotide
auauacauuugagcucgua

SEQ ID NO: 530900 - RNA, 19 nt, Artificial Sequence
  Description of Artificial Sequence: Synthetic oligonucleotide
agguuacaaaaggguaagu

SEQ ID NO: 530901 - RNA, 19 nt, Artificial Sequence
  Description of Artificial Sequence: Synthetic oligonucleotide
gcacaauauaaagccuaag

SEQ ID NO: 530902 - RNA, 19 nt, Artificial Sequence
  Description of Artificial Sequence: Synthetic oligonucleotide
gcauuagauauaucugugu

SEQ ID NO: 530903 - RNA, 19 nt, Artificial Sequence
  Description of Artificial Sequence: Synthetic oligonucleotide
aggcaugaucagaauuaug

SEQ ID NO: 530904 - RNA, 19 nt, Artificial Sequence
  Description of Artificial Sequence: Synthetic oligonucleotide
agugucucgugcgcugcug

SEQ ID NO: 530905 - RNA, 19 nt, Artificial Sequence
  Description of Artificial Sequence: Synthetic oligonucleotide
gggcguauuugaguaaaac

SEQ ID NO: 530906 - RNA, 19 nt, Artificial Sequence
  Description of Artificial Sequence: Synthetic oligonucleotide
caaugucuaucuccaaagu

SEQ ID NO: 530907 - RNA, 19 nt, Artificial Sequence
  Description of Artificial Sequence: Synthetic oligonucleotide
gcugcuggcaauccuuaga

SEQ ID NO: 530908 - RNA, 19 nt, Artificial Sequence
  Description of Artificial Sequence: Synthetic oligonucleotide
aucucucaccaucgguuua

SEQ ID NO: 530909 - RNA, 19 nt, Artificial Sequence
  Description of Artificial Sequence: Synthetic oligonucleotide
uccuugcauuagauauauc

SEQ ID NO: 530910 - RNA, 19 nt, Artificial Sequence
  Description of Artificial Sequence: Synthetic oligonucleotide
gguauuugaagcucaucuu

SEQ ID NO: 530911 - RNA, 19 nt, Artificial Sequence
  Description of Artificial Sequence: Synthetic oligonucleotide
aucgcacauucgaagucca

SEQ ID NO: 530912 - RNA, 19 nt, Artificial Sequence
  Description of Artificial Sequence: Synthetic oligonucleotide
ccuacaccaauccacuuaa

SEQ ID NO: 530913 - RNA, 19 nt, Artificial Sequence
  Description of Artificial Sequence: Synthetic oligonucleotide
caaccaaagcucaguuuua

SEQ ID NO: 530914 - RNA, 19 nt, Artificial Sequence
  Description of Artificial Sequence: Synthetic oligonucleotide
gguaaguuccaaaaucaau

SEQ ID NO: 530915 - RNA, 19 nt, Artificial Sequence
  Description of Artificial Sequence: Synthetic oligonucleotide
caacagggauuauacaguu

SEQ ID NO: 530916 - RNA, 19 nt, Artificial Sequence
  Description of Artificial Sequence: Synthetic oligonucleotide
guggcauacccaaaccugu

SEQ ID NO: 530917 - RNA, 19 nt, Artificial Sequence
  Description of Artificial Sequence: Synthetic oligonucleotide
cucccaguaguuacuccaa

SEQ ID NO: 530918 - RNA, 19 nt, Artificial Sequence
  Description of Artificial Sequence: Synthetic oligonucleotide
acgcgguaaacccguugau

SEQ ID NO: 530919 - RNA, 19 nt, Artificial Sequence
  Description of Artificial Sequence: Synthetic oligonucleotide
ccaacucuagugguauaag

SEQ ID NO: 530920 - RNA, 19 nt, Artificial Sequence
  Description of Artificial Sequence: Synthetic oligonucleotide
gacauaccggcaggcacaa

SEQ ID NO: 530921 - RNA, 19 nt, Artificial Sequence
  Description of Artificial Sequence: Synthetic oligonucleotide
ggagagucuuauacugaac

SEQ ID NO: 530922 - RNA, 19 nt, Artificial Sequence
  Description of Artificial Sequence: Synthetic oligonucleotide
ccaaccaaagcucaguuuu

SEQ ID NO: 530923 - RNA, 19 nt, Artificial Sequence
  Description of Artificial Sequence: Synthetic oligonucleotide
guccuugcauuagauauau

SEQ ID NO: 530924 - RNA, 19 nt, Artificial Sequence
  Description of Artificial Sequence: Synthetic oligonucleotide
cucucaaggagugucucgu

SEQ ID NO: 530925 - RNA, 19 nt, Artificial Sequence
  Description of Artificial Sequence: Synthetic oligonucleotide
ggccaacgcgguaaacccg

SEQ ID NO: 530926 - RNA, 19 nt, Artificial Sequence
  Description of Artificial Sequence: Synthetic oligonucleotide
guaaacccguugaucauau

SEQ ID NO: 530927 - RNA, 19 nt, Artificial Sequence
  Description of Artificial Sequence: Synthetic oligonucleotide
gguaaacccguugaucaua

SEQ ID NO: 530928 - RNA, 19 nt, Artificial Sequence
  Description of Artificial Sequence: Synthetic oligonucleotide
caacauuuugagguggcau

SEQ ID NO: 530929 - RNA, 19 nt, Artificial Sequence
  Description of Artificial Sequence: Synthetic oligonucleotide
gcaauccuuagaagagcug

SEQ ID NO: 530930 - RNA, 19 nt, Artificial Sequence
  Description of Artificial Sequence: Synthetic oligonucleotide
agcucguaucugaaagcaa

SEQ ID NO: 530931 - RNA, 19 nt, Artificial Sequence
  Description of Artificial Sequence: Synthetic oligonucleotide
cagaauuauggcugacaau

SEQ ID NO: 530932 - RNA, 19 nt, Artificial Sequence
  Description of Artificial Sequence: Synthetic oligonucleotide
ucgugcgcugcuggcaauc

SEQ ID NO: 530933 - RNA, 19 nt, Artificial Sequence
  Description of Artificial Sequence: Synthetic oligonucleotide
ggagugucucgugcgcugc

SEQ ID NO: 530934 - RNA, 19 nt, Artificial Sequence
  Description of Artificial Sequence: Synthetic oligonucleotide
cagggauuauacaguuacu

SEQ ID NO: 530935 - RNA, 19 nt, Artificial Sequence
  Description of Artificial Sequence: Synthetic oligonucleotide
ccaucgguuuaauccuuuc

SEQ ID NO: 530936 - RNA, 19 nt, Artificial Sequence
  Description of Artificial Sequence: Synthetic oligonucleotide
caccaauaccaacucuagu

SEQ ID NO: 530937 - RNA, 19 nt, Artificial Sequence
  Description of Artificial Sequence: Synthetic oligonucleotide
ggucucagcagaaaauaau

SEQ ID NO: 530938 - RNA, 19 nt, Artificial Sequence
  Description of Artificial Sequence: Synthetic oligonucleotide
ggcuaaguaauaccucuuu

SEQ ID NO: 530939 - RNA, 19 nt, Artificial Sequence
  Description of Artificial Sequence: Synthetic oligonucleotide
gucucgugcgcugcuggca

SEQ ID NO: 530940 - RNA, 19 nt, Artificial Sequence
  Description of Artificial Sequence: Synthetic oligonucleotide
caucucucaccaucgguuu

SEQ ID NO: 530941 - RNA, 19 nt, Artificial Sequence
  Description of Artificial Sequence: Synthetic oligonucleotide
gguacuuaugggucauuuu

SEQ ID NO: 530942 - RNA, 19 nt, Artificial Sequence
  Description of Artificial Sequence: Synthetic oligonucleotide
cacuccgagcagcuuugga

SEQ ID NO: 530943 - RNA, 19 nt, Artificial Sequence
  Description of Artificial Sequence: Synthetic oligonucleotide
accaucgguuuaauccuuu

SEQ ID NO: 530944 - RNA, 19 nt, Artificial Sequence
  Description of Artificial Sequence: Synthetic oligonucleotide
ggcgccagucuguccauga

SEQ ID NO: 530945 - RNA, 19 nt, Artificial Sequence
  Description of Artificial Sequence: Synthetic oligonucleotide
ccccuuguuuguaauaacu

SEQ ID NO: 530946 - RNA, 19 nt, Artificial Sequence
  Description of Artificial Sequence: Synthetic oligonucleotide
ccguugaucauaugggcgu

SEQ ID NO: 530947 - RNA, 19 nt, Artificial Sequence
  Description of Artificial Sequence: Synthetic oligonucleotide
gaacuagguucugcauucu

SEQ ID NO: 530948 - RNA, 19 nt, Artificial Sequence
  Description of Artificial Sequence: Synthetic oligonucleotide
ggaauacacugggccgaug

SEQ ID NO: 530949 - RNA, 19 nt, Artificial Sequence
  Description of Artificial Sequence: Synthetic oligonucleotide
cucauuccaugucuuuauu

SEQ ID NO: 530950 - RNA, 19 nt, Artificial Sequence
  Description of Artificial Sequence: Synthetic oligonucleotide
guugaucauaugggcguau

SEQ ID NO: 530951 - RNA, 19 nt, Artificial Sequence
  Description of Artificial Sequence: Synthetic oligonucleotide
accaucuauuugggauaaa

SEQ ID NO: 530952 - RNA, 19 nt, Artificial Sequence
  Description of Artificial Sequence: Synthetic oligonucleotide
gguaagggccaacgcggua

SEQ ID NO: 530953 - RNA, 19 nt, Artificial Sequence
  Description of Artificial Sequence: Synthetic oligonucleotide
ggagcuccuuaaauguccu

SEQ ID NO: 530954 - RNA, 19 nt, Artificial Sequence
  Description of Artificial Sequence: Synthetic oligonucleotide
gcgccagucuguccaugac

SEQ ID NO: 530955 - RNA, 19 nt, Artificial Sequence
  Description of Artificial Sequence: Synthetic oligonucleotide
aggguucauguggguacuu

SEQ ID NO: 530956 - RNA, 19 nt, Artificial Sequence
  Description of Artificial Sequence: Synthetic oligonucleotide
cgcgguaaacccguugauc

SEQ ID NO: 530957 - RNA, 19 nt, Artificial Sequence
  Description of Artificial Sequence: Synthetic oligonucleotide
cgaacauaauuuugggcau

SEQ ID NO: 530958 - RNA, 19 nt, Artificial Sequence
  Description of Artificial Sequence: Synthetic oligonucleotide
ggguucauguggguacuua

SEQ ID NO: 530959 - RNA, 19 nt, Artificial Sequence
  Description of Artificial Sequence: Synthetic oligonucleotide
gccaacgcgguaaacccgu

SEQ ID NO: 530960 - RNA, 19 nt, Artificial Sequence
  Description of Artificial Sequence: Synthetic oligonucleotide
cccaguaguuacuccaaau

SEQ ID NO: 530961 - RNA, 19 nt, Artificial Sequence
  Description of Artificial Sequence: Synthetic oligonucleotide
cagccgucugucagagacu

SEQ ID NO: 530962 - RNA, 19 nt, Artificial Sequence
  Description of Artificial Sequence: Synthetic oligonucleotide
gggagggcgccagucuguc

SEQ ID NO: 530963 - RNA, 19 nt, Artificial Sequence
  Description of Artificial Sequence: Synthetic oligonucleotide
gccuaagggcuaaguaaua

SEQ ID NO: 530964 - RNA, 19 nt, Artificial Sequence
  Description of Artificial Sequence: Synthetic oligonucleotide
ccacuccgagcagcuuugg

SEQ ID NO: 530965 - RNA, 19 nt, Artificial Sequence
  Description of Artificial Sequence: Synthetic oligonucleotide
cgugcgcugcuggcaaucc

SEQ ID NO: 530966 - RNA, 19 nt, Artificial Sequence
  Description of Artificial Sequence: Synthetic oligonucleotide
ggcggccaugccagcugag

SEQ ID NO: 530967 - RNA, 19 nt, Artificial Sequence
  Description of Artificial Sequence: Synthetic oligonucleotide
cgcacauucgaaguccacu

SEQ ID NO: 530968 - RNA, 19 nt, Artificial Sequence
  Description of Artificial Sequence: Synthetic oligonucleotide
gccgucugucagagacugc

SEQ ID NO: 530969 - RNA, 19 nt, Artificial Sequence
  Description of Artificial Sequence: Synthetic oligonucleotide
gggcuaaguaauaccucuu

SEQ ID NO: 530970 - RNA, 19 nt, Artificial Sequence
  Description of Artificial Sequence: Synthetic oligonucleotide
ggcugacaauuggcaauua

SEQ ID NO: 530971 - RNA, 19 nt, Artificial Sequence
  Description of Artificial Sequence: Synthetic oligonucleotide
cucgugcgcugcuggcaau

SEQ ID NO: 530972 - RNA, 19 nt, Artificial Sequence
  Description of Artificial Sequence: Synthetic oligonucleotide
cguugaucauaugggcgua

SEQ ID NO: 530973 - RNA, 19 nt, Artificial Sequence
  Description of Artificial Sequence: Synthetic oligonucleotide
cgguaaacccguugaucau

SEQ ID NO: 530974 - RNA, 19 nt, Artificial Sequence
  Description of Artificial Sequence: Synthetic oligonucleotide
cggcggccaugccagcuga

SEQ ID NO: 530975 - RNA, 19 nt, Artificial Sequence
  Description of Artificial Sequence: Synthetic oligonucleotide
caguaacguuuggguuaau

SEQ ID NO: 530976 - RNA, 19 nt, Artificial Sequence
  Description of Artificial Sequence: Synthetic oligonucleotide
ccaacgcgguaaacccguu

SEQ ID NO: 530977 - RNA, 19 nt, Artificial Sequence
  Description of Artificial Sequence: Synthetic oligonucleotide
aauuauuuaacucauacug

SEQ ID NO: 530978 - RNA, 19 nt, Artificial Sequence
  Description of Artificial Sequence: Synthetic oligonucleotide
aaacgagagaaccagaaac

SEQ ID NO: 530979 - RNA, 19 nt, Artificial Sequence
  Description of Artificial Sequence: Synthetic oligonucleotide
ugaauuugcaaccagauuc

SEQ ID NO: 530980 - RNA, 19 nt, Artificial Sequence
  Description of Artificial Sequence: Synthetic oligonucleotide
uuaguaacuaauuuucccg

SEQ ID NO: 530981 - RNA, 19 nt, Artificial Sequence
  Description of Artificial Sequence: Synthetic oligonucleotide
aaaacgacaauaaaacugg

SEQ ID NO: 530982 - RNA, 19 nt, Artificial Sequence
  Description of Artificial Sequence: Synthetic oligonucleotide
aauauuuaaauacugcuua

SEQ ID NO: 530983 - RNA, 19 nt, Artificial Sequence
  Description of Artificial Sequence: Synthetic oligonucleotide
aauggaauguuccucgggg

SEQ ID NO: 530984 - RNA, 19 nt, Artificial Sequence
  Description of Artificial Sequence: Synthetic oligonucleotide
gauacaagaaauuagaggu

SEQ ID NO: 530985 - RNA, 19 nt, Artificial Sequence
  Description of Artificial Sequence: Synthetic oligonucleotide
uuuauaugguuuaaugucc

SEQ ID NO: 530986 - RNA, 19 nt, Artificial Sequence
  Description of Artificial Sequence: Synthetic oligonucleotide
aauggaucuccagugaugc

SEQ ID NO: 530987 - RNA, 19 nt, Artificial Sequence
  Description of Artificial Sequence: Synthetic oligonucleotide
ugaauuuacauuuaugaau

SEQ ID NO: 530988 - RNA, 19 nt, Artificial Sequence
  Description of Artificial Sequence: Synthetic oligonucleotide
ucaaauggaauguuccucg

SEQ ID NO: 530989 - RNA, 19 nt, Artificial Sequence
  Description of Artificial Sequence: Synthetic oligonucleotide
uguuuaguaacuaauuuuc

SEQ ID NO: 530990 - RNA, 19 nt, Artificial Sequence
  Description of Artificial Sequence: Synthetic oligonucleotide
uguuaucuguacaagauac

SEQ ID NO: 530991 - RNA, 19 nt, Artificial Sequence
  Description of Artificial Sequence: Synthetic oligonucleotide
uaucuaguuaauuugacaa

SEQ ID NO: 530992 - RNA, 19 nt, Artificial Sequence
  Description of Artificial Sequence: Synthetic oligonucleotide
ucaucuaugagaugccugg

SEQ ID NO: 530993 - RNA, 19 nt, Artificial Sequence
  Description of Artificial Sequence: Synthetic oligonucleotide
uuguucaauacuuucuggg

SEQ ID NO: 530994 - RNA, 19 nt, Artificial Sequence
  Description of Artificial Sequence: Synthetic oligonucleotide
uacaaggccacacuuauca

SEQ ID NO: 530995 - RNA, 19 nt, Artificial Sequence
  Description of Artificial Sequence: Synthetic oligonucleotide
cauugugaaagccaggucc

SEQ ID NO: 530996 - RNA, 19 nt, Artificial Sequence
  Description of Artificial Sequence: Synthetic oligonucleotide
uauuuaacucauacugugg

SEQ ID NO: 530997 - RNA, 19 nt, Artificial Sequence
  Description of Artificial Sequence: Synthetic oligonucleotide
gaaaucaugacacagaaau

SEQ ID NO: 530998 - RNA, 19 nt, Artificial Sequence
  Description of Artificial Sequence: Synthetic oligonucleotide
uuuauauuucugagaauag

SEQ ID NO: 530999 - RNA, 19 nt, Artificial Sequence
  Description of Artificial Sequence: Synthetic oligonucleotide
uaauaguccucccagaccu

SEQ ID NO: 531000 - RNA, 19 nt, Artificial Sequence
  Description of Artificial Sequence: Synthetic oligonucleotide
aaugcuaggaaugacacaa

SEQ ID NO: 531001 - RNA, 19 nt, Artificial Sequence
  Description of Artificial Sequence: Synthetic oligonucleotide
uauuucugagaauagagaa

SEQ ID NO: 531002 - RNA, 19 nt, Artificial Sequence
  Description of Artificial Sequence: Synthetic oligonucleotide
uguacaagauacacuacag

SEQ ID NO: 531003 - RNA, 19 nt, Artificial Sequence
  Description of Artificial Sequence: Synthetic oligonucleotide
uuaaucuaaauauaguguu

SEQ ID NO: 531004 - RNA, 19 nt, Artificial Sequence
  Description of Artificial Sequence: Synthetic oligonucleotide
gaaaucgccacgcacaccc

SEQ ID NO: 531005 - RNA, 19 nt, Artificial Sequence
  Description of Artificial Sequence: Synthetic oligonucleotide
guuaauuugacaaauauua

SEQ ID NO: 531006 - RNA, 19 nt, Artificial Sequence
  Description of Artificial Sequence: Synthetic oligonucleotide
uugcauuacccucagaaug

SEQ ID NO: 531007 - RNA, 19 nt, Artificial Sequence
  Description of Artificial Sequence: Synthetic oligonucleotide
acgacaauaaaacuggaca

SEQ ID NO: 531008 - RNA, 19 nt, Artificial Sequence
  Description of Artificial Sequence: Synthetic oligonucleotide
cugauuucggggaagagcc

SEQ ID NO: 531009 - RNA, 19 nt, Artificial Sequence
  Description of Artificial Sequence: Synthetic oligonucleotide
agaggugaaacacuuaaug

SEQ ID NO: 531010 - RNA, 19 nt, Artificial Sequence
  Description of Artificial Sequence: Synthetic oligonucleotide
ugugguuaauacuagauuu

SEQ ID NO: 531011 - RNA, 19 nt, Artificial Sequence
  Description of Artificial Sequence: Synthetic oligonucleotide
aagaaaucaugacacagaa

SEQ ID NO: 531012 - RNA, 19 nt, Artificial Sequence
  Description of Artificial Sequence: Synthetic oligonucleotide
auuaccaccuaagacuucc

SEQ ID NO: 531013 - RNA, 19 nt, Artificial Sequence
  Description of Artificial Sequence: Synthetic oligonucleotide
ucuguugcaacagaaaaca

SEQ ID NO: 531014 - RNA, 19 nt, Artificial Sequence
  Description of Artificial Sequence: Synthetic oligonucleotide
uguugcaacagaaaacaga

SEQ ID NO: 531015 - RNA, 19 nt, Artificial Sequence
  Description of Artificial Sequence: Synthetic oligonucleotide
auuguaaggaaaacgagag

SEQ ID NO: 531016 - RNA, 19 nt, Artificial Sequence
  Description of Artificial Sequence: Synthetic oligonucleotide
ucccguaucacaaggaccc

SEQ ID NO: 531017 - RNA, 19 nt, Artificial Sequence
  Description of Artificial Sequence: Synthetic oligonucleotide
aagcauuguaaggaaaacg

SEQ ID NO: 531018 - RNA, 19 nt, Artificial Sequence
  Description of Artificial Sequence: Synthetic oligonucleotide
aaucaugacacagaaauua

SEQ ID NO: 531019 - RNA, 19 nt, Artificial Sequence
  Description of Artificial Sequence: Synthetic oligonucleotide
caaaccuaggcacagacac

SEQ ID NO: 531020 - RNA, 19 nt, Artificial Sequence
  Description of Artificial Sequence: Synthetic oligonucleotide
aggucuuagacacacaacu

SEQ ID NO: 531021 - RNA, 19 nt, Artificial Sequence
  Description of Artificial Sequence: Synthetic oligonucleotide
aaauggaauguuccucggg

SEQ ID NO: 531022 - RNA, 19 nt, Artificial Sequence
  Description of Artificial Sequence: Synthetic oligonucleotide
ucucacacugauuucgggg

SEQ ID NO: 531023 - RNA, 19 nt, Artificial Sequence
  Description of Artificial Sequence: Synthetic oligonucleotide
uaguuaauuugacaaauau

SEQ ID NO: 531024 - RNA, 19 nt, Artificial Sequence
  Description of Artificial Sequence: Synthetic oligonucleotide
auuuauauuucugagaaua

SEQ ID NO: 531025 - RNA, 19 nt, Artificial Sequence
  Description of Artificial Sequence: Synthetic oligonucleotide
uuccgguaaguacacaggg

SEQ ID NO: 531026 - RNA, 19 nt, Artificial Sequence
  Description of Artificial Sequence: Synthetic oligonucleotide
ucuaggaccauuucucuug

SEQ ID NO: 531027 - RNA, 19 nt, Artificial Sequence
  Description of Artificial Sequence: Synthetic oligonucleotide
uucagcaauguuuaguaac

SEQ ID NO: 531028 - RNA, 19 nt, Artificial Sequence
  Description of Artificial Sequence: Synthetic oligonucleotide
uguaauaguccucccagac

SEQ ID NO: 531029 - RNA, 19 nt, Artificial Sequence
  Description of Artificial Sequence: Synthetic oligonucleotide
uaguuagacauuucaagca

SEQ ID NO: 531030 - RNA, 19 nt, Artificial Sequence
  Description of Artificial Sequence: Synthetic oligonucleotide
uuuagcagcgauguugggg

SEQ ID NO: 531031 - RNA, 19 nt, Artificial Sequence
  Description of Artificial Sequence: Synthetic oligonucleotide
uuaucuaguuaauuugaca

SEQ ID NO: 531032 - RNA, 19 nt, Artificial Sequence
  Description of Artificial Sequence: Synthetic oligonucleotide
guaaauauccgcagguugg

SEQ ID NO: 531033 - RNA, 19 nt, Artificial Sequence
  Description of Artificial Sequence: Synthetic oligonucleotide
uuuaucuaguuaauuugac

SEQ ID NO: 531034 - RNA, 19 nt, Artificial Sequence
  Description of Artificial Sequence: Synthetic oligonucleotide
gauacacuacaguaaacac

SEQ ID NO: 531035 - RNA, 19 nt, Artificial Sequence
  Description of Artificial Sequence: Synthetic oligonucleotide
agaaccagaaacuguaacu

SEQ ID NO: 531036 - RNA, 19 nt, Artificial Sequence
  Description of Artificial Sequence: Synthetic oligonucleotide
cauuaauuacaauacauaa

SEQ ID NO: 531037 - RNA, 19 nt, Artificial Sequence
  Description of Artificial Sequence: Synthetic oligonucleotide
aauuauucagcaauguuua

SEQ ID NO: 531038 - RNA, 19 nt, Artificial Sequence
  Description of Artificial Sequence: Synthetic oligonucleotide
aacgacaauaaaacuggac

SEQ ID NO: 531039 - RNA, 19 nt, Artificial Sequence
  Description of Artificial Sequence: Synthetic oligonucleotide
aauauccgcagguuggggu

SEQ ID NO: 531040 - RNA, 19 nt, Artificial Sequence
  Description of Artificial Sequence: Synthetic oligonucleotide
uucucucacacugauuucg

SEQ ID NO: 531041 - RNA, 19 nt, Artificial Sequence
  Description of Artificial Sequence: Synthetic oligonucleotide
ucauugaaagguuugcaaa

SEQ ID NO: 531042 - RNA, 19 nt, Artificial Sequence
  Description of Artificial Sequence: Synthetic oligonucleotide
ucuaaauauaguguuucac

SEQ ID NO: 531043 - RNA, 19 nt, Artificial Sequence
  Description of Artificial Sequence: Synthetic oligonucleotide
uauacuaccuccuccugcu

SEQ ID NO: 531044 - RNA, 19 nt, Artificial Sequence
  Description of Artificial Sequence: Synthetic oligonucleotide
uuagacgcagggaugagaa

SEQ ID NO: 531045 - RNA, 19 nt, Artificial Sequence
  Description of Artificial Sequence: Synthetic oligonucleotide
cacaucauuaauuacaaua

SEQ ID NO: 531046 - RNA, 19 nt, Artificial Sequence
  Description of Artificial Sequence: Synthetic oligonucleotide
cauacugugguuaauacua

SEQ ID NO: 531047 - RNA, 19 nt, Artificial Sequence
  Description of Artificial Sequence: Synthetic oligonucleotide
ucuaguuaauuugacaaau

SEQ ID NO: 531048 - RNA, 19 nt, Artificial Sequence
  Description of Artificial Sequence: Synthetic oligonucleotide
auagagaaaggcuuuucgu

SEQ ID NO: 531049 - RNA, 19 nt, Artificial Sequence
  Description of Artificial Sequence: Synthetic oligonucleotide
ugaugguaaauauccgcag

SEQ ID NO: 531050 - RNA, 19 nt, Artificial Sequence
  Description of Artificial Sequence: Synthetic oligonucleotide
ugcuaggaaugacacaacc

SEQ ID NO: 531051 - RNA, 19 nt, Artificial Sequence
  Description of Artificial Sequence: Synthetic oligonucleotide
uucuguugcaacagaaaac

SEQ ID NO: 531052 - RNA, 19 nt, Artificial Sequence
  Description of Artificial Sequence: Synthetic oligonucleotide
aaccagaaacuguaacuug

SEQ ID NO: 531053 - RNA, 19 nt, Artificial Sequence
  Description of Artificial Sequence: Synthetic oligonucleotide
acuugugugggcugcugcc

SEQ ID NO: 531054 - RNA, 19 nt, Artificial Sequence
  Description of Artificial Sequence: Synthetic oligonucleotide
agauacacuacaguaaaca

SEQ ID NO: 531055 - RNA, 19 nt, Artificial Sequence
  Description of Artificial Sequence: Synthetic oligonucleotide
agacacacaacucuuugca

SEQ ID NO: 531056 - RNA, 19 nt, Artificial Sequence
  Description of Artificial Sequence: Synthetic oligonucleotide
acacuuaucagcuggcacu

SEQ ID NO: 531057 - RNA, 19 nt, Artificial Sequence
  Description of Artificial Sequence: Synthetic oligonucleotide
uaguaacuaauuuucccga

SEQ ID NO: 531058 - RNA, 19 nt, Artificial Sequence
  Description of Artificial Sequence: Synthetic oligonucleotide
ugggguuccgguaaguaca

SEQ ID NO: 531059 - RNA, 19 nt, Artificial Sequence
  Description of Artificial Sequence: Synthetic oligonucleotide
auguuuaguaacuaauuuu

SEQ ID NO: 531060 - RNA, 19 nt, Artificial Sequence
  Description of Artificial Sequence: Synthetic oligonucleotide
cauuguaaggaaaacgaga

SEQ ID NO: 531061 - RNA, 19 nt, Artificial Sequence
  Description of Artificial Sequence: Synthetic oligonucleotide
uacuaccuccuccugcucg

SEQ ID NO: 531062 - RNA, 19 nt, Artificial Sequence
  Description of Artificial Sequence: Synthetic oligonucleotide
aggcauuuugauguggcgc

SEQ ID NO: 531063 - RNA, 19 nt, Artificial Sequence
  Description of Artificial Sequence: Synthetic oligonucleotide
uacguaaucuccugcacac

SEQ ID NO: 531064 - RNA, 19 nt, Artificial Sequence
  Description of Artificial Sequence: Synthetic oligonucleotide
auuacccucagaaugcuag

SEQ ID NO: 531065 - RNA, 19 nt, Artificial Sequence
  Description of Artificial Sequence: Synthetic oligonucleotide
aaaacgagagaaccagaaa

SEQ ID NO: 531066 - RNA, 19 nt, Artificial Sequence
  Description of Artificial Sequence: Synthetic oligonucleotide
uguguacguaaucuccugc

SEQ ID NO: 531067 - RNA, 19 nt, Artificial Sequence
  Description of Artificial Sequence: Synthetic oligonucleotide
uaaauauccgcagguuggg

SEQ ID NO: 531068 - RNA, 19 nt, Artificial Sequence
  Description of Artificial Sequence: Synthetic oligonucleotide
ucuaugucauugugaaagc

SEQ ID NO: 531069 - RNA, 19 nt, Artificial Sequence
  Description of Artificial Sequence: Synthetic oligonucleotide
aauacuagauuuauuuauu

SEQ ID NO: 531070 - RNA, 19 nt, Artificial Sequence
  Description of Artificial Sequence: Synthetic oligonucleotide
guucccguuaacuuuagca

SEQ ID NO: 531071 - RNA, 19 nt, Artificial Sequence
  Description of Artificial Sequence: Synthetic oligonucleotide
ugaggcaaucugaauuugc

SEQ ID NO: 531072 - RNA, 19 nt, Artificial Sequence
  Description of Artificial Sequence: Synthetic oligonucleotide
ucucucacacugauuucgg

SEQ ID NO: 531073 - RNA, 19 nt, Artificial Sequence
  Description of Artificial Sequence: Synthetic oligonucleotide
auuugcaaccagauucugc

SEQ ID NO: 531074 - RNA, 19 nt, Artificial Sequence
  Description of Artificial Sequence: Synthetic oligonucleotide
uugccuauuacaaggccac

SEQ ID NO: 531075 - RNA, 19 nt, Artificial Sequence
  Description of Artificial Sequence: Synthetic oligonucleotide
aaucgccacgcacaccccg

SEQ ID NO: 531076 - RNA, 19 nt, Artificial Sequence
  Description of Artificial Sequence: Synthetic oligonucleotide
uaaucuaaauauaguguuu

SEQ ID NO: 531077 - RNA, 19 nt, Artificial Sequence
  Description of Artificial Sequence: Synthetic oligonucleotide
ugagccugcccuaaagucu

SEQ ID NO: 531078 - RNA, 19 nt, Artificial Sequence
  Description of Artificial Sequence: Synthetic oligonucleotide
acagacaccucuauacuac

SEQ ID NO: 531079 - RNA, 19 nt, Artificial Sequence
  Description of Artificial Sequence: Synthetic oligonucleotide
uaaauggaucuccagugau

SEQ ID NO: 531080 - RNA, 19 nt, Artificial Sequence
  Description of Artificial Sequence: Synthetic oligonucleotide
aacgagagaaccagaaacu

SEQ ID NO: 531081 - RNA, 19 nt, Artificial Sequence
  Description of Artificial Sequence: Synthetic oligonucleotide
ucccguuaacuuuagcagc

SEQ ID NO: 531082 - RNA, 19 nt, Artificial Sequence
  Description of Artificial Sequence: Synthetic oligonucleotide
aauuagaggugaaacacuu

SEQ ID NO: 531083 - RNA, 19 nt, Artificial Sequence
  Description of Artificial Sequence: Synthetic oligonucleotide
gacauuucaagcauuguaa

SEQ ID NO: 531084 - RNA, 19 nt, Artificial Sequence
  Description of Artificial Sequence: Synthetic oligonucleotide
accaccuaagacuuccaag

SEQ ID NO: 531085 - RNA, 19 nt, Artificial Sequence
  Description of Artificial Sequence: Synthetic oligonucleotide
uguacuuuaaauggaucuc

SEQ ID NO: 531086 - RNA, 19 nt, Artificial Sequence
  Description of Artificial Sequence: Synthetic oligonucleotide
aaaccuaggcacagacacc

SEQ ID NO: 531087 - RNA, 19 nt, Artificial Sequence
  Description of Artificial Sequence: Synthetic oligonucleotide
auauccgcagguugggguc

SEQ ID NO: 531088 - RNA, 19 nt, Artificial Sequence
  Description of Artificial Sequence: Synthetic oligonucleotide
aagauacacuacaguaaac

SEQ ID NO: 531089 - RNA, 19 nt, Artificial Sequence
  Description of Artificial Sequence: Synthetic oligonucleotide
aaacuguaacuugaguaca

SEQ ID NO: 531090 - RNA, 19 nt, Artificial Sequence
  Description of Artificial Sequence: Synthetic oligonucleotide
ugucauugugaaagccagg

SEQ ID NO: 531091 - RNA, 19 nt, Artificial Sequence
  Description of Artificial Sequence: Synthetic oligonucleotide
uagacacacaacucuuugc

SEQ ID NO: 531092 - RNA, 19 nt, Artificial Sequence
  Description of Artificial Sequence: Synthetic oligonucleotide
cuauacuaccuccuccugc

SEQ ID NO: 531093 - RNA, 19 nt, Artificial Sequence
  Description of Artificial Sequence: Synthetic oligonucleotide
gaucaugaccauuuucaca

SEQ ID NO: 531094 - RNA, 19 nt, Artificial Sequence
  Description of Artificial Sequence: Synthetic oligonucleotide
accgccaacuuucucaucu

SEQ ID NO: 531095 - RNA, 19 nt, Artificial Sequence
  Description of Artificial Sequence: Synthetic oligonucleotide
uaaagucuguccguagaag

SEQ ID NO: 531096 - RNA, 19 nt, Artificial Sequence
  Description of Artificial Sequence: Synthetic oligonucleotide
uguacguaaucuccugcac

SEQ ID NO: 531097 - RNA, 19 nt, Artificial Sequence
  Description of Artificial Sequence: Synthetic oligonucleotide
uuugcauuacccucagaau

SEQ ID NO: 531098 - RNA, 19 nt, Artificial Sequence
  Description of Artificial Sequence: Synthetic oligonucleotide
ccaagauacaagaaauuag

SEQ ID NO: 531099 - RNA, 19 nt, Artificial Sequence
  Description of Artificial Sequence: Synthetic oligonucleotide
cugcccuaaagucuguccg

SEQ ID NO: 531100 - RNA, 19 nt, Artificial Sequence
  Description of Artificial Sequence: Synthetic oligonucleotide
guuuaguaacuaauuuucc

SEQ ID NO: 531101 - RNA, 19 nt, Artificial Sequence
  Description of Artificial Sequence: Synthetic oligonucleotide
caucguguagucuggcggg

SEQ ID NO: 531102 - RNA, 19 nt, Artificial Sequence
  Description of Artificial Sequence: Synthetic oligonucleotide
ugcucgggaggcgaaaucg

SEQ ID NO: 531103 - RNA, 19 nt, Artificial Sequence
  Description of Artificial Sequence: Synthetic oligonucleotide
aaggacccgucucaguuca

SEQ ID NO: 531104 - RNA, 19 nt, Artificial Sequence
  Description of Artificial Sequence: Synthetic oligonucleotide
aucacaaggacccgucuca

SEQ ID NO: 531105 - RNA, 19 nt, Artificial Sequence
  Description of Artificial Sequence: Synthetic oligonucleotide
aaauauccgcagguugggg

SEQ ID NO: 531106 - RNA, 19 nt, Artificial Sequence
  Description of Artificial Sequence: Synthetic oligonucleotide
cucauacugugguuaauac

SEQ ID NO: 531107 - RNA, 19 nt, Artificial Sequence
  Description of Artificial Sequence: Synthetic oligonucleotide
uucaaauggaauguuccuc

SEQ ID NO: 531108 - RNA, 19 nt, Artificial Sequence
  Description of Artificial Sequence: Synthetic oligonucleotide
aaauggaucuccagugaug

SEQ ID NO: 531109 - RNA, 19 nt, Artificial Sequence
  Description of Artificial Sequence: Synthetic oligonucleotide
aaaauagcuccaauuccgu

SEQ ID NO: 531110 - RNA, 19 nt, Artificial Sequence
  Description of Artificial Sequence: Synthetic oligonucleotide
cugaugguaaauauccgca

SEQ ID NO: 531111 - RNA, 19 nt, Artificial Sequence
  Description of Artificial Sequence: Synthetic oligonucleotide
ugccaagccugauaagugc

SEQ ID NO: 531112 - RNA, 19 nt, Artificial Sequence
  Description of Artificial Sequence: Synthetic oligonucleotide
cauuuucacaccuguccgc

SEQ ID NO: 531113 - RNA, 19 nt, Artificial Sequence
  Description of Artificial Sequence: Synthetic oligonucleotide
uuugccgaugacccagacc

SEQ ID NO: 531114 - RNA, 19 nt, Artificial Sequence
  Description of Artificial Sequence: Synthetic oligonucleotide
gcaaucugaauuugcaacc

SEQ ID NO: 531115 - RNA, 19 nt, Artificial Sequence
  Description of Artificial Sequence: Synthetic oligonucleotide
ugcaccugauugcugguug

SEQ ID NO: 531116 - RNA, 19 nt, Artificial Sequence
  Description of Artificial Sequence: Synthetic oligonucleotide
guuaacuuuagcagcgaug

SEQ ID NO: 531117 - RNA, 19 nt, Artificial Sequence
  Description of Artificial Sequence: Synthetic oligonucleotide
gaagagccgcugcagacgc

SEQ ID NO: 531118 - RNA, 19 nt, Artificial Sequence
  Description of Artificial Sequence: Synthetic oligonucleotide
ucaaaccuaggcacagaca

SEQ ID NO: 531119 - RNA, 19 nt, Artificial Sequence
  Description of Artificial Sequence: Synthetic oligonucleotide
caggccaucguguagucug

SEQ ID NO: 531120 - RNA, 19 nt, Artificial Sequence
  Description of Artificial Sequence: Synthetic oligonucleotide
agcgauguuggggaagccc

SEQ ID NO: 531121 - RNA, 19 nt, Artificial Sequence
  Description of Artificial Sequence: Synthetic oligonucleotide
agcaauguuuaguaacuaa

SEQ ID NO: 531122 - RNA, 19 nt, Artificial Sequence
  Description of Artificial Sequence: Synthetic oligonucleotide
ucuauacuaccuccuccug

SEQ ID NO: 531123 - RNA, 19 nt, Artificial Sequence
  Description of Artificial Sequence: Synthetic oligonucleotide
cucaaaccuaggcacagac

SEQ ID NO: 531124 - RNA, 19 nt, Artificial Sequence
  Description of Artificial Sequence: Synthetic oligonucleotide
uaucacaaggacccgucuc

SEQ ID NO: 531125 - RNA, 19 nt, Artificial Sequence
  Description of Artificial Sequence: Synthetic oligonucleotide
ccaccuaagacuuccaagc

SEQ ID NO: 531126 - RNA, 19 nt, Artificial Sequence
  Description of Artificial Sequence: Synthetic oligonucleotide
auacacuacaguaaacacu

SEQ ID NO: 531127 - RNA, 19 nt, Artificial Sequence
  Description of Artificial Sequence: Synthetic oligonucleotide
uccgguaaguacacagggc

SEQ ID NO: 531128 - RNA, 19 nt, Artificial Sequence
  Description of Artificial Sequence: Synthetic oligonucleotide
acggagugcccacacuccc

SEQ ID NO: 531129 - RNA, 19 nt, Artificial Sequence
  Description of Artificial Sequence: Synthetic oligonucleotide
agccugauaagugcugccc

SEQ ID NO: 531130 - RNA, 19 nt, Artificial Sequence
  Description of Artificial Sequence: Synthetic oligonucleotide
gguuccgguaaguacacag

SEQ ID NO: 531131 - RNA, 19 nt, Artificial Sequence
  Description of Artificial Sequence: Synthetic oligonucleotide
cuuugccuauuacaaggcc

SEQ ID NO: 531132 - RNA, 19 nt, Artificial Sequence
  Description of Artificial Sequence: Synthetic oligonucleotide
accucuauacuaccuccuc

SEQ ID NO: 531133 - RNA, 19 nt, Artificial Sequence
  Description of Artificial Sequence: Synthetic oligonucleotide
ccugauugcugguugaugc

SEQ ID NO: 531134 - RNA, 19 nt, Artificial Sequence
  Description of Artificial Sequence: Synthetic oligonucleotide
gaaaacgagagaaccagaa

SEQ ID NO: 531135 - RNA, 19 nt, Artificial Sequence
  Description of Artificial Sequence: Synthetic oligonucleotide
acaacccacaaacaccccu

SEQ ID NO: 531136 - RNA, 19 nt, Artificial Sequence
  Description of Artificial Sequence: Synthetic oligonucleotide
aucuccugcacaccaccac

SEQ ID NO: 531137 - RNA, 19 nt, Artificial Sequence
  Description of Artificial Sequence: Synthetic oligonucleotide
ugauuucggggaagagccg

SEQ ID NO: 531138 - RNA, 19 nt, Artificial Sequence
  Description of Artificial Sequence: Synthetic oligonucleotide
uccacaguguuuguuaaaa

SEQ ID NO: 531139 - RNA, 19 nt, Artificial Sequence
  Description of Artificial Sequence: Synthetic oligonucleotide
uuggaucaugaccauuuuc

SEQ ID NO: 531140 - RNA, 19 nt, Artificial Sequence
  Description of Artificial Sequence: Synthetic oligonucleotide
cucaucuaugagaugccug

SEQ ID NO: 531141 - RNA, 19 nt, Artificial Sequence
  Description of Artificial Sequence: Synthetic oligonucleotide
cuaugucauugugaaagcc

SEQ ID NO: 531142 - RNA, 19 nt, Artificial Sequence
  Description of Artificial Sequence: Synthetic oligonucleotide
gacaccucuauacuaccuc

SEQ ID NO: 531143 - RNA, 19 nt, Artificial Sequence
  Description of Artificial Sequence: Synthetic oligonucleotide
aguaacuaauuuucccgau

SEQ ID NO: 531144 - RNA, 19 nt, Artificial Sequence
  Description of Artificial Sequence: Synthetic oligonucleotide
uuggggucgguguuaggag

SEQ ID NO: 531145 - RNA, 19 nt, Artificial Sequence
  Description of Artificial Sequence: Synthetic oligonucleotide
acuuuagacgcagggauga

SEQ ID NO: 531146 - RNA, 19 nt, Artificial Sequence
  Description of Artificial Sequence: Synthetic oligonucleotide
ugccaucuaugucauugug

SEQ ID NO: 531147 - RNA, 19 nt, Artificial Sequence
  Description of Artificial Sequence: Synthetic oligonucleotide
ugguuaauacuagauuuau

SEQ ID NO: 531148 - RNA, 19 nt, Artificial Sequence
  Description of Artificial Sequence: Synthetic oligonucleotide
ccugaugguaaauauccgc

SEQ ID NO: 531149 - RNA, 19 nt, Artificial Sequence
  Description of Artificial Sequence: Synthetic oligonucleotide
uguuccucggggucaauuc

SEQ ID NO: 531150 - RNA, 19 nt, Artificial Sequence
  Description of Artificial Sequence: Synthetic oligonucleotide
uuuagacgcagggaugaga

SEQ ID NO: 531151 - RNA, 19 nt, Artificial Sequence
  Description of Artificial Sequence: Synthetic oligonucleotide
uccauuccgacagcggucc

SEQ ID NO: 531152 - RNA, 19 nt, Artificial Sequence
  Description of Artificial Sequence: Synthetic oligonucleotide
uaugagaugccuggccacc

SEQ ID NO: 531153 - RNA, 19 nt, Artificial Sequence
  Description of Artificial Sequence: Synthetic oligonucleotide
acaaacaccccucccguau

SEQ ID NO: 531154 - RNA, 19 nt, Artificial Sequence
  Description of Artificial Sequence: Synthetic oligonucleotide
gaaauuauucagcaauguu

SEQ ID NO: 531155 - RNA, 19 nt, Artificial Sequence
  Description of Artificial Sequence: Synthetic oligonucleotide
cacaacucuuugcauuacc

SEQ ID NO: 531156 - RNA, 19 nt, Artificial Sequence
  Description of Artificial Sequence: Synthetic oligonucleotide
caccuaagacuuccaagcc

SEQ ID NO: 531157 - RNA, 19 nt, Artificial Sequence
  Description of Artificial Sequence: Synthetic oligonucleotide
cugagccugcccuaaaguc

SEQ ID NO: 531158 - RNA, 19 nt, Artificial Sequence
  Description of Artificial Sequence: Synthetic oligonucleotide
cuaugagaugccuggccac

SEQ ID NO: 531159 - RNA, 19 nt, Artificial Sequence
  Description of Artificial Sequence: Synthetic oligonucleotide
cuugucugcuccugugggc

SEQ ID NO: 531160 - RNA, 19 nt, Artificial Sequence
  Description of Artificial Sequence: Synthetic oligonucleotide
acgagagaaccagaaacug

SEQ ID NO: 531161 - RNA, 19 nt, Artificial Sequence
  Description of Artificial Sequence: Synthetic oligonucleotide
cuaggaccauuucucuugc

SEQ ID NO: 531162 - RNA, 19 nt, Artificial Sequence
  Description of Artificial Sequence: Synthetic oligonucleotide
uagaggugaaacacuuaau

SEQ ID NO: 531163 - RNA, 19 nt, Artificial Sequence
  Description of Artificial Sequence: Synthetic oligonucleotide
guacguaaucuccugcaca

SEQ ID NO: 531164 - RNA, 19 nt, Artificial Sequence
  Description of Artificial Sequence: Synthetic oligonucleotide
aaacaccuuggaauuaaaa

SEQ ID NO: 531165 - RNA, 19 nt, Artificial Sequence
  Description of Artificial Sequence: Synthetic oligonucleotide
cucucacacugauuucggg

SEQ ID NO: 531166 - RNA, 19 nt, Artificial Sequence
  Description of Artificial Sequence: Synthetic oligonucleotide
acugugguuaauacuagau

SEQ ID NO: 531167 - RNA, 19 nt, Artificial Sequence
  Description of Artificial Sequence: Synthetic oligonucleotide
ucgggaggcgaaaucgcca

SEQ ID NO: 531168 - RNA, 19 nt, Artificial Sequence
  Description of Artificial Sequence: Synthetic oligonucleotide
cacuuuagacgcagggaug

SEQ ID NO: 531169 - RNA, 19 nt, Artificial Sequence
  Description of Artificial Sequence: Synthetic oligonucleotide
uuguuacauuaccaccuaa

SEQ ID NO: 531170 - RNA, 19 nt, Artificial Sequence
  Description of Artificial Sequence: Synthetic oligonucleotide
gaagcucuuggauugugcu

SEQ ID NO: 531171 - RNA, 19 nt, Artificial Sequence
  Description of Artificial Sequence: Synthetic oligonucleotide
cccguuaacuuuagcagcg

SEQ ID NO: 531172 - RNA, 19 nt, Artificial Sequence
  Description of Artificial Sequence: Synthetic oligonucleotide
guccguagaaggcugccug

SEQ ID NO: 531173 - RNA, 19 nt, Artificial Sequence
  Description of Artificial Sequence: Synthetic oligonucleotide
ugacccagaccccacuuua

SEQ ID NO: 531174 - RNA, 19 nt, Artificial Sequence
  Description of Artificial Sequence: Synthetic oligonucleotide
guguacguaaucuccugca

SEQ ID NO: 531175 - RNA, 19 nt, Artificial Sequence
  Description of Artificial Sequence: Synthetic oligonucleotide
cacuacaguaaacacugga

SEQ ID NO: 531176 - RNA, 19 nt, Artificial Sequence
  Description of Artificial Sequence: Synthetic oligonucleotide
ccagaccccacuuuagacg

SEQ ID NO: 531177 - RNA, 19 nt, Artificial Sequence
  Description of Artificial Sequence: Synthetic oligonucleotide
auacuuucugggguuccgg

SEQ ID NO: 531178 - RNA, 19 nt, Artificial Sequence
  Description of Artificial Sequence: Synthetic oligonucleotide
uggaucccagaacucucug

SEQ ID NO: 531179 - RNA, 19 nt, Artificial Sequence
  Description of Artificial Sequence: Synthetic oligonucleotide
cucgggaggcgaaaucgcc

SEQ ID NO: 531180 - RNA, 19 nt, Artificial Sequence
  Description of Artificial Sequence: Synthetic oligonucleotide
aaaucgccacgcacacccc

SEQ ID NO: 531181 - RNA, 19 nt, Artificial Sequence
  Description of Artificial Sequence: Synthetic oligonucleotide
gaaaucauauuaucccuuu

SEQ ID NO: 531182 - RNA, 19 nt, Artificial Sequence
  Description of Artificial Sequence: Synthetic oligonucleotide
auucagcaauguuuaguaa

SEQ ID NO: 531183 - RNA, 19 nt, Artificial Sequence
  Description of Artificial Sequence: Synthetic oligonucleotide
caacccacaaacaccccuc

SEQ ID NO: 531184 - RNA, 19 nt, Artificial Sequence
  Description of Artificial Sequence: Synthetic oligonucleotide
uucggggaagagccgcugc

SEQ ID NO: 531185 - RNA, 19 nt, Artificial Sequence
  Description of Artificial Sequence: Synthetic oligonucleotide
ggcauuuugauguggcgca

SEQ ID NO: 531186 - RNA, 19 nt, Artificial Sequence
  Description of Artificial Sequence: Synthetic oligonucleotide
ugcccuaaagucuguccgu

SEQ ID NO: 531187 - RNA, 19 nt, Artificial Sequence
  Description of Artificial Sequence: Synthetic oligonucleotide
acucuuugcauuacccuca

SEQ ID NO: 531188 - RNA, 19 nt, Artificial Sequence
  Description of Artificial Sequence: Synthetic oligonucleotide
ccaucguguagucuggcgg

SEQ ID NO: 531189 - RNA, 19 nt, Artificial Sequence
  Description of Artificial Sequence: Synthetic oligonucleotide
uaccaccuaagacuuccaa

SEQ ID NO: 531190 - RNA, 19 nt, Artificial Sequence
  Description of Artificial Sequence: Synthetic oligonucleotide
uauccgcagguuggggucg

SEQ ID NO: 531191 - RNA, 19 nt, Artificial Sequence
  Description of Artificial Sequence: Synthetic oligonucleotide
acaugugcaccugauugcu

SEQ ID NO: 531192 - RNA, 19 nt, Artificial Sequence
  Description of Artificial Sequence: Synthetic oligonucleotide
acauuaccaccuaagacuu

SEQ ID NO: 531193 - RNA, 19 nt, Artificial Sequence
  Description of Artificial Sequence: Synthetic oligonucleotide
ucggggaagagccgcugca

SEQ ID NO: 531194 - RNA, 19 nt, Artificial Sequence
  Description of Artificial Sequence: Synthetic oligonucleotide
gagccugcccuaaagucug

SEQ ID NO: 531195 - RNA, 19 nt, Artificial Sequence
  Description of Artificial Sequence: Synthetic oligonucleotide
ucuacugcuccugccuggc

SEQ ID NO: 531196 - RNA, 19 nt, Artificial Sequence
  Description of Artificial Sequence: Synthetic oligonucleotide
uuaccaccuaagacuucca

SEQ ID NO: 531197 - RNA, 19 nt, Artificial Sequence
  Description of Artificial Sequence: Synthetic oligonucleotide
cacggagugcccacacucc

SEQ ID NO: 531198 - RNA, 19 nt, Artificial Sequence
  Description of Artificial Sequence: Synthetic oligonucleotide
auuaucccuuuuauuaaau

SEQ ID NO: 531199 - RNA, 19 nt, Artificial Sequence
  Description of Artificial Sequence: Synthetic oligonucleotide
ugcagacgcccaucuacug

SEQ ID NO: 531200 - RNA, 19 nt, Artificial Sequence
  Description of Artificial Sequence: Synthetic oligonucleotide
cauuuugauguggcgcagc

SEQ ID NO: 531201 - RNA, 19 nt, Artificial Sequence
  Description of Artificial Sequence: Synthetic oligonucleotide
uagacgcagggaugagaag

SEQ ID NO: 531202 - RNA, 19 nt, Artificial Sequence
  Description of Artificial Sequence: Synthetic oligonucleotide
cacggccucucaaaccuag

SEQ ID NO: 531203 - RNA, 19 nt, Artificial Sequence
  Description of Artificial Sequence: Synthetic oligonucleotide
caucuacugcuccugccug

SEQ ID NO: 531204 - RNA, 19 nt, Artificial Sequence
  Description of Artificial Sequence: Synthetic oligonucleotide
ugccuguaguacucugccc

SEQ ID NO: 531205 - RNA, 19 nt, Artificial Sequence
  Description of Artificial Sequence: Synthetic oligonucleotide
ggaggucuuagacacacaa

SEQ ID NO: 531206 - RNA, 19 nt, Artificial Sequence
  Description of Artificial Sequence: Synthetic oligonucleotide
gacgcccaucuacugcucc

SEQ ID NO: 531207 - RNA, 19 nt, Artificial Sequence
  Description of Artificial Sequence: Synthetic oligonucleotide
agugaugcggagaggcuug

SEQ ID NO: 531208 - RNA, 19 nt, Artificial Sequence
  Description of Artificial Sequence: Synthetic oligonucleotide
aguguuucacagaaacaaa

SEQ ID NO: 531209 - RNA, 19 nt, Artificial Sequence
  Description of Artificial Sequence: Synthetic oligonucleotide
guacaagauacacuacagu

SEQ ID NO: 531210 - RNA, 19 nt, Artificial Sequence
  Description of Artificial Sequence: Synthetic oligonucleotide
ggcaccgccaacuuucuca

SEQ ID NO: 531211 - RNA, 19 nt, Artificial Sequence
  Description of Artificial Sequence: Synthetic oligonucleotide
auacuaccuccuccugcuc

SEQ ID NO: 531212 - RNA, 19 nt, Artificial Sequence
  Description of Artificial Sequence: Synthetic oligonucleotide
gaccccacuuuagacgcag

SEQ ID NO: 531213 - RNA, 19 nt, Artificial Sequence
  Description of Artificial Sequence: Synthetic oligonucleotide
cucagaaugcuaggaauga

SEQ ID NO: 531214 - RNA, 19 nt, Artificial Sequence
  Description of Artificial Sequence: Synthetic oligonucleotide
ugguaugacucuugcuuuu

SEQ ID NO: 531215 - RNA, 19 nt, Artificial Sequence
  Description of Artificial Sequence: Synthetic oligonucleotide
caucuaugagaugccuggc

SEQ ID NO: 531216 - RNA, 19 nt, Artificial Sequence
  Description of Artificial Sequence: Synthetic oligonucleotide
cacaccccggaagucagcc

SEQ ID NO: 531217 - RNA, 19 nt, Artificial Sequence
  Description of Artificial Sequence: Synthetic oligonucleotide
ucucugaggcaaucugaau

SEQ ID NO: 531218 - RNA, 19 nt, Artificial Sequence
  Description of Artificial Sequence: Synthetic oligonucleotide
caaggacccgucucaguuc

SEQ ID NO: 531219 - RNA, 19 nt, Artificial Sequence
  Description of Artificial Sequence: Synthetic oligonucleotide
ccucuauacuaccuccucc

SEQ ID NO: 531220 - RNA, 19 nt, Artificial Sequence
  Description of Artificial Sequence: Synthetic oligonucleotide
ucuuugcauuacccucaga

SEQ ID NO: 531221 - RNA, 19 nt, Artificial Sequence
  Description of Artificial Sequence: Synthetic oligonucleotide
aucguguagucuggcgggg

SEQ ID NO: 531222 - RNA, 19 nt, Artificial Sequence
  Description of Artificial Sequence: Synthetic oligonucleotide
cagccaagauacaagaaau

SEQ ID NO: 531223 - RNA, 19 nt, Artificial Sequence
  Description of Artificial Sequence: Synthetic oligonucleotide
uccgacagcgguccacaau

SEQ ID NO: 531224 - RNA, 19 nt, Artificial Sequence
  Description of Artificial Sequence: Synthetic oligonucleotide
ucucaaaccuaggcacaga

SEQ ID NO: 531225 - RNA, 19 nt, Artificial Sequence
  Description of Artificial Sequence: Synthetic oligonucleotide
augcuaggaaugacacaac

SEQ ID NO: 531226 - RNA, 19 nt, Artificial Sequence
  Description of Artificial Sequence: Synthetic oligonucleotide
gaagccccugggaggaaag

SEQ ID NO: 531227 - RNA, 19 nt, Artificial Sequence
  Description of Artificial Sequence: Synthetic oligonucleotide
uccucggggucaauucaaa

SEQ ID NO: 531228 - RNA, 19 nt, Artificial Sequence
  Description of Artificial Sequence: Synthetic oligonucleotide
gugguuaauacuagauuua

SEQ ID NO: 531229 - RNA, 19 nt, Artificial Sequence
  Description of Artificial Sequence: Synthetic oligonucleotide
ggagugcccacacucccag

SEQ ID NO: 531230 - RNA, 19 nt, Artificial Sequence
  Description of Artificial Sequence: Synthetic oligonucleotide
cacagacaccucuauacua

SEQ ID NO: 531231 - RNA, 19 nt, Artificial Sequence
  Description of Artificial Sequence: Synthetic oligonucleotide
ugcugccaagccugauaag

SEQ ID NO: 531232 - RNA, 19 nt, Artificial Sequence
  Description of Artificial Sequence: Synthetic oligonucleotide
gacccagaccccacuuuag

SEQ ID NO: 531233 - RNA, 19 nt, Artificial Sequence
  Description of Artificial Sequence: Synthetic oligonucleotide
uucacaccuguccgcuccu

SEQ ID NO: 531234 - RNA, 19 nt, Artificial Sequence
  Description of Artificial Sequence: Synthetic oligonucleotide
agccagguccauuccgaca

SEQ ID NO: 531235 - RNA, 19 nt, Artificial Sequence
  Description of Artificial Sequence: Synthetic oligonucleotide
acacugauuucggggaaga

SEQ ID NO: 531236 - RNA, 19 nt, Artificial Sequence
  Description of Artificial Sequence: Synthetic oligonucleotide
guaaucuccugcacaccac

SEQ ID NO: 531237 - RNA, 19 nt, Artificial Sequence
  Description of Artificial Sequence: Synthetic oligonucleotide
agaaaucaugacacagaaa

SEQ ID NO: 531238 - RNA, 19 nt, Artificial Sequence
  Description of Artificial Sequence: Synthetic oligonucleotide
gccugauaagugcugcccc

SEQ ID NO: 531239 - RNA, 19 nt, Artificial Sequence
  Description of Artificial Sequence: Synthetic oligonucleotide
gcagacgcccaucuacugc

SEQ ID NO: 531240 - RNA, 19 nt, Artificial Sequence
  Description of Artificial Sequence: Synthetic oligonucleotide
caaacaccccucccguauc

SEQ ID NO: 531241 - RNA, 19 nt, Artificial Sequence
  Description of Artificial Sequence: Synthetic oligonucleotide
cuuuagacgcagggaugag

SEQ ID NO: 531242 - RNA, 19 nt, Artificial Sequence
  Description of Artificial Sequence: Synthetic oligonucleotide
guuggggaagccccuggga

SEQ ID NO: 531243 - RNA, 19 nt, Artificial Sequence
  Description of Artificial Sequence: Synthetic oligonucleotide
guaacuaauuuucccgauu

SEQ ID NO: 531244 - RNA, 19 nt, Artificial Sequence
  Description of Artificial Sequence: Synthetic oligonucleotide
ucugggguuccgguaagua

SEQ ID NO: 531245 - RNA, 19 nt, Artificial Sequence
  Description of Artificial Sequence: Synthetic oligonucleotide
ggcgaaaucgccacgcaca

SEQ ID NO: 531246 - RNA, 19 nt, Artificial Sequence
  Description of Artificial Sequence: Synthetic oligonucleotide
gccaucguguagucuggcg

SEQ ID NO: 531247 - RNA, 19 nt, Artificial Sequence
  Description of Artificial Sequence: Synthetic oligonucleotide
ccgacagcgguccacaauc

SEQ ID NO: 531248 - RNA, 19 nt, Artificial Sequence
  Description of Artificial Sequence: Synthetic oligonucleotide
acaccccucccguaucaca

SEQ ID NO: 531249 - RNA, 19 nt, Artificial Sequence
  Description of Artificial Sequence: Synthetic oligonucleotide
cugaggcaaucugaauuug

SEQ ID NO: 531250 - RNA, 19 nt, Artificial Sequence
  Description of Artificial Sequence: Synthetic oligonucleotide
gaccauuuucacaccuguc

SEQ ID NO: 531251 - RNA, 19 nt, Artificial Sequence
  Description of Artificial Sequence: Synthetic oligonucleotide
aaucugccccaggagccgu

SEQ ID NO: 531252 - RNA, 19 nt, Artificial Sequence
  Description of Artificial Sequence: Synthetic oligonucleotide
gacccgucucaguucagaa

SEQ ID NO: 531253 - RNA, 19 nt, Artificial Sequence
  Description of Artificial Sequence: Synthetic oligonucleotide
guuccgcugaagcuccaca

SEQ ID NO: 531254 - RNA, 19 nt, Artificial Sequence
  Description of Artificial Sequence: Synthetic oligonucleotide
cauuaccaccuaagacuuc

SEQ ID NO: 531255 - RNA, 19 nt, Artificial Sequence
  Description of Artificial Sequence: Synthetic oligonucleotide
agacaccucuauacuaccu

SEQ ID NO: 531256 - RNA, 19 nt, Artificial Sequence
  Description of Artificial Sequence: Synthetic oligonucleotide
caugaccauuuucacaccu

SEQ ID NO: 531257 - RNA, 19 nt, Artificial Sequence
  Description of Artificial Sequence: Synthetic oligonucleotide
cuuugccgaugacccagac

SEQ ID NO: 531258 - RNA, 19 nt, Artificial Sequence
  Description of Artificial Sequence: Synthetic oligonucleotide
aggagcaccccugauggua

SEQ ID NO: 531259 - RNA, 19 nt, Artificial Sequence
  Description of Artificial Sequence: Synthetic oligonucleotide
cauuccgacagcgguccac

SEQ ID NO: 531260 - RNA, 19 nt, Artificial Sequence
  Description of Artificial Sequence: Synthetic oligonucleotide
ggugaaacacuuaaugaau

SEQ ID NO: 531261 - RNA, 19 nt, Artificial Sequence
  Description of Artificial Sequence: Synthetic oligonucleotide
ggucuuagacacacaacuc

SEQ ID NO: 531262 - RNA, 19 nt, Artificial Sequence
  Description of Artificial Sequence: Synthetic oligonucleotide
gaggcgaaaucgccacgca

SEQ ID NO: 531263 - RNA, 19 nt, Artificial Sequence
  Description of Artificial Sequence: Synthetic oligonucleotide
auuagaggugaaacacuua

SEQ ID NO: 531264 - RNA, 19 nt, Artificial Sequence
  Description of Artificial Sequence: Synthetic oligonucleotide
uugcaaccagauucugcuu

SEQ ID NO: 531265 - RNA, 19 nt, Artificial Sequence
  Description of Artificial Sequence: Synthetic oligonucleotide
agccaagauacaagaaauu

SEQ ID NO: 531266 - RNA, 19 nt, Artificial Sequence
  Description of Artificial Sequence: Synthetic oligonucleotide
ggggucgguguuaggaggg

SEQ ID NO: 531267 - RNA, 19 nt, Artificial Sequence
  Description of Artificial Sequence: Synthetic oligonucleotide
uaaguacacagggccucuc

SEQ ID NO: 531268 - RNA, 19 nt, Artificial Sequence
  Description of Artificial Sequence: Synthetic oligonucleotide
ugccuauuacaaggccaca

SEQ ID NO: 531269 - RNA, 19 nt, Artificial Sequence
  Description of Artificial Sequence: Synthetic oligonucleotide
gcgaaaucgccacgcacac

SEQ ID NO: 531270 - RNA, 19 nt, Artificial Sequence
  Description of Artificial Sequence: Synthetic oligonucleotide
aggccaucguguagucugg

SEQ ID NO: 531271 - RNA, 19 nt, Artificial Sequence
  Description of Artificial Sequence: Synthetic oligonucleotide
gcacuguguacguaaucuc

SEQ ID NO: 531272 - RNA, 19 nt, Artificial Sequence
  Description of Artificial Sequence: Synthetic oligonucleotide
gcaauguuuaguaacuaau

SEQ ID NO: 531273 - RNA, 19 nt, Artificial Sequence
  Description of Artificial Sequence: Synthetic oligonucleotide
cccagaccccacuuuagac

SEQ ID NO: 531274 - RNA, 19 nt, Artificial Sequence
  Description of Artificial Sequence: Synthetic oligonucleotide
auuucggggaagagccgcu

SEQ ID NO: 531275 - RNA, 19 nt, Artificial Sequence
  Description of Artificial Sequence: Synthetic oligonucleotide
ucguguagucuggcgggga

SEQ ID NO: 531276 - RNA, 19 nt, Artificial Sequence
  Description of Artificial Sequence: Synthetic oligonucleotide
acgcagggaugagaagcuc

SEQ ID NO: 531277 - RNA, 19 nt, Artificial Sequence
  Description of Artificial Sequence: Synthetic oligonucleotide
cugugguuaauacuagauu

SEQ ID NO: 531278 - RNA, 19 nt, Artificial Sequence
  Description of Artificial Sequence: Synthetic oligonucleotide
caccccucccguaucacaa

SEQ ID NO: 531279 - RNA, 19 nt, Artificial Sequence
  Description of Artificial Sequence: Synthetic oligonucleotide
ucgccacgcacaccccgga

SEQ ID NO: 531280 - RNA, 19 nt, Artificial Sequence
  Description of Artificial Sequence: Synthetic oligonucleotide
cugggucagaaaagcugga

SEQ ID NO: 531281 - RNA, 19 nt, Artificial Sequence
  Description of Artificial Sequence: Synthetic oligonucleotide
gacgcagggaugagaagcu

SEQ ID NO: 531282 - RNA, 19 nt, Artificial Sequence
  Description of Artificial Sequence: Synthetic oligonucleotide
caccucgaucugcugagga

SEQ ID NO: 531283 - RNA, 19 nt, Artificial Sequence
  Description of Artificial Sequence: Synthetic oligonucleotide
guaucacaaggacccgucu

SEQ ID NO: 531284 - RNA, 19 nt, Artificial Sequence
  Description of Artificial Sequence: Synthetic oligonucleotide
ccacggagugcccacacuc

SEQ ID NO: 531285 - RNA, 19 nt, Artificial Sequence
  Description of Artificial Sequence: Synthetic oligonucleotide
ugugggcaaugggccaucu

SEQ ID NO: 531286 - RNA, 19 nt, Artificial Sequence
  Description of Artificial Sequence: Synthetic oligonucleotide
cguaaucuccugcacacca

SEQ ID NO: 531287 - RNA, 19 nt, Artificial Sequence
  Description of Artificial Sequence: Synthetic oligonucleotide
acaccccggaagucagccu

SEQ ID NO: 531288 - RNA, 19 nt, Artificial Sequence
  Description of Artificial Sequence: Synthetic oligonucleotide
gaugacccagaccccacuu

SEQ ID NO: 531289 - RNA, 19 nt, Artificial Sequence
  Description of Artificial Sequence: Synthetic oligonucleotide
cguaucacaaggacccguc

SEQ ID NO: 531290 - RNA, 19 nt, Artificial Sequence
  Description of Artificial Sequence: Synthetic oligonucleotide
ccccuuugccuauuacaag

SEQ ID NO: 531291 - RNA, 19 nt, Artificial Sequence
  Description of Artificial Sequence: Synthetic oligonucleotide
gagggccacucacaggggu

SEQ ID NO: 531292 - RNA, 19 nt, Artificial Sequence
  Description of Artificial Sequence: Synthetic oligonucleotide
ggccacggccucucaaacc

SEQ ID NO: 531293 - RNA, 19 nt, Artificial Sequence
  Description of Artificial Sequence: Synthetic oligonucleotide
ggcaaugggccaucuugga

SEQ ID NO: 531294 - RNA, 19 nt, Artificial Sequence
  Description of Artificial Sequence: Synthetic oligonucleotide
gguucccguuaacuuuagc

SEQ ID NO: 531295 - RNA, 19 nt, Artificial Sequence
  Description of Artificial Sequence: Synthetic oligonucleotide
cccuaaagucuguccguag

SEQ ID NO: 531296 - RNA, 19 nt, Artificial Sequence
  Description of Artificial Sequence: Synthetic oligonucleotide
ucgaucugcugaggagcac

SEQ ID NO: 531297 - RNA, 19 nt, Artificial Sequence
  Description of Artificial Sequence: Synthetic oligonucleotide
acggccucucaaaccuagg

SEQ ID NO: 531298 - RNA, 19 nt, Artificial Sequence
  Description of Artificial Sequence: Synthetic oligonucleotide
cugcucgggaggcgaaauc

SEQ ID NO: 531299 - RNA, 19 nt, Artificial Sequence
  Description of Artificial Sequence: Synthetic oligonucleotide
gcauuuugauguggcgcag

SEQ ID NO: 531300 - RNA, 19 nt, Artificial Sequence
  Description of Artificial Sequence: Synthetic oligonucleotide
acuuaucagcuggcacugu

SEQ ID NO: 531301 - RNA, 19 nt, Artificial Sequence
  Description of Artificial Sequence: Synthetic oligonucleotide
uagcagcgauguuggggaa

SEQ ID NO: 531302 - RNA, 19 nt, Artificial Sequence
  Description of Artificial Sequence: Synthetic oligonucleotide
cauuacccucagaaugcua

SEQ ID NO: 531303 - RNA, 19 nt, Artificial Sequence
  Description of Artificial Sequence: Synthetic oligonucleotide
cugccugcugccuguagua

SEQ ID NO: 531304 - RNA, 19 nt, Artificial Sequence
  Description of Artificial Sequence: Synthetic oligonucleotide
cugcagacgcccaucuacu

SEQ ID NO: 531305 - RNA, 19 nt, Artificial Sequence
  Description of Artificial Sequence: Synthetic oligonucleotide
gccggcaccgccaacuuuc

SEQ ID NO: 531306 - RNA, 19 nt, Artificial Sequence
  Description of Artificial Sequence: Synthetic oligonucleotide
caccucuauacuaccuccu

SEQ ID NO: 531307 - RNA, 19 nt, Artificial Sequence
  Description of Artificial Sequence: Synthetic oligonucleotide
cuccuuugccgaugaccca

SEQ ID NO: 531308 - RNA, 19 nt, Artificial Sequence
  Description of Artificial Sequence: Synthetic oligonucleotide
ccacuuuagacgcagggau

SEQ ID NO: 531309 - RNA, 19 nt, Artificial Sequence
  Description of Artificial Sequence: Synthetic oligonucleotide
agcaccccugaugguaaau

SEQ ID NO: 531310 - RNA, 19 nt, Artificial Sequence
  Description of Artificial Sequence: Synthetic oligonucleotide
cagcaauguuuaguaacua

SEQ ID NO: 531311 - RNA, 19 nt, Artificial Sequence
  Description of Artificial Sequence: Synthetic oligonucleotide
uccugcucgggaggcgaaa

SEQ ID NO: 531312 - RNA, 19 nt, Artificial Sequence
  Description of Artificial Sequence: Synthetic oligonucleotide
gggucgguguuaggagggg

SEQ ID NO: 531313 - RNA, 19 nt, Artificial Sequence
  Description of Artificial Sequence: Synthetic oligonucleotide
ccgucucaguucagaauuc

SEQ ID NO: 531314 - RNA, 19 nt, Artificial Sequence
  Description of Artificial Sequence: Synthetic oligonucleotide
gggguuccgguaaguacac

SEQ ID NO: 531315 - RNA, 19 nt, Artificial Sequence
  Description of Artificial Sequence: Synthetic oligonucleotide
gggccaucuuggaucauga

SEQ ID NO: 531316 - RNA, 19 nt, Artificial Sequence
  Description of Artificial Sequence: Synthetic oligonucleotide
cugccccaggagccguuug

SEQ ID NO: 531317 - RNA, 19 nt, Artificial Sequence
  Description of Artificial Sequence: Synthetic oligonucleotide
gguuaauacuagauuuauu

SEQ ID NO: 531318 - RNA, 19 nt, Artificial Sequence
  Description of Artificial Sequence: Synthetic oligonucleotide
gagcaccccugaugguaaa

SEQ ID NO: 531319 - RNA, 19 nt, Artificial Sequence
  Description of Artificial Sequence: Synthetic oligonucleotide
cccacuuuagacgcaggga

SEQ ID NO: 531320 - RNA, 19 nt, Artificial Sequence
  Description of Artificial Sequence: Synthetic oligonucleotide
gccgaugacccagacccca

SEQ ID NO: 531321 - RNA, 19 nt, Artificial Sequence
  Description of Artificial Sequence: Synthetic oligonucleotide
gggguucccguuaacuuua

SEQ ID NO: 531322 - RNA, 19 nt, Artificial Sequence
  Description of Artificial Sequence: Synthetic oligonucleotide
ggagcaccccugaugguaa

SEQ ID NO: 531323 - RNA, 19 nt, Artificial Sequence
  Description of Artificial Sequence: Synthetic oligonucleotide
ggacccgucucaguucaga

SEQ ID NO: 531324 - RNA, 19 nt, Artificial Sequence
  Description of Artificial Sequence: Synthetic oligonucleotide
cugcccaggccaucgugua

SEQ ID NO: 531325 - RNA, 19 nt, Artificial Sequence
  Description of Artificial Sequence: Synthetic oligonucleotide
cccgucucaguucagaauu

SEQ ID NO: 531326 - RNA, 19 nt, Artificial Sequence
  Description of Artificial Sequence: Synthetic oligonucleotide
gcaaugggccaucuuggau

SEQ ID NO: 531327 - RNA, 19 nt, Artificial Sequence
  Description of Artificial Sequence: Synthetic oligonucleotide
caccgccaacuuucucauc

SEQ ID NO: 531328 - RNA, 19 nt, Artificial Sequence
  Description of Artificial Sequence: Synthetic oligonucleotide
ccgaugacccagaccccac

SEQ ID NO: 531329 - RNA, 19 nt, Artificial Sequence
  Description of Artificial Sequence: Synthetic oligonucleotide
cccguaucacaaggacccg

SEQ ID NO: 531330 - RNA, 19 nt, Artificial Sequence
  Description of Artificial Sequence: Synthetic oligonucleotide
cgagagaaccagaaacugu

SEQ ID NO: 531331 - RNA, 19 nt, Artificial Sequence
  Description of Artificial Sequence: Synthetic oligonucleotide
guacucugcccaggccauc

SEQ ID NO: 531332 - RNA, 19 nt, Artificial Sequence
  Description of Artificial Sequence: Synthetic oligonucleotide
ggccaucguguagucuggc

SEQ ID NO: 531333 - RNA, 19 nt, Artificial Sequence
  Description of Artificial Sequence: Synthetic oligonucleotide
ccgcugaagcuccacaugu

SEQ ID NO: 531334 - RNA, 19 nt, Artificial Sequence
  Description of Artificial Sequence: Synthetic oligonucleotide
aggacccgucucaguucag

SEQ ID NO: 531335 - RNA, 19 nt, Artificial Sequence
  Description of Artificial Sequence: Synthetic oligonucleotide
gucuggcggggagcuggcc

SEQ ID NO: 531336 - RNA, 19 nt, Artificial Sequence
  Description of Artificial Sequence: Synthetic oligonucleotide
gcaccccugaugguaaaua

SEQ ID NO: 531337 - RNA, 19 nt, Artificial Sequence
  Description of Artificial Sequence: Synthetic oligonucleotide
ccaccucgaucugcugagg

SEQ ID NO: 531338 - RNA, 19 nt, Artificial Sequence
  Description of Artificial Sequence: Synthetic oligonucleotide
gcccuaaagucuguccgua

SEQ ID NO: 531339 - RNA, 19 nt, Artificial Sequence
  Description of Artificial Sequence: Synthetic oligonucleotide
cgaaaucgccacgcacacc

SEQ ID NO: 531340 - RNA, 19 nt, Artificial Sequence
  Description of Artificial Sequence: Synthetic oligonucleotide
agccugcccuaaagucugu

SEQ ID NO: 531341 - RNA, 19 nt, Artificial Sequence
  Description of Artificial Sequence: Synthetic oligonucleotide
gugaugcggagaggcuugu

SEQ ID NO: 531342 - RNA, 19 nt, Artificial Sequence
  Description of Artificial Sequence: Synthetic oligonucleotide
gccugcccuaaagucuguc

SEQ ID NO: 531343 - RNA, 19 nt, Artificial Sequence
  Description of Artificial Sequence: Synthetic oligonucleotide
caccugauugcugguugau

SEQ ID NO: 531344 - RNA, 19 nt, Artificial Sequence
  Description of Artificial Sequence: Synthetic oligonucleotide
ccguuaacuuuagcagcga

SEQ ID NO: 531345 - RNA, 19 nt, Artificial Sequence
  Description of Artificial Sequence: Synthetic oligonucleotide
gugcaccugauugcugguu

SEQ ID NO: 531346 - RNA, 19 nt, Artificial Sequence
  Description of Artificial Sequence: Synthetic oligonucleotide
ggguuccgguaaguacaca

SEQ ID NO: 531347 - RNA, 19 nt, Artificial Sequence
  Description of Artificial Sequence: Synthetic oligonucleotide
ccgcagguuggggucggug

SEQ ID NO: 531348 - RNA, 19 nt, Artificial Sequence
  Description of Artificial Sequence: Synthetic oligonucleotide
gcuccgaggccggcaccgc

SEQ ID NO: 531349 - RNA, 19 nt, Artificial Sequence
  Description of Artificial Sequence: Synthetic oligonucleotide
cgcagguuggggucggugu

SEQ ID NO: 531350 - RNA, 19 nt, Artificial Sequence
  Description of Artificial Sequence: Synthetic oligonucleotide
ccguaucacaaggacccgu

SEQ ID NO: 531351 - RNA, 19 nt, Artificial Sequence
  Description of Artificial Sequence: Synthetic oligonucleotide
ggaugaucucuaggaccau

SEQ ID NO: 531352 - RNA, 19 nt, Artificial Sequence
  Description of Artificial Sequence: Synthetic oligonucleotide
ccauuccgacagcggucca

SEQ ID NO: 531353 - RNA, 19 nt, Artificial Sequence
  Description of Artificial Sequence: Synthetic oligonucleotide
ccacggccucucaaaccua

SEQ ID NO: 531354 - RNA, 19 nt, Artificial Sequence
  Description of Artificial Sequence: Synthetic oligonucleotide
ccgcugcagacgcccaucu

SEQ ID NO: 531355 - RNA, 19 nt, Artificial Sequence
  Description of Artificial Sequence: Synthetic oligonucleotide
ccugcucgggaggcgaaau

SEQ ID NO: 531356 - RNA, 19 nt, Artificial Sequence
  Description of Artificial Sequence: Synthetic oligonucleotide
ggccggcaccgccaacuuu

SEQ ID NO: 531357 - RNA, 19 nt, Artificial Sequence
  Description of Artificial Sequence: Synthetic oligonucleotide
ucuaagaugguccagggag

SEQ ID NO: 531358 - RNA, 19 nt, Artificial Sequence
  Description of Artificial Sequence: Synthetic oligonucleotide
aguaaaagggaaccuaugc

SEQ ID NO: 531359 - RNA, 19 nt, Artificial Sequence
  Description of Artificial Sequence: Synthetic oligonucleotide
aaacuuucuaguaaaaggg

SEQ ID NO: 531360 - RNA, 19 nt, Artificial Sequence
  Description of Artificial Sequence: Synthetic oligonucleotide
auguaggucagcuauaugg

SEQ ID NO: 531361 - RNA, 19 nt, Artificial Sequence
  Description of Artificial Sequence: Synthetic oligonucleotide
uuuauuucggcuacuauca

SEQ ID NO: 531362 - RNA, 19 nt, Artificial Sequence
  Description of Artificial Sequence: Synthetic oligonucleotide
auugcuguauuauuggugg

SEQ ID NO: 531363 - RNA, 19 nt, Artificial Sequence
  Description of Artificial Sequence: Synthetic oligonucleotide
uuuauugcuguauuauugg

SEQ ID NO: 531364 - RNA, 19 nt, Artificial Sequence
  Description of Artificial Sequence: Synthetic oligonucleotide
uuuaaguucucaugaaggg

SEQ ID NO: 531365 - RNA, 19 nt, Artificial Sequence
  Description of Artificial Sequence: Synthetic oligonucleotide
uuucauagaaguuuauugc

SEQ ID NO: 531366 - RNA, 19 nt, Artificial Sequence
  Description of Artificial Sequence: Synthetic oligonucleotide
agugguaucacaugguacg

SEQ ID NO: 531367 - RNA, 19 nt, Artificial Sequence
  Description of Artificial Sequence: Synthetic oligonucleotide
guaauuaggggacaggagg

SEQ ID NO: 531368 - RNA, 19 nt, Artificial Sequence
  Description of Artificial Sequence: Synthetic oligonucleotide
uguguauccacagagaagc

SEQ ID NO: 531369 - RNA, 19 nt, Artificial Sequence
  Description of Artificial Sequence: Synthetic oligonucleotide
agugaauguagccaacacc

SEQ ID NO: 531370 - RNA, 19 nt, Artificial Sequence
  Description of Artificial Sequence: Synthetic oligonucleotide
ucuaaguuucuuuagggca

SEQ ID NO: 531371 - RNA, 19 nt, Artificial Sequence
  Description of Artificial Sequence: Synthetic oligonucleotide
gaaacuuuaaguucucaug

SEQ ID NO: 531372 - RNA, 19 nt, Artificial Sequence
  Description of Artificial Sequence: Synthetic oligonucleotide
aauguaugcaacuugugua

SEQ ID NO: 531373 - RNA, 19 nt, Artificial Sequence
  Description of Artificial Sequence: Synthetic oligonucleotide
ucaguaaugaggccuauca

SEQ ID NO: 531374 - RNA, 19 nt, Artificial Sequence
  Description of Artificial Sequence: Synthetic oligonucleotide
uaauuaggggacaggaggg

SEQ ID NO: 531375 - RNA, 19 nt, Artificial Sequence
  Description of Artificial Sequence: Synthetic oligonucleotide
cuaucaauagagcuguucc

SEQ ID NO: 531376 - RNA, 19 nt, Artificial Sequence
  Description of Artificial Sequence: Synthetic oligonucleotide
uccucuuuauguauuuugg

SEQ ID NO: 531377 - RNA, 19 nt, Artificial Sequence
  Description of Artificial Sequence: Synthetic oligonucleotide
aguaauagggcagauaaug

SEQ ID NO: 531378 - RNA, 19 nt, Artificial Sequence
  Description of Artificial Sequence: Synthetic oligonucleotide
uuuuguguuguaacgagac

SEQ ID NO: 531379 - RNA, 19 nt, Artificial Sequence
  Description of Artificial Sequence: Synthetic oligonucleotide
uagucuaaguuucuuuagg

SEQ ID NO: 531380 - RNA, 19 nt, Artificial Sequence
  Description of Artificial Sequence: Synthetic oligonucleotide
uuagaauguaugcaacuug

SEQ ID NO: 531381 - RNA, 19 nt, Artificial Sequence
  Description of Artificial Sequence: Synthetic oligonucleotide
agucuaaguuucuuuaggg

SEQ ID NO: 531382 - RNA, 19 nt, Artificial Sequence
  Description of Artificial Sequence: Synthetic oligonucleotide
uaucacgauaccaugaguc

SEQ ID NO: 531383 - RNA, 19 nt, Artificial Sequence
  Description of Artificial Sequence: Synthetic oligonucleotide
aauugcugcaaguauaauu

SEQ ID NO: 531384 - RNA, 19 nt, Artificial Sequence
  Description of Artificial Sequence: Synthetic oligonucleotide
aguucaguccauuuuguag

SEQ ID NO: 531385 - RNA, 19 nt, Artificial Sequence
  Description of Artificial Sequence: Synthetic oligonucleotide
uuugugaggacccuucucu

SEQ ID NO: 531386 - RNA, 19 nt, Artificial Sequence
  Description of Artificial Sequence: Synthetic oligonucleotide
uucacuuacucccaguacu

SEQ ID NO: 531387 - RNA, 19 nt, Artificial Sequence
  Description of Artificial Sequence: Synthetic oligonucleotide
auagggcagauaaugaugc

SEQ ID NO: 531388 - RNA, 19 nt, Artificial Sequence
  Description of Artificial Sequence: Synthetic oligonucleotide
ucauagaaguuuauugcug

SEQ ID NO: 531389 - RNA, 19 nt, Artificial Sequence
  Description of Artificial Sequence: Synthetic oligonucleotide
uauucgaugccaccuuugg

SEQ ID NO: 531390 - RNA, 19 nt, Artificial Sequence
  Description of Artificial Sequence: Synthetic oligonucleotide
gauaccaugagucugggua

SEQ ID NO: 531391 - RNA, 19 nt, Artificial Sequence
  Description of Artificial Sequence: Synthetic oligonucleotide
guaguaauagggcagauaa

SEQ ID NO: 531392 - RNA, 19 nt, Artificial Sequence
  Description of Artificial Sequence: Synthetic oligonucleotide
auucuaacguuccuguguc

SEQ ID NO: 531393 - RNA, 19 nt, Artificial Sequence
  Description of Artificial Sequence: Synthetic oligonucleotide
uguauuauugguggugagg

SEQ ID NO: 531394 - RNA, 19 nt, Artificial Sequence
  Description of Artificial Sequence: Synthetic oligonucleotide
uugauguagagaacauagg

SEQ ID NO: 531395 - RNA, 19 nt, Artificial Sequence
  Description of Artificial Sequence: Synthetic oligonucleotide
guaaaagggaaccuaugcc

SEQ ID NO: 531396 - RNA, 19 nt, Artificial Sequence
  Description of Artificial Sequence: Synthetic oligonucleotide
uauucuuuauuucggcuac

SEQ ID NO: 531397 - RNA, 19 nt, Artificial Sequence
  Description of Artificial Sequence: Synthetic oligonucleotide
ucagcuauauggagcaugc

SEQ ID NO: 531398 - RNA, 19 nt, Artificial Sequence
  Description of Artificial Sequence: Synthetic oligonucleotide
agagauacccaaugcagag

SEQ ID NO: 531399 - RNA, 19 nt, Artificial Sequence
  Description of Artificial Sequence: Synthetic oligonucleotide
uugaguuggauuuaagaau

SEQ ID NO: 531400 - RNA, 19 nt, Artificial Sequence
  Description of Artificial Sequence: Synthetic oligonucleotide
aauagggcagauaaugaug

SEQ ID NO: 531401 - RNA, 19 nt, Artificial Sequence
  Description of Artificial Sequence: Synthetic oligonucleotide
aguaaugaggccuaucaau

SEQ ID NO: 531402 - RNA, 19 nt, Artificial Sequence
  Description of Artificial Sequence: Synthetic oligonucleotide
aaugaggccuaucaauaga

SEQ ID NO: 531403 - RNA, 19 nt, Artificial Sequence
  Description of Artificial Sequence: Synthetic oligonucleotide
ggaaagauaaaggagcagg

SEQ ID NO: 531404 - RNA, 19 nt, Artificial Sequence
  Description of Artificial Sequence: Synthetic oligonucleotide
uauaauucccggcacugac

SEQ ID NO: 531405 - RNA, 19 nt, Artificial Sequence
  Description of Artificial Sequence: Synthetic oligonucleotide
auguagucuaagauggucc

SEQ ID NO: 531406 - RNA, 19 nt, Artificial Sequence
  Description of Artificial Sequence: Synthetic oligonucleotide
uucuagaaggaugagcaag

SEQ ID NO: 531407 - RNA, 19 nt, Artificial Sequence
  Description of Artificial Sequence: Synthetic oligonucleotide
auugacugaaaagggaggg

SEQ ID NO: 531408 - RNA, 19 nt, Artificial Sequence
  Description of Artificial Sequence: Synthetic oligonucleotide
ugauaucacgauaccauga

SEQ ID NO: 531409 - RNA, 19 nt, Artificial Sequence
  Description of Artificial Sequence: Synthetic oligonucleotide
ugaggauacccugucaggg

SEQ ID NO: 531410 - RNA, 19 nt, Artificial Sequence
  Description of Artificial Sequence: Synthetic oligonucleotide
auaccaugagucuggguac

SEQ ID NO: 531411 - RNA, 19 nt, Artificial Sequence
  Description of Artificial Sequence: Synthetic oligonucleotide
auagucuaaguuucuuuag

SEQ ID NO: 531412 - RNA, 19 nt, Artificial Sequence
  Description of Artificial Sequence: Synthetic oligonucleotide
uuaaguucucaugaagggc

SEQ ID NO: 531413 - RNA, 19 nt, Artificial Sequence
  Description of Artificial Sequence: Synthetic oligonucleotide
uccaucuaacugucuaugg

SEQ ID NO: 531414 - RNA, 19 nt, Artificial Sequence
  Description of Artificial Sequence: Synthetic oligonucleotide
guaggaaguggguagcagg

SEQ ID NO: 531415 - RNA, 19 nt, Artificial Sequence
  Description of Artificial Sequence: Synthetic oligonucleotide
caucuaacugucuauggug

SEQ ID NO: 531416 - RNA, 19 nt, Artificial Sequence
  Description of Artificial Sequence: Synthetic oligonucleotide
aaggggaaugcuuuuccug

SEQ ID NO: 531417 - RNA, 19 nt, Artificial Sequence
  Description of Artificial Sequence: Synthetic oligonucleotide
acugcaguaauuaggggac

SEQ ID NO: 531418 - RNA, 19 nt, Artificial Sequence
  Description of Artificial Sequence: Synthetic oligonucleotide
ucggcuacuaucauuccca

SEQ ID NO: 531419 - RNA, 19 nt, Artificial Sequence
  Description of Artificial Sequence: Synthetic oligonucleotide
ugccucuuuauucuaacgu

SEQ ID NO: 531420 - RNA, 19 nt, Artificial Sequence
  Description of Artificial Sequence: Synthetic oligonucleotide
gauggaguaguaauagggc

SEQ ID NO: 531421 - RNA, 19 nt, Artificial Sequence
  Description of Artificial Sequence: Synthetic oligonucleotide
caugguacggcuguauucg

SEQ ID NO: 531422 - RNA, 19 nt, Artificial Sequence
  Description of Artificial Sequence: Synthetic oligonucleotide
agugcuaaggacagaggcc

SEQ ID NO: 531423 - RNA, 19 nt, Artificial Sequence
  Description of Artificial Sequence: Synthetic oligonucleotide
uuguguauccacagagaag

SEQ ID NO: 531424 - RNA, 19 nt, Artificial Sequence
  Description of Artificial Sequence: Synthetic oligonucleotide
uguagucuaagauggucca

SEQ ID NO: 531425 - RNA, 19 nt, Artificial Sequence
  Description of Artificial Sequence: Synthetic oligonucleotide
aggaugauccuucuggaca

SEQ ID NO: 531426 - RNA, 19 nt, Artificial Sequence
  Description of Artificial Sequence: Synthetic oligonucleotide
aaguauaauucccggcacu

SEQ ID NO: 531427 - RNA, 19 nt, Artificial Sequence
  Description of Artificial Sequence: Synthetic oligonucleotide
guuguaacgagacuacaca

SEQ ID NO: 531428 - RNA, 19 nt, Artificial Sequence
  Description of Artificial Sequence: Synthetic oligonucleotide
ugcaaguauaauucccggc

SEQ ID NO: 531429 - RNA, 19 nt, Artificial Sequence
  Description of Artificial Sequence: Synthetic oligonucleotide
gaugugauaucacgauacc

SEQ ID NO: 531430 - RNA, 19 nt, Artificial Sequence
  Description of Artificial Sequence: Synthetic oligonucleotide
aaaaucacaugaucaccau

SEQ ID NO: 531431 - RNA, 19 nt, Artificial Sequence
  Description of Artificial Sequence: Synthetic oligonucleotide
uuguaacgagacuacacac

SEQ ID NO: 531432 - RNA, 19 nt, Artificial Sequence
  Description of Artificial Sequence: Synthetic oligonucleotide
ggcaggaugauccuucugg

SEQ ID NO: 531433 - RNA, 19 nt, Artificial Sequence
  Description of Artificial Sequence: Synthetic oligonucleotide
aaccagucgccacacaggu

SEQ ID NO: 531434 - RNA, 19 nt, Artificial Sequence
  Description of Artificial Sequence: Synthetic oligonucleotide
aacuuuaaguucucaugaa

SEQ ID NO: 531435 - RNA, 19 nt, Artificial Sequence
  Description of Artificial Sequence: Synthetic oligonucleotide
agucuaagaugguccaggg

SEQ ID NO: 531436 - RNA, 19 nt, Artificial Sequence
  Description of Artificial Sequence: Synthetic oligonucleotide
uaguaaaagggaaccuaug

SEQ ID NO: 531437 - RNA, 19 nt, Artificial Sequence
  Description of Artificial Sequence: Synthetic oligonucleotide
aaaccugguauucgcuuug

SEQ ID NO: 531438 - RNA, 19 nt, Artificial Sequence
  Description of Artificial Sequence: Synthetic oligonucleotide
auuauugguggugaggaca

SEQ ID NO: 531439 - RNA, 19 nt, Artificial Sequence
  Description of Artificial Sequence: Synthetic oligonucleotide
gcuacuaucauucccacga

SEQ ID NO: 531440 - RNA, 19 nt, Artificial Sequence
  Description of Artificial Sequence: Synthetic oligonucleotide
uaauucccggcacugacaa

SEQ ID NO: 531441 - RNA, 19 nt, Artificial Sequence
  Description of Artificial Sequence: Synthetic oligonucleotide
uccuauucuuuauuucggc

SEQ ID NO: 531442 - RNA, 19 nt, Artificial Sequence
  Description of Artificial Sequence: Synthetic oligonucleotide
uucggcuacuaucauuccc

SEQ ID NO: 531443 - RNA, 19 nt, Artificial Sequence
  Description of Artificial Sequence: Synthetic oligonucleotide
uaucaauagagcuguuccu

SEQ ID NO: 531444 - RNA, 19 nt, Artificial Sequence
  Description of Artificial Sequence: Synthetic oligonucleotide
gucaucguggcagaggagg

SEQ ID NO: 531445 - RNA, 19 nt, Artificial Sequence
  Description of Artificial Sequence: Synthetic oligonucleotide
ggauucaacaggcaggaug

SEQ ID NO: 531446 - RNA, 19 nt, Artificial Sequence
  Description of Artificial Sequence: Synthetic oligonucleotide
auagcaccgggccugcaac

SEQ ID NO: 531447 - RNA, 19 nt, Artificial Sequence
  Description of Artificial Sequence: Synthetic oligonucleotide
acugcuuccauagucuaag

SEQ ID NO: 531448 - RNA, 19 nt, Artificial Sequence
  Description of Artificial Sequence: Synthetic oligonucleotide
uauggugagggcugauucc

SEQ ID NO: 531449 - RNA, 19 nt, Artificial Sequence
  Description of Artificial Sequence: Synthetic oligonucleotide
uaagaugguccagggaggg

SEQ ID NO: 531450 - RNA, 19 nt, Artificial Sequence
  Description of Artificial Sequence: Synthetic oligonucleotide
aauguaggucagcuauaug

SEQ ID NO: 531451 - RNA, 19 nt, Artificial Sequence
  Description of Artificial Sequence: Synthetic oligonucleotide
aacuuucuaguaaaaggga

SEQ ID NO: 531452 - RNA, 19 nt, Artificial Sequence
  Description of Artificial Sequence: Synthetic oligonucleotide
uuguguuguaacgagacua

SEQ ID NO: 531453 - RNA, 19 nt, Artificial Sequence
  Description of Artificial Sequence: Synthetic oligonucleotide
ucuaacugucuauggugag

SEQ ID NO: 531454 - RNA, 19 nt, Artificial Sequence
  Description of Artificial Sequence: Synthetic oligonucleotide
gggagggacagacaggucg

SEQ ID NO: 531455 - RNA, 19 nt, Artificial Sequence
  Description of Artificial Sequence: Synthetic oligonucleotide
uggaggcuagaauaucucc

SEQ ID NO: 531456 - RNA, 19 nt, Artificial Sequence
  Description of Artificial Sequence: Synthetic oligonucleotide
guaugcaacuuguguaucc

SEQ ID NO: 531457 - RNA, 19 nt, Artificial Sequence
  Description of Artificial Sequence: Synthetic oligonucleotide
uuucacuuacucccaguac

SEQ ID NO: 531458 - RNA, 19 nt, Artificial Sequence
  Description of Artificial Sequence: Synthetic oligonucleotide
ugauccuucuggacaguag

SEQ ID NO: 531459 - RNA, 19 nt, Artificial Sequence
  Description of Artificial Sequence: Synthetic oligonucleotide
cucaauggggaaccagucg

SEQ ID NO: 531460 - RNA, 19 nt, Artificial Sequence
  Description of Artificial Sequence: Synthetic oligonucleotide
aguuggauuuaagaauguc

SEQ ID NO: 531461 - RNA, 19 nt, Artificial Sequence
  Description of Artificial Sequence: Synthetic oligonucleotide
uuuguguuguaacgagacu

SEQ ID NO: 531462 - RNA, 19 nt, Artificial Sequence
  Description of Artificial Sequence: Synthetic oligonucleotide
aguauaauucccggcacug

SEQ ID NO: 531463 - RNA, 19 nt, Artificial Sequence
  Description of Artificial Sequence: Synthetic oligonucleotide
uuagggcauuccuauauaa

SEQ ID NO: 531464 - RNA, 19 nt, Artificial Sequence
  Description of Artificial Sequence: Synthetic oligonucleotide
uugacugaaaagggagggg

SEQ ID NO: 531465 - RNA, 19 nt, Artificial Sequence
  Description of Artificial Sequence: Synthetic oligonucleotide
ugaauguagccaacaccug

SEQ ID NO: 531466 - RNA, 19 nt, Artificial Sequence
  Description of Artificial Sequence: Synthetic oligonucleotide
agauacccaaugcagaguu

SEQ ID NO: 531467 - RNA, 19 nt, Artificial Sequence
  Description of Artificial Sequence: Synthetic oligonucleotide
uccuaaucagucuggcaca

SEQ ID NO: 531468 - RNA, 19 nt, Artificial Sequence
  Description of Artificial Sequence: Synthetic oligonucleotide
agggcagaaaugaaaauca

SEQ ID NO: 531469 - RNA, 19 nt, Artificial Sequence
  Description of Artificial Sequence: Synthetic oligonucleotide
ugaggccuaucaauagagc

SEQ ID NO: 531470 - RNA, 19 nt, Artificial Sequence
  Description of Artificial Sequence: Synthetic oligonucleotide
ugcuguauuauugguggug

SEQ ID NO: 531471 - RNA, 19 nt, Artificial Sequence
  Description of Artificial Sequence: Synthetic oligonucleotide
cuauggugagggcugauuc

SEQ ID NO: 531472 - RNA, 19 nt, Artificial Sequence
  Description of Artificial Sequence: Synthetic oligonucleotide
gaccauggcaggaagcugc

SEQ ID NO: 531473 - RNA, 19 nt, Artificial Sequence
  Description of Artificial Sequence: Synthetic oligonucleotide
aguaauuaggggacaggag

SEQ ID NO: 531474 - RNA, 19 nt, Artificial Sequence
  Description of Artificial Sequence: Synthetic oligonucleotide
caaguauaauucccggcac

SEQ ID NO: 531475 - RNA, 19 nt, Artificial Sequence
  Description of Artificial Sequence: Synthetic oligonucleotide
gcaaguauaauucccggca

SEQ ID NO: 531476 - RNA, 19 nt, Artificial Sequence
  Description of Artificial Sequence: Synthetic oligonucleotide
uuacucccaguacuuagaa

SEQ ID NO: 531477 - RNA, 19 nt, Artificial Sequence
  Description of Artificial Sequence: Synthetic oligonucleotide
cauagucuaaguuucuuua

SEQ ID NO: 531478 - RNA, 19 nt, Artificial Sequence
  Description of Artificial Sequence: Synthetic oligonucleotide
gaggacccuucucugaggc

SEQ ID NO: 531479 - RNA, 19 nt, Artificial Sequence
  Description of Artificial Sequence: Synthetic oligonucleotide
uuuagggcauuccuauaua

SEQ ID NO: 531480 - RNA, 19 nt, Artificial Sequence
  Description of Artificial Sequence: Synthetic oligonucleotide
gcuauauggagcaugccag

SEQ ID NO: 531481 - RNA, 19 nt, Artificial Sequence
  Description of Artificial Sequence: Synthetic oligonucleotide
augaggccuaucaauagag

SEQ ID NO: 531482 - RNA, 19 nt, Artificial Sequence
  Description of Artificial Sequence: Synthetic oligonucleotide
auucccggcacugacaaga

SEQ ID NO: 531483 - RNA, 19 nt, Artificial Sequence
  Description of Artificial Sequence: Synthetic oligonucleotide
uagggcauuccuauauaaa

SEQ ID NO: 531484 - RNA, 19 nt, Artificial Sequence
  Description of Artificial Sequence: Synthetic oligonucleotide
uauuauugguggugaggac

SEQ ID NO: 531485 - RNA, 19 nt, Artificial Sequence
  Description of Artificial Sequence: Synthetic oligonucleotide
cuuguuggaugugauauca

SEQ ID NO: 531486 - RNA, 19 nt, Artificial Sequence
  Description of Artificial Sequence: Synthetic oligonucleotide
uggauuuaagaauguccaa

SEQ ID NO: 531487 - RNA, 19 nt, Artificial Sequence
  Description of Artificial Sequence: Synthetic oligonucleotide
uaggugaaaccaucuuuga

SEQ ID NO: 531488 - RNA, 19 nt, Artificial Sequence
  Description of Artificial Sequence: Synthetic oligonucleotide
guaacgagacuacacacua

SEQ ID NO: 531489 - RNA, 19 nt, Artificial Sequence
  Description of Artificial Sequence: Synthetic oligonucleotide
agaacugcuuccauagucu

SEQ ID NO: 531490 - RNA, 19 nt, Artificial Sequence
  Description of Artificial Sequence: Synthetic oligonucleotide
cacugcuuugugaggaccc

SEQ ID NO: 531491 - RNA, 19 nt, Artificial Sequence
  Description of Artificial Sequence: Synthetic oligonucleotide
auuuggccaggccuugaag

SEQ ID NO: 531492 - RNA, 19 nt, Artificial Sequence
  Description of Artificial Sequence: Synthetic oligonucleotide
auaucacgauaccaugagu

SEQ ID NO: 531493 - RNA, 19 nt, Artificial Sequence
  Description of Artificial Sequence: Synthetic oligonucleotide
aauuaggggacaggaggga

SEQ ID NO: 531494 - RNA, 19 nt, Artificial Sequence
  Description of Artificial Sequence: Synthetic oligonucleotide
uggaugugauaucacgaua

SEQ ID NO: 531495 - RNA, 19 nt, Artificial Sequence
  Description of Artificial Sequence: Synthetic oligonucleotide
gcuucuagaaggaugagca

SEQ ID NO: 531496 - RNA, 19 nt, Artificial Sequence
  Description of Artificial Sequence: Synthetic oligonucleotide
gaggccuaucaauagagcu

SEQ ID NO: 531497 - RNA, 19 nt, Artificial Sequence
  Description of Artificial Sequence: Synthetic oligonucleotide
aggauacccugucagggcu

SEQ ID NO: 531498 - RNA, 19 nt, Artificial Sequence
  Description of Artificial Sequence: Synthetic oligonucleotide
ugaggacccuucucugagg

SEQ ID NO: 531499 - RNA, 19 nt, Artificial Sequence
  Description of Artificial Sequence: Synthetic oligonucleotide
uucuaguaaaagggaaccu

SEQ ID NO: 531500 - RNA, 19 nt, Artificial Sequence
  Description of Artificial Sequence: Synthetic oligonucleotide
cccaaugcagaguucagcc

SEQ ID NO: 531501 - RNA, 19 nt, Artificial Sequence
  Description of Artificial Sequence: Synthetic oligonucleotide
guacggcuguauucgaugc

SEQ ID NO: 531502 - RNA, 19 nt, Artificial Sequence
  Description of Artificial Sequence: Synthetic oligonucleotide
uucuguugaggaaggggaa

SEQ ID NO: 531503 - RNA, 19 nt, Artificial Sequence
  Description of Artificial Sequence: Synthetic oligonucleotide
uauuucggcuacuaucauu

SEQ ID NO: 531504 - RNA, 19 nt, Artificial Sequence
  Description of Artificial Sequence: Synthetic oligonucleotide
aagggaaccuaugccguug

SEQ ID NO: 531505 - RNA, 19 nt, Artificial Sequence
  Description of Artificial Sequence: Synthetic oligonucleotide
acaggcaggaugauccuuc

SEQ ID NO: 531506 - RNA, 19 nt, Artificial Sequence
  Description of Artificial Sequence: Synthetic oligonucleotide
uguauucgaugccaccuuu

SEQ ID NO: 531507 - RNA, 19 nt, Artificial Sequence
  Description of Artificial Sequence: Synthetic oligonucleotide
uugguccuauucuuuauuu

SEQ ID NO: 531508 - RNA, 19 nt, Artificial Sequence
  Description of Artificial Sequence: Synthetic oligonucleotide
guaauagggcagauaauga

SEQ ID NO: 531509 - RNA, 19 nt, Artificial Sequence
  Description of Artificial Sequence: Synthetic oligonucleotide
ugguauucgcuuugcugug

SEQ ID NO: 531510 - RNA, 19 nt, Artificial Sequence
  Description of Artificial Sequence: Synthetic oligonucleotide
aucuaacugucuaugguga

SEQ ID NO: 531511 - RNA, 19 nt, Artificial Sequence
  Description of Artificial Sequence: Synthetic oligonucleotide
ugguccuauucuuuauuuc

SEQ ID NO: 531512 - RNA, 19 nt, Artificial Sequence
  Description of Artificial Sequence: Synthetic oligonucleotide
augugauaucacgauacca

SEQ ID NO: 531513 - RNA, 19 nt, Artificial Sequence
  Description of Artificial Sequence: Synthetic oligonucleotide
aggggcugugaggauaccc

SEQ ID NO: 531514 - RNA, 19 nt, Artificial Sequence
  Description of Artificial Sequence: Synthetic oligonucleotide
ucacuuacucccaguacuu

SEQ ID NO: 531515 - RNA, 19 nt, Artificial Sequence
  Description of Artificial Sequence: Synthetic oligonucleotide
uacggcuguauucgaugcc

SEQ ID NO: 531516 - RNA, 19 nt, Artificial Sequence
  Description of Artificial Sequence: Synthetic oligonucleotide
guauucgcuuugcugugcc

SEQ ID NO: 531517 - RNA, 19 nt, Artificial Sequence
  Description of Artificial Sequence: Synthetic oligonucleotide
cccggcacugacaagagcc

SEQ ID NO: 531518 - RNA, 19 nt, Artificial Sequence
  Description of Artificial Sequence: Synthetic oligonucleotide
cauagaaguuuauugcugu

SEQ ID NO: 531519 - RNA, 19 nt, Artificial Sequence
  Description of Artificial Sequence: Synthetic oligonucleotide
uaguaauagggcagauaau

SEQ ID NO: 531520 - RNA, 19 nt, Artificial Sequence
  Description of Artificial Sequence: Synthetic oligonucleotide
uuccauagucuaaguuucu

SEQ ID NO: 531521 - RNA, 19 nt, Artificial Sequence
  Description of Artificial Sequence: Synthetic oligonucleotide
aauucccggcacugacaag

SEQ ID NO: 531522 - RNA, 19 nt, Artificial Sequence
  Description of Artificial Sequence: Synthetic oligonucleotide
cuguauuauugguggugag

SEQ ID NO: 531523 - RNA, 19 nt, Artificial Sequence
  Description of Artificial Sequence: Synthetic oligonucleotide
cagugaauguagccaacac

SEQ ID NO: 531524 - RNA, 19 nt, Artificial Sequence
  Description of Artificial Sequence: Synthetic oligonucleotide
aucaauagagcuguuccua

SEQ ID NO: 531525 - RNA, 19 nt, Artificial Sequence
  Description of Artificial Sequence: Synthetic oligonucleotide
gguuggcuagugcugagcc

SEQ ID NO: 531526 - RNA, 19 nt, Artificial Sequence
  Description of Artificial Sequence: Synthetic oligonucleotide
guaaugaggccuaucaaua

SEQ ID NO: 531527 - RNA, 19 nt, Artificial Sequence
  Description of Artificial Sequence: Synthetic oligonucleotide
ucuaacguuccugugucuu

SEQ ID NO: 531528 - RNA, 19 nt, Artificial Sequence
  Description of Artificial Sequence: Synthetic oligonucleotide
gguacggcuguauucgaug

SEQ ID NO: 531529 - RNA, 19 nt, Artificial Sequence
  Description of Artificial Sequence: Synthetic oligonucleotide
aggccuaucaauagagcug

SEQ ID NO: 531530 - RNA, 19 nt, Artificial Sequence
  Description of Artificial Sequence: Synthetic oligonucleotide
agcaaaguucaguccauuu

SEQ ID NO: 531531 - RNA, 19 nt, Artificial Sequence
  Description of Artificial Sequence: Synthetic oligonucleotide
gaaggaacccagaagccaa

SEQ ID NO: 531532 - RNA, 19 nt, Artificial Sequence
  Description of Artificial Sequence: Synthetic oligonucleotide
ugucuaugucaucguggca

SEQ ID NO: 531533 - RNA, 19 nt, Artificial Sequence
  Description of Artificial Sequence: Synthetic oligonucleotide
ugccccagugguaucacau

SEQ ID NO: 531534 - RNA, 19 nt, Artificial Sequence
  Description of Artificial Sequence: Synthetic oligonucleotide
uuauuucggcuacuaucau

SEQ ID NO: 531535 - RNA, 19 nt, Artificial Sequence
  Description of Artificial Sequence: Synthetic oligonucleotide
cuaacguuccugugucuuc

SEQ ID NO: 531536 - RNA, 19 nt, Artificial Sequence
  Description of Artificial Sequence: Synthetic oligonucleotide
gugguaucacaugguacgg

SEQ ID NO: 531537 - RNA, 19 nt, Artificial Sequence
  Description of Artificial Sequence: Synthetic oligonucleotide
uuucggcuacuaucauucc

SEQ ID NO: 531538 - RNA, 19 nt, Artificial Sequence
  Description of Artificial Sequence: Synthetic oligonucleotide
caguaauuaggggacagga

SEQ ID NO: 531539 - RNA, 19 nt, Artificial Sequence
  Description of Artificial Sequence: Synthetic oligonucleotide
agaauguaugcaacuugug

SEQ ID NO: 531540 - RNA, 19 nt, Artificial Sequence
  Description of Artificial Sequence: Synthetic oligonucleotide
agucagacagacaggaaaa

SEQ ID NO: 531541 - RNA, 19 nt, Artificial Sequence
  Description of Artificial Sequence: Synthetic oligonucleotide
uguccuuggcccagcuccc

SEQ ID NO: 531542 - RNA, 19 nt, Artificial Sequence
  Description of Artificial Sequence: Synthetic oligonucleotide
accuaugccguuguuuucu

SEQ ID NO: 531543 - RNA, 19 nt, Artificial Sequence
  Description of Artificial Sequence: Synthetic oligonucleotide
ugguaucacaugguacggc

SEQ ID NO: 531544 - RNA, 19 nt, Artificial Sequence
  Description of Artificial Sequence: Synthetic oligonucleotide
acguuccugugucuucagg

SEQ ID NO: 531545 - RNA, 19 nt, Artificial Sequence
  Description of Artificial Sequence: Synthetic oligonucleotide
cuuugugaggacccuucuc

SEQ ID NO: 531546 - RNA, 19 nt, Artificial Sequence
  Description of Artificial Sequence: Synthetic oligonucleotide
uguaugcaacuuguguauc

SEQ ID NO: 531547 - RNA, 19 nt, Artificial Sequence
  Description of Artificial Sequence: Synthetic oligonucleotide
gauacccugucagggcucc

SEQ ID NO: 531548 - RNA, 19 nt, Artificial Sequence
  Description of Artificial Sequence: Synthetic oligonucleotide
uucccggcacugacaagag

SEQ ID NO: 531549 - RNA, 19 nt, Artificial Sequence
  Description of Artificial Sequence: Synthetic oligonucleotide
cugucauucacaccucgga

SEQ ID NO: 531550 - RNA, 19 nt, Artificial Sequence
  Description of Artificial Sequence: Synthetic oligonucleotide
cuguagguugcagcaagag

SEQ ID NO: 531551 - RNA, 19 nt, Artificial Sequence
  Description of Artificial Sequence: Synthetic oligonucleotide
ucuguugaggaaggggaau

SEQ ID NO: 531552 - RNA, 19 nt, Artificial Sequence
  Description of Artificial Sequence: Synthetic oligonucleotide
aaccaucuuugaggacccc

SEQ ID NO: 531553 - RNA, 19 nt, Artificial Sequence
  Description of Artificial Sequence: Synthetic oligonucleotide
auucacaccucggacggga

SEQ ID NO: 531554 - RNA, 19 nt, Artificial Sequence
  Description of Artificial Sequence: Synthetic oligonucleotide
agcaauugcugcaaguaua

SEQ ID NO: 531555 - RNA, 19 nt, Artificial Sequence
  Description of Artificial Sequence: Synthetic oligonucleotide
gagagaagaacuucuuguu

SEQ ID NO: 531556 - RNA, 19 nt, Artificial Sequence
  Description of Artificial Sequence: Synthetic oligonucleotide
cuaaguuucuuuagggcau

SEQ ID NO: 531557 - RNA, 19 nt, Artificial Sequence
  Description of Artificial Sequence: Synthetic oligonucleotide
guagucuaagaugguccag

SEQ ID NO: 531558 - RNA, 19 nt, Artificial Sequence
  Description of Artificial Sequence: Synthetic oligonucleotide
ucggacgggagccggcggc

SEQ ID NO: 531559 - RNA, 19 nt, Artificial Sequence
  Description of Artificial Sequence: Synthetic oligonucleotide
uugcuguauuauugguggu

SEQ ID NO: 531560 - RNA, 19 nt, Artificial Sequence
  Description of Artificial Sequence: Synthetic oligonucleotide
caggucgaggcuugaguug

SEQ ID NO: 531561 - RNA, 19 nt, Artificial Sequence
  Description of Artificial Sequence: Synthetic oligonucleotide
gacauguagguagauggcu

SEQ ID NO: 531562 - RNA, 19 nt, Artificial Sequence
  Description of Artificial Sequence: Synthetic oligonucleotide
cugucagggcuccugugac

SEQ ID NO: 531563 - RNA, 19 nt, Artificial Sequence
  Description of Artificial Sequence: Synthetic oligonucleotide
guauucgaugccaccuuug

SEQ ID NO: 531564 - RNA, 19 nt, Artificial Sequence
  Description of Artificial Sequence: Synthetic oligonucleotide
uucuaacguuccugugucu

SEQ ID NO: 531565 - RNA, 19 nt, Artificial Sequence
  Description of Artificial Sequence: Synthetic oligonucleotide
uagggcagauaaugaugcu

SEQ ID NO: 531566 - RNA, 19 nt, Artificial Sequence
  Description of Artificial Sequence: Synthetic oligonucleotide
cuccacagagugcuaagga

SEQ ID NO: 531567 - RNA, 19 nt, Artificial Sequence
  Description of Artificial Sequence: Synthetic oligonucleotide
ugguacggcuguauucgau

SEQ ID NO: 531568 - RNA, 19 nt, Artificial Sequence
  Description of Artificial Sequence: Synthetic oligonucleotide
caucguggcagaggaggcg

SEQ ID NO: 531569 - RNA, 19 nt, Artificial Sequence
  Description of Artificial Sequence: Synthetic oligonucleotide
ggcuacuaucauucccacg

SEQ ID NO: 531570 - RNA, 19 nt, Artificial Sequence
  Description of Artificial Sequence: Synthetic oligonucleotide
ucuauggugagggcugauu

SEQ ID NO: 531571 - RNA, 19 nt, Artificial Sequence
  Description of Artificial Sequence: Synthetic oligonucleotide
guaucacaugguacggcug

SEQ ID NO: 531572 - RNA, 19 nt, Artificial Sequence
  Description of Artificial Sequence: Synthetic oligonucleotide
gacaggucgaggcuugagu

SEQ ID NO: 531573 - RNA, 19 nt, Artificial Sequence
  Description of Artificial Sequence: Synthetic oligonucleotide
gaaggggaaugcuuuuccu

SEQ ID NO: 531574 - RNA, 19 nt, Artificial Sequence
  Description of Artificial Sequence: Synthetic oligonucleotide
caugagucuggguacucaa

SEQ ID NO: 531575 - RNA, 19 nt, Artificial Sequence
  Description of Artificial Sequence: Synthetic oligonucleotide
gagccuguugaaggacagg

SEQ ID NO: 531576 - RNA, 19 nt, Artificial Sequence
  Description of Artificial Sequence: Synthetic oligonucleotide
caccgggccugcaacuggg

SEQ ID NO: 531577 - RNA, 19 nt, Artificial Sequence
  Description of Artificial Sequence: Synthetic oligonucleotide
uguucaacacugggcugga

SEQ ID NO: 531578 - RNA, 19 nt, Artificial Sequence
  Description of Artificial Sequence: Synthetic oligonucleotide
ugcauuuggccaggccuug

SEQ ID NO: 531579 - RNA, 19 nt, Artificial Sequence
  Description of Artificial Sequence: Synthetic oligonucleotide
augugauccuuuaaacuuu

SEQ ID NO: 531580 - RNA, 19 nt, Artificial Sequence
  Description of Artificial Sequence: Synthetic oligonucleotide
gguaucacaugguacggcu

SEQ ID NO: 531581 - RNA, 19 nt, Artificial Sequence
  Description of Artificial Sequence: Synthetic oligonucleotide
acgauaccaugagucuggg

SEQ ID NO: 531582 - RNA, 19 nt, Artificial Sequence
  Description of Artificial Sequence: Synthetic oligonucleotide
gucuaagaugguccaggga

SEQ ID NO: 531583 - RNA, 19 nt, Artificial Sequence
  Description of Artificial Sequence: Synthetic oligonucleotide
gcaguaauuaggggacagg

SEQ ID NO: 531584 - RNA, 19 nt, Artificial Sequence
  Description of Artificial Sequence: Synthetic oligonucleotide
agggaaccuaugccguugu

SEQ ID NO: 531585 - RNA, 19 nt, Artificial Sequence
  Description of Artificial Sequence: Synthetic oligonucleotide
acauguagguagauggcuu

SEQ ID NO: 531586 - RNA, 19 nt, Artificial Sequence
  Description of Artificial Sequence: Synthetic oligonucleotide
ggcgucgcggggcucagcg

SEQ ID NO: 531587 - RNA, 19 nt, Artificial Sequence
  Description of Artificial Sequence: Synthetic oligonucleotide
cucggauggaguaguaaua

SEQ ID NO: 531588 - RNA, 19 nt, Artificial Sequence
  Description of Artificial Sequence: Synthetic oligonucleotide
uaccaugagucuggguacu

SEQ ID NO: 531589 - RNA, 19 nt, Artificial Sequence
  Description of Artificial Sequence: Synthetic oligonucleotide
cagcggacggcgucgcggg

SEQ ID NO: 531590 - RNA, 19 nt, Artificial Sequence
  Description of Artificial Sequence: Synthetic oligonucleotide
gcuguauuauuggugguga

SEQ ID NO: 531591 - RNA, 19 nt, Artificial Sequence
  Description of Artificial Sequence: Synthetic oligonucleotide
gcaugccaggauucaacag

SEQ ID NO: 531592 - RNA, 19 nt, Artificial Sequence
  Description of Artificial Sequence: Synthetic oligonucleotide
ucccggcacugacaagagc

SEQ ID NO: 531593 - RNA, 19 nt, Artificial Sequence
  Description of Artificial Sequence: Synthetic oligonucleotide
ucacaugguacggcuguau

SEQ ID NO: 531594 - RNA, 19 nt, Artificial Sequence
  Description of Artificial Sequence: Synthetic oligonucleotide
ggcuguauucgaugccacc

SEQ ID NO: 531595 - RNA, 19 nt, Artificial Sequence
  Description of Artificial Sequence: Synthetic oligonucleotide
augguacggcuguauucga

SEQ ID NO: 531596 - RNA, 19 nt, Artificial Sequence
  Description of Artificial Sequence: Synthetic oligonucleotide
accaugagucuggguacuc

SEQ ID NO: 531597 - RNA, 19 nt, Artificial Sequence
  Description of Artificial Sequence: Synthetic oligonucleotide
ggaguaguaauagggcaga

SEQ ID NO: 531598 - RNA, 19 nt, Artificial Sequence
  Description of Artificial Sequence: Synthetic oligonucleotide
gaccccucggauggaguag

SEQ ID NO: 531599 - RNA, 19 nt, Artificial Sequence
  Description of Artificial Sequence: Synthetic oligonucleotide
cuaugucaucguggcagag

SEQ ID NO: 531600 - RNA, 19 nt, Artificial Sequence
  Description of Artificial Sequence: Synthetic oligonucleotide
cuuagaauguaugcaacuu

SEQ ID NO: 531601 - RNA, 19 nt, Artificial Sequence
  Description of Artificial Sequence: Synthetic oligonucleotide
caguaaugaggccuaucaa

SEQ ID NO: 531602 - RNA, 19 nt, Artificial Sequence
  Description of Artificial Sequence: Synthetic oligonucleotide
ucagaggcugaagguccgc

SEQ ID NO: 531603 - RNA, 19 nt, Artificial Sequence
  Description of Artificial Sequence: Synthetic oligonucleotide
ucccaauguaggucagcua

SEQ ID NO: 531604 - RNA, 19 nt, Artificial Sequence
  Description of Artificial Sequence: Synthetic oligonucleotide
gcuuaaagucucuguuuuc

SEQ ID NO: 531605 - RNA, 19 nt, Artificial Sequence
  Description of Artificial Sequence: Synthetic oligonucleotide
uucccacgauggcaccucu

SEQ ID NO: 531606 - RNA, 19 nt, Artificial Sequence
  Description of Artificial Sequence: Synthetic oligonucleotide
auacuggaccauggcagga

SEQ ID NO: 531607 - RNA, 19 nt, Artificial Sequence
  Description of Artificial Sequence: Synthetic oligonucleotide
cucaguaaugaggccuauc

SEQ ID NO: 531608 - RNA, 19 nt, Artificial Sequence
  Description of Artificial Sequence: Synthetic oligonucleotide
agguugcagcaagagagaa

SEQ ID NO: 531609 - RNA, 19 nt, Artificial Sequence
  Description of Artificial Sequence: Synthetic oligonucleotide
aggcaggaugauccuucug

SEQ ID NO: 531610 - RNA, 19 nt, Artificial Sequence
  Description of Artificial Sequence: Synthetic oligonucleotide
caguucuguugaggaaggg

SEQ ID NO: 531611 - RNA, 19 nt, Artificial Sequence
  Description of Artificial Sequence: Synthetic oligonucleotide
cuguugaaggacaggcaua

SEQ ID NO: 531612 - RNA, 19 nt, Artificial Sequence
  Description of Artificial Sequence: Synthetic oligonucleotide
cacucaguaaugaggccua

SEQ ID NO: 531613 - RNA, 19 nt, Artificial Sequence
  Description of Artificial Sequence: Synthetic oligonucleotide
ucccaguacuuagaaugua

SEQ ID NO: 531614 - RNA, 19 nt, Artificial Sequence
  Description of Artificial Sequence: Synthetic oligonucleotide
ucagcgcauccuggggaag

SEQ ID NO: 531615 - RNA, 19 nt, Artificial Sequence
  Description of Artificial Sequence: Synthetic oligonucleotide
cauucacaccucggacggg

SEQ ID NO: 531616 - RNA, 19 nt, Artificial Sequence
  Description of Artificial Sequence: Synthetic oligonucleotide
gugguugaaaugugauccu

SEQ ID NO: 531617 - RNA, 19 nt, Artificial Sequence
  Description of Artificial Sequence: Synthetic oligonucleotide
uggccgccauugauguaga

SEQ ID NO: 531618 - RNA, 19 nt, Artificial Sequence
  Description of Artificial Sequence: Synthetic oligonucleotide
gguauucgcuuugcugugc

SEQ ID NO: 531619 - RNA, 19 nt, Artificial Sequence
  Description of Artificial Sequence: Synthetic oligonucleotide
gcaagagagaagaacuucu

SEQ ID NO: 531620 - RNA, 19 nt, Artificial Sequence
  Description of Artificial Sequence: Synthetic oligonucleotide
gcgguagauccuguguggg

SEQ ID NO: 531621 - RNA, 19 nt, Artificial Sequence
  Description of Artificial Sequence: Synthetic oligonucleotide
agcaccgggccugcaacug

SEQ ID NO: 531622 - RNA, 19 nt, Artificial Sequence
  Description of Artificial Sequence: Synthetic oligonucleotide
cucccaguacuuagaaugu

SEQ ID NO: 531623 - RNA, 19 nt, Artificial Sequence
  Description of Artificial Sequence: Synthetic oligonucleotide
ggggccucagcacacaacu

SEQ ID NO: 531624 - RNA, 19 nt, Artificial Sequence
  Description of Artificial Sequence: Synthetic oligonucleotide
gcauacacucugcuucuga

SEQ ID NO: 531625 - RNA, 19 nt, Artificial Sequence
  Description of Artificial Sequence: Synthetic oligonucleotide
gagauacccaaugcagagu

SEQ ID NO: 531626 - RNA, 19 nt, Artificial Sequence
  Description of Artificial Sequence: Synthetic oligonucleotide
augauccuucuggacagua

SEQ ID NO: 531627 - RNA, 19 nt, Artificial Sequence
  Description of Artificial Sequence: Synthetic oligonucleotide
gcaaaguucaguccauuuu

SEQ ID NO: 531628 - RNA, 19 nt, Artificial Sequence
  Description of Artificial Sequence: Synthetic oligonucleotide
cauuuggccaggccuugaa

SEQ ID NO: 531629 - RNA, 19 nt, Artificial Sequence
  Description of Artificial Sequence: Synthetic oligonucleotide
gaguuggauuuaagaaugu

SEQ ID NO: 531630 - RNA, 19 nt, Artificial Sequence
  Description of Artificial Sequence: Synthetic oligonucleotide
gcuguauucgaugccaccu

SEQ ID NO: 531631 - RNA, 19 nt, Artificial Sequence
  Description of Artificial Sequence: Synthetic oligonucleotide
ggccuaucaauagagcugu

SEQ ID NO: 531632 - RNA, 19 nt, Artificial Sequence
  Description of Artificial Sequence: Synthetic oligonucleotide
cccaauguaggucagcuau

SEQ ID NO: 531633 - RNA, 19 nt, Artificial Sequence
  Description of Artificial Sequence: Synthetic oligonucleotide
caauguaggucagcuauau

SEQ ID NO: 531634 - RNA, 19 nt, Artificial Sequence
  Description of Artificial Sequence: Synthetic oligonucleotide
ccggccagcccuuuuccag

SEQ ID NO: 531635 - RNA, 19 nt, Artificial Sequence
  Description of Artificial Sequence: Synthetic oligonucleotide
gcaccgggccugcaacugg

SEQ ID NO: 531636 - RNA, 19 nt, Artificial Sequence
  Description of Artificial Sequence: Synthetic oligonucleotide
gguccgcaggcaccaacug

SEQ ID NO: 531637 - RNA, 19 nt, Artificial Sequence
  Description of Artificial Sequence: Synthetic oligonucleotide
accuguccuuggcccagcu

SEQ ID NO: 531638 - RNA, 19 nt, Artificial Sequence
  Description of Artificial Sequence: Synthetic oligonucleotide
auucaacaggcaggaugau

SEQ ID NO: 531639 - RNA, 19 nt, Artificial Sequence
  Description of Artificial Sequence: Synthetic oligonucleotide
cagcaauugcugcaaguau

SEQ ID NO: 531640 - RNA, 19 nt, Artificial Sequence
  Description of Artificial Sequence: Synthetic oligonucleotide
gccgccauugauguagaga

SEQ ID NO: 531641 - RNA, 19 nt, Artificial Sequence
  Description of Artificial Sequence: Synthetic oligonucleotide
ccuaugccguuguuuucug

SEQ ID NO: 531642 - RNA, 19 nt, Artificial Sequence
  Description of Artificial Sequence: Synthetic oligonucleotide
agcucccaauguaggucag

SEQ ID NO: 531643 - RNA, 19 nt, Artificial Sequence
  Description of Artificial Sequence: Synthetic oligonucleotide
cuggcgguagauccugugu

SEQ ID NO: 531644 - RNA, 19 nt, Artificial Sequence
  Description of Artificial Sequence: Synthetic oligonucleotide
acucaguaaugaggccuau

SEQ ID NO: 531645 - RNA, 19 nt, Artificial Sequence
  Description of Artificial Sequence: Synthetic oligonucleotide
ccaucuaacugucuauggu

SEQ ID NO: 531646 - RNA, 19 nt, Artificial Sequence
  Description of Artificial Sequence: Synthetic oligonucleotide
ggacucagguuggcuagug

SEQ ID NO: 531647 - RNA, 19 nt, Artificial Sequence
  Description of Artificial Sequence: Synthetic oligonucleotide
ccacucuuucuccccaguc

SEQ ID NO: 531648 - RNA, 19 nt, Artificial Sequence
  Description of Artificial Sequence: Synthetic oligonucleotide
ccucuuuauguauuuuggu

SEQ ID NO: 531649 - RNA, 19 nt, Artificial Sequence
  Description of Artificial Sequence: Synthetic oligonucleotide
cugcauuuggccaggccuu

SEQ ID NO: 531650 - RNA, 19 nt, Artificial Sequence
  Description of Artificial Sequence: Synthetic oligonucleotide
accgggccugcaacugggg

SEQ ID NO: 531651 - RNA, 19 nt, Artificial Sequence
  Description of Artificial Sequence: Synthetic oligonucleotide
cuaugccguuguuuucugu

SEQ ID NO: 531652 - RNA, 19 nt, Artificial Sequence
  Description of Artificial Sequence: Synthetic oligonucleotide
ggaccccucggauggagua

SEQ ID NO: 531653 - RNA, 19 nt, Artificial Sequence
  Description of Artificial Sequence: Synthetic oligonucleotide
cuacuaucauucccacgau

SEQ ID NO: 531654 - RNA, 19 nt, Artificial Sequence
  Description of Artificial Sequence: Synthetic oligonucleotide
ggaaccuaugccguuguuu

SEQ ID NO: 531655 - RNA, 19 nt, Artificial Sequence
  Description of Artificial Sequence: Synthetic oligonucleotide
caacaggcaggaugauccu

SEQ ID NO: 531656 - RNA, 19 nt, Artificial Sequence
  Description of Artificial Sequence: Synthetic oligonucleotide
aggaccccucggauggagu

SEQ ID NO: 531657 - RNA, 19 nt, Artificial Sequence
  Description of Artificial Sequence: Synthetic oligonucleotide
aggauucaacaggcaggau

SEQ ID NO: 531658 - RNA, 19 nt, Artificial Sequence
  Description of Artificial Sequence: Synthetic oligonucleotide
ggcauacacucugcuucug

SEQ ID NO: 531659 - RNA, 19 nt, Artificial Sequence
  Description of Artificial Sequence: Synthetic oligonucleotide
cacuuacucccaguacuua

SEQ ID NO: 531660 - RNA, 19 nt, Artificial Sequence
  Description of Artificial Sequence: Synthetic oligonucleotide
ccucggauggaguaguaau

SEQ ID NO: 531661 - RNA, 19 nt, Artificial Sequence
  Description of Artificial Sequence: Synthetic oligonucleotide
gcucccaauguaggucagc

SEQ ID NO: 531662 - RNA, 19 nt, Artificial Sequence
  Description of Artificial Sequence: Synthetic oligonucleotide
ggggaaccagucgccacac

SEQ ID NO: 531663 - RNA, 19 nt, Artificial Sequence
  Description of Artificial Sequence: Synthetic oligonucleotide
ccgggccugcaacuggggc

SEQ ID NO: 531664 - RNA, 19 nt, Artificial Sequence
  Description of Artificial Sequence: Synthetic oligonucleotide
ggccgccauugauguagag

SEQ ID NO: 531665 - RNA, 19 nt, Artificial Sequence
  Description of Artificial Sequence: Synthetic oligonucleotide
ggugcuucacagugucuau

SEQ ID NO: 531666 - RNA, 19 nt, Artificial Sequence
  Description of Artificial Sequence: Synthetic oligonucleotide
ggauacccugucagggcuc

SEQ ID NO: 531667 - RNA, 19 nt, Artificial Sequence
  Description of Artificial Sequence: Synthetic oligonucleotide
ggcccggccagcccuuuuc

SEQ ID NO: 531668 - RNA, 19 nt, Artificial Sequence
  Description of Artificial Sequence: Synthetic oligonucleotide
gcgcauccuggggaagccg

SEQ ID NO: 531669 - RNA, 19 nt, Artificial Sequence
  Description of Artificial Sequence: Synthetic oligonucleotide
agucgccacacaggugcuu

SEQ ID NO: 531670 - RNA, 19 nt, Artificial Sequence
  Description of Artificial Sequence: Synthetic oligonucleotide
ccaugagucuggguacuca

SEQ ID NO: 531671 - RNA, 19 nt, Artificial Sequence
  Description of Artificial Sequence: Synthetic oligonucleotide
cggcuacuaucauucccac

SEQ ID NO: 531672 - RNA, 19 nt, Artificial Sequence
  Description of Artificial Sequence: Synthetic oligonucleotide
auacccugucagggcuccu

SEQ ID NO: 531673 - RNA, 19 nt, Artificial Sequence
  Description of Artificial Sequence: Synthetic oligonucleotide
cugugggccuggcgguaga

SEQ ID NO: 531674 - RNA, 19 nt, Artificial Sequence
  Description of Artificial Sequence: Synthetic oligonucleotide
gaagguccgcaggcaccaa

SEQ ID NO: 531675 - RNA, 19 nt, Artificial Sequence
  Description of Artificial Sequence: Synthetic oligonucleotide
ccugugacacugcagcaau

SEQ ID NO: 531676 - RNA, 19 nt, Artificial Sequence
  Description of Artificial Sequence: Synthetic oligonucleotide
caggcaccaacugccuucu

SEQ ID NO: 531677 - RNA, 19 nt, Artificial Sequence
  Description of Artificial Sequence: Synthetic oligonucleotide
ggacgggagccggcggcag

SEQ ID NO: 531678 - RNA, 19 nt, Artificial Sequence
  Description of Artificial Sequence: Synthetic oligonucleotide
acggcgucgcggggcucag

SEQ ID NO: 531679 - RNA, 19 nt, Artificial Sequence
  Description of Artificial Sequence: Synthetic oligonucleotide
gcauuuggccaggccuuga

SEQ ID NO: 531680 - RNA, 19 nt, Artificial Sequence
  Description of Artificial Sequence: Synthetic oligonucleotide
cgucgcggggcucagcgca

SEQ ID NO: 531681 - RNA, 19 nt, Artificial Sequence
  Description of Artificial Sequence: Synthetic oligonucleotide
gcgucgcggggcucagcgc

SEQ ID NO: 531682 - RNA, 19 nt, Artificial Sequence
  Description of Artificial Sequence: Synthetic oligonucleotide
cagucgccacacaggugcu

SEQ ID NO: 531683 - RNA, 19 nt, Artificial Sequence
  Description of Artificial Sequence: Synthetic oligonucleotide
gucuauggugagggcugau

SEQ ID NO: 531684 - RNA, 19 nt, Artificial Sequence
  Description of Artificial Sequence: Synthetic oligonucleotide
cggcacugacaagagccuc

SEQ ID NO: 531685 - RNA, 19 nt, Artificial Sequence
  Description of Artificial Sequence: Synthetic oligonucleotide
caagucccauggguccagu

SEQ ID NO: 531686 - RNA, 19 nt, Artificial Sequence
  Description of Artificial Sequence: Synthetic oligonucleotide
ggccgaugggcuggcaggu

SEQ ID NO: 531687 - RNA, 19 nt, Artificial Sequence
  Description of Artificial Sequence: Synthetic oligonucleotide
gggacucagguuggcuagu

SEQ ID NO: 531688 - RNA, 19 nt, Artificial Sequence
  Description of Artificial Sequence: Synthetic oligonucleotide
gggaaccuaugccguuguu

SEQ ID NO: 531689 - RNA, 19 nt, Artificial Sequence
  Description of Artificial Sequence: Synthetic oligonucleotide
gcauagcaccgggccugca

SEQ ID NO: 531690 - RNA, 19 nt, Artificial Sequence
  Description of Artificial Sequence: Synthetic oligonucleotide
ccccucggauggaguagua

SEQ ID NO: 531691 - RNA, 19 nt, Artificial Sequence
  Description of Artificial Sequence: Synthetic oligonucleotide
gccuaucaauagagcuguu

SEQ ID NO: 531692 - RNA, 19 nt, Artificial Sequence
  Description of Artificial Sequence: Synthetic oligonucleotide
cggcgucgcggggcucagc

SEQ ID NO: 531693 - RNA, 19 nt, Artificial Sequence
  Description of Artificial Sequence: Synthetic oligonucleotide
aaaguagccaccuuauccc

SEQ ID NO: 531694 - RNA, 19 nt, Artificial Sequence
  Description of Artificial Sequence: Synthetic oligonucleotide
aaaguagugacaucacgcc

SEQ ID NO: 531695 - RNA, 19 nt, Artificial Sequence
  Description of Artificial Sequence: Synthetic oligonucleotide
aaaagaacuagagcaaacc

SEQ ID NO: 531696 - RNA, 19 nt, Artificial Sequence
  Description of Artificial Sequence: Synthetic oligonucleotide
uuuaaggagacagagaccc

SEQ ID NO: 531697 - RNA, 19 nt, Artificial Sequence
  Description of Artificial Sequence: Synthetic oligonucleotide
aagugcaaagugcaaacac

SEQ ID NO: 531698 - RNA, 19 nt, Artificial Sequence
  Description of Artificial Sequence: Synthetic oligonucleotide
aaacccuacguaucgauuc

SEQ ID NO: 531699 - RNA, 19 nt, Artificial Sequence
  Description of Artificial Sequence: Synthetic oligonucleotide
ucuucaaaagccuugucgc

SEQ ID NO: 531700 - RNA, 19 nt, Artificial Sequence
  Description of Artificial Sequence: Synthetic oligonucleotide
uguccaucgucacugagcg

SEQ ID NO: 531701 - RNA, 19 nt, Artificial Sequence
  Description of Artificial Sequence: Synthetic oligonucleotide
accaguuaggcucauaguc

SEQ ID NO: 531702 - RNA, 19 nt, Artificial Sequence
  Description of Artificial Sequence: Synthetic oligonucleotide
auccaaauuuuguagcacc

SEQ ID NO: 531703 - RNA, 19 nt, Artificial Sequence
  Description of Artificial Sequence: Synthetic oligonucleotide
agagauagugccugggccc

SEQ ID NO: 531704 - RNA, 19 nt, Artificial Sequence
  Description of Artificial Sequence: Synthetic oligonucleotide
agugacaucacgccauccc

SEQ ID NO: 531705 - RNA, 19 nt, Artificial Sequence
  Description of Artificial Sequence: Synthetic oligonucleotide
ucagccaaucuucaaaagc

SEQ ID NO: 531706 - RNA, 19 nt, Artificial Sequence
  Description of Artificial Sequence: Synthetic oligonucleotide
gaaaguagugacaucacgc

SEQ ID NO: 531707 - RNA, 19 nt, Artificial Sequence
  Description of Artificial Sequence: Synthetic oligonucleotide
aagaggguaaagugcaaag

SEQ ID NO: 531708 - RNA, 19 nt, Artificial Sequence
  Description of Artificial Sequence: Synthetic oligonucleotide
aacuccgaagccuucugac

SEQ ID NO: 531709 - RNA, 19 nt, Artificial Sequence
  Description of Artificial Sequence: Synthetic oligonucleotide
acugauagcacaugggucu

SEQ ID NO: 531710 - RNA, 19 nt, Artificial Sequence
  Description of Artificial Sequence: Synthetic oligonucleotide
ugcucuaccuagauggagg

SEQ ID NO: 531711 - RNA, 19 nt, Artificial Sequence
  Description of Artificial Sequence: Synthetic oligonucleotide
guaucgauucuccugagcc

SEQ ID NO: 531712 - RNA, 19 nt, Artificial Sequence
  Description of Artificial Sequence: Synthetic oligonucleotide
gaugggguggccuucuugg

SEQ ID NO: 531713 - RNA, 19 nt, Artificial Sequence
  Description of Artificial Sequence: Synthetic oligonucleotide
uguuguuggaugcggaacc

SEQ ID NO: 531714 - RNA, 19 nt, Artificial Sequence
  Description of Artificial Sequence: Synthetic oligonucleotide
aacugagagaccccacugg

SEQ ID NO: 531715 - RNA, 19 nt, Artificial Sequence
  Description of Artificial Sequence: Synthetic oligonucleotide
gguuuaaggagacagagac

SEQ ID NO: 531716 - RNA, 19 nt, Artificial Sequence
  Description of Artificial Sequence: Synthetic oligonucleotide
acgaaagaggaacaagagg

SEQ ID NO: 531717 - RNA, 19 nt, Artificial Sequence
  Description of Artificial Sequence: Synthetic oligonucleotide
uacguaucgauucuccuga

SEQ ID NO: 531718 - RNA, 19 nt, Artificial Sequence
  Description of Artificial Sequence: Synthetic oligonucleotide
aggacguggacuuagguga

SEQ ID NO: 531719 - RNA, 19 nt, Artificial Sequence
  Description of Artificial Sequence: Synthetic oligonucleotide
gcagaagcaaacuugcucg

SEQ ID NO: 531720 - RNA, 19 nt, Artificial Sequence
  Description of Artificial Sequence: Synthetic oligonucleotide
uuccauuuguccaucguca

SEQ ID NO: 531721 - RNA, 19 nt, Artificial Sequence
  Description of Artificial Sequence: Synthetic oligonucleotide
agaucuggggccaaggggc

SEQ ID NO: 531722 - RNA, 19 nt, Artificial Sequence
  Description of Artificial Sequence: Synthetic oligonucleotide
agaccaguuaggcucauag

SEQ ID NO: 531723 - RNA, 19 nt, Artificial Sequence
  Description of Artificial Sequence: Synthetic oligonucleotide
gacgacauggcauuguuga

SEQ ID NO: 531724 - RNA, 19 nt, Artificial Sequence
  Description of Artificial Sequence: Synthetic oligonucleotide
ucacugagcgcacaaagcu

SEQ ID NO: 531725 - RNA, 19 nt, Artificial Sequence
  Description of Artificial Sequence: Synthetic oligonucleotide
caccuuaucccuaaagagc

SEQ ID NO: 531726 - RNA, 19 nt, Artificial Sequence
  Description of Artificial Sequence: Synthetic oligonucleotide
aacuagagcaaaccuuuca

SEQ ID NO: 531727 - RNA, 19 nt, Artificial Sequence
  Description of Artificial Sequence: Synthetic oligonucleotide
aacaagaggguaaagugca

SEQ ID NO: 531728 - RNA, 19 nt, Artificial Sequence
  Description of Artificial Sequence: Synthetic oligonucleotide
agacacuucaacaaaagca

SEQ ID NO: 531729 - RNA, 19 nt, Artificial Sequence
  Description of Artificial Sequence: Synthetic oligonucleotide
accuuaucccuaaagagcg

SEQ ID NO: 531730 - RNA, 19 nt, Artificial Sequence
  Description of Artificial Sequence: Synthetic oligonucleotide
accuuucaaguuuuaaaag

SEQ ID NO: 531731 - RNA, 19 nt, Artificial Sequence
  Description of Artificial Sequence: Synthetic oligonucleotide
gaacuuagcauucccacca

SEQ ID NO: 531732 - RNA, 19 nt, Artificial Sequence
  Description of Artificial Sequence: Synthetic oligonucleotide
uggaugcggaaccugagcc

SEQ ID NO: 531733 - RNA, 19 nt, Artificial Sequence
  Description of Artificial Sequence: Synthetic oligonucleotide
uuccccgaaaagaaaguag

SEQ ID NO: 531734 - RNA, 19 nt, Artificial Sequence
  Description of Artificial Sequence: Synthetic oligonucleotide
uggguuuaaggagacagag

SEQ ID NO: 531735 - RNA, 19 nt, Artificial Sequence
  Description of Artificial Sequence: Synthetic oligonucleotide
aaguuuuaaaagacacuuc

SEQ ID NO: 531736 - RNA, 19 nt, Artificial Sequence
  Description of Artificial Sequence: Synthetic oligonucleotide
uuacucuuuccucauuucu

SEQ ID NO: 531737 - RNA, 19 nt, Artificial Sequence
  Description of Artificial Sequence: Synthetic oligonucleotide
aucgauucuccugagcccc

SEQ ID NO: 531738 - RNA, 19 nt, Artificial Sequence
  Description of Artificial Sequence: Synthetic oligonucleotide
aacaaccacugauagcaca

SEQ ID NO: 531739 - RNA, 19 nt, Artificial Sequence
  Description of Artificial Sequence: Synthetic oligonucleotide
gaauccugggaggaaaagg

SEQ ID NO: 531740 - RNA, 19 nt, Artificial Sequence
  Description of Artificial Sequence: Synthetic oligonucleotide
aaguucaagucaggugucc

SEQ ID NO: 531741 - RNA, 19 nt, Artificial Sequence
  Description of Artificial Sequence: Synthetic oligonucleotide
ucaagucagguguccaggg

SEQ ID NO: 531742 - RNA, 19 nt, Artificial Sequence
  Description of Artificial Sequence: Synthetic oligonucleotide
uccccgaaaagaaaguagu

SEQ ID NO: 531743 - RNA, 19 nt, Artificial Sequence
  Description of Artificial Sequence: Synthetic oligonucleotide
aucacuauugcuguucuug

SEQ ID NO: 531744 - RNA, 19 nt, Artificial Sequence
  Description of Artificial Sequence: Synthetic oligonucleotide
uuguccaucgucacugagc

SEQ ID NO: 531745 - RNA, 19 nt, Artificial Sequence
  Description of Artificial Sequence: Synthetic oligonucleotide
cuucacacgaaagaggaac

SEQ ID NO: 531746 - RNA, 19 nt, Artificial Sequence
  Description of Artificial Sequence: Synthetic oligonucleotide
uguggcccaacuccgaagc

SEQ ID NO: 531747 - RNA, 19 nt, Artificial Sequence
  Description of Artificial Sequence: Synthetic oligonucleotide
acugucguagacacaauac

SEQ ID NO: 531748 - RNA, 19 nt, Artificial Sequence
  Description of Artificial Sequence: Synthetic oligonucleotide
aaguagugacaucacgcca

SEQ ID NO: 531749 - RNA, 19 nt, Artificial Sequence
  Description of Artificial Sequence: Synthetic oligonucleotide
uugcuugggauccaaauuu

SEQ ID NO: 531750 - RNA, 19 nt, Artificial Sequence
  Description of Artificial Sequence: Synthetic oligonucleotide
uguuuugguagcuguggcc

SEQ ID NO: 531751 - RNA, 19 nt, Artificial Sequence
  Description of Artificial Sequence: Synthetic oligonucleotide
aacuugcucgccccagugg

SEQ ID NO: 531752 - RNA, 19 nt, Artificial Sequence
  Description of Artificial Sequence: Synthetic oligonucleotide
cugauaggaacccagguca

SEQ ID NO: 531753 - RNA, 19 nt, Artificial Sequence
  Description of Artificial Sequence: Synthetic oligonucleotide
uuaucccuaaagagcgcgg

SEQ ID NO: 531754 - RNA, 19 nt, Artificial Sequence
  Description of Artificial Sequence: Synthetic oligonucleotide
cuuaucccuaaagagcgcg

SEQ ID NO: 531755 - RNA, 19 nt, Artificial Sequence
  Description of Artificial Sequence: Synthetic oligonucleotide
ucaagcucgauguccuucc

SEQ ID NO: 531756 - RNA, 19 nt, Artificial Sequence
  Description of Artificial Sequence: Synthetic oligonucleotide
cacgaaagaggaacaagag

SEQ ID NO: 531757 - RNA, 19 nt, Artificial Sequence
  Description of Artificial Sequence: Synthetic oligonucleotide
ucaaaagccuugucgccag

SEQ ID NO: 531758 - RNA, 19 nt, Artificial Sequence
  Description of Artificial Sequence: Synthetic oligonucleotide
cauuuguccaucgucacug

SEQ ID NO: 531759 - RNA, 19 nt, Artificial Sequence
  Description of Artificial Sequence: Synthetic oligonucleotide
acacaauacauggcaaaac

SEQ ID NO: 531760 - RNA, 19 nt, Artificial Sequence
  Description of Artificial Sequence: Synthetic oligonucleotide
uggacuuaggugaggacgu

SEQ ID NO: 531761 - RNA, 19 nt, Artificial Sequence
  Description of Artificial Sequence: Synthetic oligonucleotide
uuagcauucccaccagccu

SEQ ID NO: 531762 - RNA, 19 nt, Artificial Sequence
  Description of Artificial Sequence: Synthetic oligonucleotide
uggaugccaacugagagac

SEQ ID NO: 531763 - RNA, 19 nt, Artificial Sequence
  Description of Artificial Sequence: Synthetic oligonucleotide
gaacucucggaacuuagca

SEQ ID NO: 531764 - RNA, 19 nt, Artificial Sequence
  Description of Artificial Sequence: Synthetic oligonucleotide
uuuguagcacccuccuuug

SEQ ID NO: 531765 - RNA, 19 nt, Artificial Sequence
  Description of Artificial Sequence: Synthetic oligonucleotide
caaauuuuguagcacccuc

SEQ ID NO: 531766 - RNA, 19 nt, Artificial Sequence
  Description of Artificial Sequence: Synthetic oligonucleotide
aacucucggaacuuagcau

SEQ ID NO: 531767 - RNA, 19 nt, Artificial Sequence
  Description of Artificial Sequence: Synthetic oligonucleotide
uuuuccccgaaaagaaagu

SEQ ID NO: 531768 - RNA, 19 nt, Artificial Sequence
  Description of Artificial Sequence: Synthetic oligonucleotide
uaucgauucuccugagccc

SEQ ID NO: 531769 - RNA, 19 nt, Artificial Sequence
  Description of Artificial Sequence: Synthetic oligonucleotide
cuacguaucgauucuccug

SEQ ID NO: 531770 - RNA, 19 nt, Artificial Sequence
  Description of Artificial Sequence: Synthetic oligonucleotide
ucgauguccuuccauuugu

SEQ ID NO: 531771 - RNA, 19 nt, Artificial Sequence
  Description of Artificial Sequence: Synthetic oligonucleotide
caacagauaugcugaaaac

SEQ ID NO: 531772 - RNA, 19 nt, Artificial Sequence
  Description of Artificial Sequence: Synthetic oligonucleotide
cugagagucaagacaggag

SEQ ID NO: 531773 - RNA, 19 nt, Artificial Sequence
  Description of Artificial Sequence: Synthetic oligonucleotide
cagagauagugccugggcc

SEQ ID NO: 531774 - RNA, 19 nt, Artificial Sequence
  Description of Artificial Sequence: Synthetic oligonucleotide
uugggauccaaauuuugua

SEQ ID NO: 531775 - RNA, 19 nt, Artificial Sequence
  Description of Artificial Sequence: Synthetic oligonucleotide
caacaggugcucuaccuag

SEQ ID NO: 531776 - RNA, 19 nt, Artificial Sequence
  Description of Artificial Sequence: Synthetic oligonucleotide
uggagguucucccaugaaa

SEQ ID NO: 531777 - RNA, 19 nt, Artificial Sequence
  Description of Artificial Sequence: Synthetic oligonucleotide
uucagccaaucuucaaaag

SEQ ID NO: 531778 - RNA, 19 nt, Artificial Sequence
  Description of Artificial Sequence: Synthetic oligonucleotide
aacugucguagacacaaua

SEQ ID NO: 531779 - RNA, 19 nt, Artificial Sequence
  Description of Artificial Sequence: Synthetic oligonucleotide
ugggaguugucuccgcugc

SEQ ID NO: 531780 - RNA, 19 nt, Artificial Sequence
  Description of Artificial Sequence: Synthetic oligonucleotide
agccuuaagacuccaggca

SEQ ID NO: 531781 - RNA, 19 nt, Artificial Sequence
  Description of Artificial Sequence: Synthetic oligonucleotide
uacagggacgacauggcau

SEQ ID NO: 531782 - RNA, 19 nt, Artificial Sequence
  Description of Artificial Sequence: Synthetic oligonucleotide
uuaggugaggacgucggug

SEQ ID NO: 531783 - RNA, 19 nt, Artificial Sequence
  Description of Artificial Sequence: Synthetic oligonucleotide
cagccuuaagacuccaggc

SEQ ID NO: 531784 - RNA, 19 nt, Artificial Sequence
  Description of Artificial Sequence: Synthetic oligonucleotide
ucccuaaagagcgcggcgg

SEQ ID NO: 531785 - RNA, 19 nt, Artificial Sequence
  Description of Artificial Sequence: Synthetic oligonucleotide
uguggagguucucccauga

SEQ ID NO: 531786 - RNA, 19 nt, Artificial Sequence
  Description of Artificial Sequence: Synthetic oligonucleotide
ucggaacuuagcauuccca

SEQ ID NO: 531787 - RNA, 19 nt, Artificial Sequence
  Description of Artificial Sequence: Synthetic oligonucleotide
aaguagccaccuuaucccu

SEQ ID NO: 531788 - RNA, 19 nt, Artificial Sequence
  Description of Artificial Sequence: Synthetic oligonucleotide
aacccuacguaucgauucu

SEQ ID NO: 531789 - RNA, 19 nt, Artificial Sequence
  Description of Artificial Sequence: Synthetic oligonucleotide
aaacaucccagcuguccga

SEQ ID NO: 531790 - RNA, 19 nt, Artificial Sequence
  Description of Artificial Sequence: Synthetic oligonucleotide
acugagagaccccacugga

SEQ ID NO: 531791 - RNA, 19 nt, Artificial Sequence
  Description of Artificial Sequence: Synthetic oligonucleotide
aagaugcccaacccuggca

SEQ ID NO: 531792 - RNA, 19 nt, Artificial Sequence
  Description of Artificial Sequence: Synthetic oligonucleotide
uaaaacugcuccagcccga

SEQ ID NO: 531793 - RNA, 19 nt, Artificial Sequence
  Description of Artificial Sequence: Synthetic oligonucleotide
ggugaggcugucuggaggg

SEQ ID NO: 531794 - RNA, 19 nt, Artificial Sequence
  Description of Artificial Sequence: Synthetic oligonucleotide
cacaacaaccacugauagc

SEQ ID NO: 531795 - RNA, 19 nt, Artificial Sequence
  Description of Artificial Sequence: Synthetic oligonucleotide
uguuuccaaacccuacgua

SEQ ID NO: 531796 - RNA, 19 nt, Artificial Sequence
  Description of Artificial Sequence: Synthetic oligonucleotide
caggacguggacuuaggug

SEQ ID NO: 531797 - RNA, 19 nt, Artificial Sequence
  Description of Artificial Sequence: Synthetic oligonucleotide
gauccaaauuuuguagcac

SEQ ID NO: 531798 - RNA, 19 nt, Artificial Sequence
  Description of Artificial Sequence: Synthetic oligonucleotide
guuaggcucauaguccucc

SEQ ID NO: 531799 - RNA, 19 nt, Artificial Sequence
  Description of Artificial Sequence: Synthetic oligonucleotide
acuugcucgccccaguggu

SEQ ID NO: 531800 - RNA, 19 nt, Artificial Sequence
  Description of Artificial Sequence: Synthetic oligonucleotide
cagaagcuauggucuaugg

SEQ ID NO: 531801 - RNA, 19 nt, Artificial Sequence
  Description of Artificial Sequence: Synthetic oligonucleotide
ucagaggacccaagaggcc

SEQ ID NO: 531802 - RNA, 19 nt, Artificial Sequence
  Description of Artificial Sequence: Synthetic oligonucleotide
cacugauagcacauggguc

SEQ ID NO: 531803 - RNA, 19 nt, Artificial Sequence
  Description of Artificial Sequence: Synthetic oligonucleotide
gagagucaagacaggagug

SEQ ID NO: 531804 - RNA, 19 nt, Artificial Sequence
  Description of Artificial Sequence: Synthetic oligonucleotide
cauguucaggcuccccugg

SEQ ID NO: 531805 - RNA, 19 nt, Artificial Sequence
  Description of Artificial Sequence: Synthetic oligonucleotide
cuguuuugguagcuguggc

SEQ ID NO: 531806 - RNA, 19 nt, Artificial Sequence
  Description of Artificial Sequence: Synthetic oligonucleotide
gaagucgucuucucucuuc

SEQ ID NO: 531807 - RNA, 19 nt, Artificial Sequence
  Description of Artificial Sequence: Synthetic oligonucleotide
uggaugacauguccccuga

SEQ ID NO: 531808 - RNA, 19 nt, Artificial Sequence
  Description of Artificial Sequence: Synthetic oligonucleotide
uaucccuaaagagcgcggc

SEQ ID NO: 531809 - RNA, 19 nt, Artificial Sequence
  Description of Artificial Sequence: Synthetic oligonucleotide
gucuauggugcuguucugg

SEQ ID NO: 531810 - RNA, 19 nt, Artificial Sequence
  Description of Artificial Sequence: Synthetic oligonucleotide
uccauuuguccaucgucac

SEQ ID NO: 531811 - RNA, 19 nt, Artificial Sequence
  Description of Artificial Sequence: Synthetic oligonucleotide
aacaucccagcuguccgag

SEQ ID NO: 531812 - RNA, 19 nt, Artificial Sequence
  Description of Artificial Sequence: Synthetic oligonucleotide
cuuggcugacacugcacag

SEQ ID NO: 531813 - RNA, 19 nt, Artificial Sequence
  Description of Artificial Sequence: Synthetic oligonucleotide
acugagagucaagacagga

SEQ ID NO: 531814 - RNA, 19 nt, Artificial Sequence
  Description of Artificial Sequence: Synthetic oligonucleotide
ggaacuuagcauucccacc

SEQ ID NO: 531815 - RNA, 19 nt, Artificial Sequence
  Description of Artificial Sequence: Synthetic oligonucleotide
uuaaggagacagagaccca

SEQ ID NO: 531816 - RNA, 19 nt, Artificial Sequence
  Description of Artificial Sequence: Synthetic oligonucleotide
ccaccuuaucccuaaagag

SEQ ID NO: 531817 - RNA, 19 nt, Artificial Sequence
  Description of Artificial Sequence: Synthetic oligonucleotide
cucggaacuuagcauuccc

SEQ ID NO: 531818 - RNA, 19 nt, Artificial Sequence
  Description of Artificial Sequence: Synthetic oligonucleotide
acaccaacaggugcucuac

SEQ ID NO: 531819 - RNA, 19 nt, Artificial Sequence
  Description of Artificial Sequence: Synthetic oligonucleotide
aguucugugcaggcgauga

SEQ ID NO: 531820 - RNA, 19 nt, Artificial Sequence
  Description of Artificial Sequence: Synthetic oligonucleotide
aguagugacaucacgccau

SEQ ID NO: 531821 - RNA, 19 nt, Artificial Sequence
  Description of Artificial Sequence: Synthetic oligonucleotide
acaaaguccacaggguggu

SEQ ID NO: 531822 - RNA, 19 nt, Artificial Sequence
  Description of Artificial Sequence: Synthetic oligonucleotide
augaaacugagggcuggac

SEQ ID NO: 531823 - RNA, 19 nt, Artificial Sequence
  Description of Artificial Sequence: Synthetic oligonucleotide
guuuccaaacccuacguau

SEQ ID NO: 531824 - RNA, 19 nt, Artificial Sequence
  Description of Artificial Sequence: Synthetic oligonucleotide
auagcacaugggucucaac

SEQ ID NO: 531825 - RNA, 19 nt, Artificial Sequence
  Description of Artificial Sequence: Synthetic oligonucleotide
caacugagagaccccacug

SEQ ID NO: 531826 - RNA, 19 nt, Artificial Sequence
  Description of Artificial Sequence: Synthetic oligonucleotide
guccccugaggccuaagag

SEQ ID NO: 531827 - RNA, 19 nt, Artificial Sequence
  Description of Artificial Sequence: Synthetic oligonucleotide
agcugcaugcugaggagac

SEQ ID NO: 531828 - RNA, 19 nt, Artificial Sequence
  Description of Artificial Sequence: Synthetic oligonucleotide
cucgauguccuuccauuug

SEQ ID NO: 531829 - RNA, 19 nt, Artificial Sequence
  Description of Artificial Sequence: Synthetic oligonucleotide
ccugaacugucguagacac

SEQ ID NO: 531830 - RNA, 19 nt, Artificial Sequence
  Description of Artificial Sequence: Synthetic oligonucleotide
ugagcgcacaaagcugagg

SEQ ID NO: 531831 - RNA, 19 nt, Artificial Sequence
  Description of Artificial Sequence: Synthetic oligonucleotide
acugagcgcacaaagcuga

SEQ ID NO: 531832 - RNA, 19 nt, Artificial Sequence
  Description of Artificial Sequence: Synthetic oligonucleotide
uaaagagcgcggcggcucu

SEQ ID NO: 531833 - RNA, 19 nt, Artificial Sequence
  Description of Artificial Sequence: Synthetic oligonucleotide
acuggacacaucaucaaaa

SEQ ID NO: 531834 - RNA, 19 nt, Artificial Sequence
  Description of Artificial Sequence: Synthetic oligonucleotide
cacugagcgcacaaagcug

SEQ ID NO: 531835 - RNA, 19 nt, Artificial Sequence
  Description of Artificial Sequence: Synthetic oligonucleotide
ccagccuuaagacuccagg

SEQ ID NO: 531836 - RNA, 19 nt, Artificial Sequence
  Description of Artificial Sequence: Synthetic oligonucleotide
uguccccugaggccuaaga

SEQ ID NO: 531837 - RNA, 19 nt, Artificial Sequence
  Description of Artificial Sequence: Synthetic oligonucleotide
ggauccaaauuuuguagca

SEQ ID NO: 531838 - RNA, 19 nt, Artificial Sequence
  Description of Artificial Sequence: Synthetic oligonucleotide
accgacucaaguccugccu

SEQ ID NO: 531839 - RNA, 19 nt, Artificial Sequence
  Description of Artificial Sequence: Synthetic oligonucleotide
aagccaccccacaccaggc

SEQ ID NO: 531840 - RNA, 19 nt, Artificial Sequence
  Description of Artificial Sequence: Synthetic oligonucleotide
ugauaggaacccaggucau

SEQ ID NO: 531841 - RNA, 19 nt, Artificial Sequence
  Description of Artificial Sequence: Synthetic oligonucleotide
accuucugccaaaguagcc

SEQ ID NO: 531842 - RNA, 19 nt, Artificial Sequence
  Description of Artificial Sequence: Synthetic oligonucleotide
acagggacgacauggcauu

SEQ ID NO: 531843 - RNA, 19 nt, Artificial Sequence
  Description of Artificial Sequence: Synthetic oligonucleotide
ucuucacacgaaagaggaa

SEQ ID NO: 531844 - RNA, 19 nt, Artificial Sequence
  Description of Artificial Sequence: Synthetic oligonucleotide
uccaggcauuuucuucaag

SEQ ID NO: 531845 - RNA, 19 nt, Artificial Sequence
  Description of Artificial Sequence: Synthetic oligonucleotide
gucacugagcgcacaaagc

SEQ ID NO: 531846 - RNA, 19 nt, Artificial Sequence
  Description of Artificial Sequence: Synthetic oligonucleotide
uuuccccgaaaagaaagua

SEQ ID NO: 531847 - RNA, 19 nt, Artificial Sequence
  Description of Artificial Sequence: Synthetic oligonucleotide
gcaugcugaggagacaugg

SEQ ID NO: 531848 - RNA, 19 nt, Artificial Sequence
  Description of Artificial Sequence: Synthetic oligonucleotide
aagaggccgauggaugaca

SEQ ID NO: 531849 - RNA, 19 nt, Artificial Sequence
  Description of Artificial Sequence: Synthetic oligonucleotide
agaaggccugaacugucgu

SEQ ID NO: 531850 - RNA, 19 nt, Artificial Sequence
  Description of Artificial Sequence: Synthetic oligonucleotide
aggcuugagaacauucuca

SEQ ID NO: 531851 - RNA, 19 nt, Artificial Sequence
  Description of Artificial Sequence: Synthetic oligonucleotide
agcucgauguccuuccauu

SEQ ID NO: 531852 - RNA, 19 nt, Artificial Sequence
  Description of Artificial Sequence: Synthetic oligonucleotide
uggcuuggcugacacugca

SEQ ID NO: 531853 - RNA, 19 nt, Artificial Sequence
  Description of Artificial Sequence: Synthetic oligonucleotide
acaggacguggacuuaggu

SEQ ID NO: 531854 - RNA, 19 nt, Artificial Sequence
  Description of Artificial Sequence: Synthetic oligonucleotide
ugacaucacgccaucccuu

SEQ ID NO: 531855 - RNA, 19 nt, Artificial Sequence
  Description of Artificial Sequence: Synthetic oligonucleotide
cugcacaggacugcagucc

SEQ ID NO: 531856 - RNA, 19 nt, Artificial Sequence
  Description of Artificial Sequence: Synthetic oligonucleotide
cucucggaacuuagcauuc

SEQ ID NO: 531857 - RNA, 19 nt, Artificial Sequence
  Description of Artificial Sequence: Synthetic oligonucleotide
uuaggcucauaguccuccu

SEQ ID NO: 531858 - RNA, 19 nt, Artificial Sequence
  Description of Artificial Sequence: Synthetic oligonucleotide
uccucuguuuuccccgaaa

SEQ ID NO: 531859 - RNA, 19 nt, Artificial Sequence
  Description of Artificial Sequence: Synthetic oligonucleotide
aggacgucgguggcagugc

SEQ ID NO: 531860 - RNA, 19 nt, Artificial Sequence
  Description of Artificial Sequence: Synthetic oligonucleotide
cccaucaagaugcccaacc

SEQ ID NO: 531861 - RNA, 19 nt, Artificial Sequence
  Description of Artificial Sequence: Synthetic oligonucleotide
agaggaacaagaggguaaa

SEQ ID NO: 531862 - RNA, 19 nt, Artificial Sequence
  Description of Artificial Sequence: Synthetic oligonucleotide
agcgcacaaagcugaggug

SEQ ID NO: 531863 - RNA, 19 nt, Artificial Sequence
  Description of Artificial Sequence: Synthetic oligonucleotide
aucuguggagguucuccca

SEQ ID NO: 531864 - RNA, 19 nt, Artificial Sequence
  Description of Artificial Sequence: Synthetic oligonucleotide
ucucggaacuuagcauucc

SEQ ID NO: 531865 - RNA, 19 nt, Artificial Sequence
  Description of Artificial Sequence: Synthetic oligonucleotide
accuuggaugccaacugag

SEQ ID NO: 531866 - RNA, 19 nt, Artificial Sequence
  Description of Artificial Sequence: Synthetic oligonucleotide
acgucgguggcagugcaag

SEQ ID NO: 531867 - RNA, 19 nt, Artificial Sequence
  Description of Artificial Sequence: Synthetic oligonucleotide
ucuuuacucuuuccucauu

SEQ ID NO: 531868 - RNA, 19 nt, Artificial Sequence
  Description of Artificial Sequence: Synthetic oligonucleotide
ucgguggcagugcaagcuc

SEQ ID NO: 531869 - RNA, 19 nt, Artificial Sequence
  Description of Artificial Sequence: Synthetic oligonucleotide
ugacuccagagaccacucu

SEQ ID NO: 531870 - RNA, 19 nt, Artificial Sequence
  Description of Artificial Sequence: Synthetic oligonucleotide
guuggaugcggaaccugag

SEQ ID NO: 531871 - RNA, 19 nt, Artificial Sequence
  Description of Artificial Sequence: Synthetic oligonucleotide
cuuguuguuggaugcggaa

SEQ ID NO: 531872 - RNA, 19 nt, Artificial Sequence
  Description of Artificial Sequence: Synthetic oligonucleotide
ucaagacaggaguggguuu

SEQ ID NO: 531873 - RNA, 19 nt, Artificial Sequence
  Description of Artificial Sequence: Synthetic oligonucleotide
cuaaagagcgcggcggcuc

SEQ ID NO: 531874 - RNA, 19 nt, Artificial Sequence
  Description of Artificial Sequence: Synthetic oligonucleotide
ugucgccagaggcagucau

SEQ ID NO: 531875 - RNA, 19 nt, Artificial Sequence
  Description of Artificial Sequence: Synthetic oligonucleotide
gcagaucuggggccaaggg

SEQ ID NO: 531876 - RNA, 19 nt, Artificial Sequence
  Description of Artificial Sequence: Synthetic oligonucleotide
aggaacucucggaacuuag

SEQ ID NO: 531877 - RNA, 19 nt, Artificial Sequence
  Description of Artificial Sequence: Synthetic oligonucleotide
gugaggacgucgguggcag

SEQ ID NO: 531878 - RNA, 19 nt, Artificial Sequence
  Description of Artificial Sequence: Synthetic oligonucleotide
ucucuaccuucugccaaag

SEQ ID NO: 531879 - RNA, 19 nt, Artificial Sequence
  Description of Artificial Sequence: Synthetic oligonucleotide
cuugucgccagaggcaguc

SEQ ID NO: 531880 - RNA, 19 nt, Artificial Sequence
  Description of Artificial Sequence: Synthetic oligonucleotide
ccaaggggcagcaaggcuc

SEQ ID NO: 531881 - RNA, 19 nt, Artificial Sequence
  Description of Artificial Sequence: Synthetic oligonucleotide
uuguuggaugcggaaccug

SEQ ID NO: 531882 - RNA, 19 nt, Artificial Sequence
  Description of Artificial Sequence: Synthetic oligonucleotide
ggguaaagugcaaagugca

SEQ ID NO: 531883 - RNA, 19 nt, Artificial Sequence
  Description of Artificial Sequence: Synthetic oligonucleotide
aguggccguagauggggug

SEQ ID NO: 531884 - RNA, 19 nt, Artificial Sequence
  Description of Artificial Sequence: Synthetic oligonucleotide
agacauggccaagugugcu

SEQ ID NO: 531885 - RNA, 19 nt, Artificial Sequence
  Description of Artificial Sequence: Synthetic oligonucleotide
ccaucaagaugcccaaccc

SEQ ID NO: 531886 - RNA, 19 nt, Artificial Sequence
  Description of Artificial Sequence: Synthetic oligonucleotide
ggggcaguuggccccauag

SEQ ID NO: 531887 - RNA, 19 nt, Artificial Sequence
  Description of Artificial Sequence: Synthetic oligonucleotide
cacugcuuggggacuuggc

SEQ ID NO: 531888 - RNA, 19 nt, Artificial Sequence
  Description of Artificial Sequence: Synthetic oligonucleotide
cuccaguauugcuuuuguc

SEQ ID NO: 531889 - RNA, 19 nt, Artificial Sequence
  Description of Artificial Sequence: Synthetic oligonucleotide
aucccagcuguccgagcuc

SEQ ID NO: 531890 - RNA, 19 nt, Artificial Sequence
  Description of Artificial Sequence: Synthetic oligonucleotide
gcucuaccuagauggaggc

SEQ ID NO: 531891 - RNA, 19 nt, Artificial Sequence
  Description of Artificial Sequence: Synthetic oligonucleotide
acguaucgauucuccugag

SEQ ID NO: 531892 - RNA, 19 nt, Artificial Sequence
  Description of Artificial Sequence: Synthetic oligonucleotide
ucugacccugagcacccuc

SEQ ID NO: 531893 - RNA, 19 nt, Artificial Sequence
  Description of Artificial Sequence: Synthetic oligonucleotide
ccgauggaugacauguccc

SEQ ID NO: 531894 - RNA, 19 nt, Artificial Sequence
  Description of Artificial Sequence: Synthetic oligonucleotide
caguuggccccauagccca

SEQ ID NO: 531895 - RNA, 19 nt, Artificial Sequence
  Description of Artificial Sequence: Synthetic oligonucleotide
augccaacugagagacccc

SEQ ID NO: 531896 - RNA, 19 nt, Artificial Sequence
  Description of Artificial Sequence: Synthetic oligonucleotide
acaugggucucaacugcag

SEQ ID NO: 531897 - RNA, 19 nt, Artificial Sequence
  Description of Artificial Sequence: Synthetic oligonucleotide
uccaaacccuacguaucga

SEQ ID NO: 531898 - RNA, 19 nt, Artificial Sequence
  Description of Artificial Sequence: Synthetic oligonucleotide
aucgucacugagcgcacaa

SEQ ID NO: 531899 - RNA, 19 nt, Artificial Sequence
  Description of Artificial Sequence: Synthetic oligonucleotide
ccaaacaucccagcugucc

SEQ ID NO: 531900 - RNA, 19 nt, Artificial Sequence
  Description of Artificial Sequence: Synthetic oligonucleotide
cagcccgaguacagggacg

SEQ ID NO: 531901 - RNA, 19 nt, Artificial Sequence
  Description of Artificial Sequence: Synthetic oligonucleotide
guagugacaucacgccauc

SEQ ID NO: 531902 - RNA, 19 nt, Artificial Sequence
  Description of Artificial Sequence: Synthetic oligonucleotide
gacguggacuuaggugagg

SEQ ID NO: 531903 - RNA, 19 nt, Artificial Sequence
  Description of Artificial Sequence: Synthetic oligonucleotide
gcaggcgaugacuccagag

SEQ ID NO: 531904 - RNA, 19 nt, Artificial Sequence
  Description of Artificial Sequence: Synthetic oligonucleotide
gucuaucugaaguguccuc

SEQ ID NO: 531905 - RNA, 19 nt, Artificial Sequence
  Description of Artificial Sequence: Synthetic oligonucleotide
guacagggacgacauggca

SEQ ID NO: 531906 - RNA, 19 nt, Artificial Sequence
  Description of Artificial Sequence: Synthetic oligonucleotide
gucggugggcaguggacug

SEQ ID NO: 531907 - RNA, 19 nt, Artificial Sequence
  Description of Artificial Sequence: Synthetic oligonucleotide
uagugacaucacgccaucc

SEQ ID NO: 531908 - RNA, 19 nt, Artificial Sequence
  Description of Artificial Sequence: Synthetic oligonucleotide
uccuaccaguucugguugu

SEQ ID NO: 531909 - RNA, 19 nt, Artificial Sequence
  Description of Artificial Sequence: Synthetic oligonucleotide
gaacuagagcaaaccuuuc

SEQ ID NO: 531910 - RNA, 19 nt, Artificial Sequence
  Description of Artificial Sequence: Synthetic oligonucleotide
agacagagacccagcuggg

SEQ ID NO: 531911 - RNA, 19 nt, Artificial Sequence
  Description of Artificial Sequence: Synthetic oligonucleotide
uucugggaguugucuccgc

SEQ ID NO: 531912 - RNA, 19 nt, Artificial Sequence
  Description of Artificial Sequence: Synthetic oligonucleotide
gauagcacaugggucucaa

SEQ ID NO: 531913 - RNA, 19 nt, Artificial Sequence
  Description of Artificial Sequence: Synthetic oligonucleotide
ugauagcacaugggucuca

SEQ ID NO: 531914 - RNA, 19 nt, Artificial Sequence
  Description of Artificial Sequence: Synthetic oligonucleotide
cuuuacucuuuccucauuu

SEQ ID NO: 531915 - RNA, 19 nt, Artificial Sequence
  Description of Artificial Sequence: Synthetic oligonucleotide
ugcauagguccagcuguca

SEQ ID NO: 531916 - RNA, 19 nt, Artificial Sequence
  Description of Artificial Sequence: Synthetic oligonucleotide
gaggccgauggaugacaug

SEQ ID NO: 531917 - RNA, 19 nt, Artificial Sequence
  Description of Artificial Sequence: Synthetic oligonucleotide
cugagcgcacaaagcugag

SEQ ID NO: 531918 - RNA, 19 nt, Artificial Sequence
  Description of Artificial Sequence: Synthetic oligonucleotide
agucaagacaggagugggu

SEQ ID NO: 531919 - RNA, 19 nt, Artificial Sequence
  Description of Artificial Sequence: Synthetic oligonucleotide
agacccagcugggcucucc

SEQ ID NO: 531920 - RNA, 19 nt, Artificial Sequence
  Description of Artificial Sequence: Synthetic oligonucleotide
gaaaacacucccagccucu

SEQ ID NO: 531921 - RNA, 19 nt, Artificial Sequence
  Description of Artificial Sequence: Synthetic oligonucleotide
ucgccccagugguaaaacu

SEQ ID NO: 531922 - RNA, 19 nt, Artificial Sequence
  Description of Artificial Sequence: Synthetic oligonucleotide
cucgaagggucuaucugaa

SEQ ID NO: 531923 - RNA, 19 nt, Artificial Sequence
  Description of Artificial Sequence: Synthetic oligonucleotide
acccuacguaucgauucuc

SEQ ID NO: 531924 - RNA, 19 nt, Artificial Sequence
  Description of Artificial Sequence: Synthetic oligonucleotide
gugacaucacgccaucccu

SEQ ID NO: 531925 - RNA, 19 nt, Artificial Sequence
  Description of Artificial Sequence: Synthetic oligonucleotide
cccuacguaucgauucucc

SEQ ID NO: 531926 - RNA, 19 nt, Artificial Sequence
  Description of Artificial Sequence: Synthetic oligonucleotide
ggaacucucggaacuuagc

SEQ ID NO: 531927 - RNA, 19 nt, Artificial Sequence
  Description of Artificial Sequence: Synthetic oligonucleotide
agggucggugggcagugga

SEQ ID NO: 531928 - RNA, 19 nt, Artificial Sequence
  Description of Artificial Sequence: Synthetic oligonucleotide
ugcccaacccuggcagggg

SEQ ID NO: 531929 - RNA, 19 nt, Artificial Sequence
  Description of Artificial Sequence: Synthetic oligonucleotide
cugacccugagcacccuca

SEQ ID NO: 531930 - RNA, 19 nt, Artificial Sequence
  Description of Artificial Sequence: Synthetic oligonucleotide
gcauagguccagcugucac

SEQ ID NO: 531931 - RNA, 19 nt, Artificial Sequence
  Description of Artificial Sequence: Synthetic oligonucleotide
agcccgaguacagggacga

SEQ ID NO: 531932 - RNA, 19 nt, Artificial Sequence
  Description of Artificial Sequence: Synthetic oligonucleotide
caucaagaugcccaacccu

SEQ ID NO: 531933 - RNA, 19 nt, Artificial Sequence
  Description of Artificial Sequence: Synthetic oligonucleotide
gaccaguuaggcucauagu

SEQ ID NO: 531934 - RNA, 19 nt, Artificial Sequence
  Description of Artificial Sequence: Synthetic oligonucleotide
caagaggccgauggaugac

SEQ ID NO: 531935 - RNA, 19 nt, Artificial Sequence
  Description of Artificial Sequence: Synthetic oligonucleotide
agcacccucagcaggcuga

SEQ ID NO: 531936 - RNA, 19 nt, Artificial Sequence
  Description of Artificial Sequence: Synthetic oligonucleotide
caaccacugauagcacaug

SEQ ID NO: 531937 - RNA, 19 nt, Artificial Sequence
  Description of Artificial Sequence: Synthetic oligonucleotide
ccccgaaaagaaaguagug

SEQ ID NO: 531938 - RNA, 19 nt, Artificial Sequence
  Description of Artificial Sequence: Synthetic oligonucleotide
agagggucggugggcagug

SEQ ID NO: 531939 - RNA, 19 nt, Artificial Sequence
  Description of Artificial Sequence: Synthetic oligonucleotide
ugacuugcuugggauccaa

SEQ ID NO: 531940 - RNA, 19 nt, Artificial Sequence
  Description of Artificial Sequence: Synthetic oligonucleotide
ggucucccagaagcuaugg

SEQ ID NO: 531941 - RNA, 19 nt, Artificial Sequence
  Description of Artificial Sequence: Synthetic oligonucleotide
aaagagcgcggcggcucug

SEQ ID NO: 531942 - RNA, 19 nt, Artificial Sequence
  Description of Artificial Sequence: Synthetic oligonucleotide
caacuccgaagccuucuga

SEQ ID NO: 531943 - RNA, 19 nt, Artificial Sequence
  Description of Artificial Sequence: Synthetic oligonucleotide
agagaccccacuggacaca

SEQ ID NO: 531944 - RNA, 19 nt, Artificial Sequence
  Description of Artificial Sequence: Synthetic oligonucleotide
ccuuaucccuaaagagcgc

SEQ ID NO: 531945 - RNA, 19 nt, Artificial Sequence
  Description of Artificial Sequence: Synthetic oligonucleotide
uaccuagauggaggcuccc

SEQ ID NO: 531946 - RNA, 19 nt, Artificial Sequence
  Description of Artificial Sequence: Synthetic oligonucleotide
ggcagucauauucuguggu

SEQ ID NO: 531947 - RNA, 19 nt, Artificial Sequence
  Description of Artificial Sequence: Synthetic oligonucleotide
agggacgacauggcauugu

SEQ ID NO: 531948 - RNA, 19 nt, Artificial Sequence
  Description of Artificial Sequence: Synthetic oligonucleotide
cucgccccagugguaaaac

SEQ ID NO: 531949 - RNA, 19 nt, Artificial Sequence
  Description of Artificial Sequence: Synthetic oligonucleotide
gucaagacaggaguggguu

SEQ ID NO: 531950 - RNA, 19 nt, Artificial Sequence
  Description of Artificial Sequence: Synthetic oligonucleotide
ggccugaacugucguagac

SEQ ID NO: 531951 - RNA, 19 nt, Artificial Sequence
  Description of Artificial Sequence: Synthetic oligonucleotide
gacccagcugggcucucca

SEQ ID NO: 531952 - RNA, 19 nt, Artificial Sequence
  Description of Artificial Sequence: Synthetic oligonucleotide
ggcgaugacuccagagacc

SEQ ID NO: 531953 - RNA, 19 nt, Artificial Sequence
  Description of Artificial Sequence: Synthetic oligonucleotide
ucgucacugagcgcacaaa

SEQ ID NO: 531954 - RNA, 19 nt, Artificial Sequence
  Description of Artificial Sequence: Synthetic oligonucleotide
gagcgcggcggcucugcug

SEQ ID NO: 531955 - RNA, 19 nt, Artificial Sequence
  Description of Artificial Sequence: Synthetic oligonucleotide
ccaagaggccgauggauga

SEQ ID NO: 531956 - RNA, 19 nt, Artificial Sequence
  Description of Artificial Sequence: Synthetic oligonucleotide
cccucgaagggucuaucug

SEQ ID NO: 531957 - RNA, 19 nt, Artificial Sequence
  Description of Artificial Sequence: Synthetic oligonucleotide
ccgacucaaguccugccug

SEQ ID NO: 531958 - RNA, 19 nt, Artificial Sequence
  Description of Artificial Sequence: Synthetic oligonucleotide
cccaagcugccaugugugg

SEQ ID NO: 531959 - RNA, 19 nt, Artificial Sequence
  Description of Artificial Sequence: Synthetic oligonucleotide
cugcuguuuugguagcugu

SEQ ID NO: 531960 - RNA, 19 nt, Artificial Sequence
  Description of Artificial Sequence: Synthetic oligonucleotide
aguuggccccauagcccac

SEQ ID NO: 531961 - RNA, 19 nt, Artificial Sequence
  Description of Artificial Sequence: Synthetic oligonucleotide
acaagaggguaaagugcaa

SEQ ID NO: 531962 - RNA, 19 nt, Artificial Sequence
  Description of Artificial Sequence: Synthetic oligonucleotide
cccuaaagagcgcggcggc

SEQ ID NO: 531963 - RNA, 19 nt, Artificial Sequence
  Description of Artificial Sequence: Synthetic oligonucleotide
cguaucgauucuccugagc

SEQ ID NO: 531964 - RNA, 19 nt, Artificial Sequence
  Description of Artificial Sequence: Synthetic oligonucleotide
ccagaagcuauggucuaug

SEQ ID NO: 531965 - RNA, 19 nt, Artificial Sequence
  Description of Artificial Sequence: Synthetic oligonucleotide
caugggucucaacugcagu

SEQ ID NO: 531966 - RNA, 19 nt, Artificial Sequence
  Description of Artificial Sequence: Synthetic oligonucleotide
gcaccccaagcccacggug

SEQ ID NO: 531967 - RNA, 19 nt, Artificial Sequence
  Description of Artificial Sequence: Synthetic oligonucleotide
ggacgacauggcauuguug

SEQ ID NO: 531968 - RNA, 19 nt, Artificial Sequence
  Description of Artificial Sequence: Synthetic oligonucleotide
cuccgaagccuucugacuu

SEQ ID NO: 531969 - RNA, 19 nt, Artificial Sequence
  Description of Artificial Sequence: Synthetic oligonucleotide
uugucgccagaggcaguca

SEQ ID NO: 531970 - RNA, 19 nt, Artificial Sequence
  Description of Artificial Sequence: Synthetic oligonucleotide
gucgguggcagugcaagcu

SEQ ID NO: 531971 - RNA, 19 nt, Artificial Sequence
  Description of Artificial Sequence: Synthetic oligonucleotide
ggacguggacuuaggugag

SEQ ID NO: 531972 - RNA, 19 nt, Artificial Sequence
  Description of Artificial Sequence: Synthetic oligonucleotide
guccaucgucacugagcgc

SEQ ID NO: 531973 - RNA, 19 nt, Artificial Sequence
  Description of Artificial Sequence: Synthetic oligonucleotide
aaguccugccugagccacu

SEQ ID NO: 531974 - RNA, 19 nt, Artificial Sequence
  Description of Artificial Sequence: Synthetic oligonucleotide
agaggccgauggaugacau

SEQ ID NO: 531975 - RNA, 19 nt, Artificial Sequence
  Description of Artificial Sequence: Synthetic oligonucleotide
ccaguauugcuuuugucau

SEQ ID NO: 531976 - RNA, 19 nt, Artificial Sequence
  Description of Artificial Sequence: Synthetic oligonucleotide
aguagccaccuuaucccua

SEQ ID NO: 531977 - RNA, 19 nt, Artificial Sequence
  Description of Artificial Sequence: Synthetic oligonucleotide
ggccuaagagaaagccacc

SEQ ID NO: 531978 - RNA, 19 nt, Artificial Sequence
  Description of Artificial Sequence: Synthetic oligonucleotide
caaacccuacguaucgauu

SEQ ID NO: 531979 - RNA, 19 nt, Artificial Sequence
  Description of Artificial Sequence: Synthetic oligonucleotide
gccuuaagacuccaggcau

SEQ ID NO: 531980 - RNA, 19 nt, Artificial Sequence
  Description of Artificial Sequence: Synthetic oligonucleotide
uagaugggguggccuucuu

SEQ ID NO: 531981 - RNA, 19 nt, Artificial Sequence
  Description of Artificial Sequence: Synthetic oligonucleotide
ccacugauagcacaugggu

SEQ ID NO: 531982 - RNA, 19 nt, Artificial Sequence
  Description of Artificial Sequence: Synthetic oligonucleotide
ggucucaacugcaguguuc

SEQ ID NO: 531983 - RNA, 19 nt, Artificial Sequence
  Description of Artificial Sequence: Synthetic oligonucleotide
ggugcuguucugggaguug

SEQ ID NO: 531984 - RNA, 19 nt, Artificial Sequence
  Description of Artificial Sequence: Synthetic oligonucleotide
gccugaacugucguagaca

SEQ ID NO: 531985 - RNA, 19 nt, Artificial Sequence
  Description of Artificial Sequence: Synthetic oligonucleotide
caagcucgauguccuucca

SEQ ID NO: 531986 - RNA, 19 nt, Artificial Sequence
  Description of Artificial Sequence: Synthetic oligonucleotide
guggagguucucccaugaa

SEQ ID NO: 531987 - RNA, 19 nt, Artificial Sequence
  Description of Artificial Sequence: Synthetic oligonucleotide
agagcgcggcggcucugcu

SEQ ID NO: 531988 - RNA, 19 nt, Artificial Sequence
  Description of Artificial Sequence: Synthetic oligonucleotide
caguucugugcaggcgaug

SEQ ID NO: 531989 - RNA, 19 nt, Artificial Sequence
  Description of Artificial Sequence: Synthetic oligonucleotide
aggucaucauucagccaau

SEQ ID NO: 531990 - RNA, 19 nt, Artificial Sequence
  Description of Artificial Sequence: Synthetic oligonucleotide
gacuugcuugggauccaaa

SEQ ID NO: 531991 - RNA, 19 nt, Artificial Sequence
  Description of Artificial Sequence: Synthetic oligonucleotide
cggaaccugagccccaaac

SEQ ID NO: 531992 - RNA, 19 nt, Artificial Sequence
  Description of Artificial Sequence: Synthetic oligonucleotide
caaaagccuugucgccaga

SEQ ID NO: 531993 - RNA, 19 nt, Artificial Sequence
  Description of Artificial Sequence: Synthetic oligonucleotide
cagcagaucuggggccaag

SEQ ID NO: 531994 - RNA, 19 nt, Artificial Sequence
  Description of Artificial Sequence: Synthetic oligonucleotide
acgccaucccuugcugcca

SEQ ID NO: 531995 - RNA, 19 nt, Artificial Sequence
  Description of Artificial Sequence: Synthetic oligonucleotide
ggugcucuaccuagaugga

SEQ ID NO: 531996 - RNA, 19 nt, Artificial Sequence
  Description of Artificial Sequence: Synthetic oligonucleotide
ggcugucacaacaaccacu

SEQ ID NO: 531997 - RNA, 19 nt, Artificial Sequence
  Description of Artificial Sequence: Synthetic oligonucleotide
cuugcucgccccaguggua

SEQ ID NO: 531998 - RNA, 19 nt, Artificial Sequence
  Description of Artificial Sequence: Synthetic oligonucleotide
ggaggcuccccaucaagau

SEQ ID NO: 531999 - RNA, 19 nt, Artificial Sequence
  Description of Artificial Sequence: Synthetic oligonucleotide
guagaugggguggccuucu

SEQ ID NO: 532000 - RNA, 19 nt, Artificial Sequence
  Description of Artificial Sequence: Synthetic oligonucleotide
gccauguguggccaucugu

SEQ ID NO: 532001 - RNA, 19 nt, Artificial Sequence
  Description of Artificial Sequence: Synthetic oligonucleotide
agcugccauguguggccau

SEQ ID NO: 532002 - RNA, 19 nt, Artificial Sequence
  Description of Artificial Sequence: Synthetic oligonucleotide
ggacgucgguggcagugca

SEQ ID NO: 532003 - RNA, 19 nt, Artificial Sequence
  Description of Artificial Sequence: Synthetic oligonucleotide
ccaacugagagaccccacu

SEQ ID NO: 532004 - RNA, 19 nt, Artificial Sequence
  Description of Artificial Sequence: Synthetic oligonucleotide
ggcuuggcugacacugcac

SEQ ID NO: 532005 - RNA, 19 nt, Artificial Sequence
  Description of Artificial Sequence: Synthetic oligonucleotide
gacgucgguggcagugcaa

SEQ ID NO: 532006 - RNA, 19 nt, Artificial Sequence
  Description of Artificial Sequence: Synthetic oligonucleotide
cgauguccuuccauuuguc

SEQ ID NO: 532007 - RNA, 19 nt, Artificial Sequence
  Description of Artificial Sequence: Synthetic oligonucleotide
cugcuccagcccgaguaca

SEQ ID NO: 532008 - RNA, 19 nt, Artificial Sequence
  Description of Artificial Sequence: Synthetic oligonucleotide
ccuacguaucgauucuccu

SEQ ID NO: 532009 - RNA, 19 nt, Artificial Sequence
  Description of Artificial Sequence: Synthetic oligonucleotide
auguccccugaggccuaag

SEQ ID NO: 532010 - RNA, 19 nt, Artificial Sequence
  Description of Artificial Sequence: Synthetic oligonucleotide
ggccacaggacguggacuu

SEQ ID NO: 532011 - RNA, 19 nt, Artificial Sequence
  Description of Artificial Sequence: Synthetic oligonucleotide
cccgaguacagggacgaca

SEQ ID NO: 532012 - RNA, 19 nt, Artificial Sequence
  Description of Artificial Sequence: Synthetic oligonucleotide
gcacaaagcugaggugcac

SEQ ID NO: 532013 - RNA, 19 nt, Artificial Sequence
  Description of Artificial Sequence: Synthetic oligonucleotide
ccgaguacagggacgacau

SEQ ID NO: 532014 - RNA, 19 nt, Artificial Sequence
  Description of Artificial Sequence: Synthetic oligonucleotide
cccgaaggucucccagaag

SEQ ID NO: 532015 - RNA, 19 nt, Artificial Sequence
  Description of Artificial Sequence: Synthetic oligonucleotide
gggucggugggcaguggac

SEQ ID NO: 532016 - RNA, 19 nt, Artificial Sequence
  Description of Artificial Sequence: Synthetic oligonucleotide
ggacuuaggugaggacguc

SEQ ID NO: 532017 - RNA, 19 nt, Artificial Sequence
  Description of Artificial Sequence: Synthetic oligonucleotide
gaacugucguagacacaau

SEQ ID NO: 532018 - RNA, 19 nt, Artificial Sequence
  Description of Artificial Sequence: Synthetic oligonucleotide
augcggaaccugagcccca

SEQ ID NO: 532019 - RNA, 19 nt, Artificial Sequence
  Description of Artificial Sequence: Synthetic oligonucleotide
ccaaacccuacguaucgau

SEQ ID NO: 532020 - RNA, 19 nt, Artificial Sequence
  Description of Artificial Sequence: Synthetic oligonucleotide
ggucggugggcaguggacu

SEQ ID NO: 532021 - RNA, 19 nt, Artificial Sequence
  Description of Artificial Sequence: Synthetic oligonucleotide
ccaagugugcucugacccu

SEQ ID NO: 532022 - RNA, 19 nt, Artificial Sequence
  Description of Artificial Sequence: Synthetic oligonucleotide
gcaguggacugcagcaucu

SEQ ID NO: 532023 - RNA, 19 nt, Artificial Sequence
  Description of Artificial Sequence: Synthetic oligonucleotide
gcucgauguccuuccauuu

SEQ ID NO: 532024 - RNA, 19 nt, Artificial Sequence
  Description of Artificial Sequence: Synthetic oligonucleotide
ggccgauggaugacauguc

SEQ ID NO: 532025 - RNA, 19 nt, Artificial Sequence
  Description of Artificial Sequence: Synthetic oligonucleotide
cucuaccuagauggaggcu

SEQ ID NO: 532026 - RNA, 19 nt, Artificial Sequence
  Description of Artificial Sequence: Synthetic oligonucleotide
aggggcaguuggccccaua

SEQ ID NO: 532027 - RNA, 19 nt, Artificial Sequence
  Description of Artificial Sequence: Synthetic oligonucleotide
cacccuccauguucaggcu

SEQ ID NO: 532028 - RNA, 19 nt, Artificial Sequence
  Description of Artificial Sequence: Synthetic oligonucleotide
gguguccagggaggggcca

SEQ ID NO: 532029 - RNA, 19 nt, Artificial Sequence
  Description of Artificial Sequence: Synthetic oligonucleotide
cgacucaaguccugccuga

SEQ ID NO: 532030 - RNA, 19 nt, Artificial Sequence
  Description of Artificial Sequence: Synthetic oligonucleotide
ccuuaagacuccaggcauu

SEQ ID NO: 532031 - RNA, 19 nt, Artificial Sequence
  Description of Artificial Sequence: Synthetic oligonucleotide
ggaagucgucuucucucuu

SEQ ID NO: 532032 - RNA, 19 nt, Artificial Sequence
  Description of Artificial Sequence: Synthetic oligonucleotide
cgaguacagggacgacaug

SEQ ID NO: 532033 - RNA, 19 nt, Artificial Sequence
  Description of Artificial Sequence: Synthetic oligonucleotide
gggaguugucuccgcugcu

SEQ ID NO: 532034 - RNA, 19 nt, Artificial Sequence
  Description of Artificial Sequence: Synthetic oligonucleotide
guggccaucuguggagguu

SEQ ID NO: 532035 - RNA, 19 nt, Artificial Sequence
  Description of Artificial Sequence: Synthetic oligonucleotide
gggucucaacugcaguguu

SEQ ID NO: 532036 - RNA, 19 nt, Artificial Sequence
  Description of Artificial Sequence: Synthetic oligonucleotide
gccguagaugggguggccu

SEQ ID NO: 532037 - RNA, 19 nt, Artificial Sequence
  Description of Artificial Sequence: Synthetic oligonucleotide
ccccaucaagaugcccaac

SEQ ID NO: 532038 - RNA, 19 nt, Artificial Sequence
  Description of Artificial Sequence: Synthetic oligonucleotide
ccuaaagagcgcggcggcu

SEQ ID NO: 532039 - RNA, 19 nt, Artificial Sequence
  Description of Artificial Sequence: Synthetic oligonucleotide
cccaacuccgaagccuucu

SEQ ID NO: 532040 - RNA, 19 nt, Artificial Sequence
  Description of Artificial Sequence: Synthetic oligonucleotide
gcggaaccugagccccaaa

SEQ ID NO: 532041 - RNA, 19 nt, Artificial Sequence
  Description of Artificial Sequence: Synthetic oligonucleotide
ccuuccuguugaggcaucu

SEQ ID NO: 532042 - RNA, 19 nt, Artificial Sequence
  Description of Artificial Sequence: Synthetic oligonucleotide
gcccgaguacagggacgac

SEQ ID NO: 532043 - RNA, 19 nt, Artificial Sequence
  Description of Artificial Sequence: Synthetic oligonucleotide
ccuugucgccagaggcagu

SEQ ID NO: 532044 - RNA, 19 nt, Artificial Sequence
  Description of Artificial Sequence: Synthetic oligonucleotide
aaugaauauaacuugccuc

SEQ ID NO: 532045 - RNA, 19 nt, Artificial Sequence
  Description of Artificial Sequence: Synthetic oligonucleotide
agcuauauuguucacagcc

SEQ ID NO: 532046 - RNA, 19 nt, Artificial Sequence
  Description of Artificial Sequence: Synthetic oligonucleotide
augaauauaacuugccucc

SEQ ID NO: 532047 - RNA, 19 nt, Artificial Sequence
  Description of Artificial Sequence: Synthetic oligonucleotide
aaaguuauuuagcaagcac

SEQ ID NO: 532048 - RNA, 19 nt, Artificial Sequence
  Description of Artificial Sequence: Synthetic oligonucleotide
aggagauaagucuauagcc

SEQ ID NO: 532049 - RNA, 19 nt, Artificial Sequence
  Description of Artificial Sequence: Synthetic oligonucleotide
aaagguaccugacuuacgg

SEQ ID NO: 532050 - RNA, 19 nt, Artificial Sequence
  Description of Artificial Sequence: Synthetic oligonucleotide
aauugaaaauguuuggaug

SEQ ID NO: 532051 - RNA, 19 nt, Artificial Sequence
  Description of Artificial Sequence: Synthetic oligonucleotide
auauuacugaacuaguaac

SEQ ID NO: 532052 - RNA, 19 nt, Artificial Sequence
  Description of Artificial Sequence: Synthetic oligonucleotide
ugauuguuaaaucuagucc

SEQ ID NO: 532053 - RNA, 19 nt, Artificial Sequence
  Description of Artificial Sequence: Synthetic oligonucleotide
ucuagcuugaaacaaaagu

SEQ ID NO: 532054 - RNA, 19 nt, Artificial Sequence
  Description of Artificial Sequence: Synthetic oligonucleotide
uucaagaccaaaauaggag

SEQ ID NO: 532055 - RNA, 19 nt, Artificial Sequence
  Description of Artificial Sequence: Synthetic oligonucleotide
aaaucuaccaaacugcaaa

SEQ ID NO: 532056 - RNA, 19 nt, Artificial Sequence
  Description of Artificial Sequence: Synthetic oligonucleotide
gagguaagcaaauaaauac

SEQ ID NO: 532057 - RNA, 19 nt, Artificial Sequence
  Description of Artificial Sequence: Synthetic oligonucleotide
aaaauauuggcuauaauaa

SEQ ID NO: 532058 - RNA, 19 nt, Artificial Sequence
  Description of Artificial Sequence: Synthetic oligonucleotide
aauuccaacaguaggaauc

SEQ ID NO: 532059 - RNA, 19 nt, Artificial Sequence
  Description of Artificial Sequence: Synthetic oligonucleotide
auaacuugccuccuagucc

SEQ ID NO: 532060 - RNA, 19 nt, Artificial Sequence
  Description of Artificial Sequence: Synthetic oligonucleotide
uaagcaaauaaauacugug

SEQ ID NO: 532061 - RNA, 19 nt, Artificial Sequence
  Description of Artificial Sequence: Synthetic oligonucleotide
ucagcuaacuuucuaaggc

SEQ ID NO: 532062 - RNA, 19 nt, Artificial Sequence
  Description of Artificial Sequence: Synthetic oligonucleotide
uguuuuauuucuacugggg

SEQ ID NO: 532063 - RNA, 19 nt, Artificial Sequence
  Description of Artificial Sequence: Synthetic oligonucleotide
uuuagcaagcacaugcuag

SEQ ID NO: 532064 - RNA, 19 nt, Artificial Sequence
  Description of Artificial Sequence: Synthetic oligonucleotide
ucugucucaagcuaggcag

SEQ ID NO: 532065 - RNA, 19 nt, Artificial Sequence
  Description of Artificial Sequence: Synthetic oligonucleotide
aaaucaacgaaucuauaaa

SEQ ID NO: 532066 - RNA, 19 nt, Artificial Sequence
  Description of Artificial Sequence: Synthetic oligonucleotide
uuaaguaucaaggaaagau

SEQ ID NO: 532067 - RNA, 19 nt, Artificial Sequence
  Description of Artificial Sequence: Synthetic oligonucleotide
uacaagaucuggaacauca

SEQ ID NO: 532068 - RNA, 19 nt, Artificial Sequence
  Description of Artificial Sequence: Synthetic oligonucleotide
uauauuacugaacuaguaa

SEQ ID NO: 532069 - RNA, 19 nt, Artificial Sequence
  Description of Artificial Sequence: Synthetic oligonucleotide
uauuaucaaaggcugacca

SEQ ID NO: 532070 - RNA, 19 nt, Artificial Sequence
  Description of Artificial Sequence: Synthetic oligonucleotide
agugaaugaauauaacuug

SEQ ID NO: 532071 - RNA, 19 nt, Artificial Sequence
  Description of Artificial Sequence: Synthetic oligonucleotide
aagaauagaucccugggga

SEQ ID NO: 532072 - RNA, 19 nt, Artificial Sequence
  Description of Artificial Sequence: Synthetic oligonucleotide
gaagaguuagauaaaacug

SEQ ID NO: 532073 - RNA, 19 nt, Artificial Sequence
  Description of Artificial Sequence: Synthetic oligonucleotide
uacuauccaauacuugucg

SEQ ID NO: 532074 - RNA, 19 nt, Artificial Sequence
  Description of Artificial Sequence: Synthetic oligonucleotide
gaggauuuuaguuagcuuc

SEQ ID NO: 532075 - RNA, 19 nt, Artificial Sequence
  Description of Artificial Sequence: Synthetic oligonucleotide
aagaaagcuaauaaaagga

SEQ ID NO: 532076 - RNA, 19 nt, Artificial Sequence
  Description of Artificial Sequence: Synthetic oligonucleotide
uaaaucuaguccaugccag

SEQ ID NO: 532077 - RNA, 19 nt, Artificial Sequence
  Description of Artificial Sequence: Synthetic oligonucleotide
ugacuuacggcucuggcag

SEQ ID NO: 532078 - RNA, 19 nt, Artificial Sequence
  Description of Artificial Sequence: Synthetic oligonucleotide
aacaggauaagccuggcau

SEQ ID NO: 532079 - RNA, 19 nt, Artificial Sequence
  Description of Artificial Sequence: Synthetic oligonucleotide
aggaaagauaucuagcuug

SEQ ID NO: 532080 - RNA, 19 nt, Artificial Sequence
  Description of Artificial Sequence: Synthetic oligonucleotide
aaaucuaguccaugccagc

SEQ ID NO: 532081 - RNA, 19 nt, Artificial Sequence
  Description of Artificial Sequence: Synthetic oligonucleotide
cuuauccuaaaauauuggc

SEQ ID NO: 532082 - RNA, 19 nt, Artificial Sequence
  Description of Artificial Sequence: Synthetic oligonucleotide
uaggagauaagucuauagc

SEQ ID NO: 532083 - RNA, 19 nt, Artificial Sequence
  Description of Artificial Sequence: Synthetic oligonucleotide
ucuaccaaacugcaaaugu

SEQ ID NO: 532084 - RNA, 19 nt, Artificial Sequence
  Description of Artificial Sequence: Synthetic oligonucleotide
auuauucuaagcaugcagg

SEQ ID NO: 532085 - RNA, 19 nt, Artificial Sequence
  Description of Artificial Sequence: Synthetic oligonucleotide
aaagauaucuagcuugaaa

SEQ ID NO: 532086 - RNA, 19 nt, Artificial Sequence
  Description of Artificial Sequence: Synthetic oligonucleotide
auaaaguuauuuagcaagc

SEQ ID NO: 532087 - RNA, 19 nt, Artificial Sequence
  Description of Artificial Sequence: Synthetic oligonucleotide
aacuguuaccaauuggcug

SEQ ID NO: 532088 - RNA, 19 nt, Artificial Sequence
  Description of Artificial Sequence: Synthetic oligonucleotide
uauuggcuauaauaaaugc

SEQ ID NO: 532089 - RNA, 19 nt, Artificial Sequence
  Description of Artificial Sequence: Synthetic oligonucleotide
aaguugacaugcugcaagg

SEQ ID NO: 532090 - RNA, 19 nt, Artificial Sequence
  Description of Artificial Sequence: Synthetic oligonucleotide
ugcuuuacuauccaauacu

SEQ ID NO: 532091 - RNA, 19 nt, Artificial Sequence
  Description of Artificial Sequence: Synthetic oligonucleotide
uauccaauacuugucgugg

SEQ ID NO: 532092 - RNA, 19 nt, Artificial Sequence
  Description of Artificial Sequence: Synthetic oligonucleotide
aaguuauuuagcaagcaca

SEQ ID NO: 532093 - RNA, 19 nt, Artificial Sequence
  Description of Artificial Sequence: Synthetic oligonucleotide
ucuacuggggaaaagggaa

SEQ ID NO: 532094 - RNA, 19 nt, Artificial Sequence
  Description of Artificial Sequence: Synthetic oligonucleotide
aagaguuagauaaaacugu

SEQ ID NO: 532095 - RNA, 19 nt, Artificial Sequence
  Description of Artificial Sequence: Synthetic oligonucleotide
cauuauucuaagcaugcag

SEQ ID NO: 532096 - RNA, 19 nt, Artificial Sequence
  Description of Artificial Sequence: Synthetic oligonucleotide
aacuuuggaacaacagagc

SEQ ID NO: 532097 - RNA, 19 nt, Artificial Sequence
  Description of Artificial Sequence: Synthetic oligonucleotide
uucagcuaacuuucuaagg

SEQ ID NO: 532098 - RNA, 19 nt, Artificial Sequence
  Description of Artificial Sequence: Synthetic oligonucleotide
uauaacuugccuccuaguc

SEQ ID NO: 532099 - RNA, 19 nt, Artificial Sequence
  Description of Artificial Sequence: Synthetic oligonucleotide
gcuaugagcagcuacaacc

SEQ ID NO: 532100 - RNA, 19 nt, Artificial Sequence
  Description of Artificial Sequence: Synthetic oligonucleotide
guuagauaaaacuguuacc

SEQ ID NO: 532101 - RNA, 19 nt, Artificial Sequence
  Description of Artificial Sequence: Synthetic oligonucleotide
ucuuuaaaccuuauccuaa

SEQ ID NO: 532102 - RNA, 19 nt, Artificial Sequence
  Description of Artificial Sequence: Synthetic oligonucleotide
uggcauaaaguuauuuagc

SEQ ID NO: 532103 - RNA, 19 nt, Artificial Sequence
  Description of Artificial Sequence: Synthetic oligonucleotide
caagaccaaaauaggaggg

SEQ ID NO: 532104 - RNA, 19 nt, Artificial Sequence
  Description of Artificial Sequence: Synthetic oligonucleotide
uaccaaacugcaaauguga

SEQ ID NO: 532105 - RNA, 19 nt, Artificial Sequence
  Description of Artificial Sequence: Synthetic oligonucleotide
agcacuagaggaaauaguc

SEQ ID NO: 532106 - RNA, 19 nt, Artificial Sequence
  Description of Artificial Sequence: Synthetic oligonucleotide
agcauuauucuaagcaugc

SEQ ID NO: 532107 - RNA, 19 nt, Artificial Sequence
  Description of Artificial Sequence: Synthetic oligonucleotide
uuuucgaugcuucaucaaa

SEQ ID NO: 532108 - RNA, 19 nt, Artificial Sequence
  Description of Artificial Sequence: Synthetic oligonucleotide
aaagcuaauaaaaggagua

SEQ ID NO: 532109 - RNA, 19 nt, Artificial Sequence
  Description of Artificial Sequence: Synthetic oligonucleotide
augaccaguaauugcaaag

SEQ ID NO: 532110 - RNA, 19 nt, Artificial Sequence
  Description of Artificial Sequence: Synthetic oligonucleotide
uuagcaagcacaugcuagc

SEQ ID NO: 532111 - RNA, 19 nt, Artificial Sequence
  Description of Artificial Sequence: Synthetic oligonucleotide
uaaguaucaaggaaagaua

SEQ ID NO: 532112 - RNA, 19 nt, Artificial Sequence
  Description of Artificial Sequence: Synthetic oligonucleotide
caaaauuccaacaguagga

SEQ ID NO: 532113 - RNA, 19 nt, Artificial Sequence
  Description of Artificial Sequence: Synthetic oligonucleotide
uuauucuaagcaugcagga

SEQ ID NO: 532114 - RNA, 19 nt, Artificial Sequence
  Description of Artificial Sequence: Synthetic oligonucleotide
ucaacgaaucuauaaaaua

SEQ ID NO: 532115 - RNA, 19 nt, Artificial Sequence
  Description of Artificial Sequence: Synthetic oligonucleotide
guaauugcaaagguguuag

SEQ ID NO: 532116 - RNA, 19 nt, Artificial Sequence
  Description of Artificial Sequence: Synthetic oligonucleotide
guuaaaucuaguccaugcc

SEQ ID NO: 532117 - RNA, 19 nt, Artificial Sequence
  Description of Artificial Sequence: Synthetic oligonucleotide
ggaagcauuucugugaucg

SEQ ID NO: 532118 - RNA, 19 nt, Artificial Sequence
  Description of Artificial Sequence: Synthetic oligonucleotide
uguccuauguacuaccuuc

SEQ ID NO: 532119 - RNA, 19 nt, Artificial Sequence
  Description of Artificial Sequence: Synthetic oligonucleotide
aauagauccugggaagaag

SEQ ID NO: 532120 - RNA, 19 nt, Artificial Sequence
  Description of Artificial Sequence: Synthetic oligonucleotide
auuaucaaaggcugaccag

SEQ ID NO: 532121 - RNA, 19 nt, Artificial Sequence
  Description of Artificial Sequence: Synthetic oligonucleotide
auagccuauauucuuuuca

SEQ ID NO: 532122 - RNA, 19 nt, Artificial Sequence
  Description of Artificial Sequence: Synthetic oligonucleotide
aggagauaagaguauuauc

SEQ ID NO: 532123 - RNA, 19 nt, Artificial Sequence
  Description of Artificial Sequence: Synthetic oligonucleotide
ugaccaguccauuucaaga

SEQ ID NO: 532124 - RNA, 19 nt, Artificial Sequence
  Description of Artificial Sequence: Synthetic oligonucleotide
cuaggagauaagucuauag

SEQ ID NO: 532125 - RNA, 19 nt, Artificial Sequence
  Description of Artificial Sequence: Synthetic oligonucleotide
gcuacaaccacucagaucu

SEQ ID NO: 532126 - RNA, 19 nt, Artificial Sequence
  Description of Artificial Sequence: Synthetic oligonucleotide
ucuaaggcuuguuaagcug

SEQ ID NO: 532127 - RNA, 19 nt, Artificial Sequence
  Description of Artificial Sequence: Synthetic oligonucleotide
uauuuagcaagcacaugcu

SEQ ID NO: 532128 - RNA, 19 nt, Artificial Sequence
  Description of Artificial Sequence: Synthetic oligonucleotide
aagguuaaggggcagucau

SEQ ID NO: 532129 - RNA, 19 nt, Artificial Sequence
  Description of Artificial Sequence: Synthetic oligonucleotide
ggagauaagaguauuauca

SEQ ID NO: 532130 - RNA, 19 nt, Artificial Sequence
  Description of Artificial Sequence: Synthetic oligonucleotide
uaccauuucagagaaugcc

SEQ ID NO: 532131 - RNA, 19 nt, Artificial Sequence
  Description of Artificial Sequence: Synthetic oligonucleotide
agaguauuaucaaaggcug

SEQ ID NO: 532132 - RNA, 19 nt, Artificial Sequence
  Description of Artificial Sequence: Synthetic oligonucleotide
accaguccauuucaagacc

SEQ ID NO: 532133 - RNA, 19 nt, Artificial Sequence
  Description of Artificial Sequence: Synthetic oligonucleotide
agauaucuagcuugaaaca

SEQ ID NO: 532134 - RNA, 19 nt, Artificial Sequence
  Description of Artificial Sequence: Synthetic oligonucleotide
uaacuugccuccuaguccu

SEQ ID NO: 532135 - RNA, 19 nt, Artificial Sequence
  Description of Artificial Sequence: Synthetic oligonucleotide
ucuauagaucucucauuag

SEQ ID NO: 532136 - RNA, 19 nt, Artificial Sequence
  Description of Artificial Sequence: Synthetic oligonucleotide
aaguaucaaggaaagauau

SEQ ID NO: 532137 - RNA, 19 nt, Artificial Sequence
  Description of Artificial Sequence: Synthetic oligonucleotide
uucuuuaaaccuuauccua

SEQ ID NO: 532138 - RNA, 19 nt, Artificial Sequence
  Description of Artificial Sequence: Synthetic oligonucleotide
cacuagaggaaauagucuc

SEQ ID NO: 532139 - RNA, 19 nt, Artificial Sequence
  Description of Artificial Sequence: Synthetic oligonucleotide
gacagucccuguuuuagcc

SEQ ID NO: 532140 - RNA, 19 nt, Artificial Sequence
  Description of Artificial Sequence: Synthetic oligonucleotide
aaaauuccaacaguaggaa

SEQ ID NO: 532141 - RNA, 19 nt, Artificial Sequence
  Description of Artificial Sequence: Synthetic oligonucleotide
auauugaagauggagcugu

SEQ ID NO: 532142 - RNA, 19 nt, Artificial Sequence
  Description of Artificial Sequence: Synthetic oligonucleotide
uuuaugcuaggagauaagu

SEQ ID NO: 532143 - RNA, 19 nt, Artificial Sequence
  Description of Artificial Sequence: Synthetic oligonucleotide
ugauuaagaagugagucua

SEQ ID NO: 532144 - RNA, 19 nt, Artificial Sequence
  Description of Artificial Sequence: Synthetic oligonucleotide
caacgaaucuauaaaauaa

SEQ ID NO: 532145 - RNA, 19 nt, Artificial Sequence
  Description of Artificial Sequence: Synthetic oligonucleotide
auugagcaaauuaaaacca

SEQ ID NO: 532146 - RNA, 19 nt, Artificial Sequence
  Description of Artificial Sequence: Synthetic oligonucleotide
aaaugaccaagaaaugcug

SEQ ID NO: 532147 - RNA, 19 nt, Artificial Sequence
  Description of Artificial Sequence: Synthetic oligonucleotide
guuaaguccauauauuaua

SEQ ID NO: 532148 - RNA, 19 nt, Artificial Sequence
  Description of Artificial Sequence: Synthetic oligonucleotide
ugcccauuuaugcuaggag

SEQ ID NO: 532149 - RNA, 19 nt, Artificial Sequence
  Description of Artificial Sequence: Synthetic oligonucleotide
uucuccuggggcuaguacc

SEQ ID NO: 532150 - RNA, 19 nt, Artificial Sequence
  Description of Artificial Sequence: Synthetic oligonucleotide
uuacuauccaauacuuguc

SEQ ID NO: 532151 - RNA, 19 nt, Artificial Sequence
  Description of Artificial Sequence: Synthetic oligonucleotide
aauacuugucgugggaacu

SEQ ID NO: 532152 - RNA, 19 nt, Artificial Sequence
  Description of Artificial Sequence: Synthetic oligonucleotide
ccaaaauuccaacaguagg

SEQ ID NO: 532153 - RNA, 19 nt, Artificial Sequence
  Description of Artificial Sequence: Synthetic oligonucleotide
auauuggcuauaauaaaug

SEQ ID NO: 532154 - RNA, 19 nt, Artificial Sequence
  Description of Artificial Sequence: Synthetic oligonucleotide
ucuauagccuauauucuuu

SEQ ID NO: 532155 - RNA, 19 nt, Artificial Sequence
  Description of Artificial Sequence: Synthetic oligonucleotide
augucuauagaucucucau

SEQ ID NO: 532156 - RNA, 19 nt, Artificial Sequence
  Description of Artificial Sequence: Synthetic oligonucleotide
ucugcaugaccaguaauug

SEQ ID NO: 532157 - RNA, 19 nt, Artificial Sequence
  Description of Artificial Sequence: Synthetic oligonucleotide
gugaaugaauauaacuugc

SEQ ID NO: 532158 - RNA, 19 nt, Artificial Sequence
  Description of Artificial Sequence: Synthetic oligonucleotide
auaagccuggcauaaaguu

SEQ ID NO: 532159 - RNA, 19 nt, Artificial Sequence
  Description of Artificial Sequence: Synthetic oligonucleotide
aggucuugcaucuuaagua

SEQ ID NO: 532160 - RNA, 19 nt, Artificial Sequence
  Description of Artificial Sequence: Synthetic oligonucleotide
cuaccaaacugcaaaugug

SEQ ID NO: 532161 - RNA, 19 nt, Artificial Sequence
  Description of Artificial Sequence: Synthetic oligonucleotide
agauaagaguauuaucaaa

SEQ ID NO: 532162 - RNA, 19 nt, Artificial Sequence
  Description of Artificial Sequence: Synthetic oligonucleotide
aagaagugcaaaaugcaaa

SEQ ID NO: 532163 - RNA, 19 nt, Artificial Sequence
  Description of Artificial Sequence: Synthetic oligonucleotide
augcuguugguaaaucugc

SEQ ID NO: 532164 - RNA, 19 nt, Artificial Sequence
  Description of Artificial Sequence: Synthetic oligonucleotide
uggcuauaauaaaugcuga

SEQ ID NO: 532165 - RNA, 19 nt, Artificial Sequence
  Description of Artificial Sequence: Synthetic oligonucleotide
aaauuccaacaguaggaau

SEQ ID NO: 532166 - RNA, 19 nt, Artificial Sequence
  Description of Artificial Sequence: Synthetic oligonucleotide
aaggaguauuucugggucu

SEQ ID NO: 532167 - RNA, 19 nt, Artificial Sequence
  Description of Artificial Sequence: Synthetic oligonucleotide
ugcuagcuauuccaguuug

SEQ ID NO: 532168 - RNA, 19 nt, Artificial Sequence
  Description of Artificial Sequence: Synthetic oligonucleotide
gaccaaaauaggagggugg

SEQ ID NO: 532169 - RNA, 19 nt, Artificial Sequence
  Description of Artificial Sequence: Synthetic oligonucleotide
uuaagcugucagcaccaag

SEQ ID NO: 532170 - RNA, 19 nt, Artificial Sequence
  Description of Artificial Sequence: Synthetic oligonucleotide
agagguaaguucaaggcca

SEQ ID NO: 532171 - RNA, 19 nt, Artificial Sequence
  Description of Artificial Sequence: Synthetic oligonucleotide
uucauucaaaaggacaguc

SEQ ID NO: 532172 - RNA, 19 nt, Artificial Sequence
  Description of Artificial Sequence: Synthetic oligonucleotide
accaaaauaggaggguggg

SEQ ID NO: 532173 - RNA, 19 nt, Artificial Sequence
  Description of Artificial Sequence: Synthetic oligonucleotide
ucuaguccaugccagcuuc

SEQ ID NO: 532174 - RNA, 19 nt, Artificial Sequence
  Description of Artificial Sequence: Synthetic oligonucleotide
accagcacgcggcaagagc

SEQ ID NO: 532175 - RNA, 19 nt, Artificial Sequence
  Description of Artificial Sequence: Synthetic oligonucleotide
acacaagcuuuuaucagac

SEQ ID NO: 532176 - RNA, 19 nt, Artificial Sequence
  Description of Artificial Sequence: Synthetic oligonucleotide
gaaugaauauaacuugccu

SEQ ID NO: 532177 - RNA, 19 nt, Artificial Sequence
  Description of Artificial Sequence: Synthetic oligonucleotide
gguaagcaaauaaauacug

SEQ ID NO: 532178 - RNA, 19 nt, Artificial Sequence
  Description of Artificial Sequence: Synthetic oligonucleotide
aaacuguuaccaauuggcu

SEQ ID NO: 532179 - RNA, 19 nt, Artificial Sequence
  Description of Artificial Sequence: Synthetic oligonucleotide
aggcuuguuaagcugucag

SEQ ID NO: 532180 - RNA, 19 nt, Artificial Sequence
  Description of Artificial Sequence: Synthetic oligonucleotide
uuaggucuugcaucuuaag

SEQ ID NO: 532181 - RNA, 19 nt, Artificial Sequence
  Description of Artificial Sequence: Synthetic oligonucleotide
ggcauaaaguuauuuagca

SEQ ID NO: 532182 - RNA, 19 nt, Artificial Sequence
  Description of Artificial Sequence: Synthetic oligonucleotide
uguucaaggugaagaacaa

SEQ ID NO: 532183 - RNA, 19 nt, Artificial Sequence
  Description of Artificial Sequence: Synthetic oligonucleotide
agcuacaaccacucagauc

SEQ ID NO: 532184 - RNA, 19 nt, Artificial Sequence
  Description of Artificial Sequence: Synthetic oligonucleotide
aaacaggauaagccuggca

SEQ ID NO: 532185 - RNA, 19 nt, Artificial Sequence
  Description of Artificial Sequence: Synthetic oligonucleotide
ccagcuauauuguucacag

SEQ ID NO: 532186 - RNA, 19 nt, Artificial Sequence
  Description of Artificial Sequence: Synthetic oligonucleotide
cuauguacuaccuucuucu

SEQ ID NO: 532187 - RNA, 19 nt, Artificial Sequence
  Description of Artificial Sequence: Synthetic oligonucleotide
cuuguuaagcugucagcac

SEQ ID NO: 532188 - RNA, 19 nt, Artificial Sequence
  Description of Artificial Sequence: Synthetic oligonucleotide
uaucaaggaaagauaucua

SEQ ID NO: 532189 - RNA, 19 nt, Artificial Sequence
  Description of Artificial Sequence: Synthetic oligonucleotide
aaaccugagugaaugaaua

SEQ ID NO: 532190 - RNA, 19 nt, Artificial Sequence
  Description of Artificial Sequence: Synthetic oligonucleotide
aguaucaaggaaagauauc

SEQ ID NO: 532191 - RNA, 19 nt, Artificial Sequence
  Description of Artificial Sequence: Synthetic oligonucleotide
acaggugauguucucugug

SEQ ID NO: 532192 - RNA, 19 nt, Artificial Sequence
  Description of Artificial Sequence: Synthetic oligonucleotide
ucucagcucuguauggaga

SEQ ID NO: 532193 - RNA, 19 nt, Artificial Sequence
  Description of Artificial Sequence: Synthetic oligonucleotide
cuaagcaugcaggagggug

SEQ ID NO: 532194 - RNA, 19 nt, Artificial Sequence
  Description of Artificial Sequence: Synthetic oligonucleotide
gucuauagaucucucauua

SEQ ID NO: 532195 - RNA, 19 nt, Artificial Sequence
  Description of Artificial Sequence: Synthetic oligonucleotide
aguuauuuagcaagcacau

SEQ ID NO: 532196 - RNA, 19 nt, Artificial Sequence
  Description of Artificial Sequence: Synthetic oligonucleotide
uagccuauauucuuuucau

SEQ ID NO: 532197 - RNA, 19 nt, Artificial Sequence
  Description of Artificial Sequence: Synthetic oligonucleotide
ugcuacugacaacagcuaa

SEQ ID NO: 532198 - RNA, 19 nt, Artificial Sequence
  Description of Artificial Sequence: Synthetic oligonucleotide
cucagaucuacccagaggu

SEQ ID NO: 532199 - RNA, 19 nt, Artificial Sequence
  Description of Artificial Sequence: Synthetic oligonucleotide
agguaagcaaauaaauacu

SEQ ID NO: 532200 - RNA, 19 nt, Artificial Sequence
  Description of Artificial Sequence: Synthetic oligonucleotide
acuauccaauacuugucgu

SEQ ID NO: 532201 - RNA, 19 nt, Artificial Sequence
  Description of Artificial Sequence: Synthetic oligonucleotide
ggcuaguaccauuucagag

SEQ ID NO: 532202 - RNA, 19 nt, Artificial Sequence
  Description of Artificial Sequence: Synthetic oligonucleotide
aagcuaauaaaaggaguau

SEQ ID NO: 532203 - RNA, 19 nt, Artificial Sequence
  Description of Artificial Sequence: Synthetic oligonucleotide
uuaccaauuggcuguccac

SEQ ID NO: 532204 - RNA, 19 nt, Artificial Sequence
  Description of Artificial Sequence: Synthetic oligonucleotide
agcugauuguuaaaucuag

SEQ ID NO: 532205 - RNA, 19 nt, Artificial Sequence
  Description of Artificial Sequence: Synthetic oligonucleotide
cugagugaaugaauauaac

SEQ ID NO: 532206 - RNA, 19 nt, Artificial Sequence
  Description of Artificial Sequence: Synthetic oligonucleotide
cacaugcuagcuauuccag

SEQ ID NO: 532207 - RNA, 19 nt, Artificial Sequence
  Description of Artificial Sequence: Synthetic oligonucleotide
caauacuugucgugggaac

SEQ ID NO: 532208 - RNA, 19 nt, Artificial Sequence
  Description of Artificial Sequence: Synthetic oligonucleotide
ugaucgguuuggcuucugc

SEQ ID NO: 532209 - RNA, 19 nt, Artificial Sequence
  Description of Artificial Sequence: Synthetic oligonucleotide
gcuaguaccauuucagaga

SEQ ID NO: 532210 - RNA, 19 nt, Artificial Sequence
  Description of Artificial Sequence: Synthetic oligonucleotide
ggguuauugaaaugaauga

SEQ ID NO: 532211 - RNA, 19 nt, Artificial Sequence
  Description of Artificial Sequence: Synthetic oligonucleotide
aucaauguccucugguuuu

SEQ ID NO: 532212 - RNA, 19 nt, Artificial Sequence
  Description of Artificial Sequence: Synthetic oligonucleotide
guauuaucaaaggcugacc

SEQ ID NO: 532213 - RNA, 19 nt, Artificial Sequence
  Description of Artificial Sequence: Synthetic oligonucleotide
aaccuuauccuaaaauauu

SEQ ID NO: 532214 - RNA, 19 nt, Artificial Sequence
  Description of Artificial Sequence: Synthetic oligonucleotide
auauaacuugccuccuagu

SEQ ID NO: 532215 - RNA, 19 nt, Artificial Sequence
  Description of Artificial Sequence: Synthetic oligonucleotide
auagauccugggaagaagu

SEQ ID NO: 532216 - RNA, 19 nt, Artificial Sequence
  Description of Artificial Sequence: Synthetic oligonucleotide
gugagucuaaggcagccac

SEQ ID NO: 532217 - RNA, 19 nt, Artificial Sequence
  Description of Artificial Sequence: Synthetic oligonucleotide
uuggcuaacuuuucuugau

SEQ ID NO: 532218 - RNA, 19 nt, Artificial Sequence
  Description of Artificial Sequence: Synthetic oligonucleotide
ugucuauagaucucucauu

SEQ ID NO: 532219 - RNA, 19 nt, Artificial Sequence
  Description of Artificial Sequence: Synthetic oligonucleotide
ugagucuaaggcagccaca

SEQ ID NO: 532220 - RNA, 19 nt, Artificial Sequence
  Description of Artificial Sequence: Synthetic oligonucleotide
gaucgguuuggcuucugca

SEQ ID NO: 532221 - RNA, 19 nt, Artificial Sequence
  Description of Artificial Sequence: Synthetic oligonucleotide
agaauagaucccuggggaa

SEQ ID NO: 532222 - RNA, 19 nt, Artificial Sequence
  Description of Artificial Sequence: Synthetic oligonucleotide
gugcuuuacuauccaauac

SEQ ID NO: 532223 - RNA, 19 nt, Artificial Sequence
  Description of Artificial Sequence: Synthetic oligonucleotide
aagcacuagaggaaauagu

SEQ ID NO: 532224 - RNA, 19 nt, Artificial Sequence
  Description of Artificial Sequence: Synthetic oligonucleotide
uacggcucuggcagcaacc

SEQ ID NO: 532225 - RNA, 19 nt, Artificial Sequence
  Description of Artificial Sequence: Synthetic oligonucleotide
uaccaauuggcuguccacu

SEQ ID NO: 532226 - RNA, 19 nt, Artificial Sequence
  Description of Artificial Sequence: Synthetic oligonucleotide
auuuagcaagcacaugcua

SEQ ID NO: 532227 - RNA, 19 nt, Artificial Sequence
  Description of Artificial Sequence: Synthetic oligonucleotide
cugucucaagcuaggcagg

SEQ ID NO: 532228 - RNA, 19 nt, Artificial Sequence
  Description of Artificial Sequence: Synthetic oligonucleotide
aaaaguugacaugcugcaa

SEQ ID NO: 532229 - RNA, 19 nt, Artificial Sequence
  Description of Artificial Sequence: Synthetic oligonucleotide
auccuaaaauauuggcuau

SEQ ID NO: 532230 - RNA, 19 nt, Artificial Sequence
  Description of Artificial Sequence: Synthetic oligonucleotide
cagcuaagaaacaggauaa

SEQ ID NO: 532231 - RNA, 19 nt, Artificial Sequence
  Description of Artificial Sequence: Synthetic oligonucleotide
uugaaaauguuuggaugaa

SEQ ID NO: 532232 - RNA, 19 nt, Artificial Sequence
  Description of Artificial Sequence: Synthetic oligonucleotide
uagcuauuccaguuugaaa

SEQ ID NO: 532233 - RNA, 19 nt, Artificial Sequence
  Description of Artificial Sequence: Synthetic oligonucleotide
aguaauugcaaagguguua

SEQ ID NO: 532234 - RNA, 19 nt, Artificial Sequence
  Description of Artificial Sequence: Synthetic oligonucleotide
ugcuaugagcagcuacaac

SEQ ID NO: 532235 - RNA, 19 nt, Artificial Sequence
  Description of Artificial Sequence: Synthetic oligonucleotide
aggauuuuaguuagcuuca

SEQ ID NO: 532236 - RNA, 19 nt, Artificial Sequence
  Description of Artificial Sequence: Synthetic oligonucleotide
uccaugccagcuuccaaac

SEQ ID NO: 532237 - RNA, 19 nt, Artificial Sequence
  Description of Artificial Sequence: Synthetic oligonucleotide
auuuaugcuaggagauaag

SEQ ID NO: 532238 - RNA, 19 nt, Artificial Sequence
  Description of Artificial Sequence: Synthetic oligonucleotide
caugucuauagaucucuca

SEQ ID NO: 532239 - RNA, 19 nt, Artificial Sequence
  Description of Artificial Sequence: Synthetic oligonucleotide
acaugcuagcuauuccagu

SEQ ID NO: 532240 - RNA, 19 nt, Artificial Sequence
  Description of Artificial Sequence: Synthetic oligonucleotide
uguuagcggagagggaagc

SEQ ID NO: 532241 - RNA, 19 nt, Artificial Sequence
  Description of Artificial Sequence: Synthetic oligonucleotide
cauuuaugcuaggagauaa

SEQ ID NO: 532242 - RNA, 19 nt, Artificial Sequence
  Description of Artificial Sequence: Synthetic oligonucleotide
ggcuaacuuuucuugauuc

SEQ ID NO: 532243 - RNA, 19 nt, Artificial Sequence
  Description of Artificial Sequence: Synthetic oligonucleotide
agaggauuuuaguuagcuu

SEQ ID NO: 532244 - RNA, 19 nt, Artificial Sequence
  Description of Artificial Sequence: Synthetic oligonucleotide
ccaagcugacuuaauauuc

SEQ ID NO: 532245 - RNA, 19 nt, Artificial Sequence
  Description of Artificial Sequence: Synthetic oligonucleotide
aguccauauauuauauaaa

SEQ ID NO: 532246 - RNA, 19 nt, Artificial Sequence
  Description of Artificial Sequence: Synthetic oligonucleotide
agucuccucuuuuguacug

SEQ ID NO: 532247 - RNA, 19 nt, Artificial Sequence
  Description of Artificial Sequence: Synthetic oligonucleotide
ccuccuaguccucugaaag

SEQ ID NO: 532248 - RNA, 19 nt, Artificial Sequence
  Description of Artificial Sequence: Synthetic oligonucleotide
cugugaucgguuuggcuuc

SEQ ID NO: 532249 - RNA, 19 nt, Artificial Sequence
  Description of Artificial Sequence: Synthetic oligonucleotide
cugacuuacggcucuggca

SEQ ID NO: 532250 - RNA, 19 nt, Artificial Sequence
  Description of Artificial Sequence: Synthetic oligonucleotide
ucuuaccacuguucacccc

SEQ ID NO: 532251 - RNA, 19 nt, Artificial Sequence
  Description of Artificial Sequence: Synthetic oligonucleotide
aacuuacuuuucaucaauu

SEQ ID NO: 532252 - RNA, 19 nt, Artificial Sequence
  Description of Artificial Sequence: Synthetic oligonucleotide
agaucuacccagagguaag

SEQ ID NO: 532253 - RNA, 19 nt, Artificial Sequence
  Description of Artificial Sequence: Synthetic oligonucleotide
auaucuagcuugaaacaaa

SEQ ID NO: 532254 - RNA, 19 nt, Artificial Sequence
  Description of Artificial Sequence: Synthetic oligonucleotide
agaguuagauaaaacuguu

SEQ ID NO: 532255 - RNA, 19 nt, Artificial Sequence
  Description of Artificial Sequence: Synthetic oligonucleotide
agcugacuuaauauuccag

SEQ ID NO: 532256 - RNA, 19 nt, Artificial Sequence
  Description of Artificial Sequence: Synthetic oligonucleotide
cuauccggaccugagcuug

SEQ ID NO: 532257 - RNA, 19 nt, Artificial Sequence
  Description of Artificial Sequence: Synthetic oligonucleotide
cccagaggauuuuaguuag

SEQ ID NO: 532258 - RNA, 19 nt, Artificial Sequence
  Description of Artificial Sequence: Synthetic oligonucleotide
cuacugacaacagcuaaga

SEQ ID NO: 532259 - RNA, 19 nt, Artificial Sequence
  Description of Artificial Sequence: Synthetic oligonucleotide
augggccaggaaauaauag

SEQ ID NO: 532260 - RNA, 19 nt, Artificial Sequence
  Description of Artificial Sequence: Synthetic oligonucleotide
ggaagaagugcaaaaugca

SEQ ID NO: 532261 - RNA, 19 nt, Artificial Sequence
  Description of Artificial Sequence: Synthetic oligonucleotide
accccaaagcauuauucua

SEQ ID NO: 532262 - RNA, 19 nt, Artificial Sequence
  Description of Artificial Sequence: Synthetic oligonucleotide
ccaagaagaggagaguggc

SEQ ID NO: 532263 - RNA, 19 nt, Artificial Sequence
  Description of Artificial Sequence: Synthetic oligonucleotide
caacagagcugauuguuaa

SEQ ID NO: 532264 - RNA, 19 nt, Artificial Sequence
  Description of Artificial Sequence: Synthetic oligonucleotide
aucuagcuugaaacaaaag

SEQ ID NO: 532265 - RNA, 19 nt, Artificial Sequence
  Description of Artificial Sequence: Synthetic oligonucleotide
cuaguccaugccagcuucc

SEQ ID NO: 532266 - RNA, 19 nt, Artificial Sequence
  Description of Artificial Sequence: Synthetic oligonucleotide
acugugucuuaccacuguu

SEQ ID NO: 532267 - RNA, 19 nt, Artificial Sequence
  Description of Artificial Sequence: Synthetic oligonucleotide
gaguauuaucaaaggcuga

SEQ ID NO: 532268 - RNA, 19 nt, Artificial Sequence
  Description of Artificial Sequence: Synthetic oligonucleotide
uagaggaaauagucuccuc

SEQ ID NO: 532269 - RNA, 19 nt, Artificial Sequence
  Description of Artificial Sequence: Synthetic oligonucleotide
gauaagccuggcauaaagu

SEQ ID NO: 532270 - RNA, 19 nt, Artificial Sequence
  Description of Artificial Sequence: Synthetic oligonucleotide
accugagugaaugaauaua

SEQ ID NO: 532271 - RNA, 19 nt, Artificial Sequence
  Description of Artificial Sequence: Synthetic oligonucleotide
gcacaugcuagcuauucca

SEQ ID NO: 532272 - RNA, 19 nt, Artificial Sequence
  Description of Artificial Sequence: Synthetic oligonucleotide
gcuauuccaguuugaaauc

SEQ ID NO: 532273 - RNA, 19 nt, Artificial Sequence
  Description of Artificial Sequence: Synthetic oligonucleotide
gauaagucuauagccuaua

SEQ ID NO: 532274 - RNA, 19 nt, Artificial Sequence
  Description of Artificial Sequence: Synthetic oligonucleotide
ggugcuuuacuauccaaua

SEQ ID NO: 532275 - RNA, 19 nt, Artificial Sequence
  Description of Artificial Sequence: Synthetic oligonucleotide
uucaugcuguugguaaauc

SEQ ID NO: 532276 - RNA, 19 nt, Artificial Sequence
  Description of Artificial Sequence: Synthetic oligonucleotide
gauuaagaagugagucuaa

SEQ ID NO: 532277 - RNA, 19 nt, Artificial Sequence
  Description of Artificial Sequence: Synthetic oligonucleotide
gcuauaauaaaugcugaua

SEQ ID NO: 532278 - RNA, 19 nt, Artificial Sequence
  Description of Artificial Sequence: Synthetic oligonucleotide
ggaaagauaucuagcuuga

SEQ ID NO: 532279 - RNA, 19 nt, Artificial Sequence
  Description of Artificial Sequence: Synthetic oligonucleotide
ugcaagguuaaggggcagu

SEQ ID NO: 532280 - RNA, 19 nt, Artificial Sequence
  Description of Artificial Sequence: Synthetic oligonucleotide
cuagcuauuccaguuugaa

SEQ ID NO: 532281 - RNA, 19 nt, Artificial Sequence
  Description of Artificial Sequence: Synthetic oligonucleotide
uagcaagcacaugcuagcu

SEQ ID NO: 532282 - RNA, 19 nt, Artificial Sequence
  Description of Artificial Sequence: Synthetic oligonucleotide
gaguuagauaaaacuguua

SEQ ID NO: 532283 - RNA, 19 nt, Artificial Sequence
  Description of Artificial Sequence: Synthetic oligonucleotide
agauaagucuauagccuau

SEQ ID NO: 532284 - RNA, 19 nt, Artificial Sequence
  Description of Artificial Sequence: Synthetic oligonucleotide
gguguuagcggagagggaa

SEQ ID NO: 532285 - RNA, 19 nt, Artificial Sequence
  Description of Artificial Sequence: Synthetic oligonucleotide
gaggaaauagucuccucuu

SEQ ID NO: 532286 - RNA, 19 nt, Artificial Sequence
  Description of Artificial Sequence: Synthetic oligonucleotide
gaugggccaggaaauaaua

SEQ ID NO: 532287 - RNA, 19 nt, Artificial Sequence
  Description of Artificial Sequence: Synthetic oligonucleotide
augcuagcuauuccaguuu

SEQ ID NO: 532288 - RNA, 19 nt, Artificial Sequence
  Description of Artificial Sequence: Synthetic oligonucleotide
aucuaguccaugccagcuu

SEQ ID NO: 532289 - RNA, 19 nt, Artificial Sequence
  Description of Artificial Sequence: Synthetic oligonucleotide
agcaagcacaugcuagcua

SEQ ID NO: 532290 - RNA, 19 nt, Artificial Sequence
  Description of Artificial Sequence: Synthetic oligonucleotide
agaggguuaggcacucucu

SEQ ID NO: 532291 - RNA, 19 nt, Artificial Sequence
  Description of Artificial Sequence: Synthetic oligonucleotide
gacuuacggcucuggcagc

SEQ ID NO: 532292 - RNA, 19 nt, Artificial Sequence
  Description of Artificial Sequence: Synthetic oligonucleotide
agaucccuggggaagaaua

SEQ ID NO: 532293 - RNA, 19 nt, Artificial Sequence
  Description of Artificial Sequence: Synthetic oligonucleotide
gcaggagggugcuaugagc

SEQ ID NO: 532294 - RNA, 19 nt, Artificial Sequence
  Description of Artificial Sequence: Synthetic oligonucleotide
cauuaggucuugcaucuua

SEQ ID NO: 532295 - RNA, 19 nt, Artificial Sequence
  Description of Artificial Sequence: Synthetic oligonucleotide
uacuugucgugggaacugu

SEQ ID NO: 532296 - RNA, 19 nt, Artificial Sequence
  Description of Artificial Sequence: Synthetic oligonucleotide
ggagauaagucuauagccu

SEQ ID NO: 532297 - RNA, 19 nt, Artificial Sequence
  Description of Artificial Sequence: Synthetic oligonucleotide
uguuaccaauuggcugucc

SEQ ID NO: 532298 - RNA, 19 nt, Artificial Sequence
  Description of Artificial Sequence: Synthetic oligonucleotide
cagaucuacccagagguaa

SEQ ID NO: 532299 - RNA, 19 nt, Artificial Sequence
  Description of Artificial Sequence: Synthetic oligonucleotide
guguuagcggagagggaag

SEQ ID NO: 532300 - RNA, 19 nt, Artificial Sequence
  Description of Artificial Sequence: Synthetic oligonucleotide
gaucucucauuaggucuug

SEQ ID NO: 532301 - RNA, 19 nt, Artificial Sequence
  Description of Artificial Sequence: Synthetic oligonucleotide
ccaaagguaccugacuuac

SEQ ID NO: 532302 - RNA, 19 nt, Artificial Sequence
  Description of Artificial Sequence: Synthetic oligonucleotide
caugcaggagggugcuaug

SEQ ID NO: 532303 - RNA, 19 nt, Artificial Sequence
  Description of Artificial Sequence: Synthetic oligonucleotide
gguuaggcacucucucagc

SEQ ID NO: 532304 - RNA, 19 nt, Artificial Sequence
  Description of Artificial Sequence: Synthetic oligonucleotide
acuuacggcucuggcagca

SEQ ID NO: 532305 - RNA, 19 nt, Artificial Sequence
  Description of Artificial Sequence: Synthetic oligonucleotide
ugcgagcugugcccuugcc

SEQ ID NO: 532306 - RNA, 19 nt, Artificial Sequence
  Description of Artificial Sequence: Synthetic oligonucleotide
gcuauauuguucacagcca

SEQ ID NO: 532307 - RNA, 19 nt, Artificial Sequence
  Description of Artificial Sequence: Synthetic oligonucleotide
gcuaggcaggagauaagag

SEQ ID NO: 532308 - RNA, 19 nt, Artificial Sequence
  Description of Artificial Sequence: Synthetic oligonucleotide
ucuaagcaugcaggagggu

SEQ ID NO: 532309 - RNA, 19 nt, Artificial Sequence
  Description of Artificial Sequence: Synthetic oligonucleotide
cagcuaacuuucuaaggcu

SEQ ID NO: 532310 - RNA, 19 nt, Artificial Sequence
  Description of Artificial Sequence: Synthetic oligonucleotide
ggucuugcaucuuaaguau

SEQ ID NO: 532311 - RNA, 19 nt, Artificial Sequence
  Description of Artificial Sequence: Synthetic oligonucleotide
ggaaucucuucagaucuga

SEQ ID NO: 532312 - RNA, 19 nt, Artificial Sequence
  Description of Artificial Sequence: Synthetic oligonucleotide
ccuggcauaaaguuauuua

SEQ ID NO: 532313 - RNA, 19 nt, Artificial Sequence
  Description of Artificial Sequence: Synthetic oligonucleotide
aggaaucucuucagaucug

SEQ ID NO: 532314 - RNA, 19 nt, Artificial Sequence
  Description of Artificial Sequence: Synthetic oligonucleotide
ugugaucgguuuggcuucu

SEQ ID NO: 532315 - RNA, 19 nt, Artificial Sequence
  Description of Artificial Sequence: Synthetic oligonucleotide
ccaaaauaggagggugggg

SEQ ID NO: 532316 - RNA, 19 nt, Artificial Sequence
  Description of Artificial Sequence: Synthetic oligonucleotide
cuagaggaaauagucuccu

SEQ ID NO: 532317 - RNA, 19 nt, Artificial Sequence
  Description of Artificial Sequence: Synthetic oligonucleotide
ccuaguccucugaaaggag

SEQ ID NO: 532318 - RNA, 19 nt, Artificial Sequence
  Description of Artificial Sequence: Synthetic oligonucleotide
ccugacuuacggcucuggc

SEQ ID NO: 532319 - RNA, 19 nt, Artificial Sequence
  Description of Artificial Sequence: Synthetic oligonucleotide
cagaggauuuuaguuagcu

SEQ ID NO: 532320 - RNA, 19 nt, Artificial Sequence
  Description of Artificial Sequence: Synthetic oligonucleotide
agcacgcggcaagagcaag

SEQ ID NO: 532321 - RNA, 19 nt, Artificial Sequence
  Description of Artificial Sequence: Synthetic oligonucleotide
ccagcacgcggcaagagca

SEQ ID NO: 532322 - RNA, 19 nt, Artificial Sequence
  Description of Artificial Sequence: Synthetic oligonucleotide
gucugauuaagaagugagu

SEQ ID NO: 532323 - RNA, 19 nt, Artificial Sequence
  Description of Artificial Sequence: Synthetic oligonucleotide
ccccaaagcauuauucuaa

SEQ ID NO: 532324 - RNA, 19 nt, Artificial Sequence
  Description of Artificial Sequence: Synthetic oligonucleotide
gcgagcugugcccuugccc

SEQ ID NO: 532325 - RNA, 19 nt, Artificial Sequence
  Description of Artificial Sequence: Synthetic oligonucleotide
cuauagccuauauucuuuu

SEQ ID NO: 532326 - RNA, 19 nt, Artificial Sequence
  Description of Artificial Sequence: Synthetic oligonucleotide
cucaagcuaggcaggagau

SEQ ID NO: 532327 - RNA, 19 nt, Artificial Sequence
  Description of Artificial Sequence: Synthetic oligonucleotide
ggcugaccaguccauuuca

SEQ ID NO: 532328 - RNA, 19 nt, Artificial Sequence
  Description of Artificial Sequence: Synthetic oligonucleotide
ccagaggauuuuaguuagc

SEQ ID NO: 532329 - RNA, 19 nt, Artificial Sequence
  Description of Artificial Sequence: Synthetic oligonucleotide
uuccaacaguaggaaucuc

SEQ ID NO: 532330 - RNA, 19 nt, Artificial Sequence
  Description of Artificial Sequence: Synthetic oligonucleotide
auagaucccuggggaagaa

SEQ ID NO: 532331 - RNA, 19 nt, Artificial Sequence
  Description of Artificial Sequence: Synthetic oligonucleotide
gggucugauuaagaaguga

SEQ ID NO: 532332 - RNA, 19 nt, Artificial Sequence
  Description of Artificial Sequence: Synthetic oligonucleotide
ugucagcaccaagcugacu

SEQ ID NO: 532333 - RNA, 19 nt, Artificial Sequence
  Description of Artificial Sequence: Synthetic oligonucleotide
agcucuguauggagaacuu

SEQ ID NO: 532334 - RNA, 19 nt, Artificial Sequence
  Description of Artificial Sequence: Synthetic oligonucleotide
ucauuaggucuugcaucuu

SEQ ID NO: 532335 - RNA, 19 nt, Artificial Sequence
  Description of Artificial Sequence: Synthetic oligonucleotide
cgaaucuauaaaauaaauu

SEQ ID NO: 532336 - RNA, 19 nt, Artificial Sequence
  Description of Artificial Sequence: Synthetic oligonucleotide
guccuauguacuaccuucu

SEQ ID NO: 532337 - RNA, 19 nt, Artificial Sequence
  Description of Artificial Sequence: Synthetic oligonucleotide
gguuaaggggcagucauuu

SEQ ID NO: 532338 - RNA, 19 nt, Artificial Sequence
  Description of Artificial Sequence: Synthetic oligonucleotide
gcuuuacuauccaauacuu

SEQ ID NO: 532339 - RNA, 19 nt, Artificial Sequence
  Description of Artificial Sequence: Synthetic oligonucleotide
ccggaccugagcuugaagu

SEQ ID NO: 532340 - RNA, 19 nt, Artificial Sequence
  Description of Artificial Sequence: Synthetic oligonucleotide
guuagcggagagggaagcu

SEQ ID NO: 532341 - RNA, 19 nt, Artificial Sequence
  Description of Artificial Sequence: Synthetic oligonucleotide
agguguuagcggagaggga

SEQ ID NO: 532342 - RNA, 19 nt, Artificial Sequence
  Description of Artificial Sequence: Synthetic oligonucleotide
guuaaggggcagucauuuu

SEQ ID NO: 532343 - RNA, 19 nt, Artificial Sequence
  Description of Artificial Sequence: Synthetic oligonucleotide
gcaggagauaagaguauua

SEQ ID NO: 532344 - RNA, 19 nt, Artificial Sequence
  Description of Artificial Sequence: Synthetic oligonucleotide
gcggggaggguccuccaac

SEQ ID NO: 532345 - RNA, 19 nt, Artificial Sequence
  Description of Artificial Sequence: Synthetic oligonucleotide
gcuagcuauuccaguuuga

SEQ ID NO: 532346 - RNA, 19 nt, Artificial Sequence
  Description of Artificial Sequence: Synthetic oligonucleotide
ccccuauccggaccugagc

SEQ ID NO: 532347 - RNA, 19 nt, Artificial Sequence
  Description of Artificial Sequence: Synthetic oligonucleotide
cccuauccggaccugagcu

SEQ ID NO: 532348 - RNA, 19 nt, Artificial Sequence
  Description of Artificial Sequence: Synthetic oligonucleotide
cuacaaccacucagaucua

SEQ ID NO: 532349 - RNA, 19 nt, Artificial Sequence
  Description of Artificial Sequence: Synthetic oligonucleotide
ggugaugggccaggaaaua

SEQ ID NO: 532350 - RNA, 19 nt, Artificial Sequence
  Description of Artificial Sequence: Synthetic oligonucleotide
cagcacgcggcaagagcaa

SEQ ID NO: 532351 - RNA, 19 nt, Artificial Sequence
  Description of Artificial Sequence: Synthetic oligonucleotide
cgguuuggcuucugcauga

SEQ ID NO: 532352 - RNA, 19 nt, Artificial Sequence
  Description of Artificial Sequence: Synthetic oligonucleotide
guucaccccaaagcauuau

SEQ ID NO: 532353 - RNA, 19 nt, Artificial Sequence
  Description of Artificial Sequence: Synthetic oligonucleotide
ccauuuaugcuaggagaua

SEQ ID NO: 532354 - RNA, 19 nt, Artificial Sequence
  Description of Artificial Sequence: Synthetic oligonucleotide
cacgcggcaagagcaagau

SEQ ID NO: 532355 - RNA, 19 nt, Artificial Sequence
  Description of Artificial Sequence: Synthetic oligonucleotide
gcacgcggcaagagcaaga

SEQ ID NO: 532356 - RNA, 19 nt, Artificial Sequence
  Description of Artificial Sequence: Synthetic oligonucleotide
ccuauccggaccugagcuu

SEQ ID NO: 532357 - RNA, 19 nt, Artificial Sequence
  Description of Artificial Sequence: Synthetic oligonucleotide
aauaucacuguguucaaac

SEQ ID NO: 532358 - RNA, 19 nt, Artificial Sequence
  Description of Artificial Sequence: Synthetic oligonucleotide
aaagugauaugaugcaucc

SEQ ID NO: 532359 - RNA, 19 nt, Artificial Sequence
  Description of Artificial Sequence: Synthetic oligonucleotide
aauccaucauuauaugucc

SEQ ID NO: 532360 - RNA, 19 nt, Artificial Sequence
  Description of Artificial Sequence: Synthetic oligonucleotide
aauauuggcagaguggcgc

SEQ ID NO: 532361 - RNA, 19 nt, Artificial Sequence
  Description of Artificial Sequence: Synthetic oligonucleotide
aauuacaucaaguucauuu

SEQ ID NO: 532362 - RNA, 19 nt, Artificial Sequence
  Description of Artificial Sequence: Synthetic oligonucleotide
uccauuauccaauaguagg

SEQ ID NO: 532363 - RNA, 19 nt, Artificial Sequence
  Description of Artificial Sequence: Synthetic oligonucleotide
auuuaagauuccuauacac

SEQ ID NO: 532364 - RNA, 19 nt, Artificial Sequence
  Description of Artificial Sequence: Synthetic oligonucleotide
cucgguaugauauuaaucc

SEQ ID NO: 532365 - RNA, 19 nt, Artificial Sequence
  Description of Artificial Sequence: Synthetic oligonucleotide
uuagaaaccaguuuuauau

SEQ ID NO: 532366 - RNA, 19 nt, Artificial Sequence
  Description of Artificial Sequence: Synthetic oligonucleotide
auaagguuuacuaucagcc

SEQ ID NO: 532367 - RNA, 19 nt, Artificial Sequence
  Description of Artificial Sequence: Synthetic oligonucleotide
aaguauuccaguaaccugc

SEQ ID NO: 532368 - RNA, 19 nt, Artificial Sequence
  Description of Artificial Sequence: Synthetic oligonucleotide
aguuaauuaauucuucauc

SEQ ID NO: 532369 - RNA, 19 nt, Artificial Sequence
  Description of Artificial Sequence: Synthetic oligonucleotide
gaugauaggauguuggcag

SEQ ID NO: 532370 - RNA, 19 nt, Artificial Sequence
  Description of Artificial Sequence: Synthetic oligonucleotide
uuucuauucggccauaccc

SEQ ID NO: 532371 - RNA, 19 nt, Artificial Sequence
  Description of Artificial Sequence: Synthetic oligonucleotide
uaauuaaugcuucauuuug

SEQ ID NO: 532372 - RNA, 19 nt, Artificial Sequence
  Description of Artificial Sequence: Synthetic oligonucleotide
uacaccauagaacagcucc

SEQ ID NO: 532373 - RNA, 19 nt, Artificial Sequence
  Description of Artificial Sequence: Synthetic oligonucleotide
auaugaugcauccagcaac

SEQ ID NO: 532374 - RNA, 19 nt, Artificial Sequence
  Description of Artificial Sequence: Synthetic oligonucleotide
caauaaaccauccaaacug

SEQ ID NO: 532375 - RNA, 19 nt, Artificial Sequence
  Description of Artificial Sequence: Synthetic oligonucleotide
guaaguaccaucuuugcag

SEQ ID NO: 532376 - RNA, 19 nt, Artificial Sequence
  Description of Artificial Sequence: Synthetic oligonucleotide
uccauuaauaaauccagag

SEQ ID NO: 532377 - RNA, 19 nt, Artificial Sequence
  Description of Artificial Sequence: Synthetic oligonucleotide
acauaauucaaacagagua

SEQ ID NO: 532378 - RNA, 19 nt, Artificial Sequence
  Description of Artificial Sequence: Synthetic oligonucleotide
agagaauuucuauucggcc

SEQ ID NO: 532379 - RNA, 19 nt, Artificial Sequence
  Description of Artificial Sequence: Synthetic oligonucleotide
auaauuagaaaccaguuuu

SEQ ID NO: 532380 - RNA, 19 nt, Artificial Sequence
  Description of Artificial Sequence: Synthetic oligonucleotide
aauaaaccauccaaacugc

SEQ ID NO: 532381 - RNA, 19 nt, Artificial Sequence
  Description of Artificial Sequence: Synthetic oligonucleotide
uggcuaaaggcacagaucc

SEQ ID NO: 532382 - RNA, 19 nt, Artificial Sequence
  Description of Artificial Sequence: Synthetic oligonucleotide
ugugucugccaaaacaugg

SEQ ID NO: 532383 - RNA, 19 nt, Artificial Sequence
  Description of Artificial Sequence: Synthetic oligonucleotide
aaguaaaagaucugccuag

SEQ ID NO: 532384 - RNA, 19 nt, Artificial Sequence
  Description of Artificial Sequence: Synthetic oligonucleotide
ucgaaaagcaguaagcaga

SEQ ID NO: 532385 - RNA, 19 nt, Artificial Sequence
  Description of Artificial Sequence: Synthetic oligonucleotide
gauaacgacaauaucacug

SEQ ID NO: 532386 - RNA, 19 nt, Artificial Sequence
  Description of Artificial Sequence: Synthetic oligonucleotide
aaaggagcgacacuaauaa

SEQ ID NO: 532387 - RNA, 19 nt, Artificial Sequence
  Description of Artificial Sequence: Synthetic oligonucleotide
aagcacaagaaguaaaaga

SEQ ID NO: 532388 - RNA, 19 nt, Artificial Sequence
  Description of Artificial Sequence: Synthetic oligonucleotide
uauauguccauuucugaag

SEQ ID NO: 532389 - RNA, 19 nt, Artificial Sequence
  Description of Artificial Sequence: Synthetic oligonucleotide
uccuuaauaaaccuuggga

SEQ ID NO: 532390 - RNA, 19 nt, Artificial Sequence
  Description of Artificial Sequence: Synthetic oligonucleotide
agugauuccuuaauaaacc

SEQ ID NO: 532391 - RNA, 19 nt, Artificial Sequence
  Description of Artificial Sequence: Synthetic oligonucleotide
auagaaaguaaaugcacag

SEQ ID NO: 532392 - RNA, 19 nt, Artificial Sequence
  Description of Artificial Sequence: Synthetic oligonucleotide
auaauucaaacagaguaac

SEQ ID NO: 532393 - RNA, 19 nt, Artificial Sequence
  Description of Artificial Sequence: Synthetic oligonucleotide
ucagaaguaagacuugaca

SEQ ID NO: 532394 - RNA, 19 nt, Artificial Sequence
  Description of Artificial Sequence: Synthetic oligonucleotide
ucgagaaucuguuuuagug

SEQ ID NO: 532395 - RNA, 19 nt, Artificial Sequence
  Description of Artificial Sequence: Synthetic oligonucleotide
cagaaguaagacuugacag

SEQ ID NO: 532396 - RNA, 19 nt, Artificial Sequence
  Description of Artificial Sequence: Synthetic oligonucleotide
ucuguaucuuuucuaaagc

SEQ ID NO: 532397 - RNA, 19 nt, Artificial Sequence
  Description of Artificial Sequence: Synthetic oligonucleotide
ugaugugaaacaauuacau

SEQ ID NO: 532398 - RNA, 19 nt, Artificial Sequence
  Description of Artificial Sequence: Synthetic oligonucleotide
uuuacuaucagcccuccaa

SEQ ID NO: 532399 - RNA, 19 nt, Artificial Sequence
  Description of Artificial Sequence: Synthetic oligonucleotide
uaaaagaucugccuagagu

SEQ ID NO: 532400 - RNA, 19 nt, Artificial Sequence
  Description of Artificial Sequence: Synthetic oligonucleotide
aggagaauauccaauaagg

SEQ ID NO: 532401 - RNA, 19 nt, Artificial Sequence
  Description of Artificial Sequence: Synthetic oligonucleotide
uuauccaauaguagggagc

SEQ ID NO: 532402 - RNA, 19 nt, Artificial Sequence
  Description of Artificial Sequence: Synthetic oligonucleotide
ugggauaacacugagaaau

SEQ ID NO: 532403 - RNA, 19 nt, Artificial Sequence
  Description of Artificial Sequence: Synthetic oligonucleotide
uccuugagaagucccaugg

SEQ ID NO: 532404 - RNA, 19 nt, Artificial Sequence
  Description of Artificial Sequence: Synthetic oligonucleotide
auugucgaaaagcaguaag

SEQ ID NO: 532405 - RNA, 19 nt, Artificial Sequence
  Description of Artificial Sequence: Synthetic oligonucleotide
agagagaauuucuauucgg

SEQ ID NO: 532406 - RNA, 19 nt, Artificial Sequence
  Description of Artificial Sequence: Synthetic oligonucleotide
aaaaugagggucucgguau

SEQ ID NO: 532407 - RNA, 19 nt, Artificial Sequence
  Description of Artificial Sequence: Synthetic oligonucleotide
uaugaauuguuccugcuau

SEQ ID NO: 532408 - RNA, 19 nt, Artificial Sequence
  Description of Artificial Sequence: Synthetic oligonucleotide
uuaaguauuccaguaaccu

SEQ ID NO: 532409 - RNA, 19 nt, Artificial Sequence
  Description of Artificial Sequence: Synthetic oligonucleotide
uuuacauuggagaugcuuu

SEQ ID NO: 532410 - RNA, 19 nt, Artificial Sequence
  Description of Artificial Sequence: Synthetic oligonucleotide
ucuguuauuggaugugucc

SEQ ID NO: 532411 - RNA, 19 nt, Artificial Sequence
  Description of Artificial Sequence: Synthetic oligonucleotide
aucauuauauguccauuuc

SEQ ID NO: 532412 - RNA, 19 nt, Artificial Sequence
  Description of Artificial Sequence: Synthetic oligonucleotide
uuaaucagugggauaacac

SEQ ID NO: 532413 - RNA, 19 nt, Artificial Sequence
  Description of Artificial Sequence: Synthetic oligonucleotide
aaaucagugguugaaauuu

SEQ ID NO: 532414 - RNA, 19 nt, Artificial Sequence
  Description of Artificial Sequence: Synthetic oligonucleotide
ugagcagugagauaacgac

SEQ ID NO: 532415 - RNA, 19 nt, Artificial Sequence
  Description of Artificial Sequence: Synthetic oligonucleotide
gauguaaguaccaucuuug

SEQ ID NO: 532416 - RNA, 19 nt, Artificial Sequence
  Description of Artificial Sequence: Synthetic oligonucleotide
aaucaaucuagccacugau

SEQ ID NO: 532417 - RNA, 19 nt, Artificial Sequence
  Description of Artificial Sequence: Synthetic oligonucleotide
uugucgaaaagcaguaagc

SEQ ID NO: 532418 - RNA, 19 nt, Artificial Sequence
  Description of Artificial Sequence: Synthetic oligonucleotide
uuuagagggagaugauagg

SEQ ID NO: 532419 - RNA, 19 nt, Artificial Sequence
  Description of Artificial Sequence: Synthetic oligonucleotide
ugugaaacaauuacaucaa

SEQ ID NO: 532420 - RNA, 19 nt, Artificial Sequence
  Description of Artificial Sequence: Synthetic oligonucleotide
ugauauuaauccuucaauu

SEQ ID NO: 532421 - RNA, 19 nt, Artificial Sequence
  Description of Artificial Sequence: Synthetic oligonucleotide
gagaaauacaccucucaug

SEQ ID NO: 532422 - RNA, 19 nt, Artificial Sequence
  Description of Artificial Sequence: Synthetic oligonucleotide
ccugcuauaauauuggcag

SEQ ID NO: 532423 - RNA, 19 nt, Artificial Sequence
  Description of Artificial Sequence: Synthetic oligonucleotide
uguaaguaccaucuuugca

SEQ ID NO: 532424 - RNA, 19 nt, Artificial Sequence
  Description of Artificial Sequence: Synthetic oligonucleotide
cuugagaagucccauggcc

SEQ ID NO: 532425 - RNA, 19 nt, Artificial Sequence
  Description of Artificial Sequence: Synthetic oligonucleotide
gagaaauauuaacacagca

SEQ ID NO: 532426 - RNA, 19 nt, Artificial Sequence
  Description of Artificial Sequence: Synthetic oligonucleotide
augaguaugaugggaaugg

SEQ ID NO: 532427 - RNA, 19 nt, Artificial Sequence
  Description of Artificial Sequence: Synthetic oligonucleotide
uaaguauuccaguaaccug

SEQ ID NO: 532428 - RNA, 19 nt, Artificial Sequence
  Description of Artificial Sequence: Synthetic oligonucleotide
cuauaauauuggcagagug

SEQ ID NO: 532429 - RNA, 19 nt, Artificial Sequence
  Description of Artificial Sequence: Synthetic oligonucleotide
ucggcaauaaaccauccaa

SEQ ID NO: 532430 - RNA, 19 nt, Artificial Sequence
  Description of Artificial Sequence: Synthetic oligonucleotide
ugguccacaaagaguaagg

SEQ ID NO: 532431 - RNA, 19 nt, Artificial Sequence
  Description of Artificial Sequence: Synthetic oligonucleotide
uucugauagaaaguaaaug

SEQ ID NO: 532432 - RNA, 19 nt, Artificial Sequence
  Description of Artificial Sequence: Synthetic oligonucleotide
uuagugauuccuuaauaaa

SEQ ID NO: 532433 - RNA, 19 nt, Artificial Sequence
  Description of Artificial Sequence: Synthetic oligonucleotide
auauuaauccuucaauuuu

SEQ ID NO: 532434 - RNA, 19 nt, Artificial Sequence
  Description of Artificial Sequence: Synthetic oligonucleotide
gaauccaucauuauauguc

SEQ ID NO: 532435 - RNA, 19 nt, Artificial Sequence
  Description of Artificial Sequence: Synthetic oligonucleotide
uucuauucggccauaccca

SEQ ID NO: 532436 - RNA, 19 nt, Artificial Sequence
  Description of Artificial Sequence: Synthetic oligonucleotide
aguaagacuugacaggcgu

SEQ ID NO: 532437 - RNA, 19 nt, Artificial Sequence
  Description of Artificial Sequence: Synthetic oligonucleotide
auaguagggagcucuauga

SEQ ID NO: 532438 - RNA, 19 nt, Artificial Sequence
  Description of Artificial Sequence: Synthetic oligonucleotide
uuuuacuuaauggauuuaa

SEQ ID NO: 532439 - RNA, 19 nt, Artificial Sequence
  Description of Artificial Sequence: Synthetic oligonucleotide
uuagugguccacaaagagu

SEQ ID NO: 532440 - RNA, 19 nt, Artificial Sequence
  Description of Artificial Sequence: Synthetic oligonucleotide
uaagguuuacuaucagccc

SEQ ID NO: 532441 - RNA, 19 nt, Artificial Sequence
  Description of Artificial Sequence: Synthetic oligonucleotide
gagauaacgacaauaucac

SEQ ID NO: 532442 - RNA, 19 nt, Artificial Sequence
  Description of Artificial Sequence: Synthetic oligonucleotide
cagugguugaaauuucucc

SEQ ID NO: 532443 - RNA, 19 nt, Artificial Sequence
  Description of Artificial Sequence: Synthetic oligonucleotide
uaauauuggcagaguggcg

SEQ ID NO: 532444 - RNA, 19 nt, Artificial Sequence
  Description of Artificial Sequence: Synthetic oligonucleotide
ugaagugauagaguggugu

SEQ ID NO: 532445 - RNA, 19 nt, Artificial Sequence
  Description of Artificial Sequence: Synthetic oligonucleotide
uggauuguuaaguuguuua

SEQ ID NO: 532446 - RNA, 19 nt, Artificial Sequence
  Description of Artificial Sequence: Synthetic oligonucleotide
aaugaagaacacggcacuc

SEQ ID NO: 532447 - RNA, 19 nt, Artificial Sequence
  Description of Artificial Sequence: Synthetic oligonucleotide
ugacaggcgucuuuaauca

SEQ ID NO: 532448 - RNA, 19 nt, Artificial Sequence
  Description of Artificial Sequence: Synthetic oligonucleotide
gaacacggcacucacuacc

SEQ ID NO: 532449 - RNA, 19 nt, Artificial Sequence
  Description of Artificial Sequence: Synthetic oligonucleotide
acaucaaguucauuuauau

SEQ ID NO: 532450 - RNA, 19 nt, Artificial Sequence
  Description of Artificial Sequence: Synthetic oligonucleotide
auauaauuaaugcuucauu

SEQ ID NO: 532451 - RNA, 19 nt, Artificial Sequence
  Description of Artificial Sequence: Synthetic oligonucleotide
ugucgaaaagcaguaagca

SEQ ID NO: 532452 - RNA, 19 nt, Artificial Sequence
  Description of Artificial Sequence: Synthetic oligonucleotide
aauaaaccuugggauggac

SEQ ID NO: 532453 - RNA, 19 nt, Artificial Sequence
  Description of Artificial Sequence: Synthetic oligonucleotide
gauagagugguguuccuuc

SEQ ID NO: 532454 - RNA, 19 nt, Artificial Sequence
  Description of Artificial Sequence: Synthetic oligonucleotide
aaacagaguaacaaauagu

SEQ ID NO: 532455 - RNA, 19 nt, Artificial Sequence
  Description of Artificial Sequence: Synthetic oligonucleotide
aauauccaauaaggguacc

SEQ ID NO: 532456 - RNA, 19 nt, Artificial Sequence
  Description of Artificial Sequence: Synthetic oligonucleotide
aauuaauucuucaucucaa

SEQ ID NO: 532457 - RNA, 19 nt, Artificial Sequence
  Description of Artificial Sequence: Synthetic oligonucleotide
uuagagggagaugauagga

SEQ ID NO: 532458 - RNA, 19 nt, Artificial Sequence
  Description of Artificial Sequence: Synthetic oligonucleotide
uccugcuauaauauuggca

SEQ ID NO: 532459 - RNA, 19 nt, Artificial Sequence
  Description of Artificial Sequence: Synthetic oligonucleotide
ucggccauacccauaggag

SEQ ID NO: 532460 - RNA, 19 nt, Artificial Sequence
  Description of Artificial Sequence: Synthetic oligonucleotide
aggggaucggcaauaaacc

SEQ ID NO: 532461 - RNA, 19 nt, Artificial Sequence
  Description of Artificial Sequence: Synthetic oligonucleotide
gaaguaaaagaucugccua

SEQ ID NO: 532462 - RNA, 19 nt, Artificial Sequence
  Description of Artificial Sequence: Synthetic oligonucleotide
aguaugaugggaauggcca

SEQ ID NO: 532463 - RNA, 19 nt, Artificial Sequence
  Description of Artificial Sequence: Synthetic oligonucleotide
uauccaauaguagggagcu

SEQ ID NO: 532464 - RNA, 19 nt, Artificial Sequence
  Description of Artificial Sequence: Synthetic oligonucleotide
ugucugccaaaacauggag

SEQ ID NO: 532465 - RNA, 19 nt, Artificial Sequence
  Description of Artificial Sequence: Synthetic oligonucleotide
ggcgucuuuaaucaguggg

SEQ ID NO: 532466 - RNA, 19 nt, Artificial Sequence
  Description of Artificial Sequence: Synthetic oligonucleotide
ugaccaaagcugaacaguc

SEQ ID NO: 532467 - RNA, 19 nt, Artificial Sequence
  Description of Artificial Sequence: Synthetic oligonucleotide
uccaguaaccugcuguaca

SEQ ID NO: 532468 - RNA, 19 nt, Artificial Sequence
  Description of Artificial Sequence: Synthetic oligonucleotide
acaacugucugcaaccuuc

SEQ ID NO: 532469 - RNA, 19 nt, Artificial Sequence
  Description of Artificial Sequence: Synthetic oligonucleotide
aacuagugaauaaaacacu

SEQ ID NO: 532470 - RNA, 19 nt, Artificial Sequence
  Description of Artificial Sequence: Synthetic oligonucleotide
aauggagacuggugucaac

SEQ ID NO: 532471 - RNA, 19 nt, Artificial Sequence
  Description of Artificial Sequence: Synthetic oligonucleotide
uaauuagaaaccaguuuua

SEQ ID NO: 532472 - RNA, 19 nt, Artificial Sequence
  Description of Artificial Sequence: Synthetic oligonucleotide
gacaagacaugcucugugc

SEQ ID NO: 532473 - RNA, 19 nt, Artificial Sequence
  Description of Artificial Sequence: Synthetic oligonucleotide
gagagaauuucuauucggc

SEQ ID NO: 532474 - RNA, 19 nt, Artificial Sequence
  Description of Artificial Sequence: Synthetic oligonucleotide
uuuaaucagugggauaaca

SEQ ID NO: 532475 - RNA, 19 nt, Artificial Sequence
  Description of Artificial Sequence: Synthetic oligonucleotide
uccaauaguagggagcucu

SEQ ID NO: 532476 - RNA, 19 nt, Artificial Sequence
  Description of Artificial Sequence: Synthetic oligonucleotide
gucgaaaagcaguaagcag

SEQ ID NO: 532477 - RNA, 19 nt, Artificial Sequence
  Description of Artificial Sequence: Synthetic oligonucleotide
gagaugauaggauguuggc

SEQ ID NO: 532478 - RNA, 19 nt, Artificial Sequence
  Description of Artificial Sequence: Synthetic oligonucleotide
aagugauagagugguguuc

SEQ ID NO: 532479 - RNA, 19 nt, Artificial Sequence
  Description of Artificial Sequence: Synthetic oligonucleotide
agaaauauuaacacagcaa

SEQ ID NO: 532480 - RNA, 19 nt, Artificial Sequence
  Description of Artificial Sequence: Synthetic oligonucleotide
uauaugaauuguuccugcu

SEQ ID NO: 532481 - RNA, 19 nt, Artificial Sequence
  Description of Artificial Sequence: Synthetic oligonucleotide
aucccaauaagguuuacua

SEQ ID NO: 532482 - RNA, 19 nt, Artificial Sequence
  Description of Artificial Sequence: Synthetic oligonucleotide
cuuucugauagaaaguaaa

SEQ ID NO: 532483 - RNA, 19 nt, Artificial Sequence
  Description of Artificial Sequence: Synthetic oligonucleotide
ugaagaacacggcacucac

SEQ ID NO: 532484 - RNA, 19 nt, Artificial Sequence
  Description of Artificial Sequence: Synthetic oligonucleotide
ucucgguaugauauuaauc

SEQ ID NO: 532485 - RNA, 19 nt, Artificial Sequence
  Description of Artificial Sequence: Synthetic oligonucleotide
uucggccauacccauagga

SEQ ID NO: 532486 - RNA, 19 nt, Artificial Sequence
  Description of Artificial Sequence: Synthetic oligonucleotide
ccauuauccaauaguaggg

SEQ ID NO: 532487 - RNA, 19 nt, Artificial Sequence
  Description of Artificial Sequence: Synthetic oligonucleotide
gacauaugcugaaaguaug

SEQ ID NO: 532488 - RNA, 19 nt, Artificial Sequence
  Description of Artificial Sequence: Synthetic oligonucleotide
aagcagaucacagcaauaa

SEQ ID NO: 532489 - RNA, 19 nt, Artificial Sequence
  Description of Artificial Sequence: Synthetic oligonucleotide
ucauugucgaaaagcagua

SEQ ID NO: 532490 - RNA, 19 nt, Artificial Sequence
  Description of Artificial Sequence: Synthetic oligonucleotide
ugugggcauggcuaaaggc

SEQ ID NO: 532491 - RNA, 19 nt, Artificial Sequence
  Description of Artificial Sequence: Synthetic oligonucleotide
guaaaagaucugccuagag

SEQ ID NO: 532492 - RNA, 19 nt, Artificial Sequence
  Description of Artificial Sequence: Synthetic oligonucleotide
uaacacugagaaauauuaa

SEQ ID NO: 532493 - RNA, 19 nt, Artificial Sequence
  Description of Artificial Sequence: Synthetic oligonucleotide
acccauaggagaaaauccg

SEQ ID NO: 532494 - RNA, 19 nt, Artificial Sequence
  Description of Artificial Sequence: Synthetic oligonucleotide
agccaugagaucaucauug

SEQ ID NO: 532495 - RNA, 19 nt, Artificial Sequence
  Description of Artificial Sequence: Synthetic oligonucleotide
gucaccuguauaugaauug

SEQ ID NO: 532496 - RNA, 19 nt, Artificial Sequence
  Description of Artificial Sequence: Synthetic oligonucleotide
aggagaaaauccggguugc

SEQ ID NO: 532497 - RNA, 19 nt, Artificial Sequence
  Description of Artificial Sequence: Synthetic oligonucleotide
gaagccguggcugugacca

SEQ ID NO: 532498 - RNA, 19 nt, Artificial Sequence
  Description of Artificial Sequence: Synthetic oligonucleotide
ugaauuguuccugcuauaa

SEQ ID NO: 532499 - RNA, 19 nt, Artificial Sequence
  Description of Artificial Sequence: Synthetic oligonucleotide
cucuuuuagagggagauga

SEQ ID NO: 532500 - RNA, 19 nt, Artificial Sequence
  Description of Artificial Sequence: Synthetic oligonucleotide
agacaagacaugcucugug

SEQ ID NO: 532501 - RNA, 19 nt, Artificial Sequence
  Description of Artificial Sequence: Synthetic oligonucleotide
uuacuaucagcccuccaau

SEQ ID NO: 532502 - RNA, 19 nt, Artificial Sequence
  Description of Artificial Sequence: Synthetic oligonucleotide
ccuguauaugaauuguucc

SEQ ID NO: 532503 - RNA, 19 nt, Artificial Sequence
  Description of Artificial Sequence: Synthetic oligonucleotide
ggagaugauaggauguugg

SEQ ID NO: 532504 - RNA, 19 nt, Artificial Sequence
  Description of Artificial Sequence: Synthetic oligonucleotide
gauggacugagagcuaugc

SEQ ID NO: 532505 - RNA, 19 nt, Artificial Sequence
  Description of Artificial Sequence: Synthetic oligonucleotide
uaagacuugacaggcgucu

SEQ ID NO: 532506 - RNA, 19 nt, Artificial Sequence
  Description of Artificial Sequence: Synthetic oligonucleotide
ggaggaucaaucaaucuag

SEQ ID NO: 532507 - RNA, 19 nt, Artificial Sequence
  Description of Artificial Sequence: Synthetic oligonucleotide
ugagagcuaugcugaaaag

SEQ ID NO: 532508 - RNA, 19 nt, Artificial Sequence
  Description of Artificial Sequence: Synthetic oligonucleotide
auaggagaaaauccggguu

SEQ ID NO: 532509 - RNA, 19 nt, Artificial Sequence
  Description of Artificial Sequence: Synthetic oligonucleotide
uaagauuccuauacacaua

SEQ ID NO: 532510 - RNA, 19 nt, Artificial Sequence
  Description of Artificial Sequence: Synthetic oligonucleotide
uccuucaauuuucuguauc

SEQ ID NO: 532511 - RNA, 19 nt, Artificial Sequence
  Description of Artificial Sequence: Synthetic oligonucleotide
gauaugaugcauccagcaa

SEQ ID NO: 532512 - RNA, 19 nt, Artificial Sequence
  Description of Artificial Sequence: Synthetic oligonucleotide
agcaguaagcagaucacag

SEQ ID NO: 532513 - RNA, 19 nt, Artificial Sequence
  Description of Artificial Sequence: Synthetic oligonucleotide
aucaggccuagacuauugg

SEQ ID NO: 532514 - RNA, 19 nt, Artificial Sequence
  Description of Artificial Sequence: Synthetic oligonucleotide
uccagaacuagugaauaaa

SEQ ID NO: 532515 - RNA, 19 nt, Artificial Sequence
  Description of Artificial Sequence: Synthetic oligonucleotide
uuuacaccagcaucuuuaa

SEQ ID NO: 532516 - RNA, 19 nt, Artificial Sequence
  Description of Artificial Sequence: Synthetic oligonucleotide
gaaaggauccauagcggug

SEQ ID NO: 532517 - RNA, 19 nt, Artificial Sequence
  Description of Artificial Sequence: Synthetic oligonucleotide
aaaaggagcgacacuaaua

SEQ ID NO: 532518 - RNA, 19 nt, Artificial Sequence
  Description of Artificial Sequence: Synthetic oligonucleotide
aguuccggaggaucaauca

SEQ ID NO: 532519 - RNA, 19 nt, Artificial Sequence
  Description of Artificial Sequence: Synthetic oligonucleotide
gaguaugaugggaauggcc

SEQ ID NO: 532520 - RNA, 19 nt, Artificial Sequence
  Description of Artificial Sequence: Synthetic oligonucleotide
cuuuaagaagacuccauua

SEQ ID NO: 532521 - RNA, 19 nt, Artificial Sequence
  Description of Artificial Sequence: Synthetic oligonucleotide
uuaaugcuucauuuugcau

SEQ ID NO: 532522 - RNA, 19 nt, Artificial Sequence
  Description of Artificial Sequence: Synthetic oligonucleotide
uauucaggugguagucuca

SEQ ID NO: 532523 - RNA, 19 nt, Artificial Sequence
  Description of Artificial Sequence: Synthetic oligonucleotide
accagaauccaucauuaua

SEQ ID NO: 532524 - RNA, 19 nt, Artificial Sequence
  Description of Artificial Sequence: Synthetic oligonucleotide
uacuaucagcccuccaaug

SEQ ID NO: 532525 - RNA, 19 nt, Artificial Sequence
  Description of Artificial Sequence: Synthetic oligonucleotide
uccuuuaagaagacuccau

SEQ ID NO: 532526 - RNA, 19 nt, Artificial Sequence
  Description of Artificial Sequence: Synthetic oligonucleotide
uuccuuuaagaagacucca

SEQ ID NO: 532527 - RNA, 19 nt, Artificial Sequence
  Description of Artificial Sequence: Synthetic oligonucleotide
ucaggccuagacuauuggu

SEQ ID NO: 532528 - RNA, 19 nt, Artificial Sequence
  Description of Artificial Sequence: Synthetic oligonucleotide
aggagcgacacuaauaaaa

SEQ ID NO: 532529 - RNA, 19 nt, Artificial Sequence
  Description of Artificial Sequence: Synthetic oligonucleotide
uguccucuuuuagagggag

SEQ ID NO: 532530 - RNA, 19 nt, Artificial Sequence
  Description of Artificial Sequence: Synthetic oligonucleotide
aguaaccugcuguacaauu

SEQ ID NO: 532531 - RNA, 19 nt, Artificial Sequence
  Description of Artificial Sequence: Synthetic oligonucleotide
uagagugguguuccuucag

SEQ ID NO: 532532 - RNA, 19 nt, Artificial Sequence
  Description of Artificial Sequence: Synthetic oligonucleotide
uuccggaggaucaaucaau

SEQ ID NO: 532533 - RNA, 19 nt, Artificial Sequence
  Description of Artificial Sequence: Synthetic oligonucleotide
acagaucccaauaagguuu

SEQ ID NO: 532534 - RNA, 19 nt, Artificial Sequence
  Description of Artificial Sequence: Synthetic oligonucleotide
aaagagucccaugaccaaa

SEQ ID NO: 532535 - RNA, 19 nt, Artificial Sequence
  Description of Artificial Sequence: Synthetic oligonucleotide
agaugauaggauguuggca

SEQ ID NO: 532536 - RNA, 19 nt, Artificial Sequence
  Description of Artificial Sequence: Synthetic oligonucleotide
agauaacgacaauaucacu

SEQ ID NO: 532537 - RNA, 19 nt, Artificial Sequence
  Description of Artificial Sequence: Synthetic oligonucleotide
agagcauauggaauccauc

SEQ ID NO: 532538 - RNA, 19 nt, Artificial Sequence
  Description of Artificial Sequence: Synthetic oligonucleotide
aggaaaggauccauagcgg

SEQ ID NO: 532539 - RNA, 19 nt, Artificial Sequence
  Description of Artificial Sequence: Synthetic oligonucleotide
aggauguuggcagacaaaa

SEQ ID NO: 532540 - RNA, 19 nt, Artificial Sequence
  Description of Artificial Sequence: Synthetic oligonucleotide
gaaaauccggguugcuuuc

SEQ ID NO: 532541 - RNA, 19 nt, Artificial Sequence
  Description of Artificial Sequence: Synthetic oligonucleotide
caauaagguuuacuaucag

SEQ ID NO: 532542 - RNA, 19 nt, Artificial Sequence
  Description of Artificial Sequence: Synthetic oligonucleotide
caucgacucaucagggcag

SEQ ID NO: 532543 - RNA, 19 nt, Artificial Sequence
  Description of Artificial Sequence: Synthetic oligonucleotide
aaauccggguugcuuucca

SEQ ID NO: 532544 - RNA, 19 nt, Artificial Sequence
  Description of Artificial Sequence: Synthetic oligonucleotide
auuuacauuggagaugcuu

SEQ ID NO: 532545 - RNA, 19 nt, Artificial Sequence
  Description of Artificial Sequence: Synthetic oligonucleotide
gagaacacaggggaucggc

SEQ ID NO: 532546 - RNA, 19 nt, Artificial Sequence
  Description of Artificial Sequence: Synthetic oligonucleotide
ggauuguuaaguuguuuac

SEQ ID NO: 532547 - RNA, 19 nt, Artificial Sequence
  Description of Artificial Sequence: Synthetic oligonucleotide
uccucuuuuagagggagau

SEQ ID NO: 532548 - RNA, 19 nt, Artificial Sequence
  Description of Artificial Sequence: Synthetic oligonucleotide
auauggaauccaucugaga

SEQ ID NO: 532549 - RNA, 19 nt, Artificial Sequence
  Description of Artificial Sequence: Synthetic oligonucleotide
caugaguaugaugggaaug

SEQ ID NO: 532550 - RNA, 19 nt, Artificial Sequence
  Description of Artificial Sequence: Synthetic oligonucleotide
auccggguugcuuuccauc

SEQ ID NO: 532551 - RNA, 19 nt, Artificial Sequence
  Description of Artificial Sequence: Synthetic oligonucleotide
agagucacucuccucgaga

SEQ ID NO: 532552 - RNA, 19 nt, Artificial Sequence
  Description of Artificial Sequence: Synthetic oligonucleotide
auggcuaaaggcacagauc

SEQ ID NO: 532553 - RNA, 19 nt, Artificial Sequence
  Description of Artificial Sequence: Synthetic oligonucleotide
uccaucgacucaucagggc

SEQ ID NO: 532554 - RNA, 19 nt, Artificial Sequence
  Description of Artificial Sequence: Synthetic oligonucleotide
cugccuagagucacucucc

SEQ ID NO: 532555 - RNA, 19 nt, Artificial Sequence
  Description of Artificial Sequence: Synthetic oligonucleotide
auauccaauaaggguaccu

SEQ ID NO: 532556 - RNA, 19 nt, Artificial Sequence
  Description of Artificial Sequence: Synthetic oligonucleotide
ucuuuuagagggagaugau

SEQ ID NO: 532557 - RNA, 19 nt, Artificial Sequence
  Description of Artificial Sequence: Synthetic oligonucleotide
auagagugguguuccuuca

SEQ ID NO: 532558 - RNA, 19 nt, Artificial Sequence
  Description of Artificial Sequence: Synthetic oligonucleotide
ucuauucggccauacccau

SEQ ID NO: 532559 - RNA, 19 nt, Artificial Sequence
  Description of Artificial Sequence: Synthetic oligonucleotide
augccaucuggacacgucu

SEQ ID NO: 532560 - RNA, 19 nt, Artificial Sequence
  Description of Artificial Sequence: Synthetic oligonucleotide
uuggagaugcuuucugaua

SEQ ID NO: 532561 - RNA, 19 nt, Artificial Sequence
  Description of Artificial Sequence: Synthetic oligonucleotide
uauccaauaaggguaccuu

SEQ ID NO: 532562 - RNA, 19 nt, Artificial Sequence
  Description of Artificial Sequence: Synthetic oligonucleotide
aguaaaagaucugccuaga

SEQ ID NO: 532563 - RNA, 19 nt, Artificial Sequence
  Description of Artificial Sequence: Synthetic oligonucleotide
auucaggugguagucucag

SEQ ID NO: 532564 - RNA, 19 nt, Artificial Sequence
  Description of Artificial Sequence: Synthetic oligonucleotide
caggcgucuuuaaucagug

SEQ ID NO: 532565 - RNA, 19 nt, Artificial Sequence
  Description of Artificial Sequence: Synthetic oligonucleotide
ugcuuugucauggccagaa

SEQ ID NO: 532566 - RNA, 19 nt, Artificial Sequence
  Description of Artificial Sequence: Synthetic oligonucleotide
cuguauaugaauuguuccu

SEQ ID NO: 532567 - RNA, 19 nt, Artificial Sequence
  Description of Artificial Sequence: Synthetic oligonucleotide
aucggcaauaaaccaucca

SEQ ID NO: 532568 - RNA, 19 nt, Artificial Sequence
  Description of Artificial Sequence: Synthetic oligonucleotide
cugagagcuaugcugaaaa

SEQ ID NO: 532569 - RNA, 19 nt, Artificial Sequence
  Description of Artificial Sequence: Synthetic oligonucleotide
agguuuacuaucagcccuc

SEQ ID NO: 532570 - RNA, 19 nt, Artificial Sequence
  Description of Artificial Sequence: Synthetic oligonucleotide
ccacugauuccauaaacac

SEQ ID NO: 532571 - RNA, 19 nt, Artificial Sequence
  Description of Artificial Sequence: Synthetic oligonucleotide
aguaccaucuuugcaguau

SEQ ID NO: 532572 - RNA, 19 nt, Artificial Sequence
  Description of Artificial Sequence: Synthetic oligonucleotide
augaagaacacggcacuca

SEQ ID NO: 532573 - RNA, 19 nt, Artificial Sequence
  Description of Artificial Sequence: Synthetic oligonucleotide
guaugauauuaauccuuca

SEQ ID NO: 532574 - RNA, 19 nt, Artificial Sequence
  Description of Artificial Sequence: Synthetic oligonucleotide
gcaguaagcagaucacagc

SEQ ID NO: 532575 - RNA, 19 nt, Artificial Sequence
  Description of Artificial Sequence: Synthetic oligonucleotide
aucaccguguccaugagua

SEQ ID NO: 532576 - RNA, 19 nt, Artificial Sequence
  Description of Artificial Sequence: Synthetic oligonucleotide
ugauaggauguuggcagac

SEQ ID NO: 532577 - RNA, 19 nt, Artificial Sequence
  Description of Artificial Sequence: Synthetic oligonucleotide
auaaaccuugggauggacu

SEQ ID NO: 532578 - RNA, 19 nt, Artificial Sequence
  Description of Artificial Sequence: Synthetic oligonucleotide
ugaucaccguguccaugag

SEQ ID NO: 532579 - RNA, 19 nt, Artificial Sequence
  Description of Artificial Sequence: Synthetic oligonucleotide
gaggaucaaucaaucuagc

SEQ ID NO: 532580 - RNA, 19 nt, Artificial Sequence
  Description of Artificial Sequence: Synthetic oligonucleotide
gacaggcgucuuuaaucag

SEQ ID NO: 532581 - RNA, 19 nt, Artificial Sequence
  Description of Artificial Sequence: Synthetic oligonucleotide
gaucaggccuagacuauug

SEQ ID NO: 532582 - RNA, 19 nt, Artificial Sequence
  Description of Artificial Sequence: Synthetic oligonucleotide
ugaguggcaguguccuuga

SEQ ID NO: 532583 - RNA, 19 nt, Artificial Sequence
  Description of Artificial Sequence: Synthetic oligonucleotide
aaggagcgacacuaauaaa

SEQ ID NO: 532584 - RNA, 19 nt, Artificial Sequence
  Description of Artificial Sequence: Synthetic oligonucleotide
uccucgagaaucuguuuua

SEQ ID NO: 532585 - RNA, 19 nt, Artificial Sequence
  Description of Artificial Sequence: Synthetic oligonucleotide
ugggaauggccaugaucag

SEQ ID NO: 532586 - RNA, 19 nt, Artificial Sequence
  Description of Artificial Sequence: Synthetic oligonucleotide
cugagcagugagauaacga

SEQ ID NO: 532587 - RNA, 19 nt, Artificial Sequence
  Description of Artificial Sequence: Synthetic oligonucleotide
gaacacaggggaucggcaa

SEQ ID NO: 532588 - RNA, 19 nt, Artificial Sequence
  Description of Artificial Sequence: Synthetic oligonucleotide
cccauaggagaaaauccgg

SEQ ID NO: 532589 - RNA, 19 nt, Artificial Sequence
  Description of Artificial Sequence: Synthetic oligonucleotide
auggacugagagcuaugcu

SEQ ID NO: 532590 - RNA, 19 nt, Artificial Sequence
  Description of Artificial Sequence: Synthetic oligonucleotide
ggugucaacauguuugugu

SEQ ID NO: 532591 - RNA, 19 nt, Artificial Sequence
  Description of Artificial Sequence: Synthetic oligonucleotide
ugccuagagucacucuccu

SEQ ID NO: 532592 - RNA, 19 nt, Artificial Sequence
  Description of Artificial Sequence: Synthetic oligonucleotide
aauccggguugcuuuccau

SEQ ID NO: 532593 - RNA, 19 nt, Artificial Sequence
  Description of Artificial Sequence: Synthetic oligonucleotide
acgucucacaugauguaag

SEQ ID NO: 532594 - RNA, 19 nt, Artificial Sequence
  Description of Artificial Sequence: Synthetic oligonucleotide
ccaauaagguuuacuauca

SEQ ID NO: 532595 - RNA, 19 nt, Artificial Sequence
  Description of Artificial Sequence: Synthetic oligonucleotide
gauaggauguuggcagaca

SEQ ID NO: 532596 - RNA, 19 nt, Artificial Sequence
  Description of Artificial Sequence: Synthetic oligonucleotide
aggcgucuuuaaucagugg

SEQ ID NO: 532597 - RNA, 19 nt, Artificial Sequence
  Description of Artificial Sequence: Synthetic oligonucleotide
guaagcagaucacagcaau

SEQ ID NO: 532598 - RNA, 19 nt, Artificial Sequence
  Description of Artificial Sequence: Synthetic oligonucleotide
acaauuacaucaaguucau

SEQ ID NO: 532599 - RNA, 19 nt, Artificial Sequence
  Description of Artificial Sequence: Synthetic oligonucleotide
guugaaauuucuccugaau

SEQ ID NO: 532600 - RNA, 19 nt, Artificial Sequence
  Description of Artificial Sequence: Synthetic oligonucleotide
aucagugggauaacacuga

SEQ ID NO: 532601 - RNA, 19 nt, Artificial Sequence
  Description of Artificial Sequence: Synthetic oligonucleotide
caugaucagaugaguggca

SEQ ID NO: 532602 - RNA, 19 nt, Artificial Sequence
  Description of Artificial Sequence: Synthetic oligonucleotide
aggucaccuguauaugaau

SEQ ID NO: 532603 - RNA, 19 nt, Artificial Sequence
  Description of Artificial Sequence: Synthetic oligonucleotide
ugccaucuggacacgucuc

SEQ ID NO: 532604 - RNA, 19 nt, Artificial Sequence
  Description of Artificial Sequence: Synthetic oligonucleotide
ucuaguuccggaggaucaa

SEQ ID NO: 532605 - RNA, 19 nt, Artificial Sequence
  Description of Artificial Sequence: Synthetic oligonucleotide
uccaguacucaggccagac

SEQ ID NO: 532606 - RNA, 19 nt, Artificial Sequence
  Description of Artificial Sequence: Synthetic oligonucleotide
uuggauuguuaaguuguuu

SEQ ID NO: 532607 - RNA, 19 nt, Artificial Sequence
  Description of Artificial Sequence: Synthetic oligonucleotide
gaagugauagagugguguu

SEQ ID NO: 532608 - RNA, 19 nt, Artificial Sequence
  Description of Artificial Sequence: Synthetic oligonucleotide
gaucugccuagagucacuc

SEQ ID NO: 532609 - RNA, 19 nt, Artificial Sequence
  Description of Artificial Sequence: Synthetic oligonucleotide
guuccggaggaucaaucaa

SEQ ID NO: 532610 - RNA, 19 nt, Artificial Sequence
  Description of Artificial Sequence: Synthetic oligonucleotide
accucucauguuggcauuc

SEQ ID NO: 532611 - RNA, 19 nt, Artificial Sequence
  Description of Artificial Sequence: Synthetic oligonucleotide
ggauccauagcggugcuca

SEQ ID NO: 532612 - RNA, 19 nt, Artificial Sequence
  Description of Artificial Sequence: Synthetic oligonucleotide
caucauuauauguccauuu

SEQ ID NO: 532613 - RNA, 19 nt, Artificial Sequence
  Description of Artificial Sequence: Synthetic oligonucleotide
auucggccauacccauagg

SEQ ID NO: 532614 - RNA, 19 nt, Artificial Sequence
  Description of Artificial Sequence: Synthetic oligonucleotide
auacaccauagaacagcuc

SEQ ID NO: 532615 - RNA, 19 nt, Artificial Sequence
  Description of Artificial Sequence: Synthetic oligonucleotide
aguaagcagaucacagcaa

SEQ ID NO: 532616 - RNA, 19 nt, Artificial Sequence
  Description of Artificial Sequence: Synthetic oligonucleotide
ggaucggcaauaaaccauc

SEQ ID NO: 532617 - RNA, 19 nt, Artificial Sequence
  Description of Artificial Sequence: Synthetic oligonucleotide
cuagagucacucuccucga

SEQ ID NO: 532618 - RNA, 19 nt, Artificial Sequence
  Description of Artificial Sequence: Synthetic oligonucleotide
gaggucaccuguauaugaa

SEQ ID NO: 532619 - RNA, 19 nt, Artificial Sequence
  Description of Artificial Sequence: Synthetic oligonucleotide
caguacucaggccagacau

SEQ ID NO: 532620 - RNA, 19 nt, Artificial Sequence
  Description of Artificial Sequence: Synthetic oligonucleotide
cagugagauaacgacaaua

SEQ ID NO: 532621 - RNA, 19 nt, Artificial Sequence
  Description of Artificial Sequence: Synthetic oligonucleotide
gaucccaauaagguuuacu

SEQ ID NO: 532622 - RNA, 19 nt, Artificial Sequence
  Description of Artificial Sequence: Synthetic oligonucleotide
caaagagucccaugaccaa

SEQ ID NO: 532623 - RNA, 19 nt, Artificial Sequence
  Description of Artificial Sequence: Synthetic oligonucleotide
acacgucucacaugaugua

SEQ ID NO: 532624 - RNA, 19 nt, Artificial Sequence
  Description of Artificial Sequence: Synthetic oligonucleotide
caucuggacacgucucaca

SEQ ID NO: 532625 - RNA, 19 nt, Artificial Sequence
  Description of Artificial Sequence: Synthetic oligonucleotide
guagggagcucuaugaguu

SEQ ID NO: 532626 - RNA, 19 nt, Artificial Sequence
  Description of Artificial Sequence: Synthetic oligonucleotide
aaguggaaauacagcuuuu

SEQ ID NO: 532627 - RNA, 19 nt, Artificial Sequence
  Description of Artificial Sequence: Synthetic oligonucleotide
ggggaucggcaauaaacca

SEQ ID NO: 532628 - RNA, 19 nt, Artificial Sequence
  Description of Artificial Sequence: Synthetic oligonucleotide
cugagaucaggccuagacu

SEQ ID NO: 532629 - RNA, 19 nt, Artificial Sequence
  Description of Artificial Sequence: Synthetic oligonucleotide
ggccagaacaucaugaaau

SEQ ID NO: 532630 - RNA, 19 nt, Artificial Sequence
  Description of Artificial Sequence: Synthetic oligonucleotide
auccaauaguagggagcuc

SEQ ID NO: 532631 - RNA, 19 nt, Artificial Sequence
  Description of Artificial Sequence: Synthetic oligonucleotide
ccaucgacucaucagggca

SEQ ID NO: 532632 - RNA, 19 nt, Artificial Sequence
  Description of Artificial Sequence: Synthetic oligonucleotide
ccuugagaagucccauggc

SEQ ID NO: 532633 - RNA, 19 nt, Artificial Sequence
  Description of Artificial Sequence: Synthetic oligonucleotide
gggagaugauaggauguug

SEQ ID NO: 532634 - RNA, 19 nt, Artificial Sequence
  Description of Artificial Sequence: Synthetic oligonucleotide
ucaccguguccaugaguau

SEQ ID NO: 532635 - RNA, 19 nt, Artificial Sequence
  Description of Artificial Sequence: Synthetic oligonucleotide
gugaagccguggcugugac

SEQ ID NO: 532636 - RNA, 19 nt, Artificial Sequence
  Description of Artificial Sequence: Synthetic oligonucleotide
gaucaccguguccaugagu

SEQ ID NO: 532637 - RNA, 19 nt, Artificial Sequence
  Description of Artificial Sequence: Synthetic oligonucleotide
agaucaggccuagacuauu

SEQ ID NO: 532638 - RNA, 19 nt, Artificial Sequence
  Description of Artificial Sequence: Synthetic oligonucleotide
gucucgguaugauauuaau

SEQ ID NO: 532639 - RNA, 19 nt, Artificial Sequence
  Description of Artificial Sequence: Synthetic oligonucleotide
gaaauacaccucucauguu

SEQ ID NO: 532640 - RNA, 19 nt, Artificial Sequence
  Description of Artificial Sequence: Synthetic oligonucleotide
agggucucgguaugauauu

SEQ ID NO: 532641 - RNA, 19 nt, Artificial Sequence
  Description of Artificial Sequence: Synthetic oligonucleotide
cagaucccaauaagguuua

SEQ ID NO: 532642 - RNA, 19 nt, Artificial Sequence
  Description of Artificial Sequence: Synthetic oligonucleotide
cauagcggugcucagccau

SEQ ID NO: 532643 - RNA, 19 nt, Artificial Sequence
  Description of Artificial Sequence: Synthetic oligonucleotide
cacgucucacaugauguaa

SEQ ID NO: 532644 - RNA, 19 nt, Artificial Sequence
  Description of Artificial Sequence: Synthetic oligonucleotide
agaucugccuagagucacu

SEQ ID NO: 532645 - RNA, 19 nt, Artificial Sequence
  Description of Artificial Sequence: Synthetic oligonucleotide
ucgacucaucagggcagca

SEQ ID NO: 532646 - RNA, 19 nt, Artificial Sequence
  Description of Artificial Sequence: Synthetic oligonucleotide
cucgagaaucuguuuuagu

SEQ ID NO: 532647 - RNA, 19 nt, Artificial Sequence
  Description of Artificial Sequence: Synthetic oligonucleotide
guuuuccuuuaagaagacu

SEQ ID NO: 532648 - RNA, 19 nt, Artificial Sequence
  Description of Artificial Sequence: Synthetic oligonucleotide
aguacucaggccagacaua

SEQ ID NO: 532649 - RNA, 19 nt, Artificial Sequence
  Description of Artificial Sequence: Synthetic oligonucleotide
cauugucgaaaagcaguaa

SEQ ID NO: 532650 - RNA, 19 nt, Artificial Sequence
  Description of Artificial Sequence: Synthetic oligonucleotide
cucuccucgagaaucuguu

SEQ ID NO: 532651 - RNA, 19 nt, Artificial Sequence
  Description of Artificial Sequence: Synthetic oligonucleotide
gcuuugucauggccagaac

SEQ ID NO: 532652 - RNA, 19 nt, Artificial Sequence
  Description of Artificial Sequence: Synthetic oligonucleotide
ggauaacacugagaaauau

SEQ ID NO: 532653 - RNA, 19 nt, Artificial Sequence
  Description of Artificial Sequence: Synthetic oligonucleotide
caacauguuugugucuagu

SEQ ID NO: 532654 - RNA, 19 nt, Artificial Sequence
  Description of Artificial Sequence: Synthetic oligonucleotide
gcuauaauauuggcagagu

SEQ ID NO: 532655 - RNA, 19 nt, Artificial Sequence
  Description of Artificial Sequence: Synthetic oligonucleotide
ggugguagucucagaagua

SEQ ID NO: 532656 - RNA, 19 nt, Artificial Sequence
  Description of Artificial Sequence: Synthetic oligonucleotide
gggauaacacugagaaaua

SEQ ID NO: 532657 - RNA, 19 nt, Artificial Sequence
  Description of Artificial Sequence: Synthetic oligonucleotide
caccuguauaugaauuguu

SEQ ID NO: 532658 - RNA, 19 nt, Artificial Sequence
  Description of Artificial Sequence: Synthetic oligonucleotide
gcacucacuaccacuccuc

SEQ ID NO: 532659 - RNA, 19 nt, Artificial Sequence
  Description of Artificial Sequence: Synthetic oligonucleotide
ccaauaaggguaccuuucu

SEQ ID NO: 532660 - RNA, 19 nt, Artificial Sequence
  Description of Artificial Sequence: Synthetic oligonucleotide
ccucuuuuagagggagaug

SEQ ID NO: 532661 - RNA, 19 nt, Artificial Sequence
  Description of Artificial Sequence: Synthetic oligonucleotide
cgacaauaucacuguguuc

SEQ ID NO: 532662 - RNA, 19 nt, Artificial Sequence
  Description of Artificial Sequence: Synthetic oligonucleotide
ggucucgguaugauauuaa

SEQ ID NO: 532663 - RNA, 19 nt, Artificial Sequence
  Description of Artificial Sequence: Synthetic oligonucleotide
gggaucggcaauaaaccau

SEQ ID NO: 532664 - RNA, 19 nt, Artificial Sequence
  Description of Artificial Sequence: Synthetic oligonucleotide
caaccuucacacuguucau

SEQ ID NO: 532665 - RNA, 19 nt, Artificial Sequence
  Description of Artificial Sequence: Synthetic oligonucleotide
cggccauacccauaggaga

SEQ ID NO: 532666 - RNA, 19 nt, Artificial Sequence
  Description of Artificial Sequence: Synthetic oligonucleotide
cagacaagacaugcucugu

SEQ ID NO: 532667 - RNA, 19 nt, Artificial Sequence
  Description of Artificial Sequence: Synthetic oligonucleotide
ggucaccuguauaugaauu

SEQ ID NO: 532668 - RNA, 19 nt, Artificial Sequence
  Description of Artificial Sequence: Synthetic oligonucleotide
gggucucgguaugauauua

SEQ ID NO: 532669 - RNA, 19 nt, Artificial Sequence
  Description of Artificial Sequence: Synthetic oligonucleotide
ccaguacucaggccagaca

SEQ ID NO: 532670 - RNA, 19 nt, Artificial Sequence
  Description of Artificial Sequence: Synthetic oligonucleotide
caccagaauccaucauuau

SEQ ID NO: 532671 - RNA, 19 nt, Artificial Sequence
  Description of Artificial Sequence: Synthetic oligonucleotide
ccaauaguagggagcucua

SEQ ID NO: 532672 - RNA, 19 nt, Artificial Sequence
  Description of Artificial Sequence: Synthetic oligonucleotide
caccugugaagccguggcu

SEQ ID NO: 532673 - RNA, 19 nt, Artificial Sequence
  Description of Artificial Sequence: Synthetic oligonucleotide
ccauacccauaggagaaaa

SEQ ID NO: 532674 - RNA, 19 nt, Artificial Sequence
  Description of Artificial Sequence: Synthetic oligonucleotide
cccggaguugaucuguuau

SEQ ID NO: 532675 - RNA, 19 nt, Artificial Sequence
  Description of Artificial Sequence: Synthetic oligonucleotide
ccaugaguaugaugggaau

SEQ ID NO: 532676 - RNA, 19 nt, Artificial Sequence
  Description of Artificial Sequence: Synthetic oligonucleotide
ggagaaaauccggguugcu

SEQ ID NO: 532677 - RNA, 19 nt, Artificial Sequence
  Description of Artificial Sequence: Synthetic oligonucleotide
ccccaugaagugauagagu

SEQ ID NO: 532678 - RNA, 19 nt, Artificial Sequence
  Description of Artificial Sequence: Synthetic oligonucleotide
gccauacccauaggagaaa

SEQ ID NO: 532679 - RNA, 19 nt, Artificial Sequence
  Description of Artificial Sequence: Synthetic oligonucleotide
ccggaggaucaaucaaucu

SEQ ID NO: 532680 - RNA, 19 nt, Artificial Sequence
  Description of Artificial Sequence: Synthetic oligonucleotide
caguaaccugcuguacaau

SEQ ID NO: 532681 - RNA, 19 nt, Artificial Sequence
  Description of Artificial Sequence: Synthetic oligonucleotide
gcagugagauaacgacaau

SEQ ID NO: 532682 - RNA, 19 nt, Artificial Sequence
  Description of Artificial Sequence: Synthetic oligonucleotide
caauuacaucaaguucauu

SEQ ID NO: 532683 - RNA, 19 nt, Artificial Sequence
  Description of Artificial Sequence: Synthetic oligonucleotide
cgucucacaugauguaagu

SEQ ID NO: 532684 - RNA, 19 nt, Artificial Sequence
  Description of Artificial Sequence: Synthetic oligonucleotide
ccaaugcugcccagugugu

SEQ ID NO: 532685 - RNA, 19 nt, Artificial Sequence
  Description of Artificial Sequence: Synthetic oligonucleotide
gcccggaguugaucuguua

SEQ ID NO: 532686 - RNA, 19 nt, Artificial Sequence
  Description of Artificial Sequence: Synthetic oligonucleotide
uuuguuaccaaauauaagc

SEQ ID NO: 532687 - RNA, 19 nt, Artificial Sequence
  Description of Artificial Sequence: Synthetic oligonucleotide
uuaaaauugacaguuacag

SEQ ID NO: 532688 - RNA, 19 nt, Artificial Sequence
  Description of Artificial Sequence: Synthetic oligonucleotide
uacaguauccuacacaagg

SEQ ID NO: 532689 - RNA, 19 nt, Artificial Sequence
  Description of Artificial Sequence: Synthetic oligonucleotide
ucuauauggaauuaaagcu

SEQ ID NO: 532690 - RNA, 19 nt, Artificial Sequence
  Description of Artificial Sequence: Synthetic oligonucleotide
uuuaauucuacucaacaca

SEQ ID NO: 532691 - RNA, 19 nt, Artificial Sequence
  Description of Artificial Sequence: Synthetic oligonucleotide
uccguuaagauucauaaug

SEQ ID NO: 532692 - RNA, 19 nt, Artificial Sequence
  Description of Artificial Sequence: Synthetic oligonucleotide
uuaacaaguaggaaaaccu

SEQ ID NO: 532693 - RNA, 19 nt, Artificial Sequence
  Description of Artificial Sequence: Synthetic oligonucleotide
ugcuauaagauaauaauaa

SEQ ID NO: 532694 - RNA, 19 nt, Artificial Sequence
  Description of Artificial Sequence: Synthetic oligonucleotide
aauguaacgccauaauucu

SEQ ID NO: 532695 - RNA, 19 nt, Artificial Sequence
  Description of Artificial Sequence: Synthetic oligonucleotide
aagaacacaugucaaucac

SEQ ID NO: 532696 - RNA, 19 nt, Artificial Sequence
  Description of Artificial Sequence: Synthetic oligonucleotide
aggaauaaggaccugcugg

SEQ ID NO: 532697 - RNA, 19 nt, Artificial Sequence
  Description of Artificial Sequence: Synthetic oligonucleotide
auuacugagugacaguaac

SEQ ID NO: 532698 - RNA, 19 nt, Artificial Sequence
  Description of Artificial Sequence: Synthetic oligonucleotide
cauaaugccauccuugagg

SEQ ID NO: 532699 - RNA, 19 nt, Artificial Sequence
  Description of Artificial Sequence: Synthetic oligonucleotide
aagugcacuauacaauuuc

SEQ ID NO: 532700 - RNA, 19 nt, Artificial Sequence
  Description of Artificial Sequence: Synthetic oligonucleotide
ugguauaacuuguuggugg

SEQ ID NO: 532701 - RNA, 19 nt, Artificial Sequence
  Description of Artificial Sequence: Synthetic oligonucleotide
ugucuuacuuauaaaagga

SEQ ID NO: 532702 - RNA, 19 nt, Artificial Sequence
  Description of Artificial Sequence: Synthetic oligonucleotide
uguaacgccauaauucuug

SEQ ID NO: 532703 - RNA, 19 nt, Artificial Sequence
  Description of Artificial Sequence: Synthetic oligonucleotide
acauuuaacaaguaggaaa

SEQ ID NO: 532704 - RNA, 19 nt, Artificial Sequence
  Description of Artificial Sequence: Synthetic oligonucleotide
agagguauguauuacugag

SEQ ID NO: 532705 - RNA, 19 nt, Artificial Sequence
  Description of Artificial Sequence: Synthetic oligonucleotide
uaucuuaucguauuggcaa

SEQ ID NO: 532706 - RNA, 19 nt, Artificial Sequence
  Description of Artificial Sequence: Synthetic oligonucleotide
uuuaacaaguaggaaaacc

SEQ ID NO: 532707 - RNA, 19 nt, Artificial Sequence
  Description of Artificial Sequence: Synthetic oligonucleotide
uucuacucaacacagguaa

SEQ ID NO: 532708 - RNA, 19 nt, Artificial Sequence
  Description of Artificial Sequence: Synthetic oligonucleotide
cuguaaauaagauuugcug

SEQ ID NO: 532709 - RNA, 19 nt, Artificial Sequence
  Description of Artificial Sequence: Synthetic oligonucleotide
aaagccagauucuauuaug

SEQ ID NO: 532710 - RNA, 19 nt, Artificial Sequence
  Description of Artificial Sequence: Synthetic oligonucleotide
ugccuaauuaccaauggca

SEQ ID NO: 532711 - RNA, 19 nt, Artificial Sequence
  Description of Artificial Sequence: Synthetic oligonucleotide
aauuaccaauggcagguuc

SEQ ID NO: 532712 - RNA, 19 nt, Artificial Sequence
  Description of Artificial Sequence: Synthetic oligonucleotide
aauaagauuugcuguggcu

SEQ ID NO: 532713 - RNA, 19 nt, Artificial Sequence
  Description of Artificial Sequence: Synthetic oligonucleotide
cucgguguuacauaaagac

SEQ ID NO: 532714 - RNA, 19 nt, Artificial Sequence
  Description of Artificial Sequence: Synthetic oligonucleotide
caauaaacagauucaauuc

SEQ ID NO: 532715 - RNA, 19 nt, Artificial Sequence
  Description of Artificial Sequence: Synthetic oligonucleotide
agaucaauguacagaaugc

SEQ ID NO: 532716 - RNA, 19 nt, Artificial Sequence
  Description of Artificial Sequence: Synthetic oligonucleotide
uagcccaacaagaaaaccc

SEQ ID NO: 532717 - RNA, 19 nt, Artificial Sequence
  Description of Artificial Sequence: Synthetic oligonucleotide
uuugguugauguauguccc

SEQ ID NO: 532718 - RNA, 19 nt, Artificial Sequence
  Description of Artificial Sequence: Synthetic oligonucleotide
accauugauccuuuaaauc

SEQ ID NO: 532719 - RNA, 19 nt, Artificial Sequence
  Description of Artificial Sequence: Synthetic oligonucleotide
  modified_base (12)..(12): a, c, u, g, unknown or other
cucccuaccaunuugacuc

SEQ ID NO: 532720 - RNA, 19 nt, Artificial Sequence
  Description of Artificial Sequence: Synthetic oligonucleotide
uauauaaucucuuccguua

SEQ ID NO: 532721 - RNA, 19 nt, Artificial Sequence
  Description of Artificial Sequence: Synthetic oligonucleotide
gauccuuuaaaucuaagua

SEQ ID NO: 532722 - RNA, 19 nt, Artificial Sequence
  Description of Artificial Sequence: Synthetic oligonucleotide
ugacauuauugcuauaaga

SEQ ID NO: 532723 - RNA, 19 nt, Artificial Sequence
  Description of Artificial Sequence: Synthetic oligonucleotide
agguauguauuacugagug

SEQ ID NO: 532724 - RNA, 19 nt, Artificial Sequence
  Description of Artificial Sequence: Synthetic oligonucleotide
augacguauccccuguucc

SEQ ID NO: 532725 - RNA, 19 nt, Artificial Sequence
  Description of Artificial Sequence: Synthetic oligonucleotide
uggcuugccaguuagaagu

SEQ ID NO: 532726 - RNA, 19 nt, Artificial Sequence
  Description of Artificial Sequence: Synthetic oligonucleotide
guauguauuacugagugac

SEQ ID NO: 532727 - RNA, 19 nt, Artificial Sequence
  Description of Artificial Sequence: Synthetic oligonucleotide
auaacaggagccuguacuc

SEQ ID NO: 532728 - RNA, 19 nt, Artificial Sequence
  Description of Artificial Sequence: Synthetic oligonucleotide
uaucguauuggcaaacaac

SEQ ID NO: 532729 - RNA, 19 nt, Artificial Sequence
  Description of Artificial Sequence: Synthetic oligonucleotide
uucaaucuaucaaaaggga

SEQ ID NO: 532730 - RNA, 19 nt, Artificial Sequence
  Description of Artificial Sequence: Synthetic oligonucleotide
aaccguuccauuuuaacuu

SEQ ID NO: 532731 - RNA, 19 nt, Artificial Sequence
  Description of Artificial Sequence: Synthetic oligonucleotide
uacuuacccucuaaugugg

SEQ ID NO: 532732 - RNA, 19 nt, Artificial Sequence
  Description of Artificial Sequence: Synthetic oligonucleotide
ugauccuuuaaaucuaagu

SEQ ID NO: 532733 - RNA, 19 nt, Artificial Sequence
  Description of Artificial Sequence: Synthetic oligonucleotide
uauuaugcuugucaagaac

SEQ ID NO: 532734 - RNA, 19 nt, Artificial Sequence
  Description of Artificial Sequence: Synthetic oligonucleotide
ugggguguguauuuaacag

SEQ ID NO: 532735 - RNA, 19 nt, Artificial Sequence
  Description of Artificial Sequence: Synthetic oligonucleotide
augccuaauuaccaauggc

SEQ ID NO: 532736 - RNA, 19 nt, Artificial Sequence
  Description of Artificial Sequence: Synthetic oligonucleotide
aaucuaaguagauguuuca

SEQ ID NO: 532737 - RNA, 19 nt, Artificial Sequence
  Description of Artificial Sequence: Synthetic oligonucleotide
uguuucauacagcagggaa

SEQ ID NO: 532738 - RNA, 19 nt, Artificial Sequence
  Description of Artificial Sequence: Synthetic oligonucleotide
auacuuacccucuaaugug

SEQ ID NO: 532739 - RNA, 19 nt, Artificial Sequence
  Description of Artificial Sequence: Synthetic oligonucleotide
ucaaucuaucaaaagggaa

SEQ ID NO: 532740 - RNA, 19 nt, Artificial Sequence
  Description of Artificial Sequence: Synthetic oligonucleotide
cauaucaagugcacuauac

SEQ ID NO: 532741 - RNA, 19 nt, Artificial Sequence
  Description of Artificial Sequence: Synthetic oligonucleotide
ugaccugagucuuauuucc

SEQ ID NO: 532742 - RNA, 19 nt, Artificial Sequence
  Description of Artificial Sequence: Synthetic oligonucleotide
aguauccuacacaaggccc

SEQ ID NO: 532743 - RNA, 19 nt, Artificial Sequence
  Description of Artificial Sequence: Synthetic oligonucleotide
uguuaccaaauauaagcac

SEQ ID NO: 532744 - RNA, 19 nt, Artificial Sequence
  Description of Artificial Sequence: Synthetic oligonucleotide
auaacuuguugguggugcc

SEQ ID NO: 532745 - RNA, 19 nt, Artificial Sequence
  Description of Artificial Sequence: Synthetic oligonucleotide
uugcuauaagauaauaaua

SEQ ID NO: 532746 - RNA, 19 nt, Artificial Sequence
  Description of Artificial Sequence: Synthetic oligonucleotide
uguguaucuuaucguauug

SEQ ID NO: 532747 - RNA, 19 nt, Artificial Sequence
  Description of Artificial Sequence: Synthetic oligonucleotide
accuaauuaaaacaagcau

SEQ ID NO: 532748 - RNA, 19 nt, Artificial Sequence
  Description of Artificial Sequence: Synthetic oligonucleotide
acaagcauccauuccuggg

SEQ ID NO: 532749 - RNA, 19 nt, Artificial Sequence
  Description of Artificial Sequence: Synthetic oligonucleotide
aagagguauguauuacuga

SEQ ID NO: 532750 - RNA, 19 nt, Artificial Sequence
  Description of Artificial Sequence: Synthetic oligonucleotide
acuugcagcaccaaugggg

SEQ ID NO: 532751 - RNA, 19 nt, Artificial Sequence
  Description of Artificial Sequence: Synthetic oligonucleotide
caagagguauguauuacug

SEQ ID NO: 532752 - RNA, 19 nt, Artificial Sequence
  Description of Artificial Sequence: Synthetic oligonucleotide
augaccugagucuuauuuc

SEQ ID NO: 532753 - RNA, 19 nt, Artificial Sequence
  Description of Artificial Sequence: Synthetic oligonucleotide
ucggugguaaccuuuguga

SEQ ID NO: 532754 - RNA, 19 nt, Artificial Sequence
  Description of Artificial Sequence: Synthetic oligonucleotide
ugaccauugauccuuuaaa

SEQ ID NO: 532755 - RNA, 19 nt, Artificial Sequence
  Description of Artificial Sequence: Synthetic oligonucleotide
agugucuauguugucaagg

SEQ ID NO: 532756 - RNA, 19 nt, Artificial Sequence
  Description of Artificial Sequence: Synthetic oligonucleotide
aaugggguguguauuuaac

SEQ ID NO: 532757 - RNA, 19 nt, Artificial Sequence
  Description of Artificial Sequence: Synthetic oligonucleotide
uaaaauugacaguuacagu

SEQ ID NO: 532758 - RNA, 19 nt, Artificial Sequence
  Description of Artificial Sequence: Synthetic oligonucleotide
ucuaaagccagauucuauu

SEQ ID NO: 532759 - RNA, 19 nt, Artificial Sequence
  Description of Artificial Sequence: Synthetic oligonucleotide
uucaggucauuccaacaag

SEQ ID NO: 532760 - RNA, 19 nt, Artificial Sequence
  Description of Artificial Sequence: Synthetic oligonucleotide
ucacauaucaagugcacua

SEQ ID NO: 532761 - RNA, 19 nt, Artificial Sequence
  Description of Artificial Sequence: Synthetic oligonucleotide
aaucuaucaaaagggaaau

SEQ ID NO: 532762 - RNA, 19 nt, Artificial Sequence
  Description of Artificial Sequence: Synthetic oligonucleotide
ucaagugcacuauacaauu

SEQ ID NO: 532763 - RNA, 19 nt, Artificial Sequence
  Description of Artificial Sequence: Synthetic oligonucleotide
  modified_base (16)..(16): a, c, u, g, unknown or other
aagccucccuaccaunuug

SEQ ID NO: 532764 - RNA, 19 nt, Artificial Sequence
  Description of Artificial Sequence: Synthetic oligonucleotide
ugucaaucacugcacacac

SEQ ID NO: 532765 - RNA, 19 nt, Artificial Sequence
  Description of Artificial Sequence: Synthetic oligonucleotide
auguauuacugagugacag

SEQ ID NO: 532766 - RNA, 19 nt, Artificial Sequence
  Description of Artificial Sequence: Synthetic oligonucleotide
  modified_base (7)..(7): a, c, u, g, unknown or other
uaccaunuugacuccagaa

SEQ ID NO: 532767 - RNA, 19 nt, Artificial Sequence
  Description of Artificial Sequence: Synthetic oligonucleotide
  modified_base (2)..(2): a, c, u, g, unknown or other
unuugacuccagaaacugc

SEQ ID NO: 532768 - RNA, 19 nt, Artificial Sequence
  Description of Artificial Sequence: Synthetic oligonucleotide
gauaacaggagccuguacu

SEQ ID NO: 532769 - RNA, 19 nt, Artificial Sequence
  Description of Artificial Sequence: Synthetic oligonucleotide
gaucaauguacagaaugcc

SEQ ID NO: 532770 - RNA, 19 nt, Artificial Sequence
  Description of Artificial Sequence: Synthetic oligonucleotide
ucuaaguagauguuucaua

SEQ ID NO: 532771 - RNA, 19 nt, Artificial Sequence
  Description of Artificial Sequence: Synthetic oligonucleotide
aucguauuggcaaacaaca

SEQ ID NO: 532772 - RNA, 19 nt, Artificial Sequence
  Description of Artificial Sequence: Synthetic oligonucleotide
ucuacugcgcuuuucugac

SEQ ID NO: 532773 - RNA, 19 nt, Artificial Sequence
  Description of Artificial Sequence: Synthetic oligonucleotide
caugccuaauuaccaaugg

SEQ ID NO: 532774 - RNA, 19 nt, Artificial Sequence
  Description of Artificial Sequence: Synthetic oligonucleotide
auaucaagugcacuauaca

SEQ ID NO: 532775 - RNA, 19 nt, Artificial Sequence
  Description of Artificial Sequence: Synthetic oligonucleotide
acaaguaucuucugacuga

SEQ ID NO: 532776 - RNA, 19 nt, Artificial Sequence
  Description of Artificial Sequence: Synthetic oligonucleotide
ggaauaaggaccugcuggg

SEQ ID NO: 532777 - RNA, 19 nt, Artificial Sequence
  Description of Artificial Sequence: Synthetic oligonucleotide
guuaccaaauauaagcaca

SEQ ID NO: 532778 - RNA, 19 nt, Artificial Sequence
  Description of Artificial Sequence: Synthetic oligonucleotide
ugugugugugugaugcugc

SEQ ID NO: 532779 - RNA, 19 nt, Artificial Sequence
  Description of Artificial Sequence: Synthetic oligonucleotide
caaucuaucaaaagggaaa

SEQ ID NO: 532780 - RNA, 19 nt, Artificial Sequence
  Description of Artificial Sequence: Synthetic oligonucleotide
acaauuucagcucgguggu

SEQ ID NO: 532781 - RNA, 19 nt, Artificial Sequence
  Description of Artificial Sequence: Synthetic oligonucleotide
caucaggacuuguucaucc

SEQ ID NO: 532782 - RNA, 19 nt, Artificial Sequence
  Description of Artificial Sequence: Synthetic oligonucleotide
ucgguguuacauaaagacu

SEQ ID NO: 532783 - RNA, 19 nt, Artificial Sequence
  Description of Artificial Sequence: Synthetic oligonucleotide
cuuccguuaagauucauaa

SEQ ID NO: 532784 - RNA, 19 nt, Artificial Sequence
  Description of Artificial Sequence: Synthetic oligonucleotide
ucuaauguggugacauuau

SEQ ID NO: 532785 - RNA, 19 nt, Artificial Sequence
  Description of Artificial Sequence: Synthetic oligonucleotide
ucagagggagacaacucug

SEQ ID NO: 532786 - RNA, 19 nt, Artificial Sequence
  Description of Artificial Sequence: Synthetic oligonucleotide
aauccaucuacugcccuag

SEQ ID NO: 532787 - RNA, 19 nt, Artificial Sequence
  Description of Artificial Sequence: Synthetic oligonucleotide
aacuugcagcaccaauggg

SEQ ID NO: 532788 - RNA, 19 nt, Artificial Sequence
  Description of Artificial Sequence: Synthetic oligonucleotide
cugcauuaacuuauucucc

SEQ ID NO: 532789 - RNA, 19 nt, Artificial Sequence
  Description of Artificial Sequence: Synthetic oligonucleotide
  modified_base (3)..(3): a, c, u, g, unknown or other
aunuugacuccagaaacug

SEQ ID NO: 532790 - RNA, 19 nt, Artificial Sequence
  Description of Artificial Sequence: Synthetic oligonucleotide
uaacaaguaggaaaaccua

SEQ ID NO: 532791 - RNA, 19 nt, Artificial Sequence
  Description of Artificial Sequence: Synthetic oligonucleotide
uauguauuacugagugaca

SEQ ID NO: 532792 - RNA, 19 nt, Artificial Sequence
  Description of Artificial Sequence: Synthetic oligonucleotide
uuaucguauuggcaaacaa

SEQ ID NO: 532793 - RNA, 19 nt, Artificial Sequence
  Description of Artificial Sequence: Synthetic oligonucleotide
auauauaaucucuuccguu

SEQ ID NO: 532794 - RNA, 19 nt, Artificial Sequence
  Description of Artificial Sequence: Synthetic oligonucleotide
uugccaguuagaaguagug

SEQ ID NO: 532795 - RNA, 19 nt, Artificial Sequence
  Description of Artificial Sequence: Synthetic oligonucleotide
  modified_base (6)..(6): a, c, u, g, unknown or other
accaunuugacuccagaaa

SEQ ID NO: 532796 - RNA, 19 nt, Artificial Sequence
  Description of Artificial Sequence: Synthetic oligonucleotide
acaguuacaguauccuaca

SEQ ID NO: 532797 - RNA, 19 nt, Artificial Sequence
  Description of Artificial Sequence: Synthetic oligonucleotide
auaaggaccugcugggucu

SEQ ID NO: 532798 - RNA, 19 nt, Artificial Sequence
  Description of Artificial Sequence: Synthetic oligonucleotide
guaccgauggcugagguug

SEQ ID NO: 532799 - RNA, 19 nt, Artificial Sequence
  Description of Artificial Sequence: Synthetic oligonucleotide
cauuaacuuauucucccac

SEQ ID NO: 532800 - RNA, 19 nt, Artificial Sequence
  Description of Artificial Sequence: Synthetic oligonucleotide
agauucauaaugccauccu

SEQ ID NO: 532801 - RNA, 19 nt, Artificial Sequence
  Description of Artificial Sequence: Synthetic oligonucleotide
uguuuguuccaguagcuuu

SEQ ID NO: 532802 - RNA, 19 nt, Artificial Sequence
  Description of Artificial Sequence: Synthetic oligonucleotide
uguauuacugagugacagu

SEQ ID NO: 532803 - RNA, 19 nt, Artificial Sequence
  Description of Artificial Sequence: Synthetic oligonucleotide
ugaaucuugaugccagcau

SEQ ID NO: 532804 - RNA, 19 nt, Artificial Sequence
  Description of Artificial Sequence: Synthetic oligonucleotide
ugcuucuuagaucaaugua

SEQ ID NO: 532805 - RNA, 19 nt, Artificial Sequence
  Description of Artificial Sequence: Synthetic oligonucleotide
cuaaaugcauagcucagca

SEQ ID NO: 532806 - RNA, 19 nt, Artificial Sequence
  Description of Artificial Sequence: Synthetic oligonucleotide
aagcccaauauaaaagccu

SEQ ID NO: 532807 - RNA, 19 nt, Artificial Sequence
  Description of Artificial Sequence: Synthetic oligonucleotide
uuucaaaccguuccauuuu

SEQ ID NO: 532808 - RNA, 19 nt, Artificial Sequence
  Description of Artificial Sequence: Synthetic oligonucleotide
aguaugggaguacaguuuu

SEQ ID NO: 532809 - RNA, 19 nt, Artificial Sequence
  Description of Artificial Sequence: Synthetic oligonucleotide
guaucugcgcuugugcugg

SEQ ID NO: 532810 - RNA, 19 nt, Artificial Sequence
  Description of Artificial Sequence: Synthetic oligonucleotide
ugcauucguccauucaagc

SEQ ID NO: 532811 - RNA, 19 nt, Artificial Sequence
  Description of Artificial Sequence: Synthetic oligonucleotide
aaaugggguguguauuuaa

SEQ ID NO: 532812 - RNA, 19 nt, Artificial Sequence
  Description of Artificial Sequence: Synthetic oligonucleotide
uuacaguauccuacacaag

SEQ ID NO: 532813 - RNA, 19 nt, Artificial Sequence
  Description of Artificial Sequence: Synthetic oligonucleotide
auaaucucuuccguuaaga

SEQ ID NO: 532814 - RNA, 19 nt, Artificial Sequence
  Description of Artificial Sequence: Synthetic oligonucleotide
gugugugugugugugaugc

SEQ ID NO: 532815 - RNA, 19 nt, Artificial Sequence
  Description of Artificial Sequence: Synthetic oligonucleotide
aaauccaucuacugcccua

SEQ ID NO: 532816 - RNA, 19 nt, Artificial Sequence
  Description of Artificial Sequence: Synthetic oligonucleotide
accaauggcagguuccugu

SEQ ID NO: 532817 - RNA, 19 nt, Artificial Sequence
  Description of Artificial Sequence: Synthetic oligonucleotide
uuacaugccuaauuaccaa

SEQ ID NO: 532818 - RNA, 19 nt, Artificial Sequence
  Description of Artificial Sequence: Synthetic oligonucleotide
gcaucugugguauaacuug

SEQ ID NO: 532819 - RNA, 19 nt, Artificial Sequence
  Description of Artificial Sequence: Synthetic oligonucleotide
ugacaugcggaaguugaag

SEQ ID NO: 532820 - RNA, 19 nt, Artificial Sequence
  Description of Artificial Sequence: Synthetic oligonucleotide
agggagacaacucugcauu

SEQ ID NO: 532821 - RNA, 19 nt, Artificial Sequence
  Description of Artificial Sequence: Synthetic oligonucleotide
  modified_base (5)..(5): a, c, u, g, unknown or other
ccaunuugacuccagaaac

SEQ ID NO: 532822 - RNA, 19 nt, Artificial Sequence
  Description of Artificial Sequence: Synthetic oligonucleotide
ugcgcuuuucugacaugcg

SEQ ID NO: 532823 - RNA, 19 nt, Artificial Sequence
  Description of Artificial Sequence: Synthetic oligonucleotide
ucuuccguuaagauucaua

SEQ ID NO: 532824 - RNA, 19 nt, Artificial Sequence
  Description of Artificial Sequence: Synthetic oligonucleotide
aggucauuccaacaaguau

SEQ ID NO: 532825 - RNA, 19 nt, Artificial Sequence
  Description of Artificial Sequence: Synthetic oligonucleotide
gacuaaaugcauagcucag

SEQ ID NO: 532826 - RNA, 19 nt, Artificial Sequence
  Description of Artificial Sequence: Synthetic oligonucleotide
uccauucaagccaccaaaa

SEQ ID NO: 532827 - RNA, 19 nt, Artificial Sequence
  Description of Artificial Sequence: Synthetic oligonucleotide
auauaaucucuuccguuaa

SEQ ID NO: 532828 - RNA, 19 nt, Artificial Sequence
  Description of Artificial Sequence: Synthetic oligonucleotide
aaguagugucuauguuguc

SEQ ID NO: 532829 - RNA, 19 nt, Artificial Sequence
  Description of Artificial Sequence: Synthetic oligonucleotide
ugcuugucaagaacacaug

SEQ ID NO: 532830 - RNA, 19 nt, Artificial Sequence
  Description of Artificial Sequence: Synthetic oligonucleotide
uaaaugcauagcucagcac

SEQ ID NO: 532831 - RNA, 19 nt, Artificial Sequence
  Description of Artificial Sequence: Synthetic oligonucleotide
auuucagcucggugguaac

SEQ ID NO: 532832 - RNA, 19 nt, Artificial Sequence
  Description of Artificial Sequence: Synthetic oligonucleotide
ccuuaugcuucuuagauca

SEQ ID NO: 532833 - RNA, 19 nt, Artificial Sequence
  Description of Artificial Sequence: Synthetic oligonucleotide
agaaacugcacaugacaaa

SEQ ID NO: 532834 - RNA, 19 nt, Artificial Sequence
  Description of Artificial Sequence: Synthetic oligonucleotide
gaugacguauccccuguuc

SEQ ID NO: 532835 - RNA, 19 nt, Artificial Sequence
  Description of Artificial Sequence: Synthetic oligonucleotide
augcuucuuagaucaaugu

SEQ ID NO: 532836 - RNA, 19 nt, Artificial Sequence
  Description of Artificial Sequence: Synthetic oligonucleotide
ugacguauccccuguucca

SEQ ID NO: 532837 - RNA, 19 nt, Artificial Sequence
  Description of Artificial Sequence: Synthetic oligonucleotide
uccuacacaaggcccuccc

SEQ ID NO: 532838 - RNA, 19 nt, Artificial Sequence
  Description of Artificial Sequence: Synthetic oligonucleotide
guaacgccauaauucuugc

SEQ ID NO: 532839 - RNA, 19 nt, Artificial Sequence
  Description of Artificial Sequence: Synthetic oligonucleotide
uucacauaucaagugcacu

SEQ ID NO: 532840 - RNA, 19 nt, Artificial Sequence
  Description of Artificial Sequence: Synthetic oligonucleotide
uacaugccuaauuaccaau

SEQ ID NO: 532841 - RNA, 19 nt, Artificial Sequence
  Description of Artificial Sequence: Synthetic oligonucleotide
ucguauuggcaaacaacaa

SEQ ID NO: 532842 - RNA, 19 nt, Artificial Sequence
  Description of Artificial Sequence: Synthetic oligonucleotide
ccguuaagauucauaaugc

SEQ ID NO: 532843 - RNA, 19 nt, Artificial Sequence
  Description of Artificial Sequence: Synthetic oligonucleotide
ucugcgcuugugcuggugu

SEQ ID NO: 532844 - RNA, 19 nt, Artificial Sequence
  Description of Artificial Sequence: Synthetic oligonucleotide
ucucagagggagacaacuc

SEQ ID NO: 532845 - RNA, 19 nt, Artificial Sequence
  Description of Artificial Sequence: Synthetic oligonucleotide
uuccugaggagccgauuug

SEQ ID NO: 532846 - RNA, 19 nt, Artificial Sequence
  Description of Artificial Sequence: Synthetic oligonucleotide
guugucaaggucuagcuuu

SEQ ID NO: 532847 - RNA, 19 nt, Artificial Sequence
  Description of Artificial Sequence: Synthetic oligonucleotide
gacaaaguccaguccucac

SEQ ID NO: 532848 - RNA, 19 nt, Artificial Sequence
  Description of Artificial Sequence: Synthetic oligonucleotide
cuaauuaccaauggcaggu

SEQ ID NO: 532849 - RNA, 19 nt, Artificial Sequence
  Description of Artificial Sequence: Synthetic oligonucleotide
ggugcuacaguuccauggc

SEQ ID NO: 532850 - RNA, 19 nt, Artificial Sequence
  Description of Artificial Sequence: Synthetic oligonucleotide
agccagauucuauuaugcu

SEQ ID NO: 532851 - RNA, 19 nt, Artificial Sequence
  Description of Artificial Sequence: Synthetic oligonucleotide
gagucuuauuuccuguaaa

SEQ ID NO: 532852 - RNA, 19 nt, Artificial Sequence
  Description of Artificial Sequence: Synthetic oligonucleotide
ucuuaucguauuggcaaac

SEQ ID NO: 532853 - RNA, 19 nt, Artificial Sequence
  Description of Artificial Sequence: Synthetic oligonucleotide
gccaguuagaaguaguguc

SEQ ID NO: 532854 - RNA, 19 nt, Artificial Sequence
  Description of Artificial Sequence: Synthetic oligonucleotide
acauauuccugaggagccg

SEQ ID NO: 532855 - RNA, 19 nt, Artificial Sequence
  Description of Artificial Sequence: Synthetic oligonucleotide
cagaaacugcacaugacaa

SEQ ID NO: 532856 - RNA, 19 nt, Artificial Sequence
  Description of Artificial Sequence: Synthetic oligonucleotide
aucuccaauugcuuuggaa

SEQ ID NO: 532857 - RNA, 19 nt, Artificial Sequence
  Description of Artificial Sequence: Synthetic oligonucleotide
cugcgcuuuucugacaugc

SEQ ID NO: 532858 - RNA, 19 nt, Artificial Sequence
  Description of Artificial Sequence: Synthetic oligonucleotide
aucaagugcacuauacaau

SEQ ID NO: 532859 - RNA, 19 nt, Artificial Sequence
  Description of Artificial Sequence: Synthetic oligonucleotide
acgccauaauucuugcccu

SEQ ID NO: 532860 - RNA, 19 nt, Artificial Sequence
  Description of Artificial Sequence: Synthetic oligonucleotide
acugugaccauugauccuu

SEQ ID NO: 532861 - RNA, 19 nt, Artificial Sequence
  Description of Artificial Sequence: Synthetic oligonucleotide
agugcacuauacaauuuca

SEQ ID NO: 532862 - RNA, 19 nt, Artificial Sequence
  Description of Artificial Sequence: Synthetic oligonucleotide
  modified_base (4)..(4): a, c, u, g, unknown or other
caunuugacuccagaaacu

SEQ ID NO: 532863 - RNA, 19 nt, Artificial Sequence
  Description of Artificial Sequence: Synthetic oligonucleotide
uguugguggugccguagcu

SEQ ID NO: 532864 - RNA, 19 nt, Artificial Sequence
  Description of Artificial Sequence: Synthetic oligonucleotide
guaucuuaucguauuggca

SEQ ID NO: 532865 - RNA, 19 nt, Artificial Sequence
  Description of Artificial Sequence: Synthetic oligonucleotide
acaugccuaauuaccaaug

SEQ ID NO: 532866 - RNA, 19 nt, Artificial Sequence
  Description of Artificial Sequence: Synthetic oligonucleotide
gugcacuauacaauuucag

SEQ ID NO: 532867 - RNA, 19 nt, Artificial Sequence
  Description of Artificial Sequence: Synthetic oligonucleotide
ugcccuagacugcauuaac

SEQ ID NO: 532868 - RNA, 19 nt, Artificial Sequence
  Description of Artificial Sequence: Synthetic oligonucleotide
gacaugcggaaguugaagu

SEQ ID NO: 532869 - RNA, 19 nt, Artificial Sequence
  Description of Artificial Sequence: Synthetic oligonucleotide
aaauucucagagggagaca

SEQ ID NO: 532870 - RNA, 19 nt, Artificial Sequence
  Description of Artificial Sequence: Synthetic oligonucleotide
ugccaguuagaaguagugu

SEQ ID NO: 532871 - RNA, 19 nt, Artificial Sequence
  Description of Artificial Sequence: Synthetic oligonucleotide
augaaucuugaugccagca

SEQ ID NO: 532872 - RNA, 19 nt, Artificial Sequence
  Description of Artificial Sequence: Synthetic oligonucleotide
aucuuaucguauuggcaaa

SEQ ID NO: 532873 - RNA, 19 nt, Artificial Sequence
  Description of Artificial Sequence: Synthetic oligonucleotide
ugcgcuugugcuggugugg

SEQ ID NO: 532874 - RNA, 19 nt, Artificial Sequence
  Description of Artificial Sequence: Synthetic oligonucleotide
aguuagaaguagugucuau

SEQ ID NO: 532875 - RNA, 19 nt, Artificial Sequence
  Description of Artificial Sequence: Synthetic oligonucleotide
guagcccaacaagaaaacc

SEQ ID NO: 532876 - RNA, 19 nt, Artificial Sequence
  Description of Artificial Sequence: Synthetic oligonucleotide
uuccguuaagauucauaau

SEQ ID NO: 532877 - RNA, 19 nt, Artificial Sequence
  Description of Artificial Sequence: Synthetic oligonucleotide
aaacugcacaugacaaagu

SEQ ID NO: 532878 - RNA, 19 nt, Artificial Sequence
  Description of Artificial Sequence: Synthetic oligonucleotide
gccuaauuaccaauggcag

SEQ ID NO: 532879 - RNA, 19 nt, Artificial Sequence
  Description of Artificial Sequence: Synthetic oligonucleotide
aucuacugcccuagacugc

SEQ ID NO: 532880 - RNA, 19 nt, Artificial Sequence
  Description of Artificial Sequence: Synthetic oligonucleotide
gaccauugauccuuuaaau

SEQ ID NO: 532881 - RNA, 19 nt, Artificial Sequence
  Description of Artificial Sequence: Synthetic oligonucleotide
gaugcugcugcugcugcug

SEQ ID NO: 532882 - RNA, 19 nt, Artificial Sequence
  Description of Artificial Sequence: Synthetic oligonucleotide
aucaggacuuguucaucca

SEQ ID NO: 532883 - RNA, 19 nt, Artificial Sequence
  Description of Artificial Sequence: Synthetic oligonucleotide
uccaauugcuuuggaaaau

SEQ ID NO: 532884 - RNA, 19 nt, Artificial Sequence
  Description of Artificial Sequence: Synthetic oligonucleotide
gugguauaacuuguuggug

SEQ ID NO: 532885 - RNA, 19 nt, Artificial Sequence
  Description of Artificial Sequence: Synthetic oligonucleotide
ggagacaacucugcauucg

SEQ ID NO: 532886 - RNA, 19 nt, Artificial Sequence
  Description of Artificial Sequence: Synthetic oligonucleotide
gguaucugcgcuugugcug

SEQ ID NO: 532887 - RNA, 19 nt, Artificial Sequence
  Description of Artificial Sequence: Synthetic oligonucleotide
gcgcuuuucugacaugcgg

SEQ ID NO: 532888 - RNA, 19 nt, Artificial Sequence
  Description of Artificial Sequence: Synthetic oligonucleotide
cguuaagauucauaaugcc

SEQ ID NO: 532889 - RNA, 19 nt, Artificial Sequence
  Description of Artificial Sequence: Synthetic oligonucleotide
caggaauaaggaccugcug

SEQ ID NO: 532890 - RNA, 19 nt, Artificial Sequence
  Description of Artificial Sequence: Synthetic oligonucleotide
cguauuggcaaacaacaac

SEQ ID NO: 532891 - RNA, 19 nt, Artificial Sequence
  Description of Artificial Sequence: Synthetic oligonucleotide
ccauugauccuuuaaaucu

SEQ ID NO: 532892 - RNA, 19 nt, Artificial Sequence
  Description of Artificial Sequence: Synthetic oligonucleotide
agguugcgcuugcuggugg

SEQ ID NO: 532893 - RNA, 19 nt, Artificial Sequence
  Description of Artificial Sequence: Synthetic oligonucleotide
gugugugugugugaugcug

SEQ ID NO: 532894 - RNA, 19 nt, Artificial Sequence
  Description of Artificial Sequence: Synthetic oligonucleotide
ucucuuccguuaagauuca

SEQ ID NO: 532895 - RNA, 19 nt, Artificial Sequence
  Description of Artificial Sequence: Synthetic oligonucleotide
gugaccauugauccuuuaa

SEQ ID NO: 532896 - RNA, 19 nt, Artificial Sequence
  Description of Artificial Sequence: Synthetic oligonucleotide
acugcccuagacugcauua

SEQ ID NO: 532897 - RNA, 19 nt, Artificial Sequence
  Description of Artificial Sequence: Synthetic oligonucleotide
augcugcugcugcugcugg

SEQ ID NO: 532898 - RNA, 19 nt, Artificial Sequence
  Description of Artificial Sequence: Synthetic oligonucleotide
uaaaugggguguguauuua

SEQ ID NO: 532899 - RNA, 19 nt, Artificial Sequence
  Description of Artificial Sequence: Synthetic oligonucleotide
ggaagcaagagguauguau

SEQ ID NO: 532900 - RNA, 19 nt, Artificial Sequence
  Description of Artificial Sequence: Synthetic oligonucleotide
gaagcaagagguauguauu

SEQ ID NO: 532901 - RNA, 19 nt, Artificial Sequence
  Description of Artificial Sequence: Synthetic oligonucleotide
uaaugccauccuugaggug

SEQ ID NO: 532902 - RNA, 19 nt, Artificial Sequence
  Description of Artificial Sequence: Synthetic oligonucleotide
ugugugugugugugaugcu

SEQ ID NO: 532903 - RNA, 19 nt, Artificial Sequence
  Description of Artificial Sequence: Synthetic oligonucleotide
cuuaucguauuggcaaaca

SEQ ID NO: 532904 - RNA, 19 nt, Artificial Sequence
  Description of Artificial Sequence: Synthetic oligonucleotide
uggugugugugugugugau

SEQ ID NO: 532905 - RNA, 19 nt, Artificial Sequence
  Description of Artificial Sequence: Synthetic oligonucleotide
cuacaguuccauggcuugc

SEQ ID NO: 532906 - RNA, 19 nt, Artificial Sequence
  Description of Artificial Sequence: Synthetic oligonucleotide
ccauucaagccaccaaaag

SEQ ID NO: 532907 - RNA, 19 nt, Artificial Sequence
  Description of Artificial Sequence: Synthetic oligonucleotide
ugcugcugcugcugcuggg

SEQ ID NO: 532908 - RNA, 19 nt, Artificial Sequence
  Description of Artificial Sequence: Synthetic oligonucleotide
caguuacaguauccuacac

SEQ ID NO: 532909 - RNA, 19 nt, Artificial Sequence
  Description of Artificial Sequence: Synthetic oligonucleotide
agcauccauuccuggguca

SEQ ID NO: 532910 - RNA, 19 nt, Artificial Sequence
  Description of Artificial Sequence: Synthetic oligonucleotide
gucaagaacacaugucaau

SEQ ID NO: 532911 - RNA, 19 nt, Artificial Sequence
  Description of Artificial Sequence: Synthetic oligonucleotide
uaccgauggcugagguugc

SEQ ID NO: 532912 - RNA, 19 nt, Artificial Sequence
  Description of Artificial Sequence: Synthetic oligonucleotide
gguggugugugugugugug

SEQ ID NO: 532913 - RNA, 19 nt, Artificial Sequence
  Description of Artificial Sequence: Synthetic oligonucleotide
  modified_base (9)..(9): a, c, u, g, unknown or other
ccuaccaunuugacuccag

SEQ ID NO: 532914 - RNA, 19 nt, Artificial Sequence
  Description of Artificial Sequence: Synthetic oligonucleotide
cucuaauguggugacauua

SEQ ID NO: 532915 - RNA, 19 nt, Artificial Sequence
  Description of Artificial Sequence: Synthetic oligonucleotide
ggugccguagcuugcugug

SEQ ID NO: 532916 - RNA, 19 nt, Artificial Sequence
  Description of Artificial Sequence: Synthetic oligonucleotide
gggguguguauuuaacaga

SEQ ID NO: 532917 - RNA, 19 nt, Artificial Sequence
  Description of Artificial Sequence: Synthetic oligonucleotide
gaggugaaauuuccauuua

SEQ ID NO: 532918 - RNA, 19 nt, Artificial Sequence
  Description of Artificial Sequence: Synthetic oligonucleotide
accaauggggcuugcuguu

SEQ ID NO: 532919 - RNA, 19 nt, Artificial Sequence
  Description of Artificial Sequence: Synthetic oligonucleotide
gaaauccaucuacugcccu

SEQ ID NO: 532920 - RNA, 19 nt, Artificial Sequence
  Description of Artificial Sequence: Synthetic oligonucleotide
aguuccaucaggacuuguu

SEQ ID NO: 532921 - RNA, 19 nt, Artificial Sequence
  Description of Artificial Sequence: Synthetic oligonucleotide
uacugcccuagacugcauu

SEQ ID NO: 532922 - RNA, 19 nt, Artificial Sequence
  Description of Artificial Sequence: Synthetic oligonucleotide
cucagagggagacaacucu

SEQ ID NO: 532923 - RNA, 19 nt, Artificial Sequence
  Description of Artificial Sequence: Synthetic oligonucleotide
gugguggugugugugugug

SEQ ID NO: 532924 - RNA, 19 nt, Artificial Sequence
  Description of Artificial Sequence: Synthetic oligonucleotide
  modified_base (8)..(8): a, c, u, g, unknown or other
cuaccaunuugacuccaga

SEQ ID NO: 532925 - RNA, 19 nt, Artificial Sequence
  Description of Artificial Sequence: Synthetic oligonucleotide
uggugguggugugugugug

SEQ ID NO: 532926 - RNA, 19 nt, Artificial Sequence
  Description of Artificial Sequence: Synthetic oligonucleotide
cugugucaaagaguuccug

SEQ ID NO: 532927 - RNA, 19 nt, Artificial Sequence
  Description of Artificial Sequence: Synthetic oligonucleotide
cauauuccugaggagccga

SEQ ID NO: 532928 - RNA, 19 nt, Artificial Sequence
  Description of Artificial Sequence: Synthetic oligonucleotide
gagguugcgcuugcuggug

SEQ ID NO: 532929 - RNA, 19 nt, Artificial Sequence
  Description of Artificial Sequence: Synthetic oligonucleotide
uauccuacacaaggcccuc

SEQ ID NO: 532930 - RNA, 19 nt, Artificial Sequence
  Description of Artificial Sequence: Synthetic oligonucleotide
auguuucauacagcaggga

SEQ ID NO: 532931 - RNA, 19 nt, Artificial Sequence
  Description of Artificial Sequence: Synthetic oligonucleotide
gagggagacaacucugcau

SEQ ID NO: 532932 - RNA, 19 nt, Artificial Sequence
  Description of Artificial Sequence: Synthetic oligonucleotide
guauccuacacaaggcccu

SEQ ID NO: 532933 - RNA, 19 nt, Artificial Sequence
  Description of Artificial Sequence: Synthetic oligonucleotide
gagguauguauuacugagu

SEQ ID NO: 532934 - RNA, 19 nt, Artificial Sequence
  Description of Artificial Sequence: Synthetic oligonucleotide
uaauuaccaauggcagguu

SEQ ID NO: 532935 - RNA, 19 nt, Artificial Sequence
  Description of Artificial Sequence: Synthetic oligonucleotide
caucugugguauaacuugu

SEQ ID NO: 532936 - RNA, 19 nt, Artificial Sequence
  Description of Artificial Sequence: Synthetic oligonucleotide
caagaccugcuggauaaca

SEQ ID NO: 532937 - RNA, 19 nt, Artificial Sequence
  Description of Artificial Sequence: Synthetic oligonucleotide
agaaugccaucucgguguu

SEQ ID NO: 532938 - RNA, 19 nt, Artificial Sequence
  Description of Artificial Sequence: Synthetic oligonucleotide
cugcgcuugugcuggugug

SEQ ID NO: 532939 - RNA, 19 nt, Artificial Sequence
  Description of Artificial Sequence: Synthetic oligonucleotide
aucuaucaaaagggaaauu

SEQ ID NO: 532940 - RNA, 19 nt, Artificial Sequence
  Description of Artificial Sequence: Synthetic oligonucleotide
aggucuagcuuuguuuguu

SEQ ID NO: 532941 - RNA, 19 nt, Artificial Sequence
  Description of Artificial Sequence: Synthetic oligonucleotide
ccguagcuugcugugaugc

SEQ ID NO: 532942 - RNA, 19 nt, Artificial Sequence
  Description of Artificial Sequence: Synthetic oligonucleotide
ugguggugugugugugugu

SEQ ID NO: 532943 - RNA, 19 nt, Artificial Sequence
  Description of Artificial Sequence: Synthetic oligonucleotide
caggugcuacaguuccaug

SEQ ID NO: 532944 - RNA, 19 nt, Artificial Sequence
  Description of Artificial Sequence: Synthetic oligonucleotide
ccccaggugcuacaguucc

SEQ ID NO: 532945 - RNA, 19 nt, Artificial Sequence
  Description of Artificial Sequence: Synthetic oligonucleotide
accgauggcugagguugcg

SEQ ID NO: 532946 - RNA, 19 nt, Artificial Sequence
  Description of Artificial Sequence: Synthetic oligonucleotide
cugcaucugugguauaacu

SEQ ID NO: 532947 - RNA, 19 nt, Artificial Sequence
  Description of Artificial Sequence: Synthetic oligonucleotide
ugucaaggucuagcuuugu

SEQ ID NO: 532948 - RNA, 19 nt, Artificial Sequence
  Description of Artificial Sequence: Synthetic oligonucleotide
cagauucaauucaaucuau

SEQ ID NO: 532949 - RNA, 19 nt, Artificial Sequence
  Description of Artificial Sequence: Synthetic oligonucleotide
cuguguaucuuaucguauu

SEQ ID NO: 532950 - RNA, 19 nt, Artificial Sequence
  Description of Artificial Sequence: Synthetic oligonucleotide
ggugugugugugugugaug

SEQ ID NO: 532951 - RNA, 19 nt, Artificial Sequence
  Description of Artificial Sequence: Synthetic oligonucleotide
gguguuacauaaagacuaa

SEQ ID NO: 532952 - RNA, 19 nt, Artificial Sequence
  Description of Artificial Sequence: Synthetic oligonucleotide
gaauaaggaccugcugggu

SEQ ID NO: 532953 - RNA, 19 nt, Artificial Sequence
  Description of Artificial Sequence: Synthetic oligonucleotide
cuuaugcuucuuagaucaa

SEQ ID NO: 532954 - RNA, 19 nt, Artificial Sequence
  Description of Artificial Sequence: Synthetic oligonucleotide
ccaguuagaaguagugucu

SEQ ID NO: 532955 - RNA, 19 nt, Artificial Sequence
  Description of Artificial Sequence: Synthetic oligonucleotide
auccaucuacugcccuaga

SEQ ID NO: 532956 - RNA, 19 nt, Artificial Sequence
  Description of Artificial Sequence: Synthetic oligonucleotide
  modified_base (15)..(15): a, c, u, g, unknown or other
agccucccuaccaunuuga

SEQ ID NO: 532957 - RNA, 19 nt, Artificial Sequence
  Description of Artificial Sequence: Synthetic oligonucleotide
caguuagaaguagugucua

SEQ ID NO: 532958 - RNA, 19 nt, Artificial Sequence
  Description of Artificial Sequence: Synthetic oligonucleotide
  modified_base (14)..(14): a, c, u, g, unknown or other
gccucccuaccaunuugac

SEQ ID NO: 532959 - RNA, 19 nt, Artificial Sequence
  Description of Artificial Sequence: Synthetic oligonucleotide
gcccuuaugcuucuuagau

SEQ ID NO: 532960 - RNA, 19 nt, Artificial Sequence
  Description of Artificial Sequence: Synthetic oligonucleotide
gggagacaacucugcauuc

SEQ ID NO: 532961 - RNA, 19 nt, Artificial Sequence
  Description of Artificial Sequence: Synthetic oligonucleotide
ccaucaacuugcagcacca

SEQ ID NO: 532962 - RNA, 19 nt, Artificial Sequence
  Description of Artificial Sequence: Synthetic oligonucleotide
gugguguguguguguguga

SEQ ID NO: 532963 - RNA, 19 nt, Artificial Sequence
  Description of Artificial Sequence: Synthetic oligonucleotide
aucugugguauaacuuguu

SEQ ID NO: 532964 - RNA, 19 nt, Artificial Sequence
  Description of Artificial Sequence: Synthetic oligonucleotide
ccuacacaaggcccucccc

SEQ ID NO: 532965 - RNA, 19 nt, Artificial Sequence
  Description of Artificial Sequence: Synthetic oligonucleotide
auguaacgccauaauucuu

SEQ ID NO: 532966 - RNA, 19 nt, Artificial Sequence
  Description of Artificial Sequence: Synthetic oligonucleotide
ccuagacugcauuaacuua

SEQ ID NO: 532967 - RNA, 19 nt, Artificial Sequence
  Description of Artificial Sequence: Synthetic oligonucleotide
gaggagccgauuugggguu

SEQ ID NO: 532968 - RNA, 19 nt, Artificial Sequence
  Description of Artificial Sequence: Synthetic oligonucleotide
gcgcuugugcugguguggg

SEQ ID NO: 532969 - RNA, 19 nt, Artificial Sequence
  Description of Artificial Sequence: Synthetic oligonucleotide
gacguauccccuguuccau

SEQ ID NO: 532970 - RNA, 19 nt, Artificial Sequence
  Description of Artificial Sequence: Synthetic oligonucleotide
cgucacucacaucaucuuc

SEQ ID NO: 532971 - RNA, 19 nt, Artificial Sequence
  Description of Artificial Sequence: Synthetic oligonucleotide
uugcuucuacugcgcuuuu

SEQ ID NO: 532972 - RNA, 19 nt, Artificial Sequence
  Description of Artificial Sequence: Synthetic oligonucleotide
cgcuuuucugacaugcgga

SEQ ID NO: 532973 - RNA, 19 nt, Artificial Sequence
  Description of Artificial Sequence: Synthetic oligonucleotide
caagugcacuauacaauuu

SEQ ID NO: 532974 - RNA, 19 nt, Artificial Sequence
  Description of Artificial Sequence: Synthetic oligonucleotide
cugcccuagacugcauuaa

SEQ ID NO: 532975 - RNA, 19 nt, Artificial Sequence
  Description of Artificial Sequence: Synthetic oligonucleotide
gcaggaauaaggaccugcu

SEQ ID NO: 532976 - RNA, 19 nt, Artificial Sequence
  Description of Artificial Sequence: Synthetic oligonucleotide
gccguagcuugcugugaug

SEQ ID NO: 532977 - RNA, 19 nt, Artificial Sequence
  Description of Artificial Sequence: Synthetic oligonucleotide
gccaucucgguguuacaua

SEQ ID NO: 532978 - RNA, 19 nt, Artificial Sequence
  Description of Artificial Sequence: Synthetic oligonucleotide
ccaauugcuuuggaaaaua

SEQ ID NO: 532979 - RNA, 19 nt, Artificial Sequence
  Description of Artificial Sequence: Synthetic oligonucleotide
gugccguagcuugcuguga

SEQ ID NO: 532980 - RNA, 19 nt, Artificial Sequence
  Description of Artificial Sequence: Synthetic oligonucleotide
uccucaccaccugcccuua

SEQ ID NO: 532981 - RNA, 19 nt, Artificial Sequence
  Description of Artificial Sequence: Synthetic oligonucleotide
caucaacuugcagcaccaa

SEQ ID NO: 532982 - RNA, 19 nt, Artificial Sequence
  Description of Artificial Sequence: Synthetic oligonucleotide
ggugguggugugugugugu

SEQ ID NO: 532983 - RNA, 19 nt, Artificial Sequence
  Description of Artificial Sequence: Synthetic oligonucleotide
gcccuagacugcauuaacu

SEQ ID NO: 532984 - RNA, 19 nt, Artificial Sequence
  Description of Artificial Sequence: Synthetic oligonucleotide
ugccauccuugaggugaaa

SEQ ID NO: 532985 - RNA, 19 nt, Artificial Sequence
  Description of Artificial Sequence: Synthetic oligonucleotide
gguaccgauggcugagguu

SEQ ID NO: 532986 - RNA, 19 nt, Artificial Sequence
  Description of Artificial Sequence: Synthetic oligonucleotide
cggugguaaccuuugugaa

SEQ ID NO: 532987 - RNA, 19 nt, Artificial Sequence
  Description of Artificial Sequence: Synthetic oligonucleotide
cccucuaauguggugacau

SEQ ID NO: 532988 - RNA, 19 nt, Artificial Sequence
  Description of Artificial Sequence: Synthetic oligonucleotide
ccaagaccugcuggauaac

SEQ ID NO: 532989 - RNA, 19 nt, Artificial Sequence
  Description of Artificial Sequence: Synthetic oligonucleotide
ggagccgauuugggguuuc

SEQ ID NO: 532990 - RNA, 19 nt, Artificial Sequence
  Description of Artificial Sequence: Synthetic oligonucleotide
cuccaucguccagaaagau

SEQ ID NO: 532991 - RNA, 19 nt, Artificial Sequence
  Description of Artificial Sequence: Synthetic oligonucleotide
gagccgauuugggguuucu

SEQ ID NO: 532992 - RNA, 19 nt, Artificial Sequence
  Description of Artificial Sequence: Synthetic oligonucleotide
cagcaccaauggggcuugc

SEQ ID NO: 532993 - RNA, 19 nt, Artificial Sequence
  Description of Artificial Sequence: Synthetic oligonucleotide
ccauggcuugccaguuaga

SEQ ID NO: 532994 - RNA, 19 nt, Artificial Sequence
  Description of Artificial Sequence: Synthetic oligonucleotide
cuacugcccuagacugcau

SEQ ID NO: 532995 - RNA, 19 nt, Artificial Sequence
  Description of Artificial Sequence: Synthetic oligonucleotide
gcggcagguaucugcgcuu

SEQ ID NO: 532996 - RNA, 19 nt, Artificial Sequence
  Description of Artificial Sequence: Synthetic oligonucleotide
ggccagcggcagguaucug

SEQ ID NO: 532997 - RNA, 19 nt, Artificial Sequence
  Description of Artificial Sequence: Synthetic oligonucleotide
aacgugcuaaucuugaaac

SEQ ID NO: 532998 - RNA, 19 nt, Artificial Sequence
  Description of Artificial Sequence: Synthetic oligonucleotide
uuuauuaucaucagacuca

SEQ ID NO: 532999 - RNA, 19 nt, Artificial Sequence
  Description of Artificial Sequence: Synthetic oligonucleotide
acucacuuagcuuugggcc

SEQ ID NO: 533000 - RNA, 19 nt, Artificial Sequence
  Description of Artificial Sequence: Synthetic oligonucleotide
uuuuauuaucaucagacuc

SEQ ID NO: 533001 - RNA, 19 nt, Artificial Sequence
  Description of Artificial Sequence: Synthetic oligonucleotide
  modified_base (15)..(16): a, c, u, g, unknown or other
acgguucucaaucunnugc

SEQ ID NO: 533002 - RNA, 19 nt, Artificial Sequence
  Description of Artificial Sequence: Synthetic oligonucleotide
uaaaacaguacucagcuaa

SEQ ID NO: 533003 - RNA, 19 nt, Artificial Sequence
  Description of Artificial Sequence: Synthetic oligonucleotide
  modified_base (7)..(8): a, c, u, g, unknown or other
caaucunnugcuuuucugg

SEQ ID NO: 533004 - RNA, 19 nt, Artificial Sequence
  Description of Artificial Sequence: Synthetic oligonucleotide
gaaggugaggcuaugagcg

SEQ ID NO: 533005 - RNA, 19 nt, Artificial Sequence
  Description of Artificial Sequence: Synthetic oligonucleotide
aagaacgccucuccaaggc

SEQ ID NO: 533006 - RNA, 19 nt, Artificial Sequence
  Description of Artificial Sequence: Synthetic oligonucleotide
ucucggaaggucuucaugg

SEQ ID NO: 533007 - RNA, 19 nt, Artificial Sequence
  Description of Artificial Sequence: Synthetic oligonucleotide
uugcuagagaacucgaggg

SEQ ID NO: 533008 - RNA, 19 nt, Artificial Sequence
  Description of Artificial Sequence: Synthetic oligonucleotide
uuugguucgcuccucagug

SEQ ID NO: 533009 - RNA, 19 nt, Artificial Sequence
  Description of Artificial Sequence: Synthetic oligonucleotide
cuuauugcuagagaacucg

SEQ ID NO: 533010 - RNA, 19 nt, Artificial Sequence
  Description of Artificial Sequence: Synthetic oligonucleotide
aucgaugacacauaccucu

SEQ ID NO: 533011 - RNA, 19 nt, Artificial Sequence
  Description of Artificial Sequence: Synthetic oligonucleotide
aagacaggcagccguuggc

SEQ ID NO: 533012 - RNA, 19 nt, Artificial Sequence
  Description of Artificial Sequence: Synthetic oligonucleotide
cuuggcuuggcgaacaccc

SEQ ID NO: 533013 - RNA, 19 nt, Artificial Sequence
  Description of Artificial Sequence: Synthetic oligonucleotide
ccacauaccaggaagaacg

SEQ ID NO: 533014 - RNA, 19 nt, Artificial Sequence
  Description of Artificial Sequence: Synthetic oligonucleotide
ugucacccgacucugcugg

SEQ ID NO: 533015 - RNA, 19 nt, Artificial Sequence
  Description of Artificial Sequence: Synthetic oligonucleotide
  modified_base (8)..(9): a, c, u, g, unknown or other
ucaaucunnugcuuuucug

SEQ ID NO: 533016 - RNA, 19 nt, Artificial Sequence
  Description of Artificial Sequence: Synthetic oligonucleotide
ugcuagagaacucgagggg

SEQ ID NO: 533017 - RNA, 19 nt, Artificial Sequence
  Description of Artificial Sequence: Synthetic oligonucleotide
uguaccuaucucccuaaag

SEQ ID NO: 533018 - RNA, 19 nt, Artificial Sequence
  Description of Artificial Sequence: Synthetic oligonucleotide
cuagggaugugucaagugc

SEQ ID NO: 533019 - RNA, 19 nt, Artificial Sequence
  Description of Artificial Sequence: Synthetic oligonucleotide
gucgagagcacucacuuag

SEQ ID NO: 533020 - RNA, 19 nt, Artificial Sequence
  Description of Artificial Sequence: Synthetic oligonucleotide
uguauggcauugcuggcag

SEQ ID NO: 533021 - RNA, 19 nt, Artificial Sequence
  Description of Artificial Sequence: Synthetic oligonucleotide
cuaaucuugaaaccgucug

SEQ ID NO: 533022 - RNA, 19 nt, Artificial Sequence
  Description of Artificial Sequence: Synthetic oligonucleotide
aguugauucccgcagcuug

SEQ ID NO: 533023 - RNA, 19 nt, Artificial Sequence
  Description of Artificial Sequence: Synthetic oligonucleotide
aaucuugaaaccgucugca

SEQ ID NO: 533024 - RNA, 19 nt, Artificial Sequence
  Description of Artificial Sequence: Synthetic oligonucleotide
uuauuaucaucagacucag

SEQ ID NO: 533025 - RNA, 19 nt, Artificial Sequence
  Description of Artificial Sequence: Synthetic oligonucleotide
agguauuuguaccuaucuc

SEQ ID NO: 533026 - RNA, 19 nt, Artificial Sequence
  Description of Artificial Sequence: Synthetic oligonucleotide
acaccuuccguucuauuuc

SEQ ID NO: 533027 - RNA, 19 nt, Artificial Sequence
  Description of Artificial Sequence: Synthetic oligonucleotide
ugugccgucagccuuggcu

SEQ ID NO: 533028 - RNA, 19 nt, Artificial Sequence
  Description of Artificial Sequence: Synthetic oligonucleotide
ugugcugagccgucgagag

SEQ ID NO: 533029 - RNA, 19 nt, Artificial Sequence
  Description of Artificial Sequence: Synthetic oligonucleotide
uugaggaaauucccaaucu

SEQ ID NO: 533030 - RNA, 19 nt, Artificial Sequence
  Description of Artificial Sequence: Synthetic oligonucleotide
uugaggaucagcuggcaga

SEQ ID NO: 533031 - RNA, 19 nt, Artificial Sequence
  Description of Artificial Sequence: Synthetic oligonucleotide
cagaaaaggaccugucuag

SEQ ID NO: 533032 - RNA, 19 nt, Artificial Sequence
  Description of Artificial Sequence: Synthetic oligonucleotide
aacugagccauggaggcag

SEQ ID NO: 533033 - RNA, 19 nt, Artificial Sequence
  Description of Artificial Sequence: Synthetic oligonucleotide
gaauguugcagcccauugc

SEQ ID NO: 533034 - RNA, 19 nt, Artificial Sequence
  Description of Artificial Sequence: Synthetic oligonucleotide
ucagugaaugcgccgcacg

SEQ ID NO: 533035 - RNA, 19 nt, Artificial Sequence
  Description of Artificial Sequence: Synthetic oligonucleotide
agguccuagcaucaauggc

SEQ ID NO: 533036 - RNA, 19 nt, Artificial Sequence
  Description of Artificial Sequence: Synthetic oligonucleotide
ugagcuucagcaacgugcu

SEQ ID NO: 533037 - RNA, 19 nt, Artificial Sequence
  Description of Artificial Sequence: Synthetic oligonucleotide
uguccagugcccgagaggc

SEQ ID NO: 533038 - RNA, 19 nt, Artificial Sequence
  Description of Artificial Sequence: Synthetic oligonucleotide
aaggucaacugagccaugg

SEQ ID NO: 533039 - RNA, 19 nt, Artificial Sequence
  Description of Artificial Sequence: Synthetic oligonucleotide
gauugaggcagacaccuuc

SEQ ID NO: 533040 - RNA, 19 nt, Artificial Sequence
  Description of Artificial Sequence: Synthetic oligonucleotide
acugcguccucagaaaagg

SEQ ID NO: 533041 - RNA, 19 nt, Artificial Sequence
  Description of Artificial Sequence: Synthetic oligonucleotide
gaagaacgccucuccaagg

SEQ ID NO: 533042 - RNA, 19 nt, Artificial Sequence
  Description of Artificial Sequence: Synthetic oligonucleotide
aguugcaggcucuguggcc

SEQ ID NO: 533043 - RNA, 19 nt, Artificial Sequence
  Description of Artificial Sequence: Synthetic oligonucleotide
ugucaagugcagacucugg

SEQ ID NO: 533044 - RNA, 19 nt, Artificial Sequence
  Description of Artificial Sequence: Synthetic oligonucleotide
ugagcggaugaucuccaag

SEQ ID NO: 533045 - RNA, 19 nt, Artificial Sequence
  Description of Artificial Sequence: Synthetic oligonucleotide
cagcuaaaggucaacugag

SEQ ID NO: 533046 - RNA, 19 nt, Artificial Sequence
  Description of Artificial Sequence: Synthetic oligonucleotide
uuauugcuagagaacucga

SEQ ID NO: 533047 - RNA, 19 nt, Artificial Sequence
  Description of Artificial Sequence: Synthetic oligonucleotide
aagaugcauaaaacaguac

SEQ ID NO: 533048 - RNA, 19 nt, Artificial Sequence
  Description of Artificial Sequence: Synthetic oligonucleotide
gaagacaggcagccguugg

SEQ ID NO: 533049 - RNA, 19 nt, Artificial Sequence
  Description of Artificial Sequence: Synthetic oligonucleotide
aaacggagcaccugcugcu

SEQ ID NO: 533050 - RNA, 19 nt, Artificial Sequence
  Description of Artificial Sequence: Synthetic oligonucleotide
cuugguuccuugagggacg

SEQ ID NO: 533051 - RNA, 19 nt, Artificial Sequence
  Description of Artificial Sequence: Synthetic oligonucleotide
uucagguuaucuucaggga

SEQ ID NO: 533052 - RNA, 19 nt, Artificial Sequence
  Description of Artificial Sequence: Synthetic oligonucleotide
auguccagaacgauggcgg

SEQ ID NO: 533053 - RNA, 19 nt, Artificial Sequence
  Description of Artificial Sequence: Synthetic oligonucleotide
uggaagcccuuccugaugu

SEQ ID NO: 533054 - RNA, 19 nt, Artificial Sequence
  Description of Artificial Sequence: Synthetic oligonucleotide
caaacggagcaccugcugc

SEQ ID NO: 533055 - RNA, 19 nt, Artificial Sequence
  Description of Artificial Sequence: Synthetic oligonucleotide
uggaggaucuguuggaguc

SEQ ID NO: 533056 - RNA, 19 nt, Artificial Sequence
  Description of Artificial Sequence: Synthetic oligonucleotide
ugguucagggugaugccag

SEQ ID NO: 533057 - RNA, 19 nt, Artificial Sequence
  Description of Artificial Sequence: Synthetic oligonucleotide
uuuguauggcauugcuggc

SEQ ID NO: 533058 - RNA, 19 nt, Artificial Sequence
  Description of Artificial Sequence: Synthetic oligonucleotide
cucaauagccucgaacacc

SEQ ID NO: 533059 - RNA, 19 nt, Artificial Sequence
  Description of Artificial Sequence: Synthetic oligonucleotide
ugcugagccgucgagagca

SEQ ID NO: 533060 - RNA, 19 nt, Artificial Sequence
  Description of Artificial Sequence: Synthetic oligonucleotide
cacucacuuagcuuugggc

SEQ ID NO: 533061 - RNA, 19 nt, Artificial Sequence
  Description of Artificial Sequence: Synthetic oligonucleotide
ugcguccucagaaaaggac

SEQ ID NO: 533062 - RNA, 19 nt, Artificial Sequence
  Description of Artificial Sequence: Synthetic oligonucleotide
ugcgaugggagguggguag

SEQ ID NO: 533063 - RNA, 19 nt, Artificial Sequence
  Description of Artificial Sequence: Synthetic oligonucleotide
gcuaaaggucaacugagcc

SEQ ID NO: 533064 - RNA, 19 nt, Artificial Sequence
  Description of Artificial Sequence: Synthetic oligonucleotide
uccccuuugagacccggcc

SEQ ID NO: 533065 - RNA, 19 nt, Artificial Sequence
  Description of Artificial Sequence: Synthetic oligonucleotide
cucagcuaaaggucaacug

SEQ ID NO: 533066 - RNA, 19 nt, Artificial Sequence
  Description of Artificial Sequence: Synthetic oligonucleotide
uccucuaaagacagcugcu

SEQ ID NO: 533067 - RNA, 19 nt, Artificial Sequence
  Description of Artificial Sequence: Synthetic oligonucleotide
cauucagguuaucuucagg

SEQ ID NO: 533068 - RNA, 19 nt, Artificial Sequence
  Description of Artificial Sequence: Synthetic oligonucleotide
ugaggaaauucccaaucuu

SEQ ID NO: 533069 - RNA, 19 nt, Artificial Sequence
  Description of Artificial Sequence: Synthetic oligonucleotide
uugaggcagacaccuuccg

SEQ ID NO: 533070 - RNA, 19 nt, Artificial Sequence
  Description of Artificial Sequence: Synthetic oligonucleotide
auuuguaccuaucucccua

SEQ ID NO: 533071 - RNA, 19 nt, Artificial Sequence
  Description of Artificial Sequence: Synthetic oligonucleotide
uccagaacgauggcggugc

SEQ ID NO: 533072 - RNA, 19 nt, Artificial Sequence
  Description of Artificial Sequence: Synthetic oligonucleotide
cauguccagaacgauggcg

SEQ ID NO: 533073 - RNA, 19 nt, Artificial Sequence
  Description of Artificial Sequence: Synthetic oligonucleotide
gguccuagcaucaauggcc

SEQ ID NO: 533074 - RNA, 19 nt, Artificial Sequence
  Description of Artificial Sequence: Synthetic oligonucleotide
cagguccuagcaucaaugg

SEQ ID NO: 533075 - RNA, 19 nt, Artificial Sequence
  Description of Artificial Sequence: Synthetic oligonucleotide
agcagugucacccgacucu

SEQ ID NO: 533076 - RNA, 19 nt, Artificial Sequence
  Description of Artificial Sequence: Synthetic oligonucleotide
acauaccaggaagaacgcc

SEQ ID NO: 533077 - RNA, 19 nt, Artificial Sequence
  Description of Artificial Sequence: Synthetic oligonucleotide
aaaccgucugcaucuccug

SEQ ID NO: 533078 - RNA, 19 nt, Artificial Sequence
  Description of Artificial Sequence: Synthetic oligonucleotide
ucagcaacgugcuaaucuu

SEQ ID NO: 533079 - RNA, 19 nt, Artificial Sequence
  Description of Artificial Sequence: Synthetic oligonucleotide
ugucuuccguagcuggaag

SEQ ID NO: 533080 - RNA, 19 nt, Artificial Sequence
  Description of Artificial Sequence: Synthetic oligonucleotide
ugcccgagaggccucaaug

SEQ ID NO: 533081 - RNA, 19 nt, Artificial Sequence
  Description of Artificial Sequence: Synthetic oligonucleotide
uuugugcuuuguauggcau

SEQ ID NO: 533082 - RNA, 19 nt, Artificial Sequence
  Description of Artificial Sequence: Synthetic oligonucleotide
uggccagauccccucagag

SEQ ID NO: 533083 - RNA, 19 nt, Artificial Sequence
  Description of Artificial Sequence: Synthetic oligonucleotide
agggacguuucuuccuucg

SEQ ID NO: 533084 - RNA, 19 nt, Artificial Sequence
  Description of Artificial Sequence: Synthetic oligonucleotide
ucggaaggucuucauggug

SEQ ID NO: 533085 - RNA, 19 nt, Artificial Sequence
  Description of Artificial Sequence: Synthetic oligonucleotide
ucccuaaagccagacagga

SEQ ID NO: 533086 - RNA, 19 nt, Artificial Sequence
  Description of Artificial Sequence: Synthetic oligonucleotide
gauggcggugcccucacac

SEQ ID NO: 533087 - RNA, 19 nt, Artificial Sequence
  Description of Artificial Sequence: Synthetic oligonucleotide
cuugaaaccgucugcaucu

SEQ ID NO: 533088 - RNA, 19 nt, Artificial Sequence
  Description of Artificial Sequence: Synthetic oligonucleotide
gggccuaccagccaggacc

SEQ ID NO: 533089 - RNA, 19 nt, Artificial Sequence
  Description of Artificial Sequence: Synthetic oligonucleotide
ggaagaacgccucuccaag

SEQ ID NO: 533090 - RNA, 19 nt, Artificial Sequence
  Description of Artificial Sequence: Synthetic oligonucleotide
caucaugcacuccacccgc

SEQ ID NO: 533091 - RNA, 19 nt, Artificial Sequence
  Description of Artificial Sequence: Synthetic oligonucleotide
cucucuugugccgucagcc

SEQ ID NO: 533092 - RNA, 19 nt, Artificial Sequence
  Description of Artificial Sequence: Synthetic oligonucleotide
gaugguuugugcuuuguau

SEQ ID NO: 533093 - RNA, 19 nt, Artificial Sequence
  Description of Artificial Sequence: Synthetic oligonucleotide
uccguucuauuuccagaag

SEQ ID NO: 533094 - RNA, 19 nt, Artificial Sequence
  Description of Artificial Sequence: Synthetic oligonucleotide
  modified_base (11)..(12): a, c, u, g, unknown or other
uucucaaucunnugcuuuu

SEQ ID NO: 533095 - RNA, 19 nt, Artificial Sequence
  Description of Artificial Sequence: Synthetic oligonucleotide
ugcuucaguguccccucgg

SEQ ID NO: 533096 - RNA, 19 nt, Artificial Sequence
  Description of Artificial Sequence: Synthetic oligonucleotide
aucagcuggcagaagacag

SEQ ID NO: 533097 - RNA, 19 nt, Artificial Sequence
  Description of Artificial Sequence: Synthetic oligonucleotide
gagcucucgacuccaggag

SEQ ID NO: 533098 - RNA, 19 nt, Artificial Sequence
  Description of Artificial Sequence: Synthetic oligonucleotide
uuccguagcuggaagcccu

SEQ ID NO: 533099 - RNA, 19 nt, Artificial Sequence
  Description of Artificial Sequence: Synthetic oligonucleotide
aggaaauucccaaucuuga

SEQ ID NO: 533100 - RNA, 19 nt, Artificial Sequence
  Description of Artificial Sequence: Synthetic oligonucleotide
uuguauggcauugcuggca

SEQ ID NO: 533101 - RNA, 19 nt, Artificial Sequence
  Description of Artificial Sequence: Synthetic oligonucleotide
ugaaaccgucugcaucucc

SEQ ID NO: 533102 - RNA, 19 nt, Artificial Sequence
  Description of Artificial Sequence: Synthetic oligonucleotide
ugucuagggaugugucaag

SEQ ID NO: 533103 - RNA, 19 nt, Artificial Sequence
  Description of Artificial Sequence: Synthetic oligonucleotide
aguugaggaaauucccaau

SEQ ID NO: 533104 - RNA, 19 nt, Artificial Sequence
  Description of Artificial Sequence: Synthetic oligonucleotide
gcaucgaugacacauaccu

SEQ ID NO: 533105 - RNA, 19 nt, Artificial Sequence
  Description of Artificial Sequence: Synthetic oligonucleotide
aggaccuacccaccagcac

SEQ ID NO: 533106 - RNA, 19 nt, Artificial Sequence
  Description of Artificial Sequence: Synthetic oligonucleotide
aggcuuauugcuagagaac

SEQ ID NO: 533107 - RNA, 19 nt, Artificial Sequence
  Description of Artificial Sequence: Synthetic oligonucleotide
  modified_base (10)..(11): a, c, u, g, unknown or other
ucucaaucunnugcuuuuc

SEQ ID NO: 533108 - RNA, 19 nt, Artificial Sequence
  Description of Artificial Sequence: Synthetic oligonucleotide
  modified_base (16)..(17): a, c, u, g, unknown or other
cacgguucucaaucunnug

SEQ ID NO: 533109 - RNA, 19 nt, Artificial Sequence
  Description of Artificial Sequence: Synthetic oligonucleotide
ugaggcagacaccuuccgu

SEQ ID NO: 533110 - RNA, 19 nt, Artificial Sequence
  Description of Artificial Sequence: Synthetic oligonucleotide
uguggcugccauaguugag

SEQ ID NO: 533111 - RNA, 19 nt, Artificial Sequence
  Description of Artificial Sequence: Synthetic oligonucleotide
caucaauggccaagacucc

SEQ ID NO: 533112 - RNA, 19 nt, Artificial Sequence
  Description of Artificial Sequence: Synthetic oligonucleotide
cauaccaggaagaacgccu

SEQ ID NO: 533113 - RNA, 19 nt, Artificial Sequence
  Description of Artificial Sequence: Synthetic oligonucleotide
aguuugguucgcuccucag

SEQ ID NO: 533114 - RNA, 19 nt, Artificial Sequence
  Description of Artificial Sequence: Synthetic oligonucleotide
uuugagacccggccucgga

SEQ ID NO: 533115 - RNA, 19 nt, Artificial Sequence
  Description of Artificial Sequence: Synthetic oligonucleotide
uugagggacguuucuuccu

SEQ ID NO: 533116 - RNA, 19 nt, Artificial Sequence
  Description of Artificial Sequence: Synthetic oligonucleotide
aguguccaagcuuggcucu

SEQ ID NO: 533117 - RNA, 19 nt, Artificial Sequence
  Description of Artificial Sequence: Synthetic oligonucleotide
guucgcuccucagugaaug

SEQ ID NO: 533118 - RNA, 19 nt, Artificial Sequence
  Description of Artificial Sequence: Synthetic oligonucleotide
ugagccgucgagagcacuc

SEQ ID NO: 533119 - RNA, 19 nt, Artificial Sequence
  Description of Artificial Sequence: Synthetic oligonucleotide
ucacugcguccucagaaaa

SEQ ID NO: 533120 - RNA, 19 nt, Artificial Sequence
  Description of Artificial Sequence: Synthetic oligonucleotide
gaaucugucacugcguccu

SEQ ID NO: 533121 - RNA, 19 nt, Artificial Sequence
  Description of Artificial Sequence: Synthetic oligonucleotide
ucgagagcacucacuuagc

SEQ ID NO: 533122 - RNA, 19 nt, Artificial Sequence
  Description of Artificial Sequence: Synthetic oligonucleotide
aggaagaacgccucuccaa

SEQ ID NO: 533123 - RNA, 19 nt, Artificial Sequence
  Description of Artificial Sequence: Synthetic oligonucleotide
guagaggcuugcaaagcag

SEQ ID NO: 533124 - RNA, 19 nt, Artificial Sequence
  Description of Artificial Sequence: Synthetic oligonucleotide
uugagacccggccucggac

SEQ ID NO: 533125 - RNA, 19 nt, Artificial Sequence
  Description of Artificial Sequence: Synthetic oligonucleotide
cuaccagccaggaccuacc

SEQ ID NO: 533126 - RNA, 19 nt, Artificial Sequence
  Description of Artificial Sequence: Synthetic oligonucleotide
aucuccaaguugauucccg

SEQ ID NO: 533127 - RNA, 19 nt, Artificial Sequence
  Description of Artificial Sequence: Synthetic oligonucleotide
ugguucgcuccucagugaa

SEQ ID NO: 533128 - RNA, 19 nt, Artificial Sequence
  Description of Artificial Sequence: Synthetic oligonucleotide
cuucgcacagguagucggc

SEQ ID NO: 533129 - RNA, 19 nt, Artificial Sequence
  Description of Artificial Sequence: Synthetic oligonucleotide
cuuguccagugcccgagag

SEQ ID NO: 533130 - RNA, 19 nt, Artificial Sequence
  Description of Artificial Sequence: Synthetic oligonucleotide
aacgccucuccaaggcugg

SEQ ID NO: 533131 - RNA, 19 nt, Artificial Sequence
  Description of Artificial Sequence: Synthetic oligonucleotide
auaccaggaagaacgccuc

SEQ ID NO: 533132 - RNA, 19 nt, Artificial Sequence
  Description of Artificial Sequence: Synthetic oligonucleotide
agcauucuggggugagcuc

SEQ ID NO: 533133 - RNA, 19 nt, Artificial Sequence
  Description of Artificial Sequence: Synthetic oligonucleotide
uucuugguuccuugaggga

SEQ ID NO: 533134 - RNA, 19 nt, Artificial Sequence
  Description of Artificial Sequence: Synthetic oligonucleotide
uggggugagcucucgacuc

SEQ ID NO: 533135 - RNA, 19 nt, Artificial Sequence
  Description of Artificial Sequence: Synthetic oligonucleotide
uguguccucuaaagacagc

SEQ ID NO: 533136 - RNA, 19 nt, Artificial Sequence
  Description of Artificial Sequence: Synthetic oligonucleotide
ugagggacguuucuuccuu

SEQ ID NO: 533137 - RNA, 19 nt, Artificial Sequence
  Description of Artificial Sequence: Synthetic oligonucleotide
agggauugaggcagacacc

SEQ ID NO: 533138 - RNA, 19 nt, Artificial Sequence
  Description of Artificial Sequence: Synthetic oligonucleotide
cacuguccccaacucagcc

SEQ ID NO: 533139 - RNA, 19 nt, Artificial Sequence
  Description of Artificial Sequence: Synthetic oligonucleotide
ucucuugugccgucagccu

SEQ ID NO: 533140 - RNA, 19 nt, Artificial Sequence
  Description of Artificial Sequence: Synthetic oligonucleotide
ugagacccggccucggacu

SEQ ID NO: 533141 - RNA, 19 nt, Artificial Sequence
  Description of Artificial Sequence: Synthetic oligonucleotide
gagcggaugaucuccaagu

SEQ ID NO: 533142 - RNA, 19 nt, Artificial Sequence
  Description of Artificial Sequence: Synthetic oligonucleotide
gaacgccucuccaaggcug

SEQ ID NO: 533143 - RNA, 19 nt, Artificial Sequence
  Description of Artificial Sequence: Synthetic oligonucleotide
cacugcguccucagaaaag

SEQ ID NO: 533144 - RNA, 19 nt, Artificial Sequence
  Description of Artificial Sequence: Synthetic oligonucleotide
auaaaacaguacucagcua

SEQ ID NO: 533145 - RNA, 19 nt, Artificial Sequence
  Description of Artificial Sequence: Synthetic oligonucleotide
uuggcuuggcgaacacccc

SEQ ID NO: 533146 - RNA, 19 nt, Artificial Sequence
  Description of Artificial Sequence: Synthetic oligonucleotide
cucguccccuuugagaccc

SEQ ID NO: 533147 - RNA, 19 nt, Artificial Sequence
  Description of Artificial Sequence: Synthetic oligonucleotide
ugcagguauuuguaccuau

SEQ ID NO: 533148 - RNA, 19 nt, Artificial Sequence
  Description of Artificial Sequence: Synthetic oligonucleotide
uuccuugagggacguuucu

SEQ ID NO: 533149 - RNA, 19 nt, Artificial Sequence
  Description of Artificial Sequence: Synthetic oligonucleotide
gucuuccguagcuggaagc

SEQ ID NO: 533150 - RNA, 19 nt, Artificial Sequence
  Description of Artificial Sequence: Synthetic oligonucleotide
agaacgccucuccaaggcu

SEQ ID NO: 533151 - RNA, 19 nt, Artificial Sequence
  Description of Artificial Sequence: Synthetic oligonucleotide
gucucggaaggucuucaug

SEQ ID NO: 533152 - RNA, 19 nt, Artificial Sequence
  Description of Artificial Sequence: Synthetic oligonucleotide
ccguucuauuuccagaagc

SEQ ID NO: 533153 - RNA, 19 nt, Artificial Sequence
  Description of Artificial Sequence: Synthetic oligonucleotide
  modified_base (9)..(10): a, c, u, g, unknown or other
cucaaucunnugcuuuucu

SEQ ID NO: 533154 - RNA, 19 nt, Artificial Sequence
  Description of Artificial Sequence: Synthetic oligonucleotide
uugauucccgcagcuugag

SEQ ID NO: 533155 - RNA, 19 nt, Artificial Sequence
  Description of Artificial Sequence: Synthetic oligonucleotide
caucgaugacacauaccuc

SEQ ID NO: 533156 - RNA, 19 nt, Artificial Sequence
  Description of Artificial Sequence: Synthetic oligonucleotide
gcuagagaacucgaggggc

SEQ ID NO: 533157 - RNA, 19 nt, Artificial Sequence
  Description of Artificial Sequence: Synthetic oligonucleotide
aacgauggcggugcccuca

SEQ ID NO: 533158 - RNA, 19 nt, Artificial Sequence
  Description of Artificial Sequence: Synthetic oligonucleotide
uguauccucuggucccucu

SEQ ID NO: 533159 - RNA, 19 nt, Artificial Sequence
  Description of Artificial Sequence: Synthetic oligonucleotide
uugcaccucagggauugag

SEQ ID NO: 533160 - RNA, 19 nt, Artificial Sequence
  Description of Artificial Sequence: Synthetic oligonucleotide
cuagcaucaauggccaaga

SEQ ID NO: 533161 - RNA, 19 nt, Artificial Sequence
  Description of Artificial Sequence: Synthetic oligonucleotide
uggagcagugucacccgac

SEQ ID NO: 533162 - RNA, 19 nt, Artificial Sequence
  Description of Artificial Sequence: Synthetic oligonucleotide
uugguucgcuccucaguga

SEQ ID NO: 533163 - RNA, 19 nt, Artificial Sequence
  Description of Artificial Sequence: Synthetic oligonucleotide
gugucaagugcagacucug

SEQ ID NO: 533164 - RNA, 19 nt, Artificial Sequence
  Description of Artificial Sequence: Synthetic oligonucleotide
agcaacgugcuaaucuuga

SEQ ID NO: 533165 - RNA, 19 nt, Artificial Sequence
  Description of Artificial Sequence: Synthetic oligonucleotide
caacgugcuaaucuugaaa

SEQ ID NO: 533166 - RNA, 19 nt, Artificial Sequence
  Description of Artificial Sequence: Synthetic oligonucleotide
ugaaugcgccgcacgguuc

SEQ ID NO: 533167 - RNA, 19 nt, Artificial Sequence
  Description of Artificial Sequence: Synthetic oligonucleotide
cuggaggcgcucagcauac

SEQ ID NO: 533168 - RNA, 19 nt, Artificial Sequence
  Description of Artificial Sequence: Synthetic oligonucleotide
ucagggauugaggcagaca

SEQ ID NO: 533169 - RNA, 19 nt, Artificial Sequence
  Description of Artificial Sequence: Synthetic oligonucleotide
uaaagccagacaggaggcu

SEQ ID NO: 533170 - RNA, 19 nt, Artificial Sequence
  Description of Artificial Sequence: Synthetic oligonucleotide
gacaccuuccguucuauuu

SEQ ID NO: 533171 - RNA, 19 nt, Artificial Sequence
  Description of Artificial Sequence: Synthetic oligonucleotide
cagcaacgugcuaaucuug

SEQ ID NO: 533172 - RNA, 19 nt, Artificial Sequence
  Description of Artificial Sequence: Synthetic oligonucleotide
aucuugaaaccgucugcau

SEQ ID NO: 533173 - RNA, 19 nt, Artificial Sequence
  Description of Artificial Sequence: Synthetic oligonucleotide
uaucucccuaaagccagac

SEQ ID NO: 533174 - RNA, 19 nt, Artificial Sequence
  Description of Artificial Sequence: Synthetic oligonucleotide
ugcugugcugagccgucga

SEQ ID NO: 533175 - RNA, 19 nt, Artificial Sequence
  Description of Artificial Sequence: Synthetic oligonucleotide
acgauggcggugcccucac

SEQ ID NO: 533176 - RNA, 19 nt, Artificial Sequence
  Description of Artificial Sequence: Synthetic oligonucleotide
gucuucgcacagguagucg

SEQ ID NO: 533177 - RNA, 19 nt, Artificial Sequence
  Description of Artificial Sequence: Synthetic oligonucleotide
ggaaucugucacugcgucc

SEQ ID NO: 533178 - RNA, 19 nt, Artificial Sequence
  Description of Artificial Sequence: Synthetic oligonucleotide
gguggagcagugucacccg

SEQ ID NO: 533179 - RNA, 19 nt, Artificial Sequence
  Description of Artificial Sequence: Synthetic oligonucleotide
uucccgggccccuuucuga

SEQ ID NO: 533180 - RNA, 19 nt, Artificial Sequence
  Description of Artificial Sequence: Synthetic oligonucleotide
uuguaccuaucucccuaaa

SEQ ID NO: 533181 - RNA, 19 nt, Artificial Sequence
  Description of Artificial Sequence: Synthetic oligonucleotide
gcugccauaguugaggaaa

SEQ ID NO: 533182 - RNA, 19 nt, Artificial Sequence
  Description of Artificial Sequence: Synthetic oligonucleotide
aggugaggcuaugagcgug

SEQ ID NO: 533183 - RNA, 19 nt, Artificial Sequence
  Description of Artificial Sequence: Synthetic oligonucleotide
agcacucacuuagcuuugg

SEQ ID NO: 533184 - RNA, 19 nt, Artificial Sequence
  Description of Artificial Sequence: Synthetic oligonucleotide
agccgucgagagcacucac

SEQ ID NO: 533185 - RNA, 19 nt, Artificial Sequence
  Description of Artificial Sequence: Synthetic oligonucleotide
gaugugucaagugcagacu

SEQ ID NO: 533186 - RNA, 19 nt, Artificial Sequence
  Description of Artificial Sequence: Synthetic oligonucleotide
acgggugaagaggucucgg

SEQ ID NO: 533187 - RNA, 19 nt, Artificial Sequence
  Description of Artificial Sequence: Synthetic oligonucleotide
ggccaguuugguucgcucc

SEQ ID NO: 533188 - RNA, 19 nt, Artificial Sequence
  Description of Artificial Sequence: Synthetic oligonucleotide
agugaaugcgccgcacggu

SEQ ID NO: 533189 - RNA, 19 nt, Artificial Sequence
  Description of Artificial Sequence: Synthetic oligonucleotide
agaagacaggcagccguug

SEQ ID NO: 533190 - RNA, 19 nt, Artificial Sequence
  Description of Artificial Sequence: Synthetic oligonucleotide
agacaggcagccguuggcu

SEQ ID NO: 533191 - RNA, 19 nt, Artificial Sequence
  Description of Artificial Sequence: Synthetic oligonucleotide
gaggcagacaccuuccguu

SEQ ID NO: 533192 - RNA, 19 nt, Artificial Sequence
  Description of Artificial Sequence: Synthetic oligonucleotide
uacucagcuaaaggucaac

SEQ ID NO: 533193 - RNA, 19 nt, Artificial Sequence
  Description of Artificial Sequence: Synthetic oligonucleotide
caagcuuggcucugaggca

SEQ ID NO: 533194 - RNA, 19 nt, Artificial Sequence
  Description of Artificial Sequence: Synthetic oligonucleotide
cagguauuuguaccuaucu

SEQ ID NO: 533195 - RNA, 19 nt, Artificial Sequence
  Description of Artificial Sequence: Synthetic oligonucleotide
guagucggccagcuccagc

SEQ ID NO: 533196 - RNA, 19 nt, Artificial Sequence
  Description of Artificial Sequence: Synthetic oligonucleotide
guuacagcguccacaaggu

SEQ ID NO: 533197 - RNA, 19 nt, Artificial Sequence
  Description of Artificial Sequence: Synthetic oligonucleotide
guugauucccgcagcuuga

SEQ ID NO: 533198 - RNA, 19 nt, Artificial Sequence
  Description of Artificial Sequence: Synthetic oligonucleotide
gaacaccccacaaggcuuc

SEQ ID NO: 533199 - RNA, 19 nt, Artificial Sequence
  Description of Artificial Sequence: Synthetic oligonucleotide
auggcggugcccucacaca

SEQ ID NO: 533200 - RNA, 19 nt, Artificial Sequence
  Description of Artificial Sequence: Synthetic oligonucleotide
acaugguggagcaguguca

SEQ ID NO: 533201 - RNA, 19 nt, Artificial Sequence
  Description of Artificial Sequence: Synthetic oligonucleotide
aaguugauucccgcagcuu

SEQ ID NO: 533202 - RNA, 19 nt, Artificial Sequence
  Description of Artificial Sequence: Synthetic oligonucleotide
ucugcucaauagccucgaa

SEQ ID NO: 533203 - RNA, 19 nt, Artificial Sequence
  Description of Artificial Sequence: Synthetic oligonucleotide
ccaaguugauucccgcagc

SEQ ID NO: 533204 - RNA, 19 nt, Artificial Sequence
  Description of Artificial Sequence: Synthetic oligonucleotide
cacagaguuucaguuucuc

SEQ ID NO: 533205 - RNA, 19 nt, Artificial Sequence
  Description of Artificial Sequence: Synthetic oligonucleotide
guccuagcaucaauggcca

SEQ ID NO: 533206 - RNA, 19 nt, Artificial Sequence
  Description of Artificial Sequence: Synthetic oligonucleotide
gaaugcgccgcacgguucu

SEQ ID NO: 533207 - RNA, 19 nt, Artificial Sequence
  Description of Artificial Sequence: Synthetic oligonucleotide
ccuuccguucuauuuccag

SEQ ID NO: 533208 - RNA, 19 nt, Artificial Sequence
  Description of Artificial Sequence: Synthetic oligonucleotide
aaugcgccgcacgguucuc

SEQ ID NO: 533209 - RNA, 19 nt, Artificial Sequence
  Description of Artificial Sequence: Synthetic oligonucleotide
guauccucuggucccucuc

SEQ ID NO: 533210 - RNA, 19 nt, Artificial Sequence
  Description of Artificial Sequence: Synthetic oligonucleotide
ccauugcagguauuuguac

SEQ ID NO: 533211 - RNA, 19 nt, Artificial Sequence
  Description of Artificial Sequence: Synthetic oligonucleotide
cuagagaacucgaggggcu

SEQ ID NO: 533212 - RNA, 19 nt, Artificial Sequence
  Description of Artificial Sequence: Synthetic oligonucleotide
gagaacucgaggggcuuca

SEQ ID NO: 533213 - RNA, 19 nt, Artificial Sequence
  Description of Artificial Sequence: Synthetic oligonucleotide
cacgggugaagaggucucg

SEQ ID NO: 533214 - RNA, 19 nt, Artificial Sequence
  Description of Artificial Sequence: Synthetic oligonucleotide
aaaggucaacugagccaug

SEQ ID NO: 533215 - RNA, 19 nt, Artificial Sequence
  Description of Artificial Sequence: Synthetic oligonucleotide
gccgcgcucagcuguaucc

SEQ ID NO: 533216 - RNA, 19 nt, Artificial Sequence
  Description of Artificial Sequence: Synthetic oligonucleotide
uucagggcuugaucaucuc

SEQ ID NO: 533217 - RNA, 19 nt, Artificial Sequence
  Description of Artificial Sequence: Synthetic oligonucleotide
guuccuugagggacguuuc

SEQ ID NO: 533218 - RNA, 19 nt, Artificial Sequence
  Description of Artificial Sequence: Synthetic oligonucleotide
cuucagggcuugaucaucu

SEQ ID NO: 533219 - RNA, 19 nt, Artificial Sequence
  Description of Artificial Sequence: Synthetic oligonucleotide
ccgcaccauguccagaacg

SEQ ID NO: 533220 - RNA, 19 nt, Artificial Sequence
  Description of Artificial Sequence: Synthetic oligonucleotide
gagcacucacuuagcuuug

SEQ ID NO: 533221 - RNA, 19 nt, Artificial Sequence
  Description of Artificial Sequence: Synthetic oligonucleotide
ggaggcuuauugcuagaga

SEQ ID NO: 533222 - RNA, 19 nt, Artificial Sequence
  Description of Artificial Sequence: Synthetic oligonucleotide
aggcagucugggaauguug

SEQ ID NO: 533223 - RNA, 19 nt, Artificial Sequence
  Description of Artificial Sequence: Synthetic oligonucleotide
aggaccugucuagggaugu

SEQ ID NO: 533224 - RNA, 19 nt, Artificial Sequence
  Description of Artificial Sequence: Synthetic oligonucleotide
gcccgagaggccucaaugc

SEQ ID NO: 533225 - RNA, 19 nt, Artificial Sequence
  Description of Artificial Sequence: Synthetic oligonucleotide
cacccgacucugcugggac

SEQ ID NO: 533226 - RNA, 19 nt, Artificial Sequence
  Description of Artificial Sequence: Synthetic oligonucleotide
ggaccuacccaccagcacu

SEQ ID NO: 533227 - RNA, 19 nt, Artificial Sequence
  Description of Artificial Sequence: Synthetic oligonucleotide
gagggacguuucuuccuuc

SEQ ID NO: 533228 - RNA, 19 nt, Artificial Sequence
  Description of Artificial Sequence: Synthetic oligonucleotide
gagagcacucacuuagcuu

SEQ ID NO: 533229 - RNA, 19 nt, Artificial Sequence
  Description of Artificial Sequence: Synthetic oligonucleotide
gagacccggccucggacuc

SEQ ID NO: 533230 - RNA, 19 nt, Artificial Sequence
  Description of Artificial Sequence: Synthetic oligonucleotide
cuggggccuaccagccagg

SEQ ID NO: 533231 - RNA, 19 nt, Artificial Sequence
  Description of Artificial Sequence: Synthetic oligonucleotide
gggcaucgaugacacauac

SEQ ID NO: 533232 - RNA, 19 nt, Artificial Sequence
  Description of Artificial Sequence: Synthetic oligonucleotide
uugguuccuugagggacgu

SEQ ID NO: 533233 - RNA, 19 nt, Artificial Sequence
  Description of Artificial Sequence: Synthetic oligonucleotide
cucagugaaugcgccgcac

SEQ ID NO: 533234 - RNA, 19 nt, Artificial Sequence
  Description of Artificial Sequence: Synthetic oligonucleotide
cuugugccgucagccuugg

SEQ ID NO: 533235 - RNA, 19 nt, Artificial Sequence
  Description of Artificial Sequence: Synthetic oligonucleotide
gucacccgacucugcuggg

SEQ ID NO: 533236 - RNA, 19 nt, Artificial Sequence
  Description of Artificial Sequence: Synthetic oligonucleotide
guccagaacgauggcggug

SEQ ID NO: 533237 - RNA, 19 nt, Artificial Sequence
  Description of Artificial Sequence: Synthetic oligonucleotide
caaguugauucccgcagcu

SEQ ID NO: 533238 - RNA, 19 nt, Artificial Sequence
  Description of Artificial Sequence: Synthetic oligonucleotide
caggaccuacccaccagca

SEQ ID NO: 533239 - RNA, 19 nt, Artificial Sequence
  Description of Artificial Sequence: Synthetic oligonucleotide
cuuggcgaacaccccacaa

SEQ ID NO: 533240 - RNA, 19 nt, Artificial Sequence
  Description of Artificial Sequence: Synthetic oligonucleotide
gggacguuucuuccuucgc

SEQ ID NO: 533241 - RNA, 19 nt, Artificial Sequence
  Description of Artificial Sequence: Synthetic oligonucleotide
ucacccgacucugcuggga

SEQ ID NO: 533242 - RNA, 19 nt, Artificial Sequence
  Description of Artificial Sequence: Synthetic oligonucleotide
uguccccaacucagccaca

SEQ ID NO: 533243 - RNA, 19 nt, Artificial Sequence
  Description of Artificial Sequence: Synthetic oligonucleotide
uccccggcugcuguagugu

SEQ ID NO: 533244 - RNA, 19 nt, Artificial Sequence
  Description of Artificial Sequence: Synthetic oligonucleotide
acggagcaccugcugcugu

SEQ ID NO: 533245 - RNA, 19 nt, Artificial Sequence
  Description of Artificial Sequence: Synthetic oligonucleotide
agcguccacaaggucccag

SEQ ID NO: 533246 - RNA, 19 nt, Artificial Sequence
  Description of Artificial Sequence: Synthetic oligonucleotide
uaggaggucuggguggcuu

SEQ ID NO: 533247 - RNA, 19 nt, Artificial Sequence
  Description of Artificial Sequence: Synthetic oligonucleotide
uugaaaccgucugcaucuc

SEQ ID NO: 533248 - RNA, 19 nt, Artificial Sequence
  Description of Artificial Sequence: Synthetic oligonucleotide
uucgcuugcucguccccuu

SEQ ID NO: 533249 - RNA, 19 nt, Artificial Sequence
  Description of Artificial Sequence: Synthetic oligonucleotide
agaacucgaggggcuucag

SEQ ID NO: 533250 - RNA, 19 nt, Artificial Sequence
  Description of Artificial Sequence: Synthetic oligonucleotide
uagagaacucgaggggcuu

SEQ ID NO: 533251 - RNA, 19 nt, Artificial Sequence
  Description of Artificial Sequence: Synthetic oligonucleotide
aggaugguuugugcuuugu

SEQ ID NO: 533252 - RNA, 19 nt, Artificial Sequence
  Description of Artificial Sequence: Synthetic oligonucleotide
gagaggccucaaugcuggc

SEQ ID NO: 533253 - RNA, 19 nt, Artificial Sequence
  Description of Artificial Sequence: Synthetic oligonucleotide
cuaucucccuaaagccaga

SEQ ID NO: 533254 - RNA, 19 nt, Artificial Sequence
  Description of Artificial Sequence: Synthetic oligonucleotide
cucgacuccaggaggcuua

SEQ ID NO: 533255 - RNA, 19 nt, Artificial Sequence
  Description of Artificial Sequence: Synthetic oligonucleotide
agcagaaggugaggcuaug

SEQ ID NO: 533256 - RNA, 19 nt, Artificial Sequence
  Description of Artificial Sequence: Synthetic oligonucleotide
ugcgccgcacgguucucaa

SEQ ID NO: 533257 - RNA, 19 nt, Artificial Sequence
  Description of Artificial Sequence: Synthetic oligonucleotide
ggacuuggucucugugagc

SEQ ID NO: 533258 - RNA, 19 nt, Artificial Sequence
  Description of Artificial Sequence: Synthetic oligonucleotide
cccguggugcaugcgaugg

SEQ ID NO: 533259 - RNA, 19 nt, Artificial Sequence
  Description of Artificial Sequence: Synthetic oligonucleotide
gugcugagccgucgagagc

SEQ ID NO: 533260 - RNA, 19 nt, Artificial Sequence
  Description of Artificial Sequence: Synthetic oligonucleotide
gaggaaucugucacugcgu

SEQ ID NO: 533261 - RNA, 19 nt, Artificial Sequence
  Description of Artificial Sequence: Synthetic oligonucleotide
ccucagaaaaggaccuguc

SEQ ID NO: 533262 - RNA, 19 nt, Artificial Sequence
  Description of Artificial Sequence: Synthetic oligonucleotide
ucguccccuuugagacccg

SEQ ID NO: 533263 - RNA, 19 nt, Artificial Sequence
  Description of Artificial Sequence: Synthetic oligonucleotide
gcguccacaaggucccagc

SEQ ID NO: 533264 - RNA, 19 nt, Artificial Sequence
  Description of Artificial Sequence: Synthetic oligonucleotide
cugcguccucagaaaagga

SEQ ID NO: 533265 - RNA, 19 nt, Artificial Sequence
  Description of Artificial Sequence: Synthetic oligonucleotide
ggcaucgaugacacauacc

SEQ ID NO: 533266 - RNA, 19 nt, Artificial Sequence
  Description of Artificial Sequence: Synthetic oligonucleotide
ugccauaguugaggaaauu

SEQ ID NO: 533267 - RNA, 19 nt, Artificial Sequence
  Description of Artificial Sequence: Synthetic oligonucleotide
gcuuauugcuagagaacuc

SEQ ID NO: 533268 - RNA, 19 nt, Artificial Sequence
  Description of Artificial Sequence: Synthetic oligonucleotide
ggacguuucuuccuucgcu

SEQ ID NO: 533269 - RNA, 19 nt, Artificial Sequence
  Description of Artificial Sequence: Synthetic oligonucleotide
uccuagcaucaauggccaa

SEQ ID NO: 533270 - RNA, 19 nt, Artificial Sequence
  Description of Artificial Sequence: Synthetic oligonucleotide
gaccugucuagggaugugu

SEQ ID NO: 533271 - RNA, 19 nt, Artificial Sequence
  Description of Artificial Sequence: Synthetic oligonucleotide
cccuaaagccagacaggag

SEQ ID NO: 533272 - RNA, 19 nt, Artificial Sequence
  Description of Artificial Sequence: Synthetic oligonucleotide
gcgaacaccccacaaggcu

SEQ ID NO: 533273 - RNA, 19 nt, Artificial Sequence
  Description of Artificial Sequence: Synthetic oligonucleotide
gagccgucgagagcacuca

SEQ ID NO: 533274 - RNA, 19 nt, Artificial Sequence
  Description of Artificial Sequence: Synthetic oligonucleotide
agguagucggccagcucca

SEQ ID NO: 533275 - RNA, 19 nt, Artificial Sequence
  Description of Artificial Sequence: Synthetic oligonucleotide
gcagguauuuguaccuauc

SEQ ID NO: 533276 - RNA, 19 nt, Artificial Sequence
  Description of Artificial Sequence: Synthetic oligonucleotide
ucccguccucgccccucgg

SEQ ID NO: 533277 - RNA, 19 nt, Artificial Sequence
  Description of Artificial Sequence: Synthetic oligonucleotide
ggcgaacaccccacaaggc

SEQ ID NO: 533278 - RNA, 19 nt, Artificial Sequence
  Description of Artificial Sequence: Synthetic oligonucleotide
gugaaugcgccgcacgguu

SEQ ID NO: 533279 - RNA, 19 nt, Artificial Sequence
  Description of Artificial Sequence: Synthetic oligonucleotide
ccggccucggacucugggg

SEQ ID NO: 533280 - RNA, 19 nt, Artificial Sequence
  Description of Artificial Sequence: Synthetic oligonucleotide
gcccauugcagguauuugu

SEQ ID NO: 533281 - RNA, 19 nt, Artificial Sequence
  Description of Artificial Sequence: Synthetic oligonucleotide
gaacgauggcggugcccuc

SEQ ID NO: 533282 - RNA, 19 nt, Artificial Sequence
  Description of Artificial Sequence: Synthetic oligonucleotide
uggggccuaccagccagga

SEQ ID NO: 533283 - RNA, 19 nt, Artificial Sequence
  Description of Artificial Sequence: Synthetic oligonucleotide
ggaugguuugugcuuugua

SEQ ID NO: 533284 - RNA, 19 nt, Artificial Sequence
  Description of Artificial Sequence: Synthetic oligonucleotide
auccccucagagggcuggg

SEQ ID NO: 533285 - RNA, 19 nt, Artificial Sequence
  Description of Artificial Sequence: Synthetic oligonucleotide
cuaugagcgugcagguggu

SEQ ID NO: 533286 - RNA, 19 nt, Artificial Sequence
  Description of Artificial Sequence: Synthetic oligonucleotide
ccuaccagccaggaccuac

SEQ ID NO: 533287 - RNA, 19 nt, Artificial Sequence
  Description of Artificial Sequence: Synthetic oligonucleotide
cucggaaggucuucauggu

SEQ ID NO: 533288 - RNA, 19 nt, Artificial Sequence
  Description of Artificial Sequence: Synthetic oligonucleotide
ccugucuagggauguguca

SEQ ID NO: 533289 - RNA, 19 nt, Artificial Sequence
  Description of Artificial Sequence: Synthetic oligonucleotide
ccagauccccucagagggc

SEQ ID NO: 533290 - RNA, 19 nt, Artificial Sequence
  Description of Artificial Sequence: Synthetic oligonucleotide
gcccucacacagcaucaug

SEQ ID NO: 533291 - RNA, 19 nt, Artificial Sequence
  Description of Artificial Sequence: Synthetic oligonucleotide
ggugcaugcgaugggaggu

SEQ ID NO: 533292 - RNA, 19 nt, Artificial Sequence
  Description of Artificial Sequence: Synthetic oligonucleotide
cagcauucuggggugagcu

SEQ ID NO: 533293 - RNA, 19 nt, Artificial Sequence
  Description of Artificial Sequence: Synthetic oligonucleotide
guccccuuugagacccggc

SEQ ID NO: 533294 - RNA, 19 nt, Artificial Sequence
  Description of Artificial Sequence: Synthetic oligonucleotide
cuggggugagcucucgacu

SEQ ID NO: 533295 - RNA, 19 nt, Artificial Sequence
  Description of Artificial Sequence: Synthetic oligonucleotide
uugcagcccauugcaggua

SEQ ID NO: 533296 - RNA, 19 nt, Artificial Sequence
  Description of Artificial Sequence: Synthetic oligonucleotide
augcgaugggaggugggua

SEQ ID NO: 533297 - RNA, 19 nt, Artificial Sequence
  Description of Artificial Sequence: Synthetic oligonucleotide
ggcucucgcaggcggugag

SEQ ID NO: 533298 - RNA, 19 nt, Artificial Sequence
  Description of Artificial Sequence: Synthetic oligonucleotide
caggaggcuuauugcuaga

SEQ ID NO: 533299 - RNA, 19 nt, Artificial Sequence
  Description of Artificial Sequence: Synthetic oligonucleotide
ucgacuccaggaggcuuau

SEQ ID NO: 533300 - RNA, 19 nt, Artificial Sequence
  Description of Artificial Sequence: Synthetic oligonucleotide
gcaacgugcuaaucuugaa

SEQ ID NO: 533301 - RNA, 19 nt, Artificial Sequence
  Description of Artificial Sequence: Synthetic oligonucleotide
ggucuucgcacagguaguc

SEQ ID NO: 533302 - RNA, 19 nt, Artificial Sequence
  Description of Artificial Sequence: Synthetic oligonucleotide
gacucuggggagggugcca

SEQ ID NO: 533303 - RNA, 19 nt, Artificial Sequence
  Description of Artificial Sequence: Synthetic oligonucleotide
gcuaaucuugaaaccgucu

SEQ ID NO: 533304 - RNA, 19 nt, Artificial Sequence
  Description of Artificial Sequence: Synthetic oligonucleotide
gcuugcucguccccuuuga

SEQ ID NO: 533305 - RNA, 19 nt, Artificial Sequence
  Description of Artificial Sequence: Synthetic oligonucleotide
uugugccgucagccuuggc

SEQ ID NO: 533306 - RNA, 19 nt, Artificial Sequence
  Description of Artificial Sequence: Synthetic oligonucleotide
agguggguagaggcuugca

SEQ ID NO: 533307 - RNA, 19 nt, Artificial Sequence
  Description of Artificial Sequence: Synthetic oligonucleotide
gguuccuugagggacguuu

SEQ ID NO: 533308 - RNA, 19 nt, Artificial Sequence
  Description of Artificial Sequence: Synthetic oligonucleotide
cagcacaugguggagcagu

SEQ ID NO: 533309 - RNA, 19 nt, Artificial Sequence
  Description of Artificial Sequence: Synthetic oligonucleotide
ggagcagugucacccgacu

SEQ ID NO: 533310 - RNA, 19 nt, Artificial Sequence
  Description of Artificial Sequence: Synthetic oligonucleotide
gcucguccccuuugagacc

SEQ ID NO: 533311 - RNA, 19 nt, Artificial Sequence
  Description of Artificial Sequence: Synthetic oligonucleotide
gcauucuggggugagcucu

SEQ ID NO: 533312 - RNA, 19 nt, Artificial Sequence
  Description of Artificial Sequence: Synthetic oligonucleotide
cgcaccauguccagaacga

SEQ ID NO: 533313 - RNA, 19 nt, Artificial Sequence
  Description of Artificial Sequence: Synthetic oligonucleotide
gcaugcgaugggagguggg

SEQ ID NO: 533314 - RNA, 19 nt, Artificial Sequence
  Description of Artificial Sequence: Synthetic oligonucleotide
cugccauaguugaggaaau

SEQ ID NO: 533315 - RNA, 19 nt, Artificial Sequence
  Description of Artificial Sequence: Synthetic oligonucleotide
gcagaaggugaggcuauga

SEQ ID NO: 533316 - RNA, 19 nt, Artificial Sequence
  Description of Artificial Sequence: Synthetic oligonucleotide
caugcgaugggaggugggu

SEQ ID NO: 533317 - RNA, 19 nt, Artificial Sequence
  Description of Artificial Sequence: Synthetic oligonucleotide
cuucccguccucgccccuc

SEQ ID NO: 533318 - RNA, 19 nt, Artificial Sequence
  Description of Artificial Sequence: Synthetic oligonucleotide
guuucccgggccccuuucu

SEQ ID NO: 533319 - RNA, 19 nt, Artificial Sequence
  Description of Artificial Sequence: Synthetic oligonucleotide
cugagcggaugaucuccaa

SEQ ID NO: 533320 - RNA, 19 nt, Artificial Sequence
  Description of Artificial Sequence: Synthetic oligonucleotide
cagccuuggcuuggcgaac

SEQ ID NO: 533321 - RNA, 19 nt, Artificial Sequence
  Description of Artificial Sequence: Synthetic oligonucleotide
cgccgcacgguucucaauc

SEQ ID NO: 533322 - RNA, 19 nt, Artificial Sequence
  Description of Artificial Sequence: Synthetic oligonucleotide
augcgccgcacgguucuca

SEQ ID NO: 533323 - RNA, 19 nt, Artificial Sequence
  Description of Artificial Sequence: Synthetic oligonucleotide
gguagucggccagcuccag

SEQ ID NO: 533324 - RNA, 19 nt, Artificial Sequence
  Description of Artificial Sequence: Synthetic oligonucleotide
ggcacgggugaagaggucu

SEQ ID NO: 533325 - RNA, 19 nt, Artificial Sequence
  Description of Artificial Sequence: Synthetic oligonucleotide
agauccccucagagggcug

SEQ ID NO: 533326 - RNA, 19 nt, Artificial Sequence
  Description of Artificial Sequence: Synthetic oligonucleotide
caggcggugagcgccagcu

SEQ ID NO: 533327 - RNA, 19 nt, Artificial Sequence
  Description of Artificial Sequence: Synthetic oligonucleotide
ggaccugucuagggaugug

SEQ ID NO: 533328 - RNA, 19 nt, Artificial Sequence
  Description of Artificial Sequence: Synthetic oligonucleotide
ccguggugcaugcgauggg

SEQ ID NO: 533329 - RNA, 19 nt, Artificial Sequence
  Description of Artificial Sequence: Synthetic oligonucleotide
cagauccccucagagggcu

SEQ ID NO: 533330 - RNA, 19 nt, Artificial Sequence
  Description of Artificial Sequence: Synthetic oligonucleotide
cccgcagcuugagagggug

SEQ ID NO: 533331 - RNA, 19 nt, Artificial Sequence
  Description of Artificial Sequence: Synthetic oligonucleotide
gaccuacccaccagcacuu

SEQ ID NO: 533332 - RNA, 19 nt, Artificial Sequence
  Description of Artificial Sequence: Synthetic oligonucleotide
uggaggcgcucagcauacu

SEQ ID NO: 533333 - RNA, 19 nt, Artificial Sequence
  Description of Artificial Sequence: Synthetic oligonucleotide
cacaaggcuucaggaucca

SEQ ID NO: 533334 - RNA, 19 nt, Artificial Sequence
  Description of Artificial Sequence: Synthetic oligonucleotide
ggggccuaccagccaggac

SEQ ID NO: 533335 - RNA, 19 nt, Artificial Sequence
  Description of Artificial Sequence: Synthetic oligonucleotide
ccagaacgauggcggugcc

SEQ ID NO: 533336 - RNA, 19 nt, Artificial Sequence
  Description of Artificial Sequence: Synthetic oligonucleotide
gcacgggugaagaggucuc

SEQ ID NO: 533337 - RNA, 19 nt, Artificial Sequence
  Description of Artificial Sequence: Synthetic oligonucleotide
cacagguagucggccagcu

SEQ ID NO: 533338 - RNA, 19 nt, Artificial Sequence
  Description of Artificial Sequence: Synthetic oligonucleotide
cguccucagaaaaggaccu

SEQ ID NO: 533339 - RNA, 19 nt, Artificial Sequence
  Description of Artificial Sequence: Synthetic oligonucleotide
ccgggcugucuuccguagc

SEQ ID NO: 533340 - RNA, 19 nt, Artificial Sequence
  Description of Artificial Sequence: Synthetic oligonucleotide
ggcuugcaaagcagaaggu

SEQ ID NO: 533341 - RNA, 19 nt, Artificial Sequence
  Description of Artificial Sequence: Synthetic oligonucleotide
cguggugcaugcgauggga

SEQ ID NO: 533342 - RNA, 19 nt, Artificial Sequence
  Description of Artificial Sequence: Synthetic oligonucleotide
ccucagugaaugcgccgca

SEQ ID NO: 533343 - RNA, 19 nt, Artificial Sequence
  Description of Artificial Sequence: Synthetic oligonucleotide
ccccguggugcaugcgaug

SEQ ID NO: 533344 - RNA, 19 nt, Artificial Sequence
  Description of Artificial Sequence: Synthetic oligonucleotide
ccggcugcuguagugucca

SEQ ID NO: 533345 - RNA, 19 nt, Artificial Sequence
  Description of Artificial Sequence: Synthetic oligonucleotide
cgucagccuuggcuuggcg

SEQ ID NO: 533346 - RNA, 19 nt, Artificial Sequence
  Description of Artificial Sequence: Synthetic oligonucleotide
  modified_base (17)..(18): a, c, u, g, unknown or other
gcacgguucucaaucunnu

SEQ ID NO: 533347 - RNA, 19 nt, Artificial Sequence
  Description of Artificial Sequence: Synthetic oligonucleotide
cccgagaggccucaaugcu

SEQ ID NO: 533348 - RNA, 19 nt, Artificial Sequence
  Description of Artificial Sequence: Synthetic oligonucleotide
gggucuucgcacagguagu

SEQ ID NO: 533349 - RNA, 19 nt, Artificial Sequence
  Description of Artificial Sequence: Synthetic oligonucleotide
agugcccgagaggccucaa

SEQ ID NO: 533350 - RNA, 19 nt, Artificial Sequence
  Description of Artificial Sequence: Synthetic oligonucleotide
ggccgcgcucagcuguauc

SEQ ID NO: 533351 - RNA, 19 nt, Artificial Sequence
  Description of Artificial Sequence: Synthetic oligonucleotide
cuggccccgaagagccucu

SEQ ID NO: 533352 - RNA, 19 nt, Artificial Sequence
  Description of Artificial Sequence: Synthetic oligonucleotide
gccagguccuagcaucaau

SEQ ID NO: 533353 - RNA, 19 nt, Artificial Sequence
  Description of Artificial Sequence: Synthetic oligonucleotide
gcuguauccucuggucccu

SEQ ID NO: 533354 - RNA, 19 nt, Artificial Sequence
  Description of Artificial Sequence: Synthetic oligonucleotide
ccagugcccgagaggccuc

SEQ ID NO: 533355 - RNA, 19 nt, Artificial Sequence
  Description of Artificial Sequence: Synthetic oligonucleotide
cgagagcacucacuuagcu

SEQ ID NO: 533356 - RNA, 19 nt, Artificial Sequence
  Description of Artificial Sequence: Synthetic oligonucleotide
ccgucgagagcacucacuu

SEQ ID NO: 533357 - RNA, 19 nt, Artificial Sequence
  Description of Artificial Sequence: Synthetic oligonucleotide
uggccgcgcucagcuguau

SEQ ID NO: 533358 - RNA, 19 nt, Artificial Sequence
  Description of Artificial Sequence: Synthetic oligonucleotide
cguccccuuugagacccgg

SEQ ID NO: 533359 - RNA, 19 nt, Artificial Sequence
  Description of Artificial Sequence: Synthetic oligonucleotide
ggaugaucuccaaguugau

SEQ ID NO: 533360 - RNA, 19 nt, Artificial Sequence
  Description of Artificial Sequence: Synthetic oligonucleotide
gugcccgagaggccucaau

SEQ ID NO: 533361 - RNA, 19 nt, Artificial Sequence
  Description of Artificial Sequence: Synthetic oligonucleotide
cgaacaccccacaaggcuu

SEQ ID NO: 533362 - RNA, 19 nt, Artificial Sequence
  Description of Artificial Sequence: Synthetic oligonucleotide
gcugagccgucgagagcac

SEQ ID NO: 533363 - RNA, 19 nt, Artificial Sequence
  Description of Artificial Sequence: Synthetic oligonucleotide
gccgucgagagcacucacu

SEQ ID NO: 533364 - RNA, 19 nt, Artificial Sequence
  Description of Artificial Sequence: Synthetic oligonucleotide
cugagccgucgagagcacu

SEQ ID NO: 533365 - RNA, 19 nt, Artificial Sequence
  Description of Artificial Sequence: Synthetic oligonucleotide
gguucgcuccucagugaau

SEQ ID NO: 533366 - RNA, 19 nt, Artificial Sequence
  Description of Artificial Sequence: Synthetic oligonucleotide
cgucgagagcacucacuua

SEQ ID NO: 533367 - RNA, 19 nt, Artificial Sequence
  Description of Artificial Sequence: Synthetic oligonucleotide
  modified_base (19)..(19): a, c, u, g, unknown or other
ccgcacgguucucaaucun

SEQ ID NO: 533368 - RNA, 19 nt, Artificial Sequence
  Description of Artificial Sequence: Synthetic oligonucleotide
cagcguccacaagguccca

SEQ ID NO: 533369 - RNA, 19 nt, Artificial Sequence
  Description of Artificial Sequence: Synthetic oligonucleotide
cccgggccccuuucugaca

SEQ ID NO: 533370 - RNA, 19 nt, Artificial Sequence
  Description of Artificial Sequence: Synthetic oligonucleotide
cggccccgggcugucuucc

SEQ ID NO: 533371 - RNA, 19 nt, Artificial Sequence
  Description of Artificial Sequence: Synthetic oligonucleotide
ccgcgcucagcuguauccu

SEQ ID NO: 533372 - RNA, 19 nt, Artificial Sequence
  Description of Artificial Sequence: Synthetic oligonucleotide
cguccucgccccucggccu

SEQ ID NO: 533373 - RNA, 19 nt, Artificial Sequence
  Description of Artificial Sequence: Synthetic oligonucleotide
gcgccgcacgguucucaau

SEQ ID NO: 533374 - RNA, 19 nt, Artificial Sequence
  Description of Artificial Sequence: Synthetic oligonucleotide
cgauggcggugcccucaca

SEQ ID NO: 533375 - RNA, 19 nt, Artificial Sequence
  Description of Artificial Sequence: Synthetic oligonucleotide
gccuaccagccaggaccua

SEQ ID NO: 533376 - RNA, 19 nt, Artificial Sequence
  Description of Artificial Sequence: Synthetic oligonucleotide
ccucggccccgggcugucu

SEQ ID NO: 533377 - RNA, 19 nt, Artificial Sequence
  Description of Artificial Sequence: Synthetic oligonucleotide
ugugauuugguccaggagg

SEQ ID NO: 533378 - RNA, 19 nt, Artificial Sequence
  Description of Artificial Sequence: Synthetic oligonucleotide
ugucuugugacaaagaacu

SEQ ID NO: 533379 - RNA, 19 nt, Artificial Sequence
  Description of Artificial Sequence: Synthetic oligonucleotide
uuucauugacauaaaaucc

SEQ ID NO: 533380 - RNA, 19 nt, Artificial Sequence
  Description of Artificial Sequence: Synthetic oligonucleotide
ucuuugaaacccaaugucg

SEQ ID NO: 533381 - RNA, 19 nt, Artificial Sequence
  Description of Artificial Sequence: Synthetic oligonucleotide
aggaauguaacuuuacuuc

SEQ ID NO: 533382 - RNA, 19 nt, Artificial Sequence
  Description of Artificial Sequence: Synthetic oligonucleotide
aaccgguuaauccuguccc

SEQ ID NO: 533383 - RNA, 19 nt, Artificial Sequence
  Description of Artificial Sequence: Synthetic oligonucleotide
aaaccgguuaauccugucc

SEQ ID NO: 533384 - RNA, 19 nt, Artificial Sequence
  Description of Artificial Sequence: Synthetic oligonucleotide
cuuaacuuuccccagagag

SEQ ID NO: 533385 - RNA, 19 nt, Artificial Sequence
  Description of Artificial Sequence: Synthetic oligonucleotide
ugaccuaucgucauaguag

SEQ ID NO: 533386 - RNA, 19 nt, Artificial Sequence
  Description of Artificial Sequence: Synthetic oligonucleotide
accacuaucucccaguggg

SEQ ID NO: 533387 - RNA, 19 nt, Artificial Sequence
  Description of Artificial Sequence: Synthetic oligonucleotide
ucuauuguaggucaucgca

SEQ ID NO: 533388 - RNA, 19 nt, Artificial Sequence
  Description of Artificial Sequence: Synthetic oligonucleotide
aauacagaaguuccaucuc

SEQ ID NO: 533389 - RNA, 19 nt, Artificial Sequence
  Description of Artificial Sequence: Synthetic oligonucleotide
ucaucugcgggucucauag

SEQ ID NO: 533390 - RNA, 19 nt, Artificial Sequence
  Description of Artificial Sequence: Synthetic oligonucleotide
acacauccaguuuugaaac

SEQ ID NO: 533391 - RNA, 19 nt, Artificial Sequence
  Description of Artificial Sequence: Synthetic oligonucleotide
auugacauaaaauccagaa

SEQ ID NO: 533392 - RNA, 19 nt, Artificial Sequence
  Description of Artificial Sequence: Synthetic oligonucleotide
aaaggaauguaacuuuacu

SEQ ID NO: 533393 - RNA, 19 nt, Artificial Sequence
  Description of Artificial Sequence: Synthetic oligonucleotide
uuuauuaggacccguguuc

SEQ ID NO: 533394 - RNA, 19 nt, Artificial Sequence
  Description of Artificial Sequence: Synthetic oligonucleotide
auuuuauggcucugaauac

SEQ ID NO: 533395 - RNA, 19 nt, Artificial Sequence
  Description of Artificial Sequence: Synthetic oligonucleotide
gaauucguaagggucaugg

SEQ ID NO: 533396 - RNA, 19 nt, Artificial Sequence
  Description of Artificial Sequence: Synthetic oligonucleotide
ucaggguacgauuucauug

SEQ ID NO: 533397 - RNA, 19 nt, Artificial Sequence
  Description of Artificial Sequence: Synthetic oligonucleotide
acugaaggaauucguaagg

SEQ ID NO: 533398 - RNA, 19 nt, Artificial Sequence
  Description of Artificial Sequence: Synthetic oligonucleotide
uucauucuaaaaugugggg

SEQ ID NO: 533399 - RNA, 19 nt, Artificial Sequence
  Description of Artificial Sequence: Synthetic oligonucleotide
ucauugacauaaaauccag

SEQ ID NO: 533400 - RNA, 19 nt, Artificial Sequence
  Description of Artificial Sequence: Synthetic oligonucleotide
uuuucucuguaguuggcgg

SEQ ID NO: 533401 - RNA, 19 nt, Artificial Sequence
  Description of Artificial Sequence: Synthetic oligonucleotide
ugucguaaaaccugggagc

SEQ ID NO: 533402 - RNA, 19 nt, Artificial Sequence
  Description of Artificial Sequence: Synthetic oligonucleotide
ugacaguacagacaggcca

SEQ ID NO: 533403 - RNA, 19 nt, Artificial Sequence
  Description of Artificial Sequence: Synthetic oligonucleotide
uucguaagggucaugggug

SEQ ID NO: 533404 - RNA, 19 nt, Artificial Sequence
  Description of Artificial Sequence: Synthetic oligonucleotide
aaugucguaaaaccuggga

SEQ ID NO: 533405 - RNA, 19 nt, Artificial Sequence
  Description of Artificial Sequence: Synthetic oligonucleotide
aaaaccugggagcaacuug

SEQ ID NO: 533406 - RNA, 19 nt, Artificial Sequence
  Description of Artificial Sequence: Synthetic oligonucleotide
aguucaaguggcuaucauc

SEQ ID NO: 533407 - RNA, 19 nt, Artificial Sequence
  Description of Artificial Sequence: Synthetic oligonucleotide
ucuguguaaucuucguacg

SEQ ID NO: 533408 - RNA, 19 nt, Artificial Sequence
  Description of Artificial Sequence: Synthetic oligonucleotide
augucguaaaaccugggag

SEQ ID NO: 533409 - RNA, 19 nt, Artificial Sequence
  Description of Artificial Sequence: Synthetic oligonucleotide
aauucguaagggucauggg

SEQ ID NO: 533410 - RNA, 19 nt, Artificial Sequence
  Description of Artificial Sequence: Synthetic oligonucleotide
uuaggacccguguucaugg

SEQ ID NO: 533411 - RNA, 19 nt, Artificial Sequence
  Description of Artificial Sequence: Synthetic oligonucleotide
aguugucucguccaaguuc

SEQ ID NO: 533412 - RNA, 19 nt, Artificial Sequence
  Description of Artificial Sequence: Synthetic oligonucleotide
gacugaaggaauucguaag

SEQ ID NO: 533413 - RNA, 19 nt, Artificial Sequence
  Description of Artificial Sequence: Synthetic oligonucleotide
agagagcuaagguuggagg

SEQ ID NO: 533414 - RNA, 19 nt, Artificial Sequence
  Description of Artificial Sequence: Synthetic oligonucleotide
uugacauaaaauccagaac

SEQ ID NO: 533415 - RNA, 19 nt, Artificial Sequence
  Description of Artificial Sequence: Synthetic oligonucleotide
cauucuaaaauguggggug

SEQ ID NO: 533416 - RNA, 19 nt, Artificial Sequence
  Description of Artificial Sequence: Synthetic oligonucleotide
uaaaauguggggugguuca

SEQ ID NO: 533417 - RNA, 19 nt, Artificial Sequence
  Description of Artificial Sequence: Synthetic oligonucleotide
ucugucuugugacaaagaa

SEQ ID NO: 533418 - RNA, 19 nt, Artificial Sequence
  Description of Artificial Sequence: Synthetic oligonucleotide
acugcucagaacuuucggg

SEQ ID NO: 533419 - RNA, 19 nt, Artificial Sequence
  Description of Artificial Sequence: Synthetic oligonucleotide
acuaucucccagugggucc

SEQ ID NO: 533420 - RNA, 19 nt, Artificial Sequence
  Description of Artificial Sequence: Synthetic oligonucleotide
uguaaucuucguacgacga

SEQ ID NO: 533421 - RNA, 19 nt, Artificial Sequence
  Description of Artificial Sequence: Synthetic oligonucleotide
cuccauaugcugaauacag

SEQ ID NO: 533422 - RNA, 19 nt, Artificial Sequence
  Description of Artificial Sequence: Synthetic oligonucleotide
ugauaacuucucuacucgg

SEQ ID NO: 533423 - RNA, 19 nt, Artificial Sequence
  Description of Artificial Sequence: Synthetic oligonucleotide
cugauaacuucucuacucg

SEQ ID NO: 533424 - RNA, 19 nt, Artificial Sequence
  Description of Artificial Sequence: Synthetic oligonucleotide
uuggcuaacuuguaguaca

SEQ ID NO: 533425 - RNA, 19 nt, Artificial Sequence
  Description of Artificial Sequence: Synthetic oligonucleotide
ugugcuucauguaaauccu

SEQ ID NO: 533426 - RNA, 19 nt, Artificial Sequence
  Description of Artificial Sequence: Synthetic oligonucleotide
gcuaacuuguaguacacgg

SEQ ID NO: 533427 - RNA, 19 nt, Artificial Sequence
  Description of Artificial Sequence: Synthetic oligonucleotide
ggagcaacuugcuagagag

SEQ ID NO: 533428 - RNA, 19 nt, Artificial Sequence
  Description of Artificial Sequence: Synthetic oligonucleotide
ugaaacauuuuauggcucu

SEQ ID NO: 533429 - RNA, 19 nt, Artificial Sequence
  Description of Artificial Sequence: Synthetic oligonucleotide
uuguucugcauugaaagug

SEQ ID NO: 533430 - RNA, 19 nt, Artificial Sequence
  Description of Artificial Sequence: Synthetic oligonucleotide
acaagcuaguucuugucag

SEQ ID NO: 533431 - RNA, 19 nt, Artificial Sequence
  Description of Artificial Sequence: Synthetic oligonucleotide
gucuguguaaucuucguac

SEQ ID NO: 533432 - RNA, 19 nt, Artificial Sequence
  Description of Artificial Sequence: Synthetic oligonucleotide
uguaguacacggugucugg

SEQ ID NO: 533433 - RNA, 19 nt, Artificial Sequence
  Description of Artificial Sequence: Synthetic oligonucleotide
agucugucaggcugcaggc

SEQ ID NO: 533434 - RNA, 19 nt, Artificial Sequence
  Description of Artificial Sequence: Synthetic oligonucleotide
guggcuaucaucaugguca

SEQ ID NO: 533435 - RNA, 19 nt, Artificial Sequence
  Description of Artificial Sequence: Synthetic oligonucleotide
ucuggucuauuguagguca

SEQ ID NO: 533436 - RNA, 19 nt, Artificial Sequence
  Description of Artificial Sequence: Synthetic oligonucleotide
ucuacuugcacugggacaa

SEQ ID NO: 533437 - RNA, 19 nt, Artificial Sequence
  Description of Artificial Sequence: Synthetic oligonucleotide
uucggcaucuccuuuauua

SEQ ID NO: 533438 - RNA, 19 nt, Artificial Sequence
  Description of Artificial Sequence: Synthetic oligonucleotide
ugcaauugcauccgugaca

SEQ ID NO: 533439 - RNA, 19 nt, Artificial Sequence
  Description of Artificial Sequence: Synthetic oligonucleotide
aaucuucguacgacgagcg

SEQ ID NO: 533440 - RNA, 19 nt, Artificial Sequence
  Description of Artificial Sequence: Synthetic oligonucleotide
gaccuaucgucauaguagc

SEQ ID NO: 533441 - RNA, 19 nt, Artificial Sequence
  Description of Artificial Sequence: Synthetic oligonucleotide
acauaaaauccagaacagg

SEQ ID NO: 533442 - RNA, 19 nt, Artificial Sequence
  Description of Artificial Sequence: Synthetic oligonucleotide
ucuugugacaaagaacugu

SEQ ID NO: 533443 - RNA, 19 nt, Artificial Sequence
  Description of Artificial Sequence: Synthetic oligonucleotide
aagaucauccuugagugau

SEQ ID NO: 533444 - RNA, 19 nt, Artificial Sequence
  Description of Artificial Sequence: Synthetic oligonucleotide
aaagcccgcgugcaggauc

SEQ ID NO: 533445 - RNA, 19 nt, Artificial Sequence
  Description of Artificial Sequence: Synthetic oligonucleotide
uaggucaucgcauuaucac

SEQ ID NO: 533446 - RNA, 19 nt, Artificial Sequence
  Description of Artificial Sequence: Synthetic oligonucleotide
auaacuucucuacucggcu

SEQ ID NO: 533447 - RNA, 19 nt, Artificial Sequence
  Description of Artificial Sequence: Synthetic oligonucleotide
caacacucaggcgagaagg

SEQ ID NO: 533448 - RNA, 19 nt, Artificial Sequence
  Description of Artificial Sequence: Synthetic oligonucleotide
cauaugcugaauacagaag

SEQ ID NO: 533449 - RNA, 19 nt, Artificial Sequence
  Description of Artificial Sequence: Synthetic oligonucleotide
ugcauugaaagugcggugc

SEQ ID NO: 533450 - RNA, 19 nt, Artificial Sequence
  Description of Artificial Sequence: Synthetic oligonucleotide
uaaucuucguacgacgagc

SEQ ID NO: 533451 - RNA, 19 nt, Artificial Sequence
  Description of Artificial Sequence: Synthetic oligonucleotide
uucagguaccccaucuugc

SEQ ID NO: 533452 - RNA, 19 nt, Artificial Sequence
  Description of Artificial Sequence: Synthetic oligonucleotide
uguuugcucaucaucuuaa

SEQ ID NO: 533453 - RNA, 19 nt, Artificial Sequence
  Description of Artificial Sequence: Synthetic oligonucleotide
aucgcauuaucacacauua

SEQ ID NO: 533454 - RNA, 19 nt, Artificial Sequence
  Description of Artificial Sequence: Synthetic oligonucleotide
agcaacuugcuagagagug

SEQ ID NO: 533455 - RNA, 19 nt, Artificial Sequence
  Description of Artificial Sequence: Synthetic oligonucleotide
gcuaguucuugucagaagc

SEQ ID NO: 533456 - RNA, 19 nt, Artificial Sequence
  Description of Artificial Sequence: Synthetic oligonucleotide
gauaacuucucuacucggc

SEQ ID NO: 533457 - RNA, 19 nt, Artificial Sequence
  Description of Artificial Sequence: Synthetic oligonucleotide
guguaaucuucguacgacg

SEQ ID NO: 533458 - RNA, 19 nt, Artificial Sequence
  Description of Artificial Sequence: Synthetic oligonucleotide
gguucauuauuugucaggg

SEQ ID NO: 533459 - RNA, 19 nt, Artificial Sequence
  Description of Artificial Sequence: Synthetic oligonucleotide
auacagaaguuccaucuca

SEQ ID NO: 533460 - RNA, 19 nt, Artificial Sequence
  Description of Artificial Sequence: Synthetic oligonucleotide
ucuucguacgacgagcgcc

SEQ ID NO: 533461 - RNA, 19 nt, Artificial Sequence
  Description of Artificial Sequence: Synthetic oligonucleotide
aucgaggugcuuuuccuuc

SEQ ID NO: 533462 - RNA, 19 nt, Artificial Sequence
  Description of Artificial Sequence: Synthetic oligonucleotide
ugagugaucuccaccugug

SEQ ID NO: 533463 - RNA, 19 nt, Artificial Sequence
  Description of Artificial Sequence: Synthetic oligonucleotide
aucccgagagcucugucac

SEQ ID NO: 533464 - RNA, 19 nt, Artificial Sequence
  Description of Artificial Sequence: Synthetic oligonucleotide
cauggucugaccuaucguc

SEQ ID NO: 533465 - RNA, 19 nt, Artificial Sequence
  Description of Artificial Sequence: Synthetic oligonucleotide
acuugcuagagagugaacu

SEQ ID NO: 533466 - RNA, 19 nt, Artificial Sequence
  Description of Artificial Sequence: Synthetic oligonucleotide
acuuucgggacaccacucg

SEQ ID NO: 533467 - RNA, 19 nt, Artificial Sequence
  Description of Artificial Sequence: Synthetic oligonucleotide
uguguaaucuucguacgac

SEQ ID NO: 533468 - RNA, 19 nt, Artificial Sequence
  Description of Artificial Sequence: Synthetic oligonucleotide
uuuuauggcucugaauacu

SEQ ID NO: 533469 - RNA, 19 nt, Artificial Sequence
  Description of Artificial Sequence: Synthetic oligonucleotide
uucuuuccagggucaaagg

SEQ ID NO: 533470 - RNA, 19 nt, Artificial Sequence
  Description of Artificial Sequence: Synthetic oligonucleotide
agggucaaagggcaucacg

SEQ ID NO: 533471 - RNA, 19 nt, Artificial Sequence
  Description of Artificial Sequence: Synthetic oligonucleotide
ucagguaccccaucuugcc

SEQ ID NO: 533472 - RNA, 19 nt, Artificial Sequence
  Description of Artificial Sequence: Synthetic oligonucleotide
ugagcaccaguuucagagg

SEQ ID NO: 533473 - RNA, 19 nt, Artificial Sequence
  Description of Artificial Sequence: Synthetic oligonucleotide
ucggcaucuccuuuauuag

SEQ ID NO: 533474 - RNA, 19 nt, Artificial Sequence
  Description of Artificial Sequence: Synthetic oligonucleotide
aggaugagacaaaaguuuc

SEQ ID NO: 533475 - RNA, 19 nt, Artificial Sequence
  Description of Artificial Sequence: Synthetic oligonucleotide
guaaucuucguacgacgag

SEQ ID NO: 533476 - RNA, 19 nt, Artificial Sequence
  Description of Artificial Sequence: Synthetic oligonucleotide
auagggaugcuccuccucu

SEQ ID NO: 533477 - RNA, 19 nt, Artificial Sequence
  Description of Artificial Sequence: Synthetic oligonucleotide
aaccucgggaacagguucc

SEQ ID NO: 533478 - RNA, 19 nt, Artificial Sequence
  Description of Artificial Sequence: Synthetic oligonucleotide
uuauuaggacccguguuca

SEQ ID NO: 533479 - RNA, 19 nt, Artificial Sequence
  Description of Artificial Sequence: Synthetic oligonucleotide
cugucuugugacaaagaac

SEQ ID NO: 533480 - RNA, 19 nt, Artificial Sequence
  Description of Artificial Sequence: Synthetic oligonucleotide
aauguggggugguucauua

SEQ ID NO: 533481 - RNA, 19 nt, Artificial Sequence
  Description of Artificial Sequence: Synthetic oligonucleotide
cuugcuagagagugaacuc

SEQ ID NO: 533482 - RNA, 19 nt, Artificial Sequence
  Description of Artificial Sequence: Synthetic oligonucleotide
cacucggugcuuuugggcc

SEQ ID NO: 533483 - RNA, 19 nt, Artificial Sequence
  Description of Artificial Sequence: Synthetic oligonucleotide
uacgacgagcgccacucgg

SEQ ID NO: 533484 - RNA, 19 nt, Artificial Sequence
  Description of Artificial Sequence: Synthetic oligonucleotide
cuugcaauugcauccguga

SEQ ID NO: 533485 - RNA, 19 nt, Artificial Sequence
  Description of Artificial Sequence: Synthetic oligonucleotide
gagagcuaagguuggagga

SEQ ID NO: 533486 - RNA, 19 nt, Artificial Sequence
  Description of Artificial Sequence: Synthetic oligonucleotide
ucuuaaagcccgcgugcag

SEQ ID NO: 533487 - RNA, 19 nt, Artificial Sequence
  Description of Artificial Sequence: Synthetic oligonucleotide
uccauaugcugaauacaga

SEQ ID NO: 533488 - RNA, 19 nt, Artificial Sequence
  Description of Artificial Sequence: Synthetic oligonucleotide
agacugaaggaauucguaa

SEQ ID NO: 533489 - RNA, 19 nt, Artificial Sequence
  Description of Artificial Sequence: Synthetic oligonucleotide
uccaaguucaaguggcuau

SEQ ID NO: 533490 - RNA, 19 nt, Artificial Sequence
  Description of Artificial Sequence: Synthetic oligonucleotide
accagucucaucuccauau

SEQ ID NO: 533491 - RNA, 19 nt, Artificial Sequence
  Description of Artificial Sequence: Synthetic oligonucleotide
uggaggauggccgggagcc

SEQ ID NO: 533492 - RNA, 19 nt, Artificial Sequence
  Description of Artificial Sequence: Synthetic oligonucleotide
uguaggucaucgcauuauc

SEQ ID NO: 533493 - RNA, 19 nt, Artificial Sequence
  Description of Artificial Sequence: Synthetic oligonucleotide
gugucuggucuauuguagg

SEQ ID NO: 533494 - RNA, 19 nt, Artificial Sequence
  Description of Artificial Sequence: Synthetic oligonucleotide
aucaucuuaaagcccgcgu

SEQ ID NO: 533495 - RNA, 19 nt, Artificial Sequence
  Description of Artificial Sequence: Synthetic oligonucleotide
uugcaauugcauccgugac

SEQ ID NO: 533496 - RNA, 19 nt, Artificial Sequence
  Description of Artificial Sequence: Synthetic oligonucleotide
aggucaucgcauuaucaca

SEQ ID NO: 533497 - RNA, 19 nt, Artificial Sequence
  Description of Artificial Sequence: Synthetic oligonucleotide
ugucccgagccucaucagc

SEQ ID NO: 533498 - RNA, 19 nt, Artificial Sequence
  Description of Artificial Sequence: Synthetic oligonucleotide
uggucaagcuccuucuuaa

SEQ ID NO: 533499 - RNA, 19 nt, Artificial Sequence
  Description of Artificial Sequence: Synthetic oligonucleotide
uuaaagcccgcgugcagga

SEQ ID NO: 533500 - RNA, 19 nt, Artificial Sequence
  Description of Artificial Sequence: Synthetic oligonucleotide
aucuucguacgacgagcgc

SEQ ID NO: 533501 - RNA, 19 nt, Artificial Sequence
  Description of Artificial Sequence: Synthetic oligonucleotide
gcaauugcauccgugacag

SEQ ID NO: 533502 - RNA, 19 nt, Artificial Sequence
  Description of Artificial Sequence: Synthetic oligonucleotide
cuuucgggacaccacucgg

SEQ ID NO: 533503 - RNA, 19 nt, Artificial Sequence
  Description of Artificial Sequence: Synthetic oligonucleotide
ggucuauuguaggucaucg

SEQ ID NO: 533504 - RNA, 19 nt, Artificial Sequence
  Description of Artificial Sequence: Synthetic oligonucleotide
augacaguacagacaggcc

SEQ ID NO: 533505 - RNA, 19 nt, Artificial Sequence
  Description of Artificial Sequence: Synthetic oligonucleotide
aacuuucgggacaccacuc

SEQ ID NO: 533506 - RNA, 19 nt, Artificial Sequence
  Description of Artificial Sequence: Synthetic oligonucleotide
cuugugacaaagaacugua

SEQ ID NO: 533507 - RNA, 19 nt, Artificial Sequence
  Description of Artificial Sequence: Synthetic oligonucleotide
aggguacgauuucauugac

SEQ ID NO: 533508 - RNA, 19 nt, Artificial Sequence
  Description of Artificial Sequence: Synthetic oligonucleotide
gagaaaccgguuaauccug

SEQ ID NO: 533509 - RNA, 19 nt, Artificial Sequence
  Description of Artificial Sequence: Synthetic oligonucleotide
ucaucaucuuaaagcccgc

SEQ ID NO: 533510 - RNA, 19 nt, Artificial Sequence
  Description of Artificial Sequence: Synthetic oligonucleotide
ccaaugucguaaaaccugg

SEQ ID NO: 533511 - RNA, 19 nt, Artificial Sequence
  Description of Artificial Sequence: Synthetic oligonucleotide
agggagacaacuccauccu

SEQ ID NO: 533512 - RNA, 19 nt, Artificial Sequence
  Description of Artificial Sequence: Synthetic oligonucleotide
cuaaaauguggggugguuc

SEQ ID NO: 533513 - RNA, 19 nt, Artificial Sequence
  Description of Artificial Sequence: Synthetic oligonucleotide
ucuccuuuauuaggacccg

SEQ ID NO: 533514 - RNA, 19 nt, Artificial Sequence
  Description of Artificial Sequence: Synthetic oligonucleotide
ucccuucaggcucaaacau

SEQ ID NO: 533515 - RNA, 19 nt, Artificial Sequence
  Description of Artificial Sequence: Synthetic oligonucleotide
uucggcaggcccucacugg

SEQ ID NO: 533516 - RNA, 19 nt, Artificial Sequence
  Description of Artificial Sequence: Synthetic oligonucleotide
ucagugcacacuguacacc

SEQ ID NO: 533517 - RNA, 19 nt, Artificial Sequence
  Description of Artificial Sequence: Synthetic oligonucleotide
gaaacauuuuauggcucug

SEQ ID NO: 533518 - RNA, 19 nt, Artificial Sequence
  Description of Artificial Sequence: Synthetic oligonucleotide
accgguuaauccugucccg

SEQ ID NO: 533519 - RNA, 19 nt, Artificial Sequence
  Description of Artificial Sequence: Synthetic oligonucleotide
cuguacaccagucucaucu

SEQ ID NO: 533520 - RNA, 19 nt, Artificial Sequence
  Description of Artificial Sequence: Synthetic oligonucleotide
caaugucguaaaaccuggg

SEQ ID NO: 533521 - RNA, 19 nt, Artificial Sequence
  Description of Artificial Sequence: Synthetic oligonucleotide
ugcucagaacuuucgggac

SEQ ID NO: 533522 - RNA, 19 nt, Artificial Sequence
  Description of Artificial Sequence: Synthetic oligonucleotide
gaucccgagagcucuguca

SEQ ID NO: 533523 - RNA, 19 nt, Artificial Sequence
  Description of Artificial Sequence: Synthetic oligonucleotide
agcuaguucuugucagaag

SEQ ID NO: 533524 - RNA, 19 nt, Artificial Sequence
  Description of Artificial Sequence: Synthetic oligonucleotide
cacugcucagaacuuucgg

SEQ ID NO: 533525 - RNA, 19 nt, Artificial Sequence
  Description of Artificial Sequence: Synthetic oligonucleotide
ugccaccugggagaaaccg

SEQ ID NO: 533526 - RNA, 19 nt, Artificial Sequence
  Description of Artificial Sequence: Synthetic oligonucleotide
auuaggacccguguucaug

SEQ ID NO: 533527 - RNA, 19 nt, Artificial Sequence
  Description of Artificial Sequence: Synthetic oligonucleotide
gcugauaacuucucuacuc

SEQ ID NO: 533528 - RNA, 19 nt, Artificial Sequence
  Description of Artificial Sequence: Synthetic oligonucleotide
ugcuuucagguccccaaac

SEQ ID NO: 533529 - RNA, 19 nt, Artificial Sequence
  Description of Artificial Sequence: Synthetic oligonucleotide
uuaauccugucccgagccu

SEQ ID NO: 533530 - RNA, 19 nt, Artificial Sequence
  Description of Artificial Sequence: Synthetic oligonucleotide
uauuugucagggagacaac

SEQ ID NO: 533531 - RNA, 19 nt, Artificial Sequence
  Description of Artificial Sequence: Synthetic oligonucleotide
accacucggugcuuuuggg

SEQ ID NO: 533532 - RNA, 19 nt, Artificial Sequence
  Description of Artificial Sequence: Synthetic oligonucleotide
uccccaacacucaggcgag

SEQ ID NO: 533533 - RNA, 19 nt, Artificial Sequence
  Description of Artificial Sequence: Synthetic oligonucleotide
accccaucuugccaccugg

SEQ ID NO: 533534 - RNA, 19 nt, Artificial Sequence
  Description of Artificial Sequence: Synthetic oligonucleotide
caggguacgauuucauuga

SEQ ID NO: 533535 - RNA, 19 nt, Artificial Sequence
  Description of Artificial Sequence: Synthetic oligonucleotide
uucacuucaucugcggguc

SEQ ID NO: 533536 - RNA, 19 nt, Artificial Sequence
  Description of Artificial Sequence: Synthetic oligonucleotide
uggcuaacuuguaguacac

SEQ ID NO: 533537 - RNA, 19 nt, Artificial Sequence
  Description of Artificial Sequence: Synthetic oligonucleotide
cacagggugugucuccucc

SEQ ID NO: 533538 - RNA, 19 nt, Artificial Sequence
  Description of Artificial Sequence: Synthetic oligonucleotide
gguacgauuucauugacau

SEQ ID NO: 533539 - RNA, 19 nt, Artificial Sequence
  Description of Artificial Sequence: Synthetic oligonucleotide
gucuauuguaggucaucgc

SEQ ID NO: 533540 - RNA, 19 nt, Artificial Sequence
  Description of Artificial Sequence: Synthetic oligonucleotide
ucguaagggucauggguga

SEQ ID NO: 533541 - RNA, 19 nt, Artificial Sequence
  Description of Artificial Sequence: Synthetic oligonucleotide
ucggccuugugcuucuugu

SEQ ID NO: 533542 - RNA, 19 nt, Artificial Sequence
  Description of Artificial Sequence: Synthetic oligonucleotide
ucugcgggucucauaggga

SEQ ID NO: 533543 - RNA, 19 nt, Artificial Sequence
  Description of Artificial Sequence: Synthetic oligonucleotide
ugaaagugcggugcuggca

SEQ ID NO: 533544 - RNA, 19 nt, Artificial Sequence
  Description of Artificial Sequence: Synthetic oligonucleotide
uaucgucauaguagcugga

SEQ ID NO: 533545 - RNA, 19 nt, Artificial Sequence
  Description of Artificial Sequence: Synthetic oligonucleotide
cacggugucuggucuauug

SEQ ID NO: 533546 - RNA, 19 nt, Artificial Sequence
  Description of Artificial Sequence: Synthetic oligonucleotide
cucacuggucgaucugggg

SEQ ID NO: 533547 - RNA, 19 nt, Artificial Sequence
  Description of Artificial Sequence: Synthetic oligonucleotide
ugggacaaccucgggaaca

SEQ ID NO: 533548 - RNA, 19 nt, Artificial Sequence
  Description of Artificial Sequence: Synthetic oligonucleotide
uugcauccgugacaggaaa

SEQ ID NO: 533549 - RNA, 19 nt, Artificial Sequence
  Description of Artificial Sequence: Synthetic oligonucleotide
aguggugugucuguguaau

SEQ ID NO: 533550 - RNA, 19 nt, Artificial Sequence
  Description of Artificial Sequence: Synthetic oligonucleotide
gggucaaagggcaucacgc

SEQ ID NO: 533551 - RNA, 19 nt, Artificial Sequence
  Description of Artificial Sequence: Synthetic oligonucleotide
gaacuuucgggacaccacu

SEQ ID NO: 533552 - RNA, 19 nt, Artificial Sequence
  Description of Artificial Sequence: Synthetic oligonucleotide
aacuugcuagagagugaac

SEQ ID NO: 533553 - RNA, 19 nt, Artificial Sequence
  Description of Artificial Sequence: Synthetic oligonucleotide
aguuucugucuugugacaa

SEQ ID NO: 533554 - RNA, 19 nt, Artificial Sequence
  Description of Artificial Sequence: Synthetic oligonucleotide
cauugacauaaaauccaga

SEQ ID NO: 533555 - RNA, 19 nt, Artificial Sequence
  Description of Artificial Sequence: Synthetic oligonucleotide
cucagaacuuucgggacac

SEQ ID NO: 533556 - RNA, 19 nt, Artificial Sequence
  Description of Artificial Sequence: Synthetic oligonucleotide
uaguacacggugucugguc

SEQ ID NO: 533557 - RNA, 19 nt, Artificial Sequence
  Description of Artificial Sequence: Synthetic oligonucleotide
agagugaacucagguccac

SEQ ID NO: 533558 - RNA, 19 nt, Artificial Sequence
  Description of Artificial Sequence: Synthetic oligonucleotide
ugggugugcucucauucuc

SEQ ID NO: 533559 - RNA, 19 nt, Artificial Sequence
  Description of Artificial Sequence: Synthetic oligonucleotide
ggagaaaccgguuaauccu

SEQ ID NO: 533560 - RNA, 19 nt, Artificial Sequence
  Description of Artificial Sequence: Synthetic oligonucleotide
ggaacagguuccucaacug

SEQ ID NO: 533561 - RNA, 19 nt, Artificial Sequence
  Description of Artificial Sequence: Synthetic oligonucleotide
caaccucgggaacagguuc

SEQ ID NO: 533562 - RNA, 19 nt, Artificial Sequence
  Description of Artificial Sequence: Synthetic oligonucleotide
cucgggaacagguuccuca

SEQ ID NO: 533563 - RNA, 19 nt, Artificial Sequence
  Description of Artificial Sequence: Synthetic oligonucleotide
aggcgguggacagagagcu

SEQ ID NO: 533564 - RNA, 19 nt, Artificial Sequence
  Description of Artificial Sequence: Synthetic oligonucleotide
uucauggcuuuuguaaaua

SEQ ID NO: 533565 - RNA, 19 nt, Artificial Sequence
  Description of Artificial Sequence: Synthetic oligonucleotide
uggguccccaaccuucacu

SEQ ID NO: 533566 - RNA, 19 nt, Artificial Sequence
  Description of Artificial Sequence: Synthetic oligonucleotide
acgacgagcgccacucggc

SEQ ID NO: 533567 - RNA, 19 nt, Artificial Sequence
  Description of Artificial Sequence: Synthetic oligonucleotide
cugcauugaaagugcggug

SEQ ID NO: 533568 - RNA, 19 nt, Artificial Sequence
  Description of Artificial Sequence: Synthetic oligonucleotide
uguucggcaggcccucacu

SEQ ID NO: 533569 - RNA, 19 nt, Artificial Sequence
  Description of Artificial Sequence: Synthetic oligonucleotide
uucuaaaaugugggguggu

SEQ ID NO: 533570 - RNA, 19 nt, Artificial Sequence
  Description of Artificial Sequence: Synthetic oligonucleotide
agccuaguugucucgucca

SEQ ID NO: 533571 - RNA, 19 nt, Artificial Sequence
  Description of Artificial Sequence: Synthetic oligonucleotide
ugggagaaaccgguuaauc

SEQ ID NO: 533572 - RNA, 19 nt, Artificial Sequence
  Description of Artificial Sequence: Synthetic oligonucleotide
gguuaauccugucccgagc

SEQ ID NO: 533573 - RNA, 19 nt, Artificial Sequence
  Description of Artificial Sequence: Synthetic oligonucleotide
gucucguccaaguucaagu

SEQ ID NO: 533574 - RNA, 19 nt, Artificial Sequence
  Description of Artificial Sequence: Synthetic oligonucleotide
cuaucucccaguggguccc

SEQ ID NO: 533575 - RNA, 19 nt, Artificial Sequence
  Description of Artificial Sequence: Synthetic oligonucleotide
cugcgaucgcagcggaucg

SEQ ID NO: 533576 - RNA, 19 nt, Artificial Sequence
  Description of Artificial Sequence: Synthetic oligonucleotide
aaguggcuaucaucauggu

SEQ ID NO: 533577 - RNA, 19 nt, Artificial Sequence
  Description of Artificial Sequence: Synthetic oligonucleotide
ggugucuggucuauuguag

SEQ ID NO: 533578 - RNA, 19 nt, Artificial Sequence
  Description of Artificial Sequence: Synthetic oligonucleotide
uuguaggucaucgcauuau

SEQ ID NO: 533579 - RNA, 19 nt, Artificial Sequence
  Description of Artificial Sequence: Synthetic oligonucleotide
uaacuucucuacucggcuu

SEQ ID NO: 533580 - RNA, 19 nt, Artificial Sequence
  Description of Artificial Sequence: Synthetic oligonucleotide
ggaauguaacuuuacuucu

SEQ ID NO: 533581 - RNA, 19 nt, Artificial Sequence
  Description of Artificial Sequence: Synthetic oligonucleotide
ggcuacaugccagagagga

SEQ ID NO: 533582 - RNA, 19 nt, Artificial Sequence
  Description of Artificial Sequence: Synthetic oligonucleotide
cagagagcuaagguuggag

SEQ ID NO: 533583 - RNA, 19 nt, Artificial Sequence
  Description of Artificial Sequence: Synthetic oligonucleotide
acaucaggguacgauuuca

SEQ ID NO: 533584 - RNA, 19 nt, Artificial Sequence
  Description of Artificial Sequence: Synthetic oligonucleotide
aaaauccaugcggaucuuu

SEQ ID NO: 533585 - RNA, 19 nt, Artificial Sequence
  Description of Artificial Sequence: Synthetic oligonucleotide
gucguggccagaucccgag

SEQ ID NO: 533586 - RNA, 19 nt, Artificial Sequence
  Description of Artificial Sequence: Synthetic oligonucleotide
cuucguacgacgagcgcca

SEQ ID NO: 533587 - RNA, 19 nt, Artificial Sequence
  Description of Artificial Sequence: Synthetic oligonucleotide
ucgcagugcucccucuccc

SEQ ID NO: 533588 - RNA, 19 nt, Artificial Sequence
  Description of Artificial Sequence: Synthetic oligonucleotide
ugcauccgugacaggaaaa

SEQ ID NO: 533589 - RNA, 19 nt, Artificial Sequence
  Description of Artificial Sequence: Synthetic oligonucleotide
aucuuaaagcccgcgugca

SEQ ID NO: 533590 - RNA, 19 nt, Artificial Sequence
  Description of Artificial Sequence: Synthetic oligonucleotide
uaauccugucccgagccuc

SEQ ID NO: 533591 - RNA, 19 nt, Artificial Sequence
  Description of Artificial Sequence: Synthetic oligonucleotide
ucuaaaauguggggugguu

SEQ ID NO: 533592 - RNA, 19 nt, Artificial Sequence
  Description of Artificial Sequence: Synthetic oligonucleotide
ucgaggugcuuuuccuucu

SEQ ID NO: 533593 - RNA, 19 nt, Artificial Sequence
  Description of Artificial Sequence: Synthetic oligonucleotide
guucggcaggcccucacug

SEQ ID NO: 533594 - RNA, 19 nt, Artificial Sequence
  Description of Artificial Sequence: Synthetic oligonucleotide
ugcgggucucauagggaug

SEQ ID NO: 533595 - RNA, 19 nt, Artificial Sequence
  Description of Artificial Sequence: Synthetic oligonucleotide
caggagccuaguugucucg

SEQ ID NO: 533596 - RNA, 19 nt, Artificial Sequence
  Description of Artificial Sequence: Synthetic oligonucleotide
ucgcauuaucacacauuaa

SEQ ID NO: 533597 - RNA, 19 nt, Artificial Sequence
  Description of Artificial Sequence: Synthetic oligonucleotide
gaaaccgguuaauccuguc

SEQ ID NO: 533598 - RNA, 19 nt, Artificial Sequence
  Description of Artificial Sequence: Synthetic oligonucleotide
cuaacuuguaguacacggu

SEQ ID NO: 533599 - RNA, 19 nt, Artificial Sequence
  Description of Artificial Sequence: Synthetic oligonucleotide
uacuugcacugggacaacc

SEQ ID NO: 533600 - RNA, 19 nt, Artificial Sequence
  Description of Artificial Sequence: Synthetic oligonucleotide
uucaaguggcuaucaucau

SEQ ID NO: 533601 - RNA, 19 nt, Artificial Sequence
  Description of Artificial Sequence: Synthetic oligonucleotide
agaucauccuugagugauc

SEQ ID NO: 533602 - RNA, 19 nt, Artificial Sequence
  Description of Artificial Sequence: Synthetic oligonucleotide
aauccugucccgagccuca

SEQ ID NO: 533603 - RNA, 19 nt, Artificial Sequence
  Description of Artificial Sequence: Synthetic oligonucleotide
ccauaugcugaauacagaa

SEQ ID NO: 533604 - RNA, 19 nt, Artificial Sequence
  Description of Artificial Sequence: Synthetic oligonucleotide
caucacgccuccccuuccg

SEQ ID NO: 533605 - RNA, 19 nt, Artificial Sequence
  Description of Artificial Sequence: Synthetic oligonucleotide
uggucugaccuaucgucau

SEQ ID NO: 533606 - RNA, 19 nt, Artificial Sequence
  Description of Artificial Sequence: Synthetic oligonucleotide
cuggaagaucauccuugag

SEQ ID NO: 533607 - RNA, 19 nt, Artificial Sequence
  Description of Artificial Sequence: Synthetic oligonucleotide
acgccuccccuuccgaguc

SEQ ID NO: 533608 - RNA, 19 nt, Artificial Sequence
  Description of Artificial Sequence: Synthetic oligonucleotide
uaaaaccugggagcaacuu

SEQ ID NO: 533609 - RNA, 19 nt, Artificial Sequence
  Description of Artificial Sequence: Synthetic oligonucleotide
caugggugacauccggcug

SEQ ID NO: 533610 - RNA, 19 nt, Artificial Sequence
  Description of Artificial Sequence: Synthetic oligonucleotide
ccuaucgucauaguagcug

SEQ ID NO: 533611 - RNA, 19 nt, Artificial Sequence
  Description of Artificial Sequence: Synthetic oligonucleotide
ucugaccuaucgucauagu

SEQ ID NO: 533612 - RNA, 19 nt, Artificial Sequence
  Description of Artificial Sequence: Synthetic oligonucleotide
caagcuaguucuugucaga

SEQ ID NO: 533613 - RNA, 19 nt, Artificial Sequence
  Description of Artificial Sequence: Synthetic oligonucleotide
aaauguggggugguucauu

SEQ ID NO: 533614 - RNA, 19 nt, Artificial Sequence
  Description of Artificial Sequence: Synthetic oligonucleotide
acccaaugucguaaaaccu

SEQ ID NO: 533615 - RNA, 19 nt, Artificial Sequence
  Description of Artificial Sequence: Synthetic oligonucleotide
aggacccguguucauggcu

SEQ ID NO: 533616 - RNA, 19 nt, Artificial Sequence
  Description of Artificial Sequence: Synthetic oligonucleotide
cuguguaaucuucguacga

SEQ ID NO: 533617 - RNA, 19 nt, Artificial Sequence
  Description of Artificial Sequence: Synthetic oligonucleotide
gguggacagagagcuaagg

SEQ ID NO: 533618 - RNA, 19 nt, Artificial Sequence
  Description of Artificial Sequence: Synthetic oligonucleotide
ucacgcucauggucugacc

SEQ ID NO: 533619 - RNA, 19 nt, Artificial Sequence
  Description of Artificial Sequence: Synthetic oligonucleotide
cugaccuaucgucauagua

SEQ ID NO: 533620 - RNA, 19 nt, Artificial Sequence
  Description of Artificial Sequence: Synthetic oligonucleotide
cugcuugugcuucauguaa

SEQ ID NO: 533621 - RNA, 19 nt, Artificial Sequence
  Description of Artificial Sequence: Synthetic oligonucleotide
caccacuaucucccagugg

SEQ ID NO: 533622 - RNA, 19 nt, Artificial Sequence
  Description of Artificial Sequence: Synthetic oligonucleotide
auggucugaccuaucguca

SEQ ID NO: 533623 - RNA, 19 nt, Artificial Sequence
  Description of Artificial Sequence: Synthetic oligonucleotide
uggucuauuguaggucauc

SEQ ID NO: 533624 - RNA, 19 nt, Artificial Sequence
  Description of Artificial Sequence: Synthetic oligonucleotide
gaucauccuugagugaucu

SEQ ID NO: 533625 - RNA, 19 nt, Artificial Sequence
  Description of Artificial Sequence: Synthetic oligonucleotide
caacuugcuagagagugaa

SEQ ID NO: 533626 - RNA, 19 nt, Artificial Sequence
  Description of Artificial Sequence: Synthetic oligonucleotide
cacugggacaaccucggga

SEQ ID NO: 533627 - RNA, 19 nt, Artificial Sequence
  Description of Artificial Sequence: Synthetic oligonucleotide
cacuaucucccaguggguc

SEQ ID NO: 533628 - RNA, 19 nt, Artificial Sequence
  Description of Artificial Sequence: Synthetic oligonucleotide
aagugcggugcuggcacug

SEQ ID NO: 533629 - RNA, 19 nt, Artificial Sequence
  Description of Artificial Sequence: Synthetic oligonucleotide
guuucugucuugugacaaa

SEQ ID NO: 533630 - RNA, 19 nt, Artificial Sequence
  Description of Artificial Sequence: Synthetic oligonucleotide
cuauuguaggucaucgcau

SEQ ID NO: 533631 - RNA, 19 nt, Artificial Sequence
  Description of Artificial Sequence: Synthetic oligonucleotide
uccccaaccuucacuucau

SEQ ID NO: 533632 - RNA, 19 nt, Artificial Sequence
  Description of Artificial Sequence: Synthetic oligonucleotide
caucugcgggucucauagg

SEQ ID NO: 533633 - RNA, 19 nt, Artificial Sequence
  Description of Artificial Sequence: Synthetic oligonucleotide
gucuggucuauuguagguc

SEQ ID NO: 533634 - RNA, 19 nt, Artificial Sequence
  Description of Artificial Sequence: Synthetic oligonucleotide
gacaaccucgggaacaggu

SEQ ID NO: 533635 - RNA, 19 nt, Artificial Sequence
  Description of Artificial Sequence: Synthetic oligonucleotide
aagcccgcgugcaggaucu

SEQ ID NO: 533636 - RNA, 19 nt, Artificial Sequence
  Description of Artificial Sequence: Synthetic oligonucleotide
cugggagcaacuugcuaga

SEQ ID NO: 533637 - RNA, 19 nt, Artificial Sequence
  Description of Artificial Sequence: Synthetic oligonucleotide
acagggugugucuccuccu

SEQ ID NO: 533638 - RNA, 19 nt, Artificial Sequence
  Description of Artificial Sequence: Synthetic oligonucleotide
ugcgaucgcagcggaucgg

SEQ ID NO: 533639 - RNA, 19 nt, Artificial Sequence
  Description of Artificial Sequence: Synthetic oligonucleotide
ugggagcaacuugcuagag

SEQ ID NO: 533640 - RNA, 19 nt, Artificial Sequence
  Description of Artificial Sequence: Synthetic oligonucleotide
aacaugcagcugauaacuu

SEQ ID NO: 533641 - RNA, 19 nt, Artificial Sequence
  Description of Artificial Sequence: Synthetic oligonucleotide
cagaacuuucgggacacca

SEQ ID NO: 533642 - RNA, 19 nt, Artificial Sequence
  Description of Artificial Sequence: Synthetic oligonucleotide
uucaucugcgggucucaua

SEQ ID NO: 533643 - RNA, 19 nt, Artificial Sequence
  Description of Artificial Sequence: Synthetic oligonucleotide
auugcauccgugacaggaa

SEQ ID NO: 533644 - RNA, 19 nt, Artificial Sequence
  Description of Artificial Sequence: Synthetic oligonucleotide
acacagaguuguucugcau

SEQ ID NO: 533645 - RNA, 19 nt, Artificial Sequence
  Description of Artificial Sequence: Synthetic oligonucleotide
aggauggccgggagccucc

SEQ ID NO: 533646 - RNA, 19 nt, Artificial Sequence
  Description of Artificial Sequence: Synthetic oligonucleotide
uaggacccguguucauggc

SEQ ID NO: 533647 - RNA, 19 nt, Artificial Sequence
  Description of Artificial Sequence: Synthetic oligonucleotide
cucacgcucauggucugac

SEQ ID NO: 533648 - RNA, 19 nt, Artificial Sequence
  Description of Artificial Sequence: Synthetic oligonucleotide
cuuuauuaggacccguguu

SEQ ID NO: 533649 - RNA, 19 nt, Artificial Sequence
  Description of Artificial Sequence: Synthetic oligonucleotide
ggcuaacuuguaguacacg

SEQ ID NO: 533650 - RNA, 19 nt, Artificial Sequence
  Description of Artificial Sequence: Synthetic oligonucleotide
uucuaccaccuucggcauc

SEQ ID NO: 533651 - RNA, 19 nt, Artificial Sequence
  Description of Artificial Sequence: Synthetic oligonucleotide
gcuagcacaugcuccucug

SEQ ID NO: 533652 - RNA, 19 nt, Artificial Sequence
  Description of Artificial Sequence: Synthetic oligonucleotide
uggaugggugugcucucau

SEQ ID NO: 533653 - RNA, 19 nt, Artificial Sequence
  Description of Artificial Sequence: Synthetic oligonucleotide
agaaaccgguuaauccugu

SEQ ID NO: 533654 - RNA, 19 nt, Artificial Sequence
  Description of Artificial Sequence: Synthetic oligonucleotide
gcgagaaggacuuccugga

SEQ ID NO: 533655 - RNA, 19 nt, Artificial Sequence
  Description of Artificial Sequence: Synthetic oligonucleotide
caauugcauccgugacagg

SEQ ID NO: 533656 - RNA, 19 nt, Artificial Sequence
  Description of Artificial Sequence: Synthetic oligonucleotide
guacgacgagcgccacucg

SEQ ID NO: 533657 - RNA, 19 nt, Artificial Sequence
  Description of Artificial Sequence: Synthetic oligonucleotide
ucguacgacgagcgccacu

SEQ ID NO: 533658 - RNA, 19 nt, Artificial Sequence
  Description of Artificial Sequence: Synthetic oligonucleotide
acucaggcgagaaggacuu

SEQ ID NO: 533659 - RNA, 19 nt, Artificial Sequence
  Description of Artificial Sequence: Synthetic oligonucleotide
aggaauucguaagggucau

SEQ ID NO: 533660 - RNA, 19 nt, Artificial Sequence
  Description of Artificial Sequence: Synthetic oligonucleotide
gagccucaucagcugcgug

SEQ ID NO: 533661 - RNA, 19 nt, Artificial Sequence
  Description of Artificial Sequence: Synthetic oligonucleotide
cacucaggcgagaaggacu

SEQ ID NO: 533662 - RNA, 19 nt, Artificial Sequence
  Description of Artificial Sequence: Synthetic oligonucleotide
aaauuccugcaggcucagu

SEQ ID NO: 533663 - RNA, 19 nt, Artificial Sequence
  Description of Artificial Sequence: Synthetic oligonucleotide
uacacggugucuggucuau

SEQ ID NO: 533664 - RNA, 19 nt, Artificial Sequence
  Description of Artificial Sequence: Synthetic oligonucleotide
acgagcgccacucggccuu

SEQ ID NO: 533665 - RNA, 19 nt, Artificial Sequence
  Description of Artificial Sequence: Synthetic oligonucleotide
ucguggccagaucccgaga

SEQ ID NO: 533666 - RNA, 19 nt, Artificial Sequence
  Description of Artificial Sequence: Synthetic oligonucleotide
uccucaacugcugggucuu

SEQ ID NO: 533667 - RNA, 19 nt, Artificial Sequence
  Description of Artificial Sequence: Synthetic oligonucleotide
aucacgccuccccuuccga

SEQ ID NO: 533668 - RNA, 19 nt, Artificial Sequence
  Description of Artificial Sequence: Synthetic oligonucleotide
gagugaacucagguccaca

SEQ ID NO: 533669 - RNA, 19 nt, Artificial Sequence
  Description of Artificial Sequence: Synthetic oligonucleotide
ucguaaaaccugggagcaa

SEQ ID NO: 533670 - RNA, 19 nt, Artificial Sequence
  Description of Artificial Sequence: Synthetic oligonucleotide
gcucagaacuuucgggaca

SEQ ID NO: 533671 - RNA, 19 nt, Artificial Sequence
  Description of Artificial Sequence: Synthetic oligonucleotide
gcgggucucauagggaugc

SEQ ID NO: 533672 - RNA, 19 nt, Artificial Sequence
  Description of Artificial Sequence: Synthetic oligonucleotide
acagagagcuaagguugga

SEQ ID NO: 533673 - RNA, 19 nt, Artificial Sequence
  Description of Artificial Sequence: Synthetic oligonucleotide
gguaccccaucuugccacc

SEQ ID NO: 533674 - RNA, 19 nt, Artificial Sequence
  Description of Artificial Sequence: Synthetic oligonucleotide
cacgcucauggucugaccu

SEQ ID NO: 533675 - RNA, 19 nt, Artificial Sequence
  Description of Artificial Sequence: Synthetic oligonucleotide
cugggacaaccucgggaac

SEQ ID NO: 533676 - RNA, 19 nt, Artificial Sequence
  Description of Artificial Sequence: Synthetic oligonucleotide
aggagccuaguugucucgu

SEQ ID NO: 533677 - RNA, 19 nt, Artificial Sequence
  Description of Artificial Sequence: Synthetic oligonucleotide
gggagcaacuugcuagaga

SEQ ID NO: 533678 - RNA, 19 nt, Artificial Sequence
  Description of Artificial Sequence: Synthetic oligonucleotide
acgcucauggucugaccua

SEQ ID NO: 533679 - RNA, 19 nt, Artificial Sequence
  Description of Artificial Sequence: Synthetic oligonucleotide
guacgauuucauugacaua

SEQ ID NO: 533680 - RNA, 19 nt, Artificial Sequence
  Description of Artificial Sequence: Synthetic oligonucleotide
ggagucguggccagauccc

SEQ ID NO: 533681 - RNA, 19 nt, Artificial Sequence
  Description of Artificial Sequence: Synthetic oligonucleotide
gcaggagccuaguugucuc

SEQ ID NO: 533682 - RNA, 19 nt, Artificial Sequence
  Description of Artificial Sequence: Synthetic oligonucleotide
ucccgagagcucugucacu

SEQ ID NO: 533683 - RNA, 19 nt, Artificial Sequence
  Description of Artificial Sequence: Synthetic oligonucleotide
cugcgugcucuaccagggc

SEQ ID NO: 533684 - RNA, 19 nt, Artificial Sequence
  Description of Artificial Sequence: Synthetic oligonucleotide
cucuucuauugucacugcu

SEQ ID NO: 533685 - RNA, 19 nt, Artificial Sequence
  Description of Artificial Sequence: Synthetic oligonucleotide
gcugcgaucgcagcggauc

SEQ ID NO: 533686 - RNA, 19 nt, Artificial Sequence
  Description of Artificial Sequence: Synthetic oligonucleotide
guggugugucuguguaauc

SEQ ID NO: 533687 - RNA, 19 nt, Artificial Sequence
  Description of Artificial Sequence: Synthetic oligonucleotide
gcgaucgcagcggaucggg

SEQ ID NO: 533688 - RNA, 19 nt, Artificial Sequence
  Description of Artificial Sequence: Synthetic oligonucleotide
cgcauuaucacacauuaau

SEQ ID NO: 533689 - RNA, 19 nt, Artificial Sequence
  Description of Artificial Sequence: Synthetic oligonucleotide
cagguaccccaucuugcca

SEQ ID NO: 533690 - RNA, 19 nt, Artificial Sequence
  Description of Artificial Sequence: Synthetic oligonucleotide
ccgagccucaucagcugcg

SEQ ID NO: 533691 - RNA, 19 nt, Artificial Sequence
  Description of Artificial Sequence: Synthetic oligonucleotide
ccuaguugucucguccaag

SEQ ID NO: 533692 - RNA, 19 nt, Artificial Sequence
  Description of Artificial Sequence: Synthetic oligonucleotide
cccucacuggucgaucugg

SEQ ID NO: 533693 - RNA, 19 nt, Artificial Sequence
  Description of Artificial Sequence: Synthetic oligonucleotide
accuaucgucauaguagcu

SEQ ID NO: 533694 - RNA, 19 nt, Artificial Sequence
  Description of Artificial Sequence: Synthetic oligonucleotide
aggcuacaugccagagagg

SEQ ID NO: 533695 - RNA, 19 nt, Artificial Sequence
  Description of Artificial Sequence: Synthetic oligonucleotide
cacugcccaagagggcugc

SEQ ID NO: 533696 - RNA, 19 nt, Artificial Sequence
  Description of Artificial Sequence: Synthetic oligonucleotide
uguguucggcaggcccuca

SEQ ID NO: 533697 - RNA, 19 nt, Artificial Sequence
  Description of Artificial Sequence: Synthetic oligonucleotide
cuggagucguggccagauc

SEQ ID NO: 533698 - RNA, 19 nt, Artificial Sequence
  Description of Artificial Sequence: Synthetic oligonucleotide
ggaugagacaaaaguuucu

SEQ ID NO: 533699 - RNA, 19 nt, Artificial Sequence
  Description of Artificial Sequence: Synthetic oligonucleotide
cguacgacgagcgccacuc

SEQ ID NO: 533700 - RNA, 19 nt, Artificial Sequence
  Description of Artificial Sequence: Synthetic oligonucleotide
guacacggugucuggucua

SEQ ID NO: 533701 - RNA, 19 nt, Artificial Sequence
  Description of Artificial Sequence: Synthetic oligonucleotide
cuacuugcacugggacaac

SEQ ID NO: 533702 - RNA, 19 nt, Artificial Sequence
  Description of Artificial Sequence: Synthetic oligonucleotide
gcauuaucacacauuaauu

SEQ ID NO: 533703 - RNA, 19 nt, Artificial Sequence
  Description of Artificial Sequence: Synthetic oligonucleotide
ggguacgauuucauugaca

SEQ ID NO: 533704 - RNA, 19 nt, Artificial Sequence
  Description of Artificial Sequence: Synthetic oligonucleotide
ggagccuaguugucucguc

SEQ ID NO: 533705 - RNA, 19 nt, Artificial Sequence
  Description of Artificial Sequence: Synthetic oligonucleotide
gucccgagccucaucagcu

SEQ ID NO: 533706 - RNA, 19 nt, Artificial Sequence
  Description of Artificial Sequence: Synthetic oligonucleotide
ggcacuggaaaggaaugua

SEQ ID NO: 533707 - RNA, 19 nt, Artificial Sequence
  Description of Artificial Sequence: Synthetic oligonucleotide
uucguacgacgagcgccac

SEQ ID NO: 533708 - RNA, 19 nt, Artificial Sequence
  Description of Artificial Sequence: Synthetic oligonucleotide
caucagcugcgugcucuac

SEQ ID NO: 533709 - RNA, 19 nt, Artificial Sequence
  Description of Artificial Sequence: Synthetic oligonucleotide
gggagccuccucgaucugc

SEQ ID NO: 533710 - RNA, 19 nt, Artificial Sequence
  Description of Artificial Sequence: Synthetic oligonucleotide
cgguuaauccugucccgag

SEQ ID NO: 533711 - RNA, 19 nt, Artificial Sequence
  Description of Artificial Sequence: Synthetic oligonucleotide
cauccaguuuugaaacauu

SEQ ID NO: 533712 - RNA, 19 nt, Artificial Sequence
  Description of Artificial Sequence: Synthetic oligonucleotide
ggaauucguaagggucaug

SEQ ID NO: 533713 - RNA, 19 nt, Artificial Sequence
  Description of Artificial Sequence: Synthetic oligonucleotide
ccugggagaaaccgguuaa

SEQ ID NO: 533714 - RNA, 19 nt, Artificial Sequence
  Description of Artificial Sequence: Synthetic oligonucleotide
gguuccucaacugcugggu

SEQ ID NO: 533715 - RNA, 19 nt, Artificial Sequence
  Description of Artificial Sequence: Synthetic oligonucleotide
gcacugggacaaccucggg

SEQ ID NO: 533716 - RNA, 19 nt, Artificial Sequence
  Description of Artificial Sequence: Synthetic oligonucleotide
gcgguggacagagagcuaa

SEQ ID NO: 533717 - RNA, 19 nt, Artificial Sequence
  Description of Artificial Sequence: Synthetic oligonucleotide
ccuuuauuaggacccgugu

SEQ ID NO: 533718 - RNA, 19 nt, Artificial Sequence
  Description of Artificial Sequence: Synthetic oligonucleotide
gcauugaaagugcggugcu

SEQ ID NO: 533719 - RNA, 19 nt, Artificial Sequence
  Description of Artificial Sequence: Synthetic oligonucleotide
gagagacaucaggguacga

SEQ ID NO: 533720 - RNA, 19 nt, Artificial Sequence
  Description of Artificial Sequence: Synthetic oligonucleotide
cuggaugggugugcucuca

SEQ ID NO: 533721 - RNA, 19 nt, Artificial Sequence
  Description of Artificial Sequence: Synthetic oligonucleotide
cagggucaaagggcaucac

SEQ ID NO: 533722 - RNA, 19 nt, Artificial Sequence
  Description of Artificial Sequence: Synthetic oligonucleotide
caggcgagaaggacuuccu

SEQ ID NO: 533723 - RNA, 19 nt, Artificial Sequence
  Description of Artificial Sequence: Synthetic oligonucleotide
gacaccacucggugcuuuu

SEQ ID NO: 533724 - RNA, 19 nt, Artificial Sequence
  Description of Artificial Sequence: Synthetic oligonucleotide
ggucugaccuaucgucaua

SEQ ID NO: 533725 - RNA, 19 nt, Artificial Sequence
  Description of Artificial Sequence: Synthetic oligonucleotide
gcggaggaagugcuccaga

SEQ ID NO: 533726 - RNA, 19 nt, Artificial Sequence
  Description of Artificial Sequence: Synthetic oligonucleotide
ucuugccaccugggagaaa

SEQ ID NO: 533727 - RNA, 19 nt, Artificial Sequence
  Description of Artificial Sequence: Synthetic oligonucleotide
cuggucuauuguaggucau

SEQ ID NO: 533728 - RNA, 19 nt, Artificial Sequence
  Description of Artificial Sequence: Synthetic oligonucleotide
gccuaguugucucguccaa

SEQ ID NO: 533729 - RNA, 19 nt, Artificial Sequence
  Description of Artificial Sequence: Synthetic oligonucleotide
cgaucgcagcggaucgggg

SEQ ID NO: 533730 - RNA, 19 nt, Artificial Sequence
  Description of Artificial Sequence: Synthetic oligonucleotide
cucaggcgagaaggacuuc

SEQ ID NO: 533731 - RNA, 19 nt, Artificial Sequence
  Description of Artificial Sequence: Synthetic oligonucleotide
gacccguguucauggcuuu

SEQ ID NO: 533732 - RNA, 19 nt, Artificial Sequence
  Description of Artificial Sequence: Synthetic oligonucleotide
ccgguuaauccugucccga

SEQ ID NO: 533733 - RNA, 19 nt, Artificial Sequence
  Description of Artificial Sequence: Synthetic oligonucleotide
cugggagaaaccgguuaau

SEQ ID NO: 533734 - RNA, 19 nt, Artificial Sequence
  Description of Artificial Sequence: Synthetic oligonucleotide
cgagucgcagugcucccuc

SEQ ID NO: 533735 - RNA, 19 nt, Artificial Sequence
  Description of Artificial Sequence: Synthetic oligonucleotide
cuucuccaguggugugucu

SEQ ID NO: 533736 - RNA, 19 nt, Artificial Sequence
  Description of Artificial Sequence: Synthetic oligonucleotide
ggacccguguucauggcuu

SEQ ID NO: 533737 - RNA, 19 nt, Artificial Sequence
  Description of Artificial Sequence: Synthetic oligonucleotide
gcuggagucguggccagau

SEQ ID NO: 533738 - RNA, 19 nt, Artificial Sequence
  Description of Artificial Sequence: Synthetic oligonucleotide
gcgugcucuaccagggcua

SEQ ID NO: 533739 - RNA, 19 nt, Artificial Sequence
  Description of Artificial Sequence: Synthetic oligonucleotide
cagaucccgagagcucugu

SEQ ID NO: 533740 - RNA, 19 nt, Artificial Sequence
  Description of Artificial Sequence: Synthetic oligonucleotide
guaccccaucuugccaccu

SEQ ID NO: 533741 - RNA, 19 nt, Artificial Sequence
  Description of Artificial Sequence: Synthetic oligonucleotide
cccgcgugcaggaucuucu

SEQ ID NO: 533742 - RNA, 19 nt, Artificial Sequence
  Description of Artificial Sequence: Synthetic oligonucleotide
gcaggcccucacuggucga

SEQ ID NO: 533743 - RNA, 19 nt, Artificial Sequence
  Description of Artificial Sequence: Synthetic oligonucleotide
cuucaucugcgggucucau

SEQ ID NO: 533744 - RNA, 19 nt, Artificial Sequence
  Description of Artificial Sequence: Synthetic oligonucleotide
cgccacucggccuugugcu

SEQ ID NO: 533745 - RNA, 19 nt, Artificial Sequence
  Description of Artificial Sequence: Synthetic oligonucleotide
gcuacaugccagagaggau

SEQ ID NO: 533746 - RNA, 19 nt, Artificial Sequence
  Description of Artificial Sequence: Synthetic oligonucleotide
caccugggagaaaccgguu

SEQ ID NO: 533747 - RNA, 19 nt, Artificial Sequence
  Description of Artificial Sequence: Synthetic oligonucleotide
ggagggugcugcucccuuu

SEQ ID NO: 533748 - RNA, 19 nt, Artificial Sequence
  Description of Artificial Sequence: Synthetic oligonucleotide
ccguguucauggcuuuugu

SEQ ID NO: 533749 - RNA, 19 nt, Artificial Sequence
  Description of Artificial Sequence: Synthetic oligonucleotide
gcccgcgugcaggaucuuc

SEQ ID NO: 533750 - RNA, 19 nt, Artificial Sequence
  Description of Artificial Sequence: Synthetic oligonucleotide
caccuucggcaucuccuuu

SEQ ID NO: 533751 - RNA, 19 nt, Artificial Sequence
  Description of Artificial Sequence: Synthetic oligonucleotide
gccuugcaauugcauccgu

SEQ ID NO: 533752 - RNA, 19 nt, Artificial Sequence
  Description of Artificial Sequence: Synthetic oligonucleotide
ccgucuuccucaggcuaca

SEQ ID NO: 533753 - RNA, 19 nt, Artificial Sequence
  Description of Artificial Sequence: Synthetic oligonucleotide
cgccuccccuuccgagucg

SEQ ID NO: 533754 - RNA, 19 nt, Artificial Sequence
  Description of Artificial Sequence: Synthetic oligonucleotide
caggcccucacuggucgau

SEQ ID NO: 533755 - RNA, 19 nt, Artificial Sequence
  Description of Artificial Sequence: Synthetic oligonucleotide
cguccaaguucaaguggcu

SEQ ID NO: 533756 - RNA, 19 nt, Artificial Sequence
  Description of Artificial Sequence: Synthetic oligonucleotide
cccgagagcucugucacuu

SEQ ID NO: 533757 - RNA, 19 nt, Artificial Sequence
  Description of Artificial Sequence: Synthetic oligonucleotide
gcucccuuucagaggcggu

SEQ ID NO: 533758 - RNA, 19 nt, Artificial Sequence
  Description of Artificial Sequence: Synthetic oligonucleotide
ggcgguggacagagagcua

SEQ ID NO: 533759 - RNA, 19 nt, Artificial Sequence
  Description of Artificial Sequence: Synthetic oligonucleotide
agcccgcgugcaggaucuu

SEQ ID NO: 533760 - RNA, 19 nt, Artificial Sequence
  Description of Artificial Sequence: Synthetic oligonucleotide
cgagcgccacucggccuug

SEQ ID NO: 533761 - RNA, 19 nt, Artificial Sequence
  Description of Artificial Sequence: Synthetic oligonucleotide
ccccaacacucaggcgaga

SEQ ID NO: 533762 - RNA, 19 nt, Artificial Sequence
  Description of Artificial Sequence: Synthetic oligonucleotide
ggcugcgaucgcagcggau

SEQ ID NO: 533763 - RNA, 19 nt, Artificial Sequence
  Description of Artificial Sequence: Synthetic oligonucleotide
ccgcgugcaggaucuucuu

SEQ ID NO: 533764 - RNA, 19 nt, Artificial Sequence
  Description of Artificial Sequence: Synthetic oligonucleotide
gggacaccacucggugcuu

SEQ ID NO: 533765 - RNA, 19 nt, Artificial Sequence
  Description of Artificial Sequence: Synthetic oligonucleotide
ccucugcaguggagucugu

SEQ ID NO: 533766 - RNA, 19 nt, Artificial Sequence
  Description of Artificial Sequence: Synthetic oligonucleotide
cgggucucauagggaugcu

SEQ ID NO: 533767 - RNA, 19 nt, Artificial Sequence
  Description of Artificial Sequence: Synthetic oligonucleotide
aaaucaauagugaaaauag

SEQ ID NO: 533768 - RNA, 19 nt, Artificial Sequence
  Description of Artificial Sequence: Synthetic oligonucleotide
uauaggacgagauaccucc

SEQ ID NO: 533769 - RNA, 19 nt, Artificial Sequence
  Description of Artificial Sequence: Synthetic oligonucleotide
aaaccugcaggauauucac

SEQ ID NO: 533770 - RNA, 19 nt, Artificial Sequence
  Description of Artificial Sequence: Synthetic oligonucleotide
auuaaauguagacuauuag

SEQ ID NO: 533771 - RNA, 19 nt, Artificial Sequence
  Description of Artificial Sequence: Synthetic oligonucleotide
aaggaagauacugauuggc

SEQ ID NO: 533772 - RNA, 19 nt, Artificial Sequence
  Description of Artificial Sequence: Synthetic oligonucleotide
aaauguagacuauuaguca

SEQ ID NO: 533773 - RNA, 19 nt, Artificial Sequence
  Description of Artificial Sequence: Synthetic oligonucleotide
ugauuagcaguccacagug

SEQ ID NO: 533774 - RNA, 19 nt, Artificial Sequence
  Description of Artificial Sequence: Synthetic oligonucleotide
uguacucuuguccagcucc

SEQ ID NO: 533775 - RNA, 19 nt, Artificial Sequence
  Description of Artificial Sequence: Synthetic oligonucleotide
cauacaacguuccagggcc

SEQ ID NO: 533776 - RNA, 19 nt, Artificial Sequence
  Description of Artificial Sequence: Synthetic oligonucleotide
cuauuagucaaaugauugg

SEQ ID NO: 533777 - RNA, 19 nt, Artificial Sequence
  Description of Artificial Sequence: Synthetic oligonucleotide
ugaaaauaguucuuagggu

SEQ ID NO: 533778 - RNA, 19 nt, Artificial Sequence
  Description of Artificial Sequence: Synthetic oligonucleotide
agucauaugucuccucucg

SEQ ID NO: 533779 - RNA, 19 nt, Artificial Sequence
  Description of Artificial Sequence: Synthetic oligonucleotide
cuaagcuuggcaugcaagg

SEQ ID NO: 533780 - RNA, 19 nt, Artificial Sequence
  Description of Artificial Sequence: Synthetic oligonucleotide
acgagauaccuccugcucc

SEQ ID NO: 533781 - RNA, 19 nt, Artificial Sequence
  Description of Artificial Sequence: Synthetic oligonucleotide
acuauuagucaaaugauug

SEQ ID NO: 533782 - RNA, 19 nt, Artificial Sequence
  Description of Artificial Sequence: Synthetic oligonucleotide
augggugucggguugggcc

SEQ ID NO: 533783 - RNA, 19 nt, Artificial Sequence
  Description of Artificial Sequence: Synthetic oligonucleotide
ugccuugcuauaaauaugu

SEQ ID NO: 533784 - RNA, 19 nt, Artificial Sequence
  Description of Artificial Sequence: Synthetic oligonucleotide
aaagaucuuggguggcugg

SEQ ID NO: 533785 - RNA, 19 nt, Artificial Sequence
  Description of Artificial Sequence: Synthetic oligonucleotide
agccucuauacccuagucc

SEQ ID NO: 533786 - RNA, 19 nt, Artificial Sequence
  Description of Artificial Sequence: Synthetic oligonucleotide
ucauaauccuccauccagc

SEQ ID NO: 533787 - RNA, 19 nt, Artificial Sequence
  Description of Artificial Sequence: Synthetic oligonucleotide
gaugcugcuggcuuuauca

SEQ ID NO: 533788 - RNA, 19 nt, Artificial Sequence
  Description of Artificial Sequence: Synthetic oligonucleotide
ggugcuuacacccagcugc

SEQ ID NO: 533789 - RNA, 19 nt, Artificial Sequence
  Description of Artificial Sequence: Synthetic oligonucleotide
gucauaauccuccauccag

SEQ ID NO: 533790 - RNA, 19 nt, Artificial Sequence
  Description of Artificial Sequence: Synthetic oligonucleotide
cuuaugugcacugaggaug

SEQ ID NO: 533791 - RNA, 19 nt, Artificial Sequence
  Description of Artificial Sequence: Synthetic oligonucleotide
gaggaugacaaacuugcug

SEQ ID NO: 533792 - RNA, 19 nt, Artificial Sequence
  Description of Artificial Sequence: Synthetic oligonucleotide
ucaagggugaauccugggc

SEQ ID NO: 533793 - RNA, 19 nt, Artificial Sequence
  Description of Artificial Sequence: Synthetic oligonucleotide
uuaucagugggguuggggu

SEQ ID NO: 533794 - RNA, 19 nt, Artificial Sequence
  Description of Artificial Sequence: Synthetic oligonucleotide
uuaccuguccccaaaccug

SEQ ID NO: 533795 - RNA, 19 nt, Artificial Sequence
  Description of Artificial Sequence: Synthetic oligonucleotide
gaacaucauacaccgaaug

SEQ ID NO: 533796 - RNA, 19 nt, Artificial Sequence
  Description of Artificial Sequence: Synthetic oligonucleotide
aggacgagauaccuccugc

SEQ ID NO: 533797 - RNA, 19 nt, Artificial Sequence
  Description of Artificial Sequence: Synthetic oligonucleotide
cuuacacccagcugcagcc

SEQ ID NO: 533798 - RNA, 19 nt, Artificial Sequence
  Description of Artificial Sequence: Synthetic oligonucleotide
uagucaaaugauuggaaaa

SEQ ID NO: 533799 - RNA, 19 nt, Artificial Sequence
  Description of Artificial Sequence: Synthetic oligonucleotide
gucggguugggccaaaggg

SEQ ID NO: 533800 - RNA, 19 nt, Artificial Sequence
  Description of Artificial Sequence: Synthetic oligonucleotide
ugaggcauugccaugcaaa

SEQ ID NO: 533801 - RNA, 19 nt, Artificial Sequence
  Description of Artificial Sequence: Synthetic oligonucleotide
ucacgaggagcucugcggg

SEQ ID NO: 533802 - RNA, 19 nt, Artificial Sequence
  Description of Artificial Sequence: Synthetic oligonucleotide
ugugcuagaggccgacagg

SEQ ID NO: 533803 - RNA, 19 nt, Artificial Sequence
  Description of Artificial Sequence: Synthetic oligonucleotide
uuaugugcacugaggauga

SEQ ID NO: 533804 - RNA, 19 nt, Artificial Sequence
  Description of Artificial Sequence: Synthetic oligonucleotide
gcuauagugggucaccugg

SEQ ID NO: 533805 - RNA, 19 nt, Artificial Sequence
  Description of Artificial Sequence: Synthetic oligonucleotide
ccaaggaagauacugauug

SEQ ID NO: 533806 - RNA, 19 nt, Artificial Sequence
  Description of Artificial Sequence: Synthetic oligonucleotide
caucauacaccgaaugaug

SEQ ID NO: 533807 - RNA, 19 nt, Artificial Sequence
  Description of Artificial Sequence: Synthetic oligonucleotide
agcacugcgggcaaacucc

SEQ ID NO: 533808 - RNA, 19 nt, Artificial Sequence
  Description of Artificial Sequence: Synthetic oligonucleotide
gacccugucuaccaugucc

SEQ ID NO: 533809 - RNA, 19 nt, Artificial Sequence
  Description of Artificial Sequence: Synthetic oligonucleotide
agaggugcuacgccagccc

SEQ ID NO: 533810 - RNA, 19 nt, Artificial Sequence
  Description of Artificial Sequence: Synthetic oligonucleotide
caggucauggucuauagga

SEQ ID NO: 533811 - RNA, 19 nt, Artificial Sequence
  Description of Artificial Sequence: Synthetic oligonucleotide
aaucaauagugaaaauagu

SEQ ID NO: 533812 - RNA, 19 nt, Artificial Sequence
  Description of Artificial Sequence: Synthetic oligonucleotide
acaucauacaacguuccag

SEQ ID NO: 533813 - RNA, 19 nt, Artificial Sequence
  Description of Artificial Sequence: Synthetic oligonucleotide
auacugauuggcugcugcg

SEQ ID NO: 533814 - RNA, 19 nt, Artificial Sequence
  Description of Artificial Sequence: Synthetic oligonucleotide
ucggguugggccaaagggc

SEQ ID NO: 533815 - RNA, 19 nt, Artificial Sequence
  Description of Artificial Sequence: Synthetic oligonucleotide
guggacguagucauaaucc

SEQ ID NO: 533816 - RNA, 19 nt, Artificial Sequence
  Description of Artificial Sequence: Synthetic oligonucleotide
aucuucuguaguugccggc

SEQ ID NO: 533817 - RNA, 19 nt, Artificial Sequence
  Description of Artificial Sequence: Synthetic oligonucleotide
ucuauaggacgagauaccu

SEQ ID NO: 533818 - RNA, 19 nt, Artificial Sequence
  Description of Artificial Sequence: Synthetic oligonucleotide
acaccgaaugaugauuggc

SEQ ID NO: 533819 - RNA, 19 nt, Artificial Sequence
  Description of Artificial Sequence: Synthetic oligonucleotide
ugucacgaggagcucugcg

SEQ ID NO: 533820 - RNA, 19 nt, Artificial Sequence
  Description of Artificial Sequence: Synthetic oligonucleotide
ugguccgucugaaaagcag

SEQ ID NO: 533821 - RNA, 19 nt, Artificial Sequence
  Description of Artificial Sequence: Synthetic oligonucleotide
gaauccugggcuuccccgg

SEQ ID NO: 533822 - RNA, 19 nt, Artificial Sequence
  Description of Artificial Sequence: Synthetic oligonucleotide
uaguugccggcuaagcuug

SEQ ID NO: 533823 - RNA, 19 nt, Artificial Sequence
  Description of Artificial Sequence: Synthetic oligonucleotide
ucaagacagaugcuugggu

SEQ ID NO: 533824 - RNA, 19 nt, Artificial Sequence
  Description of Artificial Sequence: Synthetic oligonucleotide
gucacgaggagcucugcgg

SEQ ID NO: 533825 - RNA, 19 nt, Artificial Sequence
  Description of Artificial Sequence: Synthetic oligonucleotide
agagggcgugacuggaugc

SEQ ID NO: 533826 - RNA, 19 nt, Artificial Sequence
  Description of Artificial Sequence: Synthetic oligonucleotide
aaugccucgcaggagguca

SEQ ID NO: 533827 - RNA, 19 nt, Artificial Sequence
  Description of Artificial Sequence: Synthetic oligonucleotide
uacccuaguccucuguucu

SEQ ID NO: 533828 - RNA, 19 nt, Artificial Sequence
  Description of Artificial Sequence: Synthetic oligonucleotide
ggaagauacugauuggcug

SEQ ID NO: 533829 - RNA, 19 nt, Artificial Sequence
  Description of Artificial Sequence: Synthetic oligonucleotide
uucaagggugaauccuggg

SEQ ID NO: 533830 - RNA, 19 nt, Artificial Sequence
  Description of Artificial Sequence: Synthetic oligonucleotide
auacccuaguccucuguuc

SEQ ID NO: 533831 - RNA, 19 nt, Artificial Sequence
  Description of Artificial Sequence: Synthetic oligonucleotide
accgaaugaugauuggcug

SEQ ID NO: 533832 - RNA, 19 nt, Artificial Sequence
  Description of Artificial Sequence: Synthetic oligonucleotide
cucgcaggaggucacacag

SEQ ID NO: 533833 - RNA, 19 nt, Artificial Sequence
  Description of Artificial Sequence: Synthetic oligonucleotide
aggugggcuacaguggugc

SEQ ID NO: 533834 - RNA, 19 nt, Artificial Sequence
  Description of Artificial Sequence: Synthetic oligonucleotide
uacaccgaaugaugauugg

SEQ ID NO: 533835 - RNA, 19 nt, Artificial Sequence
  Description of Artificial Sequence: Synthetic oligonucleotide
uuauuaaauguagacuauu

SEQ ID NO: 533836 - RNA, 19 nt, Artificial Sequence
  Description of Artificial Sequence: Synthetic oligonucleotide
uguuccccuuuucuaguag

SEQ ID NO: 533837 - RNA, 19 nt, Artificial Sequence
  Description of Artificial Sequence: Synthetic oligonucleotide
uauagugggucaccuggcu

SEQ ID NO: 533838 - RNA, 19 nt, Artificial Sequence
  Description of Artificial Sequence: Synthetic oligonucleotide
cagcuuaugugcacugagg

SEQ ID NO: 533839 - RNA, 19 nt, Artificial Sequence
  Description of Artificial Sequence: Synthetic oligonucleotide
ggucuauaggacgagauac

SEQ ID NO: 533840 - RNA, 19 nt, Artificial Sequence
  Description of Artificial Sequence: Synthetic oligonucleotide
aucaaugggugucggguug

SEQ ID NO: 533841 - RNA, 19 nt, Artificial Sequence
  Description of Artificial Sequence: Synthetic oligonucleotide
ugucuccucucgcugcagg

SEQ ID NO: 533842 - RNA, 19 nt, Artificial Sequence
  Description of Artificial Sequence: Synthetic oligonucleotide
ugucggguugggccaaagg

SEQ ID NO: 533843 - RNA, 19 nt, Artificial Sequence
  Description of Artificial Sequence: Synthetic oligonucleotide
guagacuauuagucaaaug

SEQ ID NO: 533844 - RNA, 19 nt, Artificial Sequence
  Description of Artificial Sequence: Synthetic oligonucleotide
caucaucaauuacauuccc

SEQ ID NO: 533845 - RNA, 19 nt, Artificial Sequence
  Description of Artificial Sequence: Synthetic oligonucleotide
guagcucggaccaucacug

SEQ ID NO: 533846 - RNA, 19 nt, Artificial Sequence
  Description of Artificial Sequence: Synthetic oligonucleotide
caaggugcggucagaagug

SEQ ID NO: 533847 - RNA, 19 nt, Artificial Sequence
  Description of Artificial Sequence: Synthetic oligonucleotide
auagugaaaauaguucuua

SEQ ID NO: 533848 - RNA, 19 nt, Artificial Sequence
  Description of Artificial Sequence: Synthetic oligonucleotide
cuauagugggucaccuggc

SEQ ID NO: 533849 - RNA, 19 nt, Artificial Sequence
  Description of Artificial Sequence: Synthetic oligonucleotide
uauacccuaguccucuguu

SEQ ID NO: 533850 - RNA, 19 nt, Artificial Sequence
  Description of Artificial Sequence: Synthetic oligonucleotide
ggugauuagcaguccacag

SEQ ID NO: 533851 - RNA, 19 nt, Artificial Sequence
  Description of Artificial Sequence: Synthetic oligonucleotide
caauuacauucccaucagc

SEQ ID NO: 533852 - RNA, 19 nt, Artificial Sequence
  Description of Artificial Sequence: Synthetic oligonucleotide
uaggacgagauaccuccug

SEQ ID NO: 533853 - RNA, 19 nt, Artificial Sequence
  Description of Artificial Sequence: Synthetic oligonucleotide
auacaccgaaugaugauug

SEQ ID NO: 533854 - RNA, 19 nt, Artificial Sequence
  Description of Artificial Sequence: Synthetic oligonucleotide
ucauacaccgaaugaugau

SEQ ID NO: 533855 - RNA, 19 nt, Artificial Sequence
  Description of Artificial Sequence: Synthetic oligonucleotide
ucaggcacggcccgugagc

SEQ ID NO: 533856 - RNA, 19 nt, Artificial Sequence
  Description of Artificial Sequence: Synthetic oligonucleotide
aucgggcacauccuugcuc

SEQ ID NO: 533857 - RNA, 19 nt, Artificial Sequence
  Description of Artificial Sequence: Synthetic oligonucleotide
uguagacuauuagucaaau

SEQ ID NO: 533858 - RNA, 19 nt, Artificial Sequence
  Description of Artificial Sequence: Synthetic oligonucleotide
caggacgccucaaaccagg

SEQ ID NO: 533859 - RNA, 19 nt, Artificial Sequence
  Description of Artificial Sequence: Synthetic oligonucleotide
auagugggucaccuggcug

SEQ ID NO: 533860 - RNA, 19 nt, Artificial Sequence
  Description of Artificial Sequence: Synthetic oligonucleotide
aucauacaccgaaugauga

SEQ ID NO: 533861 - RNA, 19 nt, Artificial Sequence
  Description of Artificial Sequence: Synthetic oligonucleotide
ucaaugggugucggguugg

SEQ ID NO: 533862 - RNA, 19 nt, Artificial Sequence
  Description of Artificial Sequence: Synthetic oligonucleotide
gcuacaguggugcuuacac

SEQ ID NO: 533863 - RNA, 19 nt, Artificial Sequence
  Description of Artificial Sequence: Synthetic oligonucleotide
caaggaucaaugggugucg

SEQ ID NO: 533864 - RNA, 19 nt, Artificial Sequence
  Description of Artificial Sequence: Synthetic oligonucleotide
agucgcucaaacuguuuca

SEQ ID NO: 533865 - RNA, 19 nt, Artificial Sequence
  Description of Artificial Sequence: Synthetic oligonucleotide
cgaggcacaucauacaacg

SEQ ID NO: 533866 - RNA, 19 nt, Artificial Sequence
  Description of Artificial Sequence: Synthetic oligonucleotide
cugugcuagaggccgacag

SEQ ID NO: 533867 - RNA, 19 nt, Artificial Sequence
  Description of Artificial Sequence: Synthetic oligonucleotide
aaauaguucuuaggguuuu

SEQ ID NO: 533868 - RNA, 19 nt, Artificial Sequence
  Description of Artificial Sequence: Synthetic oligonucleotide
cuauaggacgagauaccuc

SEQ ID NO: 533869 - RNA, 19 nt, Artificial Sequence
  Description of Artificial Sequence: Synthetic oligonucleotide
uggucuauaggacgagaua

SEQ ID NO: 533870 - RNA, 19 nt, Artificial Sequence
  Description of Artificial Sequence: Synthetic oligonucleotide
agacuauuagucaaaugau

SEQ ID NO: 533871 - RNA, 19 nt, Artificial Sequence
  Description of Artificial Sequence: Synthetic oligonucleotide
cugccuugcuauaaauaug

SEQ ID NO: 533872 - RNA, 19 nt, Artificial Sequence
  Description of Artificial Sequence: Synthetic oligonucleotide
uggugauuagcaguccaca

SEQ ID NO: 533873 - RNA, 19 nt, Artificial Sequence
  Description of Artificial Sequence: Synthetic oligonucleotide
cuugacccugucuaccaug

SEQ ID NO: 533874 - RNA, 19 nt, Artificial Sequence
  Description of Artificial Sequence: Synthetic oligonucleotide
ggcgcuugccaucuguugg

SEQ ID NO: 533875 - RNA, 19 nt, Artificial Sequence
  Description of Artificial Sequence: Synthetic oligonucleotide
ugaggaugacaaacuugcu

SEQ ID NO: 533876 - RNA, 19 nt, Artificial Sequence
  Description of Artificial Sequence: Synthetic oligonucleotide
aucuacugcaucugucagu

SEQ ID NO: 533877 - RNA, 19 nt, Artificial Sequence
  Description of Artificial Sequence: Synthetic oligonucleotide
ugccgcauuauguuccccu

SEQ ID NO: 533878 - RNA, 19 nt, Artificial Sequence
  Description of Artificial Sequence: Synthetic oligonucleotide
gacgagauaccuccugcuc

SEQ ID NO: 533879 - RNA, 19 nt, Artificial Sequence
  Description of Artificial Sequence: Synthetic oligonucleotide
auuagucaaaugauuggaa

SEQ ID NO: 533880 - RNA, 19 nt, Artificial Sequence
  Description of Artificial Sequence: Synthetic oligonucleotide
cuggugauuagcaguccac

SEQ ID NO: 533881 - RNA, 19 nt, Artificial Sequence
  Description of Artificial Sequence: Synthetic oligonucleotide
gucauaugucuccucucgc

SEQ ID NO: 533882 - RNA, 19 nt, Artificial Sequence
  Description of Artificial Sequence: Synthetic oligonucleotide
ucuguaguugccggcuaag

SEQ ID NO: 533883 - RNA, 19 nt, Artificial Sequence
  Description of Artificial Sequence: Synthetic oligonucleotide
ugcaaggugcggucagaag

SEQ ID NO: 533884 - RNA, 19 nt, Artificial Sequence
  Description of Artificial Sequence: Synthetic oligonucleotide
gaccugaccauggaccacc

SEQ ID NO: 533885 - RNA, 19 nt, Artificial Sequence
  Description of Artificial Sequence: Synthetic oligonucleotide
augcuuggguagcucggac

SEQ ID NO: 533886 - RNA, 19 nt, Artificial Sequence
  Description of Artificial Sequence: Synthetic oligonucleotide
gucuauaggacgagauacc

SEQ ID NO: 533887 - RNA, 19 nt, Artificial Sequence
  Description of Artificial Sequence: Synthetic oligonucleotide
uguuggggccucucguuca

SEQ ID NO: 533888 - RNA, 19 nt, Artificial Sequence
  Description of Artificial Sequence: Synthetic oligonucleotide
guccucuguucucaggcag

SEQ ID NO: 533889 - RNA, 19 nt, Artificial Sequence
  Description of Artificial Sequence: Synthetic oligonucleotide
gaggcucagaggugcuacg

SEQ ID NO: 533890 - RNA, 19 nt, Artificial Sequence
  Description of Artificial Sequence: Synthetic oligonucleotide
ugucaaggaccugaccaug

SEQ ID NO: 533891 - RNA, 19 nt, Artificial Sequence
  Description of Artificial Sequence: Synthetic oligonucleotide
cagucgcucaaacuguuuc

SEQ ID NO: 533892 - RNA, 19 nt, Artificial Sequence
  Description of Artificial Sequence: Synthetic oligonucleotide
uccaaggaagauacugauu

SEQ ID NO: 533893 - RNA, 19 nt, Artificial Sequence
  Description of Artificial Sequence: Synthetic oligonucleotide
gaggcauugccaugcaaaa

SEQ ID NO: 533894 - RNA, 19 nt, Artificial Sequence
  Description of Artificial Sequence: Synthetic oligonucleotide
gacggaggaacaucauaca

SEQ ID NO: 533895 - RNA, 19 nt, Artificial Sequence
  Description of Artificial Sequence: Synthetic oligonucleotide
aggaagauacugauuggcu

SEQ ID NO: 533896 - RNA, 19 nt, Artificial Sequence
  Description of Artificial Sequence: Synthetic oligonucleotide
ucgcucaaacuguuucagc

SEQ ID NO: 533897 - RNA, 19 nt, Artificial Sequence
  Description of Artificial Sequence: Synthetic oligonucleotide
guuaccuguccccaaaccu

SEQ ID NO: 533898 - RNA, 19 nt, Artificial Sequence
  Description of Artificial Sequence: Synthetic oligonucleotide
gaggugcuacgccagcccc

SEQ ID NO: 533899 - RNA, 19 nt, Artificial Sequence
  Description of Artificial Sequence: Synthetic oligonucleotide
agcaaggaucaaugggugu

SEQ ID NO: 533900 - RNA, 19 nt, Artificial Sequence
  Description of Artificial Sequence: Synthetic oligonucleotide
gagggagcaccuguucacg

SEQ ID NO: 533901 - RNA, 19 nt, Artificial Sequence
  Description of Artificial Sequence: Synthetic oligonucleotide
gugcuagaggccgacaggc

SEQ ID NO: 533902 - RNA, 19 nt, Artificial Sequence
  Description of Artificial Sequence: Synthetic oligonucleotide
aggcucagaggugcuacgc

SEQ ID NO: 533903 - RNA, 19 nt, Artificial Sequence
  Description of Artificial Sequence: Synthetic oligonucleotide
uucuguaguugccggcuaa

SEQ ID NO: 533904 - RNA, 19 nt, Artificial Sequence
  Description of Artificial Sequence: Synthetic oligonucleotide
ggaggcaacccacaccugc

SEQ ID NO: 533905 - RNA, 19 nt, Artificial Sequence
  Description of Artificial Sequence: Synthetic oligonucleotide
gggccucucguucagcugg

SEQ ID NO: 533906 - RNA, 19 nt, Artificial Sequence
  Description of Artificial Sequence: Synthetic oligonucleotide
gucgcucaaacuguuucag

SEQ ID NO: 533907 - RNA, 19 nt, Artificial Sequence
  Description of Artificial Sequence: Synthetic oligonucleotide
aguggugcuuacacccagc

SEQ ID NO: 533908 - RNA, 19 nt, Artificial Sequence
  Description of Artificial Sequence: Synthetic oligonucleotide
ucuauacccuaguccucug

SEQ ID NO: 533909 - RNA, 19 nt, Artificial Sequence
  Description of Artificial Sequence: Synthetic oligonucleotide
ggacggaggaacaucauac

SEQ ID NO: 533910 - RNA, 19 nt, Artificial Sequence
  Description of Artificial Sequence: Synthetic oligonucleotide
uuccccugcagguggacgu

SEQ ID NO: 533911 - RNA, 19 nt, Artificial Sequence
  Description of Artificial Sequence: Synthetic oligonucleotide
uugguccgucugaaaagca

SEQ ID NO: 533912 - RNA, 19 nt, Artificial Sequence
  Description of Artificial Sequence: Synthetic oligonucleotide
caaggaccugaccauggac

SEQ ID NO: 533913 - RNA, 19 nt, Artificial Sequence
  Description of Artificial Sequence: Synthetic oligonucleotide
ucauggucuauaggacgag

SEQ ID NO: 533914 - RNA, 19 nt, Artificial Sequence
  Description of Artificial Sequence: Synthetic oligonucleotide
agcaguccacaguguacuc

SEQ ID NO: 533915 - RNA, 19 nt, Artificial Sequence
  Description of Artificial Sequence: Synthetic oligonucleotide
cagguugcuauaguggguc

SEQ ID NO: 533916 - RNA, 19 nt, Artificial Sequence
  Description of Artificial Sequence: Synthetic oligonucleotide
acgaggcacaucauacaac

SEQ ID NO: 533917 - RNA, 19 nt, Artificial Sequence
  Description of Artificial Sequence: Synthetic oligonucleotide
ugugacccagcuccuugac

SEQ ID NO: 533918 - RNA, 19 nt, Artificial Sequence
  Description of Artificial Sequence: Synthetic oligonucleotide
cuuggcaugcaaggugcgg

SEQ ID NO: 533919 - RNA, 19 nt, Artificial Sequence
  Description of Artificial Sequence: Synthetic oligonucleotide
uuacacccagcugcagccg

SEQ ID NO: 533920 - RNA, 19 nt, Artificial Sequence
  Description of Artificial Sequence: Synthetic oligonucleotide
ugauuggcugcugcgugug

SEQ ID NO: 533921 - RNA, 19 nt, Artificial Sequence
  Description of Artificial Sequence: Synthetic oligonucleotide
caaagaucuuggguggcug

SEQ ID NO: 533922 - RNA, 19 nt, Artificial Sequence
  Description of Artificial Sequence: Synthetic oligonucleotide
aggccuuucuccacacucg

SEQ ID NO: 533923 - RNA, 19 nt, Artificial Sequence
  Description of Artificial Sequence: Synthetic oligonucleotide
gguggacguagucauaauc

SEQ ID NO: 533924 - RNA, 19 nt, Artificial Sequence
  Description of Artificial Sequence: Synthetic oligonucleotide
acagaugcuuggguagcuc

SEQ ID NO: 533925 - RNA, 19 nt, Artificial Sequence
  Description of Artificial Sequence: Synthetic oligonucleotide
cauuauguuccccuuuucu

SEQ ID NO: 533926 - RNA, 19 nt, Artificial Sequence
  Description of Artificial Sequence: Synthetic oligonucleotide
ccgucugaaaagcagugag

SEQ ID NO: 533927 - RNA, 19 nt, Artificial Sequence
  Description of Artificial Sequence: Synthetic oligonucleotide
uccgucugaaaagcaguga

SEQ ID NO: 533928 - RNA, 19 nt, Artificial Sequence
  Description of Artificial Sequence: Synthetic oligonucleotide
gcuagaggccgacaggcgc

SEQ ID NO: 533929 - RNA, 19 nt, Artificial Sequence
  Description of Artificial Sequence: Synthetic oligonucleotide
acaaagaucuuggguggcu

SEQ ID NO: 533930 - RNA, 19 nt, Artificial Sequence
  Description of Artificial Sequence: Synthetic oligonucleotide
ucuguuggggccucucguu

SEQ ID NO: 533931 - RNA, 19 nt, Artificial Sequence
  Description of Artificial Sequence: Synthetic oligonucleotide
gcuuacacccagcugcagc

SEQ ID NO: 533932 - RNA, 19 nt, Artificial Sequence
  Description of Artificial Sequence: Synthetic oligonucleotide
gguuaccuguccccaaacc

SEQ ID NO: 533933 - RNA, 19 nt, Artificial Sequence
  Description of Artificial Sequence: Synthetic oligonucleotide
uacugccccgugaacugca

SEQ ID NO: 533934 - RNA, 19 nt, Artificial Sequence
  Description of Artificial Sequence: Synthetic oligonucleotide
caccucaggagggagcacc

SEQ ID NO: 533935 - RNA, 19 nt, Artificial Sequence
  Description of Artificial Sequence: Synthetic oligonucleotide
caguguacucuuguccagc

SEQ ID NO: 533936 - RNA, 19 nt, Artificial Sequence
  Description of Artificial Sequence: Synthetic oligonucleotide
gugauuagcaguccacagu

SEQ ID NO: 533937 - RNA, 19 nt, Artificial Sequence
  Description of Artificial Sequence: Synthetic oligonucleotide
cacggacggaggaacauca

SEQ ID NO: 533938 - RNA, 19 nt, Artificial Sequence
  Description of Artificial Sequence: Synthetic oligonucleotide
ugcucacggacggaggaac

SEQ ID NO: 533939 - RNA, 19 nt, Artificial Sequence
  Description of Artificial Sequence: Synthetic oligonucleotide
cuguaguugccggcuaagc

SEQ ID NO: 533940 - RNA, 19 nt, Artificial Sequence
  Description of Artificial Sequence: Synthetic oligonucleotide
uggccacaaugccucgcag

SEQ ID NO: 533941 - RNA, 19 nt, Artificial Sequence
  Description of Artificial Sequence: Synthetic oligonucleotide
cagagggcgugacuggaug

SEQ ID NO: 533942 - RNA, 19 nt, Artificial Sequence
  Description of Artificial Sequence: Synthetic oligonucleotide
cagucauaugucuccucuc

SEQ ID NO: 533943 - RNA, 19 nt, Artificial Sequence
  Description of Artificial Sequence: Synthetic oligonucleotide
gcuggcuuuaucagugggg

SEQ ID NO: 533944 - RNA, 19 nt, Artificial Sequence
  Description of Artificial Sequence: Synthetic oligonucleotide
gugcggucagaaguguggg

SEQ ID NO: 533945 - RNA, 19 nt, Artificial Sequence
  Description of Artificial Sequence: Synthetic oligonucleotide
ggcacaucauacaacguuc

SEQ ID NO: 533946 - RNA, 19 nt, Artificial Sequence
  Description of Artificial Sequence: Synthetic oligonucleotide
uccacacucggaggcacug

SEQ ID NO: 533947 - RNA, 19 nt, Artificial Sequence
  Description of Artificial Sequence: Synthetic oligonucleotide
caguggugcuuacacccag

SEQ ID NO: 533948 - RNA, 19 nt, Artificial Sequence
  Description of Artificial Sequence: Synthetic oligonucleotide
gacccggcggaacugcuga

SEQ ID NO: 533949 - RNA, 19 nt, Artificial Sequence
  Description of Artificial Sequence: Synthetic oligonucleotide
uacugcaaggcagcagccu

SEQ ID NO: 533950 - RNA, 19 nt, Artificial Sequence
  Description of Artificial Sequence: Synthetic oligonucleotide
gacuauuagucaaaugauu

SEQ ID NO: 533951 - RNA, 19 nt, Artificial Sequence
  Description of Artificial Sequence: Synthetic oligonucleotide
caccgaaugaugauuggcu

SEQ ID NO: 533952 - RNA, 19 nt, Artificial Sequence
  Description of Artificial Sequence: Synthetic oligonucleotide
gcuaagcuuggcaugcaag

SEQ ID NO: 533953 - RNA, 19 nt, Artificial Sequence
  Description of Artificial Sequence: Synthetic oligonucleotide
aggcgcuugccaucuguug

SEQ ID NO: 533954 - RNA, 19 nt, Artificial Sequence
  Description of Artificial Sequence: Synthetic oligonucleotide
ggcgcagcaaggaucaaug

SEQ ID NO: 533955 - RNA, 19 nt, Artificial Sequence
  Description of Artificial Sequence: Synthetic oligonucleotide
aggcaucuacugcaucugu

SEQ ID NO: 533956 - RNA, 19 nt, Artificial Sequence
  Description of Artificial Sequence: Synthetic oligonucleotide
gaggccgacaggcgcuugc

SEQ ID NO: 533957 - RNA, 19 nt, Artificial Sequence
  Description of Artificial Sequence: Synthetic oligonucleotide
acaacguuccagggccagg

SEQ ID NO: 533958 - RNA, 19 nt, Artificial Sequence
  Description of Artificial Sequence: Synthetic oligonucleotide
gaugcuuggguagcucgga

SEQ ID NO: 533959 - RNA, 19 nt, Artificial Sequence
  Description of Artificial Sequence: Synthetic oligonucleotide
uggccuuuucccugccgca

SEQ ID NO: 533960 - RNA, 19 nt, Artificial Sequence
  Description of Artificial Sequence: Synthetic oligonucleotide
ccagcuuaugugcacugag

SEQ ID NO: 533961 - RNA, 19 nt, Artificial Sequence
  Description of Artificial Sequence: Synthetic oligonucleotide
gcaaggugcggucagaagu

SEQ ID NO: 533962 - RNA, 19 nt, Artificial Sequence
  Description of Artificial Sequence: Synthetic oligonucleotide
ggcugcgcacaucagcugc

SEQ ID NO: 533963 - RNA, 19 nt, Artificial Sequence
  Description of Artificial Sequence: Synthetic oligonucleotide
gcuuggguagcucggacca

SEQ ID NO: 533964 - RNA, 19 nt, Artificial Sequence
  Description of Artificial Sequence: Synthetic oligonucleotide
aaggugcggucagaagugu

SEQ ID NO: 533965 - RNA, 19 nt, Artificial Sequence
  Description of Artificial Sequence: Synthetic oligonucleotide
agggagcaccuguucacga

SEQ ID NO: 533966 - RNA, 19 nt, Artificial Sequence
  Description of Artificial Sequence: Synthetic oligonucleotide
uguucacgaggcacaucau

SEQ ID NO: 533967 - RNA, 19 nt, Artificial Sequence
  Description of Artificial Sequence: Synthetic oligonucleotide
cacugucaaggaccugacc

SEQ ID NO: 533968 - RNA, 19 nt, Artificial Sequence
  Description of Artificial Sequence: Synthetic oligonucleotide
aaccugcaggauauucacu

SEQ ID NO: 533969 - RNA, 19 nt, Artificial Sequence
  Description of Artificial Sequence: Synthetic oligonucleotide
uuggguagcucggaccauc

SEQ ID NO: 533970 - RNA, 19 nt, Artificial Sequence
  Description of Artificial Sequence: Synthetic oligonucleotide
ugcggucagaagugugggu

SEQ ID NO: 533971 - RNA, 19 nt, Artificial Sequence
  Description of Artificial Sequence: Synthetic oligonucleotide
cacaucauacaacguucca

SEQ ID NO: 533972 - RNA, 19 nt, Artificial Sequence
  Description of Artificial Sequence: Synthetic oligonucleotide
gcaaggaucaauggguguc

SEQ ID NO: 533973 - RNA, 19 nt, Artificial Sequence
  Description of Artificial Sequence: Synthetic oligonucleotide
uggcaugcaaggugcgguc

SEQ ID NO: 533974 - RNA, 19 nt, Artificial Sequence
  Description of Artificial Sequence: Synthetic oligonucleotide
auguagacuauuagucaaa

SEQ ID NO: 533975 - RNA, 19 nt, Artificial Sequence
  Description of Artificial Sequence: Synthetic oligonucleotide
cuuccccugcagguggacg

SEQ ID NO: 533976 - RNA, 19 nt, Artificial Sequence
  Description of Artificial Sequence: Synthetic oligonucleotide
agguugcuauaguggguca

SEQ ID NO: 533977 - RNA, 19 nt, Artificial Sequence
  Description of Artificial Sequence: Synthetic oligonucleotide
cuguuggggccucucguuc

SEQ ID NO: 533978 - RNA, 19 nt, Artificial Sequence
  Description of Artificial Sequence: Synthetic oligonucleotide
cagaggugcuacgccagcc

SEQ ID NO: 533979 - RNA, 19 nt, Artificial Sequence
  Description of Artificial Sequence: Synthetic oligonucleotide
caacccacaccugccuugc

SEQ ID NO: 533980 - RNA, 19 nt, Artificial Sequence
  Description of Artificial Sequence: Synthetic oligonucleotide
uccccuuuucuaguagcuc

SEQ ID NO: 533981 - RNA, 19 nt, Artificial Sequence
  Description of Artificial Sequence: Synthetic oligonucleotide
gcugggguuaccugucccc

SEQ ID NO: 533982 - RNA, 19 nt, Artificial Sequence
  Description of Artificial Sequence: Synthetic oligonucleotide
ucacggacggaggaacauc

SEQ ID NO: 533983 - RNA, 19 nt, Artificial Sequence
  Description of Artificial Sequence: Synthetic oligonucleotide
caccuguucacgaggcaca

SEQ ID NO: 533984 - RNA, 19 nt, Artificial Sequence
  Description of Artificial Sequence: Synthetic oligonucleotide
guggccacaaugccucgca

SEQ ID NO: 533985 - RNA, 19 nt, Artificial Sequence
  Description of Artificial Sequence: Synthetic oligonucleotide
aacuugcugugugccacaa

SEQ ID NO: 533986 - RNA, 19 nt, Artificial Sequence
  Description of Artificial Sequence: Synthetic oligonucleotide
cugugcuugccugucacga

SEQ ID NO: 533987 - RNA, 19 nt, Artificial Sequence
  Description of Artificial Sequence: Synthetic oligonucleotide
ugcggguggggcccaugug

SEQ ID NO: 533988 - RNA, 19 nt, Artificial Sequence
  Description of Artificial Sequence: Synthetic oligonucleotide
cuggcugcgcacaucagcu

SEQ ID NO: 533989 - RNA, 19 nt, Artificial Sequence
  Description of Artificial Sequence: Synthetic oligonucleotide
guguguccccaaugaacac

SEQ ID NO: 533990 - RNA, 19 nt, Artificial Sequence
  Description of Artificial Sequence: Synthetic oligonucleotide
auguuccccuuuucuagua

SEQ ID NO: 533991 - RNA, 19 nt, Artificial Sequence
  Description of Artificial Sequence: Synthetic oligonucleotide
gauuggcugguggcaggcc

SEQ ID NO: 533992 - RNA, 19 nt, Artificial Sequence
  Description of Artificial Sequence: Synthetic oligonucleotide
ccucucguucagcuggugg

SEQ ID NO: 533993 - RNA, 19 nt, Artificial Sequence
  Description of Artificial Sequence: Synthetic oligonucleotide
cccugccgcauuauguucc

SEQ ID NO: 533994 - RNA, 19 nt, Artificial Sequence
  Description of Artificial Sequence: Synthetic oligonucleotide
gcagcaaggaucaaugggu

SEQ ID NO: 533995 - RNA, 19 nt, Artificial Sequence
  Description of Artificial Sequence: Synthetic oligonucleotide
gcggguggggcccaugugc

SEQ ID NO: 533996 - RNA, 19 nt, Artificial Sequence
  Description of Artificial Sequence: Synthetic oligonucleotide
caccuggcugcgcacauca

SEQ ID NO: 533997 - RNA, 19 nt, Artificial Sequence
  Description of Artificial Sequence: Synthetic oligonucleotide
ccugucuaccauguccugg

SEQ ID NO: 533998 - RNA, 19 nt, Artificial Sequence
  Description of Artificial Sequence: Synthetic oligonucleotide
gaucaaugggugucggguu

SEQ ID NO: 533999 - RNA, 19 nt, Artificial Sequence
  Description of Artificial Sequence: Synthetic oligonucleotide
cagccucuauacccuaguc

SEQ ID NO: 534000 - RNA, 19 nt, Artificial Sequence
  Description of Artificial Sequence: Synthetic oligonucleotide
gcaugcaaggugcggucag

SEQ ID NO: 534001 - RNA, 19 nt, Artificial Sequence
  Description of Artificial Sequence: Synthetic oligonucleotide
cuaguagcuccuucugugu

SEQ ID NO: 534002 - RNA, 19 nt, Artificial Sequence
  Description of Artificial Sequence: Synthetic oligonucleotide
cuaccauguccugggcagc

SEQ ID NO: 534003 - RNA, 19 nt, Artificial Sequence
  Description of Artificial Sequence: Synthetic oligonucleotide
acccacaccugccuugcua

SEQ ID NO: 534004 - RNA, 19 nt, Artificial Sequence
  Description of Artificial Sequence: Synthetic oligonucleotide
ugggguuaccuguccccaa

SEQ ID NO: 534005 - RNA, 19 nt, Artificial Sequence
  Description of Artificial Sequence: Synthetic oligonucleotide
uccucagcugguggggagu

SEQ ID NO: 534006 - RNA, 19 nt, Artificial Sequence
  Description of Artificial Sequence: Synthetic oligonucleotide
cuggcuuuaucaguggggu

SEQ ID NO: 534007 - RNA, 19 nt, Artificial Sequence
  Description of Artificial Sequence: Synthetic oligonucleotide
aggacgccucaaaccaggg

SEQ ID NO: 534008 - RNA, 19 nt, Artificial Sequence
  Description of Artificial Sequence: Synthetic oligonucleotide
gcgcagcaaggaucaaugg

SEQ ID NO: 534009 - RNA, 19 nt, Artificial Sequence
  Description of Artificial Sequence: Synthetic oligonucleotide
acaguggugcuuacaccca

SEQ ID NO: 534010 - RNA, 19 nt, Artificial Sequence
  Description of Artificial Sequence: Synthetic oligonucleotide
ggaggcgcagcaaggauca

SEQ ID NO: 534011 - RNA, 19 nt, Artificial Sequence
  Description of Artificial Sequence: Synthetic oligonucleotide
gagauaccuccugcuccag

SEQ ID NO: 534012 - RNA, 19 nt, Artificial Sequence
  Description of Artificial Sequence: Synthetic oligonucleotide
cagguggacguagucauaa

SEQ ID NO: 534013 - RNA, 19 nt, Artificial Sequence
  Description of Artificial Sequence: Synthetic oligonucleotide
aacccacaccugccuugcu

SEQ ID NO: 534014 - RNA, 19 nt, Artificial Sequence
  Description of Artificial Sequence: Synthetic oligonucleotide
cugccgugacagugugucc

SEQ ID NO: 534015 - RNA, 19 nt, Artificial Sequence
  Description of Artificial Sequence: Synthetic oligonucleotide
caaugggugucggguuggg

SEQ ID NO: 534016 - RNA, 19 nt, Artificial Sequence
  Description of Artificial Sequence: Synthetic oligonucleotide
cauggucuauaggacgaga

SEQ ID NO: 534017 - RNA, 19 nt, Artificial Sequence
  Description of Artificial Sequence: Synthetic oligonucleotide
ugacccugucuaccauguc

SEQ ID NO: 534018 - RNA, 19 nt, Artificial Sequence
  Description of Artificial Sequence: Synthetic oligonucleotide
uggcuuuaucagugggguu

SEQ ID NO: 534019 - RNA, 19 nt, Artificial Sequence
  Description of Artificial Sequence: Synthetic oligonucleotide
acaaugccucgcaggaggu

SEQ ID NO: 534020 - RNA, 19 nt, Artificial Sequence
  Description of Artificial Sequence: Synthetic oligonucleotide
cucuauacccuaguccucu

SEQ ID NO: 534021 - RNA, 19 nt, Artificial Sequence
  Description of Artificial Sequence: Synthetic oligonucleotide
gggcccaugugccuccacc

SEQ ID NO: 534022 - RNA, 19 nt, Artificial Sequence
  Description of Artificial Sequence: Synthetic oligonucleotide
ugcccacuccccagccucu

SEQ ID NO: 534023 - RNA, 19 nt, Artificial Sequence
  Description of Artificial Sequence: Synthetic oligonucleotide
agguggacguagucauaau

SEQ ID NO: 534024 - RNA, 19 nt, Artificial Sequence
  Description of Artificial Sequence: Synthetic oligonucleotide
auaggacgagauaccuccu

SEQ ID NO: 534025 - RNA, 19 nt, Artificial Sequence
  Description of Artificial Sequence: Synthetic oligonucleotide
cgcgcaagggacuccacag

SEQ ID NO: 534026 - RNA, 19 nt, Artificial Sequence
  Description of Artificial Sequence: Synthetic oligonucleotide
cauacaccgaaugaugauu

SEQ ID NO: 534027 - RNA, 19 nt, Artificial Sequence
  Description of Artificial Sequence: Synthetic oligonucleotide
guggugcuuacacccagcu

SEQ ID NO: 534028 - RNA, 19 nt, Artificial Sequence
  Description of Artificial Sequence: Synthetic oligonucleotide
gccggcuaagcuuggcaug

SEQ ID NO: 534029 - RNA, 19 nt, Artificial Sequence
  Description of Artificial Sequence: Synthetic oligonucleotide
cugccccgugaacugcagc

SEQ ID NO: 534030 - RNA, 19 nt, Artificial Sequence
  Description of Artificial Sequence: Synthetic oligonucleotide
ccaaaccugcaggauauuc

SEQ ID NO: 534031 - RNA, 19 nt, Artificial Sequence
  Description of Artificial Sequence: Synthetic oligonucleotide
guugccggcuaagcuuggc

SEQ ID NO: 534032 - RNA, 19 nt, Artificial Sequence
  Description of Artificial Sequence: Synthetic oligonucleotide
gauuagcaguccacagugu

SEQ ID NO: 534033 - RNA, 19 nt, Artificial Sequence
  Description of Artificial Sequence: Synthetic oligonucleotide
augccucgcaggaggucac

SEQ ID NO: 534034 - RNA, 19 nt, Artificial Sequence
  Description of Artificial Sequence: Synthetic oligonucleotide
cucggaccaucacugccca

SEQ ID NO: 534035 - RNA, 19 nt, Artificial Sequence
  Description of Artificial Sequence: Synthetic oligonucleotide
acggcccgugagcaggcca

SEQ ID NO: 534036 - RNA, 19 nt, Artificial Sequence
  Description of Artificial Sequence: Synthetic oligonucleotide
ccggcuaagcuuggcaugc

SEQ ID NO: 534037 - RNA, 19 nt, Artificial Sequence
  Description of Artificial Sequence: Synthetic oligonucleotide
agggcgugacuggaugcug

SEQ ID NO: 534038 - RNA, 19 nt, Artificial Sequence
  Description of Artificial Sequence: Synthetic oligonucleotide
ggcaucuacugcaucuguc

SEQ ID NO: 534039 - RNA, 19 nt, Artificial Sequence
  Description of Artificial Sequence: Synthetic oligonucleotide
cugucaaggaccugaccau

SEQ ID NO: 534040 - RNA, 19 nt, Artificial Sequence
  Description of Artificial Sequence: Synthetic oligonucleotide
ugcgcacaucagcugccuu

SEQ ID NO: 534041 - RNA, 19 nt, Artificial Sequence
  Description of Artificial Sequence: Synthetic oligonucleotide
gugcuuacacccagcugca

SEQ ID NO: 534042 - RNA, 19 nt, Artificial Sequence
  Description of Artificial Sequence: Synthetic oligonucleotide
auacaacguuccagggcca

SEQ ID NO: 534043 - RNA, 19 nt, Artificial Sequence
  Description of Artificial Sequence: Synthetic oligonucleotide
aguugccggcuaagcuugg

SEQ ID NO: 534044 - RNA, 19 nt, Artificial Sequence
  Description of Artificial Sequence: Synthetic oligonucleotide
ggguuaccuguccccaaac

SEQ ID NO: 534045 - RNA, 19 nt, Artificial Sequence
  Description of Artificial Sequence: Synthetic oligonucleotide
ggugaauccugggcuuccc

SEQ ID NO: 534046 - RNA, 19 nt, Artificial Sequence
  Description of Artificial Sequence: Synthetic oligonucleotide
gcgcaagggacuccacagc

SEQ ID NO: 534047 - RNA, 19 nt, Artificial Sequence
  Description of Artificial Sequence: Synthetic oligonucleotide
gggcuuggcgaaggcaggg

SEQ ID NO: 534048 - RNA, 19 nt, Artificial Sequence
  Description of Artificial Sequence: Synthetic oligonucleotide
cugggguuaccugucccca

SEQ ID NO: 534049 - RNA, 19 nt, Artificial Sequence
  Description of Artificial Sequence: Synthetic oligonucleotide
caggcgguccaugucuuca

SEQ ID NO: 534050 - RNA, 19 nt, Artificial Sequence
  Description of Artificial Sequence: Synthetic oligonucleotide
ggcuuggcgaaggcagggg

SEQ ID NO: 534051 - RNA, 19 nt, Artificial Sequence
  Description of Artificial Sequence: Synthetic oligonucleotide
cacaccugccuugcuauaa

SEQ ID NO: 534052 - RNA, 19 nt, Artificial Sequence
  Description of Artificial Sequence: Synthetic oligonucleotide
acccggcggaacugcugag

SEQ ID NO: 534053 - RNA, 19 nt, Artificial Sequence
  Description of Artificial Sequence: Synthetic oligonucleotide
cugauuggcugcugcgugu

SEQ ID NO: 534054 - RNA, 19 nt, Artificial Sequence
  Description of Artificial Sequence: Synthetic oligonucleotide
ccauggaccaccagggucu

SEQ ID NO: 534055 - RNA, 19 nt, Artificial Sequence
  Description of Artificial Sequence: Synthetic oligonucleotide
gugaggcauugccaugcaa

SEQ ID NO: 534056 - RNA, 19 nt, Artificial Sequence
  Description of Artificial Sequence: Synthetic oligonucleotide
aggcacggcccgugagcag

SEQ ID NO: 534057 - RNA, 19 nt, Artificial Sequence
  Description of Artificial Sequence: Synthetic oligonucleotide
cugucacgaggagcucugc

SEQ ID NO: 534058 - RNA, 19 nt, Artificial Sequence
  Description of Artificial Sequence: Synthetic oligonucleotide
ccuggugauuagcagucca

SEQ ID NO: 534059 - RNA, 19 nt, Artificial Sequence
  Description of Artificial Sequence: Synthetic oligonucleotide
gcuuggcaugcaaggugcg

SEQ ID NO: 534060 - RNA, 19 nt, Artificial Sequence
  Description of Artificial Sequence: Synthetic oligonucleotide
cuauacccuaguccucugu

SEQ ID NO: 534061 - RNA, 19 nt, Artificial Sequence
  Description of Artificial Sequence: Synthetic oligonucleotide
gaccauggaccaccagggu

SEQ ID NO: 534062 - RNA, 19 nt, Artificial Sequence
  Description of Artificial Sequence: Synthetic oligonucleotide
gcugccugugcuagaggcc

SEQ ID NO: 534063 - RNA, 19 nt, Artificial Sequence
  Description of Artificial Sequence: Synthetic oligonucleotide
cauggaccaccagggucug

SEQ ID NO: 534064 - RNA, 19 nt, Artificial Sequence
  Description of Artificial Sequence: Synthetic oligonucleotide
ggcggaacugcugagugcu

SEQ ID NO: 534065 - RNA, 19 nt, Artificial Sequence
  Description of Artificial Sequence: Synthetic oligonucleotide
caaugccucgcaggagguc

SEQ ID NO: 534066 - RNA, 19 nt, Artificial Sequence
  Description of Artificial Sequence: Synthetic oligonucleotide
ccggcggaacugcugagug

SEQ ID NO: 534067 - RNA, 19 nt, Artificial Sequence
  Description of Artificial Sequence: Synthetic oligonucleotide
cuucuguaguugccggcua

SEQ ID NO: 534068 - RNA, 19 nt, Artificial Sequence
  Description of Artificial Sequence: Synthetic oligonucleotide
caggcacggcccgugagca

SEQ ID NO: 534069 - RNA, 19 nt, Artificial Sequence
  Description of Artificial Sequence: Synthetic oligonucleotide
ucggaccaucacugcccac

SEQ ID NO: 534070 - RNA, 19 nt, Artificial Sequence
  Description of Artificial Sequence: Synthetic oligonucleotide
gggcgugacuggaugcugc

SEQ ID NO: 534071 - RNA, 19 nt, Artificial Sequence
  Description of Artificial Sequence: Synthetic oligonucleotide
ccccuguccgcccuggcac

SEQ ID NO: 534072 - RNA, 19 nt, Artificial Sequence
  Description of Artificial Sequence: Synthetic oligonucleotide
guccgcccuggcaccaggg

SEQ ID NO: 534073 - RNA, 19 nt, Artificial Sequence
  Description of Artificial Sequence: Synthetic oligonucleotide
gcuuaugugcacugaggau

SEQ ID NO: 534074 - RNA, 19 nt, Artificial Sequence
  Description of Artificial Sequence: Synthetic oligonucleotide
gaggugcacaccacacugu

SEQ ID NO: 534075 - RNA, 19 nt, Artificial Sequence
  Description of Artificial Sequence: Synthetic oligonucleotide
cacccagcugcagccgcgc

SEQ ID NO: 534076 - RNA, 19 nt, Artificial Sequence
  Description of Artificial Sequence: Synthetic oligonucleotide
gggguuaccuguccccaaa

SEQ ID NO: 534077 - RNA, 19 nt, Artificial Sequence
  Description of Artificial Sequence: Synthetic oligonucleotide
cgagauaccuccugcucca

SEQ ID NO: 534078 - RNA, 19 nt, Artificial Sequence
  Description of Artificial Sequence: Synthetic oligonucleotide
gugcacugaggaugacaaa

SEQ ID NO: 534079 - RNA, 19 nt, Artificial Sequence
  Description of Artificial Sequence: Synthetic oligonucleotide
cugccgcauuauguucccc

SEQ ID NO: 534080 - RNA, 19 nt, Artificial Sequence
  Description of Artificial Sequence: Synthetic oligonucleotide
ugccucgcaggaggucaca

SEQ ID NO: 534081 - RNA, 19 nt, Artificial Sequence
  Description of Artificial Sequence: Synthetic oligonucleotide
cacagcagguugcuauagu

SEQ ID NO: 534082 - RNA, 19 nt, Artificial Sequence
  Description of Artificial Sequence: Synthetic oligonucleotide
cugcugcgugugcugccug

SEQ ID NO: 534083 - RNA, 19 nt, Artificial Sequence
  Description of Artificial Sequence: Synthetic oligonucleotide
ggaacaucauacaccgaau

SEQ ID NO: 534084 - RNA, 19 nt, Artificial Sequence
  Description of Artificial Sequence: Synthetic oligonucleotide
cgcaagggacuccacagca

SEQ ID NO: 534085 - RNA, 19 nt, Artificial Sequence
  Description of Artificial Sequence: Synthetic oligonucleotide
accugaccauggaccacca

SEQ ID NO: 534086 - RNA, 19 nt, Artificial Sequence
  Description of Artificial Sequence: Synthetic oligonucleotide
cccgugagcaggccaccag

SEQ ID NO: 534087 - RNA, 19 nt, Artificial Sequence
  Description of Artificial Sequence: Synthetic oligonucleotide
gcacgucauagaggucagg

SEQ ID NO: 534088 - RNA, 19 nt, Artificial Sequence
  Description of Artificial Sequence: Synthetic oligonucleotide
agaggccgacaggcgcuug

SEQ ID NO: 534089 - RNA, 19 nt, Artificial Sequence
  Description of Artificial Sequence: Synthetic oligonucleotide
acggacggaggaacaucau

SEQ ID NO: 534090 - RNA, 19 nt, Artificial Sequence
  Description of Artificial Sequence: Synthetic oligonucleotide
caccugccuugcuauaaau

SEQ ID NO: 534091 - RNA, 19 nt, Artificial Sequence
  Description of Artificial Sequence: Synthetic oligonucleotide
gccuggugauuagcagucc

SEQ ID NO: 534092 - RNA, 19 nt, Artificial Sequence
  Description of Artificial Sequence: Synthetic oligonucleotide
ggaccugaccauggaccac

SEQ ID NO: 534093 - RNA, 19 nt, Artificial Sequence
  Description of Artificial Sequence: Synthetic oligonucleotide
cccuguccgcccuggcacc

SEQ ID NO: 534094 - RNA, 19 nt, Artificial Sequence
  Description of Artificial Sequence: Synthetic oligonucleotide
ggcuuugguccgucugaaa

SEQ ID NO: 534095 - RNA, 19 nt, Artificial Sequence
  Description of Artificial Sequence: Synthetic oligonucleotide
gugggucaccuggcugcgc

SEQ ID NO: 534096 - RNA, 19 nt, Artificial Sequence
  Description of Artificial Sequence: Synthetic oligonucleotide
cccugucuaccauguccug

SEQ ID NO: 534097 - RNA, 19 nt, Artificial Sequence
  Description of Artificial Sequence: Synthetic oligonucleotide
gggcugguguccaguuggc

SEQ ID NO: 534098 - RNA, 19 nt, Artificial Sequence
  Description of Artificial Sequence: Synthetic oligonucleotide
gcuuccccggccacuguca

SEQ ID NO: 534099 - RNA, 19 nt, Artificial Sequence
  Description of Artificial Sequence: Synthetic oligonucleotide
gcugucggucugagggccc

SEQ ID NO: 534100 - RNA, 19 nt, Artificial Sequence
  Description of Artificial Sequence: Synthetic oligonucleotide
ggcgugacuggaugcugcu

SEQ ID NO: 534101 - RNA, 19 nt, Artificial Sequence
  Description of Artificial Sequence: Synthetic oligonucleotide
gcgugacuggaugcugcug

SEQ ID NO: 534102 - RNA, 19 nt, Artificial Sequence
  Description of Artificial Sequence: Synthetic oligonucleotide
cggcggaacugcugagugc

SEQ ID NO: 534103 - RNA, 19 nt, Artificial Sequence
  Description of Artificial Sequence: Synthetic oligonucleotide
ggccccagccuggugauua

SEQ ID NO: 534104 - RNA, 19 nt, Artificial Sequence
  Description of Artificial Sequence: Synthetic oligonucleotide
cacggcccgugagcaggcc

SEQ ID NO: 534105 - RNA, 19 nt, Artificial Sequence
  Description of Artificial Sequence: Synthetic oligonucleotide
ggccgacaggcgcuugcca

SEQ ID NO: 534106 - RNA, 19 nt, Artificial Sequence
  Description of Artificial Sequence: Synthetic oligonucleotide
gcucacggacggaggaaca

SEQ ID NO: 534107 - RNA, 19 nt, Artificial Sequence
  Description of Artificial Sequence: Synthetic oligonucleotide
cagccgcgcaagggacucc

SEQ ID NO: 534108 - RNA, 19 nt, Artificial Sequence
  Description of Artificial Sequence: Synthetic oligonucleotide
gccucgcaggaggucacac

SEQ ID NO: 534109 - RNA, 19 nt, Artificial Sequence
  Description of Artificial Sequence: Synthetic oligonucleotide
cugcggguggggcccaugu

SEQ ID NO: 534110 - RNA, 19 nt, Artificial Sequence
  Description of Artificial Sequence: Synthetic oligonucleotide
cuccacacucggaggcacu

SEQ ID NO: 534111 - RNA, 19 nt, Artificial Sequence
  Description of Artificial Sequence: Synthetic oligonucleotide
gcgcacaucagcugccuuu

SEQ ID NO: 534112 - RNA, 19 nt, Artificial Sequence
  Description of Artificial Sequence: Synthetic oligonucleotide
cagaaguguggguggcauu

SEQ ID NO: 534113 - RNA, 19 nt, Artificial Sequence
  Description of Artificial Sequence: Synthetic oligonucleotide
cuacugcaucugucagugu

SEQ ID NO: 534114 - RNA, 19 nt, Artificial Sequence
  Description of Artificial Sequence: Synthetic oligonucleotide
gccugugcuagaggccgac

SEQ ID NO: 534115 - RNA, 19 nt, Artificial Sequence
  Description of Artificial Sequence: Synthetic oligonucleotide
caggcgcuugccaucuguu

SEQ ID NO: 534116 - RNA, 19 nt, Artificial Sequence
  Description of Artificial Sequence: Synthetic oligonucleotide
ccaucuguuggggccucuc

SEQ ID NO: 534117 - RNA, 19 nt, Artificial Sequence
  Description of Artificial Sequence: Synthetic oligonucleotide
gcgugugcugccugugcua

SEQ ID NO: 534118 - RNA, 19 nt, Artificial Sequence
  Description of Artificial Sequence: Synthetic oligonucleotide
gccuugcuauaaauaugua

SEQ ID NO: 534119 - RNA, 19 nt, Artificial Sequence
  Description of Artificial Sequence: Synthetic oligonucleotide
gccgcauuauguuccccuu

SEQ ID NO: 534120 - RNA, 19 nt, Artificial Sequence
  Description of Artificial Sequence: Synthetic oligonucleotide
ggcccgugagcaggccacc

SEQ ID NO: 534121 - RNA, 19 nt, Artificial Sequence
  Description of Artificial Sequence: Synthetic oligonucleotide
ggcaacccacaccugccuu

SEQ ID NO: 534122 - RNA, 19 nt, Artificial Sequence
  Description of Artificial Sequence: Synthetic oligonucleotide
cuuuucccugccgcauuau

SEQ ID NO: 534123 - RNA, 19 nt, Artificial Sequence
  Description of Artificial Sequence: Synthetic oligonucleotide
aggggccaucgggcacauc

SEQ ID NO: 534124 - RNA, 19 nt, Artificial Sequence
  Description of Artificial Sequence: Synthetic oligonucleotide
gaggcgcagcaaggaucaa

SEQ ID NO: 534125 - RNA, 19 nt, Artificial Sequence
  Description of Artificial Sequence: Synthetic oligonucleotide
cugcgcacaucagcugccu

SEQ ID NO: 534126 - RNA, 19 nt, Artificial Sequence
  Description of Artificial Sequence: Synthetic oligonucleotide
ccacuccccagccucuaua

SEQ ID NO: 534127 - RNA, 19 nt, Artificial Sequence
  Description of Artificial Sequence: Synthetic oligonucleotide
cccaggacccggcggaacu

SEQ ID NO: 534128 - RNA, 19 nt, Artificial Sequence
  Description of Artificial Sequence: Synthetic oligonucleotide
cucagcugguggggagucu

SEQ ID NO: 534129 - RNA, 19 nt, Artificial Sequence
  Description of Artificial Sequence: Synthetic oligonucleotide
gccuuuucccugccgcauu

SEQ ID NO: 534130 - RNA, 19 nt, Artificial Sequence
  Description of Artificial Sequence: Synthetic oligonucleotide
gguguccaguuggccaggu

SEQ ID NO: 534131 - RNA, 19 nt, Artificial Sequence
  Description of Artificial Sequence: Synthetic oligonucleotide
gcccgugagcaggccacca

SEQ ID NO: 534132 - RNA, 19 nt, Artificial Sequence
  Description of Artificial Sequence: Synthetic oligonucleotide
gggccaucgggcacauccu

SEQ ID NO: 534133 - RNA, 19 nt, Artificial Sequence
  Description of Artificial Sequence: Synthetic oligonucleotide
cccgugaacugcagccacu

SEQ ID NO: 534134 - RNA, 19 nt, Artificial Sequence
  Description of Artificial Sequence: Synthetic oligonucleotide
gcagagggcgugacuggau

SEQ ID NO: 534135 - RNA, 19 nt, Artificial Sequence
  Description of Artificial Sequence: Synthetic oligonucleotide
ggugucggguugggccaaa

SEQ ID NO: 534136 - RNA, 19 nt, Artificial Sequence
  Description of Artificial Sequence: Synthetic oligonucleotide
ccuguccgcccuggcacca

SEQ ID NO: 534137 - RNA, 19 nt, Artificial Sequence
  Description of Artificial Sequence: Synthetic oligonucleotide
ccgcauuauguuccccuuu

SEQ ID NO: 534138 - RNA, 19 nt, Artificial Sequence
  Description of Artificial Sequence: Synthetic oligonucleotide
ccgugacagugugucccca

SEQ ID NO: 534139 - RNA, 19 nt, Artificial Sequence
  Description of Artificial Sequence: Synthetic oligonucleotide
ggccucucguucagcuggu

SEQ ID NO: 534140 - RNA, 19 nt, Artificial Sequence
  Description of Artificial Sequence: Synthetic oligonucleotide
ccccggccacugucaagga

SEQ ID NO: 534141 - RNA, 19 nt, Artificial Sequence
  Description of Artificial Sequence: Synthetic oligonucleotide
cgacaggcgcuugccaucu

SEQ ID NO: 534142 - RNA, 19 nt, Artificial Sequence
  Description of Artificial Sequence: Synthetic oligonucleotide
cccggcggaacugcugagu

SEQ ID NO: 534143 - RNA, 19 nt, Artificial Sequence
  Description of Artificial Sequence: Synthetic oligonucleotide
gccugccgugacagugugu

SEQ ID NO: 534144 - RNA, 19 nt, Artificial Sequence
  Description of Artificial Sequence: Synthetic oligonucleotide
caggggccaucgggcacau

SEQ ID NO: 534145 - RNA, 19 nt, Artificial Sequence
  Description of Artificial Sequence: Synthetic oligonucleotide
cucugcggguggggcccau

SEQ ID NO: 534146 - RNA, 19 nt, Artificial Sequence
  Description of Artificial Sequence: Synthetic oligonucleotide
augacucagguccauacgc

SEQ ID NO: 534147 - RNA, 19 nt, Artificial Sequence
  Description of Artificial Sequence: Synthetic oligonucleotide
gaagcaauuuagcaccugg

SEQ ID NO: 534148 - RNA, 19 nt, Artificial Sequence
  Description of Artificial Sequence: Synthetic oligonucleotide
uucccgaugucacacaggg

SEQ ID NO: 534149 - RNA, 19 nt, Artificial Sequence
  Description of Artificial Sequence: Synthetic oligonucleotide
ucguggacgaaccugagcc

SEQ ID NO: 534150 - RNA, 19 nt, Artificial Sequence
  Description of Artificial Sequence: Synthetic oligonucleotide
aguuguaaggcucccgucg

SEQ ID NO: 534151 - RNA, 19 nt, Artificial Sequence
  Description of Artificial Sequence: Synthetic oligonucleotide
uuguagguccccaaauggg

SEQ ID NO: 534152 - RNA, 19 nt, Artificial Sequence
  Description of Artificial Sequence: Synthetic oligonucleotide
cuuguagguccccaaaugg

SEQ ID NO: 534153 - RNA, 19 nt, Artificial Sequence
  Description of Artificial Sequence: Synthetic oligonucleotide
caauuuagcaccuggcuug

SEQ ID NO: 534154 - RNA, 19 nt, Artificial Sequence
  Description of Artificial Sequence: Synthetic oligonucleotide
uccuucacaaguugagugg

SEQ ID NO: 534155 - RNA, 19 nt, Artificial Sequence
  Description of Artificial Sequence: Synthetic oligonucleotide
aucccuaagaagcuggcuc

SEQ ID NO: 534156 - RNA, 19 nt, Artificial Sequence
  Description of Artificial Sequence: Synthetic oligonucleotide
gaauccggguccuugaagc

SEQ ID NO: 534157 - RNA, 19 nt, Artificial Sequence
  Description of Artificial Sequence: Synthetic oligonucleotide
uguaguaagcuugagucca

SEQ ID NO: 534158 - RNA, 19 nt, Artificial Sequence
  Description of Artificial Sequence: Synthetic oligonucleotide
aagcucuggggucgaaucc

SEQ ID NO: 534159 - RNA, 19 nt, Artificial Sequence
  Description of Artificial Sequence: Synthetic oligonucleotide
auccgacccauucagcugc

SEQ ID NO: 534160 - RNA, 19 nt, Artificial Sequence
  Description of Artificial Sequence: Synthetic oligonucleotide
acuucggcacaccaggugg

SEQ ID NO: 534161 - RNA, 19 nt, Artificial Sequence
  Description of Artificial Sequence: Synthetic oligonucleotide
uuggguuugccacaaagaa

SEQ ID NO: 534162 - RNA, 19 nt, Artificial Sequence
  Description of Artificial Sequence: Synthetic oligonucleotide
aauuuagcaccuggcuugc

SEQ ID NO: 534163 - RNA, 19 nt, Artificial Sequence
  Description of Artificial Sequence: Synthetic oligonucleotide
acgacagcucuccacaugg

SEQ ID NO: 534164 - RNA, 19 nt, Artificial Sequence
  Description of Artificial Sequence: Synthetic oligonucleotide
cugagcauaagccuccugc

SEQ ID NO: 534165 - RNA, 19 nt, Artificial Sequence
  Description of Artificial Sequence: Synthetic oligonucleotide
aguugaguggccauauccc

SEQ ID NO: 534166 - RNA, 19 nt, Artificial Sequence
  Description of Artificial Sequence: Synthetic oligonucleotide
ucgggaggcauaaugaccu

SEQ ID NO: 534167 - RNA, 19 nt, Artificial Sequence
  Description of Artificial Sequence: Synthetic oligonucleotide
aagcaauuuagcaccuggc

SEQ ID NO: 534168 - RNA, 19 nt, Artificial Sequence
  Description of Artificial Sequence: Synthetic oligonucleotide
cuaagaagcuggcucagcc

SEQ ID NO: 534169 - RNA, 19 nt, Artificial Sequence
  Description of Artificial Sequence: Synthetic oligonucleotide
uaaggcaaggacuucggcu

SEQ ID NO: 534170 - RNA, 19 nt, Artificial Sequence
  Description of Artificial Sequence: Synthetic oligonucleotide
gaugacucagguccauacg

SEQ ID NO: 534171 - RNA, 19 nt, Artificial Sequence
  Description of Artificial Sequence: Synthetic oligonucleotide
aagucggggacagggaagc

SEQ ID NO: 534172 - RNA, 19 nt, Artificial Sequence
  Description of Artificial Sequence: Synthetic oligonucleotide
agaacccggauccaguguc

SEQ ID NO: 534173 - RNA, 19 nt, Artificial Sequence
  Description of Artificial Sequence: Synthetic oligonucleotide
ucucgauagguguaggcug

SEQ ID NO: 534174 - RNA, 19 nt, Artificial Sequence
  Description of Artificial Sequence: Synthetic oligonucleotide
uuagacacguuccccaccu

SEQ ID NO: 534175 - RNA, 19 nt, Artificial Sequence
  Description of Artificial Sequence: Synthetic oligonucleotide
aguaagcuugaguccaggg

SEQ ID NO: 534176 - RNA, 19 nt, Artificial Sequence
  Description of Artificial Sequence: Synthetic oligonucleotide
gggaucgaaggauaaagcg

SEQ ID NO: 534177 - RNA, 19 nt, Artificial Sequence
  Description of Artificial Sequence: Synthetic oligonucleotide
agucucgauagguguaggc

SEQ ID NO: 534178 - RNA, 19 nt, Artificial Sequence
  Description of Artificial Sequence: Synthetic oligonucleotide
gaagcugcgaccagggcgg

SEQ ID NO: 534179 - RNA, 19 nt, Artificial Sequence
  Description of Artificial Sequence: Synthetic oligonucleotide
aaggaaagaugcaguggcc

SEQ ID NO: 534180 - RNA, 19 nt, Artificial Sequence
  Description of Artificial Sequence: Synthetic oligonucleotide
auaaugaccuuugucuguc

SEQ ID NO: 534181 - RNA, 19 nt, Artificial Sequence
  Description of Artificial Sequence: Synthetic oligonucleotide
gugggugaaggaaagaugc

SEQ ID NO: 534182 - RNA, 19 nt, Artificial Sequence
  Description of Artificial Sequence: Synthetic oligonucleotide
uucgggaggcauaaugacc

SEQ ID NO: 534183 - RNA, 19 nt, Artificial Sequence
  Description of Artificial Sequence: Synthetic oligonucleotide
aggcauaaugaccuuuguc

SEQ ID NO: 534184 - RNA, 19 nt, Artificial Sequence
  Description of Artificial Sequence: Synthetic oligonucleotide
cuaagucuguguaguaagc

SEQ ID NO: 534185 - RNA, 19 nt, Artificial Sequence
  Description of Artificial Sequence: Synthetic oligonucleotide
uguucccgaugucacacag

SEQ ID NO: 534186 - RNA, 19 nt, Artificial Sequence
  Description of Artificial Sequence: Synthetic oligonucleotide
gagaaguaagccuggguca

SEQ ID NO: 534187 - RNA, 19 nt, Artificial Sequence
  Description of Artificial Sequence: Synthetic oligonucleotide
ugagcauaagccuccugca

SEQ ID NO: 534188 - RNA, 19 nt, Artificial Sequence
  Description of Artificial Sequence: Synthetic oligonucleotide
cucgauagguguaggcugg

SEQ ID NO: 534189 - RNA, 19 nt, Artificial Sequence
  Description of Artificial Sequence: Synthetic oligonucleotide
ucacaguuccucucggacc

SEQ ID NO: 534190 - RNA, 19 nt, Artificial Sequence
  Description of Artificial Sequence: Synthetic oligonucleotide
uuagcaccuggcuugcuca

SEQ ID NO: 534191 - RNA, 19 nt, Artificial Sequence
  Description of Artificial Sequence: Synthetic oligonucleotide
uugcucaccuucuauggca

SEQ ID NO: 534192 - RNA, 19 nt, Artificial Sequence
  Description of Artificial Sequence: Synthetic oligonucleotide
agagucauaggcugcccag

SEQ ID NO: 534193 - RNA, 19 nt, Artificial Sequence
  Description of Artificial Sequence: Synthetic oligonucleotide
ucccgcaucugcaagugug

SEQ ID NO: 534194 - RNA, 19 nt, Artificial Sequence
  Description of Artificial Sequence: Synthetic oligonucleotide
cuugaguacugugagcccc

SEQ ID NO: 534195 - RNA, 19 nt, Artificial Sequence
  Description of Artificial Sequence: Synthetic oligonucleotide
aucguggacgaaccugagc

SEQ ID NO: 534196 - RNA, 19 nt, Artificial Sequence
  Description of Artificial Sequence: Synthetic oligonucleotide
ucacucaccuccagaagca

SEQ ID NO: 534197 - RNA, 19 nt, Artificial Sequence
  Description of Artificial Sequence: Synthetic oligonucleotide
uguaaggcucccgucggcg

SEQ ID NO: 534198 - RNA, 19 nt, Artificial Sequence
  Description of Artificial Sequence: Synthetic oligonucleotide
uuuagcaccuggcuugcuc

SEQ ID NO: 534199 - RNA, 19 nt, Artificial Sequence
  Description of Artificial Sequence: Synthetic oligonucleotide
uguugccaugccuuucggg

SEQ ID NO: 534200 - RNA, 19 nt, Artificial Sequence
  Description of Artificial Sequence: Synthetic oligonucleotide
ugggaaugaagucggggac

SEQ ID NO: 534201 - RNA, 19 nt, Artificial Sequence
  Description of Artificial Sequence: Synthetic oligonucleotide
caguuguccgcauguaccg

SEQ ID NO: 534202 - RNA, 19 nt, Artificial Sequence
  Description of Artificial Sequence: Synthetic oligonucleotide
aaagcguucaugaggacua

SEQ ID NO: 534203 - RNA, 19 nt, Artificial Sequence
  Description of Artificial Sequence: Synthetic oligonucleotide
agggaucgaaggauaaagc

SEQ ID NO: 534204 - RNA, 19 nt, Artificial Sequence
  Description of Artificial Sequence: Synthetic oligonucleotide
ucaagguccguacucgcuc

SEQ ID NO: 534205 - RNA, 19 nt, Artificial Sequence
  Description of Artificial Sequence: Synthetic oligonucleotide
ggcauaaugaccuuugucu

SEQ ID NO: 534206 - RNA, 19 nt, Artificial Sequence
  Description of Artificial Sequence: Synthetic oligonucleotide
cuaggcuaagucuguguag

SEQ ID NO: 534207 - RNA, 19 nt, Artificial Sequence
  Description of Artificial Sequence: Synthetic oligonucleotide
aagacaucccgcagcgcgc

SEQ ID NO: 534208 - RNA, 19 nt, Artificial Sequence
  Description of Artificial Sequence: Synthetic oligonucleotide
ucccuaagaagcuggcuca

SEQ ID NO: 534209 - RNA, 19 nt, Artificial Sequence
  Description of Artificial Sequence: Synthetic oligonucleotide
aaggccacgaggcgcccac

SEQ ID NO: 534210 - RNA, 19 nt, Artificial Sequence
  Description of Artificial Sequence: Synthetic oligonucleotide
gcuaagucuguguaguaag

SEQ ID NO: 534211 - RNA, 19 nt, Artificial Sequence
  Description of Artificial Sequence: Synthetic oligonucleotide
guguaguaagcuugagucc

SEQ ID NO: 534212 - RNA, 19 nt, Artificial Sequence
  Description of Artificial Sequence: Synthetic oligonucleotide
ucaugaggacuaugagggg

SEQ ID NO: 534213 - RNA, 19 nt, Artificial Sequence
  Description of Artificial Sequence: Synthetic oligonucleotide
gaaccccacacucggcugg

SEQ ID NO: 534214 - RNA, 19 nt, Artificial Sequence
  Description of Artificial Sequence: Synthetic oligonucleotide
gaacaggucgccucccuug

SEQ ID NO: 534215 - RNA, 19 nt, Artificial Sequence
  Description of Artificial Sequence: Synthetic oligonucleotide
uccugcaauggcuucguac

SEQ ID NO: 534216 - RNA, 19 nt, Artificial Sequence
  Description of Artificial Sequence: Synthetic oligonucleotide
caucauugagguagaggag

SEQ ID NO: 534217 - RNA, 19 nt, Artificial Sequence
  Description of Artificial Sequence: Synthetic oligonucleotide
gaagcucuggggucgaauc

SEQ ID NO: 534218 - RNA, 19 nt, Artificial Sequence
  Description of Artificial Sequence: Synthetic oligonucleotide
aaccugagccgugacagug

SEQ ID NO: 534219 - RNA, 19 nt, Artificial Sequence
  Description of Artificial Sequence: Synthetic oligonucleotide
agcggcgaccacgauagcc

SEQ ID NO: 534220 - RNA, 19 nt, Artificial Sequence
  Description of Artificial Sequence: Synthetic oligonucleotide
aggacuaugaggggagcgg

SEQ ID NO: 534221 - RNA, 19 nt, Artificial Sequence
  Description of Artificial Sequence: Synthetic oligonucleotide
uccguacucgcucacucac

SEQ ID NO: 534222 - RNA, 19 nt, Artificial Sequence
  Description of Artificial Sequence: Synthetic oligonucleotide
uucgccaugucuucccgca

SEQ ID NO: 534223 - RNA, 19 nt, Artificial Sequence
  Description of Artificial Sequence: Synthetic oligonucleotide
gauccgacccauucagcug

SEQ ID NO: 534224 - RNA, 19 nt, Artificial Sequence
  Description of Artificial Sequence: Synthetic oligonucleotide
gaucgaaggauaaagcgcu

SEQ ID NO: 534225 - RNA, 19 nt, Artificial Sequence
  Description of Artificial Sequence: Synthetic oligonucleotide
cuugcucaccuucuauggc

SEQ ID NO: 534226 - RNA, 19 nt, Artificial Sequence
  Description of Artificial Sequence: Synthetic oligonucleotide
ggaucgaaggauaaagcgc

SEQ ID NO: 534227 - RNA, 19 nt, Artificial Sequence
  Description of Artificial Sequence: Synthetic oligonucleotide
ugaguggccauaucccuaa

SEQ ID NO: 534228 - RNA, 19 nt, Artificial Sequence
  Description of Artificial Sequence: Synthetic oligonucleotide
gucggcggaagacaucccg

SEQ ID NO: 534229 - RNA, 19 nt, Artificial Sequence
  Description of Artificial Sequence: Synthetic oligonucleotide
aguaaggcaaggacuucgg

SEQ ID NO: 534230 - RNA, 19 nt, Artificial Sequence
  Description of Artificial Sequence: Synthetic oligonucleotide
gcauaaugaccuuugucug

SEQ ID NO: 534231 - RNA, 19 nt, Artificial Sequence
  Description of Artificial Sequence: Synthetic oligonucleotide
aacaggucgccucccuuga

SEQ ID NO: 534232 - RNA, 19 nt, Artificial Sequence
  Description of Artificial Sequence: Synthetic oligonucleotide
gaggacuaugaggggagcg

SEQ ID NO: 534233 - RNA, 19 nt, Artificial Sequence
  Description of Artificial Sequence: Synthetic oligonucleotide
cuccccgagggaucgaagg

SEQ ID NO: 534234 - RNA, 19 nt, Artificial Sequence
  Description of Artificial Sequence: Synthetic oligonucleotide
ugccacgcagugcugccgg

SEQ ID NO: 534235 - RNA, 19 nt, Artificial Sequence
  Description of Artificial Sequence: Synthetic oligonucleotide
aagguccguacucgcucac

SEQ ID NO: 534236 - RNA, 19 nt, Artificial Sequence
  Description of Artificial Sequence: Synthetic oligonucleotide
agccgucucagcuggcugg

SEQ ID NO: 534237 - RNA, 19 nt, Artificial Sequence
  Description of Artificial Sequence: Synthetic oligonucleotide
uugaguccagggcuuggug

SEQ ID NO: 534238 - RNA, 19 nt, Artificial Sequence
  Description of Artificial Sequence: Synthetic oligonucleotide
cuuagacacguuccccacc

SEQ ID NO: 534239 - RNA, 19 nt, Artificial Sequence
  Description of Artificial Sequence: Synthetic oligonucleotide
acgauagccagaccuggcu

SEQ ID NO: 534240 - RNA, 19 nt, Artificial Sequence
  Description of Artificial Sequence: Synthetic oligonucleotide
ugggucaagguccguacuc

SEQ ID NO: 534241 - RNA, 19 nt, Artificial Sequence
  Description of Artificial Sequence: Synthetic oligonucleotide
ugggcccuaggcuaagucu

SEQ ID NO: 534242 - RNA, 19 nt, Artificial Sequence
  Description of Artificial Sequence: Synthetic oligonucleotide
guagucucgauagguguag

SEQ ID NO: 534243 - RNA, 19 nt, Artificial Sequence
  Description of Artificial Sequence: Synthetic oligonucleotide
agcacggcucgauccgacc

SEQ ID NO: 534244 - RNA, 19 nt, Artificial Sequence
  Description of Artificial Sequence: Synthetic oligonucleotide
acuucgccaugucuucccg

SEQ ID NO: 534245 - RNA, 19 nt, Artificial Sequence
  Description of Artificial Sequence: Synthetic oligonucleotide
uaguaagcuugaguccagg

SEQ ID NO: 534246 - RNA, 19 nt, Artificial Sequence
  Description of Artificial Sequence: Synthetic oligonucleotide
uugaguacugugagccccu

SEQ ID NO: 534247 - RNA, 19 nt, Artificial Sequence
  Description of Artificial Sequence: Synthetic oligonucleotide
cauggccuuagacacguuc

SEQ ID NO: 534248 - RNA, 19 nt, Artificial Sequence
  Description of Artificial Sequence: Synthetic oligonucleotide
ucguaguuucccagcuuug

SEQ ID NO: 534249 - RNA, 19 nt, Artificial Sequence
  Description of Artificial Sequence: Synthetic oligonucleotide
guaagccugggucaagguc

SEQ ID NO: 534250 - RNA, 19 nt, Artificial Sequence
  Description of Artificial Sequence: Synthetic oligonucleotide
auugauuccuucacaaguu

SEQ ID NO: 534251 - RNA, 19 nt, Artificial Sequence
  Description of Artificial Sequence: Synthetic oligonucleotide
cuucggcacaccagguggg

SEQ ID NO: 534252 - RNA, 19 nt, Artificial Sequence
  Description of Artificial Sequence: Synthetic oligonucleotide
gaagucggggacagggaag

SEQ ID NO: 534253 - RNA, 19 nt, Artificial Sequence
  Description of Artificial Sequence: Synthetic oligonucleotide
uggcacuucggcacaccag

SEQ ID NO: 534254 - RNA, 19 nt, Artificial Sequence
  Description of Artificial Sequence: Synthetic oligonucleotide
ugagggucacacccuccag

SEQ ID NO: 534255 - RNA, 19 nt, Artificial Sequence
  Description of Artificial Sequence: Synthetic oligonucleotide
guaaggcucccgucggcgg

SEQ ID NO: 534256 - RNA, 19 nt, Artificial Sequence
  Description of Artificial Sequence: Synthetic oligonucleotide
ucucguggucccaggccgg

SEQ ID NO: 534257 - RNA, 19 nt, Artificial Sequence
  Description of Artificial Sequence: Synthetic oligonucleotide
agccgugacagugagggca

SEQ ID NO: 534258 - RNA, 19 nt, Artificial Sequence
  Description of Artificial Sequence: Synthetic oligonucleotide
guaaggcaaggacuucggc

SEQ ID NO: 534259 - RNA, 19 nt, Artificial Sequence
  Description of Artificial Sequence: Synthetic oligonucleotide
agcgccguccccgagucac

SEQ ID NO: 534260 - RNA, 19 nt, Artificial Sequence
  Description of Artificial Sequence: Synthetic oligonucleotide
uuguaaggcucccgucggc

SEQ ID NO: 534261 - RNA, 19 nt, Artificial Sequence
  Description of Artificial Sequence: Synthetic oligonucleotide
gaauccccgacauucuucu

SEQ ID NO: 534262 - RNA, 19 nt, Artificial Sequence
  Description of Artificial Sequence: Synthetic oligonucleotide
cuucuauggcacuucggca

SEQ ID NO: 534263 - RNA, 19 nt, Artificial Sequence
  Description of Artificial Sequence: Synthetic oligonucleotide
aguaagccugggucaaggu

SEQ ID NO: 534264 - RNA, 19 nt, Artificial Sequence
  Description of Artificial Sequence: Synthetic oligonucleotide
uaugaggggagcggcgacc

SEQ ID NO: 534265 - RNA, 19 nt, Artificial Sequence
  Description of Artificial Sequence: Synthetic oligonucleotide
cauguaccggaugacucag

SEQ ID NO: 534266 - RNA, 19 nt, Artificial Sequence
  Description of Artificial Sequence: Synthetic oligonucleotide
aggagcccacuguagucuc

SEQ ID NO: 534267 - RNA, 19 nt, Artificial Sequence
  Description of Artificial Sequence: Synthetic oligonucleotide
ggucgaauccccgacauuc

SEQ ID NO: 534268 - RNA, 19 nt, Artificial Sequence
  Description of Artificial Sequence: Synthetic oligonucleotide
ggaugacucagguccauac

SEQ ID NO: 534269 - RNA, 19 nt, Artificial Sequence
  Description of Artificial Sequence: Synthetic oligonucleotide
cacgauagccagaccuggc

SEQ ID NO: 534270 - RNA, 19 nt, Artificial Sequence
  Description of Artificial Sequence: Synthetic oligonucleotide
ccacgaggcgcccacaucg

SEQ ID NO: 534271 - RNA, 19 nt, Artificial Sequence
  Description of Artificial Sequence: Synthetic oligonucleotide
guagaggagcccacuguag

SEQ ID NO: 534272 - RNA, 19 nt, Artificial Sequence
  Description of Artificial Sequence: Synthetic oligonucleotide
ucgauccgacccauucagc

SEQ ID NO: 534273 - RNA, 19 nt, Artificial Sequence
  Description of Artificial Sequence: Synthetic oligonucleotide
uguguuggguuugccacaa

SEQ ID NO: 534274 - RNA, 19 nt, Artificial Sequence
  Description of Artificial Sequence: Synthetic oligonucleotide
caugcuacucuguucccga

SEQ ID NO: 534275 - RNA, 19 nt, Artificial Sequence
  Description of Artificial Sequence: Synthetic oligonucleotide
gaccuuugucuguccuagg

SEQ ID NO: 534276 - RNA, 19 nt, Artificial Sequence
  Description of Artificial Sequence: Synthetic oligonucleotide
uagucucgauagguguagg

SEQ ID NO: 534277 - RNA, 19 nt, Artificial Sequence
  Description of Artificial Sequence: Synthetic oligonucleotide
uaguuguaaggcucccguc

SEQ ID NO: 534278 - RNA, 19 nt, Artificial Sequence
  Description of Artificial Sequence: Synthetic oligonucleotide
uccccaaaugggcaugcua

SEQ ID NO: 534279 - RNA, 19 nt, Artificial Sequence
  Description of Artificial Sequence: Synthetic oligonucleotide
aguuguccgcauguaccgg

SEQ ID NO: 534280 - RNA, 19 nt, Artificial Sequence
  Description of Artificial Sequence: Synthetic oligonucleotide
agaaguaagccugggucaa

SEQ ID NO: 534281 - RNA, 19 nt, Artificial Sequence
  Description of Artificial Sequence: Synthetic oligonucleotide
aggucgccucccuugaagu

SEQ ID NO: 534282 - RNA, 19 nt, Artificial Sequence
  Description of Artificial Sequence: Synthetic oligonucleotide
ucacaaguugaguggccau

SEQ ID NO: 534283 - RNA, 19 nt, Artificial Sequence
  Description of Artificial Sequence: Synthetic oligonucleotide
ggucacacccuccaggaga

SEQ ID NO: 534284 - RNA, 19 nt, Artificial Sequence
  Description of Artificial Sequence: Synthetic oligonucleotide
acaaguugaguggccauau

SEQ ID NO: 534285 - RNA, 19 nt, Artificial Sequence
  Description of Artificial Sequence: Synthetic oligonucleotide
uggacgaaccugagccgug

SEQ ID NO: 534286 - RNA, 19 nt, Artificial Sequence
  Description of Artificial Sequence: Synthetic oligonucleotide
guccgcauguaccggauga

SEQ ID NO: 534287 - RNA, 19 nt, Artificial Sequence
  Description of Artificial Sequence: Synthetic oligonucleotide
guuguccgcauguaccgga

SEQ ID NO: 534288 - RNA, 19 nt, Artificial Sequence
  Description of Artificial Sequence: Synthetic oligonucleotide
uguccgcauguaccggaug

SEQ ID NO: 534289 - RNA, 19 nt, Artificial Sequence
  Description of Artificial Sequence: Synthetic oligonucleotide
gaaguaagccugggucaag

SEQ ID NO: 534290 - RNA, 19 nt, Artificial Sequence
  Description of Artificial Sequence: Synthetic oligonucleotide
uccuagggacccugcaggu

SEQ ID NO: 534291 - RNA, 19 nt, Artificial Sequence
  Description of Artificial Sequence: Synthetic oligonucleotide
ucuccccgagggaucgaag

SEQ ID NO: 534292 - RNA, 19 nt, Artificial Sequence
  Description of Artificial Sequence: Synthetic oligonucleotide
acgaaccugagccgugaca

SEQ ID NO: 534293 - RNA, 19 nt, Artificial Sequence
  Description of Artificial Sequence: Synthetic oligonucleotide
cauaaugaccuuugucugu

SEQ ID NO: 534294 - RNA, 19 nt, Artificial Sequence
  Description of Artificial Sequence: Synthetic oligonucleotide
ucgaauccccgacauucuu

SEQ ID NO: 534295 - RNA, 19 nt, Artificial Sequence
  Description of Artificial Sequence: Synthetic oligonucleotide
ggaauccggguccuugaag

SEQ ID NO: 534296 - RNA, 19 nt, Artificial Sequence
  Description of Artificial Sequence: Synthetic oligonucleotide
guaguaagcuugaguccag

SEQ ID NO: 534297 - RNA, 19 nt, Artificial Sequence
  Description of Artificial Sequence: Synthetic oligonucleotide
cuggaguuagcaguccauc

SEQ ID NO: 534298 - RNA, 19 nt, Artificial Sequence
  Description of Artificial Sequence: Synthetic oligonucleotide
cucuagccugggcagugcc

SEQ ID NO: 534299 - RNA, 19 nt, Artificial Sequence
  Description of Artificial Sequence: Synthetic oligonucleotide
cacuucggcacaccaggug

SEQ ID NO: 534300 - RNA, 19 nt, Artificial Sequence
  Description of Artificial Sequence: Synthetic oligonucleotide
gggucaagguccguacucg

SEQ ID NO: 534301 - RNA, 19 nt, Artificial Sequence
  Description of Artificial Sequence: Synthetic oligonucleotide
ugaggacuaugaggggagc

SEQ ID NO: 534302 - RNA, 19 nt, Artificial Sequence
  Description of Artificial Sequence: Synthetic oligonucleotide
guucccgaugucacacagg

SEQ ID NO: 534303 - RNA, 19 nt, Artificial Sequence
  Description of Artificial Sequence: Synthetic oligonucleotide
cuggggucgaauccccgac

SEQ ID NO: 534304 - RNA, 19 nt, Artificial Sequence
  Description of Artificial Sequence: Synthetic oligonucleotide
gugcuccauggcauaauag

SEQ ID NO: 534305 - RNA, 19 nt, Artificial Sequence
  Description of Artificial Sequence: Synthetic oligonucleotide
caucguggacgaaccugag

SEQ ID NO: 534306 - RNA, 19 nt, Artificial Sequence
  Description of Artificial Sequence: Synthetic oligonucleotide
ucccgaugucacacagggc

SEQ ID NO: 534307 - RNA, 19 nt, Artificial Sequence
  Description of Artificial Sequence: Synthetic oligonucleotide
guagguccccaaaugggca

SEQ ID NO: 534308 - RNA, 19 nt, Artificial Sequence
  Description of Artificial Sequence: Synthetic oligonucleotide
uuguccgcauguaccggau

SEQ ID NO: 534309 - RNA, 19 nt, Artificial Sequence
  Description of Artificial Sequence: Synthetic oligonucleotide
cacgacagcucuccacaug

SEQ ID NO: 534310 - RNA, 19 nt, Artificial Sequence
  Description of Artificial Sequence: Synthetic oligonucleotide
gaacccggauccagugucc

SEQ ID NO: 534311 - RNA, 19 nt, Artificial Sequence
  Description of Artificial Sequence: Synthetic oligonucleotide
cuaugaggggagcggcgac

SEQ ID NO: 534312 - RNA, 19 nt, Artificial Sequence
  Description of Artificial Sequence: Synthetic oligonucleotide
accuucuauggcacuucgg

SEQ ID NO: 534313 - RNA, 19 nt, Artificial Sequence
  Description of Artificial Sequence: Synthetic oligonucleotide
aacccggauccaguguccu

SEQ ID NO: 534314 - RNA, 19 nt, Artificial Sequence
  Description of Artificial Sequence: Synthetic oligonucleotide
cuucccgcaucugcaagug

SEQ ID NO: 534315 - RNA, 19 nt, Artificial Sequence
  Description of Artificial Sequence: Synthetic oligonucleotide
gcaugcuacucuguucccg

SEQ ID NO: 534316 - RNA, 19 nt, Artificial Sequence
  Description of Artificial Sequence: Synthetic oligonucleotide
cacacucggcuggaguuag

SEQ ID NO: 534317 - RNA, 19 nt, Artificial Sequence
  Description of Artificial Sequence: Synthetic oligonucleotide
guguguuggguuugccaca

SEQ ID NO: 534318 - RNA, 19 nt, Artificial Sequence
  Description of Artificial Sequence: Synthetic oligonucleotide
gcauguaccggaugacuca

SEQ ID NO: 534319 - RNA, 19 nt, Artificial Sequence
  Description of Artificial Sequence: Synthetic oligonucleotide
cgaaccugagccgugacag

SEQ ID NO: 534320 - RNA, 19 nt, Artificial Sequence
  Description of Artificial Sequence: Synthetic oligonucleotide
cauaauagagcugucucuu

SEQ ID NO: 534321 - RNA, 19 nt, Artificial Sequence
  Description of Artificial Sequence: Synthetic oligonucleotide
ggucaagguccguacucgc

SEQ ID NO: 534322 - RNA, 19 nt, Artificial Sequence
  Description of Artificial Sequence: Synthetic oligonucleotide
caaguugaguggccauauc

SEQ ID NO: 534323 - RNA, 19 nt, Artificial Sequence
  Description of Artificial Sequence: Synthetic oligonucleotide
caagguccguacucgcuca

SEQ ID NO: 534324 - RNA, 19 nt, Artificial Sequence
  Description of Artificial Sequence: Synthetic oligonucleotide
ggcgcccacaucguggacg

SEQ ID NO: 534325 - RNA, 19 nt, Artificial Sequence
  Description of Artificial Sequence: Synthetic oligonucleotide
gacgaaccugagccgugac

SEQ ID NO: 534326 - RNA, 19 nt, Artificial Sequence
  Description of Artificial Sequence: Synthetic oligonucleotide
aggaauccggguccuugaa

SEQ ID NO: 534327 - RNA, 19 nt, Artificial Sequence
  Description of Artificial Sequence: Synthetic oligonucleotide
uccgcauguaccggaugac

SEQ ID NO: 534328 - RNA, 19 nt, Artificial Sequence
  Description of Artificial Sequence: Synthetic oligonucleotide
gucggggacagggaagcug

SEQ ID NO: 534329 - RNA, 19 nt, Artificial Sequence
  Description of Artificial Sequence: Synthetic oligonucleotide
gaaggauaaagcgcuggau

SEQ ID NO: 534330 - RNA, 19 nt, Artificial Sequence
  Description of Artificial Sequence: Synthetic oligonucleotide
gcauaauagagcugucucu

SEQ ID NO: 534331 - RNA, 19 nt, Artificial Sequence
  Description of Artificial Sequence: Synthetic oligonucleotide
agucguaguuucccagcuu

SEQ ID NO: 534332 - RNA, 19 nt, Artificial Sequence
  Description of Artificial Sequence: Synthetic oligonucleotide
gucguaguuucccagcuuu

SEQ ID NO: 534333 - RNA, 19 nt, Artificial Sequence
  Description of Artificial Sequence: Synthetic oligonucleotide
gucucgauagguguaggcu

SEQ ID NO: 534334 - RNA, 19 nt, Artificial Sequence
  Description of Artificial Sequence: Synthetic oligonucleotide
cacgcagugcugccggcac

SEQ ID NO: 534335 - RNA, 19 nt, Artificial Sequence
  Description of Artificial Sequence: Synthetic oligonucleotide
aggcaaggacuucggcugu

SEQ ID NO: 534336 - RNA, 19 nt, Artificial Sequence
  Description of Artificial Sequence: Synthetic oligonucleotide
uagcaccuggcuugcucac

SEQ ID NO: 534337 - RNA, 19 nt, Artificial Sequence
  Description of Artificial Sequence: Synthetic oligonucleotide
augaggggagcggcgacca

SEQ ID NO: 534338 - RNA, 19 nt, Artificial Sequence
  Description of Artificial Sequence: Synthetic oligonucleotide
caggaauccggguccuuga

SEQ ID NO: 534339 - RNA, 19 nt, Artificial Sequence
  Description of Artificial Sequence: Synthetic oligonucleotide
cuucggcuguggaggcucc

SEQ ID NO: 534340 - RNA, 19 nt, Artificial Sequence
  Description of Artificial Sequence: Synthetic oligonucleotide
ccggucacaguuccucucg

SEQ ID NO: 534341 - RNA, 19 nt, Artificial Sequence
  Description of Artificial Sequence: Synthetic oligonucleotide
gguccguacucgcucacuc

SEQ ID NO: 534342 - RNA, 19 nt, Artificial Sequence
  Description of Artificial Sequence: Synthetic oligonucleotide
gggcccuaggcuaagucug

SEQ ID NO: 534343 - RNA, 19 nt, Artificial Sequence
  Description of Artificial Sequence: Synthetic oligonucleotide
aucgaaggauaaagcgcug

SEQ ID NO: 534344 - RNA, 19 nt, Artificial Sequence
  Description of Artificial Sequence: Synthetic oligonucleotide
augaagucggggacaggga

SEQ ID NO: 534345 - RNA, 19 nt, Artificial Sequence
  Description of Artificial Sequence: Synthetic oligonucleotide
agcguucaugaggacuaug

SEQ ID NO: 534346 - RNA, 19 nt, Artificial Sequence
  Description of Artificial Sequence: Synthetic oligonucleotide
gcgaccacgauagccagac

SEQ ID NO: 534347 - RNA, 19 nt, Artificial Sequence
  Description of Artificial Sequence: Synthetic oligonucleotide
auguaccggaugacucagg

SEQ ID NO: 534348 - RNA, 19 nt, Artificial Sequence
  Description of Artificial Sequence: Synthetic oligonucleotide
guccguacucgcucacuca

SEQ ID NO: 534349 - RNA, 19 nt, Artificial Sequence
  Description of Artificial Sequence: Synthetic oligonucleotide
ccuugaguacugugagccc

SEQ ID NO: 534350 - RNA, 19 nt, Artificial Sequence
  Description of Artificial Sequence: Synthetic oligonucleotide
ucccaggccgggucuuggc

SEQ ID NO: 534351 - RNA, 19 nt, Artificial Sequence
  Description of Artificial Sequence: Synthetic oligonucleotide
gcacggcucgauccgaccc

SEQ ID NO: 534352 - RNA, 19 nt, Artificial Sequence
  Description of Artificial Sequence: Synthetic oligonucleotide
cauugggcugugugaagaa

SEQ ID NO: 534353 - RNA, 19 nt, Artificial Sequence
  Description of Artificial Sequence: Synthetic oligonucleotide
gaggagcccacuguagucu

SEQ ID NO: 534354 - RNA, 19 nt, Artificial Sequence
  Description of Artificial Sequence: Synthetic oligonucleotide
gugggcccuaggcuaaguc

SEQ ID NO: 534355 - RNA, 19 nt, Artificial Sequence
  Description of Artificial Sequence: Synthetic oligonucleotide
gagccgugacagugagggc

SEQ ID NO: 534356 - RNA, 19 nt, Artificial Sequence
  Description of Artificial Sequence: Synthetic oligonucleotide
acguuccccaccugagcau

SEQ ID NO: 534357 - RNA, 19 nt, Artificial Sequence
  Description of Artificial Sequence: Synthetic oligonucleotide
uucuccccgagggaucgaa

SEQ ID NO: 534358 - RNA, 19 nt, Artificial Sequence
  Description of Artificial Sequence: Synthetic oligonucleotide
ccgucggcggaagacaucc

SEQ ID NO: 534359 - RNA, 19 nt, Artificial Sequence
  Description of Artificial Sequence: Synthetic oligonucleotide
ucggacccggagucguagu

SEQ ID NO: 534360 - RNA, 19 nt, Artificial Sequence
  Description of Artificial Sequence: Synthetic oligonucleotide
gccagcacgacagcucucc

SEQ ID NO: 534361 - RNA, 19 nt, Artificial Sequence
  Description of Artificial Sequence: Synthetic oligonucleotide
gggaaugaagucggggaca

SEQ ID NO: 534362 - RNA, 19 nt, Artificial Sequence
  Description of Artificial Sequence: Synthetic oligonucleotide
acccggauccaguguccug

SEQ ID NO: 534363 - RNA, 19 nt, Artificial Sequence
  Description of Artificial Sequence: Synthetic oligonucleotide
caguggccguucuggggag

SEQ ID NO: 534364 - RNA, 19 nt, Artificial Sequence
  Description of Artificial Sequence: Synthetic oligonucleotide
aagcguucaugaggacuau

SEQ ID NO: 534365 - RNA, 19 nt, Artificial Sequence
  Description of Artificial Sequence: Synthetic oligonucleotide
caucccgcagcgcgcuccc

SEQ ID NO: 534366 - RNA, 19 nt, Artificial Sequence
  Description of Artificial Sequence: Synthetic oligonucleotide
cagaaccccacacucggcu

SEQ ID NO: 534367 - RNA, 19 nt, Artificial Sequence
  Description of Artificial Sequence: Synthetic oligonucleotide
cuauggcacuucggcacac

SEQ ID NO: 534368 - RNA, 19 nt, Artificial Sequence
  Description of Artificial Sequence: Synthetic oligonucleotide
cgcauguaccggaugacuc

SEQ ID NO: 534369 - RNA, 19 nt, Artificial Sequence
  Description of Artificial Sequence: Synthetic oligonucleotide
cucguggucccaggccggg

SEQ ID NO: 534370 - RNA, 19 nt, Artificial Sequence
  Description of Artificial Sequence: Synthetic oligonucleotide
ggcuaagucuguguaguaa

SEQ ID NO: 534371 - RNA, 19 nt, Artificial Sequence
  Description of Artificial Sequence: Synthetic oligonucleotide
cuacucuguucccgauguc

SEQ ID NO: 534372 - RNA, 19 nt, Artificial Sequence
  Description of Artificial Sequence: Synthetic oligonucleotide
cagcacggcucgauccgac

SEQ ID NO: 534373 - RNA, 19 nt, Artificial Sequence
  Description of Artificial Sequence: Synthetic oligonucleotide
ggcaugcuacucuguuccc

SEQ ID NO: 534374 - RNA, 19 nt, Artificial Sequence
  Description of Artificial Sequence: Synthetic oligonucleotide
ggccuuagacacguucccc

SEQ ID NO: 534375 - RNA, 19 nt, Artificial Sequence
  Description of Artificial Sequence: Synthetic oligonucleotide
aggacacaguuguccgcau

SEQ ID NO: 534376 - RNA, 19 nt, Artificial Sequence
  Description of Artificial Sequence: Synthetic oligonucleotide
guacucgcucacucaccuc

SEQ ID NO: 534377 - RNA, 19 nt, Artificial Sequence
  Description of Artificial Sequence: Synthetic oligonucleotide
ugaguacugugagccccuc

SEQ ID NO: 534378 - RNA, 19 nt, Artificial Sequence
  Description of Artificial Sequence: Synthetic oligonucleotide
cguggacgaaccugagccg

SEQ ID NO: 534379 - RNA, 19 nt, Artificial Sequence
  Description of Artificial Sequence: Synthetic oligonucleotide
cucccuugaagucaucauu

SEQ ID NO: 534380 - RNA, 19 nt, Artificial Sequence
  Description of Artificial Sequence: Synthetic oligonucleotide
cacaaguugaguggccaua

SEQ ID NO: 534381 - RNA, 19 nt, Artificial Sequence
  Description of Artificial Sequence: Synthetic oligonucleotide
aggcgcccacaucguggac

SEQ ID NO: 534382 - RNA, 19 nt, Artificial Sequence
  Description of Artificial Sequence: Synthetic oligonucleotide
gagucauaggcugcccagu

SEQ ID NO: 534383 - RNA, 19 nt, Artificial Sequence
  Description of Artificial Sequence: Synthetic oligonucleotide
acacaccguggggauucuc

SEQ ID NO: 534384 - RNA, 19 nt, Artificial Sequence
  Description of Artificial Sequence: Synthetic oligonucleotide
cacggcucgauccgaccca

SEQ ID NO: 534385 - RNA, 19 nt, Artificial Sequence
  Description of Artificial Sequence: Synthetic oligonucleotide
cguggggauucucaccacc

SEQ ID NO: 534386 - RNA, 19 nt, Artificial Sequence
  Description of Artificial Sequence: Synthetic oligonucleotide
cacgcggagucgcgccgcg

SEQ ID NO: 534387 - RNA, 19 nt, Artificial Sequence
  Description of Artificial Sequence: Synthetic oligonucleotide
acgcagugcugccggcacu

SEQ ID NO: 534388 - RNA, 19 nt, Artificial Sequence
  Description of Artificial Sequence: Synthetic oligonucleotide
ccuaggcuaagucugugua

SEQ ID NO: 534389 - RNA, 19 nt, Artificial Sequence
  Description of Artificial Sequence: Synthetic oligonucleotide
ccuaagaagcuggcucagc

SEQ ID NO: 534390 - RNA, 19 nt, Artificial Sequence
  Description of Artificial Sequence: Synthetic oligonucleotide
accggaugacucaggucca

SEQ ID NO: 534391 - RNA, 19 nt, Artificial Sequence
  Description of Artificial Sequence: Synthetic oligonucleotide
ggagcccacuguagucucg

SEQ ID NO: 534392 - RNA, 19 nt, Artificial Sequence
  Description of Artificial Sequence: Synthetic oligonucleotide
ucggcccggcggagcgugg

SEQ ID NO: 534393 - RNA, 19 nt, Artificial Sequence
  Description of Artificial Sequence: Synthetic oligonucleotide
gcggcgaccacgauagcca

SEQ ID NO: 534394 - RNA, 19 nt, Artificial Sequence
  Description of Artificial Sequence: Synthetic oligonucleotide
guggacgaaccugagccgu

SEQ ID NO: 534395 - RNA, 19 nt, Artificial Sequence
  Description of Artificial Sequence: Synthetic oligonucleotide
uccccacgcggagucgcgc

SEQ ID NO: 534396 - RNA, 19 nt, Artificial Sequence
  Description of Artificial Sequence: Synthetic oligonucleotide
agguccguacucgcucacu

SEQ ID NO: 534397 - RNA, 19 nt, Artificial Sequence
  Description of Artificial Sequence: Synthetic oligonucleotide
ccguacucgcucacucacc

SEQ ID NO: 534398 - RNA, 19 nt, Artificial Sequence
  Description of Artificial Sequence: Synthetic oligonucleotide
ccgccagcagucaccagug

SEQ ID NO: 534399 - RNA, 19 nt, Artificial Sequence
  Description of Artificial Sequence: Synthetic oligonucleotide
cggagucguaguuucccag

SEQ ID NO: 534400 - RNA, 19 nt, Artificial Sequence
  Description of Artificial Sequence: Synthetic oligonucleotide
ccaacucaguuugguacug

SEQ ID NO: 534401 - RNA, 19 nt, Artificial Sequence
  Description of Artificial Sequence: Synthetic oligonucleotide
ugcgcgccgcgcacugggu

SEQ ID NO: 534402 - RNA, 19 nt, Artificial Sequence
  Description of Artificial Sequence: Synthetic oligonucleotide
gucaagguccguacucgcu

SEQ ID NO: 534403 - RNA, 19 nt, Artificial Sequence
  Description of Artificial Sequence: Synthetic oligonucleotide
uucggcuguggaggcuccu

SEQ ID NO: 534404 - RNA, 19 nt, Artificial Sequence
  Description of Artificial Sequence: Synthetic oligonucleotide
acgcggagucgcgccgcgc

SEQ ID NO: 534405 - RNA, 19 nt, Artificial Sequence
  Description of Artificial Sequence: Synthetic oligonucleotide
cgauagccagaccuggcuc

SEQ ID NO: 534406 - RNA, 19 nt, Artificial Sequence
  Description of Artificial Sequence: Synthetic oligonucleotide
cgaaggauaaagcgcugga

SEQ ID NO: 534407 - RNA, 19 nt, Artificial Sequence
  Description of Artificial Sequence: Synthetic oligonucleotide
ccaggccgggucuuggcuc

SEQ ID NO: 534408 - RNA, 19 nt, Artificial Sequence
  Description of Artificial Sequence: Synthetic oligonucleotide
gucgaauccccgacauucu

SEQ ID NO: 534409 - RNA, 19 nt, Artificial Sequence
  Description of Artificial Sequence: Synthetic oligonucleotide
gccggucacaguuccucuc

SEQ ID NO: 534410 - RNA, 19 nt, Artificial Sequence
  Description of Artificial Sequence: Synthetic oligonucleotide
cccuaagaagcuggcucag

SEQ ID NO: 534411 - RNA, 19 nt, Artificial Sequence
  Description of Artificial Sequence: Synthetic oligonucleotide
ggacgaaccugagccguga

SEQ ID NO: 534412 - RNA, 19 nt, Artificial Sequence
  Description of Artificial Sequence: Synthetic oligonucleotide
cagccggcugcuguuccuc

SEQ ID NO: 534413 - RNA, 19 nt, Artificial Sequence
  Description of Artificial Sequence: Synthetic oligonucleotide
ucguggucccaggccgggu

SEQ ID NO: 534414 - RNA, 19 nt, Artificial Sequence
  Description of Artificial Sequence: Synthetic oligonucleotide
gcagaaccccacacucggc

SEQ ID NO: 534415 - RNA, 19 nt, Artificial Sequence
  Description of Artificial Sequence: Synthetic oligonucleotide
caggacacucaggacauuu

SEQ ID NO: 534416 - RNA, 19 nt, Artificial Sequence
  Description of Artificial Sequence: Synthetic oligonucleotide
gagcggcgaccacgauagc

SEQ ID NO: 534417 - RNA, 19 nt, Artificial Sequence
  Description of Artificial Sequence: Synthetic oligonucleotide
cgcucacucaccuccagaa

SEQ ID NO: 534418 - RNA, 19 nt, Artificial Sequence
  Description of Artificial Sequence: Synthetic oligonucleotide
ccugagcauaagccuccug

SEQ ID NO: 534419 - RNA, 19 nt, Artificial Sequence
  Description of Artificial Sequence: Synthetic oligonucleotide
uggaagcucuggggucgaa

SEQ ID NO: 534420 - RNA, 19 nt, Artificial Sequence
  Description of Artificial Sequence: Synthetic oligonucleotide
cgauagguguaggcugggg

SEQ ID NO: 534421 - RNA, 19 nt, Artificial Sequence
  Description of Artificial Sequence: Synthetic oligonucleotide
ggccguucuggggagaagu

SEQ ID NO: 534422 - RNA, 19 nt, Artificial Sequence
  Description of Artificial Sequence: Synthetic oligonucleotide
cgauccgacccauucagcu

SEQ ID NO: 534423 - RNA, 19 nt, Artificial Sequence
  Description of Artificial Sequence: Synthetic oligonucleotide
ccccacgcggagucgcgcc

SEQ ID NO: 534424 - RNA, 19 nt, Artificial Sequence
  Description of Artificial Sequence: Synthetic oligonucleotide
cacucaccuccagaagcaa

SEQ ID NO: 534425 - RNA, 19 nt, Artificial Sequence
  Description of Artificial Sequence: Synthetic oligonucleotide
ggggucgaauccccgacau

SEQ ID NO: 534426 - RNA, 19 nt, Artificial Sequence
  Description of Artificial Sequence: Synthetic oligonucleotide
cacagcgccguccccgagu

SEQ ID NO: 534427 - RNA, 19 nt, Artificial Sequence
  Description of Artificial Sequence: Synthetic oligonucleotide
ccggagucguaguuuccca

SEQ ID NO: 534428 - RNA, 19 nt, Artificial Sequence
  Description of Artificial Sequence: Synthetic oligonucleotide
cgcggagucgcgccgcgcc

SEQ ID NO: 534429 - RNA, 19 nt, Artificial Sequence
  Description of Artificial Sequence: Synthetic oligonucleotide
ccuagggacccugcagguc

SEQ ID NO: 534430 - RNA, 19 nt, Artificial Sequence
  Description of Artificial Sequence: Synthetic oligonucleotide
gccacgaggcgcccacauc

SEQ ID NO: 534431 - RNA, 19 nt, Artificial Sequence
  Description of Artificial Sequence: Synthetic oligonucleotide
ggcccuuguagguccccaa

SEQ ID NO: 534432 - RNA, 19 nt, Artificial Sequence
  Description of Artificial Sequence: Synthetic oligonucleotide
cacgaggcgcccacaucgu

SEQ ID NO: 534433 - RNA, 19 nt, Artificial Sequence
  Description of Artificial Sequence: Synthetic oligonucleotide
cccgccagcagucaccagu

SEQ ID NO: 534434 - RNA, 19 nt, Artificial Sequence
  Description of Artificial Sequence: Synthetic oligonucleotide
ggagaggaugggguuuugu

SEQ ID NO: 534435 - RNA, 19 nt, Artificial Sequence
  Description of Artificial Sequence: Synthetic oligonucleotide
ccccgacauucuucuguac

SEQ ID NO: 534436 - RNA, 19 nt, Artificial Sequence
  Description of Artificial Sequence: Synthetic oligonucleotide
gccacgcagugcugccggc

SEQ ID NO: 534437 - RNA, 19 nt, Artificial Sequence
  Description of Artificial Sequence: Synthetic oligonucleotide
gccguccccgagucacagc

SEQ ID NO: 534438 - RNA, 19 nt, Artificial Sequence
  Description of Artificial Sequence: Synthetic oligonucleotide
cguacucgcucacucaccu

SEQ ID NO: 534439 - RNA, 19 nt, Artificial Sequence
  Description of Artificial Sequence: Synthetic oligonucleotide
gguuugccacaaagaaggu

SEQ ID NO: 534440 - RNA, 19 nt, Artificial Sequence
  Description of Artificial Sequence: Synthetic oligonucleotide
ggguuuugucuccucuguu

SEQ ID NO: 534441 - RNA, 19 nt, Artificial Sequence
  Description of Artificial Sequence: Synthetic oligonucleotide
cuugggcccgcugaagcuu

SEQ ID NO: 534442 - RNA, 19 nt, Artificial Sequence
  Description of Artificial Sequence: Synthetic oligonucleotide
caccagugucaggguccag

SEQ ID NO: 534443 - RNA, 19 nt, Artificial Sequence
  Description of Artificial Sequence: Synthetic oligonucleotide
ccguucuggggagaaguaa

SEQ ID NO: 534444 - RNA, 19 nt, Artificial Sequence
  Description of Artificial Sequence: Synthetic oligonucleotide
cccacacucggcuggaguu

SEQ ID NO: 534445 - RNA, 19 nt, Artificial Sequence
  Description of Artificial Sequence: Synthetic oligonucleotide
gcucacagucccagcccga

SEQ ID NO: 534446 - RNA, 19 nt, Artificial Sequence
  Description of Artificial Sequence: Synthetic oligonucleotide
cccgucggcggaagacauc

SEQ ID NO: 534447 - RNA, 19 nt, Artificial Sequence
  Description of Artificial Sequence: Synthetic oligonucleotide
gcucaccuucuauggcacu

SEQ ID NO: 534448 - RNA, 19 nt, Artificial Sequence
  Description of Artificial Sequence: Synthetic oligonucleotide
ggaugggguuuugucuccu

SEQ ID NO: 534449 - RNA, 19 nt, Artificial Sequence
  Description of Artificial Sequence: Synthetic oligonucleotide
cgucucagcuggcugggaa

SEQ ID NO: 534450 - RNA, 19 nt, Artificial Sequence
  Description of Artificial Sequence: Synthetic oligonucleotide
ccgggcccagccugcgcgc

SEQ ID NO: 534451 - RNA, 19 nt, Artificial Sequence
  Description of Artificial Sequence: Synthetic oligonucleotide
gccguucuggggagaagua

SEQ ID NO: 534452 - RNA, 19 nt, Artificial Sequence
  Description of Artificial Sequence: Synthetic oligonucleotide
guccccaaaugggcaugcu

SEQ ID NO: 534453 - RNA, 19 nt, Artificial Sequence
  Description of Artificial Sequence: Synthetic oligonucleotide
ccagcacgacagcucucca

SEQ ID NO: 534454 - RNA, 19 nt, Artificial Sequence
  Description of Artificial Sequence: Synthetic oligonucleotide
cgaccacgauagccagacc

SEQ ID NO: 534455 - RNA, 19 nt, Artificial Sequence
  Description of Artificial Sequence: Synthetic oligonucleotide
gcgccgcgcacugggucag

SEQ ID NO: 534456 - RNA, 19 nt, Artificial Sequence
  Description of Artificial Sequence: Synthetic oligonucleotide
ggacccggagucguaguuu

SEQ ID NO: 534457 - RNA, 19 nt, Artificial Sequence
  Description of Artificial Sequence: Synthetic oligonucleotide
cggagcguggcgcgcagga

SEQ ID NO: 534458 - RNA, 19 nt, Artificial Sequence
  Description of Artificial Sequence: Synthetic oligonucleotide
cggagucgcgccgcgcccc

SEQ ID NO: 534459 - RNA, 19 nt, Artificial Sequence
  Description of Artificial Sequence: Synthetic oligonucleotide
gccgugacagugagggcau

SEQ ID NO: 534460 - RNA, 19 nt, Artificial Sequence
  Description of Artificial Sequence: Synthetic oligonucleotide
ccgcauguaccggaugacu

SEQ ID NO: 534461 - RNA, 19 nt, Artificial Sequence
  Description of Artificial Sequence: Synthetic oligonucleotide
cgccguccccgagucacag

SEQ ID NO: 534462 - RNA, 19 nt, Artificial Sequence
  Description of Artificial Sequence: Synthetic oligonucleotide
ccgcgcacugggucaggca

SEQ ID NO: 534463 - RNA, 19 nt, Artificial Sequence
  Description of Artificial Sequence: Synthetic oligonucleotide
gggucgaauccccgacauu

SEQ ID NO: 534464 - RNA, 19 nt, Artificial Sequence
  Description of Artificial Sequence: Synthetic oligonucleotide
cagcgccguccccgaguca

SEQ ID NO: 534465 - RNA, 19 nt, Artificial Sequence
  Description of Artificial Sequence: Synthetic oligonucleotide
ccgacccauucagcugcug

SEQ ID NO: 534466 - RNA, 19 nt, Artificial Sequence
  Description of Artificial Sequence: Synthetic oligonucleotide
ggugggcccuaggcuaagu

SEQ ID NO: 534467 - RNA, 19 nt, Artificial Sequence
  Description of Artificial Sequence: Synthetic oligonucleotide
cccaggccgggucuuggcu

SEQ ID NO: 534468 - RNA, 19 nt, Artificial Sequence
  Description of Artificial Sequence: Synthetic oligonucleotide
gggcauccugggugagggu

SEQ ID NO: 534469 - RNA, 19 nt, Artificial Sequence
  Description of Artificial Sequence: Synthetic oligonucleotide
ccccgagggaucgaaggau

SEQ ID NO: 534470 - RNA, 19 nt, Artificial Sequence
  Description of Artificial Sequence: Synthetic oligonucleotide
gcgccguccccgagucaca

SEQ ID NO: 534471 - RNA, 19 nt, Artificial Sequence
  Description of Artificial Sequence: Synthetic oligonucleotide
ccgucucagcuggcuggga

SEQ ID NO: 534472 - RNA, 19 nt, Artificial Sequence
  Description of Artificial Sequence: Synthetic oligonucleotide
ccgcaucugcaaguguguu

SEQ ID NO: 534473 - RNA, 19 nt, Artificial Sequence
  Description of Artificial Sequence: Synthetic oligonucleotide
ccggaugacucagguccau

SEQ ID NO: 534474 - RNA, 19 nt, Artificial Sequence
  Description of Artificial Sequence: Synthetic oligonucleotide
cggacccggagucguaguu

SEQ ID NO: 534475 - RNA, 19 nt, Artificial Sequence
  Description of Artificial Sequence: Synthetic oligonucleotide
gccuuucgggaggcauaau

SEQ ID NO: 534476 - RNA, 19 nt, Artificial Sequence
  Description of Artificial Sequence: Synthetic oligonucleotide
ccgugacagugagggcauu

SEQ ID NO: 534477 - RNA, 19 nt, Artificial Sequence
  Description of Artificial Sequence: Synthetic oligonucleotide
aaguguaucaucuauuuuc

SEQ ID NO: 534478 - RNA, 19 nt, Artificial Sequence
  Description of Artificial Sequence: Synthetic oligonucleotide
aggucaauaaaccauagcc

SEQ ID NO: 534479 - RNA, 19 nt, Artificial Sequence
  Description of Artificial Sequence: Synthetic oligonucleotide
ugugaucuaacuuauaucu

SEQ ID NO: 534480 - RNA, 19 nt, Artificial Sequence
  Description of Artificial Sequence: Synthetic oligonucleotide
augugaacgauguucaugc

SEQ ID NO: 534481 - RNA, 19 nt, Artificial Sequence
  Description of Artificial Sequence: Synthetic oligonucleotide
ugaucuaacuuauaucugg

SEQ ID NO: 534482 - RNA, 19 nt, Artificial Sequence
  Description of Artificial Sequence: Synthetic oligonucleotide
gaucuguagauuuagcagg

SEQ ID NO: 534483 - RNA, 19 nt, Artificial Sequence
  Description of Artificial Sequence: Synthetic oligonucleotide
acuuaugaggauaugagcc

SEQ ID NO: 534484 - RNA, 19 nt, Artificial Sequence
  Description of Artificial Sequence: Synthetic oligonucleotide
auaugagccagacaguagc

SEQ ID NO: 534485 - RNA, 19 nt, Artificial Sequence
  Description of Artificial Sequence: Synthetic oligonucleotide
ucuaacuuauaucugggcc

SEQ ID NO: 534486 - RNA, 19 nt, Artificial Sequence
  Description of Artificial Sequence: Synthetic oligonucleotide
ugauuauuucacaauacgc

SEQ ID NO: 534487 - RNA, 19 nt, Artificial Sequence
  Description of Artificial Sequence: Synthetic oligonucleotide
aauccuaguugcuagaagu

SEQ ID NO: 534488 - RNA, 19 nt, Artificial Sequence
  Description of Artificial Sequence: Synthetic oligonucleotide
guuccauaggacuugaagg

SEQ ID NO: 534489 - RNA, 19 nt, Artificial Sequence
  Description of Artificial Sequence: Synthetic oligonucleotide
uguguaauuuaucacuacc

SEQ ID NO: 534490 - RNA, 19 nt, Artificial Sequence
  Description of Artificial Sequence: Synthetic oligonucleotide
gguaaaagcaauaaaauug

SEQ ID NO: 534491 - RNA, 19 nt, Artificial Sequence
  Description of Artificial Sequence: Synthetic oligonucleotide
uaauuuaucacuaccugaa

SEQ ID NO: 534492 - RNA, 19 nt, Artificial Sequence
  Description of Artificial Sequence: Synthetic oligonucleotide
aaagcauacccacaaucag

SEQ ID NO: 534493 - RNA, 19 nt, Artificial Sequence
  Description of Artificial Sequence: Synthetic oligonucleotide
gucaauaaaccauagcccc

SEQ ID NO: 534494 - RNA, 19 nt, Artificial Sequence
  Description of Artificial Sequence: Synthetic oligonucleotide
ugcaaaaugugaacgaugu

SEQ ID NO: 534495 - RNA, 19 nt, Artificial Sequence
  Description of Artificial Sequence: Synthetic oligonucleotide
gauuauuucacaauacgca

SEQ ID NO: 534496 - RNA, 19 nt, Artificial Sequence
  Description of Artificial Sequence: Synthetic oligonucleotide
cagugcaucacuaaagccc

SEQ ID NO: 534497 - RNA, 19 nt, Artificial Sequence
  Description of Artificial Sequence: Synthetic oligonucleotide
auuuaucacuaccugaaug

SEQ ID NO: 534498 - RNA, 19 nt, Artificial Sequence
  Description of Artificial Sequence: Synthetic oligonucleotide
ucuugauuauuucacaaua

SEQ ID NO: 534499 - RNA, 19 nt, Artificial Sequence
  Description of Artificial Sequence: Synthetic oligonucleotide
accccuuacaguccuaugc

SEQ ID NO: 534500 - RNA, 19 nt, Artificial Sequence
  Description of Artificial Sequence: Synthetic oligonucleotide
uguauggucacaugcaggu

SEQ ID NO: 534501 - RNA, 19 nt, Artificial Sequence
  Description of Artificial Sequence: Synthetic oligonucleotide
aguguaucaucuauuuucc

SEQ ID NO: 534502 - RNA, 19 nt, Artificial Sequence
  Description of Artificial Sequence: Synthetic oligonucleotide
ucacaauacgcacaguacu

SEQ ID NO: 534503 - RNA, 19 nt, Artificial Sequence
  Description of Artificial Sequence: Synthetic oligonucleotide
caaaaugugaacgauguuc

SEQ ID NO: 534504 - RNA, 19 nt, Artificial Sequence
  Description of Artificial Sequence: Synthetic oligonucleotide
auggcauagacaccgucgc

SEQ ID NO: 534505 - RNA, 19 nt, Artificial Sequence
  Description of Artificial Sequence: Synthetic oligonucleotide
cauacccacaaucagugcc

SEQ ID NO: 534506 - RNA, 19 nt, Artificial Sequence
  Description of Artificial Sequence: Synthetic oligonucleotide
ggaauugcggcccauaugc

SEQ ID NO: 534507 - RNA, 19 nt, Artificial Sequence
  Description of Artificial Sequence: Synthetic oligonucleotide
acgauuagaaaugucauca

SEQ ID NO: 534508 - RNA, 19 nt, Artificial Sequence
  Description of Artificial Sequence: Synthetic oligonucleotide
uagucagacagguaaauuc

SEQ ID NO: 534509 - RNA, 19 nt, Artificial Sequence
  Description of Artificial Sequence: Synthetic oligonucleotide
augugaucuaacuuauauc

SEQ ID NO: 534510 - RNA, 19 nt, Artificial Sequence
  Description of Artificial Sequence: Synthetic oligonucleotide
aaugugaacgauguucaug

SEQ ID NO: 534511 - RNA, 19 nt, Artificial Sequence
  Description of Artificial Sequence: Synthetic oligonucleotide
auaaaccauagccccaggg

SEQ ID NO: 534512 - RNA, 19 nt, Artificial Sequence
  Description of Artificial Sequence: Synthetic oligonucleotide
acgcagaacaggaagauac

SEQ ID NO: 534513 - RNA, 19 nt, Artificial Sequence
  Description of Artificial Sequence: Synthetic oligonucleotide
agcuuauucagguuaguca

SEQ ID NO: 534514 - RNA, 19 nt, Artificial Sequence
  Description of Artificial Sequence: Synthetic oligonucleotide
gagaggugcaugcagauca

SEQ ID NO: 534515 - RNA, 19 nt, Artificial Sequence
  Description of Artificial Sequence: Synthetic oligonucleotide
agugacaguauguugagua

SEQ ID NO: 534516 - RNA, 19 nt, Artificial Sequence
  Description of Artificial Sequence: Synthetic oligonucleotide
uuacgauuagaaaugucau

SEQ ID NO: 534517 - RNA, 19 nt, Artificial Sequence
  Description of Artificial Sequence: Synthetic oligonucleotide
agguuagucagacagguaa

SEQ ID NO: 534518 - RNA, 19 nt, Artificial Sequence
  Description of Artificial Sequence: Synthetic oligonucleotide
gaagaugcuggcaaagaag

SEQ ID NO: 534519 - RNA, 19 nt, Artificial Sequence
  Description of Artificial Sequence: Synthetic oligonucleotide
gcuuauucagguuagucag

SEQ ID NO: 534520 - RNA, 19 nt, Artificial Sequence
  Description of Artificial Sequence: Synthetic oligonucleotide
uuagugauggccccaugca

SEQ ID NO: 534521 - RNA, 19 nt, Artificial Sequence
  Description of Artificial Sequence: Synthetic oligonucleotide
cuugcugauaugagggagg

SEQ ID NO: 534522 - RNA, 19 nt, Artificial Sequence
  Description of Artificial Sequence: Synthetic oligonucleotide
caguauguugaguagcccc

SEQ ID NO: 534523 - RNA, 19 nt, Artificial Sequence
  Description of Artificial Sequence: Synthetic oligonucleotide
uguguguaauuuaucacua

SEQ ID NO: 534524 - RNA, 19 nt, Artificial Sequence
  Description of Artificial Sequence: Synthetic oligonucleotide
ucaauaaaccauagcccca

SEQ ID NO: 534525 - RNA, 19 nt, Artificial Sequence
  Description of Artificial Sequence: Synthetic oligonucleotide
aaacugucagucccaaaga

SEQ ID NO: 534526 - RNA, 19 nt, Artificial Sequence
  Description of Artificial Sequence: Synthetic oligonucleotide
aucaauacugaaggucucc

SEQ ID NO: 534527 - RNA, 19 nt, Artificial Sequence
  Description of Artificial Sequence: Synthetic oligonucleotide
acaguuacgauuagaaaug

SEQ ID NO: 534528 - RNA, 19 nt, Artificial Sequence
  Description of Artificial Sequence: Synthetic oligonucleotide
aaguacgccaggaauugcg

SEQ ID NO: 534529 - RNA, 19 nt, Artificial Sequence
  Description of Artificial Sequence: Synthetic oligonucleotide
ggaucuguagauuuagcag

SEQ ID NO: 534530 - RNA, 19 nt, Artificial Sequence
  Description of Artificial Sequence: Synthetic oligonucleotide
uggggucuggacaugguag

SEQ ID NO: 534531 - RNA, 19 nt, Artificial Sequence
  Description of Artificial Sequence: Synthetic oligonucleotide
aaaccauagccccaggguu

SEQ ID NO: 534532 - RNA, 19 nt, Artificial Sequence
  Description of Artificial Sequence: Synthetic oligonucleotide
cacuuaugaggauaugagc

SEQ ID NO: 534533 - RNA, 19 nt, Artificial Sequence
  Description of Artificial Sequence: Synthetic oligonucleotide
cuaacuuauaucugggcca

SEQ ID NO: 534534 - RNA, 19 nt, Artificial Sequence
  Description of Artificial Sequence: Synthetic oligonucleotide
gaaagcaugcuccugccca

SEQ ID NO: 534535 - RNA, 19 nt, Artificial Sequence
  Description of Artificial Sequence: Synthetic oligonucleotide
aaauggguaaaagcaauaa

SEQ ID NO: 534536 - RNA, 19 nt, Artificial Sequence
  Description of Artificial Sequence: Synthetic oligonucleotide
agaucaauacugaaggucu

SEQ ID NO: 534537 - RNA, 19 nt, Artificial Sequence
  Description of Artificial Sequence: Synthetic oligonucleotide
ugcacuuaugaggauauga

SEQ ID NO: 534538 - RNA, 19 nt, Artificial Sequence
  Description of Artificial Sequence: Synthetic oligonucleotide
uguauguagagcacuggau

SEQ ID NO: 534539 - RNA, 19 nt, Artificial Sequence
  Description of Artificial Sequence: Synthetic oligonucleotide
aacugguaugggaaugggc

SEQ ID NO: 534540 - RNA, 19 nt, Artificial Sequence
  Description of Artificial Sequence: Synthetic oligonucleotide
auaugagggaggaagauga

SEQ ID NO: 534541 - RNA, 19 nt, Artificial Sequence
  Description of Artificial Sequence: Synthetic oligonucleotide
uagacaccgucgcugaaag

SEQ ID NO: 534542 - RNA, 19 nt, Artificial Sequence
  Description of Artificial Sequence: Synthetic oligonucleotide
guauguagagcacuggauc

SEQ ID NO: 534543 - RNA, 19 nt, Artificial Sequence
  Description of Artificial Sequence: Synthetic oligonucleotide
gugauggucaucauacagg

SEQ ID NO: 534544 - RNA, 19 nt, Artificial Sequence
  Description of Artificial Sequence: Synthetic oligonucleotide
ucuguugguaggccagagg

SEQ ID NO: 534545 - RNA, 19 nt, Artificial Sequence
  Description of Artificial Sequence: Synthetic oligonucleotide
aaucugguaugugcugccc

SEQ ID NO: 534546 - RNA, 19 nt, Artificial Sequence
  Description of Artificial Sequence: Synthetic oligonucleotide
uuaugaggauaugagccag

SEQ ID NO: 534547 - RNA, 19 nt, Artificial Sequence
  Description of Artificial Sequence: Synthetic oligonucleotide
acgcacaguacucagguca

SEQ ID NO: 534548 - RNA, 19 nt, Artificial Sequence
  Description of Artificial Sequence: Synthetic oligonucleotide
gcugauaugagggaggaag

SEQ ID NO: 534549 - RNA, 19 nt, Artificial Sequence
  Description of Artificial Sequence: Synthetic oligonucleotide
acugguaugggaaugggca

SEQ ID NO: 534550 - RNA, 19 nt, Artificial Sequence
  Description of Artificial Sequence: Synthetic oligonucleotide
gauaugagggaggaagaug

SEQ ID NO: 534551 - RNA, 19 nt, Artificial Sequence
  Description of Artificial Sequence: Synthetic oligonucleotide
gacaguauguugaguagcc

SEQ ID NO: 534552 - RNA, 19 nt, Artificial Sequence
  Description of Artificial Sequence: Synthetic oligonucleotide
gucgcugaaagcuuccacc

SEQ ID NO: 534553 - RNA, 19 nt, Artificial Sequence
  Description of Artificial Sequence: Synthetic oligonucleotide
aaccccucacugcaaaaug

SEQ ID NO: 534554 - RNA, 19 nt, Artificial Sequence
  Description of Artificial Sequence: Synthetic oligonucleotide
uguauacucuugucaaacu

SEQ ID NO: 534555 - RNA, 19 nt, Artificial Sequence
  Description of Artificial Sequence: Synthetic oligonucleotide
gauggcgcagcugacacgc

SEQ ID NO: 534556 - RNA, 19 nt, Artificial Sequence
  Description of Artificial Sequence: Synthetic oligonucleotide
aauggcaaucacacauacg

SEQ ID NO: 534557 - RNA, 19 nt, Artificial Sequence
  Description of Artificial Sequence: Synthetic oligonucleotide
cuugggauccggaacguug

SEQ ID NO: 534558 - RNA, 19 nt, Artificial Sequence
  Description of Artificial Sequence: Synthetic oligonucleotide
ggcaaucacacauacgcag

SEQ ID NO: 534559 - RNA, 19 nt, Artificial Sequence
  Description of Artificial Sequence: Synthetic oligonucleotide
gggaacgucaccauuagag

SEQ ID NO: 534560 - RNA, 19 nt, Artificial Sequence
  Description of Artificial Sequence: Synthetic oligonucleotide
ucgcugaaagcuuccaccc

SEQ ID NO: 534561 - RNA, 19 nt, Artificial Sequence
  Description of Artificial Sequence: Synthetic oligonucleotide
gaagagugaaugaugggca

SEQ ID NO: 534562 - RNA, 19 nt, Artificial Sequence
  Description of Artificial Sequence: Synthetic oligonucleotide
acagauguccaggaugagg

SEQ ID NO: 534563 - RNA, 19 nt, Artificial Sequence
  Description of Artificial Sequence: Synthetic oligonucleotide
acgauguucaugcucuuga

SEQ ID NO: 534564 - RNA, 19 nt, Artificial Sequence
  Description of Artificial Sequence: Synthetic oligonucleotide
ggugauggucaucauacag

SEQ ID NO: 534565 - RNA, 19 nt, Artificial Sequence
  Description of Artificial Sequence: Synthetic oligonucleotide
uacgauuagaaaugucauc

SEQ ID NO: 534566 - RNA, 19 nt, Artificial Sequence
  Description of Artificial Sequence: Synthetic oligonucleotide
cuugcacagggguacagug

SEQ ID NO: 534567 - RNA, 19 nt, Artificial Sequence
  Description of Artificial Sequence: Synthetic oligonucleotide
cagauguccaggaugagga

SEQ ID NO: 534568 - RNA, 19 nt, Artificial Sequence
  Description of Artificial Sequence: Synthetic oligonucleotide
accugaaugugaucuaacu

SEQ ID NO: 534569 - RNA, 19 nt, Artificial Sequence
  Description of Artificial Sequence: Synthetic oligonucleotide
uguugaguagccccauggu

SEQ ID NO: 534570 - RNA, 19 nt, Artificial Sequence
  Description of Artificial Sequence: Synthetic oligonucleotide
ggugagaucucuguguggg

SEQ ID NO: 534571 - RNA, 19 nt, Artificial Sequence
  Description of Artificial Sequence: Synthetic oligonucleotide
auagcagugcaucacuaaa

SEQ ID NO: 534572 - RNA, 19 nt, Artificial Sequence
  Description of Artificial Sequence: Synthetic oligonucleotide
auggauagcagugcaucac

SEQ ID NO: 534573 - RNA, 19 nt, Artificial Sequence
  Description of Artificial Sequence: Synthetic oligonucleotide
augaggauaugagccagac

SEQ ID NO: 534574 - RNA, 19 nt, Artificial Sequence
  Description of Artificial Sequence: Synthetic oligonucleotide
acaugguagggccaccgag

SEQ ID NO: 534575 - RNA, 19 nt, Artificial Sequence
  Description of Artificial Sequence: Synthetic oligonucleotide
cacaguuacgauuagaaau

SEQ ID NO: 534576 - RNA, 19 nt, Artificial Sequence
  Description of Artificial Sequence: Synthetic oligonucleotide
ggucaauaaaccauagccc

SEQ ID NO: 534577 - RNA, 19 nt, Artificial Sequence
  Description of Artificial Sequence: Synthetic oligonucleotide
uuaucacuaccugaaugug

SEQ ID NO: 534578 - RNA, 19 nt, Artificial Sequence
  Description of Artificial Sequence: Synthetic oligonucleotide
cagaucaauacugaagguc

SEQ ID NO: 534579 - RNA, 19 nt, Artificial Sequence
  Description of Artificial Sequence: Synthetic oligonucleotide
gugaaugaugggcaaacca

SEQ ID NO: 534580 - RNA, 19 nt, Artificial Sequence
  Description of Artificial Sequence: Synthetic oligonucleotide
acaguauguugaguagccc

SEQ ID NO: 534581 - RNA, 19 nt, Artificial Sequence
  Description of Artificial Sequence: Synthetic oligonucleotide
aagcauacccacaaucagu

SEQ ID NO: 534582 - RNA, 19 nt, Artificial Sequence
  Description of Artificial Sequence: Synthetic oligonucleotide
guacucaggucaauaaacc

SEQ ID NO: 534583 - RNA, 19 nt, Artificial Sequence
  Description of Artificial Sequence: Synthetic oligonucleotide
gcuccugcccaccaaaucg

SEQ ID NO: 534584 - RNA, 19 nt, Artificial Sequence
  Description of Artificial Sequence: Synthetic oligonucleotide
cuguauacucuugucaaac

SEQ ID NO: 534585 - RNA, 19 nt, Artificial Sequence
  Description of Artificial Sequence: Synthetic oligonucleotide
cugcaaaaugugaacgaug

SEQ ID NO: 534586 - RNA, 19 nt, Artificial Sequence
  Description of Artificial Sequence: Synthetic oligonucleotide
gauggauagcagugcauca

SEQ ID NO: 534587 - RNA, 19 nt, Artificial Sequence
  Description of Artificial Sequence: Synthetic oligonucleotide
auaaauggguaaaagcaau

SEQ ID NO: 534588 - RNA, 19 nt, Artificial Sequence
  Description of Artificial Sequence: Synthetic oligonucleotide
acaaaggccagugacagua

SEQ ID NO: 534589 - RNA, 19 nt, Artificial Sequence
  Description of Artificial Sequence: Synthetic oligonucleotide
aggagcguagccacaaugg

SEQ ID NO: 534590 - RNA, 19 nt, Artificial Sequence
  Description of Artificial Sequence: Synthetic oligonucleotide
gucuggacaugguagggcc

SEQ ID NO: 534591 - RNA, 19 nt, Artificial Sequence
  Description of Artificial Sequence: Synthetic oligonucleotide
uuuagcaggugugggaagu

SEQ ID NO: 534592 - RNA, 19 nt, Artificial Sequence
  Description of Artificial Sequence: Synthetic oligonucleotide
augcagaucaauacugaag

SEQ ID NO: 534593 - RNA, 19 nt, Artificial Sequence
  Description of Artificial Sequence: Synthetic oligonucleotide
acaguacucaggucaauaa

SEQ ID NO: 534594 - RNA, 19 nt, Artificial Sequence
  Description of Artificial Sequence: Synthetic oligonucleotide
gaggagcguagccacaaug

SEQ ID NO: 534595 - RNA, 19 nt, Artificial Sequence
  Description of Artificial Sequence: Synthetic oligonucleotide
uaugaggauaugagccaga

SEQ ID NO: 534596 - RNA, 19 nt, Artificial Sequence
  Description of Artificial Sequence: Synthetic oligonucleotide
guugaguagccccaugguc

SEQ ID NO: 534597 - RNA, 19 nt, Artificial Sequence
  Description of Artificial Sequence: Synthetic oligonucleotide
uugggauccggaacguugu

SEQ ID NO: 534598 - RNA, 19 nt, Artificial Sequence
  Description of Artificial Sequence: Synthetic oligonucleotide
guaaauucuccuggcagug

SEQ ID NO: 534599 - RNA, 19 nt, Artificial Sequence
  Description of Artificial Sequence: Synthetic oligonucleotide
uauguugaguagccccaug

SEQ ID NO: 534600 - RNA, 19 nt, Artificial Sequence
  Description of Artificial Sequence: Synthetic oligonucleotide
ucuguauacucuugucaaa

SEQ ID NO: 534601 - RNA, 19 nt, Artificial Sequence
  Description of Artificial Sequence: Synthetic oligonucleotide
gucagucccaaagaggagc

SEQ ID NO: 534602 - RNA, 19 nt, Artificial Sequence
  Description of Artificial Sequence: Synthetic oligonucleotide
uugucaaacugcuguucug

SEQ ID NO: 534603 - RNA, 19 nt, Artificial Sequence
  Description of Artificial Sequence: Synthetic oligonucleotide
uggcaaucacacauacgca

SEQ ID NO: 534604 - RNA, 19 nt, Artificial Sequence
  Description of Artificial Sequence: Synthetic oligonucleotide
acacauacgcagaacagga

SEQ ID NO: 534605 - RNA, 19 nt, Artificial Sequence
  Description of Artificial Sequence: Synthetic oligonucleotide
auagccccaggguuacaac

SEQ ID NO: 534606 - RNA, 19 nt, Artificial Sequence
  Description of Artificial Sequence: Synthetic oligonucleotide
ugaggauaugagccagaca

SEQ ID NO: 534607 - RNA, 19 nt, Artificial Sequence
  Description of Artificial Sequence: Synthetic oligonucleotide
uguagccuuccggacaugc

SEQ ID NO: 534608 - RNA, 19 nt, Artificial Sequence
  Description of Artificial Sequence: Synthetic oligonucleotide
caggucaauaaaccauagc

SEQ ID NO: 534609 - RNA, 19 nt, Artificial Sequence
  Description of Artificial Sequence: Synthetic oligonucleotide
uggcccaugagcuugucuu

SEQ ID NO: 534610 - RNA, 19 nt, Artificial Sequence
  Description of Artificial Sequence: Synthetic oligonucleotide
caauccuaguugcuagaag

SEQ ID NO: 534611 - RNA, 19 nt, Artificial Sequence
  Description of Artificial Sequence: Synthetic oligonucleotide
uaacuuauaucugggccaa

SEQ ID NO: 534612 - RNA, 19 nt, Artificial Sequence
  Description of Artificial Sequence: Synthetic oligonucleotide
gauagcagugcaucacuaa

SEQ ID NO: 534613 - RNA, 19 nt, Artificial Sequence
  Description of Artificial Sequence: Synthetic oligonucleotide
aguauguugaguagcccca

SEQ ID NO: 534614 - RNA, 19 nt, Artificial Sequence
  Description of Artificial Sequence: Synthetic oligonucleotide
aggaauugcggcccauaug

SEQ ID NO: 534615 - RNA, 19 nt, Artificial Sequence
  Description of Artificial Sequence: Synthetic oligonucleotide
acgcucaaguucaucacgg

SEQ ID NO: 534616 - RNA, 19 nt, Artificial Sequence
  Description of Artificial Sequence: Synthetic oligonucleotide
aguuacgauuagaaauguc

SEQ ID NO: 534617 - RNA, 19 nt, Artificial Sequence
  Description of Artificial Sequence: Synthetic oligonucleotide
ccugacuuagcccacacuc

SEQ ID NO: 534618 - RNA, 19 nt, Artificial Sequence
  Description of Artificial Sequence: Synthetic oligonucleotide
uaugagggaggaagaugac

SEQ ID NO: 534619 - RNA, 19 nt, Artificial Sequence
  Description of Artificial Sequence: Synthetic oligonucleotide
auaggaccccuuacagucc

SEQ ID NO: 534620 - RNA, 19 nt, Artificial Sequence
  Description of Artificial Sequence: Synthetic oligonucleotide
aaaccccucacugcaaaau

SEQ ID NO: 534621 - RNA, 19 nt, Artificial Sequence
  Description of Artificial Sequence: Synthetic oligonucleotide
gacaccgucgcugaaagcu

SEQ ID NO: 534622 - RNA, 19 nt, Artificial Sequence
  Description of Artificial Sequence: Synthetic oligonucleotide
aguacgccaggaauugcgg

SEQ ID NO: 534623 - RNA, 19 nt, Artificial Sequence
  Description of Artificial Sequence: Synthetic oligonucleotide
acucaggucaauaaaccau

SEQ ID NO: 534624 - RNA, 19 nt, Artificial Sequence
  Description of Artificial Sequence: Synthetic oligonucleotide
aaggcaaguguaucaucua

SEQ ID NO: 534625 - RNA, 19 nt, Artificial Sequence
  Description of Artificial Sequence: Synthetic oligonucleotide
ugauggcgcagcugacacg

SEQ ID NO: 534626 - RNA, 19 nt, Artificial Sequence
  Description of Artificial Sequence: Synthetic oligonucleotide
ggcaggaucaugacagugg

SEQ ID NO: 534627 - RNA, 19 nt, Artificial Sequence
  Description of Artificial Sequence: Synthetic oligonucleotide
cuggccggagguuccauag

SEQ ID NO: 534628 - RNA, 19 nt, Artificial Sequence
  Description of Artificial Sequence: Synthetic oligonucleotide
acuuauaucugggccaaau

SEQ ID NO: 534629 - RNA, 19 nt, Artificial Sequence
  Description of Artificial Sequence: Synthetic oligonucleotide
aucaugacaguggcaauga

SEQ ID NO: 534630 - RNA, 19 nt, Artificial Sequence
  Description of Artificial Sequence: Synthetic oligonucleotide
cugagcacaagguggccug

SEQ ID NO: 534631 - RNA, 19 nt, Artificial Sequence
  Description of Artificial Sequence: Synthetic oligonucleotide
acauaggacaaggggaaga

SEQ ID NO: 534632 - RNA, 19 nt, Artificial Sequence
  Description of Artificial Sequence: Synthetic oligonucleotide
cuuagcccacacucaacug

SEQ ID NO: 534633 - RNA, 19 nt, Artificial Sequence
  Description of Artificial Sequence: Synthetic oligonucleotide
aauucuccuggcaguguug

SEQ ID NO: 534634 - RNA, 19 nt, Artificial Sequence
  Description of Artificial Sequence: Synthetic oligonucleotide
uaggaccccuuacaguccu

SEQ ID NO: 534635 - RNA, 19 nt, Artificial Sequence
  Description of Artificial Sequence: Synthetic oligonucleotide
auaggacuugaagggccgc

SEQ ID NO: 534636 - RNA, 19 nt, Artificial Sequence
  Description of Artificial Sequence: Synthetic oligonucleotide
guguguaauuuaucacuac

SEQ ID NO: 534637 - RNA, 19 nt, Artificial Sequence
  Description of Artificial Sequence: Synthetic oligonucleotide
uggagacucccuguggccc

SEQ ID NO: 534638 - RNA, 19 nt, Artificial Sequence
  Description of Artificial Sequence: Synthetic oligonucleotide
gugaucuaacuuauaucug

SEQ ID NO: 534639 - RNA, 19 nt, Artificial Sequence
  Description of Artificial Sequence: Synthetic oligonucleotide
uccacccgcucuuugcuga

SEQ ID NO: 534640 - RNA, 19 nt, Artificial Sequence
  Description of Artificial Sequence: Synthetic oligonucleotide
guacagugcaagcuuggca

SEQ ID NO: 534641 - RNA, 19 nt, Artificial Sequence
  Description of Artificial Sequence: Synthetic oligonucleotide
caggaaaccccucacugca

SEQ ID NO: 534642 - RNA, 19 nt, Artificial Sequence
  Description of Artificial Sequence: Synthetic oligonucleotide
agacaccgucgcugaaagc

SEQ ID NO: 534643 - RNA, 19 nt, Artificial Sequence
  Description of Artificial Sequence: Synthetic oligonucleotide
gcaggaucaugacaguggc

SEQ ID NO: 534644 - RNA, 19 nt, Artificial Sequence
  Description of Artificial Sequence: Synthetic oligonucleotide
ccauaggacuugaagggcc

SEQ ID NO: 534645 - RNA, 19 nt, Artificial Sequence
  Description of Artificial Sequence: Synthetic oligonucleotide
acccacaaucagugccugc

SEQ ID NO: 534646 - RNA, 19 nt, Artificial Sequence
  Description of Artificial Sequence: Synthetic oligonucleotide
ugccugcacagauccaaug

SEQ ID NO: 534647 - RNA, 19 nt, Artificial Sequence
  Description of Artificial Sequence: Synthetic oligonucleotide
acccgcucuuugcugagag

SEQ ID NO: 534648 - RNA, 19 nt, Artificial Sequence
  Description of Artificial Sequence: Synthetic oligonucleotide
aaucgcacagcuggcugca

SEQ ID NO: 534649 - RNA, 19 nt, Artificial Sequence
  Description of Artificial Sequence: Synthetic oligonucleotide
ccuaguugcuagaaguuuc

SEQ ID NO: 534650 - RNA, 19 nt, Artificial Sequence
  Description of Artificial Sequence: Synthetic oligonucleotide
cauacaggccagguugagc

SEQ ID NO: 534651 - RNA, 19 nt, Artificial Sequence
  Description of Artificial Sequence: Synthetic oligonucleotide
agggguacagugcaagcuu

SEQ ID NO: 534652 - RNA, 19 nt, Artificial Sequence
  Description of Artificial Sequence: Synthetic oligonucleotide
uggccggagguuccauagg

SEQ ID NO: 534653 - RNA, 19 nt, Artificial Sequence
  Description of Artificial Sequence: Synthetic oligonucleotide
guacgccaggaauugcggc

SEQ ID NO: 534654 - RNA, 19 nt, Artificial Sequence
  Description of Artificial Sequence: Synthetic oligonucleotide
guucacccuggccugguug

SEQ ID NO: 534655 - RNA, 19 nt, Artificial Sequence
  Description of Artificial Sequence: Synthetic oligonucleotide
agaucucugugugggucac

SEQ ID NO: 534656 - RNA, 19 nt, Artificial Sequence
  Description of Artificial Sequence: Synthetic oligonucleotide
agcagacccacuguggcga

SEQ ID NO: 534657 - RNA, 19 nt, Artificial Sequence
  Description of Artificial Sequence: Synthetic oligonucleotide
ucauacaggccagguugag

SEQ ID NO: 534658 - RNA, 19 nt, Artificial Sequence
  Description of Artificial Sequence: Synthetic oligonucleotide
uggcgaaggagccgaagua

SEQ ID NO: 534659 - RNA, 19 nt, Artificial Sequence
  Description of Artificial Sequence: Synthetic oligonucleotide
cagggaacgucaccauuag

SEQ ID NO: 534660 - RNA, 19 nt, Artificial Sequence
  Description of Artificial Sequence: Synthetic oligonucleotide
gaucaauacugaaggucuc

SEQ ID NO: 534661 - RNA, 19 nt, Artificial Sequence
  Description of Artificial Sequence: Synthetic oligonucleotide
ggccaaauacauugugagc

SEQ ID NO: 534662 - RNA, 19 nt, Artificial Sequence
  Description of Artificial Sequence: Synthetic oligonucleotide
ggagcguagccacaauggc

SEQ ID NO: 534663 - RNA, 19 nt, Artificial Sequence
  Description of Artificial Sequence: Synthetic oligonucleotide
gauaaacugucagucccaa

SEQ ID NO: 534664 - RNA, 19 nt, Artificial Sequence
  Description of Artificial Sequence: Synthetic oligonucleotide
gaacguuguccucacagau

SEQ ID NO: 534665 - RNA, 19 nt, Artificial Sequence
  Description of Artificial Sequence: Synthetic oligonucleotide
gcaacugguaugggaaugg

SEQ ID NO: 534666 - RNA, 19 nt, Artificial Sequence
  Description of Artificial Sequence: Synthetic oligonucleotide
gcagugcaucacuaaagcc

SEQ ID NO: 534667 - RNA, 19 nt, Artificial Sequence
  Description of Artificial Sequence: Synthetic oligonucleotide
ggcauagacaccgucgcug

SEQ ID NO: 534668 - RNA, 19 nt, Artificial Sequence
  Description of Artificial Sequence: Synthetic oligonucleotide
gagcguagccacaauggca

SEQ ID NO: 534669 - RNA, 19 nt, Artificial Sequence
  Description of Artificial Sequence: Synthetic oligonucleotide
acuaccugaaugugaucua

SEQ ID NO: 534670 - RNA, 19 nt, Artificial Sequence
  Description of Artificial Sequence: Synthetic oligonucleotide
caacugguaugggaauggg

SEQ ID NO: 534671 - RNA, 19 nt, Artificial Sequence
  Description of Artificial Sequence: Synthetic oligonucleotide
gaaguacgccaggaauugc

SEQ ID NO: 534672 - RNA, 19 nt, Artificial Sequence
  Description of Artificial Sequence: Synthetic oligonucleotide
cuuauaucugggccaaaua

SEQ ID NO: 534673 - RNA, 19 nt, Artificial Sequence
  Description of Artificial Sequence: Synthetic oligonucleotide
aguggaaagcauacccaca

SEQ ID NO: 534674 - RNA, 19 nt, Artificial Sequence
  Description of Artificial Sequence: Synthetic oligonucleotide
ggcccauaugcacccaggg

SEQ ID NO: 534675 - RNA, 19 nt, Artificial Sequence
  Description of Artificial Sequence: Synthetic oligonucleotide
auacgcagaacaggaagau

SEQ ID NO: 534676 - RNA, 19 nt, Artificial Sequence
  Description of Artificial Sequence: Synthetic oligonucleotide
caauggcauagacaccguc

SEQ ID NO: 534677 - RNA, 19 nt, Artificial Sequence
  Description of Artificial Sequence: Synthetic oligonucleotide
uggcauagacaccgucgcu

SEQ ID NO: 534678 - RNA, 19 nt, Artificial Sequence
  Description of Artificial Sequence: Synthetic oligonucleotide
cuaugccugcaaugggcac

SEQ ID NO: 534679 - RNA, 19 nt, Artificial Sequence
  Description of Artificial Sequence: Synthetic oligonucleotide
acgcacacgcucaaguuca

SEQ ID NO: 534680 - RNA, 19 nt, Artificial Sequence
  Description of Artificial Sequence: Synthetic oligonucleotide
gguagccuugcugauauga

SEQ ID NO: 534681 - RNA, 19 nt, Artificial Sequence
  Description of Artificial Sequence: Synthetic oligonucleotide
caucacgggguugucgggc

SEQ ID NO: 534682 - RNA, 19 nt, Artificial Sequence
  Description of Artificial Sequence: Synthetic oligonucleotide
auaaacugucagucccaaa

SEQ ID NO: 534683 - RNA, 19 nt, Artificial Sequence
  Description of Artificial Sequence: Synthetic oligonucleotide
uuccacccgcucuuugcug

SEQ ID NO: 534684 - RNA, 19 nt, Artificial Sequence
  Description of Artificial Sequence: Synthetic oligonucleotide
gggcccuguauguagagca

SEQ ID NO: 534685 - RNA, 19 nt, Artificial Sequence
  Description of Artificial Sequence: Synthetic oligonucleotide
aucacgggguugucgggca

SEQ ID NO: 534686 - RNA, 19 nt, Artificial Sequence
  Description of Artificial Sequence: Synthetic oligonucleotide
gguagggccaccgagcguc

SEQ ID NO: 534687 - RNA, 19 nt, Artificial Sequence
  Description of Artificial Sequence: Synthetic oligonucleotide
cuguguagccuuccggaca

SEQ ID NO: 534688 - RNA, 19 nt, Artificial Sequence
  Description of Artificial Sequence: Synthetic oligonucleotide
gaccccuuacaguccuaug

SEQ ID NO: 534689 - RNA, 19 nt, Artificial Sequence
  Description of Artificial Sequence: Synthetic oligonucleotide
uccggaacguuguccucac

SEQ ID NO: 534690 - RNA, 19 nt, Artificial Sequence
  Description of Artificial Sequence: Synthetic oligonucleotide
gaaaccccucacugcaaaa

SEQ ID NO: 534691 - RNA, 19 nt, Artificial Sequence
  Description of Artificial Sequence: Synthetic oligonucleotide
accgucgcugaaagcuucc

SEQ ID NO: 534692 - RNA, 19 nt, Artificial Sequence
  Description of Artificial Sequence: Synthetic oligonucleotide
aucauacaggccagguuga

SEQ ID NO: 534693 - RNA, 19 nt, Artificial Sequence
  Description of Artificial Sequence: Synthetic oligonucleotide
ggaacguuguccucacaga

SEQ ID NO: 534694 - RNA, 19 nt, Artificial Sequence
  Description of Artificial Sequence: Synthetic oligonucleotide
agagugaaugaugggcaaa

SEQ ID NO: 534695 - RNA, 19 nt, Artificial Sequence
  Description of Artificial Sequence: Synthetic oligonucleotide
gguaugugcugcccaugcc

SEQ ID NO: 534696 - RNA, 19 nt, Artificial Sequence
  Description of Artificial Sequence: Synthetic oligonucleotide
acauugugagcuggagacu

SEQ ID NO: 534697 - RNA, 19 nt, Artificial Sequence
  Description of Artificial Sequence: Synthetic oligonucleotide
uacgcacaguacucagguc

SEQ ID NO: 534698 - RNA, 19 nt, Artificial Sequence
  Description of Artificial Sequence: Synthetic oligonucleotide
accccucacugcaaaaugu

SEQ ID NO: 534699 - RNA, 19 nt, Artificial Sequence
  Description of Artificial Sequence: Synthetic oligonucleotide
gccacaguuacgauuagaa

SEQ ID NO: 534700 - RNA, 19 nt, Artificial Sequence
  Description of Artificial Sequence: Synthetic oligonucleotide
augaggagcguagccacaa

SEQ ID NO: 534701 - RNA, 19 nt, Artificial Sequence
  Description of Artificial Sequence: Synthetic oligonucleotide
ggaugagucucccucggaa

SEQ ID NO: 534702 - RNA, 19 nt, Artificial Sequence
  Description of Artificial Sequence: Synthetic oligonucleotide
uacgcagaacaggaagaua

SEQ ID NO: 534703 - RNA, 19 nt, Artificial Sequence
  Description of Artificial Sequence: Synthetic oligonucleotide
guagccacaauggcauaga

SEQ ID NO: 534704 - RNA, 19 nt, Artificial Sequence
  Description of Artificial Sequence: Synthetic oligonucleotide
guugagcaaggcaagugua

SEQ ID NO: 534705 - RNA, 19 nt, Artificial Sequence
  Description of Artificial Sequence: Synthetic oligonucleotide
gguugucgggcaaaagcug

SEQ ID NO: 534706 - RNA, 19 nt, Artificial Sequence
  Description of Artificial Sequence: Synthetic oligonucleotide
ugaggagcguagccacaau

SEQ ID NO: 534707 - RNA, 19 nt, Artificial Sequence
  Description of Artificial Sequence: Synthetic oligonucleotide
cagauccaauggcaaucac

SEQ ID NO: 534708 - RNA, 19 nt, Artificial Sequence
  Description of Artificial Sequence: Synthetic oligonucleotide
gaauugcggcccauaugca

SEQ ID NO: 534709 - RNA, 19 nt, Artificial Sequence
  Description of Artificial Sequence: Synthetic oligonucleotide
gaugaggagcguagccaca

SEQ ID NO: 534710 - RNA, 19 nt, Artificial Sequence
  Description of Artificial Sequence: Synthetic oligonucleotide
caccgucgcugaaagcuuc

SEQ ID NO: 534711 - RNA, 19 nt, Artificial Sequence
  Description of Artificial Sequence: Synthetic oligonucleotide
cucggucuggggucuggac

SEQ ID NO: 534712 - RNA, 19 nt, Artificial Sequence
  Description of Artificial Sequence: Synthetic oligonucleotide
ugggauccggaacguuguc

SEQ ID NO: 534713 - RNA, 19 nt, Artificial Sequence
  Description of Artificial Sequence: Synthetic oligonucleotide
uaggcgcaggaugugccgu

SEQ ID NO: 534714 - RNA, 19 nt, Artificial Sequence
  Description of Artificial Sequence: Synthetic oligonucleotide
gccaccgagcgucacagca

SEQ ID NO: 534715 - RNA, 19 nt, Artificial Sequence
  Description of Artificial Sequence: Synthetic oligonucleotide
agccgaaguacgccaggaa

SEQ ID NO: 534716 - RNA, 19 nt, Artificial Sequence
  Description of Artificial Sequence: Synthetic oligonucleotide
ccuguauguagagcacugg

SEQ ID NO: 534717 - RNA, 19 nt, Artificial Sequence
  Description of Artificial Sequence: Synthetic oligonucleotide
aggccagugacaguauguu

SEQ ID NO: 534718 - RNA, 19 nt, Artificial Sequence
  Description of Artificial Sequence: Synthetic oligonucleotide
gcaaguguaucaucuauuu

SEQ ID NO: 534719 - RNA, 19 nt, Artificial Sequence
  Description of Artificial Sequence: Synthetic oligonucleotide
cacauacgcagaacaggaa

SEQ ID NO: 534720 - RNA, 19 nt, Artificial Sequence
  Description of Artificial Sequence: Synthetic oligonucleotide
ugagcacaagguggccugu

SEQ ID NO: 534721 - RNA, 19 nt, Artificial Sequence
  Description of Artificial Sequence: Synthetic oligonucleotide
ugguagggccaccgagcgu

SEQ ID NO: 534722 - RNA, 19 nt, Artificial Sequence
  Description of Artificial Sequence: Synthetic oligonucleotide
ggauccggaacguuguccu

SEQ ID NO: 534723 - RNA, 19 nt, Artificial Sequence
  Description of Artificial Sequence: Synthetic oligonucleotide
gggauccggaacguugucc

SEQ ID NO: 534724 - RNA, 19 nt, Artificial Sequence
  Description of Artificial Sequence: Synthetic oligonucleotide
guguagggaugagucuccc

SEQ ID NO: 534725 - RNA, 19 nt, Artificial Sequence
  Description of Artificial Sequence: Synthetic oligonucleotide
cauagccccaggguuacaa

SEQ ID NO: 534726 - RNA, 19 nt, Artificial Sequence
  Description of Artificial Sequence: Synthetic oligonucleotide
ccccucacugcaaaaugug

SEQ ID NO: 534727 - RNA, 19 nt, Artificial Sequence
  Description of Artificial Sequence: Synthetic oligonucleotide
gcauacccacaaucagugc

SEQ ID NO: 534728 - RNA, 19 nt, Artificial Sequence
  Description of Artificial Sequence: Synthetic oligonucleotide
aacuuauaucugggccaaa

SEQ ID NO: 534729 - RNA, 19 nt, Artificial Sequence
  Description of Artificial Sequence: Synthetic oligonucleotide
uccuugggauccggaacgu

SEQ ID NO: 534730 - RNA, 19 nt, Artificial Sequence
  Description of Artificial Sequence: Synthetic oligonucleotide
ggaaaccccucacugcaaa

SEQ ID NO: 534731 - RNA, 19 nt, Artificial Sequence
  Description of Artificial Sequence: Synthetic oligonucleotide
aggugguagccuugcugau

SEQ ID NO: 534732 - RNA, 19 nt, Artificial Sequence
  Description of Artificial Sequence: Synthetic oligonucleotide
guauggucacaugcagguc

SEQ ID NO: 534733 - RNA, 19 nt, Artificial Sequence
  Description of Artificial Sequence: Synthetic oligonucleotide
cccaggguuacaacauuuc

SEQ ID NO: 534734 - RNA, 19 nt, Artificial Sequence
  Description of Artificial Sequence: Synthetic oligonucleotide
ccacuguggcgaaggagcc

SEQ ID NO: 534735 - RNA, 19 nt, Artificial Sequence
  Description of Artificial Sequence: Synthetic oligonucleotide
ccuaugccugcaaugggca

SEQ ID NO: 534736 - RNA, 19 nt, Artificial Sequence
  Description of Artificial Sequence: Synthetic oligonucleotide
cgcagaacaggaagauacc

SEQ ID NO: 534737 - RNA, 19 nt, Artificial Sequence
  Description of Artificial Sequence: Synthetic oligonucleotide
agucucccucggaauccac

SEQ ID NO: 534738 - RNA, 19 nt, Artificial Sequence
  Description of Artificial Sequence: Synthetic oligonucleotide
gguuagucagacagguaaa

SEQ ID NO: 534739 - RNA, 19 nt, Artificial Sequence
  Description of Artificial Sequence: Synthetic oligonucleotide
ucacgggguugucgggcaa

SEQ ID NO: 534740 - RNA, 19 nt, Artificial Sequence
  Description of Artificial Sequence: Synthetic oligonucleotide
accuuagugauggccccau

SEQ ID NO: 534741 - RNA, 19 nt, Artificial Sequence
  Description of Artificial Sequence: Synthetic oligonucleotide
cgaaguacgccaggaauug

SEQ ID NO: 534742 - RNA, 19 nt, Artificial Sequence
  Description of Artificial Sequence: Synthetic oligonucleotide
gaagggccgccaggguaag

SEQ ID NO: 534743 - RNA, 19 nt, Artificial Sequence
  Description of Artificial Sequence: Synthetic oligonucleotide
ugcugauaugagggaggaa

SEQ ID NO: 534744 - RNA, 19 nt, Artificial Sequence
  Description of Artificial Sequence: Synthetic oligonucleotide
gcugacacgcacacgcuca

SEQ ID NO: 534745 - RNA, 19 nt, Artificial Sequence
  Description of Artificial Sequence: Synthetic oligonucleotide
gccuguauggucacaugca

SEQ ID NO: 534746 - RNA, 19 nt, Artificial Sequence
  Description of Artificial Sequence: Synthetic oligonucleotide
caucacuaaagcccagcau

SEQ ID NO: 534747 - RNA, 19 nt, Artificial Sequence
  Description of Artificial Sequence: Synthetic oligonucleotide
ccaccgagcgucacagcag

SEQ ID NO: 534748 - RNA, 19 nt, Artificial Sequence
  Description of Artificial Sequence: Synthetic oligonucleotide
cgcacaaggagccggagca

SEQ ID NO: 534749 - RNA, 19 nt, Artificial Sequence
  Description of Artificial Sequence: Synthetic oligonucleotide
ggguugucgggcaaaagcu

SEQ ID NO: 534750 - RNA, 19 nt, Artificial Sequence
  Description of Artificial Sequence: Synthetic oligonucleotide
gcgcacaaggagccggagc

SEQ ID NO: 534751 - RNA, 19 nt, Artificial Sequence
  Description of Artificial Sequence: Synthetic oligonucleotide
gggccaccgagcgucacag

SEQ ID NO: 534752 - RNA, 19 nt, Artificial Sequence
  Description of Artificial Sequence: Synthetic oligonucleotide
agcaugcggugggagcucu

SEQ ID NO: 534753 - RNA, 19 nt, Artificial Sequence
  Description of Artificial Sequence: Synthetic oligonucleotide
cugaaagcuuccacccgcu

SEQ ID NO: 534754 - RNA, 19 nt, Artificial Sequence
  Description of Artificial Sequence: Synthetic oligonucleotide
caaguguaucaucuauuuu

SEQ ID NO: 534755 - RNA, 19 nt, Artificial Sequence
  Description of Artificial Sequence: Synthetic oligonucleotide
cugcacuuaugaggauaug

SEQ ID NO: 534756 - RNA, 19 nt, Artificial Sequence
  Description of Artificial Sequence: Synthetic oligonucleotide
cguagccacaauggcauag

SEQ ID NO: 534757 - RNA, 19 nt, Artificial Sequence
  Description of Artificial Sequence: Synthetic oligonucleotide
agaggugcaugcagaucaa

SEQ ID NO: 534758 - RNA, 19 nt, Artificial Sequence
  Description of Artificial Sequence: Synthetic oligonucleotide
cgcucaaguucaucacggg

SEQ ID NO: 534759 - RNA, 19 nt, Artificial Sequence
  Description of Artificial Sequence: Synthetic oligonucleotide
gcagaucaauacugaaggu

SEQ ID NO: 534760 - RNA, 19 nt, Artificial Sequence
  Description of Artificial Sequence: Synthetic oligonucleotide
guccagcaacugguauggg

SEQ ID NO: 534761 - RNA, 19 nt, Artificial Sequence
  Description of Artificial Sequence: Synthetic oligonucleotide
ccacaguuacgauuagaaa

SEQ ID NO: 534762 - RNA, 19 nt, Artificial Sequence
  Description of Artificial Sequence: Synthetic oligonucleotide
gcaauccuaguugcuagaa

SEQ ID NO: 534763 - RNA, 19 nt, Artificial Sequence
  Description of Artificial Sequence: Synthetic oligonucleotide
caguuacgauuagaaaugu

SEQ ID NO: 534764 - RNA, 19 nt, Artificial Sequence
  Description of Artificial Sequence: Synthetic oligonucleotide
gccgaaguacgccaggaau

SEQ ID NO: 534765 - RNA, 19 nt, Artificial Sequence
  Description of Artificial Sequence: Synthetic oligonucleotide
caggaauugcggcccauau

SEQ ID NO: 534766 - RNA, 19 nt, Artificial Sequence
  Description of Artificial Sequence: Synthetic oligonucleotide
cagggguacagugcaagcu

SEQ ID NO: 534767 - RNA, 19 nt, Artificial Sequence
  Description of Artificial Sequence: Synthetic oligonucleotide
acaccgucgcugaaagcuu

SEQ ID NO: 534768 - RNA, 19 nt, Artificial Sequence
  Description of Artificial Sequence: Synthetic oligonucleotide
cugacacgcacacgcucaa

SEQ ID NO: 534769 - RNA, 19 nt, Artificial Sequence
  Description of Artificial Sequence: Synthetic oligonucleotide
cccaccaaaucgcacagcu

SEQ ID NO: 534770 - RNA, 19 nt, Artificial Sequence
  Description of Artificial Sequence: Synthetic oligonucleotide
aggaaaccccucacugcaa

SEQ ID NO: 534771 - RNA, 19 nt, Artificial Sequence
  Description of Artificial Sequence: Synthetic oligonucleotide
aucgcacagcuggcugcag

SEQ ID NO: 534772 - RNA, 19 nt, Artificial Sequence
  Description of Artificial Sequence: Synthetic oligonucleotide
cccgcucuuugcugagagg

SEQ ID NO: 534773 - RNA, 19 nt, Artificial Sequence
  Description of Artificial Sequence: Synthetic oligonucleotide
gggaugagucucccucgga

SEQ ID NO: 534774 - RNA, 19 nt, Artificial Sequence
  Description of Artificial Sequence: Synthetic oligonucleotide
acgggguugucgggcaaaa

SEQ ID NO: 534775 - RNA, 19 nt, Artificial Sequence
  Description of Artificial Sequence: Synthetic oligonucleotide
ggcccuguauguagagcac

SEQ ID NO: 534776 - RNA, 19 nt, Artificial Sequence
  Description of Artificial Sequence: Synthetic oligonucleotide
guauguugaguagccccau

SEQ ID NO: 534777 - RNA, 19 nt, Artificial Sequence
  Description of Artificial Sequence: Synthetic oligonucleotide
ggcgcagcugacacgcaca

SEQ ID NO: 534778 - RNA, 19 nt, Artificial Sequence
  Description of Artificial Sequence: Synthetic oligonucleotide
ccggagguuccauaggacu

SEQ ID NO: 534779 - RNA, 19 nt, Artificial Sequence
  Description of Artificial Sequence: Synthetic oligonucleotide
cggcccauaugcacccagg

SEQ ID NO: 534780 - RNA, 19 nt, Artificial Sequence
  Description of Artificial Sequence: Synthetic oligonucleotide
gagcacaagguggccugua

SEQ ID NO: 534781 - RNA, 19 nt, Artificial Sequence
  Description of Artificial Sequence: Synthetic oligonucleotide
uagggccaccgagcgucac

SEQ ID NO: 534782 - RNA, 19 nt, Artificial Sequence
  Description of Artificial Sequence: Synthetic oligonucleotide
cgcucuuugcugagaggug

SEQ ID NO: 534783 - RNA, 19 nt, Artificial Sequence
  Description of Artificial Sequence: Synthetic oligonucleotide
gccggagguuccauaggac

SEQ ID NO: 534784 - RNA, 19 nt, Artificial Sequence
  Description of Artificial Sequence: Synthetic oligonucleotide
ccacccgcucuuugcugag

SEQ ID NO: 534785 - RNA, 19 nt, Artificial Sequence
  Description of Artificial Sequence: Synthetic oligonucleotide
ccgcucuuugcugagaggu

SEQ ID NO: 534786 - RNA, 19 nt, Artificial Sequence
  Description of Artificial Sequence: Synthetic oligonucleotide
guagggccaccgagcguca

SEQ ID NO: 534787 - RNA, 19 nt, Artificial Sequence
  Description of Artificial Sequence: Synthetic oligonucleotide
guguagccuuccggacaug

SEQ ID NO: 534788 - RNA, 19 nt, Artificial Sequence
  Description of Artificial Sequence: Synthetic oligonucleotide
cagugacaguauguugagu

SEQ ID NO: 534789 - RNA, 19 nt, Artificial Sequence
  Description of Artificial Sequence: Synthetic oligonucleotide
ggccaccgagcgucacagc

SEQ ID NO: 534790 - RNA, 19 nt, Artificial Sequence
  Description of Artificial Sequence: Synthetic oligonucleotide
cgcacaguacucaggucaa

SEQ ID NO: 534791 - RNA, 19 nt, Artificial Sequence
  Description of Artificial Sequence: Synthetic oligonucleotide
gcccuguauguagagcacu

SEQ ID NO: 534792 - RNA, 19 nt, Artificial Sequence
  Description of Artificial Sequence: Synthetic oligonucleotide
ggaccccuuacaguccuau

SEQ ID NO: 534793 - RNA, 19 nt, Artificial Sequence
  Description of Artificial Sequence: Synthetic oligonucleotide
cacccgcucuuugcugaga

SEQ ID NO: 534794 - RNA, 19 nt, Artificial Sequence
  Description of Artificial Sequence: Synthetic oligonucleotide
gcagacccacuguggcgaa

SEQ ID NO: 534795 - RNA, 19 nt, Artificial Sequence
  Description of Artificial Sequence: Synthetic oligonucleotide
uggccccaugcagcuuauu

SEQ ID NO: 534796 - RNA, 19 nt, Artificial Sequence
  Description of Artificial Sequence: Synthetic oligonucleotide
aggaccccuuacaguccua

SEQ ID NO: 534797 - RNA, 19 nt, Artificial Sequence
  Description of Artificial Sequence: Synthetic oligonucleotide
gcaugcggugggagcucug

SEQ ID NO: 534798 - RNA, 19 nt, Artificial Sequence
  Description of Artificial Sequence: Synthetic oligonucleotide
caucuccauaggaccccuu

SEQ ID NO: 534799 - RNA, 19 nt, Artificial Sequence
  Description of Artificial Sequence: Synthetic oligonucleotide
gcguagccacaauggcaua

SEQ ID NO: 534800 - RNA, 19 nt, Artificial Sequence
  Description of Artificial Sequence: Synthetic oligonucleotide
ccaggaauugcggcccaua

SEQ ID NO: 534801 - RNA, 19 nt, Artificial Sequence
  Description of Artificial Sequence: Synthetic oligonucleotide
ccgucgcugaaagcuucca

SEQ ID NO: 534802 - RNA, 19 nt, Artificial Sequence
  Description of Artificial Sequence: Synthetic oligonucleotide
gccccaggguuacaacauu

SEQ ID NO: 534803 - RNA, 19 nt, Artificial Sequence
  Description of Artificial Sequence: Synthetic oligonucleotide
ccggaacguuguccucaca

SEQ ID NO: 534804 - RNA, 19 nt, Artificial Sequence
  Description of Artificial Sequence: Synthetic oligonucleotide
gcacaguacucaggucaau

SEQ ID NO: 534805 - RNA, 19 nt, Artificial Sequence
  Description of Artificial Sequence: Synthetic oligonucleotide
ccgccaggguaaggcgcac

SEQ ID NO: 534806 - RNA, 19 nt, Artificial Sequence
  Description of Artificial Sequence: Synthetic oligonucleotide
gccaggaauugcggcccau

SEQ ID NO: 534807 - RNA, 19 nt, Artificial Sequence
  Description of Artificial Sequence: Synthetic oligonucleotide
ccuugggauccggaacguu

SEQ ID NO: 534808 - RNA, 19 nt, Artificial Sequence
  Description of Artificial Sequence: Synthetic oligonucleotide
aaaauauacgcuuaggcac

SEQ ID NO: 534809 - RNA, 19 nt, Artificial Sequence
  Description of Artificial Sequence: Synthetic oligonucleotide
uagaccaugaaauacgacg

SEQ ID NO: 534810 - RNA, 19 nt, Artificial Sequence
  Description of Artificial Sequence: Synthetic oligonucleotide
aaucugauaacuaauguuc

SEQ ID NO: 534811 - RNA, 19 nt, Artificial Sequence
  Description of Artificial Sequence: Synthetic oligonucleotide
ugcuuaacaaaacauacgc

SEQ ID NO: 534812 - RNA, 19 nt, Artificial Sequence
  Description of Artificial Sequence: Synthetic oligonucleotide
aaaaucugauaacuaaugu

SEQ ID NO: 534813 - RNA, 19 nt, Artificial Sequence
  Description of Artificial Sequence: Synthetic oligonucleotide
cuaacaugggcccaaagcc

SEQ ID NO: 534814 - RNA, 19 nt, Artificial Sequence
  Description of Artificial Sequence: Synthetic oligonucleotide
aaaucugauaacuaauguu

SEQ ID NO: 534815 - RNA, 19 nt, Artificial Sequence
  Description of Artificial Sequence: Synthetic oligonucleotide
uugcuuaacaaaacauacg

SEQ ID NO: 534816 - RNA, 19 nt, Artificial Sequence
  Description of Artificial Sequence: Synthetic oligonucleotide
aaauauacgcuuaggcacg

SEQ ID NO: 534817 - RNA, 19 nt, Artificial Sequence
  Description of Artificial Sequence: Synthetic oligonucleotide
cuucgaaggacauguaugg

SEQ ID NO: 534818 - RNA, 19 nt, Artificial Sequence
  Description of Artificial Sequence: Synthetic oligonucleotide
ugaaauacgacgcggaguu

SEQ ID NO: 534819 - RNA, 19 nt, Artificial Sequence
  Description of Artificial Sequence: Synthetic oligonucleotide
cuuaacaaaacauacgcaa

SEQ ID NO: 534820 - RNA, 19 nt, Artificial Sequence
  Description of Artificial Sequence: Synthetic oligonucleotide
ugcguuauuggccaugcgc

SEQ ID NO: 534821 - RNA, 19 nt, Artificial Sequence
  Description of Artificial Sequence: Synthetic oligonucleotide
ucugccacguagaaugggg

SEQ ID NO: 534822 - RNA, 19 nt, Artificial Sequence
  Description of Artificial Sequence: Synthetic oligonucleotide
agaccaugaaauacgacgc

SEQ ID NO: 534823 - RNA, 19 nt, Artificial Sequence
  Description of Artificial Sequence: Synthetic oligonucleotide
uuaaccuuguagaccauga

SEQ ID NO: 534824 - RNA, 19 nt, Artificial Sequence
  Description of Artificial Sequence: Synthetic oligonucleotide
uccaguuucgguuaaucga

SEQ ID NO: 534825 - RNA, 19 nt, Artificial Sequence
  Description of Artificial Sequence: Synthetic oligonucleotide
uaugagggguaauacuggg

SEQ ID NO: 534826 - RNA, 19 nt, Artificial Sequence
  Description of Artificial Sequence: Synthetic oligonucleotide
ucgaaggacauguauggcc

SEQ ID NO: 534827 - RNA, 19 nt, Artificial Sequence
  Description of Artificial Sequence: Synthetic oligonucleotide
uuccaguuucgguuaaucg

SEQ ID NO: 534828 - RNA, 19 nt, Artificial Sequence
  Description of Artificial Sequence: Synthetic oligonucleotide
gaguucuagaaacagcaac

SEQ ID NO: 534829 - RNA, 19 nt, Artificial Sequence
  Description of Artificial Sequence: Synthetic oligonucleotide
agugcggugguccaugguc

SEQ ID NO: 534830 - RNA, 19 nt, Artificial Sequence
  Description of Artificial Sequence: Synthetic oligonucleotide
gaagcuuguggucaacgcc

SEQ ID NO: 534831 - RNA, 19 nt, Artificial Sequence
  Description of Artificial Sequence: Synthetic oligonucleotide
agacuggagacuuuuauaa

SEQ ID NO: 534832 - RNA, 19 nt, Artificial Sequence
  Description of Artificial Sequence: Synthetic oligonucleotide
ugccguugaccucagaccc

SEQ ID NO: 534833 - RNA, 19 nt, Artificial Sequence
  Description of Artificial Sequence: Synthetic oligonucleotide
ugugccguugaccucagac

SEQ ID NO: 534834 - RNA, 19 nt, Artificial Sequence
  Description of Artificial Sequence: Synthetic oligonucleotide
uauacgcuuaggcacgaug

SEQ ID NO: 534835 - RNA, 19 nt, Artificial Sequence
  Description of Artificial Sequence: Synthetic oligonucleotide
aguuucgguuaaucgaggg

SEQ ID NO: 534836 - RNA, 19 nt, Artificial Sequence
  Description of Artificial Sequence: Synthetic oligonucleotide
gaugagaagcuggacacag

SEQ ID NO: 534837 - RNA, 19 nt, Artificial Sequence
  Description of Artificial Sequence: Synthetic oligonucleotide
aaauacgacgcggaguucu

SEQ ID NO: 534838 - RNA, 19 nt, Artificial Sequence
  Description of Artificial Sequence: Synthetic oligonucleotide
gacgcggaguucuagaaac

SEQ ID NO: 534839 - RNA, 19 nt, Artificial Sequence
  Description of Artificial Sequence: Synthetic oligonucleotide
ucguuaaugucccgcacgc

SEQ ID NO: 534840 - RNA, 19 nt, Artificial Sequence
  Description of Artificial Sequence: Synthetic oligonucleotide
caaaagacuggcaccacug

SEQ ID NO: 534841 - RNA, 19 nt, Artificial Sequence
  Description of Artificial Sequence: Synthetic oligonucleotide
guuucgguuaaucgagggg

SEQ ID NO: 534842 - RNA, 19 nt, Artificial Sequence
  Description of Artificial Sequence: Synthetic oligonucleotide
acccgauggggauaguggc

SEQ ID NO: 534843 - RNA, 19 nt, Artificial Sequence
  Description of Artificial Sequence: Synthetic oligonucleotide
ucuuccgucuuccacaguu

SEQ ID NO: 534844 - RNA, 19 nt, Artificial Sequence
  Description of Artificial Sequence: Synthetic oligonucleotide
uguggucaacgccccaugg

SEQ ID NO: 534845 - RNA, 19 nt, Artificial Sequence
  Description of Artificial Sequence: Synthetic oligonucleotide
gaccaugaaauacgacgcg

SEQ ID NO: 534846 - RNA, 19 nt, Artificial Sequence
  Description of Artificial Sequence: Synthetic oligonucleotide
ugcuacuuuaauuaaccuu

SEQ ID NO: 534847 - RNA, 19 nt, Artificial Sequence
  Description of Artificial Sequence: Synthetic oligonucleotide
ucugaaaagugagcaugcg

SEQ ID NO: 534848 - RNA, 19 nt, Artificial Sequence
  Description of Artificial Sequence: Synthetic oligonucleotide
uuccgaguccgccauaaga

SEQ ID NO: 534849 - RNA, 19 nt, Artificial Sequence
  Description of Artificial Sequence: Synthetic oligonucleotide
caugccguccgccaagugg

SEQ ID NO: 534850 - RNA, 19 nt, Artificial Sequence
  Description of Artificial Sequence: Synthetic oligonucleotide
uccgccauaagagucaggu

SEQ ID NO: 534851 - RNA, 19 nt, Artificial Sequence
  Description of Artificial Sequence: Synthetic oligonucleotide
caagcgauccuccaucuug

SEQ ID NO: 534852 - RNA, 19 nt, Artificial Sequence
  Description of Artificial Sequence: Synthetic oligonucleotide
ugagcuggguggauacacg

SEQ ID NO: 534853 - RNA, 19 nt, Artificial Sequence
  Description of Artificial Sequence: Synthetic oligonucleotide
uacgcaaaagaaagcuuac

SEQ ID NO: 534854 - RNA, 19 nt, Artificial Sequence
  Description of Artificial Sequence: Synthetic oligonucleotide
uccgccaaguggcaugggg

SEQ ID NO: 534855 - RNA, 19 nt, Artificial Sequence
  Description of Artificial Sequence: Synthetic oligonucleotide
aagugcauccccugagcug

SEQ ID NO: 534856 - RNA, 19 nt, Artificial Sequence
  Description of Artificial Sequence: Synthetic oligonucleotide
gguaugagggguaauacug

SEQ ID NO: 534857 - RNA, 19 nt, Artificial Sequence
  Description of Artificial Sequence: Synthetic oligonucleotide
accaugaaauacgacgcgg

SEQ ID NO: 534858 - RNA, 19 nt, Artificial Sequence
  Description of Artificial Sequence: Synthetic oligonucleotide
ugauaacuaauguucuuuu

SEQ ID NO: 534859 - RNA, 19 nt, Artificial Sequence
  Description of Artificial Sequence: Synthetic oligonucleotide
agagggguaggcuacggca

SEQ ID NO: 534860 - RNA, 19 nt, Artificial Sequence
  Description of Artificial Sequence: Synthetic oligonucleotide
caugaaauacgacgcggag

SEQ ID NO: 534861 - RNA, 19 nt, Artificial Sequence
  Description of Artificial Sequence: Synthetic oligonucleotide
acggcaucccugcuguagc

SEQ ID NO: 534862 - RNA, 19 nt, Artificial Sequence
  Description of Artificial Sequence: Synthetic oligonucleotide
gcuaacaugggcccaaagc

SEQ ID NO: 534863 - RNA, 19 nt, Artificial Sequence
  Description of Artificial Sequence: Synthetic oligonucleotide
guaugagggguaauacugg

SEQ ID NO: 534864 - RNA, 19 nt, Artificial Sequence
  Description of Artificial Sequence: Synthetic oligonucleotide
ucacccgguaggaagccag

SEQ ID NO: 534865 - RNA, 19 nt, Artificial Sequence
  Description of Artificial Sequence: Synthetic oligonucleotide
ucugcuacgccuugcugga

SEQ ID NO: 534866 - RNA, 19 nt, Artificial Sequence
  Description of Artificial Sequence: Synthetic oligonucleotide
agucguccuggguacgccc

SEQ ID NO: 534867 - RNA, 19 nt, Artificial Sequence
  Description of Artificial Sequence: Synthetic oligonucleotide
caccguaagugccaggggc

SEQ ID NO: 534868 - RNA, 19 nt, Artificial Sequence
  Description of Artificial Sequence: Synthetic oligonucleotide
acgcuuaggcacgaugugc

SEQ ID NO: 534869 - RNA, 19 nt, Artificial Sequence
  Description of Artificial Sequence: Synthetic oligonucleotide
cuuaggcacgaugugcugg

SEQ ID NO: 534870 - RNA, 19 nt, Artificial Sequence
  Description of Artificial Sequence: Synthetic oligonucleotide
gguugcugggguaugaggg

SEQ ID NO: 534871 - RNA, 19 nt, Artificial Sequence
  Description of Artificial Sequence: Synthetic oligonucleotide
gauaaccugcacugccugc

SEQ ID NO: 534872 - RNA, 19 nt, Artificial Sequence
  Description of Artificial Sequence: Synthetic oligonucleotide
gucucuggagcccaagccc

SEQ ID NO: 534873 - RNA, 19 nt, Artificial Sequence
  Description of Artificial Sequence: Synthetic oligonucleotide
augccguccgccaaguggc

SEQ ID NO: 534874 - RNA, 19 nt, Artificial Sequence
  Description of Artificial Sequence: Synthetic oligonucleotide
uacgcuuaggcacgaugug

SEQ ID NO: 534875 - RNA, 19 nt, Artificial Sequence
  Description of Artificial Sequence: Synthetic oligonucleotide
guagccgggagauaaggca

SEQ ID NO: 534876 - RNA, 19 nt, Artificial Sequence
  Description of Artificial Sequence: Synthetic oligonucleotide
cugggguucggucagagga

SEQ ID NO: 534877 - RNA, 19 nt, Artificial Sequence
  Description of Artificial Sequence: Synthetic oligonucleotide
gacuggagacuuuuauaac

SEQ ID NO: 534878 - RNA, 19 nt, Artificial Sequence
  Description of Artificial Sequence: Synthetic oligonucleotide
ucuugacacccgaugggga

SEQ ID NO: 534879 - RNA, 19 nt, Artificial Sequence
  Description of Artificial Sequence: Synthetic oligonucleotide
cgccauaagagucaggugg

SEQ ID NO: 534880 - RNA, 19 nt, Artificial Sequence
  Description of Artificial Sequence: Synthetic oligonucleotide
guggauacacggaggaggg

SEQ ID NO: 534881 - RNA, 19 nt, Artificial Sequence
  Description of Artificial Sequence: Synthetic oligonucleotide
uagccgggagauaaggcac

SEQ ID NO: 534882 - RNA, 19 nt, Artificial Sequence
  Description of Artificial Sequence: Synthetic oligonucleotide
ucccgcuugauuucacuug

SEQ ID NO: 534883 - RNA, 19 nt, Artificial Sequence
  Description of Artificial Sequence: Synthetic oligonucleotide
uuaggcacgaugugcuggu

SEQ ID NO: 534884 - RNA, 19 nt, Artificial Sequence
  Description of Artificial Sequence: Synthetic oligonucleotide
cuuucguuuccaguuucgg

SEQ ID NO: 534885 - RNA, 19 nt, Artificial Sequence
  Description of Artificial Sequence: Synthetic oligonucleotide
gacccaugcagcugguagc

SEQ ID NO: 534886 - RNA, 19 nt, Artificial Sequence
  Description of Artificial Sequence: Synthetic oligonucleotide
ccaguuucgguuaaucgag

SEQ ID NO: 534887 - RNA, 19 nt, Artificial Sequence
  Description of Artificial Sequence: Synthetic oligonucleotide
auacgcaaaagaaagcuua

SEQ ID NO: 534888 - RNA, 19 nt, Artificial Sequence
  Description of Artificial Sequence: Synthetic oligonucleotide
auuaaccuuguagaccaug

SEQ ID NO: 534889 - RNA, 19 nt, Artificial Sequence
  Description of Artificial Sequence: Synthetic oligonucleotide
uauugcuggagugguccgg

SEQ ID NO: 534890 - RNA, 19 nt, Artificial Sequence
  Description of Artificial Sequence: Synthetic oligonucleotide
ucguagccgggagauaagg

SEQ ID NO: 534891 - RNA, 19 nt, Artificial Sequence
  Description of Artificial Sequence: Synthetic oligonucleotide
agguuuucggccccgcuca

SEQ ID NO: 534892 - RNA, 19 nt, Artificial Sequence
  Description of Artificial Sequence: Synthetic oligonucleotide
uuucacuugcgcccacugu

SEQ ID NO: 534893 - RNA, 19 nt, Artificial Sequence
  Description of Artificial Sequence: Synthetic oligonucleotide
gaguagaucgaggccagug

SEQ ID NO: 534894 - RNA, 19 nt, Artificial Sequence
  Description of Artificial Sequence: Synthetic oligonucleotide
uuauccgacuugaggugca

SEQ ID NO: 534895 - RNA, 19 nt, Artificial Sequence
  Description of Artificial Sequence: Synthetic oligonucleotide
augaaauacgacgcggagu

SEQ ID NO: 534896 - RNA, 19 nt, Artificial Sequence
  Description of Artificial Sequence: Synthetic oligonucleotide
ucggccaccgacgaguucu

SEQ ID NO: 534897 - RNA, 19 nt, Artificial Sequence
  Description of Artificial Sequence: Synthetic oligonucleotide
auacgcuuaggcacgaugu

SEQ ID NO: 534898 - RNA, 19 nt, Artificial Sequence
  Description of Artificial Sequence: Synthetic oligonucleotide
uccggggaguagaucgagg

SEQ ID NO: 534899 - RNA, 19 nt, Artificial Sequence
  Description of Artificial Sequence: Synthetic oligonucleotide
ugcuacgccuugcuggaga

SEQ ID NO: 534900 - RNA, 19 nt, Artificial Sequence
  Description of Artificial Sequence: Synthetic oligonucleotide
guacuccaaagcuccgccg

SEQ ID NO: 534901 - RNA, 19 nt, Artificial Sequence
  Description of Artificial Sequence: Synthetic oligonucleotide
aaaagugagcaugcggcuu

SEQ ID NO: 534902 - RNA, 19 nt, Artificial Sequence
  Description of Artificial Sequence: Synthetic oligonucleotide
cucccgugcguuauuggcc

SEQ ID NO: 534903 - RNA, 19 nt, Artificial Sequence
  Description of Artificial Sequence: Synthetic oligonucleotide
aauauacgcuuaggcacga

SEQ ID NO: 534904 - RNA, 19 nt, Artificial Sequence
  Description of Artificial Sequence: Synthetic oligonucleotide
gcuaggugagaaauuauug

SEQ ID NO: 534905 - RNA, 19 nt, Artificial Sequence
  Description of Artificial Sequence: Synthetic oligonucleotide
ugaacccacaggcguugag

SEQ ID NO: 534906 - RNA, 19 nt, Artificial Sequence
  Description of Artificial Sequence: Synthetic oligonucleotide
gauacacggaggagggcag

SEQ ID NO: 534907 - RNA, 19 nt, Artificial Sequence
  Description of Artificial Sequence: Synthetic oligonucleotide
uacggcaucccugcuguag

SEQ ID NO: 534908 - RNA, 19 nt, Artificial Sequence
  Description of Artificial Sequence: Synthetic oligonucleotide
aagagugcggugguccaug

SEQ ID NO: 534909 - RNA, 19 nt, Artificial Sequence
  Description of Artificial Sequence: Synthetic oligonucleotide
augucccgcacgcgcaccc

SEQ ID NO: 534910 - RNA, 19 nt, Artificial Sequence
  Description of Artificial Sequence: Synthetic oligonucleotide
uucggucagaggacuguca

SEQ ID NO: 534911 - RNA, 19 nt, Artificial Sequence
  Description of Artificial Sequence: Synthetic oligonucleotide
ucggucagaggacugucau

SEQ ID NO: 534912 - RNA, 19 nt, Artificial Sequence
  Description of Artificial Sequence: Synthetic oligonucleotide
caguuucgguuaaucgagg

SEQ ID NO: 534913 - RNA, 19 nt, Artificial Sequence
  Description of Artificial Sequence: Synthetic oligonucleotide
uucgaaggacauguauggc

SEQ ID NO: 534914 - RNA, 19 nt, Artificial Sequence
  Description of Artificial Sequence: Synthetic oligonucleotide
agagucguccuggguacgc

SEQ ID NO: 534915 - RNA, 19 nt, Artificial Sequence
  Description of Artificial Sequence: Synthetic oligonucleotide
auaaccugcacugccugcu

SEQ ID NO: 534916 - RNA, 19 nt, Artificial Sequence
  Description of Artificial Sequence: Synthetic oligonucleotide
cagcucacccgguaggaag

SEQ ID NO: 534917 - RNA, 19 nt, Artificial Sequence
  Description of Artificial Sequence: Synthetic oligonucleotide
uacgacgcggaguucuaga

SEQ ID NO: 534918 - RNA, 19 nt, Artificial Sequence
  Description of Artificial Sequence: Synthetic oligonucleotide
gguacuccaaagcuccgcc

SEQ ID NO: 534919 - RNA, 19 nt, Artificial Sequence
  Description of Artificial Sequence: Synthetic oligonucleotide
uagcagggcccacagcgug

SEQ ID NO: 534920 - RNA, 19 nt, Artificial Sequence
  Description of Artificial Sequence: Synthetic oligonucleotide
cggguugugagcuucaccc

SEQ ID NO: 534921 - RNA, 19 nt, Artificial Sequence
  Description of Artificial Sequence: Synthetic oligonucleotide
agauaaggcacugggcgcu

SEQ ID NO: 534922 - RNA, 19 nt, Artificial Sequence
  Description of Artificial Sequence: Synthetic oligonucleotide
ccgucuuccacaguuaagg

SEQ ID NO: 534923 - RNA, 19 nt, Artificial Sequence
  Description of Artificial Sequence: Synthetic oligonucleotide
gaaaagugagcaugcggcu

SEQ ID NO: 534924 - RNA, 19 nt, Artificial Sequence
  Description of Artificial Sequence: Synthetic oligonucleotide
uccaagcgauccuccaucu

SEQ ID NO: 534925 - RNA, 19 nt, Artificial Sequence
  Description of Artificial Sequence: Synthetic oligonucleotide
uggugaggccauccucagg

SEQ ID NO: 534926 - RNA, 19 nt, Artificial Sequence
  Description of Artificial Sequence: Synthetic oligonucleotide
ugggguucggucagaggac

SEQ ID NO: 534927 - RNA, 19 nt, Artificial Sequence
  Description of Artificial Sequence: Synthetic oligonucleotide
cacagcggcaagugugccg

SEQ ID NO: 534928 - RNA, 19 nt, Artificial Sequence
  Description of Artificial Sequence: Synthetic oligonucleotide
ugacacccgauggggauag

SEQ ID NO: 534929 - RNA, 19 nt, Artificial Sequence
  Description of Artificial Sequence: Synthetic oligonucleotide
cacugggcgcuccugcucg

SEQ ID NO: 534930 - RNA, 19 nt, Artificial Sequence
  Description of Artificial Sequence: Synthetic oligonucleotide
agggguaggcuacggcauc

SEQ ID NO: 534931 - RNA, 19 nt, Artificial Sequence
  Description of Artificial Sequence: Synthetic oligonucleotide
aaccagaagccagccccgg

SEQ ID NO: 534932 - RNA, 19 nt, Artificial Sequence
  Description of Artificial Sequence: Synthetic oligonucleotide
agcaugcggcuuucguuuc

SEQ ID NO: 534933 - RNA, 19 nt, Artificial Sequence
  Description of Artificial Sequence: Synthetic oligonucleotide
guggucaacgccccauggc

SEQ ID NO: 534934 - RNA, 19 nt, Artificial Sequence
  Description of Artificial Sequence: Synthetic oligonucleotide
gucaacgccccauggccag

SEQ ID NO: 534935 - RNA, 19 nt, Artificial Sequence
  Description of Artificial Sequence: Synthetic oligonucleotide
uccgccgaggguugcuggg

SEQ ID NO: 534936 - RNA, 19 nt, Artificial Sequence
  Description of Artificial Sequence: Synthetic oligonucleotide
cuggguacgccccgggaag

SEQ ID NO: 534937 - RNA, 19 nt, Artificial Sequence
  Description of Artificial Sequence: Synthetic oligonucleotide
gcaugguuaugcaaaagac

SEQ ID NO: 534938 - RNA, 19 nt, Artificial Sequence
  Description of Artificial Sequence: Synthetic oligonucleotide
gggugcauccgauucuucc

SEQ ID NO: 534939 - RNA, 19 nt, Artificial Sequence
  Description of Artificial Sequence: Synthetic oligonucleotide
acagcggcaagugugccgu

SEQ ID NO: 534940 - RNA, 19 nt, Artificial Sequence
  Description of Artificial Sequence: Synthetic oligonucleotide
ucguccuggguacgccccg

SEQ ID NO: 534941 - RNA, 19 nt, Artificial Sequence
  Description of Artificial Sequence: Synthetic oligonucleotide
gcguuauuggccaugcgcc

SEQ ID NO: 534942 - RNA, 19 nt, Artificial Sequence
  Description of Artificial Sequence: Synthetic oligonucleotide
agcuaacaugggcccaaag

SEQ ID NO: 534943 - RNA, 19 nt, Artificial Sequence
  Description of Artificial Sequence: Synthetic oligonucleotide
cagaccagguggaaccuuc

SEQ ID NO: 534944 - RNA, 19 nt, Artificial Sequence
  Description of Artificial Sequence: Synthetic oligonucleotide
ugggguaugagggguaaua

SEQ ID NO: 534945 - RNA, 19 nt, Artificial Sequence
  Description of Artificial Sequence: Synthetic oligonucleotide
auaaggcacugggcgcucc

SEQ ID NO: 534946 - RNA, 19 nt, Artificial Sequence
  Description of Artificial Sequence: Synthetic oligonucleotide
cuucaagcaggccgcuuug

SEQ ID NO: 534947 - RNA, 19 nt, Artificial Sequence
  Description of Artificial Sequence: Synthetic oligonucleotide
guaggcuacggcaucccug

SEQ ID NO: 534948 - RNA, 19 nt, Artificial Sequence
  Description of Artificial Sequence: Synthetic oligonucleotide
acggaauugcugccuggug

SEQ ID NO: 534949 - RNA, 19 nt, Artificial Sequence
  Description of Artificial Sequence: Synthetic oligonucleotide
acacggaggagggcagacc

SEQ ID NO: 534950 - RNA, 19 nt, Artificial Sequence
  Description of Artificial Sequence: Synthetic oligonucleotide
acgccagacaccuuuucuu

SEQ ID NO: 534951 - RNA, 19 nt, Artificial Sequence
  Description of Artificial Sequence: Synthetic oligonucleotide
uggcaugguuaugcaaaag

SEQ ID NO: 534952 - RNA, 19 nt, Artificial Sequence
  Description of Artificial Sequence: Synthetic oligonucleotide
cauguauggccucauccaa

SEQ ID NO: 534953 - RNA, 19 nt, Artificial Sequence
  Description of Artificial Sequence: Synthetic oligonucleotide
gauggggauaguggcccag

SEQ ID NO: 534954 - RNA, 19 nt, Artificial Sequence
  Description of Artificial Sequence: Synthetic oligonucleotide
guggcuucgaaggacaugu

SEQ ID NO: 534955 - RNA, 19 nt, Artificial Sequence
  Description of Artificial Sequence: Synthetic oligonucleotide
cauccccugagcugcuggc

SEQ ID NO: 534956 - RNA, 19 nt, Artificial Sequence
  Description of Artificial Sequence: Synthetic oligonucleotide
ugacaccucacaggugccc

SEQ ID NO: 534957 - RNA, 19 nt, Artificial Sequence
  Description of Artificial Sequence: Synthetic oligonucleotide
acgcaaaagaaagcuuacu

SEQ ID NO: 534958 - RNA, 19 nt, Artificial Sequence
  Description of Artificial Sequence: Synthetic oligonucleotide
ugccccggcggguugugag

SEQ ID NO: 534959 - RNA, 19 nt, Artificial Sequence
  Description of Artificial Sequence: Synthetic oligonucleotide
aggauaaccugcacugccu

SEQ ID NO: 534960 - RNA, 19 nt, Artificial Sequence
  Description of Artificial Sequence: Synthetic oligonucleotide
acacagcggcaagugugcc

SEQ ID NO: 534961 - RNA, 19 nt, Artificial Sequence
  Description of Artificial Sequence: Synthetic oligonucleotide
ggauacacggaggagggca

SEQ ID NO: 534962 - RNA, 19 nt, Artificial Sequence
  Description of Artificial Sequence: Synthetic oligonucleotide
acgacgcggaguucuagaa

SEQ ID NO: 534963 - RNA, 19 nt, Artificial Sequence
  Description of Artificial Sequence: Synthetic oligonucleotide
gcguugaggggcuagguga

SEQ ID NO: 534964 - RNA, 19 nt, Artificial Sequence
  Description of Artificial Sequence: Synthetic oligonucleotide
gaguccgccauaagaguca

SEQ ID NO: 534965 - RNA, 19 nt, Artificial Sequence
  Description of Artificial Sequence: Synthetic oligonucleotide
caucguagccgggagauaa

SEQ ID NO: 534966 - RNA, 19 nt, Artificial Sequence
  Description of Artificial Sequence: Synthetic oligonucleotide
cagacuggagacuuuuaua

SEQ ID NO: 534967 - RNA, 19 nt, Artificial Sequence
  Description of Artificial Sequence: Synthetic oligonucleotide
acacccgauggggauagug

SEQ ID NO: 534968 - RNA, 19 nt, Artificial Sequence
  Description of Artificial Sequence: Synthetic oligonucleotide
ugcccacggaauugcugcc

SEQ ID NO: 534969 - RNA, 19 nt, Artificial Sequence
  Description of Artificial Sequence: Synthetic oligonucleotide
guagaccaugaaauacgac

SEQ ID NO: 534970 - RNA, 19 nt, Artificial Sequence
  Description of Artificial Sequence: Synthetic oligonucleotide
ccggggaguagaucgaggc

SEQ ID NO: 534971 - RNA, 19 nt, Artificial Sequence
  Description of Artificial Sequence: Synthetic oligonucleotide
guacgccccgggaagagug

SEQ ID NO: 534972 - RNA, 19 nt, Artificial Sequence
  Description of Artificial Sequence: Synthetic oligonucleotide
ggguaauacugggagcugc

SEQ ID NO: 534973 - RNA, 19 nt, Artificial Sequence
  Description of Artificial Sequence: Synthetic oligonucleotide
gcuuaacaaaacauacgca

SEQ ID NO: 534974 - RNA, 19 nt, Artificial Sequence
  Description of Artificial Sequence: Synthetic oligonucleotide
gcucccgugcguuauuggc

SEQ ID NO: 534975 - RNA, 19 nt, Artificial Sequence
  Description of Artificial Sequence: Synthetic oligonucleotide
cccgcuugauuucacuugc

SEQ ID NO: 534976 - RNA, 19 nt, Artificial Sequence
  Description of Artificial Sequence: Synthetic oligonucleotide
gagcaugcggcuuucguuu

SEQ ID NO: 534977 - RNA, 19 nt, Artificial Sequence
  Description of Artificial Sequence: Synthetic oligonucleotide
cggaauugcugccuggugc

SEQ ID NO: 534978 - RNA, 19 nt, Artificial Sequence
  Description of Artificial Sequence: Synthetic oligonucleotide
aguccgccauaagagucag

SEQ ID NO: 534979 - RNA, 19 nt, Artificial Sequence
  Description of Artificial Sequence: Synthetic oligonucleotide
ucccacggagacccaugug

SEQ ID NO: 534980 - RNA, 19 nt, Artificial Sequence
  Description of Artificial Sequence: Synthetic oligonucleotide
acgaugugcugguggcucu

SEQ ID NO: 534981 - RNA, 19 nt, Artificial Sequence
  Description of Artificial Sequence: Synthetic oligonucleotide
uccuggguacgccccggga

SEQ ID NO: 534982 - RNA, 19 nt, Artificial Sequence
  Description of Artificial Sequence: Synthetic oligonucleotide
cccaccguaagugccaggg

SEQ ID NO: 534983 - RNA, 19 nt, Artificial Sequence
  Description of Artificial Sequence: Synthetic oligonucleotide
accguaagugccaggggca

SEQ ID NO: 534984 - RNA, 19 nt, Artificial Sequence
  Description of Artificial Sequence: Synthetic oligonucleotide
auccccgaccacgccagac

SEQ ID NO: 534985 - RNA, 19 nt, Artificial Sequence
  Description of Artificial Sequence: Synthetic oligonucleotide
gggacgagccaucagcuaa

SEQ ID NO: 534986 - RNA, 19 nt, Artificial Sequence
  Description of Artificial Sequence: Synthetic oligonucleotide
gccauaagagucagguggc

SEQ ID NO: 534987 - RNA, 19 nt, Artificial Sequence
  Description of Artificial Sequence: Synthetic oligonucleotide
agaucacuagcagggccca

SEQ ID NO: 534988 - RNA, 19 nt, Artificial Sequence
  Description of Artificial Sequence: Synthetic oligonucleotide
aauacgacgcggaguucua

SEQ ID NO: 534989 - RNA, 19 nt, Artificial Sequence
  Description of Artificial Sequence: Synthetic oligonucleotide
augagggguaauacuggga

SEQ ID NO: 534990 - RNA, 19 nt, Artificial Sequence
  Description of Artificial Sequence: Synthetic oligonucleotide
auacgacgcggaguucuag

SEQ ID NO: 534991 - RNA, 19 nt, Artificial Sequence
  Description of Artificial Sequence: Synthetic oligonucleotide
caaagcuccgccgaggggu

SEQ ID NO: 534992 - RNA, 19 nt, Artificial Sequence
  Description of Artificial Sequence: Synthetic oligonucleotide
ucaacgccccauggccagg

SEQ ID NO: 534993 - RNA, 19 nt, Artificial Sequence
  Description of Artificial Sequence: Synthetic oligonucleotide
acaugggcccaaagcccgc

SEQ ID NO: 534994 - RNA, 19 nt, Artificial Sequence
  Description of Artificial Sequence: Synthetic oligonucleotide
gugcguuauuggccaugcg

SEQ ID NO: 534995 - RNA, 19 nt, Artificial Sequence
  Description of Artificial Sequence: Synthetic oligonucleotide
uggauacacggaggagggc

SEQ ID NO: 534996 - RNA, 19 nt, Artificial Sequence
  Description of Artificial Sequence: Synthetic oligonucleotide
ggcguugaggggcuaggug

SEQ ID NO: 534997 - RNA, 19 nt, Artificial Sequence
  Description of Artificial Sequence: Synthetic oligonucleotide
ccagagucguccuggguac

SEQ ID NO: 534998 - RNA, 19 nt, Artificial Sequence
  Description of Artificial Sequence: Synthetic oligonucleotide
cuccgccgaggguugcugg

SEQ ID NO: 534999 - RNA, 19 nt, Artificial Sequence
  Description of Artificial Sequence: Synthetic oligonucleotide
ggugguguguggcccgaag

SEQ ID NO: 535000 - RNA, 19 nt, Artificial Sequence
  Description of Artificial Sequence: Synthetic oligonucleotide
gagucguccuggguacgcc

SEQ ID NO: 535001 - RNA, 19 nt, Artificial Sequence
  Description of Artificial Sequence: Synthetic oligonucleotide
agcgauccuccaucuugcu

SEQ ID NO: 535002 - RNA, 19 nt, Artificial Sequence
  Description of Artificial Sequence: Synthetic oligonucleotide
cacccgguaggaagccagc

SEQ ID NO: 535003 - RNA, 19 nt, Artificial Sequence
  Description of Artificial Sequence: Synthetic oligonucleotide
agcguggcuucgaaggaca

SEQ ID NO: 535004 - RNA, 19 nt, Artificial Sequence
  Description of Artificial Sequence: Synthetic oligonucleotide
cugccacguagaaugggga

SEQ ID NO: 535005 - RNA, 19 nt, Artificial Sequence
  Description of Artificial Sequence: Synthetic oligonucleotide
cugugacgucccuggcagg

SEQ ID NO: 535006 - RNA, 19 nt, Artificial Sequence
  Description of Artificial Sequence: Synthetic oligonucleotide
ccaugaaauacgacgcgga

SEQ ID NO: 535007 - RNA, 19 nt, Artificial Sequence
  Description of Artificial Sequence: Synthetic oligonucleotide
cuuccgaguccgccauaag

SEQ ID NO: 535008 - RNA, 19 nt, Artificial Sequence
  Description of Artificial Sequence: Synthetic oligonucleotide
ccgccaaguggcauggggc

SEQ ID NO: 535009 - RNA, 19 nt, Artificial Sequence
  Description of Artificial Sequence: Synthetic oligonucleotide
caggcguugaggggcuagg

SEQ ID NO: 535010 - RNA, 19 nt, Artificial Sequence
  Description of Artificial Sequence: Synthetic oligonucleotide
caccucguccguacugcug

SEQ ID NO: 535011 - RNA, 19 nt, Artificial Sequence
  Description of Artificial Sequence: Synthetic oligonucleotide
gggguaugagggguaauac

SEQ ID NO: 535012 - RNA, 19 nt, Artificial Sequence
  Description of Artificial Sequence: Synthetic oligonucleotide
gcguggggccuucaggucc

SEQ ID NO: 535013 - RNA, 19 nt, Artificial Sequence
  Description of Artificial Sequence: Synthetic oligonucleotide
uugacacccgauggggaua

SEQ ID NO: 535014 - RNA, 19 nt, Artificial Sequence
  Description of Artificial Sequence: Synthetic oligonucleotide
cccacggagacccauguga

SEQ ID NO: 535015 - RNA, 19 nt, Artificial Sequence
  Description of Artificial Sequence: Synthetic oligonucleotide
gaaauacgacgcggaguuc

SEQ ID NO: 535016 - RNA, 19 nt, Artificial Sequence
  Description of Artificial Sequence: Synthetic oligonucleotide
ggcaccagugcccacggaa

SEQ ID NO: 535017 - RNA, 19 nt, Artificial Sequence
  Description of Artificial Sequence: Synthetic oligonucleotide
ucuccgccgaggguugcug

SEQ ID NO: 535018 - RNA, 19 nt, Artificial Sequence
  Description of Artificial Sequence: Synthetic oligonucleotide
agcggcaagugugccguug

SEQ ID NO: 535019 - RNA, 19 nt, Artificial Sequence
  Description of Artificial Sequence: Synthetic oligonucleotide
aucguagccgggagauaag

SEQ ID NO: 535020 - RNA, 19 nt, Artificial Sequence
  Description of Artificial Sequence: Synthetic oligonucleotide
gauaaggcacugggcgcuc

SEQ ID NO: 535021 - RNA, 19 nt, Artificial Sequence
  Description of Artificial Sequence: Synthetic oligonucleotide
cccgggaagagugcggugg

SEQ ID NO: 535022 - RNA, 19 nt, Artificial Sequence
  Description of Artificial Sequence: Synthetic oligonucleotide
guccguacugcuggugcgc

SEQ ID NO: 535023 - RNA, 19 nt, Artificial Sequence
  Description of Artificial Sequence: Synthetic oligonucleotide
caagugcauccccugagcu

SEQ ID NO: 535024 - RNA, 19 nt, Artificial Sequence
  Description of Artificial Sequence: Synthetic oligonucleotide
cuugacacccgauggggau

SEQ ID NO: 535025 - RNA, 19 nt, Artificial Sequence
  Description of Artificial Sequence: Synthetic oligonucleotide
aacgccccauggccaggca

SEQ ID NO: 535026 - RNA, 19 nt, Artificial Sequence
  Description of Artificial Sequence: Synthetic oligonucleotide
cucggggccacugugacgu

SEQ ID NO: 535027 - RNA, 19 nt, Artificial Sequence
  Description of Artificial Sequence: Synthetic oligonucleotide
gaccacgccagacaccuuu

SEQ ID NO: 535028 - RNA, 19 nt, Artificial Sequence
  Description of Artificial Sequence: Synthetic oligonucleotide
uggcccgaagucccaccgu

SEQ ID NO: 535029 - RNA, 19 nt, Artificial Sequence
  Description of Artificial Sequence: Synthetic oligonucleotide
cgcuugauuucacuugcgc

SEQ ID NO: 535030 - RNA, 19 nt, Artificial Sequence
  Description of Artificial Sequence: Synthetic oligonucleotide
cugcccuuccgaguccgcc

SEQ ID NO: 535031 - RNA, 19 nt, Artificial Sequence
  Description of Artificial Sequence: Synthetic oligonucleotide
guucggucagaggacuguc

SEQ ID NO: 535032 - RNA, 19 nt, Artificial Sequence
  Description of Artificial Sequence: Synthetic oligonucleotide
ccacggagacccaugugac

SEQ ID NO: 535033 - RNA, 19 nt, Artificial Sequence
  Description of Artificial Sequence: Synthetic oligonucleotide
accgacgaguucuccucau

SEQ ID NO: 535034 - RNA, 19 nt, Artificial Sequence
  Description of Artificial Sequence: Synthetic oligonucleotide
gucguccuggguacgcccc

SEQ ID NO: 535035 - RNA, 19 nt, Artificial Sequence
  Description of Artificial Sequence: Synthetic oligonucleotide
gcggaguucuagaaacagc

SEQ ID NO: 535036 - RNA, 19 nt, Artificial Sequence
  Description of Artificial Sequence: Synthetic oligonucleotide
cccgauggggauaguggcc

SEQ ID NO: 535037 - RNA, 19 nt, Artificial Sequence
  Description of Artificial Sequence: Synthetic oligonucleotide
ggugguccauggucccacg

SEQ ID NO: 535038 - RNA, 19 nt, Artificial Sequence
  Description of Artificial Sequence: Synthetic oligonucleotide
agguugcgcucucgcaccu

SEQ ID NO: 535039 - RNA, 19 nt, Artificial Sequence
  Description of Artificial Sequence: Synthetic oligonucleotide
ggauccccgaccacgccag

SEQ ID NO: 535040 - RNA, 19 nt, Artificial Sequence
  Description of Artificial Sequence: Synthetic oligonucleotide
cauaagagucagguggccu

SEQ ID NO: 535041 - RNA, 19 nt, Artificial Sequence
  Description of Artificial Sequence: Synthetic oligonucleotide
uggguacgccccgggaaga

SEQ ID NO: 535042 - RNA, 19 nt, Artificial Sequence
  Description of Artificial Sequence: Synthetic oligonucleotide
ggugcccaugagguuuucg

SEQ ID NO: 535043 - RNA, 19 nt, Artificial Sequence
  Description of Artificial Sequence: Synthetic oligonucleotide
gcuacgccuugcuggagac

SEQ ID NO: 535044 - RNA, 19 nt, Artificial Sequence
  Description of Artificial Sequence: Synthetic oligonucleotide
gccgcuucaagcaggccgc

SEQ ID NO: 535045 - RNA, 19 nt, Artificial Sequence
  Description of Artificial Sequence: Synthetic oligonucleotide
uugcgcucucgcaccugcu

SEQ ID NO: 535046 - RNA, 19 nt, Artificial Sequence
  Description of Artificial Sequence: Synthetic oligonucleotide
ggguaugagggguaauacu

SEQ ID NO: 535047 - RNA, 19 nt, Artificial Sequence
  Description of Artificial Sequence: Synthetic oligonucleotide
gacgagccaucagcuaaca

SEQ ID NO: 535048 - RNA, 19 nt, Artificial Sequence
  Description of Artificial Sequence: Synthetic oligonucleotide
gaggguugcugggguauga

SEQ ID NO: 535049 - RNA, 19 nt, Artificial Sequence
  Description of Artificial Sequence: Synthetic oligonucleotide
cccgaagucccaccguaag

SEQ ID NO: 535050 - RNA, 19 nt, Artificial Sequence
  Description of Artificial Sequence: Synthetic oligonucleotide
cguagccgggagauaaggc

SEQ ID NO: 535051 - RNA, 19 nt, Artificial Sequence
  Description of Artificial Sequence: Synthetic oligonucleotide
caacgccccauggccaggc

SEQ ID NO: 535052 - RNA, 19 nt, Artificial Sequence
  Description of Artificial Sequence: Synthetic oligonucleotide
cagagucguccuggguacg

SEQ ID NO: 535053 - RNA, 19 nt, Artificial Sequence
  Description of Artificial Sequence: Synthetic oligonucleotide
cgaguccgccauaagaguc

SEQ ID NO: 535054 - RNA, 19 nt, Artificial Sequence
  Description of Artificial Sequence: Synthetic oligonucleotide
gcuacggcaucccugcugu

SEQ ID NO: 535055 - RNA, 19 nt, Artificial Sequence
  Description of Artificial Sequence: Synthetic oligonucleotide
agcugguagcucaugcguu

SEQ ID NO: 535056 - RNA, 19 nt, Artificial Sequence
  Description of Artificial Sequence: Synthetic oligonucleotide
gguaggaagccagccugac

SEQ ID NO: 535057 - RNA, 19 nt, Artificial Sequence
  Description of Artificial Sequence: Synthetic oligonucleotide
ccaccgacgaguucuccuc

SEQ ID NO: 535058 - RNA, 19 nt, Artificial Sequence
  Description of Artificial Sequence: Synthetic oligonucleotide
gucccaccguaagugccag

SEQ ID NO: 535059 - RNA, 19 nt, Artificial Sequence
  Description of Artificial Sequence: Synthetic oligonucleotide
uggcuucgaaggacaugua

SEQ ID NO: 535060 - RNA, 19 nt, Artificial Sequence
  Description of Artificial Sequence: Synthetic oligonucleotide
gggauccccgaccacgcca

SEQ ID NO: 535061 - RNA, 19 nt, Artificial Sequence
  Description of Artificial Sequence: Synthetic oligonucleotide
cugcgccuuauccgacuug

SEQ ID NO: 535062 - RNA, 19 nt, Artificial Sequence
  Description of Artificial Sequence: Synthetic oligonucleotide
ccauaagagucagguggcc

SEQ ID NO: 535063 - RNA, 19 nt, Artificial Sequence
  Description of Artificial Sequence: Synthetic oligonucleotide
agggugcauccgauucuuc

SEQ ID NO: 535064 - RNA, 19 nt, Artificial Sequence
  Description of Artificial Sequence: Synthetic oligonucleotide
agccgggagauaaggcacu

SEQ ID NO: 535065 - RNA, 19 nt, Artificial Sequence
  Description of Artificial Sequence: Synthetic oligonucleotide
cacgccagacaccuuuucu

SEQ ID NO: 535066 - RNA, 19 nt, Artificial Sequence
  Description of Artificial Sequence: Synthetic oligonucleotide
ccaaagcuccgccgagggg

SEQ ID NO: 535067 - RNA, 19 nt, Artificial Sequence
  Description of Artificial Sequence: Synthetic oligonucleotide
ccgcuugauuucacuugcg

SEQ ID NO: 535068 - RNA, 19 nt, Artificial Sequence
  Description of Artificial Sequence: Synthetic oligonucleotide
ggcagaugagaagcuggac

SEQ ID NO: 535069 - RNA, 19 nt, Artificial Sequence
  Description of Artificial Sequence: Synthetic oligonucleotide
ggacgagccaucagcuaac

SEQ ID NO: 535070 - RNA, 19 nt, Artificial Sequence
  Description of Artificial Sequence: Synthetic oligonucleotide
ccaccguaagugccagggg

SEQ ID NO: 535071 - RNA, 19 nt, Artificial Sequence
  Description of Artificial Sequence: Synthetic oligonucleotide
acgcggaguucuagaaaca

SEQ ID NO: 535072 - RNA, 19 nt, Artificial Sequence
  Description of Artificial Sequence: Synthetic oligonucleotide
aggcguugaggggcuaggu

SEQ ID NO: 535073 - RNA, 19 nt, Artificial Sequence
  Description of Artificial Sequence: Synthetic oligonucleotide
agugguccggggaguagau

SEQ ID NO: 535074 - RNA, 19 nt, Artificial Sequence
  Description of Artificial Sequence: Synthetic oligonucleotide
gccucugcgagaggucggg

SEQ ID NO: 535075 - RNA, 19 nt, Artificial Sequence
  Description of Artificial Sequence: Synthetic oligonucleotide
cucuucccgcuugauuuca

SEQ ID NO: 535076 - RNA, 19 nt, Artificial Sequence
  Description of Artificial Sequence: Synthetic oligonucleotide
gagggguaggcuacggcau

SEQ ID NO: 535077 - RNA, 19 nt, Artificial Sequence
  Description of Artificial Sequence: Synthetic oligonucleotide
gcgauccuccaucuugcuc

SEQ ID NO: 535078 - RNA, 19 nt, Artificial Sequence
  Description of Artificial Sequence: Synthetic oligonucleotide
ggcuucgaaggacauguau

SEQ ID NO: 535079 - RNA, 19 nt, Artificial Sequence
  Description of Artificial Sequence: Synthetic oligonucleotide
caccgacgaguucuccuca

SEQ ID NO: 535080 - RNA, 19 nt, Artificial Sequence
  Description of Artificial Sequence: Synthetic oligonucleotide
cgugcguuauuggccaugc

SEQ ID NO: 535081 - RNA, 19 nt, Artificial Sequence
  Description of Artificial Sequence: Synthetic oligonucleotide
cgcggaguucuagaaacag

SEQ ID NO: 535082 - RNA, 19 nt, Artificial Sequence
  Description of Artificial Sequence: Synthetic oligonucleotide
ggucaacgccccauggcca

SEQ ID NO: 535083 - RNA, 19 nt, Artificial Sequence
  Description of Artificial Sequence: Synthetic oligonucleotide
agugugccguugaccucag

SEQ ID NO: 535084 - RNA, 19 nt, Artificial Sequence
  Description of Artificial Sequence: Synthetic oligonucleotide
gggguacuccaaagcuccg

SEQ ID NO: 535085 - RNA, 19 nt, Artificial Sequence
  Description of Artificial Sequence: Synthetic oligonucleotide
ccggaaggccucguuaaug

SEQ ID NO: 535086 - RNA, 19 nt, Artificial Sequence
  Description of Artificial Sequence: Synthetic oligonucleotide
ggcugcuaaggcccagcuc

SEQ ID NO: 535087 - RNA, 19 nt, Artificial Sequence
  Description of Artificial Sequence: Synthetic oligonucleotide
ggugcgcgugcguggggcc

SEQ ID NO: 535088 - RNA, 19 nt, Artificial Sequence
  Description of Artificial Sequence: Synthetic oligonucleotide
cgacgaguucuccucauca

SEQ ID NO: 535089 - RNA, 19 nt, Artificial Sequence
  Description of Artificial Sequence: Synthetic oligonucleotide
guccgccauaagagucagg

SEQ ID NO: 535090 - RNA, 19 nt, Artificial Sequence
  Description of Artificial Sequence: Synthetic oligonucleotide
ccacagcguggcuucgaag

SEQ ID NO: 535091 - RNA, 19 nt, Artificial Sequence
  Description of Artificial Sequence: Synthetic oligonucleotide
ccgccauaagagucaggug

SEQ ID NO: 535092 - RNA, 19 nt, Artificial Sequence
  Description of Artificial Sequence: Synthetic oligonucleotide
cccgccgcuucaagcaggc

SEQ ID NO: 535093 - RNA, 19 nt, Artificial Sequence
  Description of Artificial Sequence: Synthetic oligonucleotide
gucugcgccuuauccgacu

SEQ ID NO: 535094 - RNA, 19 nt, Artificial Sequence
  Description of Artificial Sequence: Synthetic oligonucleotide
ccguccgccaaguggcaug

SEQ ID NO: 535095 - RNA, 19 nt, Artificial Sequence
  Description of Artificial Sequence: Synthetic oligonucleotide
agcuccgccgaggggugca

SEQ ID NO: 535096 - RNA, 19 nt, Artificial Sequence
  Description of Artificial Sequence: Synthetic oligonucleotide
gguuuucggccccgcucac

SEQ ID NO: 535097 - RNA, 19 nt, Artificial Sequence
  Description of Artificial Sequence: Synthetic oligonucleotide
ccccgaccacgccagacac

SEQ ID NO: 535098 - RNA, 19 nt, Artificial Sequence
  Description of Artificial Sequence: Synthetic oligonucleotide
ccucgggugcccaugaggu

SEQ ID NO: 535099 - RNA, 19 nt, Artificial Sequence
  Description of Artificial Sequence: Synthetic oligonucleotide
ccguaagugccaggggcag

SEQ ID NO: 535100 - RNA, 19 nt, Artificial Sequence
  Description of Artificial Sequence: Synthetic oligonucleotide
cccgcucacagguggugug

SEQ ID NO: 535101 - RNA, 19 nt, Artificial Sequence
  Description of Artificial Sequence: Synthetic oligonucleotide
gauccccgaccacgccaga

SEQ ID NO: 535102 - RNA, 19 nt, Artificial Sequence
  Description of Artificial Sequence: Synthetic oligonucleotide
ggguaggcuacggcauccc

SEQ ID NO: 535103 - RNA, 19 nt, Artificial Sequence
  Description of Artificial Sequence: Synthetic oligonucleotide
gaagagugcggugguccau

SEQ ID NO: 535104 - RNA, 19 nt, Artificial Sequence
  Description of Artificial Sequence: Synthetic oligonucleotide
ggcccgaagucccaccgua

SEQ ID NO: 535105 - RNA, 19 nt, Artificial Sequence
  Description of Artificial Sequence: Synthetic oligonucleotide
cugcuacgccuugcuggag

SEQ ID NO: 535106 - RNA, 19 nt, Artificial Sequence
  Description of Artificial Sequence: Synthetic oligonucleotide
ggggauccccgaccacgcc

SEQ ID NO: 535107 - RNA, 19 nt, Artificial Sequence
  Description of Artificial Sequence: Synthetic oligonucleotide
ggguacgccccgggaagag

SEQ ID NO: 535108 - RNA, 19 nt, Artificial Sequence
  Description of Artificial Sequence: Synthetic oligonucleotide
ccgggagauaaggcacugg

SEQ ID NO: 535109 - RNA, 19 nt, Artificial Sequence
  Description of Artificial Sequence: Synthetic oligonucleotide
gugaacccacaggcguuga

SEQ ID NO: 535110 - RNA, 19 nt, Artificial Sequence
  Description of Artificial Sequence: Synthetic oligonucleotide
gcucacccgguaggaagcc

SEQ ID NO: 535111 - RNA, 19 nt, Artificial Sequence
  Description of Artificial Sequence: Synthetic oligonucleotide
gguaggcuacggcaucccu

SEQ ID NO: 535112 - RNA, 19 nt, Artificial Sequence
  Description of Artificial Sequence: Synthetic oligonucleotide
ggguucggucagaggacug

SEQ ID NO: 535113 - RNA, 19 nt, Artificial Sequence
  Description of Artificial Sequence: Synthetic oligonucleotide
caggugccccggcggguug

SEQ ID NO: 535114 - RNA, 19 nt, Artificial Sequence
  Description of Artificial Sequence: Synthetic oligonucleotide
cucacccgguaggaagcca

SEQ ID NO: 535115 - RNA, 19 nt, Artificial Sequence
  Description of Artificial Sequence: Synthetic oligonucleotide
gugguccggggaguagauc

SEQ ID NO: 535116 - RNA, 19 nt, Artificial Sequence
  Description of Artificial Sequence: Synthetic oligonucleotide
ggcgucggccaccgacgag

SEQ ID NO: 535117 - RNA, 19 nt, Artificial Sequence
  Description of Artificial Sequence: Synthetic oligonucleotide
ccuggguacgccccgggaa

SEQ ID NO: 535118 - RNA, 19 nt, Artificial Sequence
  Description of Artificial Sequence: Synthetic oligonucleotide
cccgaccacgccagacacc

SEQ ID NO: 535119 - RNA, 19 nt, Artificial Sequence
  Description of Artificial Sequence: Synthetic oligonucleotide
gcgugcguggggccuucag

SEQ ID NO: 535120 - RNA, 19 nt, Artificial Sequence
  Description of Artificial Sequence: Synthetic oligonucleotide
cguccgccaaguggcaugg

SEQ ID NO: 535121 - RNA, 19 nt, Artificial Sequence
  Description of Artificial Sequence: Synthetic oligonucleotide
gccgggagauaaggcacug

SEQ ID NO: 535122 - RNA, 19 nt, Artificial Sequence
  Description of Artificial Sequence: Synthetic oligonucleotide
accacgccagacaccuuuu

SEQ ID NO: 535123 - RNA, 19 nt, Artificial Sequence
  Description of Artificial Sequence: Synthetic oligonucleotide
ggcaccugcccuuccgagu

SEQ ID NO: 535124 - RNA, 19 nt, Artificial Sequence
  Description of Artificial Sequence: Synthetic oligonucleotide
guccgccaaguggcauggg

SEQ ID NO: 535125 - RNA, 19 nt, Artificial Sequence
  Description of Artificial Sequence: Synthetic oligonucleotide
acgucccuggcaggcccug

SEQ ID NO: 535126 - RNA, 19 nt, Artificial Sequence
  Description of Artificial Sequence: Synthetic oligonucleotide
gccccggcggguugugagc

SEQ ID NO: 535127 - RNA, 19 nt, Artificial Sequence
  Description of Artificial Sequence: Synthetic oligonucleotide
ccgacgaguucuccucauc

SEQ ID NO: 535128 - RNA, 19 nt, Artificial Sequence
  Description of Artificial Sequence: Synthetic oligonucleotide
cccggucacccugccaggg

SEQ ID NO: 535129 - RNA, 19 nt, Artificial Sequence
  Description of Artificial Sequence: Synthetic oligonucleotide
ggagagagcuggguuggcu

SEQ ID NO: 535130 - RNA, 19 nt, Artificial Sequence
  Description of Artificial Sequence: Synthetic oligonucleotide
ccgcaugccguccgccaag

SEQ ID NO: 535131 - RNA, 19 nt, Artificial Sequence
  Description of Artificial Sequence: Synthetic oligonucleotide
gguccggggaguagaucga

SEQ ID NO: 535132 - RNA, 19 nt, Artificial Sequence
  Description of Artificial Sequence: Synthetic oligonucleotide
ggucugcgccuuauccgac

SEQ ID NO: 535133 - RNA, 19 nt, Artificial Sequence
  Description of Artificial Sequence: Synthetic oligonucleotide
cgcucccgugcguuauugg

SEQ ID NO: 535134 - RNA, 19 nt, Artificial Sequence
  Description of Artificial Sequence: Synthetic oligonucleotide
ccacgccagacaccuuuuc

SEQ ID NO: 535135 - RNA, 19 nt, Artificial Sequence
  Description of Artificial Sequence: Synthetic oligonucleotide
ggggacgagccaucagcua

SEQ ID NO: 535136 - RNA, 19 nt, Artificial Sequence
  Description of Artificial Sequence: Synthetic oligonucleotide
gguugcgcucucgcaccug

SEQ ID NO: 535137 - RNA, 19 nt, Artificial Sequence
  Description of Artificial Sequence: Synthetic oligonucleotide
gcgcacccgcucccgugcg

SEQ ID NO: 535138 - RNA, 19 nt, Artificial Sequence
  Description of Artificial Sequence: Synthetic oligonucleotide
cgcuuaggcacgaugugcu

SEQ ID NO: 535139 - RNA, 19 nt, Artificial Sequence
  Description of Artificial Sequence: Synthetic oligonucleotide
ggcggguugugagcuucac

SEQ ID NO: 535140 - RNA, 19 nt, Artificial Sequence
  Description of Artificial Sequence: Synthetic oligonucleotide
ccgaccacgccagacaccu

SEQ ID NO: 535141 - RNA, 19 nt, Artificial Sequence
  Description of Artificial Sequence: Synthetic oligonucleotide
ccuuccgaguccgccauaa

SEQ ID NO: 535142 - RNA, 19 nt, Artificial Sequence
  Description of Artificial Sequence: Synthetic oligonucleotide
gcccgcaugccguccgcca

SEQ ID NO: 535143 - RNA, 19 nt, Artificial Sequence
  Description of Artificial Sequence: Synthetic oligonucleotide
ccgugcguuauuggccaug

SEQ ID NO: 535144 - RNA, 19 nt, Artificial Sequence
  Description of Artificial Sequence: Synthetic oligonucleotide
gggguucggucagaggacu

SEQ ID NO: 535145 - RNA, 19 nt, Artificial Sequence
  Description of Artificial Sequence: Synthetic oligonucleotide
ggcccacagcguggcuucg

SEQ ID NO: 535146 - RNA, 19 nt, Artificial Sequence
  Description of Artificial Sequence: Synthetic oligonucleotide
cagggugcauccgauucuu

SEQ ID NO: 535147 - RNA, 19 nt, Artificial Sequence
  Description of Artificial Sequence: Synthetic oligonucleotide
ccgauucuuccgucuucca

SEQ ID NO: 535148 - RNA, 19 nt, Artificial Sequence
  Description of Artificial Sequence: Synthetic oligonucleotide
ccgaguccgccauaagagu

SEQ ID NO: 535149 - RNA, 19 nt, Artificial Sequence
  Description of Artificial Sequence: Synthetic oligonucleotide
gacgucccuggcaggcccu

SEQ ID NO: 535150 - RNA, 19 nt, Artificial Sequence
  Description of Artificial Sequence: Synthetic oligonucleotide
aggugguguguggcccgaa

SEQ ID NO: 535151 - RNA, 19 nt, Artificial Sequence
  Description of Artificial Sequence: Synthetic oligonucleotide
gugugccguugaccucaga

SEQ ID NO: 535152 - RNA, 19 nt, Artificial Sequence
  Description of Artificial Sequence: Synthetic oligonucleotide
ccgaagucccaccguaagu

SEQ ID NO: 535153 - RNA, 19 nt, Artificial Sequence
  Description of Artificial Sequence: Synthetic oligonucleotide
ccggcggguugugagcuuc

SEQ ID NO: 535154 - RNA, 19 nt, Artificial Sequence
  Description of Artificial Sequence: Synthetic oligonucleotide
cuacggcaucccugcugua

SEQ ID NO: 535155 - RNA, 19 nt, Artificial Sequence
  Description of Artificial Sequence: Synthetic oligonucleotide
cauggggccggggaagcuu

SEQ ID NO: 535156 - RNA, 19 nt, Artificial Sequence
  Description of Artificial Sequence: Synthetic oligonucleotide
cagacccaugcagcuggua

SEQ ID NO: 535157 - RNA, 19 nt, Artificial Sequence
  Description of Artificial Sequence: Synthetic oligonucleotide
ccccgggaagagugcggug

SEQ ID NO: 535158 - RNA, 19 nt, Artificial Sequence
  Description of Artificial Sequence: Synthetic oligonucleotide
cucgggugcccaugagguu

SEQ ID NO: 535159 - RNA, 19 nt, Artificial Sequence
  Description of Artificial Sequence: Synthetic oligonucleotide
gguacgccccgggaagagu

SEQ ID NO: 535160 - RNA, 19 nt, Artificial Sequence
  Description of Artificial Sequence: Synthetic oligonucleotide
gggcuaggugagaaauuau

SEQ ID NO: 535161 - RNA, 19 nt, Artificial Sequence
  Description of Artificial Sequence: Synthetic oligonucleotide
cgacgcggaguucuagaaa

SEQ ID NO: 535162 - RNA, 19 nt, Artificial Sequence
  Description of Artificial Sequence: Synthetic oligonucleotide
cgaggguugcugggguaug

SEQ ID NO: 535163 - RNA, 19 nt, Artificial Sequence
  Description of Artificial Sequence: Synthetic oligonucleotide
gcccgaagucccaccguaa

SEQ ID NO: 535164 - RNA, 19 nt, Artificial Sequence
  Description of Artificial Sequence: Synthetic oligonucleotide
ccaccaaccaggcccgcau

SEQ ID NO: 535165 - RNA, 19 nt, Artificial Sequence
  Description of Artificial Sequence: Synthetic oligonucleotide
gugcgcgugcguggggccu

SEQ ID NO: 535166 - RNA, 19 nt, Artificial Sequence
  Description of Artificial Sequence: Synthetic oligonucleotide
cccgcaugccguccgccaa

SEQ ID NO: 535167 - RNA, 19 nt, Artificial Sequence
  Description of Artificial Sequence: Synthetic oligonucleotide
gcccuuccgaguccgccau

SEQ ID NO: 535168 - RNA, 19 nt, Artificial Sequence
  Description of Artificial Sequence: Synthetic oligonucleotide
gugccccggcggguuguga

SEQ ID NO: 535169 - RNA, 19 nt, Artificial Sequence
  Description of Artificial Sequence: Synthetic oligonucleotide
gccccgggaagagugcggu

SEQ ID NO: 535170 - RNA, 19 nt, Artificial Sequence
  Description of Artificial Sequence: Synthetic oligonucleotide
gcccacggaauugcugccu

SEQ ID NO: 535171 - RNA, 19 nt, Artificial Sequence
  Description of Artificial Sequence: Synthetic oligonucleotide
cugggguaugagggguaau

SEQ ID NO: 535172 - RNA, 19 nt, Artificial Sequence
  Description of Artificial Sequence: Synthetic oligonucleotide
gcccacagcguggcuucga

SEQ ID NO: 535173 - RNA, 19 nt, Artificial Sequence
  Description of Artificial Sequence: Synthetic oligonucleotide
gacacccgauggggauagu

SEQ ID NO: 535174 - RNA, 19 nt, Artificial Sequence
  Description of Artificial Sequence: Synthetic oligonucleotide
cggccaccgacgaguucuc

SEQ ID NO: 535175 - RNA, 19 nt, Artificial Sequence
  Description of Artificial Sequence: Synthetic oligonucleotide
ccaagcgauccuccaucuu

SEQ ID NO: 535176 - RNA, 19 nt, Artificial Sequence
  Description of Artificial Sequence: Synthetic oligonucleotide
cggcggguugugagcuuca

SEQ ID NO: 535177 - RNA, 19 nt, Artificial Sequence
  Description of Artificial Sequence: Synthetic oligonucleotide
gcguggcuucgaaggacau

SEQ ID NO: 535178 - RNA, 19 nt, Artificial Sequence
  Description of Artificial Sequence: Synthetic oligonucleotide
ccguacugcuggugcgcgu

SEQ ID NO: 535179 - RNA, 19 nt, Artificial Sequence
  Description of Artificial Sequence: Synthetic oligonucleotide
gcacccgcucccgugcguu

SEQ ID NO: 535180 - RNA, 19 nt, Artificial Sequence
  Description of Artificial Sequence: Synthetic oligonucleotide
cggcgucggccaccgacga

SEQ ID NO: 535181 - RNA, 19 nt, Artificial Sequence
  Description of Artificial Sequence: Synthetic oligonucleotide
ccccggcggguugugagcu

SEQ ID NO: 535182 - RNA, 19 nt, Artificial Sequence
  Description of Artificial Sequence: Synthetic oligonucleotide
cagcggcaagugugccguu

SEQ ID NO: 535183 - RNA, 19 nt, Artificial Sequence
  Description of Artificial Sequence: Synthetic oligonucleotide
ccggaccuucuugggcugu

SEQ ID NO: 535184 - RNA, 19 nt, Artificial Sequence
  Description of Artificial Sequence: Synthetic oligonucleotide
ccgccgaggggugcaggcu

SEQ ID NO: 535185 - RNA, 19 nt, Artificial Sequence
  Description of Artificial Sequence: Synthetic oligonucleotide
cccgugcguuauuggccau

SEQ ID NO: 535186 - RNA, 19 nt, Artificial Sequence
  Description of Artificial Sequence: Synthetic oligonucleotide
cgucggccaccgacgaguu

SEQ ID NO: 535187 - RNA, 19 nt, Artificial Sequence
  Description of Artificial Sequence: Synthetic oligonucleotide
ccgcuucaagcaggccgcu

SEQ ID NO: 535188 - RNA, 19 nt, Artificial Sequence
  Description of Artificial Sequence: Synthetic oligonucleotide
cgaccacgccagacaccuu

SEQ ID NO: 535189 - RNA, 19 nt, Artificial Sequence
  Description of Artificial Sequence: Synthetic oligonucleotide
auagaaggcguccauaugc

SEQ ID NO: 535190 - RNA, 19 nt, Artificial Sequence
  Description of Artificial Sequence: Synthetic oligonucleotide
agaacauggauuuccagcc

SEQ ID NO: 535191 - RNA, 19 nt, Artificial Sequence
  Description of Artificial Sequence: Synthetic oligonucleotide
agaaauacagcccaggcug

SEQ ID NO: 535192 - RNA, 19 nt, Artificial Sequence
  Description of Artificial Sequence: Synthetic oligonucleotide
aguucacccagacacaugc

SEQ ID NO: 535193 - RNA, 19 nt, Artificial Sequence
  Description of Artificial Sequence: Synthetic oligonucleotide
gacgaguucacccagacac

SEQ ID NO: 535194 - RNA, 19 nt, Artificial Sequence
  Description of Artificial Sequence: Synthetic oligonucleotide
ugugcuaggaccucggcgg

SEQ ID NO: 535195 - RNA, 19 nt, Artificial Sequence
  Description of Artificial Sequence: Synthetic oligonucleotide
aagcggauaaacgauggcc

SEQ ID NO: 535196 - RNA, 19 nt, Artificial Sequence
  Description of Artificial Sequence: Synthetic oligonucleotide
aauagagcggcuccaggcg

SEQ ID NO: 535197 - RNA, 19 nt, Artificial Sequence
  Description of Artificial Sequence: Synthetic oligonucleotide
uuuauucacaccugacugg

SEQ ID NO: 535198 - RNA, 19 nt, Artificial Sequence
  Description of Artificial Sequence: Synthetic oligonucleotide
uucacaagcggauaaacga

SEQ ID NO: 535199 - RNA, 19 nt, Artificial Sequence
  Description of Artificial Sequence: Synthetic oligonucleotide
acuguaguacaccuucugc

SEQ ID NO: 535200 - RNA, 19 nt, Artificial Sequence
  Description of Artificial Sequence: Synthetic oligonucleotide
gagaacauggauuuccagc

SEQ ID NO: 535201 - RNA, 19 nt, Artificial Sequence
  Description of Artificial Sequence: Synthetic oligonucleotide
uguuuauucacaccugacu

SEQ ID NO: 535202 - RNA, 19 nt, Artificial Sequence
  Description of Artificial Sequence: Synthetic oligonucleotide
agagacauuguuuguaaag

SEQ ID NO: 535203 - RNA, 19 nt, Artificial Sequence
  Description of Artificial Sequence: Synthetic oligonucleotide
uauucucagccucacggcg

SEQ ID NO: 535204 - RNA, 19 nt, Artificial Sequence
  Description of Artificial Sequence: Synthetic oligonucleotide
aggauauuguccaggaucc

SEQ ID NO: 535205 - RNA, 19 nt, Artificial Sequence
  Description of Artificial Sequence: Synthetic oligonucleotide
cuuagcugaagcaucacug

SEQ ID NO: 535206 - RNA, 19 nt, Artificial Sequence
  Description of Artificial Sequence: Synthetic oligonucleotide
caugaugucaagugcuucg

SEQ ID NO: 535207 - RNA, 19 nt, Artificial Sequence
  Description of Artificial Sequence: Synthetic oligonucleotide
auagcaggacaguaucugc

SEQ ID NO: 535208 - RNA, 19 nt, Artificial Sequence
  Description of Artificial Sequence: Synthetic oligonucleotide
agugcuguuuauucacacc

SEQ ID NO: 535209 - RNA, 19 nt, Artificial Sequence
  Description of Artificial Sequence: Synthetic oligonucleotide
ugacaauccggccaaaggu

SEQ ID NO: 535210 - RNA, 19 nt, Artificial Sequence
  Description of Artificial Sequence: Synthetic oligonucleotide
ucugagaacauggauuucc

SEQ ID NO: 535211 - RNA, 19 nt, Artificial Sequence
  Description of Artificial Sequence: Synthetic oligonucleotide
guaaggaccucuuuccagg

SEQ ID NO: 535212 - RNA, 19 nt, Artificial Sequence
  Description of Artificial Sequence: Synthetic oligonucleotide
aauauucucucgugcaccu

SEQ ID NO: 535213 - RNA, 19 nt, Artificial Sequence
  Description of Artificial Sequence: Synthetic oligonucleotide
uuggucguucuccaggagg

SEQ ID NO: 535214 - RNA, 19 nt, Artificial Sequence
  Description of Artificial Sequence: Synthetic oligonucleotide
ugcacggucugccaggcgg

SEQ ID NO: 535215 - RNA, 19 nt, Artificial Sequence
  Description of Artificial Sequence: Synthetic oligonucleotide
acauggacaccuuuaauga

SEQ ID NO: 535216 - RNA, 19 nt, Artificial Sequence
  Description of Artificial Sequence: Synthetic oligonucleotide
cuucacaagcggauaaacg

SEQ ID NO: 535217 - RNA, 19 nt, Artificial Sequence
  Description of Artificial Sequence: Synthetic oligonucleotide
gugagacagaaguuggucg

SEQ ID NO: 535218 - RNA, 19 nt, Artificial Sequence
  Description of Artificial Sequence: Synthetic oligonucleotide
uggggugccacuuuugcag

SEQ ID NO: 535219 - RNA, 19 nt, Artificial Sequence
  Description of Artificial Sequence: Synthetic oligonucleotide
guaacuguaguacaccuuc

SEQ ID NO: 535220 - RNA, 19 nt, Artificial Sequence
  Description of Artificial Sequence: Synthetic oligonucleotide
aggcaauauucucucgugc

SEQ ID NO: 535221 - RNA, 19 nt, Artificial Sequence
  Description of Artificial Sequence: Synthetic oligonucleotide
cagaccucccacaugagcc

SEQ ID NO: 535222 - RNA, 19 nt, Artificial Sequence
  Description of Artificial Sequence: Synthetic oligonucleotide
aacauggauuuccagccca

SEQ ID NO: 535223 - RNA, 19 nt, Artificial Sequence
  Description of Artificial Sequence: Synthetic oligonucleotide
ucccacaugagccugugga

SEQ ID NO: 535224 - RNA, 19 nt, Artificial Sequence
  Description of Artificial Sequence: Synthetic oligonucleotide
guccuugaaguucauaggc

SEQ ID NO: 535225 - RNA, 19 nt, Artificial Sequence
  Description of Artificial Sequence: Synthetic oligonucleotide
aggggaauagagcggcucc

SEQ ID NO: 535226 - RNA, 19 nt, Artificial Sequence
  Description of Artificial Sequence: Synthetic oligonucleotide
agugucucaaagauguggg

SEQ ID NO: 535227 - RNA, 19 nt, Artificial Sequence
  Description of Artificial Sequence: Synthetic oligonucleotide
agcuguuugcccucaugcc

SEQ ID NO: 535228 - RNA, 19 nt, Artificial Sequence
  Description of Artificial Sequence: Synthetic oligonucleotide
augucuaugaggcucugca

SEQ ID NO: 535229 - RNA, 19 nt, Artificial Sequence
  Description of Artificial Sequence: Synthetic oligonucleotide
ucguaauuggggcuguuac

SEQ ID NO: 535230 - RNA, 19 nt, Artificial Sequence
  Description of Artificial Sequence: Synthetic oligonucleotide
uaaugccuaugucuggacc

SEQ ID NO: 535231 - RNA, 19 nt, Artificial Sequence
  Description of Artificial Sequence: Synthetic oligonucleotide
agguaggcaauauucucuc

SEQ ID NO: 535232 - RNA, 19 nt, Artificial Sequence
  Description of Artificial Sequence: Synthetic oligonucleotide
ucauccggcacacugugcu

SEQ ID NO: 535233 - RNA, 19 nt, Artificial Sequence
  Description of Artificial Sequence: Synthetic oligonucleotide
aaguccaccaucgggucac

SEQ ID NO: 535234 - RNA, 19 nt, Artificial Sequence
  Description of Artificial Sequence: Synthetic oligonucleotide
ugagacagaaguuggucgu

SEQ ID NO: 535235 - RNA, 19 nt, Artificial Sequence
  Description of Artificial Sequence: Synthetic oligonucleotide
uguaguacaccuucugcuc

SEQ ID NO: 535236 - RNA, 19 nt, Artificial Sequence
  Description of Artificial Sequence: Synthetic oligonucleotide
guaauuggggcuguuacug

SEQ ID NO: 535237 - RNA, 19 nt, Artificial Sequence
  Description of Artificial Sequence: Synthetic oligonucleotide
agguguagagcuguuugcc

SEQ ID NO: 535238 - RNA, 19 nt, Artificial Sequence
  Description of Artificial Sequence: Synthetic oligonucleotide
caugaacacaauguugugc

SEQ ID NO: 535239 - RNA, 19 nt, Artificial Sequence
  Description of Artificial Sequence: Synthetic oligonucleotide
auccagaccucccacauga

SEQ ID NO: 535240 - RNA, 19 nt, Artificial Sequence
  Description of Artificial Sequence: Synthetic oligonucleotide
ucagauugugaagagccug

SEQ ID NO: 535241 - RNA, 19 nt, Artificial Sequence
  Description of Artificial Sequence: Synthetic oligonucleotide
augacgaguucacccagac

SEQ ID NO: 535242 - RNA, 19 nt, Artificial Sequence
  Description of Artificial Sequence: Synthetic oligonucleotide
acugcgaggaccuggagau

SEQ ID NO: 535243 - RNA, 19 nt, Artificial Sequence
  Description of Artificial Sequence: Synthetic oligonucleotide
acuaccaggacugcgagga

SEQ ID NO: 535244 - RNA, 19 nt, Artificial Sequence
  Description of Artificial Sequence: Synthetic oligonucleotide
aaagaugugggcacacuca

SEQ ID NO: 535245 - RNA, 19 nt, Artificial Sequence
  Description of Artificial Sequence: Synthetic oligonucleotide
auagagacauuguuuguaa

SEQ ID NO: 535246 - RNA, 19 nt, Artificial Sequence
  Description of Artificial Sequence: Synthetic oligonucleotide
gauugugaagagccuggag

SEQ ID NO: 535247 - RNA, 19 nt, Artificial Sequence
  Description of Artificial Sequence: Synthetic oligonucleotide
aagaaccugacuaccagga

SEQ ID NO: 535248 - RNA, 19 nt, Artificial Sequence
  Description of Artificial Sequence: Synthetic oligonucleotide
ucgugggacaggcugacca

SEQ ID NO: 535249 - RNA, 19 nt, Artificial Sequence
  Description of Artificial Sequence: Synthetic oligonucleotide
uaaggaccucuuuccaggg

SEQ ID NO: 535250 - RNA, 19 nt, Artificial Sequence
  Description of Artificial Sequence: Synthetic oligonucleotide
ugucuggacccucugcuca

SEQ ID NO: 535251 - RNA, 19 nt, Artificial Sequence
  Description of Artificial Sequence: Synthetic oligonucleotide
agcuugggcacgauguucc

SEQ ID NO: 535252 - RNA, 19 nt, Artificial Sequence
  Description of Artificial Sequence: Synthetic oligonucleotide
uccuuugccaggcaagaaa

SEQ ID NO: 535253 - RNA, 19 nt, Artificial Sequence
  Description of Artificial Sequence: Synthetic oligonucleotide
gauauuguccaggauccac

SEQ ID NO: 535254 - RNA, 19 nt, Artificial Sequence
  Description of Artificial Sequence: Synthetic oligonucleotide
cuugacggagggaugugcc

SEQ ID NO: 535255 - RNA, 19 nt, Artificial Sequence
  Description of Artificial Sequence: Synthetic oligonucleotide
gaugagcuuagcugaagca

SEQ ID NO: 535256 - RNA, 19 nt, Artificial Sequence
  Description of Artificial Sequence: Synthetic oligonucleotide
cagugucucaaagaugugg

SEQ ID NO: 535257 - RNA, 19 nt, Artificial Sequence
  Description of Artificial Sequence: Synthetic oligonucleotide
aaccugugggcaucucagg

SEQ ID NO: 535258 - RNA, 19 nt, Artificial Sequence
  Description of Artificial Sequence: Synthetic oligonucleotide
caauauucucucgugcacc

SEQ ID NO: 535259 - RNA, 19 nt, Artificial Sequence
  Description of Artificial Sequence: Synthetic oligonucleotide
gacaauccggccaaaggug

SEQ ID NO: 535260 - RNA, 19 nt, Artificial Sequence
  Description of Artificial Sequence: Synthetic oligonucleotide
cugggcgacaacauuccgg

SEQ ID NO: 535261 - RNA, 19 nt, Artificial Sequence
  Description of Artificial Sequence: Synthetic oligonucleotide
caggguugugccuaaugcc

SEQ ID NO: 535262 - RNA, 19 nt, Artificial Sequence
  Description of Artificial Sequence: Synthetic oligonucleotide
gcacaaauaccacaccccg

SEQ ID NO: 535263 - RNA, 19 nt, Artificial Sequence
  Description of Artificial Sequence: Synthetic oligonucleotide
cacaaauaccacaccccgg

SEQ ID NO: 535264 - RNA, 19 nt, Artificial Sequence
  Description of Artificial Sequence: Synthetic oligonucleotide
gguaucacaucacauucug

SEQ ID NO: 535265 - RNA, 19 nt, Artificial Sequence
  Description of Artificial Sequence: Synthetic oligonucleotide
ugacuaccaggacugcgag

SEQ ID NO: 535266 - RNA, 19 nt, Artificial Sequence
  Description of Artificial Sequence: Synthetic oligonucleotide
cuccucgugugcuaggacc

SEQ ID NO: 535267 - RNA, 19 nt, Artificial Sequence
  Description of Artificial Sequence: Synthetic oligonucleotide
cuguuugcccucaugccgc

SEQ ID NO: 535268 - RNA, 19 nt, Artificial Sequence
  Description of Artificial Sequence: Synthetic oligonucleotide
ugccaguaaaggcagcccu

SEQ ID NO: 535269 - RNA, 19 nt, Artificial Sequence
  Description of Artificial Sequence: Synthetic oligonucleotide
ucgggcagugcaaagccug

SEQ ID NO: 535270 - RNA, 19 nt, Artificial Sequence
  Description of Artificial Sequence: Synthetic oligonucleotide
ugguaucacaucacauucu

SEQ ID NO: 535271 - RNA, 19 nt, Artificial Sequence
  Description of Artificial Sequence: Synthetic oligonucleotide
gcuguuugcccucaugccg

SEQ ID NO: 535272 - RNA, 19 nt, Artificial Sequence
  Description of Artificial Sequence: Synthetic oligonucleotide
ugaaggccucccaggaucc

SEQ ID NO: 535273 - RNA, 19 nt, Artificial Sequence
  Description of Artificial Sequence: Synthetic oligonucleotide
ugugagacagaaguugguc

SEQ ID NO: 535274 - RNA, 19 nt, Artificial Sequence
  Description of Artificial Sequence: Synthetic oligonucleotide
ucccaaauagagacauugu

SEQ ID NO: 535275 - RNA, 19 nt, Artificial Sequence
  Description of Artificial Sequence: Synthetic oligonucleotide
augaucugggugccauagc

SEQ ID NO: 535276 - RNA, 19 nt, Artificial Sequence
  Description of Artificial Sequence: Synthetic oligonucleotide
gugugcuaggaccucggcg

SEQ ID NO: 535277 - RNA, 19 nt, Artificial Sequence
  Description of Artificial Sequence: Synthetic oligonucleotide
gcaagaugagcuuagcuga

SEQ ID NO: 535278 - RNA, 19 nt, Artificial Sequence
  Description of Artificial Sequence: Synthetic oligonucleotide
gaacauggauuuccagccc

SEQ ID NO: 535279 - RNA, 19 nt, Artificial Sequence
  Description of Artificial Sequence: Synthetic oligonucleotide
uugagacagagaucauccc

SEQ ID NO: 535280 - RNA, 19 nt, Artificial Sequence
  Description of Artificial Sequence: Synthetic oligonucleotide
aguuuaaagugcuguuuau

SEQ ID NO: 535281 - RNA, 19 nt, Artificial Sequence
  Description of Artificial Sequence: Synthetic oligonucleotide
uuguccuugacggagggau

SEQ ID NO: 535282 - RNA, 19 nt, Artificial Sequence
  Description of Artificial Sequence: Synthetic oligonucleotide
gcucagauugugaagagcc

SEQ ID NO: 535283 - RNA, 19 nt, Artificial Sequence
  Description of Artificial Sequence: Synthetic oligonucleotide
aaguccuuccugcgcuccg

SEQ ID NO: 535284 - RNA, 19 nt, Artificial Sequence
  Description of Artificial Sequence: Synthetic oligonucleotide
uguaacuguaguacaccuu

SEQ ID NO: 535285 - RNA, 19 nt, Artificial Sequence
  Description of Artificial Sequence: Synthetic oligonucleotide
ugcauguaggcacccacau

SEQ ID NO: 535286 - RNA, 19 nt, Artificial Sequence
  Description of Artificial Sequence: Synthetic oligonucleotide
uuccggacaaaaggcaucc

SEQ ID NO: 535287 - RNA, 19 nt, Artificial Sequence
  Description of Artificial Sequence: Synthetic oligonucleotide
ugugccuaaugccuauguc

SEQ ID NO: 535288 - RNA, 19 nt, Artificial Sequence
  Description of Artificial Sequence: Synthetic oligonucleotide
cuguuuauucacaccugac

SEQ ID NO: 535289 - RNA, 19 nt, Artificial Sequence
  Description of Artificial Sequence: Synthetic oligonucleotide
caugucgaucaccuugacc

SEQ ID NO: 535290 - RNA, 19 nt, Artificial Sequence
  Description of Artificial Sequence: Synthetic oligonucleotide
gaaguuggucguucuccag

SEQ ID NO: 535291 - RNA, 19 nt, Artificial Sequence
  Description of Artificial Sequence: Synthetic oligonucleotide
uugugccuaaugccuaugu

SEQ ID NO: 535292 - RNA, 19 nt, Artificial Sequence
  Description of Artificial Sequence: Synthetic oligonucleotide
gguaaggaccucuuuccag

SEQ ID NO: 535293 - RNA, 19 nt, Artificial Sequence
  Description of Artificial Sequence: Synthetic oligonucleotide
gaggacagguccuggcugc

SEQ ID NO: 535294 - RNA, 19 nt, Artificial Sequence
  Description of Artificial Sequence: Synthetic oligonucleotide
aaggcguccgaggacaggu

SEQ ID NO: 535295 - RNA, 19 nt, Artificial Sequence
  Description of Artificial Sequence: Synthetic oligonucleotide
ggcacacucauccagcgug

SEQ ID NO: 535296 - RNA, 19 nt, Artificial Sequence
  Description of Artificial Sequence: Synthetic oligonucleotide
uccucgugugcuaggaccu

SEQ ID NO: 535297 - RNA, 19 nt, Artificial Sequence
  Description of Artificial Sequence: Synthetic oligonucleotide
ggauuuccagcccagguac

SEQ ID NO: 535298 - RNA, 19 nt, Artificial Sequence
  Description of Artificial Sequence: Synthetic oligonucleotide
ucggcggucuucucgagcu

SEQ ID NO: 535299 - RNA, 19 nt, Artificial Sequence
  Description of Artificial Sequence: Synthetic oligonucleotide
uccgugcgcucaaugagca

SEQ ID NO: 535300 - RNA, 19 nt, Artificial Sequence
  Description of Artificial Sequence: Synthetic oligonucleotide
uucaugaugucaagugcuu

SEQ ID NO: 535301 - RNA, 19 nt, Artificial Sequence
  Description of Artificial Sequence: Synthetic oligonucleotide
ggauaaacgauggccacag

SEQ ID NO: 535302 - RNA, 19 nt, Artificial Sequence
  Description of Artificial Sequence: Synthetic oligonucleotide
ucacccaauagaaggcguc

SEQ ID NO: 535303 - RNA, 19 nt, Artificial Sequence
  Description of Artificial Sequence: Synthetic oligonucleotide
gaaccugacuaccaggacu

SEQ ID NO: 535304 - RNA, 19 nt, Artificial Sequence
  Description of Artificial Sequence: Synthetic oligonucleotide
ucuacuuggccaugucuau

SEQ ID NO: 535305 - RNA, 19 nt, Artificial Sequence
  Description of Artificial Sequence: Synthetic oligonucleotide
ggaccuggagaucaucagg

SEQ ID NO: 535306 - RNA, 19 nt, Artificial Sequence
  Description of Artificial Sequence: Synthetic oligonucleotide
gaacggugucugucaaggg

SEQ ID NO: 535307 - RNA, 19 nt, Artificial Sequence
  Description of Artificial Sequence: Synthetic oligonucleotide
ucgugugcuaggaccucgg

SEQ ID NO: 535308 - RNA, 19 nt, Artificial Sequence
  Description of Artificial Sequence: Synthetic oligonucleotide
cuaugucuggacccucugc

SEQ ID NO: 535309 - RNA, 19 nt, Artificial Sequence
  Description of Artificial Sequence: Synthetic oligonucleotide
ugcuccgugcgcucaauga

SEQ ID NO: 535310 - RNA, 19 nt, Artificial Sequence
  Description of Artificial Sequence: Synthetic oligonucleotide
augggaacggugucuguca

SEQ ID NO: 535311 - RNA, 19 nt, Artificial Sequence
  Description of Artificial Sequence: Synthetic oligonucleotide
agcaucacuggggugccac

SEQ ID NO: 535312 - RNA, 19 nt, Artificial Sequence
  Description of Artificial Sequence: Synthetic oligonucleotide
caugucccguucauacugc

SEQ ID NO: 535313 - RNA, 19 nt, Artificial Sequence
  Description of Artificial Sequence: Synthetic oligonucleotide
cacugggcgacaacauucc

SEQ ID NO: 535314 - RNA, 19 nt, Artificial Sequence
  Description of Artificial Sequence: Synthetic oligonucleotide
gacuaccaggacugcgagg

SEQ ID NO: 535315 - RNA, 19 nt, Artificial Sequence
  Description of Artificial Sequence: Synthetic oligonucleotide
cuccgugcgcucaaugagc

SEQ ID NO: 535316 - RNA, 19 nt, Artificial Sequence
  Description of Artificial Sequence: Synthetic oligonucleotide
auauuguccaggauccaca

SEQ ID NO: 535317 - RNA, 19 nt, Artificial Sequence
  Description of Artificial Sequence: Synthetic oligonucleotide
ggcccugaugucuacuugg

SEQ ID NO: 535318 - RNA, 19 nt, Artificial Sequence
  Description of Artificial Sequence: Synthetic oligonucleotide
acauucugcucugguggcc

SEQ ID NO: 535319 - RNA, 19 nt, Artificial Sequence
  Description of Artificial Sequence: Synthetic oligonucleotide
auuccggacaaaaggcauc

SEQ ID NO: 535320 - RNA, 19 nt, Artificial Sequence
  Description of Artificial Sequence: Synthetic oligonucleotide
cuguggaaggcguccgagg

SEQ ID NO: 535321 - RNA, 19 nt, Artificial Sequence
  Description of Artificial Sequence: Synthetic oligonucleotide
uggcauagcaggacaguau

SEQ ID NO: 535322 - RNA, 19 nt, Artificial Sequence
  Description of Artificial Sequence: Synthetic oligonucleotide
ugcucagauugugaagagc

SEQ ID NO: 535323 - RNA, 19 nt, Artificial Sequence
  Description of Artificial Sequence: Synthetic oligonucleotide
gacugcgaggaccuggaga

SEQ ID NO: 535324 - RNA, 19 nt, Artificial Sequence
  Description of Artificial Sequence: Synthetic oligonucleotide
uccacgaguggaugggaac

SEQ ID NO: 535325 - RNA, 19 nt, Artificial Sequence
  Description of Artificial Sequence: Synthetic oligonucleotide
ggcaauauucucucgugca

SEQ ID NO: 535326 - RNA, 19 nt, Artificial Sequence
  Description of Artificial Sequence: Synthetic oligonucleotide
uguagagcuguuugcccuc

SEQ ID NO: 535327 - RNA, 19 nt, Artificial Sequence
  Description of Artificial Sequence: Synthetic oligonucleotide
augucuacuuggccauguc

SEQ ID NO: 535328 - RNA, 19 nt, Artificial Sequence
  Description of Artificial Sequence: Synthetic oligonucleotide
ucgugcaccuggcugcaug

SEQ ID NO: 535329 - RNA, 19 nt, Artificial Sequence
  Description of Artificial Sequence: Synthetic oligonucleotide
caagcggauaaacgauggc

SEQ ID NO: 535330 - RNA, 19 nt, Artificial Sequence
  Description of Artificial Sequence: Synthetic oligonucleotide
acagcccuguucaugaugu

SEQ ID NO: 535331 - RNA, 19 nt, Artificial Sequence
  Description of Artificial Sequence: Synthetic oligonucleotide
cucccggccugucaugucg

SEQ ID NO: 535332 - RNA, 19 nt, Artificial Sequence
  Description of Artificial Sequence: Synthetic oligonucleotide
uguccuugacggagggaug

SEQ ID NO: 535333 - RNA, 19 nt, Artificial Sequence
  Description of Artificial Sequence: Synthetic oligonucleotide
acugggcgacaacauuccg

SEQ ID NO: 535334 - RNA, 19 nt, Artificial Sequence
  Description of Artificial Sequence: Synthetic oligonucleotide
gugccuaaugccuaugucu

SEQ ID NO: 535335 - RNA, 19 nt, Artificial Sequence
  Description of Artificial Sequence: Synthetic oligonucleotide
uggagaucaucaggaaaca

SEQ ID NO: 535336 - RNA, 19 nt, Artificial Sequence
  Description of Artificial Sequence: Synthetic oligonucleotide
uucucgagcucgugggaca

SEQ ID NO: 535337 - RNA, 19 nt, Artificial Sequence
  Description of Artificial Sequence: Synthetic oligonucleotide
auagagcggcuccaggcgu

SEQ ID NO: 535338 - RNA, 19 nt, Artificial Sequence
  Description of Artificial Sequence: Synthetic oligonucleotide
cagcugacggucacucugg

SEQ ID NO: 535339 - RNA, 19 nt, Artificial Sequence
  Description of Artificial Sequence: Synthetic oligonucleotide
ugccaugaggcugcaugcg

SEQ ID NO: 535340 - RNA, 19 nt, Artificial Sequence
  Description of Artificial Sequence: Synthetic oligonucleotide
gaugugccaacaccugguc

SEQ ID NO: 535341 - RNA, 19 nt, Artificial Sequence
  Description of Artificial Sequence: Synthetic oligonucleotide
gugucucaaagaugugggc

SEQ ID NO: 535342 - RNA, 19 nt, Artificial Sequence
  Description of Artificial Sequence: Synthetic oligonucleotide
ggaauagagcggcuccagg

SEQ ID NO: 535343 - RNA, 19 nt, Artificial Sequence
  Description of Artificial Sequence: Synthetic oligonucleotide
aggcaugaacacaauguug

SEQ ID NO: 535344 - RNA, 19 nt, Artificial Sequence
  Description of Artificial Sequence: Synthetic oligonucleotide
ugccacuuuugcagggcgc

SEQ ID NO: 535345 - RNA, 19 nt, Artificial Sequence
  Description of Artificial Sequence: Synthetic oligonucleotide
gguguagagcuguuugccc

SEQ ID NO: 535346 - RNA, 19 nt, Artificial Sequence
  Description of Artificial Sequence: Synthetic oligonucleotide
gugucugucaagggguucc

SEQ ID NO: 535347 - RNA, 19 nt, Artificial Sequence
  Description of Artificial Sequence: Synthetic oligonucleotide
gauaaacgauggccacagc

SEQ ID NO: 535348 - RNA, 19 nt, Artificial Sequence
  Description of Artificial Sequence: Synthetic oligonucleotide
gugugggugagguaggcaa

SEQ ID NO: 535349 - RNA, 19 nt, Artificial Sequence
  Description of Artificial Sequence: Synthetic oligonucleotide
ucgagcucgugggacaggc

SEQ ID NO: 535350 - RNA, 19 nt, Artificial Sequence
  Description of Artificial Sequence: Synthetic oligonucleotide
uucauccggcacacugugc

SEQ ID NO: 535351 - RNA, 19 nt, Artificial Sequence
  Description of Artificial Sequence: Synthetic oligonucleotide
ucaugaugucaagugcuuc

SEQ ID NO: 535352 - RNA, 19 nt, Artificial Sequence
  Description of Artificial Sequence: Synthetic oligonucleotide
ugacacgcuccucgugugc

SEQ ID NO: 535353 - RNA, 19 nt, Artificial Sequence
  Description of Artificial Sequence: Synthetic oligonucleotide
ggggaagaugagcuggucc

SEQ ID NO: 535354 - RNA, 19 nt, Artificial Sequence
  Description of Artificial Sequence: Synthetic oligonucleotide
cuucuguccacugguuccc

SEQ ID NO: 535355 - RNA, 19 nt, Artificial Sequence
  Description of Artificial Sequence: Synthetic oligonucleotide
uccggccaaagguguagag

SEQ ID NO: 535356 - RNA, 19 nt, Artificial Sequence
  Description of Artificial Sequence: Synthetic oligonucleotide
ggcgacaacauuccggaca

SEQ ID NO: 535357 - RNA, 19 nt, Artificial Sequence
  Description of Artificial Sequence: Synthetic oligonucleotide
caugcggcgcucacacucc

SEQ ID NO: 535358 - RNA, 19 nt, Artificial Sequence
  Description of Artificial Sequence: Synthetic oligonucleotide
agaccucccacaugagccu

SEQ ID NO: 535359 - RNA, 19 nt, Artificial Sequence
  Description of Artificial Sequence: Synthetic oligonucleotide
acauuccggacaaaaggca

SEQ ID NO: 535360 - RNA, 19 nt, Artificial Sequence
  Description of Artificial Sequence: Synthetic oligonucleotide
cucuuuccagggcugcaag

SEQ ID NO: 535361 - RNA, 19 nt, Artificial Sequence
  Description of Artificial Sequence: Synthetic oligonucleotide
acccugcacaaauaccaca

SEQ ID NO: 535362 - RNA, 19 nt, Artificial Sequence
  Description of Artificial Sequence: Synthetic oligonucleotide
gcaauauucucucgugcac

SEQ ID NO: 535363 - RNA, 19 nt, Artificial Sequence
  Description of Artificial Sequence: Synthetic oligonucleotide
cacccaauagaaggcgucc

SEQ ID NO: 535364 - RNA, 19 nt, Artificial Sequence
  Description of Artificial Sequence: Synthetic oligonucleotide
caugccgcuugccaaugac

SEQ ID NO: 535365 - RNA, 19 nt, Artificial Sequence
  Description of Artificial Sequence: Synthetic oligonucleotide
augacacgcuccucgugug

SEQ ID NO: 535366 - RNA, 19 nt, Artificial Sequence
  Description of Artificial Sequence: Synthetic oligonucleotide
accuuuaaugacacuucug

SEQ ID NO: 535367 - RNA, 19 nt, Artificial Sequence
  Description of Artificial Sequence: Synthetic oligonucleotide
guaccacuuggugaucucc

SEQ ID NO: 535368 - RNA, 19 nt, Artificial Sequence
  Description of Artificial Sequence: Synthetic oligonucleotide
uagagcggcuccaggcgug

SEQ ID NO: 535369 - RNA, 19 nt, Artificial Sequence
  Description of Artificial Sequence: Synthetic oligonucleotide
gcuguuuauucacaccuga

SEQ ID NO: 535370 - RNA, 19 nt, Artificial Sequence
  Description of Artificial Sequence: Synthetic oligonucleotide
ccuggcugcauguaggcac

SEQ ID NO: 535371 - RNA, 19 nt, Artificial Sequence
  Description of Artificial Sequence: Synthetic oligonucleotide
caucgggucacaguuccug

SEQ ID NO: 535372 - RNA, 19 nt, Artificial Sequence
  Description of Artificial Sequence: Synthetic oligonucleotide
auggguggauccacgagug

SEQ ID NO: 535373 - RNA, 19 nt, Artificial Sequence
  Description of Artificial Sequence: Synthetic oligonucleotide
acaauccggccaaaggugu

SEQ ID NO: 535374 - RNA, 19 nt, Artificial Sequence
  Description of Artificial Sequence: Synthetic oligonucleotide
cuugcugcggacaggggaa

SEQ ID NO: 535375 - RNA, 19 nt, Artificial Sequence
  Description of Artificial Sequence: Synthetic oligonucleotide
gcuguuacugagccaggag

SEQ ID NO: 535376 - RNA, 19 nt, Artificial Sequence
  Description of Artificial Sequence: Synthetic oligonucleotide
ucucgagcucgugggacag

SEQ ID NO: 535377 - RNA, 19 nt, Artificial Sequence
  Description of Artificial Sequence: Synthetic oligonucleotide
gauuuccagcccagguacc

SEQ ID NO: 535378 - RNA, 19 nt, Artificial Sequence
  Description of Artificial Sequence: Synthetic oligonucleotide
cacgaguggaugggaacgg

SEQ ID NO: 535379 - RNA, 19 nt, Artificial Sequence
  Description of Artificial Sequence: Synthetic oligonucleotide
gcuguaacuguaguacacc

SEQ ID NO: 535380 - RNA, 19 nt, Artificial Sequence
  Description of Artificial Sequence: Synthetic oligonucleotide
agcccuguucaugauguca

SEQ ID NO: 535381 - RNA, 19 nt, Artificial Sequence
  Description of Artificial Sequence: Synthetic oligonucleotide
caauagaaggcguccauau

SEQ ID NO: 535382 - RNA, 19 nt, Artificial Sequence
  Description of Artificial Sequence: Synthetic oligonucleotide
uucucacccugcacaaaua

SEQ ID NO: 535383 - RNA, 19 nt, Artificial Sequence
  Description of Artificial Sequence: Synthetic oligonucleotide
ugacggagggaugugccaa

SEQ ID NO: 535384 - RNA, 19 nt, Artificial Sequence
  Description of Artificial Sequence: Synthetic oligonucleotide
cccacauuggaggacacag

SEQ ID NO: 535385 - RNA, 19 nt, Artificial Sequence
  Description of Artificial Sequence: Synthetic oligonucleotide
cucgugugcuaggaccucg

SEQ ID NO: 535386 - RNA, 19 nt, Artificial Sequence
  Description of Artificial Sequence: Synthetic oligonucleotide
agaccaugccaucuccuuu

SEQ ID NO: 535387 - RNA, 19 nt, Artificial Sequence
  Description of Artificial Sequence: Synthetic oligonucleotide
uucucucgugcaccuggcu

SEQ ID NO: 535388 - RNA, 19 nt, Artificial Sequence
  Description of Artificial Sequence: Synthetic oligonucleotide
acccaagucuucucacccu

SEQ ID NO: 535389 - RNA, 19 nt, Artificial Sequence
  Description of Artificial Sequence: Synthetic oligonucleotide
gucuacuuggccaugucua

SEQ ID NO: 535390 - RNA, 19 nt, Artificial Sequence
  Description of Artificial Sequence: Synthetic oligonucleotide
ucaugccgcuugccaauga

SEQ ID NO: 535391 - RNA, 19 nt, Artificial Sequence
  Description of Artificial Sequence: Synthetic oligonucleotide
ugggaacggugucugucaa

SEQ ID NO: 535392 - RNA, 19 nt, Artificial Sequence
  Description of Artificial Sequence: Synthetic oligonucleotide
gcuccgugcgcucaaugag

SEQ ID NO: 535393 - RNA, 19 nt, Artificial Sequence
  Description of Artificial Sequence: Synthetic oligonucleotide
acggucacucuggaugauc

SEQ ID NO: 535394 - RNA, 19 nt, Artificial Sequence
  Description of Artificial Sequence: Synthetic oligonucleotide
uccaggcgugccugcauga

SEQ ID NO: 535395 - RNA, 19 nt, Artificial Sequence
  Description of Artificial Sequence: Synthetic oligonucleotide
cacaccccggucgauguag

SEQ ID NO: 535396 - RNA, 19 nt, Artificial Sequence
  Description of Artificial Sequence: Synthetic oligonucleotide
agauugugaagagccugga

SEQ ID NO: 535397 - RNA, 19 nt, Artificial Sequence
  Description of Artificial Sequence: Synthetic oligonucleotide
cagggcugcaagaugagcu

SEQ ID NO: 535398 - RNA, 19 nt, Artificial Sequence
  Description of Artificial Sequence: Synthetic oligonucleotide
ccgcuugccaaugacaggc

SEQ ID NO: 535399 - RNA, 19 nt, Artificial Sequence
  Description of Artificial Sequence: Synthetic oligonucleotide
gcgcuggacagcuugcugc

SEQ ID NO: 535400 - RNA, 19 nt, Artificial Sequence
  Description of Artificial Sequence: Synthetic oligonucleotide
gaaggcguccgaggacagg

SEQ ID NO: 535401 - RNA, 19 nt, Artificial Sequence
  Description of Artificial Sequence: Synthetic oligonucleotide
gacggagggaugugccaac

SEQ ID NO: 535402 - RNA, 19 nt, Artificial Sequence
  Description of Artificial Sequence: Synthetic oligonucleotide
gucaagggguuccaguugu

SEQ ID NO: 535403 - RNA, 19 nt, Artificial Sequence
  Description of Artificial Sequence: Synthetic oligonucleotide
ugccauccucaagagggug

SEQ ID NO: 535404 - RNA, 19 nt, Artificial Sequence
  Description of Artificial Sequence: Synthetic oligonucleotide
uccuucacaagcggauaaa

SEQ ID NO: 535405 - RNA, 19 nt, Artificial Sequence
  Description of Artificial Sequence: Synthetic oligonucleotide
gcucgggcagugcaaagcc

SEQ ID NO: 535406 - RNA, 19 nt, Artificial Sequence
  Description of Artificial Sequence: Synthetic oligonucleotide
cuguaacuguaguacaccu

SEQ ID NO: 535407 - RNA, 19 nt, Artificial Sequence
  Description of Artificial Sequence: Synthetic oligonucleotide
ccggacaaaaggcauccag

SEQ ID NO: 535408 - RNA, 19 nt, Artificial Sequence
  Description of Artificial Sequence: Synthetic oligonucleotide
auccggcacacugugcuug

SEQ ID NO: 535409 - RNA, 19 nt, Artificial Sequence
  Description of Artificial Sequence: Synthetic oligonucleotide
cauggguggauccacgagu

SEQ ID NO: 535410 - RNA, 19 nt, Artificial Sequence
  Description of Artificial Sequence: Synthetic oligonucleotide
gaugacgaguucacccaga

SEQ ID NO: 535411 - RNA, 19 nt, Artificial Sequence
  Description of Artificial Sequence: Synthetic oligonucleotide
ggcgguacuccucauagua

SEQ ID NO: 535412 - RNA, 19 nt, Artificial Sequence
  Description of Artificial Sequence: Synthetic oligonucleotide
ugggcaucucaggaagaac

SEQ ID NO: 535413 - RNA, 19 nt, Artificial Sequence
  Description of Artificial Sequence: Synthetic oligonucleotide
gccuaaugccuaugucugg

SEQ ID NO: 535414 - RNA, 19 nt, Artificial Sequence
  Description of Artificial Sequence: Synthetic oligonucleotide
caccgaugccccucugagc

SEQ ID NO: 535415 - RNA, 19 nt, Artificial Sequence
  Description of Artificial Sequence: Synthetic oligonucleotide
guccuucacaagcggauaa

SEQ ID NO: 535416 - RNA, 19 nt, Artificial Sequence
  Description of Artificial Sequence: Synthetic oligonucleotide
gcaugcggcgcucacacuc

SEQ ID NO: 535417 - RNA, 19 nt, Artificial Sequence
  Description of Artificial Sequence: Synthetic oligonucleotide
ugaugucuacuuggccaug

SEQ ID NO: 535418 - RNA, 19 nt, Artificial Sequence
  Description of Artificial Sequence: Synthetic oligonucleotide
uuuccagcccagguaccac

SEQ ID NO: 535419 - RNA, 19 nt, Artificial Sequence
  Description of Artificial Sequence: Synthetic oligonucleotide
gcaugaggggcagccaugg

SEQ ID NO: 535420 - RNA, 19 nt, Artificial Sequence
  Description of Artificial Sequence: Synthetic oligonucleotide
auccucaagagggugccaa

SEQ ID NO: 535421 - RNA, 19 nt, Artificial Sequence
  Description of Artificial Sequence: Synthetic oligonucleotide
ccacgaguggaugggaacg

SEQ ID NO: 535422 - RNA, 19 nt, Artificial Sequence
  Description of Artificial Sequence: Synthetic oligonucleotide
acccaauagaaggcgucca

SEQ ID NO: 535423 - RNA, 19 nt, Artificial Sequence
  Description of Artificial Sequence: Synthetic oligonucleotide
ugaccaccaugucccguuc

SEQ ID NO: 535424 - RNA, 19 nt, Artificial Sequence
  Description of Artificial Sequence: Synthetic oligonucleotide
ggacaggggaauagagcgg

SEQ ID NO: 535425 - RNA, 19 nt, Artificial Sequence
  Description of Artificial Sequence: Synthetic oligonucleotide
auauucucucgugcaccug

SEQ ID NO: 535426 - RNA, 19 nt, Artificial Sequence
  Description of Artificial Sequence: Synthetic oligonucleotide
gcacccaagucuucucacc

SEQ ID NO: 535427 - RNA, 19 nt, Artificial Sequence
  Description of Artificial Sequence: Synthetic oligonucleotide
ggcguccgaggacaggucc

SEQ ID NO: 535428 - RNA, 19 nt, Artificial Sequence
  Description of Artificial Sequence: Synthetic oligonucleotide
agggaugugccaacaccug

SEQ ID NO: 535429 - RNA, 19 nt, Artificial Sequence
  Description of Artificial Sequence: Synthetic oligonucleotide
ggcggucuucucgagcucg

SEQ ID NO: 535430 - RNA, 19 nt, Artificial Sequence
  Description of Artificial Sequence: Synthetic oligonucleotide
gggguugaugacgaguuca

SEQ ID NO: 535431 - RNA, 19 nt, Artificial Sequence
  Description of Artificial Sequence: Synthetic oligonucleotide
augccuaugucuggacccu

SEQ ID NO: 535432 - RNA, 19 nt, Artificial Sequence
  Description of Artificial Sequence: Synthetic oligonucleotide
agggcgcuggacagcuugc

SEQ ID NO: 535433 - RNA, 19 nt, Artificial Sequence
  Description of Artificial Sequence: Synthetic oligonucleotide
gguugaugacgaguucacc

SEQ ID NO: 535434 - RNA, 19 nt, Artificial Sequence
  Description of Artificial Sequence: Synthetic oligonucleotide
ucacaguuccugggcugcc

SEQ ID NO: 535435 - RNA, 19 nt, Artificial Sequence
  Description of Artificial Sequence: Synthetic oligonucleotide
ggugccaauccuugaagua

SEQ ID NO: 535436 - RNA, 19 nt, Artificial Sequence
  Description of Artificial Sequence: Synthetic oligonucleotide
cauuccggacaaaaggcau

SEQ ID NO: 535437 - RNA, 19 nt, Artificial Sequence
  Description of Artificial Sequence: Synthetic oligonucleotide
gcggauaaacgauggccac

SEQ ID NO: 535438 - RNA, 19 nt, Artificial Sequence
  Description of Artificial Sequence: Synthetic oligonucleotide
ccacauuggaggacacagc

SEQ ID NO: 535439 - RNA, 19 nt, Artificial Sequence
  Description of Artificial Sequence: Synthetic oligonucleotide
ccugcacaaauaccacacc

SEQ ID NO: 535440 - RNA, 19 nt, Artificial Sequence
  Description of Artificial Sequence: Synthetic oligonucleotide
ccacaugagccuguggaag

SEQ ID NO: 535441 - RNA, 19 nt, Artificial Sequence
  Description of Artificial Sequence: Synthetic oligonucleotide
caggggaauagagcggcuc

SEQ ID NO: 535442 - RNA, 19 nt, Artificial Sequence
  Description of Artificial Sequence: Synthetic oligonucleotide
acggucugccaggcgguac

SEQ ID NO: 535443 - RNA, 19 nt, Artificial Sequence
  Description of Artificial Sequence: Synthetic oligonucleotide
gauccacgaguggauggga

SEQ ID NO: 535444 - RNA, 19 nt, Artificial Sequence
  Description of Artificial Sequence: Synthetic oligonucleotide
caccuuuaaugacacuucu

SEQ ID NO: 535445 - RNA, 19 nt, Artificial Sequence
  Description of Artificial Sequence: Synthetic oligonucleotide
gucucccaaauagagacau

SEQ ID NO: 535446 - RNA, 19 nt, Artificial Sequence
  Description of Artificial Sequence: Synthetic oligonucleotide
ccuucacaagcggauaaac

SEQ ID NO: 535447 - RNA, 19 nt, Artificial Sequence
  Description of Artificial Sequence: Synthetic oligonucleotide
gcugaagcaucacuggggu

SEQ ID NO: 535448 - RNA, 19 nt, Artificial Sequence
  Description of Artificial Sequence: Synthetic oligonucleotide
aggcagcccuucauccggc

SEQ ID NO: 535449 - RNA, 19 nt, Artificial Sequence
  Description of Artificial Sequence: Synthetic oligonucleotide
ccugacuaccaggacugcg

SEQ ID NO: 535450 - RNA, 19 nt, Artificial Sequence
  Description of Artificial Sequence: Synthetic oligonucleotide
ggcgcucacacuccucuac

SEQ ID NO: 535451 - RNA, 19 nt, Artificial Sequence
  Description of Artificial Sequence: Synthetic oligonucleotide
cacacucauccagcgugag

SEQ ID NO: 535452 - RNA, 19 nt, Artificial Sequence
  Description of Artificial Sequence: Synthetic oligonucleotide
augccgcuugccaaugaca

SEQ ID NO: 535453 - RNA, 19 nt, Artificial Sequence
  Description of Artificial Sequence: Synthetic oligonucleotide
cgugcgcucaaugagcagc

SEQ ID NO: 535454 - RNA, 19 nt, Artificial Sequence
  Description of Artificial Sequence: Synthetic oligonucleotide
uccacgcuacauggacacc

SEQ ID NO: 535455 - RNA, 19 nt, Artificial Sequence
  Description of Artificial Sequence: Synthetic oligonucleotide
acgcuccucgugugcuagg

SEQ ID NO: 535456 - RNA, 19 nt, Artificial Sequence
  Description of Artificial Sequence: Synthetic oligonucleotide
ggaggugggcacccaaguc

SEQ ID NO: 535457 - RNA, 19 nt, Artificial Sequence
  Description of Artificial Sequence: Synthetic oligonucleotide
caguaaaggcagcccuuca

SEQ ID NO: 535458 - RNA, 19 nt, Artificial Sequence
  Description of Artificial Sequence: Synthetic oligonucleotide
gcggacaggggaauagagc

SEQ ID NO: 535459 - RNA, 19 nt, Artificial Sequence
  Description of Artificial Sequence: Synthetic oligonucleotide
uccucguaauuggggcugu

SEQ ID NO: 535460 - RNA, 19 nt, Artificial Sequence
  Description of Artificial Sequence: Synthetic oligonucleotide
cuggagggacuucccagga

SEQ ID NO: 535461 - RNA, 19 nt, Artificial Sequence
  Description of Artificial Sequence: Synthetic oligonucleotide
ggguugaugacgaguucac

SEQ ID NO: 535462 - RNA, 19 nt, Artificial Sequence
  Description of Artificial Sequence: Synthetic oligonucleotide
ggguggauccacgagugga

SEQ ID NO: 535463 - RNA, 19 nt, Artificial Sequence
  Description of Artificial Sequence: Synthetic oligonucleotide
cucaugccgcuugccaaug

SEQ ID NO: 535464 - RNA, 19 nt, Artificial Sequence
  Description of Artificial Sequence: Synthetic oligonucleotide
ugcgcuccgugugggugag

SEQ ID NO: 535465 - RNA, 19 nt, Artificial Sequence
  Description of Artificial Sequence: Synthetic oligonucleotide
cacaccgaugccccucuga

SEQ ID NO: 535466 - RNA, 19 nt, Artificial Sequence
  Description of Artificial Sequence: Synthetic oligonucleotide
agcucgugggacaggcuga

SEQ ID NO: 535467 - RNA, 19 nt, Artificial Sequence
  Description of Artificial Sequence: Synthetic oligonucleotide
aguccuuccugcgcuccgu

SEQ ID NO: 535468 - RNA, 19 nt, Artificial Sequence
  Description of Artificial Sequence: Synthetic oligonucleotide
ccauggguggauccacgag

SEQ ID NO: 535469 - RNA, 19 nt, Artificial Sequence
  Description of Artificial Sequence: Synthetic oligonucleotide
ugccggcugugggaggcag

SEQ ID NO: 535470 - RNA, 19 nt, Artificial Sequence
  Description of Artificial Sequence: Synthetic oligonucleotide
gguaccacuuggugaucuc

SEQ ID NO: 535471 - RNA, 19 nt, Artificial Sequence
  Description of Artificial Sequence: Synthetic oligonucleotide
acgcuacauggacaccuuu

SEQ ID NO: 535472 - RNA, 19 nt, Artificial Sequence
  Description of Artificial Sequence: Synthetic oligonucleotide
ccggccaaagguguagagc

SEQ ID NO: 535473 - RNA, 19 nt, Artificial Sequence
  Description of Artificial Sequence: Synthetic oligonucleotide
acggagggaugugccaaca

SEQ ID NO: 535474 - RNA, 19 nt, Artificial Sequence
  Description of Artificial Sequence: Synthetic oligonucleotide
ccuaaugccuaugucugga

SEQ ID NO: 535475 - RNA, 19 nt, Artificial Sequence
  Description of Artificial Sequence: Synthetic oligonucleotide
guagagcuguuugcccuca

SEQ ID NO: 535476 - RNA, 19 nt, Artificial Sequence
  Description of Artificial Sequence: Synthetic oligonucleotide
auccacgaguggaugggaa

SEQ ID NO: 535477 - RNA, 19 nt, Artificial Sequence
  Description of Artificial Sequence: Synthetic oligonucleotide
cggccugucaugucgauca

SEQ ID NO: 535478 - RNA, 19 nt, Artificial Sequence
  Description of Artificial Sequence: Synthetic oligonucleotide
ugcccucaugccgcuugcc

SEQ ID NO: 535479 - RNA, 19 nt, Artificial Sequence
  Description of Artificial Sequence: Synthetic oligonucleotide
cugcgcuccguguggguga

SEQ ID NO: 535480 - RNA, 19 nt, Artificial Sequence
  Description of Artificial Sequence: Synthetic oligonucleotide
cacggcguuccugcauggc

SEQ ID NO: 535481 - RNA, 19 nt, Artificial Sequence
  Description of Artificial Sequence: Synthetic oligonucleotide
cugcacggucugccaggcg

SEQ ID NO: 535482 - RNA, 19 nt, Artificial Sequence
  Description of Artificial Sequence: Synthetic oligonucleotide
agacuccacgcuacaugga

SEQ ID NO: 535483 - RNA, 19 nt, Artificial Sequence
  Description of Artificial Sequence: Synthetic oligonucleotide
cucgagcucgugggacagg

SEQ ID NO: 535484 - RNA, 19 nt, Artificial Sequence
  Description of Artificial Sequence: Synthetic oligonucleotide
gacuggugcagggcccuga

SEQ ID NO: 535485 - RNA, 19 nt, Artificial Sequence
  Description of Artificial Sequence: Synthetic oligonucleotide
cucguaauuggggcuguua

SEQ ID NO: 535486 - RNA, 19 nt, Artificial Sequence
  Description of Artificial Sequence: Synthetic oligonucleotide
cguucauacugcagcugac

SEQ ID NO: 535487 - RNA, 19 nt, Artificial Sequence
  Description of Artificial Sequence: Synthetic oligonucleotide
gcccugaugucuacuuggc

SEQ ID NO: 535488 - RNA, 19 nt, Artificial Sequence
  Description of Artificial Sequence: Synthetic oligonucleotide
ucccaggauccagggguaa

SEQ ID NO: 535489 - RNA, 19 nt, Artificial Sequence
  Description of Artificial Sequence: Synthetic oligonucleotide
gccauggguggauccacga

SEQ ID NO: 535490 - RNA, 19 nt, Artificial Sequence
  Description of Artificial Sequence: Synthetic oligonucleotide
cauucugcucugguggccu

SEQ ID NO: 535491 - RNA, 19 nt, Artificial Sequence
  Description of Artificial Sequence: Synthetic oligonucleotide
aggcguccgaggacagguc

SEQ ID NO: 535492 - RNA, 19 nt, Artificial Sequence
  Description of Artificial Sequence: Synthetic oligonucleotide
gaggcugcaugcggcgcuc

SEQ ID NO: 535493 - RNA, 19 nt, Artificial Sequence
  Description of Artificial Sequence: Synthetic oligonucleotide
ccucaagagggugccaauc

SEQ ID NO: 535494 - RNA, 19 nt, Artificial Sequence
  Description of Artificial Sequence: Synthetic oligonucleotide
cugcucccggccugucaug

SEQ ID NO: 535495 - RNA, 19 nt, Artificial Sequence
  Description of Artificial Sequence: Synthetic oligonucleotide
gccugucaugucgaucacc

SEQ ID NO: 535496 - RNA, 19 nt, Artificial Sequence
  Description of Artificial Sequence: Synthetic oligonucleotide
gcccuguucaugaugucaa

SEQ ID NO: 535497 - RNA, 19 nt, Artificial Sequence
  Description of Artificial Sequence: Synthetic oligonucleotide
cccaaauagagacauuguu

SEQ ID NO: 535498 - RNA, 19 nt, Artificial Sequence
  Description of Artificial Sequence: Synthetic oligonucleotide
cagcccuguucaugauguc

SEQ ID NO: 535499 - RNA, 19 nt, Artificial Sequence
  Description of Artificial Sequence: Synthetic oligonucleotide
cugcggacaggggaauaga

SEQ ID NO: 535500 - RNA, 19 nt, Artificial Sequence
  Description of Artificial Sequence: Synthetic oligonucleotide
ccugugggcaucucaggaa

SEQ ID NO: 535501 - RNA, 19 nt, Artificial Sequence
  Description of Artificial Sequence: Synthetic oligonucleotide
ggucucccaaauagagaca

SEQ ID NO: 535502 - RNA, 19 nt, Artificial Sequence
  Description of Artificial Sequence: Synthetic oligonucleotide
ggacugcgaggaccuggag

SEQ ID NO: 535503 - RNA, 19 nt, Artificial Sequence
  Description of Artificial Sequence: Synthetic oligonucleotide
gccaaagguguagagcugu

SEQ ID NO: 535504 - RNA, 19 nt, Artificial Sequence
  Description of Artificial Sequence: Synthetic oligonucleotide
ugcugcggacaggggaaua

SEQ ID NO: 535505 - RNA, 19 nt, Artificial Sequence
  Description of Artificial Sequence: Synthetic oligonucleotide
caugaaggccucccaggau

SEQ ID NO: 535506 - RNA, 19 nt, Artificial Sequence
  Description of Artificial Sequence: Synthetic oligonucleotide
gguugugccuaaugccuau

SEQ ID NO: 535507 - RNA, 19 nt, Artificial Sequence
  Description of Artificial Sequence: Synthetic oligonucleotide
augccccucugagccauau

SEQ ID NO: 535508 - RNA, 19 nt, Artificial Sequence
  Description of Artificial Sequence: Synthetic oligonucleotide
cugccauccucaagagggu

SEQ ID NO: 535509 - RNA, 19 nt, Artificial Sequence
  Description of Artificial Sequence: Synthetic oligonucleotide
acaccccggucgauguaga

SEQ ID NO: 535510 - RNA, 19 nt, Artificial Sequence
  Description of Artificial Sequence: Synthetic oligonucleotide
cucgggcagugcaaagccu

SEQ ID NO: 535511 - RNA, 19 nt, Artificial Sequence
  Description of Artificial Sequence: Synthetic oligonucleotide
cccacaugagccuguggaa

SEQ ID NO: 535512 - RNA, 19 nt, Artificial Sequence
  Description of Artificial Sequence: Synthetic oligonucleotide
aggcguccauaugcugcug

SEQ ID NO: 535513 - RNA, 19 nt, Artificial Sequence
  Description of Artificial Sequence: Synthetic oligonucleotide
ccugcgcuccgugugggug

SEQ ID NO: 535514 - RNA, 19 nt, Artificial Sequence
  Description of Artificial Sequence: Synthetic oligonucleotide
cagguaccacuuggugauc

SEQ ID NO: 535515 - RNA, 19 nt, Artificial Sequence
  Description of Artificial Sequence: Synthetic oligonucleotide
caaagguguagagcuguuu

SEQ ID NO: 535516 - RNA, 19 nt, Artificial Sequence
  Description of Artificial Sequence: Synthetic oligonucleotide
ccaauagaaggcguccaua

SEQ ID NO: 535517 - RNA, 19 nt, Artificial Sequence
  Description of Artificial Sequence: Synthetic oligonucleotide
gcauagcaggacaguaucu

SEQ ID NO: 535518 - RNA, 19 nt, Artificial Sequence
  Description of Artificial Sequence: Synthetic oligonucleotide
ggccugucaugucgaucac

SEQ ID NO: 535519 - RNA, 19 nt, Artificial Sequence
  Description of Artificial Sequence: Synthetic oligonucleotide
auaccacaccccggucgau

SEQ ID NO: 535520 - RNA, 19 nt, Artificial Sequence
  Description of Artificial Sequence: Synthetic oligonucleotide
cauccucaagagggugcca

SEQ ID NO: 535521 - RNA, 19 nt, Artificial Sequence
  Description of Artificial Sequence: Synthetic oligonucleotide
cgugugcuaggaccucggc

SEQ ID NO: 535522 - RNA, 19 nt, Artificial Sequence
  Description of Artificial Sequence: Synthetic oligonucleotide
gcucgugggacaggcugac

SEQ ID NO: 535523 - RNA, 19 nt, Artificial Sequence
  Description of Artificial Sequence: Synthetic oligonucleotide
ggucgauguagaugacaau

SEQ ID NO: 535524 - RNA, 19 nt, Artificial Sequence
  Description of Artificial Sequence: Synthetic oligonucleotide
cguaauuggggcuguuacu

SEQ ID NO: 535525 - RNA, 19 nt, Artificial Sequence
  Description of Artificial Sequence: Synthetic oligonucleotide
ccaggcgugccugcaugag

SEQ ID NO: 535526 - RNA, 19 nt, Artificial Sequence
  Description of Artificial Sequence: Synthetic oligonucleotide
gcuaggaccucggcggucu

SEQ ID NO: 535527 - RNA, 19 nt, Artificial Sequence
  Description of Artificial Sequence: Synthetic oligonucleotide
cguccauaugcugcuggug

SEQ ID NO: 535528 - RNA, 19 nt, Artificial Sequence
  Description of Artificial Sequence: Synthetic oligonucleotide
ccacgcuacauggacaccu

SEQ ID NO: 535529 - RNA, 19 nt, Artificial Sequence
  Description of Artificial Sequence: Synthetic oligonucleotide
cacgcuacauggacaccuu

SEQ ID NO: 535530 - RNA, 19 nt, Artificial Sequence
  Description of Artificial Sequence: Synthetic oligonucleotide
gcguccauaugcugcuggu

SEQ ID NO: 535531 - RNA, 19 nt, Artificial Sequence
  Description of Artificial Sequence: Synthetic oligonucleotide
ccgugcgcucaaugagcag

SEQ ID NO: 535532 - RNA, 19 nt, Artificial Sequence
  Description of Artificial Sequence: Synthetic oligonucleotide
cggagggaugugccaacac

SEQ ID NO: 535533 - RNA, 19 nt, Artificial Sequence
  Description of Artificial Sequence: Synthetic oligonucleotide
gggucggugccaugaggcu

SEQ ID NO: 535534 - RNA, 19 nt, Artificial Sequence
  Description of Artificial Sequence: Synthetic oligonucleotide
ccggucgauguagaugaca

SEQ ID NO: 535535 - RNA, 19 nt, Artificial Sequence
  Description of Artificial Sequence: Synthetic oligonucleotide
cggauaaacgauggccaca

SEQ ID NO: 535536 - RNA, 19 nt, Artificial Sequence
  Description of Artificial Sequence: Synthetic oligonucleotide
cugccgcagacuccacgcu

SEQ ID NO: 535537 - RNA, 19 nt, Artificial Sequence
  Description of Artificial Sequence: Synthetic oligonucleotide
gcagaccaugccaucuccu

SEQ ID NO: 535538 - RNA, 19 nt, Artificial Sequence
  Description of Artificial Sequence: Synthetic oligonucleotide
cauccggcacacugugcuu

SEQ ID NO: 535539 - RNA, 19 nt, Artificial Sequence
  Description of Artificial Sequence: Synthetic oligonucleotide
gacggucacucuggaugau

SEQ ID NO: 535540 - RNA, 19 nt, Artificial Sequence
  Description of Artificial Sequence: Synthetic oligonucleotide
gcugacggucacucuggau

SEQ ID NO: 535541 - RNA, 19 nt, Artificial Sequence
  Description of Artificial Sequence: Synthetic oligonucleotide
cccaauagaaggcguccau

SEQ ID NO: 535542 - RNA, 19 nt, Artificial Sequence
  Description of Artificial Sequence: Synthetic oligonucleotide
gcucccggccugucauguc

SEQ ID NO: 535543 - RNA, 19 nt, Artificial Sequence
  Description of Artificial Sequence: Synthetic oligonucleotide
ccucgugugcuaggaccuc

SEQ ID NO: 535544 - RNA, 19 nt, Artificial Sequence
  Description of Artificial Sequence: Synthetic oligonucleotide
caccccggucgauguagau

SEQ ID NO: 535545 - RNA, 19 nt, Artificial Sequence
  Description of Artificial Sequence: Synthetic oligonucleotide
gcuccgugugggugaggua

SEQ ID NO: 535546 - RNA, 19 nt, Artificial Sequence
  Description of Artificial Sequence: Synthetic oligonucleotide
ccgaugccccucugagcca

SEQ ID NO: 535547 - RNA, 19 nt, Artificial Sequence
  Description of Artificial Sequence: Synthetic oligonucleotide
cacggucugccaggcggua

SEQ ID NO: 535548 - RNA, 19 nt, Artificial Sequence
  Description of Artificial Sequence: Synthetic oligonucleotide
cgugcaccuggcugcaugu

SEQ ID NO: 535549 - RNA, 19 nt, Artificial Sequence
  Description of Artificial Sequence: Synthetic oligonucleotide
gcguccgaggacagguccu

SEQ ID NO: 535550 - RNA, 19 nt, Artificial Sequence
  Description of Artificial Sequence: Synthetic oligonucleotide
ccgcagacuccacgcuaca

SEQ ID NO: 535551 - RNA, 19 nt, Artificial Sequence
  Description of Artificial Sequence: Synthetic oligonucleotide
gcguuccugcauggccuca

SEQ ID NO: 535552 - RNA, 19 nt, Artificial Sequence
  Description of Artificial Sequence: Synthetic oligonucleotide
gcacggucugccaggcggu

SEQ ID NO: 535553 - RNA, 19 nt, Artificial Sequence
  Description of Artificial Sequence: Synthetic oligonucleotide
ccggcugugggaggcagcu

SEQ ID NO: 535554 - RNA, 19 nt, Artificial Sequence
  Description of Artificial Sequence: Synthetic oligonucleotide
guuugcccucaugccgcuu

SEQ ID NO: 535555 - RNA, 19 nt, Artificial Sequence
  Description of Artificial Sequence: Synthetic oligonucleotide
cuaccagggccagcaccuu

SEQ ID NO: 535556 - RNA, 19 nt, Artificial Sequence
  Description of Artificial Sequence: Synthetic oligonucleotide
ccucacggcguuccugcau

SEQ ID NO: 535557 - RNA, 19 nt, Artificial Sequence
  Description of Artificial Sequence: Synthetic oligonucleotide
ccaucgggucacaguuccu

SEQ ID NO: 535558 - RNA, 19 nt, Artificial Sequence
  Description of Artificial Sequence: Synthetic oligonucleotide
cggucugccaggcgguacu

SEQ ID NO: 535559 - RNA, 19 nt, Artificial Sequence
  Description of Artificial Sequence: Synthetic oligonucleotide
cgcuccgugugggugaggu

SEQ ID NO: 535560 - RNA, 19 nt, Artificial Sequence
  Description of Artificial Sequence: Synthetic oligonucleotide
gcgcuccgugugggugagg

SEQ ID NO: 535561 - RNA, 19 nt, Artificial Sequence
  Description of Artificial Sequence: Synthetic oligonucleotide
cggcggucuucucgagcuc

SEQ ID NO: 535562 - RNA, 19 nt, Artificial Sequence
  Description of Artificial Sequence: Synthetic oligonucleotide
gcgaggaccuggagaucau

SEQ ID NO: 535563 - RNA, 19 nt, Artificial Sequence
  Description of Artificial Sequence: Synthetic oligonucleotide
cucgugcaccuggcugcau

SEQ ID NO: 535564 - RNA, 19 nt, Artificial Sequence
  Description of Artificial Sequence: Synthetic oligonucleotide
cgagcucgugggacaggcu

SEQ ID NO: 535565 - RNA, 19 nt, Artificial Sequence
  Description of Artificial Sequence: Synthetic oligonucleotide
cgacaacauuccggacaaa

SEQ ID NO: 535566 - RNA, 19 nt, Artificial Sequence
  Description of Artificial Sequence: Synthetic oligonucleotide
cccggccugucaugucgau

SEQ ID NO: 535567 - RNA, 19 nt, Artificial Sequence
  Description of Artificial Sequence: Synthetic oligonucleotide
ccucguaauuggggcuguu

SEQ ID NO: 535568 - RNA, 19 nt, Artificial Sequence
  Description of Artificial Sequence: Synthetic oligonucleotide
auaguuaggacucuggucc

SEQ ID NO: 535569 - RNA, 19 nt, Artificial Sequence
  Description of Artificial Sequence: Synthetic oligonucleotide
aagguaucaacucugcuac

SEQ ID NO: 535570 - RNA, 19 nt, Artificial Sequence
  Description of Artificial Sequence: Synthetic oligonucleotide
  modified_base (6)..(6): a, c, u, g, unknown or other
aaaacngcagaucuugaac

SEQ ID NO: 535571 - RNA, 19 nt, Artificial Sequence
  Description of Artificial Sequence: Synthetic oligonucleotide
  modified_base (9)..(9): a, c, u, g, unknown or other
aaugaaaanuacuuuacaa

SEQ ID NO: 535572 - RNA, 19 nt, Artificial Sequence
  Description of Artificial Sequence: Synthetic oligonucleotide
uaagaauucggucagaauc

SEQ ID NO: 535573 - RNA, 19 nt, Artificial Sequence
  Description of Artificial Sequence: Synthetic oligonucleotide
uuggauagaauaaacauaa

SEQ ID NO: 535574 - RNA, 19 nt, Artificial Sequence
  Description of Artificial Sequence: Synthetic oligonucleotide
uguaaccugagaaucacag

SEQ ID NO: 535575 - RNA, 19 nt, Artificial Sequence
  Description of Artificial Sequence: Synthetic oligonucleotide
auuauagcauaacugaaug

SEQ ID NO: 535576 - RNA, 19 nt, Artificial Sequence
  Description of Artificial Sequence: Synthetic oligonucleotide
augauuauagcauaacuga

SEQ ID NO: 535577 - RNA, 19 nt, Artificial Sequence
  Description of Artificial Sequence: Synthetic oligonucleotide
  modified_base (5)..(5): a, c, u, g, unknown or other
aaacngcagaucuugaacu

SEQ ID NO: 535578 - RNA, 19 nt, Artificial Sequence
  Description of Artificial Sequence: Synthetic oligonucleotide
gaaguuuggagucuuuggg

SEQ ID NO: 535579 - RNA, 19 nt, Artificial Sequence
  Description of Artificial Sequence: Synthetic oligonucleotide
auuacaagcauguggacug

SEQ ID NO: 535580 - RNA, 19 nt, Artificial Sequence
  Description of Artificial Sequence: Synthetic oligonucleotide
guagguuuuauagagaaag

SEQ ID NO: 535581 - RNA, 19 nt, Artificial Sequence
  Description of Artificial Sequence: Synthetic oligonucleotide
uauagcauaacugaaugca

SEQ ID NO: 535582 - RNA, 19 nt, Artificial Sequence
  Description of Artificial Sequence: Synthetic oligonucleotide
aauucggucagaauccuac

SEQ ID NO: 535583 - RNA, 19 nt, Artificial Sequence
  Description of Artificial Sequence: Synthetic oligonucleotide
ucaaugagcggacaagucc

SEQ ID NO: 535584 - RNA, 19 nt, Artificial Sequence
  Description of Artificial Sequence: Synthetic oligonucleotide
acauaauucucuccucucc

SEQ ID NO: 535585 - RNA, 19 nt, Artificial Sequence
  Description of Artificial Sequence: Synthetic oligonucleotide
ugcaguuuuacccagcgac

SEQ ID NO: 535586 - RNA, 19 nt, Artificial Sequence
  Description of Artificial Sequence: Synthetic oligonucleotide
cauaucuauucuucgaggg

SEQ ID NO: 535587 - RNA, 19 nt, Artificial Sequence
  Description of Artificial Sequence: Synthetic oligonucleotide
uguauaacuguuucagaag

SEQ ID NO: 535588 - RNA, 19 nt, Artificial Sequence
  Description of Artificial Sequence: Synthetic oligonucleotide
auaucuauucuucgagggc

SEQ ID NO: 535589 - RNA, 19 nt, Artificial Sequence
  Description of Artificial Sequence: Synthetic oligonucleotide
auauauuuggcucagccaa

SEQ ID NO: 535590 - RNA, 19 nt, Artificial Sequence
  Description of Artificial Sequence: Synthetic oligonucleotide
ucugauagauuuauuaaau

SEQ ID NO: 535591 - RNA, 19 nt, Artificial Sequence
  Description of Artificial Sequence: Synthetic oligonucleotide
gcaaauacuauauuggcag

SEQ ID NO: 535592 - RNA, 19 nt, Artificial Sequence
  Description of Artificial Sequence: Synthetic oligonucleotide
ugagucacaaggaagucug

SEQ ID NO: 535593 - RNA, 19 nt, Artificial Sequence
  Description of Artificial Sequence: Synthetic oligonucleotide
aaagauguccccaaguuga

SEQ ID NO: 535594 - RNA, 19 nt, Artificial Sequence
  Description of Artificial Sequence: Synthetic oligonucleotide
guauauauuuggcucagcc

SEQ ID NO: 535595 - RNA, 19 nt, Artificial Sequence
  Description of Artificial Sequence: Synthetic oligonucleotide
ucaaggagcaauacaggag

SEQ ID NO: 535596 - RNA, 19 nt, Artificial Sequence
  Description of Artificial Sequence: Synthetic oligonucleotide
aagucugacagccauaaua

SEQ ID NO: 535597 - RNA, 19 nt, Artificial Sequence
  Description of Artificial Sequence: Synthetic oligonucleotide
cuuccuuagaccauuuggc

SEQ ID NO: 535598 - RNA, 19 nt, Artificial Sequence
  Description of Artificial Sequence: Synthetic oligonucleotide
aauacuauauuggcagcuc

SEQ ID NO: 535599 - RNA, 19 nt, Artificial Sequence
  Description of Artificial Sequence: Synthetic oligonucleotide
  modified_base (9)..(9): a, c, u, g, unknown or other
uucaaaacngcagaucuug

SEQ ID NO: 535600 - RNA, 19 nt, Artificial Sequence
  Description of Artificial Sequence: Synthetic oligonucleotide
aaggaggaauacuaggcug

SEQ ID NO: 535601 - RNA, 19 nt, Artificial Sequence
  Description of Artificial Sequence: Synthetic oligonucleotide
ucccauaagaauucgguca

SEQ ID NO: 535602 - RNA, 19 nt, Artificial Sequence
  Description of Artificial Sequence: Synthetic oligonucleotide
uaauggagguauaaaguca

SEQ ID NO: 535603 - RNA, 19 nt, Artificial Sequence
  Description of Artificial Sequence: Synthetic oligonucleotide
ugaacgaugggguagacuu

SEQ ID NO: 535604 - RNA, 19 nt, Artificial Sequence
  Description of Artificial Sequence: Synthetic oligonucleotide
agagucuugugacauuuac

SEQ ID NO: 535605 - RNA, 19 nt, Artificial Sequence
  Description of Artificial Sequence: Synthetic oligonucleotide
uaggccuaaaguuugaguc

SEQ ID NO: 535606 - RNA, 19 nt, Artificial Sequence
  Description of Artificial Sequence: Synthetic oligonucleotide
gacauaauggggugguagg

SEQ ID NO: 535607 - RNA, 19 nt, Artificial Sequence
  Description of Artificial Sequence: Synthetic oligonucleotide
uauauauuuggcucagcca

SEQ ID NO: 535608 - RNA, 19 nt, Artificial Sequence
  Description of Artificial Sequence: Synthetic oligonucleotide
gcuacaguagguuuuauag

SEQ ID NO: 535609 - RNA, 19 nt, Artificial Sequence
  Description of Artificial Sequence: Synthetic oligonucleotide
acauuuauggguaucauga

SEQ ID NO: 535610 - RNA, 19 nt, Artificial Sequence
  Description of Artificial Sequence: Synthetic oligonucleotide
guagaguuuaggaucaagg

SEQ ID NO: 535611 - RNA, 19 nt, Artificial Sequence
  Description of Artificial Sequence: Synthetic oligonucleotide
uagcauaacugaaugcaag

SEQ ID NO: 535612 - RNA, 19 nt, Artificial Sequence
  Description of Artificial Sequence: Synthetic oligonucleotide
agggugaauggacaagacc

SEQ ID NO: 535613 - RNA, 19 nt, Artificial Sequence
  Description of Artificial Sequence: Synthetic oligonucleotide
uaucuauucuucgagggcc

SEQ ID NO: 535614 - RNA, 19 nt, Artificial Sequence
  Description of Artificial Sequence: Synthetic oligonucleotide
gaaccuauaacaucccuca

SEQ ID NO: 535615 - RNA, 19 nt, Artificial Sequence
  Description of Artificial Sequence: Synthetic oligonucleotide
guaauggagguauaaaguc

SEQ ID NO: 535616 - RNA, 19 nt, Artificial Sequence
  Description of Artificial Sequence: Synthetic oligonucleotide
uuauagcauaacugaaugc

SEQ ID NO: 535617 - RNA, 19 nt, Artificial Sequence
  Description of Artificial Sequence: Synthetic oligonucleotide
agagguauucugcaucuuc

SEQ ID NO: 535618 - RNA, 19 nt, Artificial Sequence
  Description of Artificial Sequence: Synthetic oligonucleotide
uaacaucccucauagaggu

SEQ ID NO: 535619 - RNA, 19 nt, Artificial Sequence
  Description of Artificial Sequence: Synthetic oligonucleotide
ggauauaucaauaggauuc

SEQ ID NO: 535620 - RNA, 19 nt, Artificial Sequence
  Description of Artificial Sequence: Synthetic oligonucleotide
ugaaugcaagguaucaacu

SEQ ID NO: 535621 - RNA, 19 nt, Artificial Sequence
  Description of Artificial Sequence: Synthetic oligonucleotide
ugacccaagggguaaauga

SEQ ID NO: 535622 - RNA, 19 nt, Artificial Sequence
  Description of Artificial Sequence: Synthetic oligonucleotide
aucaauaggauucuucuuu

SEQ ID NO: 535623 - RNA, 19 nt, Artificial Sequence
  Description of Artificial Sequence: Synthetic oligonucleotide
agagucucuggccuggaac

SEQ ID NO: 535624 - RNA, 19 nt, Artificial Sequence
  Description of Artificial Sequence: Synthetic oligonucleotide
uugguauauauuuggcuca

SEQ ID NO: 535625 - RNA, 19 nt, Artificial Sequence
  Description of Artificial Sequence: Synthetic oligonucleotide
agcgacaguggucuuuucc

SEQ ID NO: 535626 - RNA, 19 nt, Artificial Sequence
  Description of Artificial Sequence: Synthetic oligonucleotide
uccuccuaugccuaaacug

SEQ ID NO: 535627 - RNA, 19 nt, Artificial Sequence
  Description of Artificial Sequence: Synthetic oligonucleotide
gauguccccaaguugacac

SEQ ID NO: 535628 - RNA, 19 nt, Artificial Sequence
  Description of Artificial Sequence: Synthetic oligonucleotide
ugauuauagcauaacugaa

SEQ ID NO: 535629 - RNA, 19 nt, Artificial Sequence
  Description of Artificial Sequence: Synthetic oligonucleotide
auuuauggguaucaugaga

SEQ ID NO: 535630 - RNA, 19 nt, Artificial Sequence
  Description of Artificial Sequence: Synthetic oligonucleotide
uuuacccaggaauccaaag

SEQ ID NO: 535631 - RNA, 19 nt, Artificial Sequence
  Description of Artificial Sequence: Synthetic oligonucleotide
ugacauuuacccaggaauc

SEQ ID NO: 535632 - RNA, 19 nt, Artificial Sequence
  Description of Artificial Sequence: Synthetic oligonucleotide
aaguuugaugaauccugag

SEQ ID NO: 535633 - RNA, 19 nt, Artificial Sequence
  Description of Artificial Sequence: Synthetic oligonucleotide
augggguagacuucgguag

SEQ ID NO: 535634 - RNA, 19 nt, Artificial Sequence
  Description of Artificial Sequence: Synthetic oligonucleotide
aaaguuugagucacaagga

SEQ ID NO: 535635 - RNA, 19 nt, Artificial Sequence
  Description of Artificial Sequence: Synthetic oligonucleotide
aucugauagauuuauuaaa

SEQ ID NO: 535636 - RNA, 19 nt, Artificial Sequence
  Description of Artificial Sequence: Synthetic oligonucleotide
ccuaaaauaguuuagcuga

SEQ ID NO: 535637 - RNA, 19 nt, Artificial Sequence
  Description of Artificial Sequence: Synthetic oligonucleotide
uuaggcuauguauaacugu

SEQ ID NO: 535638 - RNA, 19 nt, Artificial Sequence
  Description of Artificial Sequence: Synthetic oligonucleotide
uucggucagaauccuacag

SEQ ID NO: 535639 - RNA, 19 nt, Artificial Sequence
  Description of Artificial Sequence: Synthetic oligonucleotide
aggauguguuaguaagccc

SEQ ID NO: 535640 - RNA, 19 nt, Artificial Sequence
  Description of Artificial Sequence: Synthetic oligonucleotide
caaauuucgauccugggaa

SEQ ID NO: 535641 - RNA, 19 nt, Artificial Sequence
  Description of Artificial Sequence: Synthetic oligonucleotide
auagcaugaagcucaggug

SEQ ID NO: 535642 - RNA, 19 nt, Artificial Sequence
  Description of Artificial Sequence: Synthetic oligonucleotide
caugggaucaauagcauga

SEQ ID NO: 535643 - RNA, 19 nt, Artificial Sequence
  Description of Artificial Sequence: Synthetic oligonucleotide
uauggguaucaugagaaga

SEQ ID NO: 535644 - RNA, 19 nt, Artificial Sequence
  Description of Artificial Sequence: Synthetic oligonucleotide
auuccaagcugacccaagg

SEQ ID NO: 535645 - RNA, 19 nt, Artificial Sequence
  Description of Artificial Sequence: Synthetic oligonucleotide
caagaggauuaucagcagg

SEQ ID NO: 535646 - RNA, 19 nt, Artificial Sequence
  Description of Artificial Sequence: Synthetic oligonucleotide
auagagguauucugcaucu

SEQ ID NO: 535647 - RNA, 19 nt, Artificial Sequence
  Description of Artificial Sequence: Synthetic oligonucleotide
uuugaugaauccugagaga

SEQ ID NO: 535648 - RNA, 19 nt, Artificial Sequence
  Description of Artificial Sequence: Synthetic oligonucleotide
uguguguaaccugagaauc

SEQ ID NO: 535649 - RNA, 19 nt, Artificial Sequence
  Description of Artificial Sequence: Synthetic oligonucleotide
cuucgguaguucaaagucc

SEQ ID NO: 535650 - RNA, 19 nt, Artificial Sequence
  Description of Artificial Sequence: Synthetic oligonucleotide
ugaagagcaugcuccaucu

SEQ ID NO: 535651 - RNA, 19 nt, Artificial Sequence
  Description of Artificial Sequence: Synthetic oligonucleotide
ccuauaacaucccucauag

SEQ ID NO: 535652 - RNA, 19 nt, Artificial Sequence
  Description of Artificial Sequence: Synthetic oligonucleotide
gaggauguguuaguaagcc

SEQ ID NO: 535653 - RNA, 19 nt, Artificial Sequence
  Description of Artificial Sequence: Synthetic oligonucleotide
uaggcuauguauaacuguu

SEQ ID NO: 535654 - RNA, 19 nt, Artificial Sequence
  Description of Artificial Sequence: Synthetic oligonucleotide
gaauacuaggcugagcuga

SEQ ID NO: 535655 - RNA, 19 nt, Artificial Sequence
  Description of Artificial Sequence: Synthetic oligonucleotide
uccuugguauauauuuggc

SEQ ID NO: 535656 - RNA, 19 nt, Artificial Sequence
  Description of Artificial Sequence: Synthetic oligonucleotide
caagugagaguaauggcuc

SEQ ID NO: 535657 - RNA, 19 nt, Artificial Sequence
  Description of Artificial Sequence: Synthetic oligonucleotide
augugaccaaggcaucacc

SEQ ID NO: 535658 - RNA, 19 nt, Artificial Sequence
  Description of Artificial Sequence: Synthetic oligonucleotide
aucaguucuugaacgaugg

SEQ ID NO: 535659 - RNA, 19 nt, Artificial Sequence
  Description of Artificial Sequence: Synthetic oligonucleotide
cauagagguauucugcauc

SEQ ID NO: 535660 - RNA, 19 nt, Artificial Sequence
  Description of Artificial Sequence: Synthetic oligonucleotide
agguuacacauuuaugggu

SEQ ID NO: 535661 - RNA, 19 nt, Artificial Sequence
  Description of Artificial Sequence: Synthetic oligonucleotide
uugcccuaaaauaguuuag

SEQ ID NO: 535662 - RNA, 19 nt, Artificial Sequence
  Description of Artificial Sequence: Synthetic oligonucleotide
cauaguuaggacucugguc

SEQ ID NO: 535663 - RNA, 19 nt, Artificial Sequence
  Description of Artificial Sequence: Synthetic oligonucleotide
aauccuacagucucuucua

SEQ ID NO: 535664 - RNA, 19 nt, Artificial Sequence
  Description of Artificial Sequence: Synthetic oligonucleotide
cagugacugagcaagugag

SEQ ID NO: 535665 - RNA, 19 nt, Artificial Sequence
  Description of Artificial Sequence: Synthetic oligonucleotide
agguauaaagucagaagag

SEQ ID NO: 535666 - RNA, 19 nt, Artificial Sequence
  Description of Artificial Sequence: Synthetic oligonucleotide
uccucaaguuugaugaauc

SEQ ID NO: 535667 - RNA, 19 nt, Artificial Sequence
  Description of Artificial Sequence: Synthetic oligonucleotide
uggauauaucaauaggauu

SEQ ID NO: 535668 - RNA, 19 nt, Artificial Sequence
  Description of Artificial Sequence: Synthetic oligonucleotide
uaaacauaauucucuccuc

SEQ ID NO: 535669 - RNA, 19 nt, Artificial Sequence
  Description of Artificial Sequence: Synthetic oligonucleotide
ugcccuaaaauaguuuagc

SEQ ID NO: 535670 - RNA, 19 nt, Artificial Sequence
  Description of Artificial Sequence: Synthetic oligonucleotide
aguuugagucacaaggaag

SEQ ID NO: 535671 - RNA, 19 nt, Artificial Sequence
  Description of Artificial Sequence: Synthetic oligonucleotide
  modified_base (8)..(8): a, c, u, g, unknown or other
ucaaaacngcagaucuuga

SEQ ID NO: 535672 - RNA, 19 nt, Artificial Sequence
  Description of Artificial Sequence: Synthetic oligonucleotide
uuaggaucaaggagcaaua

SEQ ID NO: 535673 - RNA, 19 nt, Artificial Sequence
  Description of Artificial Sequence: Synthetic oligonucleotide
  modified_base (4)..(4): a, c, u, g, unknown or other
aacngcagaucuugaacua

SEQ ID NO: 535674 - RNA, 19 nt, Artificial Sequence
  Description of Artificial Sequence: Synthetic oligonucleotide
agacauaauggggugguag

SEQ ID NO: 535675 - RNA, 19 nt, Artificial Sequence
  Description of Artificial Sequence: Synthetic oligonucleotide
uggaccuagucucugucac

SEQ ID NO: 535676 - RNA, 19 nt, Artificial Sequence
  Description of Artificial Sequence: Synthetic oligonucleotide
gugacugagcaagugagag

SEQ ID NO: 535677 - RNA, 19 nt, Artificial Sequence
  Description of Artificial Sequence: Synthetic oligonucleotide
ucggucagaauccuacagu

SEQ ID NO: 535678 - RNA, 19 nt, Artificial Sequence
  Description of Artificial Sequence: Synthetic oligonucleotide
ccuccuaugccuaaacugg

SEQ ID NO: 535679 - RNA, 19 nt, Artificial Sequence
  Description of Artificial Sequence: Synthetic oligonucleotide
acuauuuaggcuauguaua

SEQ ID NO: 535680 - RNA, 19 nt, Artificial Sequence
  Description of Artificial Sequence: Synthetic oligonucleotide
ggcauaucuauucuucgag

SEQ ID NO: 535681 - RNA, 19 nt, Artificial Sequence
  Description of Artificial Sequence: Synthetic oligonucleotide
cuucguucugguagugugg

SEQ ID NO: 535682 - RNA, 19 nt, Artificial Sequence
  Description of Artificial Sequence: Synthetic oligonucleotide
gaagauguugguuaaguuu

SEQ ID NO: 535683 - RNA, 19 nt, Artificial Sequence
  Description of Artificial Sequence: Synthetic oligonucleotide
ugauccuuaccaccugcug

SEQ ID NO: 535684 - RNA, 19 nt, Artificial Sequence
  Description of Artificial Sequence: Synthetic oligonucleotide
caucaguucuugaacgaug

SEQ ID NO: 535685 - RNA, 19 nt, Artificial Sequence
  Description of Artificial Sequence: Synthetic oligonucleotide
uguguaaccugagaaucac

SEQ ID NO: 535686 - RNA, 19 nt, Artificial Sequence
  Description of Artificial Sequence: Synthetic oligonucleotide
ugcucgauccaugaagagc

SEQ ID NO: 535687 - RNA, 19 nt, Artificial Sequence
  Description of Artificial Sequence: Synthetic oligonucleotide
gaauccuacagucucuucu

SEQ ID NO: 535688 - RNA, 19 nt, Artificial Sequence
  Description of Artificial Sequence: Synthetic oligonucleotide
ugucaaugagcggacaagu

SEQ ID NO: 535689 - RNA, 19 nt, Artificial Sequence
  Description of Artificial Sequence: Synthetic oligonucleotide
uucccauaagaauucgguc

SEQ ID NO: 535690 - RNA, 19 nt, Artificial Sequence
  Description of Artificial Sequence: Synthetic oligonucleotide
ugggaucaauagcaugaag

SEQ ID NO: 535691 - RNA, 19 nt, Artificial Sequence
  Description of Artificial Sequence: Synthetic oligonucleotide
auuggauagaauaaacaua

SEQ ID NO: 535692 - RNA, 19 nt, Artificial Sequence
  Description of Artificial Sequence: Synthetic oligonucleotide
cauuggauagaauaaacau

SEQ ID NO: 535693 - RNA, 19 nt, Artificial Sequence
  Description of Artificial Sequence: Synthetic oligonucleotide
guaaaugaagacugcuaga

SEQ ID NO: 535694 - RNA, 19 nt, Artificial Sequence
  Description of Artificial Sequence: Synthetic oligonucleotide
auauuuggcucagccaauc

SEQ ID NO: 535695 - RNA, 19 nt, Artificial Sequence
  Description of Artificial Sequence: Synthetic oligonucleotide
gcauaucuauucuucgagg

SEQ ID NO: 535696 - RNA, 19 nt, Artificial Sequence
  Description of Artificial Sequence: Synthetic oligonucleotide
ucuauagggcuccccugcc

SEQ ID NO: 535697 - RNA, 19 nt, Artificial Sequence
  Description of Artificial Sequence: Synthetic oligonucleotide
aguugacacugcuacccag

SEQ ID NO: 535698 - RNA, 19 nt, Artificial Sequence
  Description of Artificial Sequence: Synthetic oligonucleotide
aguguggcaguguagguua

SEQ ID NO: 535699 - RNA, 19 nt, Artificial Sequence
  Description of Artificial Sequence: Synthetic oligonucleotide
caugaagcucaggugaagc

SEQ ID NO: 535700 - RNA, 19 nt, Artificial Sequence
  Description of Artificial Sequence: Synthetic oligonucleotide
gugacauuuacccaggaau

SEQ ID NO: 535701 - RNA, 19 nt, Artificial Sequence
  Description of Artificial Sequence: Synthetic oligonucleotide
cugaaacugccaauucuac

SEQ ID NO: 535702 - RNA, 19 nt, Artificial Sequence
  Description of Artificial Sequence: Synthetic oligonucleotide
gcugguuggucucugaccc

SEQ ID NO: 535703 - RNA, 19 nt, Artificial Sequence
  Description of Artificial Sequence: Synthetic oligonucleotide
aaguccuuuuguacugggg

SEQ ID NO: 535704 - RNA, 19 nt, Artificial Sequence
  Description of Artificial Sequence: Synthetic oligonucleotide
ugccaucuacagaaggcug

SEQ ID NO: 535705 - RNA, 19 nt, Artificial Sequence
  Description of Artificial Sequence: Synthetic oligonucleotide
uauuuggcucagccaaucu

SEQ ID NO: 535706 - RNA, 19 nt, Artificial Sequence
  Description of Artificial Sequence: Synthetic oligonucleotide
agaguuuacaacagugacu

SEQ ID NO: 535707 - RNA, 19 nt, Artificial Sequence
  Description of Artificial Sequence: Synthetic oligonucleotide
ggucccaacaugcugguug

SEQ ID NO: 535708 - RNA, 19 nt, Artificial Sequence
  Description of Artificial Sequence: Synthetic oligonucleotide
ugguauauauuuggcucag

SEQ ID NO: 535709 - RNA, 19 nt, Artificial Sequence
  Description of Artificial Sequence: Synthetic oligonucleotide
uaacugaaugcaagguauc

SEQ ID NO: 535710 - RNA, 19 nt, Artificial Sequence
  Description of Artificial Sequence: Synthetic oligonucleotide
uauauuuggcucagccaau

SEQ ID NO: 535711 - RNA, 19 nt, Artificial Sequence
  Description of Artificial Sequence: Synthetic oligonucleotide
caagguaucaacucugcua

SEQ ID NO: 535712 - RNA, 19 nt, Artificial Sequence
  Description of Artificial Sequence: Synthetic oligonucleotide
gacugagcaagugagagua

SEQ ID NO: 535713 - RNA, 19 nt, Artificial Sequence
  Description of Artificial Sequence: Synthetic oligonucleotide
guacuugaccccuugggga

SEQ ID NO: 535714 - RNA, 19 nt, Artificial Sequence
  Description of Artificial Sequence: Synthetic oligonucleotide
auaagaauucggucagaau

SEQ ID NO: 535715 - RNA, 19 nt, Artificial Sequence
  Description of Artificial Sequence: Synthetic oligonucleotide
cuauuuaggcuauguauaa

SEQ ID NO: 535716 - RNA, 19 nt, Artificial Sequence
  Description of Artificial Sequence: Synthetic oligonucleotide
uauuuaggcuauguauaac

SEQ ID NO: 535717 - RNA, 19 nt, Artificial Sequence
  Description of Artificial Sequence: Synthetic oligonucleotide
gguaucaugagaagagggc

SEQ ID NO: 535718 - RNA, 19 nt, Artificial Sequence
  Description of Artificial Sequence: Synthetic oligonucleotide
ugagccugaaggacuauuu

SEQ ID NO: 535719 - RNA, 19 nt, Artificial Sequence
  Description of Artificial Sequence: Synthetic oligonucleotide
aaacugggagggauaacug

SEQ ID NO: 535720 - RNA, 19 nt, Artificial Sequence
  Description of Artificial Sequence: Synthetic oligonucleotide
uacccagcgacaguggucu

SEQ ID NO: 535721 - RNA, 19 nt, Artificial Sequence
  Description of Artificial Sequence: Synthetic oligonucleotide
uaucaauaggauucuucuu

SEQ ID NO: 535722 - RNA, 19 nt, Artificial Sequence
  Description of Artificial Sequence: Synthetic oligonucleotide
uuuagcugacucugagagu

SEQ ID NO: 535723 - RNA, 19 nt, Artificial Sequence
  Description of Artificial Sequence: Synthetic oligonucleotide
cagaagaguucuuccuuag

SEQ ID NO: 535724 - RNA, 19 nt, Artificial Sequence
  Description of Artificial Sequence: Synthetic oligonucleotide
uacccaguuccuuggaccu

SEQ ID NO: 535725 - RNA, 19 nt, Artificial Sequence
  Description of Artificial Sequence: Synthetic oligonucleotide
ccauggauauaucaauagg

SEQ ID NO: 535726 - RNA, 19 nt, Artificial Sequence
  Description of Artificial Sequence: Synthetic oligonucleotide
ucuugaacgaugggguaga

SEQ ID NO: 535727 - RNA, 19 nt, Artificial Sequence
  Description of Artificial Sequence: Synthetic oligonucleotide
accuauaacaucccucaua

SEQ ID NO: 535728 - RNA, 19 nt, Artificial Sequence
  Description of Artificial Sequence: Synthetic oligonucleotide
  modified_base (7)..(7): a, c, u, g, unknown or other
caaaacngcagaucuugaa

SEQ ID NO: 535729 - RNA, 19 nt, Artificial Sequence
  Description of Artificial Sequence: Synthetic oligonucleotide
ucuaggccuaaaguuugag

SEQ ID NO: 535730 - RNA, 19 nt, Artificial Sequence
  Description of Artificial Sequence: Synthetic oligonucleotide
aucaacucugcuacaguag

SEQ ID NO: 535731 - RNA, 19 nt, Artificial Sequence
  Description of Artificial Sequence: Synthetic oligonucleotide
uggaacaaguggugcccgg

SEQ ID NO: 535732 - RNA, 19 nt, Artificial Sequence
  Description of Artificial Sequence: Synthetic oligonucleotide
gguaucaacucugcuacag

SEQ ID NO: 535733 - RNA, 19 nt, Artificial Sequence
  Description of Artificial Sequence: Synthetic oligonucleotide
uuggaccuagucucuguca

SEQ ID NO: 535734 - RNA, 19 nt, Artificial Sequence
  Description of Artificial Sequence: Synthetic oligonucleotide
uagggaugauccuuaccac

SEQ ID NO: 535735 - RNA, 19 nt, Artificial Sequence
  Description of Artificial Sequence: Synthetic oligonucleotide
  modified_base (2)..(2): a, c, u, g, unknown or other
cngcagaucuugaacuaug

SEQ ID NO: 535736 - RNA, 19 nt, Artificial Sequence
  Description of Artificial Sequence: Synthetic oligonucleotide
caguuuuacccagcgacag

SEQ ID NO: 535737 - RNA, 19 nt, Artificial Sequence
  Description of Artificial Sequence: Synthetic oligonucleotide
gauuauagcauaacugaau

SEQ ID NO: 535738 - RNA, 19 nt, Artificial Sequence
  Description of Artificial Sequence: Synthetic oligonucleotide
gauauaucaauaggauucu

SEQ ID NO: 535739 - RNA, 19 nt, Artificial Sequence
  Description of Artificial Sequence: Synthetic oligonucleotide
caaguuugaugaauccuga

SEQ ID NO: 535740 - RNA, 19 nt, Artificial Sequence
  Description of Artificial Sequence: Synthetic oligonucleotide
uaguuaggacucugguccc

SEQ ID NO: 535741 - RNA, 19 nt, Artificial Sequence
  Description of Artificial Sequence: Synthetic oligonucleotide
gauccuuaccaccugcugu

SEQ ID NO: 535742 - RNA, 19 nt, Artificial Sequence
  Description of Artificial Sequence: Synthetic oligonucleotide
acaucccucauagagguau

SEQ ID NO: 535743 - RNA, 19 nt, Artificial Sequence
  Description of Artificial Sequence: Synthetic oligonucleotide
ggguaucaugagaagaggg

SEQ ID NO: 535744 - RNA, 19 nt, Artificial Sequence
  Description of Artificial Sequence: Synthetic oligonucleotide
gagcggacaaguccuuuug

SEQ ID NO: 535745 - RNA, 19 nt, Artificial Sequence
  Description of Artificial Sequence: Synthetic oligonucleotide
agggguaaaugaagacugc

SEQ ID NO: 535746 - RNA, 19 nt, Artificial Sequence
  Description of Artificial Sequence: Synthetic oligonucleotide
ugacugagcaagugagagu

SEQ ID NO: 535747 - RNA, 19 nt, Artificial Sequence
  Description of Artificial Sequence: Synthetic oligonucleotide
acaaguccuuuuguacugg

SEQ ID NO: 535748 - RNA, 19 nt, Artificial Sequence
  Description of Artificial Sequence: Synthetic oligonucleotide
acauuuacccaggaaucca

SEQ ID NO: 535749 - RNA, 19 nt, Artificial Sequence
  Description of Artificial Sequence: Synthetic oligonucleotide
cugggagggauaacugccc

SEQ ID NO: 535750 - RNA, 19 nt, Artificial Sequence
  Description of Artificial Sequence: Synthetic oligonucleotide
aggacuauuuaggcuaugu

SEQ ID NO: 535751 - RNA, 19 nt, Artificial Sequence
  Description of Artificial Sequence: Synthetic oligonucleotide
aaccugagaaucacagagu

SEQ ID NO: 535752 - RNA, 19 nt, Artificial Sequence
  Description of Artificial Sequence: Synthetic oligonucleotide
agcuagggaugauccuuac

SEQ ID NO: 535753 - RNA, 19 nt, Artificial Sequence
  Description of Artificial Sequence: Synthetic oligonucleotide
cacgcugggcaucagaaca

SEQ ID NO: 535754 - RNA, 19 nt, Artificial Sequence
  Description of Artificial Sequence: Synthetic oligonucleotide
ugcuacaguagguuuuaua

SEQ ID NO: 535755 - RNA, 19 nt, Artificial Sequence
  Description of Artificial Sequence: Synthetic oligonucleotide
aaguggcuucgccuguuga

SEQ ID NO: 535756 - RNA, 19 nt, Artificial Sequence
  Description of Artificial Sequence: Synthetic oligonucleotide
uucgagggccagguguucg

SEQ ID NO: 535757 - RNA, 19 nt, Artificial Sequence
  Description of Artificial Sequence: Synthetic oligonucleotide
ggcuauguauaacuguuuc

SEQ ID NO: 535758 - RNA, 19 nt, Artificial Sequence
  Description of Artificial Sequence: Synthetic oligonucleotide
caauaggauucuucuuuuc

SEQ ID NO: 535759 - RNA, 19 nt, Artificial Sequence
  Description of Artificial Sequence: Synthetic oligonucleotide
ugcaugggaucaauagcau

SEQ ID NO: 535760 - RNA, 19 nt, Artificial Sequence
  Description of Artificial Sequence: Synthetic oligonucleotide
uggcaguguagguuaggug

SEQ ID NO: 535761 - RNA, 19 nt, Artificial Sequence
  Description of Artificial Sequence: Synthetic oligonucleotide
uggauagaauaaacauaau

SEQ ID NO: 535762 - RNA, 19 nt, Artificial Sequence
  Description of Artificial Sequence: Synthetic oligonucleotide
uuugagucacaaggaaguc

SEQ ID NO: 535763 - RNA, 19 nt, Artificial Sequence
  Description of Artificial Sequence: Synthetic oligonucleotide
aguuuuacccagcgacagu

SEQ ID NO: 535764 - RNA, 19 nt, Artificial Sequence
  Description of Artificial Sequence: Synthetic oligonucleotide
aguaauggcucugcugcug

SEQ ID NO: 535765 - RNA, 19 nt, Artificial Sequence
  Description of Artificial Sequence: Synthetic oligonucleotide
cuucccauaagaauucggu

SEQ ID NO: 535766 - RNA, 19 nt, Artificial Sequence
  Description of Artificial Sequence: Synthetic oligonucleotide
ugcccgguuuccaaaguuc

SEQ ID NO: 535767 - RNA, 19 nt, Artificial Sequence
  Description of Artificial Sequence: Synthetic oligonucleotide
aaccuauaacaucccucau

SEQ ID NO: 535768 - RNA, 19 nt, Artificial Sequence
  Description of Artificial Sequence: Synthetic oligonucleotide
cucuggauagguuacacau

SEQ ID NO: 535769 - RNA, 19 nt, Artificial Sequence
  Description of Artificial Sequence: Synthetic oligonucleotide
gcuucguucugguagugug

SEQ ID NO: 535770 - RNA, 19 nt, Artificial Sequence
  Description of Artificial Sequence: Synthetic oligonucleotide
auucggucagaauccuaca

SEQ ID NO: 535771 - RNA, 19 nt, Artificial Sequence
  Description of Artificial Sequence: Synthetic oligonucleotide
guaaccugagaaucacaga

SEQ ID NO: 535772 - RNA, 19 nt, Artificial Sequence
  Description of Artificial Sequence: Synthetic oligonucleotide
ugggguagacuucgguagu

SEQ ID NO: 535773 - RNA, 19 nt, Artificial Sequence
  Description of Artificial Sequence: Synthetic oligonucleotide
cgauccaugaagagcaugc

SEQ ID NO: 535774 - RNA, 19 nt, Artificial Sequence
  Description of Artificial Sequence: Synthetic oligonucleotide
uggcuucgccuguugaaug

SEQ ID NO: 535775 - RNA, 19 nt, Artificial Sequence
  Description of Artificial Sequence: Synthetic oligonucleotide
aggaggaauacuaggcuga

SEQ ID NO: 535776 - RNA, 19 nt, Artificial Sequence
  Description of Artificial Sequence: Synthetic oligonucleotide
aauacuaggcugagcugau

SEQ ID NO: 535777 - RNA, 19 nt, Artificial Sequence
  Description of Artificial Sequence: Synthetic oligonucleotide
ugggaggauguguuaguaa

SEQ ID NO: 535778 - RNA, 19 nt, Artificial Sequence
  Description of Artificial Sequence: Synthetic oligonucleotide
aguggcuucgccuguugaa

SEQ ID NO: 535779 - RNA, 19 nt, Artificial Sequence
  Description of Artificial Sequence: Synthetic oligonucleotide
uggugcccgguuuccaaag

SEQ ID NO: 535780 - RNA, 19 nt, Artificial Sequence
  Description of Artificial Sequence: Synthetic oligonucleotide
auagcauaacugaaugcaa

SEQ ID NO: 535781 - RNA, 19 nt, Artificial Sequence
  Description of Artificial Sequence: Synthetic oligonucleotide
guagguuaggugaggcuug

SEQ ID NO: 535782 - RNA, 19 nt, Artificial Sequence
  Description of Artificial Sequence: Synthetic oligonucleotide
cuuggaccuagucucuguc

SEQ ID NO: 535783 - RNA, 19 nt, Artificial Sequence
  Description of Artificial Sequence: Synthetic oligonucleotide
cauaagaauucggucagaa

SEQ ID NO: 535784 - RNA, 19 nt, Artificial Sequence
  Description of Artificial Sequence: Synthetic oligonucleotide
caaugagcggacaaguccu

SEQ ID NO: 535785 - RNA, 19 nt, Artificial Sequence
  Description of Artificial Sequence: Synthetic oligonucleotide
ucccucauagagguauucu

SEQ ID NO: 535786 - RNA, 19 nt, Artificial Sequence
  Description of Artificial Sequence: Synthetic oligonucleotide
agggccccuguguguaacc

SEQ ID NO: 535787 - RNA, 19 nt, Artificial Sequence
  Description of Artificial Sequence: Synthetic oligonucleotide
ggcuugaagauguugguua

SEQ ID NO: 535788 - RNA, 19 nt, Artificial Sequence
  Description of Artificial Sequence: Synthetic oligonucleotide
ccucaaguuugaugaaucc

SEQ ID NO: 535789 - RNA, 19 nt, Artificial Sequence
  Description of Artificial Sequence: Synthetic oligonucleotide
ugagcggacaaguccuuuu

SEQ ID NO: 535790 - RNA, 19 nt, Artificial Sequence
  Description of Artificial Sequence: Synthetic oligonucleotide
ccuaugccuaaacugggag

SEQ ID NO: 535791 - RNA, 19 nt, Artificial Sequence
  Description of Artificial Sequence: Synthetic oligonucleotide
cuauauuggcagcuccaca

SEQ ID NO: 535792 - RNA, 19 nt, Artificial Sequence
  Description of Artificial Sequence: Synthetic oligonucleotide
ggaauacuaggcugagcug

SEQ ID NO: 535793 - RNA, 19 nt, Artificial Sequence
  Description of Artificial Sequence: Synthetic oligonucleotide
agccaaucugggcuguccu

SEQ ID NO: 535794 - RNA, 19 nt, Artificial Sequence
  Description of Artificial Sequence: Synthetic oligonucleotide
agcggacaaguccuuuugu

SEQ ID NO: 535795 - RNA, 19 nt, Artificial Sequence
  Description of Artificial Sequence: Synthetic oligonucleotide
uugaacgaugggguagacu

SEQ ID NO: 535796 - RNA, 19 nt, Artificial Sequence
  Description of Artificial Sequence: Synthetic oligonucleotide
gacuucgguaguucaaagu

SEQ ID NO: 535797 - RNA, 19 nt, Artificial Sequence
  Description of Artificial Sequence: Synthetic oligonucleotide
ggagggucauggaugacag

SEQ ID NO: 535798 - RNA, 19 nt, Artificial Sequence
  Description of Artificial Sequence: Synthetic oligonucleotide
acucugcuacaguagguuu

SEQ ID NO: 535799 - RNA, 19 nt, Artificial Sequence
  Description of Artificial Sequence: Synthetic oligonucleotide
aucccucauagagguauuc

SEQ ID NO: 535800 - RNA, 19 nt, Artificial Sequence
  Description of Artificial Sequence: Synthetic oligonucleotide
ggugaauggacaagacccc

SEQ ID NO: 535801 - RNA, 19 nt, Artificial Sequence
  Description of Artificial Sequence: Synthetic oligonucleotide
gguagaguuuaggaucaag

SEQ ID NO: 535802 - RNA, 19 nt, Artificial Sequence
  Description of Artificial Sequence: Synthetic oligonucleotide
ggaaccuauaacaucccuc

SEQ ID NO: 535803 - RNA, 19 nt, Artificial Sequence
  Description of Artificial Sequence: Synthetic oligonucleotide
uggggaguuucaucccugu

SEQ ID NO: 535804 - RNA, 19 nt, Artificial Sequence
  Description of Artificial Sequence: Synthetic oligonucleotide
agcaauacaggagggucau

SEQ ID NO: 535805 - RNA, 19 nt, Artificial Sequence
  Description of Artificial Sequence: Synthetic oligonucleotide
acaguagguuuuauagaga

SEQ ID NO: 535806 - RNA, 19 nt, Artificial Sequence
  Description of Artificial Sequence: Synthetic oligonucleotide
gguagacuucgguaguuca

SEQ ID NO: 535807 - RNA, 19 nt, Artificial Sequence
  Description of Artificial Sequence: Synthetic oligonucleotide
gaggaauacuaggcugagc

SEQ ID NO: 535808 - RNA, 19 nt, Artificial Sequence
  Description of Artificial Sequence: Synthetic oligonucleotide
guugguuaaguuucugcau

SEQ ID NO: 535809 - RNA, 19 nt, Artificial Sequence
  Description of Artificial Sequence: Synthetic oligonucleotide
uggauagguuacacauuua

SEQ ID NO: 535810 - RNA, 19 nt, Artificial Sequence
  Description of Artificial Sequence: Synthetic oligonucleotide
ugccuaaacugggagggau

SEQ ID NO: 535811 - RNA, 19 nt, Artificial Sequence
  Description of Artificial Sequence: Synthetic oligonucleotide
uagguuaggugaggcuugc

SEQ ID NO: 535812 - RNA, 19 nt, Artificial Sequence
  Description of Artificial Sequence: Synthetic oligonucleotide
cugagaaucacagagucuu

SEQ ID NO: 535813 - RNA, 19 nt, Artificial Sequence
  Description of Artificial Sequence: Synthetic oligonucleotide
uuacaagcauguggacuga

SEQ ID NO: 535814 - RNA, 19 nt, Artificial Sequence
  Description of Artificial Sequence: Synthetic oligonucleotide
ggagcauuggauagaauaa

SEQ ID NO: 535815 - RNA, 19 nt, Artificial Sequence
  Description of Artificial Sequence: Synthetic oligonucleotide
  modified_base (3)..(3): a, c, u, g, unknown or other
acngcagaucuugaacuau

SEQ ID NO: 535816 - RNA, 19 nt, Artificial Sequence
  Description of Artificial Sequence: Synthetic oligonucleotide
gcaugggaucaauagcaug

SEQ ID NO: 535817 - RNA, 19 nt, Artificial Sequence
  Description of Artificial Sequence: Synthetic oligonucleotide
gcuggcauaguuaggacuc

SEQ ID NO: 535818 - RNA, 19 nt, Artificial Sequence
  Description of Artificial Sequence: Synthetic oligonucleotide
cugaaggacuauuuaggcu

SEQ ID NO: 535819 - RNA, 19 nt, Artificial Sequence
  Description of Artificial Sequence: Synthetic oligonucleotide
ggauagguuacacauuuau

SEQ ID NO: 535820 - RNA, 19 nt, Artificial Sequence
  Description of Artificial Sequence: Synthetic oligonucleotide
gguauaaagucagaagagu

SEQ ID NO: 535821 - RNA, 19 nt, Artificial Sequence
  Description of Artificial Sequence: Synthetic oligonucleotide
gguuacacauuuaugggua

SEQ ID NO: 535822 - RNA, 19 nt, Artificial Sequence
  Description of Artificial Sequence: Synthetic oligonucleotide
uuaggacucuggucccaac

SEQ ID NO: 535823 - RNA, 19 nt, Artificial Sequence
  Description of Artificial Sequence: Synthetic oligonucleotide
gugcucgauccaugaagag

SEQ ID NO: 535824 - RNA, 19 nt, Artificial Sequence
  Description of Artificial Sequence: Synthetic oligonucleotide
cuggauagguuacacauuu

SEQ ID NO: 535825 - RNA, 19 nt, Artificial Sequence
  Description of Artificial Sequence: Synthetic oligonucleotide
aaggacuauuuaggcuaug

SEQ ID NO: 535826 - RNA, 19 nt, Artificial Sequence
  Description of Artificial Sequence: Synthetic oligonucleotide
guguguaaccugagaauca

SEQ ID NO: 535827 - RNA, 19 nt, Artificial Sequence
  Description of Artificial Sequence: Synthetic oligonucleotide
ggaggauguguuaguaagc

SEQ ID NO: 535828 - RNA, 19 nt, Artificial Sequence
  Description of Artificial Sequence: Synthetic oligonucleotide
caagggguaaaugaagacu

SEQ ID NO: 535829 - RNA, 19 nt, Artificial Sequence
  Description of Artificial Sequence: Synthetic oligonucleotide
gaugggaggauguguuagu

SEQ ID NO: 535830 - RNA, 19 nt, Artificial Sequence
  Description of Artificial Sequence: Synthetic oligonucleotide
guguucgggaccccagaac

SEQ ID NO: 535831 - RNA, 19 nt, Artificial Sequence
  Description of Artificial Sequence: Synthetic oligonucleotide
uggggaggguagaguuuag

SEQ ID NO: 535832 - RNA, 19 nt, Artificial Sequence
  Description of Artificial Sequence: Synthetic oligonucleotide
agugacugagcaagugaga

SEQ ID NO: 535833 - RNA, 19 nt, Artificial Sequence
  Description of Artificial Sequence: Synthetic oligonucleotide
agaggauuaucagcaggau

SEQ ID NO: 535834 - RNA, 19 nt, Artificial Sequence
  Description of Artificial Sequence: Synthetic oligonucleotide
gucaaugagcggacaaguc

SEQ ID NO: 535835 - RNA, 19 nt, Artificial Sequence
  Description of Artificial Sequence: Synthetic oligonucleotide
ugccacgcugggcaucaga

SEQ ID NO: 535836 - RNA, 19 nt, Artificial Sequence
  Description of Artificial Sequence: Synthetic oligonucleotide
caaguggugcccgguuucc

SEQ ID NO: 535837 - RNA, 19 nt, Artificial Sequence
  Description of Artificial Sequence: Synthetic oligonucleotide
cugguuggucucugacccc

SEQ ID NO: 535838 - RNA, 19 nt, Artificial Sequence
  Description of Artificial Sequence: Synthetic oligonucleotide
accuagucucugucacuug

SEQ ID NO: 535839 - RNA, 19 nt, Artificial Sequence
  Description of Artificial Sequence: Synthetic oligonucleotide
uggacaccccucgaaguuc

SEQ ID NO: 535840 - RNA, 19 nt, Artificial Sequence
  Description of Artificial Sequence: Synthetic oligonucleotide
agguguucgggaccccaga

SEQ ID NO: 535841 - RNA, 19 nt, Artificial Sequence
  Description of Artificial Sequence: Synthetic oligonucleotide
ggauuacaagcauguggac

SEQ ID NO: 535842 - RNA, 19 nt, Artificial Sequence
  Description of Artificial Sequence: Synthetic oligonucleotide
ggaagucugacagccauaa

SEQ ID NO: 535843 - RNA, 19 nt, Artificial Sequence
  Description of Artificial Sequence: Synthetic oligonucleotide
cuaaacugggagggauaac

SEQ ID NO: 535844 - RNA, 19 nt, Artificial Sequence
  Description of Artificial Sequence: Synthetic oligonucleotide
gcuagggaugauccuuacc

SEQ ID NO: 535845 - RNA, 19 nt, Artificial Sequence
  Description of Artificial Sequence: Synthetic oligonucleotide
ucguucugguaguguggca

SEQ ID NO: 535846 - RNA, 19 nt, Artificial Sequence
  Description of Artificial Sequence: Synthetic oligonucleotide
caauagcaugaagcucagg

SEQ ID NO: 535847 - RNA, 19 nt, Artificial Sequence
  Description of Artificial Sequence: Synthetic oligonucleotide
auauaucaauaggauucuu

SEQ ID NO: 535848 - RNA, 19 nt, Artificial Sequence
  Description of Artificial Sequence: Synthetic oligonucleotide
ggaucuauagggcuccccu

SEQ ID NO: 535849 - RNA, 19 nt, Artificial Sequence
  Description of Artificial Sequence: Synthetic oligonucleotide
auuuacccaggaauccaaa

SEQ ID NO: 535850 - RNA, 19 nt, Artificial Sequence
  Description of Artificial Sequence: Synthetic oligonucleotide
cggacaaguccuuuuguac

SEQ ID NO: 535851 - RNA, 19 nt, Artificial Sequence
  Description of Artificial Sequence: Synthetic oligonucleotide
aaguggugcccgguuucca

SEQ ID NO: 535852 - RNA, 19 nt, Artificial Sequence
  Description of Artificial Sequence: Synthetic oligonucleotide
auuucucucuggauagguu

SEQ ID NO: 535853 - RNA, 19 nt, Artificial Sequence
  Description of Artificial Sequence: Synthetic oligonucleotide
caucuacagaaggcugcag

SEQ ID NO: 535854 - RNA, 19 nt, Artificial Sequence
  Description of Artificial Sequence: Synthetic oligonucleotide
ucgauccugggaaccuaua

SEQ ID NO: 535855 - RNA, 19 nt, Artificial Sequence
  Description of Artificial Sequence: Synthetic oligonucleotide
aaugagcggacaaguccuu

SEQ ID NO: 535856 - RNA, 19 nt, Artificial Sequence
  Description of Artificial Sequence: Synthetic oligonucleotide
guugggcuucccauaagaa

SEQ ID NO: 535857 - RNA, 19 nt, Artificial Sequence
  Description of Artificial Sequence: Synthetic oligonucleotide
cggucagaauccuacaguc

SEQ ID NO: 535858 - RNA, 19 nt, Artificial Sequence
  Description of Artificial Sequence: Synthetic oligonucleotide
ggacuauuuaggcuaugua

SEQ ID NO: 535859 - RNA, 19 nt, Artificial Sequence
  Description of Artificial Sequence: Synthetic oligonucleotide
caccugcugugcuauaaaa

SEQ ID NO: 535860 - RNA, 19 nt, Artificial Sequence
  Description of Artificial Sequence: Synthetic oligonucleotide
cagggauuacaagcaugug

SEQ ID NO: 535861 - RNA, 19 nt, Artificial Sequence
  Description of Artificial Sequence: Synthetic oligonucleotide
ggggaggguagaguuuagg

SEQ ID NO: 535862 - RNA, 19 nt, Artificial Sequence
  Description of Artificial Sequence: Synthetic oligonucleotide
cuugcaugcuggcauaguu

SEQ ID NO: 535863 - RNA, 19 nt, Artificial Sequence
  Description of Artificial Sequence: Synthetic oligonucleotide
gggagggauaacugcccug

SEQ ID NO: 535864 - RNA, 19 nt, Artificial Sequence
  Description of Artificial Sequence: Synthetic oligonucleotide
cuugaacgaugggguagac

SEQ ID NO: 535865 - RNA, 19 nt, Artificial Sequence
  Description of Artificial Sequence: Synthetic oligonucleotide
auggagguauaaagucaga

SEQ ID NO: 535866 - RNA, 19 nt, Artificial Sequence
  Description of Artificial Sequence: Synthetic oligonucleotide
agcugacucugagaguuua

SEQ ID NO: 535867 - RNA, 19 nt, Artificial Sequence
  Description of Artificial Sequence: Synthetic oligonucleotide
ggggaacucuggccuacag

SEQ ID NO: 535868 - RNA, 19 nt, Artificial Sequence
  Description of Artificial Sequence: Synthetic oligonucleotide
aggcccuguaaggaggaau

SEQ ID NO: 535869 - RNA, 19 nt, Artificial Sequence
  Description of Artificial Sequence: Synthetic oligonucleotide
gcagggauuacaagcaugu

SEQ ID NO: 535870 - RNA, 19 nt, Artificial Sequence
  Description of Artificial Sequence: Synthetic oligonucleotide
gguuaggugaggcuugcau

SEQ ID NO: 535871 - RNA, 19 nt, Artificial Sequence
  Description of Artificial Sequence: Synthetic oligonucleotide
ggacaccccucgaaguucc

SEQ ID NO: 535872 - RNA, 19 nt, Artificial Sequence
  Description of Artificial Sequence: Synthetic oligonucleotide
gaccuagucucugucacuu

SEQ ID NO: 535873 - RNA, 19 nt, Artificial Sequence
  Description of Artificial Sequence: Synthetic oligonucleotide
gcgacaguggucuuuuccu

SEQ ID NO: 535874 - RNA, 19 nt, Artificial Sequence
  Description of Artificial Sequence: Synthetic oligonucleotide
aggcuauguauaacuguuu

SEQ ID NO: 535875 - RNA, 19 nt, Artificial Sequence
  Description of Artificial Sequence: Synthetic oligonucleotide
gaaggacuauuuaggcuau

SEQ ID NO: 535876 - RNA, 19 nt, Artificial Sequence
  Description of Artificial Sequence: Synthetic oligonucleotide
guggcaguguagguuaggu

SEQ ID NO: 535877 - RNA, 19 nt, Artificial Sequence
  Description of Artificial Sequence: Synthetic oligonucleotide
uagagguauucugcaucuu

SEQ ID NO: 535878 - RNA, 19 nt, Artificial Sequence
  Description of Artificial Sequence: Synthetic oligonucleotide
augccuaaacugggaggga

SEQ ID NO: 535879 - RNA, 19 nt, Artificial Sequence
  Description of Artificial Sequence: Synthetic oligonucleotide
ggcccuggcuucguucugg

SEQ ID NO: 535880 - RNA, 19 nt, Artificial Sequence
  Description of Artificial Sequence: Synthetic oligonucleotide
ccaacaugcugguuggucu

SEQ ID NO: 535881 - RNA, 19 nt, Artificial Sequence
  Description of Artificial Sequence: Synthetic oligonucleotide
gcggacaaguccuuuugua

SEQ ID NO: 535882 - RNA, 19 nt, Artificial Sequence
  Description of Artificial Sequence: Synthetic oligonucleotide
aacaucccucauagaggua

SEQ ID NO: 535883 - RNA, 19 nt, Artificial Sequence
  Description of Artificial Sequence: Synthetic oligonucleotide
ccauuuggcaaauuucgau

SEQ ID NO: 535884 - RNA, 19 nt, Artificial Sequence
  Description of Artificial Sequence: Synthetic oligonucleotide
augagcggacaaguccuuu

SEQ ID NO: 535885 - RNA, 19 nt, Artificial Sequence
  Description of Artificial Sequence: Synthetic oligonucleotide
ccuaaacugggagggauaa

SEQ ID NO: 535886 - RNA, 19 nt, Artificial Sequence
  Description of Artificial Sequence: Synthetic oligonucleotide
gccaaucugggcuguccuc

SEQ ID NO: 535887 - RNA, 19 nt, Artificial Sequence
  Description of Artificial Sequence: Synthetic oligonucleotide
cuggccuacagggcuccuc

SEQ ID NO: 535888 - RNA, 19 nt, Artificial Sequence
  Description of Artificial Sequence: Synthetic oligonucleotide
gggaaccuauaacaucccu

SEQ ID NO: 535889 - RNA, 19 nt, Artificial Sequence
  Description of Artificial Sequence: Synthetic oligonucleotide
ggguagacuucgguaguuc

SEQ ID NO: 535890 - RNA, 19 nt, Artificial Sequence
  Description of Artificial Sequence: Synthetic oligonucleotide
agguuaggugaggcuugca

SEQ ID NO: 535891 - RNA, 19 nt, Artificial Sequence
  Description of Artificial Sequence: Synthetic oligonucleotide
cuuccagcgguuuccccau

SEQ ID NO: 535892 - RNA, 19 nt, Artificial Sequence
  Description of Artificial Sequence: Synthetic oligonucleotide
ccacgcugggcaucagaac

SEQ ID NO: 535893 - RNA, 19 nt, Artificial Sequence
  Description of Artificial Sequence: Synthetic oligonucleotide
ggcuucgccuguugaaugu

SEQ ID NO: 535894 - RNA, 19 nt, Artificial Sequence
  Description of Artificial Sequence: Synthetic oligonucleotide
ggucagaauccuacagucu

SEQ ID NO: 535895 - RNA, 19 nt, Artificial Sequence
  Description of Artificial Sequence: Synthetic oligonucleotide
agcugacccaagggguaaa

SEQ ID NO: 535896 - RNA, 19 nt, Artificial Sequence
  Description of Artificial Sequence: Synthetic oligonucleotide
gccacgcugggcaucagaa

SEQ ID NO: 535897 - RNA, 19 nt, Artificial Sequence
  Description of Artificial Sequence: Synthetic oligonucleotide
gcccuguaaggaggaauac

SEQ ID NO: 535898 - RNA, 19 nt, Artificial Sequence
  Description of Artificial Sequence: Synthetic oligonucleotide
cagagucucuggccuggaa

SEQ ID NO: 535899 - RNA, 19 nt, Artificial Sequence
  Description of Artificial Sequence: Synthetic oligonucleotide
ccccuuggggaguuucauc

SEQ ID NO: 535900 - RNA, 19 nt, Artificial Sequence
  Description of Artificial Sequence: Synthetic oligonucleotide
ccugagaaucacagagucu

SEQ ID NO: 535901 - RNA, 19 nt, Artificial Sequence
  Description of Artificial Sequence: Synthetic oligonucleotide
ggaccuagucucugucacu

SEQ ID NO: 535902 - RNA, 19 nt, Artificial Sequence
  Description of Artificial Sequence: Synthetic oligonucleotide
gcaauacaggagggucaug

SEQ ID NO: 535903 - RNA, 19 nt, Artificial Sequence
  Description of Artificial Sequence: Synthetic oligonucleotide
ggcagucuuucccugccau

SEQ ID NO: 535904 - RNA, 19 nt, Artificial Sequence
  Description of Artificial Sequence: Synthetic oligonucleotide
cgauccugggaaccuauaa

SEQ ID NO: 535905 - RNA, 19 nt, Artificial Sequence
  Description of Artificial Sequence: Synthetic oligonucleotide
cccuguguguaaccugaga

SEQ ID NO: 535906 - RNA, 19 nt, Artificial Sequence
  Description of Artificial Sequence: Synthetic oligonucleotide
gccuacagggcuccucacu

SEQ ID NO: 535907 - RNA, 19 nt, Artificial Sequence
  Description of Artificial Sequence: Synthetic oligonucleotide
cagacauaaugggguggua

SEQ ID NO: 535908 - RNA, 19 nt, Artificial Sequence
  Description of Artificial Sequence: Synthetic oligonucleotide
acccaguuccuuggaccua

SEQ ID NO: 535909 - RNA, 19 nt, Artificial Sequence
  Description of Artificial Sequence: Synthetic oligonucleotide
ggggaucuauagggcuccc

SEQ ID NO: 535910 - RNA, 19 nt, Artificial Sequence
  Description of Artificial Sequence: Synthetic oligonucleotide
gccuaaacugggagggaua

SEQ ID NO: 535911 - RNA, 19 nt, Artificial Sequence
  Description of Artificial Sequence: Synthetic oligonucleotide
ccauaagaauucggucaga

SEQ ID NO: 535912 - RNA, 19 nt, Artificial Sequence
  Description of Artificial Sequence: Synthetic oligonucleotide
uugaccccuuggggaguuu

SEQ ID NO: 535913 - RNA, 19 nt, Artificial Sequence
  Description of Artificial Sequence: Synthetic oligonucleotide
acccagcgacaguggucuu

SEQ ID NO: 535914 - RNA, 19 nt, Artificial Sequence
  Description of Artificial Sequence: Synthetic oligonucleotide
cuugaccccuuggggaguu

SEQ ID NO: 535915 - RNA, 19 nt, Artificial Sequence
  Description of Artificial Sequence: Synthetic oligonucleotide
gcuugcaugcuggcauagu

SEQ ID NO: 535916 - RNA, 19 nt, Artificial Sequence
  Description of Artificial Sequence: Synthetic oligonucleotide
cacugcuacccaguuccuu

SEQ ID NO: 535917 - RNA, 19 nt, Artificial Sequence
  Description of Artificial Sequence: Synthetic oligonucleotide
gggguagacuucgguaguu

SEQ ID NO: 535918 - RNA, 19 nt, Artificial Sequence
  Description of Artificial Sequence: Synthetic oligonucleotide
ccaaggcaucaccauggau

SEQ ID NO: 535919 - RNA, 19 nt, Artificial Sequence
  Description of Artificial Sequence: Synthetic oligonucleotide
gcuagaugguggggacacu

SEQ ID NO: 535920 - RNA, 19 nt, Artificial Sequence
  Description of Artificial Sequence: Synthetic oligonucleotide
ccagcgacaguggucuuuu

SEQ ID NO: 535921 - RNA, 19 nt, Artificial Sequence
  Description of Artificial Sequence: Synthetic oligonucleotide
cccagcgacaguggucuuu

SEQ ID NO: 535922 - RNA, 19 nt, Artificial Sequence
  Description of Artificial Sequence: Synthetic oligonucleotide
aauuauuauagccuggacu

SEQ ID NO: 535923 - RNA, 19 nt, Artificial Sequence
  Description of Artificial Sequence: Synthetic oligonucleotide
uguaauauacugcaguuca

SEQ ID NO: 535924 - RNA, 19 nt, Artificial Sequence
  Description of Artificial Sequence: Synthetic oligonucleotide
auuuauaggagacaaagca

SEQ ID NO: 535925 - RNA, 19 nt, Artificial Sequence
  Description of Artificial Sequence: Synthetic oligonucleotide
aaaaggauagguaccaagc

SEQ ID NO: 535926 - RNA, 19 nt, Artificial Sequence
  Description of Artificial Sequence: Synthetic oligonucleotide
aaacucgugugucugaugg

SEQ ID NO: 535927 - RNA, 19 nt, Artificial Sequence
  Description of Artificial Sequence: Synthetic oligonucleotide
ucuaguaucagagaauagg

SEQ ID NO: 535928 - RNA, 19 nt, Artificial Sequence
  Description of Artificial Sequence: Synthetic oligonucleotide
aauaggaugacgaacauga

SEQ ID NO: 535929 - RNA, 19 nt, Artificial Sequence
  Description of Artificial Sequence: Synthetic oligonucleotide
aaucuauuaauuacauacc

SEQ ID NO: 535930 - RNA, 19 nt, Artificial Sequence
  Description of Artificial Sequence: Synthetic oligonucleotide
aaucgggaagcuuaagaac

SEQ ID NO: 535931 - RNA, 19 nt, Artificial Sequence
  Description of Artificial Sequence: Synthetic oligonucleotide
auaauugagacaguaaaag

SEQ ID NO: 535932 - RNA, 19 nt, Artificial Sequence
  Description of Artificial Sequence: Synthetic oligonucleotide
augcuuacggagcagaacg

SEQ ID NO: 535933 - RNA, 19 nt, Artificial Sequence
  Description of Artificial Sequence: Synthetic oligonucleotide
uguaauuauuauagccugg

SEQ ID NO: 535934 - RNA, 19 nt, Artificial Sequence
  Description of Artificial Sequence: Synthetic oligonucleotide
accaaccuauauuuaagcc

SEQ ID NO: 535935 - RNA, 19 nt, Artificial Sequence
  Description of Artificial Sequence: Synthetic oligonucleotide
uuuaagccaauuaggagca

SEQ ID NO: 535936 - RNA, 19 nt, Artificial Sequence
  Description of Artificial Sequence: Synthetic oligonucleotide
ucggauuucaguuuguaga

SEQ ID NO: 535937 - RNA, 19 nt, Artificial Sequence
  Description of Artificial Sequence: Synthetic oligonucleotide
aaaauaucgccacacuagu

SEQ ID NO: 535938 - RNA, 19 nt, Artificial Sequence
  Description of Artificial Sequence: Synthetic oligonucleotide
uaagucuaguaucagagaa

SEQ ID NO: 535939 - RNA, 19 nt, Artificial Sequence
  Description of Artificial Sequence: Synthetic oligonucleotide
agcuuaacaggaugaagcc

SEQ ID NO: 535940 - RNA, 19 nt, Artificial Sequence
  Description of Artificial Sequence: Synthetic oligonucleotide
ucccguucuacccagauug

SEQ ID NO: 535941 - RNA, 19 nt, Artificial Sequence
  Description of Artificial Sequence: Synthetic oligonucleotide
ucuagcaaacuccaguuga

SEQ ID NO: 535942 - RNA, 19 nt, Artificial Sequence
  Description of Artificial Sequence: Synthetic oligonucleotide
aauaucgccacacuaguua

SEQ ID NO: 535943 - RNA, 19 nt, Artificial Sequence
  Description of Artificial Sequence: Synthetic oligonucleotide
acccuuauaauccucaugu

SEQ ID NO: 535944 - RNA, 19 nt, Artificial Sequence
  Description of Artificial Sequence: Synthetic oligonucleotide
agauugaucagauuccugu

SEQ ID NO: 535945 - RNA, 19 nt, Artificial Sequence
  Description of Artificial Sequence: Synthetic oligonucleotide
aagauggauguugauaguc

SEQ ID NO: 535946 - RNA, 19 nt, Artificial Sequence
  Description of Artificial Sequence: Synthetic oligonucleotide
aucgggaagcuuaagaacc

SEQ ID NO: 535947 - RNA, 19 nt, Artificial Sequence
  Description of Artificial Sequence: Synthetic oligonucleotide
aaaugcgcaccauucguag

SEQ ID NO: 535948 - RNA, 19 nt, Artificial Sequence
  Description of Artificial Sequence: Synthetic oligonucleotide
gaauaccucauacaaacca

SEQ ID NO: 535949 - RNA, 19 nt, Artificial Sequence
  Description of Artificial Sequence: Synthetic oligonucleotide
aagauaacuugccaccaug

SEQ ID NO: 535950 - RNA, 19 nt, Artificial Sequence
  Description of Artificial Sequence: Synthetic oligonucleotide
  modified_base (19)..(19): a, c, u, g, unknown or other
guaguuacagauaacagcn

SEQ ID NO: 535951 - RNA, 19 nt, Artificial Sequence
  Description of Artificial Sequence: Synthetic oligonucleotide
acuaguuagaaucuauuaa

SEQ ID NO: 535952 - RNA, 19 nt, Artificial Sequence
  Description of Artificial Sequence: Synthetic oligonucleotide
cucacaagggacaaugccc

SEQ ID NO: 535953 - RNA, 19 nt, Artificial Sequence
  Description of Artificial Sequence: Synthetic oligonucleotide
ugaauucaguaaaagcaca

SEQ ID NO: 535954 - RNA, 19 nt, Artificial Sequence
  Description of Artificial Sequence: Synthetic oligonucleotide
uccggaaaaggauagguac

SEQ ID NO: 535955 - RNA, 19 nt, Artificial Sequence
  Description of Artificial Sequence: Synthetic oligonucleotide
agagaauaggaugacgaac

SEQ ID NO: 535956 - RNA, 19 nt, Artificial Sequence
  Description of Artificial Sequence: Synthetic oligonucleotide
acgauacaaguuucgaaac

SEQ ID NO: 535957 - RNA, 19 nt, Artificial Sequence
  Description of Artificial Sequence: Synthetic oligonucleotide
uauucgggcuuucacaaca

SEQ ID NO: 535958 - RNA, 19 nt, Artificial Sequence
  Description of Artificial Sequence: Synthetic oligonucleotide
uuggcaaugaauucaguaa

SEQ ID NO: 535959 - RNA, 19 nt, Artificial Sequence
  Description of Artificial Sequence: Synthetic oligonucleotide
aacgugaacaggaauaccu

SEQ ID NO: 535960 - RNA, 19 nt, Artificial Sequence
  Description of Artificial Sequence: Synthetic oligonucleotide
uaaucgggaagcuuaagaa

SEQ ID NO: 535961 - RNA, 19 nt, Artificial Sequence
  Description of Artificial Sequence: Synthetic oligonucleotide
uguauucgggcuuucacaa

SEQ ID NO: 535962 - RNA, 19 nt, Artificial Sequence
  Description of Artificial Sequence: Synthetic oligonucleotide
ugacgaacaugacaguuac

SEQ ID NO: 535963 - RNA, 19 nt, Artificial Sequence
  Description of Artificial Sequence: Synthetic oligonucleotide
gaagcuaacuaggucaccc

SEQ ID NO: 535964 - RNA, 19 nt, Artificial Sequence
  Description of Artificial Sequence: Synthetic oligonucleotide
gcgaugguaauugagaugg

SEQ ID NO: 535965 - RNA, 19 nt, Artificial Sequence
  Description of Artificial Sequence: Synthetic oligonucleotide
ucugguggcaaacucggga

SEQ ID NO: 535966 - RNA, 19 nt, Artificial Sequence
  Description of Artificial Sequence: Synthetic oligonucleotide
gugagaauggcuucuguug

SEQ ID NO: 535967 - RNA, 19 nt, Artificial Sequence
  Description of Artificial Sequence: Synthetic oligonucleotide
gagaauaggaugacgaaca

SEQ ID NO: 535968 - RNA, 19 nt, Artificial Sequence
  Description of Artificial Sequence: Synthetic oligonucleotide
  modified_base (3)..(3): a, c, u, g, unknown or other
gcnguuuuggauuaccugc

SEQ ID NO: 535969 - RNA, 19 nt, Artificial Sequence
  Description of Artificial Sequence: Synthetic oligonucleotide
agucauugaccaaaugcgc

SEQ ID NO: 535970 - RNA, 19 nt, Artificial Sequence
  Description of Artificial Sequence: Synthetic oligonucleotide
augcuuacuaugcuccaac

SEQ ID NO: 535971 - RNA, 19 nt, Artificial Sequence
  Description of Artificial Sequence: Synthetic oligonucleotide
uggauguugauagucacac

SEQ ID NO: 535972 - RNA, 19 nt, Artificial Sequence
  Description of Artificial Sequence: Synthetic oligonucleotide
ucaugugcuuccuaggagu

SEQ ID NO: 535973 - RNA, 19 nt, Artificial Sequence
  Description of Artificial Sequence: Synthetic oligonucleotide
aacucgugugucugauggc

SEQ ID NO: 535974 - RNA, 19 nt, Artificial Sequence
  Description of Artificial Sequence: Synthetic oligonucleotide
aagugucccguacucauga

SEQ ID NO: 535975 - RNA, 19 nt, Artificial Sequence
  Description of Artificial Sequence: Synthetic oligonucleotide
guaugugaucgccacauug

SEQ ID NO: 535976 - RNA, 19 nt, Artificial Sequence
  Description of Artificial Sequence: Synthetic oligonucleotide
uuaagucuaguaucagaga

SEQ ID NO: 535977 - RNA, 19 nt, Artificial Sequence
  Description of Artificial Sequence: Synthetic oligonucleotide
aacuggaguauugcauccc

SEQ ID NO: 535978 - RNA, 19 nt, Artificial Sequence
  Description of Artificial Sequence: Synthetic oligonucleotide
  modified_base (4)..(4): a, c, u, g, unknown or other
agcnguuuuggauuaccug

SEQ ID NO: 535979 - RNA, 19 nt, Artificial Sequence
  Description of Artificial Sequence: Synthetic oligonucleotide
auaucgccacacuaguuag

SEQ ID NO: 535980 - RNA, 19 nt, Artificial Sequence
  Description of Artificial Sequence: Synthetic oligonucleotide
accaaaugcgcaccauucg

SEQ ID NO: 535981 - RNA, 19 nt, Artificial Sequence
  Description of Artificial Sequence: Synthetic oligonucleotide
uaauuauuauagccuggac

SEQ ID NO: 535982 - RNA, 19 nt, Artificial Sequence
  Description of Artificial Sequence: Synthetic oligonucleotide
ucauugaccaaaugcgcac

SEQ ID NO: 535983 - RNA, 19 nt, Artificial Sequence
  Description of Artificial Sequence: Synthetic oligonucleotide
uuacuaugcuccaaccuuc

SEQ ID NO: 535984 - RNA, 19 nt, Artificial Sequence
  Description of Artificial Sequence: Synthetic oligonucleotide
aaguggguuacaaauuaug

SEQ ID NO: 535985 - RNA, 19 nt, Artificial Sequence
  Description of Artificial Sequence: Synthetic oligonucleotide
  modified_base (18)..(18): a, c, u, g, unknown or other
uaguuacagauaacagcng

SEQ ID NO: 535986 - RNA, 19 nt, Artificial Sequence
  Description of Artificial Sequence: Synthetic oligonucleotide
cuuaaugacaccaaccuau

SEQ ID NO: 535987 - RNA, 19 nt, Artificial Sequence
  Description of Artificial Sequence: Synthetic oligonucleotide
  modified_base (2)..(2): a, c, u, g, unknown or other
cnguuuuggauuaccugcc

SEQ ID NO: 535988 - RNA, 19 nt, Artificial Sequence
  Description of Artificial Sequence: Synthetic oligonucleotide
gagagagcgaugguaauug

SEQ ID NO: 535989 - RNA, 19 nt, Artificial Sequence
  Description of Artificial Sequence: Synthetic oligonucleotide
ugcuuuauugcacgggguc

SEQ ID NO: 535990 - RNA, 19 nt, Artificial Sequence
  Description of Artificial Sequence: Synthetic oligonucleotide
accccaaugcuuacuaugc

SEQ ID NO: 535991 - RNA, 19 nt, Artificial Sequence
  Description of Artificial Sequence: Synthetic oligonucleotide
cacaauauguagcaaguga

SEQ ID NO: 535992 - RNA, 19 nt, Artificial Sequence
  Description of Artificial Sequence: Synthetic oligonucleotide
gccaauuaggagcaaagcc

SEQ ID NO: 535993 - RNA, 19 nt, Artificial Sequence
  Description of Artificial Sequence: Synthetic oligonucleotide
  modified_base (6)..(6): a, c, u, g, unknown or other
acagcnguuuuggauuacc

SEQ ID NO: 535994 - RNA, 19 nt, Artificial Sequence
  Description of Artificial Sequence: Synthetic oligonucleotide
gacaccaaccuauauuuaa

SEQ ID NO: 535995 - RNA, 19 nt, Artificial Sequence
  Description of Artificial Sequence: Synthetic oligonucleotide
caaccuauauuuaagccaa

SEQ ID NO: 535996 - RNA, 19 nt, Artificial Sequence
  Description of Artificial Sequence: Synthetic oligonucleotide
uauguagcaagugauuaua

SEQ ID NO: 535997 - RNA, 19 nt, Artificial Sequence
  Description of Artificial Sequence: Synthetic oligonucleotide
uacccuuauaauccucaug

SEQ ID NO: 535998 - RNA, 19 nt, Artificial Sequence
  Description of Artificial Sequence: Synthetic oligonucleotide
ugagggucggauuucaguu

SEQ ID NO: 535999 - RNA, 19 nt, Artificial Sequence
  Description of Artificial Sequence: Synthetic oligonucleotide
uccauuccggaaaaggaua

SEQ ID NO: 536000 - RNA, 19 nt, Artificial Sequence
  Description of Artificial Sequence: Synthetic oligonucleotide
auagguaccaagccucggu

SEQ ID NO: 536001 - RNA, 19 nt, Artificial Sequence
  Description of Artificial Sequence: Synthetic oligonucleotide
auauguagcaagugauuau

SEQ ID NO: 536002 - RNA, 19 nt, Artificial Sequence
  Description of Artificial Sequence: Synthetic oligonucleotide
gauaacuugccaccaugca

SEQ ID NO: 536003 - RNA, 19 nt, Artificial Sequence
  Description of Artificial Sequence: Synthetic oligonucleotide
ucguaguggcaguaggcag

SEQ ID NO: 536004 - RNA, 19 nt, Artificial Sequence
  Description of Artificial Sequence: Synthetic oligonucleotide
aguggguuacaaauuauga

SEQ ID NO: 536005 - RNA, 19 nt, Artificial Sequence
  Description of Artificial Sequence: Synthetic oligonucleotide
ccagcauaaaaguucagac

SEQ ID NO: 536006 - RNA, 19 nt, Artificial Sequence
  Description of Artificial Sequence: Synthetic oligonucleotide
cacguucgcaauaugagga

SEQ ID NO: 536007 - RNA, 19 nt, Artificial Sequence
  Description of Artificial Sequence: Synthetic oligonucleotide
gauagugcagugaacagcu

SEQ ID NO: 536008 - RNA, 19 nt, Artificial Sequence
  Description of Artificial Sequence: Synthetic oligonucleotide
cuaguuagaaucuauuaau

SEQ ID NO: 536009 - RNA, 19 nt, Artificial Sequence
  Description of Artificial Sequence: Synthetic oligonucleotide
ugcuuacuaugcuccaacc

SEQ ID NO: 536010 - RNA, 19 nt, Artificial Sequence
  Description of Artificial Sequence: Synthetic oligonucleotide
  modified_base (7)..(7): a, c, u, g, unknown or other
aacagcnguuuuggauuac

SEQ ID NO: 536011 - RNA, 19 nt, Artificial Sequence
  Description of Artificial Sequence: Synthetic oligonucleotide
uucguaguggcaguaggca

SEQ ID NO: 536012 - RNA, 19 nt, Artificial Sequence
  Description of Artificial Sequence: Synthetic oligonucleotide
gaauaggaugacgaacaug

SEQ ID NO: 536013 - RNA, 19 nt, Artificial Sequence
  Description of Artificial Sequence: Synthetic oligonucleotide
ugguauguguuugugaauu

SEQ ID NO: 536014 - RNA, 19 nt, Artificial Sequence
  Description of Artificial Sequence: Synthetic oligonucleotide
aaugcgcaccauucguagu

SEQ ID NO: 536015 - RNA, 19 nt, Artificial Sequence
  Description of Artificial Sequence: Synthetic oligonucleotide
uucgaaacccaucccuccu

SEQ ID NO: 536016 - RNA, 19 nt, Artificial Sequence
  Description of Artificial Sequence: Synthetic oligonucleotide
auuccggaaaaggauaggu

SEQ ID NO: 536017 - RNA, 19 nt, Artificial Sequence
  Description of Artificial Sequence: Synthetic oligonucleotide
augcgcaccauucguagug

SEQ ID NO: 536018 - RNA, 19 nt, Artificial Sequence
  Description of Artificial Sequence: Synthetic oligonucleotide
guguguuaaaugcaaaacu

SEQ ID NO: 536019 - RNA, 19 nt, Artificial Sequence
  Description of Artificial Sequence: Synthetic oligonucleotide
cuuaaauuuauaggagaca

SEQ ID NO: 536020 - RNA, 19 nt, Artificial Sequence
  Description of Artificial Sequence: Synthetic oligonucleotide
aguagauagugcagugaac

SEQ ID NO: 536021 - RNA, 19 nt, Artificial Sequence
  Description of Artificial Sequence: Synthetic oligonucleotide
aguuggucaagaauaacau

SEQ ID NO: 536022 - RNA, 19 nt, Artificial Sequence
  Description of Artificial Sequence: Synthetic oligonucleotide
agucuaguaucagagaaua

SEQ ID NO: 536023 - RNA, 19 nt, Artificial Sequence
  Description of Artificial Sequence: Synthetic oligonucleotide
aguucagacaaaguggguu

SEQ ID NO: 536024 - RNA, 19 nt, Artificial Sequence
  Description of Artificial Sequence: Synthetic oligonucleotide
uauugcaucccugguuuug

SEQ ID NO: 536025 - RNA, 19 nt, Artificial Sequence
  Description of Artificial Sequence: Synthetic oligonucleotide
guggguuacaaauuaugaa

SEQ ID NO: 536026 - RNA, 19 nt, Artificial Sequence
  Description of Artificial Sequence: Synthetic oligonucleotide
agggucggauuucaguuug

SEQ ID NO: 536027 - RNA, 19 nt, Artificial Sequence
  Description of Artificial Sequence: Synthetic oligonucleotide
aauugagaugggcgccucu

SEQ ID NO: 536028 - RNA, 19 nt, Artificial Sequence
  Description of Artificial Sequence: Synthetic oligonucleotide
ugcacggggucacaauaug

SEQ ID NO: 536029 - RNA, 19 nt, Artificial Sequence
  Description of Artificial Sequence: Synthetic oligonucleotide
agucuucaagagcucgaag

SEQ ID NO: 536030 - RNA, 19 nt, Artificial Sequence
  Description of Artificial Sequence: Synthetic oligonucleotide
auaccagcauaaaaguuca

SEQ ID NO: 536031 - RNA, 19 nt, Artificial Sequence
  Description of Artificial Sequence: Synthetic oligonucleotide
aaggccugguauguguuug

SEQ ID NO: 536032 - RNA, 19 nt, Artificial Sequence
  Description of Artificial Sequence: Synthetic oligonucleotide
agccuggacuuaaugacac

SEQ ID NO: 536033 - RNA, 19 nt, Artificial Sequence
  Description of Artificial Sequence: Synthetic oligonucleotide
accugcguggaguggaaag

SEQ ID NO: 536034 - RNA, 19 nt, Artificial Sequence
  Description of Artificial Sequence: Synthetic oligonucleotide
ucacccuaucuuuuggcaa

SEQ ID NO: 536035 - RNA, 19 nt, Artificial Sequence
  Description of Artificial Sequence: Synthetic oligonucleotide
cauugauuauuccccagga

SEQ ID NO: 536036 - RNA, 19 nt, Artificial Sequence
  Description of Artificial Sequence: Synthetic oligonucleotide
auugaccaaaugcgcacca

SEQ ID NO: 536037 - RNA, 19 nt, Artificial Sequence
  Description of Artificial Sequence: Synthetic oligonucleotide
acguucgcaauaugaggag

SEQ ID NO: 536038 - RNA, 19 nt, Artificial Sequence
  Description of Artificial Sequence: Synthetic oligonucleotide
cuggguaugugaucgccac

SEQ ID NO: 536039 - RNA, 19 nt, Artificial Sequence
  Description of Artificial Sequence: Synthetic oligonucleotide
uccuuaauuggcccucgaa

SEQ ID NO: 536040 - RNA, 19 nt, Artificial Sequence
  Description of Artificial Sequence: Synthetic oligonucleotide
gcuuaagaaccccagcaug

SEQ ID NO: 536041 - RNA, 19 nt, Artificial Sequence
  Description of Artificial Sequence: Synthetic oligonucleotide
gauagguaccaagccucgg

SEQ ID NO: 536042 - RNA, 19 nt, Artificial Sequence
  Description of Artificial Sequence: Synthetic oligonucleotide
cuaacuaggucacccuauc

SEQ ID NO: 536043 - RNA, 19 nt, Artificial Sequence
  Description of Artificial Sequence: Synthetic oligonucleotide
uuucauguggugaccucau

SEQ ID NO: 536044 - RNA, 19 nt, Artificial Sequence
  Description of Artificial Sequence: Synthetic oligonucleotide
auugcacggggucacaaua

SEQ ID NO: 536045 - RNA, 19 nt, Artificial Sequence
  Description of Artificial Sequence: Synthetic oligonucleotide
uuccggaaaaggauaggua

SEQ ID NO: 536046 - RNA, 19 nt, Artificial Sequence
  Description of Artificial Sequence: Synthetic oligonucleotide
agaagcuaacuaggucacc

SEQ ID NO: 536047 - RNA, 19 nt, Artificial Sequence
  Description of Artificial Sequence: Synthetic oligonucleotide
auaugaggagacaaauccu

SEQ ID NO: 536048 - RNA, 19 nt, Artificial Sequence
  Description of Artificial Sequence: Synthetic oligonucleotide
cagaacgugaacaggaaua

SEQ ID NO: 536049 - RNA, 19 nt, Artificial Sequence
  Description of Artificial Sequence: Synthetic oligonucleotide
aacucgggagcagugcuca

SEQ ID NO: 536050 - RNA, 19 nt, Artificial Sequence
  Description of Artificial Sequence: Synthetic oligonucleotide
aagucuaguaucagagaau

SEQ ID NO: 536051 - RNA, 19 nt, Artificial Sequence
  Description of Artificial Sequence: Synthetic oligonucleotide
caccuccacagauaaaguc

SEQ ID NO: 536052 - RNA, 19 nt, Artificial Sequence
  Description of Artificial Sequence: Synthetic oligonucleotide
ugaccaaaugcgcaccauu

SEQ ID NO: 536053 - RNA, 19 nt, Artificial Sequence
  Description of Artificial Sequence: Synthetic oligonucleotide
ugaaaagauugaucagauu

SEQ ID NO: 536054 - RNA, 19 nt, Artificial Sequence
  Description of Artificial Sequence: Synthetic oligonucleotide
gaucccacgauacaaguuu

SEQ ID NO: 536055 - RNA, 19 nt, Artificial Sequence
  Description of Artificial Sequence: Synthetic oligonucleotide
aaacucgggagcagugcuc

SEQ ID NO: 536056 - RNA, 19 nt, Artificial Sequence
  Description of Artificial Sequence: Synthetic oligonucleotide
ucgcaauaugaggagacaa

SEQ ID NO: 536057 - RNA, 19 nt, Artificial Sequence
  Description of Artificial Sequence: Synthetic oligonucleotide
gaccaaaugcgcaccauuc

SEQ ID NO: 536058 - RNA, 19 nt, Artificial Sequence
  Description of Artificial Sequence: Synthetic oligonucleotide
augacaguuacuacucaca

SEQ ID NO: 536059 - RNA, 19 nt, Artificial Sequence
  Description of Artificial Sequence: Synthetic oligonucleotide
agaauaggaugacgaacau

SEQ ID NO: 536060 - RNA, 19 nt, Artificial Sequence
  Description of Artificial Sequence: Synthetic oligonucleotide
gaauggcccaccaaucuga

SEQ ID NO: 536061 - RNA, 19 nt, Artificial Sequence
  Description of Artificial Sequence: Synthetic oligonucleotide
  modified_base (8)..(8): a, c, u, g, unknown or other
uaacagcnguuuuggauua

SEQ ID NO: 536062 - RNA, 19 nt, Artificial Sequence
  Description of Artificial Sequence: Synthetic oligonucleotide
guucgcaauaugaggagac

SEQ ID NO: 536063 - RNA, 19 nt, Artificial Sequence
  Description of Artificial Sequence: Synthetic oligonucleotide
uuccuaggagugcuuuaca

SEQ ID NO: 536064 - RNA, 19 nt, Artificial Sequence
  Description of Artificial Sequence: Synthetic oligonucleotide
acgugaacaggaauaccuc

SEQ ID NO: 536065 - RNA, 19 nt, Artificial Sequence
  Description of Artificial Sequence: Synthetic oligonucleotide
ccaaccuauauuuaagcca

SEQ ID NO: 536066 - RNA, 19 nt, Artificial Sequence
  Description of Artificial Sequence: Synthetic oligonucleotide
cauugaccaaaugcgcacc

SEQ ID NO: 536067 - RNA, 19 nt, Artificial Sequence
  Description of Artificial Sequence: Synthetic oligonucleotide
ugcuuacggagcagaacgu

SEQ ID NO: 536068 - RNA, 19 nt, Artificial Sequence
  Description of Artificial Sequence: Synthetic oligonucleotide
cacuaguuagaaucuauua

SEQ ID NO: 536069 - RNA, 19 nt, Artificial Sequence
  Description of Artificial Sequence: Synthetic oligonucleotide
cauggcaucucagggcccg

SEQ ID NO: 536070 - RNA, 19 nt, Artificial Sequence
  Description of Artificial Sequence: Synthetic oligonucleotide
uaguguaguuacagauaac

SEQ ID NO: 536071 - RNA, 19 nt, Artificial Sequence
  Description of Artificial Sequence: Synthetic oligonucleotide
auuaaucgggaagcuuaag

SEQ ID NO: 536072 - RNA, 19 nt, Artificial Sequence
  Description of Artificial Sequence: Synthetic oligonucleotide
uaucgccacacuaguuaga

SEQ ID NO: 536073 - RNA, 19 nt, Artificial Sequence
  Description of Artificial Sequence: Synthetic oligonucleotide
uuggauuaccugccccaga

SEQ ID NO: 536074 - RNA, 19 nt, Artificial Sequence
  Description of Artificial Sequence: Synthetic oligonucleotide
uucgcaauaugaggagaca

SEQ ID NO: 536075 - RNA, 19 nt, Artificial Sequence
  Description of Artificial Sequence: Synthetic oligonucleotide
gaacgugaacaggaauacc

SEQ ID NO: 536076 - RNA, 19 nt, Artificial Sequence
  Description of Artificial Sequence: Synthetic oligonucleotide
gggacaaugccccgacugg

SEQ ID NO: 536077 - RNA, 19 nt, Artificial Sequence
  Description of Artificial Sequence: Synthetic oligonucleotide
ugcugccgaaagaggaucu

SEQ ID NO: 536078 - RNA, 19 nt, Artificial Sequence
  Description of Artificial Sequence: Synthetic oligonucleotide
uaccaagccucgguaauac

SEQ ID NO: 536079 - RNA, 19 nt, Artificial Sequence
  Description of Artificial Sequence: Synthetic oligonucleotide
uuacccuuauaauccucau

SEQ ID NO: 536080 - RNA, 19 nt, Artificial Sequence
  Description of Artificial Sequence: Synthetic oligonucleotide
uaggucuaguuggucaaga

SEQ ID NO: 536081 - RNA, 19 nt, Artificial Sequence
  Description of Artificial Sequence: Synthetic oligonucleotide
auaggaugacgaacaugac

SEQ ID NO: 536082 - RNA, 19 nt, Artificial Sequence
  Description of Artificial Sequence: Synthetic oligonucleotide
gucacccuaucuuuuggca

SEQ ID NO: 536083 - RNA, 19 nt, Artificial Sequence
  Description of Artificial Sequence: Synthetic oligonucleotide
ugcgcaccauucguagugg

SEQ ID NO: 536084 - RNA, 19 nt, Artificial Sequence
  Description of Artificial Sequence: Synthetic oligonucleotide
ccacguucgcaauaugagg

SEQ ID NO: 536085 - RNA, 19 nt, Artificial Sequence
  Description of Artificial Sequence: Synthetic oligonucleotide
aucuucugaacuggguaug

SEQ ID NO: 536086 - RNA, 19 nt, Artificial Sequence
  Description of Artificial Sequence: Synthetic oligonucleotide
uugcacggggucacaauau

SEQ ID NO: 536087 - RNA, 19 nt, Artificial Sequence
  Description of Artificial Sequence: Synthetic oligonucleotide
ucgaaacccaucccuccuc

SEQ ID NO: 536088 - RNA, 19 nt, Artificial Sequence
  Description of Artificial Sequence: Synthetic oligonucleotide
cuuacuaugcuccaaccuu

SEQ ID NO: 536089 - RNA, 19 nt, Artificial Sequence
  Description of Artificial Sequence: Synthetic oligonucleotide
aaauaucgccacacuaguu

SEQ ID NO: 536090 - RNA, 19 nt, Artificial Sequence
  Description of Artificial Sequence: Synthetic oligonucleotide
uaaucagguuugccuguaa

SEQ ID NO: 536091 - RNA, 19 nt, Artificial Sequence
  Description of Artificial Sequence: Synthetic oligonucleotide
ugucaauguuugucuguaa

SEQ ID NO: 536092 - RNA, 19 nt, Artificial Sequence
  Description of Artificial Sequence: Synthetic oligonucleotide
cuggaguauugcaucccug

SEQ ID NO: 536093 - RNA, 19 nt, Artificial Sequence
  Description of Artificial Sequence: Synthetic oligonucleotide
ugacaccaaccuauauuua

SEQ ID NO: 536094 - RNA, 19 nt, Artificial Sequence
  Description of Artificial Sequence: Synthetic oligonucleotide
ccggaaaaggauagguacc

SEQ ID NO: 536095 - RNA, 19 nt, Artificial Sequence
  Description of Artificial Sequence: Synthetic oligonucleotide
ugauggcaucagauaagau

SEQ ID NO: 536096 - RNA, 19 nt, Artificial Sequence
  Description of Artificial Sequence: Synthetic oligonucleotide
ugucccguucuacccagau

SEQ ID NO: 536097 - RNA, 19 nt, Artificial Sequence
  Description of Artificial Sequence: Synthetic oligonucleotide
agcuaacuaggucacccua

SEQ ID NO: 536098 - RNA, 19 nt, Artificial Sequence
  Description of Artificial Sequence: Synthetic oligonucleotide
cauuaaucgggaagcuuaa

SEQ ID NO: 536099 - RNA, 19 nt, Artificial Sequence
  Description of Artificial Sequence: Synthetic oligonucleotide
agugucccguacucaugag

SEQ ID NO: 536100 - RNA, 19 nt, Artificial Sequence
  Description of Artificial Sequence: Synthetic oligonucleotide
ucacaacauuaaucgggaa

SEQ ID NO: 536101 - RNA, 19 nt, Artificial Sequence
  Description of Artificial Sequence: Synthetic oligonucleotide
agagagcgaugguaauuga

SEQ ID NO: 536102 - RNA, 19 nt, Artificial Sequence
  Description of Artificial Sequence: Synthetic oligonucleotide
aucgccacacuaguuagaa

SEQ ID NO: 536103 - RNA, 19 nt, Artificial Sequence
  Description of Artificial Sequence: Synthetic oligonucleotide
gcaccauucguaguggcag

SEQ ID NO: 536104 - RNA, 19 nt, Artificial Sequence
  Description of Artificial Sequence: Synthetic oligonucleotide
gucuaguaucagagaauag

SEQ ID NO: 536105 - RNA, 19 nt, Artificial Sequence
  Description of Artificial Sequence: Synthetic oligonucleotide
aucccacgauacaaguuuc

SEQ ID NO: 536106 - RNA, 19 nt, Artificial Sequence
  Description of Artificial Sequence: Synthetic oligonucleotide
ccaagccucgguaauacuc

SEQ ID NO: 536107 - RNA, 19 nt, Artificial Sequence
  Description of Artificial Sequence: Synthetic oligonucleotide
uuauugcacggggucacaa

SEQ ID NO: 536108 - RNA, 19 nt, Artificial Sequence
  Description of Artificial Sequence: Synthetic oligonucleotide
gucaauguuugucuguaau

SEQ ID NO: 536109 - RNA, 19 nt, Artificial Sequence
  Description of Artificial Sequence: Synthetic oligonucleotide
uucauguggugaccucauc

SEQ ID NO: 536110 - RNA, 19 nt, Artificial Sequence
  Description of Artificial Sequence: Synthetic oligonucleotide
aagggacaaugccccgacu

SEQ ID NO: 536111 - RNA, 19 nt, Artificial Sequence
  Description of Artificial Sequence: Synthetic oligonucleotide
ggucacccuaucuuuuggc

SEQ ID NO: 536112 - RNA, 19 nt, Artificial Sequence
  Description of Artificial Sequence: Synthetic oligonucleotide
augcuccuuaauuggcccu

SEQ ID NO: 536113 - RNA, 19 nt, Artificial Sequence
  Description of Artificial Sequence: Synthetic oligonucleotide
guugauagucacacacauc

SEQ ID NO: 536114 - RNA, 19 nt, Artificial Sequence
  Description of Artificial Sequence: Synthetic oligonucleotide
augagagagcgaugguaau

SEQ ID NO: 536115 - RNA, 19 nt, Artificial Sequence
  Description of Artificial Sequence: Synthetic oligonucleotide
gaugacgaacaugacaguu

SEQ ID NO: 536116 - RNA, 19 nt, Artificial Sequence
  Description of Artificial Sequence: Synthetic oligonucleotide
augacgaacaugacaguua

SEQ ID NO: 536117 - RNA, 19 nt, Artificial Sequence
  Description of Artificial Sequence: Synthetic oligonucleotide
guauucgggcuuucacaac

SEQ ID NO: 536118 - RNA, 19 nt, Artificial Sequence
  Description of Artificial Sequence: Synthetic oligonucleotide
cgauacaaguuucgaaacc

SEQ ID NO: 536119 - RNA, 19 nt, Artificial Sequence
  Description of Artificial Sequence: Synthetic oligonucleotide
acacuaguuagaaucuauu

SEQ ID NO: 536120 - RNA, 19 nt, Artificial Sequence
  Description of Artificial Sequence: Synthetic oligonucleotide
cccaaugcuuacuaugcuc

SEQ ID NO: 536121 - RNA, 19 nt, Artificial Sequence
  Description of Artificial Sequence: Synthetic oligonucleotide
agacuggaauggcccacca

SEQ ID NO: 536122 - RNA, 19 nt, Artificial Sequence
  Description of Artificial Sequence: Synthetic oligonucleotide
cuggacuuaaugacaccaa

SEQ ID NO: 536123 - RNA, 19 nt, Artificial Sequence
  Description of Artificial Sequence: Synthetic oligonucleotide
ggacacaagugucccguac

SEQ ID NO: 536124 - RNA, 19 nt, Artificial Sequence
  Description of Artificial Sequence: Synthetic oligonucleotide
uucgggcuuucacaacauu

SEQ ID NO: 536125 - RNA, 19 nt, Artificial Sequence
  Description of Artificial Sequence: Synthetic oligonucleotide
ugggcgccucugaaaagau

SEQ ID NO: 536126 - RNA, 19 nt, Artificial Sequence
  Description of Artificial Sequence: Synthetic oligonucleotide
uugaccaaaugcgcaccau

SEQ ID NO: 536127 - RNA, 19 nt, Artificial Sequence
  Description of Artificial Sequence: Synthetic oligonucleotide
cugccgaaagaggaucuuc

SEQ ID NO: 536128 - RNA, 19 nt, Artificial Sequence
  Description of Artificial Sequence: Synthetic oligonucleotide
gccgaaagaggaucuucug

SEQ ID NO: 536129 - RNA, 19 nt, Artificial Sequence
  Description of Artificial Sequence: Synthetic oligonucleotide
caaacucgggagcagugcu

SEQ ID NO: 536130 - RNA, 19 nt, Artificial Sequence
  Description of Artificial Sequence: Synthetic oligonucleotide
gcaaacucgggagcagugc

SEQ ID NO: 536131 - RNA, 19 nt, Artificial Sequence
  Description of Artificial Sequence: Synthetic oligonucleotide
ccucaucauacaaucuuca

SEQ ID NO: 536132 - RNA, 19 nt, Artificial Sequence
  Description of Artificial Sequence: Synthetic oligonucleotide
gcuuacggagcagaacgug

SEQ ID NO: 536133 - RNA, 19 nt, Artificial Sequence
  Description of Artificial Sequence: Synthetic oligonucleotide
guaauugagaugggcgccu

SEQ ID NO: 536134 - RNA, 19 nt, Artificial Sequence
  Description of Artificial Sequence: Synthetic oligonucleotide
aaccuauauuuaagccaau

SEQ ID NO: 536135 - RNA, 19 nt, Artificial Sequence
  Description of Artificial Sequence: Synthetic oligonucleotide
gcuuuauugcacgggguca

SEQ ID NO: 536136 - RNA, 19 nt, Artificial Sequence
  Description of Artificial Sequence: Synthetic oligonucleotide
ccuggacuuaaugacacca

SEQ ID NO: 536137 - RNA, 19 nt, Artificial Sequence
  Description of Artificial Sequence: Synthetic oligonucleotide
ggucagcuacacuggcacc

SEQ ID NO: 536138 - RNA, 19 nt, Artificial Sequence
  Description of Artificial Sequence: Synthetic oligonucleotide
gccccgacuggucagcuac

SEQ ID NO: 536139 - RNA, 19 nt, Artificial Sequence
  Description of Artificial Sequence: Synthetic oligonucleotide
ggcaaugaauucaguaaaa

SEQ ID NO: 536140 - RNA, 19 nt, Artificial Sequence
  Description of Artificial Sequence: Synthetic oligonucleotide
uuaagccaauuaggagcaa

SEQ ID NO: 536141 - RNA, 19 nt, Artificial Sequence
  Description of Artificial Sequence: Synthetic oligonucleotide
ggauguugauagucacaca

SEQ ID NO: 536142 - RNA, 19 nt, Artificial Sequence
  Description of Artificial Sequence: Synthetic oligonucleotide
ucgccacacuaguuagaau

SEQ ID NO: 536143 - RNA, 19 nt, Artificial Sequence
  Description of Artificial Sequence: Synthetic oligonucleotide
gcaauaugaggagacaaau

SEQ ID NO: 536144 - RNA, 19 nt, Artificial Sequence
  Description of Artificial Sequence: Synthetic oligonucleotide
  modified_base (5)..(5): a, c, u, g, unknown or other
cagcnguuuuggauuaccu

SEQ ID NO: 536145 - RNA, 19 nt, Artificial Sequence
  Description of Artificial Sequence: Synthetic oligonucleotide
gucccguacucaugagcca

SEQ ID NO: 536146 - RNA, 19 nt, Artificial Sequence
  Description of Artificial Sequence: Synthetic oligonucleotide
gcuccuuaauuggcccucg

SEQ ID NO: 536147 - RNA, 19 nt, Artificial Sequence
  Description of Artificial Sequence: Synthetic oligonucleotide
gagauuguauucgggcuuu

SEQ ID NO: 536148 - RNA, 19 nt, Artificial Sequence
  Description of Artificial Sequence: Synthetic oligonucleotide
cgugaacaggaauaccuca

SEQ ID NO: 536149 - RNA, 19 nt, Artificial Sequence
  Description of Artificial Sequence: Synthetic oligonucleotide
accauucguaguggcagua

SEQ ID NO: 536150 - RNA, 19 nt, Artificial Sequence
  Description of Artificial Sequence: Synthetic oligonucleotide
gggaagcuuaagaacccca

SEQ ID NO: 536151 - RNA, 19 nt, Artificial Sequence
  Description of Artificial Sequence: Synthetic oligonucleotide
ggaguauugcaucccuggu

SEQ ID NO: 536152 - RNA, 19 nt, Artificial Sequence
  Description of Artificial Sequence: Synthetic oligonucleotide
caagauaacuugccaccau

SEQ ID NO: 536153 - RNA, 19 nt, Artificial Sequence
  Description of Artificial Sequence: Synthetic oligonucleotide
ccccacguucgcaauauga

SEQ ID NO: 536154 - RNA, 19 nt, Artificial Sequence
  Description of Artificial Sequence: Synthetic oligonucleotide
guaccaagccucgguaaua

SEQ ID NO: 536155 - RNA, 19 nt, Artificial Sequence
  Description of Artificial Sequence: Synthetic oligonucleotide
cgcaauaugaggagacaaa

SEQ ID NO: 536156 - RNA, 19 nt, Artificial Sequence
  Description of Artificial Sequence: Synthetic oligonucleotide
ccaaaugcgcaccauucgu

SEQ ID NO: 536157 - RNA, 19 nt, Artificial Sequence
  Description of Artificial Sequence: Synthetic oligonucleotide
ggauuaccugccccagaaa

SEQ ID NO: 536158 - RNA, 19 nt, Artificial Sequence
  Description of Artificial Sequence: Synthetic oligonucleotide
ccaugacagaagcuaacua

SEQ ID NO: 536159 - RNA, 19 nt, Artificial Sequence
  Description of Artificial Sequence: Synthetic oligonucleotide
gacgaacaugacaguuacu

SEQ ID NO: 536160 - RNA, 19 nt, Artificial Sequence
  Description of Artificial Sequence: Synthetic oligonucleotide
gccacacuaguuagaaucu

SEQ ID NO: 536161 - RNA, 19 nt, Artificial Sequence
  Description of Artificial Sequence: Synthetic oligonucleotide
caccauucguaguggcagu

SEQ ID NO: 536162 - RNA, 19 nt, Artificial Sequence
  Description of Artificial Sequence: Synthetic oligonucleotide
cccacgauacaaguuucga

SEQ ID NO: 536163 - RNA, 19 nt, Artificial Sequence
  Description of Artificial Sequence: Synthetic oligonucleotide
gcuaacuaggucacccuau

SEQ ID NO: 536164 - RNA, 19 nt, Artificial Sequence
  Description of Artificial Sequence: Synthetic oligonucleotide
ccugcguggaguggaaaga

SEQ ID NO: 536165 - RNA, 19 nt, Artificial Sequence
  Description of Artificial Sequence: Synthetic oligonucleotide
ccguucuacccagauuguc

SEQ ID NO: 536166 - RNA, 19 nt, Artificial Sequence
  Description of Artificial Sequence: Synthetic oligonucleotide
cgcaccauucguaguggca

SEQ ID NO: 536167 - RNA, 19 nt, Artificial Sequence
  Description of Artificial Sequence: Synthetic oligonucleotide
gcgccucugaaaagauuga

SEQ ID NO: 536168 - RNA, 19 nt, Artificial Sequence
  Description of Artificial Sequence: Synthetic oligonucleotide
gcacggggucacaauaugu

SEQ ID NO: 536169 - RNA, 19 nt, Artificial Sequence
  Description of Artificial Sequence: Synthetic oligonucleotide
cguucgcaauaugaggaga

SEQ ID NO: 536170 - RNA, 19 nt, Artificial Sequence
  Description of Artificial Sequence: Synthetic oligonucleotide
gguaugugaucgccacauu

SEQ ID NO: 536171 - RNA, 19 nt, Artificial Sequence
  Description of Artificial Sequence: Synthetic oligonucleotide
ggaucccacgauacaaguu

SEQ ID NO: 536172 - RNA, 19 nt, Artificial Sequence
  Description of Artificial Sequence: Synthetic oligonucleotide
cccguucuacccagauugu

SEQ ID NO: 536173 - RNA, 19 nt, Artificial Sequence
  Description of Artificial Sequence: Synthetic oligonucleotide
ccaccugcguggaguggaa

SEQ ID NO: 536174 - RNA, 19 nt, Artificial Sequence
  Description of Artificial Sequence: Synthetic oligonucleotide
gggucggauuucaguuugu

SEQ ID NO: 536175 - RNA, 19 nt, Artificial Sequence
  Description of Artificial Sequence: Synthetic oligonucleotide
ccaccccaaugcuuacuau

SEQ ID NO: 536176 - RNA, 19 nt, Artificial Sequence
  Description of Artificial Sequence: Synthetic oligonucleotide
gggcgccucugaaaagauu

SEQ ID NO: 536177 - RNA, 19 nt, Artificial Sequence
  Description of Artificial Sequence: Synthetic oligonucleotide
uuuacuguggauaagagag

SEQ ID NO: 536178 - RNA, 19 nt, Artificial Sequence
  Description of Artificial Sequence: Synthetic oligonucleotide
uguacaaguagcaacaugg

SEQ ID NO: 536179 - RNA, 19 nt, Artificial Sequence
  Description of Artificial Sequence: Synthetic oligonucleotide
aauaggaggaauuuacagc

SEQ ID NO: 536180 - RNA, 19 nt, Artificial Sequence
  Description of Artificial Sequence: Synthetic oligonucleotide
acuauuuacaaguaguccc

SEQ ID NO: 536181 - RNA, 19 nt, Artificial Sequence
  Description of Artificial Sequence: Synthetic oligonucleotide
gauuugauaggacugaugg

SEQ ID NO: 536182 - RNA, 19 nt, Artificial Sequence
  Description of Artificial Sequence: Synthetic oligonucleotide
cuacuuauaagaaaagacg

SEQ ID NO: 536183 - RNA, 19 nt, Artificial Sequence
  Description of Artificial Sequence: Synthetic oligonucleotide
auacaagucaucccgagcc

SEQ ID NO: 536184 - RNA, 19 nt, Artificial Sequence
  Description of Artificial Sequence: Synthetic oligonucleotide
ucuauugaagaaaauaaca

SEQ ID NO: 536185 - RNA, 19 nt, Artificial Sequence
  Description of Artificial Sequence: Synthetic oligonucleotide
ucauuuuccugucugaagg

SEQ ID NO: 536186 - RNA, 19 nt, Artificial Sequence
  Description of Artificial Sequence: Synthetic oligonucleotide
ugaacaugaaggaaugugg

SEQ ID NO: 536187 - RNA, 19 nt, Artificial Sequence
  Description of Artificial Sequence: Synthetic oligonucleotide
uacuuauaagaaaagacga

SEQ ID NO: 536188 - RNA, 19 nt, Artificial Sequence
  Description of Artificial Sequence: Synthetic oligonucleotide
acuacuuauaagaaaagac

SEQ ID NO: 536189 - RNA, 19 nt, Artificial Sequence
  Description of Artificial Sequence: Synthetic oligonucleotide
ugauggauaauucauuuac

SEQ ID NO: 536190 - RNA, 19 nt, Artificial Sequence
  Description of Artificial Sequence: Synthetic oligonucleotide
aguaggaacagauguauuc

SEQ ID NO: 536191 - RNA, 19 nt, Artificial Sequence
  Description of Artificial Sequence: Synthetic oligonucleotide
aauaugugugcacgugugc

SEQ ID NO: 536192 - RNA, 19 nt, Artificial Sequence
  Description of Artificial Sequence: Synthetic oligonucleotide
ugcaaguaggaacagaugu

SEQ ID NO: 536193 - RNA, 19 nt, Artificial Sequence
  Description of Artificial Sequence: Synthetic oligonucleotide
auagaaaacuaaccaggcc

SEQ ID NO: 536194 - RNA, 19 nt, Artificial Sequence
  Description of Artificial Sequence: Synthetic oligonucleotide
acaaguagcaacaugggac

SEQ ID NO: 536195 - RNA, 19 nt, Artificial Sequence
  Description of Artificial Sequence: Synthetic oligonucleotide
aauuuacagcacuugaggu

SEQ ID NO: 536196 - RNA, 19 nt, Artificial Sequence
  Description of Artificial Sequence: Synthetic oligonucleotide
acaauagucacacuggaga

SEQ ID NO: 536197 - RNA, 19 nt, Artificial Sequence
  Description of Artificial Sequence: Synthetic oligonucleotide
aauugcuagauaaagagau

SEQ ID NO: 536198 - RNA, 19 nt, Artificial Sequence
  Description of Artificial Sequence: Synthetic oligonucleotide
acaucaccggugcagaucc

SEQ ID NO: 536199 - RNA, 19 nt, Artificial Sequence
  Description of Artificial Sequence: Synthetic oligonucleotide
caugggacaagaaaucugg

SEQ ID NO: 536200 - RNA, 19 nt, Artificial Sequence
  Description of Artificial Sequence: Synthetic oligonucleotide
aguacuagagcccaggcgu

SEQ ID NO: 536201 - RNA, 19 nt, Artificial Sequence
  Description of Artificial Sequence: Synthetic oligonucleotide
uuccggauagcaaugaucu

SEQ ID NO: 536202 - RNA, 19 nt, Artificial Sequence
  Description of Artificial Sequence: Synthetic oligonucleotide
agauuauucaggaaugaac

SEQ ID NO: 536203 - RNA, 19 nt, Artificial Sequence
  Description of Artificial Sequence: Synthetic oligonucleotide
uuuacacucccacucauac

SEQ ID NO: 536204 - RNA, 19 nt, Artificial Sequence
  Description of Artificial Sequence: Synthetic oligonucleotide
agauguauucaaugcuugc

SEQ ID NO: 536205 - RNA, 19 nt, Artificial Sequence
  Description of Artificial Sequence: Synthetic oligonucleotide
aauucggaaacacuuuuau

SEQ ID NO: 536206 - RNA, 19 nt, Artificial Sequence
  Description of Artificial Sequence: Synthetic oligonucleotide
aaugggugaacaugaagga

SEQ ID NO: 536207 - RNA, 19 nt, Artificial Sequence
  Description of Artificial Sequence: Synthetic oligonucleotide
uauucgguaaccugacagg

SEQ ID NO: 536208 - RNA, 19 nt, Artificial Sequence
  Description of Artificial Sequence: Synthetic oligonucleotide
augaucugaauaguggacc

SEQ ID NO: 536209 - RNA, 19 nt, Artificial Sequence
  Description of Artificial Sequence: Synthetic oligonucleotide
aauagaagugguuggcacu

SEQ ID NO: 536210 - RNA, 19 nt, Artificial Sequence
  Description of Artificial Sequence: Synthetic oligonucleotide
cuauuuacaaguagucccc

SEQ ID NO: 536211 - RNA, 19 nt, Artificial Sequence
  Description of Artificial Sequence: Synthetic oligonucleotide
uguauucaaugcuugcucc

SEQ ID NO: 536212 - RNA, 19 nt, Artificial Sequence
  Description of Artificial Sequence: Synthetic oligonucleotide
uuuagguaccuguagcuug

SEQ ID NO: 536213 - RNA, 19 nt, Artificial Sequence
  Description of Artificial Sequence: Synthetic oligonucleotide
uacagagagguccuaauac

SEQ ID NO: 536214 - RNA, 19 nt, Artificial Sequence
  Description of Artificial Sequence: Synthetic oligonucleotide
ugcgaauuuccucagcuug

SEQ ID NO: 536215 - RNA, 19 nt, Artificial Sequence
  Description of Artificial Sequence: Synthetic oligonucleotide
uacacucccacucauacaa

SEQ ID NO: 536216 - RNA, 19 nt, Artificial Sequence
  Description of Artificial Sequence: Synthetic oligonucleotide
aacguuuguugacuuuugg

SEQ ID NO: 536217 - RNA, 19 nt, Artificial Sequence
  Description of Artificial Sequence: Synthetic oligonucleotide
uuccuuaucuugaagauuu

SEQ ID NO: 536218 - RNA, 19 nt, Artificial Sequence
  Description of Artificial Sequence: Synthetic oligonucleotide
cuuguuugggucaucuucc

SEQ ID NO: 536219 - RNA, 19 nt, Artificial Sequence
  Description of Artificial Sequence: Synthetic oligonucleotide
guauucgguaaccugacag

SEQ ID NO: 536220 - RNA, 19 nt, Artificial Sequence
  Description of Artificial Sequence: Synthetic oligonucleotide
aaaauucggaaacacuuuu

SEQ ID NO: 536221 - RNA, 19 nt, Artificial Sequence
  Description of Artificial Sequence: Synthetic oligonucleotide
aucaagacggugcaaguag

SEQ ID NO: 536222 - RNA, 19 nt, Artificial Sequence
  Description of Artificial Sequence: Synthetic oligonucleotide
aaaccacgcacaaaucacc

SEQ ID NO: 536223 - RNA, 19 nt, Artificial Sequence
  Description of Artificial Sequence: Synthetic oligonucleotide
aaacuaaccaggcccucuc

SEQ ID NO: 536224 - RNA, 19 nt, Artificial Sequence
  Description of Artificial Sequence: Synthetic oligonucleotide
aucuauugaagaaaauaac

SEQ ID NO: 536225 - RNA, 19 nt, Artificial Sequence
  Description of Artificial Sequence: Synthetic oligonucleotide
acuuuuaucuauugaagaa

SEQ ID NO: 536226 - RNA, 19 nt, Artificial Sequence
  Description of Artificial Sequence: Synthetic oligonucleotide
uguuuacuguggauaagag

SEQ ID NO: 536227 - RNA, 19 nt, Artificial Sequence
  Description of Artificial Sequence: Synthetic oligonucleotide
uggauaauucauuuacugu

SEQ ID NO: 536228 - RNA, 19 nt, Artificial Sequence
  Description of Artificial Sequence: Synthetic oligonucleotide
uucuaccucauuccgguag

SEQ ID NO: 536229 - RNA, 19 nt, Artificial Sequence
  Description of Artificial Sequence: Synthetic oligonucleotide
uuugccucguucuugcuug

SEQ ID NO: 536230 - RNA, 19 nt, Artificial Sequence
  Description of Artificial Sequence: Synthetic oligonucleotide
uaauacuccucucauuccu

SEQ ID NO: 536231 - RNA, 19 nt, Artificial Sequence
  Description of Artificial Sequence: Synthetic oligonucleotide
uuuuaaaggugaacuggug

SEQ ID NO: 536232 - RNA, 19 nt, Artificial Sequence
  Description of Artificial Sequence: Synthetic oligonucleotide
cagguaaagggcuuugucc

SEQ ID NO: 536233 - RNA, 19 nt, Artificial Sequence
  Description of Artificial Sequence: Synthetic oligonucleotide
acaagaaaucuggaaacac

SEQ ID NO: 536234 - RNA, 19 nt, Artificial Sequence
  Description of Artificial Sequence: Synthetic oligonucleotide
uauaagaaaagacgaccaa

SEQ ID NO: 536235 - RNA, 19 nt, Artificial Sequence
  Description of Artificial Sequence: Synthetic oligonucleotide
guuaucaagacggugcaag

SEQ ID NO: 536236 - RNA, 19 nt, Artificial Sequence
  Description of Artificial Sequence: Synthetic oligonucleotide
auuauucaggaaugaacug

SEQ ID NO: 536237 - RNA, 19 nt, Artificial Sequence
  Description of Artificial Sequence: Synthetic oligonucleotide
ucaagacggugcaaguagg

SEQ ID NO: 536238 - RNA, 19 nt, Artificial Sequence
  Description of Artificial Sequence: Synthetic oligonucleotide
agauaauccccacuagcag

SEQ ID NO: 536239 - RNA, 19 nt, Artificial Sequence
  Description of Artificial Sequence: Synthetic oligonucleotide
cauggaauagaagugguug

SEQ ID NO: 536240 - RNA, 19 nt, Artificial Sequence
  Description of Artificial Sequence: Synthetic oligonucleotide
ugaggcauuccacaucacc

SEQ ID NO: 536241 - RNA, 19 nt, Artificial Sequence
  Description of Artificial Sequence: Synthetic oligonucleotide
acuaccaaauugcaggggu

SEQ ID NO: 536242 - RNA, 19 nt, Artificial Sequence
  Description of Artificial Sequence: Synthetic oligonucleotide
aaguaguccccaaaagcac

SEQ ID NO: 536243 - RNA, 19 nt, Artificial Sequence
  Description of Artificial Sequence: Synthetic oligonucleotide
gauuauucaggaaugaacu

SEQ ID NO: 536244 - RNA, 19 nt, Artificial Sequence
  Description of Artificial Sequence: Synthetic oligonucleotide
uugcaccaaacacugaugu

SEQ ID NO: 536245 - RNA, 19 nt, Artificial Sequence
  Description of Artificial Sequence: Synthetic oligonucleotide
ugugaaguggucccaugcc

SEQ ID NO: 536246 - RNA, 19 nt, Artificial Sequence
  Description of Artificial Sequence: Synthetic oligonucleotide
ucuucagcaaagcgaaugu

SEQ ID NO: 536247 - RNA, 19 nt, Artificial Sequence
  Description of Artificial Sequence: Synthetic oligonucleotide
gacuauuuacaaguagucc

SEQ ID NO: 536248 - RNA, 19 nt, Artificial Sequence
  Description of Artificial Sequence: Synthetic oligonucleotide
aucccaaauugcuagauaa

SEQ ID NO: 536249 - RNA, 19 nt, Artificial Sequence
  Description of Artificial Sequence: Synthetic oligonucleotide
gaauaguggaccacugggg

SEQ ID NO: 536250 - RNA, 19 nt, Artificial Sequence
  Description of Artificial Sequence: Synthetic oligonucleotide
uuacaaguaguccccaaaa

SEQ ID NO: 536251 - RNA, 19 nt, Artificial Sequence
  Description of Artificial Sequence: Synthetic oligonucleotide
agguaaagggcuuugucca

SEQ ID NO: 536252 - RNA, 19 nt, Artificial Sequence
  Description of Artificial Sequence: Synthetic oligonucleotide
auucggaaacacuuuuauc

SEQ ID NO: 536253 - RNA, 19 nt, Artificial Sequence
  Description of Artificial Sequence: Synthetic oligonucleotide
aaagauuauucaggaauga

SEQ ID NO: 536254 - RNA, 19 nt, Artificial Sequence
  Description of Artificial Sequence: Synthetic oligonucleotide
ucgguaaccugacagguaa

SEQ ID NO: 536255 - RNA, 19 nt, Artificial Sequence
  Description of Artificial Sequence: Synthetic oligonucleotide
uuuacgcugggcuuuugug

SEQ ID NO: 536256 - RNA, 19 nt, Artificial Sequence
  Description of Artificial Sequence: Synthetic oligonucleotide
gauuccuccguuucuuuug

SEQ ID NO: 536257 - RNA, 19 nt, Artificial Sequence
  Description of Artificial Sequence: Synthetic oligonucleotide
ugaucugaauaguggacca

SEQ ID NO: 536258 - RNA, 19 nt, Artificial Sequence
  Description of Artificial Sequence: Synthetic oligonucleotide
aaauugcuagauaaagaga

SEQ ID NO: 536259 - RNA, 19 nt, Artificial Sequence
  Description of Artificial Sequence: Synthetic oligonucleotide
aauguggagauaaucccca

SEQ ID NO: 536260 - RNA, 19 nt, Artificial Sequence
  Description of Artificial Sequence: Synthetic oligonucleotide
aaucacaucuaagcuuguc

SEQ ID NO: 536261 - RNA, 19 nt, Artificial Sequence
  Description of Artificial Sequence: Synthetic oligonucleotide
cauuuacuguuuacugugg

SEQ ID NO: 536262 - RNA, 19 nt, Artificial Sequence
  Description of Artificial Sequence: Synthetic oligonucleotide
uuagguaccuguagcuuga

SEQ ID NO: 536263 - RNA, 19 nt, Artificial Sequence
  Description of Artificial Sequence: Synthetic oligonucleotide
auaauccccacuagcagcg

SEQ ID NO: 536264 - RNA, 19 nt, Artificial Sequence
  Description of Artificial Sequence: Synthetic oligonucleotide
acugauggauaauucauuu

SEQ ID NO: 536265 - RNA, 19 nt, Artificial Sequence
  Description of Artificial Sequence: Synthetic oligonucleotide
ucagauuugauaggacuga

SEQ ID NO: 536266 - RNA, 19 nt, Artificial Sequence
  Description of Artificial Sequence: Synthetic oligonucleotide
caaucccucaaaaccacag

SEQ ID NO: 536267 - RNA, 19 nt, Artificial Sequence
  Description of Artificial Sequence: Synthetic oligonucleotide
gagggaauggacuauuaaa

SEQ ID NO: 536268 - RNA, 19 nt, Artificial Sequence
  Description of Artificial Sequence: Synthetic oligonucleotide
uuaugaauguugcgaauuu

SEQ ID NO: 536269 - RNA, 19 nt, Artificial Sequence
  Description of Artificial Sequence: Synthetic oligonucleotide
gagauaauccccacuagca

SEQ ID NO: 536270 - RNA, 19 nt, Artificial Sequence
  Description of Artificial Sequence: Synthetic oligonucleotide
auacgcuguuuacacuccc

SEQ ID NO: 536271 - RNA, 19 nt, Artificial Sequence
  Description of Artificial Sequence: Synthetic oligonucleotide
gugacacuaaggcugauuc

SEQ ID NO: 536272 - RNA, 19 nt, Artificial Sequence
  Description of Artificial Sequence: Synthetic oligonucleotide
cauuccacaucaccggugc

SEQ ID NO: 536273 - RNA, 19 nt, Artificial Sequence
  Description of Artificial Sequence: Synthetic oligonucleotide
uacuguuuacuguggauaa

SEQ ID NO: 536274 - RNA, 19 nt, Artificial Sequence
  Description of Artificial Sequence: Synthetic oligonucleotide
auuuacagcacuugagguu

SEQ ID NO: 536275 - RNA, 19 nt, Artificial Sequence
  Description of Artificial Sequence: Synthetic oligonucleotide
aauagucacacuggagacu

SEQ ID NO: 536276 - RNA, 19 nt, Artificial Sequence
  Description of Artificial Sequence: Synthetic oligonucleotide
gugaacaugaaggaaugug

SEQ ID NO: 536277 - RNA, 19 nt, Artificial Sequence
  Description of Artificial Sequence: Synthetic oligonucleotide
acgaccaauugccagaaau

SEQ ID NO: 536278 - RNA, 19 nt, Artificial Sequence
  Description of Artificial Sequence: Synthetic oligonucleotide
caauaugugugcacgugug

SEQ ID NO: 536279 - RNA, 19 nt, Artificial Sequence
  Description of Artificial Sequence: Synthetic oligonucleotide
acuuucugugaauccaucu

SEQ ID NO: 536280 - RNA, 19 nt, Artificial Sequence
  Description of Artificial Sequence: Synthetic oligonucleotide
acgcacaaaucaccaaaac

SEQ ID NO: 536281 - RNA, 19 nt, Artificial Sequence
  Description of Artificial Sequence: Synthetic oligonucleotide
ucaguacuagagcccaggc

SEQ ID NO: 536282 - RNA, 19 nt, Artificial Sequence
  Description of Artificial Sequence: Synthetic oligonucleotide
cugacugcauuuucaauuc

SEQ ID NO: 536283 - RNA, 19 nt, Artificial Sequence
  Description of Artificial Sequence: Synthetic oligonucleotide
aagauuauucaggaaugaa

SEQ ID NO: 536284 - RNA, 19 nt, Artificial Sequence
  Description of Artificial Sequence: Synthetic oligonucleotide
ugcacgugugcccaggccu

SEQ ID NO: 536285 - RNA, 19 nt, Artificial Sequence
  Description of Artificial Sequence: Synthetic oligonucleotide
aaaacuaaccaggcccucu

SEQ ID NO: 536286 - RNA, 19 nt, Artificial Sequence
  Description of Artificial Sequence: Synthetic oligonucleotide
auuccgguaggcaucuagc

SEQ ID NO: 536287 - RNA, 19 nt, Artificial Sequence
  Description of Artificial Sequence: Synthetic oligonucleotide
uguggagauaauccccacu

SEQ ID NO: 536288 - RNA, 19 nt, Artificial Sequence
  Description of Artificial Sequence: Synthetic oligonucleotide
caggcccucucuuaaaagc

SEQ ID NO: 536289 - RNA, 19 nt, Artificial Sequence
  Description of Artificial Sequence: Synthetic oligonucleotide
ucgucagacauuuccauuu

SEQ ID NO: 536290 - RNA, 19 nt, Artificial Sequence
  Description of Artificial Sequence: Synthetic oligonucleotide
ucauucaccaggcggcgga

SEQ ID NO: 536291 - RNA, 19 nt, Artificial Sequence
  Description of Artificial Sequence: Synthetic oligonucleotide
ggagauaauccccacuagc

SEQ ID NO: 536292 - RNA, 19 nt, Artificial Sequence
  Description of Artificial Sequence: Synthetic oligonucleotide
cauacaagucaucccgagc

SEQ ID NO: 536293 - RNA, 19 nt, Artificial Sequence
  Description of Artificial Sequence: Synthetic oligonucleotide
auggacuauuaaauaaauc

SEQ ID NO: 536294 - RNA, 19 nt, Artificial Sequence
  Description of Artificial Sequence: Synthetic oligonucleotide
ugggacaagaaaucuggaa

SEQ ID NO: 536295 - RNA, 19 nt, Artificial Sequence
  Description of Artificial Sequence: Synthetic oligonucleotide
uccgguaggcaucuagcug

SEQ ID NO: 536296 - RNA, 19 nt, Artificial Sequence
  Description of Artificial Sequence: Synthetic oligonucleotide
guaaccugacagguaaagg

SEQ ID NO: 536297 - RNA, 19 nt, Artificial Sequence
  Description of Artificial Sequence: Synthetic oligonucleotide
acguuuguugacuuuuggu

SEQ ID NO: 536298 - RNA, 19 nt, Artificial Sequence
  Description of Artificial Sequence: Synthetic oligonucleotide
acacaauagucacacugga

SEQ ID NO: 536299 - RNA, 19 nt, Artificial Sequence
  Description of Artificial Sequence: Synthetic oligonucleotide
ggaauggacuauuaaauaa

SEQ ID NO: 536300 - RNA, 19 nt, Artificial Sequence
  Description of Artificial Sequence: Synthetic oligonucleotide
guuuacuguggauaagaga

SEQ ID NO: 536301 - RNA, 19 nt, Artificial Sequence
  Description of Artificial Sequence: Synthetic oligonucleotide
auuucaucgucagacauuu

SEQ ID NO: 536302 - RNA, 19 nt, Artificial Sequence
  Description of Artificial Sequence: Synthetic oligonucleotide
aggugaacuggugaagcac

SEQ ID NO: 536303 - RNA, 19 nt, Artificial Sequence
  Description of Artificial Sequence: Synthetic oligonucleotide
ccaauugccagaaauagga

SEQ ID NO: 536304 - RNA, 19 nt, Artificial Sequence
  Description of Artificial Sequence: Synthetic oligonucleotide
ucuacggugccgcuccucu

SEQ ID NO: 536305 - RNA, 19 nt, Artificial Sequence
  Description of Artificial Sequence: Synthetic oligonucleotide
cuuccggauagcaaugauc

SEQ ID NO: 536306 - RNA, 19 nt, Artificial Sequence
  Description of Artificial Sequence: Synthetic oligonucleotide
caguacuagagcccaggcg

SEQ ID NO: 536307 - RNA, 19 nt, Artificial Sequence
  Description of Artificial Sequence: Synthetic oligonucleotide
auaaagagauucaggucag

SEQ ID NO: 536308 - RNA, 19 nt, Artificial Sequence
  Description of Artificial Sequence: Synthetic oligonucleotide
guaccuguagcuugaggug

SEQ ID NO: 536309 - RNA, 19 nt, Artificial Sequence
  Description of Artificial Sequence: Synthetic oligonucleotide
caauugccagaaauaggag

SEQ ID NO: 536310 - RNA, 19 nt, Artificial Sequence
  Description of Artificial Sequence: Synthetic oligonucleotide
cuggugaagcaccuuguag

SEQ ID NO: 536311 - RNA, 19 nt, Artificial Sequence
  Description of Artificial Sequence: Synthetic oligonucleotide
acuagcagcgcuucacgcu

SEQ ID NO: 536312 - RNA, 19 nt, Artificial Sequence
  Description of Artificial Sequence: Synthetic oligonucleotide
caugaagccggccuguguc

SEQ ID NO: 536313 - RNA, 19 nt, Artificial Sequence
  Description of Artificial Sequence: Synthetic oligonucleotide
uucacgcucagauuugaua

SEQ ID NO: 536314 - RNA, 19 nt, Artificial Sequence
  Description of Artificial Sequence: Synthetic oligonucleotide
aucuaagcuuguccagcac

SEQ ID NO: 536315 - RNA, 19 nt, Artificial Sequence
  Description of Artificial Sequence: Synthetic oligonucleotide
agggaauggacuauuaaau

SEQ ID NO: 536316 - RNA, 19 nt, Artificial Sequence
  Description of Artificial Sequence: Synthetic oligonucleotide
ucuaggcuggcuccaacuc

SEQ ID NO: 536317 - RNA, 19 nt, Artificial Sequence
  Description of Artificial Sequence: Synthetic oligonucleotide
gaagugguuggcacugcgg

SEQ ID NO: 536318 - RNA, 19 nt, Artificial Sequence
  Description of Artificial Sequence: Synthetic oligonucleotide
gcuagauaaagagauucag

SEQ ID NO: 536319 - RNA, 19 nt, Artificial Sequence
  Description of Artificial Sequence: Synthetic oligonucleotide
uaccuguagcuugaggugc

SEQ ID NO: 536320 - RNA, 19 nt, Artificial Sequence
  Description of Artificial Sequence: Synthetic oligonucleotide
ccuuuguacaaguagcaac

SEQ ID NO: 536321 - RNA, 19 nt, Artificial Sequence
  Description of Artificial Sequence: Synthetic oligonucleotide
cuguggauaagagagacaa

SEQ ID NO: 536322 - RNA, 19 nt, Artificial Sequence
  Description of Artificial Sequence: Synthetic oligonucleotide
cauuccgguaggcaucuag

SEQ ID NO: 536323 - RNA, 19 nt, Artificial Sequence
  Description of Artificial Sequence: Synthetic oligonucleotide
uaugaauguugcgaauuuc

SEQ ID NO: 536324 - RNA, 19 nt, Artificial Sequence
  Description of Artificial Sequence: Synthetic oligonucleotide
caccuuguagaagacacug

SEQ ID NO: 536325 - RNA, 19 nt, Artificial Sequence
  Description of Artificial Sequence: Synthetic oligonucleotide
uguugcgaauuuccucagc

SEQ ID NO: 536326 - RNA, 19 nt, Artificial Sequence
  Description of Artificial Sequence: Synthetic oligonucleotide
ucaugaggcauuccacauc

SEQ ID NO: 536327 - RNA, 19 nt, Artificial Sequence
  Description of Artificial Sequence: Synthetic oligonucleotide
cuacucaugaggcauucca

SEQ ID NO: 536328 - RNA, 19 nt, Artificial Sequence
  Description of Artificial Sequence: Synthetic oligonucleotide
auguggagauaauccccac

SEQ ID NO: 536329 - RNA, 19 nt, Artificial Sequence
  Description of Artificial Sequence: Synthetic oligonucleotide
cacgcucagauuugauagg

SEQ ID NO: 536330 - RNA, 19 nt, Artificial Sequence
  Description of Artificial Sequence: Synthetic oligonucleotide
ucccaaauugcuagauaaa

SEQ ID NO: 536331 - RNA, 19 nt, Artificial Sequence
  Description of Artificial Sequence: Synthetic oligonucleotide
aaaagacgaccaauugcca

SEQ ID NO: 536332 - RNA, 19 nt, Artificial Sequence
  Description of Artificial Sequence: Synthetic oligonucleotide
uauuuacaaguagucccca

SEQ ID NO: 536333 - RNA, 19 nt, Artificial Sequence
  Description of Artificial Sequence: Synthetic oligonucleotide
accgcuucugagaauuugg

SEQ ID NO: 536334 - RNA, 19 nt, Artificial Sequence
  Description of Artificial Sequence: Synthetic oligonucleotide
uuguacucgucuuggacuu

SEQ ID NO: 536335 - RNA, 19 nt, Artificial Sequence
  Description of Artificial Sequence: Synthetic oligonucleotide
gucaguacuagagcccagg

SEQ ID NO: 536336 - RNA, 19 nt, Artificial Sequence
  Description of Artificial Sequence: Synthetic oligonucleotide
aacuaaccaggcccucucu

SEQ ID NO: 536337 - RNA, 19 nt, Artificial Sequence
  Description of Artificial Sequence: Synthetic oligonucleotide
guugcaucccuuguagggc

SEQ ID NO: 536338 - RNA, 19 nt, Artificial Sequence
  Description of Artificial Sequence: Synthetic oligonucleotide
auucgguaaccugacaggu

SEQ ID NO: 536339 - RNA, 19 nt, Artificial Sequence
  Description of Artificial Sequence: Synthetic oligonucleotide
agagggaauggacuauuaa

SEQ ID NO: 536340 - RNA, 19 nt, Artificial Sequence
  Description of Artificial Sequence: Synthetic oligonucleotide
accaaauugcagggguucg

SEQ ID NO: 536341 - RNA, 19 nt, Artificial Sequence
  Description of Artificial Sequence: Synthetic oligonucleotide
uuccgguaggcaucuagcu

SEQ ID NO: 536342 - RNA, 19 nt, Artificial Sequence
  Description of Artificial Sequence: Synthetic oligonucleotide
uacgcuguuuacacuccca

SEQ ID NO: 536343 - RNA, 19 nt, Artificial Sequence
  Description of Artificial Sequence: Synthetic oligonucleotide
uugcuugagcaguucuacc

SEQ ID NO: 536344 - RNA, 19 nt, Artificial Sequence
  Description of Artificial Sequence: Synthetic oligonucleotide
gcagacuauuuacaaguag

SEQ ID NO: 536345 - RNA, 19 nt, Artificial Sequence
  Description of Artificial Sequence: Synthetic oligonucleotide
cacuugaaaaccacugaga

SEQ ID NO: 536346 - RNA, 19 nt, Artificial Sequence
  Description of Artificial Sequence: Synthetic oligonucleotide
ugacugcauuuucaauuca

SEQ ID NO: 536347 - RNA, 19 nt, Artificial Sequence
  Description of Artificial Sequence: Synthetic oligonucleotide
aguagcaacaugggacaag

SEQ ID NO: 536348 - RNA, 19 nt, Artificial Sequence
  Description of Artificial Sequence: Synthetic oligonucleotide
acuggaacguuuguugacu

SEQ ID NO: 536349 - RNA, 19 nt, Artificial Sequence
  Description of Artificial Sequence: Synthetic oligonucleotide
auagucacacuggagacuu

SEQ ID NO: 536350 - RNA, 19 nt, Artificial Sequence
  Description of Artificial Sequence: Synthetic oligonucleotide
agguaugcuggaguccuac

SEQ ID NO: 536351 - RNA, 19 nt, Artificial Sequence
  Description of Artificial Sequence: Synthetic oligonucleotide
gguaccuguagcuugaggu

SEQ ID NO: 536352 - RNA, 19 nt, Artificial Sequence
  Description of Artificial Sequence: Synthetic oligonucleotide
cucaagaggguauucaccu

SEQ ID NO: 536353 - RNA, 19 nt, Artificial Sequence
  Description of Artificial Sequence: Synthetic oligonucleotide
cuagcagcgcuucacgcuc

SEQ ID NO: 536354 - RNA, 19 nt, Artificial Sequence
  Description of Artificial Sequence: Synthetic oligonucleotide
uugcaucccuuguagggcu

SEQ ID NO: 536355 - RNA, 19 nt, Artificial Sequence
  Description of Artificial Sequence: Synthetic oligonucleotide
uacggugccgcuccucucu

SEQ ID NO: 536356 - RNA, 19 nt, Artificial Sequence
  Description of Artificial Sequence: Synthetic oligonucleotide
aaaucccuucugccaauau

SEQ ID NO: 536357 - RNA, 19 nt, Artificial Sequence
  Description of Artificial Sequence: Synthetic oligonucleotide
guagcaacaugggacaaga

SEQ ID NO: 536358 - RNA, 19 nt, Artificial Sequence
  Description of Artificial Sequence: Synthetic oligonucleotide
agaaugguacacagcuuuc

SEQ ID NO: 536359 - RNA, 19 nt, Artificial Sequence
  Description of Artificial Sequence: Synthetic oligonucleotide
aaccacgcacaaaucacca

SEQ ID NO: 536360 - RNA, 19 nt, Artificial Sequence
  Description of Artificial Sequence: Synthetic oligonucleotide
ucguucuugcuugagcagu

SEQ ID NO: 536361 - RNA, 19 nt, Artificial Sequence
  Description of Artificial Sequence: Synthetic oligonucleotide
aaauucggaaacacuuuua

SEQ ID NO: 536362 - RNA, 19 nt, Artificial Sequence
  Description of Artificial Sequence: Synthetic oligonucleotide
aggaguauuuguucucuuu

SEQ ID NO: 536363 - RNA, 19 nt, Artificial Sequence
  Description of Artificial Sequence: Synthetic oligonucleotide
uaccaaauugcagggguuc

SEQ ID NO: 536364 - RNA, 19 nt, Artificial Sequence
  Description of Artificial Sequence: Synthetic oligonucleotide
cucgaugcacacagucuag

SEQ ID NO: 536365 - RNA, 19 nt, Artificial Sequence
  Description of Artificial Sequence: Synthetic oligonucleotide
acacugauggauaauucau

SEQ ID NO: 536366 - RNA, 19 nt, Artificial Sequence
  Description of Artificial Sequence: Synthetic oligonucleotide
aguccuacucaugaggcau

SEQ ID NO: 536367 - RNA, 19 nt, Artificial Sequence
  Description of Artificial Sequence: Synthetic oligonucleotide
cccaaauugcuagauaaag

SEQ ID NO: 536368 - RNA, 19 nt, Artificial Sequence
  Description of Artificial Sequence: Synthetic oligonucleotide
gauccuuauuuuaacuuua

SEQ ID NO: 536369 - RNA, 19 nt, Artificial Sequence
  Description of Artificial Sequence: Synthetic oligonucleotide
uccuuguuaucaagacggu

SEQ ID NO: 536370 - RNA, 19 nt, Artificial Sequence
  Description of Artificial Sequence: Synthetic oligonucleotide
aggcguauucgguaaccug

SEQ ID NO: 536371 - RNA, 19 nt, Artificial Sequence
  Description of Artificial Sequence: Synthetic oligonucleotide
aaggaguauuuguucucuu

SEQ ID NO: 536372 - RNA, 19 nt, Artificial Sequence
  Description of Artificial Sequence: Synthetic oligonucleotide
guaaagggcuuuguccacc

SEQ ID NO: 536373 - RNA, 19 nt, Artificial Sequence
  Description of Artificial Sequence: Synthetic oligonucleotide
cauggcuguuggcugacug

SEQ ID NO: 536374 - RNA, 19 nt, Artificial Sequence
  Description of Artificial Sequence: Synthetic oligonucleotide
augguggacgcagucuuuc

SEQ ID NO: 536375 - RNA, 19 nt, Artificial Sequence
  Description of Artificial Sequence: Synthetic oligonucleotide
uagagcccaggcguauucg

SEQ ID NO: 536376 - RNA, 19 nt, Artificial Sequence
  Description of Artificial Sequence: Synthetic oligonucleotide
gaacguuuguugacuuuug

SEQ ID NO: 536377 - RNA, 19 nt, Artificial Sequence
  Description of Artificial Sequence: Synthetic oligonucleotide
gcgaaugugacagaaguuc

SEQ ID NO: 536378 - RNA, 19 nt, Artificial Sequence
  Description of Artificial Sequence: Synthetic oligonucleotide
cacuggcacuaccaaauug

SEQ ID NO: 536379 - RNA, 19 nt, Artificial Sequence
  Description of Artificial Sequence: Synthetic oligonucleotide
gguccuaauacuccucuca

SEQ ID NO: 536380 - RNA, 19 nt, Artificial Sequence
  Description of Artificial Sequence: Synthetic oligonucleotide
caucuagcugccagcggag

SEQ ID NO: 536381 - RNA, 19 nt, Artificial Sequence
  Description of Artificial Sequence: Synthetic oligonucleotide
ugcaccgcuucugagaauu

SEQ ID NO: 536382 - RNA, 19 nt, Artificial Sequence
  Description of Artificial Sequence: Synthetic oligonucleotide
gaagguaugcuggaguccu

SEQ ID NO: 536383 - RNA, 19 nt, Artificial Sequence
  Description of Artificial Sequence: Synthetic oligonucleotide
uccuuuguacaaguagcaa

SEQ ID NO: 536384 - RNA, 19 nt, Artificial Sequence
  Description of Artificial Sequence: Synthetic oligonucleotide
agucaacaugaagccggcc

SEQ ID NO: 536385 - RNA, 19 nt, Artificial Sequence
  Description of Artificial Sequence: Synthetic oligonucleotide
gauggauaauucauuuacu

SEQ ID NO: 536386 - RNA, 19 nt, Artificial Sequence
  Description of Artificial Sequence: Synthetic oligonucleotide
ccaacuccggucauuuucc

SEQ ID NO: 536387 - RNA, 19 nt, Artificial Sequence
  Description of Artificial Sequence: Synthetic oligonucleotide
agcauacgcuguuuacacu

SEQ ID NO: 536388 - RNA, 19 nt, Artificial Sequence
  Description of Artificial Sequence: Synthetic oligonucleotide
uucgguaaccugacaggua

SEQ ID NO: 536389 - RNA, 19 nt, Artificial Sequence
  Description of Artificial Sequence: Synthetic oligonucleotide
ggaguccuacucaugaggc

SEQ ID NO: 536390 - RNA, 19 nt, Artificial Sequence
  Description of Artificial Sequence: Synthetic oligonucleotide
gaucugaauaguggaccac

SEQ ID NO: 536391 - RNA, 19 nt, Artificial Sequence
  Description of Artificial Sequence: Synthetic oligonucleotide
ugacagguaaagggcuuug

SEQ ID NO: 536392 - RNA, 19 nt, Artificial Sequence
  Description of Artificial Sequence: Synthetic oligonucleotide
gagacaaauggcaguuaca

SEQ ID NO: 536393 - RNA, 19 nt, Artificial Sequence
  Description of Artificial Sequence: Synthetic oligonucleotide
uccuaauacuccucucauu

SEQ ID NO: 536394 - RNA, 19 nt, Artificial Sequence
  Description of Artificial Sequence: Synthetic oligonucleotide
ucgaugcacacagucuaga

SEQ ID NO: 536395 - RNA, 19 nt, Artificial Sequence
  Description of Artificial Sequence: Synthetic oligonucleotide
ggcuuuugugaaguggucc

SEQ ID NO: 536396 - RNA, 19 nt, Artificial Sequence
  Description of Artificial Sequence: Synthetic oligonucleotide
ugcggcgguucacuucucc

SEQ ID NO: 536397 - RNA, 19 nt, Artificial Sequence
  Description of Artificial Sequence: Synthetic oligonucleotide
cauccgucuacggugccgc

SEQ ID NO: 536398 - RNA, 19 nt, Artificial Sequence
  Description of Artificial Sequence: Synthetic oligonucleotide
gaccagagggaauggacua

SEQ ID NO: 536399 - RNA, 19 nt, Artificial Sequence
  Description of Artificial Sequence: Synthetic oligonucleotide
gaucccaaauugcuagaua

SEQ ID NO: 536400 - RNA, 19 nt, Artificial Sequence
  Description of Artificial Sequence: Synthetic oligonucleotide
aggaucccaaauugcuaga

SEQ ID NO: 536401 - RNA, 19 nt, Artificial Sequence
  Description of Artificial Sequence: Synthetic oligonucleotide
aguuacagagagguccuaa

SEQ ID NO: 536402 - RNA, 19 nt, Artificial Sequence
  Description of Artificial Sequence: Synthetic oligonucleotide
gaguccuacucaugaggca

SEQ ID NO: 536403 - RNA, 19 nt, Artificial Sequence
  Description of Artificial Sequence: Synthetic oligonucleotide
acgcucagauuugauagga

SEQ ID NO: 536404 - RNA, 19 nt, Artificial Sequence
  Description of Artificial Sequence: Synthetic oligonucleotide
acacuaaggcugauuccuc

SEQ ID NO: 536405 - RNA, 19 nt, Artificial Sequence
  Description of Artificial Sequence: Synthetic oligonucleotide
cuagagcccaggcguauuc

SEQ ID NO: 536406 - RNA, 19 nt, Artificial Sequence
  Description of Artificial Sequence: Synthetic oligonucleotide
gcaucuagcugccagcgga

SEQ ID NO: 536407 - RNA, 19 nt, Artificial Sequence
  Description of Artificial Sequence: Synthetic oligonucleotide
acaugaagccggccugugu

SEQ ID NO: 536408 - RNA, 19 nt, Artificial Sequence
  Description of Artificial Sequence: Synthetic oligonucleotide
ucuucucaagaggguauuc

SEQ ID NO: 536409 - RNA, 19 nt, Artificial Sequence
  Description of Artificial Sequence: Synthetic oligonucleotide
caaagcgaaugugacagaa

SEQ ID NO: 536410 - RNA, 19 nt, Artificial Sequence
  Description of Artificial Sequence: Synthetic oligonucleotide
uugcgaauuuccucagcuu

SEQ ID NO: 536411 - RNA, 19 nt, Artificial Sequence
  Description of Artificial Sequence: Synthetic oligonucleotide
uuuugcucuuccggauagc

SEQ ID NO: 536412 - RNA, 19 nt, Artificial Sequence
  Description of Artificial Sequence: Synthetic oligonucleotide
caagacggugcaaguagga

SEQ ID NO: 536413 - RNA, 19 nt, Artificial Sequence
  Description of Artificial Sequence: Synthetic oligonucleotide
aaguaggaacagauguauu

SEQ ID NO: 536414 - RNA, 19 nt, Artificial Sequence
  Description of Artificial Sequence: Synthetic oligonucleotide
uguuaucaagacggugcaa

SEQ ID NO: 536415 - RNA, 19 nt, Artificial Sequence
  Description of Artificial Sequence: Synthetic oligonucleotide
uacucgucuuggacuuuga

SEQ ID NO: 536416 - RNA, 19 nt, Artificial Sequence
  Description of Artificial Sequence: Synthetic oligonucleotide
gaaaacuaaccaggcccuc

SEQ ID NO: 536417 - RNA, 19 nt, Artificial Sequence
  Description of Artificial Sequence: Synthetic oligonucleotide
ggcguauucgguaaccuga

SEQ ID NO: 536418 - RNA, 19 nt, Artificial Sequence
  Description of Artificial Sequence: Synthetic oligonucleotide
gggaauggacuauuaaaua

SEQ ID NO: 536419 - RNA, 19 nt, Artificial Sequence
  Description of Artificial Sequence: Synthetic oligonucleotide
aucuagcugccagcggagg

SEQ ID NO: 536420 - RNA, 19 nt, Artificial Sequence
  Description of Artificial Sequence: Synthetic oligonucleotide
uccggucauuuuccugucu

SEQ ID NO: 536421 - RNA, 19 nt, Artificial Sequence
  Description of Artificial Sequence: Synthetic oligonucleotide
gacuuucugugaauccauc

SEQ ID NO: 536422 - RNA, 19 nt, Artificial Sequence
  Description of Artificial Sequence: Synthetic oligonucleotide
caggaaugaacugacaaau

SEQ ID NO: 536423 - RNA, 19 nt, Artificial Sequence
  Description of Artificial Sequence: Synthetic oligonucleotide
cacgcacaaaucaccaaaa

SEQ ID NO: 536424 - RNA, 19 nt, Artificial Sequence
  Description of Artificial Sequence: Synthetic oligonucleotide
uggaacguuuguugacuuu

SEQ ID NO: 536425 - RNA, 19 nt, Artificial Sequence
  Description of Artificial Sequence: Synthetic oligonucleotide
ugguggacgcagucuuucu

SEQ ID NO: 536426 - RNA, 19 nt, Artificial Sequence
  Description of Artificial Sequence: Synthetic oligonucleotide
gguaaagggcuuuguccac

SEQ ID NO: 536427 - RNA, 19 nt, Artificial Sequence
  Description of Artificial Sequence: Synthetic oligonucleotide
uccuuaucuugaagauuuu

SEQ ID NO: 536428 - RNA, 19 nt, Artificial Sequence
  Description of Artificial Sequence: Synthetic oligonucleotide
gucuuggacuuugagcaga

SEQ ID NO: 536429 - RNA, 19 nt, Artificial Sequence
  Description of Artificial Sequence: Synthetic oligonucleotide
gugaaguggucccaugccu

SEQ ID NO: 536430 - RNA, 19 nt, Artificial Sequence
  Description of Artificial Sequence: Synthetic oligonucleotide
uccuacucaugaggcauuc

SEQ ID NO: 536431 - RNA, 19 nt, Artificial Sequence
  Description of Artificial Sequence: Synthetic oligonucleotide
guuuggaagcagaauggua

SEQ ID NO: 536432 - RNA, 19 nt, Artificial Sequence
  Description of Artificial Sequence: Synthetic oligonucleotide
accacgcacaaaucaccaa

SEQ ID NO: 536433 - RNA, 19 nt, Artificial Sequence
  Description of Artificial Sequence: Synthetic oligonucleotide
cuagaagcacaguuuuccu

SEQ ID NO: 536434 - RNA, 19 nt, Artificial Sequence
  Description of Artificial Sequence: Synthetic oligonucleotide
cuaccucauuccgguaggc

SEQ ID NO: 536435 - RNA, 19 nt, Artificial Sequence
  Description of Artificial Sequence: Synthetic oligonucleotide
gcucgaugcacacagucua

SEQ ID NO: 536436 - RNA, 19 nt, Artificial Sequence
  Description of Artificial Sequence: Synthetic oligonucleotide
ggugccgcuccucucuggc

SEQ ID NO: 536437 - RNA, 19 nt, Artificial Sequence
  Description of Artificial Sequence: Synthetic oligonucleotide
gccaauaugugugcacgug

SEQ ID NO: 536438 - RNA, 19 nt, Artificial Sequence
  Description of Artificial Sequence: Synthetic oligonucleotide
agacgaccaauugccagaa

SEQ ID NO: 536439 - RNA, 19 nt, Artificial Sequence
  Description of Artificial Sequence: Synthetic oligonucleotide
augggacaagaaaucugga

SEQ ID NO: 536440 - RNA, 19 nt, Artificial Sequence
  Description of Artificial Sequence: Synthetic oligonucleotide
uacuagagcccaggcguau

SEQ ID NO: 536441 - RNA, 19 nt, Artificial Sequence
  Description of Artificial Sequence: Synthetic oligonucleotide
agcagacuauuuacaagua

SEQ ID NO: 536442 - RNA, 19 nt, Artificial Sequence
  Description of Artificial Sequence: Synthetic oligonucleotide
ccggucauuuuccugucug

SEQ ID NO: 536443 - RNA, 19 nt, Artificial Sequence
  Description of Artificial Sequence: Synthetic oligonucleotide
agcgaaugugacagaaguu

SEQ ID NO: 536444 - RNA, 19 nt, Artificial Sequence
  Description of Artificial Sequence: Synthetic oligonucleotide
guccuaauacuccucucau

SEQ ID NO: 536445 - RNA, 19 nt, Artificial Sequence
  Description of Artificial Sequence: Synthetic oligonucleotide
cacugcggcgguucacuuc

SEQ ID NO: 536446 - RNA, 19 nt, Artificial Sequence
  Description of Artificial Sequence: Synthetic oligonucleotide
uugccucguucuugcuuga

SEQ ID NO: 536447 - RNA, 19 nt, Artificial Sequence
  Description of Artificial Sequence: Synthetic oligonucleotide
ccgucuacggugccgcucc

SEQ ID NO: 536448 - RNA, 19 nt, Artificial Sequence
  Description of Artificial Sequence: Synthetic oligonucleotide
ggcccucucuuaaaagcag

SEQ ID NO: 536449 - RNA, 19 nt, Artificial Sequence
  Description of Artificial Sequence: Synthetic oligonucleotide
gagcaaagucugcaccgcu

SEQ ID NO: 536450 - RNA, 19 nt, Artificial Sequence
  Description of Artificial Sequence: Synthetic oligonucleotide
acggugcaaguaggaacag

SEQ ID NO: 536451 - RNA, 19 nt, Artificial Sequence
  Description of Artificial Sequence: Synthetic oligonucleotide
cuuggacuuugagcagaug

SEQ ID NO: 536452 - RNA, 19 nt, Artificial Sequence
  Description of Artificial Sequence: Synthetic oligonucleotide
cacugauggauaauucauu

SEQ ID NO: 536453 - RNA, 19 nt, Artificial Sequence
  Description of Artificial Sequence: Synthetic oligonucleotide
agcuugaggugcuguucua

SEQ ID NO: 536454 - RNA, 19 nt, Artificial Sequence
  Description of Artificial Sequence: Synthetic oligonucleotide
aucaccggugcagauccuu

SEQ ID NO: 536455 - RNA, 19 nt, Artificial Sequence
  Description of Artificial Sequence: Synthetic oligonucleotide
cggauagcaaugaucucuc

SEQ ID NO: 536456 - RNA, 19 nt, Artificial Sequence
  Description of Artificial Sequence: Synthetic oligonucleotide
cucuuccggauagcaauga

SEQ ID NO: 536457 - RNA, 19 nt, Artificial Sequence
  Description of Artificial Sequence: Synthetic oligonucleotide
ccacgcacaaaucaccaaa

SEQ ID NO: 536458 - RNA, 19 nt, Artificial Sequence
  Description of Artificial Sequence: Synthetic oligonucleotide
gcugacuggaucauggaau

SEQ ID NO: 536459 - RNA, 19 nt, Artificial Sequence
  Description of Artificial Sequence: Synthetic oligonucleotide
cuacggugccgcuccucuc

SEQ ID NO: 536460 - RNA, 19 nt, Artificial Sequence
  Description of Artificial Sequence: Synthetic oligonucleotide
gcauuccacaucaccggug

SEQ ID NO: 536461 - RNA, 19 nt, Artificial Sequence
  Description of Artificial Sequence: Synthetic oligonucleotide
aucccuuguagggcuugcu

SEQ ID NO: 536462 - RNA, 19 nt, Artificial Sequence
  Description of Artificial Sequence: Synthetic oligonucleotide
ccaggcguauucgguaacc

SEQ ID NO: 536463 - RNA, 19 nt, Artificial Sequence
  Description of Artificial Sequence: Synthetic oligonucleotide
ggaacguuuguugacuuuu

SEQ ID NO: 536464 - RNA, 19 nt, Artificial Sequence
  Description of Artificial Sequence: Synthetic oligonucleotide
caccuguaacuugucaucu

SEQ ID NO: 536465 - RNA, 19 nt, Artificial Sequence
  Description of Artificial Sequence: Synthetic oligonucleotide
gcguauucgguaaccugac

SEQ ID NO: 536466 - RNA, 19 nt, Artificial Sequence
  Description of Artificial Sequence: Synthetic oligonucleotide
cccacuagcagcgcuucac

SEQ ID NO: 536467 - RNA, 19 nt, Artificial Sequence
  Description of Artificial Sequence: Synthetic oligonucleotide
cuaccaaauugcagggguu

SEQ ID NO: 536468 - RNA, 19 nt, Artificial Sequence
  Description of Artificial Sequence: Synthetic oligonucleotide
uugcuccaaaugggugaac

SEQ ID NO: 536469 - RNA, 19 nt, Artificial Sequence
  Description of Artificial Sequence: Synthetic oligonucleotide
gacgaccaauugccagaaa

SEQ ID NO: 536470 - RNA, 19 nt, Artificial Sequence
  Description of Artificial Sequence: Synthetic oligonucleotide
ccaauaugugugcacgugu

SEQ ID NO: 536471 - RNA, 19 nt, Artificial Sequence
  Description of Artificial Sequence: Synthetic oligonucleotide
ccggauagcaaugaucucu

SEQ ID NO: 536472 - RNA, 19 nt, Artificial Sequence
  Description of Artificial Sequence: Synthetic oligonucleotide
cccacucauacaagucauc

SEQ ID NO: 536473 - RNA, 19 nt, Artificial Sequence
  Description of Artificial Sequence: Synthetic oligonucleotide
gcaaagcgaaugugacaga

SEQ ID NO: 536474 - RNA, 19 nt, Artificial Sequence
  Description of Artificial Sequence: Synthetic oligonucleotide
ccauccgucuacggugccg

SEQ ID NO: 536475 - RNA, 19 nt, Artificial Sequence
  Description of Artificial Sequence: Synthetic oligonucleotide
guacuagagcccaggcgua

SEQ ID NO: 536476 - RNA, 19 nt, Artificial Sequence
  Description of Artificial Sequence: Synthetic oligonucleotide
ccuacucaugaggcauucc

SEQ ID NO: 536477 - RNA, 19 nt, Artificial Sequence
  Description of Artificial Sequence: Synthetic oligonucleotide
cucagcuuguuugcaccaa

SEQ ID NO: 536478 - RNA, 19 nt, Artificial Sequence
  Description of Artificial Sequence: Synthetic oligonucleotide
gcgcuucacgcucagauuu

SEQ ID NO: 536479 - RNA, 19 nt, Artificial Sequence
  Description of Artificial Sequence: Synthetic oligonucleotide
uggcuccaacuccggucau

SEQ ID NO: 536480 - RNA, 19 nt, Artificial Sequence
  Description of Artificial Sequence: Synthetic oligonucleotide
gcaguuacagagagguccu

SEQ ID NO: 536481 - RNA, 19 nt, Artificial Sequence
  Description of Artificial Sequence: Synthetic oligonucleotide
gguaugcuggaguccuacu

SEQ ID NO: 536482 - RNA, 19 nt, Artificial Sequence
  Description of Artificial Sequence: Synthetic oligonucleotide
caaauugcagggguucguu

SEQ ID NO: 536483 - RNA, 19 nt, Artificial Sequence
  Description of Artificial Sequence: Synthetic oligonucleotide
cuggaacguuuguugacuu

SEQ ID NO: 536484 - RNA, 19 nt, Artificial Sequence
  Description of Artificial Sequence: Synthetic oligonucleotide
cgaccaauugccagaaaua

SEQ ID NO: 536485 - RNA, 19 nt, Artificial Sequence
  Description of Artificial Sequence: Synthetic oligonucleotide
gcuguucuaggauccuuau

SEQ ID NO: 536486 - RNA, 19 nt, Artificial Sequence
  Description of Artificial Sequence: Synthetic oligonucleotide
gcgaauuuccucagcuugu

SEQ ID NO: 536487 - RNA, 19 nt, Artificial Sequence
  Description of Artificial Sequence: Synthetic oligonucleotide
ccacagaauuuccaccucu

SEQ ID NO: 536488 - RNA, 19 nt, Artificial Sequence
  Description of Artificial Sequence: Synthetic oligonucleotide
caacuccggucauuuuccu

SEQ ID NO: 536489 - RNA, 19 nt, Artificial Sequence
  Description of Artificial Sequence: Synthetic oligonucleotide
cgcuucacgcucagauuug

SEQ ID NO: 536490 - RNA, 19 nt, Artificial Sequence
  Description of Artificial Sequence: Synthetic oligonucleotide
cuguucuaggauccuuauu

SEQ ID NO: 536491 - RNA, 19 nt, Artificial Sequence
  Description of Artificial Sequence: Synthetic oligonucleotide
gaugguggacgcagucuuu

SEQ ID NO: 536492 - RNA, 19 nt, Artificial Sequence
  Description of Artificial Sequence: Synthetic oligonucleotide
gucuacggugccgcuccuc

SEQ ID NO: 536493 - RNA, 19 nt, Artificial Sequence
  Description of Artificial Sequence: Synthetic oligonucleotide
gcccaggcguauucgguaa

SEQ ID NO: 536494 - RNA, 19 nt, Artificial Sequence
  Description of Artificial Sequence: Synthetic oligonucleotide
caggcguauucgguaaccu

SEQ ID NO: 536495 - RNA, 19 nt, Artificial Sequence
  Description of Artificial Sequence: Synthetic oligonucleotide
ggaucccaaauugcuagau

SEQ ID NO: 536496 - RNA, 19 nt, Artificial Sequence
  Description of Artificial Sequence: Synthetic oligonucleotide
gcggcggacauggcuguug

SEQ ID NO: 536497 - RNA, 19 nt, Artificial Sequence
  Description of Artificial Sequence: Synthetic oligonucleotide
cggcgguucacuucuccuc

SEQ ID NO: 536498 - RNA, 19 nt, Artificial Sequence
  Description of Artificial Sequence: Synthetic oligonucleotide
gguggacgcagucuuucuu

SEQ ID NO: 536499 - RNA, 19 nt, Artificial Sequence
  Description of Artificial Sequence: Synthetic oligonucleotide
cccaggcguauucgguaac

SEQ ID NO: 536500 - RNA, 19 nt, Artificial Sequence
  Description of Artificial Sequence: Synthetic oligonucleotide
gcgguucacuucuccucuc

SEQ ID NO: 536501 - RNA, 19 nt, Artificial Sequence
  Description of Artificial Sequence: Synthetic oligonucleotide
ucauuccgguaggcaucua

SEQ ID NO: 536502 - RNA, 19 nt, Artificial Sequence
  Description of Artificial Sequence: Synthetic oligonucleotide
ggcacugcggcgguucacu

SEQ ID NO: 536503 - RNA, 19 nt, Artificial Sequence
  Description of Artificial Sequence: Synthetic oligonucleotide
ccucucuuaaaagcagacu

SEQ ID NO: 536504 - RNA, 19 nt, Artificial Sequence
  Description of Artificial Sequence: Synthetic oligonucleotide
cugcggcgguucacuucuc

SEQ ID NO: 536505 - RNA, 19 nt, Artificial Sequence
  Description of Artificial Sequence: Synthetic oligonucleotide
gaagccggccuguguccuu

SEQ ID NO: 536506 - RNA, 19 nt, Artificial Sequence
  Description of Artificial Sequence: Synthetic oligonucleotide
cacgugugcccaggccuga

SEQ ID NO: 536507 - RNA, 19 nt, Artificial Sequence
  Description of Artificial Sequence: Synthetic oligonucleotide
cguauucgguaaccugaca

SEQ ID NO: 536508 - RNA, 19 nt, Artificial Sequence
  Description of Artificial Sequence: Synthetic oligonucleotide
gcggcgguucacuucuccu

SEQ ID NO: 536509 - RNA, 19 nt, Artificial Sequence
  Description of Artificial Sequence: Synthetic oligonucleotide
caguuacagagagguccua

SEQ ID NO: 536510 - RNA, 19 nt, Artificial Sequence
  Description of Artificial Sequence: Synthetic oligonucleotide
gcuccaacuccggucauuu

SEQ ID NO: 536511 - RNA, 19 nt, Artificial Sequence
  Description of Artificial Sequence: Synthetic oligonucleotide
guccuacucaugaggcauu

SEQ ID NO: 536512 - RNA, 19 nt, Artificial Sequence
  Description of Artificial Sequence: Synthetic oligonucleotide
ccaaauugcagggguucgu

SEQ ID NO: 536513 - RNA, 19 nt, Artificial Sequence
  Description of Artificial Sequence: Synthetic oligonucleotide
caucaccggugcagauccu

SEQ ID NO: 536514 - RNA, 19 nt, Artificial Sequence
  Description of Artificial Sequence: Synthetic oligonucleotide
cgguaaccugacagguaaa

SEQ ID NO: 536515 - RNA, 19 nt, Artificial Sequence
  Description of Artificial Sequence: Synthetic oligonucleotide
cgguucacuucuccucucu

SEQ ID NO: 536516 - RNA, 19 nt, Artificial Sequence
  Description of Artificial Sequence: Synthetic oligonucleotide
ccacuggcacuaccaaauu

SEQ ID NO: 536517 - RNA, 19 nt, Artificial Sequence
  Description of Artificial Sequence: Synthetic oligonucleotide
ggcuccaacuccggucauu

SEQ ID NO: 536518 - RNA, 19 nt, Artificial Sequence
  Description of Artificial Sequence: Synthetic oligonucleotide
gcacugcggcgguucacuu

SEQ ID NO: 536519 - RNA, 19 nt, Artificial Sequence
  Description of Artificial Sequence: Synthetic oligonucleotide
ggcggcggacauggcuguu

SEQ ID NO: 536520 - RNA, 19 nt, Artificial Sequence
  Description of Artificial Sequence: Synthetic oligonucleotide
ccggugggcuuugccucgu

SEQ ID NO: 536521 - RNA, 19 nt, Artificial Sequence
  Description of Artificial Sequence: Synthetic oligonucleotide
cgucuacggugccgcuccu

SEQ ID NO: 536522 - RNA, 19 nt, Artificial Sequence
  Description of Artificial Sequence: Synthetic oligonucleotide
cggugggcuuugccucguu

SEQ ID NO: 536523 - RNA, 19 nt, Artificial Sequence
  Description of Artificial Sequence: Synthetic oligonucleotide
ugagguaaccaucaaaacg

SEQ ID NO: 536524 - RNA, 19 nt, Artificial Sequence
  Description of Artificial Sequence: Synthetic oligonucleotide
gauaauucgacccaccagc

SEQ ID NO: 536525 - RNA, 19 nt, Artificial Sequence
  Description of Artificial Sequence: Synthetic oligonucleotide
gauguguagacauagaaga

SEQ ID NO: 536526 - RNA, 19 nt, Artificial Sequence
  Description of Artificial Sequence: Synthetic oligonucleotide
aacauagcaacccuuccgg

SEQ ID NO: 536527 - RNA, 19 nt, Artificial Sequence
  Description of Artificial Sequence: Synthetic oligonucleotide
gagguaaccaucaaaacgg

SEQ ID NO: 536528 - RNA, 19 nt, Artificial Sequence
  Description of Artificial Sequence: Synthetic oligonucleotide
aaacccacaaacucauuac

SEQ ID NO: 536529 - RNA, 19 nt, Artificial Sequence
  Description of Artificial Sequence: Synthetic oligonucleotide
auaguaucuucauugacuc

SEQ ID NO: 536530 - RNA, 19 nt, Artificial Sequence
  Description of Artificial Sequence: Synthetic oligonucleotide
aagagcuuaucuguaaagc

SEQ ID NO: 536531 - RNA, 19 nt, Artificial Sequence
  Description of Artificial Sequence: Synthetic oligonucleotide
gaauccauaguacaccagg

SEQ ID NO: 536532 - RNA, 19 nt, Artificial Sequence
  Description of Artificial Sequence: Synthetic oligonucleotide
aaacucauuacgguucucc

SEQ ID NO: 536533 - RNA, 19 nt, Artificial Sequence
  Description of Artificial Sequence: Synthetic oligonucleotide
aaggccguugcccagugcc

SEQ ID NO: 536534 - RNA, 19 nt, Artificial Sequence
  Description of Artificial Sequence: Synthetic oligonucleotide
uuagcaaucuucuuguugu

SEQ ID NO: 536535 - RNA, 19 nt, Artificial Sequence
  Description of Artificial Sequence: Synthetic oligonucleotide
auugacucgaaccaaccgg

SEQ ID NO: 536536 - RNA, 19 nt, Artificial Sequence
  Description of Artificial Sequence: Synthetic oligonucleotide
aacaguugggucaaagccc

SEQ ID NO: 536537 - RNA, 19 nt, Artificial Sequence
  Description of Artificial Sequence: Synthetic oligonucleotide
aaguauauguaacccagcu

SEQ ID NO: 536538 - RNA, 19 nt, Artificial Sequence
  Description of Artificial Sequence: Synthetic oligonucleotide
auagacaaugucgucaggc

SEQ ID NO: 536539 - RNA, 19 nt, Artificial Sequence
  Description of Artificial Sequence: Synthetic oligonucleotide
auuacgguucuccauaaag

SEQ ID NO: 536540 - RNA, 19 nt, Artificial Sequence
  Description of Artificial Sequence: Synthetic oligonucleotide
augacuucuugucacgggc

SEQ ID NO: 536541 - RNA, 19 nt, Artificial Sequence
  Description of Artificial Sequence: Synthetic oligonucleotide
aaucacagcuucuccucgc

SEQ ID NO: 536542 - RNA, 19 nt, Artificial Sequence
  Description of Artificial Sequence: Synthetic oligonucleotide
acucgaaccaaccggauag

SEQ ID NO: 536543 - RNA, 19 nt, Artificial Sequence
  Description of Artificial Sequence: Synthetic oligonucleotide
uuuugccuuacucucaugu

SEQ ID NO: 536544 - RNA, 19 nt, Artificial Sequence
  Description of Artificial Sequence: Synthetic oligonucleotide
aaaucacagcuucuccucg

SEQ ID NO: 536545 - RNA, 19 nt, Artificial Sequence
  Description of Artificial Sequence: Synthetic oligonucleotide
agucgguccagauagacug

SEQ ID NO: 536546 - RNA, 19 nt, Artificial Sequence
  Description of Artificial Sequence: Synthetic oligonucleotide
auagaacucggccacuugg

SEQ ID NO: 536547 - RNA, 19 nt, Artificial Sequence
  Description of Artificial Sequence: Synthetic oligonucleotide
uccauaguacaccagggca

SEQ ID NO: 536548 - RNA, 19 nt, Artificial Sequence
  Description of Artificial Sequence: Synthetic oligonucleotide
acauagaagagcuuaucug

SEQ ID NO: 536549 - RNA, 19 nt, Artificial Sequence
  Description of Artificial Sequence: Synthetic oligonucleotide
caacaguugggucaaagcc

SEQ ID NO: 536550 - RNA, 19 nt, Artificial Sequence
  Description of Artificial Sequence: Synthetic oligonucleotide
cuauugaagccacaggccc

SEQ ID NO: 536551 - RNA, 19 nt, Artificial Sequence
  Description of Artificial Sequence: Synthetic oligonucleotide
aaagacaggauucggcuau

SEQ ID NO: 536552 - RNA, 19 nt, Artificial Sequence
  Description of Artificial Sequence: Synthetic oligonucleotide
uuacgguucuccauaaaga

SEQ ID NO: 536553 - RNA, 19 nt, Artificial Sequence
  Description of Artificial Sequence: Synthetic oligonucleotide
aagcauggaucucagaaau

SEQ ID NO: 536554 - RNA, 19 nt, Artificial Sequence
  Description of Artificial Sequence: Synthetic oligonucleotide
guaaccaucaaaacggcgc

SEQ ID NO: 536555 - RNA, 19 nt, Artificial Sequence
  Description of Artificial Sequence: Synthetic oligonucleotide
gauaggguacacaaaagac

SEQ ID NO: 536556 - RNA, 19 nt, Artificial Sequence
  Description of Artificial Sequence: Synthetic oligonucleotide
agccauauccagcaggcgg

SEQ ID NO: 536557 - RNA, 19 nt, Artificial Sequence
  Description of Artificial Sequence: Synthetic oligonucleotide
aauccauaguacaccaggg

SEQ ID NO: 536558 - RNA, 19 nt, Artificial Sequence
  Description of Artificial Sequence: Synthetic oligonucleotide
cucgcugccaaagauaagg

SEQ ID NO: 536559 - RNA, 19 nt, Artificial Sequence
  Description of Artificial Sequence: Synthetic oligonucleotide
cuuccgggcauccaaauag

SEQ ID NO: 536560 - RNA, 19 nt, Artificial Sequence
  Description of Artificial Sequence: Synthetic oligonucleotide
ugugccgagacucagccuc

SEQ ID NO: 536561 - RNA, 19 nt, Artificial Sequence
  Description of Artificial Sequence: Synthetic oligonucleotide
uagaacucggccacuuggg

SEQ ID NO: 536562 - RNA, 19 nt, Artificial Sequence
  Description of Artificial Sequence: Synthetic oligonucleotide
agggaaugcagacaccauc

SEQ ID NO: 536563 - RNA, 19 nt, Artificial Sequence
  Description of Artificial Sequence: Synthetic oligonucleotide
aacagugggucucucacaa

SEQ ID NO: 536564 - RNA, 19 nt, Artificial Sequence
  Description of Artificial Sequence: Synthetic oligonucleotide
uccuaaaggggccuaucag

SEQ ID NO: 536565 - RNA, 19 nt, Artificial Sequence
  Description of Artificial Sequence: Synthetic oligonucleotide
acagucaugccauggagca

SEQ ID NO: 536566 - RNA, 19 nt, Artificial Sequence
  Description of Artificial Sequence: Synthetic oligonucleotide
aggcagaguuuauuggccc

SEQ ID NO: 536567 - RNA, 19 nt, Artificial Sequence
  Description of Artificial Sequence: Synthetic oligonucleotide
aaccggauaggguacacaa

SEQ ID NO: 536568 - RNA, 19 nt, Artificial Sequence
  Description of Artificial Sequence: Synthetic oligonucleotide
cuuguuguuggcacccugg

SEQ ID NO: 536569 - RNA, 19 nt, Artificial Sequence
  Description of Artificial Sequence: Synthetic oligonucleotide
uggauaauucgacccacca

SEQ ID NO: 536570 - RNA, 19 nt, Artificial Sequence
  Description of Artificial Sequence: Synthetic oligonucleotide
ucauugacucgaaccaacc

SEQ ID NO: 536571 - RNA, 19 nt, Artificial Sequence
  Description of Artificial Sequence: Synthetic oligonucleotide
uugccuuacucucaugugu

SEQ ID NO: 536572 - RNA, 19 nt, Artificial Sequence
  Description of Artificial Sequence: Synthetic oligonucleotide
ggcuauugaagccacaggc

SEQ ID NO: 536573 - RNA, 19 nt, Artificial Sequence
  Description of Artificial Sequence: Synthetic oligonucleotide
uauugaagccacaggcccc

SEQ ID NO: 536574 - RNA, 19 nt, Artificial Sequence
  Description of Artificial Sequence: Synthetic oligonucleotide
agucaugccauggagcagg

SEQ ID NO: 536575 - RNA, 19 nt, Artificial Sequence
  Description of Artificial Sequence: Synthetic oligonucleotide
aacucauuacgguucucca

SEQ ID NO: 536576 - RNA, 19 nt, Artificial Sequence
  Description of Artificial Sequence: Synthetic oligonucleotide
uucuggauaauucgaccca

SEQ ID NO: 536577 - RNA, 19 nt, Artificial Sequence
  Description of Artificial Sequence: Synthetic oligonucleotide
cuugucacgggcccggugg

SEQ ID NO: 536578 - RNA, 19 nt, Artificial Sequence
  Description of Artificial Sequence: Synthetic oligonucleotide
ucggaaguauauguaaccc

SEQ ID NO: 536579 - RNA, 19 nt, Artificial Sequence
  Description of Artificial Sequence: Synthetic oligonucleotide
ucucggaaguauauguaac

SEQ ID NO: 536580 - RNA, 19 nt, Artificial Sequence
  Description of Artificial Sequence: Synthetic oligonucleotide
cagagaugcaggcagggcc

SEQ ID NO: 536581 - RNA, 19 nt, Artificial Sequence
  Description of Artificial Sequence: Synthetic oligonucleotide
cuaucaaaguugcccaggc

SEQ ID NO: 536582 - RNA, 19 nt, Artificial Sequence
  Description of Artificial Sequence: Synthetic oligonucleotide
aaagcgcaggaagaugggg

SEQ ID NO: 536583 - RNA, 19 nt, Artificial Sequence
  Description of Artificial Sequence: Synthetic oligonucleotide
cauagcaacccuuccgggc

SEQ ID NO: 536584 - RNA, 19 nt, Artificial Sequence
  Description of Artificial Sequence: Synthetic oligonucleotide
ucauguguaagcucccuuc

SEQ ID NO: 536585 - RNA, 19 nt, Artificial Sequence
  Description of Artificial Sequence: Synthetic oligonucleotide
cuugugccgagacucagcc

SEQ ID NO: 536586 - RNA, 19 nt, Artificial Sequence
  Description of Artificial Sequence: Synthetic oligonucleotide
cuggaugcggguauaggcc

SEQ ID NO: 536587 - RNA, 19 nt, Artificial Sequence
  Description of Artificial Sequence: Synthetic oligonucleotide
uguaggggaaaaucacagc

SEQ ID NO: 536588 - RNA, 19 nt, Artificial Sequence
  Description of Artificial Sequence: Synthetic oligonucleotide
aaacggcuggaaaagucgg

SEQ ID NO: 536589 - RNA, 19 nt, Artificial Sequence
  Description of Artificial Sequence: Synthetic oligonucleotide
ugagagacacaacucuccu

SEQ ID NO: 536590 - RNA, 19 nt, Artificial Sequence
  Description of Artificial Sequence: Synthetic oligonucleotide
ugcggaauccauaguacac

SEQ ID NO: 536591 - RNA, 19 nt, Artificial Sequence
  Description of Artificial Sequence: Synthetic oligonucleotide
cauugacucgaaccaaccg

SEQ ID NO: 536592 - RNA, 19 nt, Artificial Sequence
  Description of Artificial Sequence: Synthetic oligonucleotide
auaggguacacaaaagaca

SEQ ID NO: 536593 - RNA, 19 nt, Artificial Sequence
  Description of Artificial Sequence: Synthetic oligonucleotide
gaaccaaccggauagggua

SEQ ID NO: 536594 - RNA, 19 nt, Artificial Sequence
  Description of Artificial Sequence: Synthetic oligonucleotide
guugagguaaccaucaaaa

SEQ ID NO: 536595 - RNA, 19 nt, Artificial Sequence
  Description of Artificial Sequence: Synthetic oligonucleotide
auagcaacccuuccgggca

SEQ ID NO: 536596 - RNA, 19 nt, Artificial Sequence
  Description of Artificial Sequence: Synthetic oligonucleotide
ucacgucuaagguuggugu

SEQ ID NO: 536597 - RNA, 19 nt, Artificial Sequence
  Description of Artificial Sequence: Synthetic oligonucleotide
agggauguaggggaaaauc

SEQ ID NO: 536598 - RNA, 19 nt, Artificial Sequence
  Description of Artificial Sequence: Synthetic oligonucleotide
ggaaguauauguaacccag

SEQ ID NO: 536599 - RNA, 19 nt, Artificial Sequence
  Description of Artificial Sequence: Synthetic oligonucleotide
aaagcucgccaauguacug

SEQ ID NO: 536600 - RNA, 19 nt, Artificial Sequence
  Description of Artificial Sequence: Synthetic oligonucleotide
cauacgguaauaccugcug

SEQ ID NO: 536601 - RNA, 19 nt, Artificial Sequence
  Description of Artificial Sequence: Synthetic oligonucleotide
uacaauugugcaguuguac

SEQ ID NO: 536602 - RNA, 19 nt, Artificial Sequence
  Description of Artificial Sequence: Synthetic oligonucleotide
ucgcugccaaagauaaggg

SEQ ID NO: 536603 - RNA, 19 nt, Artificial Sequence
  Description of Artificial Sequence: Synthetic oligonucleotide
uacugugcuaggaucccag

SEQ ID NO: 536604 - RNA, 19 nt, Artificial Sequence
  Description of Artificial Sequence: Synthetic oligonucleotide
agugcaacauagcaacccu

SEQ ID NO: 536605 - RNA, 19 nt, Artificial Sequence
  Description of Artificial Sequence: Synthetic oligonucleotide
agagggcaacuacauugcc

SEQ ID NO: 536606 - RNA, 19 nt, Artificial Sequence
  Description of Artificial Sequence: Synthetic oligonucleotide
uuuauuggccccugagccu

SEQ ID NO: 536607 - RNA, 19 nt, Artificial Sequence
  Description of Artificial Sequence: Synthetic oligonucleotide
agaacucggccacuugggg

SEQ ID NO: 536608 - RNA, 19 nt, Artificial Sequence
  Description of Artificial Sequence: Synthetic oligonucleotide
uugagguaaccaucaaaac

SEQ ID NO: 536609 - RNA, 19 nt, Artificial Sequence
  Description of Artificial Sequence: Synthetic oligonucleotide
uaguaucuucauugacucg

SEQ ID NO: 536610 - RNA, 19 nt, Artificial Sequence
  Description of Artificial Sequence: Synthetic oligonucleotide
ugcaguuguacuugauaca

SEQ ID NO: 536611 - RNA, 19 nt, Artificial Sequence
  Description of Artificial Sequence: Synthetic oligonucleotide
cauguguaagcucccuucc

SEQ ID NO: 536612 - RNA, 19 nt, Artificial Sequence
  Description of Artificial Sequence: Synthetic oligonucleotide
cauaguaucuucauugacu

SEQ ID NO: 536613 - RNA, 19 nt, Artificial Sequence
  Description of Artificial Sequence: Synthetic oligonucleotide
caugcggaauccauaguac

SEQ ID NO: 536614 - RNA, 19 nt, Artificial Sequence
  Description of Artificial Sequence: Synthetic oligonucleotide
cacagucaugccauggagc

SEQ ID NO: 536615 - RNA, 19 nt, Artificial Sequence
  Description of Artificial Sequence: Synthetic oligonucleotide
caccagggcagccauacgg

SEQ ID NO: 536616 - RNA, 19 nt, Artificial Sequence
  Description of Artificial Sequence: Synthetic oligonucleotide
aggagugugaucaugacuu

SEQ ID NO: 536617 - RNA, 19 nt, Artificial Sequence
  Description of Artificial Sequence: Synthetic oligonucleotide
auguaggggaaaaucacag

SEQ ID NO: 536618 - RNA, 19 nt, Artificial Sequence
  Description of Artificial Sequence: Synthetic oligonucleotide
ucucucacaacaguugggu

SEQ ID NO: 536619 - RNA, 19 nt, Artificial Sequence
  Description of Artificial Sequence: Synthetic oligonucleotide
ugauacagucaucccagaa

SEQ ID NO: 536620 - RNA, 19 nt, Artificial Sequence
  Description of Artificial Sequence: Synthetic oligonucleotide
aaggacgcagggaaccugg

SEQ ID NO: 536621 - RNA, 19 nt, Artificial Sequence
  Description of Artificial Sequence: Synthetic oligonucleotide
acauagcaacccuuccggg

SEQ ID NO: 536622 - RNA, 19 nt, Artificial Sequence
  Description of Artificial Sequence: Synthetic oligonucleotide
auacgguaauaccugcugu

SEQ ID NO: 536623 - RNA, 19 nt, Artificial Sequence
  Description of Artificial Sequence: Synthetic oligonucleotide
auacucuggccuucagagg

SEQ ID NO: 536624 - RNA, 19 nt, Artificial Sequence
  Description of Artificial Sequence: Synthetic oligonucleotide
ggaucucagaaauagcuga

SEQ ID NO: 536625 - RNA, 19 nt, Artificial Sequence
  Description of Artificial Sequence: Synthetic oligonucleotide
ugccaugcgcaccuugugc

SEQ ID NO: 536626 - RNA, 19 nt, Artificial Sequence
  Description of Artificial Sequence: Synthetic oligonucleotide
gauucggcuauugaagcca

SEQ ID NO: 536627 - RNA, 19 nt, Artificial Sequence
  Description of Artificial Sequence: Synthetic oligonucleotide
gauguaggggaaaaucaca

SEQ ID NO: 536628 - RNA, 19 nt, Artificial Sequence
  Description of Artificial Sequence: Synthetic oligonucleotide
uaauucgacccaccagcug

SEQ ID NO: 536629 - RNA, 19 nt, Artificial Sequence
  Description of Artificial Sequence: Synthetic oligonucleotide
gcucccuuccuuuuggagg

SEQ ID NO: 536630 - RNA, 19 nt, Artificial Sequence
  Description of Artificial Sequence: Synthetic oligonucleotide
cacaaaagacaggauucgg

SEQ ID NO: 536631 - RNA, 19 nt, Artificial Sequence
  Description of Artificial Sequence: Synthetic oligonucleotide
cauacaccgccacaucagc

SEQ ID NO: 536632 - RNA, 19 nt, Artificial Sequence
  Description of Artificial Sequence: Synthetic oligonucleotide
aaccaaccggauaggguac

SEQ ID NO: 536633 - RNA, 19 nt, Artificial Sequence
  Description of Artificial Sequence: Synthetic oligonucleotide
auauccagcaggcggcuga

SEQ ID NO: 536634 - RNA, 19 nt, Artificial Sequence
  Description of Artificial Sequence: Synthetic oligonucleotide
ucgaaccaaccggauaggg

SEQ ID NO: 536635 - RNA, 19 nt, Artificial Sequence
  Description of Artificial Sequence: Synthetic oligonucleotide
ggauaauucgacccaccag

SEQ ID NO: 536636 - RNA, 19 nt, Artificial Sequence
  Description of Artificial Sequence: Synthetic oligonucleotide
ggauaggguacacaaaaga

SEQ ID NO: 536637 - RNA, 19 nt, Artificial Sequence
  Description of Artificial Sequence: Synthetic oligonucleotide
cagugcaacauagcaaccc

SEQ ID NO: 536638 - RNA, 19 nt, Artificial Sequence
  Description of Artificial Sequence: Synthetic oligonucleotide
ucaggagguaucggcaaag

SEQ ID NO: 536639 - RNA, 19 nt, Artificial Sequence
  Description of Artificial Sequence: Synthetic oligonucleotide
ccaaauagaacaguggguc

SEQ ID NO: 536640 - RNA, 19 nt, Artificial Sequence
  Description of Artificial Sequence: Synthetic oligonucleotide
ggcaucacgucuaagguug

SEQ ID NO: 536641 - RNA, 19 nt, Artificial Sequence
  Description of Artificial Sequence: Synthetic oligonucleotide
auacaccgccacaucagcc

SEQ ID NO: 536642 - RNA, 19 nt, Artificial Sequence
  Description of Artificial Sequence: Synthetic oligonucleotide
ucuggauaauucgacccac

SEQ ID NO: 536643 - RNA, 19 nt, Artificial Sequence
  Description of Artificial Sequence: Synthetic oligonucleotide
guaauaccugcugugcacc

SEQ ID NO: 536644 - RNA, 19 nt, Artificial Sequence
  Description of Artificial Sequence: Synthetic oligonucleotide
augcggaauccauaguaca

SEQ ID NO: 536645 - RNA, 19 nt, Artificial Sequence
  Description of Artificial Sequence: Synthetic oligonucleotide
uccaaggucugugcaaagc

SEQ ID NO: 536646 - RNA, 19 nt, Artificial Sequence
  Description of Artificial Sequence: Synthetic oligonucleotide
cagauagacugccgaaggc

SEQ ID NO: 536647 - RNA, 19 nt, Artificial Sequence
  Description of Artificial Sequence: Synthetic oligonucleotide
uggaugcggguauaggccu

SEQ ID NO: 536648 - RNA, 19 nt, Artificial Sequence
  Description of Artificial Sequence: Synthetic oligonucleotide
gaaagcgcaggaagauggg

SEQ ID NO: 536649 - RNA, 19 nt, Artificial Sequence
  Description of Artificial Sequence: Synthetic oligonucleotide
cuuuccagcggaacguguc

SEQ ID NO: 536650 - RNA, 19 nt, Artificial Sequence
  Description of Artificial Sequence: Synthetic oligonucleotide
caaaagacaggauucggcu

SEQ ID NO: 536651 - RNA, 19 nt, Artificial Sequence
  Description of Artificial Sequence: Synthetic oligonucleotide
cuggauaauucgacccacc

SEQ ID NO: 536652 - RNA, 19 nt, Artificial Sequence
  Description of Artificial Sequence: Synthetic oligonucleotide
agggcucgugccuuugagg

SEQ ID NO: 536653 - RNA, 19 nt, Artificial Sequence
  Description of Artificial Sequence: Synthetic oligonucleotide
ucgccaauguacuguacaa

SEQ ID NO: 536654 - RNA, 19 nt, Artificial Sequence
  Description of Artificial Sequence: Synthetic oligonucleotide
ugccuuacucucaugugua

SEQ ID NO: 536655 - RNA, 19 nt, Artificial Sequence
  Description of Artificial Sequence: Synthetic oligonucleotide
acgguucuccauaaagagg

SEQ ID NO: 536656 - RNA, 19 nt, Artificial Sequence
  Description of Artificial Sequence: Synthetic oligonucleotide
uggcuagccacuguagucu

SEQ ID NO: 536657 - RNA, 19 nt, Artificial Sequence
  Description of Artificial Sequence: Synthetic oligonucleotide
uaauaccugcugugcacca

SEQ ID NO: 536658 - RNA, 19 nt, Artificial Sequence
  Description of Artificial Sequence: Synthetic oligonucleotide
auugugcaguuguacuuga

SEQ ID NO: 536659 - RNA, 19 nt, Artificial Sequence
  Description of Artificial Sequence: Synthetic oligonucleotide
aggagguaucggcaaagcu

SEQ ID NO: 536660 - RNA, 19 nt, Artificial Sequence
  Description of Artificial Sequence: Synthetic oligonucleotide
ugacuaggcagguguuuug

SEQ ID NO: 536661 - RNA, 19 nt, Artificial Sequence
  Description of Artificial Sequence: Synthetic oligonucleotide
gguguuuuggggcaucuuc

SEQ ID NO: 536662 - RNA, 19 nt, Artificial Sequence
  Description of Artificial Sequence: Synthetic oligonucleotide
gaggcuaagugaggggucc

SEQ ID NO: 536663 - RNA, 19 nt, Artificial Sequence
  Description of Artificial Sequence: Synthetic oligonucleotide
ucgccagugagguaggcuu

SEQ ID NO: 536664 - RNA, 19 nt, Artificial Sequence
  Description of Artificial Sequence: Synthetic oligonucleotide
auaccugcugugcaccaca

SEQ ID NO: 536665 - RNA, 19 nt, Artificial Sequence
  Description of Artificial Sequence: Synthetic oligonucleotide
gagugugcccuccacuuca

SEQ ID NO: 536666 - RNA, 19 nt, Artificial Sequence
  Description of Artificial Sequence: Synthetic oligonucleotide
cuaaaggggccuaucagua

SEQ ID NO: 536667 - RNA, 19 nt, Artificial Sequence
  Description of Artificial Sequence: Synthetic oligonucleotide
ccuggaugcggguauaggc

SEQ ID NO: 536668 - RNA, 19 nt, Artificial Sequence
  Description of Artificial Sequence: Synthetic oligonucleotide
uguugaugagagccgccuc

SEQ ID NO: 536669 - RNA, 19 nt, Artificial Sequence
  Description of Artificial Sequence: Synthetic oligonucleotide
aaccaucaaaacggcgcag

SEQ ID NO: 536670 - RNA, 19 nt, Artificial Sequence
  Description of Artificial Sequence: Synthetic oligonucleotide
uaaaggggccuaucaguaa

SEQ ID NO: 536671 - RNA, 19 nt, Artificial Sequence
  Description of Artificial Sequence: Synthetic oligonucleotide
ggagguaucggcaaagcuc

SEQ ID NO: 536672 - RNA, 19 nt, Artificial Sequence
  Description of Artificial Sequence: Synthetic oligonucleotide
aucacgucuaagguuggug

SEQ ID NO: 536673 - RNA, 19 nt, Artificial Sequence
  Description of Artificial Sequence: Synthetic oligonucleotide
acaguugggucaaagcccu

SEQ ID NO: 536674 - RNA, 19 nt, Artificial Sequence
  Description of Artificial Sequence: Synthetic oligonucleotide
uacucucauguguaagcuc

SEQ ID NO: 536675 - RNA, 19 nt, Artificial Sequence
  Description of Artificial Sequence: Synthetic oligonucleotide
gcagccauacgguaauacc

SEQ ID NO: 536676 - RNA, 19 nt, Artificial Sequence
  Description of Artificial Sequence: Synthetic oligonucleotide
cugcacucagucaggcuag

SEQ ID NO: 536677 - RNA, 19 nt, Artificial Sequence
  Description of Artificial Sequence: Synthetic oligonucleotide
ugcagacaccaucgggccc

SEQ ID NO: 536678 - RNA, 19 nt, Artificial Sequence
  Description of Artificial Sequence: Synthetic oligonucleotide
acagugggucucucacaac

SEQ ID NO: 536679 - RNA, 19 nt, Artificial Sequence
  Description of Artificial Sequence: Synthetic oligonucleotide
gaggugcgggcccugcuag

SEQ ID NO: 536680 - RNA, 19 nt, Artificial Sequence
  Description of Artificial Sequence: Synthetic oligonucleotide
agccauacgguaauaccug

SEQ ID NO: 536681 - RNA, 19 nt, Artificial Sequence
  Description of Artificial Sequence: Synthetic oligonucleotide
ugguggagcuugcuacagc

SEQ ID NO: 536682 - RNA, 19 nt, Artificial Sequence
  Description of Artificial Sequence: Synthetic oligonucleotide
ugcggucucggaaguauau

SEQ ID NO: 536683 - RNA, 19 nt, Artificial Sequence
  Description of Artificial Sequence: Synthetic oligonucleotide
cacuguagucucuggcuac

SEQ ID NO: 536684 - RNA, 19 nt, Artificial Sequence
  Description of Artificial Sequence: Synthetic oligonucleotide
auaauucgacccaccagcu

SEQ ID NO: 536685 - RNA, 19 nt, Artificial Sequence
  Description of Artificial Sequence: Synthetic oligonucleotide
ugcaucugagagacacaac

SEQ ID NO: 536686 - RNA, 19 nt, Artificial Sequence
  Description of Artificial Sequence: Synthetic oligonucleotide
auucggcuauugaagccac

SEQ ID NO: 536687 - RNA, 19 nt, Artificial Sequence
  Description of Artificial Sequence: Synthetic oligonucleotide
cucgccaauguacuguaca

SEQ ID NO: 536688 - RNA, 19 nt, Artificial Sequence
  Description of Artificial Sequence: Synthetic oligonucleotide
aagucgguccagauagacu

SEQ ID NO: 536689 - RNA, 19 nt, Artificial Sequence
  Description of Artificial Sequence: Synthetic oligonucleotide
acgucuaagguugguguug

SEQ ID NO: 536690 - RNA, 19 nt, Artificial Sequence
  Description of Artificial Sequence: Synthetic oligonucleotide
gaacagugggucucucaca

SEQ ID NO: 536691 - RNA, 19 nt, Artificial Sequence
  Description of Artificial Sequence: Synthetic oligonucleotide
gcuaucaaaguugcccagg

SEQ ID NO: 536692 - RNA, 19 nt, Artificial Sequence
  Description of Artificial Sequence: Synthetic oligonucleotide
ccgagacucagccucacgg

SEQ ID NO: 536693 - RNA, 19 nt, Artificial Sequence
  Description of Artificial Sequence: Synthetic oligonucleotide
uagcuuuggucuggcauug

SEQ ID NO: 536694 - RNA, 19 nt, Artificial Sequence
  Description of Artificial Sequence: Synthetic oligonucleotide
aucucgcugccaaagauaa

SEQ ID NO: 536695 - RNA, 19 nt, Artificial Sequence
  Description of Artificial Sequence: Synthetic oligonucleotide
gaucaguuccauaguaucu

SEQ ID NO: 536696 - RNA, 19 nt, Artificial Sequence
  Description of Artificial Sequence: Synthetic oligonucleotide
ucgguccagauagacugcc

SEQ ID NO: 536697 - RNA, 19 nt, Artificial Sequence
  Description of Artificial Sequence: Synthetic oligonucleotide
acgcagggaaccuggagaa

SEQ ID NO: 536698 - RNA, 19 nt, Artificial Sequence
  Description of Artificial Sequence: Synthetic oligonucleotide
ugcggguauaggccucuug

SEQ ID NO: 536699 - RNA, 19 nt, Artificial Sequence
  Description of Artificial Sequence: Synthetic oligonucleotide
ggauguaggggaaaaucac

SEQ ID NO: 536700 - RNA, 19 nt, Artificial Sequence
  Description of Artificial Sequence: Synthetic oligonucleotide
caauugcugguggagcuug

SEQ ID NO: 536701 - RNA, 19 nt, Artificial Sequence
  Description of Artificial Sequence: Synthetic oligonucleotide
ucucgcugccaaagauaag

SEQ ID NO: 536702 - RNA, 19 nt, Artificial Sequence
  Description of Artificial Sequence: Synthetic oligonucleotide
ucuugucacgggcccggug

SEQ ID NO: 536703 - RNA, 19 nt, Artificial Sequence
  Description of Artificial Sequence: Synthetic oligonucleotide
uacuuggcuuccugagucu

SEQ ID NO: 536704 - RNA, 19 nt, Artificial Sequence
  Description of Artificial Sequence: Synthetic oligonucleotide
agaggcuaagugagggguc

SEQ ID NO: 536705 - RNA, 19 nt, Artificial Sequence
  Description of Artificial Sequence: Synthetic oligonucleotide
cauugccugaggccagacc

SEQ ID NO: 536706 - RNA, 19 nt, Artificial Sequence
  Description of Artificial Sequence: Synthetic oligonucleotide
ccuaucaguaagccugggg

SEQ ID NO: 536707 - RNA, 19 nt, Artificial Sequence
  Description of Artificial Sequence: Synthetic oligonucleotide
uaucggcaaagcucgccaa

SEQ ID NO: 536708 - RNA, 19 nt, Artificial Sequence
  Description of Artificial Sequence: Synthetic oligonucleotide
ggaacgugucucccgugcg

SEQ ID NO: 536709 - RNA, 19 nt, Artificial Sequence
  Description of Artificial Sequence: Synthetic oligonucleotide
cagccauacgguaauaccu

SEQ ID NO: 536710 - RNA, 19 nt, Artificial Sequence
  Description of Artificial Sequence: Synthetic oligonucleotide
ugagguaggcuuggucccc

SEQ ID NO: 536711 - RNA, 19 nt, Artificial Sequence
  Description of Artificial Sequence: Synthetic oligonucleotide
uuccugagucugaaggcuu

SEQ ID NO: 536712 - RNA, 19 nt, Artificial Sequence
  Description of Artificial Sequence: Synthetic oligonucleotide
ucaggccgcaugcggaauc

SEQ ID NO: 536713 - RNA, 19 nt, Artificial Sequence
  Description of Artificial Sequence: Synthetic oligonucleotide
aaggcaacacagacucaca

SEQ ID NO: 536714 - RNA, 19 nt, Artificial Sequence
  Description of Artificial Sequence: Synthetic oligonucleotide
agauggcuagccacuguag

SEQ ID NO: 536715 - RNA, 19 nt, Artificial Sequence
  Description of Artificial Sequence: Synthetic oligonucleotide
ggcagaguuuauuggcccc

SEQ ID NO: 536716 - RNA, 19 nt, Artificial Sequence
  Description of Artificial Sequence: Synthetic oligonucleotide
uggaaacggcuggaaaagu

SEQ ID NO: 536717 - RNA, 19 nt, Artificial Sequence
  Description of Artificial Sequence: Synthetic oligonucleotide
caaagcucgccaauguacu

SEQ ID NO: 536718 - RNA, 19 nt, Artificial Sequence
  Description of Artificial Sequence: Synthetic oligonucleotide
agugugaucaugacuucuu

SEQ ID NO: 536719 - RNA, 19 nt, Artificial Sequence
  Description of Artificial Sequence: Synthetic oligonucleotide
cagaaagcgcaggaagaug

SEQ ID NO: 536720 - RNA, 19 nt, Artificial Sequence
  Description of Artificial Sequence: Synthetic oligonucleotide
ggcuaucaaaguugcccag

SEQ ID NO: 536721 - RNA, 19 nt, Artificial Sequence
  Description of Artificial Sequence: Synthetic oligonucleotide
agcauacucuggccuucag

SEQ ID NO: 536722 - RNA, 19 nt, Artificial Sequence
  Description of Artificial Sequence: Synthetic oligonucleotide
cucgaaccaaccggauagg

SEQ ID NO: 536723 - RNA, 19 nt, Artificial Sequence
  Description of Artificial Sequence: Synthetic oligonucleotide
uucggcuauugaagccaca

SEQ ID NO: 536724 - RNA, 19 nt, Artificial Sequence
  Description of Artificial Sequence: Synthetic oligonucleotide
ugacucgaaccaaccggau

SEQ ID NO: 536725 - RNA, 19 nt, Artificial Sequence
  Description of Artificial Sequence: Synthetic oligonucleotide
acuguagucucuggcuacu

SEQ ID NO: 536726 - RNA, 19 nt, Artificial Sequence
  Description of Artificial Sequence: Synthetic oligonucleotide
gacucgaaccaaccggaua

SEQ ID NO: 536727 - RNA, 19 nt, Artificial Sequence
  Description of Artificial Sequence: Synthetic oligonucleotide
aggugcgggcccugcuagc

SEQ ID NO: 536728 - RNA, 19 nt, Artificial Sequence
  Description of Artificial Sequence: Synthetic oligonucleotide
agugccaugcgcaccuugu

SEQ ID NO: 536729 - RNA, 19 nt, Artificial Sequence
  Description of Artificial Sequence: Synthetic oligonucleotide
gcggaauccauaguacacc

SEQ ID NO: 536730 - RNA, 19 nt, Artificial Sequence
  Description of Artificial Sequence: Synthetic oligonucleotide
uggugcccgauguguagac

SEQ ID NO: 536731 - RNA, 19 nt, Artificial Sequence
  Description of Artificial Sequence: Synthetic oligonucleotide
gcugcacucagucaggcua

SEQ ID NO: 536732 - RNA, 19 nt, Artificial Sequence
  Description of Artificial Sequence: Synthetic oligonucleotide
gcaugcggaauccauagua

SEQ ID NO: 536733 - RNA, 19 nt, Artificial Sequence
  Description of Artificial Sequence: Synthetic oligonucleotide
gacugccgaaggccguugc

SEQ ID NO: 536734 - RNA, 19 nt, Artificial Sequence
  Description of Artificial Sequence: Synthetic oligonucleotide
aguggcgcgagggcaucac

SEQ ID NO: 536735 - RNA, 19 nt, Artificial Sequence
  Description of Artificial Sequence: Synthetic oligonucleotide
acauugccugaggccagac

SEQ ID NO: 536736 - RNA, 19 nt, Artificial Sequence
  Description of Artificial Sequence: Synthetic oligonucleotide
agcuuuggucuggcauugc

SEQ ID NO: 536737 - RNA, 19 nt, Artificial Sequence
  Description of Artificial Sequence: Synthetic oligonucleotide
ugcugcacucagucaggcu

SEQ ID NO: 536738 - RNA, 19 nt, Artificial Sequence
  Description of Artificial Sequence: Synthetic oligonucleotide
acaaggacgcagggaaccu

SEQ ID NO: 536739 - RNA, 19 nt, Artificial Sequence
  Description of Artificial Sequence: Synthetic oligonucleotide
aggcuacaguugcacucag

SEQ ID NO: 536740 - RNA, 19 nt, Artificial Sequence
  Description of Artificial Sequence: Synthetic oligonucleotide
gccauacgguaauaccugc

SEQ ID NO: 536741 - RNA, 19 nt, Artificial Sequence
  Description of Artificial Sequence: Synthetic oligonucleotide
cucuugguccagugcaaca

SEQ ID NO: 536742 - RNA, 19 nt, Artificial Sequence
  Description of Artificial Sequence: Synthetic oligonucleotide
cugguggagcuugcuacag

SEQ ID NO: 536743 - RNA, 19 nt, Artificial Sequence
  Description of Artificial Sequence: Synthetic oligonucleotide
ccgcaugcggaauccauag

SEQ ID NO: 536744 - RNA, 19 nt, Artificial Sequence
  Description of Artificial Sequence: Synthetic oligonucleotide
agacaggauucggcuauug

SEQ ID NO: 536745 - RNA, 19 nt, Artificial Sequence
  Description of Artificial Sequence: Synthetic oligonucleotide
accuugugccgagacucag

SEQ ID NO: 536746 - RNA, 19 nt, Artificial Sequence
  Description of Artificial Sequence: Synthetic oligonucleotide
gguacugugcuaggauccc

SEQ ID NO: 536747 - RNA, 19 nt, Artificial Sequence
  Description of Artificial Sequence: Synthetic oligonucleotide
ccacagucaugccauggag

SEQ ID NO: 536748 - RNA, 19 nt, Artificial Sequence
  Description of Artificial Sequence: Synthetic oligonucleotide
ggaauccauaguacaccag

SEQ ID NO: 536749 - RNA, 19 nt, Artificial Sequence
  Description of Artificial Sequence: Synthetic oligonucleotide
guggcgcgagggcaucacg

SEQ ID NO: 536750 - RNA, 19 nt, Artificial Sequence
  Description of Artificial Sequence: Synthetic oligonucleotide
aucgccagugagguaggcu

SEQ ID NO: 536751 - RNA, 19 nt, Artificial Sequence
  Description of Artificial Sequence: Synthetic oligonucleotide
ugcccgauguguagacaua

SEQ ID NO: 536752 - RNA, 19 nt, Artificial Sequence
  Description of Artificial Sequence: Synthetic oligonucleotide
ggcccugcuagcuuugguc

SEQ ID NO: 536753 - RNA, 19 nt, Artificial Sequence
  Description of Artificial Sequence: Synthetic oligonucleotide
uugugccgagacucagccu

SEQ ID NO: 536754 - RNA, 19 nt, Artificial Sequence
  Description of Artificial Sequence: Synthetic oligonucleotide
agggaaccuggagaaacaa

SEQ ID NO: 536755 - RNA, 19 nt, Artificial Sequence
  Description of Artificial Sequence: Synthetic oligonucleotide
acgauguuuccugcugagu

SEQ ID NO: 536756 - RNA, 19 nt, Artificial Sequence
  Description of Artificial Sequence: Synthetic oligonucleotide
uccuuuccccagagaugca

SEQ ID NO: 536757 - RNA, 19 nt, Artificial Sequence
  Description of Artificial Sequence: Synthetic oligonucleotide
ccuuacucucauguguaag

SEQ ID NO: 536758 - RNA, 19 nt, Artificial Sequence
  Description of Artificial Sequence: Synthetic oligonucleotide
ggcucugaauccagcauac

SEQ ID NO: 536759 - RNA, 19 nt, Artificial Sequence
  Description of Artificial Sequence: Synthetic oligonucleotide
ccggauaggguacacaaaa

SEQ ID NO: 536760 - RNA, 19 nt, Artificial Sequence
  Description of Artificial Sequence: Synthetic oligonucleotide
uucccucauuccugcugca

SEQ ID NO: 536761 - RNA, 19 nt, Artificial Sequence
  Description of Artificial Sequence: Synthetic oligonucleotide
acccugguugagguaacca

SEQ ID NO: 536762 - RNA, 19 nt, Artificial Sequence
  Description of Artificial Sequence: Synthetic oligonucleotide
uuccagcggaacgugucuc

SEQ ID NO: 536763 - RNA, 19 nt, Artificial Sequence
  Description of Artificial Sequence: Synthetic oligonucleotide
caguggcuccauagaacuc

SEQ ID NO: 536764 - RNA, 19 nt, Artificial Sequence
  Description of Artificial Sequence: Synthetic oligonucleotide
caaggacgcagggaaccug

SEQ ID NO: 536765 - RNA, 19 nt, Artificial Sequence
  Description of Artificial Sequence: Synthetic oligonucleotide
acaucgccagugagguagg

SEQ ID NO: 536766 - RNA, 19 nt, Artificial Sequence
  Description of Artificial Sequence: Synthetic oligonucleotide
ugcgggcccugcuagcuuu

SEQ ID NO: 536767 - RNA, 19 nt, Artificial Sequence
  Description of Artificial Sequence: Synthetic oligonucleotide
cagccauauccagcaggcg

SEQ ID NO: 536768 - RNA, 19 nt, Artificial Sequence
  Description of Artificial Sequence: Synthetic oligonucleotide
gcauacucuggccuucaga

SEQ ID NO: 536769 - RNA, 19 nt, Artificial Sequence
  Description of Artificial Sequence: Synthetic oligonucleotide
caggccgcaugcggaaucc

SEQ ID NO: 536770 - RNA, 19 nt, Artificial Sequence
  Description of Artificial Sequence: Synthetic oligonucleotide
ggccuaucaguaagccugg

SEQ ID NO: 536771 - RNA, 19 nt, Artificial Sequence
  Description of Artificial Sequence: Synthetic oligonucleotide
acaauugcugguggagcuu

SEQ ID NO: 536772 - RNA, 19 nt, Artificial Sequence
  Description of Artificial Sequence: Synthetic oligonucleotide
gucgguccagauagacugc

SEQ ID NO: 536773 - RNA, 19 nt, Artificial Sequence
  Description of Artificial Sequence: Synthetic oligonucleotide
ccuugugccgagacucagc

SEQ ID NO: 536774 - RNA, 19 nt, Artificial Sequence
  Description of Artificial Sequence: Synthetic oligonucleotide
ccugcuagcuuuggucugg

SEQ ID NO: 536775 - RNA, 19 nt, Artificial Sequence
  Description of Artificial Sequence: Synthetic oligonucleotide
gcucuguguuggcagguac

SEQ ID NO: 536776 - RNA, 19 nt, Artificial Sequence
  Description of Artificial Sequence: Synthetic oligonucleotide
ggagugugaucaugacuuc

SEQ ID NO: 536777 - RNA, 19 nt, Artificial Sequence
  Description of Artificial Sequence: Synthetic oligonucleotide
cagucaugccauggagcag

SEQ ID NO: 536778 - RNA, 19 nt, Artificial Sequence
  Description of Artificial Sequence: Synthetic oligonucleotide
ggcgggcauacagaggcag

SEQ ID NO: 536779 - RNA, 19 nt, Artificial Sequence
  Description of Artificial Sequence: Synthetic oligonucleotide
gugcccgauguguagacau

SEQ ID NO: 536780 - RNA, 19 nt, Artificial Sequence
  Description of Artificial Sequence: Synthetic oligonucleotide
ccuaaaggggccuaucagu

SEQ ID NO: 536781 - RNA, 19 nt, Artificial Sequence
  Description of Artificial Sequence: Synthetic oligonucleotide
ugucucccgugcggucucg

SEQ ID NO: 536782 - RNA, 19 nt, Artificial Sequence
  Description of Artificial Sequence: Synthetic oligonucleotide
cagugccaugcgcaccuug

SEQ ID NO: 536783 - RNA, 19 nt, Artificial Sequence
  Description of Artificial Sequence: Synthetic oligonucleotide
gguagcccuguggugcccg

SEQ ID NO: 536784 - RNA, 19 nt, Artificial Sequence
  Description of Artificial Sequence: Synthetic oligonucleotide
gggcucgugccuuugaggu

SEQ ID NO: 536785 - RNA, 19 nt, Artificial Sequence
  Description of Artificial Sequence: Synthetic oligonucleotide
accaaccggauaggguaca

SEQ ID NO: 536786 - RNA, 19 nt, Artificial Sequence
  Description of Artificial Sequence: Synthetic oligonucleotide
cucuguguuggcagguacu

SEQ ID NO: 536787 - RNA, 19 nt, Artificial Sequence
  Description of Artificial Sequence: Synthetic oligonucleotide
cgcugccaaagauaagggc

SEQ ID NO: 536788 - RNA, 19 nt, Artificial Sequence
  Description of Artificial Sequence: Synthetic oligonucleotide
cauauccagcaggcggcug

SEQ ID NO: 536789 - RNA, 19 nt, Artificial Sequence
  Description of Artificial Sequence: Synthetic oligonucleotide
gggcucugaauccagcaua

SEQ ID NO: 536790 - RNA, 19 nt, Artificial Sequence
  Description of Artificial Sequence: Synthetic oligonucleotide
gcugguggagcuugcuaca

SEQ ID NO: 536791 - RNA, 19 nt, Artificial Sequence
  Description of Artificial Sequence: Synthetic oligonucleotide
cggaaguauauguaaccca

SEQ ID NO: 536792 - RNA, 19 nt, Artificial Sequence
  Description of Artificial Sequence: Synthetic oligonucleotide
cauuacgguucuccauaaa

SEQ ID NO: 536793 - RNA, 19 nt, Artificial Sequence
  Description of Artificial Sequence: Synthetic oligonucleotide
guacugugcuaggauccca

SEQ ID NO: 536794 - RNA, 19 nt, Artificial Sequence
  Description of Artificial Sequence: Synthetic oligonucleotide
gauaagggcucgugccuuu

SEQ ID NO: 536795 - RNA, 19 nt, Artificial Sequence
  Description of Artificial Sequence: Synthetic oligonucleotide
agcauggaucucagaaaua

SEQ ID NO: 536796 - RNA, 19 nt, Artificial Sequence
  Description of Artificial Sequence: Synthetic oligonucleotide
ggcucgugccuuugaggug

SEQ ID NO: 536797 - RNA, 19 nt, Artificial Sequence
  Description of Artificial Sequence: Synthetic oligonucleotide
agacugccgaaggccguug

SEQ ID NO: 536798 - RNA, 19 nt, Artificial Sequence
  Description of Artificial Sequence: Synthetic oligonucleotide
accggauaggguacacaaa

SEQ ID NO: 536799 - RNA, 19 nt, Artificial Sequence
  Description of Artificial Sequence: Synthetic oligonucleotide
guggugcccgauguguaga

SEQ ID NO: 536800 - RNA, 19 nt, Artificial Sequence
  Description of Artificial Sequence: Synthetic oligonucleotide
cucuggcuacuuggcuucc

SEQ ID NO: 536801 - RNA, 19 nt, Artificial Sequence
  Description of Artificial Sequence: Synthetic oligonucleotide
gccgagacucagccucacg

SEQ ID NO: 536802 - RNA, 19 nt, Artificial Sequence
  Description of Artificial Sequence: Synthetic oligonucleotide
gaugcggguauaggccucu

SEQ ID NO: 536803 - RNA, 19 nt, Artificial Sequence
  Description of Artificial Sequence: Synthetic oligonucleotide
caucgccagugagguaggc

SEQ ID NO: 536804 - RNA, 19 nt, Artificial Sequence
  Description of Artificial Sequence: Synthetic oligonucleotide
uucuugucacgggcccggu

SEQ ID NO: 536805 - RNA, 19 nt, Artificial Sequence
  Description of Artificial Sequence: Synthetic oligonucleotide
gcaucacgucuaagguugg

SEQ ID NO: 536806 - RNA, 19 nt, Artificial Sequence
  Description of Artificial Sequence: Synthetic oligonucleotide
cuguggugcccgaugugua

SEQ ID NO: 536807 - RNA, 19 nt, Artificial Sequence
  Description of Artificial Sequence: Synthetic oligonucleotide
gcuacuuggcuuccugagu

SEQ ID NO: 536808 - RNA, 19 nt, Artificial Sequence
  Description of Artificial Sequence: Synthetic oligonucleotide
gcccuugucagggugacua

SEQ ID NO: 536809 - RNA, 19 nt, Artificial Sequence
  Description of Artificial Sequence: Synthetic oligonucleotide
cucccgugcggucucggaa

SEQ ID NO: 536810 - RNA, 19 nt, Artificial Sequence
  Description of Artificial Sequence: Synthetic oligonucleotide
gugacuaggcagguguuuu

SEQ ID NO: 536811 - RNA, 19 nt, Artificial Sequence
  Description of Artificial Sequence: Synthetic oligonucleotide
gcggucucggaaguauaug

SEQ ID NO: 536812 - RNA, 19 nt, Artificial Sequence
  Description of Artificial Sequence: Synthetic oligonucleotide
gccaucucgcugccaaaga

SEQ ID NO: 536813 - RNA, 19 nt, Artificial Sequence
  Description of Artificial Sequence: Synthetic oligonucleotide
cccuugucagggugacuag

SEQ ID NO: 536814 - RNA, 19 nt, Artificial Sequence
  Description of Artificial Sequence: Synthetic oligonucleotide
gcccugcuagcuuuggucu

SEQ ID NO: 536815 - RNA, 19 nt, Artificial Sequence
  Description of Artificial Sequence: Synthetic oligonucleotide
gcugagugugcccuccacu

SEQ ID NO: 536816 - RNA, 19 nt, Artificial Sequence
  Description of Artificial Sequence: Synthetic oligonucleotide
ucgugccuuugagguguca

SEQ ID NO: 536817 - RNA, 19 nt, Artificial Sequence
  Description of Artificial Sequence: Synthetic oligonucleotide
cccugcuagcuuuggucug

SEQ ID NO: 536818 - RNA, 19 nt, Artificial Sequence
  Description of Artificial Sequence: Synthetic oligonucleotide
cucauguguaagcucccuu

SEQ ID NO: 536819 - RNA, 19 nt, Artificial Sequence
  Description of Artificial Sequence: Synthetic oligonucleotide
gcucgugccuuugaggugu

SEQ ID NO: 536820 - RNA, 19 nt, Artificial Sequence
  Description of Artificial Sequence: Synthetic oligonucleotide
cacgucuaagguugguguu

SEQ ID NO: 536821 - RNA, 19 nt, Artificial Sequence
  Description of Artificial Sequence: Synthetic oligonucleotide
aggccguugcccagugcca

SEQ ID NO: 536822 - RNA, 19 nt, Artificial Sequence
  Description of Artificial Sequence: Synthetic oligonucleotide
gccuaucaguaagccuggg

SEQ ID NO: 536823 - RNA, 19 nt, Artificial Sequence
  Description of Artificial Sequence: Synthetic oligonucleotide
agguguuuuggggcaucuu

SEQ ID NO: 536824 - RNA, 19 nt, Artificial Sequence
  Description of Artificial Sequence: Synthetic oligonucleotide
gagggauguaggggaaaau

SEQ ID NO: 536825 - RNA, 19 nt, Artificial Sequence
  Description of Artificial Sequence: Synthetic oligonucleotide
caucauccuaaaggggccu

SEQ ID NO: 536826 - RNA, 19 nt, Artificial Sequence
  Description of Artificial Sequence: Synthetic oligonucleotide
cauuagcaaucuucuuguu

SEQ ID NO: 536827 - RNA, 19 nt, Artificial Sequence
  Description of Artificial Sequence: Synthetic oligonucleotide
gccuuacucucauguguaa

SEQ ID NO: 536828 - RNA, 19 nt, Artificial Sequence
  Description of Artificial Sequence: Synthetic oligonucleotide
aggacgcagggaaccugga

SEQ ID NO: 536829 - RNA, 19 nt, Artificial Sequence
  Description of Artificial Sequence: Synthetic oligonucleotide
ccgguggccacaugcuguc

SEQ ID NO: 536830 - RNA, 19 nt, Artificial Sequence
  Description of Artificial Sequence: Synthetic oligonucleotide
ggaggugcgggcccugcua

SEQ ID NO: 536831 - RNA, 19 nt, Artificial Sequence
  Description of Artificial Sequence: Synthetic oligonucleotide
gggcaucacgucuaagguu

SEQ ID NO: 536832 - RNA, 19 nt, Artificial Sequence
  Description of Artificial Sequence: Synthetic oligonucleotide
ggaugcggguauaggccuc

SEQ ID NO: 536833 - RNA, 19 nt, Artificial Sequence
  Description of Artificial Sequence: Synthetic oligonucleotide
gcggcugagugugcccucc

SEQ ID NO: 536834 - RNA, 19 nt, Artificial Sequence
  Description of Artificial Sequence: Synthetic oligonucleotide
ggugcccgauguguagaca

SEQ ID NO: 536835 - RNA, 19 nt, Artificial Sequence
  Description of Artificial Sequence: Synthetic oligonucleotide
ccaaccggauaggguacac

SEQ ID NO: 536836 - RNA, 19 nt, Artificial Sequence
  Description of Artificial Sequence: Synthetic oligonucleotide
ggggaaaaucacagcuucu

SEQ ID NO: 536837 - RNA, 19 nt, Artificial Sequence
  Description of Artificial Sequence: Synthetic oligonucleotide
agcccuugucagggugacu

SEQ ID NO: 536838 - RNA, 19 nt, Artificial Sequence
  Description of Artificial Sequence: Synthetic oligonucleotide
gugcggucucggaaguaua

SEQ ID NO: 536839 - RNA, 19 nt, Artificial Sequence
  Description of Artificial Sequence: Synthetic oligonucleotide
cgaaccaaccggauagggu

SEQ ID NO: 536840 - RNA, 19 nt, Artificial Sequence
  Description of Artificial Sequence: Synthetic oligonucleotide
caucacgucuaagguuggu

SEQ ID NO: 536841 - RNA, 19 nt, Artificial Sequence
  Description of Artificial Sequence: Synthetic oligonucleotide
ggcauugcccaggaccccu

SEQ ID NO: 536842 - RNA, 19 nt, Artificial Sequence
  Description of Artificial Sequence: Synthetic oligonucleotide
cagguguuuuggggcaucu

SEQ ID NO: 536843 - RNA, 19 nt, Artificial Sequence
  Description of Artificial Sequence: Synthetic oligonucleotide
cgucuaagguugguguuga

SEQ ID NO: 536844 - RNA, 19 nt, Artificial Sequence
  Description of Artificial Sequence: Synthetic oligonucleotide
gccgcaugcggaauccaua

SEQ ID NO: 536845 - RNA, 19 nt, Artificial Sequence
  Description of Artificial Sequence: Synthetic oligonucleotide
gcucgccaauguacuguac

SEQ ID NO: 536846 - RNA, 19 nt, Artificial Sequence
  Description of Artificial Sequence: Synthetic oligonucleotide
ccagaaccgggaggcugag

SEQ ID NO: 536847 - RNA, 19 nt, Artificial Sequence
  Description of Artificial Sequence: Synthetic oligonucleotide
ccccugagccuuucccuca

SEQ ID NO: 536848 - RNA, 19 nt, Artificial Sequence
  Description of Artificial Sequence: Synthetic oligonucleotide
gcgcgagggcaucacgucu

SEQ ID NO: 536849 - RNA, 19 nt, Artificial Sequence
  Description of Artificial Sequence: Synthetic oligonucleotide
cagaaccgggaggcugaga

SEQ ID NO: 536850 - RNA, 19 nt, Artificial Sequence
  Description of Artificial Sequence: Synthetic oligonucleotide
ccgggaggcugagaacuuc

SEQ ID NO: 536851 - RNA, 19 nt, Artificial Sequence
  Description of Artificial Sequence: Synthetic oligonucleotide
cagcuuuggguagcccugu

SEQ ID NO: 536852 - RNA, 19 nt, Artificial Sequence
  Description of Artificial Sequence: Synthetic oligonucleotide
ccuuuccagcggaacgugu

SEQ ID NO: 536853 - RNA, 19 nt, Artificial Sequence
  Description of Artificial Sequence: Synthetic oligonucleotide
cgugccuuugaggugucaa

SEQ ID NO: 536854 - RNA, 19 nt, Artificial Sequence
  Description of Artificial Sequence: Synthetic oligonucleotide
augcggguauaggccucuu

SEQ ID NO: 536855 - RNA, 19 nt, Artificial Sequence
  Description of Artificial Sequence: Synthetic oligonucleotide
cuguagucucuggcuacuu

SEQ ID NO: 536856 - RNA, 19 nt, Artificial Sequence
  Description of Artificial Sequence: Synthetic oligonucleotide
gcuagccacuguagucucu

SEQ ID NO: 536857 - RNA, 19 nt, Artificial Sequence
  Description of Artificial Sequence: Synthetic oligonucleotide
gcgggcccugcuagcuuug

SEQ ID NO: 536858 - RNA, 19 nt, Artificial Sequence
  Description of Artificial Sequence: Synthetic oligonucleotide
gcuuaucuguaaagcccuu

SEQ ID NO: 536859 - RNA, 19 nt, Artificial Sequence
  Description of Artificial Sequence: Synthetic oligonucleotide
ggccgcaugcggaauccau

SEQ ID NO: 536860 - RNA, 19 nt, Artificial Sequence
  Description of Artificial Sequence: Synthetic oligonucleotide
ggccguugcccagugccau

SEQ ID NO: 536861 - RNA, 19 nt, Artificial Sequence
  Description of Artificial Sequence: Synthetic oligonucleotide
ccauagaacucggccacuu

SEQ ID NO: 536862 - RNA, 19 nt, Artificial Sequence
  Description of Artificial Sequence: Synthetic oligonucleotide
ggaccccucuggggcagaa

SEQ ID NO: 536863 - RNA, 19 nt, Artificial Sequence
  Description of Artificial Sequence: Synthetic oligonucleotide
cccgugcggucucggaagu

SEQ ID NO: 536864 - RNA, 19 nt, Artificial Sequence
  Description of Artificial Sequence: Synthetic oligonucleotide
ccgugcggucucggaagua

SEQ ID NO: 536865 - RNA, 19 nt, Artificial Sequence
  Description of Artificial Sequence: Synthetic oligonucleotide
ccucacgggguggcugguu

SEQ ID NO: 536866 - RNA, 19 nt, Artificial Sequence
  Description of Artificial Sequence: Synthetic oligonucleotide
cgccugccuggaugcgggu

SEQ ID NO: 536867 - RNA, 19 nt, Artificial Sequence
  Description of Artificial Sequence: Synthetic oligonucleotide
aaucuaaaacuccaaacac

SEQ ID NO: 536868 - RNA, 19 nt, Artificial Sequence
  Description of Artificial Sequence: Synthetic oligonucleotide
uuagcuaggccuaagaggg

SEQ ID NO: 536869 - RNA, 19 nt, Artificial Sequence
  Description of Artificial Sequence: Synthetic oligonucleotide
ucagcauucaauuagcuag

SEQ ID NO: 536870 - RNA, 19 nt, Artificial Sequence
  Description of Artificial Sequence: Synthetic oligonucleotide
uauucaauagcauuuauac

SEQ ID NO: 536871 - RNA, 19 nt, Artificial Sequence
  Description of Artificial Sequence: Synthetic oligonucleotide
uauaaaguaagacucacac

SEQ ID NO: 536872 - RNA, 19 nt, Artificial Sequence
  Description of Artificial Sequence: Synthetic oligonucleotide
aauuuagacacacgcauuc

SEQ ID NO: 536873 - RNA, 19 nt, Artificial Sequence
  Description of Artificial Sequence: Synthetic oligonucleotide
uaaucuaaaacuccaaaca

SEQ ID NO: 536874 - RNA, 19 nt, Artificial Sequence
  Description of Artificial Sequence: Synthetic oligonucleotide
gauucgaagggucagaggc

SEQ ID NO: 536875 - RNA, 19 nt, Artificial Sequence
  Description of Artificial Sequence: Synthetic oligonucleotide
agugaaccaagcuugaagg

SEQ ID NO: 536876 - RNA, 19 nt, Artificial Sequence
  Description of Artificial Sequence: Synthetic oligonucleotide
aauuccuacuauucaauag

SEQ ID NO: 536877 - RNA, 19 nt, Artificial Sequence
  Description of Artificial Sequence: Synthetic oligonucleotide
aguccauuaaucuaaaacu

SEQ ID NO: 536878 - RNA, 19 nt, Artificial Sequence
  Description of Artificial Sequence: Synthetic oligonucleotide
uuaauuuagacacacgcau

SEQ ID NO: 536879 - RNA, 19 nt, Artificial Sequence
  Description of Artificial Sequence: Synthetic oligonucleotide
uacacauuaacaaucgcug

SEQ ID NO: 536880 - RNA, 19 nt, Artificial Sequence
  Description of Artificial Sequence: Synthetic oligonucleotide
ucaaguaaaguauugggcu

SEQ ID NO: 536881 - RNA, 19 nt, Artificial Sequence
  Description of Artificial Sequence: Synthetic oligonucleotide
auuagcuaggccuaagagg

SEQ ID NO: 536882 - RNA, 19 nt, Artificial Sequence
  Description of Artificial Sequence: Synthetic oligonucleotide
aaguauugggcuucugccc

SEQ ID NO: 536883 - RNA, 19 nt, Artificial Sequence
  Description of Artificial Sequence: Synthetic oligonucleotide
uuuauacuuaaccaccuca

SEQ ID NO: 536884 - RNA, 19 nt, Artificial Sequence
  Description of Artificial Sequence: Synthetic oligonucleotide
aagacucacacuuauacaa

SEQ ID NO: 536885 - RNA, 19 nt, Artificial Sequence
  Description of Artificial Sequence: Synthetic oligonucleotide
uaguccauuaaucuaaaac

SEQ ID NO: 536886 - RNA, 19 nt, Artificial Sequence
  Description of Artificial Sequence: Synthetic oligonucleotide
aaaaguguaguccauuaau

SEQ ID NO: 536887 - RNA, 19 nt, Artificial Sequence
  Description of Artificial Sequence: Synthetic oligonucleotide
accaguuauagcuacauca

SEQ ID NO: 536888 - RNA, 19 nt, Artificial Sequence
  Description of Artificial Sequence: Synthetic oligonucleotide
acuauugagaauucaggag

SEQ ID NO: 536889 - RNA, 19 nt, Artificial Sequence
  Description of Artificial Sequence: Synthetic oligonucleotide
uuauagcuacaucacauug

SEQ ID NO: 536890 - RNA, 19 nt, Artificial Sequence
  Description of Artificial Sequence: Synthetic oligonucleotide
uccauuaaucuaaaacucc

SEQ ID NO: 536891 - RNA, 19 nt, Artificial Sequence
  Description of Artificial Sequence: Synthetic oligonucleotide
auuaccaacaugccgccac

SEQ ID NO: 536892 - RNA, 19 nt, Artificial Sequence
  Description of Artificial Sequence: Synthetic oligonucleotide
aacaugccgccacacauac

SEQ ID NO: 536893 - RNA, 19 nt, Artificial Sequence
  Description of Artificial Sequence: Synthetic oligonucleotide
cucaaguaaaguauugggc

SEQ ID NO: 536894 - RNA, 19 nt, Artificial Sequence
  Description of Artificial Sequence: Synthetic oligonucleotide
uuaacaaucgcuggggcag

SEQ ID NO: 536895 - RNA, 19 nt, Artificial Sequence
  Description of Artificial Sequence: Synthetic oligonucleotide
auacuuaaccaccucagug

SEQ ID NO: 536896 - RNA, 19 nt, Artificial Sequence
  Description of Artificial Sequence: Synthetic oligonucleotide
agcaagaacaaucucacau

SEQ ID NO: 536897 - RNA, 19 nt, Artificial Sequence
  Description of Artificial Sequence: Synthetic oligonucleotide
aagguaagggaccaguuau

SEQ ID NO: 536898 - RNA, 19 nt, Artificial Sequence
  Description of Artificial Sequence: Synthetic oligonucleotide
uacuuaaccaccucaguga

SEQ ID NO: 536899 - RNA, 19 nt, Artificial Sequence
  Description of Artificial Sequence: Synthetic oligonucleotide
uugcuaugggauucgaagg

SEQ ID NO: 536900 - RNA, 19 nt, Artificial Sequence
  Description of Artificial Sequence: Synthetic oligonucleotide
uauagcuacaucacauugu

SEQ ID NO: 536901 - RNA, 19 nt, Artificial Sequence
  Description of Artificial Sequence: Synthetic oligonucleotide
cauacaacccagucuaacc

SEQ ID NO: 536902 - RNA, 19 nt, Artificial Sequence
  Description of Artificial Sequence: Synthetic oligonucleotide
gagaccacuucuuauggcc

SEQ ID NO: 536903 - RNA, 19 nt, Artificial Sequence
  Description of Artificial Sequence: Synthetic oligonucleotide
uuauaaaguaagacucaca

SEQ ID NO: 536904 - RNA, 19 nt, Artificial Sequence
  Description of Artificial Sequence: Synthetic oligonucleotide
ucccgaagaggcaaagugg

SEQ ID NO: 536905 - RNA, 19 nt, Artificial Sequence
  Description of Artificial Sequence: Synthetic oligonucleotide
cacgcauucauacuucucc

SEQ ID NO: 536906 - RNA, 19 nt, Artificial Sequence
  Description of Artificial Sequence: Synthetic oligonucleotide
uauacagcuaauuccuacu

SEQ ID NO: 536907 - RNA, 19 nt, Artificial Sequence
  Description of Artificial Sequence: Synthetic oligonucleotide
augcuagggauccaagugg

SEQ ID NO: 536908 - RNA, 19 nt, Artificial Sequence
  Description of Artificial Sequence: Synthetic oligonucleotide
auuuauacuuaaccaccuc

SEQ ID NO: 536909 - RNA, 19 nt, Artificial Sequence
  Description of Artificial Sequence: Synthetic oligonucleotide
aacacaauacaaggcuugg

SEQ ID NO: 536910 - RNA, 19 nt, Artificial Sequence
  Description of Artificial Sequence: Synthetic oligonucleotide
ugagccaccgaauagugaa

SEQ ID NO: 536911 - RNA, 19 nt, Artificial Sequence
  Description of Artificial Sequence: Synthetic oligonucleotide
uuagcucagacugaauugc

SEQ ID NO: 536912 - RNA, 19 nt, Artificial Sequence
  Description of Artificial Sequence: Synthetic oligonucleotide
gagauaaauacacuuggaa

SEQ ID NO: 536913 - RNA, 19 nt, Artificial Sequence
  Description of Artificial Sequence: Synthetic oligonucleotide
uuaaaaguguaguccauua

SEQ ID NO: 536914 - RNA, 19 nt, Artificial Sequence
  Description of Artificial Sequence: Synthetic oligonucleotide
uagacacacgcauucauac

SEQ ID NO: 536915 - RNA, 19 nt, Artificial Sequence
  Description of Artificial Sequence: Synthetic oligonucleotide
caauuuagcuuaaauauaa

SEQ ID NO: 536916 - RNA, 19 nt, Artificial Sequence
  Description of Artificial Sequence: Synthetic oligonucleotide
uuauggccaagccaagcag

SEQ ID NO: 536917 - RNA, 19 nt, Artificial Sequence
  Description of Artificial Sequence: Synthetic oligonucleotide
agaggcucuuccuagcagg

SEQ ID NO: 536918 - RNA, 19 nt, Artificial Sequence
  Description of Artificial Sequence: Synthetic oligonucleotide
caaacucgauucaaggagc

SEQ ID NO: 536919 - RNA, 19 nt, Artificial Sequence
  Description of Artificial Sequence: Synthetic oligonucleotide
ugcucaaguaaaguauugg

SEQ ID NO: 536920 - RNA, 19 nt, Artificial Sequence
  Description of Artificial Sequence: Synthetic oligonucleotide
aacccagucuaaccccugc

SEQ ID NO: 536921 - RNA, 19 nt, Artificial Sequence
  Description of Artificial Sequence: Synthetic oligonucleotide
uagugaauggggauggagu

SEQ ID NO: 536922 - RNA, 19 nt, Artificial Sequence
  Description of Artificial Sequence: Synthetic oligonucleotide
cauucaauuagcuaggccu

SEQ ID NO: 536923 - RNA, 19 nt, Artificial Sequence
  Description of Artificial Sequence: Synthetic oligonucleotide
acucgauucaaggagcaac

SEQ ID NO: 536924 - RNA, 19 nt, Artificial Sequence
  Description of Artificial Sequence: Synthetic oligonucleotide
acgcauucauacuucuccc

SEQ ID NO: 536925 - RNA, 19 nt, Artificial Sequence
  Description of Artificial Sequence: Synthetic oligonucleotide
caggcuacuacuucuugcg

SEQ ID NO: 536926 - RNA, 19 nt, Artificial Sequence
  Description of Artificial Sequence: Synthetic oligonucleotide
ugugacugcucaaguaaag

SEQ ID NO: 536927 - RNA, 19 nt, Artificial Sequence
  Description of Artificial Sequence: Synthetic oligonucleotide
uuccuacuauucaauagca

SEQ ID NO: 536928 - RNA, 19 nt, Artificial Sequence
  Description of Artificial Sequence: Synthetic oligonucleotide
cugaaaguuccagaggugg

SEQ ID NO: 536929 - RNA, 19 nt, Artificial Sequence
  Description of Artificial Sequence: Synthetic oligonucleotide
cuggagauaaauacacuug

SEQ ID NO: 536930 - RNA, 19 nt, Artificial Sequence
  Description of Artificial Sequence: Synthetic oligonucleotide
auuaaguccggcauuacca

SEQ ID NO: 536931 - RNA, 19 nt, Artificial Sequence
  Description of Artificial Sequence: Synthetic oligonucleotide
caccgaauagugaaugggg

SEQ ID NO: 536932 - RNA, 19 nt, Artificial Sequence
  Description of Artificial Sequence: Synthetic oligonucleotide
aaccccugccaccagucac

SEQ ID NO: 536933 - RNA, 19 nt, Artificial Sequence
  Description of Artificial Sequence: Synthetic oligonucleotide
agagaccacuucuuauggc

SEQ ID NO: 536934 - RNA, 19 nt, Artificial Sequence
  Description of Artificial Sequence: Synthetic oligonucleotide
cuauacagcuaauuccuac

SEQ ID NO: 536935 - RNA, 19 nt, Artificial Sequence
  Description of Artificial Sequence: Synthetic oligonucleotide
ucaauagcauuuauacuua

SEQ ID NO: 536936 - RNA, 19 nt, Artificial Sequence
  Description of Artificial Sequence: Synthetic oligonucleotide
auuaacaaucgcuggggca

SEQ ID NO: 536937 - RNA, 19 nt, Artificial Sequence
  Description of Artificial Sequence: Synthetic oligonucleotide
uccagauucgggcaaggga

SEQ ID NO: 536938 - RNA, 19 nt, Artificial Sequence
  Description of Artificial Sequence: Synthetic oligonucleotide
agugugacugcucaaguaa

SEQ ID NO: 536939 - RNA, 19 nt, Artificial Sequence
  Description of Artificial Sequence: Synthetic oligonucleotide
gcucaaguaaaguauuggg

SEQ ID NO: 536940 - RNA, 19 nt, Artificial Sequence
  Description of Artificial Sequence: Synthetic oligonucleotide
gaagaagaggcgagcagcg

SEQ ID NO: 536941 - RNA, 19 nt, Artificial Sequence
  Description of Artificial Sequence: Synthetic oligonucleotide
uuuagacacacgcauucau

SEQ ID NO: 536942 - RNA, 19 nt, Artificial Sequence
  Description of Artificial Sequence: Synthetic oligonucleotide
caucccuacaggcauuugg

SEQ ID NO: 536943 - RNA, 19 nt, Artificial Sequence
  Description of Artificial Sequence: Synthetic oligonucleotide
ucucacauucauacuaaaa

SEQ ID NO: 536944 - RNA, 19 nt, Artificial Sequence
  Description of Artificial Sequence: Synthetic oligonucleotide
cauuaaguccggcauuacc

SEQ ID NO: 536945 - RNA, 19 nt, Artificial Sequence
  Description of Artificial Sequence: Synthetic oligonucleotide
uuuauggaggcuggacugg

SEQ ID NO: 536946 - RNA, 19 nt, Artificial Sequence
  Description of Artificial Sequence: Synthetic oligonucleotide
agagacaagaggcaggcua

SEQ ID NO: 536947 - RNA, 19 nt, Artificial Sequence
  Description of Artificial Sequence: Synthetic oligonucleotide
cuaggcuacacauuaacaa

SEQ ID NO: 536948 - RNA, 19 nt, Artificial Sequence
  Description of Artificial Sequence: Synthetic oligonucleotide
auagcuacaucacauuguu

SEQ ID NO: 536949 - RNA, 19 nt, Artificial Sequence
  Description of Artificial Sequence: Synthetic oligonucleotide
gagaauucaggagucagca

SEQ ID NO: 536950 - RNA, 19 nt, Artificial Sequence
  Description of Artificial Sequence: Synthetic oligonucleotide
uaggcuacacauuaacaau

SEQ ID NO: 536951 - RNA, 19 nt, Artificial Sequence
  Description of Artificial Sequence: Synthetic oligonucleotide
aauacaaggcuuggaaaau

SEQ ID NO: 536952 - RNA, 19 nt, Artificial Sequence
  Description of Artificial Sequence: Synthetic oligonucleotide
uacaacccagucuaacccc

SEQ ID NO: 536953 - RNA, 19 nt, Artificial Sequence
  Description of Artificial Sequence: Synthetic oligonucleotide
ugaaaguuccagaggugga

SEQ ID NO: 536954 - RNA, 19 nt, Artificial Sequence
  Description of Artificial Sequence: Synthetic oligonucleotide
uggggugucgggcagguga

SEQ ID NO: 536955 - RNA, 19 nt, Artificial Sequence
  Description of Artificial Sequence: Synthetic oligonucleotide
uguagugggaagcccuagc

SEQ ID NO: 536956 - RNA, 19 nt, Artificial Sequence
  Description of Artificial Sequence: Synthetic oligonucleotide
acaauacaaggcuuggaaa

SEQ ID NO: 536957 - RNA, 19 nt, Artificial Sequence
  Description of Artificial Sequence: Synthetic oligonucleotide
cagugaaccaagcuugaag

SEQ ID NO: 536958 - RNA, 19 nt, Artificial Sequence
  Description of Artificial Sequence: Synthetic oligonucleotide
caauacaaggcuuggaaaa

SEQ ID NO: 536959 - RNA, 19 nt, Artificial Sequence
  Description of Artificial Sequence: Synthetic oligonucleotide
ugggcuagguuugcuaugg

SEQ ID NO: 536960 - RNA, 19 nt, Artificial Sequence
  Description of Artificial Sequence: Synthetic oligonucleotide
agcuaggccuaagagggcc

SEQ ID NO: 536961 - RNA, 19 nt, Artificial Sequence
  Description of Artificial Sequence: Synthetic oligonucleotide
agcacggacaaaugugcuc

SEQ ID NO: 536962 - RNA, 19 nt, Artificial Sequence
  Description of Artificial Sequence: Synthetic oligonucleotide
uaauuuagacacacgcauu

SEQ ID NO: 536963 - RNA, 19 nt, Artificial Sequence
  Description of Artificial Sequence: Synthetic oligonucleotide
uccuacacaagguaugcua

SEQ ID NO: 536964 - RNA, 19 nt, Artificial Sequence
  Description of Artificial Sequence: Synthetic oligonucleotide
acuucucccaaagaggaug

SEQ ID NO: 536965 - RNA, 19 nt, Artificial Sequence
  Description of Artificial Sequence: Synthetic oligonucleotide
cacaccgaggcuaugccag

SEQ ID NO: 536966 - RNA, 19 nt, Artificial Sequence
  Description of Artificial Sequence: Synthetic oligonucleotide
ucccgcgccaaugaggugg

SEQ ID NO: 536967 - RNA, 19 nt, Artificial Sequence
  Description of Artificial Sequence: Synthetic oligonucleotide
guagugggaagcccuagcc

SEQ ID NO: 536968 - RNA, 19 nt, Artificial Sequence
  Description of Artificial Sequence: Synthetic oligonucleotide
ugacugcucaaguaaagua

SEQ ID NO: 536969 - RNA, 19 nt, Artificial Sequence
  Description of Artificial Sequence: Synthetic oligonucleotide
uuaaguccggcauuaccaa

SEQ ID NO: 536970 - RNA, 19 nt, Artificial Sequence
  Description of Artificial Sequence: Synthetic oligonucleotide
cuauugagaauucaggagu

SEQ ID NO: 536971 - RNA, 19 nt, Artificial Sequence
  Description of Artificial Sequence: Synthetic oligonucleotide
agaggcaggcuacuacuuc

SEQ ID NO: 536972 - RNA, 19 nt, Artificial Sequence
  Description of Artificial Sequence: Synthetic oligonucleotide
aggcuacacauuaacaauc

SEQ ID NO: 536973 - RNA, 19 nt, Artificial Sequence
  Description of Artificial Sequence: Synthetic oligonucleotide
cauuugggacuugaggucc

SEQ ID NO: 536974 - RNA, 19 nt, Artificial Sequence
  Description of Artificial Sequence: Synthetic oligonucleotide
uucagcauucaauuagcua

SEQ ID NO: 536975 - RNA, 19 nt, Artificial Sequence
  Description of Artificial Sequence: Synthetic oligonucleotide
gcauuuauacuuaaccacc

SEQ ID NO: 536976 - RNA, 19 nt, Artificial Sequence
  Description of Artificial Sequence: Synthetic oligonucleotide
aaacacuauugagaauuca

SEQ ID NO: 536977 - RNA, 19 nt, Artificial Sequence
  Description of Artificial Sequence: Synthetic oligonucleotide
ugcuagggauccaaguggu

SEQ ID NO: 536978 - RNA, 19 nt, Artificial Sequence
  Description of Artificial Sequence: Synthetic oligonucleotide
cucagcuacgcucacagga

SEQ ID NO: 536979 - RNA, 19 nt, Artificial Sequence
  Description of Artificial Sequence: Synthetic oligonucleotide
ucagcuacgcucacaggaa

SEQ ID NO: 536980 - RNA, 19 nt, Artificial Sequence
  Description of Artificial Sequence: Synthetic oligonucleotide
guagcaccaagcccaaagc

SEQ ID NO: 536981 - RNA, 19 nt, Artificial Sequence
  Description of Artificial Sequence: Synthetic oligonucleotide
ggcauaacuauacagcuaa

SEQ ID NO: 536982 - RNA, 19 nt, Artificial Sequence
  Description of Artificial Sequence: Synthetic oligonucleotide
uguaguccauuaaucuaaa

SEQ ID NO: 536983 - RNA, 19 nt, Artificial Sequence
  Description of Artificial Sequence: Synthetic oligonucleotide
uacagcuaauuccuacuau

SEQ ID NO: 536984 - RNA, 19 nt, Artificial Sequence
  Description of Artificial Sequence: Synthetic oligonucleotide
ggcuacuacuucuugcggg

SEQ ID NO: 536985 - RNA, 19 nt, Artificial Sequence
  Description of Artificial Sequence: Synthetic oligonucleotide
caaucucacauucauacua

SEQ ID NO: 536986 - RNA, 19 nt, Artificial Sequence
  Description of Artificial Sequence: Synthetic oligonucleotide
ucuuauggccaagccaagc

SEQ ID NO: 536987 - RNA, 19 nt, Artificial Sequence
  Description of Artificial Sequence: Synthetic oligonucleotide
gauggaguagagcugccaa

SEQ ID NO: 536988 - RNA, 19 nt, Artificial Sequence
  Description of Artificial Sequence: Synthetic oligonucleotide
caugccgccacacauacaa

SEQ ID NO: 536989 - RNA, 19 nt, Artificial Sequence
  Description of Artificial Sequence: Synthetic oligonucleotide
acuuaaccaccucagugaa

SEQ ID NO: 536990 - RNA, 19 nt, Artificial Sequence
  Description of Artificial Sequence: Synthetic oligonucleotide
aaguccggcauuaccaaca

SEQ ID NO: 536991 - RNA, 19 nt, Artificial Sequence
  Description of Artificial Sequence: Synthetic oligonucleotide
acaaagguaagggaccagu

SEQ ID NO: 536992 - RNA, 19 nt, Artificial Sequence
  Description of Artificial Sequence: Synthetic oligonucleotide
acuauucaauagcauuuau

SEQ ID NO: 536993 - RNA, 19 nt, Artificial Sequence
  Description of Artificial Sequence: Synthetic oligonucleotide
ucaauuagcuaggccuaag

SEQ ID NO: 536994 - RNA, 19 nt, Artificial Sequence
  Description of Artificial Sequence: Synthetic oligonucleotide
cuuauggccaagccaagca

SEQ ID NO: 536995 - RNA, 19 nt, Artificial Sequence
  Description of Artificial Sequence: Synthetic oligonucleotide
cauccuacacaagguaugc

SEQ ID NO: 536996 - RNA, 19 nt, Artificial Sequence
  Description of Artificial Sequence: Synthetic oligonucleotide
uagugggaagcccuagccu

SEQ ID NO: 536997 - RNA, 19 nt, Artificial Sequence
  Description of Artificial Sequence: Synthetic oligonucleotide
uucuuauggccaagccaag

SEQ ID NO: 536998 - RNA, 19 nt, Artificial Sequence
  Description of Artificial Sequence: Synthetic oligonucleotide
agaugcccuugccuguuac

SEQ ID NO: 536999 - RNA, 19 nt, Artificial Sequence
  Description of Artificial Sequence: Synthetic oligonucleotide
uuggaucccgcgccaauga

SEQ ID NO: 537000 - RNA, 19 nt, Artificial Sequence
  Description of Artificial Sequence: Synthetic oligonucleotide
cagcuagaagcaguggugg

SEQ ID NO: 537001 - RNA, 19 nt, Artificial Sequence
  Description of Artificial Sequence: Synthetic oligonucleotide
uuaccaacaugccgccaca

SEQ ID NO: 537002 - RNA, 19 nt, Artificial Sequence
  Description of Artificial Sequence: Synthetic oligonucleotide
aaacucgauucaaggagca

SEQ ID NO: 537003 - RNA, 19 nt, Artificial Sequence
  Description of Artificial Sequence: Synthetic oligonucleotide
ugacauaagcaagaacaau

SEQ ID NO: 537004 - RNA, 19 nt, Artificial Sequence
  Description of Artificial Sequence: Synthetic oligonucleotide
ccaggcuaaguccugagcc

SEQ ID NO: 537005 - RNA, 19 nt, Artificial Sequence
  Description of Artificial Sequence: Synthetic oligonucleotide
auucgggcaagggaugggg

SEQ ID NO: 537006 - RNA, 19 nt, Artificial Sequence
  Description of Artificial Sequence: Synthetic oligonucleotide
uccuacuauucaauagcau

SEQ ID NO: 537007 - RNA, 19 nt, Artificial Sequence
  Description of Artificial Sequence: Synthetic oligonucleotide
ggcuacacauuaacaaucg

SEQ ID NO: 537008 - RNA, 19 nt, Artificial Sequence
  Description of Artificial Sequence: Synthetic oligonucleotide
cagucuaaccccugccacc

SEQ ID NO: 537009 - RNA, 19 nt, Artificial Sequence
  Description of Artificial Sequence: Synthetic oligonucleotide
aggcuacuacuucuugcgg

SEQ ID NO: 537010 - RNA, 19 nt, Artificial Sequence
  Description of Artificial Sequence: Synthetic oligonucleotide
aggacaauauguacagaug

SEQ ID NO: 537011 - RNA, 19 nt, Artificial Sequence
  Description of Artificial Sequence: Synthetic oligonucleotide
gguaagggaccaguuauag

SEQ ID NO: 537012 - RNA, 19 nt, Artificial Sequence
  Description of Artificial Sequence: Synthetic oligonucleotide
ugcugagccaccgaauagu

SEQ ID NO: 537013 - RNA, 19 nt, Artificial Sequence
  Description of Artificial Sequence: Synthetic oligonucleotide
uacuauucaauagcauuua

SEQ ID NO: 537014 - RNA, 19 nt, Artificial Sequence
  Description of Artificial Sequence: Synthetic oligonucleotide
ggacaauauguacagaugu

SEQ ID NO: 537015 - RNA, 19 nt, Artificial Sequence
  Description of Artificial Sequence: Synthetic oligonucleotide
ccuacacaagguaugcuag

SEQ ID NO: 537016 - RNA, 19 nt, Artificial Sequence
  Description of Artificial Sequence: Synthetic oligonucleotide
ccaguuauagcuacaucac

SEQ ID NO: 537017 - RNA, 19 nt, Artificial Sequence
  Description of Artificial Sequence: Synthetic oligonucleotide
uacuacuucuugcggguau

SEQ ID NO: 537018 - RNA, 19 nt, Artificial Sequence
  Description of Artificial Sequence: Synthetic oligonucleotide
gcuaauuccuacuauucaa

SEQ ID NO: 537019 - RNA, 19 nt, Artificial Sequence
  Description of Artificial Sequence: Synthetic oligonucleotide
ucgcugucgagccccuggg

SEQ ID NO: 537020 - RNA, 19 nt, Artificial Sequence
  Description of Artificial Sequence: Synthetic oligonucleotide
aagauucacugcccuuuaa

SEQ ID NO: 537021 - RNA, 19 nt, Artificial Sequence
  Description of Artificial Sequence: Synthetic oligonucleotide
uaaguccggcauuaccaac

SEQ ID NO: 537022 - RNA, 19 nt, Artificial Sequence
  Description of Artificial Sequence: Synthetic oligonucleotide
ggcaaaguggcccgugggg

SEQ ID NO: 537023 - RNA, 19 nt, Artificial Sequence
  Description of Artificial Sequence: Synthetic oligonucleotide
auuuagacacacgcauuca

SEQ ID NO: 537024 - RNA, 19 nt, Artificial Sequence
  Description of Artificial Sequence: Synthetic oligonucleotide
accgaggcuaugccaggac

SEQ ID NO: 537025 - RNA, 19 nt, Artificial Sequence
  Description of Artificial Sequence: Synthetic oligonucleotide
caaucgcuggggcagcaag

SEQ ID NO: 537026 - RNA, 19 nt, Artificial Sequence
  Description of Artificial Sequence: Synthetic oligonucleotide
uggaucccgcgccaaugag

SEQ ID NO: 537027 - RNA, 19 nt, Artificial Sequence
  Description of Artificial Sequence: Synthetic oligonucleotide
ggaaagagaaaagcuagga

SEQ ID NO: 537028 - RNA, 19 nt, Artificial Sequence
  Description of Artificial Sequence: Synthetic oligonucleotide
accaccuauccccaucccu

SEQ ID NO: 537029 - RNA, 19 nt, Artificial Sequence
  Description of Artificial Sequence: Synthetic oligonucleotide
acgcggugccacuuucagc

SEQ ID NO: 537030 - RNA, 19 nt, Artificial Sequence
  Description of Artificial Sequence: Synthetic oligonucleotide
cuacuauucaauagcauuu

SEQ ID NO: 537031 - RNA, 19 nt, Artificial Sequence
  Description of Artificial Sequence: Synthetic oligonucleotide
cuaagagggcccaggcgac

SEQ ID NO: 537032 - RNA, 19 nt, Artificial Sequence
  Description of Artificial Sequence: Synthetic oligonucleotide
cccgaagaggcaaaguggc

SEQ ID NO: 537033 - RNA, 19 nt, Artificial Sequence
  Description of Artificial Sequence: Synthetic oligonucleotide
aguagagcugccaaacaaa

SEQ ID NO: 537034 - RNA, 19 nt, Artificial Sequence
  Description of Artificial Sequence: Synthetic oligonucleotide
cacacaccgaggcuaugcc

SEQ ID NO: 537035 - RNA, 19 nt, Artificial Sequence
  Description of Artificial Sequence: Synthetic oligonucleotide
agcgugagcacggacaaau

SEQ ID NO: 537036 - RNA, 19 nt, Artificial Sequence
  Description of Artificial Sequence: Synthetic oligonucleotide
gacccuuuugggaaaacaa

SEQ ID NO: 537037 - RNA, 19 nt, Artificial Sequence
  Description of Artificial Sequence: Synthetic oligonucleotide
uuccuagcaggugcugagg

SEQ ID NO: 537038 - RNA, 19 nt, Artificial Sequence
  Description of Artificial Sequence: Synthetic oligonucleotide
ucccuacaggcauuuggga

SEQ ID NO: 537039 - RNA, 19 nt, Artificial Sequence
  Description of Artificial Sequence: Synthetic oligonucleotide
agucuaaccccugccacca

SEQ ID NO: 537040 - RNA, 19 nt, Artificial Sequence
  Description of Artificial Sequence: Synthetic oligonucleotide
gauucgggcaagggauggg

SEQ ID NO: 537041 - RNA, 19 nt, Artificial Sequence
  Description of Artificial Sequence: Synthetic oligonucleotide
caaaguggcccguggggug

SEQ ID NO: 537042 - RNA, 19 nt, Artificial Sequence
  Description of Artificial Sequence: Synthetic oligonucleotide
uaauuagcucagacugaau

SEQ ID NO: 537043 - RNA, 19 nt, Artificial Sequence
  Description of Artificial Sequence: Synthetic oligonucleotide
accgaauagugaaugggga

SEQ ID NO: 537044 - RNA, 19 nt, Artificial Sequence
  Description of Artificial Sequence: Synthetic oligonucleotide
gguaugcugccuucgggcc

SEQ ID NO: 537045 - RNA, 19 nt, Artificial Sequence
  Description of Artificial Sequence: Synthetic oligonucleotide
gaggcuuccugugaagauc

SEQ ID NO: 537046 - RNA, 19 nt, Artificial Sequence
  Description of Artificial Sequence: Synthetic oligonucleotide
cuuaccugaggcacaagua

SEQ ID NO: 537047 - RNA, 19 nt, Artificial Sequence
  Description of Artificial Sequence: Synthetic oligonucleotide
augggauucgaagggucag

SEQ ID NO: 537048 - RNA, 19 nt, Artificial Sequence
  Description of Artificial Sequence: Synthetic oligonucleotide
ugccgccacacauacaauu

SEQ ID NO: 537049 - RNA, 19 nt, Artificial Sequence
  Description of Artificial Sequence: Synthetic oligonucleotide
aucgcuggggcagcaagag

SEQ ID NO: 537050 - RNA, 19 nt, Artificial Sequence
  Description of Artificial Sequence: Synthetic oligonucleotide
auucaauuagcuaggccua

SEQ ID NO: 537051 - RNA, 19 nt, Artificial Sequence
  Description of Artificial Sequence: Synthetic oligonucleotide
uucaauuagcuaggccuaa

SEQ ID NO: 537052 - RNA, 19 nt, Artificial Sequence
  Description of Artificial Sequence: Synthetic oligonucleotide
ugcggguaugcugccuucg

SEQ ID NO: 537053 - RNA, 19 nt, Artificial Sequence
  Description of Artificial Sequence: Synthetic oligonucleotide
gcauucaauuagcuaggcc

SEQ ID NO: 537054 - RNA, 19 nt, Artificial Sequence
  Description of Artificial Sequence: Synthetic oligonucleotide
gaccaguuauagcuacauc

SEQ ID NO: 537055 - RNA, 19 nt, Artificial Sequence
  Description of Artificial Sequence: Synthetic oligonucleotide
acacaccgaggcuaugcca

SEQ ID NO: 537056 - RNA, 19 nt, Artificial Sequence
  Description of Artificial Sequence: Synthetic oligonucleotide
ucgauucaaggagcaacac

SEQ ID NO: 537057 - RNA, 19 nt, Artificial Sequence
  Description of Artificial Sequence: Synthetic oligonucleotide
uaaccccugccaccaguca

SEQ ID NO: 537058 - RNA, 19 nt, Artificial Sequence
  Description of Artificial Sequence: Synthetic oligonucleotide
uccuccaaacucgauucaa

SEQ ID NO: 537059 - RNA, 19 nt, Artificial Sequence
  Description of Artificial Sequence: Synthetic oligonucleotide
ggagagacccugaaggaac

SEQ ID NO: 537060 - RNA, 19 nt, Artificial Sequence
  Description of Artificial Sequence: Synthetic oligonucleotide
acugcucaaguaaaguauu

SEQ ID NO: 537061 - RNA, 19 nt, Artificial Sequence
  Description of Artificial Sequence: Synthetic oligonucleotide
cacgcggugccacuuucag

SEQ ID NO: 537062 - RNA, 19 nt, Artificial Sequence
  Description of Artificial Sequence: Synthetic oligonucleotide
gccaccgaauagugaaugg

SEQ ID NO: 537063 - RNA, 19 nt, Artificial Sequence
  Description of Artificial Sequence: Synthetic oligonucleotide
ccauccuacacaagguaug

SEQ ID NO: 537064 - RNA, 19 nt, Artificial Sequence
  Description of Artificial Sequence: Synthetic oligonucleotide
uagcuaggccuaagagggc

SEQ ID NO: 537065 - RNA, 19 nt, Artificial Sequence
  Description of Artificial Sequence: Synthetic oligonucleotide
gauccaaguggugcgggga

SEQ ID NO: 537066 - RNA, 19 nt, Artificial Sequence
  Description of Artificial Sequence: Synthetic oligonucleotide
guaugcuagggauccaagu

SEQ ID NO: 537067 - RNA, 19 nt, Artificial Sequence
  Description of Artificial Sequence: Synthetic oligonucleotide
ucacgcggugccacuuuca

SEQ ID NO: 537068 - RNA, 19 nt, Artificial Sequence
  Description of Artificial Sequence: Synthetic oligonucleotide
uguggcugucacgcggugc

SEQ ID NO: 537069 - RNA, 19 nt, Artificial Sequence
  Description of Artificial Sequence: Synthetic oligonucleotide
ugggauucgaagggucaga

SEQ ID NO: 537070 - RNA, 19 nt, Artificial Sequence
  Description of Artificial Sequence: Synthetic oligonucleotide
uuccuuaccugaggcacaa

SEQ ID NO: 537071 - RNA, 19 nt, Artificial Sequence
  Description of Artificial Sequence: Synthetic oligonucleotide
auacaaggcuuggaaaaua

SEQ ID NO: 537072 - RNA, 19 nt, Artificial Sequence
  Description of Artificial Sequence: Synthetic oligonucleotide
ccaccgaauagugaauggg

SEQ ID NO: 537073 - RNA, 19 nt, Artificial Sequence
  Description of Artificial Sequence: Synthetic oligonucleotide
ccuauccccaucccuacag

SEQ ID NO: 537074 - RNA, 19 nt, Artificial Sequence
  Description of Artificial Sequence: Synthetic oligonucleotide
acacgcauucauacuucuc

SEQ ID NO: 537075 - RNA, 19 nt, Artificial Sequence
  Description of Artificial Sequence: Synthetic oligonucleotide
ucagugaaccaagcuugaa

SEQ ID NO: 537076 - RNA, 19 nt, Artificial Sequence
  Description of Artificial Sequence: Synthetic oligonucleotide
aggagagacccugaaggaa

SEQ ID NO: 537077 - RNA, 19 nt, Artificial Sequence
  Description of Artificial Sequence: Synthetic oligonucleotide
caccuauccccaucccuac

SEQ ID NO: 537078 - RNA, 19 nt, Artificial Sequence
  Description of Artificial Sequence: Synthetic oligonucleotide
caagaggcaggcuacuacu

SEQ ID NO: 537079 - RNA, 19 nt, Artificial Sequence
  Description of Artificial Sequence: Synthetic oligonucleotide
cccuacaggcauuugggac

SEQ ID NO: 537080 - RNA, 19 nt, Artificial Sequence
  Description of Artificial Sequence: Synthetic oligonucleotide
ucgggccugaagucgcugu

SEQ ID NO: 537081 - RNA, 19 nt, Artificial Sequence
  Description of Artificial Sequence: Synthetic oligonucleotide
aacaaucgcuggggcagca

SEQ ID NO: 537082 - RNA, 19 nt, Artificial Sequence
  Description of Artificial Sequence: Synthetic oligonucleotide
aacucgauucaaggagcaa

SEQ ID NO: 537083 - RNA, 19 nt, Artificial Sequence
  Description of Artificial Sequence: Synthetic oligonucleotide
acaacccagucuaaccccu

SEQ ID NO: 537084 - RNA, 19 nt, Artificial Sequence
  Description of Artificial Sequence: Synthetic oligonucleotide
gaucccgcgccaaugaggu

SEQ ID NO: 537085 - RNA, 19 nt, Artificial Sequence
  Description of Artificial Sequence: Synthetic oligonucleotide
gcauuaccaacaugccgcc

SEQ ID NO: 537086 - RNA, 19 nt, Artificial Sequence
  Description of Artificial Sequence: Synthetic oligonucleotide
cugucgagccccugggguc

SEQ ID NO: 537087 - RNA, 19 nt, Artificial Sequence
  Description of Artificial Sequence: Synthetic oligonucleotide
gccuaggcuacacauuaac

SEQ ID NO: 537088 - RNA, 19 nt, Artificial Sequence
  Description of Artificial Sequence: Synthetic oligonucleotide
ggaucccgcgccaaugagg

SEQ ID NO: 537089 - RNA, 19 nt, Artificial Sequence
  Description of Artificial Sequence: Synthetic oligonucleotide
gggauucgaagggucagag

SEQ ID NO: 537090 - RNA, 19 nt, Artificial Sequence
  Description of Artificial Sequence: Synthetic oligonucleotide
cuuccuuaccugaggcaca

SEQ ID NO: 537091 - RNA, 19 nt, Artificial Sequence
  Description of Artificial Sequence: Synthetic oligonucleotide
uccaaguggugcggggaug

SEQ ID NO: 537092 - RNA, 19 nt, Artificial Sequence
  Description of Artificial Sequence: Synthetic oligonucleotide
cagcuacgcucacaggaac

SEQ ID NO: 537093 - RNA, 19 nt, Artificial Sequence
  Description of Artificial Sequence: Synthetic oligonucleotide
ugcggggauggccgccuag

SEQ ID NO: 537094 - RNA, 19 nt, Artificial Sequence
  Description of Artificial Sequence: Synthetic oligonucleotide
aagaggcaggcuacuacuu

SEQ ID NO: 537095 - RNA, 19 nt, Artificial Sequence
  Description of Artificial Sequence: Synthetic oligonucleotide
aagccuccgcugccaggag

SEQ ID NO: 537096 - RNA, 19 nt, Artificial Sequence
  Description of Artificial Sequence: Synthetic oligonucleotide
ugucgagccccuggggucu

SEQ ID NO: 537097 - RNA, 19 nt, Artificial Sequence
  Description of Artificial Sequence: Synthetic oligonucleotide
auacaaucccgaagaggca

SEQ ID NO: 537098 - RNA, 19 nt, Artificial Sequence
  Description of Artificial Sequence: Synthetic oligonucleotide
gcauucauacuucucccaa

SEQ ID NO: 537099 - RNA, 19 nt, Artificial Sequence
  Description of Artificial Sequence: Synthetic oligonucleotide
cugccuucgggccugaagu

SEQ ID NO: 537100 - RNA, 19 nt, Artificial Sequence
  Description of Artificial Sequence: Synthetic oligonucleotide
gcacggacaaaugugcuca

SEQ ID NO: 537101 - RNA, 19 nt, Artificial Sequence
  Description of Artificial Sequence: Synthetic oligonucleotide
cgaauagugaauggggaug

SEQ ID NO: 537102 - RNA, 19 nt, Artificial Sequence
  Description of Artificial Sequence: Synthetic oligonucleotide
ugccuucgggccugaaguc

SEQ ID NO: 537103 - RNA, 19 nt, Artificial Sequence
  Description of Artificial Sequence: Synthetic oligonucleotide
uaagagggcccaggcgaca

SEQ ID NO: 537104 - RNA, 19 nt, Artificial Sequence
  Description of Artificial Sequence: Synthetic oligonucleotide
agcuacgcucacaggaacu

SEQ ID NO: 537105 - RNA, 19 nt, Artificial Sequence
  Description of Artificial Sequence: Synthetic oligonucleotide
ccagucuaaccccugccac

SEQ ID NO: 537106 - RNA, 19 nt, Artificial Sequence
  Description of Artificial Sequence: Synthetic oligonucleotide
cuguagugggaagcccuag

SEQ ID NO: 537107 - RNA, 19 nt, Artificial Sequence
  Description of Artificial Sequence: Synthetic oligonucleotide
ccuaggcuacacauuaaca

SEQ ID NO: 537108 - RNA, 19 nt, Artificial Sequence
  Description of Artificial Sequence: Synthetic oligonucleotide
accuauccccaucccuaca

SEQ ID NO: 537109 - RNA, 19 nt, Artificial Sequence
  Description of Artificial Sequence: Synthetic oligonucleotide
ccgaggcuaugccaggacg

SEQ ID NO: 537110 - RNA, 19 nt, Artificial Sequence
  Description of Artificial Sequence: Synthetic oligonucleotide
gacgccucuucaggggccc

SEQ ID NO: 537111 - RNA, 19 nt, Artificial Sequence
  Description of Artificial Sequence: Synthetic oligonucleotide
uaccaacaugccgccacac

SEQ ID NO: 537112 - RNA, 19 nt, Artificial Sequence
  Description of Artificial Sequence: Synthetic oligonucleotide
auccuacacaagguaugcu

SEQ ID NO: 537113 - RNA, 19 nt, Artificial Sequence
  Description of Artificial Sequence: Synthetic oligonucleotide
ccuacuauucaauagcauu

SEQ ID NO: 537114 - RNA, 19 nt, Artificial Sequence
  Description of Artificial Sequence: Synthetic oligonucleotide
cacggacaaaugugcucac

SEQ ID NO: 537115 - RNA, 19 nt, Artificial Sequence
  Description of Artificial Sequence: Synthetic oligonucleotide
caacccagucuaaccccug

SEQ ID NO: 537116 - RNA, 19 nt, Artificial Sequence
  Description of Artificial Sequence: Synthetic oligonucleotide
aauugcagggaggccccuu

SEQ ID NO: 537117 - RNA, 19 nt, Artificial Sequence
  Description of Artificial Sequence: Synthetic oligonucleotide
ccuucgggccugaagucgc

SEQ ID NO: 537118 - RNA, 19 nt, Artificial Sequence
  Description of Artificial Sequence: Synthetic oligonucleotide
cgcggugccacuuucagca

SEQ ID NO: 537119 - RNA, 19 nt, Artificial Sequence
  Description of Artificial Sequence: Synthetic oligonucleotide
acuauacagcuaauuccua

SEQ ID NO: 537120 - RNA, 19 nt, Artificial Sequence
  Description of Artificial Sequence: Synthetic oligonucleotide
ugucacgcggugccacuuu

SEQ ID NO: 537121 - RNA, 19 nt, Artificial Sequence
  Description of Artificial Sequence: Synthetic oligonucleotide
ccggcauuaccaacaugcc

SEQ ID NO: 537122 - RNA, 19 nt, Artificial Sequence
  Description of Artificial Sequence: Synthetic oligonucleotide
ucuugcggguaugcugccu

SEQ ID NO: 537123 - RNA, 19 nt, Artificial Sequence
  Description of Artificial Sequence: Synthetic oligonucleotide
cagucugccugccccagga

SEQ ID NO: 537124 - RNA, 19 nt, Artificial Sequence
  Description of Artificial Sequence: Synthetic oligonucleotide
gcugaaaguuccagaggug

SEQ ID NO: 537125 - RNA, 19 nt, Artificial Sequence
  Description of Artificial Sequence: Synthetic oligonucleotide
gugacugcucaaguaaagu

SEQ ID NO: 537126 - RNA, 19 nt, Artificial Sequence
  Description of Artificial Sequence: Synthetic oligonucleotide
acggacaaaugugcucaca

SEQ ID NO: 537127 - RNA, 19 nt, Artificial Sequence
  Description of Artificial Sequence: Synthetic oligonucleotide
guuugcuaugggauucgaa

SEQ ID NO: 537128 - RNA, 19 nt, Artificial Sequence
  Description of Artificial Sequence: Synthetic oligonucleotide
gcggguaugcugccuucgg

SEQ ID NO: 537129 - RNA, 19 nt, Artificial Sequence
  Description of Artificial Sequence: Synthetic oligonucleotide
gugugacugcucaaguaaa

SEQ ID NO: 537130 - RNA, 19 nt, Artificial Sequence
  Description of Artificial Sequence: Synthetic oligonucleotide
aggcauaacuauacagcua

SEQ ID NO: 537131 - RNA, 19 nt, Artificial Sequence
  Description of Artificial Sequence: Synthetic oligonucleotide
uugcggguaugcugccuuc

SEQ ID NO: 537132 - RNA, 19 nt, Artificial Sequence
  Description of Artificial Sequence: Synthetic oligonucleotide
ccauacaacccagucuaac

SEQ ID NO: 537133 - RNA, 19 nt, Artificial Sequence
  Description of Artificial Sequence: Synthetic oligonucleotide
gccaggcuaaguccugagc

SEQ ID NO: 537134 - RNA, 19 nt, Artificial Sequence
  Description of Artificial Sequence: Synthetic oligonucleotide
gcaagaacaaucucacauu

SEQ ID NO: 537135 - RNA, 19 nt, Artificial Sequence
  Description of Artificial Sequence: Synthetic oligonucleotide
uggccgccuaggcuacaca

SEQ ID NO: 537136 - RNA, 19 nt, Artificial Sequence
  Description of Artificial Sequence: Synthetic oligonucleotide
uucgggccugaagucgcug

SEQ ID NO: 537137 - RNA, 19 nt, Artificial Sequence
  Description of Artificial Sequence: Synthetic oligonucleotide
caagauucacugcccuuua

SEQ ID NO: 537138 - RNA, 19 nt, Artificial Sequence
  Description of Artificial Sequence: Synthetic oligonucleotide
ccgaagaggcaaaguggcc

SEQ ID NO: 537139 - RNA, 19 nt, Artificial Sequence
  Description of Artificial Sequence: Synthetic oligonucleotide
gucacgcggugccacuuuc

SEQ ID NO: 537140 - RNA, 19 nt, Artificial Sequence
  Description of Artificial Sequence: Synthetic oligonucleotide
gggccugaagucgcugucg

SEQ ID NO: 537141 - RNA, 19 nt, Artificial Sequence
  Description of Artificial Sequence: Synthetic oligonucleotide
gcgacauuaaguccggcau

SEQ ID NO: 537142 - RNA, 19 nt, Artificial Sequence
  Description of Artificial Sequence: Synthetic oligonucleotide
ccagauucgggcaagggau

SEQ ID NO: 537143 - RNA, 19 nt, Artificial Sequence
  Description of Artificial Sequence: Synthetic oligonucleotide
ccuacaggcauuugggacu

SEQ ID NO: 537144 - RNA, 19 nt, Artificial Sequence
  Description of Artificial Sequence: Synthetic oligonucleotide
caaagguaagggaccaguu

SEQ ID NO: 537145 - RNA, 19 nt, Artificial Sequence
  Description of Artificial Sequence: Synthetic oligonucleotide
gggaggaccaacagaggga

SEQ ID NO: 537146 - RNA, 19 nt, Artificial Sequence
  Description of Artificial Sequence: Synthetic oligonucleotide
gcuacgcucacaggaacuc

SEQ ID NO: 537147 - RNA, 19 nt, Artificial Sequence
  Description of Artificial Sequence: Synthetic oligonucleotide
gguccagauucgggcaagg

SEQ ID NO: 537148 - RNA, 19 nt, Artificial Sequence
  Description of Artificial Sequence: Synthetic oligonucleotide
gcuaaguccugagccacca

SEQ ID NO: 537149 - RNA, 19 nt, Artificial Sequence
  Description of Artificial Sequence: Synthetic oligonucleotide
agguaagggaccaguuaua

SEQ ID NO: 537150 - RNA, 19 nt, Artificial Sequence
  Description of Artificial Sequence: Synthetic oligonucleotide
ggugaugggcuagguuugc

SEQ ID NO: 537151 - RNA, 19 nt, Artificial Sequence
  Description of Artificial Sequence: Synthetic oligonucleotide
uccuuaccugaggcacaag

SEQ ID NO: 537152 - RNA, 19 nt, Artificial Sequence
  Description of Artificial Sequence: Synthetic oligonucleotide
aggcuaugccaggacgccu

SEQ ID NO: 537153 - RNA, 19 nt, Artificial Sequence
  Description of Artificial Sequence: Synthetic oligonucleotide
guaugcugccuucgggccu

SEQ ID NO: 537154 - RNA, 19 nt, Artificial Sequence
  Description of Artificial Sequence: Synthetic oligonucleotide
ggaccaacagagggaaguc

SEQ ID NO: 537155 - RNA, 19 nt, Artificial Sequence
  Description of Artificial Sequence: Synthetic oligonucleotide
cucuuccuagcaggugcug

SEQ ID NO: 537156 - RNA, 19 nt, Artificial Sequence
  Description of Artificial Sequence: Synthetic oligonucleotide
ggugucgggcaggugaaga

SEQ ID NO: 537157 - RNA, 19 nt, Artificial Sequence
  Description of Artificial Sequence: Synthetic oligonucleotide
gccgccacacauacaauuc

SEQ ID NO: 537158 - RNA, 19 nt, Artificial Sequence
  Description of Artificial Sequence: Synthetic oligonucleotide
augacagaucacaguuuua

SEQ ID NO: 537159 - RNA, 19 nt, Artificial Sequence
  Description of Artificial Sequence: Synthetic oligonucleotide
ugccagcccguaagucaaa

SEQ ID NO: 537160 - RNA, 19 nt, Artificial Sequence
  Description of Artificial Sequence: Synthetic oligonucleotide
ggcuaugccaggacgccuc

SEQ ID NO: 537161 - RNA, 19 nt, Artificial Sequence
  Description of Artificial Sequence: Synthetic oligonucleotide
cuggcggaaggcuggagau

SEQ ID NO: 537162 - RNA, 19 nt, Artificial Sequence
  Description of Artificial Sequence: Synthetic oligonucleotide
guccagcgugagcacggac

SEQ ID NO: 537163 - RNA, 19 nt, Artificial Sequence
  Description of Artificial Sequence: Synthetic oligonucleotide
ggggcacccacuuucucua

SEQ ID NO: 537164 - RNA, 19 nt, Artificial Sequence
  Description of Artificial Sequence: Synthetic oligonucleotide
uggugcggggauggccgcc

SEQ ID NO: 537165 - RNA, 19 nt, Artificial Sequence
  Description of Artificial Sequence: Synthetic oligonucleotide
gcggggauggccgccuagg

SEQ ID NO: 537166 - RNA, 19 nt, Artificial Sequence
  Description of Artificial Sequence: Synthetic oligonucleotide
ccaccuauccccaucccua

SEQ ID NO: 537167 - RNA, 19 nt, Artificial Sequence
  Description of Artificial Sequence: Synthetic oligonucleotide
ccuuaccugaggcacaagu

SEQ ID NO: 537168 - RNA, 19 nt, Artificial Sequence
  Description of Artificial Sequence: Synthetic oligonucleotide
guauugggcuucugccccu

SEQ ID NO: 537169 - RNA, 19 nt, Artificial Sequence
  Description of Artificial Sequence: Synthetic oligonucleotide
gcuaggccuaagagggccc

SEQ ID NO: 537170 - RNA, 19 nt, Artificial Sequence
  Description of Artificial Sequence: Synthetic oligonucleotide
aguggcccguggggugucg

SEQ ID NO: 537171 - RNA, 19 nt, Artificial Sequence
  Description of Artificial Sequence: Synthetic oligonucleotide
acaaucgcuggggcagcaa

SEQ ID NO: 537172 - RNA, 19 nt, Artificial Sequence
  Description of Artificial Sequence: Synthetic oligonucleotide
ggcuaaguccugagccacc

SEQ ID NO: 537173 - RNA, 19 nt, Artificial Sequence
  Description of Artificial Sequence: Synthetic oligonucleotide
cauuaccaacaugccgcca

SEQ ID NO: 537174 - RNA, 19 nt, Artificial Sequence
  Description of Artificial Sequence: Synthetic oligonucleotide
aucccgcgccaaugaggug

SEQ ID NO: 537175 - RNA, 19 nt, Artificial Sequence
  Description of Artificial Sequence: Synthetic oligonucleotide
gcugucgagccccuggggu

SEQ ID NO: 537176 - RNA, 19 nt, Artificial Sequence
  Description of Artificial Sequence: Synthetic oligonucleotide
cggguaugcugccuucggg

SEQ ID NO: 537177 - RNA, 19 nt, Artificial Sequence
  Description of Artificial Sequence: Synthetic oligonucleotide
cccagucuaaccccugcca

SEQ ID NO: 537178 - RNA, 19 nt, Artificial Sequence
  Description of Artificial Sequence: Synthetic oligonucleotide
cuugcggguaugcugccuu

SEQ ID NO: 537179 - RNA, 19 nt, Artificial Sequence
  Description of Artificial Sequence: Synthetic oligonucleotide
gcaagauucacugcccuuu

SEQ ID NO: 537180 - RNA, 19 nt, Artificial Sequence
  Description of Artificial Sequence: Synthetic oligonucleotide
ccaagccaagcaggcaaag

SEQ ID NO: 537181 - RNA, 19 nt, Artificial Sequence
  Description of Artificial Sequence: Synthetic oligonucleotide
guggcccguggggugucgg

SEQ ID NO: 537182 - RNA, 19 nt, Artificial Sequence
  Description of Artificial Sequence: Synthetic oligonucleotide
ccaacaugccgccacacau

SEQ ID NO: 537183 - RNA, 19 nt, Artificial Sequence
  Description of Artificial Sequence: Synthetic oligonucleotide
ggaccaguuauagcuacau

SEQ ID NO: 537184 - RNA, 19 nt, Artificial Sequence
  Description of Artificial Sequence: Synthetic oligonucleotide
ccgccacacauacaauuca

SEQ ID NO: 537185 - RNA, 19 nt, Artificial Sequence
  Description of Artificial Sequence: Synthetic oligonucleotide
cuccaaggcaaagcaagau

SEQ ID NO: 537186 - RNA, 19 nt, Artificial Sequence
  Description of Artificial Sequence: Synthetic oligonucleotide
gcuaugggauucgaagggu

SEQ ID NO: 537187 - RNA, 19 nt, Artificial Sequence
  Description of Artificial Sequence: Synthetic oligonucleotide
gcgccaaugaggugguggu

SEQ ID NO: 537188 - RNA, 19 nt, Artificial Sequence
  Description of Artificial Sequence: Synthetic oligonucleotide
ccgaauagugaauggggau

SEQ ID NO: 537189 - RNA, 19 nt, Artificial Sequence
  Description of Artificial Sequence: Synthetic oligonucleotide
cuacuacuucuugcgggua

SEQ ID NO: 537190 - RNA, 19 nt, Artificial Sequence
  Description of Artificial Sequence: Synthetic oligonucleotide
caccgaggcuaugccagga

SEQ ID NO: 537191 - RNA, 19 nt, Artificial Sequence
  Description of Artificial Sequence: Synthetic oligonucleotide
acaugccgccacacauaca

SEQ ID NO: 537192 - RNA, 19 nt, Artificial Sequence
  Description of Artificial Sequence: Synthetic oligonucleotide
gagccaccgaauagugaau

SEQ ID NO: 537193 - RNA, 19 nt, Artificial Sequence
  Description of Artificial Sequence: Synthetic oligonucleotide
ggccgccuaggcuacacau

SEQ ID NO: 537194 - RNA, 19 nt, Artificial Sequence
  Description of Artificial Sequence: Synthetic oligonucleotide
cuacaggcauuugggacuu

SEQ ID NO: 537195 - RNA, 19 nt, Artificial Sequence
  Description of Artificial Sequence: Synthetic oligonucleotide
ucgagccccuggggucuug

SEQ ID NO: 537196 - RNA, 19 nt, Artificial Sequence
  Description of Artificial Sequence: Synthetic oligonucleotide
gaauugcagggaggccccu

SEQ ID NO: 537197 - RNA, 19 nt, Artificial Sequence
  Description of Artificial Sequence: Synthetic oligonucleotide
augccgccacacauacaau

SEQ ID NO: 537198 - RNA, 19 nt, Artificial Sequence
  Description of Artificial Sequence: Synthetic oligonucleotide
cuucgggccugaagucgcu

SEQ ID NO: 537199 - RNA, 19 nt, Artificial Sequence
  Description of Artificial Sequence: Synthetic oligonucleotide
ccccauccuacacaaggua

SEQ ID NO: 537200 - RNA, 19 nt, Artificial Sequence
  Description of Artificial Sequence: Synthetic oligonucleotide
gggugucgggcaggugaag

SEQ ID NO: 537201 - RNA, 19 nt, Artificial Sequence
  Description of Artificial Sequence: Synthetic oligonucleotide
gccaagccaagcaggcaaa

SEQ ID NO: 537202 - RNA, 19 nt, Artificial Sequence
  Description of Artificial Sequence: Synthetic oligonucleotide
cgcugucgagccccugggg

SEQ ID NO: 537203 - RNA, 19 nt, Artificial Sequence
  Description of Artificial Sequence: Synthetic oligonucleotide
ggggugucgggcaggugaa

SEQ ID NO: 537204 - RNA, 19 nt, Artificial Sequence
  Description of Artificial Sequence: Synthetic oligonucleotide
gccagcccguaagucaaaa

SEQ ID NO: 537205 - RNA, 19 nt, Artificial Sequence
  Description of Artificial Sequence: Synthetic oligonucleotide
ggugcggggauggccgccu

SEQ ID NO: 537206 - RNA, 19 nt, Artificial Sequence
  Description of Artificial Sequence: Synthetic oligonucleotide
gugcggggauggccgccua

SEQ ID NO: 537207 - RNA, 19 nt, Artificial Sequence
  Description of Artificial Sequence: Synthetic oligonucleotide
ggacagccaugagccccuc

SEQ ID NO: 537208 - RNA, 19 nt, Artificial Sequence
  Description of Artificial Sequence: Synthetic oligonucleotide
cgccuaggcuacacauuaa

SEQ ID NO: 537209 - RNA, 19 nt, Artificial Sequence
  Description of Artificial Sequence: Synthetic oligonucleotide
gccgccuaggcuacacauu

SEQ ID NO: 537210 - RNA, 19 nt, Artificial Sequence
  Description of Artificial Sequence: Synthetic oligonucleotide
gcggugccacuuucagcau

SEQ ID NO: 537211 - RNA, 19 nt, Artificial Sequence
  Description of Artificial Sequence: Synthetic oligonucleotide
cccgcgccaaugagguggu

SEQ ID NO: 537212 - RNA, 19 nt, Artificial Sequence
  Description of Artificial Sequence: Synthetic oligonucleotide
cccaucccuacaggcauuu

SEQ ID NO: 537213 - RNA, 19 nt, Artificial Sequence
  Description of Artificial Sequence: Synthetic oligonucleotide
gucgagccccuggggucuu

SEQ ID NO: 537214 - RNA, 19 nt, Artificial Sequence
  Description of Artificial Sequence: Synthetic oligonucleotide
ccgcgccaaugagguggug

SEQ ID NO: 537215 - RNA, 19 nt, Artificial Sequence
  Description of Artificial Sequence: Synthetic oligonucleotide
aacgggaagaccuagaugc

SEQ ID NO: 537216 - RNA, 19 nt, Artificial Sequence
  Description of Artificial Sequence: Synthetic oligonucleotide
uguggaaugagcaagagug

SEQ ID NO: 537217 - RNA, 19 nt, Artificial Sequence
  Description of Artificial Sequence: Synthetic oligonucleotide
aaaauugguaugccagugg

SEQ ID NO: 537218 - RNA, 19 nt, Artificial Sequence
  Description of Artificial Sequence: Synthetic oligonucleotide
aaagcucccaccugguccc

SEQ ID NO: 537219 - RNA, 19 nt, Artificial Sequence
  Description of Artificial Sequence: Synthetic oligonucleotide
auaaaguugcccuucuaac

SEQ ID NO: 537220 - RNA, 19 nt, Artificial Sequence
  Description of Artificial Sequence: Synthetic oligonucleotide
ugcauuacaguccaauuug

SEQ ID NO: 537221 - RNA, 19 nt, Artificial Sequence
  Description of Artificial Sequence: Synthetic oligonucleotide
gaagcaaaggccugcacgg

SEQ ID NO: 537222 - RNA, 19 nt, Artificial Sequence
  Description of Artificial Sequence: Synthetic oligonucleotide
uguauaauuaccauuucuu

SEQ ID NO: 537223 - RNA, 19 nt, Artificial Sequence
  Description of Artificial Sequence: Synthetic oligonucleotide
ucuaacauccuguuguagc

SEQ ID NO: 537224 - RNA, 19 nt, Artificial Sequence
  Description of Artificial Sequence: Synthetic oligonucleotide
cuuaggaccagcccgagcc

SEQ ID NO: 537225 - RNA, 19 nt, Artificial Sequence
  Description of Artificial Sequence: Synthetic oligonucleotide
aaauugguaugccagugga

SEQ ID NO: 537226 - RNA, 19 nt, Artificial Sequence
  Description of Artificial Sequence: Synthetic oligonucleotide
aaaaggcugaccaggaguc

SEQ ID NO: 537227 - RNA, 19 nt, Artificial Sequence
  Description of Artificial Sequence: Synthetic oligonucleotide
gaucaugcgguggugaucg

SEQ ID NO: 537228 - RNA, 19 nt, Artificial Sequence
  Description of Artificial Sequence: Synthetic oligonucleotide
ucuuucaacugccugggug

SEQ ID NO: 537229 - RNA, 19 nt, Artificial Sequence
  Description of Artificial Sequence: Synthetic oligonucleotide
uaaggcacgcuucagcgag

SEQ ID NO: 537230 - RNA, 19 nt, Artificial Sequence
  Description of Artificial Sequence: Synthetic oligonucleotide
acaacuaggcagcuggagg

SEQ ID NO: 537231 - RNA, 19 nt, Artificial Sequence
  Description of Artificial Sequence: Synthetic oligonucleotide
ugaucgaagguaaggcacg

SEQ ID NO: 537232 - RNA, 19 nt, Artificial Sequence
  Description of Artificial Sequence: Synthetic oligonucleotide
uaaaguugcccuucuaaca

SEQ ID NO: 537233 - RNA, 19 nt, Artificial Sequence
  Description of Artificial Sequence: Synthetic oligonucleotide
uauaucguugaggacauca

SEQ ID NO: 537234 - RNA, 19 nt, Artificial Sequence
  Description of Artificial Sequence: Synthetic oligonucleotide
gaugaugcggcccaacaug

SEQ ID NO: 537235 - RNA, 19 nt, Artificial Sequence
  Description of Artificial Sequence: Synthetic oligonucleotide
aacuguauaauuaccauuu

SEQ ID NO: 537236 - RNA, 19 nt, Artificial Sequence
  Description of Artificial Sequence: Synthetic oligonucleotide
ugaguuagaaagcccgacc

SEQ ID NO: 537237 - RNA, 19 nt, Artificial Sequence
  Description of Artificial Sequence: Synthetic oligonucleotide
auugguugccacuucccac

SEQ ID NO: 537238 - RNA, 19 nt, Artificial Sequence
  Description of Artificial Sequence: Synthetic oligonucleotide
ugcucgagcucaaagacac

SEQ ID NO: 537239 - RNA, 19 nt, Artificial Sequence
  Description of Artificial Sequence: Synthetic oligonucleotide
cauguuguuucuucgggcc

SEQ ID NO: 537240 - RNA, 19 nt, Artificial Sequence
  Description of Artificial Sequence: Synthetic oligonucleotide
guaggaaggaacugguucc

SEQ ID NO: 537241 - RNA, 19 nt, Artificial Sequence
  Description of Artificial Sequence: Synthetic oligonucleotide
uuugggaacagugugucca

SEQ ID NO: 537242 - RNA, 19 nt, Artificial Sequence
  Description of Artificial Sequence: Synthetic oligonucleotide
uucuagauggugcuucuca

SEQ ID NO: 537243 - RNA, 19 nt, Artificial Sequence
  Description of Artificial Sequence: Synthetic oligonucleotide
uuaugagaccuucuuuucu

SEQ ID NO: 537244 - RNA, 19 nt, Artificial Sequence
  Description of Artificial Sequence: Synthetic oligonucleotide
ucuagauggugcuucucag

SEQ ID NO: 537245 - RNA, 19 nt, Artificial Sequence
  Description of Artificial Sequence: Synthetic oligonucleotide
ucccuaacuucccagcucc

SEQ ID NO: 537246 - RNA, 19 nt, Artificial Sequence
  Description of Artificial Sequence: Synthetic oligonucleotide
caucaaaaggcugaccagg

SEQ ID NO: 537247 - RNA, 19 nt, Artificial Sequence
  Description of Artificial Sequence: Synthetic oligonucleotide
aacauccuguuguagcugu

SEQ ID NO: 537248 - RNA, 19 nt, Artificial Sequence
  Description of Artificial Sequence: Synthetic oligonucleotide
uggugcauagucagugccg

SEQ ID NO: 537249 - RNA, 19 nt, Artificial Sequence
  Description of Artificial Sequence: Synthetic oligonucleotide
agagagugaggauggggac

SEQ ID NO: 537250 - RNA, 19 nt, Artificial Sequence
  Description of Artificial Sequence: Synthetic oligonucleotide
guacaugggagccauaauc

SEQ ID NO: 537251 - RNA, 19 nt, Artificial Sequence
  Description of Artificial Sequence: Synthetic oligonucleotide
aagaugaugcggcccaaca

SEQ ID NO: 537252 - RNA, 19 nt, Artificial Sequence
  Description of Artificial Sequence: Synthetic oligonucleotide
uagauggugcuucucaguc

SEQ ID NO: 537253 - RNA, 19 nt, Artificial Sequence
  Description of Artificial Sequence: Synthetic oligonucleotide
uugcauuacaguccaauuu

SEQ ID NO: 537254 - RNA, 19 nt, Artificial Sequence
  Description of Artificial Sequence: Synthetic oligonucleotide
ucgagcucaaagacacugg

SEQ ID NO: 537255 - RNA, 19 nt, Artificial Sequence
  Description of Artificial Sequence: Synthetic oligonucleotide
ugggcaaucugauaccaga

SEQ ID NO: 537256 - RNA, 19 nt, Artificial Sequence
  Description of Artificial Sequence: Synthetic oligonucleotide
aauugguaugccaguggac

SEQ ID NO: 537257 - RNA, 19 nt, Artificial Sequence
  Description of Artificial Sequence: Synthetic oligonucleotide
aguugcccuucuaacaucc

SEQ ID NO: 537258 - RNA, 19 nt, Artificial Sequence
  Description of Artificial Sequence: Synthetic oligonucleotide
gagcuaacucccuucaaac

SEQ ID NO: 537259 - RNA, 19 nt, Artificial Sequence
  Description of Artificial Sequence: Synthetic oligonucleotide
uugguugccacuucccaca

SEQ ID NO: 537260 - RNA, 19 nt, Artificial Sequence
  Description of Artificial Sequence: Synthetic oligonucleotide
caguccauuugauugguug

SEQ ID NO: 537261 - RNA, 19 nt, Artificial Sequence
  Description of Artificial Sequence: Synthetic oligonucleotide
gugucgucaaccucaacgc

SEQ ID NO: 537262 - RNA, 19 nt, Artificial Sequence
  Description of Artificial Sequence: Synthetic oligonucleotide
uccuguuguagcuguagug

SEQ ID NO: 537263 - RNA, 19 nt, Artificial Sequence
  Description of Artificial Sequence: Synthetic oligonucleotide
ucgggagccgaacugcucc

SEQ ID NO: 537264 - RNA, 19 nt, Artificial Sequence
  Description of Artificial Sequence: Synthetic oligonucleotide
uguucaguaccaugagcug

SEQ ID NO: 537265 - RNA, 19 nt, Artificial Sequence
  Description of Artificial Sequence: Synthetic oligonucleotide
ucagcgaguguccugggaa

SEQ ID NO: 537266 - RNA, 19 nt, Artificial Sequence
  Description of Artificial Sequence: Synthetic oligonucleotide
cuagguugcugauacugac

SEQ ID NO: 537267 - RNA, 19 nt, Artificial Sequence
  Description of Artificial Sequence: Synthetic oligonucleotide
uguccccuguacagaaugg

SEQ ID NO: 537268 - RNA, 19 nt, Artificial Sequence
  Description of Artificial Sequence: Synthetic oligonucleotide
uggugaucgaagguaaggc

SEQ ID NO: 537269 - RNA, 19 nt, Artificial Sequence
  Description of Artificial Sequence: Synthetic oligonucleotide
augaguuagaaagcccgac

SEQ ID NO: 537270 - RNA, 19 nt, Artificial Sequence
  Description of Artificial Sequence: Synthetic oligonucleotide
uuugcauuacaguccaauu

SEQ ID NO: 537271 - RNA, 19 nt, Artificial Sequence
  Description of Artificial Sequence: Synthetic oligonucleotide
agguaugguucuugaugcc

SEQ ID NO: 537272 - RNA, 19 nt, Artificial Sequence
  Description of Artificial Sequence: Synthetic oligonucleotide
guggcagcccuuaagacag

SEQ ID NO: 537273 - RNA, 19 nt, Artificial Sequence
  Description of Artificial Sequence: Synthetic oligonucleotide
cugagccucacagagagug

SEQ ID NO: 537274 - RNA, 19 nt, Artificial Sequence
  Description of Artificial Sequence: Synthetic oligonucleotide
augaugcggcccaacaugc

SEQ ID NO: 537275 - RNA, 19 nt, Artificial Sequence
  Description of Artificial Sequence: Synthetic oligonucleotide
caugcgguggugaucgaag

SEQ ID NO: 537276 - RNA, 19 nt, Artificial Sequence
  Description of Artificial Sequence: Synthetic oligonucleotide
gacccuguccccuguacag

SEQ ID NO: 537277 - RNA, 19 nt, Artificial Sequence
  Description of Artificial Sequence: Synthetic oligonucleotide
caaaauugguaugccagug

SEQ ID NO: 537278 - RNA, 19 nt, Artificial Sequence
  Description of Artificial Sequence: Synthetic oligonucleotide
gaaggaacugguucccuuc

SEQ ID NO: 537279 - RNA, 19 nt, Artificial Sequence
  Description of Artificial Sequence: Synthetic oligonucleotide
caauuugcucccuuuccac

SEQ ID NO: 537280 - RNA, 19 nt, Artificial Sequence
  Description of Artificial Sequence: Synthetic oligonucleotide
ucgaagguaaggcacgcuu

SEQ ID NO: 537281 - RNA, 19 nt, Artificial Sequence
  Description of Artificial Sequence: Synthetic oligonucleotide
uggagagcaaagcucccac

SEQ ID NO: 537282 - RNA, 19 nt, Artificial Sequence
  Description of Artificial Sequence: Synthetic oligonucleotide
gaacgggaagaccuagaug

SEQ ID NO: 537283 - RNA, 19 nt, Artificial Sequence
  Description of Artificial Sequence: Synthetic oligonucleotide
agaacauggcuauaucguu

SEQ ID NO: 537284 - RNA, 19 nt, Artificial Sequence
  Description of Artificial Sequence: Synthetic oligonucleotide
agcaaggaggaacgggaag

SEQ ID NO: 537285 - RNA, 19 nt, Artificial Sequence
  Description of Artificial Sequence: Synthetic oligonucleotide
guggugaucgaagguaagg

SEQ ID NO: 537286 - RNA, 19 nt, Artificial Sequence
  Description of Artificial Sequence: Synthetic oligonucleotide
ucucccuaacuucccagcu

SEQ ID NO: 537287 - RNA, 19 nt, Artificial Sequence
  Description of Artificial Sequence: Synthetic oligonucleotide
ugggcugcuuaugagaccu

SEQ ID NO: 537288 - RNA, 19 nt, Artificial Sequence
  Description of Artificial Sequence: Synthetic oligonucleotide
cgugucgucaaccucaacg

SEQ ID NO: 537289 - RNA, 19 nt, Artificial Sequence
  Description of Artificial Sequence: Synthetic oligonucleotide
aacgcccugcucaugauga

SEQ ID NO: 537290 - RNA, 19 nt, Artificial Sequence
  Description of Artificial Sequence: Synthetic oligonucleotide
cuccggcacagcaaggagg

SEQ ID NO: 537291 - RNA, 19 nt, Artificial Sequence
  Description of Artificial Sequence: Synthetic oligonucleotide
guaguguccuugcuccagg

SEQ ID NO: 537292 - RNA, 19 nt, Artificial Sequence
  Description of Artificial Sequence: Synthetic oligonucleotide
ggcuauaucguugaggaca

SEQ ID NO: 537293 - RNA, 19 nt, Artificial Sequence
  Description of Artificial Sequence: Synthetic oligonucleotide
uguacagaauggguaccag

SEQ ID NO: 537294 - RNA, 19 nt, Artificial Sequence
  Description of Artificial Sequence: Synthetic oligonucleotide
agcuaacucccuucaaacu

SEQ ID NO: 537295 - RNA, 19 nt, Artificial Sequence
  Description of Artificial Sequence: Synthetic oligonucleotide
aggggagcuaacucccuuc

SEQ ID NO: 537296 - RNA, 19 nt, Artificial Sequence
  Description of Artificial Sequence: Synthetic oligonucleotide
ugaggcccgagagagcggg

SEQ ID NO: 537297 - RNA, 19 nt, Artificial Sequence
  Description of Artificial Sequence: Synthetic oligonucleotide
cugcuagcucuuuuggaag

SEQ ID NO: 537298 - RNA, 19 nt, Artificial Sequence
  Description of Artificial Sequence: Synthetic oligonucleotide
ugcuuaugagaccuucuuu

SEQ ID NO: 537299 - RNA, 19 nt, Artificial Sequence
  Description of Artificial Sequence: Synthetic oligonucleotide
auggcuccaucugauuggc

SEQ ID NO: 537300 - RNA, 19 nt, Artificial Sequence
  Description of Artificial Sequence: Synthetic oligonucleotide
agaccuagaugcugaugag

SEQ ID NO: 537301 - RNA, 19 nt, Artificial Sequence
  Description of Artificial Sequence: Synthetic oligonucleotide
agagcaaagcucccaccug

SEQ ID NO: 537302 - RNA, 19 nt, Artificial Sequence
  Description of Artificial Sequence: Synthetic oligonucleotide
uucuaacauccuguuguag

SEQ ID NO: 537303 - RNA, 19 nt, Artificial Sequence
  Description of Artificial Sequence: Synthetic oligonucleotide
ugcuagcucuuuuggaagu

SEQ ID NO: 537304 - RNA, 19 nt, Artificial Sequence
  Description of Artificial Sequence: Synthetic oligonucleotide
ccuacuagugaggaggugg

SEQ ID NO: 537305 - RNA, 19 nt, Artificial Sequence
  Description of Artificial Sequence: Synthetic oligonucleotide
caagugguguaaaggaaca

SEQ ID NO: 537306 - RNA, 19 nt, Artificial Sequence
  Description of Artificial Sequence: Synthetic oligonucleotide
ucguugaggacaucagcaa

SEQ ID NO: 537307 - RNA, 19 nt, Artificial Sequence
  Description of Artificial Sequence: Synthetic oligonucleotide
uuucaacugccuggguggg

SEQ ID NO: 537308 - RNA, 19 nt, Artificial Sequence
  Description of Artificial Sequence: Synthetic oligonucleotide
ugcccuucaaccagcugcu

SEQ ID NO: 537309 - RNA, 19 nt, Artificial Sequence
  Description of Artificial Sequence: Synthetic oligonucleotide
auaucguugaggacaucag

SEQ ID NO: 537310 - RNA, 19 nt, Artificial Sequence
  Description of Artificial Sequence: Synthetic oligonucleotide
agugccgcucgaguggccc

SEQ ID NO: 537311 - RNA, 19 nt, Artificial Sequence
  Description of Artificial Sequence: Synthetic oligonucleotide
cagauguccaguccccagc

SEQ ID NO: 537312 - RNA, 19 nt, Artificial Sequence
  Description of Artificial Sequence: Synthetic oligonucleotide
cacgcuucagcgagugucc

SEQ ID NO: 537313 - RNA, 19 nt, Artificial Sequence
  Description of Artificial Sequence: Synthetic oligonucleotide
augagcaagagugggccag

SEQ ID NO: 537314 - RNA, 19 nt, Artificial Sequence
  Description of Artificial Sequence: Synthetic oligonucleotide
ccaccuacuagugaggagg

SEQ ID NO: 537315 - RNA, 19 nt, Artificial Sequence
  Description of Artificial Sequence: Synthetic oligonucleotide
agccggcuuucauucaagg

SEQ ID NO: 537316 - RNA, 19 nt, Artificial Sequence
  Description of Artificial Sequence: Synthetic oligonucleotide
cagcccuuaagacagccuc

SEQ ID NO: 537317 - RNA, 19 nt, Artificial Sequence
  Description of Artificial Sequence: Synthetic oligonucleotide
ucuuaggaccagcccgagc

SEQ ID NO: 537318 - RNA, 19 nt, Artificial Sequence
  Description of Artificial Sequence: Synthetic oligonucleotide
uccaccuacuagugaggag

SEQ ID NO: 537319 - RNA, 19 nt, Artificial Sequence
  Description of Artificial Sequence: Synthetic oligonucleotide
caguggaaucuuucaacug

SEQ ID NO: 537320 - RNA, 19 nt, Artificial Sequence
  Description of Artificial Sequence: Synthetic oligonucleotide
agagcggucaggaggauga

SEQ ID NO: 537321 - RNA, 19 nt, Artificial Sequence
  Description of Artificial Sequence: Synthetic oligonucleotide
ccaagugguguaaaggaac

SEQ ID NO: 537322 - RNA, 19 nt, Artificial Sequence
  Description of Artificial Sequence: Synthetic oligonucleotide
cagucuccggcacagcaag

SEQ ID NO: 537323 - RNA, 19 nt, Artificial Sequence
  Description of Artificial Sequence: Synthetic oligonucleotide
cuuguagugggucccagaa

SEQ ID NO: 537324 - RNA, 19 nt, Artificial Sequence
  Description of Artificial Sequence: Synthetic oligonucleotide
agagugaggauggggaccu

SEQ ID NO: 537325 - RNA, 19 nt, Artificial Sequence
  Description of Artificial Sequence: Synthetic oligonucleotide
cacagcggcacccgcaagc

SEQ ID NO: 537326 - RNA, 19 nt, Artificial Sequence
  Description of Artificial Sequence: Synthetic oligonucleotide
aagguaaggcacgcuucag

SEQ ID NO: 537327 - RNA, 19 nt, Artificial Sequence
  Description of Artificial Sequence: Synthetic oligonucleotide
ucuggggcuuuuaugcaua

SEQ ID NO: 537328 - RNA, 19 nt, Artificial Sequence
  Description of Artificial Sequence: Synthetic oligonucleotide
agcaguuugccuaugcaaa

SEQ ID NO: 537329 - RNA, 19 nt, Artificial Sequence
  Description of Artificial Sequence: Synthetic oligonucleotide
ugcauagucagugccgcuc

SEQ ID NO: 537330 - RNA, 19 nt, Artificial Sequence
  Description of Artificial Sequence: Synthetic oligonucleotide
ccuuucaagaacuuuggga

SEQ ID NO: 537331 - RNA, 19 nt, Artificial Sequence
  Description of Artificial Sequence: Synthetic oligonucleotide
gaguggcagcccuuaagac

SEQ ID NO: 537332 - RNA, 19 nt, Artificial Sequence
  Description of Artificial Sequence: Synthetic oligonucleotide
auguuguuucuucgggccu

SEQ ID NO: 537333 - RNA, 19 nt, Artificial Sequence
  Description of Artificial Sequence: Synthetic oligonucleotide
uucagcgaguguccuggga

SEQ ID NO: 537334 - RNA, 19 nt, Artificial Sequence
  Description of Artificial Sequence: Synthetic oligonucleotide
gaucgaagguaaggcacgc

SEQ ID NO: 537335 - RNA, 19 nt, Artificial Sequence
  Description of Artificial Sequence: Synthetic oligonucleotide
cuaacauccuguuguagcu

SEQ ID NO: 537336 - RNA, 19 nt, Artificial Sequence
  Description of Artificial Sequence: Synthetic oligonucleotide
uaacucccuucaaacuaac

SEQ ID NO: 537337 - RNA, 19 nt, Artificial Sequence
  Description of Artificial Sequence: Synthetic oligonucleotide
gcuucagcgaguguccugg

SEQ ID NO: 537338 - RNA, 19 nt, Artificial Sequence
  Description of Artificial Sequence: Synthetic oligonucleotide
cuagcugggcugcuuauga

SEQ ID NO: 537339 - RNA, 19 nt, Artificial Sequence
  Description of Artificial Sequence: Synthetic oligonucleotide
uuaggaccagcccgagccu

SEQ ID NO: 537340 - RNA, 19 nt, Artificial Sequence
  Description of Artificial Sequence: Synthetic oligonucleotide
gcauagucagugccgcucg

SEQ ID NO: 537341 - RNA, 19 nt, Artificial Sequence
  Description of Artificial Sequence: Synthetic oligonucleotide
cucgaguggccccaccagc

SEQ ID NO: 537342 - RNA, 19 nt, Artificial Sequence
  Description of Artificial Sequence: Synthetic oligonucleotide
guaaaggaacacccaggga

SEQ ID NO: 537343 - RNA, 19 nt, Artificial Sequence
  Description of Artificial Sequence: Synthetic oligonucleotide
ugauacugacagucauggu

SEQ ID NO: 537344 - RNA, 19 nt, Artificial Sequence
  Description of Artificial Sequence: Synthetic oligonucleotide
ugucucccugacgagaauc

SEQ ID NO: 537345 - RNA, 19 nt, Artificial Sequence
  Description of Artificial Sequence: Synthetic oligonucleotide
ugcccgguaguuggcauag

SEQ ID NO: 537346 - RNA, 19 nt, Artificial Sequence
  Description of Artificial Sequence: Synthetic oligonucleotide
cuagcaguuugccuaugca

SEQ ID NO: 537347 - RNA, 19 nt, Artificial Sequence
  Description of Artificial Sequence: Synthetic oligonucleotide
ugaugcccuucaaccagcu

SEQ ID NO: 537348 - RNA, 19 nt, Artificial Sequence
  Description of Artificial Sequence: Synthetic oligonucleotide
gccaguggaaucuuucaac

SEQ ID NO: 537349 - RNA, 19 nt, Artificial Sequence
  Description of Artificial Sequence: Synthetic oligonucleotide
uagaaagcccgacccuguc

SEQ ID NO: 537350 - RNA, 19 nt, Artificial Sequence
  Description of Artificial Sequence: Synthetic oligonucleotide
guggaccugggguggagag

SEQ ID NO: 537351 - RNA, 19 nt, Artificial Sequence
  Description of Artificial Sequence: Synthetic oligonucleotide
ggguaccaggaucaugcgg

SEQ ID NO: 537352 - RNA, 19 nt, Artificial Sequence
  Description of Artificial Sequence: Synthetic oligonucleotide
agccgaacugcuccgugca

SEQ ID NO: 537353 - RNA, 19 nt, Artificial Sequence
  Description of Artificial Sequence: Synthetic oligonucleotide
ugcaacaacuaggcagcug

SEQ ID NO: 537354 - RNA, 19 nt, Artificial Sequence
  Description of Artificial Sequence: Synthetic oligonucleotide
ugacgagaauccagcuuuc

SEQ ID NO: 537355 - RNA, 19 nt, Artificial Sequence
  Description of Artificial Sequence: Synthetic oligonucleotide
agcgccaagccugcucagc

SEQ ID NO: 537356 - RNA, 19 nt, Artificial Sequence
  Description of Artificial Sequence: Synthetic oligonucleotide
ggugcauagucagugccgc

SEQ ID NO: 537357 - RNA, 19 nt, Artificial Sequence
  Description of Artificial Sequence: Synthetic oligonucleotide
ccauguuguuucuucgggc

SEQ ID NO: 537358 - RNA, 19 nt, Artificial Sequence
  Description of Artificial Sequence: Synthetic oligonucleotide
ggagcuaacucccuucaaa

SEQ ID NO: 537359 - RNA, 19 nt, Artificial Sequence
  Description of Artificial Sequence: Synthetic oligonucleotide
caccgccugguuuucaguc

SEQ ID NO: 537360 - RNA, 19 nt, Artificial Sequence
  Description of Artificial Sequence: Synthetic oligonucleotide
cuucgggccuggugcauag

SEQ ID NO: 537361 - RNA, 19 nt, Artificial Sequence
  Description of Artificial Sequence: Synthetic oligonucleotide
gaugcccuucaaccagcug

SEQ ID NO: 537362 - RNA, 19 nt, Artificial Sequence
  Description of Artificial Sequence: Synthetic oligonucleotide
aacucccuucaaacuaacu

SEQ ID NO: 537363 - RNA, 19 nt, Artificial Sequence
  Description of Artificial Sequence: Synthetic oligonucleotide
guaaggcacgcuucagcga

SEQ ID NO: 537364 - RNA, 19 nt, Artificial Sequence
  Description of Artificial Sequence: Synthetic oligonucleotide
accgccugguuuucagucu

SEQ ID NO: 537365 - RNA, 19 nt, Artificial Sequence
  Description of Artificial Sequence: Synthetic oligonucleotide
guaccaggaucaugcggug

SEQ ID NO: 537366 - RNA, 19 nt, Artificial Sequence
  Description of Artificial Sequence: Synthetic oligonucleotide
caagagugggccaggaagu

SEQ ID NO: 537367 - RNA, 19 nt, Artificial Sequence
  Description of Artificial Sequence: Synthetic oligonucleotide
uggcuauaucguugaggac

SEQ ID NO: 537368 - RNA, 19 nt, Artificial Sequence
  Description of Artificial Sequence: Synthetic oligonucleotide
cucccuaacuucccagcuc

SEQ ID NO: 537369 - RNA, 19 nt, Artificial Sequence
  Description of Artificial Sequence: Synthetic oligonucleotide
uucuuaggaccagcccgag

SEQ ID NO: 537370 - RNA, 19 nt, Artificial Sequence
  Description of Artificial Sequence: Synthetic oligonucleotide
cccuucaaccagcugcucg

SEQ ID NO: 537371 - RNA, 19 nt, Artificial Sequence
  Description of Artificial Sequence: Synthetic oligonucleotide
gguaugccaguggaccugg

SEQ ID NO: 537372 - RNA, 19 nt, Artificial Sequence
  Description of Artificial Sequence: Synthetic oligonucleotide
gcauuacaguccaauuugc

SEQ ID NO: 537373 - RNA, 19 nt, Artificial Sequence
  Description of Artificial Sequence: Synthetic oligonucleotide
cuucagcgaguguccuggg

SEQ ID NO: 537374 - RNA, 19 nt, Artificial Sequence
  Description of Artificial Sequence: Synthetic oligonucleotide
cuucuaacauccuguugua

SEQ ID NO: 537375 - RNA, 19 nt, Artificial Sequence
  Description of Artificial Sequence: Synthetic oligonucleotide
cucgcacagucagccaucc

SEQ ID NO: 537376 - RNA, 19 nt, Artificial Sequence
  Description of Artificial Sequence: Synthetic oligonucleotide
gagagcggucaggaggaug

SEQ ID NO: 537377 - RNA, 19 nt, Artificial Sequence
  Description of Artificial Sequence: Synthetic oligonucleotide
cuucgccuggaguccaguc

SEQ ID NO: 537378 - RNA, 19 nt, Artificial Sequence
  Description of Artificial Sequence: Synthetic oligonucleotide
ucaugcgguggugaucgaa

SEQ ID NO: 537379 - RNA, 19 nt, Artificial Sequence
  Description of Artificial Sequence: Synthetic oligonucleotide
cugccacuuggcucagagc

SEQ ID NO: 537380 - RNA, 19 nt, Artificial Sequence
  Description of Artificial Sequence: Synthetic oligonucleotide
ccauuugauugguugccac

SEQ ID NO: 537381 - RNA, 19 nt, Artificial Sequence
  Description of Artificial Sequence: Synthetic oligonucleotide
ccuagcaguuugccuaugc

SEQ ID NO: 537382 - RNA, 19 nt, Artificial Sequence
  Description of Artificial Sequence: Synthetic oligonucleotide
ggcgcaaguacuucuccuc

SEQ ID NO: 537383 - RNA, 19 nt, Artificial Sequence
  Description of Artificial Sequence: Synthetic oligonucleotide
uucaacugccugggugggc

SEQ ID NO: 537384 - RNA, 19 nt, Artificial Sequence
  Description of Artificial Sequence: Synthetic oligonucleotide
uacuagugaggagguggcu

SEQ ID NO: 537385 - RNA, 19 nt, Artificial Sequence
  Description of Artificial Sequence: Synthetic oligonucleotide
ugguugccacuucccacaa

SEQ ID NO: 537386 - RNA, 19 nt, Artificial Sequence
  Description of Artificial Sequence: Synthetic oligonucleotide
agcaagagugggccaggaa

SEQ ID NO: 537387 - RNA, 19 nt, Artificial Sequence
  Description of Artificial Sequence: Synthetic oligonucleotide
cuucaaccagcugcucgag

SEQ ID NO: 537388 - RNA, 19 nt, Artificial Sequence
  Description of Artificial Sequence: Synthetic oligonucleotide
caguaccaugagcugcaac

SEQ ID NO: 537389 - RNA, 19 nt, Artificial Sequence
  Description of Artificial Sequence: Synthetic oligonucleotide
gagccggcuuucauucaag

SEQ ID NO: 537390 - RNA, 19 nt, Artificial Sequence
  Description of Artificial Sequence: Synthetic oligonucleotide
guuguagcuguaguguccu

SEQ ID NO: 537391 - RNA, 19 nt, Artificial Sequence
  Description of Artificial Sequence: Synthetic oligonucleotide
cugaggcuugggcaaucug

SEQ ID NO: 537392 - RNA, 19 nt, Artificial Sequence
  Description of Artificial Sequence: Synthetic oligonucleotide
ugggcccgugucgucaacc

SEQ ID NO: 537393 - RNA, 19 nt, Artificial Sequence
  Description of Artificial Sequence: Synthetic oligonucleotide
ucaacgcccugcucaugau

SEQ ID NO: 537394 - RNA, 19 nt, Artificial Sequence
  Description of Artificial Sequence: Synthetic oligonucleotide
ugcacuuggcuagguugcu

SEQ ID NO: 537395 - RNA, 19 nt, Artificial Sequence
  Description of Artificial Sequence: Synthetic oligonucleotide
cuagauggugcuucucagu

SEQ ID NO: 537396 - RNA, 19 nt, Artificial Sequence
  Description of Artificial Sequence: Synthetic oligonucleotide
uggagccggcuuucauuca

SEQ ID NO: 537397 - RNA, 19 nt, Artificial Sequence
  Description of Artificial Sequence: Synthetic oligonucleotide
gggccugccacuuggcuca

SEQ ID NO: 537398 - RNA, 19 nt, Artificial Sequence
  Description of Artificial Sequence: Synthetic oligonucleotide
cugaggcccgagagagcgg

SEQ ID NO: 537399 - RNA, 19 nt, Artificial Sequence
  Description of Artificial Sequence: Synthetic oligonucleotide
gaccuagaugcugaugagu

SEQ ID NO: 537400 - RNA, 19 nt, Artificial Sequence
  Description of Artificial Sequence: Synthetic oligonucleotide
agagcaaccuggaccuggu

SEQ ID NO: 537401 - RNA, 19 nt, Artificial Sequence
  Description of Artificial Sequence: Synthetic oligonucleotide
gugaggacccucgcugggc

SEQ ID NO: 537402 - RNA, 19 nt, Artificial Sequence
  Description of Artificial Sequence: Synthetic oligonucleotide
agcccuuaagacagccuca

SEQ ID NO: 537403 - RNA, 19 nt, Artificial Sequence
  Description of Artificial Sequence: Synthetic oligonucleotide
gcacgcuucagcgaguguc

SEQ ID NO: 537404 - RNA, 19 nt, Artificial Sequence
  Description of Artificial Sequence: Synthetic oligonucleotide
caacaacuaggcagcugga

SEQ ID NO: 537405 - RNA, 19 nt, Artificial Sequence
  Description of Artificial Sequence: Synthetic oligonucleotide
aucgaagguaaggcacgcu

SEQ ID NO: 537406 - RNA, 19 nt, Artificial Sequence
  Description of Artificial Sequence: Synthetic oligonucleotide
gcaguuugccuaugcaaaa

SEQ ID NO: 537407 - RNA, 19 nt, Artificial Sequence
  Description of Artificial Sequence: Synthetic oligonucleotide
ggaccuuguaguggguccc

SEQ ID NO: 537408 - RNA, 19 nt, Artificial Sequence
  Description of Artificial Sequence: Synthetic oligonucleotide
accuuguagugggucccag

SEQ ID NO: 537409 - RNA, 19 nt, Artificial Sequence
  Description of Artificial Sequence: Synthetic oligonucleotide
cacccgcaagcucgcacag

SEQ ID NO: 537410 - RNA, 19 nt, Artificial Sequence
  Description of Artificial Sequence: Synthetic oligonucleotide
aguggaccugggguggaga

SEQ ID NO: 537411 - RNA, 19 nt, Artificial Sequence
  Description of Artificial Sequence: Synthetic oligonucleotide
agucuccggcacagcaagg

SEQ ID NO: 537412 - RNA, 19 nt, Artificial Sequence
  Description of Artificial Sequence: Synthetic oligonucleotide
ucuucgccuggaguccagu

SEQ ID NO: 537413 - RNA, 19 nt, Artificial Sequence
  Description of Artificial Sequence: Synthetic oligonucleotide
aggcacgcuucagcgagug

SEQ ID NO: 537414 - RNA, 19 nt, Artificial Sequence
  Description of Artificial Sequence: Synthetic oligonucleotide
cuccaccuacuagugagga

SEQ ID NO: 537415 - RNA, 19 nt, Artificial Sequence
  Description of Artificial Sequence: Synthetic oligonucleotide
aggaacgggaagaccuaga

SEQ ID NO: 537416 - RNA, 19 nt, Artificial Sequence
  Description of Artificial Sequence: Synthetic oligonucleotide
cuccgugcacagcggcacc

SEQ ID NO: 537417 - RNA, 19 nt, Artificial Sequence
  Description of Artificial Sequence: Synthetic oligonucleotide
uggcuccaucugauuggcu

SEQ ID NO: 537418 - RNA, 19 nt, Artificial Sequence
  Description of Artificial Sequence: Synthetic oligonucleotide
accuacuagugaggaggug

SEQ ID NO: 537419 - RNA, 19 nt, Artificial Sequence
  Description of Artificial Sequence: Synthetic oligonucleotide
ugacgcugucugggaagcc

SEQ ID NO: 537420 - RNA, 19 nt, Artificial Sequence
  Description of Artificial Sequence: Synthetic oligonucleotide
ggggagcuaacucccuuca

SEQ ID NO: 537421 - RNA, 19 nt, Artificial Sequence
  Description of Artificial Sequence: Synthetic oligonucleotide
cgaagguaaggcacgcuuc

SEQ ID NO: 537422 - RNA, 19 nt, Artificial Sequence
  Description of Artificial Sequence: Synthetic oligonucleotide
ccaccuggucccuucuccc

SEQ ID NO: 537423 - RNA, 19 nt, Artificial Sequence
  Description of Artificial Sequence: Synthetic oligonucleotide
gguuccgcggccggguucc

SEQ ID NO: 537424 - RNA, 19 nt, Artificial Sequence
  Description of Artificial Sequence: Synthetic oligonucleotide
ggaacgggaagaccuagau

SEQ ID NO: 537425 - RNA, 19 nt, Artificial Sequence
  Description of Artificial Sequence: Synthetic oligonucleotide
agcccgacccuguccccug

SEQ ID NO: 537426 - RNA, 19 nt, Artificial Sequence
  Description of Artificial Sequence: Synthetic oligonucleotide
ggcucgggagccgaacugc

SEQ ID NO: 537427 - RNA, 19 nt, Artificial Sequence
  Description of Artificial Sequence: Synthetic oligonucleotide
uccuagcaguuugccuaug

SEQ ID NO: 537428 - RNA, 19 nt, Artificial Sequence
  Description of Artificial Sequence: Synthetic oligonucleotide
aaggcacgcuucagcgagu

SEQ ID NO: 537429 - RNA, 19 nt, Artificial Sequence
  Description of Artificial Sequence: Synthetic oligonucleotide
gcacccgcaagcucgcaca

SEQ ID NO: 537430 - RNA, 19 nt, Artificial Sequence
  Description of Artificial Sequence: Synthetic oligonucleotide
acggaaucccacagcuggu

SEQ ID NO: 537431 - RNA, 19 nt, Artificial Sequence
  Description of Artificial Sequence: Synthetic oligonucleotide
gagcaagagugggccagga

SEQ ID NO: 537432 - RNA, 19 nt, Artificial Sequence
  Description of Artificial Sequence: Synthetic oligonucleotide
gacgagaauccagcuuucu

SEQ ID NO: 537433 - RNA, 19 nt, Artificial Sequence
  Description of Artificial Sequence: Synthetic oligonucleotide
gugcugacgcugucuggga

SEQ ID NO: 537434 - RNA, 19 nt, Artificial Sequence
  Description of Artificial Sequence: Synthetic oligonucleotide
uuccgcggccggguucccg

SEQ ID NO: 537435 - RNA, 19 nt, Artificial Sequence
  Description of Artificial Sequence: Synthetic oligonucleotide
ggcugcuuaugagaccuuc

SEQ ID NO: 537436 - RNA, 19 nt, Artificial Sequence
  Description of Artificial Sequence: Synthetic oligonucleotide
cugcuuaugagaccuucuu

SEQ ID NO: 537437 - RNA, 19 nt, Artificial Sequence
  Description of Artificial Sequence: Synthetic oligonucleotide
gugccgcucgaguggcccc

SEQ ID NO: 537438 - RNA, 19 nt, Artificial Sequence
  Description of Artificial Sequence: Synthetic oligonucleotide
ugccgcucgaguggcccca

SEQ ID NO: 537439 - RNA, 19 nt, Artificial Sequence
  Description of Artificial Sequence: Synthetic oligonucleotide
ggcacccgcaagcucgcac

SEQ ID NO: 537440 - RNA, 19 nt, Artificial Sequence
  Description of Artificial Sequence: Synthetic oligonucleotide
caacaggggugugccugag

SEQ ID NO: 537441 - RNA, 19 nt, Artificial Sequence
  Description of Artificial Sequence: Synthetic oligonucleotide
gggcucgggagccgaacug

SEQ ID NO: 537442 - RNA, 19 nt, Artificial Sequence
  Description of Artificial Sequence: Synthetic oligonucleotide
cucuggggcuuuuaugcau

SEQ ID NO: 537443 - RNA, 19 nt, Artificial Sequence
  Description of Artificial Sequence: Synthetic oligonucleotide
caugaguggcagcccuuaa

SEQ ID NO: 537444 - RNA, 19 nt, Artificial Sequence
  Description of Artificial Sequence: Synthetic oligonucleotide
caccuacuagugaggaggu

SEQ ID NO: 537445 - RNA, 19 nt, Artificial Sequence
  Description of Artificial Sequence: Synthetic oligonucleotide
aucaugcgguggugaucga

SEQ ID NO: 537446 - RNA, 19 nt, Artificial Sequence
  Description of Artificial Sequence: Synthetic oligonucleotide
ccucgcugggcccgugucg

SEQ ID NO: 537447 - RNA, 19 nt, Artificial Sequence
  Description of Artificial Sequence: Synthetic oligonucleotide
ggaucaugcgguggugauc

SEQ ID NO: 537448 - RNA, 19 nt, Artificial Sequence
  Description of Artificial Sequence: Synthetic oligonucleotide
gcgccaagccugcucagca

SEQ ID NO: 537449 - RNA, 19 nt, Artificial Sequence
  Description of Artificial Sequence: Synthetic oligonucleotide
acgcuucagcgaguguccu

SEQ ID NO: 537450 - RNA, 19 nt, Artificial Sequence
  Description of Artificial Sequence: Synthetic oligonucleotide
cuauaucguugaggacauc

SEQ ID NO: 537451 - RNA, 19 nt, Artificial Sequence
  Description of Artificial Sequence: Synthetic oligonucleotide
caguggaccugggguggag

SEQ ID NO: 537452 - RNA, 19 nt, Artificial Sequence
  Description of Artificial Sequence: Synthetic oligonucleotide
cccgagagagcgggcagcg

SEQ ID NO: 537453 - RNA, 19 nt, Artificial Sequence
  Description of Artificial Sequence: Synthetic oligonucleotide
guccuagcaguuugccuau

SEQ ID NO: 537454 - RNA, 19 nt, Artificial Sequence
  Description of Artificial Sequence: Synthetic oligonucleotide
gcuauaucguugaggacau

SEQ ID NO: 537455 - RNA, 19 nt, Artificial Sequence
  Description of Artificial Sequence: Synthetic oligonucleotide
gguggccaauugguccuag

SEQ ID NO: 537456 - RNA, 19 nt, Artificial Sequence
  Description of Artificial Sequence: Synthetic oligonucleotide
uguguuccucuggggcuuu

SEQ ID NO: 537457 - RNA, 19 nt, Artificial Sequence
  Description of Artificial Sequence: Synthetic oligonucleotide
cuaggggagcuaacucccu

SEQ ID NO: 537458 - RNA, 19 nt, Artificial Sequence
  Description of Artificial Sequence: Synthetic oligonucleotide
gaccagcccgagccugcuc

SEQ ID NO: 537459 - RNA, 19 nt, Artificial Sequence
  Description of Artificial Sequence: Synthetic oligonucleotide
cagcgccgagccccguccc

SEQ ID NO: 537460 - RNA, 19 nt, Artificial Sequence
  Description of Artificial Sequence: Synthetic oligonucleotide
gcacuuggcuagguugcug

SEQ ID NO: 537461 - RNA, 19 nt, Artificial Sequence
  Description of Artificial Sequence: Synthetic oligonucleotide
caaagaugaugcggcccaa

SEQ ID NO: 537462 - RNA, 19 nt, Artificial Sequence
  Description of Artificial Sequence: Synthetic oligonucleotide
gguacaugggagccauaau

SEQ ID NO: 537463 - RNA, 19 nt, Artificial Sequence
  Description of Artificial Sequence: Synthetic oligonucleotide
gcgcaaguacuucuccucu

SEQ ID NO: 537464 - RNA, 19 nt, Artificial Sequence
  Description of Artificial Sequence: Synthetic oligonucleotide
gccccgucccacugcagac

SEQ ID NO: 537465 - RNA, 19 nt, Artificial Sequence
  Description of Artificial Sequence: Synthetic oligonucleotide
ccgugcugacgcugucugg

SEQ ID NO: 537466 - RNA, 19 nt, Artificial Sequence
  Description of Artificial Sequence: Synthetic oligonucleotide
gccggcuuucauucaaggu

SEQ ID NO: 537467 - RNA, 19 nt, Artificial Sequence
  Description of Artificial Sequence: Synthetic oligonucleotide
ccgccugguuuucagucuc

SEQ ID NO: 537468 - RNA, 19 nt, Artificial Sequence
  Description of Artificial Sequence: Synthetic oligonucleotide
uucgggccuggugcauagu

SEQ ID NO: 537469 - RNA, 19 nt, Artificial Sequence
  Description of Artificial Sequence: Synthetic oligonucleotide
gacucccgucggcggcagc

SEQ ID NO: 537470 - RNA, 19 nt, Artificial Sequence
  Description of Artificial Sequence: Synthetic oligonucleotide
cugcccgguaguuggcaua

SEQ ID NO: 537471 - RNA, 19 nt, Artificial Sequence
  Description of Artificial Sequence: Synthetic oligonucleotide
ggacaagggcucggacugc

SEQ ID NO: 537472 - RNA, 19 nt, Artificial Sequence
  Description of Artificial Sequence: Synthetic oligonucleotide
ugguggccaauugguccua

SEQ ID NO: 537473 - RNA, 19 nt, Artificial Sequence
  Description of Artificial Sequence: Synthetic oligonucleotide
gugcauagucagugccgcu

SEQ ID NO: 537474 - RNA, 19 nt, Artificial Sequence
  Description of Artificial Sequence: Synthetic oligonucleotide
acccgcaagcucgcacagu

SEQ ID NO: 537475 - RNA, 19 nt, Artificial Sequence
  Description of Artificial Sequence: Synthetic oligonucleotide
cagcggcacccgcaagcuc

SEQ ID NO: 537476 - RNA, 19 nt, Artificial Sequence
  Description of Artificial Sequence: Synthetic oligonucleotide
gagccccgucccacugcag

SEQ ID NO: 537477 - RNA, 19 nt, Artificial Sequence
  Description of Artificial Sequence: Synthetic oligonucleotide
cugauaccagaggaagcau

SEQ ID NO: 537478 - RNA, 19 nt, Artificial Sequence
  Description of Artificial Sequence: Synthetic oligonucleotide
ccgacccuguccccuguac

SEQ ID NO: 537479 - RNA, 19 nt, Artificial Sequence
  Description of Artificial Sequence: Synthetic oligonucleotide
cugggcccgugucgucaac

SEQ ID NO: 537480 - RNA, 19 nt, Artificial Sequence
  Description of Artificial Sequence: Synthetic oligonucleotide
gcauccugcccggguuccg

SEQ ID NO: 537481 - RNA, 19 nt, Artificial Sequence
  Description of Artificial Sequence: Synthetic oligonucleotide
cucgcugggcccgugucgu

SEQ ID NO: 537482 - RNA, 19 nt, Artificial Sequence
  Description of Artificial Sequence: Synthetic oligonucleotide
ccaggaucaugcgguggug

SEQ ID NO: 537483 - RNA, 19 nt, Artificial Sequence
  Description of Artificial Sequence: Synthetic oligonucleotide
gagcggucaggaggaugaa

SEQ ID NO: 537484 - RNA, 19 nt, Artificial Sequence
  Description of Artificial Sequence: Synthetic oligonucleotide
ccgugcacagcggcacccg

SEQ ID NO: 537485 - RNA, 19 nt, Artificial Sequence
  Description of Artificial Sequence: Synthetic oligonucleotide
ggguuccgcggccggguuc

SEQ ID NO: 537486 - RNA, 19 nt, Artificial Sequence
  Description of Artificial Sequence: Synthetic oligonucleotide
gggugugccugagccucac

SEQ ID NO: 537487 - RNA, 19 nt, Artificial Sequence
  Description of Artificial Sequence: Synthetic oligonucleotide
ccgcauccugcccggguuc

SEQ ID NO: 537488 - RNA, 19 nt, Artificial Sequence
  Description of Artificial Sequence: Synthetic oligonucleotide
gcugggcccgugucgucaa

SEQ ID NO: 537489 - RNA, 19 nt, Artificial Sequence
  Description of Artificial Sequence: Synthetic oligonucleotide
cccgguaguuggcauagau

SEQ ID NO: 537490 - RNA, 19 nt, Artificial Sequence
  Description of Artificial Sequence: Synthetic oligonucleotide
caggcgcgcggggcucggg

SEQ ID NO: 537491 - RNA, 19 nt, Artificial Sequence
  Description of Artificial Sequence: Synthetic oligonucleotide
cugcaacaacuaggcagcu

SEQ ID NO: 537492 - RNA, 19 nt, Artificial Sequence
  Description of Artificial Sequence: Synthetic oligonucleotide
ccgcaagcucgcacaguca

SEQ ID NO: 537493 - RNA, 19 nt, Artificial Sequence
  Description of Artificial Sequence: Synthetic oligonucleotide
cgcucgaguggccccacca

SEQ ID NO: 537494 - RNA, 19 nt, Artificial Sequence
  Description of Artificial Sequence: Synthetic oligonucleotide
guuccgcggccggguuccc

SEQ ID NO: 537495 - RNA, 19 nt, Artificial Sequence
  Description of Artificial Sequence: Synthetic oligonucleotide
ccgagagagcgggcagcgc

SEQ ID NO: 537496 - RNA, 19 nt, Artificial Sequence
  Description of Artificial Sequence: Synthetic oligonucleotide
gcagcccuuaagacagccu

SEQ ID NO: 537497 - RNA, 19 nt, Artificial Sequence
  Description of Artificial Sequence: Synthetic oligonucleotide
cccgugucgucaaccucaa

SEQ ID NO: 537498 - RNA, 19 nt, Artificial Sequence
  Description of Artificial Sequence: Synthetic oligonucleotide
cccugacgagaauccagcu

SEQ ID NO: 537499 - RNA, 19 nt, Artificial Sequence
  Description of Artificial Sequence: Synthetic oligonucleotide
cccggguuccgcggccggg

SEQ ID NO: 537500 - RNA, 19 nt, Artificial Sequence
  Description of Artificial Sequence: Synthetic oligonucleotide
ccucuucgccuggagucca

SEQ ID NO: 537501 - RNA, 19 nt, Artificial Sequence
  Description of Artificial Sequence: Synthetic oligonucleotide
ccgugucgucaaccucaac

SEQ ID NO: 537502 - RNA, 19 nt, Artificial Sequence
  Description of Artificial Sequence: Synthetic oligonucleotide
gcgcggcaggcgcgcgggg

SEQ ID NO: 537503 - RNA, 19 nt, Artificial Sequence
  Description of Artificial Sequence: Synthetic oligonucleotide
ggcacgcuucagcgagugu

SEQ ID NO: 537504 - RNA, 19 nt, Artificial Sequence
  Description of Artificial Sequence: Synthetic oligonucleotide
cucggacugcccgguaguu

SEQ ID NO: 537505 - RNA, 19 nt, Artificial Sequence
  Description of Artificial Sequence: Synthetic oligonucleotide
ccaguggaccuggggugga

SEQ ID NO: 537506 - RNA, 19 nt, Artificial Sequence
  Description of Artificial Sequence: Synthetic oligonucleotide
cccugcucaugaugacugu

SEQ ID NO: 537507 - RNA, 19 nt, Artificial Sequence
  Description of Artificial Sequence: Synthetic oligonucleotide
gagugaggauggggaccuu

SEQ ID NO: 537508 - RNA, 19 nt, Artificial Sequence
  Description of Artificial Sequence: Synthetic oligonucleotide
cggggcucgggagccgaac

SEQ ID NO: 537509 - RNA, 19 nt, Artificial Sequence
  Description of Artificial Sequence: Synthetic oligonucleotide
gccgcucgaguggccccac

SEQ ID NO: 537510 - RNA, 19 nt, Artificial Sequence
  Description of Artificial Sequence: Synthetic oligonucleotide
ccaguccauuugauugguu

SEQ ID NO: 537511 - RNA, 19 nt, Artificial Sequence
  Description of Artificial Sequence: Synthetic oligonucleotide
gcccgguaguuggcauaga

SEQ ID NO: 537512 - RNA, 19 nt, Artificial Sequence
  Description of Artificial Sequence: Synthetic oligonucleotide
cccgcauccugcccggguu

SEQ ID NO: 537513 - RNA, 19 nt, Artificial Sequence
  Description of Artificial Sequence: Synthetic oligonucleotide
ccccgucccacugcagacu

SEQ ID NO: 537514 - RNA, 19 nt, Artificial Sequence
  Description of Artificial Sequence: Synthetic oligonucleotide
ccgcggccggguucccgga

SEQ ID NO: 537515 - RNA, 19 nt, Artificial Sequence
  Description of Artificial Sequence: Synthetic oligonucleotide
ccggguuccgcggccgggu

SEQ ID NO: 537516 - RNA, 19 nt, Artificial Sequence
  Description of Artificial Sequence: Synthetic oligonucleotide
cgccgagccccgucccacu

SEQ ID NO: 537517 - RNA, 19 nt, Artificial Sequence
  Description of Artificial Sequence: Synthetic oligonucleotide
cggcacccgcaagcucgca

SEQ ID NO: 537518 - RNA, 19 nt, Artificial Sequence
  Description of Artificial Sequence: Synthetic oligonucleotide
cggguuccgcggccggguu

SEQ ID NO: 537519 - RNA, 19 nt, Artificial Sequence
  Description of Artificial Sequence: Synthetic oligonucleotide
ccccagcgccaagccugcu

SEQ ID NO: 537520 - RNA, 19 nt, Artificial Sequence
  Description of Artificial Sequence: Synthetic oligonucleotide
uuaauauuaggaauuucgg

SEQ ID NO: 537521 - RNA, 19 nt, Artificial Sequence
  Description of Artificial Sequence: Synthetic oligonucleotide
cucgaugugaacuucaucg

SEQ ID NO: 537522 - RNA, 19 nt, Artificial Sequence
  Description of Artificial Sequence: Synthetic oligonucleotide
aucaauguaagguagagca

SEQ ID NO: 537523 - RNA, 19 nt, Artificial Sequence
  Description of Artificial Sequence: Synthetic oligonucleotide
cauacaugucguuagaggg

SEQ ID NO: 537524 - RNA, 19 nt, Artificial Sequence
  Description of Artificial Sequence: Synthetic oligonucleotide
aaaguccguccuuugaagc

SEQ ID NO: 537525 - RNA, 19 nt, Artificial Sequence
  Description of Artificial Sequence: Synthetic oligonucleotide
ucaaccgacauuuucagug

SEQ ID NO: 537526 - RNA, 19 nt, Artificial Sequence
  Description of Artificial Sequence: Synthetic oligonucleotide
aaugucaugcaguuccggg

SEQ ID NO: 537527 - RNA, 19 nt, Artificial Sequence
  Description of Artificial Sequence: Synthetic oligonucleotide
cugacuuugacauagucug

SEQ ID NO: 537528 - RNA, 19 nt, Artificial Sequence
  Description of Artificial Sequence: Synthetic oligonucleotide
aaauauguccugcagcaug

SEQ ID NO: 537529 - RNA, 19 nt, Artificial Sequence
  Description of Artificial Sequence: Synthetic oligonucleotide
ucgaugauaagaaugucug

SEQ ID NO: 537530 - RNA, 19 nt, Artificial Sequence
  Description of Artificial Sequence: Synthetic oligonucleotide
acauucuacaauccgaguc

SEQ ID NO: 537531 - RNA, 19 nt, Artificial Sequence
  Description of Artificial Sequence: Synthetic oligonucleotide
ucucuaacuucuuagagac

SEQ ID NO: 537532 - RNA, 19 nt, Artificial Sequence
  Description of Artificial Sequence: Synthetic oligonucleotide
uaaucaaccgacauuuuca

SEQ ID NO: 537533 - RNA, 19 nt, Artificial Sequence
  Description of Artificial Sequence: Synthetic oligonucleotide
ugcuugaaaacaaaggggu

SEQ ID NO: 537534 - RNA, 19 nt, Artificial Sequence
  Description of Artificial Sequence: Synthetic oligonucleotide
auauucucugaucagagcu

SEQ ID NO: 537535 - RNA, 19 nt, Artificial Sequence
  Description of Artificial Sequence: Synthetic oligonucleotide
aauguaagguagagcaucc

SEQ ID NO: 537536 - RNA, 19 nt, Artificial Sequence
  Description of Artificial Sequence: Synthetic oligonucleotide
aaucaaccgacauuuucag

SEQ ID NO: 537537 - RNA, 19 nt, Artificial Sequence
  Description of Artificial Sequence: Synthetic oligonucleotide
uuagagaccuucugcaccg

SEQ ID NO: 537538 - RNA, 19 nt, Artificial Sequence
  Description of Artificial Sequence: Synthetic oligonucleotide
guaaaugggaaugucaugc

SEQ ID NO: 537539 - RNA, 19 nt, Artificial Sequence
  Description of Artificial Sequence: Synthetic oligonucleotide
agaacuugauuccugccac

SEQ ID NO: 537540 - RNA, 19 nt, Artificial Sequence
  Description of Artificial Sequence: Synthetic oligonucleotide
auaaacgugcaucucuaac

SEQ ID NO: 537541 - RNA, 19 nt, Artificial Sequence
  Description of Artificial Sequence: Synthetic oligonucleotide
aaaccgaaagcagagccac

SEQ ID NO: 537542 - RNA, 19 nt, Artificial Sequence
  Description of Artificial Sequence: Synthetic oligonucleotide
accuguauacaacagcuuc

SEQ ID NO: 537543 - RNA, 19 nt, Artificial Sequence
  Description of Artificial Sequence: Synthetic oligonucleotide
uguguccgcauacaugucg

SEQ ID NO: 537544 - RNA, 19 nt, Artificial Sequence
  Description of Artificial Sequence: Synthetic oligonucleotide
uucgaugauaagaaugucu

SEQ ID NO: 537545 - RNA, 19 nt, Artificial Sequence
  Description of Artificial Sequence: Synthetic oligonucleotide
uaaacgugcaucucuaacu

SEQ ID NO: 537546 - RNA, 19 nt, Artificial Sequence
  Description of Artificial Sequence: Synthetic oligonucleotide
gacgacgcauaguaaaugg

SEQ ID NO: 537547 - RNA, 19 nt, Artificial Sequence
  Description of Artificial Sequence: Synthetic oligonucleotide
uccaaauauguccugcagc

SEQ ID NO: 537548 - RNA, 19 nt, Artificial Sequence
  Description of Artificial Sequence: Synthetic oligonucleotide
aagguagagcauccauucc

SEQ ID NO: 537549 - RNA, 19 nt, Artificial Sequence
  Description of Artificial Sequence: Synthetic oligonucleotide
agcacguauaaauucacug

SEQ ID NO: 537550 - RNA, 19 nt, Artificial Sequence
  Description of Artificial Sequence: Synthetic oligonucleotide
uguaugacagugauauucu

SEQ ID NO: 537551 - RNA, 19 nt, Artificial Sequence
  Description of Artificial Sequence: Synthetic oligonucleotide
augguuucgauuuugucca

SEQ ID NO: 537552 - RNA, 19 nt, Artificial Sequence
  Description of Artificial Sequence: Synthetic oligonucleotide
ugggaaucaaggcagucag

SEQ ID NO: 537553 - RNA, 19 nt, Artificial Sequence
  Description of Artificial Sequence: Synthetic oligonucleotide
ugguaauacagcaaauuaa

SEQ ID NO: 537554 - RNA, 19 nt, Artificial Sequence
  Description of Artificial Sequence: Synthetic oligonucleotide
gucaguguaauuugagagg

SEQ ID NO: 537555 - RNA, 19 nt, Artificial Sequence
  Description of Artificial Sequence: Synthetic oligonucleotide
uccaguaucacggugguca

SEQ ID NO: 537556 - RNA, 19 nt, Artificial Sequence
  Description of Artificial Sequence: Synthetic oligonucleotide
uucgauuuuguccauacuu

SEQ ID NO: 537557 - RNA, 19 nt, Artificial Sequence
  Description of Artificial Sequence: Synthetic oligonucleotide
aaauuaaagggcccaguau

SEQ ID NO: 537558 - RNA, 19 nt, Artificial Sequence
  Description of Artificial Sequence: Synthetic oligonucleotide
uguggcaugcgucauaaaa

SEQ ID NO: 537559 - RNA, 19 nt, Artificial Sequence
  Description of Artificial Sequence: Synthetic oligonucleotide
uuaggugucugucuucuug

SEQ ID NO: 537560 - RNA, 19 nt, Artificial Sequence
  Description of Artificial Sequence: Synthetic oligonucleotide
uacccugcgaugaugacgc

SEQ ID NO: 537561 - RNA, 19 nt, Artificial Sequence
  Description of Artificial Sequence: Synthetic oligonucleotide
acugauuagcagaaggucg

SEQ ID NO: 537562 - RNA, 19 nt, Artificial Sequence
  Description of Artificial Sequence: Synthetic oligonucleotide
cuugcuauaaacgugcauc

SEQ ID NO: 537563 - RNA, 19 nt, Artificial Sequence
  Description of Artificial Sequence: Synthetic oligonucleotide
uuaucuguacaccagcuuu

SEQ ID NO: 537564 - RNA, 19 nt, Artificial Sequence
  Description of Artificial Sequence: Synthetic oligonucleotide
uaagguagagcauccauuc

SEQ ID NO: 537565 - RNA, 19 nt, Artificial Sequence
  Description of Artificial Sequence: Synthetic oligonucleotide
gauggaaaugacugauuag

SEQ ID NO: 537566 - RNA, 19 nt, Artificial Sequence
  Description of Artificial Sequence: Synthetic oligonucleotide
uaauauucgcuguuuuccc

SEQ ID NO: 537567 - RNA, 19 nt, Artificial Sequence
  Description of Artificial Sequence: Synthetic oligonucleotide
gaaaguaugugguaauuaa

SEQ ID NO: 537568 - RNA, 19 nt, Artificial Sequence
  Description of Artificial Sequence: Synthetic oligonucleotide
agaaccuugcuucucgcuc

SEQ ID NO: 537569 - RNA, 19 nt, Artificial Sequence
  Description of Artificial Sequence: Synthetic oligonucleotide
aaucacaugaggaggcuuc

SEQ ID NO: 537570 - RNA, 19 nt, Artificial Sequence
  Description of Artificial Sequence: Synthetic oligonucleotide
aaccgacauuuucaguggc

SEQ ID NO: 537571 - RNA, 19 nt, Artificial Sequence
  Description of Artificial Sequence: Synthetic oligonucleotide
agaaugucuggcuuaauau

SEQ ID NO: 537572 - RNA, 19 nt, Artificial Sequence
  Description of Artificial Sequence: Synthetic oligonucleotide
aagaaugucuggcuuaaua

SEQ ID NO: 537573 - RNA, 19 nt, Artificial Sequence
  Description of Artificial Sequence: Synthetic oligonucleotide
gauucgacugaacuuccag

SEQ ID NO: 537574 - RNA, 19 nt, Artificial Sequence
  Description of Artificial Sequence: Synthetic oligonucleotide
ucaguguaauuugagaggu

SEQ ID NO: 537575 - RNA, 19 nt, Artificial Sequence
  Description of Artificial Sequence: Synthetic oligonucleotide
cucuaaaccgaaagcagag

SEQ ID NO: 537576 - RNA, 19 nt, Artificial Sequence
  Description of Artificial Sequence: Synthetic oligonucleotide
uauucucugaucagagcug

SEQ ID NO: 537577 - RNA, 19 nt, Artificial Sequence
  Description of Artificial Sequence: Synthetic oligonucleotide
aauagccuuuguggcaugc

SEQ ID NO: 537578 - RNA, 19 nt, Artificial Sequence
  Description of Artificial Sequence: Synthetic oligonucleotide
gucgaucucggcuggaucg

SEQ ID NO: 537579 - RNA, 19 nt, Artificial Sequence
  Description of Artificial Sequence: Synthetic oligonucleotide
agaaggucgaucucggcug

SEQ ID NO: 537580 - RNA, 19 nt, Artificial Sequence
  Description of Artificial Sequence: Synthetic oligonucleotide
agauucgaugauaagaaug

SEQ ID NO: 537581 - RNA, 19 nt, Artificial Sequence
  Description of Artificial Sequence: Synthetic oligonucleotide
augucgugcacaguguugc

SEQ ID NO: 537582 - RNA, 19 nt, Artificial Sequence
  Description of Artificial Sequence: Synthetic oligonucleotide
aguguaauuugagagguca

SEQ ID NO: 537583 - RNA, 19 nt, Artificial Sequence
  Description of Artificial Sequence: Synthetic oligonucleotide
uuaaugguuucgauuuugu

SEQ ID NO: 537584 - RNA, 19 nt, Artificial Sequence
  Description of Artificial Sequence: Synthetic oligonucleotide
uguaauuugagaggucaca

SEQ ID NO: 537585 - RNA, 19 nt, Artificial Sequence
  Description of Artificial Sequence: Synthetic oligonucleotide
uccgcauacaugucguuag

SEQ ID NO: 537586 - RNA, 19 nt, Artificial Sequence
  Description of Artificial Sequence: Synthetic oligonucleotide
gacuaaaaucacaugagga

SEQ ID NO: 537587 - RNA, 19 nt, Artificial Sequence
  Description of Artificial Sequence: Synthetic oligonucleotide
gccauuacaacacuggggc

SEQ ID NO: 537588 - RNA, 19 nt, Artificial Sequence
  Description of Artificial Sequence: Synthetic oligonucleotide
aauccgagucuccaaauua

SEQ ID NO: 537589 - RNA, 19 nt, Artificial Sequence
  Description of Artificial Sequence: Synthetic oligonucleotide
ucugccgauauguugcuga

SEQ ID NO: 537590 - RNA, 19 nt, Artificial Sequence
  Description of Artificial Sequence: Synthetic oligonucleotide
ugucaugcaguuccgggug

SEQ ID NO: 537591 - RNA, 19 nt, Artificial Sequence
  Description of Artificial Sequence: Synthetic oligonucleotide
ucauaaacauggcggcucc

SEQ ID NO: 537592 - RNA, 19 nt, Artificial Sequence
  Description of Artificial Sequence: Synthetic oligonucleotide
aucauaaacauggcggcuc

SEQ ID NO: 537593 - RNA, 19 nt, Artificial Sequence
  Description of Artificial Sequence: Synthetic oligonucleotide
gugcuugaaaacaaagggg

SEQ ID NO: 537594 - RNA, 19 nt, Artificial Sequence
  Description of Artificial Sequence: Synthetic oligonucleotide
aagccguuuuggaucaugc

SEQ ID NO: 537595 - RNA, 19 nt, Artificial Sequence
  Description of Artificial Sequence: Synthetic oligonucleotide
aaacgugcaucucuaacuu

SEQ ID NO: 537596 - RNA, 19 nt, Artificial Sequence
  Description of Artificial Sequence: Synthetic oligonucleotide
ggacuaaaaucacaugagg

SEQ ID NO: 537597 - RNA, 19 nt, Artificial Sequence
  Description of Artificial Sequence: Synthetic oligonucleotide
gcacguauaaauucacugg

SEQ ID NO: 537598 - RNA, 19 nt, Artificial Sequence
  Description of Artificial Sequence: Synthetic oligonucleotide
ugucuggcuuaauauuagg

SEQ ID NO: 537599 - RNA, 19 nt, Artificial Sequence
  Description of Artificial Sequence: Synthetic oligonucleotide
uuuggauucgacugaacuu

SEQ ID NO: 537600 - RNA, 19 nt, Artificial Sequence
  Description of Artificial Sequence: Synthetic oligonucleotide
uugcuauaaacgugcaucu

SEQ ID NO: 537601 - RNA, 19 nt, Artificial Sequence
  Description of Artificial Sequence: Synthetic oligonucleotide
uggaucgaugagaucaaug

SEQ ID NO: 537602 - RNA, 19 nt, Artificial Sequence
  Description of Artificial Sequence: Synthetic oligonucleotide
aacgugcaucucuaacuuc

SEQ ID NO: 537603 - RNA, 19 nt, Artificial Sequence
  Description of Artificial Sequence: Synthetic oligonucleotide
agagacgacgcauaguaaa

SEQ ID NO: 537604 - RNA, 19 nt, Artificial Sequence
  Description of Artificial Sequence: Synthetic oligonucleotide
uggcuuaauauuaggaauu

SEQ ID NO: 537605 - RNA, 19 nt, Artificial Sequence
  Description of Artificial Sequence: Synthetic oligonucleotide
uaaauucacugguuugcug

SEQ ID NO: 537606 - RNA, 19 nt, Artificial Sequence
  Description of Artificial Sequence: Synthetic oligonucleotide
gacaugaugugcuuggcaa

SEQ ID NO: 537607 - RNA, 19 nt, Artificial Sequence
  Description of Artificial Sequence: Synthetic oligonucleotide
caucguuaucuucauauuc

SEQ ID NO: 537608 - RNA, 19 nt, Artificial Sequence
  Description of Artificial Sequence: Synthetic oligonucleotide
aauauguccugcagcauga

SEQ ID NO: 537609 - RNA, 19 nt, Artificial Sequence
  Description of Artificial Sequence: Synthetic oligonucleotide
ugauaagaaugucuggcuu

SEQ ID NO: 537610 - RNA, 19 nt, Artificial Sequence
  Description of Artificial Sequence: Synthetic oligonucleotide
ucgauuuuguccauacuuu

SEQ ID NO: 537611 - RNA, 19 nt, Artificial Sequence
  Description of Artificial Sequence: Synthetic oligonucleotide
agcggcgaggaccaggaac

SEQ ID NO: 537612 - RNA, 19 nt, Artificial Sequence
  Description of Artificial Sequence: Synthetic oligonucleotide
aaagugauccaugcucuug

SEQ ID NO: 537613 - RNA, 19 nt, Artificial Sequence
  Description of Artificial Sequence: Synthetic oligonucleotide
cagccucuugcuauaaacg

SEQ ID NO: 537614 - RNA, 19 nt, Artificial Sequence
  Description of Artificial Sequence: Synthetic oligonucleotide
uggcaugcgucauaaaagu

SEQ ID NO: 537615 - RNA, 19 nt, Artificial Sequence
  Description of Artificial Sequence: Synthetic oligonucleotide
aguauaagggauggccugg

SEQ ID NO: 537616 - RNA, 19 nt, Artificial Sequence
  Description of Artificial Sequence: Synthetic oligonucleotide
aucgcggacauccuggcug

SEQ ID NO: 537617 - RNA, 19 nt, Artificial Sequence
  Description of Artificial Sequence: Synthetic oligonucleotide
uaaaugggaaugucaugca

SEQ ID NO: 537618 - RNA, 19 nt, Artificial Sequence
  Description of Artificial Sequence: Synthetic oligonucleotide
ucggaucagcagcuggucg

SEQ ID NO: 537619 - RNA, 19 nt, Artificial Sequence
  Description of Artificial Sequence: Synthetic oligonucleotide
guuucgauuuuguccauac

SEQ ID NO: 537620 - RNA, 19 nt, Artificial Sequence
  Description of Artificial Sequence: Synthetic oligonucleotide
gauaagaaugucuggcuua

SEQ ID NO: 537621 - RNA, 19 nt, Artificial Sequence
  Description of Artificial Sequence: Synthetic oligonucleotide
uucgacugaacuuccagua

SEQ ID NO: 537622 - RNA, 19 nt, Artificial Sequence
  Description of Artificial Sequence: Synthetic oligonucleotide
aguaucacgguggucacug

SEQ ID NO: 537623 - RNA, 19 nt, Artificial Sequence
  Description of Artificial Sequence: Synthetic oligonucleotide
uacaauccgagucuccaaa

SEQ ID NO: 537624 - RNA, 19 nt, Artificial Sequence
  Description of Artificial Sequence: Synthetic oligonucleotide
guagauucgaugauaagaa

SEQ ID NO: 537625 - RNA, 19 nt, Artificial Sequence
  Description of Artificial Sequence: Synthetic oligonucleotide
agccguuuuggaucaugcc

SEQ ID NO: 537626 - RNA, 19 nt, Artificial Sequence
  Description of Artificial Sequence: Synthetic oligonucleotide
gauucgaugauaagaaugu

SEQ ID NO: 537627 - RNA, 19 nt, Artificial Sequence
  Description of Artificial Sequence: Synthetic oligonucleotide
aaaguaugugguaauuaaa

SEQ ID NO: 537628 - RNA, 19 nt, Artificial Sequence
  Description of Artificial Sequence: Synthetic oligonucleotide
uucccguccacugugacac

SEQ ID NO: 537629 - RNA, 19 nt, Artificial Sequence
  Description of Artificial Sequence: Synthetic oligonucleotide
aucguuaucuucauauucu

SEQ ID NO: 537630 - RNA, 19 nt, Artificial Sequence
  Description of Artificial Sequence: Synthetic oligonucleotide
acgguggucacuguguccg

SEQ ID NO: 537631 - RNA, 19 nt, Artificial Sequence
  Description of Artificial Sequence: Synthetic oligonucleotide
auucgacugaacuuccagu

SEQ ID NO: 537632 - RNA, 19 nt, Artificial Sequence
  Description of Artificial Sequence: Synthetic oligonucleotide
gucacagggagaaaguaug

SEQ ID NO: 537633 - RNA, 19 nt, Artificial Sequence
  Description of Artificial Sequence: Synthetic oligonucleotide
ucuacaucaccugucaauu

SEQ ID NO: 537634 - RNA, 19 nt, Artificial Sequence
  Description of Artificial Sequence: Synthetic oligonucleotide
ugccaugcacuucuuggcc

SEQ ID NO: 537635 - RNA, 19 nt, Artificial Sequence
  Description of Artificial Sequence: Synthetic oligonucleotide
auucgcuguuuucccgucc

SEQ ID NO: 537636 - RNA, 19 nt, Artificial Sequence
  Description of Artificial Sequence: Synthetic oligonucleotide
augucaucugccgauaugu

SEQ ID NO: 537637 - RNA, 19 nt, Artificial Sequence
  Description of Artificial Sequence: Synthetic oligonucleotide
uuaaagggcccaguauaag

SEQ ID NO: 537638 - RNA, 19 nt, Artificial Sequence
  Description of Artificial Sequence: Synthetic oligonucleotide
uguauacaacagcuucaca

SEQ ID NO: 537639 - RNA, 19 nt, Artificial Sequence
  Description of Artificial Sequence: Synthetic oligonucleotide
ugguaaucuguaugagcag

SEQ ID NO: 537640 - RNA, 19 nt, Artificial Sequence
  Description of Artificial Sequence: Synthetic oligonucleotide
uggaaguuaaugguuucga

SEQ ID NO: 537641 - RNA, 19 nt, Artificial Sequence
  Description of Artificial Sequence: Synthetic oligonucleotide
auauucgcuguuuucccgu

SEQ ID NO: 537642 - RNA, 19 nt, Artificial Sequence
  Description of Artificial Sequence: Synthetic oligonucleotide
guggcaugcgucauaaaag

SEQ ID NO: 537643 - RNA, 19 nt, Artificial Sequence
  Description of Artificial Sequence: Synthetic oligonucleotide
aacuugauuccugccaccu

SEQ ID NO: 537644 - RNA, 19 nt, Artificial Sequence
  Description of Artificial Sequence: Synthetic oligonucleotide
ucaauguaagguagagcau

SEQ ID NO: 537645 - RNA, 19 nt, Artificial Sequence
  Description of Artificial Sequence: Synthetic oligonucleotide
caguauaagggauggccug

SEQ ID NO: 537646 - RNA, 19 nt, Artificial Sequence
  Description of Artificial Sequence: Synthetic oligonucleotide
ugaaccucgaugugaacuu

SEQ ID NO: 537647 - RNA, 19 nt, Artificial Sequence
  Description of Artificial Sequence: Synthetic oligonucleotide
gacugauuagcagaagguc

SEQ ID NO: 537648 - RNA, 19 nt, Artificial Sequence
  Description of Artificial Sequence: Synthetic oligonucleotide
ugcaugaucuucccacuuc

SEQ ID NO: 537649 - RNA, 19 nt, Artificial Sequence
  Description of Artificial Sequence: Synthetic oligonucleotide
uggauucgacugaacuucc

SEQ ID NO: 537650 - RNA, 19 nt, Artificial Sequence
  Description of Artificial Sequence: Synthetic oligonucleotide
augucaugcaguuccgggu

SEQ ID NO: 537651 - RNA, 19 nt, Artificial Sequence
  Description of Artificial Sequence: Synthetic oligonucleotide
gaaggucgaucucggcugg

SEQ ID NO: 537652 - RNA, 19 nt, Artificial Sequence
  Description of Artificial Sequence: Synthetic oligonucleotide
caaagacaggaaugagacc

SEQ ID NO: 537653 - RNA, 19 nt, Artificial Sequence
  Description of Artificial Sequence: Synthetic oligonucleotide
uuuguggcaugcgucauaa

SEQ ID NO: 537654 - RNA, 19 nt, Artificial Sequence
  Description of Artificial Sequence: Synthetic oligonucleotide
ccucuugcuauaaacgugc

SEQ ID NO: 537655 - RNA, 19 nt, Artificial Sequence
  Description of Artificial Sequence: Synthetic oligonucleotide
ucguuaucuucauauucuc

SEQ ID NO: 537656 - RNA, 19 nt, Artificial Sequence
  Description of Artificial Sequence: Synthetic oligonucleotide
cugauuagcagaaggucga

SEQ ID NO: 537657 - RNA, 19 nt, Artificial Sequence
  Description of Artificial Sequence: Synthetic oligonucleotide
acaccuucagagcagguuu

SEQ ID NO: 537658 - RNA, 19 nt, Artificial Sequence
  Description of Artificial Sequence: Synthetic oligonucleotide
ugcgucauaaaaguccguc

SEQ ID NO: 537659 - RNA, 19 nt, Artificial Sequence
  Description of Artificial Sequence: Synthetic oligonucleotide
ccauauguagauucgauga

SEQ ID NO: 537660 - RNA, 19 nt, Artificial Sequence
  Description of Artificial Sequence: Synthetic oligonucleotide
uggcaagugucccuucuac

SEQ ID NO: 537661 - RNA, 19 nt, Artificial Sequence
  Description of Artificial Sequence: Synthetic oligonucleotide
accgaaagcagagccacag

SEQ ID NO: 537662 - RNA, 19 nt, Artificial Sequence
  Description of Artificial Sequence: Synthetic oligonucleotide
auucgaugauaagaauguc

SEQ ID NO: 537663 - RNA, 19 nt, Artificial Sequence
  Description of Artificial Sequence: Synthetic oligonucleotide
ucggcuggaucgaugagau

SEQ ID NO: 537664 - RNA, 19 nt, Artificial Sequence
  Description of Artificial Sequence: Synthetic oligonucleotide
guacccugcgaugaugacg

SEQ ID NO: 537665 - RNA, 19 nt, Artificial Sequence
  Description of Artificial Sequence: Synthetic oligonucleotide
gcaugcgucauaaaagucc

SEQ ID NO: 537666 - RNA, 19 nt, Artificial Sequence
  Description of Artificial Sequence: Synthetic oligonucleotide
aucucggcuggaucgauga

SEQ ID NO: 537667 - RNA, 19 nt, Artificial Sequence
  Description of Artificial Sequence: Synthetic oligonucleotide
agacaugaugugcuuggca

SEQ ID NO: 537668 - RNA, 19 nt, Artificial Sequence
  Description of Artificial Sequence: Synthetic oligonucleotide
ucauaaaaguccguccuuu

SEQ ID NO: 537669 - RNA, 19 nt, Artificial Sequence
  Description of Artificial Sequence: Synthetic oligonucleotide
ucguuagagggguuugcca

SEQ ID NO: 537670 - RNA, 19 nt, Artificial Sequence
  Description of Artificial Sequence: Synthetic oligonucleotide
cagagcacguauaaauuca

SEQ ID NO: 537671 - RNA, 19 nt, Artificial Sequence
  Description of Artificial Sequence: Synthetic oligonucleotide
guacucaucuagaaucagc

SEQ ID NO: 537672 - RNA, 19 nt, Artificial Sequence
  Description of Artificial Sequence: Synthetic oligonucleotide
guuagagggguuugccagc

SEQ ID NO: 537673 - RNA, 19 nt, Artificial Sequence
  Description of Artificial Sequence: Synthetic oligonucleotide
aguacccugcgaugaugac

SEQ ID NO: 537674 - RNA, 19 nt, Artificial Sequence
  Description of Artificial Sequence: Synthetic oligonucleotide
cucugagggacucaucauc

SEQ ID NO: 537675 - RNA, 19 nt, Artificial Sequence
  Description of Artificial Sequence: Synthetic oligonucleotide
uuagagggguuugccagcc

SEQ ID NO: 537676 - RNA, 19 nt, Artificial Sequence
  Description of Artificial Sequence: Synthetic oligonucleotide
uaaucuguaugagcagaga

SEQ ID NO: 537677 - RNA, 19 nt, Artificial Sequence
  Description of Artificial Sequence: Synthetic oligonucleotide
gaugugaacuucaucguua

SEQ ID NO: 537678 - RNA, 19 nt, Artificial Sequence
  Description of Artificial Sequence: Synthetic oligonucleotide
agaaaguaugugguaauua

SEQ ID NO: 537679 - RNA, 19 nt, Artificial Sequence
  Description of Artificial Sequence: Synthetic oligonucleotide
cagaacuugauuccugcca

SEQ ID NO: 537680 - RNA, 19 nt, Artificial Sequence
  Description of Artificial Sequence: Synthetic oligonucleotide
ccaaauauguccugcagca

SEQ ID NO: 537681 - RNA, 19 nt, Artificial Sequence
  Description of Artificial Sequence: Synthetic oligonucleotide
agcaccgaggggucggauc

SEQ ID NO: 537682 - RNA, 19 nt, Artificial Sequence
  Description of Artificial Sequence: Synthetic oligonucleotide
acgcauaguaaaugggaau

SEQ ID NO: 537683 - RNA, 19 nt, Artificial Sequence
  Description of Artificial Sequence: Synthetic oligonucleotide
auaaacauggcggcuccca

SEQ ID NO: 537684 - RNA, 19 nt, Artificial Sequence
  Description of Artificial Sequence: Synthetic oligonucleotide
auauguagauucgaugaua

SEQ ID NO: 537685 - RNA, 19 nt, Artificial Sequence
  Description of Artificial Sequence: Synthetic oligonucleotide
ggaucgaugagaucaaugu

SEQ ID NO: 537686 - RNA, 19 nt, Artificial Sequence
  Description of Artificial Sequence: Synthetic oligonucleotide
acgacgcauaguaaauggg

SEQ ID NO: 537687 - RNA, 19 nt, Artificial Sequence
  Description of Artificial Sequence: Synthetic oligonucleotide
ugcugguaaucuguaugag

SEQ ID NO: 537688 - RNA, 19 nt, Artificial Sequence
  Description of Artificial Sequence: Synthetic oligonucleotide
cauucuacaauccgagucu

SEQ ID NO: 537689 - RNA, 19 nt, Artificial Sequence
  Description of Artificial Sequence: Synthetic oligonucleotide
uuuucccguccacugugac

SEQ ID NO: 537690 - RNA, 19 nt, Artificial Sequence
  Description of Artificial Sequence: Synthetic oligonucleotide
gacugaacuuccaguauca

SEQ ID NO: 537691 - RNA, 19 nt, Artificial Sequence
  Description of Artificial Sequence: Synthetic oligonucleotide
agccauuaggugucugucu

SEQ ID NO: 537692 - RNA, 19 nt, Artificial Sequence
  Description of Artificial Sequence: Synthetic oligonucleotide
guauaagggauggccuggg

SEQ ID NO: 537693 - RNA, 19 nt, Artificial Sequence
  Description of Artificial Sequence: Synthetic oligonucleotide
cuauaaacgugcaucucua

SEQ ID NO: 537694 - RNA, 19 nt, Artificial Sequence
  Description of Artificial Sequence: Synthetic oligonucleotide
uccgagucuccaaauuaau

SEQ ID NO: 537695 - RNA, 19 nt, Artificial Sequence
  Description of Artificial Sequence: Synthetic oligonucleotide
gauauguugcugacuuuga

SEQ ID NO: 537696 - RNA, 19 nt, Artificial Sequence
  Description of Artificial Sequence: Synthetic oligonucleotide
ugccaguacucaucuagaa

SEQ ID NO: 537697 - RNA, 19 nt, Artificial Sequence
  Description of Artificial Sequence: Synthetic oligonucleotide
augucuggcuuaauauuag

SEQ ID NO: 537698 - RNA, 19 nt, Artificial Sequence
  Description of Artificial Sequence: Synthetic oligonucleotide
gacgcauaguaaaugggaa

SEQ ID NO: 537699 - RNA, 19 nt, Artificial Sequence
  Description of Artificial Sequence: Synthetic oligonucleotide
auagccuuuguggcaugcg

SEQ ID NO: 537700 - RNA, 19 nt, Artificial Sequence
  Description of Artificial Sequence: Synthetic oligonucleotide
uaagccguuuuggaucaug

SEQ ID NO: 537701 - RNA, 19 nt, Artificial Sequence
  Description of Artificial Sequence: Synthetic oligonucleotide
ccgaggauugugaaccucg

SEQ ID NO: 537702 - RNA, 19 nt, Artificial Sequence
  Description of Artificial Sequence: Synthetic oligonucleotide
ucuucacgcuucucgugga

SEQ ID NO: 537703 - RNA, 19 nt, Artificial Sequence
  Description of Artificial Sequence: Synthetic oligonucleotide
ggccauuacaacacugggg

SEQ ID NO: 537704 - RNA, 19 nt, Artificial Sequence
  Description of Artificial Sequence: Synthetic oligonucleotide
agucugagagaagccaucu

SEQ ID NO: 537705 - RNA, 19 nt, Artificial Sequence
  Description of Artificial Sequence: Synthetic oligonucleotide
agacgacgcauaguaaaug

SEQ ID NO: 537706 - RNA, 19 nt, Artificial Sequence
  Description of Artificial Sequence: Synthetic oligonucleotide
cacguauaaauucacuggu

SEQ ID NO: 537707 - RNA, 19 nt, Artificial Sequence
  Description of Artificial Sequence: Synthetic oligonucleotide
agccacagcgaaccgagaa

SEQ ID NO: 537708 - RNA, 19 nt, Artificial Sequence
  Description of Artificial Sequence: Synthetic oligonucleotide
aucaaccgacauuuucagu

SEQ ID NO: 537709 - RNA, 19 nt, Artificial Sequence
  Description of Artificial Sequence: Synthetic oligonucleotide
ugucguuagagggguuugc

SEQ ID NO: 537710 - RNA, 19 nt, Artificial Sequence
  Description of Artificial Sequence: Synthetic oligonucleotide
uaggucugguacacugcca

SEQ ID NO: 537711 - RNA, 19 nt, Artificial Sequence
  Description of Artificial Sequence: Synthetic oligonucleotide
ugcaccgcaccuuuccuua

SEQ ID NO: 537712 - RNA, 19 nt, Artificial Sequence
  Description of Artificial Sequence: Synthetic oligonucleotide
gaauuucggcagccauuag

SEQ ID NO: 537713 - RNA, 19 nt, Artificial Sequence
  Description of Artificial Sequence: Synthetic oligonucleotide
ucgccgcagccucuaaacc

SEQ ID NO: 537714 - RNA, 19 nt, Artificial Sequence
  Description of Artificial Sequence: Synthetic oligonucleotide
gucgccgcagccucuaaac

SEQ ID NO: 537715 - RNA, 19 nt, Artificial Sequence
  Description of Artificial Sequence: Synthetic oligonucleotide
gauuagcagaaggucgauc

SEQ ID NO: 537716 - RNA, 19 nt, Artificial Sequence
  Description of Artificial Sequence: Synthetic oligonucleotide
cuccguguuccgaggauug

SEQ ID NO: 537717 - RNA, 19 nt, Artificial Sequence
  Description of Artificial Sequence: Synthetic oligonucleotide
cucuuccgagagcaaagac

SEQ ID NO: 537718 - RNA, 19 nt, Artificial Sequence
  Description of Artificial Sequence: Synthetic oligonucleotide
auuacaacacuggggccga

SEQ ID NO: 537719 - RNA, 19 nt, Artificial Sequence
  Description of Artificial Sequence: Synthetic oligonucleotide
ugugaacuucaucguuauc

SEQ ID NO: 537720 - RNA, 19 nt, Artificial Sequence
  Description of Artificial Sequence: Synthetic oligonucleotide
auagucugagagaagccau

SEQ ID NO: 537721 - RNA, 19 nt, Artificial Sequence
  Description of Artificial Sequence: Synthetic oligonucleotide
gcuauaaacgugcaucucu

SEQ ID NO: 537722 - RNA, 19 nt, Artificial Sequence
  Description of Artificial Sequence: Synthetic oligonucleotide
agccuuuguggcaugcguc

SEQ ID NO: 537723 - RNA, 19 nt, Artificial Sequence
  Description of Artificial Sequence: Synthetic oligonucleotide
gcgucauaaaaguccgucc

SEQ ID NO: 537724 - RNA, 19 nt, Artificial Sequence
  Description of Artificial Sequence: Synthetic oligonucleotide
acgccguuccucuuaucug

SEQ ID NO: 537725 - RNA, 19 nt, Artificial Sequence
  Description of Artificial Sequence: Synthetic oligonucleotide
aaccucgaugugaacuuca

SEQ ID NO: 537726 - RNA, 19 nt, Artificial Sequence
  Description of Artificial Sequence: Synthetic oligonucleotide
gucguuagagggguuugcc

SEQ ID NO: 537727 - RNA, 19 nt, Artificial Sequence
  Description of Artificial Sequence: Synthetic oligonucleotide
cagcuuucaaacagcucuc

SEQ ID NO: 537728 - RNA, 19 nt, Artificial Sequence
  Description of Artificial Sequence: Synthetic oligonucleotide
gggucccauauguagauuc

SEQ ID NO: 537729 - RNA, 19 nt, Artificial Sequence
  Description of Artificial Sequence: Synthetic oligonucleotide
ucucggcuggaucgaugag

SEQ ID NO: 537730 - RNA, 19 nt, Artificial Sequence
  Description of Artificial Sequence: Synthetic oligonucleotide
agggaucgcggacauccug

SEQ ID NO: 537731 - RNA, 19 nt, Artificial Sequence
  Description of Artificial Sequence: Synthetic oligonucleotide
cguuagagggguuugccag

SEQ ID NO: 537732 - RNA, 19 nt, Artificial Sequence
  Description of Artificial Sequence: Synthetic oligonucleotide
agacccgcuggcccuguuc

SEQ ID NO: 537733 - RNA, 19 nt, Artificial Sequence
  Description of Artificial Sequence: Synthetic oligonucleotide
gaaccuugcuucucgcucu

SEQ ID NO: 537734 - RNA, 19 nt, Artificial Sequence
  Description of Artificial Sequence: Synthetic oligonucleotide
ugucaucugccgauauguu

SEQ ID NO: 537735 - RNA, 19 nt, Artificial Sequence
  Description of Artificial Sequence: Synthetic oligonucleotide
gaugacgccguuccucuua

SEQ ID NO: 537736 - RNA, 19 nt, Artificial Sequence
  Description of Artificial Sequence: Synthetic oligonucleotide
ugcuauaaacgugcaucuc

SEQ ID NO: 537737 - RNA, 19 nt, Artificial Sequence
  Description of Artificial Sequence: Synthetic oligonucleotide
guaugagcagagaaagaaa

SEQ ID NO: 537738 - RNA, 19 nt, Artificial Sequence
  Description of Artificial Sequence: Synthetic oligonucleotide
cauggcggcucccaggaca

SEQ ID NO: 537739 - RNA, 19 nt, Artificial Sequence
  Description of Artificial Sequence: Synthetic oligonucleotide
caugguagcaccagaacuu

SEQ ID NO: 537740 - RNA, 19 nt, Artificial Sequence
  Description of Artificial Sequence: Synthetic oligonucleotide
caguacccugcgaugauga

SEQ ID NO: 537741 - RNA, 19 nt, Artificial Sequence
  Description of Artificial Sequence: Synthetic oligonucleotide
cagcgaaccgagaaggaaa

SEQ ID NO: 537742 - RNA, 19 nt, Artificial Sequence
  Description of Artificial Sequence: Synthetic oligonucleotide
gggaucgcggacauccugg

SEQ ID NO: 537743 - RNA, 19 nt, Artificial Sequence
  Description of Artificial Sequence: Synthetic oligonucleotide
acagcgaaccgagaaggaa

SEQ ID NO: 537744 - RNA, 19 nt, Artificial Sequence
  Description of Artificial Sequence: Synthetic oligonucleotide
gccucuaaaccgaaagcag

SEQ ID NO: 537745 - RNA, 19 nt, Artificial Sequence
  Description of Artificial Sequence: Synthetic oligonucleotide
guguaauuugagaggucac

SEQ ID NO: 537746 - RNA, 19 nt, Artificial Sequence
  Description of Artificial Sequence: Synthetic oligonucleotide
ccacagcgaaccgagaagg

SEQ ID NO: 537747 - RNA, 19 nt, Artificial Sequence
  Description of Artificial Sequence: Synthetic oligonucleotide
acaguacccugcgaugaug

SEQ ID NO: 537748 - RNA, 19 nt, Artificial Sequence
  Description of Artificial Sequence: Synthetic oligonucleotide
augucguuagagggguuug

SEQ ID NO: 537749 - RNA, 19 nt, Artificial Sequence
  Description of Artificial Sequence: Synthetic oligonucleotide
accgaggggucggaucagc

SEQ ID NO: 537750 - RNA, 19 nt, Artificial Sequence
  Description of Artificial Sequence: Synthetic oligonucleotide
ucgcggacauccuggcugu

SEQ ID NO: 537751 - RNA, 19 nt, Artificial Sequence
  Description of Artificial Sequence: Synthetic oligonucleotide
gccacagcgaaccgagaag

SEQ ID NO: 537752 - RNA, 19 nt, Artificial Sequence
  Description of Artificial Sequence: Synthetic oligonucleotide
uuccgaggauugugaaccu

SEQ ID NO: 537753 - RNA, 19 nt, Artificial Sequence
  Description of Artificial Sequence: Synthetic oligonucleotide
caguguaauuugagagguc

SEQ ID NO: 537754 - RNA, 19 nt, Artificial Sequence
  Description of Artificial Sequence: Synthetic oligonucleotide
cauaaacauggcggcuccc

SEQ ID NO: 537755 - RNA, 19 nt, Artificial Sequence
  Description of Artificial Sequence: Synthetic oligonucleotide
ugccuccguguuccgagga

SEQ ID NO: 537756 - RNA, 19 nt, Artificial Sequence
  Description of Artificial Sequence: Synthetic oligonucleotide
cuuucagccuggccauuuc

SEQ ID NO: 537757 - RNA, 19 nt, Artificial Sequence
  Description of Artificial Sequence: Synthetic oligonucleotide
ugcgaugaugacgccguuc

SEQ ID NO: 537758 - RNA, 19 nt, Artificial Sequence
  Description of Artificial Sequence: Synthetic oligonucleotide
cagaaggucgaucucggcu

SEQ ID NO: 537759 - RNA, 19 nt, Artificial Sequence
  Description of Artificial Sequence: Synthetic oligonucleotide
ugauuagcagaaggucgau

SEQ ID NO: 537760 - RNA, 19 nt, Artificial Sequence
  Description of Artificial Sequence: Synthetic oligonucleotide
guugcagaaccuugcuucu

SEQ ID NO: 537761 - RNA, 19 nt, Artificial Sequence
  Description of Artificial Sequence: Synthetic oligonucleotide
ggaauuucggcagccauua

SEQ ID NO: 537762 - RNA, 19 nt, Artificial Sequence
  Description of Artificial Sequence: Synthetic oligonucleotide
accgcaccuuuccuuauuu

SEQ ID NO: 537763 - RNA, 19 nt, Artificial Sequence
  Description of Artificial Sequence: Synthetic oligonucleotide
uggcaacuucuguccagac

SEQ ID NO: 537764 - RNA, 19 nt, Artificial Sequence
  Description of Artificial Sequence: Synthetic oligonucleotide
ggccgaugucgucaaagug

SEQ ID NO: 537765 - RNA, 19 nt, Artificial Sequence
  Description of Artificial Sequence: Synthetic oligonucleotide
cgauauguugcugacuuug

SEQ ID NO: 537766 - RNA, 19 nt, Artificial Sequence
  Description of Artificial Sequence: Synthetic oligonucleotide
cauauguagauucgaugau

SEQ ID NO: 537767 - RNA, 19 nt, Artificial Sequence
  Description of Artificial Sequence: Synthetic oligonucleotide
acguauaaauucacugguu

SEQ ID NO: 537768 - RNA, 19 nt, Artificial Sequence
  Description of Artificial Sequence: Synthetic oligonucleotide
gcggcgaggaccaggaacc

SEQ ID NO: 537769 - RNA, 19 nt, Artificial Sequence
  Description of Artificial Sequence: Synthetic oligonucleotide
agcgaaccgagaaggaaaa

SEQ ID NO: 537770 - RNA, 19 nt, Artificial Sequence
  Description of Artificial Sequence: Synthetic oligonucleotide
gccguuuuggaucaugccu

SEQ ID NO: 537771 - RNA, 19 nt, Artificial Sequence
  Description of Artificial Sequence: Synthetic oligonucleotide
auguaagguagagcaucca

SEQ ID NO: 537772 - RNA, 19 nt, Artificial Sequence
  Description of Artificial Sequence: Synthetic oligonucleotide
cugaucagagcugcuuuca

SEQ ID NO: 537773 - RNA, 19 nt, Artificial Sequence
  Description of Artificial Sequence: Synthetic oligonucleotide
cugccuccguguuccgagg

SEQ ID NO: 537774 - RNA, 19 nt, Artificial Sequence
  Description of Artificial Sequence: Synthetic oligonucleotide
cgaugagaucaauguaagg

SEQ ID NO: 537775 - RNA, 19 nt, Artificial Sequence
  Description of Artificial Sequence: Synthetic oligonucleotide
accgacauuuucaguggca

SEQ ID NO: 537776 - RNA, 19 nt, Artificial Sequence
  Description of Artificial Sequence: Synthetic oligonucleotide
cuacaauccgagucuccaa

SEQ ID NO: 537777 - RNA, 19 nt, Artificial Sequence
  Description of Artificial Sequence: Synthetic oligonucleotide
ccauuacaacacuggggcc

SEQ ID NO: 537778 - RNA, 19 nt, Artificial Sequence
  Description of Artificial Sequence: Synthetic oligonucleotide
uagagggguuugccagcca

SEQ ID NO: 537779 - RNA, 19 nt, Artificial Sequence
  Description of Artificial Sequence: Synthetic oligonucleotide
agaauuccagagacccgcu

SEQ ID NO: 537780 - RNA, 19 nt, Artificial Sequence
  Description of Artificial Sequence: Synthetic oligonucleotide
gucacuguguccgcauaca

SEQ ID NO: 537781 - RNA, 19 nt, Artificial Sequence
  Description of Artificial Sequence: Synthetic oligonucleotide
ugccgauauguugcugacu

SEQ ID NO: 537782 - RNA, 19 nt, Artificial Sequence
  Description of Artificial Sequence: Synthetic oligonucleotide
auuaggugucugucuucuu

SEQ ID NO: 537783 - RNA, 19 nt, Artificial Sequence
  Description of Artificial Sequence: Synthetic oligonucleotide
gccuuuguggcaugcguca

SEQ ID NO: 537784 - RNA, 19 nt, Artificial Sequence
  Description of Artificial Sequence: Synthetic oligonucleotide
gagcucuuccgagagcaaa

SEQ ID NO: 537785 - RNA, 19 nt, Artificial Sequence
  Description of Artificial Sequence: Synthetic oligonucleotide
uccgaggauugugaaccuc

SEQ ID NO: 537786 - RNA, 19 nt, Artificial Sequence
  Description of Artificial Sequence: Synthetic oligonucleotide
guaagguagagcauccauu

SEQ ID NO: 537787 - RNA, 19 nt, Artificial Sequence
  Description of Artificial Sequence: Synthetic oligonucleotide
cauuaggugucugucuucu

SEQ ID NO: 537788 - RNA, 19 nt, Artificial Sequence
  Description of Artificial Sequence: Synthetic oligonucleotide
aaccgaaagcagagccaca

SEQ ID NO: 537789 - RNA, 19 nt, Artificial Sequence
  Description of Artificial Sequence: Synthetic oligonucleotide
ggggccgaugucgucaaag

SEQ ID NO: 537790 - RNA, 19 nt, Artificial Sequence
  Description of Artificial Sequence: Synthetic oligonucleotide
ggaucgcggacauccuggc

SEQ ID NO: 537791 - RNA, 19 nt, Artificial Sequence
  Description of Artificial Sequence: Synthetic oligonucleotide
gagacgacgcauaguaaau

SEQ ID NO: 537792 - RNA, 19 nt, Artificial Sequence
  Description of Artificial Sequence: Synthetic oligonucleotide
uugcagaaccuugcuucuc

SEQ ID NO: 537793 - RNA, 19 nt, Artificial Sequence
  Description of Artificial Sequence: Synthetic oligonucleotide
gcaccgaggggucggauca

SEQ ID NO: 537794 - RNA, 19 nt, Artificial Sequence
  Description of Artificial Sequence: Synthetic oligonucleotide
cacagcgaaccgagaagga

SEQ ID NO: 537795 - RNA, 19 nt, Artificial Sequence
  Description of Artificial Sequence: Synthetic oligonucleotide
agagcaccacagugaucca

SEQ ID NO: 537796 - RNA, 19 nt, Artificial Sequence
  Description of Artificial Sequence: Synthetic oligonucleotide
uccguccuuugaagcuugu

SEQ ID NO: 537797 - RNA, 19 nt, Artificial Sequence
  Description of Artificial Sequence: Synthetic oligonucleotide
uccguguuccgaggauugu

SEQ ID NO: 537798 - RNA, 19 nt, Artificial Sequence
  Description of Artificial Sequence: Synthetic oligonucleotide
guuccgggugguucugcca

SEQ ID NO: 537799 - RNA, 19 nt, Artificial Sequence
  Description of Artificial Sequence: Synthetic oligonucleotide
uguccgcauacaugucguu

SEQ ID NO: 537800 - RNA, 19 nt, Artificial Sequence
  Description of Artificial Sequence: Synthetic oligonucleotide
gccgauauguugcugacuu

SEQ ID NO: 537801 - RNA, 19 nt, Artificial Sequence
  Description of Artificial Sequence: Synthetic oligonucleotide
agcugguaauacagcaaau

SEQ ID NO: 537802 - RNA, 19 nt, Artificial Sequence
  Description of Artificial Sequence: Synthetic oligonucleotide
ggaaguuaaugguuucgau

SEQ ID NO: 537803 - RNA, 19 nt, Artificial Sequence
  Description of Artificial Sequence: Synthetic oligonucleotide
cgacgcauaguaaauggga

SEQ ID NO: 537804 - RNA, 19 nt, Artificial Sequence
  Description of Artificial Sequence: Synthetic oligonucleotide
uccgggugguucugccagu

SEQ ID NO: 537805 - RNA, 19 nt, Artificial Sequence
  Description of Artificial Sequence: Synthetic oligonucleotide
gucggaucagcagcugguc

SEQ ID NO: 537806 - RNA, 19 nt, Artificial Sequence
  Description of Artificial Sequence: Synthetic oligonucleotide
accugcaaucucaaucaua

SEQ ID NO: 537807 - RNA, 19 nt, Artificial Sequence
  Description of Artificial Sequence: Synthetic oligonucleotide
guuuucccguccacuguga

SEQ ID NO: 537808 - RNA, 19 nt, Artificial Sequence
  Description of Artificial Sequence: Synthetic oligonucleotide
aaggucgaucucggcugga

SEQ ID NO: 537809 - RNA, 19 nt, Artificial Sequence
  Description of Artificial Sequence: Synthetic oligonucleotide
cagagacgacgcauaguaa

SEQ ID NO: 537810 - RNA, 19 nt, Artificial Sequence
  Description of Artificial Sequence: Synthetic oligonucleotide
cacauucuacaauccgagu

SEQ ID NO: 537811 - RNA, 19 nt, Artificial Sequence
  Description of Artificial Sequence: Synthetic oligonucleotide
aucugccgauauguugcug

SEQ ID NO: 537812 - RNA, 19 nt, Artificial Sequence
  Description of Artificial Sequence: Synthetic oligonucleotide
agcaugucaucugccgaua

SEQ ID NO: 537813 - RNA, 19 nt, Artificial Sequence
  Description of Artificial Sequence: Synthetic oligonucleotide
gccaucuguaaauagccuu

SEQ ID NO: 537814 - RNA, 19 nt, Artificial Sequence
  Description of Artificial Sequence: Synthetic oligonucleotide
auucacugguuugcuggua

SEQ ID NO: 537815 - RNA, 19 nt, Artificial Sequence
  Description of Artificial Sequence: Synthetic oligonucleotide
ccaguauaagggauggccu

SEQ ID NO: 537816 - RNA, 19 nt, Artificial Sequence
  Description of Artificial Sequence: Synthetic oligonucleotide
ccaguaucacgguggucac

SEQ ID NO: 537817 - RNA, 19 nt, Artificial Sequence
  Description of Artificial Sequence: Synthetic oligonucleotide
accucgaugugaacuucau

SEQ ID NO: 537818 - RNA, 19 nt, Artificial Sequence
  Description of Artificial Sequence: Synthetic oligonucleotide
ccaagucugucucagugua

SEQ ID NO: 537819 - RNA, 19 nt, Artificial Sequence
  Description of Artificial Sequence: Synthetic oligonucleotide
ccauuaggugucugucuuc

SEQ ID NO: 537820 - RNA, 19 nt, Artificial Sequence
  Description of Artificial Sequence: Synthetic oligonucleotide
gggcccaguauaagggaug

SEQ ID NO: 537821 - RNA, 19 nt, Artificial Sequence
  Description of Artificial Sequence: Synthetic oligonucleotide
caggaacccgucgccgcag

SEQ ID NO: 537822 - RNA, 19 nt, Artificial Sequence
  Description of Artificial Sequence: Synthetic oligonucleotide
guuccccauggacuaaaau

SEQ ID NO: 537823 - RNA, 19 nt, Artificial Sequence
  Description of Artificial Sequence: Synthetic oligonucleotide
gaucgcggacauccuggcu

SEQ ID NO: 537824 - RNA, 19 nt, Artificial Sequence
  Description of Artificial Sequence: Synthetic oligonucleotide
cagaaccuugcuucucgcu

SEQ ID NO: 537825 - RNA, 19 nt, Artificial Sequence
  Description of Artificial Sequence: Synthetic oligonucleotide
caauccgagucuccaaauu

SEQ ID NO: 537826 - RNA, 19 nt, Artificial Sequence
  Description of Artificial Sequence: Synthetic oligonucleotide
guguccgcauacaugucgu

SEQ ID NO: 537827 - RNA, 19 nt, Artificial Sequence
  Description of Artificial Sequence: Synthetic oligonucleotide
gaacccgucgccgcagccu

SEQ ID NO: 537828 - RNA, 19 nt, Artificial Sequence
  Description of Artificial Sequence: Synthetic oligonucleotide
ugggucccauauguagauu

SEQ ID NO: 537829 - RNA, 19 nt, Artificial Sequence
  Description of Artificial Sequence: Synthetic oligonucleotide
cagauggaaaugacugauu

SEQ ID NO: 537830 - RNA, 19 nt, Artificial Sequence
  Description of Artificial Sequence: Synthetic oligonucleotide
cguauaaauucacugguuu

SEQ ID NO: 537831 - RNA, 19 nt, Artificial Sequence
  Description of Artificial Sequence: Synthetic oligonucleotide
cuccuguaugacagugaua

SEQ ID NO: 537832 - RNA, 19 nt, Artificial Sequence
  Description of Artificial Sequence: Synthetic oligonucleotide
gccauuaggugucugucuu

SEQ ID NO: 537833 - RNA, 19 nt, Artificial Sequence
  Description of Artificial Sequence: Synthetic oligonucleotide
cgucauaaaaguccguccu

SEQ ID NO: 537834 - RNA, 19 nt, Artificial Sequence
  Description of Artificial Sequence: Synthetic oligonucleotide
ugacgccguuccucuuauc

SEQ ID NO: 537835 - RNA, 19 nt, Artificial Sequence
  Description of Artificial Sequence: Synthetic oligonucleotide
gcucuuccgagagcaaaga

SEQ ID NO: 537836 - RNA, 19 nt, Artificial Sequence
  Description of Artificial Sequence: Synthetic oligonucleotide
caugucguuagagggguuu

SEQ ID NO: 537837 - RNA, 19 nt, Artificial Sequence
  Description of Artificial Sequence: Synthetic oligonucleotide
ggauucgacugaacuucca

SEQ ID NO: 537838 - RNA, 19 nt, Artificial Sequence
  Description of Artificial Sequence: Synthetic oligonucleotide
caucugccgauauguugcu

SEQ ID NO: 537839 - RNA, 19 nt, Artificial Sequence
  Description of Artificial Sequence: Synthetic oligonucleotide
gcuucagagcacguauaaa

SEQ ID NO: 537840 - RNA, 19 nt, Artificial Sequence
  Description of Artificial Sequence: Synthetic oligonucleotide
ucccguccacugugacacu

SEQ ID NO: 537841 - RNA, 19 nt, Artificial Sequence
  Description of Artificial Sequence: Synthetic oligonucleotide
ggucuguuucacagugcuc

SEQ ID NO: 537842 - RNA, 19 nt, Artificial Sequence
  Description of Artificial Sequence: Synthetic oligonucleotide
ccgacauuuucaguggcaa

SEQ ID NO: 537843 - RNA, 19 nt, Artificial Sequence
  Description of Artificial Sequence: Synthetic oligonucleotide
caugaucuucccacuucuu

SEQ ID NO: 537844 - RNA, 19 nt, Artificial Sequence
  Description of Artificial Sequence: Synthetic oligonucleotide
caaauauguccugcagcau

SEQ ID NO: 537845 - RNA, 19 nt, Artificial Sequence
  Description of Artificial Sequence: Synthetic oligonucleotide
gggccgaugucgucaaagu

SEQ ID NO: 537846 - RNA, 19 nt, Artificial Sequence
  Description of Artificial Sequence: Synthetic oligonucleotide
uuacaacacuggggccgau

SEQ ID NO: 537847 - RNA, 19 nt, Artificial Sequence
  Description of Artificial Sequence: Synthetic oligonucleotide
caccgaggggucggaucag

SEQ ID NO: 537848 - RNA, 19 nt, Artificial Sequence
  Description of Artificial Sequence: Synthetic oligonucleotide
ggucggaucagcagcuggu

SEQ ID NO: 537849 - RNA, 19 nt, Artificial Sequence
  Description of Artificial Sequence: Synthetic oligonucleotide
gcuggaucgaugagaucaa

SEQ ID NO: 537850 - RNA, 19 nt, Artificial Sequence
  Description of Artificial Sequence: Synthetic oligonucleotide
ccgagagcaaagacaggaa

SEQ ID NO: 537851 - RNA, 19 nt, Artificial Sequence
  Description of Artificial Sequence: Synthetic oligonucleotide
guaucacgguggucacugu

SEQ ID NO: 537852 - RNA, 19 nt, Artificial Sequence
  Description of Artificial Sequence: Synthetic oligonucleotide
ccgaugucgucaaagugau

SEQ ID NO: 537853 - RNA, 19 nt, Artificial Sequence
  Description of Artificial Sequence: Synthetic oligonucleotide
gguugcuaaugugcuugaa

SEQ ID NO: 537854 - RNA, 19 nt, Artificial Sequence
  Description of Artificial Sequence: Synthetic oligonucleotide
caccuucagagcagguuuu

SEQ ID NO: 537855 - RNA, 19 nt, Artificial Sequence
  Description of Artificial Sequence: Synthetic oligonucleotide
cccguccacugugacacug

SEQ ID NO: 537856 - RNA, 19 nt, Artificial Sequence
  Description of Artificial Sequence: Synthetic oligonucleotide
agagacccgcuggcccugu

SEQ ID NO: 537857 - RNA, 19 nt, Artificial Sequence
  Description of Artificial Sequence: Synthetic oligonucleotide
cgaggauugugaaccucga

SEQ ID NO: 537858 - RNA, 19 nt, Artificial Sequence
  Description of Artificial Sequence: Synthetic oligonucleotide
cuucacgcuucucguggau

SEQ ID NO: 537859 - RNA, 19 nt, Artificial Sequence
  Description of Artificial Sequence: Synthetic oligonucleotide
acaugucguuagagggguu

SEQ ID NO: 537860 - RNA, 19 nt, Artificial Sequence
  Description of Artificial Sequence: Synthetic oligonucleotide
ccgcauacaugucguuaga

SEQ ID NO: 537861 - RNA, 19 nt, Artificial Sequence
  Description of Artificial Sequence: Synthetic oligonucleotide
uggcggcucccaggacaug

SEQ ID NO: 537862 - RNA, 19 nt, Artificial Sequence
  Description of Artificial Sequence: Synthetic oligonucleotide
cacauaggucugguacacu

SEQ ID NO: 537863 - RNA, 19 nt, Artificial Sequence
  Description of Artificial Sequence: Synthetic oligonucleotide
gagcggcgaggaccaggaa

SEQ ID NO: 537864 - RNA, 19 nt, Artificial Sequence
  Description of Artificial Sequence: Synthetic oligonucleotide
ccguccacugugacacuga

SEQ ID NO: 537865 - RNA, 19 nt, Artificial Sequence
  Description of Artificial Sequence: Synthetic oligonucleotide
caccugcaaucucaaucau

SEQ ID NO: 537866 - RNA, 19 nt, Artificial Sequence
  Description of Artificial Sequence: Synthetic oligonucleotide
cuccagccucuugcuauaa

SEQ ID NO: 537867 - RNA, 19 nt, Artificial Sequence
  Description of Artificial Sequence: Synthetic oligonucleotide
cuggaucgaugagaucaau

SEQ ID NO: 537868 - RNA, 19 nt, Artificial Sequence
  Description of Artificial Sequence: Synthetic oligonucleotide
cgccguuccucuuaucugu

SEQ ID NO: 537869 - RNA, 19 nt, Artificial Sequence
  Description of Artificial Sequence: Synthetic oligonucleotide
caguaucacgguggucacu

SEQ ID NO: 537870 - RNA, 19 nt, Artificial Sequence
  Description of Artificial Sequence: Synthetic oligonucleotide
gcuuucggaucuugucauu

SEQ ID NO: 537871 - RNA, 19 nt, Artificial Sequence
  Description of Artificial Sequence: Synthetic oligonucleotide
cgaugucgucaaagugauc

SEQ ID NO: 537872 - RNA, 19 nt, Artificial Sequence
  Description of Artificial Sequence: Synthetic oligonucleotide
gccagagacgacgcauagu

SEQ ID NO: 537873 - RNA, 19 nt, Artificial Sequence
  Description of Artificial Sequence: Synthetic oligonucleotide
caccgcaccuuuccuuauu

SEQ ID NO: 537874 - RNA, 19 nt, Artificial Sequence
  Description of Artificial Sequence: Synthetic oligonucleotide
acccgucgccgcagccucu

SEQ ID NO: 537875 - RNA, 19 nt, Artificial Sequence
  Description of Artificial Sequence: Synthetic oligonucleotide
gccuccguguuccgaggau

SEQ ID NO: 537876 - RNA, 19 nt, Artificial Sequence
  Description of Artificial Sequence: Synthetic oligonucleotide
gagacccgcuggcccuguu

SEQ ID NO: 537877 - RNA, 19 nt, Artificial Sequence
  Description of Artificial Sequence: Synthetic oligonucleotide
ccgauauguugcugacuuu

SEQ ID NO: 537878 - RNA, 19 nt, Artificial Sequence
  Description of Artificial Sequence: Synthetic oligonucleotide
cguggaugugggucccaua

SEQ ID NO: 537879 - RNA, 19 nt, Artificial Sequence
  Description of Artificial Sequence: Synthetic oligonucleotide
cugcgaugaugacgccguu

SEQ ID NO: 537880 - RNA, 19 nt, Artificial Sequence
  Description of Artificial Sequence: Synthetic oligonucleotide
ccuccguguuccgaggauu

SEQ ID NO: 537881 - RNA, 19 nt, Artificial Sequence
  Description of Artificial Sequence: Synthetic oligonucleotide
ccgcuggcccuguucuggu

SEQ ID NO: 537882 - RNA, 19 nt, Artificial Sequence
  Description of Artificial Sequence: Synthetic oligonucleotide
aaugcuaccuaagacaugc

SEQ ID NO: 537883 - RNA, 19 nt, Artificial Sequence
  Description of Artificial Sequence: Synthetic oligonucleotide
uuuauugccucuuuuauag

SEQ ID NO: 537884 - RNA, 19 nt, Artificial Sequence
  Description of Artificial Sequence: Synthetic oligonucleotide
aacuauaaggcgcuccugc

SEQ ID NO: 537885 - RNA, 19 nt, Artificial Sequence
  Description of Artificial Sequence: Synthetic oligonucleotide
aguuauuucccacugguuc

SEQ ID NO: 537886 - RNA, 19 nt, Artificial Sequence
  Description of Artificial Sequence: Synthetic oligonucleotide
guuuaguacuuauaaaccg

SEQ ID NO: 537887 - RNA, 19 nt, Artificial Sequence
  Description of Artificial Sequence: Synthetic oligonucleotide
ugggccauaacuauaaggc

SEQ ID NO: 537888 - RNA, 19 nt, Artificial Sequence
  Description of Artificial Sequence: Synthetic oligonucleotide
aagaaaauuuaccauucug

SEQ ID NO: 537889 - RNA, 19 nt, Artificial Sequence
  Description of Artificial Sequence: Synthetic oligonucleotide
aacaugcuaucucaaugcc

SEQ ID NO: 537890 - RNA, 19 nt, Artificial Sequence
  Description of Artificial Sequence: Synthetic oligonucleotide
aauacuauuugcugaacau

SEQ ID NO: 537891 - RNA, 19 nt, Artificial Sequence
  Description of Artificial Sequence: Synthetic oligonucleotide
uuauaaaccgcaaugucuc

SEQ ID NO: 537892 - RNA, 19 nt, Artificial Sequence
  Description of Artificial Sequence: Synthetic oligonucleotide
aacgaauacuauuugcuga

SEQ ID NO: 537893 - RNA, 19 nt, Artificial Sequence
  Description of Artificial Sequence: Synthetic oligonucleotide
aaacgaauacuauuugcug

SEQ ID NO: 537894 - RNA, 19 nt, Artificial Sequence
  Description of Artificial Sequence: Synthetic oligonucleotide
aagaucaccugucucacug

SEQ ID NO: 537895 - RNA, 19 nt, Artificial Sequence
  Description of Artificial Sequence: Synthetic oligonucleotide
aauccugucagcugcucgg

SEQ ID NO: 537896 - RNA, 19 nt, Artificial Sequence
  Description of Artificial Sequence: Synthetic oligonucleotide
auuguaauuucaaaagggg

SEQ ID NO: 537897 - RNA, 19 nt, Artificial Sequence
  Description of Artificial Sequence: Synthetic oligonucleotide
cauggugcuaccaaaagug

SEQ ID NO: 537898 - RNA, 19 nt, Artificial Sequence
  Description of Artificial Sequence: Synthetic oligonucleotide
uauacauggucccaguacu

SEQ ID NO: 537899 - RNA, 19 nt, Artificial Sequence
  Description of Artificial Sequence: Synthetic oligonucleotide
uuuauaguuauuucccacu

SEQ ID NO: 537900 - RNA, 19 nt, Artificial Sequence
  Description of Artificial Sequence: Synthetic oligonucleotide
uuauaguuauuucccacug

SEQ ID NO: 537901 - RNA, 19 nt, Artificial Sequence
  Description of Artificial Sequence: Synthetic oligonucleotide
agcuacgaaacuugcauac

SEQ ID NO: 537902 - RNA, 19 nt, Artificial Sequence
  Description of Artificial Sequence: Synthetic oligonucleotide
uguucagcagccaaccucc

SEQ ID NO: 537903 - RNA, 19 nt, Artificial Sequence
  Description of Artificial Sequence: Synthetic oligonucleotide
ugaaauuugcuuugcaggu

SEQ ID NO: 537904 - RNA, 19 nt, Artificial Sequence
  Description of Artificial Sequence: Synthetic oligonucleotide
gggaauaacagaauuaagg

SEQ ID NO: 537905 - RNA, 19 nt, Artificial Sequence
  Description of Artificial Sequence: Synthetic oligonucleotide
uuaguacuuauaaaccgca

SEQ ID NO: 537906 - RNA, 19 nt, Artificial Sequence
  Description of Artificial Sequence: Synthetic oligonucleotide
gacuucauuaugcucugcg

SEQ ID NO: 537907 - RNA, 19 nt, Artificial Sequence
  Description of Artificial Sequence: Synthetic oligonucleotide
guacuuauaaaccgcaaug

SEQ ID NO: 537908 - RNA, 19 nt, Artificial Sequence
  Description of Artificial Sequence: Synthetic oligonucleotide
ucuuccuaaauacuaaaua

SEQ ID NO: 537909 - RNA, 19 nt, Artificial Sequence
  Description of Artificial Sequence: Synthetic oligonucleotide
uauccguaaggcauggugc

SEQ ID NO: 537910 - RNA, 19 nt, Artificial Sequence
  Description of Artificial Sequence: Synthetic oligonucleotide
auccauaacaggaugcugc

SEQ ID NO: 537911 - RNA, 19 nt, Artificial Sequence
  Description of Artificial Sequence: Synthetic oligonucleotide
acuugcauacagaacaggc

SEQ ID NO: 537912 - RNA, 19 nt, Artificial Sequence
  Description of Artificial Sequence: Synthetic oligonucleotide
uuaugauguacuccuggag

SEQ ID NO: 537913 - RNA, 19 nt, Artificial Sequence
  Description of Artificial Sequence: Synthetic oligonucleotide
aaagaaaauuuaccauucu

SEQ ID NO: 537914 - RNA, 19 nt, Artificial Sequence
  Description of Artificial Sequence: Synthetic oligonucleotide
ucuggugaggaacauagaa

SEQ ID NO: 537915 - RNA, 19 nt, Artificial Sequence
  Description of Artificial Sequence: Synthetic oligonucleotide
caacaugcuaucucaaugc

SEQ ID NO: 537916 - RNA, 19 nt, Artificial Sequence
  Description of Artificial Sequence: Synthetic oligonucleotide
aauacuaaauaggugggaa

SEQ ID NO: 537917 - RNA, 19 nt, Artificial Sequence
  Description of Artificial Sequence: Synthetic oligonucleotide
aauggaucugguuuggguu

SEQ ID NO: 537918 - RNA, 19 nt, Artificial Sequence
  Description of Artificial Sequence: Synthetic oligonucleotide
cauuaauggaguaauuuca

SEQ ID NO: 537919 - RNA, 19 nt, Artificial Sequence
  Description of Artificial Sequence: Synthetic oligonucleotide
gaagcaacaugcuaucuca

SEQ ID NO: 537920 - RNA, 19 nt, Artificial Sequence
  Description of Artificial Sequence: Synthetic oligonucleotide
acagguucgcucuuccagc

SEQ ID NO: 537921 - RNA, 19 nt, Artificial Sequence
  Description of Artificial Sequence: Synthetic oligonucleotide
gaugcugccauaucuggug

SEQ ID NO: 537922 - RNA, 19 nt, Artificial Sequence
  Description of Artificial Sequence: Synthetic oligonucleotide
auauccguaaggcauggug

SEQ ID NO: 537923 - RNA, 19 nt, Artificial Sequence
  Description of Artificial Sequence: Synthetic oligonucleotide
auaacuauaaggcgcuccu

SEQ ID NO: 537924 - RNA, 19 nt, Artificial Sequence
  Description of Artificial Sequence: Synthetic oligonucleotide
ucaaagcuacgaaacuugc

SEQ ID NO: 537925 - RNA, 19 nt, Artificial Sequence
  Description of Artificial Sequence: Synthetic oligonucleotide
uguacagucaaggacggac

SEQ ID NO: 537926 - RNA, 19 nt, Artificial Sequence
  Description of Artificial Sequence: Synthetic oligonucleotide
agauagaucccagcuaugg

SEQ ID NO: 537927 - RNA, 19 nt, Artificial Sequence
  Description of Artificial Sequence: Synthetic oligonucleotide
uagaauacaguguauuaua

SEQ ID NO: 537928 - RNA, 19 nt, Artificial Sequence
  Description of Artificial Sequence: Synthetic oligonucleotide
gaauacuauuugcugaaca

SEQ ID NO: 537929 - RNA, 19 nt, Artificial Sequence
  Description of Artificial Sequence: Synthetic oligonucleotide
guaggaacugucucggucc

SEQ ID NO: 537930 - RNA, 19 nt, Artificial Sequence
  Description of Artificial Sequence: Synthetic oligonucleotide
aggauccucacccuugagg

SEQ ID NO: 537931 - RNA, 19 nt, Artificial Sequence
  Description of Artificial Sequence: Synthetic oligonucleotide
aguaaugcuccuugacagg

SEQ ID NO: 537932 - RNA, 19 nt, Artificial Sequence
  Description of Artificial Sequence: Synthetic oligonucleotide
aaauccauaacaggaugcu

SEQ ID NO: 537933 - RNA, 19 nt, Artificial Sequence
  Description of Artificial Sequence: Synthetic oligonucleotide
aaugcuccuugacaggagu

SEQ ID NO: 537934 - RNA, 19 nt, Artificial Sequence
  Description of Artificial Sequence: Synthetic oligonucleotide
ugggaauaacagaauuaag

SEQ ID NO: 537935 - RNA, 19 nt, Artificial Sequence
  Description of Artificial Sequence: Synthetic oligonucleotide
uucauuaugcucugcggcu

SEQ ID NO: 537936 - RNA, 19 nt, Artificial Sequence
  Description of Artificial Sequence: Synthetic oligonucleotide
ugugucggaauugucagug

SEQ ID NO: 537937 - RNA, 19 nt, Artificial Sequence
  Description of Artificial Sequence: Synthetic oligonucleotide
uacuuauaaaccgcaaugu

SEQ ID NO: 537938 - RNA, 19 nt, Artificial Sequence
  Description of Artificial Sequence: Synthetic oligonucleotide
auagaucccagcuauggaa

SEQ ID NO: 537939 - RNA, 19 nt, Artificial Sequence
  Description of Artificial Sequence: Synthetic oligonucleotide
cugaccguaagucaccagc

SEQ ID NO: 537940 - RNA, 19 nt, Artificial Sequence
  Description of Artificial Sequence: Synthetic oligonucleotide
ucggaauugucagugcacg

SEQ ID NO: 537941 - RNA, 19 nt, Artificial Sequence
  Description of Artificial Sequence: Synthetic oligonucleotide
aagacaugcuaagccuucc

SEQ ID NO: 537942 - RNA, 19 nt, Artificial Sequence
  Description of Artificial Sequence: Synthetic oligonucleotide
ucauguuuccaagauguga

SEQ ID NO: 537943 - RNA, 19 nt, Artificial Sequence
  Description of Artificial Sequence: Synthetic oligonucleotide
ucuuauuccuguuuaugau

SEQ ID NO: 537944 - RNA, 19 nt, Artificial Sequence
  Description of Artificial Sequence: Synthetic oligonucleotide
uguaggaacugucucgguc

SEQ ID NO: 537945 - RNA, 19 nt, Artificial Sequence
  Description of Artificial Sequence: Synthetic oligonucleotide
uuuccauuaauggaguaau

SEQ ID NO: 537946 - RNA, 19 nt, Artificial Sequence
  Description of Artificial Sequence: Synthetic oligonucleotide
ugucggaauugucagugca

SEQ ID NO: 537947 - RNA, 19 nt, Artificial Sequence
  Description of Artificial Sequence: Synthetic oligonucleotide
uggugcuaccaaaagugcc

SEQ ID NO: 537948 - RNA, 19 nt, Artificial Sequence
  Description of Artificial Sequence: Synthetic oligonucleotide
ucuccugaccguaagucac

SEQ ID NO: 537949 - RNA, 19 nt, Artificial Sequence
  Description of Artificial Sequence: Synthetic oligonucleotide
auaaccuugccagcuggcc

SEQ ID NO: 537950 - RNA, 19 nt, Artificial Sequence
  Description of Artificial Sequence: Synthetic oligonucleotide
ugggcauuguaguaguugu

SEQ ID NO: 537951 - RNA, 19 nt, Artificial Sequence
  Description of Artificial Sequence: Synthetic oligonucleotide
aaaggauccucacccuuga

SEQ ID NO: 537952 - RNA, 19 nt, Artificial Sequence
  Description of Artificial Sequence: Synthetic oligonucleotide
uccauaacaggaugcugcc

SEQ ID NO: 537953 - RNA, 19 nt, Artificial Sequence
  Description of Artificial Sequence: Synthetic oligonucleotide
aacuugcauacagaacagg

SEQ ID NO: 537954 - RNA, 19 nt, Artificial Sequence
  Description of Artificial Sequence: Synthetic oligonucleotide
acgaaacuugcauacagaa

SEQ ID NO: 537955 - RNA, 19 nt, Artificial Sequence
  Description of Artificial Sequence: Synthetic oligonucleotide
uccuacauuuucaucuccu

SEQ ID NO: 537956 - RNA, 19 nt, Artificial Sequence
  Description of Artificial Sequence: Synthetic oligonucleotide
accgcaaugucucuuugug

SEQ ID NO: 537957 - RNA, 19 nt, Artificial Sequence
  Description of Artificial Sequence: Synthetic oligonucleotide
gacaggaggauugaguuga

SEQ ID NO: 537958 - RNA, 19 nt, Artificial Sequence
  Description of Artificial Sequence: Synthetic oligonucleotide
acugucucgguccugcaug

SEQ ID NO: 537959 - RNA, 19 nt, Artificial Sequence
  Description of Artificial Sequence: Synthetic oligonucleotide
uauugccucuuuuauaguu

SEQ ID NO: 537960 - RNA, 19 nt, Artificial Sequence
  Description of Artificial Sequence: Synthetic oligonucleotide
caugcuaucucaaugccaa

SEQ ID NO: 537961 - RNA, 19 nt, Artificial Sequence
  Description of Artificial Sequence: Synthetic oligonucleotide
uucauaaccuugccagcug

SEQ ID NO: 537962 - RNA, 19 nt, Artificial Sequence
  Description of Artificial Sequence: Synthetic oligonucleotide
uuuucagacaaguccccgu

SEQ ID NO: 537963 - RNA, 19 nt, Artificial Sequence
  Description of Artificial Sequence: Synthetic oligonucleotide
uccaaagcgcucaaacccu

SEQ ID NO: 537964 - RNA, 19 nt, Artificial Sequence
  Description of Artificial Sequence: Synthetic oligonucleotide
ugaacucuucgucuccuga

SEQ ID NO: 537965 - RNA, 19 nt, Artificial Sequence
  Description of Artificial Sequence: Synthetic oligonucleotide
uacuaaauaggugggaaua

SEQ ID NO: 537966 - RNA, 19 nt, Artificial Sequence
  Description of Artificial Sequence: Synthetic oligonucleotide
uuucagacaaguccccguc

SEQ ID NO: 537967 - RNA, 19 nt, Artificial Sequence
  Description of Artificial Sequence: Synthetic oligonucleotide
uuugugaaauuugcuuugc

SEQ ID NO: 537968 - RNA, 19 nt, Artificial Sequence
  Description of Artificial Sequence: Synthetic oligonucleotide
aacaauuccugacgccgcu

SEQ ID NO: 537969 - RNA, 19 nt, Artificial Sequence
  Description of Artificial Sequence: Synthetic oligonucleotide
uggcugaauauacaugguc

SEQ ID NO: 537970 - RNA, 19 nt, Artificial Sequence
  Description of Artificial Sequence: Synthetic oligonucleotide
cauaacuauaaggcgcucc

SEQ ID NO: 537971 - RNA, 19 nt, Artificial Sequence
  Description of Artificial Sequence: Synthetic oligonucleotide
auacuauuugcugaacaug

SEQ ID NO: 537972 - RNA, 19 nt, Artificial Sequence
  Description of Artificial Sequence: Synthetic oligonucleotide
aauccauaacaggaugcug

SEQ ID NO: 537973 - RNA, 19 nt, Artificial Sequence
  Description of Artificial Sequence: Synthetic oligonucleotide
cuaagccuuccuuucuagg

SEQ ID NO: 537974 - RNA, 19 nt, Artificial Sequence
  Description of Artificial Sequence: Synthetic oligonucleotide
auaccgcuuccauaugcac

SEQ ID NO: 537975 - RNA, 19 nt, Artificial Sequence
  Description of Artificial Sequence: Synthetic oligonucleotide
ugaccguaagucaccagcu

SEQ ID NO: 537976 - RNA, 19 nt, Artificial Sequence
  Description of Artificial Sequence: Synthetic oligonucleotide
cagucaaggacggacacag

SEQ ID NO: 537977 - RNA, 19 nt, Artificial Sequence
  Description of Artificial Sequence: Synthetic oligonucleotide
ucuucaacgcgaaccgcca

SEQ ID NO: 537978 - RNA, 19 nt, Artificial Sequence
  Description of Artificial Sequence: Synthetic oligonucleotide
gucucuuugugaaauuugc

SEQ ID NO: 537979 - RNA, 19 nt, Artificial Sequence
  Description of Artificial Sequence: Synthetic oligonucleotide
uucaacgcgaaccgccagc

SEQ ID NO: 537980 - RNA, 19 nt, Artificial Sequence
  Description of Artificial Sequence: Synthetic oligonucleotide
acgaauacuauuugcugaa

SEQ ID NO: 537981 - RNA, 19 nt, Artificial Sequence
  Description of Artificial Sequence: Synthetic oligonucleotide
gucaaggacggacacagca

SEQ ID NO: 537982 - RNA, 19 nt, Artificial Sequence
  Description of Artificial Sequence: Synthetic oligonucleotide
ucagaacugccaaacgaau

SEQ ID NO: 537983 - RNA, 19 nt, Artificial Sequence
  Description of Artificial Sequence: Synthetic oligonucleotide
aauuuaccauucugauccu

SEQ ID NO: 537984 - RNA, 19 nt, Artificial Sequence
  Description of Artificial Sequence: Synthetic oligonucleotide
gaguugaggccagaguggg

SEQ ID NO: 537985 - RNA, 19 nt, Artificial Sequence
  Description of Artificial Sequence: Synthetic oligonucleotide
cacuauauguuuguuguuc

SEQ ID NO: 537986 - RNA, 19 nt, Artificial Sequence
  Description of Artificial Sequence: Synthetic oligonucleotide
ggaaucagcaugucacagg

SEQ ID NO: 537987 - RNA, 19 nt, Artificial Sequence
  Description of Artificial Sequence: Synthetic oligonucleotide
auacuaaauaggugggaau

SEQ ID NO: 537988 - RNA, 19 nt, Artificial Sequence
  Description of Artificial Sequence: Synthetic oligonucleotide
cacagguucgcucuuccag

SEQ ID NO: 537989 - RNA, 19 nt, Artificial Sequence
  Description of Artificial Sequence: Synthetic oligonucleotide
ugcccauguugucuggucc

SEQ ID NO: 537990 - RNA, 19 nt, Artificial Sequence
  Description of Artificial Sequence: Synthetic oligonucleotide
uccaacaauuccugacgcc

SEQ ID NO: 537991 - RNA, 19 nt, Artificial Sequence
  Description of Artificial Sequence: Synthetic oligonucleotide
gauugaguugaggccagag

SEQ ID NO: 537992 - RNA, 19 nt, Artificial Sequence
  Description of Artificial Sequence: Synthetic oligonucleotide
cuauaaggcgcuccugcag

SEQ ID NO: 537993 - RNA, 19 nt, Artificial Sequence
  Description of Artificial Sequence: Synthetic oligonucleotide
ggcugaauauacauggucc

SEQ ID NO: 537994 - RNA, 19 nt, Artificial Sequence
  Description of Artificial Sequence: Synthetic oligonucleotide
acuauaaggcgcuccugca

SEQ ID NO: 537995 - RNA, 19 nt, Artificial Sequence
  Description of Artificial Sequence: Synthetic oligonucleotide
agacccuuuucuuagcuuu

SEQ ID NO: 537996 - RNA, 19 nt, Artificial Sequence
  Description of Artificial Sequence: Synthetic oligonucleotide
ugcagcuaccuccucuggc

SEQ ID NO: 537997 - RNA, 19 nt, Artificial Sequence
  Description of Artificial Sequence: Synthetic oligonucleotide
aaaccgcaaugucucuuug

SEQ ID NO: 537998 - RNA, 19 nt, Artificial Sequence
  Description of Artificial Sequence: Synthetic oligonucleotide
ccuaaauacuaaauaggug

SEQ ID NO: 537999 - RNA, 19 nt, Artificial Sequence
  Description of Artificial Sequence: Synthetic oligonucleotide
gguugugguccacagagug

SEQ ID NO: 538000 - RNA, 19 nt, Artificial Sequence
  Description of Artificial Sequence: Synthetic oligonucleotide
agcuauggaaguuuauauu

SEQ ID NO: 538001 - RNA, 19 nt, Artificial Sequence
  Description of Artificial Sequence: Synthetic oligonucleotide
ucucaagaucaccugucuc

SEQ ID NO: 538002 - RNA, 19 nt, Artificial Sequence
  Description of Artificial Sequence: Synthetic oligonucleotide
aaccgcaaugucucuuugu

SEQ ID NO: 538003 - RNA, 19 nt, Artificial Sequence
  Description of Artificial Sequence: Synthetic oligonucleotide
uucgucuccugaccguaag

SEQ ID NO: 538004 - RNA, 19 nt, Artificial Sequence
  Description of Artificial Sequence: Synthetic oligonucleotide
uauaaaccgcaaugucucu

SEQ ID NO: 538005 - RNA, 19 nt, Artificial Sequence
  Description of Artificial Sequence: Synthetic oligonucleotide
caacaauuccugacgccgc

SEQ ID NO: 538006 - RNA, 19 nt, Artificial Sequence
  Description of Artificial Sequence: Synthetic oligonucleotide
aagcuacgaaacuugcaua

SEQ ID NO: 538007 - RNA, 19 nt, Artificial Sequence
  Description of Artificial Sequence: Synthetic oligonucleotide
auggaguaauuucauguuu

SEQ ID NO: 538008 - RNA, 19 nt, Artificial Sequence
  Description of Artificial Sequence: Synthetic oligonucleotide
ugcuaccuaagacaugcua

SEQ ID NO: 538009 - RNA, 19 nt, Artificial Sequence
  Description of Artificial Sequence: Synthetic oligonucleotide
uggaaacaucuucacuaac

SEQ ID NO: 538010 - RNA, 19 nt, Artificial Sequence
  Description of Artificial Sequence: Synthetic oligonucleotide
cauuggaaacugcuuccgc

SEQ ID NO: 538011 - RNA, 19 nt, Artificial Sequence
  Description of Artificial Sequence: Synthetic oligonucleotide
gugggaauaacagaauuaa

SEQ ID NO: 538012 - RNA, 19 nt, Artificial Sequence
  Description of Artificial Sequence: Synthetic oligonucleotide
ucauuaugcucugcggcug

SEQ ID NO: 538013 - RNA, 19 nt, Artificial Sequence
  Description of Artificial Sequence: Synthetic oligonucleotide
uaugcacccuggguguugg

SEQ ID NO: 538014 - RNA, 19 nt, Artificial Sequence
  Description of Artificial Sequence: Synthetic oligonucleotide
uaaaccgcaaugucucuuu

SEQ ID NO: 538015 - RNA, 19 nt, Artificial Sequence
  Description of Artificial Sequence: Synthetic oligonucleotide
cauuaugcucugcggcugg

SEQ ID NO: 538016 - RNA, 19 nt, Artificial Sequence
  Description of Artificial Sequence: Synthetic oligonucleotide
ggccauaacuauaaggcgc

SEQ ID NO: 538017 - RNA, 19 nt, Artificial Sequence
  Description of Artificial Sequence: Synthetic oligonucleotide
ccaacaauuccugacgccg

SEQ ID NO: 538018 - RNA, 19 nt, Artificial Sequence
  Description of Artificial Sequence: Synthetic oligonucleotide
uuaccauucugauccuaaa

SEQ ID NO: 538019 - RNA, 19 nt, Artificial Sequence
  Description of Artificial Sequence: Synthetic oligonucleotide
acguugguugaucuuggca

SEQ ID NO: 538020 - RNA, 19 nt, Artificial Sequence
  Description of Artificial Sequence: Synthetic oligonucleotide
uaccuaagacaugcuaagc

SEQ ID NO: 538021 - RNA, 19 nt, Artificial Sequence
  Description of Artificial Sequence: Synthetic oligonucleotide
ggugcuaccaaaagugccc

SEQ ID NO: 538022 - RNA, 19 nt, Artificial Sequence
  Description of Artificial Sequence: Synthetic oligonucleotide
cagguucgcucuuccagcg

SEQ ID NO: 538023 - RNA, 19 nt, Artificial Sequence
  Description of Artificial Sequence: Synthetic oligonucleotide
gguccaaagcgcucaaacc

SEQ ID NO: 538024 - RNA, 19 nt, Artificial Sequence
  Description of Artificial Sequence: Synthetic oligonucleotide
gucuucaacgcgaaccgcc

SEQ ID NO: 538025 - RNA, 19 nt, Artificial Sequence
  Description of Artificial Sequence: Synthetic oligonucleotide
uugccucuuuuauaguuau

SEQ ID NO: 538026 - RNA, 19 nt, Artificial Sequence
  Description of Artificial Sequence: Synthetic oligonucleotide
aaacacucuuagccacaug

SEQ ID NO: 538027 - RNA, 19 nt, Artificial Sequence
  Description of Artificial Sequence: Synthetic oligonucleotide
uggccucccaugagguugg

SEQ ID NO: 538028 - RNA, 19 nt, Artificial Sequence
  Description of Artificial Sequence: Synthetic oligonucleotide
uuauugccucuuuuauagu

SEQ ID NO: 538029 - RNA, 19 nt, Artificial Sequence
  Description of Artificial Sequence: Synthetic oligonucleotide
ugauggaaucccugcagua

SEQ ID NO: 538030 - RNA, 19 nt, Artificial Sequence
  Description of Artificial Sequence: Synthetic oligonucleotide
gaauugucagugcacggcu

SEQ ID NO: 538031 - RNA, 19 nt, Artificial Sequence
  Description of Artificial Sequence: Synthetic oligonucleotide
ggaauugucagugcacggc

SEQ ID NO: 538032 - RNA, 19 nt, Artificial Sequence
  Description of Artificial Sequence: Synthetic oligonucleotide
gccuccguagcuuugcucc

SEQ ID NO: 538033 - RNA, 19 nt, Artificial Sequence
  Description of Artificial Sequence: Synthetic oligonucleotide
guaaugcuccuugacagga

SEQ ID NO: 538034 - RNA, 19 nt, Artificial Sequence
  Description of Artificial Sequence: Synthetic oligonucleotide
cuccaugucuucaacgcga

SEQ ID NO: 538035 - RNA, 19 nt, Artificial Sequence
  Description of Artificial Sequence: Synthetic oligonucleotide
ggaagcaacaugcuaucuc

SEQ ID NO: 538036 - RNA, 19 nt, Artificial Sequence
  Description of Artificial Sequence: Synthetic oligonucleotide
acggcucuggggcaaaaga

SEQ ID NO: 538037 - RNA, 19 nt, Artificial Sequence
  Description of Artificial Sequence: Synthetic oligonucleotide
uaguuauuucccacugguu

SEQ ID NO: 538038 - RNA, 19 nt, Artificial Sequence
  Description of Artificial Sequence: Synthetic oligonucleotide
gcucaaacccuucuccucc

SEQ ID NO: 538039 - RNA, 19 nt, Artificial Sequence
  Description of Artificial Sequence: Synthetic oligonucleotide
ucaacgcgaaccgccagca

SEQ ID NO: 538040 - RNA, 19 nt, Artificial Sequence
  Description of Artificial Sequence: Synthetic oligonucleotide
uccaagaugugagcugugu

SEQ ID NO: 538041 - RNA, 19 nt, Artificial Sequence
  Description of Artificial Sequence: Synthetic oligonucleotide
aacugccaaacgaauacua

SEQ ID NO: 538042 - RNA, 19 nt, Artificial Sequence
  Description of Artificial Sequence: Synthetic oligonucleotide
cuguuucacagguucgcuc

SEQ ID NO: 538043 - RNA, 19 nt, Artificial Sequence
  Description of Artificial Sequence: Synthetic oligonucleotide
caaucccuuugaauggauc

SEQ ID NO: 538044 - RNA, 19 nt, Artificial Sequence
  Description of Artificial Sequence: Synthetic oligonucleotide
auggaaucccugcaguauu

SEQ ID NO: 538045 - RNA, 19 nt, Artificial Sequence
  Description of Artificial Sequence: Synthetic oligonucleotide
ggguuuagggcuuuccuuc

SEQ ID NO: 538046 - RNA, 19 nt, Artificial Sequence
  Description of Artificial Sequence: Synthetic oligonucleotide
uaacuauaaggcgcuccug

SEQ ID NO: 538047 - RNA, 19 nt, Artificial Sequence
  Description of Artificial Sequence: Synthetic oligonucleotide
agacaugcuaagccuuccu

SEQ ID NO: 538048 - RNA, 19 nt, Artificial Sequence
  Description of Artificial Sequence: Synthetic oligonucleotide
cugggcauuguaguaguug

SEQ ID NO: 538049 - RNA, 19 nt, Artificial Sequence
  Description of Artificial Sequence: Synthetic oligonucleotide
auacauggucccaguacuc

SEQ ID NO: 538050 - RNA, 19 nt, Artificial Sequence
  Description of Artificial Sequence: Synthetic oligonucleotide
auuuuccauuaauggagua

SEQ ID NO: 538051 - RNA, 19 nt, Artificial Sequence
  Description of Artificial Sequence: Synthetic oligonucleotide
ugcgccgcuucaaucuucu

SEQ ID NO: 538052 - RNA, 19 nt, Artificial Sequence
  Description of Artificial Sequence: Synthetic oligonucleotide
gucucgguccugcaugccc

SEQ ID NO: 538053 - RNA, 19 nt, Artificial Sequence
  Description of Artificial Sequence: Synthetic oligonucleotide
cugucucgguccugcaugc

SEQ ID NO: 538054 - RNA, 19 nt, Artificial Sequence
  Description of Artificial Sequence: Synthetic oligonucleotide
aguguggcggucacuacug

SEQ ID NO: 538055 - RNA, 19 nt, Artificial Sequence
  Description of Artificial Sequence: Synthetic oligonucleotide
cuccugaccguaagucacc

SEQ ID NO: 538056 - RNA, 19 nt, Artificial Sequence
  Description of Artificial Sequence: Synthetic oligonucleotide
aauuccugacgccgcuuuu

SEQ ID NO: 538057 - RNA, 19 nt, Artificial Sequence
  Description of Artificial Sequence: Synthetic oligonucleotide
ggcgcuguuucacagguuc

SEQ ID NO: 538058 - RNA, 19 nt, Artificial Sequence
  Description of Artificial Sequence: Synthetic oligonucleotide
ccuguuuaugauguacucc

SEQ ID NO: 538059 - RNA, 19 nt, Artificial Sequence
  Description of Artificial Sequence: Synthetic oligonucleotide
ucacuauauguuuguuguu

SEQ ID NO: 538060 - RNA, 19 nt, Artificial Sequence
  Description of Artificial Sequence: Synthetic oligonucleotide
agcuaccuccucuggcguc

SEQ ID NO: 538061 - RNA, 19 nt, Artificial Sequence
  Description of Artificial Sequence: Synthetic oligonucleotide
uccgguuaugguugugguc

SEQ ID NO: 538062 - RNA, 19 nt, Artificial Sequence
  Description of Artificial Sequence: Synthetic oligonucleotide
gcuauggaaguuuauauuu

SEQ ID NO: 538063 - RNA, 19 nt, Artificial Sequence
  Description of Artificial Sequence: Synthetic oligonucleotide
accgcugcuguaaucaccu

SEQ ID NO: 538064 - RNA, 19 nt, Artificial Sequence
  Description of Artificial Sequence: Synthetic oligonucleotide
agccuccguagcuuugcuc

SEQ ID NO: 538065 - RNA, 19 nt, Artificial Sequence
  Description of Artificial Sequence: Synthetic oligonucleotide
ucgucuccugaccguaagu

SEQ ID NO: 538066 - RNA, 19 nt, Artificial Sequence
  Description of Artificial Sequence: Synthetic oligonucleotide
uggcaggugcagcacucca

SEQ ID NO: 538067 - RNA, 19 nt, Artificial Sequence
  Description of Artificial Sequence: Synthetic oligonucleotide
gaccguaagucaccagcuc

SEQ ID NO: 538068 - RNA, 19 nt, Artificial Sequence
  Description of Artificial Sequence: Synthetic oligonucleotide
ggauccucacccuugaggu

SEQ ID NO: 538069 - RNA, 19 nt, Artificial Sequence
  Description of Artificial Sequence: Synthetic oligonucleotide
auugccucuuuuauaguua

SEQ ID NO: 538070 - RNA, 19 nt, Artificial Sequence
  Description of Artificial Sequence: Synthetic oligonucleotide
acugccaaacgaauacuau

SEQ ID NO: 538071 - RNA, 19 nt, Artificial Sequence
  Description of Artificial Sequence: Synthetic oligonucleotide
cacugguucauguuuccaa

SEQ ID NO: 538072 - RNA, 19 nt, Artificial Sequence
  Description of Artificial Sequence: Synthetic oligonucleotide
cuucaacgcgaaccgccag

SEQ ID NO: 538073 - RNA, 19 nt, Artificial Sequence
  Description of Artificial Sequence: Synthetic oligonucleotide
gacggacacagcauuguaa

SEQ ID NO: 538074 - RNA, 19 nt, Artificial Sequence
  Description of Artificial Sequence: Synthetic oligonucleotide
ccauaccgcuuccauaugc

SEQ ID NO: 538075 - RNA, 19 nt, Artificial Sequence
  Description of Artificial Sequence: Synthetic oligonucleotide
auaaaccgcaaugucucuu

SEQ ID NO: 538076 - RNA, 19 nt, Artificial Sequence
  Description of Artificial Sequence: Synthetic oligonucleotide
gugucggaauugucagugc

SEQ ID NO: 538077 - RNA, 19 nt, Artificial Sequence
  Description of Artificial Sequence: Synthetic oligonucleotide
cugcacgcccaucaugcug

SEQ ID NO: 538078 - RNA, 19 nt, Artificial Sequence
  Description of Artificial Sequence: Synthetic oligonucleotide
guacagucaaggacggaca

SEQ ID NO: 538079 - RNA, 19 nt, Artificial Sequence
  Description of Artificial Sequence: Synthetic oligonucleotide
cacaggccaagcagugcgc

SEQ ID NO: 538080 - RNA, 19 nt, Artificial Sequence
  Description of Artificial Sequence: Synthetic oligonucleotide
uccggucucuccuccucug

SEQ ID NO: 538081 - RNA, 19 nt, Artificial Sequence
  Description of Artificial Sequence: Synthetic oligonucleotide
gcuaccuaagacaugcuaa

SEQ ID NO: 538082 - RNA, 19 nt, Artificial Sequence
  Description of Artificial Sequence: Synthetic oligonucleotide
uccugaccguaagucacca

SEQ ID NO: 538083 - RNA, 19 nt, Artificial Sequence
  Description of Artificial Sequence: Synthetic oligonucleotide
ucccgcauccggucucucc

SEQ ID NO: 538084 - RNA, 19 nt, Artificial Sequence
  Description of Artificial Sequence: Synthetic oligonucleotide
caaagcgcucaaacccuuc

SEQ ID NO: 538085 - RNA, 19 nt, Artificial Sequence
  Description of Artificial Sequence: Synthetic oligonucleotide
cugcuuccuggagucauag

SEQ ID NO: 538086 - RNA, 19 nt, Artificial Sequence
  Description of Artificial Sequence: Synthetic oligonucleotide
agugcacggcucuggggca

SEQ ID NO: 538087 - RNA, 19 nt, Artificial Sequence
  Description of Artificial Sequence: Synthetic oligonucleotide
aggacggacacagcauugu

SEQ ID NO: 538088 - RNA, 19 nt, Artificial Sequence
  Description of Artificial Sequence: Synthetic oligonucleotide
acaggagugcugauggaau

SEQ ID NO: 538089 - RNA, 19 nt, Artificial Sequence
  Description of Artificial Sequence: Synthetic oligonucleotide
gauggaaucccugcaguau

SEQ ID NO: 538090 - RNA, 19 nt, Artificial Sequence
  Description of Artificial Sequence: Synthetic oligonucleotide
gagguugggccauaacuau

SEQ ID NO: 538091 - RNA, 19 nt, Artificial Sequence
  Description of Artificial Sequence: Synthetic oligonucleotide
acagucaaggacggacaca

SEQ ID NO: 538092 - RNA, 19 nt, Artificial Sequence
  Description of Artificial Sequence: Synthetic oligonucleotide
aaccuccgguuaugguugu

SEQ ID NO: 538093 - RNA, 19 nt, Artificial Sequence
  Description of Artificial Sequence: Synthetic oligonucleotide
agccaaccuccgguuaugg

SEQ ID NO: 538094 - RNA, 19 nt, Artificial Sequence
  Description of Artificial Sequence: Synthetic oligonucleotide
gcaaaagagggcaucugca

SEQ ID NO: 538095 - RNA, 19 nt, Artificial Sequence
  Description of Artificial Sequence: Synthetic oligonucleotide
aagcaacaugcuaucucaa

SEQ ID NO: 538096 - RNA, 19 nt, Artificial Sequence
  Description of Artificial Sequence: Synthetic oligonucleotide
gaaaugcuccuggccaauc

SEQ ID NO: 538097 - RNA, 19 nt, Artificial Sequence
  Description of Artificial Sequence: Synthetic oligonucleotide
guggcggucacuacugguc

SEQ ID NO: 538098 - RNA, 19 nt, Artificial Sequence
  Description of Artificial Sequence: Synthetic oligonucleotide
agcagugcgccgcuucaau

SEQ ID NO: 538099 - RNA, 19 nt, Artificial Sequence
  Description of Artificial Sequence: Synthetic oligonucleotide
auaugcacccuggguguug

SEQ ID NO: 538100 - RNA, 19 nt, Artificial Sequence
  Description of Artificial Sequence: Synthetic oligonucleotide
ucaggcaguuuaguacuua

SEQ ID NO: 538101 - RNA, 19 nt, Artificial Sequence
  Description of Artificial Sequence: Synthetic oligonucleotide
cuaagacaugcuaagccuu

SEQ ID NO: 538102 - RNA, 19 nt, Artificial Sequence
  Description of Artificial Sequence: Synthetic oligonucleotide
cgaaacuugcauacagaac

SEQ ID NO: 538103 - RNA, 19 nt, Artificial Sequence
  Description of Artificial Sequence: Synthetic oligonucleotide
cauggcagaguucccagcu

SEQ ID NO: 538104 - RNA, 19 nt, Artificial Sequence
  Description of Artificial Sequence: Synthetic oligonucleotide
ccguauccgagucugggac

SEQ ID NO: 538105 - RNA, 19 nt, Artificial Sequence
  Description of Artificial Sequence: Synthetic oligonucleotide
ugggaccggccauauccgu

SEQ ID NO: 538106 - RNA, 19 nt, Artificial Sequence
  Description of Artificial Sequence: Synthetic oligonucleotide
gguugggccauaacuauaa

SEQ ID NO: 538107 - RNA, 19 nt, Artificial Sequence
  Description of Artificial Sequence: Synthetic oligonucleotide
cuucaggcgcuguuucaca

SEQ ID NO: 538108 - RNA, 19 nt, Artificial Sequence
  Description of Artificial Sequence: Synthetic oligonucleotide
uagccuccguagcuuugcu

SEQ ID NO: 538109 - RNA, 19 nt, Artificial Sequence
  Description of Artificial Sequence: Synthetic oligonucleotide
ucucaccgcugcuguaauc

SEQ ID NO: 538110 - RNA, 19 nt, Artificial Sequence
  Description of Artificial Sequence: Synthetic oligonucleotide
gacaugcuaagccuuccuu

SEQ ID NO: 538111 - RNA, 19 nt, Artificial Sequence
  Description of Artificial Sequence: Synthetic oligonucleotide
ccuaagacaugcuaagccu

SEQ ID NO: 538112 - RNA, 19 nt, Artificial Sequence
  Description of Artificial Sequence: Synthetic oligonucleotide
acacucuuagccacaugaa

SEQ ID NO: 538113 - RNA, 19 nt, Artificial Sequence
  Description of Artificial Sequence: Synthetic oligonucleotide
gaccggccauauccguaag

SEQ ID NO: 538114 - RNA, 19 nt, Artificial Sequence
  Description of Artificial Sequence: Synthetic oligonucleotide
aucccagcuauggaaguuu

SEQ ID NO: 538115 - RNA, 19 nt, Artificial Sequence
  Description of Artificial Sequence: Synthetic oligonucleotide
agugcgccgcuucaaucuu

SEQ ID NO: 538116 - RNA, 19 nt, Artificial Sequence
  Description of Artificial Sequence: Synthetic oligonucleotide
uguccagacguugguugau

SEQ ID NO: 538117 - RNA, 19 nt, Artificial Sequence
  Description of Artificial Sequence: Synthetic oligonucleotide
gaugccgcuggaggagcug

SEQ ID NO: 538118 - RNA, 19 nt, Artificial Sequence
  Description of Artificial Sequence: Synthetic oligonucleotide
gaacugccaaacgaauacu

SEQ ID NO: 538119 - RNA, 19 nt, Artificial Sequence
  Description of Artificial Sequence: Synthetic oligonucleotide
gccuagcugagcauggcug

SEQ ID NO: 538120 - RNA, 19 nt, Artificial Sequence
  Description of Artificial Sequence: Synthetic oligonucleotide
ugccucuuuuauaguuauu

SEQ ID NO: 538121 - RNA, 19 nt, Artificial Sequence
  Description of Artificial Sequence: Synthetic oligonucleotide
ggccauaccgcuuccauau

SEQ ID NO: 538122 - RNA, 19 nt, Artificial Sequence
  Description of Artificial Sequence: Synthetic oligonucleotide
gcgaaccgccagcagaccc

SEQ ID NO: 538123 - RNA, 19 nt, Artificial Sequence
  Description of Artificial Sequence: Synthetic oligonucleotide
gggccaaucccguauccga

SEQ ID NO: 538124 - RNA, 19 nt, Artificial Sequence
  Description of Artificial Sequence: Synthetic oligonucleotide
ccuccgguuaugguugugg

SEQ ID NO: 538125 - RNA, 19 nt, Artificial Sequence
  Description of Artificial Sequence: Synthetic oligonucleotide
ugacgccgcuuuucaauuu

SEQ ID NO: 538126 - RNA, 19 nt, Artificial Sequence
  Description of Artificial Sequence: Synthetic oligonucleotide
cucggucccgcauccgguc

SEQ ID NO: 538127 - RNA, 19 nt, Artificial Sequence
  Description of Artificial Sequence: Synthetic oligonucleotide
gccauauccguaaggcaug

SEQ ID NO: 538128 - RNA, 19 nt, Artificial Sequence
  Description of Artificial Sequence: Synthetic oligonucleotide
uggaucugguuuggguuua

SEQ ID NO: 538129 - RNA, 19 nt, Artificial Sequence
  Description of Artificial Sequence: Synthetic oligonucleotide
ggccaaucccguauccgag

SEQ ID NO: 538130 - RNA, 19 nt, Artificial Sequence
  Description of Artificial Sequence: Synthetic oligonucleotide
gcugcucggucccgcaucc

SEQ ID NO: 538131 - RNA, 19 nt, Artificial Sequence
  Description of Artificial Sequence: Synthetic oligonucleotide
ugucucgguccugcaugcc

SEQ ID NO: 538132 - RNA, 19 nt, Artificial Sequence
  Description of Artificial Sequence: Synthetic oligonucleotide
ccauauccguaaggcaugg

SEQ ID NO: 538133 - RNA, 19 nt, Artificial Sequence
  Description of Artificial Sequence: Synthetic oligonucleotide
caaugagugugucggaauu

SEQ ID NO: 538134 - RNA, 19 nt, Artificial Sequence
  Description of Artificial Sequence: Synthetic oligonucleotide
aagcagugcgccgcuucaa

SEQ ID NO: 538135 - RNA, 19 nt, Artificial Sequence
  Description of Artificial Sequence: Synthetic oligonucleotide
cauacagaacaggcaaacu

SEQ ID NO: 538136 - RNA, 19 nt, Artificial Sequence
  Description of Artificial Sequence: Synthetic oligonucleotide
ggaccggccauauccguaa

SEQ ID NO: 538137 - RNA, 19 nt, Artificial Sequence
  Description of Artificial Sequence: Synthetic oligonucleotide
ccaaucccguauccgaguc

SEQ ID NO: 538138 - RNA, 19 nt, Artificial Sequence
  Description of Artificial Sequence: Synthetic oligonucleotide
cacggcucuggggcaaaag

SEQ ID NO: 538139 - RNA, 19 nt, Artificial Sequence
  Description of Artificial Sequence: Synthetic oligonucleotide
ggccauauccguaaggcau

SEQ ID NO: 538140 - RNA, 19 nt, Artificial Sequence
  Description of Artificial Sequence: Synthetic oligonucleotide
aucuggugaggaacauaga

SEQ ID NO: 538141 - RNA, 19 nt, Artificial Sequence
  Description of Artificial Sequence: Synthetic oligonucleotide
gacgccgcuuuucaauuuu

SEQ ID NO: 538142 - RNA, 19 nt, Artificial Sequence
  Description of Artificial Sequence: Synthetic oligonucleotide
aggcaguuuaguacuuaua

SEQ ID NO: 538143 - RNA, 19 nt, Artificial Sequence
  Description of Artificial Sequence: Synthetic oligonucleotide
cacgggccaguuuggcauc

SEQ ID NO: 538144 - RNA, 19 nt, Artificial Sequence
  Description of Artificial Sequence: Synthetic oligonucleotide
ggcaaugagugugucggaa

SEQ ID NO: 538145 - RNA, 19 nt, Artificial Sequence
  Description of Artificial Sequence: Synthetic oligonucleotide
caaggacggacacagcauu

SEQ ID NO: 538146 - RNA, 19 nt, Artificial Sequence
  Description of Artificial Sequence: Synthetic oligonucleotide
gcccauguugucuggucca

SEQ ID NO: 538147 - RNA, 19 nt, Artificial Sequence
  Description of Artificial Sequence: Synthetic oligonucleotide
gguuuagggcuuuccuucu

SEQ ID NO: 538148 - RNA, 19 nt, Artificial Sequence
  Description of Artificial Sequence: Synthetic oligonucleotide
gcgcuguuucacagguucg

SEQ ID NO: 538149 - RNA, 19 nt, Artificial Sequence
  Description of Artificial Sequence: Synthetic oligonucleotide
cagccaaccuccgguuaug

SEQ ID NO: 538150 - RNA, 19 nt, Artificial Sequence
  Description of Artificial Sequence: Synthetic oligonucleotide
cuucgucuccugaccguaa

SEQ ID NO: 538151 - RNA, 19 nt, Artificial Sequence
  Description of Artificial Sequence: Synthetic oligonucleotide
augccccauagccuccgua

SEQ ID NO: 538152 - RNA, 19 nt, Artificial Sequence
  Description of Artificial Sequence: Synthetic oligonucleotide
agguugggccauaacuaua

SEQ ID NO: 538153 - RNA, 19 nt, Artificial Sequence
  Description of Artificial Sequence: Synthetic oligonucleotide
cuccgguuaugguuguggu

SEQ ID NO: 538154 - RNA, 19 nt, Artificial Sequence
  Description of Artificial Sequence: Synthetic oligonucleotide
gcaaaaggauccucacccu

SEQ ID NO: 538155 - RNA, 19 nt, Artificial Sequence
  Description of Artificial Sequence: Synthetic oligonucleotide
cagaacaggcaaacugaau

SEQ ID NO: 538156 - RNA, 19 nt, Artificial Sequence
  Description of Artificial Sequence: Synthetic oligonucleotide
ccaagcagugcgccgcuuc

SEQ ID NO: 538157 - RNA, 19 nt, Artificial Sequence
  Description of Artificial Sequence: Synthetic oligonucleotide
gugugucggaauugucagu

SEQ ID NO: 538158 - RNA, 19 nt, Artificial Sequence
  Description of Artificial Sequence: Synthetic oligonucleotide
cucaaacccuucuccuccu

SEQ ID NO: 538159 - RNA, 19 nt, Artificial Sequence
  Description of Artificial Sequence: Synthetic oligonucleotide
cguaaggcauggugcuacc

SEQ ID NO: 538160 - RNA, 19 nt, Artificial Sequence
  Description of Artificial Sequence: Synthetic oligonucleotide
agaugccgcuggaggagcu

SEQ ID NO: 538161 - RNA, 19 nt, Artificial Sequence
  Description of Artificial Sequence: Synthetic oligonucleotide
augcuaccuaagacaugcu

SEQ ID NO: 538162 - RNA, 19 nt, Artificial Sequence
  Description of Artificial Sequence: Synthetic oligonucleotide
cugacgccgcuuuucaauu

SEQ ID NO: 538163 - RNA, 19 nt, Artificial Sequence
  Description of Artificial Sequence: Synthetic oligonucleotide
gcaaugagugugucggaau

SEQ ID NO: 538164 - RNA, 19 nt, Artificial Sequence
  Description of Artificial Sequence: Synthetic oligonucleotide
ccugaccguaagucaccag

SEQ ID NO: 538165 - RNA, 19 nt, Artificial Sequence
  Description of Artificial Sequence: Synthetic oligonucleotide
ccaaccuccgguuaugguu

SEQ ID NO: 538166 - RNA, 19 nt, Artificial Sequence
  Description of Artificial Sequence: Synthetic oligonucleotide
cacgcccaucaugcuguag

SEQ ID NO: 538167 - RNA, 19 nt, Artificial Sequence
  Description of Artificial Sequence: Synthetic oligonucleotide
gccaguuuggcaucagguu

SEQ ID NO: 538168 - RNA, 19 nt, Artificial Sequence
  Description of Artificial Sequence: Synthetic oligonucleotide
ccaagaugugagcugugua

SEQ ID NO: 538169 - RNA, 19 nt, Artificial Sequence
  Description of Artificial Sequence: Synthetic oligonucleotide
ccgcaaugucucuuuguga

SEQ ID NO: 538170 - RNA, 19 nt, Artificial Sequence
  Description of Artificial Sequence: Synthetic oligonucleotide
caaucccguauccgagucu

SEQ ID NO: 538171 - RNA, 19 nt, Artificial Sequence
  Description of Artificial Sequence: Synthetic oligonucleotide
guguacagucaaggacgga

SEQ ID NO: 538172 - RNA, 19 nt, Artificial Sequence
  Description of Artificial Sequence: Synthetic oligonucleotide
ggcggucacuacuggucuc

SEQ ID NO: 538173 - RNA, 19 nt, Artificial Sequence
  Description of Artificial Sequence: Synthetic oligonucleotide
cugcucggucccgcauccg

SEQ ID NO: 538174 - RNA, 19 nt, Artificial Sequence
  Description of Artificial Sequence: Synthetic oligonucleotide
accuccgguuaugguugug

SEQ ID NO: 538175 - RNA, 19 nt, Artificial Sequence
  Description of Artificial Sequence: Synthetic oligonucleotide
gucugggaccggccauauc

SEQ ID NO: 538176 - RNA, 19 nt, Artificial Sequence
  Description of Artificial Sequence: Synthetic oligonucleotide
ucccgucuucaggcgcugu

SEQ ID NO: 538177 - RNA, 19 nt, Artificial Sequence
  Description of Artificial Sequence: Synthetic oligonucleotide
cccguauccgagucuggga

SEQ ID NO: 538178 - RNA, 19 nt, Artificial Sequence
  Description of Artificial Sequence: Synthetic oligonucleotide
gccaaucccguauccgagu

SEQ ID NO: 538179 - RNA, 19 nt, Artificial Sequence
  Description of Artificial Sequence: Synthetic oligonucleotide
ccugacgccgcuuuucaau

SEQ ID NO: 538180 - RNA, 19 nt, Artificial Sequence
  Description of Artificial Sequence: Synthetic oligonucleotide
gugcgccgcuucaaucuuc

SEQ ID NO: 538181 - RNA, 19 nt, Artificial Sequence
  Description of Artificial Sequence: Synthetic oligonucleotide
cgcauccggucucuccucc

SEQ ID NO: 538182 - RNA, 19 nt, Artificial Sequence
  Description of Artificial Sequence: Synthetic oligonucleotide
gcuguuucacagguucgcu

SEQ ID NO: 538183 - RNA, 19 nt, Artificial Sequence
  Description of Artificial Sequence: Synthetic oligonucleotide
ccauaacuauaaggcgcuc

SEQ ID NO: 538184 - RNA, 19 nt, Artificial Sequence
  Description of Artificial Sequence: Synthetic oligonucleotide
gggaagcaacaugcuaucu

SEQ ID NO: 538185 - RNA, 19 nt, Artificial Sequence
  Description of Artificial Sequence: Synthetic oligonucleotide
ccgagucugggaccggcca

SEQ ID NO: 538186 - RNA, 19 nt, Artificial Sequence
  Description of Artificial Sequence: Synthetic oligonucleotide
gaaccgccagcagacccuu

SEQ ID NO: 538187 - RNA, 19 nt, Artificial Sequence
  Description of Artificial Sequence: Synthetic oligonucleotide
cucucaccgcugcuguaau

SEQ ID NO: 538188 - RNA, 19 nt, Artificial Sequence
  Description of Artificial Sequence: Synthetic oligonucleotide
cauauccguaaggcauggu

SEQ ID NO: 538189 - RNA, 19 nt, Artificial Sequence
  Description of Artificial Sequence: Synthetic oligonucleotide
gccaaccuccgguuauggu

SEQ ID NO: 538190 - RNA, 19 nt, Artificial Sequence
  Description of Artificial Sequence: Synthetic oligonucleotide
cgcccaucaugcuguagga

SEQ ID NO: 538191 - RNA, 19 nt, Artificial Sequence
  Description of Artificial Sequence: Synthetic oligonucleotide
gucaggcaguuuaguacuu

SEQ ID NO: 538192 - RNA, 19 nt, Artificial Sequence
  Description of Artificial Sequence: Synthetic oligonucleotide
aaccgccagcagacccuuu

SEQ ID NO: 538193 - RNA, 19 nt, Artificial Sequence
  Description of Artificial Sequence: Synthetic oligonucleotide
ccuugccagcuggccauac

SEQ ID NO: 538194 - RNA, 19 nt, Artificial Sequence
  Description of Artificial Sequence: Synthetic oligonucleotide
cauaugcacccuggguguu

SEQ ID NO: 538195 - RNA, 19 nt, Artificial Sequence
  Description of Artificial Sequence: Synthetic oligonucleotide
aggcgcuguuucacagguu

SEQ ID NO: 538196 - RNA, 19 nt, Artificial Sequence
  Description of Artificial Sequence: Synthetic oligonucleotide
cucacccuugagguauuuu

SEQ ID NO: 538197 - RNA, 19 nt, Artificial Sequence
  Description of Artificial Sequence: Synthetic oligonucleotide
cgaaccgccagcagacccu

SEQ ID NO: 538198 - RNA, 19 nt, Artificial Sequence
  Description of Artificial Sequence: Synthetic oligonucleotide
ccguagcuuugcuccaugu

SEQ ID NO: 538199 - RNA, 19 nt, Artificial Sequence
  Description of Artificial Sequence: Synthetic oligonucleotide
ccaaagcgcucaaacccuu

SEQ ID NO: 538200 - RNA, 19 nt, Artificial Sequence
  Description of Artificial Sequence: Synthetic oligonucleotide
ccgcuucaaucuucuugaa

SEQ ID NO: 538201 - RNA, 19 nt, Artificial Sequence
  Description of Artificial Sequence: Synthetic oligonucleotide
gguggccucccaugagguu

SEQ ID NO: 538202 - RNA, 19 nt, Artificial Sequence
  Description of Artificial Sequence: Synthetic oligonucleotide
caccaucacuggccuuggu

SEQ ID NO: 538203 - RNA, 19 nt, Artificial Sequence
  Description of Artificial Sequence: Synthetic oligonucleotide
ccagacguugguugaucuu

SEQ ID NO: 538204 - RNA, 19 nt, Artificial Sequence
  Description of Artificial Sequence: Synthetic oligonucleotide
gucccgcauccggucucuc

SEQ ID NO: 538205 - RNA, 19 nt, Artificial Sequence
  Description of Artificial Sequence: Synthetic oligonucleotide
gcucggucccgcauccggu

SEQ ID NO: 538206 - RNA, 19 nt, Artificial Sequence
  Description of Artificial Sequence: Synthetic oligonucleotide
cugucuugucaggcaguuu

SEQ ID NO: 538207 - RNA, 19 nt, Artificial Sequence
  Description of Artificial Sequence: Synthetic oligonucleotide
cccagcuauggaaguuuau

SEQ ID NO: 538208 - RNA, 19 nt, Artificial Sequence
  Description of Artificial Sequence: Synthetic oligonucleotide
ccaugagguugggccauaa

SEQ ID NO: 538209 - RNA, 19 nt, Artificial Sequence
  Description of Artificial Sequence: Synthetic oligonucleotide
ccugcacgcccaucaugcu

SEQ ID NO: 538210 - RNA, 19 nt, Artificial Sequence
  Description of Artificial Sequence: Synthetic oligonucleotide
gcacggcucuggggcaaaa

SEQ ID NO: 538211 - RNA, 19 nt, Artificial Sequence
  Description of Artificial Sequence: Synthetic oligonucleotide
cccgucuucaggcgcuguu

SEQ ID NO: 538212 - RNA, 19 nt, Artificial Sequence
  Description of Artificial Sequence: Synthetic oligonucleotide
gcgccgcuucaaucuucuu

SEQ ID NO: 538213 - RNA, 19 nt, Artificial Sequence
  Description of Artificial Sequence: Synthetic oligonucleotide
gccaagcagugcgccgcuu

SEQ ID NO: 538214 - RNA, 19 nt, Artificial Sequence
  Description of Artificial Sequence: Synthetic oligonucleotide
ucugauuaaaaccagaaac

SEQ ID NO: 538215 - RNA, 19 nt, Artificial Sequence
  Description of Artificial Sequence: Synthetic oligonucleotide
uuuauaucguuccacaaag

SEQ ID NO: 538216 - RNA, 19 nt, Artificial Sequence
  Description of Artificial Sequence: Synthetic oligonucleotide
ucuagcagaccuaugaagg

SEQ ID NO: 538217 - RNA, 19 nt, Artificial Sequence
  Description of Artificial Sequence: Synthetic oligonucleotide
aauuaaagcuggcagagca

SEQ ID NO: 538218 - RNA, 19 nt, Artificial Sequence
  Description of Artificial Sequence: Synthetic oligonucleotide
agugaaacuuaauggagcc

SEQ ID NO: 538219 - RNA, 19 nt, Artificial Sequence
  Description of Artificial Sequence: Synthetic oligonucleotide
uccgaguuaaccaggaccg

SEQ ID NO: 538220 - RNA, 19 nt, Artificial Sequence
  Description of Artificial Sequence: Synthetic oligonucleotide
cuuauuauggccgaggcag

SEQ ID NO: 538221 - RNA, 19 nt, Artificial Sequence
  Description of Artificial Sequence: Synthetic oligonucleotide
accaggaccgaauagcugc

SEQ ID NO: 538222 - RNA, 19 nt, Artificial Sequence
  Description of Artificial Sequence: Synthetic oligonucleotide
uuguguguugaucagaugu

SEQ ID NO: 538223 - RNA, 19 nt, Artificial Sequence
  Description of Artificial Sequence: Synthetic oligonucleotide
gaucaguuuggccagacag

SEQ ID NO: 538224 - RNA, 19 nt, Artificial Sequence
  Description of Artificial Sequence: Synthetic oligonucleotide
ugguaguugacaaaugacc

SEQ ID NO: 538225 - RNA, 19 nt, Artificial Sequence
  Description of Artificial Sequence: Synthetic oligonucleotide
aaaagccgugcauagauca

SEQ ID NO: 538226 - RNA, 19 nt, Artificial Sequence
  Description of Artificial Sequence: Synthetic oligonucleotide
ugauucuccacuuaugcca

SEQ ID NO: 538227 - RNA, 19 nt, Artificial Sequence
  Description of Artificial Sequence: Synthetic oligonucleotide
aauagcaucaugagcagag

SEQ ID NO: 538228 - RNA, 19 nt, Artificial Sequence
  Description of Artificial Sequence: Synthetic oligonucleotide
guuaucaggaaauagcauc

SEQ ID NO: 538229 - RNA, 19 nt, Artificial Sequence
  Description of Artificial Sequence: Synthetic oligonucleotide
uguguuuccgaguuaacca

SEQ ID NO: 538230 - RNA, 19 nt, Artificial Sequence
  Description of Artificial Sequence: Synthetic oligonucleotide
uauguguaaccuuuggaug

SEQ ID NO: 538231 - RNA, 19 nt, Artificial Sequence
  Description of Artificial Sequence: Synthetic oligonucleotide
aggaauguccuguaguggg

SEQ ID NO: 538232 - RNA, 19 nt, Artificial Sequence
  Description of Artificial Sequence: Synthetic oligonucleotide
acaaaugaccacuccaguc

SEQ ID NO: 538233 - RNA, 19 nt, Artificial Sequence
  Description of Artificial Sequence: Synthetic oligonucleotide
aacccauacacaucuagca

SEQ ID NO: 538234 - RNA, 19 nt, Artificial Sequence
  Description of Artificial Sequence: Synthetic oligonucleotide
uggugagauacccggaugg

SEQ ID NO: 538235 - RNA, 19 nt, Artificial Sequence
  Description of Artificial Sequence: Synthetic oligonucleotide
uuagcggcaagacaggcca

SEQ ID NO: 538236 - RNA, 19 nt, Artificial Sequence
  Description of Artificial Sequence: Synthetic oligonucleotide
caaaugaccacuccagucc

SEQ ID NO: 538237 - RNA, 19 nt, Artificial Sequence
  Description of Artificial Sequence: Synthetic oligonucleotide
uuaaccaggaccgaauagc

SEQ ID NO: 538238 - RNA, 19 nt, Artificial Sequence
  Description of Artificial Sequence: Synthetic oligonucleotide
uaaagaucacguaggcagg

SEQ ID NO: 538239 - RNA, 19 nt, Artificial Sequence
  Description of Artificial Sequence: Synthetic oligonucleotide
ugaaaagccgugcauagau

SEQ ID NO: 538240 - RNA, 19 nt, Artificial Sequence
  Description of Artificial Sequence: Synthetic oligonucleotide
agcuuauuauggccgaggc

SEQ ID NO: 538241 - RNA, 19 nt, Artificial Sequence
  Description of Artificial Sequence: Synthetic oligonucleotide
aauagcuuggcaguugugu

SEQ ID NO: 538242 - RNA, 19 nt, Artificial Sequence
  Description of Artificial Sequence: Synthetic oligonucleotide
aguccagucaguucagggg

SEQ ID NO: 538243 - RNA, 19 nt, Artificial Sequence
  Description of Artificial Sequence: Synthetic oligonucleotide
aacauuugggcacgcccac

SEQ ID NO: 538244 - RNA, 19 nt, Artificial Sequence
  Description of Artificial Sequence: Synthetic oligonucleotide
uauaucguuccacaaaguu

SEQ ID NO: 538245 - RNA, 19 nt, Artificial Sequence
  Description of Artificial Sequence: Synthetic oligonucleotide
guucuggugagauacccgg

SEQ ID NO: 538246 - RNA, 19 nt, Artificial Sequence
  Description of Artificial Sequence: Synthetic oligonucleotide
gacguuguggccccaaucc

SEQ ID NO: 538247 - RNA, 19 nt, Artificial Sequence
  Description of Artificial Sequence: Synthetic oligonucleotide
cuuguguggucucagcugg

SEQ ID NO: 538248 - RNA, 19 nt, Artificial Sequence
  Description of Artificial Sequence: Synthetic oligonucleotide
caguacuaaaaccauaguc

SEQ ID NO: 538249 - RNA, 19 nt, Artificial Sequence
  Description of Artificial Sequence: Synthetic oligonucleotide
aucuagcagaccuaugaag

SEQ ID NO: 538250 - RNA, 19 nt, Artificial Sequence
  Description of Artificial Sequence: Synthetic oligonucleotide
uguuuccgaguuaaccagg

SEQ ID NO: 538251 - RNA, 19 nt, Artificial Sequence
  Description of Artificial Sequence: Synthetic oligonucleotide
ucugaggcaguaaaaugga

SEQ ID NO: 538252 - RNA, 19 nt, Artificial Sequence
  Description of Artificial Sequence: Synthetic oligonucleotide
uugguaguugacaaaugac

SEQ ID NO: 538253 - RNA, 19 nt, Artificial Sequence
  Description of Artificial Sequence: Synthetic oligonucleotide
ucuagcauggagucaguca

SEQ ID NO: 538254 - RNA, 19 nt, Artificial Sequence
  Description of Artificial Sequence: Synthetic oligonucleotide
ugcgcgugcagucagaguc

SEQ ID NO: 538255 - RNA, 19 nt, Artificial Sequence
  Description of Artificial Sequence: Synthetic oligonucleotide
uucgaaucugcauagucuc

SEQ ID NO: 538256 - RNA, 19 nt, Artificial Sequence
  Description of Artificial Sequence: Synthetic oligonucleotide
gaucagaugucuuuggcaa

SEQ ID NO: 538257 - RNA, 19 nt, Artificial Sequence
  Description of Artificial Sequence: Synthetic oligonucleotide
agaucacguaggcaggugg

SEQ ID NO: 538258 - RNA, 19 nt, Artificial Sequence
  Description of Artificial Sequence: Synthetic oligonucleotide
ugagauacccggaugggaa

SEQ ID NO: 538259 - RNA, 19 nt, Artificial Sequence
  Description of Artificial Sequence: Synthetic oligonucleotide
ucuuuagcggcaagacagg

SEQ ID NO: 538260 - RNA, 19 nt, Artificial Sequence
  Description of Artificial Sequence: Synthetic oligonucleotide
gguuuguuaacugucaccc

SEQ ID NO: 538261 - RNA, 19 nt, Artificial Sequence
  Description of Artificial Sequence: Synthetic oligonucleotide
gaugguucgaaucugcaua

SEQ ID NO: 538262 - RNA, 19 nt, Artificial Sequence
  Description of Artificial Sequence: Synthetic oligonucleotide
uuuagcggcaagacaggcc

SEQ ID NO: 538263 - RNA, 19 nt, Artificial Sequence
  Description of Artificial Sequence: Synthetic oligonucleotide
uccauuaguuggcagggcu

SEQ ID NO: 538264 - RNA, 19 nt, Artificial Sequence
  Description of Artificial Sequence: Synthetic oligonucleotide
uguugaucacugauaccag

SEQ ID NO: 538265 - RNA, 19 nt, Artificial Sequence
  Description of Artificial Sequence: Synthetic oligonucleotide
cagagguggauuauugccc

SEQ ID NO: 538266 - RNA, 19 nt, Artificial Sequence
  Description of Artificial Sequence: Synthetic oligonucleotide
aguuggcuagcaccagucc

SEQ ID NO: 538267 - RNA, 19 nt, Artificial Sequence
  Description of Artificial Sequence: Synthetic oligonucleotide
aggaacuguugcuugcgcg

SEQ ID NO: 538268 - RNA, 19 nt, Artificial Sequence
  Description of Artificial Sequence: Synthetic oligonucleotide
uaaccuuuggauguguuuc

SEQ ID NO: 538269 - RNA, 19 nt, Artificial Sequence
  Description of Artificial Sequence: Synthetic oligonucleotide
agcuauguguaaccuuugg

SEQ ID NO: 538270 - RNA, 19 nt, Artificial Sequence
  Description of Artificial Sequence: Synthetic oligonucleotide
auagcuuggcaguugugug

SEQ ID NO: 538271 - RNA, 19 nt, Artificial Sequence
  Description of Artificial Sequence: Synthetic oligonucleotide
augguucgaaucugcauag

SEQ ID NO: 538272 - RNA, 19 nt, Artificial Sequence
  Description of Artificial Sequence: Synthetic oligonucleotide
cuagcagaccuaugaaggc

SEQ ID NO: 538273 - RNA, 19 nt, Artificial Sequence
  Description of Artificial Sequence: Synthetic oligonucleotide
uuggauguguuuccgaguu

SEQ ID NO: 538274 - RNA, 19 nt, Artificial Sequence
  Description of Artificial Sequence: Synthetic oligonucleotide
guuaaccaggaccgaauag

SEQ ID NO: 538275 - RNA, 19 nt, Artificial Sequence
  Description of Artificial Sequence: Synthetic oligonucleotide
cuugguaguugacaaauga

SEQ ID NO: 538276 - RNA, 19 nt, Artificial Sequence
  Description of Artificial Sequence: Synthetic oligonucleotide
uucugauucuccacuuaug

SEQ ID NO: 538277 - RNA, 19 nt, Artificial Sequence
  Description of Artificial Sequence: Synthetic oligonucleotide
acuuguguggucucagcug

SEQ ID NO: 538278 - RNA, 19 nt, Artificial Sequence
  Description of Artificial Sequence: Synthetic oligonucleotide
cauuccagaagcucuagca

SEQ ID NO: 538279 - RNA, 19 nt, Artificial Sequence
  Description of Artificial Sequence: Synthetic oligonucleotide
agcucuagcauggagucag

SEQ ID NO: 538280 - RNA, 19 nt, Artificial Sequence
  Description of Artificial Sequence: Synthetic oligonucleotide
agugguugcugucugaauu

SEQ ID NO: 538281 - RNA, 19 nt, Artificial Sequence
  Description of Artificial Sequence: Synthetic oligonucleotide
guuuauaucguuccacaaa

SEQ ID NO: 538282 - RNA, 19 nt, Artificial Sequence
  Description of Artificial Sequence: Synthetic oligonucleotide
ucuugguaguugacaaaug

SEQ ID NO: 538283 - RNA, 19 nt, Artificial Sequence
  Description of Artificial Sequence: Synthetic oligonucleotide
uauuauggccgaggcaggg

SEQ ID NO: 538284 - RNA, 19 nt, Artificial Sequence
  Description of Artificial Sequence: Synthetic oligonucleotide
acuuaugccaugcacgcuu

SEQ ID NO: 538285 - RNA, 19 nt, Artificial Sequence
  Description of Artificial Sequence: Synthetic oligonucleotide
aaggcacuaaagaucacgu

SEQ ID NO: 538286 - RNA, 19 nt, Artificial Sequence
  Description of Artificial Sequence: Synthetic oligonucleotide
ucccucaacugcauauucc

SEQ ID NO: 538287 - RNA, 19 nt, Artificial Sequence
  Description of Artificial Sequence: Synthetic oligonucleotide
cacaaagugcugcuguagc

SEQ ID NO: 538288 - RNA, 19 nt, Artificial Sequence
  Description of Artificial Sequence: Synthetic oligonucleotide
cauccauuaguuggcaggg

SEQ ID NO: 538289 - RNA, 19 nt, Artificial Sequence
  Description of Artificial Sequence: Synthetic oligonucleotide
guaguugacaaaugaccac

SEQ ID NO: 538290 - RNA, 19 nt, Artificial Sequence
  Description of Artificial Sequence: Synthetic oligonucleotide
guagugagccacaaagugc

SEQ ID NO: 538291 - RNA, 19 nt, Artificial Sequence
  Description of Artificial Sequence: Synthetic oligonucleotide
aguagguuagugugugcug

SEQ ID NO: 538292 - RNA, 19 nt, Artificial Sequence
  Description of Artificial Sequence: Synthetic oligonucleotide
aguuuauaucguuccacaa

SEQ ID NO: 538293 - RNA, 19 nt, Artificial Sequence
  Description of Artificial Sequence: Synthetic oligonucleotide
gaucacguaggcagguggg

SEQ ID NO: 538294 - RNA, 19 nt, Artificial Sequence
  Description of Artificial Sequence: Synthetic oligonucleotide
ucuggugagauacccggau

SEQ ID NO: 538295 - RNA, 19 nt, Artificial Sequence
  Description of Artificial Sequence: Synthetic oligonucleotide
cagaggacgugcgaggucg

SEQ ID NO: 538296 - RNA, 19 nt, Artificial Sequence
  Description of Artificial Sequence: Synthetic oligonucleotide
uccaacuggcucaggaccu

SEQ ID NO: 538297 - RNA, 19 nt, Artificial Sequence
  Description of Artificial Sequence: Synthetic oligonucleotide
ugggaguuugagucauggg

SEQ ID NO: 538298 - RNA, 19 nt, Artificial Sequence
  Description of Artificial Sequence: Synthetic oligonucleotide
aaagaucacguaggcaggu

SEQ ID NO: 538299 - RNA, 19 nt, Artificial Sequence
  Description of Artificial Sequence: Synthetic oligonucleotide
gcucuuauggaugugauuc

SEQ ID NO: 538300 - RNA, 19 nt, Artificial Sequence
  Description of Artificial Sequence: Synthetic oligonucleotide
ucucgaugcgugacuguag

SEQ ID NO: 538301 - RNA, 19 nt, Artificial Sequence
  Description of Artificial Sequence: Synthetic oligonucleotide
auacccggaugggaaagcc

SEQ ID NO: 538302 - RNA, 19 nt, Artificial Sequence
  Description of Artificial Sequence: Synthetic oligonucleotide
aaacuuaauggagcccuga

SEQ ID NO: 538303 - RNA, 19 nt, Artificial Sequence
  Description of Artificial Sequence: Synthetic oligonucleotide
aucagaugucuuuggcaag

SEQ ID NO: 538304 - RNA, 19 nt, Artificial Sequence
  Description of Artificial Sequence: Synthetic oligonucleotide
aaauagcaucaugagcaga

SEQ ID NO: 538305 - RNA, 19 nt, Artificial Sequence
  Description of Artificial Sequence: Synthetic oligonucleotide
gaggucggagccuucucag

SEQ ID NO: 538306 - RNA, 19 nt, Artificial Sequence
  Description of Artificial Sequence: Synthetic oligonucleotide
uccucugaaagccccgcac

SEQ ID NO: 538307 - RNA, 19 nt, Artificial Sequence
  Description of Artificial Sequence: Synthetic oligonucleotide
cuauguguaaccuuuggau

SEQ ID NO: 538308 - RNA, 19 nt, Artificial Sequence
  Description of Artificial Sequence: Synthetic oligonucleotide
cuccauaccauccaguucu

SEQ ID NO: 538309 - RNA, 19 nt, Artificial Sequence
  Description of Artificial Sequence: Synthetic oligonucleotide
ccagagguggauuauugcc

SEQ ID NO: 538310 - RNA, 19 nt, Artificial Sequence
  Description of Artificial Sequence: Synthetic oligonucleotide
ccauccauuaguuggcagg

SEQ ID NO: 538311 - RNA, 19 nt, Artificial Sequence
  Description of Artificial Sequence: Synthetic oligonucleotide
ugaugguucgaaucugcau

SEQ ID NO: 538312 - RNA, 19 nt, Artificial Sequence
  Description of Artificial Sequence: Synthetic oligonucleotide
guuuguuaacugucacccc

SEQ ID NO: 538313 - RNA, 19 nt, Artificial Sequence
  Description of Artificial Sequence: Synthetic oligonucleotide
caugcacgcuugaugacug

SEQ ID NO: 538314 - RNA, 19 nt, Artificial Sequence
  Description of Artificial Sequence: Synthetic oligonucleotide
augccaugcacgcuugaug

SEQ ID NO: 538315 - RNA, 19 nt, Artificial Sequence
  Description of Artificial Sequence: Synthetic oligonucleotide
auggagucagucaugaaaa

SEQ ID NO: 538316 - RNA, 19 nt, Artificial Sequence
  Description of Artificial Sequence: Synthetic oligonucleotide
caguuuauaucguuccaca

SEQ ID NO: 538317 - RNA, 19 nt, Artificial Sequence
  Description of Artificial Sequence: Synthetic oligonucleotide
cacgcuugaugacuguggc

SEQ ID NO: 538318 - RNA, 19 nt, Artificial Sequence
  Description of Artificial Sequence: Synthetic oligonucleotide
ugcgugacuguaguugugc

SEQ ID NO: 538319 - RNA, 19 nt, Artificial Sequence
  Description of Artificial Sequence: Synthetic oligonucleotide
gcacuaaagaucacguagg

SEQ ID NO: 538320 - RNA, 19 nt, Artificial Sequence
  Description of Artificial Sequence: Synthetic oligonucleotide
aguugacaaaugaccacuc

SEQ ID NO: 538321 - RNA, 19 nt, Artificial Sequence
  Description of Artificial Sequence: Synthetic oligonucleotide
agugcucuuauggauguga

SEQ ID NO: 538322 - RNA, 19 nt, Artificial Sequence
  Description of Artificial Sequence: Synthetic oligonucleotide
ggcaguuguguguugauca

SEQ ID NO: 538323 - RNA, 19 nt, Artificial Sequence
  Description of Artificial Sequence: Synthetic oligonucleotide
aaagccgugcauagaucag

SEQ ID NO: 538324 - RNA, 19 nt, Artificial Sequence
  Description of Artificial Sequence: Synthetic oligonucleotide
agcacucucgaugcgugac

SEQ ID NO: 538325 - RNA, 19 nt, Artificial Sequence
  Description of Artificial Sequence: Synthetic oligonucleotide
aguucuggugagauacccg

SEQ ID NO: 538326 - RNA, 19 nt, Artificial Sequence
  Description of Artificial Sequence: Synthetic oligonucleotide
uccgugugguaccguacag

SEQ ID NO: 538327 - RNA, 19 nt, Artificial Sequence
  Description of Artificial Sequence: Synthetic oligonucleotide
uacacaucuagcagaccua

SEQ ID NO: 538328 - RNA, 19 nt, Artificial Sequence
  Description of Artificial Sequence: Synthetic oligonucleotide
aguuaaccaggaccgaaua

SEQ ID NO: 538329 - RNA, 19 nt, Artificial Sequence
  Description of Artificial Sequence: Synthetic oligonucleotide
cugcucggccgauugaggc

SEQ ID NO: 538330 - RNA, 19 nt, Artificial Sequence
  Description of Artificial Sequence: Synthetic oligonucleotide
ccugccaguacuaaaacca

SEQ ID NO: 538331 - RNA, 19 nt, Artificial Sequence
  Description of Artificial Sequence: Synthetic oligonucleotide
guugcuugcgcgugcaguc

SEQ ID NO: 538332 - RNA, 19 nt, Artificial Sequence
  Description of Artificial Sequence: Synthetic oligonucleotide
caacauuugggcacgccca

SEQ ID NO: 538333 - RNA, 19 nt, Artificial Sequence
  Description of Artificial Sequence: Synthetic oligonucleotide
aguuugagucauggguuuc

SEQ ID NO: 538334 - RNA, 19 nt, Artificial Sequence
  Description of Artificial Sequence: Synthetic oligonucleotide
cuuaugccaugcacgcuug

SEQ ID NO: 538335 - RNA, 19 nt, Artificial Sequence
  Description of Artificial Sequence: Synthetic oligonucleotide
cuuuagcggcaagacaggc

SEQ ID NO: 538336 - RNA, 19 nt, Artificial Sequence
  Description of Artificial Sequence: Synthetic oligonucleotide
caggagaucuaaacagguc

SEQ ID NO: 538337 - RNA, 19 nt, Artificial Sequence
  Description of Artificial Sequence: Synthetic oligonucleotide
accauccauuaguuggcag

SEQ ID NO: 538338 - RNA, 19 nt, Artificial Sequence
  Description of Artificial Sequence: Synthetic oligonucleotide
uucuggugagauacccgga

SEQ ID NO: 538339 - RNA, 19 nt, Artificial Sequence
  Description of Artificial Sequence: Synthetic oligonucleotide
gaugcgugacuguaguugu

SEQ ID NO: 538340 - RNA, 19 nt, Artificial Sequence
  Description of Artificial Sequence: Synthetic oligonucleotide
uguugcuugcgcgugcagu

SEQ ID NO: 538341 - RNA, 19 nt, Artificial Sequence
  Description of Artificial Sequence: Synthetic oligonucleotide
uuccggaauaccugcugcu

SEQ ID NO: 538342 - RNA, 19 nt, Artificial Sequence
  Description of Artificial Sequence: Synthetic oligonucleotide
uaccguacagguccugcaa

SEQ ID NO: 538343 - RNA, 19 nt, Artificial Sequence
  Description of Artificial Sequence: Synthetic oligonucleotide
ugcuugcgcgugcagucag

SEQ ID NO: 538344 - RNA, 19 nt, Artificial Sequence
  Description of Artificial Sequence: Synthetic oligonucleotide
ucugcgggugucacacuca

SEQ ID NO: 538345 - RNA, 19 nt, Artificial Sequence
  Description of Artificial Sequence: Synthetic oligonucleotide
aagaucacguaggcaggug

SEQ ID NO: 538346 - RNA, 19 nt, Artificial Sequence
  Description of Artificial Sequence: Synthetic oligonucleotide
ccaacauuugggcacgccc

SEQ ID NO: 538347 - RNA, 19 nt, Artificial Sequence
  Description of Artificial Sequence: Synthetic oligonucleotide
gucagcauacugaagugga

SEQ ID NO: 538348 - RNA, 19 nt, Artificial Sequence
  Description of Artificial Sequence: Synthetic oligonucleotide
gguucgaaucugcauaguc

SEQ ID NO: 538349 - RNA, 19 nt, Artificial Sequence
  Description of Artificial Sequence: Synthetic oligonucleotide
ccacuuaugccaugcacgc

SEQ ID NO: 538350 - RNA, 19 nt, Artificial Sequence
  Description of Artificial Sequence: Synthetic oligonucleotide
ccgugcauagaucaguuug

SEQ ID NO: 538351 - RNA, 19 nt, Artificial Sequence
  Description of Artificial Sequence: Synthetic oligonucleotide
ugccaguacuaaaaccaua

SEQ ID NO: 538352 - RNA, 19 nt, Artificial Sequence
  Description of Artificial Sequence: Synthetic oligonucleotide
ccuaugaaggcaguccacg

SEQ ID NO: 538353 - RNA, 19 nt, Artificial Sequence
  Description of Artificial Sequence: Synthetic oligonucleotide
gauacccggaugggaaagc

SEQ ID NO: 538354 - RNA, 19 nt, Artificial Sequence
  Description of Artificial Sequence: Synthetic oligonucleotide
acccggaugggaaagccag

SEQ ID NO: 538355 - RNA, 19 nt, Artificial Sequence
  Description of Artificial Sequence: Synthetic oligonucleotide
gauugaggcggcauuccuc

SEQ ID NO: 538356 - RNA, 19 nt, Artificial Sequence
  Description of Artificial Sequence: Synthetic oligonucleotide
cuaugaaggcaguccacga

SEQ ID NO: 538357 - RNA, 19 nt, Artificial Sequence
  Description of Artificial Sequence: Synthetic oligonucleotide
gccagagcacucucgaugc

SEQ ID NO: 538358 - RNA, 19 nt, Artificial Sequence
  Description of Artificial Sequence: Synthetic oligonucleotide
gugaaacuuaauggagccc

SEQ ID NO: 538359 - RNA, 19 nt, Artificial Sequence
  Description of Artificial Sequence: Synthetic oligonucleotide
uacccggaugggaaagcca

SEQ ID NO: 538360 - RNA, 19 nt, Artificial Sequence
  Description of Artificial Sequence: Synthetic oligonucleotide
gacgugcgaggucggagcc

SEQ ID NO: 538361 - RNA, 19 nt, Artificial Sequence
  Description of Artificial Sequence: Synthetic oligonucleotide
ugcacgcuugaugacugug

SEQ ID NO: 538362 - RNA, 19 nt, Artificial Sequence
  Description of Artificial Sequence: Synthetic oligonucleotide
gacuuguguggucucagcu

SEQ ID NO: 538363 - RNA, 19 nt, Artificial Sequence
  Description of Artificial Sequence: Synthetic oligonucleotide
auuaguuggcagggcuggg

SEQ ID NO: 538364 - RNA, 19 nt, Artificial Sequence
  Description of Artificial Sequence: Synthetic oligonucleotide
ugauggggcuccccuccag

SEQ ID NO: 538365 - RNA, 19 nt, Artificial Sequence
  Description of Artificial Sequence: Synthetic oligonucleotide
cuagcauggagucagucau

SEQ ID NO: 538366 - RNA, 19 nt, Artificial Sequence
  Description of Artificial Sequence: Synthetic oligonucleotide
uggcauaguugaugcacaa

SEQ ID NO: 538367 - RNA, 19 nt, Artificial Sequence
  Description of Artificial Sequence: Synthetic oligonucleotide
accuaugaaggcaguccac

SEQ ID NO: 538368 - RNA, 19 nt, Artificial Sequence
  Description of Artificial Sequence: Synthetic oligonucleotide
agaucaguuuggccagaca

SEQ ID NO: 538369 - RNA, 19 nt, Artificial Sequence
  Description of Artificial Sequence: Synthetic oligonucleotide
gaaaagccgugcauagauc

SEQ ID NO: 538370 - RNA, 19 nt, Artificial Sequence
  Description of Artificial Sequence: Synthetic oligonucleotide
aaccaggaccgaauagcug

SEQ ID NO: 538371 - RNA, 19 nt, Artificial Sequence
  Description of Artificial Sequence: Synthetic oligonucleotide
guagaaacaaaggcacuaa

SEQ ID NO: 538372 - RNA, 19 nt, Artificial Sequence
  Description of Artificial Sequence: Synthetic oligonucleotide
uuaugccaugcacgcuuga

SEQ ID NO: 538373 - RNA, 19 nt, Artificial Sequence
  Description of Artificial Sequence: Synthetic oligonucleotide
cuggugagauacccggaug

SEQ ID NO: 538374 - RNA, 19 nt, Artificial Sequence
  Description of Artificial Sequence: Synthetic oligonucleotide
ugguccucugaccgccaag

SEQ ID NO: 538375 - RNA, 19 nt, Artificial Sequence
  Description of Artificial Sequence: Synthetic oligonucleotide
uuugagucauggguuucuc

SEQ ID NO: 538376 - RNA, 19 nt, Artificial Sequence
  Description of Artificial Sequence: Synthetic oligonucleotide
guucgaaucugcauagucu

SEQ ID NO: 538377 - RNA, 19 nt, Artificial Sequence
  Description of Artificial Sequence: Synthetic oligonucleotide
ggcauaggccaccaguuuc

SEQ ID NO: 538378 - RNA, 19 nt, Artificial Sequence
  Description of Artificial Sequence: Synthetic oligonucleotide
cugaccgccaagcccuggc

SEQ ID NO: 538379 - RNA, 19 nt, Artificial Sequence
  Description of Artificial Sequence: Synthetic oligonucleotide
gugggaauagcuuggcagu

SEQ ID NO: 538380 - RNA, 19 nt, Artificial Sequence
  Description of Artificial Sequence: Synthetic oligonucleotide
agcgaggaacucagggaac

SEQ ID NO: 538381 - RNA, 19 nt, Artificial Sequence
  Description of Artificial Sequence: Synthetic oligonucleotide
cucugcgggugucacacuc

SEQ ID NO: 538382 - RNA, 19 nt, Artificial Sequence
  Description of Artificial Sequence: Synthetic oligonucleotide
ugcucuuauggaugugauu

SEQ ID NO: 538383 - RNA, 19 nt, Artificial Sequence
  Description of Artificial Sequence: Synthetic oligonucleotide
cacugcucggccgauugag

SEQ ID NO: 538384 - RNA, 19 nt, Artificial Sequence
  Description of Artificial Sequence: Synthetic oligonucleotide
guaguugugcugcacugcu

SEQ ID NO: 538385 - RNA, 19 nt, Artificial Sequence
  Description of Artificial Sequence: Synthetic oligonucleotide
ggugagauacccggauggg

SEQ ID NO: 538386 - RNA, 19 nt, Artificial Sequence
  Description of Artificial Sequence: Synthetic oligonucleotide
agagcacucucgaugcgug

SEQ ID NO: 538387 - RNA, 19 nt, Artificial Sequence
  Description of Artificial Sequence: Synthetic oligonucleotide
ucacugauaccagccaguu

SEQ ID NO: 538388 - RNA, 19 nt, Artificial Sequence
  Description of Artificial Sequence: Synthetic oligonucleotide
uagaucaguuuggccagac

SEQ ID NO: 538389 - RNA, 19 nt, Artificial Sequence
  Description of Artificial Sequence: Synthetic oligonucleotide
cacaaccacaaagcugggc

SEQ ID NO: 538390 - RNA, 19 nt, Artificial Sequence
  Description of Artificial Sequence: Synthetic oligonucleotide
cugagcuuauuauggccga

SEQ ID NO: 538391 - RNA, 19 nt, Artificial Sequence
  Description of Artificial Sequence: Synthetic oligonucleotide
gaauagcuuggcaguugug

SEQ ID NO: 538392 - RNA, 19 nt, Artificial Sequence
  Description of Artificial Sequence: Synthetic oligonucleotide
gagauacccggaugggaaa

SEQ ID NO: 538393 - RNA, 19 nt, Artificial Sequence
  Description of Artificial Sequence: Synthetic oligonucleotide
uguggccccaauccugguu

SEQ ID NO: 538394 - RNA, 19 nt, Artificial Sequence
  Description of Artificial Sequence: Synthetic oligonucleotide
ggagucagucaugaaaauc

SEQ ID NO: 538395 - RNA, 19 nt, Artificial Sequence
  Description of Artificial Sequence: Synthetic oligonucleotide
gucccucaacugcauauuc

SEQ ID NO: 538396 - RNA, 19 nt, Artificial Sequence
  Description of Artificial Sequence: Synthetic oligonucleotide
ugaccgccaagcccuggcu

SEQ ID NO: 538397 - RNA, 19 nt, Artificial Sequence
  Description of Artificial Sequence: Synthetic oligonucleotide
cacaucuagcagaccuaug

SEQ ID NO: 538398 - RNA, 19 nt, Artificial Sequence
  Description of Artificial Sequence: Synthetic oligonucleotide
ggacgugcgaggucggagc

SEQ ID NO: 538399 - RNA, 19 nt, Artificial Sequence
  Description of Artificial Sequence: Synthetic oligonucleotide
acgcuugaugacuguggca

SEQ ID NO: 538400 - RNA, 19 nt, Artificial Sequence
  Description of Artificial Sequence: Synthetic oligonucleotide
uaccauccauuaguuggca

SEQ ID NO: 538401 - RNA, 19 nt, Artificial Sequence
  Description of Artificial Sequence: Synthetic oligonucleotide
aaugaccacuccagucccu

SEQ ID NO: 538402 - RNA, 19 nt, Artificial Sequence
  Description of Artificial Sequence: Synthetic oligonucleotide
guaccguacagguccugca

SEQ ID NO: 538403 - RNA, 19 nt, Artificial Sequence
  Description of Artificial Sequence: Synthetic oligonucleotide
gggcuugccugccagagca

SEQ ID NO: 538404 - RNA, 19 nt, Artificial Sequence
  Description of Artificial Sequence: Synthetic oligonucleotide
gcugauggggcuccccucc

SEQ ID NO: 538405 - RNA, 19 nt, Artificial Sequence
  Description of Artificial Sequence: Synthetic oligonucleotide
cagcuauguguaaccuuug

SEQ ID NO: 538406 - RNA, 19 nt, Artificial Sequence
  Description of Artificial Sequence: Synthetic oligonucleotide
acugcucggccgauugagg

SEQ ID NO: 538407 - RNA, 19 nt, Artificial Sequence
  Description of Artificial Sequence: Synthetic oligonucleotide
aggacgugcgaggucggag

SEQ ID NO: 538408 - RNA, 19 nt, Artificial Sequence
  Description of Artificial Sequence: Synthetic oligonucleotide
agccccgcacacccacagc

SEQ ID NO: 538409 - RNA, 19 nt, Artificial Sequence
  Description of Artificial Sequence: Synthetic oligonucleotide
cacugauaccagccaguug

SEQ ID NO: 538410 - RNA, 19 nt, Artificial Sequence
  Description of Artificial Sequence: Synthetic oligonucleotide
gcucagagggcccucuggc

SEQ ID NO: 538411 - RNA, 19 nt, Artificial Sequence
  Description of Artificial Sequence: Synthetic oligonucleotide
ugguugcugucugaauuaa

SEQ ID NO: 538412 - RNA, 19 nt, Artificial Sequence
  Description of Artificial Sequence: Synthetic oligonucleotide
aggcacuaaagaucacgua

SEQ ID NO: 538413 - RNA, 19 nt, Artificial Sequence
  Description of Artificial Sequence: Synthetic oligonucleotide
uggauguguuuccgaguua

SEQ ID NO: 538414 - RNA, 19 nt, Artificial Sequence
  Description of Artificial Sequence: Synthetic oligonucleotide
uggcagcuauguguaaccu

SEQ ID NO: 538415 - RNA, 19 nt, Artificial Sequence
  Description of Artificial Sequence: Synthetic oligonucleotide
gcuguugaucacugauacc

SEQ ID NO: 538416 - RNA, 19 nt, Artificial Sequence
  Description of Artificial Sequence: Synthetic oligonucleotide
agccaguugaaaagccgug

SEQ ID NO: 538417 - RNA, 19 nt, Artificial Sequence
  Description of Artificial Sequence: Synthetic oligonucleotide
uggcaguuguguguugauc

SEQ ID NO: 538418 - RNA, 19 nt, Artificial Sequence
  Description of Artificial Sequence: Synthetic oligonucleotide
gcacgcuugaugacugugg

SEQ ID NO: 538419 - RNA, 19 nt, Artificial Sequence
  Description of Artificial Sequence: Synthetic oligonucleotide
gugagauacccggauggga

SEQ ID NO: 538420 - RNA, 19 nt, Artificial Sequence
  Description of Artificial Sequence: Synthetic oligonucleotide
caguacagugggacuugug

SEQ ID NO: 538421 - RNA, 19 nt, Artificial Sequence
  Description of Artificial Sequence: Synthetic oligonucleotide
ugagcacugcggccugccu

SEQ ID NO: 538422 - RNA, 19 nt, Artificial Sequence
  Description of Artificial Sequence: Synthetic oligonucleotide
aucaugagcagagggucuu

SEQ ID NO: 538423 - RNA, 19 nt, Artificial Sequence
  Description of Artificial Sequence: Synthetic oligonucleotide
gcuuauuauggccgaggca

SEQ ID NO: 538424 - RNA, 19 nt, Artificial Sequence
  Description of Artificial Sequence: Synthetic oligonucleotide
gucuuuggcaaggcagcug

SEQ ID NO: 538425 - RNA, 19 nt, Artificial Sequence
  Description of Artificial Sequence: Synthetic oligonucleotide
gcgggugucacacucagcu

SEQ ID NO: 538426 - RNA, 19 nt, Artificial Sequence
  Description of Artificial Sequence: Synthetic oligonucleotide
gguaccguacagguccugc

SEQ ID NO: 538427 - RNA, 19 nt, Artificial Sequence
  Description of Artificial Sequence: Synthetic oligonucleotide
ugggaauagcuuggcaguu

SEQ ID NO: 538428 - RNA, 19 nt, Artificial Sequence
  Description of Artificial Sequence: Synthetic oligonucleotide
ucugaccgccaagcccugg

SEQ ID NO: 538429 - RNA, 19 nt, Artificial Sequence
  Description of Artificial Sequence: Synthetic oligonucleotide
ugcgaggucggagccuucu

SEQ ID NO: 538430 - RNA, 19 nt, Artificial Sequence
  Description of Artificial Sequence: Synthetic oligonucleotide
gccaguugaaaagccgugc

SEQ ID NO: 538431 - RNA, 19 nt, Artificial Sequence
  Description of Artificial Sequence: Synthetic oligonucleotide
uggugccgccuccagccac

SEQ ID NO: 538432 - RNA, 19 nt, Artificial Sequence
  Description of Artificial Sequence: Synthetic oligonucleotide
ccggaauaccugcugcugc

SEQ ID NO: 538433 - RNA, 19 nt, Artificial Sequence
  Description of Artificial Sequence: Synthetic oligonucleotide
ucgagggaagccggaggca

SEQ ID NO: 538434 - RNA, 19 nt, Artificial Sequence
  Description of Artificial Sequence: Synthetic oligonucleotide
gcucggccgauugaggcgg

SEQ ID NO: 538435 - RNA, 19 nt, Artificial Sequence
  Description of Artificial Sequence: Synthetic oligonucleotide
cacgagcuggagucugcac

SEQ ID NO: 538436 - RNA, 19 nt, Artificial Sequence
  Description of Artificial Sequence: Synthetic oligonucleotide
ugcagcgggcacacugcuc

SEQ ID NO: 538437 - RNA, 19 nt, Artificial Sequence
  Description of Artificial Sequence: Synthetic oligonucleotide
ggaccgaauagcugccuga

SEQ ID NO: 538438 - RNA, 19 nt, Artificial Sequence
  Description of Artificial Sequence: Synthetic oligonucleotide
cagccaguugaaaagccgu

SEQ ID NO: 538439 - RNA, 19 nt, Artificial Sequence
  Description of Artificial Sequence: Synthetic oligonucleotide
ucgaugcgugacuguaguu

SEQ ID NO: 538440 - RNA, 19 nt, Artificial Sequence
  Description of Artificial Sequence: Synthetic oligonucleotide
ccggaggcaggcauaggcc

SEQ ID NO: 538441 - RNA, 19 nt, Artificial Sequence
  Description of Artificial Sequence: Synthetic oligonucleotide
ugguucgaaucugcauagu

SEQ ID NO: 538442 - RNA, 19 nt, Artificial Sequence
  Description of Artificial Sequence: Synthetic oligonucleotide
gaguuaaccaggaccgaau

SEQ ID NO: 538443 - RNA, 19 nt, Artificial Sequence
  Description of Artificial Sequence: Synthetic oligonucleotide
gggaauagcuuggcaguug

SEQ ID NO: 538444 - RNA, 19 nt, Artificial Sequence
  Description of Artificial Sequence: Synthetic oligonucleotide
guuugagucauggguuucu

SEQ ID NO: 538445 - RNA, 19 nt, Artificial Sequence
  Description of Artificial Sequence: Synthetic oligonucleotide
uugcgcgugcagucagagu

SEQ ID NO: 538446 - RNA, 19 nt, Artificial Sequence
  Description of Artificial Sequence: Synthetic oligonucleotide
ggcacgcccacauuccaga

SEQ ID NO: 538447 - RNA, 19 nt, Artificial Sequence
  Description of Artificial Sequence: Synthetic oligonucleotide
aggaguccagucaguucag

SEQ ID NO: 538448 - RNA, 19 nt, Artificial Sequence
  Description of Artificial Sequence: Synthetic oligonucleotide
cgaugcgugacuguaguug

SEQ ID NO: 538449 - RNA, 19 nt, Artificial Sequence
  Description of Artificial Sequence: Synthetic oligonucleotide
caguagguuagugugugcu

SEQ ID NO: 538450 - RNA, 19 nt, Artificial Sequence
  Description of Artificial Sequence: Synthetic oligonucleotide
cgaauagcugccugaauga

SEQ ID NO: 538451 - RNA, 19 nt, Artificial Sequence
  Description of Artificial Sequence: Synthetic oligonucleotide
cucgaugcgugacuguagu

SEQ ID NO: 538452 - RNA, 19 nt, Artificial Sequence
  Description of Artificial Sequence: Synthetic oligonucleotide
ccaguugaaaagccgugca

SEQ ID NO: 538453 - RNA, 19 nt, Artificial Sequence
  Description of Artificial Sequence: Synthetic oligonucleotide
augcacgcuugaugacugu

SEQ ID NO: 538454 - RNA, 19 nt, Artificial Sequence
  Description of Artificial Sequence: Synthetic oligonucleotide
ggacguuguggccccaauc

SEQ ID NO: 538455 - RNA, 19 nt, Artificial Sequence
  Description of Artificial Sequence: Synthetic oligonucleotide
gcugggacguuguggcccc

SEQ ID NO: 538456 - RNA, 19 nt, Artificial Sequence
  Description of Artificial Sequence: Synthetic oligonucleotide
cccaguagguuagugugug

SEQ ID NO: 538457 - RNA, 19 nt, Artificial Sequence
  Description of Artificial Sequence: Synthetic oligonucleotide
agaggacgugcgaggucgg

SEQ ID NO: 538458 - RNA, 19 nt, Artificial Sequence
  Description of Artificial Sequence: Synthetic oligonucleotide
gcaagacaggccauucuga

SEQ ID NO: 538459 - RNA, 19 nt, Artificial Sequence
  Description of Artificial Sequence: Synthetic oligonucleotide
ucucugcgggugucacacu

SEQ ID NO: 538460 - RNA, 19 nt, Artificial Sequence
  Description of Artificial Sequence: Synthetic oligonucleotide
ccaguagguuagugugugc

SEQ ID NO: 538461 - RNA, 19 nt, Artificial Sequence
  Description of Artificial Sequence: Synthetic oligonucleotide
ccgugugguaccguacagg

SEQ ID NO: 538462 - RNA, 19 nt, Artificial Sequence
  Description of Artificial Sequence: Synthetic oligonucleotide
augcgugacuguaguugug

SEQ ID NO: 538463 - RNA, 19 nt, Artificial Sequence
  Description of Artificial Sequence: Synthetic oligonucleotide
gcagcuauguguaaccuuu

SEQ ID NO: 538464 - RNA, 19 nt, Artificial Sequence
  Description of Artificial Sequence: Synthetic oligonucleotide
ugguaccguacagguccug

SEQ ID NO: 538465 - RNA, 19 nt, Artificial Sequence
  Description of Artificial Sequence: Synthetic oligonucleotide
ggagugguugcugucugaa

SEQ ID NO: 538466 - RNA, 19 nt, Artificial Sequence
  Description of Artificial Sequence: Synthetic oligonucleotide
ccucugaccgccaagcccu

SEQ ID NO: 538467 - RNA, 19 nt, Artificial Sequence
  Description of Artificial Sequence: Synthetic oligonucleotide
gcgcgugcagucagagucg

SEQ ID NO: 538468 - RNA, 19 nt, Artificial Sequence
  Description of Artificial Sequence: Synthetic oligonucleotide
ggcggcauuccucauuuau

SEQ ID NO: 538469 - RNA, 19 nt, Artificial Sequence
  Description of Artificial Sequence: Synthetic oligonucleotide
ggcuagcaccagucccagg

SEQ ID NO: 538470 - RNA, 19 nt, Artificial Sequence
  Description of Artificial Sequence: Synthetic oligonucleotide
ccgauugaggcggcauucc

SEQ ID NO: 538471 - RNA, 19 nt, Artificial Sequence
  Description of Artificial Sequence: Synthetic oligonucleotide
cucggccgauugaggcggc

SEQ ID NO: 538472 - RNA, 19 nt, Artificial Sequence
  Description of Artificial Sequence: Synthetic oligonucleotide
gccgauugaggcggcauuc

SEQ ID NO: 538473 - RNA, 19 nt, Artificial Sequence
  Description of Artificial Sequence: Synthetic oligonucleotide
gggaaugacucaaacccau

SEQ ID NO: 538474 - RNA, 19 nt, Artificial Sequence
  Description of Artificial Sequence: Synthetic oligonucleotide
cggcugagcuuauuauggc

SEQ ID NO: 538475 - RNA, 19 nt, Artificial Sequence
  Description of Artificial Sequence: Synthetic oligonucleotide
gaggacgugcgaggucgga

SEQ ID NO: 538476 - RNA, 19 nt, Artificial Sequence
  Description of Artificial Sequence: Synthetic oligonucleotide
cccggaugggaaagccagc

SEQ ID NO: 538477 - RNA, 19 nt, Artificial Sequence
  Description of Artificial Sequence: Synthetic oligonucleotide
ccgaggcagggcuugccug

SEQ ID NO: 538478 - RNA, 19 nt, Artificial Sequence
  Description of Artificial Sequence: Synthetic oligonucleotide
gggcacgcccacauuccag

SEQ ID NO: 538479 - RNA, 19 nt, Artificial Sequence
  Description of Artificial Sequence: Synthetic oligonucleotide
ucggccgauugaggcggca

SEQ ID NO: 538480 - RNA, 19 nt, Artificial Sequence
  Description of Artificial Sequence: Synthetic oligonucleotide
agccggaggcaggcauagg

SEQ ID NO: 538481 - RNA, 19 nt, Artificial Sequence
  Description of Artificial Sequence: Synthetic oligonucleotide
cagagcacucucgaugcgu

SEQ ID NO: 538482 - RNA, 19 nt, Artificial Sequence
  Description of Artificial Sequence: Synthetic oligonucleotide
acgugcgaggucggagccu

SEQ ID NO: 538483 - RNA, 19 nt, Artificial Sequence
  Description of Artificial Sequence: Synthetic oligonucleotide
gcacaaccacaaagcuggg

SEQ ID NO: 538484 - RNA, 19 nt, Artificial Sequence
  Description of Artificial Sequence: Synthetic oligonucleotide
cugcucgagggaagccgga

SEQ ID NO: 538485 - RNA, 19 nt, Artificial Sequence
  Description of Artificial Sequence: Synthetic oligonucleotide
cugccuugaugguucgaau

SEQ ID NO: 538486 - RNA, 19 nt, Artificial Sequence
  Description of Artificial Sequence: Synthetic oligonucleotide
ccguacagguccugcaaaa

SEQ ID NO: 538487 - RNA, 19 nt, Artificial Sequence
  Description of Artificial Sequence: Synthetic oligonucleotide
ggcagcuauguguaaccuu

SEQ ID NO: 538488 - RNA, 19 nt, Artificial Sequence
  Description of Artificial Sequence: Synthetic oligonucleotide
gcgaggaacucagggaacu

SEQ ID NO: 538489 - RNA, 19 nt, Artificial Sequence
  Description of Artificial Sequence: Synthetic oligonucleotide
guuggcagcguggcauccu

SEQ ID NO: 538490 - RNA, 19 nt, Artificial Sequence
  Description of Artificial Sequence: Synthetic oligonucleotide
ccuuccgugugguaccgua

SEQ ID NO: 538491 - RNA, 19 nt, Artificial Sequence
  Description of Artificial Sequence: Synthetic oligonucleotide
cugguccucugaccgccaa

SEQ ID NO: 538492 - RNA, 19 nt, Artificial Sequence
  Description of Artificial Sequence: Synthetic oligonucleotide
gcggcaagacaggccauuc

SEQ ID NO: 538493 - RNA, 19 nt, Artificial Sequence
  Description of Artificial Sequence: Synthetic oligonucleotide
cgaggucggagccuucuca

SEQ ID NO: 538494 - RNA, 19 nt, Artificial Sequence
  Description of Artificial Sequence: Synthetic oligonucleotide
gcgugacuguaguugugcu

SEQ ID NO: 538495 - RNA, 19 nt, Artificial Sequence
  Description of Artificial Sequence: Synthetic oligonucleotide
aggcggcauuccucauuua

SEQ ID NO: 538496 - RNA, 19 nt, Artificial Sequence
  Description of Artificial Sequence: Synthetic oligonucleotide
gcacucucgaugcgugacu

SEQ ID NO: 538497 - RNA, 19 nt, Artificial Sequence
  Description of Artificial Sequence: Synthetic oligonucleotide
cacuuaugccaugcacgcu

SEQ ID NO: 538498 - RNA, 19 nt, Artificial Sequence
  Description of Artificial Sequence: Synthetic oligonucleotide
acacuuggacuggccuguu

SEQ ID NO: 538499 - RNA, 19 nt, Artificial Sequence
  Description of Artificial Sequence: Synthetic oligonucleotide
gcgaggucggagccuucuc

SEQ ID NO: 538500 - RNA, 19 nt, Artificial Sequence
  Description of Artificial Sequence: Synthetic oligonucleotide
gcacugcucggccgauuga

SEQ ID NO: 538501 - RNA, 19 nt, Artificial Sequence
  Description of Artificial Sequence: Synthetic oligonucleotide
ccccaauccugguuuguua

SEQ ID NO: 538502 - RNA, 19 nt, Artificial Sequence
  Description of Artificial Sequence: Synthetic oligonucleotide
cgaguuaaccaggaccgaa

SEQ ID NO: 538503 - RNA, 19 nt, Artificial Sequence
  Description of Artificial Sequence: Synthetic oligonucleotide
gcacgcccacauuccagaa

SEQ ID NO: 538504 - RNA, 19 nt, Artificial Sequence
  Description of Artificial Sequence: Synthetic oligonucleotide
ccaugcacgcuugaugacu

SEQ ID NO: 538505 - RNA, 19 nt, Artificial Sequence
  Description of Artificial Sequence: Synthetic oligonucleotide
gugaggccuugaacuugga

SEQ ID NO: 538506 - RNA, 19 nt, Artificial Sequence
  Description of Artificial Sequence: Synthetic oligonucleotide
gugguaccguacagguccu

SEQ ID NO: 538507 - RNA, 19 nt, Artificial Sequence
  Description of Artificial Sequence: Synthetic oligonucleotide
cugccagagcacucucgau

SEQ ID NO: 538508 - RNA, 19 nt, Artificial Sequence
  Description of Artificial Sequence: Synthetic oligonucleotide
cgcgugcagucagagucgc

SEQ ID NO: 538509 - RNA, 19 nt, Artificial Sequence
  Description of Artificial Sequence: Synthetic oligonucleotide
gccgaggcagggcuugccu

SEQ ID NO: 538510 - RNA, 19 nt, Artificial Sequence
  Description of Artificial Sequence: Synthetic oligonucleotide
gcuugcgcgugcagucaga

SEQ ID NO: 538511 - RNA, 19 nt, Artificial Sequence
  Description of Artificial Sequence: Synthetic oligonucleotide
ggccgauugaggcggcauu

SEQ ID NO: 538512 - RNA, 19 nt, Artificial Sequence
  Description of Artificial Sequence: Synthetic oligonucleotide
ccacgagcuggagucugca

SEQ ID NO: 538513 - RNA, 19 nt, Artificial Sequence
  Description of Artificial Sequence: Synthetic oligonucleotide
ccgaguuaaccaggaccga

SEQ ID NO: 538514 - RNA, 19 nt, Artificial Sequence
  Description of Artificial Sequence: Synthetic oligonucleotide
gccgugcauagaucaguuu

SEQ ID NO: 538515 - RNA, 19 nt, Artificial Sequence
  Description of Artificial Sequence: Synthetic oligonucleotide
cgauugaggcggcauuccu

SEQ ID NO: 538516 - RNA, 19 nt, Artificial Sequence
  Description of Artificial Sequence: Synthetic oligonucleotide
gugcgaggucggagccuuc

SEQ ID NO: 538517 - RNA, 19 nt, Artificial Sequence
  Description of Artificial Sequence: Synthetic oligonucleotide
ggccccaauccugguuugu

SEQ ID NO: 538518 - RNA, 19 nt, Artificial Sequence
  Description of Artificial Sequence: Synthetic oligonucleotide
gccccaauccugguuuguu

SEQ ID NO: 538519 - RNA, 19 nt, Artificial Sequence
  Description of Artificial Sequence: Synthetic oligonucleotide
gcgugcagucagagucgcu

SEQ ID NO: 538520 - RNA, 19 nt, Artificial Sequence
  Description of Artificial Sequence: Synthetic oligonucleotide
cgccaagcccuggcucaca

SEQ ID NO: 538521 - RNA, 19 nt, Artificial Sequence
  Description of Artificial Sequence: Synthetic oligonucleotide
cggccgauugaggcggcau

SEQ ID NO: 538522 - RNA, 19 nt, Artificial Sequence
  Description of Artificial Sequence: Synthetic oligonucleotide
uuugcaguagucaugacag

SEQ ID NO: 538523 - RNA, 19 nt, Artificial Sequence
  Description of Artificial Sequence: Synthetic oligonucleotide
uuuauuuaaucuugaaccg

SEQ ID NO: 538524 - RNA, 19 nt, Artificial Sequence
  Description of Artificial Sequence: Synthetic oligonucleotide
auuugcaucagagacaggc

SEQ ID NO: 538525 - RNA, 19 nt, Artificial Sequence
  Description of Artificial Sequence: Synthetic oligonucleotide
ugaaccguuaauagaaacg

SEQ ID NO: 538526 - RNA, 19 nt, Artificial Sequence
  Description of Artificial Sequence: Synthetic oligonucleotide
aaacauuuucguuggcccc

SEQ ID NO: 538527 - RNA, 19 nt, Artificial Sequence
  Description of Artificial Sequence: Synthetic oligonucleotide
uuuuguguaaaccuuaaua

SEQ ID NO: 538528 - RNA, 19 nt, Artificial Sequence
  Description of Artificial Sequence: Synthetic oligonucleotide
acgggagaaacucagacgg

SEQ ID NO: 538529 - RNA, 19 nt, Artificial Sequence
  Description of Artificial Sequence: Synthetic oligonucleotide
ugccagauaaguuucgggg

SEQ ID NO: 538530 - RNA, 19 nt, Artificial Sequence
  Description of Artificial Sequence: Synthetic oligonucleotide
cuguuaaguagcuacacag

SEQ ID NO: 538531 - RNA, 19 nt, Artificial Sequence
  Description of Artificial Sequence: Synthetic oligonucleotide
ucaauuaauagugugcugu

SEQ ID NO: 538532 - RNA, 19 nt, Artificial Sequence
  Description of Artificial Sequence: Synthetic oligonucleotide
uauucggugcaaauaacca

SEQ ID NO: 538533 - RNA, 19 nt, Artificial Sequence
  Description of Artificial Sequence: Synthetic oligonucleotide
uuucggggaggcaaggugg

SEQ ID NO: 538534 - RNA, 19 nt, Artificial Sequence
  Description of Artificial Sequence: Synthetic oligonucleotide
ucgauaaggcuaaacaggu

SEQ ID NO: 538535 - RNA, 19 nt, Artificial Sequence
  Description of Artificial Sequence: Synthetic oligonucleotide
guaaacccauccuuaaggg

SEQ ID NO: 538536 - RNA, 19 nt, Artificial Sequence
  Description of Artificial Sequence: Synthetic oligonucleotide
uuguguaaaccuuaauaga

SEQ ID NO: 538537 - RNA, 19 nt, Artificial Sequence
  Description of Artificial Sequence: Synthetic oligonucleotide
ugauccugcgguuaaauaa

SEQ ID NO: 538538 - RNA, 19 nt, Artificial Sequence
  Description of Artificial Sequence: Synthetic oligonucleotide
agaaacgauaaagucaaag

SEQ ID NO: 538539 - RNA, 19 nt, Artificial Sequence
  Description of Artificial Sequence: Synthetic oligonucleotide
uuaauagagaugugacuca

SEQ ID NO: 538540 - RNA, 19 nt, Artificial Sequence
  Description of Artificial Sequence: Synthetic oligonucleotide
gaaacggaugcucacuccc

SEQ ID NO: 538541 - RNA, 19 nt, Artificial Sequence
  Description of Artificial Sequence: Synthetic oligonucleotide
auagaaacgauaaagucaa

SEQ ID NO: 538542 - RNA, 19 nt, Artificial Sequence
  Description of Artificial Sequence: Synthetic oligonucleotide
aaugacgggagaaacucag

SEQ ID NO: 538543 - RNA, 19 nt, Artificial Sequence
  Description of Artificial Sequence: Synthetic oligonucleotide
uggggauaggaaccuagcg

SEQ ID NO: 538544 - RNA, 19 nt, Artificial Sequence
  Description of Artificial Sequence: Synthetic oligonucleotide
acaguugguacaccuguac

SEQ ID NO: 538545 - RNA, 19 nt, Artificial Sequence
  Description of Artificial Sequence: Synthetic oligonucleotide
aacuaguaugaaaucaaug

SEQ ID NO: 538546 - RNA, 19 nt, Artificial Sequence
  Description of Artificial Sequence: Synthetic oligonucleotide
aaugccagauaaguuucgg

SEQ ID NO: 538547 - RNA, 19 nt, Artificial Sequence
  Description of Artificial Sequence: Synthetic oligonucleotide
uaaucuugaaccguuaaua

SEQ ID NO: 538548 - RNA, 19 nt, Artificial Sequence
  Description of Artificial Sequence: Synthetic oligonucleotide
gacagugucggcuccaaug

SEQ ID NO: 538549 - RNA, 19 nt, Artificial Sequence
  Description of Artificial Sequence: Synthetic oligonucleotide
gggauaggaaccuagcggg

SEQ ID NO: 538550 - RNA, 19 nt, Artificial Sequence
  Description of Artificial Sequence: Synthetic oligonucleotide
gacgggagaaacucagacg

SEQ ID NO: 538551 - RNA, 19 nt, Artificial Sequence
  Description of Artificial Sequence: Synthetic oligonucleotide
agaaacggaugcucacucc

SEQ ID NO: 538552 - RNA, 19 nt, Artificial Sequence
  Description of Artificial Sequence: Synthetic oligonucleotide
uguaccagucauuuguccu

SEQ ID NO: 538553 - RNA, 19 nt, Artificial Sequence
  Description of Artificial Sequence: Synthetic oligonucleotide
accuuaauagagaugugac

SEQ ID NO: 538554 - RNA, 19 nt, Artificial Sequence
  Description of Artificial Sequence: Synthetic oligonucleotide
gucgguguuguauacguag

SEQ ID NO: 538555 - RNA, 19 nt, Artificial Sequence
  Description of Artificial Sequence: Synthetic oligonucleotide
uguaacugaggucucccga

SEQ ID NO: 538556 - RNA, 19 nt, Artificial Sequence
  Description of Artificial Sequence: Synthetic oligonucleotide
uaauguaguagcugggguc

SEQ ID NO: 538557 - RNA, 19 nt, Artificial Sequence
  Description of Artificial Sequence: Synthetic oligonucleotide
gaucucgacgcucugcgag

SEQ ID NO: 538558 - RNA, 19 nt, Artificial Sequence
  Description of Artificial Sequence: Synthetic oligonucleotide
guauacguagagcuucagg

SEQ ID NO: 538559 - RNA, 19 nt, Artificial Sequence
  Description of Artificial Sequence: Synthetic oligonucleotide
gaaccguuaauagaaacga

SEQ ID NO: 538560 - RNA, 19 nt, Artificial Sequence
  Description of Artificial Sequence: Synthetic oligonucleotide
guaauucugaguucagaac

SEQ ID NO: 538561 - RNA, 19 nt, Artificial Sequence
  Description of Artificial Sequence: Synthetic oligonucleotide
uaaguuucggggaggcaag

SEQ ID NO: 538562 - RNA, 19 nt, Artificial Sequence
  Description of Artificial Sequence: Synthetic oligonucleotide
guguaaugaucacuucucg

SEQ ID NO: 538563 - RNA, 19 nt, Artificial Sequence
  Description of Artificial Sequence: Synthetic oligonucleotide
uucggugcaaauaaccaua

SEQ ID NO: 538564 - RNA, 19 nt, Artificial Sequence
  Description of Artificial Sequence: Synthetic oligonucleotide
cugagcuaauagaaagucc

SEQ ID NO: 538565 - RNA, 19 nt, Artificial Sequence
  Description of Artificial Sequence: Synthetic oligonucleotide
agguauucggugcaaauaa

SEQ ID NO: 538566 - RNA, 19 nt, Artificial Sequence
  Description of Artificial Sequence: Synthetic oligonucleotide
uugaaccguuaauagaaac

SEQ ID NO: 538567 - RNA, 19 nt, Artificial Sequence
  Description of Artificial Sequence: Synthetic oligonucleotide
aauuaauagugugcugugu

SEQ ID NO: 538568 - RNA, 19 nt, Artificial Sequence
  Description of Artificial Sequence: Synthetic oligonucleotide
auuuucguuggccccauca

SEQ ID NO: 538569 - RNA, 19 nt, Artificial Sequence
  Description of Artificial Sequence: Synthetic oligonucleotide
uucaauuaauagugugcug

SEQ ID NO: 538570 - RNA, 19 nt, Artificial Sequence
  Description of Artificial Sequence: Synthetic oligonucleotide
aacggaugcucacucccag

SEQ ID NO: 538571 - RNA, 19 nt, Artificial Sequence
  Description of Artificial Sequence: Synthetic oligonucleotide
uacaguuuagugagguggu

SEQ ID NO: 538572 - RNA, 19 nt, Artificial Sequence
  Description of Artificial Sequence: Synthetic oligonucleotide
ggggauaggaaccuagcgg

SEQ ID NO: 538573 - RNA, 19 nt, Artificial Sequence
  Description of Artificial Sequence: Synthetic oligonucleotide
ugaguaauucugaguucag

SEQ ID NO: 538574 - RNA, 19 nt, Artificial Sequence
  Description of Artificial Sequence: Synthetic oligonucleotide
uaauggguguaccagucau

SEQ ID NO: 538575 - RNA, 19 nt, Artificial Sequence
  Description of Artificial Sequence: Synthetic oligonucleotide
guauucggugcaaauaacc

SEQ ID NO: 538576 - RNA, 19 nt, Artificial Sequence
  Description of Artificial Sequence: Synthetic oligonucleotide
aagcaggggacaucauauc

SEQ ID NO: 538577 - RNA, 19 nt, Artificial Sequence
  Description of Artificial Sequence: Synthetic oligonucleotide
agaguuugguguaaugauc

SEQ ID NO: 538578 - RNA, 19 nt, Artificial Sequence
  Description of Artificial Sequence: Synthetic oligonucleotide
acuguuaaguagcuacaca

SEQ ID NO: 538579 - RNA, 19 nt, Artificial Sequence
  Description of Artificial Sequence: Synthetic oligonucleotide
acgucgauugugaagauug

SEQ ID NO: 538580 - RNA, 19 nt, Artificial Sequence
  Description of Artificial Sequence: Synthetic oligonucleotide
uguaaucgcugugaggucu

SEQ ID NO: 538581 - RNA, 19 nt, Artificial Sequence
  Description of Artificial Sequence: Synthetic oligonucleotide
augccuacagauacgguac

SEQ ID NO: 538582 - RNA, 19 nt, Artificial Sequence
  Description of Artificial Sequence: Synthetic oligonucleotide
ugggacguggcacucgcag

SEQ ID NO: 538583 - RNA, 19 nt, Artificial Sequence
  Description of Artificial Sequence: Synthetic oligonucleotide
aucaaugguggucugcggu

SEQ ID NO: 538584 - RNA, 19 nt, Artificial Sequence
  Description of Artificial Sequence: Synthetic oligonucleotide
gauccguacggcccggccg

SEQ ID NO: 538585 - RNA, 19 nt, Artificial Sequence
  Description of Artificial Sequence: Synthetic oligonucleotide
auacgguacaaacuaguau

SEQ ID NO: 538586 - RNA, 19 nt, Artificial Sequence
  Description of Artificial Sequence: Synthetic oligonucleotide
guuguauacguagagcuuc

SEQ ID NO: 538587 - RNA, 19 nt, Artificial Sequence
  Description of Artificial Sequence: Synthetic oligonucleotide
acggcauggggagaggugc

SEQ ID NO: 538588 - RNA, 19 nt, Artificial Sequence
  Description of Artificial Sequence: Synthetic oligonucleotide
acuugguaggagacaagcc

SEQ ID NO: 538589 - RNA, 19 nt, Artificial Sequence
  Description of Artificial Sequence: Synthetic oligonucleotide
ugggcacuaggcauaaagu

SEQ ID NO: 538590 - RNA, 19 nt, Artificial Sequence
  Description of Artificial Sequence: Synthetic oligonucleotide
aacucagacggcaugggga

SEQ ID NO: 538591 - RNA, 19 nt, Artificial Sequence
  Description of Artificial Sequence: Synthetic oligonucleotide
uuuucguuggccccaucaa

SEQ ID NO: 538592 - RNA, 19 nt, Artificial Sequence
  Description of Artificial Sequence: Synthetic oligonucleotide
uuguauacguagagcuuca

SEQ ID NO: 538593 - RNA, 19 nt, Artificial Sequence
  Description of Artificial Sequence: Synthetic oligonucleotide
aagcacauucucacacccc

SEQ ID NO: 538594 - RNA, 19 nt, Artificial Sequence
  Description of Artificial Sequence: Synthetic oligonucleotide
aguugcucgguguaacuga

SEQ ID NO: 538595 - RNA, 19 nt, Artificial Sequence
  Description of Artificial Sequence: Synthetic oligonucleotide
uaacugaggucucccgaag

SEQ ID NO: 538596 - RNA, 19 nt, Artificial Sequence
  Description of Artificial Sequence: Synthetic oligonucleotide
uggaagggaaauuuucuuu

SEQ ID NO: 538597 - RNA, 19 nt, Artificial Sequence
  Description of Artificial Sequence: Synthetic oligonucleotide
aaagggaaugacgggagaa

SEQ ID NO: 538598 - RNA, 19 nt, Artificial Sequence
  Description of Artificial Sequence: Synthetic oligonucleotide
aaacccggguucccgagcu

SEQ ID NO: 538599 - RNA, 19 nt, Artificial Sequence
  Description of Artificial Sequence: Synthetic oligonucleotide
acccucaggacgugguagc

SEQ ID NO: 538600 - RNA, 19 nt, Artificial Sequence
  Description of Artificial Sequence: Synthetic oligonucleotide
uguuguauacguagagcuu

SEQ ID NO: 538601 - RNA, 19 nt, Artificial Sequence
  Description of Artificial Sequence: Synthetic oligonucleotide
gaaccuagcgggcacccug

SEQ ID NO: 538602 - RNA, 19 nt, Artificial Sequence
  Description of Artificial Sequence: Synthetic oligonucleotide
uucggggaggcaagguggg

SEQ ID NO: 538603 - RNA, 19 nt, Artificial Sequence
  Description of Artificial Sequence: Synthetic oligonucleotide
uuucguuggccccaucaaa

SEQ ID NO: 538604 - RNA, 19 nt, Artificial Sequence
  Description of Artificial Sequence: Synthetic oligonucleotide
gaaacucagacggcauggg

SEQ ID NO: 538605 - RNA, 19 nt, Artificial Sequence
  Description of Artificial Sequence: Synthetic oligonucleotide
uguacccucaggacguggu

SEQ ID NO: 538606 - RNA, 19 nt, Artificial Sequence
  Description of Artificial Sequence: Synthetic oligonucleotide
aagcaagggacugguuaac

SEQ ID NO: 538607 - RNA, 19 nt, Artificial Sequence
  Description of Artificial Sequence: Synthetic oligonucleotide
uuugcuucgugugucucga

SEQ ID NO: 538608 - RNA, 19 nt, Artificial Sequence
  Description of Artificial Sequence: Synthetic oligonucleotide
gacuccgcguagcacuugg

SEQ ID NO: 538609 - RNA, 19 nt, Artificial Sequence
  Description of Artificial Sequence: Synthetic oligonucleotide
aauagaccacgucgauugu

SEQ ID NO: 538610 - RNA, 19 nt, Artificial Sequence
  Description of Artificial Sequence: Synthetic oligonucleotide
ucgguguuguauacguaga

SEQ ID NO: 538611 - RNA, 19 nt, Artificial Sequence
  Description of Artificial Sequence: Synthetic oligonucleotide
guuucggggaggcaaggug

SEQ ID NO: 538612 - RNA, 19 nt, Artificial Sequence
  Description of Artificial Sequence: Synthetic oligonucleotide
uggaccuccguaaacccau

SEQ ID NO: 538613 - RNA, 19 nt, Artificial Sequence
  Description of Artificial Sequence: Synthetic oligonucleotide
cugaguaauucugaguuca

SEQ ID NO: 538614 - RNA, 19 nt, Artificial Sequence
  Description of Artificial Sequence: Synthetic oligonucleotide
accuguacugagaacacug

SEQ ID NO: 538615 - RNA, 19 nt, Artificial Sequence
  Description of Artificial Sequence: Synthetic oligonucleotide
ugguacaccuguacugaga

SEQ ID NO: 538616 - RNA, 19 nt, Artificial Sequence
  Description of Artificial Sequence: Synthetic oligonucleotide
gguacaaacuaguaugaaa

SEQ ID NO: 538617 - RNA, 19 nt, Artificial Sequence
  Description of Artificial Sequence: Synthetic oligonucleotide
aaccuagcgggcacccugc

SEQ ID NO: 538618 - RNA, 19 nt, Artificial Sequence
  Description of Artificial Sequence: Synthetic oligonucleotide
ucagugucgguguuguaua

SEQ ID NO: 538619 - RNA, 19 nt, Artificial Sequence
  Description of Artificial Sequence: Synthetic oligonucleotide
cagauacgguacaaacuag

SEQ ID NO: 538620 - RNA, 19 nt, Artificial Sequence
  Description of Artificial Sequence: Synthetic oligonucleotide
cuaguaugaaaucaauggu

SEQ ID NO: 538621 - RNA, 19 nt, Artificial Sequence
  Description of Artificial Sequence: Synthetic oligonucleotide
auccguacggcccggccgg

SEQ ID NO: 538622 - RNA, 19 nt, Artificial Sequence
  Description of Artificial Sequence: Synthetic oligonucleotide
uuccugguggugacaaaga

SEQ ID NO: 538623 - RNA, 19 nt, Artificial Sequence
  Description of Artificial Sequence: Synthetic oligonucleotide
gagacaagcccuuggccuc

SEQ ID NO: 538624 - RNA, 19 nt, Artificial Sequence
  Description of Artificial Sequence: Synthetic oligonucleotide
gggaucucgacgcucugcg

SEQ ID NO: 538625 - RNA, 19 nt, Artificial Sequence
  Description of Artificial Sequence: Synthetic oligonucleotide
agauacgguacaaacuagu

SEQ ID NO: 538626 - RNA, 19 nt, Artificial Sequence
  Description of Artificial Sequence: Synthetic oligonucleotide
agauccguguacaagcgga

SEQ ID NO: 538627 - RNA, 19 nt, Artificial Sequence
  Description of Artificial Sequence: Synthetic oligonucleotide
aaguuucggggaggcaagg

SEQ ID NO: 538628 - RNA, 19 nt, Artificial Sequence
  Description of Artificial Sequence: Synthetic oligonucleotide
gauaggaaccuagcgggca

SEQ ID NO: 538629 - RNA, 19 nt, Artificial Sequence
  Description of Artificial Sequence: Synthetic oligonucleotide
uccugguggugacaaagau

SEQ ID NO: 538630 - RNA, 19 nt, Artificial Sequence
  Description of Artificial Sequence: Synthetic oligonucleotide
uacccucaggacgugguag

SEQ ID NO: 538631 - RNA, 19 nt, Artificial Sequence
  Description of Artificial Sequence: Synthetic oligonucleotide
uucaaacgggcguguaggu

SEQ ID NO: 538632 - RNA, 19 nt, Artificial Sequence
  Description of Artificial Sequence: Synthetic oligonucleotide
cucgacaguugucaguguc

SEQ ID NO: 538633 - RNA, 19 nt, Artificial Sequence
  Description of Artificial Sequence: Synthetic oligonucleotide
accguuaauagaaacgaua

SEQ ID NO: 538634 - RNA, 19 nt, Artificial Sequence
  Description of Artificial Sequence: Synthetic oligonucleotide
gauccugcgguuaaauaaa

SEQ ID NO: 538635 - RNA, 19 nt, Artificial Sequence
  Description of Artificial Sequence: Synthetic oligonucleotide
uagguauucggugcaaaua

SEQ ID NO: 538636 - RNA, 19 nt, Artificial Sequence
  Description of Artificial Sequence: Synthetic oligonucleotide
uguauacguagagcuucag

SEQ ID NO: 538637 - RNA, 19 nt, Artificial Sequence
  Description of Artificial Sequence: Synthetic oligonucleotide
gguguuguauacguagagc

SEQ ID NO: 538638 - RNA, 19 nt, Artificial Sequence
  Description of Artificial Sequence: Synthetic oligonucleotide
ugcguaguuuccccuuaga

SEQ ID NO: 538639 - RNA, 19 nt, Artificial Sequence
  Description of Artificial Sequence: Synthetic oligonucleotide
cagauaaguuucggggagg

SEQ ID NO: 538640 - RNA, 19 nt, Artificial Sequence
  Description of Artificial Sequence: Synthetic oligonucleotide
guaacugaggucucccgaa

SEQ ID NO: 538641 - RNA, 19 nt, Artificial Sequence
  Description of Artificial Sequence: Synthetic oligonucleotide
accuccguaaacccauccu

SEQ ID NO: 538642 - RNA, 19 nt, Artificial Sequence
  Description of Artificial Sequence: Synthetic oligonucleotide
auagaccacgucgauugug

SEQ ID NO: 538643 - RNA, 19 nt, Artificial Sequence
  Description of Artificial Sequence: Synthetic oligonucleotide
agugucggcuccaaugaug

SEQ ID NO: 538644 - RNA, 19 nt, Artificial Sequence
  Description of Artificial Sequence: Synthetic oligonucleotide
aggaaccuagcgggcaccc

SEQ ID NO: 538645 - RNA, 19 nt, Artificial Sequence
  Description of Artificial Sequence: Synthetic oligonucleotide
ugcuucgugugucucgaua

SEQ ID NO: 538646 - RNA, 19 nt, Artificial Sequence
  Description of Artificial Sequence: Synthetic oligonucleotide
gaccuccguaaacccaucc

SEQ ID NO: 538647 - RNA, 19 nt, Artificial Sequence
  Description of Artificial Sequence: Synthetic oligonucleotide
gaugugacucacggagacc

SEQ ID NO: 538648 - RNA, 19 nt, Artificial Sequence
  Description of Artificial Sequence: Synthetic oligonucleotide
ugccuacagauacgguaca

SEQ ID NO: 538649 - RNA, 19 nt, Artificial Sequence
  Description of Artificial Sequence: Synthetic oligonucleotide
aaacggaugcucacuccca

SEQ ID NO: 538650 - RNA, 19 nt, Artificial Sequence
  Description of Artificial Sequence: Synthetic oligonucleotide
ugucucgauaaggcuaaac

SEQ ID NO: 538651 - RNA, 19 nt, Artificial Sequence
  Description of Artificial Sequence: Synthetic oligonucleotide
uggggaguuuuguguaaac

SEQ ID NO: 538652 - RNA, 19 nt, Artificial Sequence
  Description of Artificial Sequence: Synthetic oligonucleotide
gggaguuuuguguaaaccu

SEQ ID NO: 538653 - RNA, 19 nt, Artificial Sequence
  Description of Artificial Sequence: Synthetic oligonucleotide
ccgaagauguacaucccag

SEQ ID NO: 538654 - RNA, 19 nt, Artificial Sequence
  Description of Artificial Sequence: Synthetic oligonucleotide
guaauggguguaccaguca

SEQ ID NO: 538655 - RNA, 19 nt, Artificial Sequence
  Description of Artificial Sequence: Synthetic oligonucleotide
gcgguuaaauaaauagacc

SEQ ID NO: 538656 - RNA, 19 nt, Artificial Sequence
  Description of Artificial Sequence: Synthetic oligonucleotide
aguagucaugacaggguca

SEQ ID NO: 538657 - RNA, 19 nt, Artificial Sequence
  Description of Artificial Sequence: Synthetic oligonucleotide
uccugcgguuaaauaaaua

SEQ ID NO: 538658 - RNA, 19 nt, Artificial Sequence
  Description of Artificial Sequence: Synthetic oligonucleotide
uacugagaacacugcugac

SEQ ID NO: 538659 - RNA, 19 nt, Artificial Sequence
  Description of Artificial Sequence: Synthetic oligonucleotide
ggcguguagguauucggug

SEQ ID NO: 538660 - RNA, 19 nt, Artificial Sequence
  Description of Artificial Sequence: Synthetic oligonucleotide
ggagucgccgacucugucc

SEQ ID NO: 538661 - RNA, 19 nt, Artificial Sequence
  Description of Artificial Sequence: Synthetic oligonucleotide
agcugagcuaauagaaagu

SEQ ID NO: 538662 - RNA, 19 nt, Artificial Sequence
  Description of Artificial Sequence: Synthetic oligonucleotide
ccguuaauagaaacgauaa

SEQ ID NO: 538663 - RNA, 19 nt, Artificial Sequence
  Description of Artificial Sequence: Synthetic oligonucleotide
gcguguagguauucggugc

SEQ ID NO: 538664 - RNA, 19 nt, Artificial Sequence
  Description of Artificial Sequence: Synthetic oligonucleotide
augauccugcgguuaaaua

SEQ ID NO: 538665 - RNA, 19 nt, Artificial Sequence
  Description of Artificial Sequence: Synthetic oligonucleotide
ccgcguagcacuugggacg

SEQ ID NO: 538666 - RNA, 19 nt, Artificial Sequence
  Description of Artificial Sequence: Synthetic oligonucleotide
uccgcgacuccgcguagca

SEQ ID NO: 538667 - RNA, 19 nt, Artificial Sequence
  Description of Artificial Sequence: Synthetic oligonucleotide
guguacaagcggaauaaaa

SEQ ID NO: 538668 - RNA, 19 nt, Artificial Sequence
  Description of Artificial Sequence: Synthetic oligonucleotide
gaaugacgggagaaacuca

SEQ ID NO: 538669 - RNA, 19 nt, Artificial Sequence
  Description of Artificial Sequence: Synthetic oligonucleotide
accuagcgggcacccugcc

SEQ ID NO: 538670 - RNA, 19 nt, Artificial Sequence
  Description of Artificial Sequence: Synthetic oligonucleotide
guguccuggggaauucucc

SEQ ID NO: 538671 - RNA, 19 nt, Artificial Sequence
  Description of Artificial Sequence: Synthetic oligonucleotide
ggagcagggagguugaagu

SEQ ID NO: 538672 - RNA, 19 nt, Artificial Sequence
  Description of Artificial Sequence: Synthetic oligonucleotide
ggugcaaugccagauaagu

SEQ ID NO: 538673 - RNA, 19 nt, Artificial Sequence
  Description of Artificial Sequence: Synthetic oligonucleotide
ggagacaagcccuuggccu

SEQ ID NO: 538674 - RNA, 19 nt, Artificial Sequence
  Description of Artificial Sequence: Synthetic oligonucleotide
caaacccggguucccgagc

SEQ ID NO: 538675 - RNA, 19 nt, Artificial Sequence
  Description of Artificial Sequence: Synthetic oligonucleotide
aacccggguucccgagcuc

SEQ ID NO: 538676 - RNA, 19 nt, Artificial Sequence
  Description of Artificial Sequence: Synthetic oligonucleotide
uagaaacgauaaagucaaa

SEQ ID NO: 538677 - RNA, 19 nt, Artificial Sequence
  Description of Artificial Sequence: Synthetic oligonucleotide
ggagguuaggcaucccuga

SEQ ID NO: 538678 - RNA, 19 nt, Artificial Sequence
  Description of Artificial Sequence: Synthetic oligonucleotide
gugucgguguuguauacgu

SEQ ID NO: 538679 - RNA, 19 nt, Artificial Sequence
  Description of Artificial Sequence: Synthetic oligonucleotide
caaacgggcguguagguau

SEQ ID NO: 538680 - RNA, 19 nt, Artificial Sequence
  Description of Artificial Sequence: Synthetic oligonucleotide
gauaaguuucggggaggca

SEQ ID NO: 538681 - RNA, 19 nt, Artificial Sequence
  Description of Artificial Sequence: Synthetic oligonucleotide
ugucgguguuguauacgua

SEQ ID NO: 538682 - RNA, 19 nt, Artificial Sequence
  Description of Artificial Sequence: Synthetic oligonucleotide
cagugucgguguuguauac

SEQ ID NO: 538683 - RNA, 19 nt, Artificial Sequence
  Description of Artificial Sequence: Synthetic oligonucleotide
ugugacucacggagaccaa

SEQ ID NO: 538684 - RNA, 19 nt, Artificial Sequence
  Description of Artificial Sequence: Synthetic oligonucleotide
uaggaaccuagcgggcacc

SEQ ID NO: 538685 - RNA, 19 nt, Artificial Sequence
  Description of Artificial Sequence: Synthetic oligonucleotide
gccgccugggaucucgacg

SEQ ID NO: 538686 - RNA, 19 nt, Artificial Sequence
  Description of Artificial Sequence: Synthetic oligonucleotide
acgggcguguagguauucg

SEQ ID NO: 538687 - RNA, 19 nt, Artificial Sequence
  Description of Artificial Sequence: Synthetic oligonucleotide
gacggcauggggagaggug

SEQ ID NO: 538688 - RNA, 19 nt, Artificial Sequence
  Description of Artificial Sequence: Synthetic oligonucleotide
uucccgagcuccggcaagc

SEQ ID NO: 538689 - RNA, 19 nt, Artificial Sequence
  Description of Artificial Sequence: Synthetic oligonucleotide
gcuucgugugucucgauaa

SEQ ID NO: 538690 - RNA, 19 nt, Artificial Sequence
  Description of Artificial Sequence: Synthetic oligonucleotide
gggcacuaggcauaaagua

SEQ ID NO: 538691 - RNA, 19 nt, Artificial Sequence
  Description of Artificial Sequence: Synthetic oligonucleotide
gagucgccgacucuguccu

SEQ ID NO: 538692 - RNA, 19 nt, Artificial Sequence
  Description of Artificial Sequence: Synthetic oligonucleotide
ucucgacgcucugcgagga

SEQ ID NO: 538693 - RNA, 19 nt, Artificial Sequence
  Description of Artificial Sequence: Synthetic oligonucleotide
ccgccugggaucucgacgc

SEQ ID NO: 538694 - RNA, 19 nt, Artificial Sequence
  Description of Artificial Sequence: Synthetic oligonucleotide
gugacucacggagaccaac

SEQ ID NO: 538695 - RNA, 19 nt, Artificial Sequence
  Description of Artificial Sequence: Synthetic oligonucleotide
gguauucggugcaaauaac

SEQ ID NO: 538696 - RNA, 19 nt, Artificial Sequence
  Description of Artificial Sequence: Synthetic oligonucleotide
guagguauucggugcaaau

SEQ ID NO: 538697 - RNA, 19 nt, Artificial Sequence
  Description of Artificial Sequence: Synthetic oligonucleotide
aguuucggggaggcaaggu

SEQ ID NO: 538698 - RNA, 19 nt, Artificial Sequence
  Description of Artificial Sequence: Synthetic oligonucleotide
cuggaccuccguaaaccca

SEQ ID NO: 538699 - RNA, 19 nt, Artificial Sequence
  Description of Artificial Sequence: Synthetic oligonucleotide
gggagguuaggcaucccug

SEQ ID NO: 538700 - RNA, 19 nt, Artificial Sequence
  Description of Artificial Sequence: Synthetic oligonucleotide
cucaggacgugguagcccu

SEQ ID NO: 538701 - RNA, 19 nt, Artificial Sequence
  Description of Artificial Sequence: Synthetic oligonucleotide
agaccacgucgauugugaa

SEQ ID NO: 538702 - RNA, 19 nt, Artificial Sequence
  Description of Artificial Sequence: Synthetic oligonucleotide
cuccgcguagcacuuggga

SEQ ID NO: 538703 - RNA, 19 nt, Artificial Sequence
  Description of Artificial Sequence: Synthetic oligonucleotide
gauccguguacaagcggaa

SEQ ID NO: 538704 - RNA, 19 nt, Artificial Sequence
  Description of Artificial Sequence: Synthetic oligonucleotide
auggggaguuuuguguaaa

SEQ ID NO: 538705 - RNA, 19 nt, Artificial Sequence
  Description of Artificial Sequence: Synthetic oligonucleotide
gcguaguuuccccuuagaa

SEQ ID NO: 538706 - RNA, 19 nt, Artificial Sequence
  Description of Artificial Sequence: Synthetic oligonucleotide
ggggacuaacugaggacag

SEQ ID NO: 538707 - RNA, 19 nt, Artificial Sequence
  Description of Artificial Sequence: Synthetic oligonucleotide
ggauaggaaccuagcgggc

SEQ ID NO: 538708 - RNA, 19 nt, Artificial Sequence
  Description of Artificial Sequence: Synthetic oligonucleotide
ccguaaacccauccuuaag

SEQ ID NO: 538709 - RNA, 19 nt, Artificial Sequence
  Description of Artificial Sequence: Synthetic oligonucleotide
aggucucccgaagcucuag

SEQ ID NO: 538710 - RNA, 19 nt, Artificial Sequence
  Description of Artificial Sequence: Synthetic oligonucleotide
gggcgauccguacggcccg

SEQ ID NO: 538711 - RNA, 19 nt, Artificial Sequence
  Description of Artificial Sequence: Synthetic oligonucleotide
aguuccugguggugacaaa

SEQ ID NO: 538712 - RNA, 19 nt, Artificial Sequence
  Description of Artificial Sequence: Synthetic oligonucleotide
cuagcgggcacccugccau

SEQ ID NO: 538713 - RNA, 19 nt, Artificial Sequence
  Description of Artificial Sequence: Synthetic oligonucleotide
cuugcguaguuuccccuua

SEQ ID NO: 538714 - RNA, 19 nt, Artificial Sequence
  Description of Artificial Sequence: Synthetic oligonucleotide
ccaauggggaguuuugugu

SEQ ID NO: 538715 - RNA, 19 nt, Artificial Sequence
  Description of Artificial Sequence: Synthetic oligonucleotide
ucaggacgugguagcccuc

SEQ ID NO: 538716 - RNA, 19 nt, Artificial Sequence
  Description of Artificial Sequence: Synthetic oligonucleotide
gagguuaggcaucccugau

SEQ ID NO: 538717 - RNA, 19 nt, Artificial Sequence
  Description of Artificial Sequence: Synthetic oligonucleotide
gggacuaacugaggacagc

SEQ ID NO: 538718 - RNA, 19 nt, Artificial Sequence
  Description of Artificial Sequence: Synthetic oligonucleotide
gucgccgacucuguccuca

SEQ ID NO: 538719 - RNA, 19 nt, Artificial Sequence
  Description of Artificial Sequence: Synthetic oligonucleotide
ggggaguaauggguguacc

SEQ ID NO: 538720 - RNA, 19 nt, Artificial Sequence
  Description of Artificial Sequence: Synthetic oligonucleotide
cgacaguugucagugucgg

SEQ ID NO: 538721 - RNA, 19 nt, Artificial Sequence
  Description of Artificial Sequence: Synthetic oligonucleotide
aaacgggcguguagguauu

SEQ ID NO: 538722 - RNA, 19 nt, Artificial Sequence
  Description of Artificial Sequence: Synthetic oligonucleotide
gcggcgggcgauccguacg

SEQ ID NO: 538723 - RNA, 19 nt, Artificial Sequence
  Description of Artificial Sequence: Synthetic oligonucleotide
auccugcgguuaaauaaau

SEQ ID NO: 538724 - RNA, 19 nt, Artificial Sequence
  Description of Artificial Sequence: Synthetic oligonucleotide
cucgacgcucugcgaggag

SEQ ID NO: 538725 - RNA, 19 nt, Artificial Sequence
  Description of Artificial Sequence: Synthetic oligonucleotide
ggggagaggugcaaugcca

SEQ ID NO: 538726 - RNA, 19 nt, Artificial Sequence
  Description of Artificial Sequence: Synthetic oligonucleotide
cgggcguguagguauucgg

SEQ ID NO: 538727 - RNA, 19 nt, Artificial Sequence
  Description of Artificial Sequence: Synthetic oligonucleotide
cacaaguugcucgguguaa

SEQ ID NO: 538728 - RNA, 19 nt, Artificial Sequence
  Description of Artificial Sequence: Synthetic oligonucleotide
ggcaagccgaccccuggca

SEQ ID NO: 538729 - RNA, 19 nt, Artificial Sequence
  Description of Artificial Sequence: Synthetic oligonucleotide
ccaccuuaccacaggcauc

SEQ ID NO: 538730 - RNA, 19 nt, Artificial Sequence
  Description of Artificial Sequence: Synthetic oligonucleotide
gguggucugcgguuccaga

SEQ ID NO: 538731 - RNA, 19 nt, Artificial Sequence
  Description of Artificial Sequence: Synthetic oligonucleotide
cgggcgauccguacggccc

SEQ ID NO: 538732 - RNA, 19 nt, Artificial Sequence
  Description of Artificial Sequence: Synthetic oligonucleotide
ccgagcuccggcaagccga

SEQ ID NO: 538733 - RNA, 19 nt, Artificial Sequence
  Description of Artificial Sequence: Synthetic oligonucleotide
gggacugguuaacuugugu

SEQ ID NO: 538734 - RNA, 19 nt, Artificial Sequence
  Description of Artificial Sequence: Synthetic oligonucleotide
cuccgcgacuccgcguagc

SEQ ID NO: 538735 - RNA, 19 nt, Artificial Sequence
  Description of Artificial Sequence: Synthetic oligonucleotide
cccgaagauguacauccca

SEQ ID NO: 538736 - RNA, 19 nt, Artificial Sequence
  Description of Artificial Sequence: Synthetic oligonucleotide
gcgggcgauccguacggcc

SEQ ID NO: 538737 - RNA, 19 nt, Artificial Sequence
  Description of Artificial Sequence: Synthetic oligonucleotide
agcgggcacccugccaucu

SEQ ID NO: 538738 - RNA, 19 nt, Artificial Sequence
  Description of Artificial Sequence: Synthetic oligonucleotide
cguaguuuccccuuagaau

SEQ ID NO: 538739 - RNA, 19 nt, Artificial Sequence
  Description of Artificial Sequence: Synthetic oligonucleotide
cacuaggcauaaaguauuu

SEQ ID NO: 538740 - RNA, 19 nt, Artificial Sequence
  Description of Artificial Sequence: Synthetic oligonucleotide
caugauccugcgguuaaau

SEQ ID NO: 538741 - RNA, 19 nt, Artificial Sequence
  Description of Artificial Sequence: Synthetic oligonucleotide
ggggagguuaggcaucccu

SEQ ID NO: 538742 - RNA, 19 nt, Artificial Sequence
  Description of Artificial Sequence: Synthetic oligonucleotide
acgcagaguuugguguaau

SEQ ID NO: 538743 - RNA, 19 nt, Artificial Sequence
  Description of Artificial Sequence: Synthetic oligonucleotide
uggggagguuaggcauccc

SEQ ID NO: 538744 - RNA, 19 nt, Artificial Sequence
  Description of Artificial Sequence: Synthetic oligonucleotide
ggaucucgacgcucugcga

SEQ ID NO: 538745 - RNA, 19 nt, Artificial Sequence
  Description of Artificial Sequence: Synthetic oligonucleotide
ccggcaagccgaccccugg

SEQ ID NO: 538746 - RNA, 19 nt, Artificial Sequence
  Description of Artificial Sequence: Synthetic oligonucleotide
cccgagcuccggcaagccg

SEQ ID NO: 538747 - RNA, 19 nt, Artificial Sequence
  Description of Artificial Sequence: Synthetic oligonucleotide
cccacgcagaguuuggugu

SEQ ID NO: 538748 - RNA, 19 nt, Artificial Sequence
  Description of Artificial Sequence: Synthetic oligonucleotide
ccguguacaagcggaauaa

SEQ ID NO: 538749 - RNA, 19 nt, Artificial Sequence
  Description of Artificial Sequence: Synthetic oligonucleotide
gcacuaggcauaaaguauu

SEQ ID NO: 538750 - RNA, 19 nt, Artificial Sequence
  Description of Artificial Sequence: Synthetic oligonucleotide
cggugcaaauaaccauagc

SEQ ID NO: 538751 - RNA, 19 nt, Artificial Sequence
  Description of Artificial Sequence: Synthetic oligonucleotide
ggucugcgguuccagacau

SEQ ID NO: 538752 - RNA, 19 nt, Artificial Sequence
  Description of Artificial Sequence: Synthetic oligonucleotide
cgcgguacacuguuaagua

SEQ ID NO: 538753 - RNA, 19 nt, Artificial Sequence
  Description of Artificial Sequence: Synthetic oligonucleotide
ggagaaacucagacggcau

SEQ ID NO: 538754 - RNA, 19 nt, Artificial Sequence
  Description of Artificial Sequence: Synthetic oligonucleotide
cccgcuccgcgacuccgcg

SEQ ID NO: 538755 - RNA, 19 nt, Artificial Sequence
  Description of Artificial Sequence: Synthetic oligonucleotide
gcccuuggccucuugcgua

SEQ ID NO: 538756 - RNA, 19 nt, Artificial Sequence
  Description of Artificial Sequence: Synthetic oligonucleotide
cggcgggcgauccguacgg

SEQ ID NO: 538757 - RNA, 19 nt, Artificial Sequence
  Description of Artificial Sequence: Synthetic oligonucleotide
gggcguguagguauucggu

SEQ ID NO: 538758 - RNA, 19 nt, Artificial Sequence
  Description of Artificial Sequence: Synthetic oligonucleotide
ccacaaguugcucggugua

SEQ ID NO: 538759 - RNA, 19 nt, Artificial Sequence
  Description of Artificial Sequence: Synthetic oligonucleotide
gccuacagauacgguacaa

SEQ ID NO: 538760 - RNA, 19 nt, Artificial Sequence
  Description of Artificial Sequence: Synthetic oligonucleotide
ggcgauccguacggcccgg

SEQ ID NO: 538761 - RNA, 19 nt, Artificial Sequence
  Description of Artificial Sequence: Synthetic oligonucleotide
cgauccguacggcccggcc

SEQ ID NO: 538762 - RNA, 19 nt, Artificial Sequence
  Description of Artificial Sequence: Synthetic oligonucleotide
guccuggaagggaaauuuu

SEQ ID NO: 538763 - RNA, 19 nt, Artificial Sequence
  Description of Artificial Sequence: Synthetic oligonucleotide
ccuccguaaacccauccuu

SEQ ID NO: 538764 - RNA, 19 nt, Artificial Sequence
  Description of Artificial Sequence: Synthetic oligonucleotide
gcuccgcgacuccgcguag

SEQ ID NO: 538765 - RNA, 19 nt, Artificial Sequence
  Description of Artificial Sequence: Synthetic oligonucleotide
cagugucggcuccaaugau

SEQ ID NO: 538766 - RNA, 19 nt, Artificial Sequence
  Description of Artificial Sequence: Synthetic oligonucleotide
cggcaagccgaccccuggc

SEQ ID NO: 538767 - RNA, 19 nt, Artificial Sequence
  Description of Artificial Sequence: Synthetic oligonucleotide
cgcgacuccgcguagcacu

SEQ ID NO: 538768 - RNA, 19 nt, Artificial Sequence
  Description of Artificial Sequence: Synthetic oligonucleotide
ggaccuccguaaacccauc

SEQ ID NO: 538769 - RNA, 19 nt, Artificial Sequence
  Description of Artificial Sequence: Synthetic oligonucleotide
ccuagcgggcacccugcca

SEQ ID NO: 538770 - RNA, 19 nt, Artificial Sequence
  Description of Artificial Sequence: Synthetic oligonucleotide
cacgucgauugugaagauu

SEQ ID NO: 538771 - RNA, 19 nt, Artificial Sequence
  Description of Artificial Sequence: Synthetic oligonucleotide
gcaagccgaccccuggcau

SEQ ID NO: 538772 - RNA, 19 nt, Artificial Sequence
  Description of Artificial Sequence: Synthetic oligonucleotide
gugucucgauaaggcuaaa

SEQ ID NO: 538773 - RNA, 19 nt, Artificial Sequence
  Description of Artificial Sequence: Synthetic oligonucleotide
caguggagucgccgacucu

SEQ ID NO: 538774 - RNA, 19 nt, Artificial Sequence
  Description of Artificial Sequence: Synthetic oligonucleotide
ggcgggcgauccguacggc

SEQ ID NO: 538775 - RNA, 19 nt, Artificial Sequence
  Description of Artificial Sequence: Synthetic oligonucleotide
cguguacaagcggaauaaa

SEQ ID NO: 538776 - RNA, 19 nt, Artificial Sequence
  Description of Artificial Sequence: Synthetic oligonucleotide
gcgauccguacggcccggc

SEQ ID NO: 538777 - RNA, 19 nt, Artificial Sequence
  Description of Artificial Sequence: Synthetic oligonucleotide
ggaaccuagcgggcacccu

SEQ ID NO: 538778 - RNA, 19 nt, Artificial Sequence
  Description of Artificial Sequence: Synthetic oligonucleotide
gcucugcgaggagcccaug

SEQ ID NO: 538779 - RNA, 19 nt, Artificial Sequence
  Description of Artificial Sequence: Synthetic oligonucleotide
cgccgccugggaucucgac

SEQ ID NO: 538780 - RNA, 19 nt, Artificial Sequence
  Description of Artificial Sequence: Synthetic oligonucleotide
cgacuccgcguagcacuug

SEQ ID NO: 538781 - RNA, 19 nt, Artificial Sequence
  Description of Artificial Sequence: Synthetic oligonucleotide
cgcguagcacuugggacgu

SEQ ID NO: 538782 - RNA, 19 nt, Artificial Sequence
  Description of Artificial Sequence: Synthetic oligonucleotide
gcgacuccgcguagcacuu

SEQ ID NO: 538783 - RNA, 19 nt, Artificial Sequence
  Description of Artificial Sequence: Synthetic oligonucleotide
uuuaugaccugcuucagcg

SEQ ID NO: 538784 - RNA, 19 nt, Artificial Sequence
  Description of Artificial Sequence: Synthetic oligonucleotide
uuuauuaggaggaggcagg

SEQ ID NO: 538785 - RNA, 19 nt, Artificial Sequence
  Description of Artificial Sequence: Synthetic oligonucleotide
uuaacaagcagacugguau

SEQ ID NO: 538786 - RNA, 19 nt, Artificial Sequence
  Description of Artificial Sequence: Synthetic oligonucleotide
agcagaugcaaccacagag

SEQ ID NO: 538787 - RNA, 19 nt, Artificial Sequence
  Description of Artificial Sequence: Synthetic oligonucleotide
acacauauaaggcucccgg

SEQ ID NO: 538788 - RNA, 19 nt, Artificial Sequence
  Description of Artificial Sequence: Synthetic oligonucleotide
ugucgggcaaacuaaaggc

SEQ ID NO: 538789 - RNA, 19 nt, Artificial Sequence
  Description of Artificial Sequence: Synthetic oligonucleotide
aggauuugcacacaaguga

SEQ ID NO: 538790 - RNA, 19 nt, Artificial Sequence
  Description of Artificial Sequence: Synthetic oligonucleotide
guuaccccgcacuagaggg

SEQ ID NO: 538791 - RNA, 19 nt, Artificial Sequence
  Description of Artificial Sequence: Synthetic oligonucleotide
agguuugacacacagugcu

SEQ ID NO: 538792 - RNA, 19 nt, Artificial Sequence
  Description of Artificial Sequence: Synthetic oligonucleotide
uccgacagcaaccagucac

SEQ ID NO: 538793 - RNA, 19 nt, Artificial Sequence
  Description of Artificial Sequence: Synthetic oligonucleotide
agggcuaaauagccaaggc

SEQ ID NO: 538794 - RNA, 19 nt, Artificial Sequence
  Description of Artificial Sequence: Synthetic oligonucleotide
agcuaagacgggaaaagcc

SEQ ID NO: 538795 - RNA, 19 nt, Artificial Sequence
  Description of Artificial Sequence: Synthetic oligonucleotide
aaugagccuuuauuaggag

SEQ ID NO: 538796 - RNA, 19 nt, Artificial Sequence
  Description of Artificial Sequence: Synthetic oligonucleotide
ucuugcacugaacacacau

SEQ ID NO: 538797 - RNA, 19 nt, Artificial Sequence
  Description of Artificial Sequence: Synthetic oligonucleotide
uguagcacagccccguuac

SEQ ID NO: 538798 - RNA, 19 nt, Artificial Sequence
  Description of Artificial Sequence: Synthetic oligonucleotide
caaacuucaaccuauagau

SEQ ID NO: 538799 - RNA, 19 nt, Artificial Sequence
  Description of Artificial Sequence: Synthetic oligonucleotide
gacaacuccgcccuucucc

SEQ ID NO: 538800 - RNA, 19 nt, Artificial Sequence
  Description of Artificial Sequence: Synthetic oligonucleotide
ggaacgccaacuuacgucg

SEQ ID NO: 538801 - RNA, 19 nt, Artificial Sequence
  Description of Artificial Sequence: Synthetic oligonucleotide
acaacuccgcccuucuccc

SEQ ID NO: 538802 - RNA, 19 nt, Artificial Sequence
  Description of Artificial Sequence: Synthetic oligonucleotide
uguuguccccuucagugag

SEQ ID NO: 538803 - RNA, 19 nt, Artificial Sequence
  Description of Artificial Sequence: Synthetic oligonucleotide
cacacuauuuccacguggc

SEQ ID NO: 538804 - RNA, 19 nt, Artificial Sequence
  Description of Artificial Sequence: Synthetic oligonucleotide
aagucuuaugcacugccaa

SEQ ID NO: 538805 - RNA, 19 nt, Artificial Sequence
  Description of Artificial Sequence: Synthetic oligonucleotide
acauauaaggcucccggga

SEQ ID NO: 538806 - RNA, 19 nt, Artificial Sequence
  Description of Artificial Sequence: Synthetic oligonucleotide
uugguuggacgucaugcag

SEQ ID NO: 538807 - RNA, 19 nt, Artificial Sequence
  Description of Artificial Sequence: Synthetic oligonucleotide
gguauguuccaccuugagg

SEQ ID NO: 538808 - RNA, 19 nt, Artificial Sequence
  Description of Artificial Sequence: Synthetic oligonucleotide
agcgccuucacaaaggcag

SEQ ID NO: 538809 - RNA, 19 nt, Artificial Sequence
  Description of Artificial Sequence: Synthetic oligonucleotide
acauuggcgacacggauga

SEQ ID NO: 538810 - RNA, 19 nt, Artificial Sequence
  Description of Artificial Sequence: Synthetic oligonucleotide
aacuuugggagcuccgggu

SEQ ID NO: 538811 - RNA, 19 nt, Artificial Sequence
  Description of Artificial Sequence: Synthetic oligonucleotide
agaggcaacuguugucccc

SEQ ID NO: 538812 - RNA, 19 nt, Artificial Sequence
  Description of Artificial Sequence: Synthetic oligonucleotide
cagaugagcaguaggcugc

SEQ ID NO: 538813 - RNA, 19 nt, Artificial Sequence
  Description of Artificial Sequence: Synthetic oligonucleotide
aguggcggagggaugaugc

SEQ ID NO: 538814 - RNA, 19 nt, Artificial Sequence
  Description of Artificial Sequence: Synthetic oligonucleotide
aacgccaacuuacgucggg

SEQ ID NO: 538815 - RNA, 19 nt, Artificial Sequence
  Description of Artificial Sequence: Synthetic oligonucleotide
uuauuaggaggaggcaggg

SEQ ID NO: 538816 - RNA, 19 nt, Artificial Sequence
  Description of Artificial Sequence: Synthetic oligonucleotide
caagcagacugguauuggg

SEQ ID NO: 538817 - RNA, 19 nt, Artificial Sequence
  Description of Artificial Sequence: Synthetic oligonucleotide
uucaaccuauagauggcca

SEQ ID NO: 538818 - RNA, 19 nt, Artificial Sequence
  Description of Artificial Sequence: Synthetic oligonucleotide
cacauauaaggcucccggg

SEQ ID NO: 538819 - RNA, 19 nt, Artificial Sequence
  Description of Artificial Sequence: Synthetic oligonucleotide
acgucggggcuuuaugacc

SEQ ID NO: 538820 - RNA, 19 nt, Artificial Sequence
  Description of Artificial Sequence: Synthetic oligonucleotide
auguuaacaagcagacugg

SEQ ID NO: 538821 - RNA, 19 nt, Artificial Sequence
  Description of Artificial Sequence: Synthetic oligonucleotide
guuacuccaaucacgggcc

SEQ ID NO: 538822 - RNA, 19 nt, Artificial Sequence
  Description of Artificial Sequence: Synthetic oligonucleotide
acaccgcagggcuaaauag

SEQ ID NO: 538823 - RNA, 19 nt, Artificial Sequence
  Description of Artificial Sequence: Synthetic oligonucleotide
uuacgucggggcuuuauga

SEQ ID NO: 538824 - RNA, 19 nt, Artificial Sequence
  Description of Artificial Sequence: Synthetic oligonucleotide
uauugugucgagggaagcc

SEQ ID NO: 538825 - RNA, 19 nt, Artificial Sequence
  Description of Artificial Sequence: Synthetic oligonucleotide
gaauuugcaugcugggcac

SEQ ID NO: 538826 - RNA, 19 nt, Artificial Sequence
  Description of Artificial Sequence: Synthetic oligonucleotide
agguccgaguuucugcugg

SEQ ID NO: 538827 - RNA, 19 nt, Artificial Sequence
  Description of Artificial Sequence: Synthetic oligonucleotide
cuaacuguauugugucgag

SEQ ID NO: 538828 - RNA, 19 nt, Artificial Sequence
  Description of Artificial Sequence: Synthetic oligonucleotide
accgcagggcuaaauagcc

SEQ ID NO: 538829 - RNA, 19 nt, Artificial Sequence
  Description of Artificial Sequence: Synthetic oligonucleotide
augacuacuugggaacugg

SEQ ID NO: 538830 - RNA, 19 nt, Artificial Sequence
  Description of Artificial Sequence: Synthetic oligonucleotide
ucggccuuugugccggugg

SEQ ID NO: 538831 - RNA, 19 nt, Artificial Sequence
  Description of Artificial Sequence: Synthetic oligonucleotide
aacucauuguuggcagcac

SEQ ID NO: 538832 - RNA, 19 nt, Artificial Sequence
  Description of Artificial Sequence: Synthetic oligonucleotide
agcaguaggcugcucuggg

SEQ ID NO: 538833 - RNA, 19 nt, Artificial Sequence
  Description of Artificial Sequence: Synthetic oligonucleotide
aacaccgcagggcuaaaua

SEQ ID NO: 538834 - RNA, 19 nt, Artificial Sequence
  Description of Artificial Sequence: Synthetic oligonucleotide
guuugacacacagugcugc

SEQ ID NO: 538835 - RNA, 19 nt, Artificial Sequence
  Description of Artificial Sequence: Synthetic oligonucleotide
ucccuaacuguauuguguc

SEQ ID NO: 538836 - RNA, 19 nt, Artificial Sequence
  Description of Artificial Sequence: Synthetic oligonucleotide
ucaaccuauagauggccau

SEQ ID NO: 538837 - RNA, 19 nt, Artificial Sequence
  Description of Artificial Sequence: Synthetic oligonucleotide
ugguuggacgucaugcagu

SEQ ID NO: 538838 - RNA, 19 nt, Artificial Sequence
  Description of Artificial Sequence: Synthetic oligonucleotide
ugguauguuccaccuugag

SEQ ID NO: 538839 - RNA, 19 nt, Artificial Sequence
  Description of Artificial Sequence: Synthetic oligonucleotide
gauccugccugcuuguguc

SEQ ID NO: 538840 - RNA, 19 nt, Artificial Sequence
  Description of Artificial Sequence: Synthetic oligonucleotide
ccuggcucaacuuugggag

SEQ ID NO: 538841 - RNA, 19 nt, Artificial Sequence
  Description of Artificial Sequence: Synthetic oligonucleotide
agacgggaaaagccaaaag

SEQ ID NO: 538842 - RNA, 19 nt, Artificial Sequence
  Description of Artificial Sequence: Synthetic oligonucleotide
uuaccccgcacuagagggg

SEQ ID NO: 538843 - RNA, 19 nt, Artificial Sequence
  Description of Artificial Sequence: Synthetic oligonucleotide
cugguuggggauccgacag

SEQ ID NO: 538844 - RNA, 19 nt, Artificial Sequence
  Description of Artificial Sequence: Synthetic oligonucleotide
cagccgacugguauguucc

SEQ ID NO: 538845 - RNA, 19 nt, Artificial Sequence
  Description of Artificial Sequence: Synthetic oligonucleotide
ugagcaguaggcugcucug

SEQ ID NO: 538846 - RNA, 19 nt, Artificial Sequence
  Description of Artificial Sequence: Synthetic oligonucleotide
uccgaguuucugcuggugu

SEQ ID NO: 538847 - RNA, 19 nt, Artificial Sequence
  Description of Artificial Sequence: Synthetic oligonucleotide
gaucccggguaccagggug

SEQ ID NO: 538848 - RNA, 19 nt, Artificial Sequence
  Description of Artificial Sequence: Synthetic oligonucleotide
ucugacaagugguggcaug

SEQ ID NO: 538849 - RNA, 19 nt, Artificial Sequence
  Description of Artificial Sequence: Synthetic oligonucleotide
ggguuuaaauuaaaguccc

SEQ ID NO: 538850 - RNA, 19 nt, Artificial Sequence
  Description of Artificial Sequence: Synthetic oligonucleotide
gucuuaugcacugccaagc

SEQ ID NO: 538851 - RNA, 19 nt, Artificial Sequence
  Description of Artificial Sequence: Synthetic oligonucleotide
uugugucgagggaagccag

SEQ ID NO: 538852 - RNA, 19 nt, Artificial Sequence
  Description of Artificial Sequence: Synthetic oligonucleotide
cacuauuuccacguggcug

SEQ ID NO: 538853 - RNA, 19 nt, Artificial Sequence
  Description of Artificial Sequence: Synthetic oligonucleotide
gacgucaugcaguucucac

SEQ ID NO: 538854 - RNA, 19 nt, Artificial Sequence
  Description of Artificial Sequence: Synthetic oligonucleotide
gacuagguagaugaacuca

SEQ ID NO: 538855 - RNA, 19 nt, Artificial Sequence
  Description of Artificial Sequence: Synthetic oligonucleotide
uguuaacaagcagacuggu

SEQ ID NO: 538856 - RNA, 19 nt, Artificial Sequence
  Description of Artificial Sequence: Synthetic oligonucleotide
agucccuaacuguauugug

SEQ ID NO: 538857 - RNA, 19 nt, Artificial Sequence
  Description of Artificial Sequence: Synthetic oligonucleotide
acuguauugugucgaggga

SEQ ID NO: 538858 - RNA, 19 nt, Artificial Sequence
  Description of Artificial Sequence: Synthetic oligonucleotide
cuuaccagggccguagcug

SEQ ID NO: 538859 - RNA, 19 nt, Artificial Sequence
  Description of Artificial Sequence: Synthetic oligonucleotide
gggcuaaauagccaaggcc

SEQ ID NO: 538860 - RNA, 19 nt, Artificial Sequence
  Description of Artificial Sequence: Synthetic oligonucleotide
agcuccuacccaugcuggc

SEQ ID NO: 538861 - RNA, 19 nt, Artificial Sequence
  Description of Artificial Sequence: Synthetic oligonucleotide
agccccguuacuccaauca

SEQ ID NO: 538862 - RNA, 19 nt, Artificial Sequence
  Description of Artificial Sequence: Synthetic oligonucleotide
gacuacuugggaacuggcc

SEQ ID NO: 538863 - RNA, 19 nt, Artificial Sequence
  Description of Artificial Sequence: Synthetic oligonucleotide
cuuacgucggggcuuuaug

SEQ ID NO: 538864 - RNA, 19 nt, Artificial Sequence
  Description of Artificial Sequence: Synthetic oligonucleotide
ugggcaagaaguucaucuc

SEQ ID NO: 538865 - RNA, 19 nt, Artificial Sequence
  Description of Artificial Sequence: Synthetic oligonucleotide
cuucagcgugguauguggg

SEQ ID NO: 538866 - RNA, 19 nt, Artificial Sequence
  Description of Artificial Sequence: Synthetic oligonucleotide
uaagacgggaaaagccaaa

SEQ ID NO: 538867 - RNA, 19 nt, Artificial Sequence
  Description of Artificial Sequence: Synthetic oligonucleotide
caccgcagggcuaaauagc

SEQ ID NO: 538868 - RNA, 19 nt, Artificial Sequence
  Description of Artificial Sequence: Synthetic oligonucleotide
ugugaaucugggccccucu

SEQ ID NO: 538869 - RNA, 19 nt, Artificial Sequence
  Description of Artificial Sequence: Synthetic oligonucleotide
uacgucggggcuuuaugac

SEQ ID NO: 538870 - RNA, 19 nt, Artificial Sequence
  Description of Artificial Sequence: Synthetic oligonucleotide
uccgucuugcacugaacac

SEQ ID NO: 538871 - RNA, 19 nt, Artificial Sequence
  Description of Artificial Sequence: Synthetic oligonucleotide
caagugguggcaugacuac

SEQ ID NO: 538872 - RNA, 19 nt, Artificial Sequence
  Description of Artificial Sequence: Synthetic oligonucleotide
gcuucagcgugguaugugg

SEQ ID NO: 538873 - RNA, 19 nt, Artificial Sequence
  Description of Artificial Sequence: Synthetic oligonucleotide
ucagccgacugguauguuc

SEQ ID NO: 538874 - RNA, 19 nt, Artificial Sequence
  Description of Artificial Sequence: Synthetic oligonucleotide
uggaugauccucugucccu

SEQ ID NO: 538875 - RNA, 19 nt, Artificial Sequence
  Description of Artificial Sequence: Synthetic oligonucleotide
ggggacauuggcgacacgg

SEQ ID NO: 538876 - RNA, 19 nt, Artificial Sequence
  Description of Artificial Sequence: Synthetic oligonucleotide
ucugguuaccccgcacuag

SEQ ID NO: 538877 - RNA, 19 nt, Artificial Sequence
  Description of Artificial Sequence: Synthetic oligonucleotide
ugcagaacaaggguuuaaa

SEQ ID NO: 538878 - RNA, 19 nt, Artificial Sequence
  Description of Artificial Sequence: Synthetic oligonucleotide
cagggcuaaauagccaagg

SEQ ID NO: 538879 - RNA, 19 nt, Artificial Sequence
  Description of Artificial Sequence: Synthetic oligonucleotide
aagacgggaaaagccaaaa

SEQ ID NO: 538880 - RNA, 19 nt, Artificial Sequence
  Description of Artificial Sequence: Synthetic oligonucleotide
ggagcuaagacgggaaaag

SEQ ID NO: 538881 - RNA, 19 nt, Artificial Sequence
  Description of Artificial Sequence: Synthetic oligonucleotide
gauccgacagcaaccaguc

SEQ ID NO: 538882 - RNA, 19 nt, Artificial Sequence
  Description of Artificial Sequence: Synthetic oligonucleotide
cccguuacuccaaucacgg

SEQ ID NO: 538883 - RNA, 19 nt, Artificial Sequence
  Description of Artificial Sequence: Synthetic oligonucleotide
ugguuaccccgcacuagag

SEQ ID NO: 538884 - RNA, 19 nt, Artificial Sequence
  Description of Artificial Sequence: Synthetic oligonucleotide
gagcuaagacgggaaaagc

SEQ ID NO: 538885 - RNA, 19 nt, Artificial Sequence
  Description of Artificial Sequence: Synthetic oligonucleotide
cguuacuccaaucacgggc

SEQ ID NO: 538886 - RNA, 19 nt, Artificial Sequence
  Description of Artificial Sequence: Synthetic oligonucleotide
ucgacuagcuggagacuca

SEQ ID NO: 538887 - RNA, 19 nt, Artificial Sequence
  Description of Artificial Sequence: Synthetic oligonucleotide
uccaaucacgggccucucc

SEQ ID NO: 538888 - RNA, 19 nt, Artificial Sequence
  Description of Artificial Sequence: Synthetic oligonucleotide
cagcuuagcuuccucuagc

SEQ ID NO: 538889 - RNA, 19 nt, Artificial Sequence
  Description of Artificial Sequence: Synthetic oligonucleotide
gagcggaacgccaacuuac

SEQ ID NO: 538890 - RNA, 19 nt, Artificial Sequence
  Description of Artificial Sequence: Synthetic oligonucleotide
aggagguauucucgcugac

SEQ ID NO: 538891 - RNA, 19 nt, Artificial Sequence
  Description of Artificial Sequence: Synthetic oligonucleotide
agggccguagcugaggcug

SEQ ID NO: 538892 - RNA, 19 nt, Artificial Sequence
  Description of Artificial Sequence: Synthetic oligonucleotide
caccacgagguguuguggc

SEQ ID NO: 538893 - RNA, 19 nt, Artificial Sequence
  Description of Artificial Sequence: Synthetic oligonucleotide
gccuuuauuaggaggaggc

SEQ ID NO: 538894 - RNA, 19 nt, Artificial Sequence
  Description of Artificial Sequence: Synthetic oligonucleotide
gguuaccccgcacuagagg

SEQ ID NO: 538895 - RNA, 19 nt, Artificial Sequence
  Description of Artificial Sequence: Synthetic oligonucleotide
uuuccacguggcugacugg

SEQ ID NO: 538896 - RNA, 19 nt, Artificial Sequence
  Description of Artificial Sequence: Synthetic oligonucleotide
accuauagauggccaugag

SEQ ID NO: 538897 - RNA, 19 nt, Artificial Sequence
  Description of Artificial Sequence: Synthetic oligonucleotide
gacacggaugagucccugc

SEQ ID NO: 538898 - RNA, 19 nt, Artificial Sequence
  Description of Artificial Sequence: Synthetic oligonucleotide
ugggcaugucacagugucc

SEQ ID NO: 538899 - RNA, 19 nt, Artificial Sequence
  Description of Artificial Sequence: Synthetic oligonucleotide
acaagugguggcaugacua

SEQ ID NO: 538900 - RNA, 19 nt, Artificial Sequence
  Description of Artificial Sequence: Synthetic oligonucleotide
cuugggcugacgaaggcaa

SEQ ID NO: 538901 - RNA, 19 nt, Artificial Sequence
  Description of Artificial Sequence: Synthetic oligonucleotide
ugauccucugucccugaau

SEQ ID NO: 538902 - RNA, 19 nt, Artificial Sequence
  Description of Artificial Sequence: Synthetic oligonucleotide
gggauguuaacaagcagac

SEQ ID NO: 538903 - RNA, 19 nt, Artificial Sequence
  Description of Artificial Sequence: Synthetic oligonucleotide
uucugguuaccccgcacua

SEQ ID NO: 538904 - RNA, 19 nt, Artificial Sequence
  Description of Artificial Sequence: Synthetic oligonucleotide
gccuucuuuugguuggacg

SEQ ID NO: 538905 - RNA, 19 nt, Artificial Sequence
  Description of Artificial Sequence: Synthetic oligonucleotide
caguuugggugacuggcug

SEQ ID NO: 538906 - RNA, 19 nt, Artificial Sequence
  Description of Artificial Sequence: Synthetic oligonucleotide
cuaagacgggaaaagccaa

SEQ ID NO: 538907 - RNA, 19 nt, Artificial Sequence
  Description of Artificial Sequence: Synthetic oligonucleotide
cuggcucaacuuugggagc

SEQ ID NO: 538908 - RNA, 19 nt, Artificial Sequence
  Description of Artificial Sequence: Synthetic oligonucleotide
caaccuauagauggccaug

SEQ ID NO: 538909 - RNA, 19 nt, Artificial Sequence
  Description of Artificial Sequence: Synthetic oligonucleotide
ugguuggggauccgacagc

SEQ ID NO: 538910 - RNA, 19 nt, Artificial Sequence
  Description of Artificial Sequence: Synthetic oligonucleotide
ucaacaggaccagcuuagc

SEQ ID NO: 538911 - RNA, 19 nt, Artificial Sequence
  Description of Artificial Sequence: Synthetic oligonucleotide
aaguggugcccuugcuggu

SEQ ID NO: 538912 - RNA, 19 nt, Artificial Sequence
  Description of Artificial Sequence: Synthetic oligonucleotide
ucggaccaguggcggaggg

SEQ ID NO: 538913 - RNA, 19 nt, Artificial Sequence
  Description of Artificial Sequence: Synthetic oligonucleotide
gacuggaagccuguagcac

SEQ ID NO: 538914 - RNA, 19 nt, Artificial Sequence
  Description of Artificial Sequence: Synthetic oligonucleotide
gcuaagacgggaaaagcca

SEQ ID NO: 538915 - RNA, 19 nt, Artificial Sequence
  Description of Artificial Sequence: Synthetic oligonucleotide
gacgguccacagcugagga

SEQ ID NO: 538916 - RNA, 19 nt, Artificial Sequence
  Description of Artificial Sequence: Synthetic oligonucleotide
cuuuugguuggacgucaug

SEQ ID NO: 538917 - RNA, 19 nt, Artificial Sequence
  Description of Artificial Sequence: Synthetic oligonucleotide
ugcuuucgcagugcuagcu

SEQ ID NO: 538918 - RNA, 19 nt, Artificial Sequence
  Description of Artificial Sequence: Synthetic oligonucleotide
uggugucgggcaaacuaaa

SEQ ID NO: 538919 - RNA, 19 nt, Artificial Sequence
  Description of Artificial Sequence: Synthetic oligonucleotide
ggagguauucucgcugacg

SEQ ID NO: 538920 - RNA, 19 nt, Artificial Sequence
  Description of Artificial Sequence: Synthetic oligonucleotide
acuccaaucacgggccucu

SEQ ID NO: 538921 - RNA, 19 nt, Artificial Sequence
  Description of Artificial Sequence: Synthetic oligonucleotide
cacgggccucuccugagcg

SEQ ID NO: 538922 - RNA, 19 nt, Artificial Sequence
  Description of Artificial Sequence: Synthetic oligonucleotide
cacuauggcuuuccuuuug

SEQ ID NO: 538923 - RNA, 19 nt, Artificial Sequence
  Description of Artificial Sequence: Synthetic oligonucleotide
ccaagguccgaguuucugc

SEQ ID NO: 538924 - RNA, 19 nt, Artificial Sequence
  Description of Artificial Sequence: Synthetic oligonucleotide
ugcuucagcgugguaugug

SEQ ID NO: 538925 - RNA, 19 nt, Artificial Sequence
  Description of Artificial Sequence: Synthetic oligonucleotide
uggaggaaugcugucugau

SEQ ID NO: 538926 - RNA, 19 nt, Artificial Sequence
  Description of Artificial Sequence: Synthetic oligonucleotide
agugcuagcuuggcagcag

SEQ ID NO: 538927 - RNA, 19 nt, Artificial Sequence
  Description of Artificial Sequence: Synthetic oligonucleotide
cucggaaugucuggcaguc

SEQ ID NO: 538928 - RNA, 19 nt, Artificial Sequence
  Description of Artificial Sequence: Synthetic oligonucleotide
acaccacgagguguugugg

SEQ ID NO: 538929 - RNA, 19 nt, Artificial Sequence
  Description of Artificial Sequence: Synthetic oligonucleotide
cugaagugaugucuugcca

SEQ ID NO: 538930 - RNA, 19 nt, Artificial Sequence
  Description of Artificial Sequence: Synthetic oligonucleotide
agcggaacgccaacuuacg

SEQ ID NO: 538931 - RNA, 19 nt, Artificial Sequence
  Description of Artificial Sequence: Synthetic oligonucleotide
acgccaacuuacgucgggg

SEQ ID NO: 538932 - RNA, 19 nt, Artificial Sequence
  Description of Artificial Sequence: Synthetic oligonucleotide
guucucacacaugacaacu

SEQ ID NO: 538933 - RNA, 19 nt, Artificial Sequence
  Description of Artificial Sequence: Synthetic oligonucleotide
gucgacuagcuggagacuc

SEQ ID NO: 538934 - RNA, 19 nt, Artificial Sequence
  Description of Artificial Sequence: Synthetic oligonucleotide
ugcuuaccagggccguagc

SEQ ID NO: 538935 - RNA, 19 nt, Artificial Sequence
  Description of Artificial Sequence: Synthetic oligonucleotide
cugcuuaccagggccguag

SEQ ID NO: 538936 - RNA, 19 nt, Artificial Sequence
  Description of Artificial Sequence: Synthetic oligonucleotide
guauugugucgagggaagc

SEQ ID NO: 538937 - RNA, 19 nt, Artificial Sequence
  Description of Artificial Sequence: Synthetic oligonucleotide
uugcuuucgcagugcuagc

SEQ ID NO: 538938 - RNA, 19 nt, Artificial Sequence
  Description of Artificial Sequence: Synthetic oligonucleotide
ucgcagugcuagcuuggca

SEQ ID NO: 538939 - RNA, 19 nt, Artificial Sequence
  Description of Artificial Sequence: Synthetic oligonucleotide
uuggggacauuggcgacac

SEQ ID NO: 538940 - RNA, 19 nt, Artificial Sequence
  Description of Artificial Sequence: Synthetic oligonucleotide
ucucccgccagcggcaugu

SEQ ID NO: 538941 - RNA, 19 nt, Artificial Sequence
  Description of Artificial Sequence: Synthetic oligonucleotide
cugguuaccccgcacuaga

SEQ ID NO: 538942 - RNA, 19 nt, Artificial Sequence
  Description of Artificial Sequence: Synthetic oligonucleotide
cugcagcgccuucacaaag

SEQ ID NO: 538943 - RNA, 19 nt, Artificial Sequence
  Description of Artificial Sequence: Synthetic oligonucleotide
uuugugccgguggugccca

SEQ ID NO: 538944 - RNA, 19 nt, Artificial Sequence
  Description of Artificial Sequence: Synthetic oligonucleotide
cuguauugugucgagggaa

SEQ ID NO: 538945 - RNA, 19 nt, Artificial Sequence
  Description of Artificial Sequence: Synthetic oligonucleotide
cuggugucgggcaaacuaa

SEQ ID NO: 538946 - RNA, 19 nt, Artificial Sequence
  Description of Artificial Sequence: Synthetic oligonucleotide
gaacgccaacuuacgucgg

SEQ ID NO: 538947 - RNA, 19 nt, Artificial Sequence
  Description of Artificial Sequence: Synthetic oligonucleotide
ccccguuacuccaaucacg

SEQ ID NO: 538948 - RNA, 19 nt, Artificial Sequence
  Description of Artificial Sequence: Synthetic oligonucleotide
cccaccucggaccaguggc

SEQ ID NO: 538949 - RNA, 19 nt, Artificial Sequence
  Description of Artificial Sequence: Synthetic oligonucleotide
gucgggcaaacuaaaggca

SEQ ID NO: 538950 - RNA, 19 nt, Artificial Sequence
  Description of Artificial Sequence: Synthetic oligonucleotide
uuugcaugcugggcacuga

SEQ ID NO: 538951 - RNA, 19 nt, Artificial Sequence
  Description of Artificial Sequence: Synthetic oligonucleotide
gcucucucggaaugucugg

SEQ ID NO: 538952 - RNA, 19 nt, Artificial Sequence
  Description of Artificial Sequence: Synthetic oligonucleotide
aggcaagggugccaccugu

SEQ ID NO: 538953 - RNA, 19 nt, Artificial Sequence
  Description of Artificial Sequence: Synthetic oligonucleotide
guccugcuuaccagggccg

SEQ ID NO: 538954 - RNA, 19 nt, Artificial Sequence
  Description of Artificial Sequence: Synthetic oligonucleotide
gcuaaauagccaaggccug

SEQ ID NO: 538955 - RNA, 19 nt, Artificial Sequence
  Description of Artificial Sequence: Synthetic oligonucleotide
uccugagcggaacgccaac

SEQ ID NO: 538956 - RNA, 19 nt, Artificial Sequence
  Description of Artificial Sequence: Synthetic oligonucleotide
cuguuguccccuucaguga

SEQ ID NO: 538957 - RNA, 19 nt, Artificial Sequence
  Description of Artificial Sequence: Synthetic oligonucleotide
ccgacugguauguuccacc

SEQ ID NO: 538958 - RNA, 19 nt, Artificial Sequence
  Description of Artificial Sequence: Synthetic oligonucleotide
ugaucccggguaccagggu

SEQ ID NO: 538959 - RNA, 19 nt, Artificial Sequence
  Description of Artificial Sequence: Synthetic oligonucleotide
caguccugcuuaccagggc

SEQ ID NO: 538960 - RNA, 19 nt, Artificial Sequence
  Description of Artificial Sequence: Synthetic oligonucleotide
ccggcauucgagcagagga

SEQ ID NO: 538961 - RNA, 19 nt, Artificial Sequence
  Description of Artificial Sequence: Synthetic oligonucleotide
uggcgacacggaugagucc

SEQ ID NO: 538962 - RNA, 19 nt, Artificial Sequence
  Description of Artificial Sequence: Synthetic oligonucleotide
gcaugugaaguccgucuug

SEQ ID NO: 538963 - RNA, 19 nt, Artificial Sequence
  Description of Artificial Sequence: Synthetic oligonucleotide
gaucauccgcucucgcucu

SEQ ID NO: 538964 - RNA, 19 nt, Artificial Sequence
  Description of Artificial Sequence: Synthetic oligonucleotide
uacccaugcuggccaggca

SEQ ID NO: 538965 - RNA, 19 nt, Artificial Sequence
  Description of Artificial Sequence: Synthetic oligonucleotide
cauauaaggcucccgggau

SEQ ID NO: 538966 - RNA, 19 nt, Artificial Sequence
  Description of Artificial Sequence: Synthetic oligonucleotide
guuaacaagcagacuggua

SEQ ID NO: 538967 - RNA, 19 nt, Artificial Sequence
  Description of Artificial Sequence: Synthetic oligonucleotide
ugucgacuagcuggagacu

SEQ ID NO: 538968 - RNA, 19 nt, Artificial Sequence
  Description of Artificial Sequence: Synthetic oligonucleotide
ccgggcucacacuauuucc

SEQ ID NO: 538969 - RNA, 19 nt, Artificial Sequence
  Description of Artificial Sequence: Synthetic oligonucleotide
ggaugauccucugucccug

SEQ ID NO: 538970 - RNA, 19 nt, Artificial Sequence
  Description of Artificial Sequence: Synthetic oligonucleotide
gcagugcuagcuuggcagc

SEQ ID NO: 538971 - RNA, 19 nt, Artificial Sequence
  Description of Artificial Sequence: Synthetic oligonucleotide
ccaggagguauucucgcug

SEQ ID NO: 538972 - RNA, 19 nt, Artificial Sequence
  Description of Artificial Sequence: Synthetic oligonucleotide
ugcccggcauucgagcaga

SEQ ID NO: 538973 - RNA, 19 nt, Artificial Sequence
  Description of Artificial Sequence: Synthetic oligonucleotide
ggugucgggcaaacuaaag

SEQ ID NO: 538974 - RNA, 19 nt, Artificial Sequence
  Description of Artificial Sequence: Synthetic oligonucleotide
ggcggagggaugaugcugc

SEQ ID NO: 538975 - RNA, 19 nt, Artificial Sequence
  Description of Artificial Sequence: Synthetic oligonucleotide
gucccuaacuguauugugu

SEQ ID NO: 538976 - RNA, 19 nt, Artificial Sequence
  Description of Artificial Sequence: Synthetic oligonucleotide
ucggaaugucuggcagucc

SEQ ID NO: 538977 - RNA, 19 nt, Artificial Sequence
  Description of Artificial Sequence: Synthetic oligonucleotide
gguuugacacacagugcug

SEQ ID NO: 538978 - RNA, 19 nt, Artificial Sequence
  Description of Artificial Sequence: Synthetic oligonucleotide
cugcccggcauucgagcag

SEQ ID NO: 538979 - RNA, 19 nt, Artificial Sequence
  Description of Artificial Sequence: Synthetic oligonucleotide
agugggcugagggauguua

SEQ ID NO: 538980 - RNA, 19 nt, Artificial Sequence
  Description of Artificial Sequence: Synthetic oligonucleotide
cgucuugcacugaacacac

SEQ ID NO: 538981 - RNA, 19 nt, Artificial Sequence
  Description of Artificial Sequence: Synthetic oligonucleotide
caccucggaccaguggcgg

SEQ ID NO: 538982 - RNA, 19 nt, Artificial Sequence
  Description of Artificial Sequence: Synthetic oligonucleotide
ggcucccgggauaacacag

SEQ ID NO: 538983 - RNA, 19 nt, Artificial Sequence
  Description of Artificial Sequence: Synthetic oligonucleotide
ccuaacuguauugugucga

SEQ ID NO: 538984 - RNA, 19 nt, Artificial Sequence
  Description of Artificial Sequence: Synthetic oligonucleotide
gaggcaacuguuguccccu

SEQ ID NO: 538985 - RNA, 19 nt, Artificial Sequence
  Description of Artificial Sequence: Synthetic oligonucleotide
agcgugguauguggggcug

SEQ ID NO: 538986 - RNA, 19 nt, Artificial Sequence
  Description of Artificial Sequence: Synthetic oligonucleotide
uugugaaucugggccccuc

SEQ ID NO: 538987 - RNA, 19 nt, Artificial Sequence
  Description of Artificial Sequence: Synthetic oligonucleotide
gguuggggauccgacagca

SEQ ID NO: 538988 - RNA, 19 nt, Artificial Sequence
  Description of Artificial Sequence: Synthetic oligonucleotide
cugaacaccgcagggcuaa

SEQ ID NO: 538989 - RNA, 19 nt, Artificial Sequence
  Description of Artificial Sequence: Synthetic oligonucleotide
ggagcguggagggaucaug

SEQ ID NO: 538990 - RNA, 19 nt, Artificial Sequence
  Description of Artificial Sequence: Synthetic oligonucleotide
acuuacgucggggcuuuau

SEQ ID NO: 538991 - RNA, 19 nt, Artificial Sequence
  Description of Artificial Sequence: Synthetic oligonucleotide
uacuccaaucacgggccuc

SEQ ID NO: 538992 - RNA, 19 nt, Artificial Sequence
  Description of Artificial Sequence: Synthetic oligonucleotide
cacgagguguuguggcuga

SEQ ID NO: 538993 - RNA, 19 nt, Artificial Sequence
  Description of Artificial Sequence: Synthetic oligonucleotide
uccugcuuaccagggccgu

SEQ ID NO: 538994 - RNA, 19 nt, Artificial Sequence
  Description of Artificial Sequence: Synthetic oligonucleotide
gguucugaucccggguacc

SEQ ID NO: 538995 - RNA, 19 nt, Artificial Sequence
  Description of Artificial Sequence: Synthetic oligonucleotide
cggaacgccaacuuacguc

SEQ ID NO: 538996 - RNA, 19 nt, Artificial Sequence
  Description of Artificial Sequence: Synthetic oligonucleotide
gugccgguggugcccacac

SEQ ID NO: 538997 - RNA, 19 nt, Artificial Sequence
  Description of Artificial Sequence: Synthetic oligonucleotide
acagccccguuacuccaau

SEQ ID NO: 538998 - RNA, 19 nt, Artificial Sequence
  Description of Artificial Sequence: Synthetic oligonucleotide
auccgacagcaaccaguca

SEQ ID NO: 538999 - RNA, 19 nt, Artificial Sequence
  Description of Artificial Sequence: Synthetic oligonucleotide
ccgaguuucugcugguguc

SEQ ID NO: 539000 - RNA, 19 nt, Artificial Sequence
  Description of Artificial Sequence: Synthetic oligonucleotide
ggcaugucacaguguccag

SEQ ID NO: 539001 - RNA, 19 nt, Artificial Sequence
  Description of Artificial Sequence: Synthetic oligonucleotide
ugugccgguggugcccaca

SEQ ID NO: 539002 - RNA, 19 nt, Artificial Sequence
  Description of Artificial Sequence: Synthetic oligonucleotide
gcugguuggggauccgaca

SEQ ID NO: 539003 - RNA, 19 nt, Artificial Sequence
  Description of Artificial Sequence: Synthetic oligonucleotide
gccgacuagguagaugaac

SEQ ID NO: 539004 - RNA, 19 nt, Artificial Sequence
  Description of Artificial Sequence: Synthetic oligonucleotide
gcucugggcagguuugaca

SEQ ID NO: 539005 - RNA, 19 nt, Artificial Sequence
  Description of Artificial Sequence: Synthetic oligonucleotide
caccugcugcccaccucgg

SEQ ID NO: 539006 - RNA, 19 nt, Artificial Sequence
  Description of Artificial Sequence: Synthetic oligonucleotide
ccgacuagguagaugaacu

SEQ ID NO: 539007 - RNA, 19 nt, Artificial Sequence
  Description of Artificial Sequence: Synthetic oligonucleotide
accucggaccaguggcgga

SEQ ID NO: 539008 - RNA, 19 nt, Artificial Sequence
  Description of Artificial Sequence: Synthetic oligonucleotide
cuauuuccacguggcugac

SEQ ID NO: 539009 - RNA, 19 nt, Artificial Sequence
  Description of Artificial Sequence: Synthetic oligonucleotide
agccugucgacuagcugga

SEQ ID NO: 539010 - RNA, 19 nt, Artificial Sequence
  Description of Artificial Sequence: Synthetic oligonucleotide
cagacaccugcugcccacc

SEQ ID NO: 539011 - RNA, 19 nt, Artificial Sequence
  Description of Artificial Sequence: Synthetic oligonucleotide
gcugcucugggcagguuug

SEQ ID NO: 539012 - RNA, 19 nt, Artificial Sequence
  Description of Artificial Sequence: Synthetic oligonucleotide
ccguagcuucuucaacagg

SEQ ID NO: 539013 - RNA, 19 nt, Artificial Sequence
  Description of Artificial Sequence: Synthetic oligonucleotide
auggagcguggagggauca

SEQ ID NO: 539014 - RNA, 19 nt, Artificial Sequence
  Description of Artificial Sequence: Synthetic oligonucleotide
ggauccgacagcaaccagu

SEQ ID NO: 539015 - RNA, 19 nt, Artificial Sequence
  Description of Artificial Sequence: Synthetic oligonucleotide
gaucucgagcagagucuuc

SEQ ID NO: 539016 - RNA, 19 nt, Artificial Sequence
  Description of Artificial Sequence: Synthetic oligonucleotide
gccccguuacuccaaucac

SEQ ID NO: 539017 - RNA, 19 nt, Artificial Sequence
  Description of Artificial Sequence: Synthetic oligonucleotide
gcagggcuaaauagccaag

SEQ ID NO: 539018 - RNA, 19 nt, Artificial Sequence
  Description of Artificial Sequence: Synthetic oligonucleotide
gucggggcuuuaugaccug

SEQ ID NO: 539019 - RNA, 19 nt, Artificial Sequence
  Description of Artificial Sequence: Synthetic oligonucleotide
caggccgacuagguagaug

SEQ ID NO: 539020 - RNA, 19 nt, Artificial Sequence
  Description of Artificial Sequence: Synthetic oligonucleotide
augcugcccggcauucgag

SEQ ID NO: 539021 - RNA, 19 nt, Artificial Sequence
  Description of Artificial Sequence: Synthetic oligonucleotide
ccguuacuccaaucacggg

SEQ ID NO: 539022 - RNA, 19 nt, Artificial Sequence
  Description of Artificial Sequence: Synthetic oligonucleotide
gccgggcucacacuauuuc

SEQ ID NO: 539023 - RNA, 19 nt, Artificial Sequence
  Description of Artificial Sequence: Synthetic oligonucleotide
cuccugagcggaacgccaa

SEQ ID NO: 539024 - RNA, 19 nt, Artificial Sequence
  Description of Artificial Sequence: Synthetic oligonucleotide
guguuguggcugagccccg

SEQ ID NO: 539025 - RNA, 19 nt, Artificial Sequence
  Description of Artificial Sequence: Synthetic oligonucleotide
ccgucuugcacugaacaca

SEQ ID NO: 539026 - RNA, 19 nt, Artificial Sequence
  Description of Artificial Sequence: Synthetic oligonucleotide
gggauccgacagcaaccag

SEQ ID NO: 539027 - RNA, 19 nt, Artificial Sequence
  Description of Artificial Sequence: Synthetic oligonucleotide
ggggauccgacagcaacca

SEQ ID NO: 539028 - RNA, 19 nt, Artificial Sequence
  Description of Artificial Sequence: Synthetic oligonucleotide
ggcaacuguuguccccuuc

SEQ ID NO: 539029 - RNA, 19 nt, Artificial Sequence
  Description of Artificial Sequence: Synthetic oligonucleotide
gguuuaaauuaaagucccu

SEQ ID NO: 539030 - RNA, 19 nt, Artificial Sequence
  Description of Artificial Sequence: Synthetic oligonucleotide
cagugcuagcuuggcagca

SEQ ID NO: 539031 - RNA, 19 nt, Artificial Sequence
  Description of Artificial Sequence: Synthetic oligonucleotide
acaugacaacuccgcccuu

SEQ ID NO: 539032 - RNA, 19 nt, Artificial Sequence
  Description of Artificial Sequence: Synthetic oligonucleotide
ccccgggacagcugacugg

SEQ ID NO: 539033 - RNA, 19 nt, Artificial Sequence
  Description of Artificial Sequence: Synthetic oligonucleotide
ugaacaccgcagggcuaaa

SEQ ID NO: 539034 - RNA, 19 nt, Artificial Sequence
  Description of Artificial Sequence: Synthetic oligonucleotide
ggcugguuggggauccgac

SEQ ID NO: 539035 - RNA, 19 nt, Artificial Sequence
  Description of Artificial Sequence: Synthetic oligonucleotide
gguuggacgucaugcaguu

SEQ ID NO: 539036 - RNA, 19 nt, Artificial Sequence
  Description of Artificial Sequence: Synthetic oligonucleotide
uggagcguggagggaucau

SEQ ID NO: 539037 - RNA, 19 nt, Artificial Sequence
  Description of Artificial Sequence: Synthetic oligonucleotide
cgccaacuuacgucggggc

SEQ ID NO: 539038 - RNA, 19 nt, Artificial Sequence
  Description of Artificial Sequence: Synthetic oligonucleotide
gcucccgggauaacacagc

SEQ ID NO: 539039 - RNA, 19 nt, Artificial Sequence
  Description of Artificial Sequence: Synthetic oligonucleotide
gccaacuuacgucggggcu

SEQ ID NO: 539040 - RNA, 19 nt, Artificial Sequence
  Description of Artificial Sequence: Synthetic oligonucleotide
gccccgggacagcugacug

SEQ ID NO: 539041 - RNA, 19 nt, Artificial Sequence
  Description of Artificial Sequence: Synthetic oligonucleotide
guuggacgucaugcaguuc

SEQ ID NO: 539042 - RNA, 19 nt, Artificial Sequence
  Description of Artificial Sequence: Synthetic oligonucleotide
agggcugguuggggauccg

SEQ ID NO: 539043 - RNA, 19 nt, Artificial Sequence
  Description of Artificial Sequence: Synthetic oligonucleotide
gacugguauguuccaccuu

SEQ ID NO: 539044 - RNA, 19 nt, Artificial Sequence
  Description of Artificial Sequence: Synthetic oligonucleotide
cagccccguuacuccaauc

SEQ ID NO: 539045 - RNA, 19 nt, Artificial Sequence
  Description of Artificial Sequence: Synthetic oligonucleotide
ccgggauaacacagcagca

SEQ ID NO: 539046 - RNA, 19 nt, Artificial Sequence
  Description of Artificial Sequence: Synthetic oligonucleotide
gccccguggaggaaugcug

SEQ ID NO: 539047 - RNA, 19 nt, Artificial Sequence
  Description of Artificial Sequence: Synthetic oligonucleotide
cauuggcgacacggaugag

SEQ ID NO: 539048 - RNA, 19 nt, Artificial Sequence
  Description of Artificial Sequence: Synthetic oligonucleotide
cacagccccguuacuccaa

SEQ ID NO: 539049 - RNA, 19 nt, Artificial Sequence
  Description of Artificial Sequence: Synthetic oligonucleotide
cccaagguccgaguuucug

SEQ ID NO: 539050 - RNA, 19 nt, Artificial Sequence
  Description of Artificial Sequence: Synthetic oligonucleotide
cgggcucacacuauuucca

SEQ ID NO: 539051 - RNA, 19 nt, Artificial Sequence
  Description of Artificial Sequence: Synthetic oligonucleotide
ccgccagcggcaugugaag

SEQ ID NO: 539052 - RNA, 19 nt, Artificial Sequence
  Description of Artificial Sequence: Synthetic oligonucleotide
guggcggagggaugaugcu

SEQ ID NO: 539053 - RNA, 19 nt, Artificial Sequence
  Description of Artificial Sequence: Synthetic oligonucleotide
aggcaacuguuguccccuu

SEQ ID NO: 539054 - RNA, 19 nt, Artificial Sequence
  Description of Artificial Sequence: Synthetic oligonucleotide
cugagcggaacgccaacuu

SEQ ID NO: 539055 - RNA, 19 nt, Artificial Sequence
  Description of Artificial Sequence: Synthetic oligonucleotide
gcgccuucacaaaggcagc

SEQ ID NO: 539056 - RNA, 19 nt, Artificial Sequence
  Description of Artificial Sequence: Synthetic oligonucleotide
cagcgugguauguggggcu

SEQ ID NO: 539057 - RNA, 19 nt, Artificial Sequence
  Description of Artificial Sequence: Synthetic oligonucleotide
gccgacugguauguuccac

SEQ ID NO: 539058 - RNA, 19 nt, Artificial Sequence
  Description of Artificial Sequence: Synthetic oligonucleotide
uucagccgacugguauguu

SEQ ID NO: 539059 - RNA, 19 nt, Artificial Sequence
  Description of Artificial Sequence: Synthetic oligonucleotide
gcuuaccagggccguagcu

SEQ ID NO: 539060 - RNA, 19 nt, Artificial Sequence
  Description of Artificial Sequence: Synthetic oligonucleotide
gggguuaaaugagccuuua

SEQ ID NO: 539061 - RNA, 19 nt, Artificial Sequence
  Description of Artificial Sequence: Synthetic oligonucleotide
uugugccgguggugcccac

SEQ ID NO: 539062 - RNA, 19 nt, Artificial Sequence
  Description of Artificial Sequence: Synthetic oligonucleotide
cucggccuuugugccggug

SEQ ID NO: 539063 - RNA, 19 nt, Artificial Sequence
  Description of Artificial Sequence: Synthetic oligonucleotide
cccggcauucgagcagagg

SEQ ID NO: 539064 - RNA, 19 nt, Artificial Sequence
  Description of Artificial Sequence: Synthetic oligonucleotide
cccguggaggaaugcuguc

SEQ ID NO: 539065 - RNA, 19 nt, Artificial Sequence
  Description of Artificial Sequence: Synthetic oligonucleotide
ggccuucuuuugguuggac

SEQ ID NO: 539066 - RNA, 19 nt, Artificial Sequence
  Description of Artificial Sequence: Synthetic oligonucleotide
gcggcaugugaaguccguc

SEQ ID NO: 539067 - RNA, 19 nt, Artificial Sequence
  Description of Artificial Sequence: Synthetic oligonucleotide
aacuuacgucggggcuuua

SEQ ID NO: 539068 - RNA, 19 nt, Artificial Sequence
  Description of Artificial Sequence: Synthetic oligonucleotide
gcggaacgccaacuuacgu

SEQ ID NO: 539069 - RNA, 19 nt, Artificial Sequence
  Description of Artificial Sequence: Synthetic oligonucleotide
gcuuucgcagugcuagcuu

SEQ ID NO: 539070 - RNA, 19 nt, Artificial Sequence
  Description of Artificial Sequence: Synthetic oligonucleotide
ggggcuuuaugaccugcuu

SEQ ID NO: 539071 - RNA, 19 nt, Artificial Sequence
  Description of Artificial Sequence: Synthetic oligonucleotide
gcgugguauguggggcugc

SEQ ID NO: 539072 - RNA, 19 nt, Artificial Sequence
  Description of Artificial Sequence: Synthetic oligonucleotide
caacuuacgucggggcuuu

SEQ ID NO: 539073 - RNA, 19 nt, Artificial Sequence
  Description of Artificial Sequence: Synthetic oligonucleotide
cgucggggcuuuaugaccu

SEQ ID NO: 539074 - RNA, 19 nt, Artificial Sequence
  Description of Artificial Sequence: Synthetic oligonucleotide
cucggggagggucccuggu

SEQ ID NO: 539075 - RNA, 19 nt, Artificial Sequence
  Description of Artificial Sequence: Synthetic oligonucleotide
gcacuauggcuuuccuuuu

SEQ ID NO: 539076 - RNA, 19 nt, Artificial Sequence
  Description of Artificial Sequence: Synthetic oligonucleotide
gccugucgacuagcuggag

SEQ ID NO: 539077 - RNA, 19 nt, Artificial Sequence
  Description of Artificial Sequence: Synthetic oligonucleotide
cgacugguauguuccaccu

SEQ ID NO: 539078 - RNA, 19 nt, Artificial Sequence
  Description of Artificial Sequence: Synthetic oligonucleotide
cugugcuggcagagauccu

SEQ ID NO: 539079 - RNA, 19 nt, Artificial Sequence
  Description of Artificial Sequence: Synthetic oligonucleotide
cagggccguagcugaggcu

SEQ ID NO: 539080 - RNA, 19 nt, Artificial Sequence
  Description of Artificial Sequence: Synthetic oligonucleotide
ccaacuuacgucggggcuu

SEQ ID NO: 539081 - RNA, 19 nt, Artificial Sequence
  Description of Artificial Sequence: Synthetic oligonucleotide
gggcaugucugcagagggu

SEQ ID NO: 539082 - RNA, 19 nt, Artificial Sequence
  Description of Artificial Sequence: Synthetic oligonucleotide
ggcaacugguuaggagggu

SEQ ID NO: 539083 - RNA, 19 nt, Artificial Sequence
  Description of Artificial Sequence: Synthetic oligonucleotide
ggcagagauccugccugcu

SEQ ID NO: 539084 - RNA, 19 nt, Artificial Sequence
  Description of Artificial Sequence: Synthetic oligonucleotide
ggccgacuagguagaugaa

SEQ ID NO: 539085 - RNA, 19 nt, Artificial Sequence
  Description of Artificial Sequence: Synthetic oligonucleotide
ccugagcggaacgccaacu

SEQ ID NO: 539086 - RNA, 19 nt, Artificial Sequence
  Description of Artificial Sequence: Synthetic oligonucleotide
gcccggcauucgagcagag

SEQ ID NO: 539087 - RNA, 19 nt, Artificial Sequence
  Description of Artificial Sequence: Synthetic oligonucleotide
ccguagcugaggcugcauu

SEQ ID NO: 539088 - RNA, 19 nt, Artificial Sequence
  Description of Artificial Sequence: Synthetic oligonucleotide
ccugcuuaccagggccgua

SEQ ID NO: 539089 - RNA, 19 nt, Artificial Sequence
  Description of Artificial Sequence: Synthetic oligonucleotide
gcgacacggaugagucccu

SEQ ID NO: 539090 - RNA, 19 nt, Artificial Sequence
  Description of Artificial Sequence: Synthetic oligonucleotide
cgacagcaaccagucacua

SEQ ID NO: 539091 - RNA, 19 nt, Artificial Sequence
  Description of Artificial Sequence: Synthetic oligonucleotide
ggccgggcucacacuauuu

SEQ ID NO: 539092 - RNA, 19 nt, Artificial Sequence
  Description of Artificial Sequence: Synthetic oligonucleotide
cgccagcggcaugugaagu

SEQ ID NO: 539093 - RNA, 19 nt, Artificial Sequence
  Description of Artificial Sequence: Synthetic oligonucleotide
ccaguggcggagggaugau

SEQ ID NO: 539094 - RNA, 19 nt, Artificial Sequence
  Description of Artificial Sequence: Synthetic oligonucleotide
aauauuuugccaaagggcc

SEQ ID NO: 539095 - RNA, 19 nt, Artificial Sequence
  Description of Artificial Sequence: Synthetic oligonucleotide
aaagcaaucuccauggagc

SEQ ID NO: 539096 - RNA, 19 nt, Artificial Sequence
  Description of Artificial Sequence: Synthetic oligonucleotide
agaacauuccacuucuucc

SEQ ID NO: 539097 - RNA, 19 nt, Artificial Sequence
  Description of Artificial Sequence: Synthetic oligonucleotide
aguauaguugaugaggucc

SEQ ID NO: 539098 - RNA, 19 nt, Artificial Sequence
  Description of Artificial Sequence: Synthetic oligonucleotide
uguacuaagagucccagca

SEQ ID NO: 539099 - RNA, 19 nt, Artificial Sequence
  Description of Artificial Sequence: Synthetic oligonucleotide
auuacuucaagcaaaggac

SEQ ID NO: 539100 - RNA, 19 nt, Artificial Sequence
  Description of Artificial Sequence: Synthetic oligonucleotide
uuuauugucaccacagggu

SEQ ID NO: 539101 - RNA, 19 nt, Artificial Sequence
  Description of Artificial Sequence: Synthetic oligonucleotide
aauccuacuaaguggcagg

SEQ ID NO: 539102 - RNA, 19 nt, Artificial Sequence
  Description of Artificial Sequence: Synthetic oligonucleotide
auccaauuaccccacaugg

SEQ ID NO: 539103 - RNA, 19 nt, Artificial Sequence
  Description of Artificial Sequence: Synthetic oligonucleotide
ugagggauuaguucgcugg

SEQ ID NO: 539104 - RNA, 19 nt, Artificial Sequence
  Description of Artificial Sequence: Synthetic oligonucleotide
uagggacuagcucacaugg

SEQ ID NO: 539105 - RNA, 19 nt, Artificial Sequence
  Description of Artificial Sequence: Synthetic oligonucleotide
aguaugcuggccuccaugc

SEQ ID NO: 539106 - RNA, 19 nt, Artificial Sequence
  Description of Artificial Sequence: Synthetic oligonucleotide
auggaauccuacuaagugg

SEQ ID NO: 539107 - RNA, 19 nt, Artificial Sequence
  Description of Artificial Sequence: Synthetic oligonucleotide
auaagguggauauagcuga

SEQ ID NO: 539108 - RNA, 19 nt, Artificial Sequence
  Description of Artificial Sequence: Synthetic oligonucleotide
ugggugcuaaagaugaagg

SEQ ID NO: 539109 - RNA, 19 nt, Artificial Sequence
  Description of Artificial Sequence: Synthetic oligonucleotide
uccaauucgguuauugcug

SEQ ID NO: 539110 - RNA, 19 nt, Artificial Sequence
  Description of Artificial Sequence: Synthetic oligonucleotide
aggaacuguacuaagaguc

SEQ ID NO: 539111 - RNA, 19 nt, Artificial Sequence
  Description of Artificial Sequence: Synthetic oligonucleotide
aauucgguuauugcugugg

SEQ ID NO: 539112 - RNA, 19 nt, Artificial Sequence
  Description of Artificial Sequence: Synthetic oligonucleotide
cuagcaauaggcucagugc

SEQ ID NO: 539113 - RNA, 19 nt, Artificial Sequence
  Description of Artificial Sequence: Synthetic oligonucleotide
uauccaauuaccccacaug

SEQ ID NO: 539114 - RNA, 19 nt, Artificial Sequence
  Description of Artificial Sequence: Synthetic oligonucleotide
gaagcaguagauguggaag

SEQ ID NO: 539115 - RNA, 19 nt, Artificial Sequence
  Description of Artificial Sequence: Synthetic oligonucleotide
cauaagguggauauagcug

SEQ ID NO: 539116 - RNA, 19 nt, Artificial Sequence
  Description of Artificial Sequence: Synthetic oligonucleotide
caggaugugcucaauaaag

SEQ ID NO: 539117 - RNA, 19 nt, Artificial Sequence
  Description of Artificial Sequence: Synthetic oligonucleotide
uccuguaagaagucaauga

SEQ ID NO: 539118 - RNA, 19 nt, Artificial Sequence
  Description of Artificial Sequence: Synthetic oligonucleotide
agugcaacgacuguaacca

SEQ ID NO: 539119 - RNA, 19 nt, Artificial Sequence
  Description of Artificial Sequence: Synthetic oligonucleotide
cuucuagaccauaaggcag

SEQ ID NO: 539120 - RNA, 19 nt, Artificial Sequence
  Description of Artificial Sequence: Synthetic oligonucleotide
gaugaaccaguguggauag

SEQ ID NO: 539121 - RNA, 19 nt, Artificial Sequence
  Description of Artificial Sequence: Synthetic oligonucleotide
caggguaaauaccagguag

SEQ ID NO: 539122 - RNA, 19 nt, Artificial Sequence
  Description of Artificial Sequence: Synthetic oligonucleotide
gaugagguccacaagaaga

SEQ ID NO: 539123 - RNA, 19 nt, Artificial Sequence
  Description of Artificial Sequence: Synthetic oligonucleotide
cacgcgaucagccacgggg

SEQ ID NO: 539124 - RNA, 19 nt, Artificial Sequence
  Description of Artificial Sequence: Synthetic oligonucleotide
uuguucuagauagauggag

SEQ ID NO: 539125 - RNA, 19 nt, Artificial Sequence
  Description of Artificial Sequence: Synthetic oligonucleotide
aggagcacccaucagccac

SEQ ID NO: 539126 - RNA, 19 nt, Artificial Sequence
  Description of Artificial Sequence: Synthetic oligonucleotide
gagucgaaggccaagggag

SEQ ID NO: 539127 - RNA, 19 nt, Artificial Sequence
  Description of Artificial Sequence: Synthetic oligonucleotide
ugcuuaaaaguugcugugg

SEQ ID NO: 539128 - RNA, 19 nt, Artificial Sequence
  Description of Artificial Sequence: Synthetic oligonucleotide
uucuagaccauaaggcagu

SEQ ID NO: 539129 - RNA, 19 nt, Artificial Sequence
  Description of Artificial Sequence: Synthetic oligonucleotide
ucaaccauacuuacaucac

SEQ ID NO: 539130 - RNA, 19 nt, Artificial Sequence
  Description of Artificial Sequence: Synthetic oligonucleotide
cucaaccauacuuacauca

SEQ ID NO: 539131 - RNA, 19 nt, Artificial Sequence
  Description of Artificial Sequence: Synthetic oligonucleotide
aaggccugccuacauuuag

SEQ ID NO: 539132 - RNA, 19 nt, Artificial Sequence
  Description of Artificial Sequence: Synthetic oligonucleotide
acuagcucacauggaaucc

SEQ ID NO: 539133 - RNA, 19 nt, Artificial Sequence
  Description of Artificial Sequence: Synthetic oligonucleotide
agggccuauccucucaugg

SEQ ID NO: 539134 - RNA, 19 nt, Artificial Sequence
  Description of Artificial Sequence: Synthetic oligonucleotide
gauuaguucgcuggggcag

SEQ ID NO: 539135 - RNA, 19 nt, Artificial Sequence
  Description of Artificial Sequence: Synthetic oligonucleotide
uacuucaagcaaaggacac

SEQ ID NO: 539136 - RNA, 19 nt, Artificial Sequence
  Description of Artificial Sequence: Synthetic oligonucleotide
caaccauacuuacaucacg

SEQ ID NO: 539137 - RNA, 19 nt, Artificial Sequence
  Description of Artificial Sequence: Synthetic oligonucleotide
aaccauacuuacaucacga

SEQ ID NO: 539138 - RNA, 19 nt, Artificial Sequence
  Description of Artificial Sequence: Synthetic oligonucleotide
gggaguauaguugaugagg

SEQ ID NO: 539139 - RNA, 19 nt, Artificial Sequence
  Description of Artificial Sequence: Synthetic oligonucleotide
acaagcaaacccaaugaag

SEQ ID NO: 539140 - RNA, 19 nt, Artificial Sequence
  Description of Artificial Sequence: Synthetic oligonucleotide
uauagcugauccacagaug

SEQ ID NO: 539141 - RNA, 19 nt, Artificial Sequence
  Description of Artificial Sequence: Synthetic oligonucleotide
aggcuuguggagugcaccc

SEQ ID NO: 539142 - RNA, 19 nt, Artificial Sequence
  Description of Artificial Sequence: Synthetic oligonucleotide
gaauccuacuaaguggcag

SEQ ID NO: 539143 - RNA, 19 nt, Artificial Sequence
  Description of Artificial Sequence: Synthetic oligonucleotide
uguggauaguccugagugc

SEQ ID NO: 539144 - RNA, 19 nt, Artificial Sequence
  Description of Artificial Sequence: Synthetic oligonucleotide
gcccgauucaucuugagcc

SEQ ID NO: 539145 - RNA, 19 nt, Artificial Sequence
  Description of Artificial Sequence: Synthetic oligonucleotide
uggccuacaguaagggaag

SEQ ID NO: 539146 - RNA, 19 nt, Artificial Sequence
  Description of Artificial Sequence: Synthetic oligonucleotide
ggugcuaaagaugaaggag

SEQ ID NO: 539147 - RNA, 19 nt, Artificial Sequence
  Description of Artificial Sequence: Synthetic oligonucleotide
aguagcaacucaaagguaa

SEQ ID NO: 539148 - RNA, 19 nt, Artificial Sequence
  Description of Artificial Sequence: Synthetic oligonucleotide
gacuagcucacauggaauc

SEQ ID NO: 539149 - RNA, 19 nt, Artificial Sequence
  Description of Artificial Sequence: Synthetic oligonucleotide
cacauggaauccuacuaag

SEQ ID NO: 539150 - RNA, 19 nt, Artificial Sequence
  Description of Artificial Sequence: Synthetic oligonucleotide
gauccacagauggaugugg

SEQ ID NO: 539151 - RNA, 19 nt, Artificial Sequence
  Description of Artificial Sequence: Synthetic oligonucleotide
gagggauuaguucgcuggg

SEQ ID NO: 539152 - RNA, 19 nt, Artificial Sequence
  Description of Artificial Sequence: Synthetic oligonucleotide
uaaguggcagggaauccug

SEQ ID NO: 539153 - RNA, 19 nt, Artificial Sequence
  Description of Artificial Sequence: Synthetic oligonucleotide
gaauccuggccauuccacc

SEQ ID NO: 539154 - RNA, 19 nt, Artificial Sequence
  Description of Artificial Sequence: Synthetic oligonucleotide
gauggauuaggcccugcac

SEQ ID NO: 539155 - RNA, 19 nt, Artificial Sequence
  Description of Artificial Sequence: Synthetic oligonucleotide
guaaccaaccagguggcgg

SEQ ID NO: 539156 - RNA, 19 nt, Artificial Sequence
  Description of Artificial Sequence: Synthetic oligonucleotide
cagugcaacgacuguaacc

SEQ ID NO: 539157 - RNA, 19 nt, Artificial Sequence
  Description of Artificial Sequence: Synthetic oligonucleotide
ugcaacgacuguaaccaac

SEQ ID NO: 539158 - RNA, 19 nt, Artificial Sequence
  Description of Artificial Sequence: Synthetic oligonucleotide
ggauauagcugauccacag

SEQ ID NO: 539159 - RNA, 19 nt, Artificial Sequence
  Description of Artificial Sequence: Synthetic oligonucleotide
guggauauagcugauccac

SEQ ID NO: 539160 - RNA, 19 nt, Artificial Sequence
  Description of Artificial Sequence: Synthetic oligonucleotide
uauugucaccacaggguca

SEQ ID NO: 539161 - RNA, 19 nt, Artificial Sequence
  Description of Artificial Sequence: Synthetic oligonucleotide
uccaauuaccccacauggu

SEQ ID NO: 539162 - RNA, 19 nt, Artificial Sequence
  Description of Artificial Sequence: Synthetic oligonucleotide
gaacagacgccagagcgag

SEQ ID NO: 539163 - RNA, 19 nt, Artificial Sequence
  Description of Artificial Sequence: Synthetic oligonucleotide
guccuaggcaggcugagag

SEQ ID NO: 539164 - RNA, 19 nt, Artificial Sequence
  Description of Artificial Sequence: Synthetic oligonucleotide
agagucgaaggccaaggga

SEQ ID NO: 539165 - RNA, 19 nt, Artificial Sequence
  Description of Artificial Sequence: Synthetic oligonucleotide
cagagugagggauuaguuc

SEQ ID NO: 539166 - RNA, 19 nt, Artificial Sequence
  Description of Artificial Sequence: Synthetic oligonucleotide
gauauagcugauccacaga

SEQ ID NO: 539167 - RNA, 19 nt, Artificial Sequence
  Description of Artificial Sequence: Synthetic oligonucleotide
agagcaaggucccaaugaa

SEQ ID NO: 539168 - RNA, 19 nt, Artificial Sequence
  Description of Artificial Sequence: Synthetic oligonucleotide
gacuguaaccaaccaggug

SEQ ID NO: 539169 - RNA, 19 nt, Artificial Sequence
  Description of Artificial Sequence: Synthetic oligonucleotide
gagcacuccuagcaauagg

SEQ ID NO: 539170 - RNA, 19 nt, Artificial Sequence
  Description of Artificial Sequence: Synthetic oligonucleotide
cuguaaccaaccagguggc

SEQ ID NO: 539171 - RNA, 19 nt, Artificial Sequence
  Description of Artificial Sequence: Synthetic oligonucleotide
gacauaagguggauauagc

SEQ ID NO: 539172 - RNA, 19 nt, Artificial Sequence
  Description of Artificial Sequence: Synthetic oligonucleotide
gaaacgagcauguuggcuu

SEQ ID NO: 539173 - RNA, 19 nt, Artificial Sequence
  Description of Artificial Sequence: Synthetic oligonucleotide
uacuaaguggcagggaauc

SEQ ID NO: 539174 - RNA, 19 nt, Artificial Sequence
  Description of Artificial Sequence: Synthetic oligonucleotide
cagaacauuccacuucuuc

SEQ ID NO: 539175 - RNA, 19 nt, Artificial Sequence
  Description of Artificial Sequence: Synthetic oligonucleotide
gcuuaaaaguugcuguggc

SEQ ID NO: 539176 - RNA, 19 nt, Artificial Sequence
  Description of Artificial Sequence: Synthetic oligonucleotide
gaugucggaaaggauggac

SEQ ID NO: 539177 - RNA, 19 nt, Artificial Sequence
  Description of Artificial Sequence: Synthetic oligonucleotide
cuagggacuagcucacaug

SEQ ID NO: 539178 - RNA, 19 nt, Artificial Sequence
  Description of Artificial Sequence: Synthetic oligonucleotide
guggauaguccugagugcc

SEQ ID NO: 539179 - RNA, 19 nt, Artificial Sequence
  Description of Artificial Sequence: Synthetic oligonucleotide
uaaagagcaaggucccaau

SEQ ID NO: 539180 - RNA, 19 nt, Artificial Sequence
  Description of Artificial Sequence: Synthetic oligonucleotide
auucgguuauugcugugga

SEQ ID NO: 539181 - RNA, 19 nt, Artificial Sequence
  Description of Artificial Sequence: Synthetic oligonucleotide
ugcaagcacuugcagcuga

SEQ ID NO: 539182 - RNA, 19 nt, Artificial Sequence
  Description of Artificial Sequence: Synthetic oligonucleotide
cuaaggugggcagguaucc

SEQ ID NO: 539183 - RNA, 19 nt, Artificial Sequence
  Description of Artificial Sequence: Synthetic oligonucleotide
acagagagucugguuggcc

SEQ ID NO: 539184 - RNA, 19 nt, Artificial Sequence
  Description of Artificial Sequence: Synthetic oligonucleotide
gugcuaaagaugaaggaga

SEQ ID NO: 539185 - RNA, 19 nt, Artificial Sequence
  Description of Artificial Sequence: Synthetic oligonucleotide
uggauaguccugagugccc

SEQ ID NO: 539186 - RNA, 19 nt, Artificial Sequence
  Description of Artificial Sequence: Synthetic oligonucleotide
auugggugcuuaaaaguug

SEQ ID NO: 539187 - RNA, 19 nt, Artificial Sequence
  Description of Artificial Sequence: Synthetic oligonucleotide
cagccuauagggucggcag

SEQ ID NO: 539188 - RNA, 19 nt, Artificial Sequence
  Description of Artificial Sequence: Synthetic oligonucleotide
ccgaagaacagcuuucggc

SEQ ID NO: 539189 - RNA, 19 nt, Artificial Sequence
  Description of Artificial Sequence: Synthetic oligonucleotide
uucuagauagauggaguuc

SEQ ID NO: 539190 - RNA, 19 nt, Artificial Sequence
  Description of Artificial Sequence: Synthetic oligonucleotide
aagauggauuaggcccugc

SEQ ID NO: 539191 - RNA, 19 nt, Artificial Sequence
  Description of Artificial Sequence: Synthetic oligonucleotide
cuggucaagaucauaggaa

SEQ ID NO: 539192 - RNA, 19 nt, Artificial Sequence
  Description of Artificial Sequence: Synthetic oligonucleotide
cugccuacauuuagcacac

SEQ ID NO: 539193 - RNA, 19 nt, Artificial Sequence
  Description of Artificial Sequence: Synthetic oligonucleotide
aaagggccuauccucucau

SEQ ID NO: 539194 - RNA, 19 nt, Artificial Sequence
  Description of Artificial Sequence: Synthetic oligonucleotide
uggcgcagaacauuccacu

SEQ ID NO: 539195 - RNA, 19 nt, Artificial Sequence
  Description of Artificial Sequence: Synthetic oligonucleotide
agauggauuaggcccugca

SEQ ID NO: 539196 - RNA, 19 nt, Artificial Sequence
  Description of Artificial Sequence: Synthetic oligonucleotide
agacauagaagcaguagau

SEQ ID NO: 539197 - RNA, 19 nt, Artificial Sequence
  Description of Artificial Sequence: Synthetic oligonucleotide
agaccauaaggcaguaaag

SEQ ID NO: 539198 - RNA, 19 nt, Artificial Sequence
  Description of Artificial Sequence: Synthetic oligonucleotide
cuauagggucggcagaguc

SEQ ID NO: 539199 - RNA, 19 nt, Artificial Sequence
  Description of Artificial Sequence: Synthetic oligonucleotide
gacgccagagcgaggagag

SEQ ID NO: 539200 - RNA, 19 nt, Artificial Sequence
  Description of Artificial Sequence: Synthetic oligonucleotide
auuaguucgcuggggcagg

SEQ ID NO: 539201 - RNA, 19 nt, Artificial Sequence
  Description of Artificial Sequence: Synthetic oligonucleotide
acagaugaaccagugugga

SEQ ID NO: 539202 - RNA, 19 nt, Artificial Sequence
  Description of Artificial Sequence: Synthetic oligonucleotide
uuaugguuggggucaccac

SEQ ID NO: 539203 - RNA, 19 nt, Artificial Sequence
  Description of Artificial Sequence: Synthetic oligonucleotide
uguggccuacaguaaggga

SEQ ID NO: 539204 - RNA, 19 nt, Artificial Sequence
  Description of Artificial Sequence: Synthetic oligonucleotide
aaacgagcauguuggcuuu

SEQ ID NO: 539205 - RNA, 19 nt, Artificial Sequence
  Description of Artificial Sequence: Synthetic oligonucleotide
agaaacgagcauguuggcu

SEQ ID NO: 539206 - RNA, 19 nt, Artificial Sequence
  Description of Artificial Sequence: Synthetic oligonucleotide
auccuacuaaguggcaggg

SEQ ID NO: 539207 - RNA, 19 nt, Artificial Sequence
  Description of Artificial Sequence: Synthetic oligonucleotide
gagaggugcuuggagucgg

SEQ ID NO: 539208 - RNA, 19 nt, Artificial Sequence
  Description of Artificial Sequence: Synthetic oligonucleotide
guagcaacucaaagguaag

SEQ ID NO: 539209 - RNA, 19 nt, Artificial Sequence
  Description of Artificial Sequence: Synthetic oligonucleotide
caagggaguauaguugaug

SEQ ID NO: 539210 - RNA, 19 nt, Artificial Sequence
  Description of Artificial Sequence: Synthetic oligonucleotide
ggccuauccucucaugggg

SEQ ID NO: 539211 - RNA, 19 nt, Artificial Sequence
  Description of Artificial Sequence: Synthetic oligonucleotide
auagggucggcagagucga

SEQ ID NO: 539212 - RNA, 19 nt, Artificial Sequence
  Description of Artificial Sequence: Synthetic oligonucleotide
acagacgccagagcgagga

SEQ ID NO: 539213 - RNA, 19 nt, Artificial Sequence
  Description of Artificial Sequence: Synthetic oligonucleotide
uguaaccaaccagguggcg

SEQ ID NO: 539214 - RNA, 19 nt, Artificial Sequence
  Description of Artificial Sequence: Synthetic oligonucleotide
cagagucgaaggccaaggg

SEQ ID NO: 539215 - RNA, 19 nt, Artificial Sequence
  Description of Artificial Sequence: Synthetic oligonucleotide
caaugaacagcuggucaag

SEQ ID NO: 539216 - RNA, 19 nt, Artificial Sequence
  Description of Artificial Sequence: Synthetic oligonucleotide
gggauuaguucgcuggggc

SEQ ID NO: 539217 - RNA, 19 nt, Artificial Sequence
  Description of Artificial Sequence: Synthetic oligonucleotide
aaccaaccagguggcggcc

SEQ ID NO: 539218 - RNA, 19 nt, Artificial Sequence
  Description of Artificial Sequence: Synthetic oligonucleotide
auaggggagcugucugguc

SEQ ID NO: 539219 - RNA, 19 nt, Artificial Sequence
  Description of Artificial Sequence: Synthetic oligonucleotide
guccaauucgguuauugcu

SEQ ID NO: 539220 - RNA, 19 nt, Artificial Sequence
  Description of Artificial Sequence: Synthetic oligonucleotide
gguucucaaccauacuuac

SEQ ID NO: 539221 - RNA, 19 nt, Artificial Sequence
  Description of Artificial Sequence: Synthetic oligonucleotide
auagaucuucaggcaguac

SEQ ID NO: 539222 - RNA, 19 nt, Artificial Sequence
  Description of Artificial Sequence: Synthetic oligonucleotide
guggccuacaguaagggaa

SEQ ID NO: 539223 - RNA, 19 nt, Artificial Sequence
  Description of Artificial Sequence: Synthetic oligonucleotide
aggguaaauaccagguagu

SEQ ID NO: 539224 - RNA, 19 nt, Artificial Sequence
  Description of Artificial Sequence: Synthetic oligonucleotide
agggauuaguucgcugggg

SEQ ID NO: 539225 - RNA, 19 nt, Artificial Sequence
  Description of Artificial Sequence: Synthetic oligonucleotide
auauuuugccaaagggccu

SEQ ID NO: 539226 - RNA, 19 nt, Artificial Sequence
  Description of Artificial Sequence: Synthetic oligonucleotide
augaaggcgaaggggccac

SEQ ID NO: 539227 - RNA, 19 nt, Artificial Sequence
  Description of Artificial Sequence: Synthetic oligonucleotide
accauacuuacaucacgau

SEQ ID NO: 539228 - RNA, 19 nt, Artificial Sequence
  Description of Artificial Sequence: Synthetic oligonucleotide
cuguccaauucgguuauug

SEQ ID NO: 539229 - RNA, 19 nt, Artificial Sequence
  Description of Artificial Sequence: Synthetic oligonucleotide
aagggccuauccucucaug

SEQ ID NO: 539230 - RNA, 19 nt, Artificial Sequence
  Description of Artificial Sequence: Synthetic oligonucleotide
guccuguaagaagucaaug

SEQ ID NO: 539231 - RNA, 19 nt, Artificial Sequence
  Description of Artificial Sequence: Synthetic oligonucleotide
uaagguggauauagcugau

SEQ ID NO: 539232 - RNA, 19 nt, Artificial Sequence
  Description of Artificial Sequence: Synthetic oligonucleotide
uguggagugcacccaggua

SEQ ID NO: 539233 - RNA, 19 nt, Artificial Sequence
  Description of Artificial Sequence: Synthetic oligonucleotide
aaaguugcuguggccuaca

SEQ ID NO: 539234 - RNA, 19 nt, Artificial Sequence
  Description of Artificial Sequence: Synthetic oligonucleotide
uuggggucaccaccgcaug

SEQ ID NO: 539235 - RNA, 19 nt, Artificial Sequence
  Description of Artificial Sequence: Synthetic oligonucleotide
augucggaaaggauggaca

SEQ ID NO: 539236 - RNA, 19 nt, Artificial Sequence
  Description of Artificial Sequence: Synthetic oligonucleotide
acauggaauccuacuaagu

SEQ ID NO: 539237 - RNA, 19 nt, Artificial Sequence
  Description of Artificial Sequence: Synthetic oligonucleotide
aagguaaggccugccuaca

SEQ ID NO: 539238 - RNA, 19 nt, Artificial Sequence
  Description of Artificial Sequence: Synthetic oligonucleotide
gucggcagagucgaaggcc

SEQ ID NO: 539239 - RNA, 19 nt, Artificial Sequence
  Description of Artificial Sequence: Synthetic oligonucleotide
gggguuuaucugcaucagg

SEQ ID NO: 539240 - RNA, 19 nt, Artificial Sequence
  Description of Artificial Sequence: Synthetic oligonucleotide
gcggccuagcaccugaucc

SEQ ID NO: 539241 - RNA, 19 nt, Artificial Sequence
  Description of Artificial Sequence: Synthetic oligonucleotide
auuguucuagauagaugga

SEQ ID NO: 539242 - RNA, 19 nt, Artificial Sequence
  Description of Artificial Sequence: Synthetic oligonucleotide
cagugcccgauucaucuug

SEQ ID NO: 539243 - RNA, 19 nt, Artificial Sequence
  Description of Artificial Sequence: Synthetic oligonucleotide
cuggcgcagaacauuccac

SEQ ID NO: 539244 - RNA, 19 nt, Artificial Sequence
  Description of Artificial Sequence: Synthetic oligonucleotide
uuaguucgcuggggcaggg

SEQ ID NO: 539245 - RNA, 19 nt, Artificial Sequence
  Description of Artificial Sequence: Synthetic oligonucleotide
guacagagcggugguaggc

SEQ ID NO: 539246 - RNA, 19 nt, Artificial Sequence
  Description of Artificial Sequence: Synthetic oligonucleotide
gggccuauccucucauggg

SEQ ID NO: 539247 - RNA, 19 nt, Artificial Sequence
  Description of Artificial Sequence: Synthetic oligonucleotide
gaaguacagagugagggau

SEQ ID NO: 539248 - RNA, 19 nt, Artificial Sequence
  Description of Artificial Sequence: Synthetic oligonucleotide
cucagugcaacgacuguaa

SEQ ID NO: 539249 - RNA, 19 nt, Artificial Sequence
  Description of Artificial Sequence: Synthetic oligonucleotide
auaguccugagugcccgag

SEQ ID NO: 539250 - RNA, 19 nt, Artificial Sequence
  Description of Artificial Sequence: Synthetic oligonucleotide
cacaaguaugcuggccucc

SEQ ID NO: 539251 - RNA, 19 nt, Artificial Sequence
  Description of Artificial Sequence: Synthetic oligonucleotide
agcucacauggaauccuac

SEQ ID NO: 539252 - RNA, 19 nt, Artificial Sequence
  Description of Artificial Sequence: Synthetic oligonucleotide
guaugcuggccuccaugcc

SEQ ID NO: 539253 - RNA, 19 nt, Artificial Sequence
  Description of Artificial Sequence: Synthetic oligonucleotide
gagagucugguuggcccgg

SEQ ID NO: 539254 - RNA, 19 nt, Artificial Sequence
  Description of Artificial Sequence: Synthetic oligonucleotide
aaaagcggccuagcaccug

SEQ ID NO: 539255 - RNA, 19 nt, Artificial Sequence
  Description of Artificial Sequence: Synthetic oligonucleotide
agccugcaagcacuugcag

SEQ ID NO: 539256 - RNA, 19 nt, Artificial Sequence
  Description of Artificial Sequence: Synthetic oligonucleotide
acaaguaugcuggccucca

SEQ ID NO: 539257 - RNA, 19 nt, Artificial Sequence
  Description of Artificial Sequence: Synthetic oligonucleotide
uagcucacauggaauccua

SEQ ID NO: 539258 - RNA, 19 nt, Artificial Sequence
  Description of Artificial Sequence: Synthetic oligonucleotide
uuaccccacaugguauuac

SEQ ID NO: 539259 - RNA, 19 nt, Artificial Sequence
  Description of Artificial Sequence: Synthetic oligonucleotide
gcagagucgaaggccaagg

SEQ ID NO: 539260 - RNA, 19 nt, Artificial Sequence
  Description of Artificial Sequence: Synthetic oligonucleotide
agccuauagggucggcaga

SEQ ID NO: 539261 - RNA, 19 nt, Artificial Sequence
  Description of Artificial Sequence: Synthetic oligonucleotide
guucuagauagauggaguu

SEQ ID NO: 539262 - RNA, 19 nt, Artificial Sequence
  Description of Artificial Sequence: Synthetic oligonucleotide
acuaagagucccagcauua

SEQ ID NO: 539263 - RNA, 19 nt, Artificial Sequence
  Description of Artificial Sequence: Synthetic oligonucleotide
gggacuagcucacauggaa

SEQ ID NO: 539264 - RNA, 19 nt, Artificial Sequence
  Description of Artificial Sequence: Synthetic oligonucleotide
agcggccuagcaccugauc

SEQ ID NO: 539265 - RNA, 19 nt, Artificial Sequence
  Description of Artificial Sequence: Synthetic oligonucleotide
uaaggugggcagguaucca

SEQ ID NO: 539266 - RNA, 19 nt, Artificial Sequence
  Description of Artificial Sequence: Synthetic oligonucleotide
uaaggccugccuacauuua

SEQ ID NO: 539267 - RNA, 19 nt, Artificial Sequence
  Description of Artificial Sequence: Synthetic oligonucleotide
uucggcacagggagcccca

SEQ ID NO: 539268 - RNA, 19 nt, Artificial Sequence
  Description of Artificial Sequence: Synthetic oligonucleotide
gggugcuuaaaaguugcug

SEQ ID NO: 539269 - RNA, 19 nt, Artificial Sequence
  Description of Artificial Sequence: Synthetic oligonucleotide
aggaauccacccgcuggcg

SEQ ID NO: 539270 - RNA, 19 nt, Artificial Sequence
  Description of Artificial Sequence: Synthetic oligonucleotide
gguggauauagcugaucca

SEQ ID NO: 539271 - RNA, 19 nt, Artificial Sequence
  Description of Artificial Sequence: Synthetic oligonucleotide
ggcgaugaugucggaaagg

SEQ ID NO: 539272 - RNA, 19 nt, Artificial Sequence
  Description of Artificial Sequence: Synthetic oligonucleotide
agcuuucggcacagggagc

SEQ ID NO: 539273 - RNA, 19 nt, Artificial Sequence
  Description of Artificial Sequence: Synthetic oligonucleotide
gggugcuaaagaugaagga

SEQ ID NO: 539274 - RNA, 19 nt, Artificial Sequence
  Description of Artificial Sequence: Synthetic oligonucleotide
ggauuaguucgcuggggca

SEQ ID NO: 539275 - RNA, 19 nt, Artificial Sequence
  Description of Artificial Sequence: Synthetic oligonucleotide
agagucugguuggcccggc

SEQ ID NO: 539276 - RNA, 19 nt, Artificial Sequence
  Description of Artificial Sequence: Synthetic oligonucleotide
guucucaaccauacuuaca

SEQ ID NO: 539277 - RNA, 19 nt, Artificial Sequence
  Description of Artificial Sequence: Synthetic oligonucleotide
uccuacuaaguggcaggga

SEQ ID NO: 539278 - RNA, 19 nt, Artificial Sequence
  Description of Artificial Sequence: Synthetic oligonucleotide
agcgaggagaggccauaga

SEQ ID NO: 539279 - RNA, 19 nt, Artificial Sequence
  Description of Artificial Sequence: Synthetic oligonucleotide
ccuacuaaguggcagggaa

SEQ ID NO: 539280 - RNA, 19 nt, Artificial Sequence
  Description of Artificial Sequence: Synthetic oligonucleotide
ggaauccacccgcuggcgc

SEQ ID NO: 539281 - RNA, 19 nt, Artificial Sequence
  Description of Artificial Sequence: Synthetic oligonucleotide
ugguuggcccggcuguguc

SEQ ID NO: 539282 - RNA, 19 nt, Artificial Sequence
  Description of Artificial Sequence: Synthetic oligonucleotide
aacagacgccagagcgagg

SEQ ID NO: 539283 - RNA, 19 nt, Artificial Sequence
  Description of Artificial Sequence: Synthetic oligonucleotide
ggggacauaagguggauau

SEQ ID NO: 539284 - RNA, 19 nt, Artificial Sequence
  Description of Artificial Sequence: Synthetic oligonucleotide
cccgauucaucuugagccc

SEQ ID NO: 539285 - RNA, 19 nt, Artificial Sequence
  Description of Artificial Sequence: Synthetic oligonucleotide
ggaguauaguugaugaggu

SEQ ID NO: 539286 - RNA, 19 nt, Artificial Sequence
  Description of Artificial Sequence: Synthetic oligonucleotide
gagcgaggagaggccauag

SEQ ID NO: 539287 - RNA, 19 nt, Artificial Sequence
  Description of Artificial Sequence: Synthetic oligonucleotide
caaagggccuauccucuca

SEQ ID NO: 539288 - RNA, 19 nt, Artificial Sequence
  Description of Artificial Sequence: Synthetic oligonucleotide
gacacccaguggcuuauua

SEQ ID NO: 539289 - RNA, 19 nt, Artificial Sequence
  Description of Artificial Sequence: Synthetic oligonucleotide
guauccaauuaccccacau

SEQ ID NO: 539290 - RNA, 19 nt, Artificial Sequence
  Description of Artificial Sequence: Synthetic oligonucleotide
ccaauuaccccacauggua

SEQ ID NO: 539291 - RNA, 19 nt, Artificial Sequence
  Description of Artificial Sequence: Synthetic oligonucleotide
gccuauagggucggcagag

SEQ ID NO: 539292 - RNA, 19 nt, Artificial Sequence
  Description of Artificial Sequence: Synthetic oligonucleotide
gcgaugaugucggaaagga

SEQ ID NO: 539293 - RNA, 19 nt, Artificial Sequence
  Description of Artificial Sequence: Synthetic oligonucleotide
uaguucgcuggggcagggg

SEQ ID NO: 539294 - RNA, 19 nt, Artificial Sequence
  Description of Artificial Sequence: Synthetic oligonucleotide
agccacgcgaucagccacg

SEQ ID NO: 539295 - RNA, 19 nt, Artificial Sequence
  Description of Artificial Sequence: Synthetic oligonucleotide
ggaauccuggccauuccac

SEQ ID NO: 539296 - RNA, 19 nt, Artificial Sequence
  Description of Artificial Sequence: Synthetic oligonucleotide
agguaaggccugccuacau

SEQ ID NO: 539297 - RNA, 19 nt, Artificial Sequence
  Description of Artificial Sequence: Synthetic oligonucleotide
ucgaaggccaagggaguau

SEQ ID NO: 539298 - RNA, 19 nt, Artificial Sequence
  Description of Artificial Sequence: Synthetic oligonucleotide
gguaggugugcaccacaug

SEQ ID NO: 539299 - RNA, 19 nt, Artificial Sequence
  Description of Artificial Sequence: Synthetic oligonucleotide
agucgaaggccaagggagu

SEQ ID NO: 539300 - RNA, 19 nt, Artificial Sequence
  Description of Artificial Sequence: Synthetic oligonucleotide
caauuaccccacaugguau

SEQ ID NO: 539301 - RNA, 19 nt, Artificial Sequence
  Description of Artificial Sequence: Synthetic oligonucleotide
gcaauaggcucagugcaac

SEQ ID NO: 539302 - RNA, 19 nt, Artificial Sequence
  Description of Artificial Sequence: Synthetic oligonucleotide
cacccgcuggcgcagaaca

SEQ ID NO: 539303 - RNA, 19 nt, Artificial Sequence
  Description of Artificial Sequence: Synthetic oligonucleotide
cugagcacuccuagcaaua

SEQ ID NO: 539304 - RNA, 19 nt, Artificial Sequence
  Description of Artificial Sequence: Synthetic oligonucleotide
auuaccccacaugguauua

SEQ ID NO: 539305 - RNA, 19 nt, Artificial Sequence
  Description of Artificial Sequence: Synthetic oligonucleotide
ucccagagucugagcacuc

SEQ ID NO: 539306 - RNA, 19 nt, Artificial Sequence
  Description of Artificial Sequence: Synthetic oligonucleotide
cagguacccaggaguguuc

SEQ ID NO: 539307 - RNA, 19 nt, Artificial Sequence
  Description of Artificial Sequence: Synthetic oligonucleotide
gugcccgauucaucuugag

SEQ ID NO: 539308 - RNA, 19 nt, Artificial Sequence
  Description of Artificial Sequence: Synthetic oligonucleotide
agcaacaagcaaacccaau

SEQ ID NO: 539309 - RNA, 19 nt, Artificial Sequence
  Description of Artificial Sequence: Synthetic oligonucleotide
ggucggcagagucgaaggc

SEQ ID NO: 539310 - RNA, 19 nt, Artificial Sequence
  Description of Artificial Sequence: Synthetic oligonucleotide
cagggguagaugagcucuc

SEQ ID NO: 539311 - RNA, 19 nt, Artificial Sequence
  Description of Artificial Sequence: Synthetic oligonucleotide
auuaggcccugcacaguga

SEQ ID NO: 539312 - RNA, 19 nt, Artificial Sequence
  Description of Artificial Sequence: Synthetic oligonucleotide
agcauaucccagagucuga

SEQ ID NO: 539313 - RNA, 19 nt, Artificial Sequence
  Description of Artificial Sequence: Synthetic oligonucleotide
ggaacagacgccagagcga

SEQ ID NO: 539314 - RNA, 19 nt, Artificial Sequence
  Description of Artificial Sequence: Synthetic oligonucleotide
cccgagacagacagggcug

SEQ ID NO: 539315 - RNA, 19 nt, Artificial Sequence
  Description of Artificial Sequence: Synthetic oligonucleotide
ccuacccaaagcagccaag

SEQ ID NO: 539316 - RNA, 19 nt, Artificial Sequence
  Description of Artificial Sequence: Synthetic oligonucleotide
agugcccgauucaucuuga

SEQ ID NO: 539317 - RNA, 19 nt, Artificial Sequence
  Description of Artificial Sequence: Synthetic oligonucleotide
cauagaucuucaggcagua

SEQ ID NO: 539318 - RNA, 19 nt, Artificial Sequence
  Description of Artificial Sequence: Synthetic oligonucleotide
gcgcagaacauuccacuuc

SEQ ID NO: 539319 - RNA, 19 nt, Artificial Sequence
  Description of Artificial Sequence: Synthetic oligonucleotide
cuuucggcacagggagccc

SEQ ID NO: 539320 - RNA, 19 nt, Artificial Sequence
  Description of Artificial Sequence: Synthetic oligonucleotide
ccggagcaggguaaauacc

SEQ ID NO: 539321 - RNA, 19 nt, Artificial Sequence
  Description of Artificial Sequence: Synthetic oligonucleotide
guuggcccggcugugucca

SEQ ID NO: 539322 - RNA, 19 nt, Artificial Sequence
  Description of Artificial Sequence: Synthetic oligonucleotide
cgaggagaggccauagauc

SEQ ID NO: 539323 - RNA, 19 nt, Artificial Sequence
  Description of Artificial Sequence: Synthetic oligonucleotide
acgcgaucagccacgggga

SEQ ID NO: 539324 - RNA, 19 nt, Artificial Sequence
  Description of Artificial Sequence: Synthetic oligonucleotide
agccggagcaggguaaaua

SEQ ID NO: 539325 - RNA, 19 nt, Artificial Sequence
  Description of Artificial Sequence: Synthetic oligonucleotide
caguccuaggcaggcugag

SEQ ID NO: 539326 - RNA, 19 nt, Artificial Sequence
  Description of Artificial Sequence: Synthetic oligonucleotide
gguuggcccggcugugucc

SEQ ID NO: 539327 - RNA, 19 nt, Artificial Sequence
  Description of Artificial Sequence: Synthetic oligonucleotide
cuacuaaguggcagggaau

SEQ ID NO: 539328 - RNA, 19 nt, Artificial Sequence
  Description of Artificial Sequence: Synthetic oligonucleotide
gagggcgaugaugucggaa

SEQ ID NO: 539329 - RNA, 19 nt, Artificial Sequence
  Description of Artificial Sequence: Synthetic oligonucleotide
cuagcucacauggaauccu

SEQ ID NO: 539330 - RNA, 19 nt, Artificial Sequence
  Description of Artificial Sequence: Synthetic oligonucleotide
guucaggacugaagcugac

SEQ ID NO: 539331 - RNA, 19 nt, Artificial Sequence
  Description of Artificial Sequence: Synthetic oligonucleotide
agggacuagcucacaugga

SEQ ID NO: 539332 - RNA, 19 nt, Artificial Sequence
  Description of Artificial Sequence: Synthetic oligonucleotide
gccuauccucucauggggc

SEQ ID NO: 539333 - RNA, 19 nt, Artificial Sequence
  Description of Artificial Sequence: Synthetic oligonucleotide
cagacgccagagcgaggag

SEQ ID NO: 539334 - RNA, 19 nt, Artificial Sequence
  Description of Artificial Sequence: Synthetic oligonucleotide
cugcaagcacuugcagcug

SEQ ID NO: 539335 - RNA, 19 nt, Artificial Sequence
  Description of Artificial Sequence: Synthetic oligonucleotide
ggauggacagggcaacagu

SEQ ID NO: 539336 - RNA, 19 nt, Artificial Sequence
  Description of Artificial Sequence: Synthetic oligonucleotide
agccauuguucuagauaga

SEQ ID NO: 539337 - RNA, 19 nt, Artificial Sequence
  Description of Artificial Sequence: Synthetic oligonucleotide
gcgaggagaggccauagau

SEQ ID NO: 539338 - RNA, 19 nt, Artificial Sequence
  Description of Artificial Sequence: Synthetic oligonucleotide
gccugccuacauuuagcac

SEQ ID NO: 539339 - RNA, 19 nt, Artificial Sequence
  Description of Artificial Sequence: Synthetic oligonucleotide
gguaaagagcaagguccca

SEQ ID NO: 539340 - RNA, 19 nt, Artificial Sequence
  Description of Artificial Sequence: Synthetic oligonucleotide
cgauucaucuugagcccag

SEQ ID NO: 539341 - RNA, 19 nt, Artificial Sequence
  Description of Artificial Sequence: Synthetic oligonucleotide
gaacaggaauccacccgcu

SEQ ID NO: 539342 - RNA, 19 nt, Artificial Sequence
  Description of Artificial Sequence: Synthetic oligonucleotide
gcccgagacagacagggcu

SEQ ID NO: 539343 - RNA, 19 nt, Artificial Sequence
  Description of Artificial Sequence: Synthetic oligonucleotide
cauaggggagcugucuggu

SEQ ID NO: 539344 - RNA, 19 nt, Artificial Sequence
  Description of Artificial Sequence: Synthetic oligonucleotide
cuggugcuagagcaguggu

SEQ ID NO: 539345 - RNA, 19 nt, Artificial Sequence
  Description of Artificial Sequence: Synthetic oligonucleotide
uggcccggcuguguccagc

SEQ ID NO: 539346 - RNA, 19 nt, Artificial Sequence
  Description of Artificial Sequence: Synthetic oligonucleotide
gccauuguucuagauagau

SEQ ID NO: 539347 - RNA, 19 nt, Artificial Sequence
  Description of Artificial Sequence: Synthetic oligonucleotide
ccgagacagacagggcugg

SEQ ID NO: 539348 - RNA, 19 nt, Artificial Sequence
  Description of Artificial Sequence: Synthetic oligonucleotide
accccacaugguauuacuu

SEQ ID NO: 539349 - RNA, 19 nt, Artificial Sequence
  Description of Artificial Sequence: Synthetic oligonucleotide
guaguacagagcgguggua

SEQ ID NO: 539350 - RNA, 19 nt, Artificial Sequence
  Description of Artificial Sequence: Synthetic oligonucleotide
gucgaaggccaagggagua

SEQ ID NO: 539351 - RNA, 19 nt, Artificial Sequence
  Description of Artificial Sequence: Synthetic oligonucleotide
uuggcccggcuguguccag

SEQ ID NO: 539352 - RNA, 19 nt, Artificial Sequence
  Description of Artificial Sequence: Synthetic oligonucleotide
ggaauccuacuaaguggca

SEQ ID NO: 539353 - RNA, 19 nt, Artificial Sequence
  Description of Artificial Sequence: Synthetic oligonucleotide
caccugauccagugcccga

SEQ ID NO: 539354 - RNA, 19 nt, Artificial Sequence
  Description of Artificial Sequence: Synthetic oligonucleotide
ugcccacaguggacacuuc

SEQ ID NO: 539355 - RNA, 19 nt, Artificial Sequence
  Description of Artificial Sequence: Synthetic oligonucleotide
gcgaucagccacggggacc

SEQ ID NO: 539356 - RNA, 19 nt, Artificial Sequence
  Description of Artificial Sequence: Synthetic oligonucleotide
ggagugcacccagguaccc

SEQ ID NO: 539357 - RNA, 19 nt, Artificial Sequence
  Description of Artificial Sequence: Synthetic oligonucleotide
gugcaacgacuguaaccaa

SEQ ID NO: 539358 - RNA, 19 nt, Artificial Sequence
  Description of Artificial Sequence: Synthetic oligonucleotide
gcuaggcaggcgguaggug

SEQ ID NO: 539359 - RNA, 19 nt, Artificial Sequence
  Description of Artificial Sequence: Synthetic oligonucleotide
aagcggccuagcaccugau

SEQ ID NO: 539360 - RNA, 19 nt, Artificial Sequence
  Description of Artificial Sequence: Synthetic oligonucleotide
ccaaccagguggcggccac

SEQ ID NO: 539361 - RNA, 19 nt, Artificial Sequence
  Description of Artificial Sequence: Synthetic oligonucleotide
gcggugguaggcagcaaga

SEQ ID NO: 539362 - RNA, 19 nt, Artificial Sequence
  Description of Artificial Sequence: Synthetic oligonucleotide
gccacgcgaucagccacgg

SEQ ID NO: 539363 - RNA, 19 nt, Artificial Sequence
  Description of Artificial Sequence: Synthetic oligonucleotide
ggcuuguggagugcaccca

SEQ ID NO: 539364 - RNA, 19 nt, Artificial Sequence
  Description of Artificial Sequence: Synthetic oligonucleotide
ggcgcagaacauuccacuu

SEQ ID NO: 539365 - RNA, 19 nt, Artificial Sequence
  Description of Artificial Sequence: Synthetic oligonucleotide
ccagccuauagggucggca

SEQ ID NO: 539366 - RNA, 19 nt, Artificial Sequence
  Description of Artificial Sequence: Synthetic oligonucleotide
cgaucagccacggggacca

SEQ ID NO: 539367 - RNA, 19 nt, Artificial Sequence
  Description of Artificial Sequence: Synthetic oligonucleotide
cacagcuaggcaggcggua

SEQ ID NO: 539368 - RNA, 19 nt, Artificial Sequence
  Description of Artificial Sequence: Synthetic oligonucleotide
ccccaaagucauucacaca

SEQ ID NO: 539369 - RNA, 19 nt, Artificial Sequence
  Description of Artificial Sequence: Synthetic oligonucleotide
ggcggccacacagcuggug

SEQ ID NO: 539370 - RNA, 19 nt, Artificial Sequence
  Description of Artificial Sequence: Synthetic oligonucleotide
ccgauucaucuugagccca

SEQ ID NO: 539371 - RNA, 19 nt, Artificial Sequence
  Description of Artificial Sequence: Synthetic oligonucleotide
guggacacuucuagaccau

SEQ ID NO: 539372 - RNA, 19 nt, Artificial Sequence
  Description of Artificial Sequence: Synthetic oligonucleotide
gguccacaagaagauggau

SEQ ID NO: 539373 - RNA, 19 nt, Artificial Sequence
  Description of Artificial Sequence: Synthetic oligonucleotide
caaggagaccugccagcau

SEQ ID NO: 539374 - RNA, 19 nt, Artificial Sequence
  Description of Artificial Sequence: Synthetic oligonucleotide
ggagaccugccagcauauc

SEQ ID NO: 539375 - RNA, 19 nt, Artificial Sequence
  Description of Artificial Sequence: Synthetic oligonucleotide
ccuagggacuagcucacau

SEQ ID NO: 539376 - RNA, 19 nt, Artificial Sequence
  Description of Artificial Sequence: Synthetic oligonucleotide
guucgcuggggcaggggau

SEQ ID NO: 539377 - RNA, 19 nt, Artificial Sequence
  Description of Artificial Sequence: Synthetic oligonucleotide
ggagcacccaucagccacu

SEQ ID NO: 539378 - RNA, 19 nt, Artificial Sequence
  Description of Artificial Sequence: Synthetic oligonucleotide
ccacgcgaucagccacggg

SEQ ID NO: 539379 - RNA, 19 nt, Artificial Sequence
  Description of Artificial Sequence: Synthetic oligonucleotide
ggauuaggcccugcacagu

SEQ ID NO: 539380 - RNA, 19 nt, Artificial Sequence
  Description of Artificial Sequence: Synthetic oligonucleotide
cgcgaucagccacggggac

SEQ ID NO: 539381 - RNA, 19 nt, Artificial Sequence
  Description of Artificial Sequence: Synthetic oligonucleotide
ccaagggaguauaguugau

SEQ ID NO: 539382 - RNA, 19 nt, Artificial Sequence
  Description of Artificial Sequence: Synthetic oligonucleotide
gccagccuauagggucggc

SEQ ID NO: 539383 - RNA, 19 nt, Artificial Sequence
  Description of Artificial Sequence: Synthetic oligonucleotide
cgaaggccaagggaguaua

SEQ ID NO: 539384 - RNA, 19 nt, Artificial Sequence
  Description of Artificial Sequence: Synthetic oligonucleotide
ggcgaaggggccacagcuu

SEQ ID NO: 539385 - RNA, 19 nt, Artificial Sequence
  Description of Artificial Sequence: Synthetic oligonucleotide
ccuauagggucggcagagu

SEQ ID NO: 539386 - RNA, 19 nt, Artificial Sequence
  Description of Artificial Sequence: Synthetic oligonucleotide
aguaauaaagcgcugagcc

SEQ ID NO: 539387 - RNA, 19 nt, Artificial Sequence
  Description of Artificial Sequence: Synthetic oligonucleotide
uuuaauauaucaaaaggcc

SEQ ID NO: 539388 - RNA, 19 nt, Artificial Sequence
  Description of Artificial Sequence: Synthetic oligonucleotide
auacauaugcaucuuagcc

SEQ ID NO: 539389 - RNA, 19 nt, Artificial Sequence
  Description of Artificial Sequence: Synthetic oligonucleotide
uugaguuacaaugagacag

SEQ ID NO: 539390 - RNA, 19 nt, Artificial Sequence
  Description of Artificial Sequence: Synthetic oligonucleotide
aguaauacggaccuugggg

SEQ ID NO: 539391 - RNA, 19 nt, Artificial Sequence
  Description of Artificial Sequence: Synthetic oligonucleotide
aauaaaagcaagauuaacu

SEQ ID NO: 539392 - RNA, 19 nt, Artificial Sequence
  Description of Artificial Sequence: Synthetic oligonucleotide
aaccccauaaaccccaccc

SEQ ID NO: 539393 - RNA, 19 nt, Artificial Sequence
  Description of Artificial Sequence: Synthetic oligonucleotide
ucaacccagauauacaugg

SEQ ID NO: 539394 - RNA, 19 nt, Artificial Sequence
  Description of Artificial Sequence: Synthetic oligonucleotide
aaguacauuugcuugaugu

SEQ ID NO: 539395 - RNA, 19 nt, Artificial Sequence
  Description of Artificial Sequence: Synthetic oligonucleotide
uuuagugacaugcuagucc

SEQ ID NO: 539396 - RNA, 19 nt, Artificial Sequence
  Description of Artificial Sequence: Synthetic oligonucleotide
uauucugaccaauaaaagc

SEQ ID NO: 539397 - RNA, 19 nt, Artificial Sequence
  Description of Artificial Sequence: Synthetic oligonucleotide
uaggaaaggcucaagauca

SEQ ID NO: 539398 - RNA, 19 nt, Artificial Sequence
  Description of Artificial Sequence: Synthetic oligonucleotide
ugcggauuccuucacaggg

SEQ ID NO: 539399 - RNA, 19 nt, Artificial Sequence
  Description of Artificial Sequence: Synthetic oligonucleotide
uuaaccaagcucuucaaac

SEQ ID NO: 539400 - RNA, 19 nt, Artificial Sequence
  Description of Artificial Sequence: Synthetic oligonucleotide
ucauugagaaggcaugugc

SEQ ID NO: 539401 - RNA, 19 nt, Artificial Sequence
  Description of Artificial Sequence: Synthetic oligonucleotide
gauguuggacguuucgugg

SEQ ID NO: 539402 - RNA, 19 nt, Artificial Sequence
  Description of Artificial Sequence: Synthetic oligonucleotide
uaauaaagcgcugagcccc

SEQ ID NO: 539403 - RNA, 19 nt, Artificial Sequence
  Description of Artificial Sequence: Synthetic oligonucleotide
ucuuagccuaagcacaggg

SEQ ID NO: 539404 - RNA, 19 nt, Artificial Sequence
  Description of Artificial Sequence: Synthetic oligonucleotide
agugguuacguucccuucc

SEQ ID NO: 539405 - RNA, 19 nt, Artificial Sequence
  Description of Artificial Sequence: Synthetic oligonucleotide
agugccuuaaauuggucuc

SEQ ID NO: 539406 - RNA, 19 nt, Artificial Sequence
  Description of Artificial Sequence: Synthetic oligonucleotide
uguaaaguuagaaacccua

SEQ ID NO: 539407 - RNA, 19 nt, Artificial Sequence
  Description of Artificial Sequence: Synthetic oligonucleotide
aaagguugcuauuacccca

SEQ ID NO: 539408 - RNA, 19 nt, Artificial Sequence
  Description of Artificial Sequence: Synthetic oligonucleotide
uucacaggguccuauuugg

SEQ ID NO: 539409 - RNA, 19 nt, Artificial Sequence
  Description of Artificial Sequence: Synthetic oligonucleotide
uacauaugcaucuuagccu

SEQ ID NO: 539410 - RNA, 19 nt, Artificial Sequence
  Description of Artificial Sequence: Synthetic oligonucleotide
cuaucaguaacaauguuca

SEQ ID NO: 539411 - RNA, 19 nt, Artificial Sequence
  Description of Artificial Sequence: Synthetic oligonucleotide
gggauuaagaacuugacuc

SEQ ID NO: 539412 - RNA, 19 nt, Artificial Sequence
  Description of Artificial Sequence: Synthetic oligonucleotide
uuuaacuccucaccuaacu

SEQ ID NO: 539413 - RNA, 19 nt, Artificial Sequence
  Description of Artificial Sequence: Synthetic oligonucleotide
uuuguauuggaagggcucg

SEQ ID NO: 539414 - RNA, 19 nt, Artificial Sequence
  Description of Artificial Sequence: Synthetic oligonucleotide
agauuaacugggcacgagg

SEQ ID NO: 539415 - RNA, 19 nt, Artificial Sequence
  Description of Artificial Sequence: Synthetic oligonucleotide
cagaguauacuccuguucc

SEQ ID NO: 539416 - RNA, 19 nt, Artificial Sequence
  Description of Artificial Sequence: Synthetic oligonucleotide
auugagaaggcaugugcgg

SEQ ID NO: 539417 - RNA, 19 nt, Artificial Sequence
  Description of Artificial Sequence: Synthetic oligonucleotide
uggaauagaaaguugguuu

SEQ ID NO: 539418 - RNA, 19 nt, Artificial Sequence
  Description of Artificial Sequence: Synthetic oligonucleotide
cucgaugcaagaugaaacg

SEQ ID NO: 539419 - RNA, 19 nt, Artificial Sequence
  Description of Artificial Sequence: Synthetic oligonucleotide
aaagguacuagagccauca

SEQ ID NO: 539420 - RNA, 19 nt, Artificial Sequence
  Description of Artificial Sequence: Synthetic oligonucleotide
ucgaaugugguaccggugc

SEQ ID NO: 539421 - RNA, 19 nt, Artificial Sequence
  Description of Artificial Sequence: Synthetic oligonucleotide
uuauccguuuacacgagug

SEQ ID NO: 539422 - RNA, 19 nt, Artificial Sequence
  Description of Artificial Sequence: Synthetic oligonucleotide
ugcaucuuagccuaagcac

SEQ ID NO: 539423 - RNA, 19 nt, Artificial Sequence
  Description of Artificial Sequence: Synthetic oligonucleotide
auaggggaauugucaaucc

SEQ ID NO: 539424 - RNA, 19 nt, Artificial Sequence
  Description of Artificial Sequence: Synthetic oligonucleotide
uguaaucuugaccccagca

SEQ ID NO: 539425 - RNA, 19 nt, Artificial Sequence
  Description of Artificial Sequence: Synthetic oligonucleotide
accaucaacccagauauac

SEQ ID NO: 539426 - RNA, 19 nt, Artificial Sequence
  Description of Artificial Sequence: Synthetic oligonucleotide
auacaugucacuguuggag

SEQ ID NO: 539427 - RNA, 19 nt, Artificial Sequence
  Description of Artificial Sequence: Synthetic oligonucleotide
aaugugguaccggugccgc

SEQ ID NO: 539428 - RNA, 19 nt, Artificial Sequence
  Description of Artificial Sequence: Synthetic oligonucleotide
gaaaguugguuuuaccuga

SEQ ID NO: 539429 - RNA, 19 nt, Artificial Sequence
  Description of Artificial Sequence: Synthetic oligonucleotide
uuuggaauagaaaguuggu

SEQ ID NO: 539430 - RNA, 19 nt, Artificial Sequence
  Description of Artificial Sequence: Synthetic oligonucleotide
agaaaugaggguugggugu

SEQ ID NO: 539431 - RNA, 19 nt, Artificial Sequence
  Description of Artificial Sequence: Synthetic oligonucleotide
guguauagggauuaagaac

SEQ ID NO: 539432 - RNA, 19 nt, Artificial Sequence
  Description of Artificial Sequence: Synthetic oligonucleotide
ucugaccaauaaaagcaag

SEQ ID NO: 539433 - RNA, 19 nt, Artificial Sequence
  Description of Artificial Sequence: Synthetic oligonucleotide
ugauguuggacguuucgug

SEQ ID NO: 539434 - RNA, 19 nt, Artificial Sequence
  Description of Artificial Sequence: Synthetic oligonucleotide
uauuuggaauucccacugg

SEQ ID NO: 539435 - RNA, 19 nt, Artificial Sequence
  Description of Artificial Sequence: Synthetic oligonucleotide
acucgaugcaagaugaaac

SEQ ID NO: 539436 - RNA, 19 nt, Artificial Sequence
  Description of Artificial Sequence: Synthetic oligonucleotide
accccuaucaguaacaaug

SEQ ID NO: 539437 - RNA, 19 nt, Artificial Sequence
  Description of Artificial Sequence: Synthetic oligonucleotide
acauacucgaugcaagaug

SEQ ID NO: 539438 - RNA, 19 nt, Artificial Sequence
  Description of Artificial Sequence: Synthetic oligonucleotide
cuugauauuccauccuuug

SEQ ID NO: 539439 - RNA, 19 nt, Artificial Sequence
  Description of Artificial Sequence: Synthetic oligonucleotide
uuacaaugagacagcuggg

SEQ ID NO: 539440 - RNA, 19 nt, Artificial Sequence
  Description of Artificial Sequence: Synthetic oligonucleotide
aguaacuaggaugguuucc

SEQ ID NO: 539441 - RNA, 19 nt, Artificial Sequence
  Description of Artificial Sequence: Synthetic oligonucleotide
agauaaccaccuuuccugg

SEQ ID NO: 539442 - RNA, 19 nt, Artificial Sequence
  Description of Artificial Sequence: Synthetic oligonucleotide
uauccguuuacacgagugc

SEQ ID NO: 539443 - RNA, 19 nt, Artificial Sequence
  Description of Artificial Sequence: Synthetic oligonucleotide
uucaagugggaacuugcug

SEQ ID NO: 539444 - RNA, 19 nt, Artificial Sequence
  Description of Artificial Sequence: Synthetic oligonucleotide
aacuaggaugguuuccuca

SEQ ID NO: 539445 - RNA, 19 nt, Artificial Sequence
  Description of Artificial Sequence: Synthetic oligonucleotide
gaugcaagaugaaacgggc

SEQ ID NO: 539446 - RNA, 19 nt, Artificial Sequence
  Description of Artificial Sequence: Synthetic oligonucleotide
uauuggaagggcucgucgc

SEQ ID NO: 539447 - RNA, 19 nt, Artificial Sequence
  Description of Artificial Sequence: Synthetic oligonucleotide
gaagcagugguuacguucc

SEQ ID NO: 539448 - RNA, 19 nt, Artificial Sequence
  Description of Artificial Sequence: Synthetic oligonucleotide
aaaccccauaaaccccacc

SEQ ID NO: 539449 - RNA, 19 nt, Artificial Sequence
  Description of Artificial Sequence: Synthetic oligonucleotide
guugauguuggacguuucg

SEQ ID NO: 539450 - RNA, 19 nt, Artificial Sequence
  Description of Artificial Sequence: Synthetic oligonucleotide
ggaauugucaauccaagca

SEQ ID NO: 539451 - RNA, 19 nt, Artificial Sequence
  Description of Artificial Sequence: Synthetic oligonucleotide
uuugaguuacaaugagaca

SEQ ID NO: 539452 - RNA, 19 nt, Artificial Sequence
  Description of Artificial Sequence: Synthetic oligonucleotide
uggacaugcauuccugaug

SEQ ID NO: 539453 - RNA, 19 nt, Artificial Sequence
  Description of Artificial Sequence: Synthetic oligonucleotide
uauaggggaauugucaauc

SEQ ID NO: 539454 - RNA, 19 nt, Artificial Sequence
  Description of Artificial Sequence: Synthetic oligonucleotide
aaaauuccacucagguaac

SEQ ID NO: 539455 - RNA, 19 nt, Artificial Sequence
  Description of Artificial Sequence: Synthetic oligonucleotide
guaauaaagcgcugagccc

SEQ ID NO: 539456 - RNA, 19 nt, Artificial Sequence
  Description of Artificial Sequence: Synthetic oligonucleotide
ucgaugcaagaugaaacgg

SEQ ID NO: 539457 - RNA, 19 nt, Artificial Sequence
  Description of Artificial Sequence: Synthetic oligonucleotide
cuugcuuaguuucucgaug

SEQ ID NO: 539458 - RNA, 19 nt, Artificial Sequence
  Description of Artificial Sequence: Synthetic oligonucleotide
auaaaccccacccaccccu

SEQ ID NO: 539459 - RNA, 19 nt, Artificial Sequence
  Description of Artificial Sequence: Synthetic oligonucleotide
aguaccaucaacccagaua

SEQ ID NO: 539460 - RNA, 19 nt, Artificial Sequence
  Description of Artificial Sequence: Synthetic oligonucleotide
ugaaacgggccacccagag

SEQ ID NO: 539461 - RNA, 19 nt, Artificial Sequence
  Description of Artificial Sequence: Synthetic oligonucleotide
cauacucgaugcaagauga

SEQ ID NO: 539462 - RNA, 19 nt, Artificial Sequence
  Description of Artificial Sequence: Synthetic oligonucleotide
uacuagagccaucaaaauu

SEQ ID NO: 539463 - RNA, 19 nt, Artificial Sequence
  Description of Artificial Sequence: Synthetic oligonucleotide
uggaugaacuaggaaaggc

SEQ ID NO: 539464 - RNA, 19 nt, Artificial Sequence
  Description of Artificial Sequence: Synthetic oligonucleotide
acuaggaaaggcucaagau

SEQ ID NO: 539465 - RNA, 19 nt, Artificial Sequence
  Description of Artificial Sequence: Synthetic oligonucleotide
cccacauaguaauaaagcg

SEQ ID NO: 539466 - RNA, 19 nt, Artificial Sequence
  Description of Artificial Sequence: Synthetic oligonucleotide
ggauuaagaacuugacucc

SEQ ID NO: 539467 - RNA, 19 nt, Artificial Sequence
  Description of Artificial Sequence: Synthetic oligonucleotide
guauuggaagggcucgucg

SEQ ID NO: 539468 - RNA, 19 nt, Artificial Sequence
  Description of Artificial Sequence: Synthetic oligonucleotide
caugcggauuccuucacag

SEQ ID NO: 539469 - RNA, 19 nt, Artificial Sequence
  Description of Artificial Sequence: Synthetic oligonucleotide
auuaccccaaagucuucac

SEQ ID NO: 539470 - RNA, 19 nt, Artificial Sequence
  Description of Artificial Sequence: Synthetic oligonucleotide
uagggauuaagaacuugac

SEQ ID NO: 539471 - RNA, 19 nt, Artificial Sequence
  Description of Artificial Sequence: Synthetic oligonucleotide
uauaucaaaaggccugcuu

SEQ ID NO: 539472 - RNA, 19 nt, Artificial Sequence
  Description of Artificial Sequence: Synthetic oligonucleotide
gaugaacuaggaaaggcuc

SEQ ID NO: 539473 - RNA, 19 nt, Artificial Sequence
  Description of Artificial Sequence: Synthetic oligonucleotide
uggcaaacccaguaacuag

SEQ ID NO: 539474 - RNA, 19 nt, Artificial Sequence
  Description of Artificial Sequence: Synthetic oligonucleotide
uuccgguuguacuugaaaa

SEQ ID NO: 539475 - RNA, 19 nt, Artificial Sequence
  Description of Artificial Sequence: Synthetic oligonucleotide
ugaccucagcauuuguucc

SEQ ID NO: 539476 - RNA, 19 nt, Artificial Sequence
  Description of Artificial Sequence: Synthetic oligonucleotide
cacgagugccuuaaauugg

SEQ ID NO: 539477 - RNA, 19 nt, Artificial Sequence
  Description of Artificial Sequence: Synthetic oligonucleotide
ugaggguuggguguauagg

SEQ ID NO: 539478 - RNA, 19 nt, Artificial Sequence
  Description of Artificial Sequence: Synthetic oligonucleotide
uccacgauaucccugccau

SEQ ID NO: 539479 - RNA, 19 nt, Artificial Sequence
  Description of Artificial Sequence: Synthetic oligonucleotide
cucgucgccagucucauug

SEQ ID NO: 539480 - RNA, 19 nt, Artificial Sequence
  Description of Artificial Sequence: Synthetic oligonucleotide
uaauacggaccuuggggcc

SEQ ID NO: 539481 - RNA, 19 nt, Artificial Sequence
  Description of Artificial Sequence: Synthetic oligonucleotide
gaugguuuccucaauuaga

SEQ ID NO: 539482 - RNA, 19 nt, Artificial Sequence
  Description of Artificial Sequence: Synthetic oligonucleotide
augcaucuuagccuaagca

SEQ ID NO: 539483 - RNA, 19 nt, Artificial Sequence
  Description of Artificial Sequence: Synthetic oligonucleotide
uccgguuguacuugaaaac

SEQ ID NO: 539484 - RNA, 19 nt, Artificial Sequence
  Description of Artificial Sequence: Synthetic oligonucleotide
auagggauuaagaacuuga

SEQ ID NO: 539485 - RNA, 19 nt, Artificial Sequence
  Description of Artificial Sequence: Synthetic oligonucleotide
cacauaguaauaaagcgcu

SEQ ID NO: 539486 - RNA, 19 nt, Artificial Sequence
  Description of Artificial Sequence: Synthetic oligonucleotide
aaguugguuuuaccugaag

SEQ ID NO: 539487 - RNA, 19 nt, Artificial Sequence
  Description of Artificial Sequence: Synthetic oligonucleotide
cacgauaucccugccauag

SEQ ID NO: 539488 - RNA, 19 nt, Artificial Sequence
  Description of Artificial Sequence: Synthetic oligonucleotide
ugaucucccaugcggauuc

SEQ ID NO: 539489 - RNA, 19 nt, Artificial Sequence
  Description of Artificial Sequence: Synthetic oligonucleotide
ugcagcgcaguccuucucc

SEQ ID NO: 539490 - RNA, 19 nt, Artificial Sequence
  Description of Artificial Sequence: Synthetic oligonucleotide
acaauuggcagaggggcgg

SEQ ID NO: 539491 - RNA, 19 nt, Artificial Sequence
  Description of Artificial Sequence: Synthetic oligonucleotide
ucuaccuauaggggaauug

SEQ ID NO: 539492 - RNA, 19 nt, Artificial Sequence
  Description of Artificial Sequence: Synthetic oligonucleotide
ggagcccucagacugaaag

SEQ ID NO: 539493 - RNA, 19 nt, Artificial Sequence
  Description of Artificial Sequence: Synthetic oligonucleotide
uuggacguuucguggaacc

SEQ ID NO: 539494 - RNA, 19 nt, Artificial Sequence
  Description of Artificial Sequence: Synthetic oligonucleotide
aagcugaacuuguuuugcu

SEQ ID NO: 539495 - RNA, 19 nt, Artificial Sequence
  Description of Artificial Sequence: Synthetic oligonucleotide
uuacacgagugccuuaaau

SEQ ID NO: 539496 - RNA, 19 nt, Artificial Sequence
  Description of Artificial Sequence: Synthetic oligonucleotide
acugcgauuggcgacacca

SEQ ID NO: 539497 - RNA, 19 nt, Artificial Sequence
  Description of Artificial Sequence: Synthetic oligonucleotide
cuuuccugguacugcaccc

SEQ ID NO: 539498 - RNA, 19 nt, Artificial Sequence
  Description of Artificial Sequence: Synthetic oligonucleotide
gcuaaaguugguauggcag

SEQ ID NO: 539499 - RNA, 19 nt, Artificial Sequence
  Description of Artificial Sequence: Synthetic oligonucleotide
uuaacuccucaccuaacuu

SEQ ID NO: 539500 - RNA, 19 nt, Artificial Sequence
  Description of Artificial Sequence: Synthetic oligonucleotide
ccuaucaguaacaauguuc

SEQ ID NO: 539501 - RNA, 19 nt, Artificial Sequence
  Description of Artificial Sequence: Synthetic oligonucleotide
guauacuccuguuccauuc

SEQ ID NO: 539502 - RNA, 19 nt, Artificial Sequence
  Description of Artificial Sequence: Synthetic oligonucleotide
uuaacugggcacgaggaau

SEQ ID NO: 539503 - RNA, 19 nt, Artificial Sequence
  Description of Artificial Sequence: Synthetic oligonucleotide
gauuaacugggcacgagga

SEQ ID NO: 539504 - RNA, 19 nt, Artificial Sequence
  Description of Artificial Sequence: Synthetic oligonucleotide
uuaccccaaagucuucaca

SEQ ID NO: 539505 - RNA, 19 nt, Artificial Sequence
  Description of Artificial Sequence: Synthetic oligonucleotide
uacuggacaugcauuccug

SEQ ID NO: 539506 - RNA, 19 nt, Artificial Sequence
  Description of Artificial Sequence: Synthetic oligonucleotide
aagcagugguuacguuccc

SEQ ID NO: 539507 - RNA, 19 nt, Artificial Sequence
  Description of Artificial Sequence: Synthetic oligonucleotide
uauuaccccaaagucuuca

SEQ ID NO: 539508 - RNA, 19 nt, Artificial Sequence
  Description of Artificial Sequence: Synthetic oligonucleotide
ugcgauuggcgacaccagc

SEQ ID NO: 539509 - RNA, 19 nt, Artificial Sequence
  Description of Artificial Sequence: Synthetic oligonucleotide
uaggggaauugucaaucca

SEQ ID NO: 539510 - RNA, 19 nt, Artificial Sequence
  Description of Artificial Sequence: Synthetic oligonucleotide
uccguuuacacgagugccu

SEQ ID NO: 539511 - RNA, 19 nt, Artificial Sequence
  Description of Artificial Sequence: Synthetic oligonucleotide
guaaaguuagaaacccuac

SEQ ID NO: 539512 - RNA, 19 nt, Artificial Sequence
  Description of Artificial Sequence: Synthetic oligonucleotide
cacaauuggcagaggggcg

SEQ ID NO: 539513 - RNA, 19 nt, Artificial Sequence
  Description of Artificial Sequence: Synthetic oligonucleotide
aagauuaacugggcacgag

SEQ ID NO: 539514 - RNA, 19 nt, Artificial Sequence
  Description of Artificial Sequence: Synthetic oligonucleotide
uccuccguuccuccaagag

SEQ ID NO: 539515 - RNA, 19 nt, Artificial Sequence
  Description of Artificial Sequence: Synthetic oligonucleotide
agggugcggguuuugcagc

SEQ ID NO: 539516 - RNA, 19 nt, Artificial Sequence
  Description of Artificial Sequence: Synthetic oligonucleotide
cuacucaagagauccuuuc

SEQ ID NO: 539517 - RNA, 19 nt, Artificial Sequence
  Description of Artificial Sequence: Synthetic oligonucleotide
gcaagauuaacugggcacg

SEQ ID NO: 539518 - RNA, 19 nt, Artificial Sequence
  Description of Artificial Sequence: Synthetic oligonucleotide
agacugaaagguacuagag

SEQ ID NO: 539519 - RNA, 19 nt, Artificial Sequence
  Description of Artificial Sequence: Synthetic oligonucleotide
cugaccaauaaaagcaaga

SEQ ID NO: 539520 - RNA, 19 nt, Artificial Sequence
  Description of Artificial Sequence: Synthetic oligonucleotide
uagccuaagcacagggaca

SEQ ID NO: 539521 - RNA, 19 nt, Artificial Sequence
  Description of Artificial Sequence: Synthetic oligonucleotide
ggcaacagggcugagauac

SEQ ID NO: 539522 - RNA, 19 nt, Artificial Sequence
  Description of Artificial Sequence: Synthetic oligonucleotide
uguccauuauccguuuaca

SEQ ID NO: 539523 - RNA, 19 nt, Artificial Sequence
  Description of Artificial Sequence: Synthetic oligonucleotide
cuuaguuucucgauggccu

SEQ ID NO: 539524 - RNA, 19 nt, Artificial Sequence
  Description of Artificial Sequence: Synthetic oligonucleotide
acaggguccuauuuggaau

SEQ ID NO: 539525 - RNA, 19 nt, Artificial Sequence
  Description of Artificial Sequence: Synthetic oligonucleotide
uugauguuggacguuucgu

SEQ ID NO: 539526 - RNA, 19 nt, Artificial Sequence
  Description of Artificial Sequence: Synthetic oligonucleotide
augcaagaugaaacgggcc

SEQ ID NO: 539527 - RNA, 19 nt, Artificial Sequence
  Description of Artificial Sequence: Synthetic oligonucleotide
auaaaccccauaaacccca

SEQ ID NO: 539528 - RNA, 19 nt, Artificial Sequence
  Description of Artificial Sequence: Synthetic oligonucleotide
uuggaauagaaaguugguu

SEQ ID NO: 539529 - RNA, 19 nt, Artificial Sequence
  Description of Artificial Sequence: Synthetic oligonucleotide
gguguauagggauuaagaa

SEQ ID NO: 539530 - RNA, 19 nt, Artificial Sequence
  Description of Artificial Sequence: Synthetic oligonucleotide
ggaugguuuccucaauuag

SEQ ID NO: 539531 - RNA, 19 nt, Artificial Sequence
  Description of Artificial Sequence: Synthetic oligonucleotide
cagacugaaagguacuaga

SEQ ID NO: 539532 - RNA, 19 nt, Artificial Sequence
  Description of Artificial Sequence: Synthetic oligonucleotide
agaguauacuccuguucca

SEQ ID NO: 539533 - RNA, 19 nt, Artificial Sequence
  Description of Artificial Sequence: Synthetic oligonucleotide
uaaccaccuuuccugguac

SEQ ID NO: 539534 - RNA, 19 nt, Artificial Sequence
  Description of Artificial Sequence: Synthetic oligonucleotide
accagcagaaaagucguug

SEQ ID NO: 539535 - RNA, 19 nt, Artificial Sequence
  Description of Artificial Sequence: Synthetic oligonucleotide
agccuaagcacagggacag

SEQ ID NO: 539536 - RNA, 19 nt, Artificial Sequence
  Description of Artificial Sequence: Synthetic oligonucleotide
ucaaguugaccagccaacu

SEQ ID NO: 539537 - RNA, 19 nt, Artificial Sequence
  Description of Artificial Sequence: Synthetic oligonucleotide
gguacuagagccaucaaaa

SEQ ID NO: 539538 - RNA, 19 nt, Artificial Sequence
  Description of Artificial Sequence: Synthetic oligonucleotide
guccauuauccguuuacac

SEQ ID NO: 539539 - RNA, 19 nt, Artificial Sequence
  Description of Artificial Sequence: Synthetic oligonucleotide
ugaacuaggaaaggcucaa

SEQ ID NO: 539540 - RNA, 19 nt, Artificial Sequence
  Description of Artificial Sequence: Synthetic oligonucleotide
uaccuauaggggaauuguc

SEQ ID NO: 539541 - RNA, 19 nt, Artificial Sequence
  Description of Artificial Sequence: Synthetic oligonucleotide
acccagucagacgacgggc

SEQ ID NO: 539542 - RNA, 19 nt, Artificial Sequence
  Description of Artificial Sequence: Synthetic oligonucleotide
cagggugcggguuuugcag

SEQ ID NO: 539543 - RNA, 19 nt, Artificial Sequence
  Description of Artificial Sequence: Synthetic oligonucleotide
uccucuauucugaccaaua

SEQ ID NO: 539544 - RNA, 19 nt, Artificial Sequence
  Description of Artificial Sequence: Synthetic oligonucleotide
cacaaguacauuugcuuga

SEQ ID NO: 539545 - RNA, 19 nt, Artificial Sequence
  Description of Artificial Sequence: Synthetic oligonucleotide
gaucguaggcucgaaugug

SEQ ID NO: 539546 - RNA, 19 nt, Artificial Sequence
  Description of Artificial Sequence: Synthetic oligonucleotide
uaacugggcacgaggaaua

SEQ ID NO: 539547 - RNA, 19 nt, Artificial Sequence
  Description of Artificial Sequence: Synthetic oligonucleotide
auuaacugggcacgaggaa

SEQ ID NO: 539548 - RNA, 19 nt, Artificial Sequence
  Description of Artificial Sequence: Synthetic oligonucleotide
aucguaggcucgaaugugg

SEQ ID NO: 539549 - RNA, 19 nt, Artificial Sequence
  Description of Artificial Sequence: Synthetic oligonucleotide
gggaucguaggcucgaaug

SEQ ID NO: 539550 - RNA, 19 nt, Artificial Sequence
  Description of Artificial Sequence: Synthetic oligonucleotide
acaggcaauucuguaaagu

SEQ ID NO: 539551 - RNA, 19 nt, Artificial Sequence
  Description of Artificial Sequence: Synthetic oligonucleotide
cauuggaaggccaaccaaa

SEQ ID NO: 539552 - RNA, 19 nt, Artificial Sequence
  Description of Artificial Sequence: Synthetic oligonucleotide
guuucguggaacccaguca

SEQ ID NO: 539553 - RNA, 19 nt, Artificial Sequence
  Description of Artificial Sequence: Synthetic oligonucleotide
cauuauccguuuacacgag

SEQ ID NO: 539554 - RNA, 19 nt, Artificial Sequence
  Description of Artificial Sequence: Synthetic oligonucleotide
auuauccguuuacacgagu

SEQ ID NO: 539555 - RNA, 19 nt, Artificial Sequence
  Description of Artificial Sequence: Synthetic oligonucleotide
auaucccugccauaggcuu

SEQ ID NO: 539556 - RNA, 19 nt, Artificial Sequence
  Description of Artificial Sequence: Synthetic oligonucleotide
ggcaaacccaguaacuagg

SEQ ID NO: 539557 - RNA, 19 nt, Artificial Sequence
  Description of Artificial Sequence: Synthetic oligonucleotide
auacaagcaggcgcgguag

SEQ ID NO: 539558 - RNA, 19 nt, Artificial Sequence
  Description of Artificial Sequence: Synthetic oligonucleotide
gacaguccggggaaugcgg

SEQ ID NO: 539559 - RNA, 19 nt, Artificial Sequence
  Description of Artificial Sequence: Synthetic oligonucleotide
acaugcauuccugaugaga

SEQ ID NO: 539560 - RNA, 19 nt, Artificial Sequence
  Description of Artificial Sequence: Synthetic oligonucleotide
uguccuccguuccuccaag

SEQ ID NO: 539561 - RNA, 19 nt, Artificial Sequence
  Description of Artificial Sequence: Synthetic oligonucleotide
uggguguauagggauuaag

SEQ ID NO: 539562 - RNA, 19 nt, Artificial Sequence
  Description of Artificial Sequence: Synthetic oligonucleotide
accugaagaacuagcagcu

SEQ ID NO: 539563 - RNA, 19 nt, Artificial Sequence
  Description of Artificial Sequence: Synthetic oligonucleotide
gacguuucguggaacccag

SEQ ID NO: 539564 - RNA, 19 nt, Artificial Sequence
  Description of Artificial Sequence: Synthetic oligonucleotide
agucagacgacgggcauug

SEQ ID NO: 539565 - RNA, 19 nt, Artificial Sequence
  Description of Artificial Sequence: Synthetic oligonucleotide
acccaccccuaucaguaac

SEQ ID NO: 539566 - RNA, 19 nt, Artificial Sequence
  Description of Artificial Sequence: Synthetic oligonucleotide
uguuggacguuucguggaa

SEQ ID NO: 539567 - RNA, 19 nt, Artificial Sequence
  Description of Artificial Sequence: Synthetic oligonucleotide
acgauaucccugccauagg

SEQ ID NO: 539568 - RNA, 19 nt, Artificial Sequence
  Description of Artificial Sequence: Synthetic oligonucleotide
cugggcacgaggaauaaaa

SEQ ID NO: 539569 - RNA, 19 nt, Artificial Sequence
  Description of Artificial Sequence: Synthetic oligonucleotide
gcuaacucuguguggauac

SEQ ID NO: 539570 - RNA, 19 nt, Artificial Sequence
  Description of Artificial Sequence: Synthetic oligonucleotide
aaagaccuugauauuccau

SEQ ID NO: 539571 - RNA, 19 nt, Artificial Sequence
  Description of Artificial Sequence: Synthetic oligonucleotide
aguugguauggcagccugc

SEQ ID NO: 539572 - RNA, 19 nt, Artificial Sequence
  Description of Artificial Sequence: Synthetic oligonucleotide
cugagccccagauaaccac

SEQ ID NO: 539573 - RNA, 19 nt, Artificial Sequence
  Description of Artificial Sequence: Synthetic oligonucleotide
ccgaaacauggcaacaggg

SEQ ID NO: 539574 - RNA, 19 nt, Artificial Sequence
  Description of Artificial Sequence: Synthetic oligonucleotide
ugcaccauuccaguuccca

SEQ ID NO: 539575 - RNA, 19 nt, Artificial Sequence
  Description of Artificial Sequence: Synthetic oligonucleotide
aggaugguuuccucaauua

SEQ ID NO: 539576 - RNA, 19 nt, Artificial Sequence
  Description of Artificial Sequence: Synthetic oligonucleotide
uaggcucgaaugugguacc

SEQ ID NO: 539577 - RNA, 19 nt, Artificial Sequence
  Description of Artificial Sequence: Synthetic oligonucleotide
gaaggggucccgaaacaug

SEQ ID NO: 539578 - RNA, 19 nt, Artificial Sequence
  Description of Artificial Sequence: Synthetic oligonucleotide
gugguuacguucccuuccc

SEQ ID NO: 539579 - RNA, 19 nt, Artificial Sequence
  Description of Artificial Sequence: Synthetic oligonucleotide
gagugccuuaaauuggucu

SEQ ID NO: 539580 - RNA, 19 nt, Artificial Sequence
  Description of Artificial Sequence: Synthetic oligonucleotide
caugcauuccugaugagau

SEQ ID NO: 539581 - RNA, 19 nt, Artificial Sequence
  Description of Artificial Sequence: Synthetic oligonucleotide
gugagccuccacgauaucc

SEQ ID NO: 539582 - RNA, 19 nt, Artificial Sequence
  Description of Artificial Sequence: Synthetic oligonucleotide
acguucccuuccccuaccc

SEQ ID NO: 539583 - RNA, 19 nt, Artificial Sequence
  Description of Artificial Sequence: Synthetic oligonucleotide
aauaaagcgcugagcccca

SEQ ID NO: 539584 - RNA, 19 nt, Artificial Sequence
  Description of Artificial Sequence: Synthetic oligonucleotide
cuuagccuaagcacaggga

SEQ ID NO: 539585 - RNA, 19 nt, Artificial Sequence
  Description of Artificial Sequence: Synthetic oligonucleotide
ucugccuacuggacaugca

SEQ ID NO: 539586 - RNA, 19 nt, Artificial Sequence
  Description of Artificial Sequence: Synthetic oligonucleotide
agcgcaguccuucuccagu

SEQ ID NO: 539587 - RNA, 19 nt, Artificial Sequence
  Description of Artificial Sequence: Synthetic oligonucleotide
ucguaggcucgaauguggu

SEQ ID NO: 539588 - RNA, 19 nt, Artificial Sequence
  Description of Artificial Sequence: Synthetic oligonucleotide
augaacuaggaaaggcuca

SEQ ID NO: 539589 - RNA, 19 nt, Artificial Sequence
  Description of Artificial Sequence: Synthetic oligonucleotide
cucgaaugugguaccggug

SEQ ID NO: 539590 - RNA, 19 nt, Artificial Sequence
  Description of Artificial Sequence: Synthetic oligonucleotide
uuucucacccuggggcagg

SEQ ID NO: 539591 - RNA, 19 nt, Artificial Sequence
  Description of Artificial Sequence: Synthetic oligonucleotide
uuuacacgagugccuuaaa

SEQ ID NO: 539592 - RNA, 19 nt, Artificial Sequence
  Description of Artificial Sequence: Synthetic oligonucleotide
gaugaagcagugguuacgu

SEQ ID NO: 539593 - RNA, 19 nt, Artificial Sequence
  Description of Artificial Sequence: Synthetic oligonucleotide
cuuuagugacaugcuaguc

SEQ ID NO: 539594 - RNA, 19 nt, Artificial Sequence
  Description of Artificial Sequence: Synthetic oligonucleotide
uaaaccccauaaaccccac

SEQ ID NO: 539595 - RNA, 19 nt, Artificial Sequence
  Description of Artificial Sequence: Synthetic oligonucleotide
uggacguuucguggaaccc

SEQ ID NO: 539596 - RNA, 19 nt, Artificial Sequence
  Description of Artificial Sequence: Synthetic oligonucleotide
agaucacucaaagucuaau

SEQ ID NO: 539597 - RNA, 19 nt, Artificial Sequence
  Description of Artificial Sequence: Synthetic oligonucleotide
caguaacuaggaugguuuc

SEQ ID NO: 539598 - RNA, 19 nt, Artificial Sequence
  Description of Artificial Sequence: Synthetic oligonucleotide
auuggcgacaccagcagaa

SEQ ID NO: 539599 - RNA, 19 nt, Artificial Sequence
  Description of Artificial Sequence: Synthetic oligonucleotide
guugguauggcagccugca

SEQ ID NO: 539600 - RNA, 19 nt, Artificial Sequence
  Description of Artificial Sequence: Synthetic oligonucleotide
uguauuggaagggcucguc

SEQ ID NO: 539601 - RNA, 19 nt, Artificial Sequence
  Description of Artificial Sequence: Synthetic oligonucleotide
auuggaaggccaaccaaaa

SEQ ID NO: 539602 - RNA, 19 nt, Artificial Sequence
  Description of Artificial Sequence: Synthetic oligonucleotide
ugccuuaaauuggucucug

SEQ ID NO: 539603 - RNA, 19 nt, Artificial Sequence
  Description of Artificial Sequence: Synthetic oligonucleotide
uaacuaggaugguuuccuc

SEQ ID NO: 539604 - RNA, 19 nt, Artificial Sequence
  Description of Artificial Sequence: Synthetic oligonucleotide
gauuggcgacaccagcaga

SEQ ID NO: 539605 - RNA, 19 nt, Artificial Sequence
  Description of Artificial Sequence: Synthetic oligonucleotide
acucaaagucuaauuaguu

SEQ ID NO: 539606 - RNA, 19 nt, Artificial Sequence
  Description of Artificial Sequence: Synthetic oligonucleotide
guuuacacgagugccuuaa

SEQ ID NO: 539607 - RNA, 19 nt, Artificial Sequence
  Description of Artificial Sequence: Synthetic oligonucleotide
aaaguugguuuuaccugaa

SEQ ID NO: 539608 - RNA, 19 nt, Artificial Sequence
  Description of Artificial Sequence: Synthetic oligonucleotide
ugguuacguucccuucccc

SEQ ID NO: 539609 - RNA, 19 nt, Artificial Sequence
  Description of Artificial Sequence: Synthetic oligonucleotide
aggggaauugucaauccaa

SEQ ID NO: 539610 - RNA, 19 nt, Artificial Sequence
  Description of Artificial Sequence: Synthetic oligonucleotide
ggggaauugucaauccaag

SEQ ID NO: 539611 - RNA, 19 nt, Artificial Sequence
  Description of Artificial Sequence: Synthetic oligonucleotide
ggguguauagggauuaaga

SEQ ID NO: 539612 - RNA, 19 nt, Artificial Sequence
  Description of Artificial Sequence: Synthetic oligonucleotide
cuguaaucuugaccccagc

SEQ ID NO: 539613 - RNA, 19 nt, Artificial Sequence
  Description of Artificial Sequence: Synthetic oligonucleotide
guagugagccuccacgaua

SEQ ID NO: 539614 - RNA, 19 nt, Artificial Sequence
  Description of Artificial Sequence: Synthetic oligonucleotide
augugcggacgauggcuuc

SEQ ID NO: 539615 - RNA, 19 nt, Artificial Sequence
  Description of Artificial Sequence: Synthetic oligonucleotide
ccuuaaauuggucucugca

SEQ ID NO: 539616 - RNA, 19 nt, Artificial Sequence
  Description of Artificial Sequence: Synthetic oligonucleotide
gagauccuuucuuguuaac

SEQ ID NO: 539617 - RNA, 19 nt, Artificial Sequence
  Description of Artificial Sequence: Synthetic oligonucleotide
uuccccuaccccucccacc

SEQ ID NO: 539618 - RNA, 19 nt, Artificial Sequence
  Description of Artificial Sequence: Synthetic oligonucleotide
agggcucgucgccagucuc

SEQ ID NO: 539619 - RNA, 19 nt, Artificial Sequence
  Description of Artificial Sequence: Synthetic oligonucleotide
gaaacgggccacccagaga

SEQ ID NO: 539620 - RNA, 19 nt, Artificial Sequence
  Description of Artificial Sequence: Synthetic oligonucleotide
acgagugccuuaaauuggu

SEQ ID NO: 539621 - RNA, 19 nt, Artificial Sequence
  Description of Artificial Sequence: Synthetic oligonucleotide
ugucugcgcccacaccaca

SEQ ID NO: 539622 - RNA, 19 nt, Artificial Sequence
  Description of Artificial Sequence: Synthetic oligonucleotide
cucugccuacuggacaugc

SEQ ID NO: 539623 - RNA, 19 nt, Artificial Sequence
  Description of Artificial Sequence: Synthetic oligonucleotide
gcucucuaccuauagggga

SEQ ID NO: 539624 - RNA, 19 nt, Artificial Sequence
  Description of Artificial Sequence: Synthetic oligonucleotide
ugcuaacucuguguggaua

SEQ ID NO: 539625 - RNA, 19 nt, Artificial Sequence
  Description of Artificial Sequence: Synthetic oligonucleotide
cugcgauuggcgacaccag

SEQ ID NO: 539626 - RNA, 19 nt, Artificial Sequence
  Description of Artificial Sequence: Synthetic oligonucleotide
cuauuaccccaaagucuuc

SEQ ID NO: 539627 - RNA, 19 nt, Artificial Sequence
  Description of Artificial Sequence: Synthetic oligonucleotide
ugugcggacgauggcuucu

SEQ ID NO: 539628 - RNA, 19 nt, Artificial Sequence
  Description of Artificial Sequence: Synthetic oligonucleotide
agcauacaagcaggcgcgg

SEQ ID NO: 539629 - RNA, 19 nt, Artificial Sequence
  Description of Artificial Sequence: Synthetic oligonucleotide
ugggaucguaggcucgaau

SEQ ID NO: 539630 - RNA, 19 nt, Artificial Sequence
  Description of Artificial Sequence: Synthetic oligonucleotide
aguccggggaaugcggaug

SEQ ID NO: 539631 - RNA, 19 nt, Artificial Sequence
  Description of Artificial Sequence: Synthetic oligonucleotide
ccccaaagucuucacauac

SEQ ID NO: 539632 - RNA, 19 nt, Artificial Sequence
  Description of Artificial Sequence: Synthetic oligonucleotide
ugugguaccggugccgcuu

SEQ ID NO: 539633 - RNA, 19 nt, Artificial Sequence
  Description of Artificial Sequence: Synthetic oligonucleotide
ggucccgaaacauggcaac

SEQ ID NO: 539634 - RNA, 19 nt, Artificial Sequence
  Description of Artificial Sequence: Synthetic oligonucleotide
ccuguaaucuugaccccag

SEQ ID NO: 539635 - RNA, 19 nt, Artificial Sequence
  Description of Artificial Sequence: Synthetic oligonucleotide
cccauaaaccccacccacc

SEQ ID NO: 539636 - RNA, 19 nt, Artificial Sequence
  Description of Artificial Sequence: Synthetic oligonucleotide
agugagccuccacgauauc

SEQ ID NO: 539637 - RNA, 19 nt, Artificial Sequence
  Description of Artificial Sequence: Synthetic oligonucleotide
gauaucccugccauaggcu

SEQ ID NO: 539638 - RNA, 19 nt, Artificial Sequence
  Description of Artificial Sequence: Synthetic oligonucleotide
gaugugcuucagaccauuc

SEQ ID NO: 539639 - RNA, 19 nt, Artificial Sequence
  Description of Artificial Sequence: Synthetic oligonucleotide
gcggggauggaugaacuag

SEQ ID NO: 539640 - RNA, 19 nt, Artificial Sequence
  Description of Artificial Sequence: Synthetic oligonucleotide
cauacaagcaggcgcggua

SEQ ID NO: 539641 - RNA, 19 nt, Artificial Sequence
  Description of Artificial Sequence: Synthetic oligonucleotide
gaucucugcggaagggguc

SEQ ID NO: 539642 - RNA, 19 nt, Artificial Sequence
  Description of Artificial Sequence: Synthetic oligonucleotide
cauccugcuaacucugugu

SEQ ID NO: 539643 - RNA, 19 nt, Artificial Sequence
  Description of Artificial Sequence: Synthetic oligonucleotide
gcaggcgcgguagugagcc

SEQ ID NO: 539644 - RNA, 19 nt, Artificial Sequence
  Description of Artificial Sequence: Synthetic oligonucleotide
aggcgcgguagugagccuc

SEQ ID NO: 539645 - RNA, 19 nt, Artificial Sequence
  Description of Artificial Sequence: Synthetic oligonucleotide
ucgucgccagucucauuga

SEQ ID NO: 539646 - RNA, 19 nt, Artificial Sequence
  Description of Artificial Sequence: Synthetic oligonucleotide
cuaccuauaggggaauugu

SEQ ID NO: 539647 - RNA, 19 nt, Artificial Sequence
  Description of Artificial Sequence: Synthetic oligonucleotide
ggguuuugcagcgcagucc

SEQ ID NO: 539648 - RNA, 19 nt, Artificial Sequence
  Description of Artificial Sequence: Synthetic oligonucleotide
gauggacgggguggacagg

SEQ ID NO: 539649 - RNA, 19 nt, Artificial Sequence
  Description of Artificial Sequence: Synthetic oligonucleotide
guacauuugcuugauguuu

SEQ ID NO: 539650 - RNA, 19 nt, Artificial Sequence
  Description of Artificial Sequence: Synthetic oligonucleotide
aggcucgaaugugguaccg

SEQ ID NO: 539651 - RNA, 19 nt, Artificial Sequence
  Description of Artificial Sequence: Synthetic oligonucleotide
gaugaucucccaugcggau

SEQ ID NO: 539652 - RNA, 19 nt, Artificial Sequence
  Description of Artificial Sequence: Synthetic oligonucleotide
uccguuccuccaagagcca

SEQ ID NO: 539653 - RNA, 19 nt, Artificial Sequence
  Description of Artificial Sequence: Synthetic oligonucleotide
caagauuaacugggcacga

SEQ ID NO: 539654 - RNA, 19 nt, Artificial Sequence
  Description of Artificial Sequence: Synthetic oligonucleotide
aacugggcacgaggaauaa

SEQ ID NO: 539655 - RNA, 19 nt, Artificial Sequence
  Description of Artificial Sequence: Synthetic oligonucleotide
caauuggcagaggggcggc

SEQ ID NO: 539656 - RNA, 19 nt, Artificial Sequence
  Description of Artificial Sequence: Synthetic oligonucleotide
ggaugaacuaggaaaggcu

SEQ ID NO: 539657 - RNA, 19 nt, Artificial Sequence
  Description of Artificial Sequence: Synthetic oligonucleotide
gaaggugcucugagcggug

SEQ ID NO: 539658 - RNA, 19 nt, Artificial Sequence
  Description of Artificial Sequence: Synthetic oligonucleotide
augagaugaagcagugguu

SEQ ID NO: 539659 - RNA, 19 nt, Artificial Sequence
  Description of Artificial Sequence: Synthetic oligonucleotide
gccauuggaaggccaacca

SEQ ID NO: 539660 - RNA, 19 nt, Artificial Sequence
  Description of Artificial Sequence: Synthetic oligonucleotide
ucucuaccuauaggggaau

SEQ ID NO: 539661 - RNA, 19 nt, Artificial Sequence
  Description of Artificial Sequence: Synthetic oligonucleotide
gaauucccacugggcaggc

SEQ ID NO: 539662 - RNA, 19 nt, Artificial Sequence
  Description of Artificial Sequence: Synthetic oligonucleotide
uuggcgacaccagcagaaa

SEQ ID NO: 539663 - RNA, 19 nt, Artificial Sequence
  Description of Artificial Sequence: Synthetic oligonucleotide
ggaucguaggcucgaaugu

SEQ ID NO: 539664 - RNA, 19 nt, Artificial Sequence
  Description of Artificial Sequence: Synthetic oligonucleotide
caccucuacucaagagauc

SEQ ID NO: 539665 - RNA, 19 nt, Artificial Sequence
  Description of Artificial Sequence: Synthetic oligonucleotide
gccuuaaauuggucucugc

SEQ ID NO: 539666 - RNA, 19 nt, Artificial Sequence
  Description of Artificial Sequence: Synthetic oligonucleotide
cccagauaaccaccuuucc

SEQ ID NO: 539667 - RNA, 19 nt, Artificial Sequence
  Description of Artificial Sequence: Synthetic oligonucleotide
ccugcuaacucugugugga

SEQ ID NO: 539668 - RNA, 19 nt, Artificial Sequence
  Description of Artificial Sequence: Synthetic oligonucleotide
acccuacaaaguugauuua

SEQ ID NO: 539669 - RNA, 19 nt, Artificial Sequence
  Description of Artificial Sequence: Synthetic oligonucleotide
ggggaaugcggaugcuggc

SEQ ID NO: 539670 - RNA, 19 nt, Artificial Sequence
  Description of Artificial Sequence: Synthetic oligonucleotide
uuggguguauagggauuaa

SEQ ID NO: 539671 - RNA, 19 nt, Artificial Sequence
  Description of Artificial Sequence: Synthetic oligonucleotide
ggcucgaaugugguaccgg

SEQ ID NO: 539672 - RNA, 19 nt, Artificial Sequence
  Description of Artificial Sequence: Synthetic oligonucleotide
gugguaccggugccgcuug

SEQ ID NO: 539673 - RNA, 19 nt, Artificial Sequence
  Description of Artificial Sequence: Synthetic oligonucleotide
caagagauccuuucuuguu

SEQ ID NO: 539674 - RNA, 19 nt, Artificial Sequence
  Description of Artificial Sequence: Synthetic oligonucleotide
gucgccagucucauugaga

SEQ ID NO: 539675 - RNA, 19 nt, Artificial Sequence
  Description of Artificial Sequence: Synthetic oligonucleotide
ccaucaacccagauauaca

SEQ ID NO: 539676 - RNA, 19 nt, Artificial Sequence
  Description of Artificial Sequence: Synthetic oligonucleotide
auaaagcgcugagccccag

SEQ ID NO: 539677 - RNA, 19 nt, Artificial Sequence
  Description of Artificial Sequence: Synthetic oligonucleotide
cagcgcaguccuucuccag

SEQ ID NO: 539678 - RNA, 19 nt, Artificial Sequence
  Description of Artificial Sequence: Synthetic oligonucleotide
ggggucccgaaacauggca

SEQ ID NO: 539679 - RNA, 19 nt, Artificial Sequence
  Description of Artificial Sequence: Synthetic oligonucleotide
ccaaccaaaagggugccca

SEQ ID NO: 539680 - RNA, 19 nt, Artificial Sequence
  Description of Artificial Sequence: Synthetic oligonucleotide
gguuacguucccuuccccu

SEQ ID NO: 539681 - RNA, 19 nt, Artificial Sequence
  Description of Artificial Sequence: Synthetic oligonucleotide
ggacguuucguggaaccca

SEQ ID NO: 539682 - RNA, 19 nt, Artificial Sequence
  Description of Artificial Sequence: Synthetic oligonucleotide
ggcaugaccucagcauuug

SEQ ID NO: 539683 - RNA, 19 nt, Artificial Sequence
  Description of Artificial Sequence: Synthetic oligonucleotide
cuaacucuguguggauaca

SEQ ID NO: 539684 - RNA, 19 nt, Artificial Sequence
  Description of Artificial Sequence: Synthetic oligonucleotide
acaguccggggaaugcgga

SEQ ID NO: 539685 - RNA, 19 nt, Artificial Sequence
  Description of Artificial Sequence: Synthetic oligonucleotide
ugguaccggugccgcuugc

SEQ ID NO: 539686 - RNA, 19 nt, Artificial Sequence
  Description of Artificial Sequence: Synthetic oligonucleotide
cacugcaaaggggucacaa

SEQ ID NO: 539687 - RNA, 19 nt, Artificial Sequence
  Description of Artificial Sequence: Synthetic oligonucleotide
augugguaccggugccgcu

SEQ ID NO: 539688 - RNA, 19 nt, Artificial Sequence
  Description of Artificial Sequence: Synthetic oligonucleotide
gggucaaagguugcuauua

SEQ ID NO: 539689 - RNA, 19 nt, Artificial Sequence
  Description of Artificial Sequence: Synthetic oligonucleotide
gcaagcacuggugucccac

SEQ ID NO: 539690 - RNA, 19 nt, Artificial Sequence
  Description of Artificial Sequence: Synthetic oligonucleotide
augaaacgggccacccaga

SEQ ID NO: 539691 - RNA, 19 nt, Artificial Sequence
  Description of Artificial Sequence: Synthetic oligonucleotide
cucagacugaaagguacua

SEQ ID NO: 539692 - RNA, 19 nt, Artificial Sequence
  Description of Artificial Sequence: Synthetic oligonucleotide
gcggucuucaaaguaaccu

SEQ ID NO: 539693 - RNA, 19 nt, Artificial Sequence
  Description of Artificial Sequence: Synthetic oligonucleotide
cauaugcaucuuagccuaa

SEQ ID NO: 539694 - RNA, 19 nt, Artificial Sequence
  Description of Artificial Sequence: Synthetic oligonucleotide
ggguccuauuuggaauucc

SEQ ID NO: 539695 - RNA, 19 nt, Artificial Sequence
  Description of Artificial Sequence: Synthetic oligonucleotide
cguuucguggaacccaguc

SEQ ID NO: 539696 - RNA, 19 nt, Artificial Sequence
  Description of Artificial Sequence: Synthetic oligonucleotide
gcgauuggcgacaccagca

SEQ ID NO: 539697 - RNA, 19 nt, Artificial Sequence
  Description of Artificial Sequence: Synthetic oligonucleotide
cugcaccauuccaguuccc

SEQ ID NO: 539698 - RNA, 19 nt, Artificial Sequence
  Description of Artificial Sequence: Synthetic oligonucleotide
cgauuggcgacaccagcag

SEQ ID NO: 539699 - RNA, 19 nt, Artificial Sequence
  Description of Artificial Sequence: Synthetic oligonucleotide
aggcaugaccucagcauuu

SEQ ID NO: 539700 - RNA, 19 nt, Artificial Sequence
  Description of Artificial Sequence: Synthetic oligonucleotide
gggaaugcggaugcuggca

SEQ ID NO: 539701 - RNA, 19 nt, Artificial Sequence
  Description of Artificial Sequence: Synthetic oligonucleotide
aggagacacuagaaacaaa

SEQ ID NO: 539702 - RNA, 19 nt, Artificial Sequence
  Description of Artificial Sequence: Synthetic oligonucleotide
cugccuacuggacaugcau

SEQ ID NO: 539703 - RNA, 19 nt, Artificial Sequence
  Description of Artificial Sequence: Synthetic oligonucleotide
ccaacuccauccugcuaac

SEQ ID NO: 539704 - RNA, 19 nt, Artificial Sequence
  Description of Artificial Sequence: Synthetic oligonucleotide
auacggaccuuggggccca

SEQ ID NO: 539705 - RNA, 19 nt, Artificial Sequence
  Description of Artificial Sequence: Synthetic oligonucleotide
auacucgaugcaagaugaa

SEQ ID NO: 539706 - RNA, 19 nt, Artificial Sequence
  Description of Artificial Sequence: Synthetic oligonucleotide
cucugcggaaggggucccg

SEQ ID NO: 539707 - RNA, 19 nt, Artificial Sequence
  Description of Artificial Sequence: Synthetic oligonucleotide
ccagauaaccaccuuuccu

SEQ ID NO: 539708 - RNA, 19 nt, Artificial Sequence
  Description of Artificial Sequence: Synthetic oligonucleotide
ccaaaagggugcccaucug

SEQ ID NO: 539709 - RNA, 19 nt, Artificial Sequence
  Description of Artificial Sequence: Synthetic oligonucleotide
ggcggucuucaaaguaacc

SEQ ID NO: 539710 - RNA, 19 nt, Artificial Sequence
  Description of Artificial Sequence: Synthetic oligonucleotide
gcucgaaugugguaccggu

SEQ ID NO: 539711 - RNA, 19 nt, Artificial Sequence
  Description of Artificial Sequence: Synthetic oligonucleotide
cgcugagccccagauaacc

SEQ ID NO: 539712 - RNA, 19 nt, Artificial Sequence
  Description of Artificial Sequence: Synthetic oligonucleotide
cagucucauugagaaggca

SEQ ID NO: 539713 - RNA, 19 nt, Artificial Sequence
  Description of Artificial Sequence: Synthetic oligonucleotide
ggggauggaugaacuagga

SEQ ID NO: 539714 - RNA, 19 nt, Artificial Sequence
  Description of Artificial Sequence: Synthetic oligonucleotide
caggguccuauuuggaauu

SEQ ID NO: 539715 - RNA, 19 nt, Artificial Sequence
  Description of Artificial Sequence: Synthetic oligonucleotide
ggaaggugcucugagcggu

SEQ ID NO: 539716 - RNA, 19 nt, Artificial Sequence
  Description of Artificial Sequence: Synthetic oligonucleotide
gcggacgauggcuucuguc

SEQ ID NO: 539717 - RNA, 19 nt, Artificial Sequence
  Description of Artificial Sequence: Synthetic oligonucleotide
caugugcggacgauggcuu

SEQ ID NO: 539718 - RNA, 19 nt, Artificial Sequence
  Description of Artificial Sequence: Synthetic oligonucleotide
cacugcgauuggcgacacc

SEQ ID NO: 539719 - RNA, 19 nt, Artificial Sequence
  Description of Artificial Sequence: Synthetic oligonucleotide
gggaaaccccacauaguaa

SEQ ID NO: 539720 - RNA, 19 nt, Artificial Sequence
  Description of Artificial Sequence: Synthetic oligonucleotide
cacauacucgaugcaagau

SEQ ID NO: 539721 - RNA, 19 nt, Artificial Sequence
  Description of Artificial Sequence: Synthetic oligonucleotide
gguaacucuucuacacacu

SEQ ID NO: 539722 - RNA, 19 nt, Artificial Sequence
  Description of Artificial Sequence: Synthetic oligonucleotide
ccauuggaaggccaaccaa

SEQ ID NO: 539723 - RNA, 19 nt, Artificial Sequence
  Description of Artificial Sequence: Synthetic oligonucleotide
gcaugugcggacgauggcu

SEQ ID NO: 539724 - RNA, 19 nt, Artificial Sequence
  Description of Artificial Sequence: Synthetic oligonucleotide
ccgacaguccggggaaugc

SEQ ID NO: 539725 - RNA, 19 nt, Artificial Sequence
  Description of Artificial Sequence: Synthetic oligonucleotide
gguagugagccuccacgau

SEQ ID NO: 539726 - RNA, 19 nt, Artificial Sequence
  Description of Artificial Sequence: Synthetic oligonucleotide
gcggcggucuucaaaguaa

SEQ ID NO: 539727 - RNA, 19 nt, Artificial Sequence
  Description of Artificial Sequence: Synthetic oligonucleotide
guauagggauuaagaacuu

SEQ ID NO: 539728 - RNA, 19 nt, Artificial Sequence
  Description of Artificial Sequence: Synthetic oligonucleotide
cuaggaugguuuccucaau

SEQ ID NO: 539729 - RNA, 19 nt, Artificial Sequence
  Description of Artificial Sequence: Synthetic oligonucleotide
acccaguaacuaggauggu

SEQ ID NO: 539730 - RNA, 19 nt, Artificial Sequence
  Description of Artificial Sequence: Synthetic oligonucleotide
cgacaguccggggaaugcg

SEQ ID NO: 539731 - RNA, 19 nt, Artificial Sequence
  Description of Artificial Sequence: Synthetic oligonucleotide
cccacccugcuaccugucc

SEQ ID NO: 539732 - RNA, 19 nt, Artificial Sequence
  Description of Artificial Sequence: Synthetic oligonucleotide
ggcgcgguagugagccucc

SEQ ID NO: 539733 - RNA, 19 nt, Artificial Sequence
  Description of Artificial Sequence: Synthetic oligonucleotide
gggucccgaaacauggcaa

SEQ ID NO: 539734 - RNA, 19 nt, Artificial Sequence
  Description of Artificial Sequence: Synthetic oligonucleotide
ccgguuguacuugaaaacu

SEQ ID NO: 539735 - RNA, 19 nt, Artificial Sequence
  Description of Artificial Sequence: Synthetic oligonucleotide
cgacaccagcagaaaaguc

SEQ ID NO: 539736 - RNA, 19 nt, Artificial Sequence
  Description of Artificial Sequence: Synthetic oligonucleotide
gccaaccaaaagggugccc

SEQ ID NO: 539737 - RNA, 19 nt, Artificial Sequence
  Description of Artificial Sequence: Synthetic oligonucleotide
cggcggucuucaaaguaac

SEQ ID NO: 539738 - RNA, 19 nt, Artificial Sequence
  Description of Artificial Sequence: Synthetic oligonucleotide
ggugccgcuugcuuaguuu

SEQ ID NO: 539739 - RNA, 19 nt, Artificial Sequence
  Description of Artificial Sequence: Synthetic oligonucleotide
ccccuaucaguaacaaugu

SEQ ID NO: 539740 - RNA, 19 nt, Artificial Sequence
  Description of Artificial Sequence: Synthetic oligonucleotide
cguugauguuggacguuuc

SEQ ID NO: 539741 - RNA, 19 nt, Artificial Sequence
  Description of Artificial Sequence: Synthetic oligonucleotide
ggcuuugucugcgcccaca

SEQ ID NO: 539742 - RNA, 19 nt, Artificial Sequence
  Description of Artificial Sequence: Synthetic oligonucleotide
ccacccugcuaccugucca

SEQ ID NO: 539743 - RNA, 19 nt, Artificial Sequence
  Description of Artificial Sequence: Synthetic oligonucleotide
acguuucguggaacccagu

SEQ ID NO: 539744 - RNA, 19 nt, Artificial Sequence
  Description of Artificial Sequence: Synthetic oligonucleotide
cgguagugagccuccacga

SEQ ID NO: 539745 - RNA, 19 nt, Artificial Sequence
  Description of Artificial Sequence: Synthetic oligonucleotide
ccggggaaugcggaugcug

SEQ ID NO: 539746 - RNA, 19 nt, Artificial Sequence
  Description of Artificial Sequence: Synthetic oligonucleotide
ggaaggggucccgaaacau

SEQ ID NO: 539747 - RNA, 19 nt, Artificial Sequence
  Description of Artificial Sequence: Synthetic oligonucleotide
cgucgccagucucauugag

SEQ ID NO: 539748 - RNA, 19 nt, Artificial Sequence
  Description of Artificial Sequence: Synthetic oligonucleotide
ccaugcggauuccuucaca

SEQ ID NO: 539749 - RNA, 19 nt, Artificial Sequence
  Description of Artificial Sequence: Synthetic oligonucleotide
cgagugccuuaaauugguc

SEQ ID NO: 539750 - RNA, 19 nt, Artificial Sequence
  Description of Artificial Sequence: Synthetic oligonucleotide
gcgcaguccuucuccagua

SEQ ID NO: 539751 - RNA, 19 nt, Artificial Sequence
  Description of Artificial Sequence: Synthetic oligonucleotide
ggcggggauggaugaacua

SEQ ID NO: 539752 - RNA, 19 nt, Artificial Sequence
  Description of Artificial Sequence: Synthetic oligonucleotide
uacggaccuuggggcccag

SEQ ID NO: 539753 - RNA, 19 nt, Artificial Sequence
  Description of Artificial Sequence: Synthetic oligonucleotide
ccucagacugaaagguacu

SEQ ID NO: 539754 - RNA, 19 nt, Artificial Sequence
  Description of Artificial Sequence: Synthetic oligonucleotide
cccugcuaccuguccagca

SEQ ID NO: 539755 - RNA, 19 nt, Artificial Sequence
  Description of Artificial Sequence: Synthetic oligonucleotide
caccccuaucaguaacaau

SEQ ID NO: 539756 - RNA, 19 nt, Artificial Sequence
  Description of Artificial Sequence: Synthetic oligonucleotide
ggugcugguugcucaccau

SEQ ID NO: 539757 - RNA, 19 nt, Artificial Sequence
  Description of Artificial Sequence: Synthetic oligonucleotide
gcggauuccuucacagggu

SEQ ID NO: 539758 - RNA, 19 nt, Artificial Sequence
  Description of Artificial Sequence: Synthetic oligonucleotide
guugaccagccaacuccau

SEQ ID NO: 539759 - RNA, 19 nt, Artificial Sequence
  Description of Artificial Sequence: Synthetic oligonucleotide
caguccggggaaugcggau

SEQ ID NO: 539760 - RNA, 19 nt, Artificial Sequence
  Description of Artificial Sequence: Synthetic oligonucleotide
caacuccauccugcuaacu

SEQ ID NO: 539761 - RNA, 19 nt, Artificial Sequence
  Description of Artificial Sequence: Synthetic oligonucleotide
gcauacaagcaggcgcggu

SEQ ID NO: 539762 - RNA, 19 nt, Artificial Sequence
  Description of Artificial Sequence: Synthetic oligonucleotide
gguaccggugccgcuugcu

SEQ ID NO: 539763 - RNA, 19 nt, Artificial Sequence
  Description of Artificial Sequence: Synthetic oligonucleotide
gcggguuuugcagcgcagu

SEQ ID NO: 539764 - RNA, 19 nt, Artificial Sequence
  Description of Artificial Sequence: Synthetic oligonucleotide
ccaccccuaucaguaacaa

SEQ ID NO: 539765 - RNA, 19 nt, Artificial Sequence
  Description of Artificial Sequence: Synthetic oligonucleotide
gcacugcgauuggcgacac

SEQ ID NO: 539766 - RNA, 19 nt, Artificial Sequence
  Description of Artificial Sequence: Synthetic oligonucleotide
cucuaccuauaggggaauu

SEQ ID NO: 539767 - RNA, 19 nt, Artificial Sequence
  Description of Artificial Sequence: Synthetic oligonucleotide
gcgcugagccccagauaac

SEQ ID NO: 539768 - RNA, 19 nt, Artificial Sequence
  Description of Artificial Sequence: Synthetic oligonucleotide
cagucagacgacgggcauu

SEQ ID NO: 539769 - RNA, 19 nt, Artificial Sequence
  Description of Artificial Sequence: Synthetic oligonucleotide
gggcggggauggaugaacu

SEQ ID NO: 539770 - RNA, 19 nt, Artificial Sequence
  Description of Artificial Sequence: Synthetic oligonucleotide
ccacgauaucccugccaua

SEQ ID NO: 539771 - RNA, 19 nt, Artificial Sequence
  Description of Artificial Sequence: Synthetic oligonucleotide
cguuuacacgagugccuua

SEQ ID NO: 539772 - RNA, 19 nt, Artificial Sequence
  Description of Artificial Sequence: Synthetic oligonucleotide
gggcggcggucuucaaagu

SEQ ID NO: 539773 - RNA, 19 nt, Artificial Sequence
  Description of Artificial Sequence: Synthetic oligonucleotide
ccauguccauuauccguuu

SEQ ID NO: 539774 - RNA, 19 nt, Artificial Sequence
  Description of Artificial Sequence: Synthetic oligonucleotide
ggcucgucgccagucucau

SEQ ID NO: 539775 - RNA, 19 nt, Artificial Sequence
  Description of Artificial Sequence: Synthetic oligonucleotide
gucagacgacgggcauugu

SEQ ID NO: 539776 - RNA, 19 nt, Artificial Sequence
  Description of Artificial Sequence: Synthetic oligonucleotide
ccguuuacacgagugccuu

SEQ ID NO: 539777 - RNA, 19 nt, Artificial Sequence
  Description of Artificial Sequence: Synthetic oligonucleotide
caggcgcgguagugagccu

SEQ ID NO: 539778 - RNA, 19 nt, Artificial Sequence
  Description of Artificial Sequence: Synthetic oligonucleotide
gcucgucgccagucucauu

SEQ ID NO: 539779 - RNA, 19 nt, Artificial Sequence
  Description of Artificial Sequence: Synthetic oligonucleotide
cgggccacccagagaugau

SEQ ID NO: 539780 - RNA, 19 nt, Artificial Sequence
  Description of Artificial Sequence: Synthetic oligonucleotide
ccggugccgcuugcuuagu

SEQ ID NO: 539781 - RNA, 19 nt, Artificial Sequence
  Description of Artificial Sequence: Synthetic oligonucleotide
auugcauucauuuagauau

SEQ ID NO: 539782 - RNA, 19 nt, Artificial Sequence
  Description of Artificial Sequence: Synthetic oligonucleotide
uguauaugaacgaugaacu

SEQ ID NO: 539783 - RNA, 19 nt, Artificial Sequence
  Description of Artificial Sequence: Synthetic oligonucleotide
aaaauuauaugccagugua

SEQ ID NO: 539784 - RNA, 19 nt, Artificial Sequence
  Description of Artificial Sequence: Synthetic oligonucleotide
aguuaaaccaaauaacuca

SEQ ID NO: 539785 - RNA, 19 nt, Artificial Sequence
  Description of Artificial Sequence: Synthetic oligonucleotide
cauuauacgguucaaauac

SEQ ID NO: 539786 - RNA, 19 nt, Artificial Sequence
  Description of Artificial Sequence: Synthetic oligonucleotide
uuauagcuuauuaaaauga

SEQ ID NO: 539787 - RNA, 19 nt, Artificial Sequence
  Description of Artificial Sequence: Synthetic oligonucleotide
aauccaaacaaaucuuguc

SEQ ID NO: 539788 - RNA, 19 nt, Artificial Sequence
  Description of Artificial Sequence: Synthetic oligonucleotide
aauaaggggcuuucuaaac

SEQ ID NO: 539789 - RNA, 19 nt, Artificial Sequence
  Description of Artificial Sequence: Synthetic oligonucleotide
ugacuuuacauuaauuagc

SEQ ID NO: 539790 - RNA, 19 nt, Artificial Sequence
  Description of Artificial Sequence: Synthetic oligonucleotide
aaaguguuguggaucaucc

SEQ ID NO: 539791 - RNA, 19 nt, Artificial Sequence
  Description of Artificial Sequence: Synthetic oligonucleotide
uagcauaacaucuaagagc

SEQ ID NO: 539792 - RNA, 19 nt, Artificial Sequence
  Description of Artificial Sequence: Synthetic oligonucleotide
uuaaauuuguauuuacagu

SEQ ID NO: 539793 - RNA, 19 nt, Artificial Sequence
  Description of Artificial Sequence: Synthetic oligonucleotide
uucuuuaaaaguuauggaa

SEQ ID NO: 539794 - RNA, 19 nt, Artificial Sequence
  Description of Artificial Sequence: Synthetic oligonucleotide
aacacuauauuaaaccuag

SEQ ID NO: 539795 - RNA, 19 nt, Artificial Sequence
  Description of Artificial Sequence: Synthetic oligonucleotide
aaauagaagcauuagcaaa

SEQ ID NO: 539796 - RNA, 19 nt, Artificial Sequence
  Description of Artificial Sequence: Synthetic oligonucleotide
uuagguuuuggacauauaa

SEQ ID NO: 539797 - RNA, 19 nt, Artificial Sequence
  Description of Artificial Sequence: Synthetic oligonucleotide
uuuacauugaucugugaca

SEQ ID NO: 539798 - RNA, 19 nt, Artificial Sequence
  Description of Artificial Sequence: Synthetic oligonucleotide
aagcauuagcaaaaggugc

SEQ ID NO: 539799 - RNA, 19 nt, Artificial Sequence
  Description of Artificial Sequence: Synthetic oligonucleotide
ugagaaaagaaggugugcg

SEQ ID NO: 539800 - RNA, 19 nt, Artificial Sequence
  Description of Artificial Sequence: Synthetic oligonucleotide
ugugacuuuacauuaauua

SEQ ID NO: 539801 - RNA, 19 nt, Artificial Sequence
  Description of Artificial Sequence: Synthetic oligonucleotide
ucuauggucgagcuugugg

SEQ ID NO: 539802 - RNA, 19 nt, Artificial Sequence
  Description of Artificial Sequence: Synthetic oligonucleotide
auuaauuagcauaacaucu

SEQ ID NO: 539803 - RNA, 19 nt, Artificial Sequence
  Description of Artificial Sequence: Synthetic oligonucleotide
aguccaguuugcuacauac

SEQ ID NO: 539804 - RNA, 19 nt, Artificial Sequence
  Description of Artificial Sequence: Synthetic oligonucleotide
auaacuaagagaaagaaua

SEQ ID NO: 539805 - RNA, 19 nt, Artificial Sequence
  Description of Artificial Sequence: Synthetic oligonucleotide
uaaccaugauaaaauacag

SEQ ID NO: 539806 - RNA, 19 nt, Artificial Sequence
  Description of Artificial Sequence: Synthetic oligonucleotide
uaaaccuagguuuaaauuu

SEQ ID NO: 539807 - RNA, 19 nt, Artificial Sequence
  Description of Artificial Sequence: Synthetic oligonucleotide
uuugagaaaagaaggugug

SEQ ID NO: 539808 - RNA, 19 nt, Artificial Sequence
  Description of Artificial Sequence: Synthetic oligonucleotide
acaucuaagagcaauauca

SEQ ID NO: 539809 - RNA, 19 nt, Artificial Sequence
  Description of Artificial Sequence: Synthetic oligonucleotide
aaaguuauggaaaaggaua

SEQ ID NO: 539810 - RNA, 19 nt, Artificial Sequence
  Description of Artificial Sequence: Synthetic oligonucleotide
aagaauacauuauacgguu

SEQ ID NO: 539811 - RNA, 19 nt, Artificial Sequence
  Description of Artificial Sequence: Synthetic oligonucleotide
auuauaugccaguguauac

SEQ ID NO: 539812 - RNA, 19 nt, Artificial Sequence
  Description of Artificial Sequence: Synthetic oligonucleotide
aaagaauacauuauacggu

SEQ ID NO: 539813 - RNA, 19 nt, Artificial Sequence
  Description of Artificial Sequence: Synthetic oligonucleotide
uccacuacgagaugaacag

SEQ ID NO: 539814 - RNA, 19 nt, Artificial Sequence
  Description of Artificial Sequence: Synthetic oligonucleotide
guucgugagaucuaaagug

SEQ ID NO: 539815 - RNA, 19 nt, Artificial Sequence
  Description of Artificial Sequence: Synthetic oligonucleotide
uuggguucguguuuaaagg

SEQ ID NO: 539816 - RNA, 19 nt, Artificial Sequence
  Description of Artificial Sequence: Synthetic oligonucleotide
gugacuuuacauuaauuag

SEQ ID NO: 539817 - RNA, 19 nt, Artificial Sequence
  Description of Artificial Sequence: Synthetic oligonucleotide
cuucguguauucuucaagg

SEQ ID NO: 539818 - RNA, 19 nt, Artificial Sequence
  Description of Artificial Sequence: Synthetic oligonucleotide
uaaaaguuaugguacgucu

SEQ ID NO: 539819 - RNA, 19 nt, Artificial Sequence
  Description of Artificial Sequence: Synthetic oligonucleotide
gaggauuuuagcaauccgg

SEQ ID NO: 539820 - RNA, 19 nt, Artificial Sequence
  Description of Artificial Sequence: Synthetic oligonucleotide
cauuaauuagcauaacauc

SEQ ID NO: 539821 - RNA, 19 nt, Artificial Sequence
  Description of Artificial Sequence: Synthetic oligonucleotide
agagaaggaggauuuuagc

SEQ ID NO: 539822 - RNA, 19 nt, Artificial Sequence
  Description of Artificial Sequence: Synthetic oligonucleotide
ugaaggugcacaaacauuu

SEQ ID NO: 539823 - RNA, 19 nt, Artificial Sequence
  Description of Artificial Sequence: Synthetic oligonucleotide
aaguuauggaaaaggauag

SEQ ID NO: 539824 - RNA, 19 nt, Artificial Sequence
  Description of Artificial Sequence: Synthetic oligonucleotide
uuagcaaaaggugcaauag

SEQ ID NO: 539825 - RNA, 19 nt, Artificial Sequence
  Description of Artificial Sequence: Synthetic oligonucleotide
uccucagauacauaguuca

SEQ ID NO: 539826 - RNA, 19 nt, Artificial Sequence
  Description of Artificial Sequence: Synthetic oligonucleotide
uuauacgguucaaauacug

SEQ ID NO: 539827 - RNA, 19 nt, Artificial Sequence
  Description of Artificial Sequence: Synthetic oligonucleotide
gaagcauuagcaaaaggug

SEQ ID NO: 539828 - RNA, 19 nt, Artificial Sequence
  Description of Artificial Sequence: Synthetic oligonucleotide
uauauuaaaccuagguuua

SEQ ID NO: 539829 - RNA, 19 nt, Artificial Sequence
  Description of Artificial Sequence: Synthetic oligonucleotide
cuuuagaggagucuucugc

SEQ ID NO: 539830 - RNA, 19 nt, Artificial Sequence
  Description of Artificial Sequence: Synthetic oligonucleotide
aucucgaugcucucuaugg

SEQ ID NO: 539831 - RNA, 19 nt, Artificial Sequence
  Description of Artificial Sequence: Synthetic oligonucleotide
uguuccacuacuaacuuua

SEQ ID NO: 539832 - RNA, 19 nt, Artificial Sequence
  Description of Artificial Sequence: Synthetic oligonucleotide
uuauaugccaguguauacc

SEQ ID NO: 539833 - RNA, 19 nt, Artificial Sequence
  Description of Artificial Sequence: Synthetic oligonucleotide
uacgagaugaacagacucc

SEQ ID NO: 539834 - RNA, 19 nt, Artificial Sequence
  Description of Artificial Sequence: Synthetic oligonucleotide
aauagaagcauuagcaaaa

SEQ ID NO: 539835 - RNA, 19 nt, Artificial Sequence
  Description of Artificial Sequence: Synthetic oligonucleotide
uuaauuagcauaacaucua

SEQ ID NO: 539836 - RNA, 19 nt, Artificial Sequence
  Description of Artificial Sequence: Synthetic oligonucleotide
aauccucagauacauaguu

SEQ ID NO: 539837 - RNA, 19 nt, Artificial Sequence
  Description of Artificial Sequence: Synthetic oligonucleotide
aaauaaggggcuuucuaaa

SEQ ID NO: 539838 - RNA, 19 nt, Artificial Sequence
  Description of Artificial Sequence: Synthetic oligonucleotide
cucuaaaacucaaacauca

SEQ ID NO: 539839 - RNA, 19 nt, Artificial Sequence
  Description of Artificial Sequence: Synthetic oligonucleotide
gugguuaaccuacugaccc

SEQ ID NO: 539840 - RNA, 19 nt, Artificial Sequence
  Description of Artificial Sequence: Synthetic oligonucleotide
auuuugauagguguuccac

SEQ ID NO: 539841 - RNA, 19 nt, Artificial Sequence
  Description of Artificial Sequence: Synthetic oligonucleotide
ucuacacacauuguaauac

SEQ ID NO: 539842 - RNA, 19 nt, Artificial Sequence
  Description of Artificial Sequence: Synthetic oligonucleotide
uugugguuaaccuacugac

SEQ ID NO: 539843 - RNA, 19 nt, Artificial Sequence
  Description of Artificial Sequence: Synthetic oligonucleotide
cuguauaugaacgaugaac

SEQ ID NO: 539844 - RNA, 19 nt, Artificial Sequence
  Description of Artificial Sequence: Synthetic oligonucleotide
caguguauaccaaagcuac

SEQ ID NO: 539845 - RNA, 19 nt, Artificial Sequence
  Description of Artificial Sequence: Synthetic oligonucleotide
acgguucaaauacugauug

SEQ ID NO: 539846 - RNA, 19 nt, Artificial Sequence
  Description of Artificial Sequence: Synthetic oligonucleotide
aauuauaugccaguguaua

SEQ ID NO: 539847 - RNA, 19 nt, Artificial Sequence
  Description of Artificial Sequence: Synthetic oligonucleotide
uauaugccaguguauacca

SEQ ID NO: 539848 - RNA, 19 nt, Artificial Sequence
  Description of Artificial Sequence: Synthetic oligonucleotide
aaggauaguucacagguua

SEQ ID NO: 539849 - RNA, 19 nt, Artificial Sequence
  Description of Artificial Sequence: Synthetic oligonucleotide
ugcaauaguuuacuguugu

SEQ ID NO: 539850 - RNA, 19 nt, Artificial Sequence
  Description of Artificial Sequence: Synthetic oligonucleotide
ugucacauuguaauauaca

SEQ ID NO: 539851 - RNA, 19 nt, Artificial Sequence
  Description of Artificial Sequence: Synthetic oligonucleotide
uuugcuacauaccccaauc

SEQ ID NO: 539852 - RNA, 19 nt, Artificial Sequence
  Description of Artificial Sequence: Synthetic oligonucleotide
caccuuauacugaaggugc

SEQ ID NO: 539853 - RNA, 19 nt, Artificial Sequence
  Description of Artificial Sequence: Synthetic oligonucleotide
agagcaauaucagauaacu

SEQ ID NO: 539854 - RNA, 19 nt, Artificial Sequence
  Description of Artificial Sequence: Synthetic oligonucleotide
uggaaaacagcucaugguu

SEQ ID NO: 539855 - RNA, 19 nt, Artificial Sequence
  Description of Artificial Sequence: Synthetic oligonucleotide
aacuaagagaaagaauaca

SEQ ID NO: 539856 - RNA, 19 nt, Artificial Sequence
  Description of Artificial Sequence: Synthetic oligonucleotide
uauacgguucaaauacuga

SEQ ID NO: 539857 - RNA, 19 nt, Artificial Sequence
  Description of Artificial Sequence: Synthetic oligonucleotide
aaaccuagguuuaaauuug

SEQ ID NO: 539858 - RNA, 19 nt, Artificial Sequence
  Description of Artificial Sequence: Synthetic oligonucleotide
acucaaaguuuccacuacg

SEQ ID NO: 539859 - RNA, 19 nt, Artificial Sequence
  Description of Artificial Sequence: Synthetic oligonucleotide
ugugcaaugucacauugua

SEQ ID NO: 539860 - RNA, 19 nt, Artificial Sequence
  Description of Artificial Sequence: Synthetic oligonucleotide
cucuaaaaguuaugguacg

SEQ ID NO: 539861 - RNA, 19 nt, Artificial Sequence
  Description of Artificial Sequence: Synthetic oligonucleotide
agacuuaauggugaucucg

SEQ ID NO: 539862 - RNA, 19 nt, Artificial Sequence
  Description of Artificial Sequence: Synthetic oligonucleotide
acgucuguugccucugugc

SEQ ID NO: 539863 - RNA, 19 nt, Artificial Sequence
  Description of Artificial Sequence: Synthetic oligonucleotide
ugugguuaaccuacugacc

SEQ ID NO: 539864 - RNA, 19 nt, Artificial Sequence
  Description of Artificial Sequence: Synthetic oligonucleotide
guauuuggugaguucagcc

SEQ ID NO: 539865 - RNA, 19 nt, Artificial Sequence
  Description of Artificial Sequence: Synthetic oligonucleotide
aggauuuuagcaauccggg

SEQ ID NO: 539866 - RNA, 19 nt, Artificial Sequence
  Description of Artificial Sequence: Synthetic oligonucleotide
uguggaucauccauuuaca

SEQ ID NO: 539867 - RNA, 19 nt, Artificial Sequence
  Description of Artificial Sequence: Synthetic oligonucleotide
agggacccaagauacaguc

SEQ ID NO: 539868 - RNA, 19 nt, Artificial Sequence
  Description of Artificial Sequence: Synthetic oligonucleotide
auugugcaaugucacauug

SEQ ID NO: 539869 - RNA, 19 nt, Artificial Sequence
  Description of Artificial Sequence: Synthetic oligonucleotide
guuacuucaggugagagaa

SEQ ID NO: 539870 - RNA, 19 nt, Artificial Sequence
  Description of Artificial Sequence: Synthetic oligonucleotide
caucuaagagcaauaucag

SEQ ID NO: 539871 - RNA, 19 nt, Artificial Sequence
  Description of Artificial Sequence: Synthetic oligonucleotide
uguauaccaaagcuacaga

SEQ ID NO: 539872 - RNA, 19 nt, Artificial Sequence
  Description of Artificial Sequence: Synthetic oligonucleotide
cacuacgagaugaacagac

SEQ ID NO: 539873 - RNA, 19 nt, Artificial Sequence
  Description of Artificial Sequence: Synthetic oligonucleotide
uuugauagguguuccacua

SEQ ID NO: 539874 - RNA, 19 nt, Artificial Sequence
  Description of Artificial Sequence: Synthetic oligonucleotide
gucaauaauaaccaugaua

SEQ ID NO: 539875 - RNA, 19 nt, Artificial Sequence
  Description of Artificial Sequence: Synthetic oligonucleotide
cauuagugcccacugaaac

SEQ ID NO: 539876 - RNA, 19 nt, Artificial Sequence
  Description of Artificial Sequence: Synthetic oligonucleotide
acagaguacauugauuuug

SEQ ID NO: 539877 - RNA, 19 nt, Artificial Sequence
  Description of Artificial Sequence: Synthetic oligonucleotide
aucuaaaguguuguggauc

SEQ ID NO: 539878 - RNA, 19 nt, Artificial Sequence
  Description of Artificial Sequence: Synthetic oligonucleotide
gucguaucgguucuguucc

SEQ ID NO: 539879 - RNA, 19 nt, Artificial Sequence
  Description of Artificial Sequence: Synthetic oligonucleotide
ugguauuuaauugugcaau

SEQ ID NO: 539880 - RNA, 19 nt, Artificial Sequence
  Description of Artificial Sequence: Synthetic oligonucleotide
acaaaauccccucugugaa

SEQ ID NO: 539881 - RNA, 19 nt, Artificial Sequence
  Description of Artificial Sequence: Synthetic oligonucleotide
aauccgaucuaccacugua

SEQ ID NO: 539882 - RNA, 19 nt, Artificial Sequence
  Description of Artificial Sequence: Synthetic oligonucleotide
aguguuguggaucauccau

SEQ ID NO: 539883 - RNA, 19 nt, Artificial Sequence
  Description of Artificial Sequence: Synthetic oligonucleotide
uaaccuacugacccgcuga

SEQ ID NO: 539884 - RNA, 19 nt, Artificial Sequence
  Description of Artificial Sequence: Synthetic oligonucleotide
guccacaacaauuccugcg

SEQ ID NO: 539885 - RNA, 19 nt, Artificial Sequence
  Description of Artificial Sequence: Synthetic oligonucleotide
acuacuuaggccucaacuu

SEQ ID NO: 539886 - RNA, 19 nt, Artificial Sequence
  Description of Artificial Sequence: Synthetic oligonucleotide
acauaccccaauccgaucu

SEQ ID NO: 539887 - RNA, 19 nt, Artificial Sequence
  Description of Artificial Sequence: Synthetic oligonucleotide
gugacuuugaaggcgagcc

SEQ ID NO: 539888 - RNA, 19 nt, Artificial Sequence
  Description of Artificial Sequence: Synthetic oligonucleotide
aaaucaagaagugguaguu

SEQ ID NO: 539889 - RNA, 19 nt, Artificial Sequence
  Description of Artificial Sequence: Synthetic oligonucleotide
augaacuaaaaugugguau

SEQ ID NO: 539890 - RNA, 19 nt, Artificial Sequence
  Description of Artificial Sequence: Synthetic oligonucleotide
aucagauaacuuuuacaca

SEQ ID NO: 539891 - RNA, 19 nt, Artificial Sequence
  Description of Artificial Sequence: Synthetic oligonucleotide
acaacaauuccugcgagca

SEQ ID NO: 539892 - RNA, 19 nt, Artificial Sequence
  Description of Artificial Sequence: Synthetic oligonucleotide
auuagcaaaaggugcaaua

SEQ ID NO: 539893 - RNA, 19 nt, Artificial Sequence
  Description of Artificial Sequence: Synthetic oligonucleotide
ugagagaauuucauacuau

SEQ ID NO: 539894 - RNA, 19 nt, Artificial Sequence
  Description of Artificial Sequence: Synthetic oligonucleotide
ucuaaaacucaaacaucaa

SEQ ID NO: 539895 - RNA, 19 nt, Artificial Sequence
  Description of Artificial Sequence: Synthetic oligonucleotide
auuccauuagugcccacug

SEQ ID NO: 539896 - RNA, 19 nt, Artificial Sequence
  Description of Artificial Sequence: Synthetic oligonucleotide
gauuagaccugcugcuuug

SEQ ID NO: 539897 - RNA, 19 nt, Artificial Sequence
  Description of Artificial Sequence: Synthetic oligonucleotide
auaguucacagguuacugu

SEQ ID NO: 539898 - RNA, 19 nt, Artificial Sequence
  Description of Artificial Sequence: Synthetic oligonucleotide
gaguuaaaccaaauaacuc

SEQ ID NO: 539899 - RNA, 19 nt, Artificial Sequence
  Description of Artificial Sequence: Synthetic oligonucleotide
ugguuaaccuacugacccg

SEQ ID NO: 539900 - RNA, 19 nt, Artificial Sequence
  Description of Artificial Sequence: Synthetic oligonucleotide
aaaauccccucugugaaaa

SEQ ID NO: 539901 - RNA, 19 nt, Artificial Sequence
  Description of Artificial Sequence: Synthetic oligonucleotide
uugcuacauaccccaaucc

SEQ ID NO: 539902 - RNA, 19 nt, Artificial Sequence
  Description of Artificial Sequence: Synthetic oligonucleotide
cuacgagaugaacagacuc

SEQ ID NO: 539903 - RNA, 19 nt, Artificial Sequence
  Description of Artificial Sequence: Synthetic oligonucleotide
uuaaccuacugacccgcug

SEQ ID NO: 539904 - RNA, 19 nt, Artificial Sequence
  Description of Artificial Sequence: Synthetic oligonucleotide
ugagaucuaaaguguugug

SEQ ID NO: 539905 - RNA, 19 nt, Artificial Sequence
  Description of Artificial Sequence: Synthetic oligonucleotide
acuacuaacuuuagaggag

SEQ ID NO: 539906 - RNA, 19 nt, Artificial Sequence
  Description of Artificial Sequence: Synthetic oligonucleotide
aaaagacuacuuaggccuc

SEQ ID NO: 539907 - RNA, 19 nt, Artificial Sequence
  Description of Artificial Sequence: Synthetic oligonucleotide
gacaugaccucuuggguuc

SEQ ID NO: 539908 - RNA, 19 nt, Artificial Sequence
  Description of Artificial Sequence: Synthetic oligonucleotide
uguucuagugcuguccucu

SEQ ID NO: 539909 - RNA, 19 nt, Artificial Sequence
  Description of Artificial Sequence: Synthetic oligonucleotide
cacuguauaugaacgauga

SEQ ID NO: 539910 - RNA, 19 nt, Artificial Sequence
  Description of Artificial Sequence: Synthetic oligonucleotide
uggguucguguuuaaagga

SEQ ID NO: 539911 - RNA, 19 nt, Artificial Sequence
  Description of Artificial Sequence: Synthetic oligonucleotide
uuagugcccacugaaacaa

SEQ ID NO: 539912 - RNA, 19 nt, Artificial Sequence
  Description of Artificial Sequence: Synthetic oligonucleotide
uugucuucguguauucuuc

SEQ ID NO: 539913 - RNA, 19 nt, Artificial Sequence
  Description of Artificial Sequence: Synthetic oligonucleotide
agauaacuuuuacacauuu

SEQ ID NO: 539914 - RNA, 19 nt, Artificial Sequence
  Description of Artificial Sequence: Synthetic oligonucleotide
auauuuaugcacauugcau

SEQ ID NO: 539915 - RNA, 19 nt, Artificial Sequence
  Description of Artificial Sequence: Synthetic oligonucleotide
cguguauucuucaaggucc

SEQ ID NO: 539916 - RNA, 19 nt, Artificial Sequence
  Description of Artificial Sequence: Synthetic oligonucleotide
ucuaaaaguuaugguacgu

SEQ ID NO: 539917 - RNA, 19 nt, Artificial Sequence
  Description of Artificial Sequence: Synthetic oligonucleotide
ugggauuagaccugcugcu

SEQ ID NO: 539918 - RNA, 19 nt, Artificial Sequence
  Description of Artificial Sequence: Synthetic oligonucleotide
uugagaaaagaaggugugc

SEQ ID NO: 539919 - RNA, 19 nt, Artificial Sequence
  Description of Artificial Sequence: Synthetic oligonucleotide
caagauuaaguuuguaaaa

SEQ ID NO: 539920 - RNA, 19 nt, Artificial Sequence
  Description of Artificial Sequence: Synthetic oligonucleotide
ucauccacgugauuuuggu

SEQ ID NO: 539921 - RNA, 19 nt, Artificial Sequence
  Description of Artificial Sequence: Synthetic oligonucleotide
auagcuuauuaaaaugacu

SEQ ID NO: 539922 - RNA, 19 nt, Artificial Sequence
  Description of Artificial Sequence: Synthetic oligonucleotide
ugaacagacuccaguaguu

SEQ ID NO: 539923 - RNA, 19 nt, Artificial Sequence
  Description of Artificial Sequence: Synthetic oligonucleotide
ucgagcuugugguuaaccu

SEQ ID NO: 539924 - RNA, 19 nt, Artificial Sequence
  Description of Artificial Sequence: Synthetic oligonucleotide
gguuacugugucuacacac

SEQ ID NO: 539925 - RNA, 19 nt, Artificial Sequence
  Description of Artificial Sequence: Synthetic oligonucleotide
aaagaaggugugcggaauu

SEQ ID NO: 539926 - RNA, 19 nt, Artificial Sequence
  Description of Artificial Sequence: Synthetic oligonucleotide
aagauacagucaauaauaa

SEQ ID NO: 539927 - RNA, 19 nt, Artificial Sequence
  Description of Artificial Sequence: Synthetic oligonucleotide
uucguguauucuucaaggu

SEQ ID NO: 539928 - RNA, 19 nt, Artificial Sequence
  Description of Artificial Sequence: Synthetic oligonucleotide
cuaaaaguuaugguacguc

SEQ ID NO: 539929 - RNA, 19 nt, Artificial Sequence
  Description of Artificial Sequence: Synthetic oligonucleotide
aaauuauaugccaguguau

SEQ ID NO: 539930 - RNA, 19 nt, Artificial Sequence
  Description of Artificial Sequence: Synthetic oligonucleotide
gaucuaccacuguauauga

SEQ ID NO: 539931 - RNA, 19 nt, Artificial Sequence
  Description of Artificial Sequence: Synthetic oligonucleotide
gacucgucuccccaauucc

SEQ ID NO: 539932 - RNA, 19 nt, Artificial Sequence
  Description of Artificial Sequence: Synthetic oligonucleotide
aaccuacugacccgcugag

SEQ ID NO: 539933 - RNA, 19 nt, Artificial Sequence
  Description of Artificial Sequence: Synthetic oligonucleotide
uaacuuuagaggagucuuc

SEQ ID NO: 539934 - RNA, 19 nt, Artificial Sequence
  Description of Artificial Sequence: Synthetic oligonucleotide
ucguccucaaggagaaggc

SEQ ID NO: 539935 - RNA, 19 nt, Artificial Sequence
  Description of Artificial Sequence: Synthetic oligonucleotide
uggaucauccauuuacauu

SEQ ID NO: 539936 - RNA, 19 nt, Artificial Sequence
  Description of Artificial Sequence: Synthetic oligonucleotide
uacgguucaaauacugauu

SEQ ID NO: 539937 - RNA, 19 nt, Artificial Sequence
  Description of Artificial Sequence: Synthetic oligonucleotide
uugucagaguuaaaccaaa

SEQ ID NO: 539938 - RNA, 19 nt, Artificial Sequence
  Description of Artificial Sequence: Synthetic oligonucleotide
uuucgauugucuucgugua

SEQ ID NO: 539939 - RNA, 19 nt, Artificial Sequence
  Description of Artificial Sequence: Synthetic oligonucleotide
gacuacuuaggccucaacu

SEQ ID NO: 539940 - RNA, 19 nt, Artificial Sequence
  Description of Artificial Sequence: Synthetic oligonucleotide
uuacugugucuacacacau

SEQ ID NO: 539941 - RNA, 19 nt, Artificial Sequence
  Description of Artificial Sequence: Synthetic oligonucleotide
ggauuuuagcaauccgggg

SEQ ID NO: 539942 - RNA, 19 nt, Artificial Sequence
  Description of Artificial Sequence: Synthetic oligonucleotide
auaugaacgaugaacuaaa

SEQ ID NO: 539943 - RNA, 19 nt, Artificial Sequence
  Description of Artificial Sequence: Synthetic oligonucleotide
cuugugguuaaccuacuga

SEQ ID NO: 539944 - RNA, 19 nt, Artificial Sequence
  Description of Artificial Sequence: Synthetic oligonucleotide
uauuaaaccuagguuuaaa

SEQ ID NO: 539945 - RNA, 19 nt, Artificial Sequence
  Description of Artificial Sequence: Synthetic oligonucleotide
auggagaacacuauauuaa

SEQ ID NO: 539946 - RNA, 19 nt, Artificial Sequence
  Description of Artificial Sequence: Synthetic oligonucleotide
aaaaguuaugguacgucuu

SEQ ID NO: 539947 - RNA, 19 nt, Artificial Sequence
  Description of Artificial Sequence: Synthetic oligonucleotide
cacaacaauuccugcgagc

SEQ ID NO: 539948 - RNA, 19 nt, Artificial Sequence
  Description of Artificial Sequence: Synthetic oligonucleotide
agugaagcucuuggaaaac

SEQ ID NO: 539949 - RNA, 19 nt, Artificial Sequence
  Description of Artificial Sequence: Synthetic oligonucleotide
gagcauuccauuagugccc

SEQ ID NO: 539950 - RNA, 19 nt, Artificial Sequence
  Description of Artificial Sequence: Synthetic oligonucleotide
aaguguuguggaucaucca

SEQ ID NO: 539951 - RNA, 19 nt, Artificial Sequence
  Description of Artificial Sequence: Synthetic oligonucleotide
gaugacugaauggguuagg

SEQ ID NO: 539952 - RNA, 19 nt, Artificial Sequence
  Description of Artificial Sequence: Synthetic oligonucleotide
agaauacauuauacgguuc

SEQ ID NO: 539953 - RNA, 19 nt, Artificial Sequence
  Description of Artificial Sequence: Synthetic oligonucleotide
uaugaacgaugaacuaaaa

SEQ ID NO: 539954 - RNA, 19 nt, Artificial Sequence
  Description of Artificial Sequence: Synthetic oligonucleotide
uguuguggaucauccauuu

SEQ ID NO: 539955 - RNA, 19 nt, Artificial Sequence
  Description of Artificial Sequence: Synthetic oligonucleotide
ccacuacuaacuuuagagg

SEQ ID NO: 539956 - RNA, 19 nt, Artificial Sequence
  Description of Artificial Sequence: Synthetic oligonucleotide
ucguguuuaaaggaacaaa

SEQ ID NO: 539957 - RNA, 19 nt, Artificial Sequence
  Description of Artificial Sequence: Synthetic oligonucleotide
ugauuggcuagaugcacau

SEQ ID NO: 539958 - RNA, 19 nt, Artificial Sequence
  Description of Artificial Sequence: Synthetic oligonucleotide
caucacuugggaaaaugga

SEQ ID NO: 539959 - RNA, 19 nt, Artificial Sequence
  Description of Artificial Sequence: Synthetic oligonucleotide
cucgaugcucucuaugguc

SEQ ID NO: 539960 - RNA, 19 nt, Artificial Sequence
  Description of Artificial Sequence: Synthetic oligonucleotide
ugucuucguguauucuuca

SEQ ID NO: 539961 - RNA, 19 nt, Artificial Sequence
  Description of Artificial Sequence: Synthetic oligonucleotide
cacuauauuaaaccuaggu

SEQ ID NO: 539962 - RNA, 19 nt, Artificial Sequence
  Description of Artificial Sequence: Synthetic oligonucleotide
aggauaguucacagguuac

SEQ ID NO: 539963 - RNA, 19 nt, Artificial Sequence
  Description of Artificial Sequence: Synthetic oligonucleotide
ugucagaguuaaaccaaau

SEQ ID NO: 539964 - RNA, 19 nt, Artificial Sequence
  Description of Artificial Sequence: Synthetic oligonucleotide
accaaauaacucauuuaug

SEQ ID NO: 539965 - RNA, 19 nt, Artificial Sequence
  Description of Artificial Sequence: Synthetic oligonucleotide
aguuaugguacgucuuaau

SEQ ID NO: 539966 - RNA, 19 nt, Artificial Sequence
  Description of Artificial Sequence: Synthetic oligonucleotide
accccaauccgaucuacca

SEQ ID NO: 539967 - RNA, 19 nt, Artificial Sequence
  Description of Artificial Sequence: Synthetic oligonucleotide
ugguacgucuuaaucucuc

SEQ ID NO: 539968 - RNA, 19 nt, Artificial Sequence
  Description of Artificial Sequence: Synthetic oligonucleotide
uucguguuuaaaggaacaa

SEQ ID NO: 539969 - RNA, 19 nt, Artificial Sequence
  Description of Artificial Sequence: Synthetic oligonucleotide
aaagacuacuuaggccuca

SEQ ID NO: 539970 - RNA, 19 nt, Artificial Sequence
  Description of Artificial Sequence: Synthetic oligonucleotide
ccaaauaacucauuuaugu

SEQ ID NO: 539971 - RNA, 19 nt, Artificial Sequence
  Description of Artificial Sequence: Synthetic oligonucleotide
ugcuuuguucuagugcugu

SEQ ID NO: 539972 - RNA, 19 nt, Artificial Sequence
  Description of Artificial Sequence: Synthetic oligonucleotide
ucgguucuguucccgaauc

SEQ ID NO: 539973 - RNA, 19 nt, Artificial Sequence
  Description of Artificial Sequence: Synthetic oligonucleotide
acgagaugaacagacucca

SEQ ID NO: 539974 - RNA, 19 nt, Artificial Sequence
  Description of Artificial Sequence: Synthetic oligonucleotide
agacuacuuaggccucaac

SEQ ID NO: 539975 - RNA, 19 nt, Artificial Sequence
  Description of Artificial Sequence: Synthetic oligonucleotide
uucugcuuucauccacgug

SEQ ID NO: 539976 - RNA, 19 nt, Artificial Sequence
  Description of Artificial Sequence: Synthetic oligonucleotide
acgugauuuugguccuugg

SEQ ID NO: 539977 - RNA, 19 nt, Artificial Sequence
  Description of Artificial Sequence: Synthetic oligonucleotide
uaccccaauccgaucuacc

SEQ ID NO: 539978 - RNA, 19 nt, Artificial Sequence
  Description of Artificial Sequence: Synthetic oligonucleotide
uccgaucuaccacuguaua

SEQ ID NO: 539979 - RNA, 19 nt, Artificial Sequence
  Description of Artificial Sequence: Synthetic oligonucleotide
acgucuuaaucucucuaaa

SEQ ID NO: 539980 - RNA, 19 nt, Artificial Sequence
  Description of Artificial Sequence: Synthetic oligonucleotide
guuacugugucuacacaca

SEQ ID NO: 539981 - RNA, 19 nt, Artificial Sequence
  Description of Artificial Sequence: Synthetic oligonucleotide
auuauacgguucaaauacu

SEQ ID NO: 539982 - RNA, 19 nt, Artificial Sequence
  Description of Artificial Sequence: Synthetic oligonucleotide
auaacaucuaagagcaaua

SEQ ID NO: 539983 - RNA, 19 nt, Artificial Sequence
  Description of Artificial Sequence: Synthetic oligonucleotide
aaguuaugguacgucuuaa

SEQ ID NO: 539984 - RNA, 19 nt, Artificial Sequence
  Description of Artificial Sequence: Synthetic oligonucleotide
augauaaaauacagucuga

SEQ ID NO: 539985 - RNA, 19 nt, Artificial Sequence
  Description of Artificial Sequence: Synthetic oligonucleotide
ggucguaucgguucuguuc

SEQ ID NO: 539986 - RNA, 19 nt, Artificial Sequence
  Description of Artificial Sequence: Synthetic oligonucleotide
acucgucuccccaauuccg

SEQ ID NO: 539987 - RNA, 19 nt, Artificial Sequence
  Description of Artificial Sequence: Synthetic oligonucleotide
aaucucucuaaaacucaaa

SEQ ID NO: 539988 - RNA, 19 nt, Artificial Sequence
  Description of Artificial Sequence: Synthetic oligonucleotide
uccacgugauuuugguccu

SEQ ID NO: 539989 - RNA, 19 nt, Artificial Sequence
  Description of Artificial Sequence: Synthetic oligonucleotide
agcuuuuagagcauuccau

SEQ ID NO: 539990 - RNA, 19 nt, Artificial Sequence
  Description of Artificial Sequence: Synthetic oligonucleotide
cauugaucugugacaucac

SEQ ID NO: 539991 - RNA, 19 nt, Artificial Sequence
  Description of Artificial Sequence: Synthetic oligonucleotide
aaccuagguuuaaauuugu

SEQ ID NO: 539992 - RNA, 19 nt, Artificial Sequence
  Description of Artificial Sequence: Synthetic oligonucleotide
auaccccaauccgaucuac

SEQ ID NO: 539993 - RNA, 19 nt, Artificial Sequence
  Description of Artificial Sequence: Synthetic oligonucleotide
cuauggucgagcuuguggu

SEQ ID NO: 539994 - RNA, 19 nt, Artificial Sequence
  Description of Artificial Sequence: Synthetic oligonucleotide
aaucaagauuaaguuugua

SEQ ID NO: 539995 - RNA, 19 nt, Artificial Sequence
  Description of Artificial Sequence: Synthetic oligonucleotide
ggagacuuaauggugaucu

SEQ ID NO: 539996 - RNA, 19 nt, Artificial Sequence
  Description of Artificial Sequence: Synthetic oligonucleotide
uccccaauuccgagacucc

SEQ ID NO: 539997 - RNA, 19 nt, Artificial Sequence
  Description of Artificial Sequence: Synthetic oligonucleotide
caauuccgagacuccuccg

SEQ ID NO: 539998 - RNA, 19 nt, Artificial Sequence
  Description of Artificial Sequence: Synthetic oligonucleotide
uuuccacuacgagaugaac

SEQ ID NO: 539999 - RNA, 19 nt, Artificial Sequence
  Description of Artificial Sequence: Synthetic oligonucleotide
acuguauaugaacgaugaa

SEQ ID NO: 540000 - RNA, 19 nt, Artificial Sequence
  Description of Artificial Sequence: Synthetic oligonucleotide
ucaguuggguucguguuua

SEQ ID NO: 540001 - RNA, 19 nt, Artificial Sequence
  Description of Artificial Sequence: Synthetic oligonucleotide
ggacccaagauacagucaa

SEQ ID NO: 540002 - RNA, 19 nt, Artificial Sequence
  Description of Artificial Sequence: Synthetic oligonucleotide
ccaauuccgagacuccucc

SEQ ID NO: 540003 - RNA, 19 nt, Artificial Sequence
  Description of Artificial Sequence: Synthetic oligonucleotide
uuagcaauccggggcuucu

SEQ ID NO: 540004 - RNA, 19 nt, Artificial Sequence
  Description of Artificial Sequence: Synthetic oligonucleotide
cauguacuugaggggagag

SEQ ID NO: 540005 - RNA, 19 nt, Artificial Sequence
  Description of Artificial Sequence: Synthetic oligonucleotide
uaucgguucuguucccgaa

SEQ ID NO: 540006 - RNA, 19 nt, Artificial Sequence
  Description of Artificial Sequence: Synthetic oligonucleotide
cauuaugccaaagcaagua

SEQ ID NO: 540007 - RNA, 19 nt, Artificial Sequence
  Description of Artificial Sequence: Synthetic oligonucleotide
gggcuuucuaaacuaauaa

SEQ ID NO: 540008 - RNA, 19 nt, Artificial Sequence
  Description of Artificial Sequence: Synthetic oligonucleotide
cucguccaggccucguugc

SEQ ID NO: 540009 - RNA, 19 nt, Artificial Sequence
  Description of Artificial Sequence: Synthetic oligonucleotide
ccaguuugcuacauacccc

SEQ ID NO: 540010 - RNA, 19 nt, Artificial Sequence
  Description of Artificial Sequence: Synthetic oligonucleotide
aggaacaaacugauuggga

SEQ ID NO: 540011 - RNA, 19 nt, Artificial Sequence
  Description of Artificial Sequence: Synthetic oligonucleotide
uuuucacgucuguugccuc

SEQ ID NO: 540012 - RNA, 19 nt, Artificial Sequence
  Description of Artificial Sequence: Synthetic oligonucleotide
acacuauauuaaaccuagg

SEQ ID NO: 540013 - RNA, 19 nt, Artificial Sequence
  Description of Artificial Sequence: Synthetic oligonucleotide
ggugcaauaguuuacuguu

SEQ ID NO: 540014 - RNA, 19 nt, Artificial Sequence
  Description of Artificial Sequence: Synthetic oligonucleotide
auauuaaaccuagguuuaa

SEQ ID NO: 540015 - RNA, 19 nt, Artificial Sequence
  Description of Artificial Sequence: Synthetic oligonucleotide
acucaaacaucaacagagu

SEQ ID NO: 540016 - RNA, 19 nt, Artificial Sequence
  Description of Artificial Sequence: Synthetic oligonucleotide
gcaauaacuaagagaaaga

SEQ ID NO: 540017 - RNA, 19 nt, Artificial Sequence
  Description of Artificial Sequence: Synthetic oligonucleotide
guucccgaaucuuauuucu

SEQ ID NO: 540018 - RNA, 19 nt, Artificial Sequence
  Description of Artificial Sequence: Synthetic oligonucleotide
aucaggugacaugaccucu

SEQ ID NO: 540019 - RNA, 19 nt, Artificial Sequence
  Description of Artificial Sequence: Synthetic oligonucleotide
gguuaaccuacugacccgc

SEQ ID NO: 540020 - RNA, 19 nt, Artificial Sequence
  Description of Artificial Sequence: Synthetic oligonucleotide
gacccgcugagcaagcuca

SEQ ID NO: 540021 - RNA, 19 nt, Artificial Sequence
  Description of Artificial Sequence: Synthetic oligonucleotide
cauccacgugauuuugguc

SEQ ID NO: 540022 - RNA, 19 nt, Artificial Sequence
  Description of Artificial Sequence: Synthetic oligonucleotide
uggugacuuugaaggcgag

SEQ ID NO: 540023 - RNA, 19 nt, Artificial Sequence
  Description of Artificial Sequence: Synthetic oligonucleotide
cuagaugcacaugacaccu

SEQ ID NO: 540024 - RNA, 19 nt, Artificial Sequence
  Description of Artificial Sequence: Synthetic oligonucleotide
uuuucucguccaggccucg

SEQ ID NO: 540025 - RNA, 19 nt, Artificial Sequence
  Description of Artificial Sequence: Synthetic oligonucleotide
auuugugacuuuacauuaa

SEQ ID NO: 540026 - RNA, 19 nt, Artificial Sequence
  Description of Artificial Sequence: Synthetic oligonucleotide
aucgguucuguucccgaau

SEQ ID NO: 540027 - RNA, 19 nt, Artificial Sequence
  Description of Artificial Sequence: Synthetic oligonucleotide
uccaguaguucgugagauc

SEQ ID NO: 540028 - RNA, 19 nt, Artificial Sequence
  Description of Artificial Sequence: Synthetic oligonucleotide
accuacugacccgcugagc

SEQ ID NO: 540029 - RNA, 19 nt, Artificial Sequence
  Description of Artificial Sequence: Synthetic oligonucleotide
uacauaccccaauccgauc

SEQ ID NO: 540030 - RNA, 19 nt, Artificial Sequence
  Description of Artificial Sequence: Synthetic oligonucleotide
gguuuucucguccaggccu

SEQ ID NO: 540031 - RNA, 19 nt, Artificial Sequence
  Description of Artificial Sequence: Synthetic oligonucleotide
gaauggguuaggaggagcu

SEQ ID NO: 540032 - RNA, 19 nt, Artificial Sequence
  Description of Artificial Sequence: Synthetic oligonucleotide
acuacgagaugaacagacu

SEQ ID NO: 540033 - RNA, 19 nt, Artificial Sequence
  Description of Artificial Sequence: Synthetic oligonucleotide
gugagaucuaaaguguugu

SEQ ID NO: 540034 - RNA, 19 nt, Artificial Sequence
  Description of Artificial Sequence: Synthetic oligonucleotide
gaucuaaaguguuguggau

SEQ ID NO: 540035 - RNA, 19 nt, Artificial Sequence
  Description of Artificial Sequence: Synthetic oligonucleotide
gguucguguuuaaaggaac

SEQ ID NO: 540036 - RNA, 19 nt, Artificial Sequence
  Description of Artificial Sequence: Synthetic oligonucleotide
gauuggcuagaugcacaug

SEQ ID NO: 540037 - RNA, 19 nt, Artificial Sequence
  Description of Artificial Sequence: Synthetic oligonucleotide
auguaaguauuuggugagu

SEQ ID NO: 540038 - RNA, 19 nt, Artificial Sequence
  Description of Artificial Sequence: Synthetic oligonucleotide
cuuugaaggcgagccauca

SEQ ID NO: 540039 - RNA, 19 nt, Artificial Sequence
  Description of Artificial Sequence: Synthetic oligonucleotide
ccacuguauaugaacgaug

SEQ ID NO: 540040 - RNA, 19 nt, Artificial Sequence
  Description of Artificial Sequence: Synthetic oligonucleotide
ggugagagaauuucauacu

SEQ ID NO: 540041 - RNA, 19 nt, Artificial Sequence
  Description of Artificial Sequence: Synthetic oligonucleotide
gucgagcuugugguuaacc

SEQ ID NO: 540042 - RNA, 19 nt, Artificial Sequence
  Description of Artificial Sequence: Synthetic oligonucleotide
guaucgguucuguucccga

SEQ ID NO: 540043 - RNA, 19 nt, Artificial Sequence
  Description of Artificial Sequence: Synthetic oligonucleotide
cagugucguccucaaggag

SEQ ID NO: 540044 - RNA, 19 nt, Artificial Sequence
  Description of Artificial Sequence: Synthetic oligonucleotide
gauagguguuccacuacua

SEQ ID NO: 540045 - RNA, 19 nt, Artificial Sequence
  Description of Artificial Sequence: Synthetic oligonucleotide
cuagugcuguccucuaaaa

SEQ ID NO: 540046 - RNA, 19 nt, Artificial Sequence
  Description of Artificial Sequence: Synthetic oligonucleotide
cgaucuaccacuguauaug

SEQ ID NO: 540047 - RNA, 19 nt, Artificial Sequence
  Description of Artificial Sequence: Synthetic oligonucleotide
ucguaucgguucuguuccc

SEQ ID NO: 540048 - RNA, 19 nt, Artificial Sequence
  Description of Artificial Sequence: Synthetic oligonucleotide
uuguucuagugcuguccuc

SEQ ID NO: 540049 - RNA, 19 nt, Artificial Sequence
  Description of Artificial Sequence: Synthetic oligonucleotide
auuagaccugcugcuuugu

SEQ ID NO: 540050 - RNA, 19 nt, Artificial Sequence
  Description of Artificial Sequence: Synthetic oligonucleotide
cuaacuuuagaggagucuu

SEQ ID NO: 540051 - RNA, 19 nt, Artificial Sequence
  Description of Artificial Sequence: Synthetic oligonucleotide
gaucauccauuuacauuga

SEQ ID NO: 540052 - RNA, 19 nt, Artificial Sequence
  Description of Artificial Sequence: Synthetic oligonucleotide
ugaucucgaugcucucuau

SEQ ID NO: 540053 - RNA, 19 nt, Artificial Sequence
  Description of Artificial Sequence: Synthetic oligonucleotide
cuggugggauuagaccugc

SEQ ID NO: 540054 - RNA, 19 nt, Artificial Sequence
  Description of Artificial Sequence: Synthetic oligonucleotide
cugcuuuguucuagugcug

SEQ ID NO: 540055 - RNA, 19 nt, Artificial Sequence
  Description of Artificial Sequence: Synthetic oligonucleotide
auguacuugaggggagaga

SEQ ID NO: 540056 - RNA, 19 nt, Artificial Sequence
  Description of Artificial Sequence: Synthetic oligonucleotide
cuacauaccccaauccgau

SEQ ID NO: 540057 - RNA, 19 nt, Artificial Sequence
  Description of Artificial Sequence: Synthetic oligonucleotide
cacgugauuuugguccuug

SEQ ID NO: 540058 - RNA, 19 nt, Artificial Sequence
  Description of Artificial Sequence: Synthetic oligonucleotide
ucguugcuuucuuucgauu

SEQ ID NO: 540059 - RNA, 19 nt, Artificial Sequence
  Description of Artificial Sequence: Synthetic oligonucleotide
ccucagauacauaguucag

SEQ ID NO: 540060 - RNA, 19 nt, Artificial Sequence
  Description of Artificial Sequence: Synthetic oligonucleotide
cuuaggccucaacuuucuc

SEQ ID NO: 540061 - RNA, 19 nt, Artificial Sequence
  Description of Artificial Sequence: Synthetic oligonucleotide
guccucuaaaaguuauggu

SEQ ID NO: 540062 - RNA, 19 nt, Artificial Sequence
  Description of Artificial Sequence: Synthetic oligonucleotide
cagauacauaguucagcaa

SEQ ID NO: 540063 - RNA, 19 nt, Artificial Sequence
  Description of Artificial Sequence: Synthetic oligonucleotide
cuacuaacuuuagaggagu

SEQ ID NO: 540064 - RNA, 19 nt, Artificial Sequence
  Description of Artificial Sequence: Synthetic oligonucleotide
cgugagaucuaaaguguug

SEQ ID NO: 540065 - RNA, 19 nt, Artificial Sequence
  Description of Artificial Sequence: Synthetic oligonucleotide
guuuucucguccaggccuc

SEQ ID NO: 540066 - RNA, 19 nt, Artificial Sequence
  Description of Artificial Sequence: Synthetic oligonucleotide
ggacucgucuccccaauuc

SEQ ID NO: 540067 - RNA, 19 nt, Artificial Sequence
  Description of Artificial Sequence: Synthetic oligonucleotide
gcuugugguuaaccuacug

SEQ ID NO: 540068 - RNA, 19 nt, Artificial Sequence
  Description of Artificial Sequence: Synthetic oligonucleotide
accuuauacugaaggugca

SEQ ID NO: 540069 - RNA, 19 nt, Artificial Sequence
  Description of Artificial Sequence: Synthetic oligonucleotide
ucacgucuguugccucugu

SEQ ID NO: 540070 - RNA, 19 nt, Artificial Sequence
  Description of Artificial Sequence: Synthetic oligonucleotide
auccgaucuaccacuguau

SEQ ID NO: 540071 - RNA, 19 nt, Artificial Sequence
  Description of Artificial Sequence: Synthetic oligonucleotide
ggcacguccauggaaguga

SEQ ID NO: 540072 - RNA, 19 nt, Artificial Sequence
  Description of Artificial Sequence: Synthetic oligonucleotide
ggugacuuugaaggcgagc

SEQ ID NO: 540073 - RNA, 19 nt, Artificial Sequence
  Description of Artificial Sequence: Synthetic oligonucleotide
acagucugauuagguuuug

SEQ ID NO: 540074 - RNA, 19 nt, Artificial Sequence
  Description of Artificial Sequence: Synthetic oligonucleotide
auggucgagcuugugguua

SEQ ID NO: 540075 - RNA, 19 nt, Artificial Sequence
  Description of Artificial Sequence: Synthetic oligonucleotide
ccaaagcuacagauucuug

SEQ ID NO: 540076 - RNA, 19 nt, Artificial Sequence
  Description of Artificial Sequence: Synthetic oligonucleotide
ccuagguuuaaauuuguau

SEQ ID NO: 540077 - RNA, 19 nt, Artificial Sequence
  Description of Artificial Sequence: Synthetic oligonucleotide
agagagcggcacagugucg

SEQ ID NO: 540078 - RNA, 19 nt, Artificial Sequence
  Description of Artificial Sequence: Synthetic oligonucleotide
gauugucuucguguauucu

SEQ ID NO: 540079 - RNA, 19 nt, Artificial Sequence
  Description of Artificial Sequence: Synthetic oligonucleotide
aguuggguucguguuuaaa

SEQ ID NO: 540080 - RNA, 19 nt, Artificial Sequence
  Description of Artificial Sequence: Synthetic oligonucleotide
augguacgucuuaaucucu

SEQ ID NO: 540081 - RNA, 19 nt, Artificial Sequence
  Description of Artificial Sequence: Synthetic oligonucleotide
gagagcggcacagugucgu

SEQ ID NO: 540082 - RNA, 19 nt, Artificial Sequence
  Description of Artificial Sequence: Synthetic oligonucleotide
ggccucguugcuuucuuuc

SEQ ID NO: 540083 - RNA, 19 nt, Artificial Sequence
  Description of Artificial Sequence: Synthetic oligonucleotide
aggagucuucugcuuucau

SEQ ID NO: 540084 - RNA, 19 nt, Artificial Sequence
  Description of Artificial Sequence: Synthetic oligonucleotide
uuuuagcaauccggggcuu

SEQ ID NO: 540085 - RNA, 19 nt, Artificial Sequence
  Description of Artificial Sequence: Synthetic oligonucleotide
aggcacguccauggaagug

SEQ ID NO: 540086 - RNA, 19 nt, Artificial Sequence
  Description of Artificial Sequence: Synthetic oligonucleotide
uggguucucucuggagacu

SEQ ID NO: 540087 - RNA, 19 nt, Artificial Sequence
  Description of Artificial Sequence: Synthetic oligonucleotide
ccaugauaaaauacagucu

SEQ ID NO: 540088 - RNA, 19 nt, Artificial Sequence
  Description of Artificial Sequence: Synthetic oligonucleotide
ccacaacaauuccugcgag

SEQ ID NO: 540089 - RNA, 19 nt, Artificial Sequence
  Description of Artificial Sequence: Synthetic oligonucleotide
acuucaggugagagaauuu

SEQ ID NO: 540090 - RNA, 19 nt, Artificial Sequence
  Description of Artificial Sequence: Synthetic oligonucleotide
cauuccauuagugcccacu

SEQ ID NO: 540091 - RNA, 19 nt, Artificial Sequence
  Description of Artificial Sequence: Synthetic oligonucleotide
cacuggguucacuggcuca

SEQ ID NO: 540092 - RNA, 19 nt, Artificial Sequence
  Description of Artificial Sequence: Synthetic oligonucleotide
ccaauccgaucuaccacug

SEQ ID NO: 540093 - RNA, 19 nt, Artificial Sequence
  Description of Artificial Sequence: Synthetic oligonucleotide
cuguucccgaaucuuauuu

SEQ ID NO: 540094 - RNA, 19 nt, Artificial Sequence
  Description of Artificial Sequence: Synthetic oligonucleotide
gugcaaugucacauuguaa

SEQ ID NO: 540095 - RNA, 19 nt, Artificial Sequence
  Description of Artificial Sequence: Synthetic oligonucleotide
auuagguuuuggacauaua

SEQ ID NO: 540096 - RNA, 19 nt, Artificial Sequence
  Description of Artificial Sequence: Synthetic oligonucleotide
ucacaguugcugggauuuc

SEQ ID NO: 540097 - RNA, 19 nt, Artificial Sequence
  Description of Artificial Sequence: Synthetic oligonucleotide
accuagguuuaaauuugua

SEQ ID NO: 540098 - RNA, 19 nt, Artificial Sequence
  Description of Artificial Sequence: Synthetic oligonucleotide
aggucguaucgguucuguu

SEQ ID NO: 540099 - RNA, 19 nt, Artificial Sequence
  Description of Artificial Sequence: Synthetic oligonucleotide
ccccaauccgaucuaccac

SEQ ID NO: 540100 - RNA, 19 nt, Artificial Sequence
  Description of Artificial Sequence: Synthetic oligonucleotide
cagcaauaacuaagagaaa

SEQ ID NO: 540101 - RNA, 19 nt, Artificial Sequence
  Description of Artificial Sequence: Synthetic oligonucleotide
gugagaugacugaaugggu

SEQ ID NO: 540102 - RNA, 19 nt, Artificial Sequence
  Description of Artificial Sequence: Synthetic oligonucleotide
guucuagugcuguccucua

SEQ ID NO: 540103 - RNA, 19 nt, Artificial Sequence
  Description of Artificial Sequence: Synthetic oligonucleotide
gguacgucuuaaucucucu

SEQ ID NO: 540104 - RNA, 19 nt, Artificial Sequence
  Description of Artificial Sequence: Synthetic oligonucleotide
ggguucguguuuaaaggaa

SEQ ID NO: 540105 - RNA, 19 nt, Artificial Sequence
  Description of Artificial Sequence: Synthetic oligonucleotide
ggaggcuuguccacaacaa

SEQ ID NO: 540106 - RNA, 19 nt, Artificial Sequence
  Description of Artificial Sequence: Synthetic oligonucleotide
cauaccccaauccgaucua

SEQ ID NO: 540107 - RNA, 19 nt, Artificial Sequence
  Description of Artificial Sequence: Synthetic oligonucleotide
ggggcuuucuaaacuaaua

SEQ ID NO: 540108 - RNA, 19 nt, Artificial Sequence
  Description of Artificial Sequence: Synthetic oligonucleotide
cucguugcuuucuuucgau

SEQ ID NO: 540109 - RNA, 19 nt, Artificial Sequence
  Description of Artificial Sequence: Synthetic oligonucleotide
ccaguaguucgugagaucu

SEQ ID NO: 540110 - RNA, 19 nt, Artificial Sequence
  Description of Artificial Sequence: Synthetic oligonucleotide
ggauaguucacagguuacu

SEQ ID NO: 540111 - RNA, 19 nt, Artificial Sequence
  Description of Artificial Sequence: Synthetic oligonucleotide
gagcaauaucagauaacuu

SEQ ID NO: 540112 - RNA, 19 nt, Artificial Sequence
  Description of Artificial Sequence: Synthetic oligonucleotide
cucuauggucgagcuugug

SEQ ID NO: 540113 - RNA, 19 nt, Artificial Sequence
  Description of Artificial Sequence: Synthetic oligonucleotide
guaguucgugagaucuaaa

SEQ ID NO: 540114 - RNA, 19 nt, Artificial Sequence
  Description of Artificial Sequence: Synthetic oligonucleotide
aguuugcuacauaccccaa

SEQ ID NO: 540115 - RNA, 19 nt, Artificial Sequence
  Description of Artificial Sequence: Synthetic oligonucleotide
cgagaugaacagacuccag

SEQ ID NO: 540116 - RNA, 19 nt, Artificial Sequence
  Description of Artificial Sequence: Synthetic oligonucleotide
cccaauccgaucuaccacu

SEQ ID NO: 540117 - RNA, 19 nt, Artificial Sequence
  Description of Artificial Sequence: Synthetic oligonucleotide
caucgugcaucucauccuu

SEQ ID NO: 540118 - RNA, 19 nt, Artificial Sequence
  Description of Artificial Sequence: Synthetic oligonucleotide
cgauugucuucguguauuc

SEQ ID NO: 540119 - RNA, 19 nt, Artificial Sequence
  Description of Artificial Sequence: Synthetic oligonucleotide
cauuagcaaaaggugcaau

SEQ ID NO: 540120 - RNA, 19 nt, Artificial Sequence
  Description of Artificial Sequence: Synthetic oligonucleotide
ggauuagaccugcugcuuu

SEQ ID NO: 540121 - RNA, 19 nt, Artificial Sequence
  Description of Artificial Sequence: Synthetic oligonucleotide
cucaguuggguucguguuu

SEQ ID NO: 540122 - RNA, 19 nt, Artificial Sequence
  Description of Artificial Sequence: Synthetic oligonucleotide
uuccugcgagcagcugaga

SEQ ID NO: 540123 - RNA, 19 nt, Artificial Sequence
  Description of Artificial Sequence: Synthetic oligonucleotide
guguuguggaucauccauu

SEQ ID NO: 540124 - RNA, 19 nt, Artificial Sequence
  Description of Artificial Sequence: Synthetic oligonucleotide
cagggacccaagauacagu

SEQ ID NO: 540125 - RNA, 19 nt, Artificial Sequence
  Description of Artificial Sequence: Synthetic oligonucleotide
gugcggaauuucuucuuuu

SEQ ID NO: 540126 - RNA, 19 nt, Artificial Sequence
  Description of Artificial Sequence: Synthetic oligonucleotide
uagcaauccggggcuucuu

SEQ ID NO: 540127 - RNA, 19 nt, Artificial Sequence
  Description of Artificial Sequence: Synthetic oligonucleotide
ggagagagcggcacagugu

SEQ ID NO: 540128 - RNA, 19 nt, Artificial Sequence
  Description of Artificial Sequence: Synthetic oligonucleotide
ggugaucucgaugcucucu

SEQ ID NO: 540129 - RNA, 19 nt, Artificial Sequence
  Description of Artificial Sequence: Synthetic oligonucleotide
guuaaccuacugacccgcu

SEQ ID NO: 540130 - RNA, 19 nt, Artificial Sequence
  Description of Artificial Sequence: Synthetic oligonucleotide
caauccgaucuaccacugu

SEQ ID NO: 540131 - RNA, 19 nt, Artificial Sequence
  Description of Artificial Sequence: Synthetic oligonucleotide
ccauguacuugaggggaga

SEQ ID NO: 540132 - RNA, 19 nt, Artificial Sequence
  Description of Artificial Sequence: Synthetic oligonucleotide
ggccucaacuuucuccuuu

SEQ ID NO: 540133 - RNA, 19 nt, Artificial Sequence
  Description of Artificial Sequence: Synthetic oligonucleotide
ccgaucuaccacuguauau

SEQ ID NO: 540134 - RNA, 19 nt, Artificial Sequence
  Description of Artificial Sequence: Synthetic oligonucleotide
cagcugagacugugguccu

SEQ ID NO: 540135 - RNA, 19 nt, Artificial Sequence
  Description of Artificial Sequence: Synthetic oligonucleotide
ggucgagcuugugguuaac

SEQ ID NO: 540136 - RNA, 19 nt, Artificial Sequence
  Description of Artificial Sequence: Synthetic oligonucleotide
ccucaguuggguucguguu

SEQ ID NO: 540137 - RNA, 19 nt, Artificial Sequence
  Description of Artificial Sequence: Synthetic oligonucleotide
ccacuacgagaugaacaga

SEQ ID NO: 540138 - RNA, 19 nt, Artificial Sequence
  Description of Artificial Sequence: Synthetic oligonucleotide
gggauuagaccugcugcuu

SEQ ID NO: 540139 - RNA, 19 nt, Artificial Sequence
  Description of Artificial Sequence: Synthetic oligonucleotide
gcauaacaucuaagagcaa

SEQ ID NO: 540140 - RNA, 19 nt, Artificial Sequence
  Description of Artificial Sequence: Synthetic oligonucleotide
ggggacucgucuccccaau

SEQ ID NO: 540141 - RNA, 19 nt, Artificial Sequence
  Description of Artificial Sequence: Synthetic oligonucleotide
gcucucuauggucgagcuu

SEQ ID NO: 540142 - RNA, 19 nt, Artificial Sequence
  Description of Artificial Sequence: Synthetic oligonucleotide
gggacucgucuccccaauu

SEQ ID NO: 540143 - RNA, 19 nt, Artificial Sequence
  Description of Artificial Sequence: Synthetic oligonucleotide
ggcgagccaucaggugaca

SEQ ID NO: 540144 - RNA, 19 nt, Artificial Sequence
  Description of Artificial Sequence: Synthetic oligonucleotide
ccuccggcacauucacuuu

SEQ ID NO: 540145 - RNA, 19 nt, Artificial Sequence
  Description of Artificial Sequence: Synthetic oligonucleotide
ccacgugauuuugguccuu

SEQ ID NO: 540146 - RNA, 19 nt, Artificial Sequence
  Description of Artificial Sequence: Synthetic oligonucleotide
gaucaaguaagacagacag

SEQ ID NO: 540147 - RNA, 19 nt, Artificial Sequence
  Description of Artificial Sequence: Synthetic oligonucleotide
aacucaaguacauagucuc

SEQ ID NO: 540148 - RNA, 19 nt, Artificial Sequence
  Description of Artificial Sequence: Synthetic oligonucleotide
ucaauugccacagacaacg

SEQ ID NO: 540149 - RNA, 19 nt, Artificial Sequence
  Description of Artificial Sequence: Synthetic oligonucleotide
uucaauaagcgccagguag

SEQ ID NO: 540150 - RNA, 19 nt, Artificial Sequence
  Description of Artificial Sequence: Synthetic oligonucleotide
ugagauaguagaaagucag

SEQ ID NO: 540151 - RNA, 19 nt, Artificial Sequence
  Description of Artificial Sequence: Synthetic oligonucleotide
auacaagcagcucaggacc

SEQ ID NO: 540152 - RNA, 19 nt, Artificial Sequence
  Description of Artificial Sequence: Synthetic oligonucleotide
ucuacuauguccuuaguga

SEQ ID NO: 540153 - RNA, 19 nt, Artificial Sequence
  Description of Artificial Sequence: Synthetic oligonucleotide
uugaacucuagacauuugg

SEQ ID NO: 540154 - RNA, 19 nt, Artificial Sequence
  Description of Artificial Sequence: Synthetic oligonucleotide
acaacgucuuaucacaggc

SEQ ID NO: 540155 - RNA, 19 nt, Artificial Sequence
  Description of Artificial Sequence: Synthetic oligonucleotide
aauuacauguggccagagc

SEQ ID NO: 540156 - RNA, 19 nt, Artificial Sequence
  Description of Artificial Sequence: Synthetic oligonucleotide
uaucaagaauuacaugugg

SEQ ID NO: 540157 - RNA, 19 nt, Artificial Sequence
  Description of Artificial Sequence: Synthetic oligonucleotide
gaaaauaucaagaauuaca

SEQ ID NO: 540158 - RNA, 19 nt, Artificial Sequence
  Description of Artificial Sequence: Synthetic oligonucleotide
aaugccguguucuagagau

SEQ ID NO: 540159 - RNA, 19 nt, Artificial Sequence
  Description of Artificial Sequence: Synthetic oligonucleotide
aguacauagucucucagag

SEQ ID NO: 540160 - RNA, 19 nt, Artificial Sequence
  Description of Artificial Sequence: Synthetic oligonucleotide
aagaauuacauguggccag

SEQ ID NO: 540161 - RNA, 19 nt, Artificial Sequence
  Description of Artificial Sequence: Synthetic oligonucleotide
auacuuguacaauucauag

SEQ ID NO: 540162 - RNA, 19 nt, Artificial Sequence
  Description of Artificial Sequence: Synthetic oligonucleotide
ucaagaauuacauguggcc

SEQ ID NO: 540163 - RNA, 19 nt, Artificial Sequence
  Description of Artificial Sequence: Synthetic oligonucleotide
uucuuuaaccugauguggg

SEQ ID NO: 540164 - RNA, 19 nt, Artificial Sequence
  Description of Artificial Sequence: Synthetic oligonucleotide
agucaugaaaugcacacag

SEQ ID NO: 540165 - RNA, 19 nt, Artificial Sequence
  Description of Artificial Sequence: Synthetic oligonucleotide
acugauacugauuggcugg

SEQ ID NO: 540166 - RNA, 19 nt, Artificial Sequence
  Description of Artificial Sequence: Synthetic oligonucleotide
augguuauauuuaaauggc

SEQ ID NO: 540167 - RNA, 19 nt, Artificial Sequence
  Description of Artificial Sequence: Synthetic oligonucleotide
uuucuuuaaccugaugugg

SEQ ID NO: 540168 - RNA, 19 nt, Artificial Sequence
  Description of Artificial Sequence: Synthetic oligonucleotide
accuaacucaaguacauag

SEQ ID NO: 540169 - RNA, 19 nt, Artificial Sequence
  Description of Artificial Sequence: Synthetic oligonucleotide
uuauuacccacuuuaccag

SEQ ID NO: 540170 - RNA, 19 nt, Artificial Sequence
  Description of Artificial Sequence: Synthetic oligonucleotide
aacgucuuaucacaggccu

SEQ ID NO: 540171 - RNA, 19 nt, Artificial Sequence
  Description of Artificial Sequence: Synthetic oligonucleotide
uggaucucggccauuaacc

SEQ ID NO: 540172 - RNA, 19 nt, Artificial Sequence
  Description of Artificial Sequence: Synthetic oligonucleotide
uguaguauuugccuuccug

SEQ ID NO: 540173 - RNA, 19 nt, Artificial Sequence
  Description of Artificial Sequence: Synthetic oligonucleotide
aauagccacauccuugcug

SEQ ID NO: 540174 - RNA, 19 nt, Artificial Sequence
  Description of Artificial Sequence: Synthetic oligonucleotide
gggaaugagagguagaaag

SEQ ID NO: 540175 - RNA, 19 nt, Artificial Sequence
  Description of Artificial Sequence: Synthetic oligonucleotide
aaguauacuuguacaauuc

SEQ ID NO: 540176 - RNA, 19 nt, Artificial Sequence
  Description of Artificial Sequence: Synthetic oligonucleotide
uauacuuguacaauucaua

SEQ ID NO: 540177 - RNA, 19 nt, Artificial Sequence
  Description of Artificial Sequence: Synthetic oligonucleotide
aaacugaccagaucaauuu

SEQ ID NO: 540178 - RNA, 19 nt, Artificial Sequence
  Description of Artificial Sequence: Synthetic oligonucleotide
uaccaggcgagaaacaacc

SEQ ID NO: 540179 - RNA, 19 nt, Artificial Sequence
  Description of Artificial Sequence: Synthetic oligonucleotide
aucaagaauuacauguggc

SEQ ID NO: 540180 - RNA, 19 nt, Artificial Sequence
  Description of Artificial Sequence: Synthetic oligonucleotide
uagagaugcgaacuguuug

SEQ ID NO: 540181 - RNA, 19 nt, Artificial Sequence
  Description of Artificial Sequence: Synthetic oligonucleotide
ucguucuucaauuucaaua

SEQ ID NO: 540182 - RNA, 19 nt, Artificial Sequence
  Description of Artificial Sequence: Synthetic oligonucleotide
uguacccuggucuucagca

SEQ ID NO: 540183 - RNA, 19 nt, Artificial Sequence
  Description of Artificial Sequence: Synthetic oligonucleotide
agagucggaaaaugggugg

SEQ ID NO: 540184 - RNA, 19 nt, Artificial Sequence
  Description of Artificial Sequence: Synthetic oligonucleotide
aaucgguuaagcuucuuua

SEQ ID NO: 540185 - RNA, 19 nt, Artificial Sequence
  Description of Artificial Sequence: Synthetic oligonucleotide
uguacaauucauagucucu

SEQ ID NO: 540186 - RNA, 19 nt, Artificial Sequence
  Description of Artificial Sequence: Synthetic oligonucleotide
acauucucgguacuucucg

SEQ ID NO: 540187 - RNA, 19 nt, Artificial Sequence
  Description of Artificial Sequence: Synthetic oligonucleotide
acugguaacuggcacaaug

SEQ ID NO: 540188 - RNA, 19 nt, Artificial Sequence
  Description of Artificial Sequence: Synthetic oligonucleotide
uuagagucaugaaaugcac

SEQ ID NO: 540189 - RNA, 19 nt, Artificial Sequence
  Description of Artificial Sequence: Synthetic oligonucleotide
aaguacauagucucucaga

SEQ ID NO: 540190 - RNA, 19 nt, Artificial Sequence
  Description of Artificial Sequence: Synthetic oligonucleotide
ucgauuucguuucccuucg

SEQ ID NO: 540191 - RNA, 19 nt, Artificial Sequence
  Description of Artificial Sequence: Synthetic oligonucleotide
ugaacucuagacauuuggu

SEQ ID NO: 540192 - RNA, 19 nt, Artificial Sequence
  Description of Artificial Sequence: Synthetic oligonucleotide
ucaauaagcgccagguagu

SEQ ID NO: 540193 - RNA, 19 nt, Artificial Sequence
  Description of Artificial Sequence: Synthetic oligonucleotide
uuucguuucccuucgcuug

SEQ ID NO: 540194 - RNA, 19 nt, Artificial Sequence
  Description of Artificial Sequence: Synthetic oligonucleotide
auauugucaucauugcugu

SEQ ID NO: 540195 - RNA, 19 nt, Artificial Sequence
  Description of Artificial Sequence: Synthetic oligonucleotide
cuaacucaaguacauaguc

SEQ ID NO: 540196 - RNA, 19 nt, Artificial Sequence
  Description of Artificial Sequence: Synthetic oligonucleotide
uagacauuuggugaucucc

SEQ ID NO: 540197 - RNA, 19 nt, Artificial Sequence
  Description of Artificial Sequence: Synthetic oligonucleotide
ucaugagauaguagaaagu

SEQ ID NO: 540198 - RNA, 19 nt, Artificial Sequence
  Description of Artificial Sequence: Synthetic oligonucleotide
gguucaauaccacagcagc

SEQ ID NO: 540199 - RNA, 19 nt, Artificial Sequence
  Description of Artificial Sequence: Synthetic oligonucleotide
gaugcgaacuguuugugga

SEQ ID NO: 540200 - RNA, 19 nt, Artificial Sequence
  Description of Artificial Sequence: Synthetic oligonucleotide
aguuccuuauagcacacgu

SEQ ID NO: 540201 - RNA, 19 nt, Artificial Sequence
  Description of Artificial Sequence: Synthetic oligonucleotide
guauucuugcacugggagg

SEQ ID NO: 540202 - RNA, 19 nt, Artificial Sequence
  Description of Artificial Sequence: Synthetic oligonucleotide
uaaacugaccagaucaauu

SEQ ID NO: 540203 - RNA, 19 nt, Artificial Sequence
  Description of Artificial Sequence: Synthetic oligonucleotide
ugggguuccaucacuucgg

SEQ ID NO: 540204 - RNA, 19 nt, Artificial Sequence
  Description of Artificial Sequence: Synthetic oligonucleotide
aguagcccggguucaauac

SEQ ID NO: 540205 - RNA, 19 nt, Artificial Sequence
  Description of Artificial Sequence: Synthetic oligonucleotide
uucucggccagccuuuucc

SEQ ID NO: 540206 - RNA, 19 nt, Artificial Sequence
  Description of Artificial Sequence: Synthetic oligonucleotide
guagagcagguucugaagc

SEQ ID NO: 540207 - RNA, 19 nt, Artificial Sequence
  Description of Artificial Sequence: Synthetic oligonucleotide
aucgguuaagcuucuuuag

SEQ ID NO: 540208 - RNA, 19 nt, Artificial Sequence
  Description of Artificial Sequence: Synthetic oligonucleotide
aaauuccucuaaacugacc

SEQ ID NO: 540209 - RNA, 19 nt, Artificial Sequence
  Description of Artificial Sequence: Synthetic oligonucleotide
cugguaacuggcacaaugc

SEQ ID NO: 540210 - RNA, 19 nt, Artificial Sequence
  Description of Artificial Sequence: Synthetic oligonucleotide
gacaacgucuuaucacagg

SEQ ID NO: 540211 - RNA, 19 nt, Artificial Sequence
  Description of Artificial Sequence: Synthetic oligonucleotide
ucuuuaaccugaugugggc

SEQ ID NO: 540212 - RNA, 19 nt, Artificial Sequence
  Description of Artificial Sequence: Synthetic oligonucleotide
uacaagcagcucaggaccg

SEQ ID NO: 540213 - RNA, 19 nt, Artificial Sequence
  Description of Artificial Sequence: Synthetic oligonucleotide
uucgcuugggguuccauca

SEQ ID NO: 540214 - RNA, 19 nt, Artificial Sequence
  Description of Artificial Sequence: Synthetic oligonucleotide
uccaaacgugccaaggucu

SEQ ID NO: 540215 - RNA, 19 nt, Artificial Sequence
  Description of Artificial Sequence: Synthetic oligonucleotide
aaauggcaugaacagguau

SEQ ID NO: 540216 - RNA, 19 nt, Artificial Sequence
  Description of Artificial Sequence: Synthetic oligonucleotide
agagauugguguccccagc

SEQ ID NO: 540217 - RNA, 19 nt, Artificial Sequence
  Description of Artificial Sequence: Synthetic oligonucleotide
uguacccacaaguagggau

SEQ ID NO: 540218 - RNA, 19 nt, Artificial Sequence
  Description of Artificial Sequence: Synthetic oligonucleotide
cuccauagcccgaauauug

SEQ ID NO: 540219 - RNA, 19 nt, Artificial Sequence
  Description of Artificial Sequence: Synthetic oligonucleotide
uucguuucccuucgcuugg

SEQ ID NO: 540220 - RNA, 19 nt, Artificial Sequence
  Description of Artificial Sequence: Synthetic oligonucleotide
ucgguuaagcuucuuuaga

SEQ ID NO: 540221 - RNA, 19 nt, Artificial Sequence
  Description of Artificial Sequence: Synthetic oligonucleotide
ggggugaucagcucuaccg

SEQ ID NO: 540222 - RNA, 19 nt, Artificial Sequence
  Description of Artificial Sequence: Synthetic oligonucleotide
caauuauuacccacuuuac

SEQ ID NO: 540223 - RNA, 19 nt, Artificial Sequence
  Description of Artificial Sequence: Synthetic oligonucleotide
ggaugguuauauuuaaaug

SEQ ID NO: 540224 - RNA, 19 nt, Artificial Sequence
  Description of Artificial Sequence: Synthetic oligonucleotide
agaugcgaacuguuugugg

SEQ ID NO: 540225 - RNA, 19 nt, Artificial Sequence
  Description of Artificial Sequence: Synthetic oligonucleotide
aggugcaucacuucguaga

SEQ ID NO: 540226 - RNA, 19 nt, Artificial Sequence
  Description of Artificial Sequence: Synthetic oligonucleotide
uuacccacuuuaccaggcg

SEQ ID NO: 540227 - RNA, 19 nt, Artificial Sequence
  Description of Artificial Sequence: Synthetic oligonucleotide
cuucaauugccacagacaa

SEQ ID NO: 540228 - RNA, 19 nt, Artificial Sequence
  Description of Artificial Sequence: Synthetic oligonucleotide
agggacgccugcaugaugc

SEQ ID NO: 540229 - RNA, 19 nt, Artificial Sequence
  Description of Artificial Sequence: Synthetic oligonucleotide
uggcaaguauacuuguaca

SEQ ID NO: 540230 - RNA, 19 nt, Artificial Sequence
  Description of Artificial Sequence: Synthetic oligonucleotide
uuuaccaggcgagaaacaa

SEQ ID NO: 540231 - RNA, 19 nt, Artificial Sequence
  Description of Artificial Sequence: Synthetic oligonucleotide
gguauucuugcacugggag

SEQ ID NO: 540232 - RNA, 19 nt, Artificial Sequence
  Description of Artificial Sequence: Synthetic oligonucleotide
ugccaacuuuaucaaacug

SEQ ID NO: 540233 - RNA, 19 nt, Artificial Sequence
  Description of Artificial Sequence: Synthetic oligonucleotide
uagagucaugaaaugcaca

SEQ ID NO: 540234 - RNA, 19 nt, Artificial Sequence
  Description of Artificial Sequence: Synthetic oligonucleotide
ugucaugauguugagguuc

SEQ ID NO: 540235 - RNA, 19 nt, Artificial Sequence
  Description of Artificial Sequence: Synthetic oligonucleotide
uacuuguacaauucauagu

SEQ ID NO: 540236 - RNA, 19 nt, Artificial Sequence
  Description of Artificial Sequence: Synthetic oligonucleotide
ugaguggucugcuaucacu

SEQ ID NO: 540237 - RNA, 19 nt, Artificial Sequence
  Description of Artificial Sequence: Synthetic oligonucleotide
cgagaaacaaccuuggcag

SEQ ID NO: 540238 - RNA, 19 nt, Artificial Sequence
  Description of Artificial Sequence: Synthetic oligonucleotide
gucagaucgauuucguuuc

SEQ ID NO: 540239 - RNA, 19 nt, Artificial Sequence
  Description of Artificial Sequence: Synthetic oligonucleotide
auuacccacuuuaccaggc

SEQ ID NO: 540240 - RNA, 19 nt, Artificial Sequence
  Description of Artificial Sequence: Synthetic oligonucleotide
agugggugccuuuucagca

SEQ ID NO: 540241 - RNA, 19 nt, Artificial Sequence
  Description of Artificial Sequence: Synthetic oligonucleotide
ugggcuaaucgguuaagcu

SEQ ID NO: 540242 - RNA, 19 nt, Artificial Sequence
  Description of Artificial Sequence: Synthetic oligonucleotide
ugaaccccagugugggucg

SEQ ID NO: 540243 - RNA, 19 nt, Artificial Sequence
  Description of Artificial Sequence: Synthetic oligonucleotide
ugaccuaacucaaguacau

SEQ ID NO: 540244 - RNA, 19 nt, Artificial Sequence
  Description of Artificial Sequence: Synthetic oligonucleotide
uagacagagucggaaaaug

SEQ ID NO: 540245 - RNA, 19 nt, Artificial Sequence
  Description of Artificial Sequence: Synthetic oligonucleotide
uccuuauagcacacguuga

SEQ ID NO: 540246 - RNA, 19 nt, Artificial Sequence
  Description of Artificial Sequence: Synthetic oligonucleotide
gcaauuauuacccacuuua

SEQ ID NO: 540247 - RNA, 19 nt, Artificial Sequence
  Description of Artificial Sequence: Synthetic oligonucleotide
uagagauugguguccccag

SEQ ID NO: 540248 - RNA, 19 nt, Artificial Sequence
  Description of Artificial Sequence: Synthetic oligonucleotide
ucauccaacugaaccccag

SEQ ID NO: 540249 - RNA, 19 nt, Artificial Sequence
  Description of Artificial Sequence: Synthetic oligonucleotide
ugccguguucuagagaugc

SEQ ID NO: 540250 - RNA, 19 nt, Artificial Sequence
  Description of Artificial Sequence: Synthetic oligonucleotide
uaaucgguuaagcuucuuu

SEQ ID NO: 540251 - RNA, 19 nt, Artificial Sequence
  Description of Artificial Sequence: Synthetic oligonucleotide
cagacaacgucuuaucaca

SEQ ID NO: 540252 - RNA, 19 nt, Artificial Sequence
  Description of Artificial Sequence: Synthetic oligonucleotide
uuuaaccugaugugggcua

SEQ ID NO: 540253 - RNA, 19 nt, Artificial Sequence
  Description of Artificial Sequence: Synthetic oligonucleotide
uuaccaggcgagaaacaac

SEQ ID NO: 540254 - RNA, 19 nt, Artificial Sequence
  Description of Artificial Sequence: Synthetic oligonucleotide
ucuagagaugcgaacuguu

SEQ ID NO: 540255 - RNA, 19 nt, Artificial Sequence
  Description of Artificial Sequence: Synthetic oligonucleotide
acuauguccuuagugaaau

SEQ ID NO: 540256 - RNA, 19 nt, Artificial Sequence
  Description of Artificial Sequence: Synthetic oligonucleotide
caaguacauagucucucag

SEQ ID NO: 540257 - RNA, 19 nt, Artificial Sequence
  Description of Artificial Sequence: Synthetic oligonucleotide
uacuauguccuuagugaaa

SEQ ID NO: 540258 - RNA, 19 nt, Artificial Sequence
  Description of Artificial Sequence: Synthetic oligonucleotide
uucggaucacuuuuggguu

SEQ ID NO: 540259 - RNA, 19 nt, Artificial Sequence
  Description of Artificial Sequence: Synthetic oligonucleotide
aauaagcgccagguaguag

SEQ ID NO: 540260 - RNA, 19 nt, Artificial Sequence
  Description of Artificial Sequence: Synthetic oligonucleotide
ucuagacauuuggugaucu

SEQ ID NO: 540261 - RNA, 19 nt, Artificial Sequence
  Description of Artificial Sequence: Synthetic oligonucleotide
ucggaaaaugggugggaug

SEQ ID NO: 540262 - RNA, 19 nt, Artificial Sequence
  Description of Artificial Sequence: Synthetic oligonucleotide
agacauucucgguacuucu

SEQ ID NO: 540263 - RNA, 19 nt, Artificial Sequence
  Description of Artificial Sequence: Synthetic oligonucleotide
ggcaucaacuuucugcuug

SEQ ID NO: 540264 - RNA, 19 nt, Artificial Sequence
  Description of Artificial Sequence: Synthetic oligonucleotide
ucaagaguugguggcuggg

SEQ ID NO: 540265 - RNA, 19 nt, Artificial Sequence
  Description of Artificial Sequence: Synthetic oligonucleotide
gguagaaagggacaucauc

SEQ ID NO: 540266 - RNA, 19 nt, Artificial Sequence
  Description of Artificial Sequence: Synthetic oligonucleotide
uuaaccuuuguagcuccug

SEQ ID NO: 540267 - RNA, 19 nt, Artificial Sequence
  Description of Artificial Sequence: Synthetic oligonucleotide
cagugucagaucgauuucg

SEQ ID NO: 540268 - RNA, 19 nt, Artificial Sequence
  Description of Artificial Sequence: Synthetic oligonucleotide
gagucggaaaauggguggg

SEQ ID NO: 540269 - RNA, 19 nt, Artificial Sequence
  Description of Artificial Sequence: Synthetic oligonucleotide
ucucggccagccuuuuccg

SEQ ID NO: 540270 - RNA, 19 nt, Artificial Sequence
  Description of Artificial Sequence: Synthetic oligonucleotide
aaccugaugugggcuaauc

SEQ ID NO: 540271 - RNA, 19 nt, Artificial Sequence
  Description of Artificial Sequence: Synthetic oligonucleotide
ugugggucgacgccguuuc

SEQ ID NO: 540272 - RNA, 19 nt, Artificial Sequence
  Description of Artificial Sequence: Synthetic oligonucleotide
ucguagagcagguucugaa

SEQ ID NO: 540273 - RNA, 19 nt, Artificial Sequence
  Description of Artificial Sequence: Synthetic oligonucleotide
aaacaaccuuggcagggaa

SEQ ID NO: 540274 - RNA, 19 nt, Artificial Sequence
  Description of Artificial Sequence: Synthetic oligonucleotide
cacguugacuucacucucc

SEQ ID NO: 540275 - RNA, 19 nt, Artificial Sequence
  Description of Artificial Sequence: Synthetic oligonucleotide
uugugugccuggucaaaug

SEQ ID NO: 540276 - RNA, 19 nt, Artificial Sequence
  Description of Artificial Sequence: Synthetic oligonucleotide
ggccauuaaccuuuguagc

SEQ ID NO: 540277 - RNA, 19 nt, Artificial Sequence
  Description of Artificial Sequence: Synthetic oligonucleotide
cuuugcacuucagaucaag

SEQ ID NO: 540278 - RNA, 19 nt, Artificial Sequence
  Description of Artificial Sequence: Synthetic oligonucleotide
augcgaacuguuuguggag

SEQ ID NO: 540279 - RNA, 19 nt, Artificial Sequence
  Description of Artificial Sequence: Synthetic oligonucleotide
aacaaccuuggcagggaag

SEQ ID NO: 540280 - RNA, 19 nt, Artificial Sequence
  Description of Artificial Sequence: Synthetic oligonucleotide
augagauaguagaaaguca

SEQ ID NO: 540281 - RNA, 19 nt, Artificial Sequence
  Description of Artificial Sequence: Synthetic oligonucleotide
cuggaucucggccauuaac

SEQ ID NO: 540282 - RNA, 19 nt, Artificial Sequence
  Description of Artificial Sequence: Synthetic oligonucleotide
guacccacaaguagggaug

SEQ ID NO: 540283 - RNA, 19 nt, Artificial Sequence
  Description of Artificial Sequence: Synthetic oligonucleotide
ggugcaucacuucguagag

SEQ ID NO: 540284 - RNA, 19 nt, Artificial Sequence
  Description of Artificial Sequence: Synthetic oligonucleotide
ccuugcugauguuuggugg

SEQ ID NO: 540285 - RNA, 19 nt, Artificial Sequence
  Description of Artificial Sequence: Synthetic oligonucleotide
aguuucaugguggucucca

SEQ ID NO: 540286 - RNA, 19 nt, Artificial Sequence
  Description of Artificial Sequence: Synthetic oligonucleotide
ucuaccgcgguugucacuu

SEQ ID NO: 540287 - RNA, 19 nt, Artificial Sequence
  Description of Artificial Sequence: Synthetic oligonucleotide
ggggaaauuccuuggggcc

SEQ ID NO: 540288 - RNA, 19 nt, Artificial Sequence
  Description of Artificial Sequence: Synthetic oligonucleotide
ugaugcuguugagucgagg

SEQ ID NO: 540289 - RNA, 19 nt, Artificial Sequence
  Description of Artificial Sequence: Synthetic oligonucleotide
gcgagaaacaaccuuggca

SEQ ID NO: 540290 - RNA, 19 nt, Artificial Sequence
  Description of Artificial Sequence: Synthetic oligonucleotide
caggccugcccauaugcag

SEQ ID NO: 540291 - RNA, 19 nt, Artificial Sequence
  Description of Artificial Sequence: Synthetic oligonucleotide
agacauuuggugaucuccu

SEQ ID NO: 540292 - RNA, 19 nt, Artificial Sequence
  Description of Artificial Sequence: Synthetic oligonucleotide
acuucguagagcagguucu

SEQ ID NO: 540293 - RNA, 19 nt, Artificial Sequence
  Description of Artificial Sequence: Synthetic oligonucleotide
agauugguguccccagcca

SEQ ID NO: 540294 - RNA, 19 nt, Artificial Sequence
  Description of Artificial Sequence: Synthetic oligonucleotide
cuacuauguccuuagugaa

SEQ ID NO: 540295 - RNA, 19 nt, Artificial Sequence
  Description of Artificial Sequence: Synthetic oligonucleotide
gaauuacauguggccagag

SEQ ID NO: 540296 - RNA, 19 nt, Artificial Sequence
  Description of Artificial Sequence: Synthetic oligonucleotide
accgagucaggagacagca

SEQ ID NO: 540297 - RNA, 19 nt, Artificial Sequence
  Description of Artificial Sequence: Synthetic oligonucleotide
agcucuaccgcgguuguca

SEQ ID NO: 540298 - RNA, 19 nt, Artificial Sequence
  Description of Artificial Sequence: Synthetic oligonucleotide
uccuggcaaguauacuugu

SEQ ID NO: 540299 - RNA, 19 nt, Artificial Sequence
  Description of Artificial Sequence: Synthetic oligonucleotide
guccaaacgugccaagguc

SEQ ID NO: 540300 - RNA, 19 nt, Artificial Sequence
  Description of Artificial Sequence: Synthetic oligonucleotide
guagcccggguucaauacc

SEQ ID NO: 540301 - RNA, 19 nt, Artificial Sequence
  Description of Artificial Sequence: Synthetic oligonucleotide
ugcacugggagggacgccu

SEQ ID NO: 540302 - RNA, 19 nt, Artificial Sequence
  Description of Artificial Sequence: Synthetic oligonucleotide
ggcuaaucgguuaagcuuc

SEQ ID NO: 540303 - RNA, 19 nt, Artificial Sequence
  Description of Artificial Sequence: Synthetic oligonucleotide
caguccaaacgugccaagg

SEQ ID NO: 540304 - RNA, 19 nt, Artificial Sequence
  Description of Artificial Sequence: Synthetic oligonucleotide
gaaacaaccuuggcaggga

SEQ ID NO: 540305 - RNA, 19 nt, Artificial Sequence
  Description of Artificial Sequence: Synthetic oligonucleotide
ggacagacauucucgguac

SEQ ID NO: 540306 - RNA, 19 nt, Artificial Sequence
  Description of Artificial Sequence: Synthetic oligonucleotide
acguugacuucacucucca

SEQ ID NO: 540307 - RNA, 19 nt, Artificial Sequence
  Description of Artificial Sequence: Synthetic oligonucleotide
cuagacauuuggugaucuc

SEQ ID NO: 540308 - RNA, 19 nt, Artificial Sequence
  Description of Artificial Sequence: Synthetic oligonucleotide
cuucgcuugggguuccauc

SEQ ID NO: 540309 - RNA, 19 nt, Artificial Sequence
  Description of Artificial Sequence: Synthetic oligonucleotide
guacccuggucuucagcag

SEQ ID NO: 540310 - RNA, 19 nt, Artificial Sequence
  Description of Artificial Sequence: Synthetic oligonucleotide
uuaaccugaugugggcuaa

SEQ ID NO: 540311 - RNA, 19 nt, Artificial Sequence
  Description of Artificial Sequence: Synthetic oligonucleotide
ccuuauagcacacguugac

SEQ ID NO: 540312 - RNA, 19 nt, Artificial Sequence
  Description of Artificial Sequence: Synthetic oligonucleotide
aggcgagaaacaaccuugg

SEQ ID NO: 540313 - RNA, 19 nt, Artificial Sequence
  Description of Artificial Sequence: Synthetic oligonucleotide
gucaugaaaugcacacagc

SEQ ID NO: 540314 - RNA, 19 nt, Artificial Sequence
  Description of Artificial Sequence: Synthetic oligonucleotide
ucgcucucaucaucuugag

SEQ ID NO: 540315 - RNA, 19 nt, Artificial Sequence
  Description of Artificial Sequence: Synthetic oligonucleotide
cggccauuaaccuuuguag

SEQ ID NO: 540316 - RNA, 19 nt, Artificial Sequence
  Description of Artificial Sequence: Synthetic oligonucleotide
aguccagccucuacuaugu

SEQ ID NO: 540317 - RNA, 19 nt, Artificial Sequence
  Description of Artificial Sequence: Synthetic oligonucleotide
cccggguucaauaccacag

SEQ ID NO: 540318 - RNA, 19 nt, Artificial Sequence
  Description of Artificial Sequence: Synthetic oligonucleotide
cacacguugacuucacucu

SEQ ID NO: 540319 - RNA, 19 nt, Artificial Sequence
  Description of Artificial Sequence: Synthetic oligonucleotide
ucauccuacuuggaccccu

SEQ ID NO: 540320 - RNA, 19 nt, Artificial Sequence
  Description of Artificial Sequence: Synthetic oligonucleotide
cgguuaagcuucuuuagag

SEQ ID NO: 540321 - RNA, 19 nt, Artificial Sequence
  Description of Artificial Sequence: Synthetic oligonucleotide
aagucagaugaagcacacu

SEQ ID NO: 540322 - RNA, 19 nt, Artificial Sequence
  Description of Artificial Sequence: Synthetic oligonucleotide
uaccgcgguugucacuuug

SEQ ID NO: 540323 - RNA, 19 nt, Artificial Sequence
  Description of Artificial Sequence: Synthetic oligonucleotide
uccuuggggcccucuacac

SEQ ID NO: 540324 - RNA, 19 nt, Artificial Sequence
  Description of Artificial Sequence: Synthetic oligonucleotide
augugggcuaaucgguuaa

SEQ ID NO: 540325 - RNA, 19 nt, Artificial Sequence
  Description of Artificial Sequence: Synthetic oligonucleotide
cacuucagaucaaguaaga

SEQ ID NO: 540326 - RNA, 19 nt, Artificial Sequence
  Description of Artificial Sequence: Synthetic oligonucleotide
acccacuuuaccaggcgag

SEQ ID NO: 540327 - RNA, 19 nt, Artificial Sequence
  Description of Artificial Sequence: Synthetic oligonucleotide
cauuguugcucuuccaggu

SEQ ID NO: 540328 - RNA, 19 nt, Artificial Sequence
  Description of Artificial Sequence: Synthetic oligonucleotide
uucguagagcagguucuga

SEQ ID NO: 540329 - RNA, 19 nt, Artificial Sequence
  Description of Artificial Sequence: Synthetic oligonucleotide
gucugcuaucacugugugc

SEQ ID NO: 540330 - RNA, 19 nt, Artificial Sequence
  Description of Artificial Sequence: Synthetic oligonucleotide
aucaaguaagacagacagu

SEQ ID NO: 540331 - RNA, 19 nt, Artificial Sequence
  Description of Artificial Sequence: Synthetic oligonucleotide
gugggcuaaucgguuaagc

SEQ ID NO: 540332 - RNA, 19 nt, Artificial Sequence
  Description of Artificial Sequence: Synthetic oligonucleotide
ggacuugaacucuagacau

SEQ ID NO: 540333 - RNA, 19 nt, Artificial Sequence
  Description of Artificial Sequence: Synthetic oligonucleotide
ggguucaauaccacagcag

SEQ ID NO: 540334 - RNA, 19 nt, Artificial Sequence
  Description of Artificial Sequence: Synthetic oligonucleotide
caggcgagacuguacccug

SEQ ID NO: 540335 - RNA, 19 nt, Artificial Sequence
  Description of Artificial Sequence: Synthetic oligonucleotide
ugcuugugugccuggucaa

SEQ ID NO: 540336 - RNA, 19 nt, Artificial Sequence
  Description of Artificial Sequence: Synthetic oligonucleotide
ggaggaguagcccggguuc

SEQ ID NO: 540337 - RNA, 19 nt, Artificial Sequence
  Description of Artificial Sequence: Synthetic oligonucleotide
aaggucuguuggugagggu

SEQ ID NO: 540338 - RNA, 19 nt, Artificial Sequence
  Description of Artificial Sequence: Synthetic oligonucleotide
gacgccguuucguggucug

SEQ ID NO: 540339 - RNA, 19 nt, Artificial Sequence
  Description of Artificial Sequence: Synthetic oligonucleotide
gcucagauacuccuucuuc

SEQ ID NO: 540340 - RNA, 19 nt, Artificial Sequence
  Description of Artificial Sequence: Synthetic oligonucleotide
gccaaggucuguuggugag

SEQ ID NO: 540341 - RNA, 19 nt, Artificial Sequence
  Description of Artificial Sequence: Synthetic oligonucleotide
accgcgguugucacuuugg

SEQ ID NO: 540342 - RNA, 19 nt, Artificial Sequence
  Description of Artificial Sequence: Synthetic oligonucleotide
ucgcuugggguuccaucac

SEQ ID NO: 540343 - RNA, 19 nt, Artificial Sequence
  Description of Artificial Sequence: Synthetic oligonucleotide
gguuaagcuucuuuagagu

SEQ ID NO: 540344 - RNA, 19 nt, Artificial Sequence
  Description of Artificial Sequence: Synthetic oligonucleotide
ccuacuuggaccccuaaaa

SEQ ID NO: 540345 - RNA, 19 nt, Artificial Sequence
  Description of Artificial Sequence: Synthetic oligonucleotide
cucggccagccuuuuccgc

SEQ ID NO: 540346 - RNA, 19 nt, Artificial Sequence
  Description of Artificial Sequence: Synthetic oligonucleotide
ggucgacgccguuucgugg

SEQ ID NO: 540347 - RNA, 19 nt, Artificial Sequence
  Description of Artificial Sequence: Synthetic oligonucleotide
cauggcucuccgucuccag

SEQ ID NO: 540348 - RNA, 19 nt, Artificial Sequence
  Description of Artificial Sequence: Synthetic oligonucleotide
ucgguggcugaagaauccu

SEQ ID NO: 540349 - RNA, 19 nt, Artificial Sequence
  Description of Artificial Sequence: Synthetic oligonucleotide
gaccgagucaggagacagc

SEQ ID NO: 540350 - RNA, 19 nt, Artificial Sequence
  Description of Artificial Sequence: Synthetic oligonucleotide
agucgaggcuggaggcugc

SEQ ID NO: 540351 - RNA, 19 nt, Artificial Sequence
  Description of Artificial Sequence: Synthetic oligonucleotide
caguuccuuauagcacacg

SEQ ID NO: 540352 - RNA, 19 nt, Artificial Sequence
  Description of Artificial Sequence: Synthetic oligonucleotide
uucauccuacuuggacccc

SEQ ID NO: 540353 - RNA, 19 nt, Artificial Sequence
  Description of Artificial Sequence: Synthetic oligonucleotide
ugggucgacgccguuucgu

SEQ ID NO: 540354 - RNA, 19 nt, Artificial Sequence
  Description of Artificial Sequence: Synthetic oligonucleotide
uucuugcacugggagggac

SEQ ID NO: 540355 - RNA, 19 nt, Artificial Sequence
  Description of Artificial Sequence: Synthetic oligonucleotide
gagggacgccugcaugaug

SEQ ID NO: 540356 - RNA, 19 nt, Artificial Sequence
  Description of Artificial Sequence: Synthetic oligonucleotide
cuuauagcacacguugacu

SEQ ID NO: 540357 - RNA, 19 nt, Artificial Sequence
  Description of Artificial Sequence: Synthetic oligonucleotide
gcuguugagucgaggcugg

SEQ ID NO: 540358 - RNA, 19 nt, Artificial Sequence
  Description of Artificial Sequence: Synthetic oligonucleotide
gacgccugcaugaugcugu

SEQ ID NO: 540359 - RNA, 19 nt, Artificial Sequence
  Description of Artificial Sequence: Synthetic oligonucleotide
ggcgagaaacaaccuuggc

SEQ ID NO: 540360 - RNA, 19 nt, Artificial Sequence
  Description of Artificial Sequence: Synthetic oligonucleotide
gccuugcugauguuuggug

SEQ ID NO: 540361 - RNA, 19 nt, Artificial Sequence
  Description of Artificial Sequence: Synthetic oligonucleotide
ccaaacgugccaaggucug

SEQ ID NO: 540362 - RNA, 19 nt, Artificial Sequence
  Description of Artificial Sequence: Synthetic oligonucleotide
auccuucguucuucaauuu

SEQ ID NO: 540363 - RNA, 19 nt, Artificial Sequence
  Description of Artificial Sequence: Synthetic oligonucleotide
ucuuugcgcuugucaucca

SEQ ID NO: 540364 - RNA, 19 nt, Artificial Sequence
  Description of Artificial Sequence: Synthetic oligonucleotide
agccuugcugauguuuggu

SEQ ID NO: 540365 - RNA, 19 nt, Artificial Sequence
  Description of Artificial Sequence: Synthetic oligonucleotide
ccugcccauaugcaguggc

SEQ ID NO: 540366 - RNA, 19 nt, Artificial Sequence
  Description of Artificial Sequence: Synthetic oligonucleotide
ucggagucgcucucaucau

SEQ ID NO: 540367 - RNA, 19 nt, Artificial Sequence
  Description of Artificial Sequence: Synthetic oligonucleotide
agguauucuugcacuggga

SEQ ID NO: 540368 - RNA, 19 nt, Artificial Sequence
  Description of Artificial Sequence: Synthetic oligonucleotide
gcgguugucacuuuggcuu

SEQ ID NO: 540369 - RNA, 19 nt, Artificial Sequence
  Description of Artificial Sequence: Synthetic oligonucleotide
guugguggcugggccgagg

SEQ ID NO: 540370 - RNA, 19 nt, Artificial Sequence
  Description of Artificial Sequence: Synthetic oligonucleotide
acgucuuaucacaggccug

SEQ ID NO: 540371 - RNA, 19 nt, Artificial Sequence
  Description of Artificial Sequence: Synthetic oligonucleotide
ggaugaccuaacucaagua

SEQ ID NO: 540372 - RNA, 19 nt, Artificial Sequence
  Description of Artificial Sequence: Synthetic oligonucleotide
ccauagcccgaauauuguc

SEQ ID NO: 540373 - RNA, 19 nt, Artificial Sequence
  Description of Artificial Sequence: Synthetic oligonucleotide
ggaguuuucuuuccauggu

SEQ ID NO: 540374 - RNA, 19 nt, Artificial Sequence
  Description of Artificial Sequence: Synthetic oligonucleotide
ccggguucaauaccacagc

SEQ ID NO: 540375 - RNA, 19 nt, Artificial Sequence
  Description of Artificial Sequence: Synthetic oligonucleotide
gggucgacgccguuucgug

SEQ ID NO: 540376 - RNA, 19 nt, Artificial Sequence
  Description of Artificial Sequence: Synthetic oligonucleotide
acgccguuucguggucugc

SEQ ID NO: 540377 - RNA, 19 nt, Artificial Sequence
  Description of Artificial Sequence: Synthetic oligonucleotide
aggcgagacuguacccugg

SEQ ID NO: 540378 - RNA, 19 nt, Artificial Sequence
  Description of Artificial Sequence: Synthetic oligonucleotide
cugauacugauuggcugga

SEQ ID NO: 540379 - RNA, 19 nt, Artificial Sequence
  Description of Artificial Sequence: Synthetic oligonucleotide
agcaucggagucgcucuca

SEQ ID NO: 540380 - RNA, 19 nt, Artificial Sequence
  Description of Artificial Sequence: Synthetic oligonucleotide
gugggucgacgccguuucg

SEQ ID NO: 540381 - RNA, 19 nt, Artificial Sequence
  Description of Artificial Sequence: Synthetic oligonucleotide
guacuucucggccagccuu

SEQ ID NO: 540382 - RNA, 19 nt, Artificial Sequence
  Description of Artificial Sequence: Synthetic oligonucleotide
gucgacgccguuucguggu

SEQ ID NO: 540383 - RNA, 19 nt, Artificial Sequence
  Description of Artificial Sequence: Synthetic oligonucleotide
acaggccugcccauaugca

SEQ ID NO: 540384 - RNA, 19 nt, Artificial Sequence
  Description of Artificial Sequence: Synthetic oligonucleotide
ccacaaguagggaugaccu

SEQ ID NO: 540385 - RNA, 19 nt, Artificial Sequence
  Description of Artificial Sequence: Synthetic oligonucleotide
agcccggguucaauaccac

SEQ ID NO: 540386 - RNA, 19 nt, Artificial Sequence
  Description of Artificial Sequence: Synthetic oligonucleotide
cacaaguagggaugaccua

SEQ ID NO: 540387 - RNA, 19 nt, Artificial Sequence
  Description of Artificial Sequence: Synthetic oligonucleotide
auucuugcacugggaggga

SEQ ID NO: 540388 - RNA, 19 nt, Artificial Sequence
  Description of Artificial Sequence: Synthetic oligonucleotide
ucgacgccguuucgugguc

SEQ ID NO: 540389 - RNA, 19 nt, Artificial Sequence
  Description of Artificial Sequence: Synthetic oligonucleotide
gaccuaacucaaguacaua

SEQ ID NO: 540390 - RNA, 19 nt, Artificial Sequence
  Description of Artificial Sequence: Synthetic oligonucleotide
accaggcgagaaacaaccu

SEQ ID NO: 540391 - RNA, 19 nt, Artificial Sequence
  Description of Artificial Sequence: Synthetic oligonucleotide
agguagaaagggacaucau

SEQ ID NO: 540392 - RNA, 19 nt, Artificial Sequence
  Description of Artificial Sequence: Synthetic oligonucleotide
guuucguggucugcuccuc

SEQ ID NO: 540393 - RNA, 19 nt, Artificial Sequence
  Description of Artificial Sequence: Synthetic oligonucleotide
uaaccugaugugggcuaau

SEQ ID NO: 540394 - RNA, 19 nt, Artificial Sequence
  Description of Artificial Sequence: Synthetic oligonucleotide
uugcacugggagggacgcc

SEQ ID NO: 540395 - RNA, 19 nt, Artificial Sequence
  Description of Artificial Sequence: Synthetic oligonucleotide
agccucuacuauguccuua

SEQ ID NO: 540396 - RNA, 19 nt, Artificial Sequence
  Description of Artificial Sequence: Synthetic oligonucleotide
gccguguucuagagaugcg

SEQ ID NO: 540397 - RNA, 19 nt, Artificial Sequence
  Description of Artificial Sequence: Synthetic oligonucleotide
aguugguggcugggccgag

SEQ ID NO: 540398 - RNA, 19 nt, Artificial Sequence
  Description of Artificial Sequence: Synthetic oligonucleotide
ccccagugugggucgacgc

SEQ ID NO: 540399 - RNA, 19 nt, Artificial Sequence
  Description of Artificial Sequence: Synthetic oligonucleotide
cauccuacuuggaccccua

SEQ ID NO: 540400 - RNA, 19 nt, Artificial Sequence
  Description of Artificial Sequence: Synthetic oligonucleotide
ccccuuucaauaagcgcca

SEQ ID NO: 540401 - RNA, 19 nt, Artificial Sequence
  Description of Artificial Sequence: Synthetic oligonucleotide
augccguguucuagagaug

SEQ ID NO: 540402 - RNA, 19 nt, Artificial Sequence
  Description of Artificial Sequence: Synthetic oligonucleotide
ccgcgguugucacuuuggc

SEQ ID NO: 540403 - RNA, 19 nt, Artificial Sequence
  Description of Artificial Sequence: Synthetic oligonucleotide
cgaacuguuuguggagagc

SEQ ID NO: 540404 - RNA, 19 nt, Artificial Sequence
  Description of Artificial Sequence: Synthetic oligonucleotide
ucccuucgcuugggguucc

SEQ ID NO: 540405 - RNA, 19 nt, Artificial Sequence
  Description of Artificial Sequence: Synthetic oligonucleotide
cguguucuagagaugcgaa

SEQ ID NO: 540406 - RNA, 19 nt, Artificial Sequence
  Description of Artificial Sequence: Synthetic oligonucleotide
cuugugugccuggucaaau

SEQ ID NO: 540407 - RNA, 19 nt, Artificial Sequence
  Description of Artificial Sequence: Synthetic oligonucleotide
guugggcuuuggggaauga

SEQ ID NO: 540408 - RNA, 19 nt, Artificial Sequence
  Description of Artificial Sequence: Synthetic oligonucleotide
cagagucaggaugccaacu

SEQ ID NO: 540409 - RNA, 19 nt, Artificial Sequence
  Description of Artificial Sequence: Synthetic oligonucleotide
gccguuucguggucugcuc

SEQ ID NO: 540410 - RNA, 19 nt, Artificial Sequence
  Description of Artificial Sequence: Synthetic oligonucleotide
gcccggguucaauaccaca

SEQ ID NO: 540411 - RNA, 19 nt, Artificial Sequence
  Description of Artificial Sequence: Synthetic oligonucleotide
gggcaauuauuacccacuu

SEQ ID NO: 540412 - RNA, 19 nt, Artificial Sequence
  Description of Artificial Sequence: Synthetic oligonucleotide
agggucucccauggugauu

SEQ ID NO: 540413 - RNA, 19 nt, Artificial Sequence
  Description of Artificial Sequence: Synthetic oligonucleotide
ccuggcaaguauacuugua

SEQ ID NO: 540414 - RNA, 19 nt, Artificial Sequence
  Description of Artificial Sequence: Synthetic oligonucleotide
gggucucccauggugauuu

SEQ ID NO: 540415 - RNA, 19 nt, Artificial Sequence
  Description of Artificial Sequence: Synthetic oligonucleotide
ggcgagacuguacccuggu

SEQ ID NO: 540416 - RNA, 19 nt, Artificial Sequence
  Description of Artificial Sequence: Synthetic oligonucleotide
caaacgugccaaggucugu

SEQ ID NO: 540417 - RNA, 19 nt, Artificial Sequence
  Description of Artificial Sequence: Synthetic oligonucleotide
cgauuucguuucccuucgc

SEQ ID NO: 540418 - RNA, 19 nt, Artificial Sequence
  Description of Artificial Sequence: Synthetic oligonucleotide
cagcucuaccgcgguuguc

SEQ ID NO: 540419 - RNA, 19 nt, Artificial Sequence
  Description of Artificial Sequence: Synthetic oligonucleotide
ggucucccauggugauuuc

SEQ ID NO: 540420 - RNA, 19 nt, Artificial Sequence
  Description of Artificial Sequence: Synthetic oligonucleotide
gcuaaucgguuaagcuucu

SEQ ID NO: 540421 - RNA, 19 nt, Artificial Sequence
  Description of Artificial Sequence: Synthetic oligonucleotide
ggugagggucucccauggu

SEQ ID NO: 540422 - RNA, 19 nt, Artificial Sequence
  Description of Artificial Sequence: Synthetic oligonucleotide
cgugccaaggucuguuggu

SEQ ID NO: 540423 - RNA, 19 nt, Artificial Sequence
  Description of Artificial Sequence: Synthetic oligonucleotide
gcccgaauauugucaucau

SEQ ID NO: 540424 - RNA, 19 nt, Artificial Sequence
  Description of Artificial Sequence: Synthetic oligonucleotide
cuaaucgguuaagcuucuu

SEQ ID NO: 540425 - RNA, 19 nt, Artificial Sequence
  Description of Artificial Sequence: Synthetic oligonucleotide
ccgagucaggagacagcaa

SEQ ID NO: 540426 - RNA, 19 nt, Artificial Sequence
  Description of Artificial Sequence: Synthetic oligonucleotide
cugggccgagggccacaca

SEQ ID NO: 540427 - RNA, 19 nt, Artificial Sequence
  Description of Artificial Sequence: Synthetic oligonucleotide
ggagggacgccugcaugau

SEQ ID NO: 540428 - RNA, 19 nt, Artificial Sequence
  Description of Artificial Sequence: Synthetic oligonucleotide
cgcgguugucacuuuggcu

SEQ ID NO: 540429 - RNA, 19 nt, Artificial Sequence
  Description of Artificial Sequence: Synthetic oligonucleotide
cuaccgcgguugucacuuu

SEQ ID NO: 540430 - RNA, 19 nt, Artificial Sequence
  Description of Artificial Sequence: Synthetic oligonucleotide
cacugguaacuggcacaau

SEQ ID NO: 540431 - RNA, 19 nt, Artificial Sequence
  Description of Artificial Sequence: Synthetic oligonucleotide
gcgccagguaguagagauu

SEQ ID NO: 540432 - RNA, 19 nt, Artificial Sequence
  Description of Artificial Sequence: Synthetic oligonucleotide
ccuucgcuugggguuccau

SEQ ID NO: 540433 - RNA, 19 nt, Artificial Sequence
  Description of Artificial Sequence: Synthetic oligonucleotide
cgacgccguuucguggucu

SEQ ID NO: 540434 - RNA, 19 nt, Artificial Sequence
  Description of Artificial Sequence: Synthetic oligonucleotide
auagucucgauauucaccc

SEQ ID NO: 540435 - RNA, 19 nt, Artificial Sequence
  Description of Artificial Sequence: Synthetic oligonucleotide
uuuaucaucauuagaacug

SEQ ID NO: 540436 - RNA, 19 nt, Artificial Sequence
  Description of Artificial Sequence: Synthetic oligonucleotide
ugugguaugggucagaacu

SEQ ID NO: 540437 - RNA, 19 nt, Artificial Sequence
  Description of Artificial Sequence: Synthetic oligonucleotide
aauacgcaaauagagaagg

SEQ ID NO: 540438 - RNA, 19 nt, Artificial Sequence
  Description of Artificial Sequence: Synthetic oligonucleotide
ucuucgaucguacucgucg

SEQ ID NO: 540439 - RNA, 19 nt, Artificial Sequence
  Description of Artificial Sequence: Synthetic oligonucleotide
guuguaauaauccagagaa

SEQ ID NO: 540440 - RNA, 19 nt, Artificial Sequence
  Description of Artificial Sequence: Synthetic oligonucleotide
uuuacgacccaucuucugg

SEQ ID NO: 540441 - RNA, 19 nt, Artificial Sequence
  Description of Artificial Sequence: Synthetic oligonucleotide
cuuaucauugaccuuacgc

SEQ ID NO: 540442 - RNA, 19 nt, Artificial Sequence
  Description of Artificial Sequence: Synthetic oligonucleotide
acucaguucacacucacgg

SEQ ID NO: 540443 - RNA, 19 nt, Artificial Sequence
  Description of Artificial Sequence: Synthetic oligonucleotide
uuaucauugaccuuacgcu

SEQ ID NO: 540444 - RNA, 19 nt, Artificial Sequence
  Description of Artificial Sequence: Synthetic oligonucleotide
aaagugaaaugaucuccgc

SEQ ID NO: 540445 - RNA, 19 nt, Artificial Sequence
  Description of Artificial Sequence: Synthetic oligonucleotide
aaugccacgcgcauaaagc

SEQ ID NO: 540446 - RNA, 19 nt, Artificial Sequence
  Description of Artificial Sequence: Synthetic oligonucleotide
agauacacuacccucauca

SEQ ID NO: 540447 - RNA, 19 nt, Artificial Sequence
  Description of Artificial Sequence: Synthetic oligonucleotide
aagggauucacgaacacuc

SEQ ID NO: 540448 - RNA, 19 nt, Artificial Sequence
  Description of Artificial Sequence: Synthetic oligonucleotide
aaaagcgucauaguucccg

SEQ ID NO: 540449 - RNA, 19 nt, Artificial Sequence
  Description of Artificial Sequence: Synthetic oligonucleotide
cauggauuaugccacagcg

SEQ ID NO: 540450 - RNA, 19 nt, Artificial Sequence
  Description of Artificial Sequence: Synthetic oligonucleotide
cagagaaugcacaauacgc

SEQ ID NO: 540451 - RNA, 19 nt, Artificial Sequence
  Description of Artificial Sequence: Synthetic oligonucleotide
aaagcgucauaguucccgc

SEQ ID NO: 540452 - RNA, 19 nt, Artificial Sequence
  Description of Artificial Sequence: Synthetic oligonucleotide
ugauguugcggacacgacg

SEQ ID NO: 540453 - RNA, 19 nt, Artificial Sequence
  Description of Artificial Sequence: Synthetic oligonucleotide
aaaugcuaccuccuucuuc

SEQ ID NO: 540454 - RNA, 19 nt, Artificial Sequence
  Description of Artificial Sequence: Synthetic oligonucleotide
uggauuaugccacagcggu

SEQ ID NO: 540455 - RNA, 19 nt, Artificial Sequence
  Description of Artificial Sequence: Synthetic oligonucleotide
uguuguaauaauccagaga

SEQ ID NO: 540456 - RNA, 19 nt, Artificial Sequence
  Description of Artificial Sequence: Synthetic oligonucleotide
acaauacgcaaauagagaa

SEQ ID NO: 540457 - RNA, 19 nt, Artificial Sequence
  Description of Artificial Sequence: Synthetic oligonucleotide
uuuaagugcuucuucaguc

SEQ ID NO: 540458 - RNA, 19 nt, Artificial Sequence
  Description of Artificial Sequence: Synthetic oligonucleotide
aagucacccagccacggcg

SEQ ID NO: 540459 - RNA, 19 nt, Artificial Sequence
  Description of Artificial Sequence: Synthetic oligonucleotide
gauguugcggacacgacgg

SEQ ID NO: 540460 - RNA, 19 nt, Artificial Sequence
  Description of Artificial Sequence: Synthetic oligonucleotide
ugugcuugcgcacaaacuc

SEQ ID NO: 540461 - RNA, 19 nt, Artificial Sequence
  Description of Artificial Sequence: Synthetic oligonucleotide
ugcacaauacgcaaauaga

SEQ ID NO: 540462 - RNA, 19 nt, Artificial Sequence
  Description of Artificial Sequence: Synthetic oligonucleotide
ugcagguuccaacauaucu

SEQ ID NO: 540463 - RNA, 19 nt, Artificial Sequence
  Description of Artificial Sequence: Synthetic oligonucleotide
uccgcaugcgcuuuugugg

SEQ ID NO: 540464 - RNA, 19 nt, Artificial Sequence
  Description of Artificial Sequence: Synthetic oligonucleotide
gacuccauagcccaagaug

SEQ ID NO: 540465 - RNA, 19 nt, Artificial Sequence
  Description of Artificial Sequence: Synthetic oligonucleotide
uucgaaauuugucccugcg

SEQ ID NO: 540466 - RNA, 19 nt, Artificial Sequence
  Description of Artificial Sequence: Synthetic oligonucleotide
aaagucacccagccacggc

SEQ ID NO: 540467 - RNA, 19 nt, Artificial Sequence
  Description of Artificial Sequence: Synthetic oligonucleotide
ugaagagagagcaagucuu

SEQ ID NO: 540468 - RNA, 19 nt, Artificial Sequence
  Description of Artificial Sequence: Synthetic oligonucleotide
aaaaccuccucucgggcug

SEQ ID NO: 540469 - RNA, 19 nt, Artificial Sequence
  Description of Artificial Sequence: Synthetic oligonucleotide
acuucuccgugacugauuc

SEQ ID NO: 540470 - RNA, 19 nt, Artificial Sequence
  Description of Artificial Sequence: Synthetic oligonucleotide
gacugauucgguugggcgg

SEQ ID NO: 540471 - RNA, 19 nt, Artificial Sequence
  Description of Artificial Sequence: Synthetic oligonucleotide
ucucuucgaaauuuguccc

SEQ ID NO: 540472 - RNA, 19 nt, Artificial Sequence
  Description of Artificial Sequence: Synthetic oligonucleotide
ugacugauucgguugggcg

SEQ ID NO: 540473 - RNA, 19 nt, Artificial Sequence
  Description of Artificial Sequence: Synthetic oligonucleotide
uacgcaaauagagaaggag

SEQ ID NO: 540474 - RNA, 19 nt, Artificial Sequence
  Description of Artificial Sequence: Synthetic oligonucleotide
agucucgauauucaccccg

SEQ ID NO: 540475 - RNA, 19 nt, Artificial Sequence
  Description of Artificial Sequence: Synthetic oligonucleotide
gauuaugccacagcgguug

SEQ ID NO: 540476 - RNA, 19 nt, Artificial Sequence
  Description of Artificial Sequence: Synthetic oligonucleotide
acauggauuaugccacagc

SEQ ID NO: 540477 - RNA, 19 nt, Artificial Sequence
  Description of Artificial Sequence: Synthetic oligonucleotide
augccacgcgcauaaagcc

SEQ ID NO: 540478 - RNA, 19 nt, Artificial Sequence
  Description of Artificial Sequence: Synthetic oligonucleotide
ucacgaacacucagcaggg

SEQ ID NO: 540479 - RNA, 19 nt, Artificial Sequence
  Description of Artificial Sequence: Synthetic oligonucleotide
aggaguuuauccaagaccu

SEQ ID NO: 540480 - RNA, 19 nt, Artificial Sequence
  Description of Artificial Sequence: Synthetic oligonucleotide
agcgucauaguucccgcgc

SEQ ID NO: 540481 - RNA, 19 nt, Artificial Sequence
  Description of Artificial Sequence: Synthetic oligonucleotide
ucucuuuaauguuaacacu

SEQ ID NO: 540482 - RNA, 19 nt, Artificial Sequence
  Description of Artificial Sequence: Synthetic oligonucleotide
auagccacuuauccuugcc

SEQ ID NO: 540483 - RNA, 19 nt, Artificial Sequence
  Description of Artificial Sequence: Synthetic oligonucleotide
ugcgcaugaagagagagca

SEQ ID NO: 540484 - RNA, 19 nt, Artificial Sequence
  Description of Artificial Sequence: Synthetic oligonucleotide
uaugggucagaacugugcu

SEQ ID NO: 540485 - RNA, 19 nt, Artificial Sequence
  Description of Artificial Sequence: Synthetic oligonucleotide
gauucacgaacacucagca

SEQ ID NO: 540486 - RNA, 19 nt, Artificial Sequence
  Description of Artificial Sequence: Synthetic oligonucleotide
ugucauugcgcacuaucug

SEQ ID NO: 540487 - RNA, 19 nt, Artificial Sequence
  Description of Artificial Sequence: Synthetic oligonucleotide
uaucauugaccuuacgcuc

SEQ ID NO: 540488 - RNA, 19 nt, Artificial Sequence
  Description of Artificial Sequence: Synthetic oligonucleotide
gauauucaccccgacugcg

SEQ ID NO: 540489 - RNA, 19 nt, Artificial Sequence
  Description of Artificial Sequence: Synthetic oligonucleotide
aauguugcgcaugaagaga

SEQ ID NO: 540490 - RNA, 19 nt, Artificial Sequence
  Description of Artificial Sequence: Synthetic oligonucleotide
caauguugcgcaugaagag

SEQ ID NO: 540491 - RNA, 19 nt, Artificial Sequence
  Description of Artificial Sequence: Synthetic oligonucleotide
augaagagagagcaagucu

SEQ ID NO: 540492 - RNA, 19 nt, Artificial Sequence
  Description of Artificial Sequence: Synthetic oligonucleotide
gucauugcgcacuaucugc

SEQ ID NO: 540493 - RNA, 19 nt, Artificial Sequence
  Description of Artificial Sequence: Synthetic oligonucleotide
agcacucacuuccucaauc

SEQ ID NO: 540494 - RNA, 19 nt, Artificial Sequence
  Description of Artificial Sequence: Synthetic oligonucleotide
aaaagucacccagccacgg

SEQ ID NO: 540495 - RNA, 19 nt, Artificial Sequence
  Description of Artificial Sequence: Synthetic oligonucleotide
aaucagugauguucuucag

SEQ ID NO: 540496 - RNA, 19 nt, Artificial Sequence
  Description of Artificial Sequence: Synthetic oligonucleotide
caauacgcaaauagagaag

SEQ ID NO: 540497 - RNA, 19 nt, Artificial Sequence
  Description of Artificial Sequence: Synthetic oligonucleotide
uuucauuccuuaucauuga

SEQ ID NO: 540498 - RNA, 19 nt, Artificial Sequence
  Description of Artificial Sequence: Synthetic oligonucleotide
gaccuuacgcucugcaucc

SEQ ID NO: 540499 - RNA, 19 nt, Artificial Sequence
  Description of Artificial Sequence: Synthetic oligonucleotide
gaugccguugauguugcgg

SEQ ID NO: 540500 - RNA, 19 nt, Artificial Sequence
  Description of Artificial Sequence: Synthetic oligonucleotide
aauuugucccugcgucuuc

SEQ ID NO: 540501 - RNA, 19 nt, Artificial Sequence
  Description of Artificial Sequence: Synthetic oligonucleotide
ucucuguucacaccaggac

SEQ ID NO: 540502 - RNA, 19 nt, Artificial Sequence
  Description of Artificial Sequence: Synthetic oligonucleotide
acugauucgguugggcggc

SEQ ID NO: 540503 - RNA, 19 nt, Artificial Sequence
  Description of Artificial Sequence: Synthetic oligonucleotide
uguuccgagguuucccagg

SEQ ID NO: 540504 - RNA, 19 nt, Artificial Sequence
  Description of Artificial Sequence: Synthetic oligonucleotide
uccgcccuugaaauguugg

SEQ ID NO: 540505 - RNA, 19 nt, Artificial Sequence
  Description of Artificial Sequence: Synthetic oligonucleotide
uuacacuccagccccgccc

SEQ ID NO: 540506 - RNA, 19 nt, Artificial Sequence
  Description of Artificial Sequence: Synthetic oligonucleotide
aaagggauucacgaacacu

SEQ ID NO: 540507 - RNA, 19 nt, Artificial Sequence
  Description of Artificial Sequence: Synthetic oligonucleotide
uccacuauggcccgcgggu

SEQ ID NO: 540508 - RNA, 19 nt, Artificial Sequence
  Description of Artificial Sequence: Synthetic oligonucleotide
uccgcgugcuuauugaaga

SEQ ID NO: 540509 - RNA, 19 nt, Artificial Sequence
  Description of Artificial Sequence: Synthetic oligonucleotide
aaacgucuucugccacucc

SEQ ID NO: 540510 - RNA, 19 nt, Artificial Sequence
  Description of Artificial Sequence: Synthetic oligonucleotide
ucgaaauuugucccugcgu

SEQ ID NO: 540511 - RNA, 19 nt, Artificial Sequence
  Description of Artificial Sequence: Synthetic oligonucleotide
ugggucagaacugugcuca

SEQ ID NO: 540512 - RNA, 19 nt, Artificial Sequence
  Description of Artificial Sequence: Synthetic oligonucleotide
ucgauuccggucauagucu

SEQ ID NO: 540513 - RNA, 19 nt, Artificial Sequence
  Description of Artificial Sequence: Synthetic oligonucleotide
ucgaucguacucgucgucg

SEQ ID NO: 540514 - RNA, 19 nt, Artificial Sequence
  Description of Artificial Sequence: Synthetic oligonucleotide
uauccaagaccuugaucag

SEQ ID NO: 540515 - RNA, 19 nt, Artificial Sequence
  Description of Artificial Sequence: Synthetic oligonucleotide
uguucagggucuuuacgac

SEQ ID NO: 540516 - RNA, 19 nt, Artificial Sequence
  Description of Artificial Sequence: Synthetic oligonucleotide
uugggguacucacaagugu

SEQ ID NO: 540517 - RNA, 19 nt, Artificial Sequence
  Description of Artificial Sequence: Synthetic oligonucleotide
caaaagucacccagccacg

SEQ ID NO: 540518 - RNA, 19 nt, Artificial Sequence
  Description of Artificial Sequence: Synthetic oligonucleotide
gaaaugaucuccgcccuug

SEQ ID NO: 540519 - RNA, 19 nt, Artificial Sequence
  Description of Artificial Sequence: Synthetic oligonucleotide
agagaaugcacaauacgca

SEQ ID NO: 540520 - RNA, 19 nt, Artificial Sequence
  Description of Artificial Sequence: Synthetic oligonucleotide
uauucaccccgacugcggc

SEQ ID NO: 540521 - RNA, 19 nt, Artificial Sequence
  Description of Artificial Sequence: Synthetic oligonucleotide
ucauugcgcacuaucugcu

SEQ ID NO: 540522 - RNA, 19 nt, Artificial Sequence
  Description of Artificial Sequence: Synthetic oligonucleotide
cauuccuuaucauugaccu

SEQ ID NO: 540523 - RNA, 19 nt, Artificial Sequence
  Description of Artificial Sequence: Synthetic oligonucleotide
ugcuugcgcacaaacucag

SEQ ID NO: 540524 - RNA, 19 nt, Artificial Sequence
  Description of Artificial Sequence: Synthetic oligonucleotide
cacaauacgcaaauagaga

SEQ ID NO: 540525 - RNA, 19 nt, Artificial Sequence
  Description of Artificial Sequence: Synthetic oligonucleotide
gacacgacgggucaggucu

SEQ ID NO: 540526 - RNA, 19 nt, Artificial Sequence
  Description of Artificial Sequence: Synthetic oligonucleotide
acgacccaucuucugggcc

SEQ ID NO: 540527 - RNA, 19 nt, Artificial Sequence
  Description of Artificial Sequence: Synthetic oligonucleotide
gcacaauacgcaaauagag

SEQ ID NO: 540528 - RNA, 19 nt, Artificial Sequence
  Description of Artificial Sequence: Synthetic oligonucleotide
caggacucaguucacacuc

SEQ ID NO: 540529 - RNA, 19 nt, Artificial Sequence
  Description of Artificial Sequence: Synthetic oligonucleotide
ucuccucgaaccauccugu

SEQ ID NO: 540530 - RNA, 19 nt, Artificial Sequence
  Description of Artificial Sequence: Synthetic oligonucleotide
uggguaucuuuuacaaagu

SEQ ID NO: 540531 - RNA, 19 nt, Artificial Sequence
  Description of Artificial Sequence: Synthetic oligonucleotide
uccgacaaugccacgcgca

SEQ ID NO: 540532 - RNA, 19 nt, Artificial Sequence
  Description of Artificial Sequence: Synthetic oligonucleotide
gucgcugucgcccaucgug

SEQ ID NO: 540533 - RNA, 19 nt, Artificial Sequence
  Description of Artificial Sequence: Synthetic oligonucleotide
uggggcuccgacaaugcca

SEQ ID NO: 540534 - RNA, 19 nt, Artificial Sequence
  Description of Artificial Sequence: Synthetic oligonucleotide
  modified_base (4)..(4): a, c, u, g, unknown or other
gggngaaacguucccuucg

SEQ ID NO: 540535 - RNA, 19 nt, Artificial Sequence
  Description of Artificial Sequence: Synthetic oligonucleotide
uugcgcaugaagagagagc

SEQ ID NO: 540536 - RNA, 19 nt, Artificial Sequence
  Description of Artificial Sequence: Synthetic oligonucleotide
ucaaacgucuucugccacu

SEQ ID NO: 540537 - RNA, 19 nt, Artificial Sequence
  Description of Artificial Sequence: Synthetic oligonucleotide
guugcgcaugaagagagag

SEQ ID NO: 540538 - RNA, 19 nt, Artificial Sequence
  Description of Artificial Sequence: Synthetic oligonucleotide
ugcgucuucgaucguacuc

SEQ ID NO: 540539 - RNA, 19 nt, Artificial Sequence
  Description of Artificial Sequence: Synthetic oligonucleotide
agccacuuauccuugccca

SEQ ID NO: 540540 - RNA, 19 nt, Artificial Sequence
  Description of Artificial Sequence: Synthetic oligonucleotide
auucacgaacacucagcag

SEQ ID NO: 540541 - RNA, 19 nt, Artificial Sequence
  Description of Artificial Sequence: Synthetic oligonucleotide
aaaugaucuccgcccuuga

SEQ ID NO: 540542 - RNA, 19 nt, Artificial Sequence
  Description of Artificial Sequence: Synthetic oligonucleotide
ucacaaguguuguaauaau

SEQ ID NO: 540543 - RNA, 19 nt, Artificial Sequence
  Description of Artificial Sequence: Synthetic oligonucleotide
uggguagggaaguccuggg

SEQ ID NO: 540544 - RNA, 19 nt, Artificial Sequence
  Description of Artificial Sequence: Synthetic oligonucleotide
gaaagggauucacgaacac

SEQ ID NO: 540545 - RNA, 19 nt, Artificial Sequence
  Description of Artificial Sequence: Synthetic oligonucleotide
caaugccacgcgcauaaag

SEQ ID NO: 540546 - RNA, 19 nt, Artificial Sequence
  Description of Artificial Sequence: Synthetic oligonucleotide
cauaucucuuuaauguuaa

SEQ ID NO: 540547 - RNA, 19 nt, Artificial Sequence
  Description of Artificial Sequence: Synthetic oligonucleotide
auguugcgcaugaagagag

SEQ ID NO: 540548 - RNA, 19 nt, Artificial Sequence
  Description of Artificial Sequence: Synthetic oligonucleotide
ugggguacucacaaguguu

SEQ ID NO: 540549 - RNA, 19 nt, Artificial Sequence
  Description of Artificial Sequence: Synthetic oligonucleotide
auuaugccacagcgguugg

SEQ ID NO: 540550 - RNA, 19 nt, Artificial Sequence
  Description of Artificial Sequence: Synthetic oligonucleotide
ccagagaaugcacaauacg

SEQ ID NO: 540551 - RNA, 19 nt, Artificial Sequence
  Description of Artificial Sequence: Synthetic oligonucleotide
aguguguggaucagcuugg

SEQ ID NO: 540552 - RNA, 19 nt, Artificial Sequence
  Description of Artificial Sequence: Synthetic oligonucleotide
ucggacucagauacacuac

SEQ ID NO: 540553 - RNA, 19 nt, Artificial Sequence
  Description of Artificial Sequence: Synthetic oligonucleotide
ucucggucauuccaaucgu

SEQ ID NO: 540554 - RNA, 19 nt, Artificial Sequence
  Description of Artificial Sequence: Synthetic oligonucleotide
ucauaguucccgcgcccag

SEQ ID NO: 540555 - RNA, 19 nt, Artificial Sequence
  Description of Artificial Sequence: Synthetic oligonucleotide
ucaacaucaucuggggcgu

SEQ ID NO: 540556 - RNA, 19 nt, Artificial Sequence
  Description of Artificial Sequence: Synthetic oligonucleotide
uucuccgcgugcuuauuga

SEQ ID NO: 540557 - RNA, 19 nt, Artificial Sequence
  Description of Artificial Sequence: Synthetic oligonucleotide
ucauugggguacucacaag

SEQ ID NO: 540558 - RNA, 19 nt, Artificial Sequence
  Description of Artificial Sequence: Synthetic oligonucleotide
guaaucagugauguucuuc

SEQ ID NO: 540559 - RNA, 19 nt, Artificial Sequence
  Description of Artificial Sequence: Synthetic oligonucleotide
gguaaaguggucccgggga

SEQ ID NO: 540560 - RNA, 19 nt, Artificial Sequence
  Description of Artificial Sequence: Synthetic oligonucleotide
auucaccccgacugcggcg

SEQ ID NO: 540561 - RNA, 19 nt, Artificial Sequence
  Description of Artificial Sequence: Synthetic oligonucleotide
ucgcugucgcccaucgugc

SEQ ID NO: 540562 - RNA, 19 nt, Artificial Sequence
  Description of Artificial Sequence: Synthetic oligonucleotide
gcggucaaaagucacccag

SEQ ID NO: 540563 - RNA, 19 nt, Artificial Sequence
  Description of Artificial Sequence: Synthetic oligonucleotide
gucaucgccacugugcuuc

SEQ ID NO: 540564 - RNA, 19 nt, Artificial Sequence
  Description of Artificial Sequence: Synthetic oligonucleotide
gccucgaaaagcgucauag

SEQ ID NO: 540565 - RNA, 19 nt, Artificial Sequence
  Description of Artificial Sequence: Synthetic oligonucleotide
ggucauuccaaucgucccc

SEQ ID NO: 540566 - RNA, 19 nt, Artificial Sequence
  Description of Artificial Sequence: Synthetic oligonucleotide
ggguaucuuuuacaaagug

SEQ ID NO: 540567 - RNA, 19 nt, Artificial Sequence
  Description of Artificial Sequence: Synthetic oligonucleotide
auauucaccccgacugcgg

SEQ ID NO: 540568 - RNA, 19 nt, Artificial Sequence
  Description of Artificial Sequence: Synthetic oligonucleotide
uccuuaucauugaccuuac

SEQ ID NO: 540569 - RNA, 19 nt, Artificial Sequence
  Description of Artificial Sequence: Synthetic oligonucleotide
uugaccacucucggacucg

SEQ ID NO: 540570 - RNA, 19 nt, Artificial Sequence
  Description of Artificial Sequence: Synthetic oligonucleotide
ugccacgcgcauaaagccu

SEQ ID NO: 540571 - RNA, 19 nt, Artificial Sequence
  Description of Artificial Sequence: Synthetic oligonucleotide
uccucgaaccauccuguuc

SEQ ID NO: 540572 - RNA, 19 nt, Artificial Sequence
  Description of Artificial Sequence: Synthetic oligonucleotide
aucuccgcccuugaaaugu

SEQ ID NO: 540573 - RNA, 19 nt, Artificial Sequence
  Description of Artificial Sequence: Synthetic oligonucleotide
cucauugggguacucacaa

SEQ ID NO: 540574 - RNA, 19 nt, Artificial Sequence
  Description of Artificial Sequence: Synthetic oligonucleotide
gauuccggucauagucucg

SEQ ID NO: 540575 - RNA, 19 nt, Artificial Sequence
  Description of Artificial Sequence: Synthetic oligonucleotide
gauacacuacccucaucaa

SEQ ID NO: 540576 - RNA, 19 nt, Artificial Sequence
  Description of Artificial Sequence: Synthetic oligonucleotide
ccgggaacggucauagucg

SEQ ID NO: 540577 - RNA, 19 nt, Artificial Sequence
  Description of Artificial Sequence: Synthetic oligonucleotide
uacucacaaguguuguaau

SEQ ID NO: 540578 - RNA, 19 nt, Artificial Sequence
  Description of Artificial Sequence: Synthetic oligonucleotide
guaacaaacuucuccacuu

SEQ ID NO: 540579 - RNA, 19 nt, Artificial Sequence
  Description of Artificial Sequence: Synthetic oligonucleotide
guacucgucgucgcugucg

SEQ ID NO: 540580 - RNA, 19 nt, Artificial Sequence
  Description of Artificial Sequence: Synthetic oligonucleotide
agcgccauacggaccaugg

SEQ ID NO: 540581 - RNA, 19 nt, Artificial Sequence
  Description of Artificial Sequence: Synthetic oligonucleotide
gauucgguugggcggcaug

SEQ ID NO: 540582 - RNA, 19 nt, Artificial Sequence
  Description of Artificial Sequence: Synthetic oligonucleotide
ucacggagucggauguucu

SEQ ID NO: 540583 - RNA, 19 nt, Artificial Sequence
  Description of Artificial Sequence: Synthetic oligonucleotide
cucggacucagauacacua

SEQ ID NO: 540584 - RNA, 19 nt, Artificial Sequence
  Description of Artificial Sequence: Synthetic oligonucleotide
ugucccaggcucagaugcc

SEQ ID NO: 540585 - RNA, 19 nt, Artificial Sequence
  Description of Artificial Sequence: Synthetic oligonucleotide
uuaugccacagcgguuggg

SEQ ID NO: 540586 - RNA, 19 nt, Artificial Sequence
  Description of Artificial Sequence: Synthetic oligonucleotide
uugcgcacuaucugcuugu

SEQ ID NO: 540587 - RNA, 19 nt, Artificial Sequence
  Description of Artificial Sequence: Synthetic oligonucleotide
acgggucaggucucuguuc

SEQ ID NO: 540588 - RNA, 19 nt, Artificial Sequence
  Description of Artificial Sequence: Synthetic oligonucleotide
ugguaugggucagaacugu

SEQ ID NO: 540589 - RNA, 19 nt, Artificial Sequence
  Description of Artificial Sequence: Synthetic oligonucleotide
caucgugcugucagaggag

SEQ ID NO: 540590 - RNA, 19 nt, Artificial Sequence
  Description of Artificial Sequence: Synthetic oligonucleotide
ugggacuccauagcccaag

SEQ ID NO: 540591 - RNA, 19 nt, Artificial Sequence
  Description of Artificial Sequence: Synthetic oligonucleotide
cuccgcaugcgcuuuugug

SEQ ID NO: 540592 - RNA, 19 nt, Artificial Sequence
  Description of Artificial Sequence: Synthetic oligonucleotide
ugaccacucucggacucgg

SEQ ID NO: 540593 - RNA, 19 nt, Artificial Sequence
  Description of Artificial Sequence: Synthetic oligonucleotide
gaucuccgcccuugaaaug

SEQ ID NO: 540594 - RNA, 19 nt, Artificial Sequence
  Description of Artificial Sequence: Synthetic oligonucleotide
auacggaccauggggauau

SEQ ID NO: 540595 - RNA, 19 nt, Artificial Sequence
  Description of Artificial Sequence: Synthetic oligonucleotide
ucucgauauucaccccgac

SEQ ID NO: 540596 - RNA, 19 nt, Artificial Sequence
  Description of Artificial Sequence: Synthetic oligonucleotide
uucaccccgacugcggcgc

SEQ ID NO: 540597 - RNA, 19 nt, Artificial Sequence
  Description of Artificial Sequence: Synthetic oligonucleotide
cauugggguacucacaagu

SEQ ID NO: 540598 - RNA, 19 nt, Artificial Sequence
  Description of Artificial Sequence: Synthetic oligonucleotide
ugaaaugaucuccgcccuu

SEQ ID NO: 540599 - RNA, 19 nt, Artificial Sequence
  Description of Artificial Sequence: Synthetic oligonucleotide
uacgacccaucuucugggc

SEQ ID NO: 540600 - RNA, 19 nt, Artificial Sequence
  Description of Artificial Sequence: Synthetic oligonucleotide
ugcgcucucuucgaaauuu

SEQ ID NO: 540601 - RNA, 19 nt, Artificial Sequence
  Description of Artificial Sequence: Synthetic oligonucleotide
cuuacacuccagccccgcc

SEQ ID NO: 540602 - RNA, 19 nt, Artificial Sequence
  Description of Artificial Sequence: Synthetic oligonucleotide
uagucucgauauucacccc

SEQ ID NO: 540603 - RNA, 19 nt, Artificial Sequence
  Description of Artificial Sequence: Synthetic oligonucleotide
uugcggacacgacggguca

SEQ ID NO: 540604 - RNA, 19 nt, Artificial Sequence
  Description of Artificial Sequence: Synthetic oligonucleotide
cucgaaccauccuguuccg

SEQ ID NO: 540605 - RNA, 19 nt, Artificial Sequence
  Description of Artificial Sequence: Synthetic oligonucleotide
cuucuccgcgugcuuauug

SEQ ID NO: 540606 - RNA, 19 nt, Artificial Sequence
  Description of Artificial Sequence: Synthetic oligonucleotide
cgaaauuugucccugcguc

SEQ ID NO: 540607 - RNA, 19 nt, Artificial Sequence
  Description of Artificial Sequence: Synthetic oligonucleotide
augggguaaaguggucccg

SEQ ID NO: 540608 - RNA, 19 nt, Artificial Sequence
  Description of Artificial Sequence: Synthetic oligonucleotide
ucauuagaacugucauuuu

SEQ ID NO: 540609 - RNA, 19 nt, Artificial Sequence
  Description of Artificial Sequence: Synthetic oligonucleotide
ucguacucgucgucgcugu

SEQ ID NO: 540610 - RNA, 19 nt, Artificial Sequence
  Description of Artificial Sequence: Synthetic oligonucleotide
ggguaaaguggucccgggg

SEQ ID NO: 540611 - RNA, 19 nt, Artificial Sequence
  Description of Artificial Sequence: Synthetic oligonucleotide
ucuccgugacugauucggu

SEQ ID NO: 540612 - RNA, 19 nt, Artificial Sequence
  Description of Artificial Sequence: Synthetic oligonucleotide
cggacucggacucagauac

SEQ ID NO: 540613 - RNA, 19 nt, Artificial Sequence
  Description of Artificial Sequence: Synthetic oligonucleotide
gugguaugggucagaacug

SEQ ID NO: 540614 - RNA, 19 nt, Artificial Sequence
  Description of Artificial Sequence: Synthetic oligonucleotide
auguugcggacacgacggg

SEQ ID NO: 540615 - RNA, 19 nt, Artificial Sequence
  Description of Artificial Sequence: Synthetic oligonucleotide
uggcgucugguguggguag

SEQ ID NO: 540616 - RNA, 19 nt, Artificial Sequence
  Description of Artificial Sequence: Synthetic oligonucleotide
ugcggucaaaagucaccca

SEQ ID NO: 540617 - RNA, 19 nt, Artificial Sequence
  Description of Artificial Sequence: Synthetic oligonucleotide
ccgauacuccacuauggcc

SEQ ID NO: 540618 - RNA, 19 nt, Artificial Sequence
  Description of Artificial Sequence: Synthetic oligonucleotide
gcgguugggcaucucaucc

SEQ ID NO: 540619 - RNA, 19 nt, Artificial Sequence
  Description of Artificial Sequence: Synthetic oligonucleotide
uucgguugggcggcauggg

SEQ ID NO: 540620 - RNA, 19 nt, Artificial Sequence
  Description of Artificial Sequence: Synthetic oligonucleotide
agaaugcacaauacgcaaa

SEQ ID NO: 540621 - RNA, 19 nt, Artificial Sequence
  Description of Artificial Sequence: Synthetic oligonucleotide
caaacgucuucugccacuc

SEQ ID NO: 540622 - RNA, 19 nt, Artificial Sequence
  Description of Artificial Sequence: Synthetic oligonucleotide
cauccuguuccgagguuuc

SEQ ID NO: 540623 - RNA, 19 nt, Artificial Sequence
  Description of Artificial Sequence: Synthetic oligonucleotide
acgcgcauaaagccugggu

SEQ ID NO: 540624 - RNA, 19 nt, Artificial Sequence
  Description of Artificial Sequence: Synthetic oligonucleotide
gcuaaguucguggcagggg

SEQ ID NO: 540625 - RNA, 19 nt, Artificial Sequence
  Description of Artificial Sequence: Synthetic oligonucleotide
ucuccgcgugcuuauugaa

SEQ ID NO: 540626 - RNA, 19 nt, Artificial Sequence
  Description of Artificial Sequence: Synthetic oligonucleotide
ugggcgcuuggcauccgug

SEQ ID NO: 540627 - RNA, 19 nt, Artificial Sequence
  Description of Artificial Sequence: Synthetic oligonucleotide
ucggcgucuuucaucucuc

SEQ ID NO: 540628 - RNA, 19 nt, Artificial Sequence
  Description of Artificial Sequence: Synthetic oligonucleotide
guugcggacacgacggguc

SEQ ID NO: 540629 - RNA, 19 nt, Artificial Sequence
  Description of Artificial Sequence: Synthetic oligonucleotide
cggacauggauuaugccac

SEQ ID NO: 540630 - RNA, 19 nt, Artificial Sequence
  Description of Artificial Sequence: Synthetic oligonucleotide
cucggucauuccaaucguc

SEQ ID NO: 540631 - RNA, 19 nt, Artificial Sequence
  Description of Artificial Sequence: Synthetic oligonucleotide
uccccggacauggauuaug

SEQ ID NO: 540632 - RNA, 19 nt, Artificial Sequence
  Description of Artificial Sequence: Synthetic oligonucleotide
gcggcagaugucucaaaag

SEQ ID NO: 540633 - RNA, 19 nt, Artificial Sequence
  Description of Artificial Sequence: Synthetic oligonucleotide
agucuugugcaggggccgg

SEQ ID NO: 540634 - RNA, 19 nt, Artificial Sequence
  Description of Artificial Sequence: Synthetic oligonucleotide
uguggcgucuggugugggu

SEQ ID NO: 540635 - RNA, 19 nt, Artificial Sequence
  Description of Artificial Sequence: Synthetic oligonucleotide
gcuccgacaaugccacgcg

SEQ ID NO: 540636 - RNA, 19 nt, Artificial Sequence
  Description of Artificial Sequence: Synthetic oligonucleotide
ucuccgcaugcgcuuuugu

SEQ ID NO: 540637 - RNA, 19 nt, Artificial Sequence
  Description of Artificial Sequence: Synthetic oligonucleotide
gaacugucauuuucagccu

SEQ ID NO: 540638 - RNA, 19 nt, Artificial Sequence
  Description of Artificial Sequence: Synthetic oligonucleotide
ccuucgauuccggucauag

SEQ ID NO: 540639 - RNA, 19 nt, Artificial Sequence
  Description of Artificial Sequence: Synthetic oligonucleotide
auacgcaaauagagaagga

SEQ ID NO: 540640 - RNA, 19 nt, Artificial Sequence
  Description of Artificial Sequence: Synthetic oligonucleotide
gaaaagcgucauaguuccc

SEQ ID NO: 540641 - RNA, 19 nt, Artificial Sequence
  Description of Artificial Sequence: Synthetic oligonucleotide
augugcuugcgcacaaacu

SEQ ID NO: 540642 - RNA, 19 nt, Artificial Sequence
  Description of Artificial Sequence: Synthetic oligonucleotide
caaucguccccucggcguc

SEQ ID NO: 540643 - RNA, 19 nt, Artificial Sequence
  Description of Artificial Sequence: Synthetic oligonucleotide
acucgucgucgcugucgcc

SEQ ID NO: 540644 - RNA, 19 nt, Artificial Sequence
  Description of Artificial Sequence: Synthetic oligonucleotide
  modified_base (3)..(3): a, c, u, g, unknown or other
ggngaaacguucccuucga

SEQ ID NO: 540645 - RNA, 19 nt, Artificial Sequence
  Description of Artificial Sequence: Synthetic oligonucleotide
ccgcaugcgcuuuuguggg

SEQ ID NO: 540646 - RNA, 19 nt, Artificial Sequence
  Description of Artificial Sequence: Synthetic oligonucleotide
uugucccugcgucuucgau

SEQ ID NO: 540647 - RNA, 19 nt, Artificial Sequence
  Description of Artificial Sequence: Synthetic oligonucleotide
cucacggagucggauguuc

SEQ ID NO: 540648 - RNA, 19 nt, Artificial Sequence
  Description of Artificial Sequence: Synthetic oligonucleotide
cccgauacuccacuauggc

SEQ ID NO: 540649 - RNA, 19 nt, Artificial Sequence
  Description of Artificial Sequence: Synthetic oligonucleotide
cuccgacaaugccacgcgc

SEQ ID NO: 540650 - RNA, 19 nt, Artificial Sequence
  Description of Artificial Sequence: Synthetic oligonucleotide
cccgggaacggucauaguc

SEQ ID NO: 540651 - RNA, 19 nt, Artificial Sequence
  Description of Artificial Sequence: Synthetic oligonucleotide
ucauagucgcugcgcucuc

SEQ ID NO: 540652 - RNA, 19 nt, Artificial Sequence
  Description of Artificial Sequence: Synthetic oligonucleotide
caucaagcccuguggcguc

SEQ ID NO: 540653 - RNA, 19 nt, Artificial Sequence
  Description of Artificial Sequence: Synthetic oligonucleotide
gugaaaugaucuccgcccu

SEQ ID NO: 540654 - RNA, 19 nt, Artificial Sequence
  Description of Artificial Sequence: Synthetic oligonucleotide
ggagucggauguucugcag

SEQ ID NO: 540655 - RNA, 19 nt, Artificial Sequence
  Description of Artificial Sequence: Synthetic oligonucleotide
agucucuccgcaugcgcuu

SEQ ID NO: 540656 - RNA, 19 nt, Artificial Sequence
  Description of Artificial Sequence: Synthetic oligonucleotide
ggcuaaguucguggcaggg

SEQ ID NO: 540657 - RNA, 19 nt, Artificial Sequence
  Description of Artificial Sequence: Synthetic oligonucleotide
accuuacgcucugcauccc

SEQ ID NO: 540658 - RNA, 19 nt, Artificial Sequence
  Description of Artificial Sequence: Synthetic oligonucleotide
gccacuuauccuugcccag

SEQ ID NO: 540659 - RNA, 19 nt, Artificial Sequence
  Description of Artificial Sequence: Synthetic oligonucleotide
gugcuugcgcacaaacuca

SEQ ID NO: 540660 - RNA, 19 nt, Artificial Sequence
  Description of Artificial Sequence: Synthetic oligonucleotide
agggauucacgaacacuca

SEQ ID NO: 540661 - RNA, 19 nt, Artificial Sequence
  Description of Artificial Sequence: Synthetic oligonucleotide
cauccuuaggcuucucccu

SEQ ID NO: 540662 - RNA, 19 nt, Artificial Sequence
  Description of Artificial Sequence: Synthetic oligonucleotide
acgcauagggcaugucaua

SEQ ID NO: 540663 - RNA, 19 nt, Artificial Sequence
  Description of Artificial Sequence: Synthetic oligonucleotide
ccgugacugauucgguugg

SEQ ID NO: 540664 - RNA, 19 nt, Artificial Sequence
  Description of Artificial Sequence: Synthetic oligonucleotide
aaucguccccucggcgucu

SEQ ID NO: 540665 - RNA, 19 nt, Artificial Sequence
  Description of Artificial Sequence: Synthetic oligonucleotide
ggggauauggaggcccucc

SEQ ID NO: 540666 - RNA, 19 nt, Artificial Sequence
  Description of Artificial Sequence: Synthetic oligonucleotide
ucucucucccgggaacggu

SEQ ID NO: 540667 - RNA, 19 nt, Artificial Sequence
  Description of Artificial Sequence: Synthetic oligonucleotide
ugcgcacuaucugcuugug

SEQ ID NO: 540668 - RNA, 19 nt, Artificial Sequence
  Description of Artificial Sequence: Synthetic oligonucleotide
cacgaacacucagcagggg

SEQ ID NO: 540669 - RNA, 19 nt, Artificial Sequence
  Description of Artificial Sequence: Synthetic oligonucleotide
cucgauauucaccccgacu

SEQ ID NO: 540670 - RNA, 19 nt, Artificial Sequence
  Description of Artificial Sequence: Synthetic oligonucleotide
gucauaguucccgcgccca

SEQ ID NO: 540671 - RNA, 19 nt, Artificial Sequence
  Description of Artificial Sequence: Synthetic oligonucleotide
gucucgauauucaccccga

SEQ ID NO: 540672 - RNA, 19 nt, Artificial Sequence
  Description of Artificial Sequence: Synthetic oligonucleotide
ccgcccuugaaauguuggg

SEQ ID NO: 540673 - RNA, 19 nt, Artificial Sequence
  Description of Artificial Sequence: Synthetic oligonucleotide
cucgggcaaugcugggcgc

SEQ ID NO: 540674 - RNA, 19 nt, Artificial Sequence
  Description of Artificial Sequence: Synthetic oligonucleotide
gggguacucacaaguguug

SEQ ID NO: 540675 - RNA, 19 nt, Artificial Sequence
  Description of Artificial Sequence: Synthetic oligonucleotide
cuccgcccuugaaauguug

SEQ ID NO: 540676 - RNA, 19 nt, Artificial Sequence
  Description of Artificial Sequence: Synthetic oligonucleotide
cagauacacuacccucauc

SEQ ID NO: 540677 - RNA, 19 nt, Artificial Sequence
  Description of Artificial Sequence: Synthetic oligonucleotide
ugcggacacgacgggucag

SEQ ID NO: 540678 - RNA, 19 nt, Artificial Sequence
  Description of Artificial Sequence: Synthetic oligonucleotide
cucuucgaaauuugucccu

SEQ ID NO: 540679 - RNA, 19 nt, Artificial Sequence
  Description of Artificial Sequence: Synthetic oligonucleotide
ucauuccaaucguccccuc

SEQ ID NO: 540680 - RNA, 19 nt, Artificial Sequence
  Description of Artificial Sequence: Synthetic oligonucleotide
guaaaguggucccggggau

SEQ ID NO: 540681 - RNA, 19 nt, Artificial Sequence
  Description of Artificial Sequence: Synthetic oligonucleotide
gcgucauaguucccgcgcc

SEQ ID NO: 540682 - RNA, 19 nt, Artificial Sequence
  Description of Artificial Sequence: Synthetic oligonucleotide
ucccggggauagagggcag

SEQ ID NO: 540683 - RNA, 19 nt, Artificial Sequence
  Description of Artificial Sequence: Synthetic oligonucleotide
gguaugggucagaacugug

SEQ ID NO: 540684 - RNA, 19 nt, Artificial Sequence
  Description of Artificial Sequence: Synthetic oligonucleotide
  modified_base (5)..(5): a, c, u, g, unknown or other
ggggngaaacguucccuuc

SEQ ID NO: 540685 - RNA, 19 nt, Artificial Sequence
  Description of Artificial Sequence: Synthetic oligonucleotide
guggucccggggauagagg

SEQ ID NO: 540686 - RNA, 19 nt, Artificial Sequence
  Description of Artificial Sequence: Synthetic oligonucleotide
cuguguguuggagguaaca

SEQ ID NO: 540687 - RNA, 19 nt, Artificial Sequence
  Description of Artificial Sequence: Synthetic oligonucleotide
gaucguacucgucgucgcu

SEQ ID NO: 540688 - RNA, 19 nt, Artificial Sequence
  Description of Artificial Sequence: Synthetic oligonucleotide
cauugaccuuacgcucugc

SEQ ID NO: 540689 - RNA, 19 nt, Artificial Sequence
  Description of Artificial Sequence: Synthetic oligonucleotide
gucgcugcgcucucuucga

SEQ ID NO: 540690 - RNA, 19 nt, Artificial Sequence
  Description of Artificial Sequence: Synthetic oligonucleotide
ucuccgcccuugaaauguu

SEQ ID NO: 540691 - RNA, 19 nt, Artificial Sequence
  Description of Artificial Sequence: Synthetic oligonucleotide
gucuugugcaggggccggg

SEQ ID NO: 540692 - RNA, 19 nt, Artificial Sequence
  Description of Artificial Sequence: Synthetic oligonucleotide
gggucuuuacgacccaucu

SEQ ID NO: 540693 - RNA, 19 nt, Artificial Sequence
  Description of Artificial Sequence: Synthetic oligonucleotide
gucauuccaaucguccccu

SEQ ID NO: 540694 - RNA, 19 nt, Artificial Sequence
  Description of Artificial Sequence: Synthetic oligonucleotide
cuucgaucguacucgucgu

SEQ ID NO: 540695 - RNA, 19 nt, Artificial Sequence
  Description of Artificial Sequence: Synthetic oligonucleotide
gccauacggaccaugggga

SEQ ID NO: 540696 - RNA, 19 nt, Artificial Sequence
  Description of Artificial Sequence: Synthetic oligonucleotide
ccucaaacgucuucugcca

SEQ ID NO: 540697 - RNA, 19 nt, Artificial Sequence
  Description of Artificial Sequence: Synthetic oligonucleotide
ggggcuccgacaaugccac

SEQ ID NO: 540698 - RNA, 19 nt, Artificial Sequence
  Description of Artificial Sequence: Synthetic oligonucleotide
gaacugugcucaucccagu

SEQ ID NO: 540699 - RNA, 19 nt, Artificial Sequence
  Description of Artificial Sequence: Synthetic oligonucleotide
cccaucgugcugucagagg

SEQ ID NO: 540700 - RNA, 19 nt, Artificial Sequence
  Description of Artificial Sequence: Synthetic oligonucleotide
ccuuacgcucugcaucccc

SEQ ID NO: 540701 - RNA, 19 nt, Artificial Sequence
  Description of Artificial Sequence: Synthetic oligonucleotide
gccacgcgcauaaagccug

SEQ ID NO: 540702 - RNA, 19 nt, Artificial Sequence
  Description of Artificial Sequence: Synthetic oligonucleotide
cacgcgcauaaagccuggg

SEQ ID NO: 540703 - RNA, 19 nt, Artificial Sequence
  Description of Artificial Sequence: Synthetic oligonucleotide
agucacccagccacggcga

SEQ ID NO: 540704 - RNA, 19 nt, Artificial Sequence
  Description of Artificial Sequence: Synthetic oligonucleotide
ccgacugcggcgcucccgg

SEQ ID NO: 540705 - RNA, 19 nt, Artificial Sequence
  Description of Artificial Sequence: Synthetic oligonucleotide
ccccaguaguuccucuucc

SEQ ID NO: 540706 - RNA, 19 nt, Artificial Sequence
  Description of Artificial Sequence: Synthetic oligonucleotide
cgcccuugaaauguugggg

SEQ ID NO: 540707 - RNA, 19 nt, Artificial Sequence
  Description of Artificial Sequence: Synthetic oligonucleotide
  modified_base (2)..(2): a, c, u, g, unknown or other
gngaaacguucccuucgau

SEQ ID NO: 540708 - RNA, 19 nt, Artificial Sequence
  Description of Artificial Sequence: Synthetic oligonucleotide
uuccggucauagucucgau

SEQ ID NO: 540709 - RNA, 19 nt, Artificial Sequence
  Description of Artificial Sequence: Synthetic oligonucleotide
gucccacucucggucauuc

SEQ ID NO: 540710 - RNA, 19 nt, Artificial Sequence
  Description of Artificial Sequence: Synthetic oligonucleotide
cagucucuccgcaugcgcu

SEQ ID NO: 540711 - RNA, 19 nt, Artificial Sequence
  Description of Artificial Sequence: Synthetic oligonucleotide
ucgcugcgcucucuucgaa

SEQ ID NO: 540712 - RNA, 19 nt, Artificial Sequence
  Description of Artificial Sequence: Synthetic oligonucleotide
gcgugcuuauugaagaugu

SEQ ID NO: 540713 - RNA, 19 nt, Artificial Sequence
  Description of Artificial Sequence: Synthetic oligonucleotide
gcuugcgcacaaacucagg

SEQ ID NO: 540714 - RNA, 19 nt, Artificial Sequence
  Description of Artificial Sequence: Synthetic oligonucleotide
uccccucggcgucuuucau

SEQ ID NO: 540715 - RNA, 19 nt, Artificial Sequence
  Description of Artificial Sequence: Synthetic oligonucleotide
agggcggcagaugucucaa

SEQ ID NO: 540716 - RNA, 19 nt, Artificial Sequence
  Description of Artificial Sequence: Synthetic oligonucleotide
accauccuguuccgagguu

SEQ ID NO: 540717 - RNA, 19 nt, Artificial Sequence
  Description of Artificial Sequence: Synthetic oligonucleotide
cgaucguacucgucgucgc

SEQ ID NO: 540718 - RNA, 19 nt, Artificial Sequence
  Description of Artificial Sequence: Synthetic oligonucleotide
uggggcguccaggucccga

SEQ ID NO: 540719 - RNA, 19 nt, Artificial Sequence
  Description of Artificial Sequence: Synthetic oligonucleotide
ucacccagccacggcgaaa

SEQ ID NO: 540720 - RNA, 19 nt, Artificial Sequence
  Description of Artificial Sequence: Synthetic oligonucleotide
ccuguuccgagguuuccca

SEQ ID NO: 540721 - RNA, 19 nt, Artificial Sequence
  Description of Artificial Sequence: Synthetic oligonucleotide
gcgcacuaucugcuugugc

SEQ ID NO: 540722 - RNA, 19 nt, Artificial Sequence
  Description of Artificial Sequence: Synthetic oligonucleotide
cacccagccacggcgaaaa

SEQ ID NO: 540723 - RNA, 19 nt, Artificial Sequence
  Description of Artificial Sequence: Synthetic oligonucleotide
gcugucgcccaucgugcug

SEQ ID NO: 540724 - RNA, 19 nt, Artificial Sequence
  Description of Artificial Sequence: Synthetic oligonucleotide
cgggaacggucauagucgc

SEQ ID NO: 540725 - RNA, 19 nt, Artificial Sequence
  Description of Artificial Sequence: Synthetic oligonucleotide
cuucgauuccggucauagu

SEQ ID NO: 540726 - RNA, 19 nt, Artificial Sequence
  Description of Artificial Sequence: Synthetic oligonucleotide
gcccaucgugcugucagag

SEQ ID NO: 540727 - RNA, 19 nt, Artificial Sequence
  Description of Artificial Sequence: Synthetic oligonucleotide
gcgcauaaagccuggguau

SEQ ID NO: 540728 - RNA, 19 nt, Artificial Sequence
  Description of Artificial Sequence: Synthetic oligonucleotide
gcggacacgacgggucagg

SEQ ID NO: 540729 - RNA, 19 nt, Artificial Sequence
  Description of Artificial Sequence: Synthetic oligonucleotide
ucucccgggaacggucaua

SEQ ID NO: 540730 - RNA, 19 nt, Artificial Sequence
  Description of Artificial Sequence: Synthetic oligonucleotide
ugauucgguugggcggcau

SEQ ID NO: 540731 - RNA, 19 nt, Artificial Sequence
  Description of Artificial Sequence: Synthetic oligonucleotide
gcaucaagcccuguggcgu

SEQ ID NO: 540732 - RNA, 19 nt, Artificial Sequence
  Description of Artificial Sequence: Synthetic oligonucleotide
ccucgaucuucuccgcgug

SEQ ID NO: 540733 - RNA, 19 nt, Artificial Sequence
  Description of Artificial Sequence: Synthetic oligonucleotide
uauggcccgcgggucuccu

SEQ ID NO: 540734 - RNA, 19 nt, Artificial Sequence
  Description of Artificial Sequence: Synthetic oligonucleotide
ccacgcgcauaaagccugg

SEQ ID NO: 540735 - RNA, 19 nt, Artificial Sequence
  Description of Artificial Sequence: Synthetic oligonucleotide
gucuucgaucguacucguc

SEQ ID NO: 540736 - RNA, 19 nt, Artificial Sequence
  Description of Artificial Sequence: Synthetic oligonucleotide
gcgucugguguggguaggg

SEQ ID NO: 540737 - RNA, 19 nt, Artificial Sequence
  Description of Artificial Sequence: Synthetic oligonucleotide
ucaccccgacugcggcgcu

SEQ ID NO: 540738 - RNA, 19 nt, Artificial Sequence
  Description of Artificial Sequence: Synthetic oligonucleotide
cgauuccggucauagucuc

SEQ ID NO: 540739 - RNA, 19 nt, Artificial Sequence
  Description of Artificial Sequence: Synthetic oligonucleotide
acgacgggucaggucucug

SEQ ID NO: 540740 - RNA, 19 nt, Artificial Sequence
  Description of Artificial Sequence: Synthetic oligonucleotide
ugucgcccaucgugcuguc

SEQ ID NO: 540741 - RNA, 19 nt, Artificial Sequence
  Description of Artificial Sequence: Synthetic oligonucleotide
cgcgcauaaagccugggua

SEQ ID NO: 540742 - RNA, 19 nt, Artificial Sequence
  Description of Artificial Sequence: Synthetic oligonucleotide
gcggcauggguccccggac

SEQ ID NO: 540743 - RNA, 19 nt, Artificial Sequence
  Description of Artificial Sequence: Synthetic oligonucleotide
cgcaaauagagaaggaguu

SEQ ID NO: 540744 - RNA, 19 nt, Artificial Sequence
  Description of Artificial Sequence: Synthetic oligonucleotide
cagcgccauacggaccaug

SEQ ID NO: 540745 - RNA, 19 nt, Artificial Sequence
  Description of Artificial Sequence: Synthetic oligonucleotide
cacuauggcccgcgggucu

SEQ ID NO: 540746 - RNA, 19 nt, Artificial Sequence
  Description of Artificial Sequence: Synthetic oligonucleotide
gcgcucucuucgaaauuug

SEQ ID NO: 540747 - RNA, 19 nt, Artificial Sequence
  Description of Artificial Sequence: Synthetic oligonucleotide
uacggaccauggggauaug

SEQ ID NO: 540748 - RNA, 19 nt, Artificial Sequence
  Description of Artificial Sequence: Synthetic oligonucleotide
caaagcugucaucgccacu

SEQ ID NO: 540749 - RNA, 19 nt, Artificial Sequence
  Description of Artificial Sequence: Synthetic oligonucleotide
cgcgcccagcgccauacgg

SEQ ID NO: 540750 - RNA, 19 nt, Artificial Sequence
  Description of Artificial Sequence: Synthetic oligonucleotide
cgguugggcggcauggguc

SEQ ID NO: 540751 - RNA, 19 nt, Artificial Sequence
  Description of Artificial Sequence: Synthetic oligonucleotide
cgcccagcgccauacggac

SEQ ID NO: 540752 - RNA, 19 nt, Artificial Sequence
  Description of Artificial Sequence: Synthetic oligonucleotide
cauugcgcacuaucugcuu

SEQ ID NO: 540753 - RNA, 19 nt, Artificial Sequence
  Description of Artificial Sequence: Synthetic oligonucleotide
gaccacucucggacucgga

SEQ ID NO: 540754 - RNA, 19 nt, Artificial Sequence
  Description of Artificial Sequence: Synthetic oligonucleotide
gcuugaccacucucggacu

SEQ ID NO: 540755 - RNA, 19 nt, Artificial Sequence
  Description of Artificial Sequence: Synthetic oligonucleotide
gucgucgcugucgcccauc

SEQ ID NO: 540756 - RNA, 19 nt, Artificial Sequence
  Description of Artificial Sequence: Synthetic oligonucleotide
ccccucggcgucuuucauc

SEQ ID NO: 540757 - RNA, 19 nt, Artificial Sequence
  Description of Artificial Sequence: Synthetic oligonucleotide
gggauagagggcagcagau

SEQ ID NO: 540758 - RNA, 19 nt, Artificial Sequence
  Description of Artificial Sequence: Synthetic oligonucleotide
cacucucggucauuccaau

SEQ ID NO: 540759 - RNA, 19 nt, Artificial Sequence
  Description of Artificial Sequence: Synthetic oligonucleotide
cacuucuccgugacugauu

SEQ ID NO: 540760 - RNA, 19 nt, Artificial Sequence
  Description of Artificial Sequence: Synthetic oligonucleotide
cuccccaguaguuccucuu

SEQ ID NO: 540761 - RNA, 19 nt, Artificial Sequence
  Description of Artificial Sequence: Synthetic oligonucleotide
cgccgcauccuuaggcuuc

SEQ ID NO: 540762 - RNA, 19 nt, Artificial Sequence
  Description of Artificial Sequence: Synthetic oligonucleotide
gcgcccagcgccauacgga

SEQ ID NO: 540763 - RNA, 19 nt, Artificial Sequence
  Description of Artificial Sequence: Synthetic oligonucleotide
ccgugaggaaguuguuaaa

SEQ ID NO: 540764 - RNA, 19 nt, Artificial Sequence
  Description of Artificial Sequence: Synthetic oligonucleotide
cauagucgcugcgcucucu

SEQ ID NO: 540765 - RNA, 19 nt, Artificial Sequence
  Description of Artificial Sequence: Synthetic oligonucleotide
ccacuauggcccgcggguc

SEQ ID NO: 540766 - RNA, 19 nt, Artificial Sequence
  Description of Artificial Sequence: Synthetic oligonucleotide
cugauucgguugggcggca

SEQ ID NO: 540767 - RNA, 19 nt, Artificial Sequence
  Description of Artificial Sequence: Synthetic oligonucleotide
cccggggauagagggcagc

SEQ ID NO: 540768 - RNA, 19 nt, Artificial Sequence
  Description of Artificial Sequence: Synthetic oligonucleotide
ggcauggguccccggacau

SEQ ID NO: 540769 - RNA, 19 nt, Artificial Sequence
  Description of Artificial Sequence: Synthetic oligonucleotide
ggacucggacucagauaca

SEQ ID NO: 540770 - RNA, 19 nt, Artificial Sequence
  Description of Artificial Sequence: Synthetic oligonucleotide
ggccucgaaaagcgucaua

SEQ ID NO: 540771 - RNA, 19 nt, Artificial Sequence
  Description of Artificial Sequence: Synthetic oligonucleotide
cuggggcguccaggucccg

SEQ ID NO: 540772 - RNA, 19 nt, Artificial Sequence
  Description of Artificial Sequence: Synthetic oligonucleotide
ucguccccucggcgucuuu

SEQ ID NO: 540773 - RNA, 19 nt, Artificial Sequence
  Description of Artificial Sequence: Synthetic oligonucleotide
ggauuaugccacagcgguu

SEQ ID NO: 540774 - RNA, 19 nt, Artificial Sequence
  Description of Artificial Sequence: Synthetic oligonucleotide
gcccagcgccauacggacc

SEQ ID NO: 540775 - RNA, 19 nt, Artificial Sequence
  Description of Artificial Sequence: Synthetic oligonucleotide
caccccgacugcggcgcuc

SEQ ID NO: 540776 - RNA, 19 nt, Artificial Sequence
  Description of Artificial Sequence: Synthetic oligonucleotide
aucguccccucggcgucuu

SEQ ID NO: 540777 - RNA, 19 nt, Artificial Sequence
  Description of Artificial Sequence: Synthetic oligonucleotide
cuccucgaaccauccuguu

SEQ ID NO: 540778 - RNA, 19 nt, Artificial Sequence
  Description of Artificial Sequence: Synthetic oligonucleotide
gcgcaugaagagagagcaa

SEQ ID NO: 540779 - RNA, 19 nt, Artificial Sequence
  Description of Artificial Sequence: Synthetic oligonucleotide
ccacuuauccuugcccagu

SEQ ID NO: 540780 - RNA, 19 nt, Artificial Sequence
  Description of Artificial Sequence: Synthetic oligonucleotide
ccauacggaccauggggau

SEQ ID NO: 540781 - RNA, 19 nt, Artificial Sequence
  Description of Artificial Sequence: Synthetic oligonucleotide
cugcgcucucuucgaaauu

SEQ ID NO: 540782 - RNA, 19 nt, Artificial Sequence
  Description of Artificial Sequence: Synthetic oligonucleotide
gucucuccgcaugcgcuuu

SEQ ID NO: 540783 - RNA, 19 nt, Artificial Sequence
  Description of Artificial Sequence: Synthetic oligonucleotide
gcacuucuccgugacugau

SEQ ID NO: 540784 - RNA, 19 nt, Artificial Sequence
  Description of Artificial Sequence: Synthetic oligonucleotide
cguacucgucgucgcuguc

SEQ ID NO: 540785 - RNA, 19 nt, Artificial Sequence
  Description of Artificial Sequence: Synthetic oligonucleotide
ccauccuguuccgagguuu

SEQ ID NO: 540786 - RNA, 19 nt, Artificial Sequence
  Description of Artificial Sequence: Synthetic oligonucleotide
gggucagaacugugcucau
